United States Patent Application Publication US 2017/0009304 A1 - sequence listing, part 30

SEQ ID NO: 625838 - DNA, 74 bp, Homo sapiens
cctcaccaacctcatccacaccaagtacccgcagcttctgccaggtcacgcatgaagggagcaccgtggagaag

SEQ ID NO: 625839 - DNA, 76 bp, Homo sapiens
ctggactgtgggctggtgtgtggaactggctcagcaacagcctcaccaaggactccatgaatatcaaagcccatat

SEQ ID NO: 625840 - DNA, 96 bp, Homo sapiens
ggagagccgcccagcagcacaacacagggaagcttggggagttacagaatgtctgaaggggacagtgtgggagaatccgtccatgggaaaccttcg

SEQ ID NO: 625841 - DNA, 100 bp, Homo sapiens
aaagttgttaacggaaaaagaactccgagatgctctgctcctgatttttgctaacaaacaggtgatgagacaaaccatgcttctgccacatcaacacagg

SEQ ID NO: 625842 - DNA, 75 bp, Homo sapiens
tctcaggaacctcaggccctgcttgacagtggccccatcacaggtatatggaggagtgacctactataaccccgc

SEQ ID NO: 625843 - DNA, 98 bp, Homo sapiens
ttgaagagggctccgagatctccgacagctctccagtgaagaagccaagtcttctaaaggcccaccaattcgagggagactcttttgactcagcctcc

SEQ ID NO: 625844 - DNA, 80 bp, Homo sapiens
gtttctagtagcgcttagtgaatatgatcaagttctcgtggagtcagacaatgagcagcaacaactccaggcccagcatt

SEQ ID NO: 625845 - DNA, 75 bp, Homo sapiens
ctgaggatcgaggaacgttgtctgggaacccagtttggccagtgggatactgctggttttgagaacgaggaccaa

SEQ ID NO: 625846 - DNA, 82 bp, Homo sapiens
tgcagtttgcaatatgactttggaggaattctcggctggagagcagaagaccgaaagtgagaagcgccaccttcaagtgaac

SEQ ID NO: 625847 - DNA, 100 bp, Homo sapiens
ctctggccgcctcagcgtccgccctcaggcccgtggccgctgtccaggagctctgctctcccctccagaatttacatagtacatgacgaagttaaggata

SEQ ID NO: 625848 - DNA, 75 bp, Homo sapiens
ctcagatgctgccagggtccctgaagagggaagacacgcggaaacagcaaatcagccggcaccaggagcagttca

SEQ ID NO: 625849 - DNA, 74 bp, Homo sapiens
gacatggaaggggcagtacaagcttacgtctctgctcttcagtacaatccttctgtggcaagcgctacaagaac

SEQ ID NO: 625850 - DNA, 51 bp, Homo sapiens
gcggcggcccagctctctctgacacagcacaaacgtgcagatatctgatag

SEQ ID NO: 625851 - DNA, 98 bp, Homo sapiens
ctgggcgccgcgccgcacgagcaccagcctagagccagagccccgaagccaggacaggagacggcagcagcagcccctgaaccatcgtcctgcaggca

SEQ ID NO: 625852 - DNA, 100 bp, Homo sapiens
ccagccaggacgagaggatgcggagcccgcagaacctccacagtcaagaggacgagacaaggtctcactatgttgcccaagcagattttgaactcctggc

SEQ ID NO: 625853 - DNA, 75 bp, Homo sapiens
gagaaacaccaaaaggaatccgcaggactggctggacaatggcccagaacaagctattcaacaagatcctcaaag

SEQ ID NO: 625854 - DNA, 98 bp, Homo sapiens
agaagaagctggaggccggcaaagccaagacatgtagactgccaaagtgtatgggatgctttcaagggtgcatttatttcaaaacatccttgcaacat

SEQ ID NO: 625855 - DNA, 82 bp, Homo sapiens
cacacctaccaagaagccagtcaagcggccaggatccctccccgcggcggcgatggcccgagccatgagagtgaggactttc

SEQ ID NO: 625856 - DNA, 90 bp, Homo sapiens
ggggacttgatgttaacaaatgtgagattgccagggacccagatggaaggatgctcttagatatttttgatgaaaatcttcaccctcttt

SEQ ID NO: 625857 - DNA, 75 bp, Homo sapiens
ccgggtgaggttgccggggccgtgcgcgctgctcctgcccctcctaaagctgaagccaaagcgaaggctttaaag

SEQ ID NO: 625858 - DNA, 88 bp, Homo sapiens
atgcggaaaatactacagagtgtgcacactggctatcattgatccaggtgtggatgaggtcaccattgtcaacattttgaccaaccgc

SEQ ID NO: 625859 - DNA, 98 bp, Homo sapiens
ataggctaacagagaccctgatgctggaattgatgaagctcaagttgaacaagatgctcaggatggtgctgctccactggtgcctgctgtggctcctg

SEQ ID NO: 625860 - DNA, 100 bp, Homo sapiens
attggactaaattaccagaatgcagggatgacggtggatattccatgaattttaacatgagttcttccaggggaccactcccagtaaaaagaggaccacc

SEQ ID NO: 625861 - DNA, 75 bp, Homo sapiens
ctgtcggttggtacagataaaactttaaggtggacattgaagtggacctaattcggttttccttttaaaagcccc

SEQ ID NO: 625862 - DNA, 83 bp, Homo sapiens
agcacttggagcgcagaaccggccgcgcccgacatgaagagtatttctggagaagaatcatcccatggagtgattatgacaag

SEQ ID NO: 625863 - DNA, 100 bp, Homo sapiens
agctgcatatgcccattttgctgtgtgttacagcacacagcatgcctctgcaatgccatcattgctttgctgaaagttcccctttctttccagagatatt

SEQ ID NO: 625864 - DNA, 50 bp, Homo sapiens
tcatctcactagttatgttcaaaaaagaagttgttgacatgaagtctgag

SEQ ID NO: 625865 - DNA, 82 bp, Homo sapiens
gcagcgacgagaacctggatcaggaacagcttgagaactatgacttcaccaaattccactcgctgaagcccaagctgatcga

SEQ ID NO: 625866 - DNA, 75 bp, Homo sapiens
gcagatatcattctggtggagttttatgccccatggtctccataaattgtctttgggggattccaccacacccaa

SEQ ID NO: 625867 - DNA, 88 bp, Homo sapiens
aagagtttatatctgaaatggacgccaaggagcgggagctggaactgaagaacacctggtcagagaacaagctcagccgccgtcagac

SEQ ID NO: 625868 - DNA, 98 bp, Homo sapiens
ctggtgtcccagcctcctacctgctgattcctgcagcctcctatgtgctcccagaggtagacaagggcgtggtccccctggcagggacaaatggcgag

SEQ ID NO: 625869 - DNA, 92 bp, Homo sapiens
cttgggacccaccgctgccctcagctccgagtccagggcgagttccagggtctccctccactgctgtagtaacccgggtccggggcctcggt

SEQ ID NO: 625870 - DNA, 87 bp, Homo sapiens
catcctgccgtcttcctatccttacccgacctcagatgctcccttctgctcctggaggaggaagccaagaatctggtgagcgaagcc

SEQ ID NO: 625871 - DNA, 100 bp, Homo sapiens
gacatgtggctcttcttcgggatcactggattgctgacggcagccctctcaggaagcattcaaagctgtggaagatattcacgggctattctccttgtct

SEQ ID NO: 625872 - DNA, 75 bp, Homo sapiens
ccgagctccagccgaaggagaagggggtcgcccatgtttgatggaaaagtcccacactggtaccacttctcctgc

SEQ ID NO: 625873 - DNA, 82 bp, Homo sapiens
gcgggacccggcggggcgcaccacagagaccggcttcaatatcttcacccagcatggtaccacttaatgggcaagtttatga

SEQ ID NO: 625874 - DNA, 100 bp, Homo sapiens
gcagaaagttgatataggtggacttttttacagggagagtccggtagtgaaaggcaatgcgctgttagctctaagcagccttgctgtcgtcgtatctaga

SEQ ID NO: 625875 - DNA, 83 bp, Homo sapiens
caccacgtctctaccgagcacaaactccacgaagccaacgcccaggaataagacgagttggaagaagacctgatcaacaactt

SEQ ID NO: 625876 - DNA, 100 bp, Homo sapiens
ttgtttaccctttggaaaagctgttgacatctcataaacggctggttatgaaagacagtgcactgtggaggaagatgcagagtcagaagatgaagaggag

SEQ ID NO: 625877 - DNA, 51 bp, Homo sapiens
tggaacccaaacctcagaagagtccagagcatgcaagcggcaagatgtcct

SEQ ID NO: 625878 - DNA, 75 bp, Homo sapiens
gaaaatgagcagatactgaatgtaaaccctgcaggtggccaagcaagaggagttcttcaacctgtcccactgcca

SEQ ID NO: 625879 - DNA, 74 bp, Homo sapiens
aacagtttgaagctgaggattttgtccaagacaagctgctgctatctgcgtgccacttactggtctcactggcc

SEQ ID NO: 625880 - DNA, 98 bp, Homo sapiens
aaggattcagagcagatgtgatctgcgctaggtggcatctcctctcacggatgcctcggtgctggagaatctggtaaaagcaccattgtgaagcagat

SEQ ID NO: 625881 - DNA, 75 bp, Homo sapiens
cgccccttggcctcatctacttcttcgtccagcgtcatcacgtagacataaccaagaaacttcacccaaatcaag

SEQ ID NO: 625882 - DNA, 90 bp, Homo sapiens
tttcgaccttcaatccagttccaaggactccacgggagagaagtggagatcctgatgtttctcagtgccattgtgatgatgaagaaccgc

SEQ ID NO: 625883 - DNA, 51 bp, Homo sapiens
agcatggagttggcaccccaaaagaaaggcatgattccaacagaactgcag

SEQ ID NO: 625884 - DNA, 78 bp, Homo sapiens
gcgatgagaagaggggcaagcggccgtctcccctcgcacaccaggagggacagcagtgtgataaaagaggaaatcaaa

SEQ ID NO: 625885 - DNA, 100 bp, Homo sapiens
cagcttggacattttacccttcagtcggcccaagaaatcaaaataaaggaaacacatttcatatactgcaggatgtgggctctcttgatgagaagatgaa

SEQ ID NO: 625886 - DNA, 75 bp, Homo sapiens
cgtgtccgcattttagagaaggcaaggccggtgtgtttatctgcaagtgcctggctctctggctatgaaaatcct

SEQ ID NO: 625887 - DNA, 75 bp, Homo sapiens
ttgtggcttccgcctgaactgcttctttcctgcctcaaaggcacgtggactccctttaatccagtgactgtcagg

SEQ ID NO: 625888 - DNA, 48 bp, Homo sapiens
tcacctctcaactgtgtgccaaaggtagtaagcattaataatgtcttt

SEQ ID NO: 625889 - DNA, 98 bp, Homo sapiens
ttcaggcacatagaagcgctcctgggtagcccctgtggcaaaggccagccctgcaggctccaagcaaagtgaagccaccactcgctctcgaatcgcgc

SEQ ID NO: 625890 - DNA, 75 bp, Homo sapiens
ttccgggccgcgcagctgccgaacgacgtggtcctacagatcaatgtccgagttaccaccatggatgcagagctg

SEQ ID NO: 625891 - DNA, 82 bp, Homo sapiens
agaaaccaccgtgctggaccgcttttacaatgcaggacctgatggctatagaagagacctcatgacagctggagttctctgg

SEQ ID NO: 625892 - DNA, 82 bp, Homo sapiens
cagtggaatgcagttatatttgggtaaactgaaggaacttaatggaactgcacctgaagagaagaagttaactgaggatgac

SEQ ID NO: 625893 - DNA, 82 bp, Homo sapiens
ggactccctttaatccagtgactgtcaggtcgatcatattgttctaagaacggaagcatctgggctggatggaatttagcat

SEQ ID NO: 625894 - DNA, 75 bp, Homo sapiens
atccattatctttcgggaaagctctctggggcagggtggtattaaagataatcaaacattatcaagaagaaggac

SEQ ID NO: 625895 - DNA, 100 bp, Homo sapiens
gaacttctcaggaagcagtactattcaagaggttcaaaccttgtactactcagctgatcacaagctgcttgatgggaacctactagatggacaggctgag

SEQ ID NO: 625896 - DNA, 100 bp, Homo sapiens
cggtggaggaaagcatgggagccaagagtatgaggagctggtgtctgtgtcagatttgtagctgcggacaggacagctggagcccctgctgtcccggttc

SEQ ID NO: 625897 - DNA, 101 bp, Homo sapiens
gtatccaatagggatattgtagaaactgtctttaacctgaatgtctacacaaggaagtacaggatttggcttttctagatgtcgtatccaaacttcgcagt

SEQ ID NO: 625898 - DNA, 75 bp, Homo sapiens
ctgttccgcacaggcctgctgaactgggtgctttatataggccctcttggaacagagatcatgatgacacggcat

SEQ ID NO: 625899 - DNA, 75 bp, Homo sapiens
cggaccggcgtccccggcgcgaagaggctggactcggattcgttgcctgaggcaaagtgtttcatggatttcaaa

SEQ ID NO: 625900 - DNA, 100 bp, Homo sapiens
gcgatcagcaccaagaacccactgcaggtggacccaagtggagagattgtggaactggcgaaaggtgcatgtccctggaaggagcatctctaccacctgg

SEQ ID NO: 625901 - DNA, 89 bp, Homo sapiens
gacgcgcccggcccggagcccccagcgcagcggccgcggtgattttacaacgagatgctgctctccatagggatgctcatgctgtcagc

SEQ ID NO: 625902 - DNA, 109 bp, Homo sapiens
agggtgttgaaaaagactgggaatgagcaagaatggaagatcaagctgcaagtgcttggtgggcgcatgatgaactgcccaaagattctccggcagttgggaagcaaag

SEQ ID NO: 625903 - DNA, 100 bp, Homo sapiens
ctgtctttttcttcaatgggcagcatatgaaagtggattatggggtaactaaggaagtggatgctacatctaaagaggccaaatccttcttcaagcagaa

SEQ ID NO: 625904 - DNA, 75 bp, Homo sapiens
gtcatatcatgtgccctctatgaggagttttggattaaggtatgatctcgtgaaaccttgagagaaactgaatga

SEQ ID NO: 625905 - DNA, 82 bp, Homo sapiens
ttggactgagtcctgcaggacacaggatattggtgctggaaaaggcaaatactatgctgtcaattttccaatgagagatggt

SEQ ID NO: 625906 - DNA, 83 bp, Homo sapiens
ccagtgcttctgtctcgactgcactttgagaaggacttaaacaggcacaatcaaaaccatctcagtcagaagtcagagcgtgg

SEQ ID NO: 625907 - DNA, 100 bp, Homo sapiens
tggctcggctgaacagtgagctccagcagcagctcaaggttatcctgaatacatgtctaacaattttccttgcaacgttagctgttgtttttcactgttt

SEQ ID NO: 625908 - DNA, 96 bp, Homo sapiens
tctggagctgcacagcgagggcaccaccgtcctgctcttccagttcgggatggacactttgccaccatcaccttgaccttcatcgacaagaacgga

SEQ ID NO: 625909 - DNA, 95 bp, Homo sapiens
cagaaatcgaaacagatacagagatgtaagcccatagactctccaacatgtgccttctgaccatacaaatgaaacttccaacagtactgtgaaac

SEQ ID NO: 625910 - DNA, 50 bp, Homo sapiens
catcatccgctatgcaattgggatttgtgtaagaattgtcatcatgtaat

SEQ ID NO: 625911 - DNA, 75 bp, Homo sapiens
tcagctacatcgctcgacagctgcaggaacaggaggaccacgatgcgacctgcctagagctggaacgttacctcc

SEQ ID NO: 625912 - DNA, 83 bp, Homo sapiens
gctggagctgccgcggcgcagccagcaaaatgatgcttcaacacccaggccaggtctctgcctcggaagtgagtgcttctgcc

SEQ ID NO: 625913 - DNA, 100 bp, Homo sapiens
ccttgcaattctggaggcgaaactggcacagtcttttgctgagcgcctgcgcctgggaattgcagtgattcatggagaggcgcaggatgccgagtcggac

SEQ ID NO: 625914 - DNA, 83 bp, Homo sapiens
cttcaccgcgggcgccaatggggagcagaaggactcggacacaggcctccggtgtggctgtctctgatggtgtcatcaaggtg

SEQ ID NO: 625915 - DNA, 82 bp, Homo sapiens
agagtccccgtacgcctacagtaacgggcagctggtggaatttttgaagaaaatggaatctcgaggccccctttcgtgcgac

SEQ ID NO: 625916 - DNA, 75 bp, Homo sapiens
ttgagtttgacttctatctgtgcagccacgcaggcatccagagtctgaaaagtgtcgaagagacagttttcagga

SEQ ID NO: 625917 - DNA, 83 bp, Homo sapiens
atgaaatggaagagagggtggtgcggatagcttgaggaaggtggcagtagagaagagcatcacagaagttgctcaggagctga

SEQ ID NO: 625918 - DNA, 75 bp, Homo sapiens
ctggagtggggagaagcatcatggttcaacaatagcctaacatggcagaccagagacagcgctcactgtctacct

SEQ ID NO: 625919 - DNA, 75 bp, Homo sapiens
cacggaggtcatggagcagattcacagcacgtttccatcttgctgccgcctcaaaacttccaatgtcaataatta

SEQ ID NO: 625920 - DNA, 73 bp, Homo sapiens
cctctcccacctgaacttgttgagcagtttggactcttttgagggcaacaacaactatgatacacctgagctg

SEQ ID NO: 625921 - DNA, 75 bp, Homo sapiens
tttgatatgttttttggaggaggaggaaggatgcagagagaaaggagagctgcaggactcatgcacacgttcaat

SEQ ID NO: 625922 - DNA, 100 bp, Homo sapiens
agggagctagagcttcgagacagactggatgagcagcaaagggtcctggaaggaaagaatgaagaggccctgcaaggcttatgcatctggatgtgacatt

SEQ ID NO: 625923 - DNA, 82 bp, Homo sapiens
ccgatccagcctgcggagcctgtggggcagggacgtgaacaccaccatcatggagctcctgatcatggtgtatgcatgtaag

SEQ ID NO: 625924 - DNA, 83 bp, Homo sapiens
gttcgctacacagcaatgcatcgagtacgagctcaactggaggcagtcctgtgcggaaatctgaagaaaaaacagatacaaag

SEQ ID NO: 625925 - DNA, 74 bp, Homo sapiens
ctcgacgtcttgcctgtgtcccacttgttcgcggcctataggatgccggaccagatctctgtctcggagttcat

SEQ ID NO: 625926 - DNA, 100 bp, Homo sapiens
gacttggaaacacctactttatagtcctgattcaagtgttggcggatggaagggaggagactcctgaccctcagaatgaaatgcactcggtgatggaaag

SEQ ID NO: 625927 - DNA, 50 bp, Homo sapiens
gccgagttccccacctgcgattgcgtcgcagtgtttggccagcgcttgga

SEQ ID NO: 625928 - DNA, 88 bp, Homo sapiens
acactcacatcccaggccggggctgttttccagagctttgccaagttcagcaaatttggagatgaaaacccgcctagtgccaagcaac

SEQ ID NO: 625929 - DNA, 74 bp, Homo sapiens
gatgaacattctgccgaagagaacaagacgtgtgaagactcaggagacaaggacggcagcaaggtgacaacagt

SEQ ID NO: 625930 - DNA, 82 bp, Homo sapiens
cacaacaacctcgtgggtgtgaagattggcggcagtaagcacacaatgaatgatcacctgcatgtcggcagccacgctcacg

SEQ ID NO: 625931 - DNA, 100 bp, Homo sapiens
atacaaaagacaaggaagatgagctgtcctttcaggaaggagccattatttatgtcatcaagaagaatgacgatgaaacctctgtagaggagcaggatgc

SEQ ID NO: 625932 - DNA, 100 bp, Homo sapiens
aggtcccaccctggcccaggaggtcagccagggaatcattaacaagaggcagtgacatggcgcagaaggaggtgaagcagaggagagcagtaagatccgt

SEQ ID NO: 625933 - DNA, 99 bp, Homo sapiens
gtggagggggtgtcagcttccgggagcgcccctgctactcccagagcttcccatcgacggtcagtgcgcacgttgtaatcagctgaggccatgtcagga

SEQ ID NO: 625934 - DNA, 88 bp, Homo sapiens
agtgatcactctcaatcccggatcaggatcctcatgaccagccaaagagaagaagaattaggaagcataaatcaaagaaaaaatttaa

SEQ ID NO: 625935 - DNA, 96 bp, Homo sapiens
caggcggtccgtgcgagaggaccaacggagcgctgaggcgggcgttttcttggatgaattgcttgctttggagaaatcatgagtggaggatctcaa

SEQ ID NO: 625936 - DNA, 101 bp, Homo sapiens
gaccgcccgctcgtactgctgctgcacctgctgcaacttgggccccttttcagtaatgtgtgtggctggtattggacttgttgtattattcttcagttgga

SEQ ID NO: 625937 - DNA, 98 bp, Homo sapiens
tatttccgtgtgggatgagatcggaggtcttatacagccaggggatattattcggttgaccagaggggtggagagattcaaccagttagcgtgaaagt

SEQ ID NO: 625938 - DNA, 75 bp, Homo sapiens
gaaagtttcatctgtggatggagtattggtcctccagcagcctgacctgagtgggttagtgatccagagaaacca

SEQ ID NO: 625939 - DNA, 97 bp, Homo sapiens
gtggctggttcccggcgagctacgtgcagttgctggagatgcagagcaaagcggcagtccccggacagggatgggctctgaccaggaggacagcaag

SEQ ID NO: 625940 - DNA, 74 bp, Homo sapiens
aacgcaaacccggaagcggatcgggtggagtgtaggtcatatcgccgcgaacatgaaaggctcccggagcagcg

SEQ ID NO: 625941 - DNA, 82 bp, Homo sapiens
ccgagcgcccgaggcgtctgggatggtgtgggaccgggtgaagctcgtgtgtggagtgccacggtacaatcagacgacagat

SEQ ID NO: 625942 - DNA, 75 bp, Homo sapiens
cgaagcaggacccgaagcctaaattccaggagggtccttggcccttgccagacattagcaccatgagcttcgtgg

SEQ ID NO: 625943 - DNA, 100 bp, Homo sapiens
cagaatattggtcaagttgctgaccttgaagagacgcaggtcagaatggaaatgggctgcagaccgggcagctattgtcagccgctggaactggcttcag

SEQ ID NO: 625944 - DNA, 83 bp, Homo sapiens
tggaagaagaagaagagcatgatcggcatgtccaccaaggcagcaaaacctggaaatccaccggaagataaaacagtctgagc

SEQ ID NO: 625945 - DNA, 78 bp, Homo sapiens
caggcccctggtgagcttgggatctgcgacaaaagggaccgaggggggagcagcctctgggagtgacagtgctgacaa

SEQ ID NO: 625946 - DNA, 98 bp, Homo sapiens
gcaaggcggagagtgacggagtcggcgagcccccgcggcgacaggccctggagagtgaatttgtttcctgccagcttcaccaatggattgatctcatt

SEQ ID NO: 625947 - DNA, 98 bp, Homo sapiens
gacaagctgcccatcgaggagacgctggaggacagcccgcaggaagcactaagtaatatggatgattatgacaaaacctgcttggagtctgcattagt

SEQ ID NO: 625948 - DNA, 98 bp, Homo sapiens
acgaaacctggcacggctcttgcttccgaggacaaaagcatgtcttcccttcctgggtgcattggtttggatgcagcaacagctacagtggagtctga

SEQ ID NO: 625949 - DNA, 75 bp, Homo sapiens
actggtgcaaggactcatgggtgcagcagtgacggtggataagcacaaggagaacctagcagctatcatgattac

SEQ ID NO: 625950 - DNA, 50 bp, Homo sapiens
cgtctcagcagtgctcgggcgcaggtgtgtgccctcttcctgattctgga

SEQ ID NO: 625951 - DNA, 100 bp, Homo sapiens
ggcgcctcaggcacctcggcccggggaggttcccctgaaggatgctaaggaatacgctgaatccataggtgccatcgtggttgagacaagtgcaaaaaat

SEQ ID NO: 625952 - DNA, 98 bp, Homo sapiens
gcagtggtcgcttcttctccttggactataagacctacttggactttgtccttgcattagaaaacagaaaggaacctgcagctctacaatatattttc

SEQ ID NO: 625953 - DNA, 100 bp, Homo sapiens
gaatttccgtactcgagaaggcatctgtctctgccttatagcaacactcaatgcacgccagagaaggaggtcggctaccgtgagtgttcccgcccttctt

SEQ ID NO: 625954 - DNA, 83 bp, Homo sapiens
tgggccccacgtgttgcctgaccattcctgagcccagatgataccacgagtcaacccaaaagttgctggggagaagttgctct

SEQ ID NO: 625955 - DNA, 100 bp, Homo sapiens
tactgtcttctggcttgcattgtttctgatgagaagtctgctgtcattcttttctttgttcctctgaaaaaaatggcgaagaaagcgaggtatagacaag

SEQ ID NO: 625956 - DNA, 83 bp, Homo sapiens
acttcagtgatgagaatcgcacctaccaggcttccagcccggatgagggacacagcaggtcaggagagattcaacagcattac

SEQ ID NO: 625957 - DNA, 75 bp, Homo sapiens
aggtcctccatgcgcagtcatgagtcgcttcaagtttatcgcagttggtagcaagaccttccagtataaactata

SEQ ID NO: 625958 - DNA, 97 bp, Homo sapiens
gctggtgaggctcacgttggagggcttcgcgtctgcttcggagaccgtaagggcagtggagtgggagtgaagaagctgtgtgaactgcagcctgagg

SEQ ID NO: 625959 - DNA, 100 bp, Homo sapiens
ttggcggtgaccggatattcagttgcacatccccacatcaatgcactgccaatgtcaggtagcattggtgctgcagatagtcctgagaactgggagaaag

SEQ ID NO: 625960 - DNA, 100 bp, Homo sapiens
cagtttactaaaacacatcatgaaggcctgttttgaagagaaggggaataagactgcatctgttcatatgagcttttacttggcagaaatctccatggct

SEQ ID NO: 625961 - DNA, 74 bp, Homo sapiens
agcgatcaagcaggcagcgggctttgccagcaaaaccgaaacagttacagctcttttgaggaagcttaagcagc

SEQ ID NO: 625962 - DNA, 100 bp, Homo sapiens
cggggttcagcgctcgggtgaggagctggtggcgtcggcaggttcgaggcgattcgaggaacttataatcaaaactgtattaagctcggcaagagatgag

SEQ ID NO: 625963 - DNA, 75 bp, Homo sapiens
caagcaaacctcagcctggaggcacttttccagactggtaaatcccccgcaggagtgaatcttttatcatttgca

SEQ ID NO: 625964 - DNA, 97 bp, Homo sapiens
atatagccatgaatggagaaggttacctctacccatcagatgtaatccctgttcattactacttaatacctccaccaacaaagactaagaatggcag

SEQ ID NO: 625965 - DNA, 50 bp, Homo sapiens
cgcctcttcgacttcctcgtggaggaaatggtgttcacactggccctgaa

SEQ ID NO: 625966 - DNA, 88 bp, Homo sapiens
agcccagcgcgctaaccctttactcgcgacctttcgcttcaccttcacagcagccctgcgagggaccctccattttccatatccagga

SEQ ID NO: 625967 - DNA, 101 bp, Homo sapiens
aagaactgtgaagagaggagttgagaacatctctgttgacattcattgtggtggtaatcactcaaggaaaaggaattatcagagtaacaatagttcctgtt

SEQ ID NO: 625968 - DNA, 108 bp, Homo sapiens
cccagaccctggagcctcagttggaagcagccgatccagcctgcggagcctgtggggcagtgctacacacgcagggccctgtcgatggcagcctttacgcgaaggtga

SEQ ID NO: 625969 - DNA, 96 bp, Homo sapiens
aaattcaaaaaggataaggagatcatagcagagtacgatactcaggtcaaagtgtttgctttcacaaccaaagttctgggccattcagacatcagc

SEQ ID NO: 625970 - DNA, 100 bp, Homo sapiens
gcccccgccggccgccgcgccgcccggcagcctcggcagttacttcaatgagaatcaatacccagatgaagcaaagagggaagaaattgcaaacgcttgc

SEQ ID NO: 625971 - DNA, 83 bp, Homo sapiens
ccttgtccgagcaaacagaggcgctcatccacagagccacatctgttaggttgtccttctattcaggccactcttcgttttcc

SEQ ID NO: 625972 - DNA, 100 bp, Homo sapiens
ttgattgatcaagaagtgaagaatggcattccttctaacagaattattttgggagggttttctcagggtgctgacacctttacggcaaaagttaatattg

SEQ ID NO: 625973 - DNA, 83 bp, Homo sapiens
gtgagccaccaaaaccacagtgttctttgcctcaagacccagctattgttcaggtcatgcttcaccccttcctccatctgctg

SEQ ID NO: 625974 - DNA, 75 bp, Homo sapiens
ctttagactaatgactgtccgaaacatcgcctccatctgtaatatgcttccttgtggtcatagatgcaaagagat

SEQ ID NO: 625975 - DNA, 83 bp, Homo sapiens
gagactcatacgcaacctcaatgctcaccatggatgatgatatcgccgcgctcgtcgtcgacaacggctccggcatgtgcaag

SEQ ID NO: 625976 - DNA, 75 bp, Homo sapiens
ttgcaagggaactggagacaatgaaaatcttgtcagcctactttggggataaaggattatttggtcttctggatt

SEQ ID NO: 625977 - DNA, 76 bp, Homo sapiens
agaaacttttgcccttatcagtaacacctgaggacacagagtctgggatctaataattcagtcattttggatggac

SEQ ID NO: 625978 - DNA, 117 bp, Homo sapiens
gaaaaaactgtggctgttggtttgtggaacagacagctccttctttattggtgctcacagttctgtgcaatgttgcagaaaagggtcctgcttactgccagcggctgtggccagggc

SEQ ID NO: 625979 - DNA, 50 bp, Homo sapiens
tgatcatcgcaaacattttctctttaggtcaaaaaaggtgatcgaattgc

SEQ ID NO: 625980 - DNA, 100 bp, Homo sapiens
ctggtctcgaactcccaacctcagctgaagaaggactaccttgatggcgtgggtgacaccctggacctggtggtgatcggcgcctacctgggccggggga

SEQ ID NO: 625981 - DNA, 100 bp, Homo sapiens
tgtctgtccccagagcctcagtttgtgcaggacaccgacatggaacagggactcactggggggagaagtgagtcatctcattcccctccgtggatcagag

SEQ ID NO: 625982 - DNA, 96 bp, Homo sapiens
cgcttagatatggtgccgcatttggagacagacatgatgcaaggaggcgtgtacggctcaggtggagaaaggcagcagcagcggaaccgcttaggc

SEQ ID NO: 625983 - DNA, 100 bp, Homo sapiens
ccgggctctccatgagcaggcggcggcggcgacgggtgcggcggcaccggcagttttcggtccccagggagcctgggttactaggtgtctttcagaagct

SEQ ID NO: 625984 - DNA, 100 bp, Homo sapiens
ccggagaactctaccctggaggagattctggggcagtatcaacggagtctccgggctcctgttcgacacagtggagaccatgggaaaagactatttgtca

SEQ ID NO: 625985 - DNA, 75 bp, Homo sapiens
cgctaggcaggcgttgaggaagaagccacccgagcggactcccgaggaggatggactcagacaagttctggagga

SEQ ID NO: 625986 - DNA, 75 bp, Homo sapiens
aagaagatttatgttcaggaccatttagtctgctctcaaaattagagagatgtgtaattgtccaccactgtctaa

SEQ ID NO: 625987 - DNA, 75 bp, Homo sapiens
taattgaagctgcaaatgaagcattacttactaaagttgattcttcaccacactgaaaccattaggaaaaatcct

SEQ ID NO: 625988 - DNA, 73 bp, Homo sapiens
ggacggccaagaccagcgcgagggccctgggcaaggcccgacaggaaagtggagaatgaggacatgaataaag

SEQ ID NO: 625989 - DNA, 97 bp, Homo sapiens
tgcaacagggacagaatttactgcaaggtctgagcaagctcagcccctctacctcagtttttggtgttgagccagacttgaccagggaaggcggcag

SEQ ID NO: 625990 - DNA, 73 bp, Homo sapiens
ggatgttggcggtccctgtgacctgtggagacacggccagatctgccctccatattcctgtgcacacaatatt

SEQ ID NO: 625991 - DNA, 88 bp, Homo sapiens
aacctggaagaaggaggaacatggagaggagagcagcgggcccaggctgggcagcctatctgccctccttggcactgtgcttccccag

SEQ ID NO: 625992 - DNA, 101 bp, Homo sapiens
cccctccagctgccccctgtgtggcaaacctttcttgagctcagctgatgttctaatcatgtcagataaagatgatattgagactccactgctaactgaag

SEQ ID NO: 625993 - DNA, 99 bp, Homo sapiens
gcgccttgttccagcagggcctgatccaggccatttgtgtaggaccagaaaacatgcagataatgtatccagctatatttgaccagttgttggcatttg

SEQ ID NO: 625994 - DNA, 50 bp, Homo sapiens
taaatattgcggcagttttatatggaagtggagaaagaggcgaaaaggat

SEQ ID NO: 625995 - DNA, 101 bp, Homo sapiens
tctcccgcgcgcacctcagccgcctcctagcggcgcggcgctcgctcctacggactctgaagacctactgggtgagcaaaggcagtgcctttagtaccagc

SEQ ID NO: 625996 - DNA, 75 bp, Homo sapiens
gcaaagactccagtaacactcaagcaaagaagagttgagcacaatcaggcaacagcattattgagaaaagccctt

SEQ ID NO: 625997 - DNA, 101 bp, Homo sapiens
ggtcactgacttctctctcctagtgaataactgctctacacttggcctgtgccagtggccatgtgcaagtggtcactctcctggttaacagaaaatgccag

SEQ ID NO: 625998 - DNA, 100 bp, Homo sapiens
gaacaagttattttccaaaaggcaaactatttcatactcctacgtgaacatccttttaccacagcctcagccacagcagaagctcctcctggggtagaga

SEQ ID NO: 625999 - DNA, 75 bp, Homo sapiens
agaaaattgaagttgtaatggccgaacccttgagccatccaaaactctgtttgtcaaaggcctgtctgaggatac

SEQ ID NO: 626000 - DNA, 101 bp, Homo sapiens
cttagtggctgcgtgtgcagctggagggcagatggtgtggacggaaagcaagctcgcagaaccaattctagcactcccttaggggagctttttgatcatgg

SEQ ID NO: 626001 - DNA, 75 bp, Homo sapiens
atagtcctctccaaactttgacctgaggttggactccatgaaagaattgcacaaaacaaatcgacagcagcatga

SEQ ID NO: 626002 - DNA, 90 bp, Homo sapiens
caccaaggagactgcaggctacctcaggggccgtccccaggacactgtccggatcttccctccctggttctccttactatgacaatgtcc

SEQ ID NO: 626003 - DNA, 75 bp, Homo sapiens
agctggagaatggctgacatcaacggccaataccaacataggcggggtttcaccatgttgcccagactggtcttg

SEQ ID NO: 626004 - DNA, 97 bp, Homo sapiens
gcaaagaaaatgggactggttgaccaactggtggaacccctgggccatccttcttgcctggatatgacaatggagcttgtttctatgattaagacct

SEQ ID NO: 626005 - DNA, 100 bp, Homo sapiens
actgaggcgtttctgtacatggattatctgatgtccggtctgtgctacgacagcaaaatgttccaggtgcatcaggtgctctgcatccccagctggatgg

SEQ ID NO: 626006 - DNA, 100 bp, Homo sapiens
caaccagagcctttcatcctcaaactggattgcctcttctttcaagccctttgcctgctaataaagatgcctttcgaaagacatggaatcccaagtatac

SEQ ID NO: 626007 - DNA, 82 bp, Homo sapiens
gtactcctcgccatggctcagctccaaacacgcttctacactgataacaagaaatcagagtgacaagaatagtgccatggtg

SEQ ID NO: 626008 - DNA, 75 bp, Homo sapiens
ggttgtgtttcaactgctgtattgcagaacagcctcagcctggacaagaatccttcaagaaacaggaaaaaactc

SEQ ID NO: 626009 - DNA, 100 bp, Homo sapiens
ctgcacgtagatggggtggcagtgaccctcacttcctgctgtatccccagacccaaaggttggatggcaagcatgtggtgtttggcaaagtgaaagaagg

SEQ ID NO: 626010 - DNA, 51 bp, Homo sapiens
atttaaacaagagatttccacagaagatgcctgaaaacttcatgcctcctg

SEQ ID NO: 626011 - DNA, 100 bp, Homo sapiens
attgagccacaagccacacggaaggcccaggtttctcagtttgggtgcagatcatttgctttgctttttgatgatatagaccataatatgtgtgcagcag

SEQ ID NO: 626012 - DNA, 107 bp, Homo sapiens
gtagccacagcggcagctccagcccggcccggcagcgacatggaaggtaggagcaacggtgggaatgccctctgaggaatgcagtgatgtccatcagtcacctctca

SEQ ID NO: 626013 - DNA, 50 bp, Homo sapiens
gcgaggatcaaaatcttcgaaggaggggttgccatctaccagacttggca

SEQ ID NO: 626014 - DNA, 98 bp, Homo sapiens
tctttacttggtgcaggaaggcagtctttgctacgtacagcaaaaggtatgggctacgtgagttcgtggtgattgcccctgctgcacacagtgacgct

SEQ ID NO: 626015 - DNA, 74 bp, Homo sapiens
aacaagtacaagcggcgggtgccccggctgagcgggctttggacaccatgaactttgatgtgattaagggaaag

SEQ ID NO: 626016 - DNA, 98 bp, Homo sapiens
agttctgtcaccgtgtctaccattgatgaagaggaagaggagattgaggctaccatgccagatgatgtccaaggcactgttgcaaccatttatacaag

SEQ ID NO: 626017 - DNA, 100 bp, Homo sapiens
catccacaatgatttctccagtgctcatcttgttctcgagttttctctgccatgttgctattgcaggacggaggcaccaatgcctctgctctggaaaaag

SEQ ID NO: 626018 - DNA, 100 bp, Homo sapiens
gcctgtgacgagtacttcatccagaacaacgtcaccgaaatccagggcatcccgggcgcggccagtggtgtcttcctggacagcaccttgtattctggcc

SEQ ID NO: 626019 - DNA, 90 bp, Homo sapiens
ggagatctcctgtgctgcgaccactgcccggctgccttccacctccagtgctggtgctggagaatctggtaaaagcaccattgtgaagca

SEQ ID NO: 626020 - DNA, 135 bp, Homo sapiens
gtctggtggaggctgcagaagaagcacacctgaaacatgaatttgatgcagacttacagggcagacctccttatgctgcttcagcagaagaagtggccaaagaacttaagtcaaaatctggggaatcgaagtcct

SEQ ID NO: 626021 - DNA, 50 bp, Homo sapiens
gccgcaagttcatgcaagattcacctgcagaatccattaaggcctggagg

SEQ ID NO: 626022 - DNA, 82 bp, Homo sapiens
cctcgctactcgcttgcctacccgccggcccgcgggtctacttcctcaaaggacaattccttcggcgaggggaggtgttttg

SEQ ID NO: 626023 - DNA, 90 bp, Homo sapiens
gtaaggccaaaaatgtgcatactcacagagttagagagagggatggtggtaccgcttaaatctaagtcaagatgaaataaaacaagaagt

SEQ ID NO: 626024 - DNA, 80 bp, Homo sapiens
ttcggtggactccttcggcagtccacccaccgccgccgcctcccagagaagcagggccctgagcggaagaggattaagaa

SEQ ID NO: 626025 - DNA, 99 bp, Homo sapiens
agccgctcttaggcgacacacctggaagcaggaggtgtcattaacttgtcagtacctatagttctgactgcgactcatgaagataaagagaggctggac

SEQ ID NO: 626026 - DNA, 101 bp, Homo sapiens
acgatctttaactttagacacctgggagccagaacttttaaaggtgggtttggaggatttgggacaacatctacaactgcaggttctgcattcagcttttc

SEQ ID NO: 626027 - DNA, 100 bp, Homo sapiens
ctgtggcgcggtttcctgtacctgccttgggatccggagggaggaagctgggacacccgggagtcaggaaatgccgttcttggaacacctcacagcttgc

SEQ ID NO: 626028 - DNA, 100 bp, Homo sapiens
aaggagttgttgtctcggcagcgcccgcggagacgtgaagaggatggagagcaatacatcatcatctttggagaatttagcgacggcgcctgtgaaccag

SEQ ID NO: 626029 - DNA, 100 bp, Homo sapiens
gggcaagggttcggccgtgccctccgacagccaggcccgcgagaagtggtgatgatgtccagcaactctgtgaagcaggagaagaggagtttttggaaat

SEQ ID NO: 626030 - DNA, 89 bp, Homo sapiens
gaagaagggcaggacctgggcggaggccgccaagacgctccagaacctgggtatcaacccagcaaacattggcttcagtaccctgacta

SEQ ID NO: 626031 - DNA, 129 bp, Homo sapiens
ggccctctcgctgttgctggtctctggctccctcctcccagggccaggcgccgctcagaacggtactaggttttgacaagcttgcatcatgcgtgagtataagctagtcgttcttggctcaggaggcgt

SEQ ID NO: 626032 - DNA, 82 bp, Homo sapiens
ccggaatcggggcgcttcgccccgggccccccagcatgaagaccccggcggacacagcctacaaggagaagatgaaggagct

SEQ ID NO: 626033 - DNA, 100 bp, Homo sapiens
ctttcaaattcgaagaggacttcagaatgacacatcccactcaaactgcatttttatccagcgttgatcttcacactcactgttcctatcaactcatgtt

SEQ ID NO: 626034 - DNA, 98 bp, Homo sapiens
aaaatagaaaacctatgtgctatgggctttgataggccatatcctgcaaatgagagttctaaacttgtctctgagaaggtggatgactatgaacatgc

SEQ ID NO: 626035 - DNA, 98 bp, Homo sapiens
accttctggactaatgatgatccagttcaaggagcagggacaagttacaggaatgttctccaagcagcaatccaaaagagtctcaaggatccttcaaa

SEQ ID NO: 626036 - DNA, 100 bp, Homo sapiens
acttcagaaatatgaatatgttttacatccaagaactacaggctttacttttgtggtagaccgtctaagagaagttgttgacctcctgtactggagagac

SEQ ID NO: 626037 - DNA, 153 bp, Homo sapiens
cgtcggaagatgccggccgtgtccaagggggacgggatgcggggcctggcggtcttcatctcggatatccgcaactaacttcaaggtagaatttgctttaaattgtgagtttgttcctgttgaatttcatgaaatccggcaagtgaaagccag

SEQ ID NO: 626038 - DNA, 90 bp, Homo sapiens
caactattcaacatggaggcggaggtcgataagctggaactgatgatatgaatatcgtgtagagatggttcaccagtcctgtaatgatcc

SEQ ID NO: 626039 - DNA, 75 bp, Homo sapiens
ctcccacttaaaggcccaccagaggactcacacagaacacagatatgtagaactcttcttgaattctacagcagg

SEQ ID NO: 626040 - DNA, 78 bp, Homo sapiens
gagatccatagggaggacggcggaacatctggaggctgggaaatgtccacagacaaacgaatttaaaggagcaaccga

SEQ ID NO: 626041 - DNA, 75 bp, Homo sapiens
tggagctcttcgacccacccaagagcctgatccagggatgtctggatggccggatggcagaatggagacctccac

SEQ ID NO: 626042 - DNA, 134 bp, Homo sapiens
gtcagagccaccagccaatgatcttttcaatgctgcgaaagctgccaaaagtgacatgcagatgatgattattctccaccgtctaagagaccaaaggccaatgagctaccgcagccaccagtcccggaacccgc

SEQ ID NO: 626043 - DNA, 100 bp, Homo sapiens
gaggaagctcaccttcgacgaggaagcttataaaaatgtgaatgtctacacaaggaagtacaggatttggcttttctagatgtcgtatccaaacttcgca

SEQ ID NO: 626044 - DNA, 100 bp, Homo sapiens
aaagccccagccacccatcaaatcagagagaaggaatccaccttcttacgctatggcaggtattctgcctttgactgcaactcttgtcgtcttatgtggg

SEQ ID NO: 626045 - DNA, 90 bp, Homo sapiens
ggtcgcctgggtccgcgccgaggaaaatcctgccttgcttcgttgggcctatgcaagaacaataaatgtctatcctaatttcagacccac

SEQ ID NO: 626046 - DNA, 99 bp, Homo sapiens
taacaaacttgctaaaggaaataggttattcatgagatttgctacaaaaggtgatttgatgaaggctgctgcaggagagttcgcagatgatccctgctc

SEQ ID NO: 626047 - DNA, 75 bp, Homo sapiens
aatggcaccgacacattgtggggagaaacagatggctattcatatgaaaaggaagcaatggaaaattggatcagc

SEQ ID NO: 626048 - DNA, 103 bp, Homo sapiens
ttcccgcagtggcagtggctccccatcgccggacacctactccctctattgctacccatgcacctggggagactgcaagatggagtctcgctctgtcacccag

SEQ ID NO: 626049 - DNA, 83 bp, Homo sapiens
gagaccatacagacctaccggtctgtcagtgagatggcttctaacaagtatatgactctcaacccttctactaagaggaagaa

SEQ ID NO: 626050 - DNA, 80 bp, Homo sapiens
cagctgtcagtggcctaggccgcaggaattgaatgatctggcacgggaccctccagcacagtgttcagcaggtcctgttg

SEQ ID NO: 626051 - DNA, 90 bp, Homo sapiens
gcgaatctgagaggaaaaccgaggagtacgatactcagatgtccagctcgccgctgtccaagaaacgtcgcgtgtccgggcctgatccaa

SEQ ID NO: 626052 - DNA, 83 bp, Homo sapiens
gttgctgcccttccggagtccgccccgtgaggagaatgacaatgcagatcttcgtgaagactctgactggtaagaccatcacc

SEQ ID NO: 626053 - DNA, 75 bp, Homo sapiens
cctgaaatctggagtgaagaacgccgccatccagccaccattccaagcccagaacgtcatggccgggaatggccg

SEQ ID NO: 626054 - DNA, 75 bp, Homo sapiens
cgcggtgcagggtaacatggcggatgcggaaggggcaagattcttgccaagagaattaatgtgcgtattgagcac

SEQ ID NO: 626055 - DNA, 75 bp, Homo sapiens
tgccttccaggatgtcaaatttgtcagcaactcgtcaggatgggactgaggaagacccacaggcagaactggcca

SEQ ID NO: 626056 - DNA, 98 bp, Homo sapiens
ctcagctcgggccacggagaggagcagcccccggagacagcggcacagaggtgcttctgccaggtatctaaaacagcaccaactggagaatatttgac

SEQ ID NO: 626057 - DNA, 100 bp, Homo sapiens
cgggaccaggactggccgacccggccccgcgcggggaagggggcgccttcctcccacaacacaaaacgtacggcaagaagaagctgaaatacctgcccta

SEQ ID NO: 626058 - DNA, 100 bp, Homo sapiens
aggcgggagccatgccggagaagcgcgcgggcgcgcaggccgcggggagcacctggatcctatgaatgcactccagagcctgactggcggacctgctgcg

SEQ ID NO: 626059 - DNA, 88 bp, Homo sapiens
ccaccgccatccgccaccatggtcacgagaagagaatgccttctagatgcaaaatcacctccaaaccagaccacttttcttgacttgc

SEQ ID NO: 626060 - DNA, 74 bp, Homo sapiens
cagacatctacaaccttcgatctcctgacgaagttttactacccttggatgctgctgttgacatggaaaagatt

SEQ ID NO: 626061 - DNA, 101 bp, Homo sapiens
ctccaaggcccgcccgggagggccggggccgcgctcagattgggtaactcaaggcgtccctggagtacactgaggataagtgtttgagaaatgctgtctga

SEQ ID NO: 626062 - DNA, 82 bp, Homo sapiens
ctctgaacccagcttcccacttagcagcaggtcttgagtgcacctggcatacagagcaaatggaatgatgactttgaaaacc

SEQ ID NO: 626063 - DNA, 83 bp, Homo sapiens
cgggcaccatgagcgacgtggctattgtgaaggagggttggctgcacaaacgagataacgaaggaggcccaacttcattcaat

SEQ ID NO: 626064 - DNA, 100 bp, Homo sapiens
ccgccgggaggaggaggaggagccgagaggagctgagcgagcgcggaagcttcgcaacaacaaggcaaaagacgtctgcttggaccaggggccgctggag

SEQ ID NO: 626065 - DNA, 75 bp, Homo sapiens
ccagtgcggactcgcctccgtgaaggatgtgggggctcaaggttctgctgctacctgtggtgagctttgctctgt

SEQ ID NO: 626066 - DNA, 100 bp, Homo sapiens
ctgagagtgttaattctgctcctctcctgggcggcggggatgggaggatattatggggatggattaaatgccattgttgtgtttgctgtctgtttcatgc

SEQ ID NO: 626067 - DNA, 80 bp, Homo sapiens
gtggtgaggaaccctggactctcaggttccagtgtgtgttccaagtgctgccaaagtgcctcagcccagagacacccctg

SEQ ID NO: 626068 - DNA, 100 bp, Homo sapiens
tgccgtgatctccagcgccggcctcctcagtgcgaagaagctgcagccgcacctggccaaggtgatcctgccatgaagcagtttctgctgtacttggatg

SEQ ID NO: 626069 - DNA, 75 bp, Homo sapiens
tgcaccacgcccggggggacgctcttctccaccacaccgggagctctaagcgaaagacatgaggcctcagcctga

SEQ ID NO: 626070 - DNA, 50 bp, Homo sapiens
tattcttgctcgtgtggctgtgggatagctgggagtatggccaccctgct

SEQ ID NO: 626071 - DNA, 75 bp, Homo sapiens
gctgcaaggaggccgtcaccttcaaggccgtcagacaaggaagtccagcgctgtactgctgatatgaacatcact

SEQ ID NO: 626072 - DNA, 101 bp, Homo sapiens
ggccgacttcgatgatcgtgtgtcggatgaggagaagtgacttctgacagctctctccatggaaggaggcggcggccgcgatgagccttcagcctgccggg

SEQ ID NO: 626073 - DNA, 113 bp, Homo sapiens
cctggatatgcccgttcagtttacagttcattttttgcttggtttggaaaaatttcattagaggtgaccaagaatatggcccaggtgaccaaagccctggacaaggccctgag

SEQ ID NO: 626074 - DNA, 83 bp, Homo sapiens
cgtctctctcatcgaggcccaaaccgccaagcttcgagagctgtgcccaggagtgaacaaccagccctacctctgtgagagtg

SEQ ID NO: 626075 - DNA, 90 bp, Homo sapiens
tgtgaagataccagtttgcgtcaggagacacaggcaagtatatcgcgtcaacacagcgacctgacgggacctggcgcaagcagcggaggg

SEQ ID NO: 626076 - DNA, 75 bp, Homo sapiens
gatcggattcctcagctacgaggaggcgctgaggagagcaataggagtgaaacatccacatctgataacacagaa

SEQ ID NO: 626077 - DNA, 100 bp, Homo sapiens
gttccagaggctgctcggcttccagctcaatcctgccggttgcgccttcttcctggacatgaccaactggtgaaatatctcttttctgacaagactggaa

SEQ ID NO: 626078 - DNA, 100 bp, Homo sapiens
ggcagctgctctgaaccaggacctggacccggacccaaagtgccatgtctttaatctaagatatcaacatggactagggactccagacttgcggcaaacc

SEQ ID NO: 626079 - DNA, 100 bp, Homo sapiens
cgggtgtcctgacgctcggggttcaggagtacttgattcttcagaaaacctccaaagtagatgtggactcaagtggaaagaaatgcaaagagaaaatgat

SEQ ID NO: 626080 - DNA, 101 bp, Homo sapiens
cgtgaaattgtccatattcagattggccagtgtggcaaccagatcggagccaagcaccactgccggaactgtggccacatcttctgcaacacctgctccag

SEQ ID NO: 626081 - DNA, 50 bp, Homo sapiens
gatgccattcaccctacagaaggaaccaacacaatggagagggaagagag

SEQ ID NO: 626082 - DNA, 155 bp, Homo sapiens
ccgcgccctcccagaggcccaccttcaagcagctggtggaggacctggaccgtgtccttaccgtgacgtccaccgacgtaaaggcgacacaggaggagaaccgggagctgaggagcaggtgtgaggagctccacgggaagaacctggaactgggg

SEQ ID NO: 626083 - DNA, 85 bp, Homo sapiens
cgacacgcctttgcacgacgctgccaacaacgggcactacaagagagaggatgcaagccatggagaaacagattgccagtttaac

SEQ ID NO: 626084 - DNA, 80 bp, Homo sapiens
gcacctcatcccctggatgggggaccacaagatcctcatcgacaggtgccgcccatcctgcctccaacccatttggaccc

SEQ ID NO: 626085 - DNA, 96 bp, Homo sapiens
attgctgctgccttgctgatgtttggtgatgcaggaataagtcagcaacctgatccaggctttactggggctacgactccccagagcccacttatg

SEQ ID NO: 626086 - DNA, 82 bp, Homo sapiens
aaaaaaggacagaggctgttccctatggcagtgggtaattccagaattgattggccataccattgtcactgtattactgctc

SEQ ID NO: 626087 - DNA, 73 bp, Homo sapiens
gctgccgctgccgcacctccgtagctgactcgttgccaccttccagagaagaggtacgagatgacaagacaac

SEQ ID NO: 626088 - DNA, 82 bp, Homo sapiens
cccggcggcctctcattctgcagctcatcttctcaaaaacagtgaaggagaacgacctgctcagaatgagaagaggaaggag

SEQ ID NO: 626089 - DNA, 100 bp, Homo sapiens
tgtgaaagaaggttgggttcagaagagggctgttccatttcctccaagtcaccggcttacagcaaaagaagtgtttgataatgatggaaaacctcgtgtg

SEQ ID NO: 626090 - DNA, 100 bp, Homo sapiens
tgcattttcctgatccaaacaagcttcattgttttcagctaacagtaaccccagatccagacatttaatgtggatgcaccatgccagaccgtggaagatt

SEQ ID NO: 626091 - DNA, 75 bp, Homo sapiens
tagaacacgttcctctgggttggagttactggtatgccttgatacaggtatccccgtttttacaacagatgttca

SEQ ID NO: 626092 - DNA, 74 bp, Homo sapiens
gaggagagcccccattggaccagtgtttgcttaggtcagcccaagactaccccgtcggtcattctgttcctgcc

SEQ ID NO: 626093 - DNA, 83 bp, Homo sapiens
acgagctgtttctcatctttatactcttccagacagtctagcagtgcttccttggagaccctgttagcacttcttcaggcaga

SEQ ID NO: 626094 - DNA, 100 bp, Homo sapiens
attatgtgttacgaaaacaaatgggaagaaccaggacatcttactttgatcatcaatgctgtggtactgttgattttattgagtgccctggctgatccgg

SEQ ID NO: 626095 - DNA, 96 bp, Homo sapiens
tgccgcggaggtcgaggatccgctcgtccgtgggatgaagtgtcctcttgctagcaccaataaaagatttctaattaacacaattaaaaacacatt

SEQ ID NO: 626096 - DNA, 59 bp, Homo sapiens
gtgatgattagagacatactaatgtacatgtgtccaagacaaagattttggccacagga

SEQ ID NO: 626097 - DNA, 100 bp, Homo sapiens
gtgaccgagaccgtgaccgagagcgtgaccgagagcgcgaatatcgtcatcgttagaagttgctgatcccacaccctttcatattcaagctgaagtgacg

SEQ ID NO: 626098 - DNA, 82 bp, Homo sapiens
gactgatagagacttcgttaaggtacctagtcgatagtcgctggttcaaacagtggaaaaaatatgttggctttgacagttg

SEQ ID NO: 626099 - DNA, 100 bp, Homo sapiens
catggatgcagagctggagtttgcaatccagccaaatacaactggaaaacagctttttgatcaggtgcggtggctactaaagttcgaaggcacgatatgc

SEQ ID NO: 626100 - DNA, 50 bp, Homo sapiens
tcgatacttcctgtggccactccagttcttcaccaaaggacatggatgaa

SEQ ID NO: 626101 - DNA, 100 bp, Homo sapiens
aggccaaggagctccgtcttgccagaattaccccgaccccctccccgaagctgccggagccctctgtcctgggctgaggaagctgccctcgaaaccctcc

SEQ ID NO: 626102 - DNA, 101 bp, Homo sapiens
tccaggttgttttgaagcaaagtccaagcattgtatcacttcatctgcaaatatttcaataagtacccaaaaggattggccatttgatgatggagctccac

SEQ ID NO: 626103 - DNA, 100 bp, Homo sapiens
tattcctggagtctcagatcaccactatgccaccacgggctgttccctgaccctgcaccatacggagaaaccagaacatgaagacatatgtgaataccgt

SEQ ID NO: 626104 - DNA, 82 bp, Homo sapiens
ctaagcctgcacagccgcggcggcagcagcagtgagagactgattcttgctattccaaatcctcttccacgttgacagccct

SEQ ID NO: 626105 - DNA, 76 bp, Homo sapiens
agcctttagtagtggttcaaacttcactcgacatcagagaattcacacagtggtccactgtaggtgtgccaagtgt

SEQ ID NO: 626106 - DNA, 100 bp, Homo sapiens
tccctccggaactcacactccaggagaggatgaagatcagtatgagcagttcatgctgccactcacagcagcatttgaggctgtggcccagatgtttagc

SEQ ID NO: 626107 - DNA, 82 bp, Homo sapiens
atttcctcctgacggctgtacttgagcagtcacctggcacagcattttgaaagcgaagcagaagccgtagaatcagcggcga

SEQ ID NO: 626108 - DNA, 100 bp, Homo sapiens
cgcgactccggctctgcgctcggctgcctgacttcttcctgctgctgcttttcaggggccagaacacaaagcgtgaatccggaagaaaagttcaatctgg

SEQ ID NO: 626109 - DNA, 76 bp, Homo sapiens
taatcggaatgtgatcacagagcctatttacccagaagtagtccatatggagggtgcatctgcccggaagactcag

SEQ ID NO: 626110 - DNA, 90 bp, Homo sapiens
tagctgggagccatcacgcccagctagccatcttctaattttcattccttcaaaggtggtggactttgtagcagcaacattgcagagagc

SEQ ID NO: 626111 - DNA, 96 bp, Homo sapiens
ttgataacactggagatcagcaccaaatcccacagaggcatctgagcaaaccagtccagctacgggggcccagccagccagcagctgagtgggggt

SEQ ID NO: 626112 - DNA, 100 bp, Homo sapiens
caaaagctgtgagaacaactacacgttacgctattcgttgtggtccaaaacagtttacctcttatctaacaggtacatgtcccagagcaagcacacggag

SEQ ID NO: 626113 - DNA, 75 bp, Homo sapiens
tcttcagttaatggcaagacttgcagaggcctaaagagaaaattgttatttctgttaactggacaccactcaaag

SEQ ID NO: 626114 - DNA, 100 bp, Homo sapiens
gtaggatcatggcttactgcagtctggaactcctgggctcaaaccatcctcccacctcagcctttttggctgtagcagcaattcctgaaggtctccccat

SEQ ID NO: 626115 - DNA, 100 bp, Homo sapiens
tggcccaggaggacgactgggaccgggacctgctgctggacccggcctgggagaagcagcagcgcaaggactcaagcacagagggttcggaaaccgcgtt

SEQ ID NO: 626116 - DNA, 102 bp, Homo sapiens
cgcatttgtgggcgcgcggcacgcagccgggaggccgaggactcggagttcacctgcagacaatgcagatcttcgtgaagactctgactggtaagaccatca

SEQ ID NO: 626117 - DNA, 83 bp, Homo sapiens
agaaaaaagattcagattacgaggattatggatgaacgtaacagacaggagatcctaagaaaaagcttatatgttcagtgtgc

SEQ ID NO: 626118 - DNA, 100 bp, Homo sapiens
gaaagcagagaccatggagcttcttggatctgtctggctccattgatgacctccccacgggaacggaagcaactttgagctcagcagtcagtgcatccgg

SEQ ID NO: 626119 - DNA, 75 bp, Homo sapiens
acctttccaagcaaggccaggaggaacctaattcatctctccagcaaaggacacatctctccagcaaaggacacc

SEQ ID NO: 626120 - DNA, 75 bp, Homo sapiens
atgacttgatctcagaatttcctgacaaatttggatcctgtgttcctctgtcttctgggactctcctactcattg

SEQ ID NO: 626121 - DNA, 74 bp, Homo sapiens
ccgcggcggcagcagcagtgagagaatagcctaacatggcagaccagagacagcgctcactgtctacctctggg

SEQ ID NO: 626122 - DNA, 90 bp, Homo sapiens
cttttgcagagctgtgatgttttggggattccactctccagtgtaatgattattgacaacaggaactcagcgagatgctgtacacagacc

SEQ ID NO: 626123 - DNA, 51 bp, Homo sapiens
cttctgaacaaggccaacacctatgcaggtgctggagaatctggtaaaagc

SEQ ID NO: 626124 - DNA, 100 bp, Homo sapiens
gttaaggattccaagtaactcttatttgggagtgcatccgccccaacccttttccccctcgtctcctgtgagaattccccgtcggatacgagcagcgtgg

SEQ ID NO: 626125 - DNA, 100 bp, Homo sapiens
cagaggatgaggctgtttacaaggttgtttgcattcgctccacttggaatgctctctctccaaagctgagttgtgacacaagacctctcattctgaagac

SEQ ID NO: 626126 - DNA, 100 bp, Homo sapiens
agggcattcagaaatacaaagcaaagattgtttttgcagaaaatgacagatggcgagacctggacaggaaatgccctcttcagattgaccaaccgagcac

SEQ ID NO: 626127 - DNA, 82 bp, Homo sapiens
ccgtttagcagctgttgggccaactacacagaccttactccccttagaacaggtgctggagaatctggtaaaagcaccattg

SEQ ID NO: 626128 - DNA, 76 bp, Homo sapiens
ctgaggcctcctcagccatgtggaacttggccataaaatgcagtaaaaacaaatccagttcccaagaagctgtaca

SEQ ID NO: 626129 - DNA, 83 bp, Homo sapiens
gagcagcgccagcggccgagcgggcggcttcctggcctgggcgctccggtggcggcggagatgtggacgagtgtgaggctggg

SEQ ID NO: 626130 - DNA, 101 bp, Homo sapiens
gctgaggaagtcagcgtcggagacggaggccctgccctcagagacgcgccccctagtggaagcagagtgggaagcagacagggtctcactttgtcacccat

SEQ ID NO: 626131 - DNA, 100 bp, Homo sapiens
cttcagtgcagacgcagtggtggccctggagcagtatgccagcaaggaagaagctccctttacatcatcttgtctacaggaggcatcttcctccttgtga

SEQ ID NO: 626132 - DNA, 100 bp, Homo sapiens
ccaggactcagaggccgccatcaaccgccagatcaacctggagctctacgcctcctacgtttacctgtccatggttccgccaggtgcggctgaaacaccg

SEQ ID NO: 626133 - DNA, 83 bp, Homo sapiens
ctcctggaggtcagaggccctttcatcatcaggtctacgacgttcctccatcggtgagcaaggatgtgcccgatggcccactg

SEQ ID NO: 626134 - DNA, 100 bp, Homo sapiens
actatcttacaaagcacaggaaagggaaagcaggcaggatgggagagtcgccgatagaaccacctcttccctgcctcctgggcttgggggaagcttgaat

SEQ ID NO: 626135 - DNA, 83 bp, Homo sapiens
gatgaaggaaattgcagaagcctaccttgggaagttaagttgcttttacagagttaacaggtctccaagaaattttaaaaaag

SEQ ID NO: 626136 - DNA, 78 bp, Homo sapiens
gagctgcagctcctcctgtgcgggtaccaggatcatctatgaccggaaattcctgatggagtgtcggaactcacctgt

SEQ ID NO: 626137 - DNA, 55 bp, Homo sapiens
gctttgaagtgggaatgtccaaagaatgttgctgctgactcagccattctagaag

SEQ ID NO: 626138 - DNA, 75 bp, Homo sapiens
gtccagcacggccaagtcagccacctggacgggcgtgatggtgggcatgggtcagaaggattcctatgtgggcga

SEQ ID NO: 626139 - DNA, 95 bp, Homo sapiens
ttaaaaaacttgaggataaaatccttgaattggaaggcatctctcctgaatattttcagtctgtagatttgtacacacagatatgacgaaagact

SEQ ID NO: 626140 - DNA, 75 bp, Homo sapiens
gcagcctcgggtgcaatcctggagccccccagtgaggatctcccttgagtttagaaatctggctgagaaatacca

SEQ ID NO: 626141 - DNA, 100 bp, Homo sapiens
cttggcagaaattatattttccagcccgtgtctgcaggttgaaaggattgttgacaaaaggaaaaataaaaaagggaagacagagtatttggttcggtgg

SEQ ID NO: 626142 - DNA, 50 bp, Homo sapiens
ctgccatccactgactcgtaaaattgtagaaggcatgaaacaaaaaatgt

SEQ ID NO: 626143 - DNA, 51 bp, Homo sapiens
ctggagccaaactcaggaaagtcagcaagtgctgcaggtggagaaattttc

SEQ ID NO: 626144 - DNA, 90 bp, Homo sapiens
gttgcattgcctgcaagctctgcgaggccatctgccccgcccagagtggaatgttggctgtccgtgaaaaccgctacattgtcctggcca

SEQ ID NO: 626145 - DNA, 100 bp, Homo sapiens
gagaaatctttcgagaatattcagaactggatgaaaagcatcaaggagccaccaccagcctatgagcctccagcccctgccccattgcctccaccctcag

SEQ ID NO: 626146 - DNA, 73 bp, Homo sapiens
aaccggggtctccctcccaggacacaggagtcaaggtcgtaatctgaaggagtggctgagggagcaattttgt

SEQ ID NO: 626147 - DNA, 51 bp, Homo sapiens
accagcccctgtggagcaggatcatcgagagatggggttttgccgtgttgc

SEQ ID NO: 626148 - DNA, 80 bp, Homo sapiens
cactcgcgtgtggtggccaactcggaggagatcgccttctatgggggccatgaggtccgcgggagagctgtggggcttgg

SEQ ID NO: 626149 - DNA, 90 bp, Homo sapiens
gtgaacgtggacaaagctgttgtctcagggagcacagaaaacattcagaagattctcggccttgccccttcacgagccgccaccaagcag

SEQ ID NO: 626150 - DNA, 101 bp, Homo sapiens
gcactctaagaggaaaacacatcccaccacagtcctgcagacattcgctttgtctgggagaagaatgggcgagctctggagacctgtgtccctgtgcagac

SEQ ID NO: 626151 - DNA, 100 bp, Homo sapiens
tctggcaaaagctctcacaagcaaaagccttggagaggaggagaatgtatcaaggtaaattcaactggaagggaactattaaagcaattctgaaacaggc

SEQ ID NO: 626152 - DNA, 90 bp, Homo sapiens
gaggaacttcagtctataataaagagatgtgcacgtgtggttctcaaatataggcattctgatgggaacttgtgtgttaaagtaacagat

SEQ ID NO: 626153 - DNA, 100 bp, Homo sapiens
gagaggatagaaattgaacagaactatgcgaaacaattgagactaaatgtgttaaatgggcttgccaacaatatggatgatttgaagataaacaccgata

SEQ ID NO: 626154 - DNA, 101 bp, Homo sapiens
acgcgcagcatggcggtggaggacgaggggctccgggtcttccagagcgtgaagatcaagatcgtcgcagatatggccagtacactatgaaccaggaaagc

SEQ ID NO: 626155 - DNA, 75 bp, Homo sapiens
atgaattccagagttttcaagaaaattcaagcggagctggagtttgttcagatcatcatcatcgtggtggtgatg

SEQ ID NO: 626156 - DNA, 75 bp, Homo sapiens
agggccaggcgccgctcagaacgggagtgcatccgccccaacccttttccccctcgtctcctgtgagaattcccc

SEQ ID NO: 626157 - DNA, 98 bp, Homo sapiens
ggattctgacaaaagtactctccgaagaggaattgacatagccacagcaattgtctgctattttaaaagcactgtgatgcttaaatattccagctgct

SEQ ID NO: 626158 - DNA, 100 bp, Homo sapiens
cgctaggtggcatctcctctcacggatgcctcgcatcccagccatcactcttccacctgctccttagagaagggaagatgagtgagtcgagctcgaagtc

SEQ ID NO: 626159 - DNA, 113 bp, Homo sapiens
gaacttttggacgtaactgatcaattgaatatggacccaagagtcagcggtatattagttcagttaccactaccagtttgtcactcaagccctatcagaaggttggtttgaat

SEQ ID NO: 626160 - DNA, 98 bp, Homo sapiens
tgtgggactccagattatatcgccccagagtgtcaacagcatctccaccctggagcctgtgagccggtgccagcgcctgagtgagctgtacctgcgga

SEQ ID NO: 626161 - DNA, 100 bp, Homo sapiens
ggaggaggagcgagccaagctgcacgatgtggagcttccatgccattgcagtgtcaactaggcctcagttacttttcagtttgcccaaattgagcccatc

SEQ ID NO: 626162 - DNA, 96 bp, Homo sapiens
gccagctggataccactgagtgacctcagtagatgccacgtgggacaggagaattctctagtttcagcagagcagctttaccatttgggctggtga

SEQ ID NO: 626163 - DNA, 100 bp, Homo sapiens
ctttattctcaatggagacttcgagaggctgaacctggacactgaggagcccatgatgctgcccaaacctgggacctattacctcccctgggaggttagt

SEQ ID NO: 626164 - DNA, 50 bp, Homo sapiens
ggatgctttccacatgaaccctgaagaatttcagaggcaggaaagtgtcc

SEQ ID NO: 626165 - DNA, 100 bp, Homo sapiens
cgtcagacaggggccccatcccactcgctaccctgtccggaagagagaagggcacagttacctaagtatcaacgtaatcttcctcggccaggacaggccc

SEQ ID NO: 626166 - DNA, 99 bp, Homo sapiens
cttcagccaagtgaaaggcactatcgagattggaaccacagaagaccgagtgtgtcagcagccaggactttctctctgggtccccttccaaaacgcagc

SEQ ID NO: 626167 - DNA, 98 bp, Homo sapiens
aacccttacctggggagacagctcccagccccattgccaataccttcctccactatcgaaccagcaaggtgagggtgctgagggcagcgcgcctggag

SEQ ID NO: 626168 - DNA, 100 bp, Homo sapiens
cccagggccaggcgccgctcagaacgtggagtacgacaaggagttctcccctcgtcagcgacaccacaaagagttcaagttcaacttatcccagattcct

SEQ ID NO: 626169 - DNA, 100 bp, Homo sapiens
aacgacctggcggtggggctgcggcgcctgggactgcaccgcaccgagggcgagctccaggtgcagcggaactgctgcctgacgctctgcaacttcagca

SEQ ID NO: 626170 - DNA, 100 bp, Homo sapiens
cagaaaggagccccgcgagtggcgcgccggggatgaaagtatgcctcagactcctcccttttcagcaatgtttgacagcagtggttacaatcgaaacctc

SEQ ID NO: 626171 - DNA, 83 bp, Homo sapiens
cccagctcacgccgcgcccgcgctcccaggctccggctcctacagaagaagggaaaaaagagctgctgttcctaagtaacgcg

SEQ ID NO: 626172 - DNA, 82 bp, Homo sapiens
aagggcacaggccgggagaagcctggtggcaactatggcggtggtcctggttatagtagtagagggggctatggtggtggtg

SEQ ID NO: 626173 - DNA, 100 bp, Homo sapiens
ggctgcgccgccgcgccgccgctccgcccccggtcgggtgtgtggctgcgcgcgccgggagagatgctgaggagccttcacgtaaatgggtccagtcatg

SEQ ID NO: 626174 - DNA, 100 bp, Homo sapiens
ggcttcccccaaggaatatacagcactgtgggaccagctcttggaaggaaggatcaaactacaaaaagctctgttgaccaccaaccagcttcctcaacca

SEQ ID NO: 626175 - DNA, 100 bp, Homo sapiens
acccggagaagcaggagccctactcggcagttggaggtccccctccccactaagtgcctctttgcatagcaccagtccccacccgcacgctctctggacc

SEQ ID NO: 626176 - DNA, 107 bp, Homo sapiens
attagtgcctgtagtagaaagccttgtctatcttcagacacaaaaggcaaacagtttcgaatctaaagattatctccaggtttgtcttcgaataagaccatttacac

SEQ ID NO: 626177 - DNA, 109 bp, Homo sapiens
ctgcccggtgcccgaggaggcagccaagctcgtagcctgccactccgtgcggtccctgatgggcctgggtgacattatctcacagcagctggtggagaggcggggtctg

SEQ ID NO: 626178 - DNA, 75 bp, Homo sapiens
cgaggttggtcatgtgctcggcaaagtacccacgtttgttcgaatgctggccccagagggagccctgaatataca

SEQ ID NO: 626179 - DNA, 83 bp, Homo sapiens
aactgaacttgaaacacttcaaagatcaaaatacttgctggatggtggactcagagaccaataaaaataaactgcttgaacat

SEQ ID NO: 626180 - DNA, 96 bp, Homo sapiens
ggagagacaacaaagcgctattatcctaaggtccagacccagtacttattatgaactgttgggggtgcatcctggtgccagcactgaggaagttaa

SEQ ID NO: 626181 - DNA, 96 bp, Homo sapiens
tgatgatcacgcagctggctggcttcagtggaccagccatcgtggcccgagccaacagtctgaagaattccggagtccccgatgacatcttcaagc

SEQ ID NO: 626182 - DNA, 82 bp, Homo sapiens
gctaccgttcggactatttgtagtcatgtacagaacatgatcaagggtgttacactggaggatttgacagctaaggatattg

SEQ ID NO: 626183 - DNA, 51 bp, Homo sapiens
agcgggccgtggaggcttcgccgcctagcagcagccgctcttctaaaacat

SEQ ID NO: 626184 - DNA, 72 bp, Homo sapiens
actggctcagagggtcaggaacagagtcaatttcaggaatttatcagtttgcaaggcttaattacaccaaag

SEQ ID NO: 626185 - DNA, 75 bp, Homo sapiens
cctgactctgggagcacgcagtgagaagccctaccactgcaactgggacggctgcggctggaagtttgcgcgctc

SEQ ID NO: 626186 - DNA, 51 bp, Homo sapiens
ggcaacctgcaagacttaaaagtaggagattgcttcacctgtggtatcaga

SEQ ID NO: 626187 - DNA, 90 bp, Homo sapiens
aagaccaggaagtgctgcttcaaacgggcagggctctaggaaacatatgttacgatagccgcacgtgtggttctcaaatataggcattct

SEQ ID NO: 626188 - DNA, 75 bp, Homo sapiens
tgcagctcaacttctaccagttcctcggggtgcagcaggtcactcctggaagcaaggcggctctagctaatttat

SEQ ID NO: 626189 - DNA, 80 bp, Homo sapiens
agactaccccaggaacccgcgccgcgagggctccttccctcaggtgacttaagagattaaaattaatttggttgctgttg

SEQ ID NO: 626190 - DNA, 100 bp, Homo sapiens
aggtgtacaccttcacggagcgcatgatggcctactgcgaccagatcttccaggacgagacgggcaagaaccgccctcaggcagcccctccacagggccc

SEQ ID NO: 626191 - DNA, 100 bp, Homo sapiens
ggaggacttcgattctttggaatgcatggagggcaggtacggctcctacctggtctggaaagagctgggaggcttcacagagaaggctgtggttcccctg

SEQ ID NO: 626192 - DNA, 87 bp, Homo sapiens
ccgcaggttccctacacggtctcctgggtcaagccaccattggttcaggcaatcttcagcggtgatccagaggagatccggatgctc

SEQ ID NO: 626193 - DNA, 100 bp, Homo sapiens
ctcaacgatacctattttctagtgctgagatcctgagacaatggtgattcgcaaggggtggctcaccatcagcaacattggcatcatgaaaggcggctcg

SEQ ID NO: 626194 - DNA, 80 bp, Homo sapiens
atcgttttgaagagttctgcgttttgccagtcacctctcaactgtgtgccaaagtgtgtccccgagaaagtgtcagagcc

SEQ ID NO: 626195 - DNA, 97 bp, Homo sapiens
aaacaggagctgattcgagctggcagagctgggccatggaaccggtagagacctggacccccggaaagaaaaactggcagggtgcaagctgaatgtg

SEQ ID NO: 626196 - DNA, 100 bp, Homo sapiens
aacctatgaggatcctcaggctgtcggaggacttgcttctgcactagacaatcgaaaacagagttcagaagggggagctgtcaccatgcctcactcgtac

SEQ ID NO: 626197 - DNA, 83 bp, Homo sapiens
gtaagcgcagaaagcaggcgaacccgcggcgcaataacgtttggagctgaatttcgtcggttttcgctggaaagatcaaaacc

SEQ ID NO: 626198 - DNA, 82 bp, Homo sapiens
ctgggcctagattccccagctgctgttctctggaggggcccagggccccggccagtgcccagccccgctgggagacccggcc

SEQ ID NO: 626199 - DNA, 100 bp, Homo sapiens
cgtggaattcgcgaagctgccaaagccttagacaaggcttttttccagacttcaagctcccattccaacagtaagagcttcttccacatcacagcccttg

SEQ ID NO: 626200 - DNA, 100 bp, Homo sapiens
gaggcagccacggggcccctggggtcctccaccagcagcctggccccaggccctgagccaggcccccagcccgccctgcacgtccaggcgcaggtgaaca

SEQ ID NO: 626201 - DNA, 100 bp, Homo sapiens
ggatttctacctttccatagcaggggccaactcaccctatgcagcacagcccaccagctacgactatgatgccccactgagtgaggctggggacctcact

SEQ ID NO: 626202 - DNA, 90 bp, Homo sapiens
ctctgcaaactcaacttgctgggccggtgcaactattcgcagtccgagcggcaccagttggagatgccaggacattactctcatctggct

SEQ ID NO: 626203 - DNA, 100 bp, Homo sapiens
ctaactatgctgaatttctttgtcaccgaattgtttgccagctctgagcctgtgccaggattccagggggataccctgcagctagcattcattgacctca

SEQ ID NO: 626204 - DNA, 74 bp, Homo sapiens
actacctgcactttggggagcctaagtcctgacccaacatgagtgaagtttcctgcaagaaacgggacgactat

SEQ ID NO: 626205 - DNA, 100 bp, Homo sapiens
tttaggaagtggtatcatgagagatatagcccacttagaaatcacactttcagagattgttcgtgagttcaagtcgactaaccgcttgctcctaactgga

SEQ ID NO: 626206 - DNA, 90 bp, Homo sapiens
tgatgatgagaaactaagactaccaatgttaacaatcaaagccttagatgggagatctcaagtttcaacaccacgttttggcaaaacgtt

SEQ ID NO: 626207 - DNA, 82 bp, Homo sapiens
ccggagctgggcgcggattcgccgaggcaccgaggcactcagaggaggccctgggaggagcggggacactgaggacctctct

SEQ ID NO: 626208 - DNA, 100 bp, Homo sapiens
gacggccgccaagaagcacggcaccaaaaacaagcgcggggaaggtgctattaacctggctttggctcagaaccgaagccaagatgtgagaatgaatgga

SEQ ID NO: 626209 - DNA, 101 bp, Homo sapiens
gatactcagcagctggaccggcaaattaaagcaattatgaaagaagtcattccttttttgaagaaccgcatgcacgagtctctcatgctcttcgactccat

SEQ ID NO: 626210 - DNA, 100 bp, Homo sapiens
ggcacagctgggggcctgggaaaaatgcagccagcgatgcagaaatgaaccaccggagaaggaagaggcccagcagaagggactcgctgagccacccccc

SEQ ID NO: 626211 - DNA, 82 bp, Homo sapiens
tgcaggcactggcagatgtagaagtaaagtatatagccttatgtttacacaacaccgccctttgtcagagtgacacatggaa

SEQ ID NO: 626212 - DNA, 51 bp, Homo sapiens
ccaatttagtgggggtagccccttccagatgtgttcagagcaacattgttt

SEQ ID NO: 626213 - DNA, 82 bp, Homo sapiens
aagtaggagacatcgtagtgggacgaatcacagaggttataagcacatgtccttggccctgaataggactggcagaagcatt

SEQ ID NO: 626214 - DNA, 90 bp, Homo sapiens
ggttccccggcccacagtgggggtgtgcaaacccgagagaactgggataattgggatgaagatgaggaggagagtgaaagtgaaaaagat

SEQ ID NO: 626215 - DNA, 100 bp, Homo sapiens
gcatcctgctcgtgtagccttctctgtggcacgcgctgggcagaaaggctaccatcaccgcactgagatcaacaagaagagtatgtattcccgtgtgcca

SEQ ID NO: 626216 - DNA, 82 bp, Homo sapiens
tctcatctcgctcggctgcgggaaatcgggctgaagcgactgagtccgcgatggaggtgttgacttcaaaatcaaaactgta

SEQ ID NO: 626217 - DNA, 75 bp, Homo sapiens
gtggagatggaccttataaatggaaatgatgtcactctgaaactcaggctggaatacactggcatggtcatacct

SEQ ID NO: 626218 - DNA, 107 bp, Homo sapiens
cgcacagctgctcccttcgccttcgccctttccacctcgcggcagttcgacaatgcagatcttcgtgaagactctgactggtaagaccatcaccctcgaggttgagc

SEQ ID NO: 626219 - DNA, 82 bp, Homo sapiens
ccaaccttgcctcctacctttcatccggaagaattgaacaggtagttaagcccccccaaaacaagacggaaagtgaaaatac

SEQ ID NO: 626220 - DNA, 74 bp, Homo sapiens
agccaagcagctatggaggaaaatcagcttcctttgctccaataagctttgcaatcaaggccaaagaaaatgat

SEQ ID NO: 626221 - DNA, 90 bp, Homo sapiens
acttcctgcgcttccagcttaccatgcggctgcgctccataaaggcagacgacaagcaacgaaaaatctgtctgatgcatgtaaaccact

SEQ ID NO: 626222 - DNA, 74 bp, Homo sapiens
ggaggccggactcaaccgcgtaaaagttttaaaatcaaagatgggaaaatcggagaaaattgcccttccccatg

SEQ ID NO: 626223 - DNA, 74 bp, Homo sapiens
tcagaattgccaagatttatgacaggatctctgctgtctcttggatcccatctgcctagatggaagaggatcct

SEQ ID NO: 626224 - DNA, 51 bp, Homo sapiens
ccttctgtcacatcacacccaatgagcattccgcggtaaacacctctcttt

SEQ ID NO: 626225 - DNA, 100 bp, Homo sapiens
gccgctgccccggctgcctcctccctgaggttggaatgttgcatcagcaggtagaagaacatgaaaaaatcaagcaagagatgaccatggaatataagca

SEQ ID NO: 626226 - DNA, 83 bp, Homo sapiens
ggactatgtggagaacctgaacaagtcccagctgaagctgggcatctggggcggctatggctttgtggaattcttgagtgagg

SEQ ID NO: 626227 - DNA, 97 bp, Homo sapiens
tctgcggaagtgcagctgcctcagttcttagcgcaggtattagaactgatatgtactcgtgagtcaggagcagtctttgaggctggtggtttgaatt

SEQ ID NO: 626228 - DNA, 50 bp, Homo sapiens
cagcaatttgggcaactttaattatgtgtgtgctgtatttatggagttta

SEQ ID NO: 626229 - DNA, 90 bp, Homo sapiens
attatggaagctctgcggtcatacaaccaggagcggccagcctcccaactacgagatgctcaaggaggagcaggaagtggctatgctggg

SEQ ID NO: 626230 - DNA, 75 bp, Homo sapiens
tgctcataaggattgtcctctttctacaaaaggcatttttagatgaattcactaactggtcaagaataaatccca

SEQ ID NO: 626231 - DNA, 100 bp, Homo sapiens
ttctggagtactcttattttgaaaagttatccaagcattaggtgaacatcttaaattaagacaacaagttattgccactgctacggtatatttcaagaga

SEQ ID NO: 626232 - DNA, 75 bp, Homo sapiens
atacacctgaaaatcttcgcctgaagcagcaaagtgaattgcagagtcaggtacttgaagaaacagaagctcaac

SEQ ID NO: 626233 - DNA, 96 bp, Homo sapiens
ctcgtttggaggcactggactacttacaaaaatgggacagagcagaatgggctgatatagatccggtgccgcagaatgatggccccaatcccgtgg

SEQ ID NO: 626234 - DNA, 82 bp, Homo sapiens
ctgctcaaggacacggtctacaccgacttcgacgataacgaaggaggcccaacttcattcaataaggagcctgacggattta

SEQ ID NO: 626235 - DNA, 100 bp, Homo sapiens
tggaagcaggactgcgccgcgtcttcctcaagggtttcatcaccttaaatggttttgaaccaatgaaggtgtattcccttaaaaagacggacagcccatc

SEQ ID NO: 626236 - DNA, 100 bp, Homo sapiens
gccgcccgcccgccgagcagccatgaggtctcggcgcggaagatggccggcggcgtggacggccccatcgggatcccgttccccgaccacagcagcgaca

SEQ ID NO: 626237 - DNA, 75 bp, Homo sapiens
ggacatattcgatgccatcgtgatggcggatgagagtgagaagcgccaccttcaagtgaacgtcaccaacccagt

SEQ ID NO: 626238 - DNA, 51 bp, Homo sapiens
gtgctgcctgcaggtccatgccagtgctatgggcataaacaacagaggtgc

SEQ ID NO: 626239 - DNA, 95 bp, Homo sapiens
cgagcccagagggacagcccaaggtccaccgagcccgcaaaaccatgtccaaaccaggaaatggacaggcagatgttttgatcctgtccttcttc

SEQ ID NO: 626240 - DNA, 100 bp, Homo sapiens
tgaccaagaggaccagactttgttaatgaaggtgcaatggatgagcttcatagtctggatccaagaaggcaagagttattggaagctagatttactggag

SEQ ID NO: 626241 - DNA, 74 bp, Homo sapiens
cggccacccattgatttgatgcataaaggcagctttgaaacagttggacgtgataagtatgagcctgcagctgt

SEQ ID NO: 626242 - DNA, 100 bp, Homo sapiens
ggccccatggaggaggtcagtggccaaggcctaggaagcagggcctggagctgcagtggttgctggagctgttgtgggtaccctggttggactggggttg

SEQ ID NO: 626243 - DNA, 75 bp, Homo sapiens
tgcacgcccacgtggtgcttcccgacccggcggccacccacgctgaatttcaatatgctgaaaccgtatttcgag

SEQ ID NO: 626244 - DNA, 100 bp, Homo sapiens
gcagaccagcgcccgaaggccgacacgctggccctgaggcaacggctcatcagcgccctgcccacccttggagccaggcacacagtgacgactcggaggc

SEQ ID NO: 626245 - DNA, 99 bp, Homo sapiens
gaggaaatcatgtatttacgacagatatacaagcagcttcttccagaccagctggtcttgcttctggagcatctcttggagcagaagactctgagcccc

SEQ ID NO: 626246 - DNA, 83 bp, Homo sapiens
gcaaactatcgctgaggacctggtcgtgaccaagtataagatggggggcgacatcgccaacaacaatgcagatcttcgtgaag

SEQ ID NO: 626247 - DNA, 75 bp, Homo sapiens
gctgcacgaaacactgaaattttggcaggttatgaatactgatggcactgggagacgagtactagtggaagacaa

SEQ ID NO: 626248 - DNA, 100 bp, Homo sapiens
ccgacgggcgccattgtgcggcgcgcgccggtctataggatcgggtgaaccaccaaccggcaattgaaagctgcacagcctgaaattacctttattcaat

SEQ ID NO: 626249 - DNA, 96 bp, Homo sapiens
caagagcctggagctgcgcaagtggatatctgcattacctccacctcctccacctccaccaccaccagcagctcccttgcctcctgcgagcaccga

SEQ ID NO: 626250 - DNA, 116 bp, Homo sapiens
gggcggggccacgctgcgggcccgggccatggccgccgccgatgccgaggcggacgccgcgggcatggactattcgtacgacgaggacctggacgagctgtgccccgtgtgcgggg

SEQ ID NO: 626251 - DNA, 75 bp, Homo sapiens
cgcgtctatcgccggctgccgcatcatcgggcgcatgtgtgtggttaactctgctgtttgctgcatgctgcatga

SEQ ID NO: 626252 - DNA, 99 bp, Homo sapiens
gttttcttcagcgcccaggatgcagccggctaaggtgctttacaaggccaagtacggtccaatgtggatgtcctacttagggcctcagatgcacgtgaa

SEQ ID NO: 626253 - DNA, 98 bp, Homo sapiens
gccgactctcaccatcatcaagacggaaaaagtcgatctggagcttttcccctccccggacttaattcagtgcacaaatgagatgaatgtgaacatcc

SEQ ID NO: 626254 - DNA, 75 bp, Homo sapiens
gcgaacggaagctcctggaggtcagaggccctttcatcatcagctttgcttgtcaggcccttggggaaggagcac

SEQ ID NO: 626255 - DNA, 82 bp, Homo sapiens
acaagaaggctgtgacgcttgccattggagacggagccaatgatgtcagcatgatcaaaatgtgtcccggcatggatatccg

SEQ ID NO: 626256 - DNA, 100 bp, Homo sapiens
cccgcctcgagccagcccgccagcatgccccagtccaaagggtgcagcagttggaggaagaaaatacagagcttagaacaacagtgactcggctcaagtc

SEQ ID NO: 626257 - DNA, 100 bp, Homo sapiens
gctggagccaccagttcccgcaagcccagacaatgccggtggaggaatttgtggctggctggatctctgttagtgtgactctggatccagatacagctca

SEQ ID NO: 626258 - DNA, 100 bp, Homo sapiens
ttgctcttctccgccgcggcactgatccccacaggcagcttgaaatccactctccagatgctaagcacacggtgatcctaaggagcaaggactcagccac

SEQ ID NO: 626259 - DNA, 98 bp, Homo sapiens
gaatgaccctagccagactcagggatcaaagagcaaacagattcagtggcctgcattgcctcgtcacgtgttcaatatgctaaagaagtatgtccgcg

SEQ ID NO: 626260 - DNA, 83 bp, Homo sapiens
ccaaagcacaggaatctcactctgttaaagctggtctgttctaactgaggactcatggtttttccaaaaccagtgaccgcatt

SEQ ID NO: 626261 - DNA, 82 bp, Homo sapiens
cttacaacaaactccagcggagcccgagtattctagcagagccctctggcacaaatggaagaagaaagaagggagcaagtag

SEQ ID NO: 626262 - DNA, 100 bp, Homo sapiens
agggcaacaaaggtccccgtctgaatccagctgctccagctatctctgaccgccggaggctgtgtcttctctgtcaaaggctggaatcgacctcccaggt

SEQ ID NO: 626263 - DNA, 100 bp, Homo sapiens
agcaatcctaccatgtcagccttcccagtagctggaactacaggtccacggcccactgctgaggctgaaccaggtgtccccggctgactctggcgagtac

SEQ ID NO: 626264 - DNA, 100 bp, Homo sapiens
acagctcagccagtttgatgaagaactttataagctcattgctatggacagtgctatcaccctgtggcagttccttcttcagctcctgcagaagcctcag

SEQ ID NO: 626265 - DNA, 100 bp, Homo sapiens
acttagaagctaccgagttaccctaagaaagagtacagttgtgaatttggctccgcgaagtattatgcactgtgtggctttggtggggtcttaagttgtg

SEQ ID NO: 626266 - DNA, 100 bp, Homo sapiens
tgcctgaatacatgatttaaacaagagatttccacagaaggttgggttaacggcatggagaacagtcaccccccccaccaccaccaccagcagcccccgc

SEQ ID NO: 626267 - DNA, 82 bp, Homo sapiens
cagctgtcgccgccgctctcagtgtgtcccggcatggatatccggaacaacctcactaggttgcatgagctggagaattgct

SEQ ID NO: 626268 - DNA, 100 bp, Homo sapiens
tcagagatggtggtggctgggaagctccaggaccgggggcctgatgtgctcacagccacagtcagtgggaagctggaagcaatgaggctccccaagaaca

SEQ ID NO: 626269 - DNA, 75 bp, Homo sapiens
gagttagcagtcacgacctccagcacaggatgaaaactttcggaagagaaagttgcctgtggtaagttcagttgt

SEQ ID NO: 626270 - DNA, 101 bp, Homo sapiens
ttcggaaagacacctggccagcggtccagagctgatgcagacaggggcaagtgtccgagtggtgaatcagctacttacagagatggatggtctggaagcac

SEQ ID NO: 626271 - DNA, 98 bp, Homo sapiens
cggctccatcatcacccaggcgcggagggaagacgccctggtgctcaccaagcaagaacactcctatgccaccttcaccagctgtacaagtgcagggc

SEQ ID NO: 626272 - DNA, 100 bp, Homo sapiens
agctggcgaagatgggcgacccggatctcctggaagtgttggcggaggaaggacatggatttgattgacatactttggaggcaagatatagatcttggag

SEQ ID NO: 626273 - DNA, 87 bp, Homo sapiens
acaagaacatgtctgtacacctgtccccctgcttcaggcgttacatagccatgtgccgcgagaagcagcccatggtgccagagtctc

SEQ ID NO: 626274 - DNA, 74 bp, Homo sapiens
gctcagaccttcattgctctgtgtgccaccgggccgcgatgggcctcttggaacattggtgtgttcatctgcat

SEQ ID NO: 626275 - DNA, 75 bp, Homo sapiens
gttttttctaatggctattcaagccggcctcagaaagtgtgtttgtgtccatttctcccagcgcaccctctgcat

SEQ ID NO: 626276 - DNA, 75 bp, Homo sapiens
cacatggtgtctgggcccttggcactccgactcaaagtcctctggctcacagcctctcagccctgcagcattgtg

SEQ ID NO: 626277 - DNA, 122 bp, Homo sapiens
caaggaagccacgtgcagacatctacaaccttcgatctcctgacgagtgtgatgaatgcagactctgctaccattttggctgtttggatcctcctttgaaaaagtctcctaaacagacaggc

SEQ ID NO: 626278 - DNA, 98 bp, Homo sapiens
cacgttctgcttccgtctgacccctccgacttccgatgaaggtcaccgtgtccaaagggggcgaccgggacagtgacgacgacagcgtcctcgaagcc

SEQ ID NO: 626279 - DNA, 82 bp, Homo sapiens
cggctggcagggtggacctcaggagcctcctaaaaccacagggcagatcttgaaccttctggatgagctgagattggctaat

SEQ ID NO: 626280 - DNA, 76 bp, Homo sapiens
atagggaaacctgggggctccctggacaactccgagcagaacatgctgtttgagagcatccaggagggcaagtacg

SEQ ID NO: 626281 - DNA, 100 bp, Homo sapiens
agaggaagaggcgttgcggcgaaaggaacggctgaaggccctacgggagaaaaccgggcgcaagagtggttaagaaagtagctcaatacatggctgatgt

SEQ ID NO: 626282 - DNA, 96 bp, Homo sapiens
cccagatgagctgccctcggcgggcggcgacggcggcaaatctaagaaatttgctcaaagtctaactccccaggactataatctgaggtggtcagg

SEQ ID NO: 626283 - DNA, 83 bp, Homo sapiens
caagaagttgagaccgagaatgtggaaacagacagcatcgcacagaattattttaaaaaaaagcagtgatccaagcaattgaa

SEQ ID NO: 626284 - DNA, 90 bp, Homo sapiens
ctcatcggaaacatggcactgttgcctatcagaagtcaattcaaaggacctgcccccagagagagcaggaagttatgttcgtgatgatgc

SEQ ID NO: 626285 - DNA, 75 bp, Homo sapiens
ccaaggtcttggattatgttacaagaaccagataggacaaggccaactgtgattcgcctttgccagtctcatctc

SEQ ID NO: 626286 - DNA, 100 bp, Homo sapiens
tcagcaagctgtggacgcttgtggaggaaacccacactaacgagttcatcacctggagccagaacccttaggagaaatcttgagagtggacagcaattgt

SEQ ID NO: 626287 - DNA, 82 bp, Homo sapiens
gccgctcgcactaccagcctgtctcgcacgctaagtgaaatgacaatggatgctctgttggctcgattgaaacttctgaatc

SEQ ID NO: 626288 - DNA, 50 bp, Homo sapiens
gatgaagagaaaggcccggagactattgacatggtacatcgtaacaagtc

SEQ ID NO: 626289 - DNA, 75 bp, Homo sapiens
cctgtgtatctgccaggagacccagctgcagcacgtggaggactaccgccggatggcctgatatgaaggagtcac

SEQ ID NO: 626290 - DNA, 95 bp, Homo sapiens
gaaaatatgtcaataacctgaacactgaccagctctcagttgcacttctcaaaggagtatggatgtgtccaacagccaaaaactcaagaaagtaa

SEQ ID NO: 626291 - DNA, 90 bp, Homo sapiens
gaagacctattttactgataagaaaacacatctttacacactaaggccccgagcacgacagccgcagtctccacccagaaccagagagtc

SEQ ID NO: 626292 - DNA, 83 bp, Homo sapiens
tgcctactcccccaccggggatttcagtcaccttcaggccattcagaggaggaaagagaggggaatatgaagtcagccaagcc

SEQ ID NO: 626293 - DNA, 71 bp, Homo sapiens
ccattgtcaaagagaagggaaccgtatacttcaaggtgggtcatgataactgggtacgtggagttctgttc

SEQ ID NO: 626294 - DNA, 50 bp, Homo sapiens
ggaggtttttgatgataaagcaaagtgctctgtcctgaaagagaagctgg

SEQ ID NO: 626295 - DNA, 88 bp, Homo sapiens
tttctggaagaagaagaagagcatgatcggcatgtccaccaaggcaggaaagaccacagcaagattctttcattcgtctcctcctagc

SEQ ID NO: 626296 - DNA, 83 bp, Homo sapiens
gtatgagccacacatccccgaccacttgcggcctgagtatgccccatggctgggggttatggagtgatgggtgacgatggttc

SEQ ID NO: 626297 - DNA, 98 bp, Homo sapiens
gagcaagggaaagaaccctggctggggaaaagggaagtgaaaagagatctgttttcagacggcaccgaaagcgaaggaagctcctgctcctcctaaag

SEQ ID NO: 626298 - DNA, 100 bp, Homo sapiens
cgccacctggagagaggccgcgtcctgggcagagatcttgagccagatgattgtgcatccatttacatctttaatgtagatccacctccatctactttaa

SEQ ID NO: 626299 - DNA, 100 bp, Homo sapiens
tctttctgcttttcaagagttccgatttcatcactcgtgacttcactcagccgttgggcccatgtggtttgtgccctgtatattccagaggtacaatttg

SEQ ID NO: 626300 - DNA, 100 bp, Homo sapiens
ggctgaccatggtgtgcaggcctgctttggccgctcaagggaataccagctcaacgactcagctgcctactctgcgtacgtgtcctatgggggcctgctc

SEQ ID NO: 626301 - DNA, 100 bp, Homo sapiens
aaaagataaagtgttttggttttgatatggattatacccttgctggatggtctgcttgtccttcattatggtcttgtggtttctcctctgaagataactt

SEQ ID NO: 626302 - DNA, 74 bp, Homo sapiens
gagtaacttggccaggctggccccgagcggaactggagaaagctgagggtgtcatggagaaactccagctgggc

SEQ ID NO: 626303 - DNA, 90 bp, Homo sapiens
ggcgtcaacgccagctgcccaggcgcaagtctgtgtggtccagatgagcagcaccagcagtaagagggctccgaccacggcaacccagag

SEQ ID NO: 626304 - DNA, 80 bp, Homo sapiens
cttttcaagaaatggaattgaaaagtccagaggaagaggccctgtttgtgctcttcgtcctggcctacatccacatcgtc

SEQ ID NO: 626305 - DNA, 50 bp, Homo sapiens
ccagagctgaggactgcctgtttgcaggaacaagatcactcaaggtgaag

SEQ ID NO: 626306 - DNA, 98 bp, Homo sapiens
ccgcccctggagtgggacccacacccgcagcccgatgggcatcaggattccgagtcaggagagacttcgggagaagccgcttacaaacacgcagatgg

SEQ ID NO: 626307 - DNA, 74 bp, Homo sapiens
aaaaagaggaaagtggactgtccggggccgggctcaggagcagaggggccatggcacctgcaaggtgtttctca

SEQ ID NO: 626308 - DNA, 82 bp, Homo sapiens
caagtggatagtagaacttatctactggatttccgtagtattgatgttgctgaacctgtttgcatgagttgctcctgacggc

SEQ ID NO: 626309 - DNA, 90 bp, Homo sapiens
gagctagtgaagtataaggatcagatcaagaagatgagagagggtcctgcaaaggcaagacatctgtatagattctgcttcatccgtgag

SEQ ID NO: 626310 - DNA, 98 bp, Homo sapiens
tgcgatggccaagtggactgcgacaacggctcagacgagcaaggctgtctgcctggtccctgtgaccatgaagacctcctggacggtgtcatatttgg

SEQ ID NO: 626311 - DNA, 83 bp, Homo sapiens
attccaagtaactcttatttggttatgaagttcatggaatggaaaaaataccagaagatggaccagcacttataattttttat

SEQ ID NO: 626312 - DNA, 100 bp, Homo sapiens
atcctctgtaacatcttgtcaggctagtctttggatgggaaggtggatcatccatgccatggagtatgaacttcagatccgtggcggagacaagccagcc

SEQ ID NO: 626313 - DNA, 123 bp, Homo sapiens
agtcaatagccctagagctaatcaagaccaagcaacgcaaggagagtcgattccagctcttcatgcaggaggcaagtgaggcctatctggttggcctttttgaagacaccaacctgtgtgcta

SEQ ID NO: 626314 - DNA, 100 bp, Homo sapiens
gcgccgggcctcccagccgacatgtctctagtggcggaagccttcgtctcccagattgcagcacaagttgaccccggaatatctggagctcaaaaagtac

SEQ ID NO: 626315 - DNA, 75 bp, Homo sapiens
ggatcgactttgttacctgaaagagcagcatggggtaaccttggaaatgttctgaagagtcagagcaaaatttct

SEQ ID NO: 626316 - DNA, 75 bp, Homo sapiens
tccagtatttaaagctattcaaccagatgctcttcagaagagtaatggtgtacttcctgaattatttcagtgtca

SEQ ID NO: 626317 - DNA, 98 bp, Homo sapiens
ctcagaacctgatcgggatcagcattggaggaggggcccagtactgtccctgcctctatatcgtccaggccgcatccgaaacactccagagaccgacg

SEQ ID NO: 626318 - DNA, 98 bp, Homo sapiens
gtgtcttccccagctctgcagccacatactatccgtttgttcaggaaccaccagtgacagagtatctagaagagcagaagacagagaatggaaaagat

SEQ ID NO: 626319 - DNA, 74 bp, Homo sapiens
gacagcgctggaatcctataatacggtgttatgaagcggagattgaggagatagatgaagaaaatggcaccgct

SEQ ID NO: 626320 - DNA, 101 bp, Homo sapiens
cacagaaatagtccagaatgtcacaggtccagggcagaggaccaacatgggcattttgtttatgagcaaggtggccaaacaggagaagaagaagaagaaga

SEQ ID NO: 626321 - DNA, 97 bp, Homo sapiens
tcattagggccagagatctgataaaactgttagcaaggagtgtttcatttgaacaggtgacaactgttgatagatttcaaggtcaacagaatgacta

SEQ ID NO: 626322 - DNA, 98 bp, Homo sapiens
accaacagataactgaggacaatggacctgcctgggcatagacttccttaagatcctgataacttaagtgactctctcttttccggtgatgaagaaaa

SEQ ID NO: 626323 - DNA, 74 bp, Homo sapiens
aaatggagttgccggagagacagcccagctattgtggacgatgaaaggctctctgcagaggagatggatgagag

SEQ ID NO: 626324 - DNA, 100 bp, Homo sapiens
gtctcggtccccttcttactggcttactgtgaaagtaatttttctcccaagtttaacgaaaaggatgggcatgttgagagaaagagcaagaatggcctgt

SEQ ID NO: 626325 - DNA, 99 bp, Homo sapiens
caatgccagaaaagccaaaaactctgttactagcctcctcagcattattaatgacctcttggagcagctggttatggctgcagcttcgattgccaatat

SEQ ID NO: 626326 - DNA, 96 bp, Homo sapiens
tgaagcctgcctacagttttcacaaatctatatggccatttctgatgaactgcactacttggaggtctacctgacagatgagtttgctaaaggaag

SEQ ID NO: 626327 - DNA, 89 bp, Homo sapiens
gtgatggtcaggaatgagatcacaggacatacctacaaaagctgggtcttggtggatcatcagtataatatctacctctatagagaggg

SEQ ID NO: 626328 - DNA, 96 bp, Homo sapiens
cggctccctgctgttcgagtacctgcccagaggggcccactcgctgtcccacaagttggatggcttgaggactggtactaaaaggaaacgtgactg

SEQ ID NO: 626329 - DNA, 101 bp, Homo sapiens
ccaaatggttgaaaacagatatacaggttccagcaacagatagaaatgctttaagttcactctggggaaagctggcctctgaaatcttaatgcagaattgg

SEQ ID NO: 626330 - DNA, 80 bp, Homo sapiens
cggcaagagactaccaagacagacgctatgaaatcatatggaagagggactcagtgaaagtaaagaatatgatcaatgtg

SEQ ID NO: 626331 - DNA, 98 bp, Homo sapiens
tgccaccaaacacgacagtgagggcaagaccgccaaggactgaaaatagttcaccatgcagaaaagacactgtctagcttctgcaagtggcagaagag

SEQ ID NO: 626332 - DNA, 98 bp, Homo sapiens
cagcgatcgagagagaccggagaggtggagaggttaaacactttaagatgagaaaaattgatctctgtctgagctctgaagggtccgaagtgatttta

SEQ ID NO: 626333 - DNA, 100 bp, Homo sapiens
ggaaaaggacgcaaagttctccggcgaggctaattcacctaaataagattgatcctcatgctccaaatgaaatgctctatgggcgaataggctacatcta

SEQ ID NO: 626334 - DNA, 75 bp, Homo sapiens
atggtagaatcaattaaacactgcattgtgttgctgcagattgccaaagctttaaaggagatagatgaagttggg

SEQ ID NO: 626335 - DNA, 90 bp, Homo sapiens
gtctgctccttgcctttcacggagaatttttggaaaaggtacgacagaagaaaaaacgtgatatcactgttttggacctgggatgtggta

SEQ ID NO: 626336 - DNA, 100 bp, Homo sapiens
agccaaattcaaaaaggataaggagatcatagcagagtacgatactcaggtcaaagaagatggcagtgaacgtatactcaacgtcagtgaccagtgataa

SEQ ID NO: 626337 - DNA, 89 bp, Homo sapiens
attgcgttacaagctttgtctccttcgacttggagtctttgtccaggacgactgcctctgtcaccgggtccctccacccttgtctcctg

SEQ ID NO: 626338 - DNA, 75 bp, Homo sapiens
gatctgcgctaggtggcatctcctctcacggatgcctcggaaccacgtgaatgttgagggggcgacacacaagca

SEQ ID NO: 626339 - DNA, 83 bp, Homo sapiens
ttcgttgcttgcttgcctgtgcgcgcgtgcgcggacatggcctcaaacggccaaatagttgcatcacatgtatctaatccgag

SEQ ID NO: 626340 - DNA, 100 bp, Homo sapiens
gaaagattttgaggagatgaggaaggctggtatctttcagagtgtaaagtaatcttggaatataaagaaatgattctggggaccattctgaccacatgca

SEQ ID NO: 626341 - DNA, 98 bp, Homo sapiens
ccagaccacctgggcggaggctacagcatcgtggcgctgggcaatgacatctacgtgacggaatgtggccccgtcccagagcaccacccgagacatca

SEQ ID NO: 626342 - DNA, 75 bp, Homo sapiens
gtcctgttacttccaagtcatcaccagaaaggtatcgaaggatgatcgcagtgatgtggagagcagctcagagga

SEQ ID NO: 626343 - DNA, 76 bp, Homo sapiens
tgacgagattattgagttaaagaaggacacagcattgttggttttgccatgtactattttacctatgacccgtgga

SEQ ID NO: 626344 - DNA, 78 bp, Homo sapiens
tcaacccctctgcaaagcttttattgtcacagatgaagacatcaggagttcatgatcaagtgttgcccacaccaaatg

SEQ ID NO: 626345 - DNA, 100 bp, Homo sapiens
acgtggagctggtgcagcggaagcgagtcatcgtcatcagacagtgaggaggacccagaagccttggagaagcagaagaaagtgcggcccatgtacctga

SEQ ID NO: 626346 - DNA, 100 bp, Homo sapiens
cggaccggcccgcggagctgctgcagtccttcgcgccctcctcgccctccccaccgacatcatgctccagttcctgagctcagagttctacagagtcacc

SEQ ID NO: 626347 - DNA, 98 bp, Homo sapiens
cgagcggcggcggcggcagcgggtcttgggtcctccgagagcagcagcgaccaggtgataggtttgatcgagacagaccgttgagaggacgtggaggc

SEQ ID NO: 626348 - DNA, 74 bp, Homo sapiens
ctcagcctgtgtggccgtctataaggtaatcacaagtgaagaagctgaaagacgaggacagttctatgacaaca

SEQ ID NO: 626349 - DNA, 98 bp, Homo sapiens
ccggggcctgccgcgcctgtcctggatcgacaccctctacagcataagactttgaccccgacgcaggcttcagtgattgccgcggatcagaagcctga

SEQ ID NO: 626350 - DNA, 88 bp, Homo sapiens
ttcaccaaataagctatatactttggttacctatgtacctgttaccactttcaaaaatggcagtcttgggcacgtccatctgtaaacc

SEQ ID NO: 626351 - DNA, 74 bp, Homo sapiens
tcagataaccagaaaatttaccaggatttattgattcgggaactggagcctctcctctgtcacagtgacaatcc

SEQ ID NO: 626352 - DNA, 90 bp, Homo sapiens
gttttggggattccactctccagtgtaatgattattgacaacaggactgcaggatcctcctgtctgtcgagcccacggaccaaggctgct

SEQ ID NO: 626353 - DNA, 100 bp, Homo sapiens
accgtgtcaccatccaggaactcacagaccctgcgggagattgtgattggcgtcctgcaccaattgaaaaaccagctttactgaccggttcttggaaacc

SEQ ID NO: 626354 - DNA, 51 bp, Homo sapiens
aatgagacatgcacataatatagataacttctttgtggatgattatgctag

SEQ ID NO: 626355 - DNA, 90 bp, Homo sapiens
ggggtgaatcagtatgttgtgcaagaggtactgtccatcaaacatcttccaccacagcttagagcccctggcagccactgttctactttc

SEQ ID NO: 626356 - DNA, 100 bp, Homo sapiens
tgattgaacaaatgggcaaattttaccctgaactgaagctagcttatgctgttcgaggcaataaatgagaaaacgacgctccacacctttaacttcttcc

SEQ ID NO: 626357 - DNA, 100 bp, Homo sapiens
gacaaaactgggttcagaaccagtggtaattaccatcaatactatggaatgcattttgaaacttaaggatgggatacagctgttcgggggtcttgtctgg

SEQ ID NO: 626358 - DNA, 100 bp, Homo sapiens
ttattgatctccatacaaatgttgccactgctgttttagaacatataaaggcccggattgcatttctacaaggcgaaagaaaaggtcaagagaacctgaa

SEQ ID NO: 626359 - DNA, 82 bp, Homo sapiens
cgggtccgggagcgcggcggagacgatgcctgagatcagagtcacgcccttggatgccatggacaatattaccaggcagaac

SEQ ID NO: 626360 - DNA, 75 bp, Homo sapiens
ggcggccagaatgttcctggagccccagccaccctgaagggtcccttcccaagcccttagggaccgcagaggact

SEQ ID NO: 626361 - DNA, 75 bp, Homo sapiens
agctgagcctgccacgccgaggacgtggatcctggtgtatagcctggaagcaggacgccgcctcttgaagctggg

SEQ ID NO: 626362 - DNA, 78 bp, Homo sapiens
ggcgccccggccgaggtggcggcggctcctcagaattcaattcgtcataatctgtccctacacagcaagttcattcgt

SEQ ID NO: 626363 - DNA, 74 bp, Homo sapiens
gcagtggtcgcttcttctccttggttctctacttaaaagacaatgactactgatgaaggtgccaagaacaatga

SEQ ID NO: 626364 - DNA, 90 bp, Homo sapiens
tttcgactttgatggcactcctaggctctatcagactgacccctcgggcacataccatgcctggaaggcgagcccacaccttaaccgtgc

SEQ ID NO: 626365 - DNA, 100 bp, Homo sapiens
acagcctctaccttgcgagccgtcttccccaggcctgcgtccgagtctccgccgctgcgggcccgctccgacgcggaagaagatgcaagtggaccaggag

SEQ ID NO: 626366 - DNA, 82 bp, Homo sapiens
cccaggagtcatcggacgccagaatctggacaaggaagatggggagccaaagaccaagcatctcagagaagaggaggaagaa

SEQ ID NO: 626367 - DNA, 76 bp, Homo sapiens
tatcatgctggccaagaagatcatcattaaggacggaggcacgcaatgtctcaggctgtgcagacaaacggaactc

SEQ ID NO: 626368 - DNA, 100 bp, Homo sapiens
atgacttgggtcacaaggaagctgttgcaaatagcgtcaagaagggttggattgagattgttggatgtgctgatcgttcctgttatgacctctcctgtca

SEQ ID NO: 626369 - DNA, 82 bp, Homo sapiens
cggcggctgctgctgctgctgacgctgctgctgcccggcctcggggttttgggatttgagattgacgcggtgaactctgtcc

SEQ ID NO: 626370 - DNA, 50 bp, Homo sapiens
atctattccaccgtgttctgggtgttccccctcccctccctggggcagca

SEQ ID NO: 626371 - DNA, 83 bp, Homo sapiens
cgggacaccctggaagccaggaaatgactgtgccctgtccacggtgcctcctgcatgtcctgctgccctgagctgtcccgagc

SEQ ID NO: 626372 - DNA, 80 bp, Homo sapiens
aaagaatccaggacaaaaaggattaggttttcctttggaatatggataaatacaccatgatacggaaactagaaggacat

SEQ ID NO: 626373 - DNA, 74 bp, Homo sapiens
agggcagccgtgcccatttccccagggcatggaggcagaggaacgaggacgcctgaaggaagagctggaagagg

SEQ ID NO: 626374 - DNA, 50 bp, Homo sapiens
cgttagtgaagcgcgcccggcgtcacggccctcgggaccaaggatcacgt

SEQ ID NO: 626375 - DNA, 100 bp, Homo sapiens
gcaggagctcatgtggcctgcggctcctgtcgcctgtatagtgaccaaagatggagtctatgtccttgacttggcggccaaggtggacgccactgccgac

SEQ ID NO: 626376 - DNA, 83 bp, Homo sapiens
attaccaaacagaatggacaagcttaataaaataaccgtccccgccagtcagaagttgagacctgcctagagctggaacgtta

SEQ ID NO: 626377 - DNA, 78 bp, Homo sapiens
cgtttttgaaaacattgccaaaccagttgctgggaggtcacgagaagagaatgccttctagatgcaaaatcacctcca

SEQ ID NO: 626378 - DNA, 90 bp, Homo sapiens
gtttgtcaaggagccctcctttgattggaaaattttgactaaaggagaagttcaagtatcagataaagacacacacaactggagcagatg

SEQ ID NO: 626379 - DNA, 100 bp, Homo sapiens
aggcttccagtgggcacatgtggactgcccaagaagttcgtggacatctttcagcagactcctctgggcaggtttcttgcccagctccatggagagccgc

SEQ ID NO: 626380 - DNA, 100 bp, Homo sapiens
ttgaggatgagccacctttattagaagacttgatcctgctccctcggtgtctgcattgactcctcatgctgggactggacccgtcaacccccctgctcgc

SEQ ID NO: 626381 - DNA, 75 bp, Homo sapiens
gcgccgcgccctcggcctgcacgggttgatgataattagaagcatgctttccactgaacttcccgacaacatttg

SEQ ID NO: 626382 - DNA, 83 bp, Homo sapiens
cgcgtgcctatgagcctcaggagctgaagccctttgtgactgcaatctcgagggacatgccacccccgttttaggagaacttg

SEQ ID NO: 626383 - DNA, 103 bp, Homo sapiens
gctgctgatcgtcctgctgctgatggtgtgcgggaaaagcagttacaaagtttccaaccagcacaaattccatagtcaggttttccacatgtggggaaatgac

SEQ ID NO: 626384 - DNA, 88 bp, Homo sapiens
cccagacaagtccccagggaatgccacagcatcctccagcacctcaggatgaaaactttcggaagagaaagttgcctgtggtaagttc

SEQ ID NO: 626385 - DNA, 96 bp, Homo sapiens
cgggatcgtgaccgagaccgtgaccgagagcgtgaccgagagcgcgaatatcgtcatcgttagaaggtcctggacccaagccagaagcctctgcaa

SEQ ID NO: 626386 - DNA, 87 bp, Homo sapiens
agaaaccaatgaattccaacaacttcaaagtaaaatcagtttaatttcagaaaagactcctgggagagttggctctcaaggttctga

SEQ ID NO: 626387 - DNA, 100 bp, Homo sapiens
cggaatgctgcccgatggccctgggtcctcgctgtggggcaatccgggcttgcagacgagagttgcatgctgagaatttgaaaaatgaagatgatgtaga

SEQ ID NO: 626388 - DNA, 75 bp, Homo sapiens
acatgttcctgaaccagtatgaggaaattgcccggcatttacgccctggaactctcagagcaatctttggtaaaa

SEQ ID NO: 626389 - DNA, 73 bp, Homo sapiens
cgatgagggccattgcactgctaagatttggagtccaggaatgagactaagcatttatctgtaggaaaagata

SEQ ID NO: 626390 - DNA, 100 bp, Homo sapiens
cggagccagcggctgaggaggggccccagcagcccccgaaggccctatcaggacatggagtatgaaagacgagaggccccaccagcagaaggccctcacc

SEQ ID NO: 626391 - DNA, 90 bp, Homo sapiens
tagaggacgtgttagacaagttcatgagccgggggccatcaagtataagaccacaggaccacgtgattcataaagaactactgtcaaaac

SEQ ID NO: 626392 - DNA, 103 bp, Homo sapiens
ctcctgcctcagcctccagaatagctgggattacagagcaaacgaggcccctgagagctccacctagttcacaggataaaatcccacagcagaactcggagtc

SEQ ID NO: 626393 - DNA, 75 bp, Homo sapiens
ggcgccgagcgcagacccgagagagccccacagtcttcgttataacctcacggtgctgtcctgggatggatctgt

SEQ ID NO: 626394 - DNA, 74 bp, Homo sapiens
gattccaagtaactcttatttgtgatttgccttcaaggaaactggggagtcagaaaattgggaactcatatcaa

SEQ ID NO: 626395 - DNA, 100 bp, Homo sapiens
ccggggctatggctgtgactctggacaaagacgcttattatcggcgagtgaagagactgtacagcaattggcggaccctacagcttggggcctgggctcc

SEQ ID NO: 626396 - DNA, 98 bp, Homo sapiens
ctgaaaatgtcaaggcatgaaatccaaggttctcctgaaaagaaagctgaacattcatctataaatcaagaaaatggcactgcaaaccctatcaagaa

SEQ ID NO: 626397 - DNA, 51 bp, Homo sapiens
atcagttccttgatgagctcatggaggtgaataagtctgatgacacagcag

SEQ ID NO: 626398 - DNA, 100 bp, Homo sapiens
gagccgggtaccggccgtggaagcggccaccgactactgtcagcagctgtgccagggagaagcaggatcccctggtgctccggggcaggatggaacacgg

SEQ ID NO: 626399 - DNA, 100 bp, Homo sapiens
agatgaaaaaacaaaaggactgtgggattccattaaaaggtgaccattgtgaggtagatattttgttctaattttccagatgaggaagctgagaccctaa

SEQ ID NO: 626400 - DNA, 100 bp, Homo sapiens
tcttcgaaacctgctataaccccaaagcaagatgagaagatgaagtgaatttatggattctggtttttctgaattttcaaagcataaggaatcaaaacag

SEQ ID NO: 626401 - DNA, 100 bp, Homo sapiens
cacaaatcctctccgcagcccttggtggccacacccagccagccatcccaggcctcaggacctgagttctccgacgcccacatgacatggctgaactttg

SEQ ID NO: 626402 - DNA, 82 bp, Homo sapiens
acggccgatgcagctcttccaaagctaaggctgcctctaagaatcaaacttcactcttgggagaaccaccaaaagaaattcg

SEQ ID NO: 626403 - DNA, 83 bp, Homo sapiens
taaatatccaaggccacaaacagttaacagattgtatctcggaatttttgaagatggggacacctgtcacaagctcaagtaca

SEQ ID NO: 626404 - DNA, 83 bp, Homo sapiens
ctaacctactatgagggtcgagcagagtttccagagatgaatgatatgctgagagaaaaggtaactggaagaaaaaccgattt

SEQ ID NO: 626405 - DNA, 75 bp, Homo sapiens
ggaaaatcatattatagatggagtaaagttgaacaagagatttttcaatcaagactttggaactacgaagatgga

SEQ ID NO: 626406 - DNA, 50 bp, Homo sapiens
ctctccagtagctgggactacagagctgcagccacgtgactgttgtggac

SEQ ID NO: 626407 - DNA, 116 bp, Homo sapiens
ttgaaacttttatctcatctggcttggcgcctgaggttctcccattaggtatcgagaaccttccctgcgaacttcagaggaacttccagctgatgcgagagctggaccagaggacg

SEQ ID NO: 626408 - DNA, 75 bp, Homo sapiens
ggggaggcgaggccggacgcacctctgtttgggggtcctcaggtatgctatacctccggagcatggaaaacgact

SEQ ID NO: 626409 - DNA, 109 bp, Homo sapiens
tgcttagacgggcaatttggaactatattcactgcatgtttggaataagtcaaagaagtttggcagagatcacggagctaattcatattgctctccttgtacatcgtgg

SEQ ID NO: 626410 - DNA, 51 bp, Homo sapiens
gtgtctgtctgctgcaaggagaggaacggagtcttgctctgttgcccaggc

SEQ ID NO: 626411 - DNA, 82 bp, Homo sapiens
cagattcgcagtggtcgcttcttctccttgatgttcaagcaaatgctttcagaaaagcaaaccaaatgggagcattacaaga

SEQ ID NO: 626412 - DNA, 101 bp, Homo sapiens
aatgtggatcaagcaggttttaaatcaagatttaacattccaacacataaaaattatttatccaacagctcctcccagatagcatagaagccaatgtggaa

SEQ ID NO: 626413 - DNA, 98 bp, Homo sapiens
agcaagaactgattaccgagccattcaactagccaaggaaaaaaagcagagaggagcggggagcaatgcaggaaggatctgagtctctccctgcggag

SEQ ID NO: 626414 - DNA, 98 bp, Homo sapiens
ggttgagtaccaaacagtccagagactcatccccgccctgtgggagaagcacagtccacagatatcagacaccccgaagaactttctctcttaaagaa

SEQ ID NO: 626415 - DNA, 100 bp, Homo sapiens
tcctaaagaaaatcatttgtgatgggtcagctagtatgcaggctaggcaaactggctttgaagactgcttggtatttgatgagttaatggataaattcag

SEQ ID NO: 626416 - DNA, 82 bp, Homo sapiens
gaagagattcagccagcacactcctcgcgagcaagctcattgctatggacagtgctatcaccctgtggcagttccttcttca

SEQ ID NO: 626417 - DNA, 87 bp, Homo sapiens
acaaggaaccgtcaagggcagtcatcagatccaccatctgcttcaacgatacgggaatatgaatggattcattcccaaaccaaaaga

SEQ ID NO: 626418 - DNA, 75 bp, Homo sapiens
tttttgccaccaatcccttcgatcaggatgttggagaacctccatttctaccagaatcctttgaccgaattcttc

SEQ ID NO: 626419 - DNA, 100 bp, Homo sapiens
tggaactgtgtttgggagcctcatcattggttatgccagtgtgaagcctcagtttaggtcatctggtggttcagaacactcaacagagggctctgtatcc

SEQ ID NO: 626420 - DNA, 100 bp, Homo sapiens
gagaggatgaggagggaaaagaggatgggagagaagaaggcaaagaggatccagagaaggggggagcagggcgaggacggcaaggctgaggggccccctg

SEQ ID NO: 626421 - DNA, 100 bp, Homo sapiens
gcacatgagtgcagctgctgcctcccgagatatcactctgaatgcaagttctagccggtttttcctacaaggaatccagttgaatacaattcttcctgac

SEQ ID NO: 626422 - DNA, 100 bp, Homo sapiens
tttggggtgtctacttctctgtggaagtattacactagccctgggaaatgcacagaaattgccaaaaggacgtggtgggtcctctggtgcgaaattccgg

SEQ ID NO: 626423 - DNA, 75 bp, Homo sapiens
gggccacaccatttgccgtggccaggctagaggagctgggctggtgatgaaggtcaagcaggagaagccggagcg

SEQ ID NO: 626424 - DNA, 74 bp, Homo sapiens
aagagctttctctccaaaatccccagtgtcgtcacagcggacaaggcaaaatctcagcaagttcggacctctag

SEQ ID NO: 626425 - DNA, 75 bp, Homo sapiens
cgctcacccgtggaaagtacaggtcctgacagctgaacattgatgatggcacctcagatcgcccctacagccatg

SEQ ID NO: 626426 - DNA, 96 bp, Homo sapiens
actagcctacctacattctcatgcattgattcatagggtctccgtctctccaccgggggcttcatccttccagggaggagaagagggactccagaa

SEQ ID NO: 626427 - DNA, 98 bp, Homo sapiens
acggccgccagcaccagcaggtccctggccctcatgtacgagtccgagaaggttggggtcgcctcttccgagtcattcccaacatagcaccgcaactc

SEQ ID NO: 626428 - DNA, 80 bp, Homo sapiens
actactttgactactggggccagggaaccctggtcaccgtctcctcagggataccaataactagtgcctcgtactacgcg

SEQ ID NO: 626429 - DNA, 100 bp, Homo sapiens
ctggagcaagctgaaaataccatcaggaagctccagcaccaacaacaatgggctttaccctctgaacttctgatcgaaggtcatccctctccagcttgag

SEQ ID NO: 626430 - DNA, 75 bp, Homo sapiens
tcctggtgcagtggaagcagaggcacccacgctcctacaatggacagacatggctcagcggatgacaacacagct

SEQ ID NO: 626431 - DNA, 100 bp, Homo sapiens
gaggcacagaatgagggcccggctacagagtcagaggccccgctgatgtatgtccctgggaagctgcatgatgtggaacacgtgctcatcgatgtgggaa

SEQ ID NO: 626432 - DNA, 50 bp, Homo sapiens
cccagttccaaagtgtcttaaaggtggattcgaaggtctcactaggcatc

SEQ ID NO: 626433 - DNA, 75 bp, Homo sapiens
gtgcagaaaggaatcaaaagaatatttagaatgcaggatggagaggtagaacgtcatgacatgaataccttaagc

SEQ ID NO: 626434 - DNA, 50 bp, Homo sapiens
aaggcacaggaagaagcttgcagcaaaactggttgaacagcggatgaaga

SEQ ID NO: 626435 - DNA, 82 bp, Homo sapiens
ctgccccgccggctgggtgggcgagcaatgccagcactgcgggggccgcttcagccgtgtggttttgccatgttctgttcag

SEQ ID NO: 626436 - DNA, 90 bp, Homo sapiens
ctgtccctgatcgagcggcgggagcgaggtgcggccgggaacttcctgtgccccgctggcgccttgtccttcaacgccttcaagaccgtg

SEQ ID NO: 626437 - DNA, 101 bp, Homo sapiens
tgaagacttaaaagatatattacatgctgcaaagcagatagatttgctttgaggtcacattgatatgaaatatggagtcaccttttataacttcacctggg

SEQ ID NO: 626438 - DNA, 100 bp, Homo sapiens
gtgggcatggcggccggggcgctcttcggcaccttttcctgtctcaggagaataaaggcagccccgttgatgactgaaaatgacaaagcatccacctaac

SEQ ID NO: 626439 - DNA, 75 bp, Homo sapiens
aggctcaagaagtattttttttaaaagccacaagagtgcatttgaaacgccactttatgtttcgaaaccatctct

SEQ ID NO: 626440 - DNA, 75 bp, Homo sapiens
gctggtgcagccaccctcgctccctctgctcttcctcccttcgctcgcaccatgagccgctcccgaggccccggc

SEQ ID NO: 626441 - DNA, 100 bp, Homo sapiens
gacggataagagatattgatctgaaaagaggctttggttttgtggtgtaaacgtcctacttcggggcaacttgccagagatagaagagagtacagatgaa

SEQ ID NO: 626442 - DNA, 71 bp, Homo sapiens
ttgctctcagaattaaggaatgagattcaaactctgcgagaacaagaaaaaactcaggctgtggaactctg

SEQ ID NO: 626443 - DNA, 95 bp, Homo sapiens
cacctcggggacattattgcgcgtggaacggctgcttttggaaggctccctggggaagggaatgcagggttgctggggctgggcccagaagcagc

SEQ ID NO: 626444 - DNA, 100 bp, Homo sapiens
ggacagcgttcggtgctgtgtgccggcgcctctggcagaatgatgtctatgaatgggctcgtgaccaccgtgcccaccacaagttttcagaaacacatgc

SEQ ID NO: 626445 - DNA, 74 bp, Homo sapiens
ccagaagcgggcggcgcgggggagatggtgtggggatattcagctttgccaggtatggcagtgatttttatagc

SEQ ID NO: 626446 - DNA, 99 bp, Homo sapiens
accgccgccgccggggccgggccccctcgccgctgccccgggaaggagggtttccaggcctgaggtgcccgccctggccccaggagaatgaaccagccg

SEQ ID NO: 626447 - DNA, 75 bp, Homo sapiens
acgccatgtcgggttattcgagtgaccgagaccgcggccgggaccgagggttactcactataaacaatatccacc

SEQ ID NO: 626448 - DNA, 100 bp, Homo sapiens
gggacgcgggggaagtggcggcgccggcagcggacagctcggacagcgcccagggccggagcccgagcccttggaggtgtagagaggagagagagtgaac

SEQ ID NO: 626449 - DNA, 88 bp, Homo sapiens
gctgagaataatggcccggttggcccgggacgagtggaatgacgcaaacatgcagatctttgtgaagaccctcactggcaaaaccatc

SEQ ID NO: 626450 - DNA, 101 bp, Homo sapiens
gcagaagggacgtgagcccagccgaggtaccgctgaagaggaatcaattttgttccagaaagctgagtctgatctggattacattcaatacaggctggaat

SEQ ID NO: 626451 - DNA, 82 bp, Homo sapiens
cgagctgtttctcatctttatactcttccagattattttcgaaataccagtatttcgactccagggggatgttcatttctat

SEQ ID NO: 626452 - DNA, 98 bp, Homo sapiens
ggaaagaaaggaggcctagcatgttcgagaaggaggcagtagaagaccatgatggagaaggtgatgtggctggagatgatgatgatgacgatgatgat

SEQ ID NO: 626453 - DNA, 100 bp, Homo sapiens
gcctccaatgaacagtatgcggggtggtctgccaccccgtgagggcagaggcatgccaccaccactccgtggagctttggtgtcatccccagcactcctc

SEQ ID NO: 626454 - DNA, 75 bp, Homo sapiens
gacagaactggttcagcggagaataacatatcttcagttaatgaaggagttcccccttctgagtatgttcaatat

SEQ ID NO: 626455 - DNA, 50 bp, Homo sapiens
aaattccttgacatactccaagaataagcatttaaatcaaacggtattga

SEQ ID NO: 626456 - DNA, 113 bp, Homo sapiens
gaacgagacttttctcagatgttggatatttgcttggaaaaacgtgtgggtacgaccttgtgcctccggagccagcgtggtggccatagacaacaagatcgaacaggccatgg

SEQ ID NO: 626457 - DNA, 75 bp, Homo sapiens
aaaagaatgatgttgtccttaaacaacctacagaatatcatctataacccggagtgagctgagtcgacagaaact

SEQ ID NO: 626458 - DNA, 75 bp, Homo sapiens
gcccacctgtgtcctggttgagggtctccagggttctttggggcccgagccataaggatgagtttaccattattc

SEQ ID NO: 626459 - DNA, 100 bp, Homo sapiens
gaggatgcggcccagtttgccgccggcatggccagtgccctagaggcgttggaaggtggtgttcccactgatgaagagcaggcgactgggttggagaggg

SEQ ID NO: 626460 - DNA, 75 bp, Homo sapiens
tggatattcaaaatgttcctctatcagaaaagattgcagagtgtttggatgcttaaagaagattatttgaagacg

SEQ ID NO: 626461 - DNA, 75 bp, Homo sapiens
ccgtgaatcattcctgcagatgaaaaagtgtgacttggcagctgacccaagtcttggattgaggaacaggcaatg

SEQ ID NO: 626462 - DNA, 100 bp, Homo sapiens
cagaaatagcaaacttcatgcagctggtggaactagatgtgtctcgaaatgtgttgacctaaccaatgaagaaacaactgattccaccacttctaaaatc

SEQ ID NO: 626463 - DNA, 100 bp, Homo sapiens
gagcgttacaaggccttctacattaccggtgagggtgacctgaataaagtggctgatgcctgcttgatttacctcagtgtcaaacagcccgtgaaattac

SEQ ID NO: 626464 - DNA, 51 bp, Homo sapiens
tcagcaagaacgggaacaaaactctgtactttggaagtgttgctgaaatca

SEQ ID NO: 626465 - DNA, 82 bp, Homo sapiens
ctcagacgctggcgggcgcagtttctcacgacgggccgagcctgccactagatccgagaggccttcaaggtgtttgaccgtg

SEQ ID NO: 626466 - DNA, 82 bp, Homo sapiens
tcatcagcgagactctgcggcgcatggaggaggaggaggtgcaactgacatgggtgaaccccagggatccatgcggattcta

SEQ ID NO: 626467 - DNA, 83 bp, Homo sapiens
ctttggcttctcgactcggtcctgtttcgacagcgaacatgtcgcggcctgtcagtcttgaatccagataatagttttgaaat

SEQ ID NO: 626468 - DNA, 100 bp, Homo sapiens
tctccaatgccaaccaacctgaacagagtgttgcggagataggaacatgggagagaaacaatctgggtaacatgaaagtgatgctggttgctaagggaag

SEQ ID NO: 626469 - DNA, 75 bp, Homo sapiens
tggagtcaaggcttgaagatttctatgcaggaccccaaaatgcaggtcctggatgcctcatcccttagtttcaac

SEQ ID NO: 626470 - DNA, 100 bp, Homo sapiens
tgagtggttgtgtggtcgcgtctcggaaaccggtagcgcttgcagcatggggccaaaccagtgctcctgccacctctctggctgccccctagagcctgcc

SEQ ID NO: 626471 - DNA, 98 bp, Homo sapiens
ttcaaggcaagaccgaattcagaaggatatcgacgtcgtgatccagaagtccagagctgaggactgcctgtttgcagaacatccagtcatggataaaa

SEQ ID NO: 626472 - DNA, 50 bp, Homo sapiens
caggctagaagagctcgatgagagtacttgatgcagcacatcatcgacac

SEQ ID NO: 626473 - DNA, 98 bp, Homo sapiens
gttgaagttcaagagctcagaccctaaactaaaagaagtcttcaggaaacagctagagaaggcagaatatgaaataaagaagactacagctatcattg

SEQ ID NO: 626474 - DNA, 75 bp, Homo sapiens
gcccttcgagatcttgctgtggtagatgccaaagatgctatcaaaatggatgataagacagtttttcatgaggag

SEQ ID NO: 626475 - DNA, 100 bp, Homo sapiens
ttgtacagagatgtgatgttggagaactatagcaatctggttttcttggaaagggctattgcaagacacgaagtccgagaaattgagcagcgacatacaa

SEQ ID NO: 626476 - DNA, 100 bp, Homo sapiens
gggaaatttcctatcgcacgtctgctgcagcagtctcctgtttctcctcctaccttctccatttttctagtccctgcagatggacgacgaagacacgttg

SEQ ID NO: 626477 - DNA, 100 bp, Homo sapiens
tacaagggacaccatagcctctcaccctaaggggcctgcttccgcgaggccaacatcccaacccacttcgggagaagaaccgacaggtgaacgagctggt

SEQ ID NO: 626478 - DNA, 75 bp, Homo sapiens
ggggtccgatggttctcgaaggcccgcggcgccccgtgctgcaggagagcacagaatggggattcaacacctcgg

SEQ ID NO: 626479 - DNA, 83 bp, Homo sapiens
gaataccactattccaaccaagaagagccaggaagccagttgagggaagttctccatgaatgtacgtcacaatgatgatgacc

SEQ ID NO: 626480 - DNA, 83 bp, Homo sapiens
tctgacctccgcgcgacgtacccgccgccgccgttggctggagcttgcgcgatctctggcctcttcaactgcatcaccatcca

SEQ ID NO: 626481 - DNA, 100 bp, Homo sapiens
gggcagacggattcatttagagctgcggaacaggacgccctctgatgttttaaaatcaaagatgggaaaatcggagaaaattgcccttccccatggccag

SEQ ID NO: 626482 - DNA, 95 bp, Homo sapiens
cccaatctggtccctctgaacggccaggacctccgcagagggccctgctggcacgaggcactaaggccaaaagccagttcaagcggcggtcaaca

SEQ ID NO: 626483 - DNA, 80 bp, Homo sapiens
cgaagagacagctggatgaattgcccctcgccatggcctgcagagtctcgggaaagttgccattgcccggcgtatgccac

SEQ ID NO: 626484 - DNA, 85 bp, Homo sapiens
cgacctccggaggccggcgtgacaggctctgtcactaaaataggatgatcaggatggtagtcaaggtctgggcaagagaaaaagg

SEQ ID NO: 626485 - DNA, 100 bp, Homo sapiens
aagcagttgctaacccagtgggacaggcggattggaagagcgggaaggtcctggcccagagcagtgtgatctttgtagaatttgatggctgtaactggaa

SEQ ID NO: 626486 - DNA, 51 bp, Homo sapiens
gagcgacttccaggatatagccctggagactggacgtgtggacaagaatgc

SEQ ID NO: 626487 - DNA, 100 bp, Homo sapiens
aagagttgattgaaattatctctggtgctgcagctctctattttgaagatgaggaagaagattctagcaacgttgatttaccttacattcctgctgaaaa

SEQ ID NO: 626488 - DNA, 100 bp, Homo sapiens
cctccattggatttaaaagacagtcctcgtcagcactgactttcagctatggaatcggcagcagtgaggatgccagagttcatgggtttctagaagacaa

SEQ ID NO: 626489 - DNA, 75 bp, Homo sapiens
ctcccgagaagctggtactacaggcatttgcatcaagtgtgggcttggcatctacggagcccagcaggcgtgcca

SEQ ID NO: 626490 - DNA, 101 bp, Homo sapiens
gtcctgatgagctcattgagagaaccatgatggtcaattgccatgcacacttctgggtgcataagctggagcctgaggcgtggaaacacgtggaagccgta

SEQ ID NO: 626491 - DNA, 100 bp, Homo sapiens
cagccatggtggcctggcgctcggcgttccttgtctgcctcgctttctccttggccaccctggtccagcgagacttaattcagtgcacaaatgagatgaa

SEQ ID NO: 626492 - DNA, 80 bp, Homo sapiens
gattccaagtaactcttatttggacaaggagtagatgaacctctttcagaaactggatttaaacaagcagcagctgctgg

SEQ ID NO: 626493 - DNA, 51 bp, Homo sapiens
ctgacctccggcagatgtttgggattattgtggatgatgatgacagtaaga

SEQ ID NO: 626494 - DNA, 83 bp, Homo sapiens
aaggaataaccttcatcaagttttatgctccatgattatgtctggccactacctagatatttgtgccccgtctggatttcttt

SEQ ID NO: 626495 - DNA, 75 bp, Homo sapiens
ctgtgttctgcgtggggacggccgcctagagtggttcagccacaaggaggcgggatgtagctcattttgggatac

SEQ ID NO: 626496 - DNA, 75 bp, Homo sapiens
tggatggtgaagagagagctgacaaaaggcttgtgctcaggctccaactattatgtgcgcatcctgagcaccatc

SEQ ID NO: 626497 - DNA, 75 bp, Homo sapiens
ggctgggctggcggaggccttgctgatgaacctgactgaggtatttcaggacagccaggagggggcgcacatccg

SEQ ID NO: 626498 - DNA, 95 bp, Homo sapiens
ctgtgactgctatgcaacagataaagtttgtagtatttgcctttcaagagattccttattagcaagtttgctggatggagtaagagcctctggta

SEQ ID NO: 626499 - DNA, 100 bp, Homo sapiens
gactggggacctgtcccacctggcggccatcgtcatcctgctgctgaagatctggaagacgcgctcctgcgccgagttgcatgctgagaatttgaaaaat

SEQ ID NO: 626500 - DNA, 90 bp, Homo sapiens
tgatgttagagaactacagaaacctgatcttccttgaagctgccagtaactcagattctagccatgaaggtcaagaggaatcttcaaagg

SEQ ID NO: 626501 - DNA, 88 bp, Homo sapiens
tgcaaatgccaaaggaattggttatccaggcgcttcctcccatcaacacagtcggcggagacaaggttggctaaaggagatccgaaag

SEQ ID NO: 626502 - DNA, 90 bp, Homo sapiens
aaatggcgggcagccaaggcaggcgagaagaccatctctgtggtcctacagaaacctgaatagagtcaccttgtaataactgggaactct

SEQ ID NO: 626503 - DNA, 97 bp, Homo sapiens
tctgtcccagctctgcggcccagggggtgacgtgatggcggcagcggtgctgacggaccgggcccagctgccccagagcacatcagctatgtgcccc

SEQ ID NO: 626504 - DNA, 96 bp, Homo sapiens
caccttttgtcaattccagaatacaaagaatgaggggagaatcatacttcatcggaatgaggagcccagggcagcagggacacgtccctgaagatg

SEQ ID NO: 626505 - DNA, 83 bp, Homo sapiens
tttacataaaaatggctgagtgtcttgtcatgctagcactgcattaagtgatgcatacagcaatcccacagagtattgatgag

SEQ ID NO: 626506 - DNA, 74 bp, Homo sapiens
ttgaacaaactcgaagaacagctgtggaaagaagttgcaaaacactggacaaatttacatgtattggagaccag

SEQ ID NO: 626507 - DNA, 85 bp, Homo sapiens
gctgcctcacccacagcttttgatatctaggaggactcttctctcccaaactgttgaaatcacaaagattagacacctttttaga

SEQ ID NO: 626508 - DNA, 114 bp, Homo sapiens
gggagcatagctgctacactgaagatgaagcaaggcccaatgacccaggcgctctattatcaagtcctaaattttggaatgattgtctcatcggcactaatgatctggaagggg

SEQ ID NO: 626509 - DNA, 100 bp, Homo sapiens
taactgagtatctggaaagagttcaagctctacattcagcagggcaattgaaggaacagactaaaaatcgtgtcctggaaggaaactacaggtactacca

SEQ ID NO: 626510 - DNA, 74 bp, Homo sapiens
cccggtgcaagaggcgcaaacaagccaatcccaggaggaaaaacgcagcccctgtcaaagggaacaggaagcag

SEQ ID NO: 626511 - DNA, 90 bp, Homo sapiens
ctgcatggagcaagtctgtcagcaccatctttctaacagattccacgcagaacttggaagacagagaagttttgaatggtgtacagacag

SEQ ID NO: 626512 - DNA, 104 bp, Homo sapiens
ggcccaggtctccgtgcagcccaacttccagcaggacaagggcagcctgtgagcagcaagctgtggctctgactctgcaggaggacagagcatccctgacgctt

SEQ ID NO: 626513 - DNA, 88 bp, Homo sapiens
ccgccgagaacgagctgggagtggtggtagcccacagtgagtcaggtgaccaagaatatggcccaggtgaccaaagccctggacaagg

SEQ ID NO: 626514 - DNA, 82 bp, Homo sapiens
atcaagatatcggagaaccggatatcccagcagtatctggctacccttgaaaacaggtccggcctctttggcctacccccgt

SEQ ID NO: 626515 - DNA, 100 bp, Homo sapiens
ccgagaccgtgaccgagagcgtgaccgagagcgcgaatatcgtcatcgttagaaggtgaaattgcactactgatgaatcgtcctcgtgctgccacagttg

SEQ ID NO: 626516 - DNA, 82 bp, Homo sapiens
aaaaacacaataccaggcatacatttggcagaataaatgaaccagatggaatctcactctgtgagtctcactctatcgccca

SEQ ID NO: 626517 - DNA, 82 bp, Homo sapiens
caaagggaccatgcggaggatggcgctgtccatgatcgagttttttattggcacctcagtctcaacattttcttttcggatt

SEQ ID NO: 626518 - DNA, 82 bp, Homo sapiens
ccagaacttggaatactctactggacaaacatttcctccaagcgtggggtagagcagcggctgccatgctcttctgtggctt

SEQ ID NO: 626519 - DNA, 100 bp, Homo sapiens
tcgaaaggattggattggcatctttagagctcatgctgaagattcggttatggaccatcatttccggaagccagcaaatgatataacgtctcagctggag

SEQ ID NO: 626520 - DNA, 83 bp, Homo sapiens
gaaggattaaaagatggtcatcagagctcccatggagacattttttcacacaacgtgaactagaagagtggcagttgcagcaa

SEQ ID NO: 626521 - DNA, 97 bp, Homo sapiens
aggattctcgctgtgacagagacaacaccgagtatgagaagtgccgtaacctctcatttcctgacagcctgccagaggtgagcatcgtgttcatctt

SEQ ID NO: 626522 - DNA, 75 bp, Homo sapiens
gccgtgcctctgaggaccctctgctgaacctggtgtccccactgggctgtgaggccaaacgtaccaagaaagtcg

SEQ ID NO: 626523 - DNA, 74 bp, Homo sapiens
gggcatggatatctctactcgctccaaagaggtcatgacgccagtcagatcacactagccttgggcacagctgc

SEQ ID NO: 626524 - DNA, 75 bp, Homo sapiens
gggatcccggccaccagcaattgtccgaattcctagaggacctgtgcaacaacctcttgaggatcgaatcttcac

SEQ ID NO: 626525 - DNA, 75 bp, Homo sapiens
cgggcgcgcgcaccatgggggagaaacccgggaccaggtctgtggctcaggacatccccaagctgcagaaactag

SEQ ID NO: 626526 - DNA, 95 bp, Homo sapiens
ctgccccagccccccatctgcaccattgatgtctacatgatcatggtcaaatgcatccgtgtcattctggaccttactcccaactaccggggtga

SEQ ID NO: 626527 - DNA, 50 bp, Homo sapiens
gtttttcaaagcctaccaaaatctgtccccagtctatgtgaggatctcct

SEQ ID NO: 626528 - DNA, 75 bp, Homo sapiens
caagaacttgaatacttaacagattctgaaaaagagttccacgtcctcccttatcgagtctttgttccccttcct

SEQ ID NO: 626529 - DNA, 98 bp, Homo sapiens
gggagacgctgcctcggcccggacgcgcccgcgcccccgcggctggagggtgatcctggttagataacaatgggaaaagtgctgttaaaaagctaaag

SEQ ID NO: 626530 - DNA, 75 bp, Homo sapiens
gccgccctcgcaacctggcagccgccgccgtggaagccctgtatgatgagattcgtcagtttcgcaaggcctgtg

SEQ ID NO: 626531 - DNA, 100 bp, Homo sapiens
gggagctgctctcaggctgcgtgtcagaatggcggcagtggagcatcgtcattcttcaggattgccctactggccctacctcacagctgaaactttaaaa

SEQ ID NO: 626532 - DNA, 96 bp, Homo sapiens
actccttgtacctcctgcaacccagaaccctggctgaccactttgaaggaggatgctccagcagttttcctggaaccagaaacattggatcttttc

SEQ ID NO: 626533 - DNA, 98 bp, Homo sapiens
tgggcttgtccttgctggtgcatgcgtcgtcggcctctgggcagcaggcatggaagaggagatggttcgtgttacgcagtggccgtttaactggagat

SEQ ID NO: 626534 - DNA, 100 bp, Homo sapiens
tccatagatcatcaaacttcagttcagcaacttccagaaagtgaatggcttggaggaaggcgtggagttcctgccagtcaacaacgtcaagaaggtggaa

SEQ ID NO: 626535 - DNA, 50 bp, Homo sapiens
agggcaagcactctgacagtttcctggtccagaactttacacagaaaagg

SEQ ID NO: 626536 - DNA, 100 bp, Homo sapiens
acatgcagattatatcgcatcctatggctcaaagaaagatgattatgtctatagtaaagagatgtggcatctgatgaaaaggaagacaagaagatgcggc

SEQ ID NO: 626537 - DNA, 75 bp, Homo sapiens
aactggaaaaacatccactattttggcagcagctagagaactctttggtacctttgtgttggatgaatttaagcg

SEQ ID NO: 626538 - DNA, 73 bp, Homo sapiens
gacgccgggatccgaggtgccgggtgacaaggccgccgaggaacaggtgcacgatctgattttctggagagat

SEQ ID NO: 626539 - DNA, 73 bp, Homo sapiens
ggaacagccacagcagcctcccaaggagtctgcaagttgaactcgacattgacgatcgaggagtttcattcca

SEQ ID NO: 626540 - DNA, 75 bp, Homo sapiens
cggcccggcgggcgactggacggccggacaggaactggcccaaataaggaaggaggaaaaagagaagaaaagacg

SEQ ID NO: 626541 - DNA, 76 bp, Homo sapiens
aatatgttctagcaagacggcgcttggtgaagcttggatttacactgggcaacgtggttggaatgtatctggctca

SEQ ID NO: 626542 - DNA, 90 bp, Homo sapiens
gacatttttcttccttctgtcacatcacacccaatgaggtgctgatactcaaagaaggtttaagttgtctgatctctctataaattccac

SEQ ID NO: 626543 - DNA, 100 bp, Homo sapiens
ttttcggaaggcggctaagtcccggcagcgggaacacagagagcgaagccaggttgtttacattcagagctctatcaataagaggaatacatattacagt

SEQ ID NO: 626544 - DNA, 83 bp, Homo sapiens
gctatgcagctatcgtggacgtcactggccctggtggggattgacagccacgggaagatcaggatcctcatgaccagccaaag

SEQ ID NO: 626545 - DNA, 75 bp, Homo sapiens
tgggccggagaaatgggcttcacctccccagagagactcaggaagtaccagcgtggctgccgatctttggctgca

SEQ ID NO: 626546 - DNA, 82 bp, Homo sapiens
aaaaaacagaagacgctctgcaaaaggaatctggtggacagtaacaaactttggtgaaatttcaggaaccatagccattgaa

SEQ ID NO: 626547 - DNA, 88 bp, Homo sapiens
ctttcctcatcatcaaggatcaggaccgcaagtcccgtcttatgggacttgaggccctcaagtgaaagctggtggaatgcgaattgtg

SEQ ID NO: 626548 - DNA, 78 bp, Homo sapiens
agcctgatgcagaggaagattgaggactaaggggcttcatccacagtgtaacacagcttaccagtgtcttctaattgc

SEQ ID NO: 626549 - DNA, 88 bp, Homo sapiens
ggggccggccctctcccgagctcagagagtaaatgcttggtggagccagtgaacgtggtggacaatggagatggcacacacacagtaa

SEQ ID NO: 626550 - DNA, 98 bp, Homo sapiens
tttcccatgtgtatcctgtgaccattctatctgggaaacaccatctgattcagatcacaagaagaagaaaaagaaaaaagaagaggatcctgaacgga

SEQ ID NO: 626551 - DNA, 87 bp, Homo sapiens
gatgagaaggttcagttggcaaaccagatatatgacttgagacttccagtgtcctactattgaagcctgcacctgctgcattgctgt

SEQ ID NO: 626552 - DNA, 75 bp, Homo sapiens
atcgcctccatctgtaatatgtatcctagaaggaaaacatcaccatggctacagaaattggttctcctcctcgtt

SEQ ID NO: 626553 - DNA, 89 bp, Homo sapiens
accaggtcttgtagcagcgcctcctcgatgtaccaaagcttcagcctcatccgggattggagaagaaagaagaggaagaagaagaagaa

SEQ ID NO: 626554 - DNA, 83 bp, Homo sapiens
gagtgcgtgggggaccggctgttggcgggccgggctctcgccatgggtcactgtcgcctctgccacgggaagttttcctcgag

SEQ ID NO: 626555 - DNA, 88 bp, Homo sapiens
gagcggagaggagatgcacacggcactcgagtgtgagatcagaccccaacaccaacaagattcttgaaaaactgtgaagaagtgggtt

SEQ ID NO: 626556 - DNA, 75 bp, Homo sapiens
gttctctcgcgcgggtgtcgctgggctgtcggcctggaccttgcagccgcaatgccagagactgctgctactttg

SEQ ID NO: 626557 - DNA, 100 bp, Homo sapiens
cacaaaaagacacttatactatgaaagagcgaccgtggcagccatgtattacagctactacatgctaccggacggcacttactgcctggcgccgccccct

SEQ ID NO: 626558 - DNA, 83 bp, Homo sapiens
ctccgggcacacccggctccccggacgcctcggagtccaaaactacttacctggaagaccttccaccaccccctgagtatgaa

SEQ ID NO: 626559 - DNA, 96 bp, Homo sapiens
cagaatgctttgacctccaagctgttttaaatctagtagataagccaggtagctttggatatgttaaatcctcatgttactttgcctgttttttac

SEQ ID NO: 626560 - DNA, 75 bp, Homo sapiens
tttctggacacagaagtatttgtgacagggtaattttgggagtgtggagatgtgccggtatgaccctctacagga

SEQ ID NO: 626561 - DNA, 100 bp, Homo sapiens
acagctgccccgagggtctcctccagtagacggtacagcgaaggcagagagttcagatatgaaaatgggtgtgcttatttccacgaagaggaaagagaag

SEQ ID NO: 626562 - DNA, 83 bp, Homo sapiens
ggaaattgcagaataatgtctcagcgcgtgcctgcagacgaggcctacttcatagtcaaagagattctcgctacagaacgaac

SEQ ID NO: 626563 - DNA, 82 bp, Homo sapiens
aaaggtggctttggattcagaaaaggtggaccagatgacagaggccataaaattttgagtagaaaaatccagaaatttgaaa

SEQ ID NO: 626564 - DNA, 82 bp, Homo sapiens
gcgctcccgcggagccggagccgcagaggctcccgggctggactcaggcttctcagccttatgccagcctggaccatcttgg

SEQ ID NO: 626565 - DNA, 97 bp, Homo sapiens
cgcgttccggaggcccggccacctctgagaagggagacgacgctgctgggtccgctgagcggggcgacccgagctgaagaataagttcatgaaaaaa

SEQ ID NO: 626566 - DNA, 100 bp, Homo sapiens
gctttaaccatagcagcagataaagggcattacaaattctgtgagcttcttattggcagacctagaggatcaagacataatgggagcatttttagacaag

SEQ ID NO: 626567 - DNA, 75 bp, Homo sapiens
tcaggcaggaagcagcccccagcctcggacgccgtggcccttgggagagagacccgaccgcatgtctgtcatgga

SEQ ID NO: 626568 - DNA, 100 bp, Homo sapiens
tctgtacccagaaagagtcatacctggagcagcagtttcattgtactgacaacctcagctggcatcatggaccatgaagaagcaagacgaaaacacacag

SEQ ID NO: 626569 - DNA, 94 bp, Homo sapiens
gtgggatcttcacaatcagtgaccacccagcagaacagcgtgggatgttcacaaaggttttgtagtgcatccctgagcatgagcacagaatgaa

SEQ ID NO: 626570 - DNA, 130 bp, Homo sapiens
gaggaggaggaggacgccgcggtgaagttctccgccatgaacctgaggggcctcttccaggacttcaacccgaggggagctatccagtttgggaagatttcataaacaaagcaggaaagctgcagtccca

SEQ ID NO: 626571 - DNA, 100 bp, Homo sapiens
cgggcaaggcggagagtgacggagtcggcgagcccccgcggcgacagccatctgtgagaaagacacactgcagtggaaggaaacacaaagagaatgtgaa

SEQ ID NO: 626572 - DNA, 98 bp, Homo sapiens
gcgctggtgcagccaccctcgctccctctgctcttcctcccttcgctcgcaccatggtttactgctgcagctacctctactcctgttagtagctccca

SEQ ID NO: 626573 - DNA, 75 bp, Homo sapiens
ggcggatactctcccttcggagtttgatgtgatcgtaatagggacgggttgatccaaaagactacatgttcagtg

SEQ ID NO: 626574 - DNA, 82 bp, Homo sapiens
aaaccaggagattgcgagggagcgatgcggtgcagcgcggttcgtgctggccgtgggcagcgccgtctttgatgccatgttc

SEQ ID NO: 626575 - DNA, 100 bp, Homo sapiens
tagcatggcggtgatggaaggagacttggtgaagaaggaaaggtctgctcaccaggtggccagataccgcccacgtgcccccatcattgctgtgacccgg

SEQ ID NO: 626576 - DNA, 100 bp, Homo sapiens
agcagggagaggagctgtggataacgggaggtgaatttccatgtcaacatagtcctgggcgaactttctgaccaagtatacaactacccagagggcctag

SEQ ID NO: 626577 - DNA, 82 bp, Homo sapiens
cccgcaacagccccttcgtcccaatttgggatatgagattgaaaatgacgactcggaattttcctgagagagaagtaccctg

SEQ ID NO: 626578 - DNA, 90 bp, Homo sapiens
gcaaggagcgggtccgtcgcggagccggagggcgggaggaacatgacatcgcggagccggggaaatgtctgatgaggagataaaaaagac

SEQ ID NO: 626579 - DNA, 83 bp, Homo sapiens
ggccacgccggccgcgcgcgccagcaagaagatcctgctgcccgagcccagttttccaagagataacttcaccaagatgtcca

SEQ ID NO: 626580 - DNA, 100 bp, Homo sapiens
ctcgaaggcagcacaggacctggaaaaattacatgggtcccttcagtgttgtacgacgatgtatcaacagagaaactgggcaacaatttgctgtaaaaat

SEQ ID NO: 626581 - DNA, 82 bp, Homo sapiens
cccaatgtagaagaggtgacacttcccaaaacaggagcacgtgaattgcctctgcttacgttcaggccctgtcctaaaccca

SEQ ID NO: 626582 - DNA, 100 bp, Homo sapiens
gattacaggctgcagtagtacagactcttatcgattatgcatcagatattggaggcagttcccatgttatacgcagcagatacttacggagcattgtaat

SEQ ID NO: 626583 - DNA, 75 bp, Homo sapiens
gacccgggtgccgaggagcgggaagagttgctggggtatcacctcttctgggctcaagatggacaacaagaagcg

SEQ ID NO: 626584 - DNA, 82 bp, Homo sapiens
acagggcaccaactatgaagactctcagggcgcgatttaagaagacagagacaatgcagatcttcgtgaagactctgactgg

SEQ ID NO: 626585 - DNA, 105 bp, Homo sapiens
gcttgcatttgtttctgctgaccgcgggccctgccctgggctggaacgaccctgacaatgcagatcttcgtgaagactctgactggtaagaccatcaccctcgag

SEQ ID NO: 626586 - DNA, 82 bp, Homo sapiens
aagagctattgaaaaaatgaatggaatgctcctaaatgatcgcaaagtatacttggcatatcgaaattttatgattgacacg

SEQ ID NO: 626587 - DNA, 101 bp, Homo sapiens
atacagagccgtggaacaggtcgtgccggagatggaaacaggaaagcctgttgttttgtcgtcccagggtgctgataagactgtgaaaggcccagatggac

SEQ ID NO: 626588 - DNA, 83 bp, Homo sapiens
ctggaattagctgaagaacttctgaggattggcctgtcagtttcagaggatgcaatgcagtatgcttctgaatctaaagatac

SEQ ID NO: 626589 - DNA, 90 bp, Homo sapiens
cgcagtgatttgctccccctcgtgcagcaacccccacacccagcaccaggtggcagcatcttgagtactcgctgttctgaaacttacgaa

SEQ ID NO: 626590 - DNA, 105 bp, Homo sapiens
cccagccccgggcggccctgggcctgctgcgggcgcggcgctgcccgaccagagcttcctgtggaacgtcttccagagggtcgataaagacaggagtggagtgat

SEQ ID NO: 626591 - DNA, 101 bp, Homo sapiens
agactggcagccacacatctcacctgctgggacagaaccggcatacattgagggtctaaaattcccaggactccacagctttgcaccagataagcctggag

SEQ ID NO: 626592 - DNA, 97 bp, Homo sapiens
ctgcagaaatatcagctagaaccatgcagtcaaatcaagaagctactctagaagtcggagcagaggatggtacagcagaggccgaaccagaagccgg

SEQ ID NO: 626593 - DNA, 100 bp, Homo sapiens
gctctgcagccacatactatccgtttgttcaggaaccaccagtgacagatctctgctggatgaaccgaatcctaacagtccagccaatagccaggcagca

SEQ ID NO: 626594 - DNA, 82 bp, Homo sapiens
tgtgtgcagaaggaggtcctgccgtccatgcggaagatcgtcgccacctggatgctggaggaaggtgctcgggtcttcgggg

SEQ ID NO: 626595 - DNA, 100 bp, Homo sapiens
ccggccgcccagatgatgcggtggtgggggacctgccggcacgcgactccccccgggcccaaaagcttggggcttccttggtcgcacccaccacctgcct

SEQ ID NO: 626596 - DNA, 98 bp, Homo sapiens
tcgctccgtggccttagctgtgctcgcgctactctctctttctggcctggaggctatccagcgctgcacgtgggaatttggagccatggtgaactaca

SEQ ID NO: 626597 - DNA, 100 bp, Homo sapiens
agttgtaagtgtggtgtctgcaacggagaggactgaatggtatcctgctttgtttgaaagatgatgacagtggggaccatgatcagaatgaagaaaacag

SEQ ID NO: 626598 - DNA, 50 bp, Homo sapiens
attaaaaacaacaaggaagctttcagtcttttcttgcctggagaagaggg

SEQ ID NO: 626599 - DNA, 82 bp, Homo sapiens
ccgggcaacgatcggaactcggacacgagctagagccggtgcaggccacgcagaacaagacagggaagtatgtgccgccgag

SEQ ID NO: 626600 - DNA, 100 bp, Homo sapiens
caaagaacacaagaaggagaaggaccgggaaaagtccaagcatagcaacaggactgaaatgcaactgcagaagcaacatgtgaccttttagagatgcttg

SEQ ID NO: 626601 - DNA, 88 bp, Homo sapiens
gcgcgcccgctgctcggtggcaggagggccggcggagcgccatggcctgcatcctgaagggtgatgaccagttaaatgtatttggaga

SEQ ID NO: 626602 - DNA, 82 bp, Homo sapiens
tgtcatgttccaacactacttagctttccaagtcgagcaaaagatgtgataataccagcaaagccacctgtcagctttttct

SEQ ID NO: 626603 - DNA, 90 bp, Homo sapiens
tcacatgtcattataccttcacccagcatttcatccctcgtcgaaaggattggattggcatctttagaatttctaacgacccaagtccag

SEQ ID NO: 626604 - DNA, 75 bp, Homo sapiens
atggaatatttgtcccggcactggctcttcagtcccttcaatgaaacaaagagtcctcttcgtggaaaagaaaaa

SEQ ID NO: 626605 - DNA, 83 bp, Homo sapiens
ctttattggcagaaggtgtcattttaagacgagtaggcgaagcaaggactgttcgagtgactgtgtttccctcaaagactgta

SEQ ID NO: 626606 - DNA, 98 bp, Homo sapiens
ccggagcatggtgtgcgggcactcagtaaagtggagatgtgattactagatcattatgatagaagaagtcagagatgccatggaaaatgaaatgagaa

SEQ ID NO: 626607 - DNA, 100 bp, Homo sapiens
attcggagcctcccctgcagcgactcggaagattcgaggcggcgggggacaagtcggcgccccagagcggacgaggaagatgttggatccagggttgatg

SEQ ID NO: 626608 - DNA, 90 bp, Homo sapiens
cacgggtgaatgctgctaaaaacaagactggggctgctcccatcattgatgtggtgcgatcggaatccatgtcagtgaacgcctcacatg

SEQ ID NO: 626609 - DNA, 87 bp, Homo sapiens
ccaagatgtcgcagacggccatgtccgaaacctacggtaacagctattgaacctataattaatcatggaggagccagtgcaagcact

SEQ ID NO: 626610 - DNA, 75 bp, Homo sapiens
accacgtggagtgttaccactgcgagttgttctggagaatcatgtagcgacagatgaagacgaacctgctttgaa

SEQ ID NO: 626611 - DNA, 82 bp, Homo sapiens
cacctagccatcaatgtttccaaggcccgcaagaagtacaaagtggagtcttccgtgtgtgctaagatcgtgcagctcctgg

SEQ ID NO: 626612 - DNA, 74 bp, Homo sapiens
acgatccgggtaaagttccagggaggccgcgaaggccgggatagaaaatcgtcagctggacacagtaaatttct

SEQ ID NO: 626613 - DNA, 90 bp, Homo sapiens
cgtggagtttttcctggtgggacaagacaacgggccggtggaggtgtccacattgcagctgccactgcagagccccgccatggaagacac

SEQ ID NO: 626614 - DNA, 82 bp, Homo sapiens
ggaagcaattctggaagcgcagcaacagcaagctcccgggcaggaaccatcactgttgctggaggcacctgacaaatcctag

SEQ ID NO: 626615 - DNA, 87 bp, Homo sapiens
cccttctggatggtactgatgttagtgtggacttgccaatccccaagtaagcccttggcacggaaattaatggattgggaagtagta

SEQ ID NO: 626616 - DNA, 137 bp, Homo sapiens
ggagcattaaggtctggtcggatggggcaggatggctgcgttgacacgtcttatttaatccacatcataggtgattgaaatctctgaatatcgaacccagctctatgaatatctacaaaatcgaatgatggccattg

SEQ ID NO: 626617 - DNA, 100 bp, Homo sapiens
tctatgaggcagtgctgcggagctcccgtgccgtcatgggtgccatgaagccagagttgcatgctgagaatttgaaaaatgaagatgatgtagacactgg

SEQ ID NO: 626618 - DNA, 73 bp, Homo sapiens
aaacattgaagacgtcattgcccagggtggaagtgggctaactggagctaaacttcaggactgtatgagccga

SEQ ID NO: 626619 - DNA, 101 bp, Homo sapiens
ttggcgctggccggctacatcgaggctccccttccctgcgggcatatccgctcctctcggtgatcacccgccagcccactgtcatctcccacctggtccct

SEQ ID NO: 626620 - DNA, 75 bp, Homo sapiens
atttcttctttgagaaaaacctgaaagatgtctcaatccaaggttttgccatcaaggggggacgatttaccaaag

SEQ ID NO: 626621 - DNA, 101 bp, Homo sapiens
gggactgacgtgtttggagggaaatgggaatgtacacgataattaaagagtaaagttgtgctcaacggtgggactgccaagatgaatagacataatcctcg

SEQ ID NO: 626622 - DNA, 75 bp, Homo sapiens
gggactccaaatgggtcgcagtcgcagccgctctccacggaggggtgcacgtcggcgacgaggacttcgtacacc

SEQ ID NO: 626623 - DNA, 75 bp, Homo sapiens
ccgcttccgacagaactgaatgtaacttcaccgagtaaagaggagtgtcaaaatgcagatcttcgtgaaaaccct

SEQ ID NO: 626624 - DNA, 98 bp, Homo sapiens
gctctcggtccaagaccggttcattgcagctcatttgcaagtcagaaccaaatacagaccaacttgattatggccctcgggaccaaggatcacgtcat

SEQ ID NO: 626625 - DNA, 133 bp, Homo sapiens
cttctcccgcagccccgccagcgccaccccccgcgggccgcaggggctcatgcagccgccaaggtgacttaagagattaaaattaatttggttgctgttggttctgaacaaataatgagttcttttatttgag

SEQ ID NO: 626626 - DNA, 100 bp, Homo sapiens
gaacaaaataaacctcaaacagcagctaaaatatgccgttcagatttgtaagggaatgaagacatttggagaagaagcgtttactgaaaggagattcctg

SEQ ID NO: 626627 - DNA, 50 bp, Homo sapiens
ttctggaaaacggtttcccgcagggtgaatgaaaactttgccattgattt

SEQ ID NO: 626628 - DNA, 74 bp, Homo sapiens
acagagcctcgcctttgccgatccgccgcccgtccacacccgccgccaggactgatcctttgaaatactccagc

SEQ ID NO: 626629 - DNA, 100 bp, Homo sapiens
aggtgtcactggccccggcctttgccccaatcttgtgtgggcactgaagggggactacaggttcgagactgtgtaaatgagtatggaagattatgatttc

SEQ ID NO: 626630 - DNA, 100 bp, Homo sapiens
ctgggcagagtactactgcgccaaatttggtgcctggagtaggaggtgttccattgcctaaagaggagaacatttctgctcccttgatctccagctcccc

SEQ ID NO: 626631 - DNA, 100 bp, Homo sapiens
gaaaataacatccgatcagttacaagttggatggcttgaggactggtactaaaaggaaacgtgactgggaggccattgccagcagaatggaggattatct

SEQ ID NO: 626632 - DNA, 75 bp, Homo sapiens
cgactttcattagaaggagagcgacagcccaagtcaccaggcagagaagaggcgatggcggcgatggcatctctc

SEQ ID NO: 626633 - DNA, 100 bp, Homo sapiens
tttgttctcccactggtaatcacgttaatgaaatcttagaatcacccaagaaggcaaagtcgcgtttaataacgaggaacatatgcagcagaaaaaagag

SEQ ID NO: 626634 - DNA, 82 bp, Homo sapiens
atggcaacaagatcaccatcatgcccaagcatgaggacctcaagaccgcgctgagcacgttcttccaagaaaccaacattcc

SEQ ID NO: 626635 - DNA, 100 bp, Homo sapiens
actttagcagacagcgtccacaatgtgaatcctacagtttccaggcgcggatcaagaagatcatgcagacggacgaagagattgggaaggtggcggcggc

SEQ ID NO: 626636 - DNA, 76 bp, Homo sapiens
cgcagtggtcgcttcttctccttggagttaggacctggaaatgtacagaaagaagtctcatcttcctttgaccacg

SEQ ID NO: 626637 - DNA, 99 bp, Homo sapiens
ggaaaaactgcgtagagaggcctatgattctgataatccccaacatgaagaaatgcttttgaaggctctgcgaacatcaatagatgcttatgacaactt

SEQ ID NO: 626638 - DNA, 101 bp, Homo sapiens
ttgagctccaggagttcgtctcttacgtctgcggaagtgcagctgcctcagttcttagcgcagtgtttctaagacctcagagaaatttggaatctatagac

SEQ ID NO: 626639 - DNA, 88 bp, Homo sapiens
cagatagcagagccatccttgggttggattggatgctgctggcaagacaaccattctgtataaactgaagttaggggagatagtcacc

SEQ ID NO: 626640 - DNA, 96 bp, Homo sapiens
gattggtctatgaaacatcagttcttgatcctgatgagtctgaagatgatgagaaactgaaaaagaggaaggagcgatttgggattgtcacaagtt

SEQ ID NO: 626641 - DNA, 100 bp, Homo sapiens
ctccgttgctgaccgccgactgtcaatggagctggaaaacatcgtggccaacacggtcttgctgaaagccagggaaggagtgtggccatctggggccgtg

SEQ ID NO: 626642 - DNA, 100 bp, Homo sapiens
gggcttgggaaggggaaggaaacctctctgaaatctgacacctgctctcccggcaaggaaacttcgcaggctggtgattcgcaaggggtggctcaccatc

SEQ ID NO: 626643 - DNA, 99 bp, Homo sapiens
cagggatgcctgtaccatgatgtgatgctggagaccttgacacttatatcctccctggtcctggaagttgccgtactcagtacagaaggacagatccaa

SEQ ID NO: 626644 - DNA, 75 bp, Homo sapiens
gggcagatgaagctcactgtcaacctcggtatcgagaaccttccctgcgaacttcagaggaacttccagctgatg

SEQ ID NO: 626645 - DNA, 75 bp, Homo sapiens
ctaccctcagctctagctgatactacagacagtacaacaggtgcaggcctggggtagtctcctgtctggacagag

SEQ ID NO: 626646 - DNA, 96 bp, Homo sapiens
cgtcctcggcggccccggcgccggcaaggggacccagtgcgcccgcatcgtcgaggtgtcatggagaaactccagctgggcccagagattctgcag

SEQ ID NO: 626647 - DNA, 111 bp, Homo sapiens
cgggggccgctctgggatcccggccaccagcaattgtccggatttttagactctgaggagcagttggagctaatccacattatggaaatggaaaccaccgaacctgagcca

SEQ ID NO: 626648 - DNA, 75 bp, Homo sapiens
atgaatttagagccaaactgtccaaggctttggcaataatagaatctgtccctccagctggccctgaggcatctg

SEQ ID NO: 626649 - DNA, 76 bp, Homo sapiens
gcggggtccgggtccggagcgccacaaaggccaatgatgaggccaatcagagtgatacaagtgtctccttgtcaga

SEQ ID NO: 626650 - DNA, 75 bp, Homo sapiens
acggacgacagaagcgactttggtgagactctggacagtcattttgtttactcattcagccctgttgcaggtccc

SEQ ID NO: 626651 - DNA, 126 bp, Homo sapiens
ggggttggtgtgattagcttcgcagtctggaaagctttaggagttcacagtgagatgcgctctgtgctgcggaaggcgggctccccgcgcaaggcccgccgcgcgcgcctcaaccctctggtgctc

SEQ ID NO: 626652 - DNA, 137 bp, Homo sapiens
tagatgcccagatgcaaaagtgatgaaacagtccatttgtcataaagtaagatgcagctgtggcatgtcaaccagcttgttccgatgaagttaaattccgtcaagatttaatgaatattgcgggcacaacattatcc

SEQ ID NO: 626653 - DNA, 100 bp, Homo sapiens
atacaaaattatggataataatggaatatcttggtggaggctccgcactagatctacacctggcggctcacctgtggaagcacagcgaggccttggaggc

SEQ ID NO: 626654 - DNA, 98 bp, Homo sapiens
ggtaggcaagacctgcctcctgttccgcttctcagaggacgccttcaacaccaccttcatctccaccatcgttttttaggtggtggcggcagtcggat

SEQ ID NO: 626655 - DNA, 100 bp, Homo sapiens
gagctctacgcctcctacgtttacctgtccatgggtaaactagcgctcctttccgtaaccacgggaggcacggccgagatgtacacgaagacaggagtca

SEQ ID NO: 626656 - DNA, 100 bp, Homo sapiens
atattcgcgattacaatgatgcagacatggcgcgtcttctggagcaatgggaggttgtccttctattcaggccactcttcgttttccatgtactgcatgc

SEQ ID NO: 626657 - DNA, 90 bp, Homo sapiens
tggtgtgagtgacgggcggtggcactctgtgcaggtgcagtactacaacaagccttatgccagcctggaccatcttggaggcagtgtagg

SEQ ID NO: 626658 - DNA, 98 bp, Homo sapiens
ttctatggccgcttcaggcacttcttggatatcatcgaccctcgcacactctttgtcactgagccaacaagagagtcggaatatcactcttcagatct

SEQ ID NO: 626659 - DNA, 98 bp, Homo sapiens
cgccgctgccccggctgcctcctccctgagcatgaagcgtgccagctctctgaatgtccttaacgtgggtggcaaggctgctgaagatcgctttcaag

SEQ ID NO: 626660 - DNA, 98 bp, Homo sapiens
acagatctcagagaaattggccatggaagctttggagcagtgtattttcttatatagaattggtgataggatcacaacttctgaggtcccagcaagag

SEQ ID NO: 626661 - DNA, 100 bp, Homo sapiens
acagagacgatggtcggaatcagatttgaaaatgaaagtgattcagagactgtttttgatattcagaatgacagaaatagtatacttccaaaatctcaat

SEQ ID NO: 626662 - DNA, 100 bp, Homo sapiens
ggcgattcggtgaagcgattcctgcaggcgttggttcccctctttgacctggacaggctgcgggaggagctgcaggactgaggtacagaggccaggggcc

SEQ ID NO: 626663 - DNA, 50 bp, Homo sapiens
gaacatgcgcttttgacacattggagatccacctccgacccttaagccag

SEQ ID NO: 626664 - DNA, 96 bp, Homo sapiens
ttgggagcaagagccatctactcgtccgttaccggctgatcactggagattccatcgttagtgctgaggcagtatgggatcacgtcaccatggcca

SEQ ID NO: 626665 - DNA, 100 bp, Homo sapiens
cagtgatagctgctacaaactgggggcctactatgtgactggaaaaggtcattacacctactctgagaatcgtgtggaaaaagacggcctgattcttaca

SEQ ID NO: 626666 - DNA, 96 bp, Homo sapiens
cttttactggcaaatagtacttcaagagcacagtcttatgtaagatcatggaagggaagtggttgctgtgtatgttactggtgcttggaactgcta

SEQ ID NO: 626667 - DNA, 82 bp, Homo sapiens
tgaccaagaggagaaggggaagatcacattcgatctcactctgttgcccaggctggagtgcagtggcacaatcacagctgac

SEQ ID NO: 626668 - DNA, 101 bp, Homo sapiens
ggcggcgggactgcactcgagtgtccagacctgctcgatggagcttgatcctggatagtgtttgtatgatgtgcacacgtctctgcaaatgcttgtttgaa

SEQ ID NO: 626669 - DNA, 100 bp, Homo sapiens
tgaaagccccaccgagaaattactccgttatcgtcatgttcactgctctccaactgcatagacagtgtgtcgtttgcaaatagcatagaagccaatgtgg

SEQ ID NO: 626670 - DNA, 121 bp, Homo sapiens
gggatcctgaaaaggagggaacaattgttgtagcaggtctaaaagttcaggtccagattatgtttgagaccttcaacaccccggccatgtacgtggccatccaggccgtgctgtccctcta

SEQ ID NO: 626671 - DNA, 101 bp, Homo sapiens
tacaggacatagcaactctggctgatcaaagaagagcagcccatggtgactctggagaagaccttttgtttgggacatcagacggaaaacttgcgcttata

SEQ ID NO: 626672 - DNA, 90 bp, Homo sapiens
ctggctctgcaacgcttctcagtagttgttcctcaaagtcattcaagctgtactcgccgaaggagcccccgaacggcaacgcctttcccc

SEQ ID NO: 626673 - DNA, 83 bp, Homo sapiens
cagaagcctacaatgaagaactgaagaagctggagttgctcagacaggtacaatgactcttcttgcttttcacctaagttgaa

SEQ ID NO: 626674 - DNA, 74 bp, Homo sapiens
caatgttggagccgtctgcaaagtgtccccggcaagaaggggcagccattttggggggtgctgatggatacctg

SEQ ID NO: 626675 - DNA, 83 bp, Homo sapiens
caggaagctttggatcagacttttgtgttgcagttcggacctgcctagagctggaacgttacctccagagcgagccctgctat

SEQ ID NO: 626676 - DNA, 98 bp, Homo sapiens
ccaggatggctctcttcgctggtggcaaactggtattcaaaacctttgaccacatggcccgtcaggatgatgagaagagaaggcaggaacttgaagag

SEQ ID NO: 626677 - DNA, 103 bp, Homo sapiens
gttctctttccctctcccaacatggcggcctcagacaatgcagatcttcgtgaagactctgactggtaagaccatcaccctcgaggttgagcccagtgacacc

SEQ ID NO: 626678 - DNA, 75 bp, Homo sapiens
ggctttgggcggggcggagccgagagccacactttcaagtaaaccaggtggtgaacatcccgtccttcattgtcc

SEQ ID NO: 626679 - DNA, 82 bp, Homo sapiens
catgaaatgattgaatctggtgttatcaacttaaaagatgccacctctaaggaaattgaacagcgattacagcagcaggcag

SEQ ID NO: 626680 - DNA, 80 bp, Homo sapiens
ccggctgccggtcgacgaccgccccgcgtcatgcggctcctcggctggtgttacagaatgtctgaaggggacagtgtggg

SEQ ID NO: 626681 - DNA, 100 bp, Homo sapiens
ctggagatcagcaccaaatcccacagaggcatctgagatgatgttgaatttgaagtatcatcggaccgacggactgggaaacccattgctgttaaactgg

SEQ ID NO: 626682 - DNA, 100 bp, Homo sapiens
tggcggtggcggtgtaagtcggtggcggcgccggtacgcctggtccccgcgtggagtctttactcaaaacaggaccaagaatcgccttcagccctgtctg

SEQ ID NO: 626683 - DNA, 101 bp, Homo sapiens
aacactagttcatcgttttccccttttggtggcacatatggaaaaactcagccagttggcaggatcttgtggccagtggggtagtggagtatattgatacc

SEQ ID NO: 626684 - DNA, 100 bp, Homo sapiens
ccatggttctcatgccccaaagtcctgcaaattgacactactatactggcaattgctggagaagattttgcaattgttgcttctgatactcgattgagtg

SEQ ID NO: 626685 - DNA, 74 bp, Homo sapiens
cctggagcttaaaaagctgcacgcaagtgttaaacttctgggctgggaagaggctaggcgacgtggtttcagat

SEQ ID NO: 626686 - DNA, 75 bp, Homo sapiens
gtttcacctatcctcactgatccgtggacttctgtatgatcaggtgccgtgagcgatgtggagatgcaggaacac

SEQ ID NO: 626687 - DNA, 115 bp, Homo sapiens
cccgggaggaaggaacgaggcaaggagctaaagcagcgtgcgttcagccctgggggaaatcctcattgacgattcaatttgttgaaggccaatttgtggactcctacgatccaac

SEQ ID NO: 626688 - DNA, 97 bp, Homo sapiens
gacgggccatacccaataaccaggtgcttggcaaaatcgagcgggccattgaggtacagccccgtggtggaggccggctcggacatggtcttccggt

SEQ ID NO: 626689 - DNA, 75 bp, Homo sapiens
tcaagtacgtctcagggtcttcagccgagaggagggcagcccagagccggaagacgcacatgcagaacatcaagg

SEQ ID NO: 626690 - DNA, 80 bp, Homo sapiens
catcatagtcaactgcgtggaagagaaggtgaaaggaaagcaagccaggatggatatttacgacactcaaaccttggggg

SEQ ID NO: 626691 - DNA, 100 bp, Homo sapiens
atgcgggagctacaagatcagcttgaagctgagcaatatttctcggagatttgtgccacaccccggctgtttccagatgacccacgggaagggcaggtga

SEQ ID NO: 626692 - DNA, 90 bp, Homo sapiens
gtttgacacaactgtagagcagctgtatagcatcttcactgtaaaggagacgtccctggcaactgttcagaaaacccctgtcagaacgga

SEQ ID NO: 626693 - DNA, 90 bp, Homo sapiens
gtgggcgtaggaccctccaagccagcaagcttgaaggtgagcacctcgaagggcttctttttatgttgaaaggcacgggtttgcatggcg

SEQ ID NO: 626694 - DNA, 100 bp, Homo sapiens
tgcggcggaaaacaggctactcctttgtaaattgcaagaaagctctggagacttgtggcggggacctcaaacagacgcaaacatgcagatctttgtgaag

SEQ ID NO: 626695 - DNA, 134 bp, Homo sapiens
aggagtggaagtttgagagaagtttaagagaagaaatggacatgattgcctaaatcagccaaacacaggggctggtggacgaagccattgataccaaatctctgttggatgcttcagaagaagcaattaaaaaa

SEQ ID NO: 626696 - DNA, 74 bp, Homo sapiens
gacctgcagaggacctcaacatccgagtggaaaggtggaaagactatctcccagttggacagcggatgcctggg

SEQ ID NO: 626697 - DNA, 90 bp, Homo sapiens
tccactttcgccagcccgtgccgcgagcgcggcctgcaggaggtcgcgtggggcaggcagtggcgctgcgggccaaggccttcggcttca

SEQ ID NO: 626698 - DNA, 100 bp, Homo sapiens
ttccaaaaggtcaaggttcacaagttcacatgagagatcctaataatcaacttcacgtaattaaaaatttgaagatagcagtaagcaacattgtcaccca

SEQ ID NO: 626699 - DNA, 99 bp, Homo sapiens
atttccagcctggaccaactggtggaagtgcgagtctggatccgagggcgatgggacagtgcaccgcaggaagaagaggaggacgtgcagcatggtggg

SEQ ID NO: 626700 - DNA, 98 bp, Homo sapiens
ctctcttcaccctgccgtcatgtctaagtcagagggttttggccaaattgggcgagggcacaaaataaccacttaccccttctcaccgaggaagagcg

SEQ ID NO: 626701 - DNA, 75 bp, Homo sapiens
tggactcagagtttccattgacactgatatggctttatcctgtggataaacgcagagtgaacgagtttggggagt

SEQ ID NO: 626702 - DNA, 75 bp, Homo sapiens
ggctgtagagattagccaaacagccaagcagttgccctcaaattggctgtagccacacggatataagaaagtcag

SEQ ID NO: 626703 - DNA, 74 bp, Homo sapiens
gactgcttagtacgtgtcgagaactttctcgagccactgccgtcgtggccctgaagttcatcccaaaattgggg

SEQ ID NO: 626704 - DNA, 82 bp, Homo sapiens
ttgagtggtcggcttggtgtggtgtgcggaggagctccaggcccgtcggcgcggagccacataaagaagatccctaatagtc

SEQ ID NO: 626705 - DNA, 50 bp, Homo sapiens
gttcaccatcctggccccggaagaaatcttcccaaggctgcagacaccga

SEQ ID NO: 626706 - DNA, 98 bp, Homo sapiens
ccccagagtagttgtggcggaataatctaaatatgggtgttgggtatttgaaatatctcaccaaaaaatatttgaagaagaataatctacgtgactgg

SEQ ID NO: 626707 - DNA, 83 bp, Homo sapiens
aaccaggttcgtggctatcccactcttctctggttccgagatgggaaaaaggaagacagtgagcgctactctcgtagatccag

SEQ ID NO: 626708 - DNA, 100 bp, Homo sapiens
cgccaccggaacccgagaccgagtcagaacccgagtgctgcttggcggcgaggttattaatgctgcactggctttagcagcaaaaccacagagtaaactg

SEQ ID NO: 626709 - DNA, 75 bp, Homo sapiens
ccaccctccaactttgcgacggaaatgtgtcatcgaaagccagttaatgaaggagttcccccttctgagtatgtt

SEQ ID NO: 626710 - DNA, 75 bp, Homo sapiens
ggcggaggcagaggtggaggcgctttgaaagagctgccaaatgctgttaaatcaactgagagaaatcacaggcat

SEQ ID NO: 626711 - DNA, 73 bp, Homo sapiens
tcgaagtggttctggaaactttggtgaaggccatggaggtggacatagaggagaggcctaaagagcttgtacg

SEQ ID NO: 626712 - DNA, 122 bp, Homo sapiens
cagagcgcctgcgaccccagtcggtgctccggggaggtcacctgacgaggaggcggagtacgtccagcttgttactgaacttcgaatgacaagagccattcagcctcagatcaatgcttttt

SEQ ID NO: 626713 - DNA, 90 bp, Homo sapiens
ctgtgatatcattctgccccgactacagaataactgaagtgaagtgatggactccgatttggagagtagtaagacgtgaaaggaatacac

SEQ ID NO: 626714 - DNA, 87 bp, Homo sapiens
gccttagctgtgctcgcgctactctctctttctggcctggaggctatccagcatggcatgatcaacattgacatgactggagagaag

SEQ ID NO: 626715 - DNA, 74 bp, Homo sapiens
ttgaacttaatacagcaagaaagaccatcaagtttaccagacagagcgggatgccaccagcttgtccaaaggga

SEQ ID NO: 626716 - DNA, 100 bp, Homo sapiens
gttttattcaggctcagtacaactgtgcctggaaccagatgccctgtccgtcggcgctggtcccgaccctgcccgccctggactggcagctgccgtccca

SEQ ID NO: 626717 - DNA, 100 bp, Homo sapiens
agagcgagctgagtggttgtgtggtcgcgtctcggaaaccggtagcgcttgcagcatgtcggatttctgtggcctcacacacctggtgaagctagacctg

SEQ ID NO: 626718 - DNA, 100 bp, Homo sapiens
gacaccgcccggagttggcgtcccttctccctctccgagtgctgctcctgtcattgtggccatggacggaaatcagtacgctgaggggccaagtgggagg

SEQ ID NO: 626719 - DNA, 74 bp, Homo sapiens
tgttggagccgcagtgcagcctaattttgacttcagtccaagtggtaagaagttcagaagcaagcctcagttgg

SEQ ID NO: 626720 - DNA, 75 bp, Homo sapiens
ctgccagcacgctgtcacgtctcagcaatagactgctcttgaggtcgagtctatgctgtcttgtcaaagagagaa

SEQ ID NO: 626721 - DNA, 100 bp, Homo sapiens
tattccaagaggaagtgatattattgtagatctagaagtcactttggaagaagtatatgcaggaaattttgtggaaggtgaaatagtggtgaaaaataac

SEQ ID NO: 626722 - DNA, 75 bp, Homo sapiens
tttgccatcctcatgcaggtggtcccgctggaggtactggttttggattaggaattgttttctcacttaccttct

SEQ ID NO: 626723 - DNA, 100 bp, Homo sapiens
cctcaagggctgaaaataaatagggaagatggagacaccctctgggggtcctctctgagtcaaatccagtggaatggtcctcgtccgaagtgagaatggg

SEQ ID NO: 626724 - DNA, 90 bp, Homo sapiens
actgctggggtggtggttccaatgagacagggcacaccaaactccatctggttgaagaagcctcagcggaggcgatacggcctcctcgcc

SEQ ID NO: 626725 - DNA, 75 bp, Homo sapiens
gcaccacctccagcccctgcgcctcgggagagataatgcatgtgagaaaacttcatatatgtttctacgaaagga

SEQ ID NO: 626726 - DNA, 75 bp, Homo sapiens
gccttgaaaagcagaagacaatccaaaacaaacgctattcctctcacgatggccgagcctcgatttaacaacccc

SEQ ID NO: 626727 - DNA, 90 bp, Homo sapiens
gacggacttcagatcactgtcaatgggaccgttctcagctccagtggaaccagattcactggatgaaagaaagataaaaggggtcattga

SEQ ID NO: 626728 - DNA, 75 bp, Homo sapiens
tcggccccggtgccacccctgccgccggcagcggctttcccgagaagaaatggacagaagatgagcctgtcggtc

SEQ ID NO: 626729 - DNA, 132 bp, Homo sapiens
cccacctccacagacccgtccgggtgctgaaagtccacggatgctatccctggtcaaatcagaggctgctctttggcgtaaattgcaatcgattagggatcgtttctcagaatcaagttagaagtgagagtt

SEQ ID NO: 626730 - DNA, 98 bp, Homo sapiens
tcaaaaacttgtgccacaactatagcatatccacatggaggaatcattatagattctaaaaatatattttcccttctctgtggacttggtataaaacg

SEQ ID NO: 626731 - DNA, 80 bp, Homo sapiens
cggaaaccggtagcgcttgcagcatggtgggtgcgggaatttctgaatgatgaaaacaaaggcctggatgtactggtgga

SEQ ID NO: 626732 - DNA, 75 bp, Homo sapiens
tgatgtgggccatggtgtcaagcaaggacacccaggcccattattttcctccagcctccatggaccacagtcttc

SEQ ID NO: 626733 - DNA, 75 bp, Homo sapiens
ggcctccaacaaaactacattgcaaaaaatcccagaagtgggatgaaatgaacatcttggcgacgtatcatccag

SEQ ID NO: 626734 - DNA, 100 bp, Homo sapiens
gtcgctggagcgggcggagctgtgcgagagcctcctcacttggtcactgcttcaaccacctgtgagaaattagaaaaagccaggaatgagttacaaacag

SEQ ID NO: 626735 - DNA, 75 bp, Homo sapiens
cgctgagggtctcggggcgggcgccgcgggacctctccgggccatggtttttcagttatgggacaaaaatattat

SEQ ID NO: 626736 - DNA, 50 bp, Homo sapiens
cctcgtccgagcccacccgcctttggagcgccacgatcatgtctctcgaa

SEQ ID NO: 626737 - DNA, 74 bp, Homo sapiens
gattctacatctcaagctcatattttgaagtgtttacgggttaatgatgaaatggcaggtaattcacacttttg

SEQ ID NO: 626738 - DNA, 82 bp, Homo sapiens
tggagagctcatctggaattttgccgatttcatgactaaccagtaatccacattcatctcaatggaaggatcctgccttaag

SEQ ID NO: 626739 - DNA, 51 bp, Homo sapiens
cagattcgcagtggtcgcttcttctccttgatataatgaagatctggaact

SEQ ID NO: 626740 - DNA, 98 bp, Homo sapiens
agtatgctgatgtgatcatccctagaggtgcagataatctgggatcagttcgacagcttagacaagcatacacaatggggaattgacttcttggaaag

SEQ ID NO: 626741 - DNA, 97 bp, Homo sapiens
ggagctggagagcacctcagagaccagtgacatgccagaggcctatgttgtccttggccagtttctggtgctaaagaaagatgaagacctcttccgg

SEQ ID NO: 626742 - DNA, 75 bp, Homo sapiens
attgacgccatgtcgggttattcgagtgaccgagaccgcggccgggaccgaggctctcgccttcaaaaagaaaat

SEQ ID NO: 626743 - DNA, 82 bp, Homo sapiens
ccagagtggttcgggaacaggatgcagacattgtcctcaacgaccagcggtcaaaatgcagatcttcgtgaaaacccttacc

SEQ ID NO: 626744 - DNA, 97 bp, Homo sapiens
ccggaggcgacatggggcacccggtgtaccgcggcgagaagccccagctgcactacgcggtaagaatgattgatgttggctgatattggagtgctca

SEQ ID NO: 626745 - DNA, 100 bp, Homo sapiens
gcccggggcacgcatcttctcctttgacggcaaggacgtcctgaggcaccccacctgtacgtttcaggagacggcagcgaggctaccttgcatggtgtgg

SEQ ID NO: 626746 - DNA, 90 bp, Homo sapiens
caaggtgatagacttcgggccttgaaaagcagaagacaatccaaaacaaacgctattcctctcactttcccgtcaccaattttccttgga

SEQ ID NO: 626747 - DNA, 100 bp, Homo sapiens
ttttcttatttagccggagtgagaagcaagaaggccctggacacagcaatatctctgggctttcacagaggagaggagacgccgtgagcgggacgaccag

SEQ ID NO: 626748 - DNA, 100 bp, Homo sapiens
aggaaccagactgggggcgagctgagcacctgtagtcaatcacacgcagtgtaatgttcaagctcagaaatgccttatgtggatcgtcagaatcgcattt

SEQ ID NO: 626749 - DNA, 75 bp, Homo sapiens
ctcccacctcagtctcccgagtagcttggactacaggtaccaggatcatctatgaccggaaattcctgatggagt

SEQ ID NO: 626750 - DNA, 75 bp, Homo sapiens
gaagcatcccagacaccgggaaggtgacagcggcatggacatatgccccaggctttcctgctggggtccatccat

SEQ ID NO: 626751 - DNA, 82 bp, Homo sapiens
caggatccgaacccgcctccccaggtcaaaatgcagatcttcgtgaaaacccttaccggcaagaccatcacccttgaggtgg

SEQ ID NO: 626752 - DNA, 83 bp, Homo sapiens
aagagattcagccagcacactcctcgcgagcaaggactgcgagaactacatcactctcctggagaggcggagtgaggggctgc

SEQ ID NO: 626753 - DNA, 100 bp, Homo sapiens
aagtcgagactactggccgaaggggcgtctgcggctctccgccgtccccagccctgcctctccctgggctctggtggattctgaagagccagtctttgag

SEQ ID NO: 626754 - DNA, 97 bp, Homo sapiens
ggaaaccggccctatgacaagcacatcagccctcggcagaacccactcgtcgctctgggtgccattgcctgccgagtgcctgcgattgcaggcgcgc

SEQ ID NO: 626755 - DNA, 75 bp, Homo sapiens
gaaatgaaattgaggatttgaacttcacacagctgtttgaaggccgttgctccagggagaactgcaaatatcttc

SEQ ID NO: 626756 - DNA, 75 bp, Homo sapiens
gtgaagtataggctgaggctacctgtgaacagtacgcagtgaatgttgtgatgcttttccttggacgatcagctt

SEQ ID NO: 626757 - DNA, 139 bp, Homo sapiens
acaaaagagtctccgcggtggaggtctgcgttgctcttgcttttcctcgctggggtgtacgagccttgcttcctgttttacatcacaaatctaaaaaaggacccccccgtcaagccaaatatgccattcattgtatcca

SEQ ID NO: 626758 - DNA, 98 bp, Homo sapiens
tgaagctcatcatgaccttccagaattacgggcaagcgctgttcaaacccatgaagagtcaaattgactttatcagctttaatcgatgggaagaactt

SEQ ID NO: 626759 - DNA, 99 bp, Homo sapiens
gaccgggctagctttggcgaggggacggagccggatcaggagccgccgccgccatatcagattgcttccaagtatgatcatcaggcagaagaagatctt

SEQ ID NO: 626760 - DNA, 100 bp, Homo sapiens
aagatgctatgtgagatcttgaaagtgggcgagttgcctcaagccaggacagaacagctgcagggacagtgacagtgaaagtgccagtggagaatccaag

SEQ ID NO: 626761 - DNA, 96 bp, Homo sapiens
tcaaactgaaaccaaatactaaaatcatgatgatgggaactcgtgaggagagcttggtacatcgaggaggccattgagaaactaagcaagcggcac

SEQ ID NO: 626762 - DNA, 80 bp, Homo sapiens
gtggccgattactgcgagaacaactacatacaggtatggcatttcaaatatagatacaaccattgaaggaacgtcagatg

SEQ ID NO: 626763 - DNA, 51 bp, Homo sapiens
ctgttgtttgactatgaaaaaggtgtcagttgtacccgaggcgttctcagc

SEQ ID NO: 626764 - DNA, 75 bp, Homo sapiens
cttcgactatgcagagacatgagatggtagccaacccctcaggaggcagttcccatgttatacgcagcagatact

SEQ ID NO: 626765 - DNA, 74 bp, Homo sapiens
ccggcgcggtccgccaggccagtgccctcaggagtccccagagccaggcagggggatgaaccgcgagggagctc

SEQ ID NO: 626766 - DNA, 50 bp, Homo sapiens
ggagacgccgccgctgcctcccgcgaaccagcacctatgacagaagatct

SEQ ID NO: 626767 - DNA, 74 bp, Homo sapiens
cagagcaccgcggcgccgagcgcagacccgagaggtgtgggccaggtcgtgctccaggttgctgctgccaccaa

SEQ ID NO: 626768 - DNA, 98 bp, Homo sapiens
tgaactaaaacacaaagcaagagaaaaaccttatgatagtaaaagtttgcggacgtcctggacccaagccagaagcctctgcaaagcttccttccaga

SEQ ID NO: 626769 - DNA, 50 bp, Homo sapiens
ccgcgggtgcgctgccggtgacaggttttgctgttactgctcagtgtagt

SEQ ID NO: 626770 - DNA, 50 bp, Homo sapiens
gaacttgcagttgaaggagtataacacagatttgagttctgtgaacctgc

SEQ ID NO: 626771 - DNA, 100 bp, Homo sapiens
cccttcgtgaacggggtcctcttctgcaaggtccggctgctggatggaggggattttgtcagcttgtcgtcaaggggtattccctcagcggatactacac

SEQ ID NO: 626772 - DNA, 100 bp, Homo sapiens
ttcccgctggcgcgcagcctcagctaggctccaggaggccagagctctactgaagcggcggcggccccgggggccagggggccggggactactgagaagg

SEQ ID NO: 626773 - DNA, 90 bp, Homo sapiens
gctgctagaggaggaaaaggaaaaaaatcgccaagtggagttccaagcaggtctacgacgttcctccatcggtgagcaaggatgtgcccg

SEQ ID NO: 626774 - DNA, 100 bp, Homo sapiens
ctccagaaacgggtcctgctgctcaccaagcaaattgtggctactaatttgccccctgaagatcaagatggctctggggatgactctgacaacttctccg

SEQ ID NO: 626775 - DNA, 100 bp, Homo sapiens
ctgaaagaacagatgagtgccaaaaggtgaagtggatcctaaagagaggatagcacgccaacgaaaattattacagaagaaacttggccttaatatggga

SEQ ID NO: 626776 - DNA, 97 bp, Homo sapiens
cctggcgcgatgcgtcaagtacactgaaattcatcctgagatgaggtgtggacactgccagcggctgcagccgacttggaatgacctgggagacaaa

SEQ ID NO: 626777 - DNA, 82 bp, Homo sapiens
acacgcataatggatgaaaggaaccgacagaaagtggatctcttcagcctgggaattatcttctttgagatgtcctatcacc

SEQ ID NO: 626778 - DNA, 97 bp, Homo sapiens
ataaaagttgaagaatctcttatgatgcctgcagtttttcatactgttgcttcaaggacacagcttgcattggatgaaggggcagtgatctcccaga

SEQ ID NO: 626779 - DNA, 136 bp, Homo sapiens
tgacccccattgcagaccagttccagcttggcgtgtcccatgtttttgagtatatccgttctgagacatacaaataatctttaatctcatgaagtacgacagctacagccgcttcttaaagtctgacttgttttta

SEQ ID NO: 626780 - DNA, 100 bp, Homo sapiens
tgaggcggacggcggggtccgggccggagtacgtcgttcccgctgcgctaggggaagcgggcaggcccagaataaagagaccagtgttttagctgctgca

SEQ ID NO: 626781 - DNA, 75 bp, Homo sapiens
cagccctcatcgcaactgggcccgcgcgcagcttcctgcctgacacagctcacttcaagaagtgcacaatgtcag

SEQ ID NO: 626782 - DNA, 87 bp, Homo sapiens
acaattcatatctcatggtgattcaagacattactgctatgcatcctaatgtcctatgatcacgtggaactcacattcaatgacatg

SEQ ID NO: 626783 - DNA, 50 bp, Homo sapiens
ccggcgtgttcatgcccccgggattttgggaaccagtaggacattgacat

SEQ ID NO: 626784 - DNA, 98 bp, Homo sapiens
tttgaacaaactcgaagaacagctgtggaaagaagttgcaaaacactgggtggacacacgtttgcaaaatggatttgctcctgggatgaagctggagg

SEQ ID NO: 626785 - DNA, 100 bp, Homo sapiens
ttttggatagcaatgatcccaatttccagatgccttgttcaacaggtaccttaacatggggaatcttcttaaagttttgacatgcacagaccttgagcag

SEQ ID NO: 626786 - DNA, 82 bp, Homo sapiens
ccctggtgcacacaccctcgtattctcctgcccttccccaggtttgggccccatggtatccctgtgacagtatttcccaaaa

SEQ ID NO: 626787 - DNA, 83 bp, Homo sapiens
ttgctcttctccgccgcggcactgatccccacagggttgtgagtcccggcccagcccctccacccccctgcccccccgatgcg

SEQ ID NO: 626788 - DNA, 83 bp, Homo sapiens
acatttcttcggcattctgcaacagaatccacattcatctcaatggaaggatcctgccttaagtcaacttatttgtttttgcc

SEQ ID NO: 626789 - DNA, 96 bp, Homo sapiens
gcagcggcagctccgcggcggcgtctgcccagggcagggctcctaaggaaggacccgcctttagcaggtgtcttctgcggaggtgcgcatcgggcc

SEQ ID NO: 626790 - DNA, 100 bp, Homo sapiens
cttcaagatggcggtgcaggagtcggcggctcagttgtccatgaccctgaaggtccaggagtacccgaccctcaagcaggattcctggttttcaagcctg

SEQ ID NO: 626791 - DNA, 75 bp, Homo sapiens
agagaacctcctaagagtcacccaaacaatcggctgagaatgagaagagtagagacagggtttcgccgtgttggc

SEQ ID NO: 626792 - DNA, 75 bp, Homo sapiens
gcctcttgatctccgccaccgtcttcaggccaggtcactatcatatgacaaaggctttgccgcagttcatcttcc

SEQ ID NO: 626793 - DNA, 74 bp, Homo sapiens
caatgaaacccccaagatgggcatctattacattccagtggaaaaccatgaattccttgtaaaaccttcatttg

SEQ ID NO: 626794 - DNA, 74 bp, Homo sapiens
aggtgtccttcttaaagttgtcacagctgctaaggaacacgggttggatgaaaaatctgacaaacagtatgctg

SEQ ID NO: 626795 - DNA, 100 bp, Homo sapiens
gccccgcgcagcgtctggtcactcgctctcctctggggactgcagagaagcaggacctcgggccatggcattgatatgaaccatggacaagtatattctg

SEQ ID NO: 626796 - DNA, 82 bp, Homo sapiens
tgccatgtatccgcagggcagacatccggttttaaaatcaaagatgggaaaatcggagaaaattgcccttccccatggccag

SEQ ID NO: 626797 - DNA, 88 bp, Homo sapiens
gttcatatagcatctggacagtcaacacgggcaccatgaagcacttcctgaggagatatgtcagtattgaattctcccagacatcaga

SEQ ID NO: 626798 - DNA, 100 bp, Homo sapiens
agtgacttgtttctggatgattctaagaggtttattcactggatctctgaatacccaggccccctccaccatggccagccggggtgggggccggggtcgt

SEQ ID NO: 626799 - DNA, 75 bp, Homo sapiens
ctggatggttgtgagggatgagaaaagaagatggactctagagttgctggagaatgtaaccctaatccataaacc

SEQ ID NO: 626800 - DNA, 100 bp, Homo sapiens
gcttatgggatacagctggacaagaagattatgacagattacgccccctatcctatccgcaaacaatggagaaggatgaaactgtgagtgactgctcccc

SEQ ID NO: 626801 - DNA, 98 bp, Homo sapiens
ccgtcagtccctaggtatccgcactgctcaggggcctcaggagtgcaagtagctgatgaagtatgtcgcattttttatgacatgaaagttcgtaaatg

SEQ ID NO: 626802 - DNA, 75 bp, Homo sapiens
gtgatttctgcatttccgactgaggtacaaggattccttgaaagaagacattcagaaagcagatcttgttattag

SEQ ID NO: 626803 - DNA, 100 bp, Homo sapiens
atagaaagagattgtggaatttcacagaggaggaagtctcagaacgagtgacacttcacatttgtgcttctacaaaaaaatctccatccagttcctggtg

SEQ ID NO: 626804 - DNA, 100 bp, Homo sapiens
aagttgattactcagtctctaaaaagctaagaaatggtggagtcaatgaagaaagtagcagggatggatgtggagctgacagttgaagaaagaaacctcc

SEQ ID NO: 626805 - DNA, 101 bp, Homo sapiens
ggccgagggaaagcaagaatatctgttcctgcaactgcactgattctagaaacactctctattcgaactctcatgaggactcacaccacccggcaagaact

SEQ ID NO: 626806 - DNA, 75 bp, Homo sapiens
agttgattgactatggtctctccggctaccagattcaccagaccagagcacttgggcagcagcgccaagatcaag

SEQ ID NO: 626807 - DNA, 76 bp, Homo sapiens
ctggaactgccggattccctggatcccctggtgctaagtgagaactacctggttcgctggtccagttcaggattac

SEQ ID NO: 626808 - DNA, 88 bp, Homo sapiens
gacgctatggcgcactggagtaccctgttcctggcaggacagagcagaatgggctgatatagatccggtgccgcagaatgatggcccc

SEQ ID NO: 626809 - DNA, 101 bp, Homo sapiens
gacaggagtactccacagaggataaatttcaacctccggggccacaatagcgagttaatgacagttcggactatcacaggaaatatctactatgcaaggtc

SEQ ID NO: 626810 - DNA, 100 bp, Homo sapiens
ggccctgcggctctgggagggggccatcagcatcccccggctgccctaggggccaggaccggcgtgacagcctccagcatctaggctgcttgtggaagtc

SEQ ID NO: 626811 - DNA, 82 bp, Homo sapiens
acatggagatgaagaagaagattaacctggagttaaggaacagatccccggaggaggtgctggagaatctggtaaaagcacc

SEQ ID NO: 626812 - DNA, 90 bp, Homo sapiens
ctgaggccccagaactatcttttcgcctgacatttaccccggtaactgctgggcatttaaaggctcccaggggtacctggtggtgaggct

SEQ ID NO: 626813 - DNA, 98 bp, Homo sapiens
gcatcctgatggaacagttctctatggactccgcttctcacctggggcgggtgggttctgcaccaccctcccaccctccttcctccgtgtggacgata

SEQ ID NO: 626814 - DNA, 74 bp, Homo sapiens
gataaagatgcagccaaggtcttagcagaagatggtaagaaggtgttttaccctgtggtgttcagtctttacaa

SEQ ID NO: 626815 - DNA, 96 bp, Homo sapiens
gtggagtggacttcctagcagagactaatagggatgccaaaggaaaaatatgatcctccagatcctcgcagaatttataccatcatgtcagcagag

SEQ ID NO: 626816 - DNA, 100 bp, Homo sapiens
ggggctggcctgcggcgcctgggcgctctgaggtggcagaactggtgaagccattgtagatgctgcgctgagtgctctgcgccagctcgtgaaggatcgc

SEQ ID NO: 626817 - DNA, 100 bp, Homo sapiens
tcagcatctgaaaagccataatcagcgcctggtggagcaggtgggatcccttcaagatgcgctagaaggcatctctgggaaaggacctggggctggtgag

SEQ ID NO: 626818 - DNA, 90 bp, Homo sapiens
ggaagctgggccagggattgggaaaatctcttcaggctctggaggctgccatcgagaacctcaatgaagccaagaactattttgcaaagg

SEQ ID NO: 626819 - DNA, 100 bp, Homo sapiens
ttcagaagagccaaggaataaacatgcaatgaacccaaaagggattttggcattagagaagctcggtgctgtcttcaatcaagtagccttcccactgcag

SEQ ID NO: 626820 - DNA, 73 bp, Homo sapiens
ttcgcagtctggaaagctttaggagttcacagtcgtgttacacgttcccaagaagaacttcgagaagataaag

SEQ ID NO: 626821 - DNA, 100 bp, Homo sapiens
ctggagaggggaacaaaatcacatgatccgcacccccagcatgaggcaggaggagcgctacctggttctgacaacaaaggagattgtgacatattgctgg

SEQ ID NO: 626822 - DNA, 88 bp, Homo sapiens
gcgctgcgcggactgcggcgccccgggagcgggacggtatgcgggccatcctggggtcctacgacagcgagctgaccccggccgagta

SEQ ID NO: 626823 - DNA, 75 bp, Homo sapiens
tggaggcgagcgttgggtgtggaacatcattctcaccaccagtctcttctctggacactttgccaccatcacctt

SEQ ID NO: 626824 - DNA, 100 bp, Homo sapiens
cccggcttcccggcttcccgtctcgtcaccctctggtgagccctattcccagaggcaggtggtgctgaccctgtaacccaaaggaggaaacagctggcta

SEQ ID NO: 626825 - DNA, 82 bp, Homo sapiens
cgggcggcttcctggcctgggcgctccggtggcggcggagatttatcagtcctggctagacaagtccacaccctacacggct

SEQ ID NO: 626826 - DNA, 100 bp, Homo sapiens
gcggcagcgggctcggaggcagcggttgggctcgcggcgagcggacggggtcgagtcagtgcgttcgcgcgagaattagacctttacgagaagcacagtt

SEQ ID NO: 626827 - DNA, 50 bp, Homo sapiens
cttgccccgggagcccgcgaggagagagaatctgaccaacacagttgatc

SEQ ID NO: 626828 - DNA, 100 bp, Homo sapiens
ttaactgtaggagatgaattgctttcccagttcaaggtgccagctattcaacagaaaagaacggtggcttttctaaaccaatttgtggtgcacactgtac

SEQ ID NO: 626829 - DNA, 75 bp, Homo sapiens
tgcggccaactccaatgggcctttccagcccgtggtccttctccatattcgagcctccagctctgagctttccaa

SEQ ID NO: 626830 - DNA, 100 bp, Homo sapiens
agaatatgactctctgcctgaaaatagcgagacaggtacatgtcccagagcaagcacacggaggcccgggagctcatgtactcgggagccctgctcttct

SEQ ID NO: 626831 - DNA, 100 bp, Homo sapiens
acaggaattcttcgcccagtaaacctctctttcggaaaccacccctactcctaatcccccgactacagaagaggagaaaacggaatctaatcaggaggtt

SEQ ID NO: 626832 - DNA, 76 bp, Homo sapiens
ggaccggcggcgtgaaagtcgtgatatcatcgttgaactgcccttgatgagcctccctatttgacagtgggcactg

SEQ ID NO: 626833 - DNA, 100 bp, Homo sapiens
ctggggatgaggggctctaacacctgtgagctaatctttgaagactgcaagattcctggtggtggaggtggatacagcagtcggagaacatctggcagag

SEQ ID NO: 626834 - DNA, 100 bp, Homo sapiens
cttggtgtgtcccaaaaattggtatcaccttcaaggagcacaagtagctgctcttccaagcaaggaagtcgacagacttgcttattatgaaattcgatat

SEQ ID NO: 626835 - DNA, 75 bp, Homo sapiens
ttgcaaaaacaagctcagggatcccactgattctactttacggacaacctgccattttgttctgaagatttgaat

SEQ ID NO: 626836 - DNA, 98 bp, Homo sapiens
agagccaccacaaggccaaggggcttccaagtgttagtggagtctgactggctggattttgggcacaagtttggagatcgctgtggccaccaagagaa

SEQ ID NO: 626837 - DNA, 75 bp, Homo sapiens
cctatttgaagtatttgacgaaaatagactggagccatgtctgaccaggacgtttggaagatcatatccatgcca

SEQ ID NO: 626838 - DNA, 75 bp, Homo sapiens
tctccttttccctctccctttccctaaggtcgcaatggaagaagagatcgccgcgctggtcattgacaatggctc

SEQ ID NO: 626839 - DNA, 75 bp, Homo sapiens
gcccctcaccatcaccatcctcatctctcttggccgctttggcagagatcacggagatggtggcacagctccacg

SEQ ID NO: 626840 - DNA, 110 bp, Homo sapiens
ccgcggccggcacatcctctcggtgttcccgctggcggcgggcatcttcttcgtgaggctgctcttcgagcggacctgaaggagaagaaggagaaggtggaggagaaggc

SEQ ID NO: 626841 - DNA, 75 bp, Homo sapiens
aagtcaaacgcagaaggactgcctcactgagcaaccaagaatgtgttcagagcaacattgttttgttgacacaag

SEQ ID NO: 626842 - DNA, 100 bp, Homo sapiens
tctgtgttctcagaagacgttctgtatttcagcttcctgctatgtgccctctttgttcctaaaggtggtccattatggctgacatgcaaaatctggtaga

SEQ ID NO: 626843 - DNA, 100 bp, Homo sapiens
cctggaccctgctcagaggactctatacagggacgtgatgctggagaattataggaacctggtctccctggatactgaagtactctttcccagtgggact

SEQ ID NO: 626844 - DNA, 50 bp, Homo sapiens
aggagacctggacttttgggtcaaaaggttgctccttgagggcaggacag

SEQ ID NO: 626845 - DNA, 100 bp, Homo sapiens
atgtctgtacctactgatggtgctgtaaccacctcacagattccagcttcggaacaagagaccctgttcattcggctcctaaagaagtagcagtgtccaa

SEQ ID NO: 626846 - DNA, 75 bp, Homo sapiens
aggtgcaggtgtctcttctcgccctggcggggaagcagaaggtgatttactacctctgcatcttattgaaagatc

SEQ ID NO: 626847 - DNA, 100 bp, Homo sapiens
cagcacatctgcagctgtggatcatcccccactaccccagacctcatcatcaactccatccaacacttcgtttactccgactcaagtgggtgagttcctg

SEQ ID NO: 626848 - DNA, 74 bp, Homo sapiens
ctgcaaaggaccgatcggcgggccgccatggcatcagatgaaggcaaactttttgttggagggctgagttttga

SEQ ID NO: 626849 - DNA, 83 bp, Homo sapiens
aaacttcaggcgaaagtgctgaaggagcaagagacagtcctgcaggctcagagtgcttgtgatttcacgtatttttgctgaac

SEQ ID NO: 626850 - DNA, 87 bp, Homo sapiens
gtgctccaggaggccagaaggaaatacatatgtgcagcgggggctacagcgagtggggctagatccccagctgccactgaatctggc

SEQ ID NO: 626851 - DNA, 75 bp, Homo sapiens
ctcagatgctgccagggtccctgaagagggaagacacgcggaaacaggtacatgtcccagagcaagcacacggag

SEQ ID NO: 626852 - DNA, 89 bp, Homo sapiens
ccgccagaggaagctggaggcgctgatccgagaccctcgctcccccatcaacgtggagagcttgctgacactacccgaagcagtccttc

SEQ ID NO: 626853 - DNA, 82 bp, Homo sapiens
ttgaaaagactgggcttgtccttgctggtgcatgcgtcgtcggcctctgggcagcagccttcaaatgtttatctggtgtgac

SEQ ID NO: 626854 - DNA, 50 bp, Homo sapiens
aaacccggacctcgcttacctgcatgctgatggaacagattaaaagggcc

SEQ ID NO: 626855 - DNA, 101 bp, Homo sapiens
acctatcctccttcaggaccaacatcctgtctacctttcatgaccaactacagttttcattgcaacgtctgccatcacagtgggaatacctatttcctccg

SEQ ID NO: 626856 - DNA, 50 bp, Homo sapiens
gccgtggccgtggggagaccgtcttgttatgtgccaagaaccttgcaaag

SEQ ID NO: 626857 - DNA, 101 bp, Homo sapiens
gctcgggaagctccatccgaatgtgtctgccccccaggttatgatgtgattgctcaagcccaatctgggactgggaaaacggccacatttgccatatcgat

SEQ ID NO: 626858 - DNA, 74 bp, Homo sapiens
ttcatttaccctttggtcggaacgtggtgaagttcatggatgtctatcagcgcagctactgccatccaatcgag

SEQ ID NO: 626859 - DNA, 100 bp, Homo sapiens
agagcttcctgcctggcctgcacttgctcacctttcagcagccgcccaatacctcccagcctgacaagctgtctgtggttcatgagaaaaaatcccaaga

SEQ ID NO: 626860 - DNA, 100 bp, Homo sapiens
atatccagaatgaaatccatgctcagagatgccaagaagaatctagacagacaggcctttctagaaaggaagctgttgaagttattgaagtacctgttgc

SEQ ID NO: 626861 - DNA, 53 bp, Homo sapiens
agtggtggtagcccacagtgagtcagggaaggatgaagccagcagtgtggagg

SEQ ID NO: 626862 - DNA, 97 bp, Homo sapiens
cctggattgaatttatttgattcttctgtatttgatacagaaatctcatcagatcaggctctgaacaagaaggaacacagagggtgcgacagcccag

SEQ ID NO: 626863 - DNA, 82 bp, Homo sapiens
aagccctcagtaccagagacagaagcagatggattcgtccttttaggcattgaatgccccagaggagcccgaaacctcccag

SEQ ID NO: 626864 - DNA, 82 bp, Homo sapiens
gactacggtgaaatccccaactttccccgaagtacagacaatgcagatcttcgtgaagactctgactggtaagaccatcacc

SEQ ID NO: 626865 - DNA, 83 bp, Homo sapiens
cattctcatgaagcagctgcagcagcagcagcacagcgacaagacggtgagaagccctaccactgcaactgggacggctgcgg

SEQ ID NO: 626866 - DNA, 83 bp, Homo sapiens
gttcttccaagaaaccaacattcccaacagccaccaccaccaccagatgggtttcgtggctgtcccaacaaaaaatcccgatg

SEQ ID NO: 626867 - DNA, 98 bp, Homo sapiens
tccttggtcgccgcgtccttggctggcgtacacaactcatgtacaaatgggccaagccgaaaatctgtagcgaggaccttgagggggcagtgaagctg

SEQ ID NO: 626868 - DNA, 97 bp, Homo sapiens
aaataagctatatactttggttacctatgtacctgttaccactttcaaaagtggtctcatggattataaccatttggatatttggttcactaacaat

SEQ ID NO: 626869 - DNA, 100 bp, Homo sapiens
tgaagtttacccggatggcctgactcatcccagagatttggaaacatctcaccacgcacagaaggcggcaaaatattctgtatcatctatgccttactgg

SEQ ID NO: 626870 - DNA, 100 bp, Homo sapiens
cgccgcgctcagcgacaaacaagggggctttctctgtggtccgacgctgtgtcaagctctgcaccggccatgagtatgcagccaagatcatcaacaccaa

SEQ ID NO: 626871 - DNA, 82 bp, Homo sapiens
ccgggctaagcgtcggcaagttctgtagagaaactcgggcaacctttggtgagaagccctaccactgcaactgggacggctg

SEQ ID NO: 626872 - DNA, 90 bp, Homo sapiens
acagaagctcatccgcaaggtgtccacgtcgggtcagatccgacagaagatccttgatgaatggtttggccggaccatcatccgctcctg

SEQ ID NO: 626873 - DNA, 98 bp, Homo sapiens
acaaagtggaatttcctactgtatcatgatcatcataggagtggagaacatgcacaagtgcatccagatcaacaccgactccagcctcctcaactccg

SEQ ID NO: 626874 - DNA, 75 bp, Homo sapiens
acagacccaacagcattgacccagctctacggcgatttggtcgctttgctgttcgtgatatgagacagacagttg

SEQ ID NO: 626875 - DNA, 83 bp, Homo sapiens
cttcggtggactccttcggcagtccacccaccgccgccgcctcccaggttctggaggacacgtgccggcggcaggacttcaac

SEQ ID NO: 626876 - DNA, 73 bp, Homo sapiens
ccacttcaaacattcgtctcggaaaccccgcctcttacagtcacgagatttggtgcttccagatgtgagttat

SEQ ID NO: 626877 - DNA, 100 bp, Homo sapiens
ctgcagctgtggggagatttcagtgcattgcctcccctgggtgctcttcatcttgggcaatttcagaactggtcagcccagacatcttcatgcagtctca

SEQ ID NO: 626878 - DNA, 74 bp, Homo sapiens
tcagatgtgaagtccattaaagagtgcctggaagagctgggatgtctggttgagtcctatggcatgaatgtttg

SEQ ID NO: 626879 - DNA, 109 bp, Homo sapiens
gggacagggactgctgcaacctacggggtgtacttgggaacgaggggtgaagcggcccaggtgtcatggagaaactccagctgggcccagagattctgcagcgggaaaa

SEQ ID NO: 626880 - DNA, 100 bp, Homo sapiens
gccgccgccgccgccccgctcggtcctccacctgtccgctacgctcgccggggctgcggccgcccgaggaacagatggagtcggataactgttcaggagg

SEQ ID NO: 626881 - DNA, 89 bp, Homo sapiens
agcctcagttggaagcagccgatccagcctgcggagcctgtggggcaggatatttggccttgacattaaaggcagagactgtggcaatg

SEQ ID NO: 626882 - DNA, 83 bp, Homo sapiens
atggacctgacccaactgatacagccccaggagaggttgatgataattagaagcatgctttccactgaacttcccgacaacat

SEQ ID NO: 626883 - DNA, 75 bp, Homo sapiens
gatgtcccagaaattccagcagttccggggcctctgtgagcaaaacttgaattcttccatctctatgacaacaag

SEQ ID NO: 626884 - DNA, 74 bp, Homo sapiens
gaaaatcagaagacaaacttgccaaagctacaagagacagattggaaccaaccagatggctgtgtgtgccaaag

SEQ ID NO: 626885 - DNA, 90 bp, Homo sapiens
aagtactgagcctgttggaggaactggcccggaaacaggaggacgagagagcaagccacatcagtgctcctggcagatccctgcttccag

SEQ ID NO: 626886 - DNA, 100 bp, Homo sapiens
tggttggaaaacccaagatatttatcattcagatactcatttcaaagaacttccaactcttctccactgtgcagcaaaatttggcttaaagaacctggct

SEQ ID NO: 626887 - DNA, 100 bp, Homo sapiens
gtcaacaaggacaacaatgagatcgtggacaagatcatgggcaaaggacagatccagttccagggtctccctccactgctgtagtaacccgggtccgggg

SEQ ID NO: 626888 - DNA, 95 bp, Homo sapiens
gtgtacctgggctcgagcctgcacatgaagattttgagaagagggggaaaaaggaagtttgtcctgtcctggatcagtttctttgtcatgtagcc

SEQ ID NO: 626889 - DNA, 75 bp, Homo sapiens
agaaatagcaagaactgaggagcaccaggagacgcaactcatcggacggtctggaaaatcccgaagcagaagccc

SEQ ID NO: 626890 - DNA, 51 bp, Homo sapiens
gacaaggcactgctttttcatgacggagaactacgatgacccgcacaaaac

SEQ ID NO: 626891 - DNA, 75 bp, Homo sapiens
ctacaatgcaggactgctctcctactacacgcttggttctacagccattgggatccagacatcagagggtgtgtg

SEQ ID NO: 626892 - DNA, 100 bp, Homo sapiens
ctatcggggtgaacgcatcaatcagctcatccgtcagctgaactagacccagggcttctttcggcgaacgattcgactcaagctggtgtatgacaagtgc

SEQ ID NO: 626893 - DNA, 75 bp, Homo sapiens
atcaacaagatgttgtcctgtgctggggctgacagcccaaggagctggatccctctgctgtgctccccttagact

SEQ ID NO: 626894 - DNA, 100 bp, Homo sapiens
ctgggaaatcagggctccttcttaactaaaggtgctgcagaaattggggaaagctgtagaaaccaaagatgaacgatttgaacaaagcgctagcaacttc

SEQ ID NO: 626895 - DNA, 83 bp, Homo sapiens
cgaatcacttaaaggagtggacattgctagcaatgagctcccaaagccatccagcaattctgtggtgttcttggtcacacatt

SEQ ID NO: 626896 - DNA, 100 bp, Homo sapiens
aagaacaccaagcatcactggatgttaacaatcctcgggactttatcgattgcttcctgatcaaaatggagcagggcacaaccatattaatttccctgac

SEQ ID NO: 626897 - DNA, 100 bp, Homo sapiens
tagagaggaccccggtacatctgaaagccgggaaatgattacataccggttacggcacctccttcgtgcaaggtgtgatgcatccccagtgaccaacaac

SEQ ID NO: 626898 - DNA, 75 bp, Homo sapiens
ggaggaaggaggagcagcagactcggacgtggacgcctttttccggacaggattcactccttctccagttgcaca

SEQ ID NO: 626899 - DNA, 100 bp, Homo sapiens
aagacgtccacgtgcactccctgcactgctactttgttcgggcagattttatttggagagaagcaagcatctttgcctctttggagtaggaaattcagac

SEQ ID NO: 626900 - DNA, 112 bp, Homo sapiens
cagctgacatatggaaatgtcagtccaatacagacctcagcttccccattatttcgaggaaggaaacaactgtgagtggaattgctgagtcatgtggcaaactaccagttct

SEQ ID NO: 626901 - DNA, 50 bp, Homo sapiens
gaccgaaggctccgctcacgcccgggcatgtggagaccccaaggcaaaac

SEQ ID NO: 626902 - DNA, 100 bp, Homo sapiens
gctacaattccgatatcaacgaatggagcctcatcacctccagtccacatccaggatagtggccaaagcctccaagaacctcatgtccacgcaaagcttg

SEQ ID NO: 626903 - DNA, 99 bp, Homo sapiens
agcctctacatcgagatcccgggcggcgcgctgcccgaggggagcaaggacagggcggcgactggcggcgcgatggacctgaccgggctcctgctggac

SEQ ID NO: 626904 - DNA, 51 bp, Homo sapiens
gctgctgctgctgctactacttacaagttctcctgaaaagaaagctgaaca

SEQ ID NO: 626905 - DNA, 90 bp, Homo sapiens
gcccctgtctgtgctcaggactcttgcagacctctttacctggctgttcatcttccataatcaactgaattgtggtggttttggactcca

SEQ ID NO: 626906 - DNA, 75 bp, Homo sapiens
acggactcgtatcggtaccccaggacaggatccatgctgcagaatggtgtctctgattttgagaccaagtctttg

SEQ ID NO: 626907 - DNA, 100 bp, Homo sapiens
ggcaaatggaagcctcctatgattgacaatcccagttaccaggagtggacgcttctcttgtgagccagctggaggtcttacctctttgactgaaccaccc

SEQ ID NO: 626908 - DNA, 74 bp, Homo sapiens
cagagccaaaatcagagctggaacctgaggagagaggctttcatgagaaggacaagaagccatattgccgaaag

SEQ ID NO: 626909 - DNA, 83 bp, Homo sapiens
cctgatcatcctgctgggcttcgtccagatcgggaagggctaagtcctatcagccatggaaacaccattgctctcttcttccg

SEQ ID NO: 626910 - DNA, 75 bp, Homo sapiens
atagactttcacaaattctaacagatttccccaaattggatgtggcgacatgtctaagaatgtgagccagtcaca

SEQ ID NO: 626911 - DNA, 100 bp, Homo sapiens
atttatggagcatatattatggaacacaggtgcaactggaaactgacttgaagattgagaaggaatggaggcagactttgcaggaagatcttcaaaagga

SEQ ID NO: 626912 - DNA, 75 bp, Homo sapiens
cgctcgtcatggcctacccgggatacggaggagggactgagaactatgagcagagaatacgtgaacaacaggaac

SEQ ID NO: 626913 - DNA, 100 bp, Homo sapiens
aaagcttactgctcactaccatacctcagatagggtccacagaatggtcagaaaccctccataacctgaaggactttgtgttttatgccccacgtctgag

SEQ ID NO: 626914 - DNA, 50 bp, Homo sapiens
ctcatcttaaccatgatctatattcagcatgattatgatatgagggtgga

SEQ ID NO: 626915 - DNA, 50 bp, Homo sapiens
tgacttcttcctgctgctgcttttcagggctgttttggaaagaagtgagg

SEQ ID NO: 626916 - DNA, 118 bp, Homo sapiens
agtcagcgtcggagacggaggccctgccctcagagacgcgccccctagtggaagcagagtgggaagcagccgtgctatcaagactaatcaggaccttctcccagaaactccatggacg

SEQ ID NO: 626917 - DNA, 90 bp, Homo sapiens
agcagctggaagccgtggctgcgctctcttccctctgctgggcgtcctgttcttccagggatcctcagtcttccacaatgaaccctgttt

SEQ ID NO: 626918 - DNA, 76 bp, Homo sapiens
cagaaagtgaacttggcattttagatctaattcaaccaccaccaaagatccctgacaagcagttagatgaaaggga

SEQ ID NO: 626919 - DNA, 82 bp, Homo sapiens
aataaatctgatattgcaccttcacagcaacaaggtactgagtttgagggtgcagtcatagctctgttccatttgttggcca

SEQ ID NO: 626920 - DNA, 73 bp, Homo sapiens
atcgatgatcccacagactccaagcctgaggttgtaagcaggggttccagttaatacaagtttctgaatattt

SEQ ID NO: 626921 - DNA, 88 bp, Homo sapiens
gccgccgacgccgcgggggcaccggattctgttgggggctgaagcgaggtctctttattactatccacgatcgagggcatattgcttc

SEQ ID NO: 626922 - DNA, 78 bp, Homo sapiens
ggccgcggcgccgagtcgaacggggagccgagctggagctgccgcggcgcagccaggaagtcctgacggccacgctgg

SEQ ID NO: 626923 - DNA, 75 bp, Homo sapiens
catcagtgatgaatgcaagaggcgtttctataagaattgaaagggtttgatgtgttcaatgcactggatctcatg

SEQ ID NO: 626924 - DNA, 135 bp, Homo sapiens
ggagtctgagcagcgaccacccttttcccagctgcatcggttcctggcagaggatgcactcaacacgctctcaaaggtctatggccctgtgttcactctgtattttggcctgaaacccatagtggtgctgcatgg

SEQ ID NO: 626925 - DNA, 51 bp, Homo sapiens
aagaaacctctgcactagaagcaagcagaatcctcactatggatgggctca

SEQ ID NO: 626926 - DNA, 74 bp, Homo sapiens
agagctttacgatgtcacttgggaaggaacttagtgatttggcccgtgaccctccagcacaatgttctgcaggt

SEQ ID NO: 626927 - DNA, 87 bp, Homo sapiens
tggaacacctcaagattcacctgaattgaggcaacagttaatacagattctgttcatcttgctctgaaattaaataattctgaactc

SEQ ID NO: 626928 - DNA, 97 bp, Homo sapiens
gtgaccccaacagtggatcctgttactgcaaacgtctagtgactggacgtggatgtgaccgctgcctggctcagatgaaggactttcaaagagagct

SEQ ID NO: 626929 - DNA, 50 bp, Homo sapiens
gttcccggggcagatccaggttcaggaccagtcctgcctctgttgtagaa

SEQ ID NO: 626930 - DNA, 75 bp, Homo sapiens
cggggcgcacgagggcaccatggcccagacgcccgccttcgacaagcccaaattcttctcaccactaaatccaat

SEQ ID NO: 626931 - DNA, 51 bp, Homo sapiens
ggggctgcttgctgaccgctaaatgcttcggttacccacagtctttcgcca

SEQ ID NO: 626932 - DNA, 108 bp, Homo sapiens
ccactgttcctggaggaatccgagaagagcagagcggagggagccccagacacgcccttgatggaggggagccgacctcgcagcagcctgagcctggccagcagcgcc

SEQ ID NO: 626933 - DNA, 48 bp, Homo sapiens
tcctctgtacgcccgttcactggtgacttcatggtcatgacgattttc

SEQ ID NO: 626934 - DNA, 51 bp, Homo sapiens
tgtgccccagaaatcgaaaattcctggtccagaactttacacagaaaaggt

SEQ ID NO: 626935 - DNA, 99 bp, Homo sapiens
ggcgaacgacccgacgcaagatggcgagtaaagagagaatgggtaccacagaccatgtcatcgtcctggcgtccacgaaccgagctgacattttggacg

SEQ ID NO: 626936 - DNA, 78 bp, Homo sapiens
tgctggctctgctgaaggccatcgtgcaggggcagcccgtggaccgggagcccgtggaccgggagccggtggtgtgcc

SEQ ID NO: 626937 - DNA, 101 bp, Homo sapiens
agaaaagtcttcagaccgtggacaatgtgctctttgcccctattatggagaaaggtgttccctaggggccaactcaccctatgcagcacagcccaccagct

SEQ ID NO: 626938 - DNA, 82 bp, Homo sapiens
cttgctgctcccgcccatctaattggctttggtctaggtcagctggccgccggcacctgtgagattgtgaccttggaccggg

SEQ ID NO: 626939 - DNA, 100 bp, Homo sapiens
cctccgtctcccgaatagcggtcttactcattttctacgtgtgtgttgagtgcaccatttgagagcacgtgtggttctcaaatataggcattctgatggg

SEQ ID NO: 626940 - DNA, 100 bp, Homo sapiens
atgatttatagctaagactccaggacacccctgaagccgagaaatggacttaaccaccaccatgtcgagcaaaagaacaaagaccaagaccaagaagcgc

SEQ ID NO: 626941 - DNA, 97 bp, Homo sapiens
gttgagtaccaaacagtccagagactcatccccgccctgtgggagaagcacagtccacagctgctgtattaaagtatgaaaataatgtgatgaatat

SEQ ID NO: 626942 - DNA, 83 bp, Homo sapiens
tgatcatcctgctgggcttcgtccagatcgggaagggagcatcagatccatgctgctgctgactcggagccccacagcttggc

SEQ ID NO: 626943 - DNA, 75 bp, Homo sapiens
taatcactccccagagaagaaggactctgatttcttcacagaacacactcaagaatcagagatcattgatttctt

SEQ ID NO: 626944 - DNA, 96 bp, Homo sapiens
ccaggagccaatggccacctttcctgtgccatatgatttgcctccagaactgtatggaagtaaagggtctgccctgaagcgtctctgcctaggcaa

SEQ ID NO: 626945 - DNA, 98 bp, Homo sapiens
caagatccacgctgacgcagagcggaaggagaatgccaattcctgtccagttgatcgaactctatttaagtgcatttgtattcgagctcaatttggtg

SEQ ID NO: 626946 - DNA, 75 bp, Homo sapiens
acagagtggagccatggctagaggcttcctgtgtccagtaccggttagtggtccgggatgtgaacacccttcaga

SEQ ID NO: 626947 - DNA, 87 bp, Homo sapiens
gagaaacatgtattggttattctaacagacatgagttcttatgctgaagcacttcgagagaattcaattcgtcataatctgtcccta

SEQ ID NO: 626948 - DNA, 88 bp, Homo sapiens
gctcatctcagaaggaggagagtgctgcttcaggaggagcagcctatacaaagaggtatccaaaccttgaaacctttgctctagatgt

SEQ ID NO: 626949 - DNA, 75 bp, Homo sapiens
ccttgtgggatgtgaaaactctgttactgaaggtggctggccgtgcggctggagtgtgtgggcaactgcatcgtt

SEQ ID NO: 626950 - DNA, 100 bp, Homo sapiens
tgtgtgcggctttggcagtgtggggaaggcttccggcagcttgaccttctctgtgacatccccctggatgtctcaattgattgaaaaagaaactgaagag

SEQ ID NO: 626951 - DNA, 98 bp, Homo sapiens
gccggagcgcgagcagagcggagacccccaggtcctgcgggcgcggcagacctcaacaccaacatcgaggatgaaggcagctccttctatggggtctc

SEQ ID NO: 626952 - DNA, 75 bp, Homo sapiens
acaacagggagggtctattgttaatgtagatgttgaaagtgtgatgaacagtgtggtatccctactcttgatcct

SEQ ID NO: 626953 - DNA, 124 bp, Homo sapiens
cgcgtccccactgaccagcgcgcaggacagcgccttcctcaacgacgcggacatggtcatgagctttgtgaacctgggtgagaagccctaccactgcaactgggacggctgcggctggaagttt

SEQ ID NO: 626954 - DNA, 100 bp, Homo sapiens
cagtgttcatggagttcattgaattatggcatagatcttgggaaaattgcggtggactataatgcgagtgcctggctgaccaagaatatggacccgctga

SEQ ID NO: 626955 - DNA, 83 bp, Homo sapiens
ccgccccaaagctttgcctcctcaccatgaacggccatcactggtgcaagctatatttaacggagatcctgatgaagttcgag

SEQ ID NO: 626956 - DNA, 100 bp, Homo sapiens
cggacctgagccgcgaggacacgggctgcaacctgcagcacatcagcgaccgggagaacatagacgagtgtgaacatggctacgcctcttcattcccgtc

SEQ ID NO: 626957 - DNA, 97 bp, Homo sapiens
caggactgcgccgcgtcttcctcaagatggaatcagtgtgagtggctttcccctgtccagtccttttcggcaggtcgttcggccccgagtggagggc

SEQ ID NO: 626958 - DNA, 88 bp, Homo sapiens
gctggtcctctggcttctgtccctgctcagtcggccaagaagccctgcccagctgagtcagtgctgattctctcaaatagagcttgaa

SEQ ID NO: 626959 - DNA, 75 bp, Homo sapiens
ccgctctccagcccgcttgaacgggaaaatggagctgatagtatcctggatcttggattagtagactcctcagaa

SEQ ID NO: 626960 - DNA, 97 bp, Homo sapiens
gttgaggcggacggcggggtccgggccggagtacgtcgttcccgctgcgctaggggaagcgggcagatttgtcccatcagatgaaaagaagaaacaa

SEQ ID NO: 626961 - DNA, 100 bp, Homo sapiens
ctgaaagctagaagaaaaggtgtacttgcaagaaacctcaggacttgagtaacagcaacatggaaaccacccctactcctaatcccccgactacagaaga

SEQ ID NO: 626962 - DNA, 96 bp, Homo sapiens
gccgtggccagctccactgagagaaccccaggtatcacctcttctgggctcaagatggacaacaagaagcgcctggcctacgccatcatccagttc

SEQ ID NO: 626963 - DNA, 97 bp, Homo sapiens
ctggcaaacactggaatcctactttttctatgttggggatcagccaggtgaggtaggttattcaggctctcctgctgaagctcctccaagcaagtca

SEQ ID NO: 626964 - DNA, 90 bp, Homo sapiens
cgccgccctcgcaacctggcagccgccgccgtggaaggaattactctgcttaatgtaagcaagctgaacattttgaagcttgctcctggt

SEQ ID NO: 626965 - DNA, 50 bp, Homo sapiens
gatgaaacgtcaggaatttactacacagccccactgcaggccccaccatg

SEQ ID NO: 626966 - DNA, 75 bp, Homo sapiens
tccaaagactgtggaacttttaagtggagtggtggatcagaccaaagatggtatcaaaggtgcagaatctgggac

SEQ ID NO: 626967 - DNA, 98 bp, Homo sapiens
tagcaggttccggcggacggcgttgcgaaggaccacagccgctttgtcaactgtgtgcgattctctcctgatgggaacagatttgccacagccagtgc

SEQ ID NO: 626968 - DNA, 100 bp, Homo sapiens
cggagcccgagtggatcggggacggagagaacacgagcccatcagagagcgcgccagccttggaaggaatccacggcattccagtgtgtcctcaagtggc

SEQ ID NO: 626969 - DNA, 89 bp, Homo sapiens
cagaatttatatagagatgtgatgttggagaactacagaaacctcgtctccctgggaggagatgttaaagtaacccatcttgcaggacg

SEQ ID NO: 626970 - DNA, 148 bp, Homo sapiens
gcgggggtccgcgctgcgctgctgaggccgggccggccgcccagacgctgcccgcgggcccggccacggcggagccaagacaccactgatgtgaagacgcaggagacaggacaaccccccgtgaagggtcctgtccacccaccactga

SEQ ID NO: 626971 - DNA, 50 bp, Homo sapiens
cccgcgttcacagccccagcgcaggaggagacatcacagctttcccagat

SEQ ID NO: 626972 - DNA, 83 bp, Homo sapiens
ccgagtccgaggtctacgacgacggcaccaacaccttcttctgcagttggaattgatcacaccttttcagttgtacttcaatc

SEQ ID NO: 626973 - DNA, 82 bp, Homo sapiens
gataaagatgatgatatccttctcaaccttgtgggatgtgaaaactctgttactgaagacattatacaacgtgaaggctgag

SEQ ID NO: 626974 - DNA, 100 bp, Homo sapiens
caaaacccaacagaccaccaaatgttgacctgacgaaattccacaaaacctcttctggaaacatggggccctcgtggaggtaaagtgcctgaatttcagg

SEQ ID NO: 626975 - DNA, 100 bp, Homo sapiens
ttacaagtaccgcttcgttccctggatcgcactgaacctaagccacaacccgagggtggagatctgcctagtgttactgatattcgaagacctcggctct

SEQ ID NO: 626976 - DNA, 100 bp, Homo sapiens
aaaatactttctcacttcaagcagtccacctgatcccggtgtcgactcctaagaatggaatgagtagcaagagtcgaaagagaatcatgcccgaccctgt

SEQ ID NO: 626977 - DNA, 83 bp, Homo sapiens
acttggagctagtctacaatcaacatgagaatgaagcaaagtcattctttgagaaactgtgaacctgaaagcatttctgattg

SEQ ID NO: 626978 - DNA, 100 bp, Homo sapiens
gaagcggccccagcactcccagctgcgcagggcctgccaggtggcgctcggcagaggtggaggagacactgaagcgactgcagagccagaagggagtgca

SEQ ID NO: 626979 - DNA, 75 bp, Homo sapiens
tcactgaagttggatggtctgttagaagaaaatggtattttaagcctggaatattgtgtgggtattattggtggc

SEQ ID NO: 626980 - DNA, 82 bp, Homo sapiens
gggattcccagccatggcagattcctccgggcagcagggctatgactttgcagccgtcctggagtggttcgcggagcgtgtg

SEQ ID NO: 626981 - DNA, 137 bp, Homo sapiens
cccggcaccatcaagcatggatcggcgctggacgtgctcctctccatggggttccccagagcccgcgcccaagttctatagaaattttagagtattcatcagatagtgaaaaagaagatgatttggaaaatgtccta

SEQ ID NO: 626982 - DNA, 97 bp, Homo sapiens
gtcgtctgagagctttacgtcatcttcgattagctaataaccaactgcaattcctacctccagtgcctgcccaagtgactgacttgcatgtggccaa

SEQ ID NO: 626983 - DNA, 50 bp, Homo sapiens
cccgttccctggaggtcctgtggaatgttcccagtgacctgacagcagag

SEQ ID NO: 626984 - DNA, 75 bp, Homo sapiens
ttctccactttcgccagcccgtgccgcgagcgcggcctgcaggagggcaacaggtttgtctatgctggctctaac

SEQ ID NO: 626985 - DNA, 100 bp, Homo sapiens
acccacacccacacgtgttcaatacacctcccacctgtcctcaggcatatcaaaggtattgggagagttgctgctacatctttaggaaatttgactaacc

SEQ ID NO: 626986 - DNA, 100 bp, Homo sapiens
aggcatcatggactgtgcgcccaagtggtatcctgaggtgcggcaccactgtcccaacactcccatcatcctagtgggaactaaacttgatcttagggat

SEQ ID NO: 626987 - DNA, 97 bp, Homo sapiens
tgagatcatgtcatcactcaaccaccctcacatcattgccatccatgaagctatccagtcagttcgctgctattcccatgggtcacaggagacagat

SEQ ID NO: 626988 - DNA, 100 bp, Homo sapiens
atcatgatgaaacttagacacagacagtcggcccaatatgtcaagacctctgatcactagatcccctgcatctccactgaacaaccaaggcatccctact

SEQ ID NO: 626989 - DNA, 83 bp, Homo sapiens
gttggaagcagccgatccagcctgcggagcctgtggggcaggtatctcattcagttgctaaacttatattagttaatttccac

SEQ ID NO: 626990 - DNA, 100 bp, Homo sapiens
gaacaggcttcggcgaacacaaaggtattctctactgccgctgatggtcaaacgcaagtggaaattaaagtgtgtcagggtgaaagagagatggctggag

SEQ ID NO: 626991 - DNA, 83 bp, Homo sapiens
atgcaatgagccattctcttctcacatacaggtgtcattccacacatccacaaatctctgattgggaagaaaggacaacagaa

SEQ ID NO: 626992 - DNA, 90 bp, Homo sapiens
tgacgggtctggagtgcgtgggggaccggctgttggcggagctagagccggtgcaggccacgcagaacaagacagggaagtatgtgccgc

SEQ ID NO: 626993 - DNA, 82 bp, Homo sapiens
ccagcagatggcggatgccctgcagtacctgcagaaggtctctggagacatcttcagcaggacctctggacttcgaggcata

SEQ ID NO: 626994 - DNA, 76 bp, Homo sapiens
cgccgctcaccgcagccccctcctggcgacccgcaagatgaagatgagctggattcccacaccatggtgaagacta

SEQ ID NO: 626995 - DNA, 71 bp, Homo sapiens
agcagcggccgggagcccttagggaggcaggccagaaatcagcgaggagctcaaggacctgatcctgaaga

SEQ ID NO: 626996 - DNA, 81 bp, Homo sapiens
cagattcgcagtggtcgcttcttctccttgtctgaagatgatgagaaactgaaaaagaggaaggagcgatttgggattgtc

SEQ ID NO: 626997 - DNA, 50 bp, Homo sapiens
agagttagagagagggatggtggttctcaggaatcagatagctcgcagtc

SEQ ID NO: 626998 - DNA, 51 bp, Homo sapiens
ctcaaatgagccaacctgagtcacaagggtgatcagcccatgacctaaacc

SEQ ID NO: 626999 - DNA, 96 bp, Homo sapiens
actccaataaatacattgagcatctgctgactcagcttgaggagcaacacaggagtctctggagggcctgctttcttccccgggcgatgtgcagag

SEQ ID NO: 627000 - DNA, 100 bp, Homo sapiens
ttcttcatcaatttcatagccatttattaccatgcttcaagagccattccttttggaacaatgatcgaaattgcccagaagcatcctgatatctatgcag

SEQ ID NO: 627001 - DNA, 74 bp, Homo sapiens
ggcaggccgagctctttgccctttacccatcagtggacgaggtgtgggaaccgctgagcagaacaccctccccc

SEQ ID NO: 627002 - DNA, 98 bp, Homo sapiens
ccaaggatctggggatcttcgcactatcccaagccgcggcccatggagcccgccggcccggcccccggccgcctcgggccgctgctctgcctgctgct

SEQ ID NO: 627003 - DNA, 100 bp, Homo sapiens
ggaacatctctttcaatgacaaaaagtttgtcattaaacccatcgacaagaaggcaccttggaagacttataaccctgccttctcccggttggaaatctg

SEQ ID NO: 627004 - DNA, 74 bp, Homo sapiens
agcaaaaggtgacagtcacagcttagtaggtcactttggtggcagttcatggagaatagcttgaggtgacaaga

SEQ ID NO: 627005 - DNA, 100 bp, Homo sapiens
ttcattcctcttcaagtacctgatgcaccagcttattccactaagctcaacaaatttcctgtatttaatattaatgatgacttgaatgatctgtgtacca

SEQ ID NO: 627006 - DNA, 76 bp, Homo sapiens
accacaaatttattcaagtcaattaccatcctttaccaggcatactggagcatagtgaaagagtctattttgaagc

SEQ ID NO: 627007 - DNA, 101 bp, Homo sapiens
caaggcaggcggcgcggccggcctcttcgccaagcaggtgcagaagaagtttagcagggcccaggagaagtgggaaaagcaaggatgaacaatttgcagtt

SEQ ID NO: 627008 - DNA, 75 bp, Homo sapiens
ctcgcttcagtcagtcgggccgcgccgcgcctcagctctgggaccagccaccactgttgccttttcaagaacggg

SEQ ID NO: 627009 - DNA, 100 bp, Homo sapiens
atagaagaatcccgtttactctatgagattcagaacagagatgaacaggctttcccagccctttcccatgcaaggatctcgtggctcctgtccgtgatcg

SEQ ID NO: 627010 - DNA, 101 bp, Homo sapiens
agctacccacgatgtttcagacagtccccgacacgtcgtcttacatcaaggttcccagtgcccccgacaagcccctgctggtgtctccatctcctgccaag

SEQ ID NO: 627011 - DNA, 83 bp, Homo sapiens
gttggaacttcgttgcttgcttgcctgtgcgcgcgtgcgcggacatggcctcaaacgatgccatggacaatattaccaggcag

SEQ ID NO: 627012 - DNA, 90 bp, Homo sapiens
cgccgcctccagggtgggcgcctttcgccgtggacgccgaccgtccgggacgaggggttgtagaaggtgatttagctgccatagaagcat

SEQ ID NO: 627013 - DNA, 82 bp, Homo sapiens
tggaggccctggagtccatctaccctgactccttcacagagattcagaatatacccccctggacaacacggttatcctcaaa

SEQ ID NO: 627014 - DNA, 96 bp, Homo sapiens
caaaacctcgctccggaaaggggacacctgtaattcgccaaaatgacgaacacaaagggaaagaggagaggcacccgatatatgttctctaggcct

SEQ ID NO: 627015 - DNA, 89 bp, Homo sapiens
ggagggttatccagcacctggaggatacctgctacctgttttgctgttactgctcagtgtagtcacaccttgaataagaaatggaaaac

SEQ ID NO: 627016 - DNA, 98 bp, Homo sapiens
ggttgtccacgaggaacaaattgtacatttgcccattctcaggaagagcttgaaaaaattgcggcgagcagtaagaagcagcgtgtggaaaagggaga

SEQ ID NO: 627017 - DNA, 100 bp, Homo sapiens
atcacgaggaattgaattaagtgatgagcatggagttattcctgatgaagctaaagctttgtctctgttggcaccagctaatgcagtggcaggtcttctg

SEQ ID NO: 627018 - DNA, 83 bp, Homo sapiens
ctcggctgcggcgggaactgcggacggtggcgggcgagcggctcctctgccagaggctgtctgtccccagaccccagagcacg

SEQ ID NO: 627019 - DNA, 100 bp, Homo sapiens
gatttgcctggtgaaggggtcccataagaccctgaagctggtcgtcaaaagaaccgggctgtgggtcggcccaaggggaagctgggcccggcctccgcgg

SEQ ID NO: 627020 - DNA, 73 bp, Homo sapiens
gactgggttcgcctgcccagcaaatgcgaagtactatactggcaattgctggagaagattttgcaattgttgc

SEQ ID NO: 627021 - DNA, 75 bp, Homo sapiens
ggaggacatctgggggccacaaatgctccttctcctggagacgcaactcaagccaaatatcatgcagcttcgtga

SEQ ID NO: 627022 - DNA, 75 bp, Homo sapiens
ctttgaacgcactcctcagagtccgactctcccacctgctaagaacactgatatttgcatttaatggggaacaaa

SEQ ID NO: 627023 - DNA, 75 bp, Homo sapiens
tgcccctgaaggcctcgctggagatcgagtaccaaaaatctgcagggacctgtgcctgggcttagggcctctggc

SEQ ID NO: 627024 - DNA, 83 bp, Homo sapiens
agcgcaccgacatctgcctgctcaaaggtgacgcggcgcacggcgcggatggtggccgagtggcagtgtgtgggcttctgcca

SEQ ID NO: 627025 - DNA, 90 bp, Homo sapiens
atcaccattggctgggaaggaaaaacagaatcagctgttccctgcgaaagacagcatgagtatctatgacgatattgatgctgacgtgct

SEQ ID NO: 627026 - DNA, 97 bp, Homo sapiens
tcgagaccacgcccggggcccaggaaggcaagaagcagtataagatgatctgccatgtgttcgagtcggaggataacaatgtctcccttttgcagag

SEQ ID NO: 627027 - DNA, 50 bp, Homo sapiens
tggtgatggtggcagccatagcatgggagcctggcatgcgtgggcagtga

SEQ ID NO: 627028 - DNA, 75 bp, Homo sapiens
tcaccgccatcattggacccaatggctctgactgcctgcgctgctgacttaaggccccaacaccaaacacagaag

SEQ ID NO: 627029 - DNA, 82 bp, Homo sapiens
ctgccatcagcaggaagcttggagacatgaggtgcgcgcggagccatggttatcatgtcggagttcagcgcggaccccgcgg

SEQ ID NO: 627030 - DNA, 83 bp, Homo sapiens
aagaagatgagaccgggggaggcgacgctaagttgctgatcgtggcgaacctgagagccagaagcaacaaagatgccaaggat

SEQ ID NO: 627031 - DNA, 56 bp, Homo sapiens
ctggaagggcgtcaggtccactgggaagagctgtctgaagagcagcagtttgtggc

SEQ ID NO: 627032 - DNA, 100 bp, Homo sapiens
ttccagtcctgaaagctgcattcatgagggagtgcctttccatccacatcggtcaagctggcatccagattggggacgcctgctgggaactctattgcct

SEQ ID NO: 627033 - DNA, 75 bp, Homo sapiens
acaacttcagttcctggaagctaaagagctcttcagagcctgccttctggtacaagatgcctgtggaatgttcgg

SEQ ID NO: 627034 - DNA, 88 bp, Homo sapiens
taatttctgttttcaaagaaatcaggtgaccaagaatatggcccaggtgaccaaagccctggacaaggccctgagcaccatggacctg

SEQ ID NO: 627035 - DNA, 75 bp, Homo sapiens
aacaagccaatcccaggaggaaaaacgttgctgccaaacaaggtgaatccgacccagagaggaaagaaacaaggc

SEQ ID NO: 627036 - DNA, 50 bp, Homo sapiens
ctgaggcgccgcggtaccatgaggcgccgatgtcaagccctccaacatcc

SEQ ID NO: 627037 - DNA, 83 bp, Homo sapiens
cgataccatcggacaggatttctccgcctcagcccaacggggaggttgatgataattagaagcatgctttccactgaacttcc

SEQ ID NO: 627038 - DNA, 98 bp, Homo sapiens
gccttgcaggacctgatgttgctttctcaatattctccttcacgaagacaagaagttttcagcctcagccaaccagccttcatctcctcgtcctccag

SEQ ID NO: 627039 - DNA, 100 bp, Homo sapiens
ggtgaattttcagctcgtttccttttgaagctgcccgtagatttcagcaatatccccacataccttctcaaggaagaagcattgcatgcatttattcagc

SEQ ID NO: 627040 - DNA, 75 bp, Homo sapiens
gccaaaacagttcattcatattcagcgtgtaccaacagtaccgttattgccaccacaagtaaaccagtccctcac

SEQ ID NO: 627041 - DNA, 100 bp, Homo sapiens
ctagtgttttcttatttagccggagtgagaagcaagaaggccctggacacagcaatatctctgggctttcacagttccaattgctaatccagcatttgtg

SEQ ID NO: 627042 - DNA, 98 bp, Homo sapiens
gacatggtcaagattgagaacctgaccaagggtttggagtggaagtcgagcgcttcactggttttactaaatcagacccagaacctggtgattgggct

SEQ ID NO: 627043 - DNA, 100 bp, Homo sapiens
ataaagtcagatcttgtgaatgaagaagcaactggacagttccatgtataccgttactgcgatggcagatcagaaagaaaccttttgtagcaatatcaag

SEQ ID NO: 627044 - DNA, 89 bp, Homo sapiens
aaactcttctgaaaggtgggcaacctagaaagccagttgatgccacttgctattggagttgtgggagttaaagttcctcgtaattttcg

SEQ ID NO: 627045 - DNA, 119 bp, Homo sapiens
catcctgccgcagctggcgcagcccacgctcatgatcgacttcctcacccgcgcctgcgacctcggcaccgtctgcgtcctgctgtccttccccttcatcttcagcccctgcctgggct

SEQ ID NO: 627046 - DNA, 50 bp, Homo sapiens
atcggtggaagaaaggagccttctgtacgaaggggaggaccaggctggcg

SEQ ID NO: 627047 - DNA, 100 bp, Homo sapiens
caggaaatcaaaatcaccagcaagtttcgaggcaaatacctctccattatgcccctcgcctcaagtactacagccttccagcagccttcccagacccaca

SEQ ID NO: 627048 - DNA, 82 bp, Homo sapiens
cttgccttgagtcagtgcgccgctctccagcccgcttgaacgataaactcaagccatggagggattactgcattacatcaac

SEQ ID NO: 627049 - DNA, 148 bp, Homo sapiens
cttaaatcctctttacatcatagactttcagctacttgaagatagccatcagccgctacgtgactcttttctccaggtccaggtgcaggtacagcagtctccgcaacaggtctcggctcagctctccccacaactcaccgttcaccag

SEQ ID NO: 627050 - DNA, 83 bp, Homo sapiens
cttacgtctgcggaagtgcagctgcctcagttcttagcgcaggaggaatgccagctcctgagcaggcctcattggtggaggag

SEQ ID NO: 627051 - DNA, 75 bp, Homo sapiens
tatcctctgagatcccagatcatgaggttttcaattcaaaaacagctgaactacttagtcatcatcaagtagaaa

SEQ ID NO: 627052 - DNA, 96 bp, Homo sapiens
ggaggcttggtgactccagtggcccaggaagacataggccaaggagccagacttcctgtgttaactccttcctctgccactttttaccttggggac

SEQ ID NO: 627053 - DNA, 100 bp, Homo sapiens
caaaggtgcctaccaaggtcaaaggctatgacaacctctttgctatgcccccacccgggccacccactctcccttggccacacctgccgggtgccacgat

SEQ ID NO: 627054 - DNA, 100 bp, Homo sapiens
acatcttcccagagtatgaatttctctatgatgagcactaacactgtgggacttggtttgcctatgtcaagatcacagatggctgagagctagcaaggaa

SEQ ID NO: 627055 - DNA, 101 bp, Homo sapiens
catcttatcagacgaaggcaaaatgtatggttatcctacctacaaagaaaaagtaaagaaaaggcctggaggccgcccagaagtgatctacaactatgtcc

SEQ ID NO: 627056 - DNA, 75 bp, Homo sapiens
gcctgctcggcttcgtcgctgccaacctgctgttctgaggaagaagcccctccagatggtgctgttgccgaatac

SEQ ID NO: 627057 - DNA, 82 bp, Homo sapiens
ctcagcgcagccctgcaggccaagcgcagcctccaccagatgaggacggggacttggttgccttttccagtgacgaggaatt

SEQ ID NO: 627058 - DNA, 99 bp, Homo sapiens
cttcggctcccacggcagacatggcgacattgacagtggtccagccgctcaccctggacagaggaagctgttttaggttatgtgaaagagatgtttcct

SEQ ID NO: 627059 - DNA, 101 bp, Homo sapiens
gaagaagatccgcagctccacgcagcaagacccgcgccgccgggacccccaggacgacgtgtacctggacatcaccggcctctggctgtacctggcaggga

SEQ ID NO: 627060 - DNA, 98 bp, Homo sapiens
aggccggcccccgagagccgccgacatgaagaaagacgtgcggatcctgctggtgggagaacggatttgtcttggctgttactatgacacgggaagca

SEQ ID NO: 627061 - DNA, 88 bp, Homo sapiens
ctattgtgaaggagggttggctgcacaaacgagaaaatggacccaagtggggtcaaagtgctggaaacagcagaggacatccaggaga

SEQ ID NO: 627062 - DNA, 100 bp, Homo sapiens
ggcaaccagtacagcaggaggcagtaaagaggtgaagcatattgcctggctggcagaacagcaacagccaactcagtttataaatccagaaacacctggc

SEQ ID NO: 627063 - DNA, 83 bp, Homo sapiens
aacggatcaagtgcttattacaggcctccggtgtggctgtctctgatggtgtcatcaaggtgttcaacgacatgaaggtgcgt

SEQ ID NO: 627064 - DNA, 82 bp, Homo sapiens
tgtaacttacgtgtactttaccaacgagctgaagcagatcgaagcaaagctgagatggatttgaaggagctgagcgagtcgg

SEQ ID NO: 627065 - DNA, 82 bp, Homo sapiens
acaggaggtgtagagaggaccccgggacatctgaaagccaggaaatgggtgctggtgacagctttgtgggagctctggcctt

SEQ ID NO: 627066 - DNA, 80 bp, Homo sapiens
gggtggcggtgacgacaggcagcaaaagaccagcgaccccgataacgtggtgttgtgcctgctggcggcggacgaggacg

SEQ ID NO: 627067 - DNA, 96 bp, Homo sapiens
ccaggagctgcggccccgtccggcccgggctgagctaaaaaagtccctgtacgccatcttctcccagtttggccagatcctggatatcctggtatc

SEQ ID NO: 627068 - DNA, 75 bp, Homo sapiens
agcccaagcccctgtcccctacgtcctacatgagggccatgaagcccccaggaggagaatcgagcaatctttttg

SEQ ID NO: 627069 - DNA, 76 bp, Homo sapiens
acgggcagtttgtcgaacgatgttggactcatagtcactgccagaaaggtgctcgcatttggcttttcgttggttt

SEQ ID NO: 627070 - DNA, 100 bp, Homo sapiens
acattcatctgggcatgcctgcagtactcttggcccatggacctgaaggagaagcacctgttcccagtgacctgacagcagaggagcgtcaagaactgga

SEQ ID NO: 627071 - DNA, 75 bp, Homo sapiens
ggcctcccgtttctggctccgggctgagcttcctggagaagaggaagctcttgagatctgtggcctgaaaggcgc

SEQ ID NO: 627072 - DNA, 75 bp, Homo sapiens
cctgtcgccgttcgctgcgctgccggattgacgagatgcctgaggctgccgtgaaatcaacagccaacaaatacc

SEQ ID NO: 627073 - DNA, 74 bp, Homo sapiens
cgcagccaggagatggttcgggcctagcggagccgggactggaggtggcagcacaccctgggccccccactccc

SEQ ID NO: 627074 - DNA, 75 bp, Homo sapiens
ccctggggatggcgcatcacacaccaaaggtgctgactctggctgcccaggagctgtctaggcctgggtgcctcg

SEQ ID NO: 627075 - DNA, 75 bp, Homo sapiens
atgttgtggctgttccaatcgctcctgtttgtcttctgctttggcccagactagggtatttaaattacttcaaaa

SEQ ID NO: 627076 - DNA, 73 bp, Homo sapiens
ttcagacactcagcacagcaggggaggaaataatgctggccatacagttgttgtggattctgtggaatatgat

SEQ ID NO: 627077 - DNA, 80 bp, Homo sapiens
cggcgcgggcaggtccacgggaagcctacacgcccaagacaatgcagatcttcgtgaagactctgactggtaagaccatc

SEQ ID NO: 627078 - DNA, 98 bp, Homo sapiens
ggggatggagaaccggtgtccagcggggctgcgggctacggctgttgccatggcaatgacaggctcaacaccttgctcatccatgagtaaccacacaa

SEQ ID NO: 627079 - DNA, 100 bp, Homo sapiens
gcgcagcttcctgctttaggttgacccccggagcaaaaacgtcggatatgaagcccttcggtgcattaaatgtctctcactggcagccaggaggcaggag

SEQ ID NO: 627080 - DNA, 76 bp, Homo sapiens
ctgtgctgcgcgacccccgcgcatgaataccctctaccatctgctttggtcagggtgccgctcgaggatttaaaag

SEQ ID NO: 627081 - DNA, 75 bp, Homo sapiens
cgggggtggaggtggtgcctctggcagtgacgaggacgaagtgtccgagacacggaatcgatttgaaggaacaag

SEQ ID NO: 627082 - DNA, 100 bp, Homo sapiens
cgggctcggccgccgcccctgccgaactgtctcagcaaacagcagctcctctcggccatccgccagctgcagcagctgctgaagggccaggagacacgct

SEQ ID NO: 627083 - DNA, 100 bp, Homo sapiens
ctgaatttgaaggtggaaaatcaacagtgaattgtagctacagctccttctattcacatctgggatgcaatgaacaagcagactttatctatcctaagat

SEQ ID NO: 627084 - DNA, 80 bp, Homo sapiens
accattgacgccatgtcgggttattcgagtgaccgagaccgcggccgggaccgaggacggttacctggcacgctggccac

SEQ ID NO: 627085 - DNA, 124 bp, Homo sapiens
acctaggaatgagagggacaggagtatctgaggatggagaactcagcaggtcgtgtagggataaaaagaactgtaaggtggtcttttcccagcaggaactgaggaagcggctaacacccctgca

SEQ ID NO: 627086 - DNA, 83 bp, Homo sapiens
ctcagacctgccaatttaccagagataattgataacaccctgtaacagctgatttaaaagattggaagacccgtttgagctac

SEQ ID NO: 627087 - DNA, 75 bp, Homo sapiens
tccgaggtgcctttctccaaaaggtggatccataaagaacccagccaacccgcagagggaggggaggggctgagc

SEQ ID NO: 627088 - DNA, 75 bp, Homo sapiens
gagaacacccccccatggaggcgagggacagtatgatttggtgaaatgcctggctcctattcgagaccccaagac

SEQ ID NO: 627089 - DNA, 75 bp, Homo sapiens
gggaaatcgggctgaagcgactgagtccgcgatggagggaactctaatgatccaggacaaagaagttaccctgga

SEQ ID NO: 627090 - DNA, 90 bp, Homo sapiens
gtaaaagcgaactacagtggatgggtgcagttcagggggctaagccagctctaccataaccagagtcagggactcttatcccagctgcaa

SEQ ID NO: 627091 - DNA, 129 bp, Homo sapiens
cctgaatcctgtttcctacccactattcagccattgggtcacaagcgatgaaaagagcaccttgaagaactccatccggcacaacctgtcactgcatagtcgattcatgcgggtccagaatgagggaac

SEQ ID NO: 627092 - DNA, 75 bp, Homo sapiens
tgatcatggacactctggagaagaaagacttcctgaaggttgctcacacccgagatgtgaggttccaggagcgcc

SEQ ID NO: 627093 - DNA, 76 bp, Homo sapiens
ccaaaatctgctttgaggataacctccgagagacacacaagattgcagtattttatgttgctgaaggacaagaaga

SEQ ID NO: 627094 - DNA, 100 bp, Homo sapiens
tgggacttggaaaaacagtacagtgccagaacagataaagcccagtgtaagccagcctcagcctgccaactctaataacggcacttccacagcaaccagc

SEQ ID NO: 627095 - DNA, 83 bp, Homo sapiens
ggaggaagtaggggtgcacctcagcactatcccaagactgctggcaacaggagccctctggcacaaatggaagaagaaagaag

SEQ ID NO: 627096 - DNA, 100 bp, Homo sapiens
gggcttcgatcccttctctgatttgctgtcagccatgaacggatggatgtgatgcctgctagccaaaaggatattttggagtgtatacaataatatccct

SEQ ID NO: 627097 - DNA, 100 bp, Homo sapiens
cggacattgaggctggatgctgcgatcccgcagcgggtcctcctcgccctggtatgatgccagcaccccatatggggggccctcccatgatgccaatgat

SEQ ID NO: 627098 - DNA, 100 bp, Homo sapiens
ggcaccgcggtgcgcaagcgcaaccgtcggtgggtcggggatcggtcgcctgagagcgtccgtctccaagagagtatgaagagagtgcgtctgtagggca

SEQ ID NO: 627099 - DNA, 82 bp, Homo sapiens
caggactcccgacttgacacgatattttttgctaagcagagaatggatcttggagaatgtctgaaagtccatgacctggctt

SEQ ID NO: 627100 - DNA, 75 bp, Homo sapiens
cccgagaagtacttaaaaaaacattggaattctgcttatctaggtggcctgcatgcagtttataaatgcccttgt

SEQ ID NO: 627101 - DNA, 100 bp, Homo sapiens
cggtgaccttcgcttggtgtcctcctggcctcagcaacctgacaattctgtcgtgtcccggctgtaacagaagacaagtacgaaatactgcaatctgtcg

SEQ ID NO: 627102 - DNA, 101 bp, Homo sapiens
ccggcgagtcgggctctggaggaaaagaaaggagatacaactcgtcaacgaatcaaattcagtgatgacagagtatgcaagagtcaccttctcaactgttg

SEQ ID NO: 627103 - DNA, 96 bp, Homo sapiens
aacaaaggcagtctgttgaggcatctggacaccacacacatcatcagtctggttcttgggtgtctctggggagtccctgggccagaccttcctcca

SEQ ID NO: 627104 - DNA, 97 bp, Homo sapiens
ccccagctctgcagccacatactatccgtttgttcaggaaccaccagtgacagatgtttgaaagatgtatggtgatcttgaaacctccagacacaag

SEQ ID NO: 627105 - DNA, 82 bp, Homo sapiens
cattcccgacggcccgcccctcaaggacaacctcggcctgagacaccggaggaccggggagtgcatccgccccaaccctttt

SEQ ID NO: 627106 - DNA, 90 bp, Homo sapiens
atggcggagaaggatgacaccggagtttgacgaagaggtggtttttgaggtagaacgtcatgacatgaataccttaagcctgcccctgaa

SEQ ID NO: 627107 - DNA, 101 bp, Homo sapiens
agaatcacgcccagaataaagccaagctcatctctgagacccggaggaggttcgaagctgagtatgtgacaggtttatcatgttcattccgatagctatga

SEQ ID NO: 627108 - DNA, 90 bp, Homo sapiens
ggtgtgattagcttcgcagtctggaaagctttaggagttcacagtgcttattgtgtaacagaacctggagcaggctctgatgtagctggt

SEQ ID NO: 627109 - DNA, 83 bp, Homo sapiens
cttgtggagccggagctgggcgcggattcgccgaggcaccgaggcactcagaggagttttgggaggtcatcagcgatgagcat

SEQ ID NO: 627110 - DNA, 100 bp, Homo sapiens
gataactcaggatttacttgaaacaaaaggagaccctaatcttcaggtattttgatcacaactatagcctccaagggagaattgcagaattggcctgacc

SEQ ID NO: 627111 - DNA, 88 bp, Homo sapiens
acaagtggatccttcagctcatgcacagttgcaaagagggctacgtgaaagatctgaaagttgtcgagatgtccacagaaggaggatt

SEQ ID NO: 627112 - DNA, 97 bp, Homo sapiens
acacgtgcccactttcaccttcagagtaaccgttggtgacataacctgcacaggtcttcatcctccaggtccacctttagcaagacctattctcccc

SEQ ID NO: 627113 - DNA, 100 bp, Homo sapiens
cgcagaagaactgaagactgttgtgtgctccccgcagaaggggctaccatgatcctttcctcctatgtcagtattgaatatggtggtgaggcgtgaccct

SEQ ID NO: 627114 - DNA, 75 bp, Homo sapiens
tcaagaggaagcaagatcattagttgaatcgtttcagaatggcttcggttattgcctttccttggtgtactcgca

SEQ ID NO: 627115 - DNA, 80 bp, Homo sapiens
gcacctagagacggatggtcgcacgcatgattgtcggcatctcacagagatgccctgtatccaagcccaatatgggacac

SEQ ID NO: 627116 - DNA, 75 bp, Homo sapiens
ttcaaagagccggatcgcaggctccctgcctactcccccaccggggatttcagaactctgacagcgtcccacctg

SEQ ID NO: 627117 - DNA, 75 bp, Homo sapiens
gcaaggctgagggacgagaacgagaaaagatgactccacagggtgagtgttctgtagctgagaccttaaccccag

SEQ ID NO: 627118 - DNA, 100 bp, Homo sapiens
gtgagacctgcctgaatggcgggaagtgtgaagcggccaatggcacggaggcctgcgtaagtccattggaatattaagcccaggagttgctttggggatg

SEQ ID NO: 627119 - DNA, 75 bp, Homo sapiens
cgggaaggtaccaaggattggagcacagaggctcagaagcaagtccaggacgtggtgggtcctctggtgcgaaat

SEQ ID NO: 627120 - DNA, 90 bp, Homo sapiens
caccatggaaaaagtgacttgagcaggaacatcatttacagcgagcaatttcagcacagcaagtgtttagagaaaaaaaagagagtatgg

SEQ ID NO: 627121 - DNA, 100 bp, Homo sapiens
gcagcgggaggaacattacttctgcaaggactttgtcaggctgaagaagatcccgacatggaaggagatggcgaaaggctggagtgcaatagctcgatct

SEQ ID NO: 627122 - DNA, 157 bp, Homo sapiens
catttgttggggagaagaggattggaggtgtcagtgttaaaggaacctctacaacgaaggtgaagccacggaagataagccgccgccgcgccgccgtcgctctccaacgccagcgccgcctctcgctcgccgagctccagccgaaggagaagggggg

SEQ ID NO: 627123 - DNA, 90 bp, Homo sapiens
cttaagaagatgagagagatagttggatggtcaagtaaagatggtgatgggatattttctcctggaatttttgagagatatcttcaatct

SEQ ID NO: 627124 - DNA, 100 bp, Homo sapiens
ctggattgagtccagctcttgggatggtattgctaataccctggatctcacagatagaattctacctaggcttcaagctagagaaaaatgtaagccacag

SEQ ID NO: 627125 - DNA, 75 bp, Homo sapiens
gcaatatggcggaggcggaaggggaaagcctggagtcctggctcagcataatcaccagcaacacccgggacaata

SEQ ID NO: 627126 - DNA, 101 bp, Homo sapiens
aagcagagctcaaaggactgaaaatggagatgtatgcatttcgattcttcatccgcctgtagatgacccacagagtggagaactgccttctgaaaggtgga

SEQ ID NO: 627127 - DNA, 100 bp, Homo sapiens
tggaccaggaggaggttttcaggaccaaaattgtggaaaagtcactctgatgaaatcatgcaccaggacatcgtcccgctctgtgctgccgacatccagg

SEQ ID NO: 627128 - DNA, 83 bp, Homo sapiens
aaaggggcctcagtggagcacgtgacaatgcagatcttcgtgaagactctgactggtaagaccatcaccctcgaggttgagcc

SEQ ID NO: 627129 - DNA, 91 bp, Homo sapiens
cctggagcctcagttggaagcagccgatccagcctgcggagcctgtggggcagacatatgtagagtgtgtcggtcagaaggaacacctgag

SEQ ID NO: 627130 - DNA, 51 bp, Homo sapiens
tgatgaagaggatgatgatgaagaattagtgatgatgaaccaggttatgac

SEQ ID NO: 627131 - DNA, 83 bp, Homo sapiens
gcatttgaaatgatggagaaggatgagctatgacttgctaaacaatctgttgttgcagagtgggcaggatcttaagacccgat

SEQ ID NO: 627132 - DNA, 100 bp, Homo sapiens
tggatctacaacatggagactggaagatggtttatacagtgcaatgcctcgagacatcctgatagttgtgggcaatgagattatcgaggctcccatggca

SEQ ID NO: 627133 - DNA, 90 bp, Homo sapiens
gaaatctttcgctccctacacaccctggttggacagatgaaggactgaaccatgaatgcaaactctgcagccagacctttgactctcctg

SEQ ID NO: 627134 - DNA, 100 bp, Homo sapiens
cttcctaacatccaggccgtgcttctgcctaagaagaccgagagtcaccacaaggccaagggcaagtgatttgacagagtctggctctgttgcccaggct

SEQ ID NO: 627135 - DNA, 74 bp, Homo sapiens
ccatcttcgcggtagctgggaccgccgttcaggccgaatacatcaagcaatggtaacatctttaaatgaagata

SEQ ID NO: 627136 - DNA, 76 bp, Homo sapiens
cgaaggctgaggtggcagcggcaggagagtccggccgcgacaggacgcggaatagaagatgaactcaactgaattc

SEQ ID NO: 627137 - DNA, 75 bp, Homo sapiens
gacagattcgcagtggtcgcttcttctccttgggaaatgatcttcattggttagcatgtgccttatatgtggctt

SEQ ID NO: 627138 - DNA, 100 bp, Homo sapiens
tctgggagctacaaatataccctgggttctggattctgccattaggcgaaggtattgaagcccctgggtgataatttgatggaggaaaacataaggcagt

SEQ ID NO: 627139 - DNA, 50 bp, Homo sapiens
gtcaacctgcgcccccagatgtcccaggatgtgttcgaaatgcgctttgc

SEQ ID NO: 627140 - DNA, 97 bp, Homo sapiens
cctcatgtctctatatgaccctgtggagtccaaattcatcagtggctgacaagattttgaaaaagaaagaataccctctttatataaatcaaacctg

SEQ ID NO: 627141 - DNA, 83 bp, Homo sapiens
ggtgatttcaacttccggctggattccaagtccgtcgtggagcaaccatgtccaagggacctgcagttggtattgatcttggc

SEQ ID NO: 627142 - DNA, 100 bp, Homo sapiens
cgagacgcggcgcgcacgctccggcctgcggtacttcacatgatttcaagtatggtttgatgcctggtccttcaaatgatttcaagtatggattgatacc

SEQ ID NO: 627143 - DNA, 100 bp, Homo sapiens
tggggtgatgcacaatgggacgaccatcctggatgaatacgggcacaatctggaccgcctcaagggacatcgcggtggaggaagatctcagcagcactcc

SEQ ID NO: 627144 - DNA, 100 bp, Homo sapiens
gagctggaggagctcacggtgcaggtggcccgggtctataatgggcggctcaaggtgcagcgcctctgctcagcgtccttgagactttgtgctgcgcggg

SEQ ID NO: 627145 - DNA, 98 bp, Homo sapiens
ttccacaccgctcaaatgttatctgggaaattaaagttctacgtaaagagagtatggagctcgtaaaattaacttggcgggagatggatattcgaatc

SEQ ID NO: 627146 - DNA, 75 bp, Homo sapiens
ggccgcatccgtttccacgactttctgggagactcgccttctggcggccgcccctggtttctcctggggggtgat

SEQ ID NO: 627147 - DNA, 75 bp, Homo sapiens
gggtttggctcaatggaggaattggtgctcctattgtacagctaaaagatggcggcaaggcagcccaggcaaatg

SEQ ID NO: 627148 - DNA, 74 bp, Homo sapiens
ctcccatggcgcacattaccattaaccagtacctgcagcaggtcacggagctgctggacgtctccatggagctg

SEQ ID NO: 627149 - DNA, 97 bp, Homo sapiens
ttcgcagtggtcgcttcttctccttggcgaccatggccttgctgggtaagcgctgtgacgtccccaccaacggctgcggacccgaccgctggaactc

SEQ ID NO: 627150 - DNA, 80 bp, Homo sapiens
agtccccgtacgcctacagtaacggcctcacccccatggccagtctgtcatcacggtgatcgggggcgaggagcactttg

SEQ ID NO: 627151 - DNA, 100 bp, Homo sapiens
gtgggggaggcgaacagtctcgttgctgcctctgtgtacgctgaggggggaggctggcgcccatgcggctctacacgctctccaagcgccactttgtcct

SEQ ID NO: 627152 - DNA, 83 bp, Homo sapiens
attggaagctaaagctaccaaagacgtagaaagaaatcttagcagaaatggtggagtcaatgaagaaagtagcagggatggat

SEQ ID NO: 627153 - DNA, 100 bp, Homo sapiens
agatggagctgcgccgaggccagatcctctggttccggggcctgaaccgtatccagactcaggtaaaataccatgaagattttgaaaaaacaaaggggag

SEQ ID NO: 627154 - DNA, 100 bp, Homo sapiens
caaggtttgaaaagcagctggcctgcaagactatagggtatgaccccatcatttccccagaggtctcggcctcctttggtgttcagcagctgcccctgga

SEQ ID NO: 627155 - DNA, 75 bp, Homo sapiens
ctccactttcgccagcccgtgccgcgagcgcggcctgcaggagccgcttacaaacacgcagatggcaagaagatt

SEQ ID NO: 627156 - DNA, 89 bp, Homo sapiens
cccacgactgcctgggacctggccaagggctccacacaccaagaccaaggtcctggcattgatgtgcctgctccagacatgagcacagg

SEQ ID NO: 627157 - DNA, 75 bp, Homo sapiens
tatggtgaaacaccactgaagcattgccaagtccaatatcagatggaaatgatgcggagccttcgccatgtaaac

SEQ ID NO: 627158 - DNA, 75 bp, Homo sapiens
ggcgacccaggcatctggggagccacagaagtcgtactcccttaaaccatgaaggatttgggggcagagcacttg

SEQ ID NO: 627159 - DNA, 95 bp, Homo sapiens
aaagaatgatgagaaacttaaaagatctggctcaccgaatagccagtggcgaagaggatcaatgtgactctaagaacaaatggatgaatgaatat

SEQ ID NO: 627160 - DNA, 95 bp, Homo sapiens
tttagcaaacactgcacagcaatcagaaacttttcagtttcttgcagattttgtggaagtataatactttgtcattatgagatgtcgtctctcgg

SEQ ID NO: 627161 - DNA, 90 bp, Homo sapiens
cagccatcagccctactccggaaatttcttcagagactcctggatagtttttggattcaaagcataaaaaccattacaagatatacaatc

SEQ ID NO: 627162 - DNA, 100 bp, Homo sapiens
gacggccgctgcctaagctggaaacttcgttccagagcccagcatgaatggatacgcggaatttccgcccagccccagtaaccccaccaaggagcccgtg

SEQ ID NO: 627163 - DNA, 90 bp, Homo sapiens
tgcatgttagtgctcaagagcctcattatctaccacccgagatgccccaagatcctggtgtatagcctggaagcaggacgccgcctcttg

SEQ ID NO: 627164 - DNA, 51 bp, Homo sapiens
gatggatcactgataaatcctacagtgtttccctcttgttgcccaggctgg

SEQ ID NO: 627165 - DNA, 100 bp, Homo sapiens
ccccaacaccctctacgaaggcggctacttcaagactgcttttcaggaagccttggacgctgcaggtgataaacttgtagtagttgacttctcagccacg

SEQ ID NO: 627166 - DNA, 100 bp, Homo sapiens
gggaggccggccggtgccagcacctttcggcttctgagacggcggcagcagcggcattcagctgccactgcagagccccgccatggaagacacgccgttg

SEQ ID NO: 627167 - DNA, 118 bp, Homo sapiens
cttccactttgccgacagtaaacagaatgtcccttcaggaggccccgtgccatcgccacagacctacaggttatttaggaggattcgatggcaattttttgtggaacagaattggagc

SEQ ID NO: 627168 - DNA, 75 bp, Homo sapiens
caaaatgtcaacaaattgatgggcacgtgtggttctcaaatataggcattctgatgggaacttgtgtgttaaagt

SEQ ID NO: 627169 - DNA, 100 bp, Homo sapiens
gccgacatcaattacgccaatgtggacggactcactgccctgcaccaggtatgactgattttcccaaaatattttgtgaaacttctcagaagttggtgag

SEQ ID NO: 627170 - DNA, 89 bp, Homo sapiens
accgcaactctcagttcgagagtaaaggtgtctcccagtctgctaaagccctaaggccatcaccatggacttccagcatcgccccgggg

SEQ ID NO: 627171 - DNA, 109 bp, Homo sapiens
ggcctgaaggagctgggcctcttggattgcgtctcctacatcaccggggcctcgggctccacctggcttttatagttgtaatacagaaattatgcccggtataaataat

SEQ ID NO: 627172 - DNA, 95 bp, Homo sapiens
tcgctccgtggccttagctgtgctcgcgctactctctctttctggcctggaggctatccagcttggaaaatggatataccttatttgattatgat

SEQ ID NO: 627173 - DNA, 74 bp, Homo sapiens
tggttggggtgtctctggtgtcatttgggattcagtacataagattctttcctgatggccatgtgatgatgttg

SEQ ID NO: 627174 - DNA, 100 bp, Homo sapiens
tgcagtccaggctgaagacagagggctctgatctgtgcgacagaaatgattacggacctgaagccaaagaacaagatgcgctagtggacagattgctgac

SEQ ID NO: 627175 - DNA, 74 bp, Homo sapiens
aagcacacccaatggacagcatgcctcaccaagtcacatgacaagcagtgagcgaggagctgatccgagtggcc

SEQ ID NO: 627176 - DNA, 100 bp, Homo sapiens
gtgagagaaaaacgcaagagtctcttcattaaccatgtgaatcaaacatcccttctggaacaatacagagtaggaaaggtttgcagaataagagtcagtt

SEQ ID NO: 627177 - DNA, 82 bp, Homo sapiens
agcagatagaaggccatacgatttgtgctctgggtgacggggccgcctggcctgtgcaggctgtgttatatgacatcatcct

SEQ ID NO: 627178 - DNA, 52 bp, Homo sapiens
ggtgctggtggagcgctccacgctcaaagctatccgtcagtccatctccaaa

SEQ ID NO: 627179 - DNA, 73 bp, Homo sapiens
aagcattgatggaatgtgctttagaagttaaaaaggttacaggaaatacaggaggcagaggaacaaataaaag

SEQ ID NO: 627180 - DNA, 73 bp, Homo sapiens
gagggtcatctcttctattgtacctgcaggccaaacgtaccaagaaagtcgggatcgtcggtaaatacgggac

SEQ ID NO: 627181 - DNA, 75 bp, Homo sapiens
gtctcctggtgaccgagcacccgcctccgggcatcttcaactcaggaacgaatttcatatacacctccagagagc

SEQ ID NO: 627182 - DNA, 73 bp, Homo sapiens
ttcgagtggacaaaatggcgaagatcgccaagactcacgaaggtgctggagaatctggtaaaagcaccattgt

SEQ ID NO: 627183 - DNA, 99 bp, Homo sapiens
tttcctcaatgaagttgaggttcaggaaggattcctgagattccaggaggaagtactggcgaagtgctccatgcatttaaatcaaacggtattgagatg

SEQ ID NO: 627184 - DNA, 74 bp, Homo sapiens
gaaagttccagccggttcgagagctaggcctccggtgtggctgtctctgatggtgtcatcaaggtgttcaacga

SEQ ID NO: 627185 - DNA, 75 bp, Homo sapiens
ttctgtatagaaatgcaagctgacaagtgttggacagccggagtcagtctccatggagattatctttgataacag

SEQ ID NO: 627186 - DNA, 96 bp, Homo sapiens
ctccctgacacagcccagcctgcggtgatggagacacccgtgggtgatgcagacgcaagcgtcctacatcgccaatcgagtgactgacaagctgac

SEQ ID NO: 627187 - DNA, 82 bp, Homo sapiens
cgaagcctcccgggtggcttacagacgctgccagcatcgccgccgccaggtgaccatggaggaagaagatgagtctcgaggg

SEQ ID NO: 627188 - DNA, 97 bp, Homo sapiens
gttttgctggtgttgtccctcccgtggcagaccaaccctggaatggtccccagccatggattcagtcccagatcttatttctttgacaaccctcgaa

SEQ ID NO: 627189 - DNA, 100 bp, Homo sapiens
taacaggcaactatccagcagggaatacgaagggcatgaagacaaagctgcagaggggcattatgcttcccagaattttgatgcatacgaaagagatggt

SEQ ID NO: 627190 - DNA, 51 bp, Homo sapiens
ggtgacctcatccgtattctgagcaagattcttcatttagagacatcccac

SEQ ID NO: 627191 - DNA, 82 bp, Homo sapiens
gagcgggcggagctgtgcgagagcctcctcacttggacagaatgttgctgcgggatgtaaaagctcttaccctccactatga

SEQ ID NO: 627192 - DNA, 82 bp, Homo sapiens
cttgggactacacaaaccccaatctcagtggacaaggaaaccatcaacacaggcccttttgtgatgcgttccacgtgtagga

SEQ ID NO: 627193 - DNA, 98 bp, Homo sapiens
gtcgcctcccactgcaaaaaggcctggactggaaagctacccttgaggagaataggttgaattctgaaaaagatcgagctagggaagaactatcccac

SEQ ID NO: 627194 - DNA, 129 bp, Homo sapiens
gaaagccatcacgctggccatcggagatggggccaatgacgtgaacatgatcaaaaatcgtctggtagaatcaacttccttgagaaaagccatagaaacagtgtatgcagcctatttgcccaaaaacac

SEQ ID NO: 627195 - DNA, 100 bp, Homo sapiens
ggagcctcagttggaagcagccgatccagcctgcggagcctgtggggcagtaatccagtccctcatagcactggtgaatgacccccagcctgagcacccg

SEQ ID NO: 627196 - DNA, 80 bp, Homo sapiens
ggagcggatcccacacctccggaccgagggacgcgggtacagcagggaagaactggaaactcagagaaagaaactgccct

SEQ ID NO: 627197 - DNA, 100 bp, Homo sapiens
ttccggtttcagaggatcctgtagccataaagattgcagcatcagacaacagtcagcgctttcgagaaacctgttttgcatttgccttgacaccacaaca

SEQ ID NO: 627198 - DNA, 75 bp, Homo sapiens
gtctctgtatagtgacaaccaaggtaattcagtaccaaactgttcgatatgatatcctccccttatctcctgtgt

SEQ ID NO: 627199 - DNA, 100 bp, Homo sapiens
cggtggagccgccggagtctgagaaggaatgtatcctgtcaggtataatgtcagtgaatggcaagaaagttcttcatatggatcgaaacccttactacgg

SEQ ID NO: 627200 - DNA, 50 bp, Homo sapiens
cctcccccacgggaaccatcaggaagcggggagaggtggtgagagatgac

SEQ ID NO: 627201 - DNA, 75 bp, Homo sapiens
cgtgaggtcaacctgcgcccccagatgtcccagggcggcgactggcggcgcgatggacctgaccgggctcctgct

SEQ ID NO: 627202 - DNA, 50 bp, Homo sapiens
tgggagccctcacgagtcccgtggatccttcaggttccagggatttcacc

SEQ ID NO: 627203 - DNA, 75 bp, Homo sapiens
gaagaccaaagaggatgagaaggacgacaagcccatccgagaacgccgaatattgaccagcttgcagaggaaggt

SEQ ID NO: 627204 - DNA, 90 bp, Homo sapiens
tgtcaaaaatgctgttgatgatggttcttgctcagaactctggttttgaccttcaggaaacattagttaaaattcaagcagaacattcag

SEQ ID NO: 627205 - DNA, 100 bp, Homo sapiens
tgaagagtgaggagaccatagctgcacagccaggccaaaagcaatagccgatttggataccatcaagacacctgaaaccttatcatgagccagatgccaa

SEQ ID NO: 627206 - DNA, 88 bp, Homo sapiens
gagtgtatgatgaaaccacagtagaccctaatgatgaagagatcgatctggaatagaaaacgtcaactctgtggaggctttgcaggaa

SEQ ID NO: 627207 - DNA, 82 bp, Homo sapiens
tggagcctagagaagcagctccagttcttccagagaaatctgggcccgatttctagcatttgaaagtaatattggtgatcta

SEQ ID NO: 627208 - DNA, 74 bp, Homo sapiens
aagcatttggatgatgcatgtaaaagcaacaggcctcagtggagagactttgctaaagaagtggatgggttact

SEQ ID NO: 627209 - DNA, 100 bp, Homo sapiens
aaagaatgaacactgtccttcaaaacgaagagcacgttttcaatatcataggagcatttgatattccacgctttgtgtacaattcagaaagaaaaaaatt

SEQ ID NO: 627210 - DNA, 75 bp, Homo sapiens
gtgctttgtgatcgaaaccctgaccggatcccataaacactgtcgtcacttatataagaagaaccttgatgtgac

SEQ ID NO: 627211 - DNA, 88 bp, Homo sapiens
atactgtctcaatgatggcgagtgctttgtgatcgaaaccctgaccggatcccataaacactgtcggggggcccggctcatcccagag

SEQ ID NO: 627212 - DNA, 100 bp, Homo sapiens
ttccagtggaggcattttggggcagaatacagagatatggaatcagagggcccaggtcagcggtcaagactggcctcaatgcttgactcagacacagaag

SEQ ID NO: 627213 - DNA, 100 bp, Homo sapiens
cgcagatcctgagacccggacagtggcagtgaaacaggagtaattggcctcatcctgccacccacattctccttccttgagatgatgtggaggatttgcc

SEQ ID NO: 627214 - DNA, 98 bp, Homo sapiens
ctctgaaagaccaacaggaaggcaaaaaaggaaaaacaacaattaaaactggtgcttcaggaactgcaagcacatgttgaccagataactgaaatggc

SEQ ID NO: 627215 - DNA, 101 bp, Homo sapiens
ccaagatgtctgacatggaggatgatttcatgtgcgatgatgaggaggactacgacctgcacaataaggctttcaaaagccaaagaataacaagaaataag

SEQ ID NO: 627216 - DNA, 100 bp, Homo sapiens
agcagcagcaacagcagcgtcctccccaccccacctgccaccgaggccccctcttcgcctcctccagctaatgggaatgacagcaagaaatttaaacgag

SEQ ID NO: 627217 - DNA, 137 bp, Homo sapiens
gtgcagtggcacctgcgcgaagctggccaaagcctgcccagacggctcacctgtgcgggatggaacaaaagccagaagatcagctgccatgttacttgactcacaccaaccctagagtggatgagattgtccttaag

SEQ ID NO: 627218 - DNA, 100 bp, Homo sapiens
gacaaccgacaagtgagactgtttgatatgtcaggagtgcgcctggcgcggcttccccggagcagccgacaggaacatcatcttcagcgggctatttcag

SEQ ID NO: 627219 - DNA, 100 bp, Homo sapiens
tctgtggagaataacggctgcacctggagattgacgcagagtgggcggcggtggtgcattagtgaccagaaggatcccaaggatcgaatggttcaggttg

SEQ ID NO: 627220 - DNA, 96 bp, Homo sapiens
gggagctccaggttcacctcctcctcctccaggatatgggccctcacattttccaaacctgtccatctgctaactattttgactgcagagccatgt

SEQ ID NO: 627221 - DNA, 100 bp, Homo sapiens
agcaaatgagctgatggaagatctgtttgaaactatatcaatgatgtcaaacggctgaaacctggctacttagaagctactgtggactggtttagaaggt

SEQ ID NO: 627222 - DNA, 75 bp, Homo sapiens
aaagaggtccagcccctcagagggattgtgtccacctgtcttccgtgtgtgctaagatcgtgcagctcctggggc

SEQ ID NO: 627223 - DNA, 98 bp, Homo sapiens
caaagcagtcgtaagaagaggtcccaatcccccactctttccgccctaatggaggtctccagtttcggctaagtgctatttatggaggtacctatatg

SEQ ID NO: 627224 - DNA, 93 bp, Homo sapiens
gttaaggattccaagtaactcttatttgtgtcaaaccagaagagaagtaaaattcaacaaaaatttatgtgtggagttccttcttaaaagaag

SEQ ID NO: 627225 - DNA, 75 bp, Homo sapiens
aaggacgagccggggcgctgaaggcaccatgagccaggacaccgaggtggatatgaaggaggtggagctgaatga

SEQ ID NO: 627226 - DNA, 96 bp, Homo sapiens
ctgtgagaaacttggcttgttcagaagatactgtgcataagacatgaggacctgaaggagaagaaggagaaggtggaggagaaggcaagccggaaa

SEQ ID NO: 627227 - DNA, 74 bp, Homo sapiens
gcctcttctgtttccaatgggtgtaaaccagaatacaaggttccgggattatatgtaattgactcaattgtgcg

SEQ ID NO: 627228 - DNA, 97 bp, Homo sapiens
tcggacgagggccagagccatggcttggcagcgtccagggccagaggagccttctggagcatcacccagtttttggtgttgagccagacttgaccag

SEQ ID NO: 627229 - DNA, 100 bp, Homo sapiens
ctggcctgttgcagccatggtgcattgcagttgcgtgttgttcagaaagttctgatagtatcagcagtgatgaggaggagctaaggactttgggaagcag

SEQ ID NO: 627230 - DNA, 100 bp, Homo sapiens
cgagggaagatgaacgggacgcggaactggtgtaccctggtggacgtgcacccagaggaccaggcggcgaatgaagaagcagtacgacgtctcatctggg

SEQ ID NO: 627231 - DNA, 75 bp, Homo sapiens
gcaggcgccgccgccggacgtcggcaacggagaagggcttcttcgctggaatgaggaagaggaggaagccaagga

SEQ ID NO: 627232 - DNA, 100 bp, Homo sapiens
gccctggagcagtatgccagcaaggcagctcactttgctggtggccagtgaggactcaagctacatgccagccagggtggtggtgtttgggggtgacagc

SEQ ID NO: 627233 - DNA, 75 bp, Homo sapiens
gagtgatgtggaggaaaacaacttcgagggcagaggacaagaatccttcaagaaacaggaaaaaactcctaaaac

SEQ ID NO: 627234 - DNA, 82 bp, Homo sapiens
taccttcttcaagagaaatggagcccttctccaagataagaccatcatcatgtggaaactgaccagggatgagaccaactat

SEQ ID NO: 627235 - DNA, 74 bp, Homo sapiens
aaaagcttgcagaatatatttgttccagtctctctgaagaggctatcatggagctgaacctgccgactggtatt

SEQ ID NO: 627236 - DNA, 100 bp, Homo sapiens
cgagcggagaggagatgcacacggcactcgagtgtgaggccaggtcagagcagcccaccatgggatggggagggggtggaggctgcaccccgcgcccacc

SEQ ID NO: 627237 - DNA, 82 bp, Homo sapiens
ggctaagaaagtggtgaatcccctgtttgagaaaaggcctaagaattttggcattgctggcccggtgatcatgtccattgag

SEQ ID NO: 627238 - DNA, 98 bp, Homo sapiens
aagaacttcagcatgaactctttaggcagtgtacaaaaaatgagattcttggatctcccagtcagcttcatttccccgtaatcagaaacaaccagggg

SEQ ID NO: 627239 - DNA, 105 bp, Homo sapiens
gcctccctcccgcgcgtgctgcgggtctgctcgggggtctacttcgagggagccgtgtaaagccagtggaatatagtcagatgtacagttatagctacaaccagt

SEQ ID NO: 627240 - DNA, 98 bp, Homo sapiens
gcccacagtgggggtgtgcaaacccgagagaactggtccttcagtgaatctacagacctattttctcaggagctcagcctggccttacttcagtgata

SEQ ID NO: 627241 - DNA, 83 bp, Homo sapiens
cgggctccgggaaaactacactggccagactgtggtacagacctccatgagccggtcccaggtagccctgctgggcctgagtc

SEQ ID NO: 627242 - DNA, 85 bp, Homo sapiens
cacctccccaggtgatgcctgaagctcaagggactgtgtccaccctcaggaaggatgcctgtggccctcggagagcacagtgtca

SEQ ID NO: 627243 - DNA, 100 bp, Homo sapiens
cagtattctaccaggcctggtgctggcctcctgtgatgggccttcgcactcccaggcaatctgaaagcaaatcctgtttagatgcaggcgaaggttcctg

SEQ ID NO: 627244 - DNA, 82 bp, Homo sapiens
gattccacccaaatcctcttctccaagaaggacacggagttgcagaggaagctagaccatgagatccggatgagggaagggg

SEQ ID NO: 627245 - DNA, 100 bp, Homo sapiens
gcgccaggcattagcgcagctcgagaaggccaaggcagtgacatcagtgtctggcccaggtgagcacctccgaaatgccctgtggcatactggccacacc

SEQ ID NO: 627246 - DNA, 89 bp, Homo sapiens
ggcatggaaagttccagccggttcgagagctaggacatcggcagaaactagatgatcagaccaagcccgggagcttgtccttttccgag

SEQ ID NO: 627247 - DNA, 82 bp, Homo sapiens
gggtgtacaaatacccctttgaattaattatggcttatatgaaaatgatgatcagctcctgtgggaccctgagtacttacca

SEQ ID NO: 627248 - DNA, 100 bp, Homo sapiens
tgggattgagacattctcacctcctcctccgcctccaaagtcgcgggtcattattcatgtggttgcccagtgccatgaggaaggattggagagccacttg

SEQ ID NO: 627249 - DNA, 95 bp, Homo sapiens
gcaaaatctacaagatgatgcagggaggaggtgacgcggcgcacggcgcggatggtggccgagtggcagtgtgtgggcttctgccacggcgtgct

SEQ ID NO: 627250 - DNA, 112 bp, Homo sapiens
cttccaaatttaaccattacctaaatccgaagggaaatgagcaaacctctcggattgggtgtcaaggtactccaaagattcaggtttactcacgtcatccagcagagaatgg

SEQ ID NO: 627251 - DNA, 90 bp, Homo sapiens
gaaaatttgacaacttacggttttcgtggagaagccttggggtcaatttgttgtatagctgagagtccctgtgaagcaggaagagtgagg

SEQ ID NO: 627252 - DNA, 87 bp, Homo sapiens
gacgtgaagctggagttcccttcccttccacagtgcaaggaagacgccgagaaccatccgggtatggctgaaaagagacagtggtca

SEQ ID NO: 627253 - DNA, 96 bp, Homo sapiens
ctccgtgcagcccaacttccagcaggacaaggccaccatggcggagctgcaggaggtgcagatcacagaggagaagccactgttgccaggacagac

SEQ ID NO: 627254 - DNA, 74 bp, Homo sapiens
agggaagcacagatgtggaaagtgaatgtgcggaaaatgccttcaaatcaggcccggattgcatttctacaagg

SEQ ID NO: 627255 - DNA, 82 bp, Homo sapiens
cccgggaggaaggaacgaggcaaggagctaaagcagcgtgcgttcagccctggggattctgtttcactgaggccatctatcc

SEQ ID NO: 627256 - DNA, 75 bp, Homo sapiens
accagcgttgagtcccctgtaaagcatacgtgagaaggctgttcgagagctgcttacccggcactgccagctgtt

SEQ ID NO: 627257 - DNA, 75 bp, Homo sapiens
ggcaaagaagaaggcactccacagcccgagagcaagtcaaaggtcaaaatgcagatcttcgtgaaaacccttacc

SEQ ID NO: 627258 - DNA, 90 bp, Homo sapiens
gcggattctcagtaaataccaccggttcatttcctttactctctatctaataggtggacattgaagtggacctaattcggttttcctttt

SEQ ID NO: 627259 - DNA, 75 bp, Homo sapiens
atcgaaggggagtttccacagtgattgatgctgcctcaggtttggtgcacctcgatttggaggaagtagggcagg

SEQ ID NO: 627260 - DNA, 83 bp, Homo sapiens
cggaaccgcgattcggcgtgtcaggtaccaggatcatctatgaccggaaattcctgatggagtgtcggaactcacctgtgacc

SEQ ID NO: 627261 - DNA, 98 bp, Homo sapiens
caggcgacattgagaacaccagccttgcacctgaagaccccacctttcctgctcccacgtgggacaagatggtgtcttcggcgcagatgggcttcaac

SEQ ID NO: 627262 - DNA, 127 bp, Homo sapiens
cggggtcggaccatccgctctccctgcgctctccgcaccgcggcttaaatgatgtattttgtgatcgcagcgatgaaagcttccttcaaaatgtctactgttcacgaaatcctgtgcaagctcagct

SEQ ID NO: 627263 - DNA, 100 bp, Homo sapiens
gccgcagccgtagccaccagagaagtcggcacagttctagagataggagcagagaacgatccaagaggagtgaaactggaacgccaagctgaagaagaac

SEQ ID NO: 627264 - DNA, 103 bp, Homo sapiens
cgggggactcggcggcgacgaacatggagaacccccagcttggagcgcaaggtggatctttaactcaagactagcatgaagagttgccttctggcctgccctg

SEQ ID NO: 627265 - DNA, 58 bp, Homo sapiens
agagacgtgaagcactgaatgtattggcatactccacacatctgtaccattcttgagt

SEQ ID NO: 627266 - DNA, 50 bp, Homo sapiens
attaccacgacccttgcaaagccggatggatcatttcttattcggaaaag

SEQ ID NO: 627267 - DNA, 100 bp, Homo sapiens
acagagaccagaggctcgcctggtgtccaccaaaggagacagggctgggagcgctgcccggggcccaggtcctccctaatgacagcatgcacgaaagccc

SEQ ID NO: 627268 - DNA, 100 bp, Homo sapiens
ctggaccctgagtgatggggccggcgccagctggagagcagcttcgcggagcgactggagagccagaggaatccctgggccactggagtcaaggcttgaa

SEQ ID NO: 627269 - DNA, 82 bp, Homo sapiens
tcacaataagagcagaggatggaacacttcagtgcattcaagggatagactccacaaataataaaaaggaagagtatggtcc

SEQ ID NO: 627270 - DNA, 102 bp, Homo sapiens
cggcggaacccgtgggcctgtggactgcagcctcggcggtcagcaggcatcaagcatgatggaaccatgtgtgatacctgccgccagcaaccaatcattggc

SEQ ID NO: 627271 - DNA, 101 bp, Homo sapiens
cagcagcttaatagatccagacacttcattaagtgaattgcgggtgaaggttgctatccttaaatacatagaaactctggccaaacagatggatccaggag

SEQ ID NO: 627272 - DNA, 89 bp, Homo sapiens
tgaagagcgacaagccgctggcagccgcggatctcaccgccgctcagggaaatctggcattttttaaagtttgcgccccacaaagagga

SEQ ID NO: 627273 - DNA, 98 bp, Homo sapiens
agatgagaggagaagagcccagcacaacgaaggtgaatctggattgggaaagtcgacattaatcaactcattattcctcacagatttgtattctccag

SEQ ID NO: 627274 - DNA, 133 bp, Homo sapiens
cgggccgctgggcgccgccgcgggcgccgggagcgagctgggagggagccgcgcgcctttgtgcgcgcgccgaggaaacttggatttaactggccagaagcaggtattcaaagcagagaacaatccctgggtg

SEQ ID NO: 627275 - DNA, 98 bp, Homo sapiens
cttgatcctccggacaaaacttgagaaaggaagtactcgccgagtggaacgggcaatgaggcagacacagggggggctgtcggggggctgttaggtgc

SEQ ID NO: 627276 - DNA, 101 bp, Homo sapiens
ctgggcatcgcagccttctacttgtcccatgagcctacaacacagcagtcccctcaggatgagcaggaaaagctcttggatgaagccatacaggctgtgaa

SEQ ID NO: 627277 - DNA, 82 bp, Homo sapiens
tccttgtggacgtggagaggggccgaaccgtgaagggctggaggccccggcggctagggtcacggagactcaccagttggca

SEQ ID NO: 627278 - DNA, 93 bp, Homo sapiens
gcttggtggagcagctgcctgggagaatgttgactctactgcagcaggtagagcagagccggagccaggtgcaggccattggagagaaggtct

SEQ ID NO: 627279 - DNA, 82 bp, Homo sapiens
tccactccgtcccccgcgggtctgctctgtgtgccatggacggaagtcttcgaccctgagaaggagagggagtctggtgtct

SEQ ID NO: 627280 - DNA, 74 bp, Homo sapiens
ccccttcggccactctcgggagcaggcctcgctgtttgcgcagggtgccgacccccacatcctggcaaaagagc

SEQ ID NO: 627281 - DNA, 80 bp, Homo sapiens
gatgctggggacaagaatgccaccaaagcaggcgatgacgagccagagtacgagatgtggcaaaatctggcaaaggcaga

SEQ ID NO: 627282 - DNA, 75 bp, Homo sapiens
tcctaccaggagctcatggttgagtgtacgaagaaatgcggttgctgatgctattagaacaagccttggaccaaa

SEQ ID NO: 627283 - DNA, 75 bp, Homo sapiens
gtagaaaaggcttttccagtttgcataatgcaaataagggcgagactgaaaaatcaagtcactcagttgaaggag

SEQ ID NO: 627284 - DNA, 85 bp, Homo sapiens
gacaccgagcttcagcaagctctctccaacgaggacagaaaaatggttcgtattgttcttacaaagacaaagagagatgcagcaa

SEQ ID NO: 627285 - DNA, 100 bp, Homo sapiens
gcagctccccctataagcctcggcctccacaggatagaccactggaacaatgagaaggagagaattctactggtcacagacaagactctcttgatctgca

SEQ ID NO: 627286 - DNA, 99 bp, Homo sapiens
tgggagtcccggcgttcttccgctggctcagccgcaagtacccgtccatcatagtcaactgcgtggaagagaaggagaagtttcggtgtccgacatccc

SEQ ID NO: 627287 - DNA, 75 bp, Homo sapiens
atccttgtaatcttgaaggaatggacctcaaagtctccaggaaacctagagaaaaaccgttatggggatgtaccc

SEQ ID NO: 627288 - DNA, 100 bp, Homo sapiens
cggattcgccgaggcaccgaggcactcagaggagaacctttcagctcttggggcattggtgagtctcagtaatgcacgtctcagttccatcaaaactcgg

SEQ ID NO: 627289 - DNA, 75 bp, Homo sapiens
accctatgatgttacagaagagtcaattaaggaattctttcgaggattaaatgaaggctttgtgatacctgatga

SEQ ID NO: 627290 - DNA, 89 bp, Homo sapiens
ttgcaacgtagtgttgccaatccagcatttttgaatgttctccgtggcccgatgcccccacagcctatgtgaataacagcccttcccca

SEQ ID NO: 627291 - DNA, 100 bp, Homo sapiens
gtggacgtgcacccagaggaccaggcggcgcaaattgtggctactaatttgccccctgaagatcaagatggctctggggatgactctgacaacttctccg

SEQ ID NO: 627292 - DNA, 100 bp, Homo sapiens
agtcgactacttcccagaatatgatgtcttgcctccagcaaatccatcctccaatcctgatgccagagtgatctgaaatgcaaatatgatcttgccactc

SEQ ID NO: 627293 - DNA, 71 bp, Homo sapiens
catggtggtggtcgaagtcagcagacactagacatgttaaaagatcactgaagttggatggtctgttagaa

SEQ ID NO: 627294 - DNA, 100 bp, Homo sapiens
ccgcatcctcccggagcagaaccgctccccgccggctgtccgcaacctccgccagcgtcggtccctgggcaggtgtggtgggaggcgaaagtgcaacaag

SEQ ID NO: 627295 - DNA, 100 bp, Homo sapiens
ttccaccgggatgtccacatgctcctggtggatctggagctgctgctgggcatagccaaggtcgcgtctccttcttcacctcggggtccgagaacctaca

SEQ ID NO: 627296 - DNA, 82 bp, Homo sapiens
ctgttcttctggctctaagatctgaatgttgtgaccactaatttggaggaggacttcatccaacccagcagccgagaagagg

SEQ ID NO: 627297 - DNA, 50 bp, Homo sapiens
gatcttaaagaactagagagactgcttgaagctgcaaaagatgattaccg

SEQ ID NO: 627298 - DNA, 101 bp, Homo sapiens
ggtggggctgcacattgagaactggccagatgctcttggctcaaggactcatactacactttcttggtagagaatgtactcaagactgatcttctaagttc

SEQ ID NO: 627299 - DNA, 83 bp, Homo sapiens
gagcgggcggcttcctggcctgggcgctccggtggcggcggagtgcctacaccaactaatgttacaattgaatcctataacat

SEQ ID NO: 627300 - DNA, 121 bp, Homo sapiens
ggaagcgcggctgctgtcgcccagcgccgccccgtcgtcgtctgccttcgcttcacggcgccgagccgcggtccgagtaagaatgattgatgttggctgatattggagtgctcattcacat

SEQ ID NO: 627301 - DNA, 88 bp, Homo sapiens
caggcagcccgtatcggggcctttatttctcgtcggcggcgccctgcaccgcgcctcgcaaagtaaagaagaacagttcccctcccct

SEQ ID NO: 627302 - DNA, 83 bp, Homo sapiens
tgttcccccaaatgtctgactctgactctcggactgagaaacgcaaggaggcaacgcacgggccacaggcatgttcctgcagt

SEQ ID NO: 627303 - DNA, 75 bp, Homo sapiens
gcggcgagagatggtcaggtctggagctcgaccgggccaggcatctaataggattcaggaatcaaagaatcagtg

SEQ ID NO: 627304 - DNA, 100 bp, Homo sapiens
cgcgaagctggccaaagcctgcccagacggctcacctgtgcgggatggaacaaaaggtgtagacggggcactgccttcagagcaggtcctgccagcctcg

SEQ ID NO: 627305 - DNA, 78 bp, Homo sapiens
cattaccccactctttccgccctaatggaggtctccagtttagtgccttgtctttgaagatgctcccaatggggtgga

SEQ ID NO: 627306 - DNA, 75 bp, Homo sapiens
aatactacctttatttccaccataggacgaatgccttagtttccactttccagcctggatcccctcacactgaac

SEQ ID NO: 627307 - DNA, 54 bp, Homo sapiens
acaagtacctgactctgaaagtcaaagccagtgatgatcagccagagaagcctc

SEQ ID NO: 627308 - DNA, 50 bp, Homo sapiens
actgccctgttgaggaggattttcaccagatgtcatccatactgtagggc

SEQ ID NO: 627309 - DNA, 100 bp, Homo sapiens
ggaacaccctggaagccgagaaatgatatggctcgtggacagcagaaaattcagtctcagcagaaaaatgccaaaaagcaagctggacaaaagaagaaac

SEQ ID NO: 627310 - DNA, 75 bp, Homo sapiens
gggcgcagctggtgtcatcctctggggtgacgcggggtacaccacaagcacggctggagtgcagtggcgggatct

SEQ ID NO: 627311 - DNA, 82 bp, Homo sapiens
gcgtcccgccaccggccgcttctgtcctcgcaaaagactgttgaagtagagagcattttgcccagctcactcggattctttg

SEQ ID NO: 627312 - DNA, 83 bp, Homo sapiens
ggatgagaaggcaggtacgacccagggcggaaaaagatcagacatttctcttgggaagttgtgcatctgacaggaatatagta

SEQ ID NO: 627313 - DNA, 51 bp, Homo sapiens
tccctgcaactaactccattcttaattgaaagacctgagctgtcttccttg

SEQ ID NO: 627314 - DNA, 83 bp, Homo sapiens
cctgggggtgcgcgcctgcgacctgcccgcctgggtggccaaggtggaatacgtcaggaagaagccaaaattaaaagaagtcc

SEQ ID NO: 627315 - DNA, 98 bp, Homo sapiens
aattaaaccacccccaatcattggaagatttggaacctcactgaaaattggtattgttggattgccaaatgttggggccatcgatgcacccctcggag

SEQ ID NO: 627316 - DNA, 50 bp, Homo sapiens
cttcgcgcagttccaaccaacaagggcatgatcgcactgcgcaggggtgc

SEQ ID NO: 627317 - DNA, 80 bp, Homo sapiens
atggcgagcttccagaacatgtgtactaatggtcacttgatgtgcgctggctgttttatccacctactagcagatgcccg

SEQ ID NO: 627318 - DNA, 100 bp, Homo sapiens
acaggaaaaaaatttgctggatattgatgcgccagtcactggtcctcagaatggttggaatgaccctccagctttgaacagagtacccaaaaagaagaag

SEQ ID NO: 627319 - DNA, 100 bp, Homo sapiens
tgctacctaccggctagccggtggagctcacgtttattcaacaatcaacaacccctccccgtcgtaaacgctgaggaatgatgtggcaagaatgccatga

SEQ ID NO: 627320 - DNA, 90 bp, Homo sapiens
gcctgcgcgagctgcgggcgcgcgagttcagccgcctggcagatcactccaagaactgaggcccctgtcagcagtgtcagtaatagtttg

SEQ ID NO: 627321 - DNA, 75 bp, Homo sapiens
atcaggacaccgggagtgggagagattggactgggagactcagcagcataagcagtactataatggatgtagaca

SEQ ID NO: 627322 - DNA, 101 bp, Homo sapiens
gaaagaagacaagagagaacgcaaacagtttgaagctgaggattttgtttccacttgagcggcacagtgacagaacctgcaatacaatcggagccagaaac

SEQ ID NO: 627323 - DNA, 100 bp, Homo sapiens
ggccacagtcctgggaagtcagatgggattgaaagtttcagattggagaactggcaaataccctgacaagtaaattcgagtttctaggcattaatagaca

SEQ ID NO: 627324 - DNA, 100 bp, Homo sapiens
taacagaacaaattataaaaaccatggaactacccaaaggtcttcaaggagctggctaaatatgaatacatggaagaacaagtaatcttaactgaaaaag

SEQ ID NO: 627325 - DNA, 101 bp, Homo sapiens
ctatgcttgtcatcagtggaggagagggctacatcgacttccgaatggatccttgccagcacattacagaatatttttgttgaaccttcttgagaattcag

SEQ ID NO: 627326 - DNA, 96 bp, Homo sapiens
gtttcccgcagccggccggggtccaggtcggaaatgtagccagtggggccgccagattgccccagtggaaaatgacaatagctacgatgaactgaa

SEQ ID NO: 627327 - DNA, 90 bp, Homo sapiens
gagctgaggactgcctgtttgcagggttgcttttgtaatgaagaagcacttaaatactcatctactaggcaagcatggagttggcacccc

SEQ ID NO: 627328 - DNA, 100 bp, Homo sapiens
tctaccagctgttgattgaatggaaagtctgtttggatgggctgaaatacttgggtcagcagcatcaacaacagcaacttgtgattggcggtgaccggat

SEQ ID NO: 627329 - DNA, 82 bp, Homo sapiens
gagatccgcggaggccgacaggattcgttggctgccgtccccgctgctgtgcattgggtgattgaattactcagatatgaag

SEQ ID NO: 627330 - DNA, 90 bp, Homo sapiens
gggcttcatcggggccggccagctggcctatgctctggcgcggggcttcacggccgcagccatcgacgagtacaagccccaggatgctac

SEQ ID NO: 627331 - DNA, 100 bp, Homo sapiens
gctgctgaccgagagagctcactcagccaggaacagaggcggctgagccaggaacgggatcgcctagagggtcttcgccagagactccgcaaggcccagg

SEQ ID NO: 627332 - DNA, 91 bp, Homo sapiens
cctcacgcccggcgagcccgcgaggattggagaatccatgttgaccaaatgcaccagcacagaagtggaattgaatctgctctaaaggaga

SEQ ID NO: 627333 - DNA, 75 bp, Homo sapiens
tcgtcggctggcggagcggctttttgaaggaggagtttcctgcctggtatgagaagcttgttctggaaatggttc

SEQ ID NO: 627334 - DNA, 50 bp, Homo sapiens
tccttgacagtcttcggcaggaaggtcaccttcttgactcctttgcccgt

SEQ ID NO: 627335 - DNA, 100 bp, Homo sapiens
ccagggagtgcaagcttagagcgtctggccaagaatcagaggaagtggccactgaggcggctcccagctgcgttggcgacatggccgacacccccagaga

SEQ ID NO: 627336 - DNA, 50 bp, Homo sapiens
tgaccccatacagctggaaatccacagagaatatcctccgaatcctaaat

SEQ ID NO: 627337 - DNA, 100 bp, Homo sapiens
caggaggaagaattcccaagccaaagctttccagatgaagactggcccatttgcagagcactccaaccagctgtggaacatcagcgccgtcccttcctgg

SEQ ID NO: 627338 - DNA, 74 bp, Homo sapiens
cgaccatctttaattttggagaacagaatggctacaagcttcttggacacttaatgattgttggcaagaaatgt

SEQ ID NO: 627339 - DNA, 100 bp, Homo sapiens
gtcccctgtggttcactgtgcatcgcccactccagaagtagcatggaaatggagggcatcttcaaccacaaaggttttggcttggtttgaagaaggtgaa

SEQ ID NO: 627340 - DNA, 82 bp, Homo sapiens
attctaatttgaaccatgtttggattgaagccgcctctgtattacttaccagatgccgtagggccaggtgagctgctgtgaa

SEQ ID NO: 627341 - DNA, 100 bp, Homo sapiens
tgtgttgaaaccagcctcaagtttcacctatcctcactgatccgtggacttctgtatgatcagttttttgctccactcaagcctgttagaatcaccatgg

SEQ ID NO: 627342 - DNA, 83 bp, Homo sapiens
ctccaaagtgaaagtggcggtgcggatacgacccatgaaccggcgagaatttcagaaactgtggaggagtgtcactgtagatt

SEQ ID NO: 627343 - DNA, 83 bp, Homo sapiens
gctgcctggaggcggccgcactcggactgattcttgctattccaaatcctcttccacgttgacagcccttcagatatttcaac

SEQ ID NO: 627344 - DNA, 100 bp, Homo sapiens
aagaaaacgagcgcgagagggggaaaagcgagcgatcgagcgagcgcgcgcgcgaaaactccgggcaggtaagaatgattgatgttggctgatattggag

SEQ ID NO: 627345 - DNA, 75 bp, Homo sapiens
acagctataaaagtcactgacatttcagatgtgtgaataagagtactcatgaattcaagccacagagtggagcag

SEQ ID NO: 627346 - DNA, 74 bp, Homo sapiens
tcaaagaagatgcctcgaactaaacaaattcatcccagaaatctaagagtaatctatgccagcaattatgacaa

SEQ ID NO: 627347 - DNA, 100 bp, Homo sapiens
aacaagaagaagagaaccctgcggaggagaccggcgaggagaagcagacgctctgctgttgcccgtattcaggagttcttcagacggagaaaagaaagga

SEQ ID NO: 627348 - DNA, 100 bp, Homo sapiens
ttcaactatatttgagcatacccaggttcatctgcagaagccagcggacgcctctgttcaacttgtgggttacctggctcatgagaccttgccggcgagg

SEQ ID NO: 627349 - DNA, 75 bp, Homo sapiens
gccgggagtcgctgggtgcgtggggctgcctcgccgcgtctcgccacgggatcactgagattctgatgaacagac

SEQ ID NO: 627350 - DNA, 75 bp, Homo sapiens
tgtgacagttcagcattagaagggctacccctaataaagcgactcattgagcagagtcttgttctgtcacccagg

SEQ ID NO: 627351 - DNA, 82 bp, Homo sapiens
ctttctggcctggaggctatccagcccggatccagagcaatgtagaaggcctatacctgactgatggggtccctttctcctg

SEQ ID NO: 627352 - DNA, 100 bp, Homo sapiens
ccgcatctatagtttccagatggctctaacctcagtggtggatctccttacgtagcagccaaaataaatgaagcaaaagacttgctagaaacaaccacca

SEQ ID NO: 627353 - DNA, 100 bp, Homo sapiens
atgaaacaggaaacaatccttctgtttctttaaaactggaagaaattctaaggacatatggaattggctatggataattcatatgctttcaatcaacgaa

SEQ ID NO: 627354 - DNA, 75 bp, Homo sapiens
ccagtgcggagagaggctgcctcctgcagcccccatagcaggtattaatctctggagaagacacatccacagtta

SEQ ID NO: 627355 - DNA, 100 bp, Homo sapiens
tgaccccgcagcggccgggctgtcgcggcccccacctcaggcatagaatgtcaagctaaccaggcgtccgctacttcagaagagtgtactgtcgcatggg

SEQ ID NO: 627356 - DNA, 90 bp, Homo sapiens
ggaaaacctccttatgctgatatacatccaatgagggtcataaagaaggaaactggattttggagagactttggatttgggatgacgtgt

SEQ ID NO: 627357 - DNA, 82 bp, Homo sapiens
cagcggccgagcgggcggcttcctggcctgggcgctccggtggcggcggagatgtacggagcgcaagaggacggcagcgtcg

SEQ ID NO: 627358 - DNA, 96 bp, Homo sapiens
ccgggctggctgcggccgccctgggccgggccccaccggacggggatcctgctaaagcggagcggcaagtccctgaacaaggagtggaagaagaag

SEQ ID NO: 627359 - DNA, 50 bp, Homo sapiens
acattggccggcaacttgttccagggcttttttccagacttcaagctccc

SEQ ID NO: 627360 - DNA, 103 bp, Homo sapiens
ggccgggcgacctgggcaccagcaggacccgaggccaggagccaggggcccagaagtgatcagggccaaagcggtcagtgagaaggaagtggactctggaaac

SEQ ID NO: 627361 - DNA, 74 bp, Homo sapiens
aaaaatccagaagtacaagcagtctgacacgatgaggcgagtggtacgacagagcaagtttcggcatgtatttg

SEQ ID NO: 627362 - DNA, 98 bp, Homo sapiens
ctcgacccagggcccgcgggccaggagagcgctcggcggcctcgagtttggaagaaaacaaggcagtagtaaggaggaacaggaaaggaagaggctga

SEQ ID NO: 627363 - DNA, 83 bp, Homo sapiens
aaccgccttaaccgagcaacagcatcagaagataattgctttacagaatggtaatagcctgcagctggtgttttgagaagccc

SEQ ID NO: 627364 - DNA, 75 bp, Homo sapiens
actggtgcgtggttggctagtacgaaaaagaaattcctggaaaactcaagcaattcgtatttgacttacattctg

SEQ ID NO: 627365 - DNA, 100 bp, Homo sapiens
ccggacgagttcgatgacttcgtcacctatgaggctatgactttgcagccgtcctggagtggttcgcggagcgtgtggaccgcatcatcctgctcttcga

SEQ ID NO: 627366 - DNA, 50 bp, Homo sapiens
acagaaacctcgtctccctggcctagaacattccatattctgcttcacac

SEQ ID NO: 627367 - DNA, 90 bp, Homo sapiens
gcggggcgtgcgcgtcctcctccccaggcccgccgcctccctgccaagaaatttccatgcagtatcggcatgatggagcttgcccaacaa

SEQ ID NO: 627368 - DNA, 82 bp, Homo sapiens
ggctacctacacctgtgtgctgggctttcacgtctacgaccattgccctcttgaacatttaccgtaaccctcaaaactcttc

SEQ ID NO: 627369 - DNA, 75 bp, Homo sapiens
cgccgcggagctggtttctgccgacaatgattcgcctttgccagtctcatctcgtgtctgctttgttaagttcca

SEQ ID NO: 627370 - DNA, 98 bp, Homo sapiens
agggaagctattgctgggattttgaggagttggccacggacagagcgaaggggagaggatggtagtgtctgacttccacgttttcgtcagggatgtgt

SEQ ID NO: 627371 - DNA, 78 bp, Homo sapiens
tggttggaatgtatctggctcagaactatgatggagaagatgtcaaccggacactagaaggtggaaggaaacctcttc

SEQ ID NO: 627372 - DNA, 82 bp, Homo sapiens
atggtatgacactgaaatctgtaacggattttgacacttcatgacatgtcattatttagagcaataatgaatattgacctgt

SEQ ID NO: 627373 - DNA, 75 bp, Homo sapiens
ttggcctgtccctcacatccgatgcaccctttttgtcagattatcaggatgaggtagagacggggtttcgccgtg

SEQ ID NO: 627374 - DNA, 100 bp, Homo sapiens
ataatgagctatgccaactcttgtttcagaacgacccctggcttttgccagaaaacggccggtttgtgggcgatgctgaccttgaaagacagaaattttc

SEQ ID NO: 627375 - DNA, 75 bp, Homo sapiens
ctgcaccccaccttgatccagcggacttacggggctttgttcgcgggggtcacagctctcatggctgcagctagc

SEQ ID NO: 627376 - DNA, 82 bp, Homo sapiens
cagctgctgtcagcatggcccaggctcctgctgacccgggcagagaagtcctcatcaccgggggcatcgtggccacagctgg

SEQ ID NO: 627377 - DNA, 100 bp, Homo sapiens
aagatgttgatcggaaacactggctgttcctgggcatgtacccagaagagcattttatcgagaagcctgtgaaggaagccatggcccgattccgcaagaa

SEQ ID NO: 627378 - DNA, 82 bp, Homo sapiens
ctcagttggaagcagccgatccagcctgcggagcctgtggggcagcccaggatccggttgtggccgtggctgaggatggccg

SEQ ID NO: 627379 - DNA, 82 bp, Homo sapiens
tatctggagatacgcggtgcagctgccgacaccccagcctgttgctgacactagtgaagctcttcgtgggcggtcttgactg

SEQ ID NO: 627380 - DNA, 100 bp, Homo sapiens
ggattagttggattttcacgtgctcttgctaaagaggtagcaagaaagaaaattagagtgaatgtagttgcaccaggaagaaatctttcctgttttctgc

SEQ ID NO: 627381 - DNA, 75 bp, Homo sapiens
cttggattcagtcgagtttgctttgctccgtgggaactgcaccagagctggaggatacaatgtctctttgctata

SEQ ID NO: 627382 - DNA, 90 bp, Homo sapiens
agagatacctgattgaaattgcaaagaattacaacgtaccctatgaacctgactctgtggtcatgcattagtgccagcagtagttcccaa

SEQ ID NO: 627383 - DNA, 100 bp, Homo sapiens
gggagacacagtgtcagaattacaaggtgagatcagccgcccggccaagctatcttctcgctagcagaagatgaatccggcctcggcgccccctccgctc

SEQ ID NO: 627384 - DNA, 100 bp, Homo sapiens
aagtgaaggcaagagctgatttggcctctgtgctcccctccgcaaggggatcgttttctccaggatgtggttctgagacagtccctgtccctgatggccc

SEQ ID NO: 627385 - DNA, 157 bp, Homo sapiens
ctttggctgatgtaatgagtgaacagctggccaaagaattgcagttagaagaagaagctgccgtttttcctgaagttgcgaaggcatggtacgatgtgatacagcggttggaacacctgattatatttcccctgaagtattaaaatcccaaggtggt

SEQ ID NO: 627386 - DNA, 75 bp, Homo sapiens
gtagacgcccgcccctgcctcagagaagacaagcaaagtggatcagcaaaggctgcagtcaccagcatcttttcc

SEQ ID NO: 627387 - DNA, 75 bp, Homo sapiens
ctgtcataacaatgaccacctggtagagaaataccgcattcttatcacaaagattgatgttcttgaggaccctgc

SEQ ID NO: 627388 - DNA, 75 bp, Homo sapiens
agggtgaccgacatcccaactagatatctccggagcatttggataatgtgacagttggaatgcagtgatgtcgac

SEQ ID NO: 627389 - DNA, 98 bp, Homo sapiens
gccgcgcccgccgcgcggagcgccccttcgcgtcccctgcaccatgagctggggcaccgagctctgggtcaactttgtagtgtgccaactctttgcct

SEQ ID NO: 627390 - DNA, 100 bp, Homo sapiens
aagcgtgctccacaaatatttacagtcggaggagtactcggtgaaatcctgtcctgaagactgtaagggaagaagcgatgctgtccacatactttgaaac

SEQ ID NO: 627391 - DNA, 51 bp, Homo sapiens
tccagagctgctgcagaaaagctgtttggcttgccgaactaaagcaagaat

SEQ ID NO: 627392 - DNA, 50 bp, Homo sapiens
tcagccaccatggaggcgcaggcacaaggacacattggcgtgagacctgg

SEQ ID NO: 627393 - DNA, 100 bp, Homo sapiens
gagaagtatgaggtggtgaaactcaagatccccatggacaacaaggagatgatgaccactggatcgtcgacacagactacgacacgtatgccgtgcagta

SEQ ID NO: 627394 - DNA, 75 bp, Homo sapiens
attacccgaaaaacaaccacactgcttcgatcctggacaggatgcaggcagatactctggtggagcaacgttcag

SEQ ID NO: 627395 - DNA, 101 bp, Homo sapiens
ggcggccgcgccgaggtgacaagctgcgcacctggaaagttacccggctgtctggtgaggtactataagatctccgtggtgctcatgtgctttgtggtccc

SEQ ID NO: 627396 - DNA, 100 bp, Homo sapiens
aaggacatacttcgtatacgacagcttttacagtcccaagcaacagaagcagaggtctcagcatcagaggagcccaggaggaggaccctcccgatcccca

SEQ ID NO: 627397 - DNA, 82 bp, Homo sapiens
agacctctctcctcttcctgctcatgggttcctgcgtgaagaccagctgggagcccactgcctgctgccacctccaactccg

SEQ ID NO: 627398 - DNA, 98 bp, Homo sapiens
ctggtcttccctgaccccgcggccggacgacccaagcccgctgagcaggatgagggaaatgagtggcttatactctcctgtcagtgaggatagcacag

SEQ ID NO: 627399 - DNA, 100 bp, Homo sapiens
ctctaattgcctcctgatagcacacagaaaggaatcctatgaggatggttgtgaggattatcctactctatcagaatatgttcaggattttttgaatcat

SEQ ID NO: 627400 - DNA, 100 bp, Homo sapiens
atgaacctggcgagccagagcggggaggccggcgccggccagctgctcttcgccaacttcaaccaggacaacacctccagcggcgccatgagcaaatgaa

SEQ ID NO: 627401 - DNA, 100 bp, Homo sapiens
agcggacaaggctccggcctgcgaggagccatgtttgaccgtgagaacaaggccggcgtgaacttcagcgagttcacgggtgtgtggaagtacatcacgg

SEQ ID NO: 627402 - DNA, 100 bp, Homo sapiens
ggctgggagtggagtgatgatgaatttgatgaagaaagtgaggaagggaaagcagcaatttcacaactcaggccacaacaagttgttcagaagaagcctg

SEQ ID NO: 627403 - DNA, 82 bp, Homo sapiens
ccggaaaccacaatagcgggattgatctccttaggacctgacctgaccgagagctgcgaacagtcagacagacgatgattga

SEQ ID NO: 627404 - DNA, 87 bp, Homo sapiens
agtttaaagctcataggaatgtgctggcctcctttagagtcggatggtcagggctgccctttctgtcgttgtgaaataaaaggaact

SEQ ID NO: 627405 - DNA, 136 bp, Homo sapiens
ttcagcactcagaatgctccaggcagtgtaatctcattccatcttcattcatgactccagacagcacaacattctgaaattttttggttattgtaatgatgttgatcgggagttgagaaaatgcctgaagaatgag

SEQ ID NO: 627406 - DNA, 100 bp, Homo sapiens
cctcacctcgatgcagccagtagcttggatccttgtgggcatgatccataatcggtttcaagactattgggaagaagttacctgcaactacagcaactcc

SEQ ID NO: 627407 - DNA, 99 bp, Homo sapiens
gcagcagctccccagggcccacgggccagccccgccgccctcgcaacctggcagccgccgccgtggaaggatggccaggccatgttatgggatctcaac

SEQ ID NO: 627408 - DNA, 100 bp, Homo sapiens
agcagcggcggcggcaagacctctccccctcggaggcggcgggcggaggcggcgggtcatcatcagatttgaaatatttaaagtggatacaaaactattt

SEQ ID NO: 627409 - DNA, 100 bp, Homo sapiens
atcgtggccggtggttctgcaggtggctgttgacatggaatttgctaagaatatgtatgaactgcataaaaaagtttctccaaatgagctcatcctgggc

SEQ ID NO: 627410 - DNA, 103 bp, Homo sapiens
catcctgccgtccttctccactttcgccagcccgtgccgcgagcgcggcctgcaggagatgctgtgtgctgtggacccacctggggttcatggagtgggccac

SEQ ID NO: 627411 - DNA, 75 bp, Homo sapiens
ctgggtggatccggatcgcatggaagacgcagcctggccgcgctctcccaatgggcttaggtcacgagcaaggat

SEQ ID NO: 627412 - DNA, 90 bp, Homo sapiens
gtttgatgaaggtggaggcagcgcggctctcagacatgtcatgctgcccaaggacatagccaagctggtccctaaaacccatctgatgtc

SEQ ID NO: 627413 - DNA, 83 bp, Homo sapiens
ccagaacttgcagcaacaataggttcctaggagaatgttaacagtccagacctttttcactacatcaaccacggatgattggc

SEQ ID NO: 627414 - DNA, 75 bp, Homo sapiens
tcatacagagattgaaatgttccttagaaaggagcagcagggaaagaccatgtttgtagatttattggctgtggg

SEQ ID NO: 627415 - DNA, 97 bp, Homo sapiens
cttctctgaggcggcgagagatggtcaggtctggagctcgaccgggccaggtaaatcgatttagtaaggtggaagacagagcaatttttgtcactga

SEQ ID NO: 627416 - DNA, 100 bp, Homo sapiens
gggcttgaagacccagaagatgacatatgcaaggatgtgtttggccaaatgggagagtggttacaacacacgagctacaaactacaatgctggagacaga

SEQ ID NO: 627417 - DNA, 100 bp, Homo sapiens
ggggaaaatctccccggtgactttcaggacggggctcttcacccccgacatggcctttgaagccattgtgaaaaaacagattgtaaaactcaaagagccg

SEQ ID NO: 627418 - DNA, 48 bp, Homo sapiens
ttggaccaagaggaaatctgggtggacccccaaaagtacaagggcata

SEQ ID NO: 627419 - DNA, 50 bp, Homo sapiens
aggatgcaccttcccctgccttggaaagtgcaggaatcacagccatggcc

SEQ ID NO: 627420 - DNA, 100 bp, Homo sapiens
gcgcccgccagttgcttgatcaggtggaacagattcagaaggagcaggattaccaaaggatgttggccgatgatgcagaagcaggtgccgaggatgagaa

SEQ ID NO: 627421 - DNA, 50 bp, Homo sapiens
ggccgcggaaacctggagtggaaggaggtctgcggggtttccgagaggct

SEQ ID NO: 627422 - DNA, 100 bp, Homo sapiens
agcaaaccccagcaagatgcggaggctgcctcggcggagcagaggaaccacacgctgatcatggatttcagatgcatgccaggtttccactgattgccag

SEQ ID NO: 627423 - DNA, 100 bp, Homo sapiens
aaatatggcaaagaaacctattctgagatttcatcagctaaaccatcagatgcgggcacttatgtgtgccttgctcagaatgcactaggcacagcacaga

SEQ ID NO: 627424 - DNA, 100 bp, Homo sapiens
agtaccgacccgagttatgcccaccctccaactttgcgacggaaatgtgtcatcgaaagccagatgcctggagttactgtaaaagacgtgaaccagcagg

SEQ ID NO: 627425 - DNA, 82 bp, Homo sapiens
ttaggagggcaggaagagctgcagtctttgtgggacaagtgcctccggagccagcgtggtggccatagacaacaagatcgaa

SEQ ID NO: 627426 - DNA, 101 bp, Homo sapiens
tgcagcgcgctgccgccgcggggccggcagtactttgaagatgtcatcccattgtcttctgacctctataattgccactgagagatctgctgtcagtctgc

SEQ ID NO: 627427 - DNA, 100 bp, Homo sapiens
gggaatcatcatcgcaggctgggaccctcaagaaggagggcaggtgtttgagaagtcccccctgcgggtgaagaacttcgggatctggctgcgctatgac

SEQ ID NO: 627428 - DNA, 75 bp, Homo sapiens
gaacatcagggccctccagactcaggcgccccaacaagcagattttgaagcagtgggaagaatattctgtcttgg

SEQ ID NO: 627429 - DNA, 76 bp, Homo sapiens
gaaattttatcttttgaaacacgttctgattaaccaaggttctttatagctccaagctctacagattcttcaaata

SEQ ID NO: 627430 - DNA, 100 bp, Homo sapiens
gtgtgtcttcagttaatgagagacctattggttttagatggagcaggattagatattgatttccatcttgcctctccagaaggcaaaaccttagtttttg

SEQ ID NO: 627431 - DNA, 50 bp, Homo sapiens
cggcgccggagacgatgccgttatgcctgaggaaacccagacccaagacc

SEQ ID NO: 627432 - DNA, 74 bp, Homo sapiens
ccactttcgccagcccgtgccgcgagcgcggcctgcaggagatatggctcgtggacagcagaaaattcagtctc

SEQ ID NO: 627433 - DNA, 100 bp, Homo sapiens
aacagaaagatggaaattaagcctttgcaatttgaaattatgattgacagacttgaaaaagccagttctaatcagataaaataccatgaggagtttgaga

SEQ ID NO: 627434 - DNA, 74 bp, Homo sapiens
ttctctgctgaccctctctcgtcgccgctgccgccgccgcagctgccaaaatggctctggaaggggaggctcac

SEQ ID NO: 627435 - DNA, 100 bp, Homo sapiens
acgagtaccaggtcaacggcaagaggatccttgggaggaagaccaagtggggtaccatcgaagcggagaccctgttaactactacgttgacactgctgtg

SEQ ID NO: 627436 - DNA, 90 bp, Homo sapiens
cggagcccacgagaggcagcgccatggcggagcagacctactcgtggacattttggcgcaagttttacagattttattaaagtcgaagct

SEQ ID NO: 627437 - DNA, 75 bp, Homo sapiens
ccaacaagggcaaatcaatgttggagttccagccaactgcacctataatatgtgaatttcttacaatgatggcag

SEQ ID NO: 627438 - DNA, 75 bp, Homo sapiens
tggggagtctgattcagatgacaactgtacagatgtcactgatacgatgaatggattaaagcagataaaatagta

SEQ ID NO: 627439 - DNA, 95 bp, Homo sapiens
ctcccaaggtgctgggattacaggaacccgtggcattggaagatgtcagagacatggcacatggatgtgatcttcaaaaactgttacagcctcat

SEQ ID NO: 627440 - DNA, 100 bp, Homo sapiens
gaagcagatgattaaggatttagccaaagaaaaagataaaactgagaaagaattgcccaaaatgagccagatgtcagtattgaatatggtggtgaggcgt

SEQ ID NO: 627441 - DNA, 100 bp, Homo sapiens
gaaaattcatccttaagctaaaggagcaggtgcagccataatgactttgttgccatcctggacctccctgagggagagcaccaatacaagttctttgtgg

SEQ ID NO: 627442 - DNA, 95 bp, Homo sapiens
ttgctcaactaagaccaagtcctcgctggactgctcagggtgccagacctcatcgtccgttcactcgacctcatccagccttatggcgaatggtt

SEQ ID NO: 627443 - DNA, 100 bp, Homo sapiens
ctgggctgagcggccggcggcgcgggcccggcggcggcggcagcggggtccgggtccggagcgccacagctccaccgaggacaccgcgtccagcttgtgt

SEQ ID NO: 627444 - DNA, 88 bp, Homo sapiens
taccttgtgacagaatatgccaaaaatggagaaatttttgacttaattcagtgcacaaatgagatgaatgtgaacatcccacagttgg

SEQ ID NO: 627445 - DNA, 100 bp, Homo sapiens
atgaaaagctacttagagaacttaggaacttggattcaaggcagtgaaacacagtgctctgtgcctatacagtgtacggataaaacagataaacaagaag

SEQ ID NO: 627446 - DNA, 83 bp, Homo sapiens
tgtatgattaggccacaatcttcaatgagtaaacatattcctcctcggagaagtcaatgtgcccatcgctggacgaagcccag

SEQ ID NO: 627447 - DNA, 78 bp, Homo sapiens
tgaaagtggcggtgcggatacgacccatgaaccggcgagaactgtcaagtaatccacctctggctaccatccttattc

SEQ ID NO: 627448 - DNA, 71 bp, Homo sapiens
gcaggctcggctggggcccgcagatcagcctctgtggactcggtgcttctcctggcaagtaaaccccaagg

SEQ ID NO: 627449 - DNA, 74 bp, Homo sapiens
agagggcttgcatgaagaggatggatcttctgtgtgatccctcacatccacaaatctctgattggaaagaaggg

SEQ ID NO: 627450 - DNA, 88 bp, Homo sapiens
tttggagcctcggtacactgtatggacggtctggaaaatcccgaagcagaagcccgtattcatctaggcattcaagatctcgtagcag

SEQ ID NO: 627451 - DNA, 50 bp, Homo sapiens
cggcgcctcaggcacctcggcccggggtgtaccagtgatggcaataagaa

SEQ ID NO: 627452 - DNA, 50 bp, Homo sapiens
gaacttataatcgtcactggattaccaagatcactccatggatgaaatga

SEQ ID NO: 627453 - DNA, 101 bp, Homo sapiens
gccatgcaggtttctttctaagagaaaacgagtgtgtctcctgtagtaagatgttttagaagaatgtatgtctcttcccaagctatcttcttattctggat

SEQ ID NO: 627454 - DNA, 75 bp, Homo sapiens
ctctcttcaccctgccgtcatgtctaagtcagagatgatatcatcaagttgaatcgaaaggaagggaagaagcag

SEQ ID NO: 627455 - DNA, 100 bp, Homo sapiens
gtgacaccttctacaaggagcagctggagcgtattgagaggaaggtgaaagaactcttttcttctttgggagtcgaatgtaatgtcttggaacttgatca

SEQ ID NO: 627456 - DNA, 75 bp, Homo sapiens
atgccctcaagtcgacaggggatgggaccctagatcttttagagaaatctcgggttgttaaacagccaagaggtg

SEQ ID NO: 627457 - DNA, 97 bp, Homo sapiens
tatagacaattaataaaagaaatgaattctgccaaagagaaatataaagaagctttagctaaagtcgggaacatgccctgtgtgccgccgtcatttc

SEQ ID NO: 627458 - DNA, 90 bp, Homo sapiens
tggagctgccgccgccgggactcccgtcccagcaggttgggttaacggcatggagaacagtcaccccccccaccaccaccaccagcagcc

SEQ ID NO: 627459 - DNA, 50 bp, Homo sapiens
ggagaaggatatccagacagccctaagaaaatgtctaatcaacaggagaa

SEQ ID NO: 627460 - DNA, 98 bp, Homo sapiens
ctggcagctttgaaggcaggccattgggtggtgttggatgaggtaacatctgccggcacctgctgccccgggtccagtgccccgccttgattgtgcac

SEQ ID NO: 627461 - DNA, 75 bp, Homo sapiens
cagctggacgtttgccgtccactctgagaaattccttgagctcataggcattgctcagggtcagatgacagttct

SEQ ID NO: 627462 - DNA, 100 bp, Homo sapiens
cgagcagatcctggtcctcgatccgcccacagacctcaaattcaaaggtggacacctgcgcaggtgtgtgccctccggcccctgaagcatggccagcagc

SEQ ID NO: 627463 - DNA, 108 bp, Homo sapiens
gaggagctgtgcagccgcgaggaggcgcgggaggtgttcgagaacgaccccgagacggtcaaaatgcagatcttcgtgaaaacccttaccggcaagaccatcaccctt

SEQ ID NO: 627464 - DNA, 82 bp, Homo sapiens
gaccttaccaagaacgttaaaggaaacaagtagaaatcagcagtggagtgtctgtgattgcagcaggagagaagattccttt

SEQ ID NO: 627465 - DNA, 100 bp, Homo sapiens
ctgaacccgaggccctgcctactatctatgttgttacccccacctatgccaggtgtgtggctctgtggctgctgtggaagagcggctccgaggtcgggag

SEQ ID NO: 627466 - DNA, 100 bp, Homo sapiens
gaaagagattgggtacttaatgcggatgtgatgctggtacaacccagagtagaatttattctgtctttcattgaccacattgctggagatgaggatcaca

SEQ ID NO: 627467 - DNA, 82 bp, Homo sapiens
gacctgcagtttgcaatatgactttggaggaattctcggctggagagcagaagaccgaaagagaacaggggccccattctgc

SEQ ID NO: 627468 - DNA, 100 bp, Homo sapiens
gtaattacccttcgctctcctctacagacatatctgaagagatggattaagaatgctttggattaaggattgtggagcacatttcaatcattttaggatt

SEQ ID NO: 627469 - DNA, 80 bp, Homo sapiens
ccccagatgcccaccgggatggagaaggaggaggaatcgcaattctgtggtgttcttggtcacacatttatggagtttct

SEQ ID NO: 627470 - DNA, 50 bp, Homo sapiens
gcaagaaagaccatcaagtttaccagaactttccgctgtactttttgcca

SEQ ID NO: 627471 - DNA, 76 bp, Homo sapiens
ttaatttcatggtacatgagtggctatcatactggctattatatgaactttcacgatggccgtaaagcacagcagc

SEQ ID NO: 627472 - DNA, 82 bp, Homo sapiens
gtctcactgacttcaagaatgaagccgcggaccctcctgaaagcgtggatacccatcaacgaagttttgatattggaattca

SEQ ID NO: 627473 - DNA, 83 bp, Homo sapiens
aacttaaaatggatatgaaaagtgaagaaagtgatcataggagaaaaccatttcagagcattctgctaagtgatgaatccagc

SEQ ID NO: 627474 - DNA, 100 bp, Homo sapiens
gcatgtgaagcaatggtatgggaaaattgtttgcagaaggatgaaaaggctttattgccaaactgatgaagttaaaggaagtagatcgtacagccatgca

SEQ ID NO: 627475 - DNA, 98 bp, Homo sapiens
actcgcctcaagcacctgcgcatcgtcatcggaacagcagcagtattggtatcgacagcacttgcttagtttgcaacagaggacaaaagttcatttgc

SEQ ID NO: 627476 - DNA, 100 bp, Homo sapiens
cctgatcccaaaattattgaaaacactcgaaggctacggataaatggtgaaaaattagaagaactcttatctgagagagctgtacaatttcgggccattc

SEQ ID NO: 627477 - DNA, 98 bp, Homo sapiens
accaaaggccgaagtacaagatctaaggctcttgtctggataccagaaggccctattgatcaggggccagctataggaagagtacgcgttttagaaga

SEQ ID NO: 627478 - DNA, 100 bp, Homo sapiens
agaggatggaaatcagcgcggagttaccccagacccctcagcgtctggcatctgtataaaggaccattgttagaagagcaagcccttacaaaggcggcag

SEQ ID NO: 627479 - DNA, 98 bp, Homo sapiens
ggggctgctggtgggccgcgtcgaagacatggaccagggctacggaggcgtccgacctccgatcatgaacgggcccctgcacccgcggcccctggtgg

SEQ ID NO: 627480 - DNA, 100 bp, Homo sapiens
ctgcaaaccacccaagtctgcaatcttaccagggaggccaagcgaccacccaaagaaggcttcctggactgggtccccaagaagatgcagcgggtgggct

SEQ ID NO: 627481 - DNA, 90 bp, Homo sapiens
gtagggcgctacgccctacctccagacggaagtgagcgacacactctgcgtcctcgcctcaccagagtcttgctgtgttgcccaggctgg

SEQ ID NO: 627482 - DNA, 90 bp, Homo sapiens
ggctgttgccatgaggcgaggctagggaggacctcacttccccggggtgtaataatgttaactgaggacattgtgacaaatgtttccccc

SEQ ID NO: 627483 - DNA, 100 bp, Homo sapiens
gcagaagaccgcagtgggataaatctcaaagatctcgtacaagatccttcttttctgtggcaagcgctacaagaaccgaccggggctcagctaccactat

SEQ ID NO: 627484 - DNA, 87 bp, Homo sapiens
cggagagaactcagcgaggattctgaggctgttcacggaagaccaggatgtagatgagggacttgtctatgacactgtattcaagca

SEQ ID NO: 627485 - DNA, 98 bp, Homo sapiens
gtgaaatgccccaagcttttctatttgatgtgatttatgaagcatatcagcaggacaaggtggagcagacacctcgcagtcaacaagacccggcagga

SEQ ID NO: 627486 - DNA, 100 bp, Homo sapiens
agccgagatgccgggggagcggggccttccacaccccctccgtgggtgtgtggatgctcgacatgcagcagaaggagaaatatataccaaactgaatcaa

SEQ ID NO: 627487 - DNA, 90 bp, Homo sapiens
cgggggacaagtcggcgccccagagcggacgaggcacgtgtggttctcaaatataggcattctgatgggaacttgtgtgttaaagtaaca

SEQ ID NO: 627488 - DNA, 73 bp, Homo sapiens
aaattatgctgcagcatattgtactggcctgctgctggcccgcaggtgtgggccaaactgaaattgcagaagg

SEQ ID NO: 627489 - DNA, 51 bp, Homo sapiens
tagggtgacgtgtgcattgagtaaacgagaacctccatttctaccagaatc

SEQ ID NO: 627490 - DNA, 71 bp, Homo sapiens
cgcactttaaaaggccatcggtggaagaaaggagccttctgtggtgtcaaattgagaaccaggtagatccc

SEQ ID NO: 627491 - DNA, 100 bp, Homo sapiens
gggagcgcgaacgagcgacggcggaacccgtgggcctgtggactgcagcctcggcggtcagcagactgtgccctgtccacggtgcctcctgcatgtcctg

SEQ ID NO: 627492 - DNA, 90 bp, Homo sapiens
ggagacccaaggaacagtgccaagttagatgccgattacccacttcgagtcctttattgtggagggtctgggggtggtggcatctcccct

SEQ ID NO: 627493 - DNA, 100 bp, Homo sapiens
gtgctgaggagtcatggaagagtttttaaaccaggagccagatgaccaagatgctccagatgaacatgagtcgcctccacctgaagatgccccattgtac

SEQ ID NO: 627494 - DNA, 100 bp, Homo sapiens
tatcatctatgacagtcctgttacaaacactaaagcaacctttacctataaagaagttctggagcagaggaacactgacgagaagaccttatgaaccagg

SEQ ID NO: 627495 - DNA, 75 bp, Homo sapiens
gcttgatgacatcagtcaagagattgcccagttacaaaggcaccacactgtaactcgaggcatcaccaaaggcgt

SEQ ID NO: 627496 - DNA, 82 bp, Homo sapiens
aacacactggaaacaaacagtatttctactggaaaaaccattttcagttaaagcagatttactgagaaggggaacttggaag

SEQ ID NO: 627497 - DNA, 86 bp, Homo sapiens
agcatattttcacatgggaaaagccaacctggccctgaagaactacagtgtgctcttcaccaccaggagtgttccttgagaaggac

SEQ ID NO: 627498 - DNA, 90 bp, Homo sapiens
gttcttggtgaagtcggccagcctgagcaagcggaggacctacgccggcctggtttcatgttagggtcttacagtgtgaatgacggtgcg

SEQ ID NO: 627499 - DNA, 50 bp, Homo sapiens
agcagcaacaccagcactgccaacagattgacaagtatctctatgccatg

SEQ ID NO: 627500 - DNA, 100 bp, Homo sapiens
acatgctaaaagatgacagacttggacaacatgtcccaacattacatcccagtagtgggcagcagtcagtgacaggtgtaacctctgtggatgacagcaa

SEQ ID NO: 627501 - DNA, 100 bp, Homo sapiens
gtggccccgagggcggatccgaggaaacctcgacctgtctcccagttggttgcacagcaggttactcagcagtttgtgcctcctacacagtcaaagaaag

SEQ ID NO: 627502 - DNA, 76 bp, Homo sapiens
gtgcaacttcactaagtccatggaagaaggcggccttctgatctgtttaccacgtgagcaagcagctcggttctgt

SEQ ID NO: 627503 - DNA, 74 bp, Homo sapiens
ctcactccgatttaaggtgcccgagtccacgctgatggactgccgtagacgatgaaaactttcggaagagaaag

SEQ ID NO: 627504 - DNA, 100 bp, Homo sapiens
cacaggcccgccccattgagggtggcccaggaagtgggaaagagcgtggtggaggttaatttggagtggcccctggagtcagtttcctacaccatccgag

SEQ ID NO: 627505 - DNA, 99 bp, Homo sapiens
actggtgcctgcgctgaaaaaggttgggccatgcaggctgctgcctatatcttcattcataggaaatggaaggatgacaagagccatttcgaagacatg

SEQ ID NO: 627506 - DNA, 88 bp, Homo sapiens
gatgaagatgaaaaaacaaaaggactgtgggattccattaaaagaaaataatgttgagtttccatgaagaacaggaagtactgccaga

SEQ ID NO: 627507 - DNA, 76 bp, Homo sapiens
tacttgttgtcctagaggaagcacagcgcaaaaatcctatgttcaagacttgctgtgctcagatcctccattcaag

SEQ ID NO: 627508 - DNA, 100 bp, Homo sapiens
ggggcggaggcggaggcagaggtggaggcgctttgaaagagtctcactgtcgcccaggctgcagtgcagtggtgccatcacgcgtcactgcaacctctgc

SEQ ID NO: 627509 - DNA, 50 bp, Homo sapiens
gagaaggccaagggttctcttccgggtggaaaacgaagctcattcccaac

SEQ ID NO: 627510 - DNA, 100 bp, Homo sapiens
gaccaggggcgacggcgtactttgggcttcatcatggaggactacctgcagggttgtcgagctgctctgcagggtccagattttggctatgtaactcgag

SEQ ID NO: 627511 - DNA, 82 bp, Homo sapiens
ctgccttctactccatcgtgggactcagcagccttggtgctcaggtgccagatgcaaagggttgctcctggacgccaccaac

SEQ ID NO: 627512 - DNA, 100 bp, Homo sapiens
tgttaactacaacagaccatctgtttcaccagtgatcattaaagaatgggcagcttacaaaggaaagtctcctcaaaccccggaactggttgaagctctt

SEQ ID NO: 627513 - DNA, 84 bp, Homo sapiens
ttggagttcttacaacatggcagacattgacaatgatgatgatgatgattttgatgatgaggaagctgaagaaaaagcgccagt

SEQ ID NO: 627514 - DNA, 75 bp, Homo sapiens
cttgggacccttgcatggtgtttcaaagggtggtgaagaactaagatgctgagatgaatcgtcacctgtgtgttt

SEQ ID NO: 627515 - DNA, 75 bp, Homo sapiens
tctttgccggcctggtgaaatacatgcactcagggccggtagttgccatgaagtggtccaaaggcaaagttcggg

SEQ ID NO: 627516 - DNA, 75 bp, Homo sapiens
tgacttgtcctgggactgaggaaaatttaccaggacaggtcccagaagaggaggccagtcacaatggacagcgcc

SEQ ID NO: 627517 - DNA, 50 bp, Homo sapiens
gagacccgttcagagtcctacagtggcagccactctgcccaagaactggc

SEQ ID NO: 627518 - DNA, 88 bp, Homo sapiens
atgcttcacttcttcgacgttatgagcttttattttacccaggggatggatctgttgaaatgattagccgatgaattacatatgccat

SEQ ID NO: 627519 - DNA, 75 bp, Homo sapiens
cttggtcgccgcgtccttggctggcgttgctactatatcggggccacagatgatgcagccaccaaaatcatcaat

SEQ ID NO: 627520 - DNA, 98 bp, Homo sapiens
cttccatctacaaaagctgagtttacttctcctccttctttgttcaagactgggcttccaccgagcaggttccgaggcctcatcctgctgctgacctt

SEQ ID NO: 627521 - DNA, 101 bp, Homo sapiens
gaggaattcaagagctgaaggacaaacactggttcagatcgagttttggttcgggttagagacttgacaatacaaaaagctgatgaagttgtttgggtacg

SEQ ID NO: 627522 - DNA, 75 bp, Homo sapiens
gtttacaattattgatggaaatcaggtcagcggagaagatgctggaaacaagatgaagaagatgatgatgactat

SEQ ID NO: 627523 - DNA, 101 bp, Homo sapiens
gaagaccaagatcatcgagatggtgtgcaactgaggaacatggctcaagaaactaatcacagccaagtgcctatgctttgttccactggctgtggatttta

SEQ ID NO: 627524 - DNA, 74 bp, Homo sapiens
cgaggcggcggtacgcaaggctggagccgcagcgggagcccccgttttgaaaagtgaggtacatgacctgcgag

SEQ ID NO: 627525 - DNA, 100 bp, Homo sapiens
actgcgtggtgtggacgcccatcccggtgctcacataaaatttgatgctgggactctccttcttagtacacaccgactgatttggagagatcagaaaaat

SEQ ID NO: 627526 - DNA, 75 bp, Homo sapiens
gaggctcaccgcagtcgtgcaggatctgaaggagacagaagatatgttgtgggatcatctataaaggccgttttg

SEQ ID NO: 627527 - DNA, 76 bp, Homo sapiens
aggagcactggaggaagcacaccctgtcctatgtggacgttggcactgggaaggaaagaccacagcaagattcttt

SEQ ID NO: 627528 - DNA, 99 bp, Homo sapiens
agccaagtgaaaggcactatcgagattggaaccacagaagtctttcccagggaactccgatgaagtgttccaacaaaatgagcgagtgaaccaagaaga

SEQ ID NO: 627529 - DNA, 51 bp, Homo sapiens
ctcccgccaccctttccgcccccgggaattacatgaatgacagtcttcgaa

SEQ ID NO: 627530 - DNA, 75 bp, Homo sapiens
gcgactcggagtcagaggaagatgagcaggactcagaggaggttcgatgacggtcgaaccaaacccattccaaag

SEQ ID NO: 627531 - DNA, 100 bp, Homo sapiens
gatctggttctgaggaggacacacctggcatcggatgacctttataaattatctatgaaaatgccaaaagctctcaagcatgggtaggttctctctccat

SEQ ID NO: 627532 - DNA, 127 bp, Homo sapiens
gccgctgccgctatggatgatcgagaggatctggtgtaccaggcgaagctggccgagcaggctgagcgatacgacgccttgaaaagatcttttgaggtcgaggaggtcgagacacccaactccaccc

SEQ ID NO: 627533 - DNA, 100 bp, Homo sapiens
ggagccgtctattactgtccttggcccgcggaggggtctgcgcagtgcaggcagataccgtttgacaccaccagaggaatgccagctcctgagcaggcct

SEQ ID NO: 627534 - DNA, 95 bp, Homo sapiens
gacatcatgctccagttcctgagtcaatacagatttgtatgtgaagctattttgaaagtttatgaagaaggctttgttaaacccttaacaacatc

SEQ ID NO: 627535 - DNA, 85 bp, Homo sapiens
gctgcagatgccgttaaacaaatcctggaggcagttgctgtcagtactcctgcatttgtaccaacgaaaactcacgtgctgcttc

SEQ ID NO: 627536 - DNA, 50 bp, Homo sapiens
caggtgtgggctctaggctcggatcaggctggagtgcagtggctcggtct

SEQ ID NO: 627537 - DNA, 100 bp, Homo sapiens
agacattatctgccagttaagattattcttaaaactctgggtctaaaattcccaggactccacagctttgcaccagataagcctggaggaatactaatga

SEQ ID NO: 627538 - DNA, 74 bp, Homo sapiens
tccacatcttgatacagaaaccccgacagagcaatctcccaggcaatagcatgtcctttgcaacctgatcacac

SEQ ID NO: 627539 - DNA, 75 bp, Homo sapiens
aacagcggtggcattgagcccgaacacgtaaatggggagcaggagaaccgagtgcagaagggaaatggatatttt

SEQ ID NO: 627540 - DNA, 71 bp, Homo sapiens
tcaaggataagggcgacagcaacagctctgccggctggaagtatatctctctaccgggggaattgcaggcc

SEQ ID NO: 627541 - DNA, 101 bp, Homo sapiens
cgccttcctcaacgacgcggacatggtcatgagctttgtgaacctgggtccgtggcactcaggtagttggttctgacatgactgtgacagttgagtttacc

SEQ ID NO: 627542 - DNA, 82 bp, Homo sapiens
gaaggtctctggagacatcttcagcaggtctcctccgggctggggctgagcaagccctcggagtgaccgtgggtgacagcgg

SEQ ID NO: 627543 - DNA, 82 bp, Homo sapiens
agtggttttgacaacatcgacatcaagtcggccggggatttagaacactatggctatgcatcctccaacgtcagccccgccc

SEQ ID NO: 627544 - DNA, 88 bp, Homo sapiens
cgggaaatcgggctgaagcgactgagtccgcgatggagccaaggccacctttgatgccatttctaagacctacagctacctgaccccc

SEQ ID NO: 627545 - DNA, 100 bp, Homo sapiens
ttcttccgggaggttctgctggaggttcagaagcacctagacctgtccaatgtggctggaagcactaccacaggaagagcaagaaggaagtggaagtgag

SEQ ID NO: 627546 - DNA, 83 bp, Homo sapiens
actggagagcttcatcaaaaatagtgatagctttgataatttcagaagaggagccccgccgaggcatgagggccgtgctcccc

SEQ ID NO: 627547 - DNA, 100 bp, Homo sapiens
ccggaccgcgcctcaggctcccccagcttcggaaccaaaaagaagcttcccagagccggggccaggagccccaagcgccctctagcagcaaacacagaag

SEQ ID NO: 627548 - DNA, 75 bp, Homo sapiens
ccctccagctgccccctgtgtggcaaacctttcttgagctcaggatggatagaatgacagaagatgctcttcgct

SEQ ID NO: 627549 - DNA, 75 bp, Homo sapiens
caggaattgagagtcacagaggaaggacagtggagtctggcatcttattggagaaggaagccaacatccttttgg

SEQ ID NO: 627550 - DNA, 49 bp, Homo sapiens
ttggatatgaaactggaagacatcctggctcttgcagccaatgccggaa

SEQ ID NO: 627551 - DNA, 112 bp, Homo sapiens
cggcgacagtggcggcggcgccatggcagggcttgcaggtacatgtcccagagcaagcacacggaggcccgggagctcatgtactcgggagccctgctcttcttcagccatg

SEQ ID NO: 627552 - DNA, 100 bp, Homo sapiens
ttctggctggcatcttcccttttgcacctccgggagctgctgctgttggataacagggcaagattcagaggaagaaaaggatattgatgcattatgttga

SEQ ID NO: 627553 - DNA, 75 bp, Homo sapiens
agtgtgagaaaaaaataaactcctatttgtttatggcaagacccaacatgagtgaagtttcctgcaagaaacggg

SEQ ID NO: 627554 - DNA, 74 bp, Homo sapiens
gcggcgcaagggtgagggcggccccagaaccccaggagaaagaattgtgccatgaaaaatggaaaactcctgag

SEQ ID NO: 627555 - DNA, 82 bp, Homo sapiens
tttgacaactccaatgttgactctcagaggctgagaatggtgtggaggagaaaaagaaagcctgcaggtcgccaacagccca

SEQ ID NO: 627556 - DNA, 90 bp, Homo sapiens
gcccgccctggttggagctgcagtttcctaccagtttggttttcctcctccaccaggcgctccacctccatctcttataccaacaataga

SEQ ID NO: 627557 - DNA, 82 bp, Homo sapiens
cgggccatggccgccgccgatgccgaggctcctgctccagcccagcccccagagagcagaccccaggtgctggccccggggg

SEQ ID NO: 627558 - DNA, 96 bp, Homo sapiens
cgccagtggaaggagccaccgcccccgcccgaccatggccgagggccacaccatgaggccccagccccaccagaggccccgcgctgccctggcccc

SEQ ID NO: 627559 - DNA, 75 bp, Homo sapiens
gttctggcagattctggaaactgtacattgaagcagagggaactggattgctgtggcttccgggcggcataaagc

SEQ ID NO: 627560 - DNA, 85 bp, Homo sapiens
ctgcaccatccacggaccacagctcactttccccaaggaccagcttgacgaggcctggactgataacgtgaaggactggagcaag

SEQ ID NO: 627561 - DNA, 75 bp, Homo sapiens
ctgcagcccctgctgctggttctgcccctgctgcaggcagagttggaggagatggcaaaacgggatgctgaggcc

SEQ ID NO: 627562 - DNA, 73 bp, Homo sapiens
accaacagctgcgcaaggaggaagagaatgcatcaggcatctgcatctgggaccgacctcctgggctggctga

SEQ ID NO: 627563 - DNA, 73 bp, Homo sapiens
caacaaaccttgtggaccacagtgttaccagcatttgatattctgatggcaaaacaagtggaagaaaagagga

SEQ ID NO: 627564 - DNA, 74 bp, Homo sapiens
gacaagagagaacgcaaacagtttgaagctgaggattttatttgaaaaatgtgtgagtgctaaggaagctttgg

SEQ ID NO: 627565 - DNA, 50 bp, Homo sapiens
ggaaactgtcatcgataggaatacaagtcttgggcgtctttggtactggc

SEQ ID NO: 627566 - DNA, 100 bp, Homo sapiens
ggagaagaagcctccatgtggcagcactccatactctgagaggactactgttcgaagatttttggaagaatactgagaacggcataaagtgaagatcgac

SEQ ID NO: 627567 - DNA, 74 bp, Homo sapiens
ccttctagcatgactaggaatgcgatggcttacaatgttcagcaagttgtggtcagaaatgagaagacatgaaa

SEQ ID NO: 627568 - DNA, 100 bp, Homo sapiens
ccgccaccgccgccatgaagaagcagttcaaccgcatgaagcagctggctaaccagaccgtgggcagatttattcctgacgacattgaatgccaccacta

SEQ ID NO: 627569 - DNA, 101 bp, Homo sapiens
tgtcaactgctcacgacagaaggcgtctcatggcgttggaataccggctctcagcggctatttcaggtatgctgctgaaagtgggaatcctctacattggt

SEQ ID NO: 627570 - DNA, 114 bp, Homo sapiens
ccggtgccagcacctttcggcttctgagacggcggcagcagcggcattcagggcgccatgttttggaagtttgacctgcacacaagctcgcacctggacacgctgctggagcgg

SEQ ID NO: 627571 - DNA, 99 bp, Homo sapiens
gtttgtgttcggctgcggcacgctgctaagttttagccagtcttcttggagtcactttggctggtatttgaaatatctcaccaaaaaatatttgaagaa

SEQ ID NO: 627572 - DNA, 100 bp, Homo sapiens
gacgatctccatatttcattgcaagggttaaagcacgaattgggagctctcagcgacatcaccagtcagcagccaaagacctaactcagtcccctgaggt

SEQ ID NO: 627573 - DNA, 100 bp, Homo sapiens
gtctagtaatactggttctgtgtttggtcaagcagccagtactggtggaatagtctttggccaggtatgcatcgtgcagaagcgagacactaagaaaatg

SEQ ID NO: 627574 - DNA, 90 bp, Homo sapiens
agctgctgtggcggccccggcctcccacactcctgagccaggaacagatcaagatccagcacacggaagacatggagaacgagatcgacg

SEQ ID NO: 627575 - DNA, 98 bp, Homo sapiens
ggcggaggtctcctgccccttcattgacaacacctactcgtgctcgggcaagctgctggagagggagatcaaggcgatgcgagccacccctctggctg

SEQ ID NO: 627576 - DNA, 98 bp, Homo sapiens
caagagtttagccttgcgactggcccagtatccaggtcgaggttctgcagaaggttgtgactttagtatacagaaaactgaagccagtcatcaaatcc

SEQ ID NO: 627577 - DNA, 76 bp, Homo sapiens
gggaaacctgggggctccctggacaactccgagcaggttaattatagaaaatgccaagtaggaaatttgccgatgg

SEQ ID NO: 627578 - DNA, 83 bp, Homo sapiens
ctgagaacgaggtgtccacccccatgcagctacgagtcctcggcggaaatcctgcctcataccccgaggctcacccacttccc

SEQ ID NO: 627579 - DNA, 51 bp, Homo sapiens
gtttttgagaaggtgaaaatgattgatgactcttccgcgtctatttctctg

SEQ ID NO: 627580 - DNA, 75 bp, Homo sapiens
gtcctgcatttggccaccaagacctgggaacaagtcaatgccggtggtggtgtgcacattgagccccggtataga

SEQ ID NO: 627581 - DNA, 117 bp, Homo sapiens
tacctctgtttgcccttctcctttcaaaatgaagcccataggacttcaagagagctggcctgggagcagaagtttcggtgaggagcactagaaacacggctccaccccagattctca

SEQ ID NO: 627582 - DNA, 100 bp, Homo sapiens
tgaaggacagcctcttctcaatgctgtagcaccagttgtacccgatttaagtagtgacattgatactagtaattttgatgacttggaagaagataaagga

SEQ ID NO: 627583 - DNA, 100 bp, Homo sapiens
tggaagcccgggaccgtttaaaaaactgtgccttctgctggggatgtggagaaagccagagttctgaaggaagaaggcaatgagcttgtaaagaagggaa

SEQ ID NO: 627584 - DNA, 98 bp, Homo sapiens
ctatgggctcactgttgtccaggcagctcatcagaagatggctgtgccacccacgtatgccgatcttggcaaatctgccagggatgtcttcaccaagg

SEQ ID NO: 627585 - DNA, 138 bp, Homo sapiens
gtcgcgaagtcgggaccatcgtcgtgaggatcgtgtgcattacaggagtcctccacttgccactgggtttgttggcatccaaagctgttggggttgatggtgctgaaaaaaaggaagactacaatgaaacagctccaa

SEQ ID NO: 627586 - DNA, 87 bp, Homo sapiens
taatgggtactctttcctcgtggaatttgaagattctacagataaatcagactgacgacaacagtggagacttggacccaggagtct

SEQ ID NO: 627587 - DNA, 100 bp, Homo sapiens
cgtggccaccgctgtgatgtgggctgccgccctatattttttcttccagaatctcagcagctgggagtttcgagaggcccgtgccatgagaccgcctggg

SEQ ID NO: 627588 - DNA, 100 bp, Homo sapiens
ctgcaccttcagaaacagtgctgaagcctttaaatgcagcatctgcgatgtgaggaaaggcacctccaccaggtgttgcagcatccctggaagtgtcaga

SEQ ID NO: 627589 - DNA, 146 bp, Homo sapiens
caagaactggtataggagctccaaggacaagaaacacgtctggctaggagaaactatcaatgctggcagccagttcgagtatggcggccagggctccgaccctgccgatgtggccatccagctgaccttcctgcgcctgatgtcca

SEQ ID NO: 627590 - DNA, 89 bp, Homo sapiens
ctttcagaaacaatcacatgaagactaaagcatctgtcagaaaaaaactatccaactctggccaatattgaaaggaagaagaagttaaa

SEQ ID NO: 627591 - DNA, 98 bp, Homo sapiens
acgtagttaaagcccactagcctaaagccgggcggactgcgtactatactggcaattgctggagaagattttgcaattgttgcttctgatactcgatt

SEQ ID NO: 627592 - DNA, 100 bp, Homo sapiens
gaccagcatcttggctgaccttgagtgcagctccccctataagcctcggcctccacaggctgaagaaatgtcaacaattgggagttttgaaggattccag

SEQ ID NO: 627593 - DNA, 95 bp, Homo sapiens
agaagacagcggaagctggaggagtgacagggtaccggtggcctctgccgagcaagctttgtgcagtctggatttacctggacgtgctcttctcc

SEQ ID NO: 627594 - DNA, 82 bp, Homo sapiens
gttcgccagcagcccaagagcctcaaaggagcagtaatgaatgcaatggaaacaaacctcgttggaagtgacaaatatgctg

SEQ ID NO: 627595 - DNA, 83 bp, Homo sapiens
ctaggggcgactgcctggggcgccggcgagatgaagatctccttcaacgacaaaagcctgcagaccacatttgagtacccttc

SEQ ID NO: 627596 - DNA, 75 bp, Homo sapiens
cagctgaggttctggccatagatggaaagcagatggtggagctgaatatgccacttaccagactaaatcaaccac

SEQ ID NO: 627597 - DNA, 50 bp, Homo sapiens
gcatccggagagtggacaagaaaaactgtataatgatgactgcacaagat

SEQ ID NO: 627598 - DNA, 75 bp, Homo sapiens
ggaccagccccctgatcgcctgcggcaagtgctgcctgcaggtccatgccagctgtctgtccccagaccccagag

SEQ ID NO: 627599 - DNA, 98 bp, Homo sapiens
gggaggagccaagatgcatggacccagctcagcgggacgcgccgctggagaatgaagagctggcagcccatggggacctggtgcagagcgccgtctgg

SEQ ID NO: 627600 - DNA, 74 bp, Homo sapiens
taagaccaagtcctcgctggactgctcagggtgccagacctcatcgtaaacgccctgcagaagatatggaagag

SEQ ID NO: 627601 - DNA, 100 bp, Homo sapiens
ttgccacagatgacattactaaaccgaccagagggcaaagtgttggagacagttggtgtgtttgaggtgccaaaacagaatggaaaatatgagaccgggc

SEQ ID NO: 627602 - DNA, 100 bp, Homo sapiens
cacagctgatgacaaaaagcttcagagttctctaaaaaaactggctgtgaataatatagctggtattgaagaggtagcagcactgtctggagatgcacga

SEQ ID NO: 627603 - DNA, 97 bp, Homo sapiens
tgaatgaaaaagtctgttcaatacaggaaataaactttgaagatttggtaaaactcacctctttggtagaaaacttctgccacgcctaggatcccag

SEQ ID NO: 627604 - DNA, 75 bp, Homo sapiens
gcccagcgggacccagggagaaacaggggggcgagaagagaaacagtgaagaaagttacaacgtcaatgattatt

SEQ ID NO: 627605 - DNA, 75 bp, Homo sapiens
aagtactgagcctgttggaggaactggcccggaaacaggaggacggtggctgttgcaccacgccctccctcctgc

SEQ ID NO: 627606 - DNA, 74 bp, Homo sapiens
tgatgaggaagatgaagaggagagatggcggctgcagaggctgtgcatcacatacacctgcagaacttctcacg

SEQ ID NO: 627607 - DNA, 90 bp, Homo sapiens
gaaaaaggacgaagaggagaaacaagctatgtactctagcactgacacgtttacccacttgaaacagaacggcatcatcactggcgtgta

SEQ ID NO: 627608 - DNA, 100 bp, Homo sapiens
gtggaattcgcgaagctgccaaagccttagacaactttcaagatgttagaaagttcaagccagaagtttcttcagggtttggtctatctcattgggaacc

SEQ ID NO: 627609 - DNA, 90 bp, Homo sapiens
gctccagtttgagaaacctggatctgcgatctgtttgtggtagtatttatgaagattcatgtgctagtcatggtccaatgagtttgggag

SEQ ID NO: 627610 - DNA, 82 bp, Homo sapiens
cctcgagcgatgcacctcctttccaactgggcaaaccccgcttccagcaggaacagcttgagaactatgacttcaccaaatt

SEQ ID NO: 627611 - DNA, 83 bp, Homo sapiens
cttggtttcgggatctcggtgctgcagacggcgagacctcctgcacaggagagaacattgaaagtattctctaagctatttga

SEQ ID NO: 627612 - DNA, 100 bp, Homo sapiens
tgacagcgaagcggagcaagagggaccccagaaactgatccgcaaagtgtctacctcggggcagatccggaccaaggagctggctaaatatgaatacatg

SEQ ID NO: 627613 - DNA, 100 bp, Homo sapiens
ccgagtgcggcagtaccgcctccttcccagccgcgcggcttcctccagacctctcggcgcgggcccgccatgttcatagaggataaagcagtagacaccc

SEQ ID NO: 627614 - DNA, 90 bp, Homo sapiens
ggcctggcccccgggactccctgtgccttgcttggagctgacgccgacggacttaattcagtgcacaaatgagatgaatgtgaacatccc

SEQ ID NO: 627615 - DNA, 75 bp, Homo sapiens
gacagagcgcctgcgaccccagtcggtgctccggggaggtcacctgacgaggagatcacttcgaccacatcaagg

SEQ ID NO: 627616 - DNA, 88 bp, Homo sapiens
ttcggatggcgtcccgcgtagacgcagtggcctccaaggtgcagacagctgtgactatgaagggggtttctgggtgtctctggggagc

SEQ ID NO: 627617 - DNA, 99 bp, Homo sapiens
ggccgagcggggtcagttctctgtagtgtttgccaatgttggagccgtctgcaaagtgtccccggcaagaaggaacgtctggtcctaaccagtgagcac

SEQ ID NO: 627618 - DNA, 100 bp, Homo sapiens
gcataagcaaatgtaactcagcgaattgtaatggaaagcatatggacaggtctacgccacatcacttagttttacatgtggcacccataaaagatgaggc

SEQ ID NO: 627619 - DNA, 75 bp, Homo sapiens
tgattacatactgttagagaccactggattagcagaccctgagaatctcgatgctggcctggagcagaaactgag

SEQ ID NO: 627620 - DNA, 95 bp, Homo sapiens
ggctccggtgtttggaaccaacatctatgcagattggacatttgggagcaataaaaataagaagaaaggaaaagccagaaaaatagagaagaaag

SEQ ID NO: 627621 - DNA, 96 bp, Homo sapiens
tgacggggagtttttatactcattcaccattgacaattcaacttactctctcttcccacaggcatggaggagtgacggcaggaactttctgtgctc

SEQ ID NO: 627622 - DNA, 51 bp, Homo sapiens
gtttgtgccagctctccagagagaaaagcctcgccgctcctgctatttgcc

SEQ ID NO: 627623 - DNA, 96 bp, Homo sapiens
ggaagattaacatataccagtacagatgagcatgatgctatggatggagaattatcctgtcggatttgttaaggattccaagtaactcttatttgg

SEQ ID NO: 627624 - DNA, 91 bp, Homo sapiens
cggcgctgccgctcccgggcggccgcgggcgggtgctggagaatctggtaaaagcaccattgtgaagcagatgaggatcctgcatgttaat

SEQ ID NO: 627625 - DNA, 51 bp, Homo sapiens
cccgctgctgctggggtacctggatgtgaaatacgagcggattaagttcct

SEQ ID NO: 627626 - DNA, 98 bp, Homo sapiens
aatccgggggcaaggccaaaaagaagatggttggcaatggctgataaatgacactttgagacatctccatctcatctcaagtcactcccgccagcaga

SEQ ID NO: 627627 - DNA, 100 bp, Homo sapiens
ggaggatgcagtgtgccagctgctagaaaacagggaagatattagccaatatggaattgccaggttcttcactgaatacctgactggctcatggagaaag

SEQ ID NO: 627628 - DNA, 75 bp, Homo sapiens
cctgtacagcctgcagaactgtatggagatggtccacgtcctcccaagatggcccgatacgacaatggaagcgga

SEQ ID NO: 627629 - DNA, 74 bp, Homo sapiens
agacccggaaggcttcaaaggctgtcgcaaggaggaaggccctcctccagagttctgcaagtcgaaaaacccag

SEQ ID NO: 627630 - DNA, 87 bp, Homo sapiens
atcgggctggatcatcaagtagccgaaggaaacttttgagaagaactttgaaagagaaacccataaaataagtgagcaaaatgatgc

SEQ ID NO: 627631 - DNA, 98 bp, Homo sapiens
ccgtgcacgaggcttgggctgggatgttgaaggaggaggacgatgacacagaacgcttgcccagcaaatgcgaagggaagatcagttttcctgccatc

SEQ ID NO: 627632 - DNA, 90 bp, Homo sapiens
atgagatttacctgtgagatgtttcatcccaacactctggctttcaggctagaggaagagcagaagatgaggccagaaattgctgggtta

SEQ ID NO: 627633 - DNA, 138 bp, Homo sapiens
cgaaacaccggagctgcttccttgtggctatctggttggagagaacacgaccatctcagtgactgtgaaaggtggcgtatgtgttcgtgttttaatgtattcagagccattgggcaataagcagtccagaacattgaa

SEQ ID NO: 627634 - DNA, 75 bp, Homo sapiens
ctgagaagggagacgacgctgctgggtccgctgagcggggcgacccgagatcttcctctgatggcgctgcctcca

SEQ ID NO: 627635 - DNA, 75 bp, Homo sapiens
caagggacctgaacaggaagatgagactcgaggttttctgcatctccaaagacaacaggccctccctctgccctc

SEQ ID NO: 627636 - DNA, 127 bp, Homo sapiens
cccaccaagtgctggccagtgagcccatcccgttctctgatttgcagcagagaccatttgtttgtgactatgaagggtgtggcaaggccttcatcagggactaccatctgagccgccacattctgac

SEQ ID NO: 627637 - DNA, 100 bp, Homo sapiens
ctggggcagagaggaagcttctagtgtactcttactttgaaaagggggcagctggcattttatgctatgtgggagcctatgtcttcatcacttatgatga

SEQ ID NO: 627638 - DNA, 74 bp, Homo sapiens
tgggcatgtagtctacacaggacctgagaatctgagaaactgcaggttaaagatcgaggtccggaagccactag

SEQ ID NO: 627639 - DNA, 50 bp, Homo sapiens
tggagcagaaattggaggctcagcatagggaaaccccaaagccacggaga

SEQ ID NO: 627640 - DNA, 75 bp, Homo sapiens
cccagttatcataaccttgaatggcgactagatgtacagtccaaaattgaagacattagagcagaacaagagaga

SEQ ID NO: 627641 - DNA, 100 bp, Homo sapiens
caccttatgagccagacctcctccagcgacagcaacggccatgaggactcacgccggaggagagccgttgcccccaagtttcctggcagtgtgtgatact

SEQ ID NO: 627642 - DNA, 90 bp, Homo sapiens
aaagaaggaagctgctcaaaagaagatgcaaccttaaaatcagtgacaagaaacattccaaacaagcaacagtcttcaagaaattaaact

SEQ ID NO: 627643 - DNA, 100 bp, Homo sapiens
caggtattgggagatccacagctaagacgccaggacccactggaagcctagaaatggttaacgtccctaaaacccgccggactttctgtaagaagtgtgg

SEQ ID NO: 627644 - DNA, 74 bp, Homo sapiens
tagatatgctggtcctgaagatgatgctgccattaccttgattactgaagatttcattgctacatatcaggcca

SEQ ID NO: 627645 - DNA, 82 bp, Homo sapiens
tctgctcctgtcgccttcgcctcctaatccctagccactatgtctcgtcctgcagcacccttcacatcgtcgccacagccat

SEQ ID NO: 627646 - DNA, 75 bp, Homo sapiens
acaggtggtcattacagaccctgaaaaactggaccaaattagacagagtgatgatgatgatgattttgatgatga

SEQ ID NO: 627647 - DNA, 50 bp, Homo sapiens
tggacaaaggagagaatgggactctcagacgaaggggaggaccaggctgg

SEQ ID NO: 627648 - DNA, 71 bp, Homo sapiens
gaacgggaagggcctcggcactggtaccctttacatcgctgagagtgtgaagagtggccagattcgaaatc

SEQ ID NO: 627649 - DNA, 100 bp, Homo sapiens
gaaggcctggggcgggaagaaggagaacctgaaggctgcgcaggaggagtatgtcaagcgagccctggagtccaatgtgctgattgctgctaacagtcag

SEQ ID NO: 627650 - DNA, 100 bp, Homo sapiens
aggcgctgagaaggacgcgcagtccatctctctcagccctggaacagctgctgacagagttggatgacttcctcaagattcttgaccaggagaacctgag

SEQ ID NO: 627651 - DNA, 74 bp, Homo sapiens
agatattcaggaaccaatgctgagtgctgcacaagagcaggatatgacatgtctacatttattaggcggtatag

SEQ ID NO: 627652 - DNA, 98 bp, Homo sapiens
atagatcattcacaatatctgtgtcgttcttggcagaaattatattttccagcccgtgtctgcaggtatgcaggtgccttgagagcttcaggggaaat

SEQ ID NO: 627653 - DNA, 80 bp, Homo sapiens
ccgggaaaactacactggccagggaagatggagagttggaagaaggtgaattggaagatgatggggcagaggagacccag

SEQ ID NO: 627654 - DNA, 83 bp, Homo sapiens
tgggtgctgggacttcccgtccgcggcgtggaggtttgcagctcaccttgtgaagatgaaatatccaagaatctgtattctag

SEQ ID NO: 627655 - DNA, 50 bp, Homo sapiens
cccgccggagcagcatcatcaaggtgaatactcgggccggaccctctcaa

SEQ ID NO: 627656 - DNA, 100 bp, Homo sapiens
gcgctgcctggaggagaatcaagagctccgagcatcaagatggtgctcatgtggaccagtggtgacgccttcaagacggcctacttcctgctgaagggtg

SEQ ID NO: 627657 - DNA, 87 bp, Homo sapiens
gtgaggtgccgccatttcatctgtcctcattctctgcgcctttcgcagagcttccagcagcggtaaaaggtccaggagttgggctgc

SEQ ID NO: 627658 - DNA, 101 bp, Homo sapiens
gcctgtgcctgcatttatcttgctgcccggacgctggagatctaccagtatatccagagccgcttctaccgctcacctgaggtgctcctgggcacacccta

SEQ ID NO: 627659 - DNA, 100 bp, Homo sapiens
atcgcggtccactgcgcgcgtcaggttccctcggagacatggaggccagagaggaggtgcagttggtgggtgccagccacatggagcaaaaggccacggc

SEQ ID NO: 627660 - DNA, 100 bp, Homo sapiens
ccggctgcagagacaggcgttcgaggagatcatcctgcagtggggaagacgttttcatcccgctaatcttgggaataagaggaggaagcggctggcaact

SEQ ID NO: 627661 - DNA, 82 bp, Homo sapiens
ccggggggacgctcttctccaccacaccgggaggctttaatgactgatgaaacaatatccaatgtgccaatccttatcttgg

SEQ ID NO: 627662 - DNA, 87 bp, Homo sapiens
gggagacgcccgaggacagggaggtgcgtctgcagctggcgcggaagagggatcatagacggtatttctatgtaaacgaacagtcgg

SEQ ID NO: 627663 - DNA, 100 bp, Homo sapiens
gccttcccagtagctgggaccacaggtatgagtcgtcatccgaggactccagcacagcagagaacatctcagacaacgacagcacagagaacgaggcccc

SEQ ID NO: 627664 - DNA, 98 bp, Homo sapiens
tgtcattttaagacgagtaggcgaagcaaggactgctgagggtaaaaagctgggattggtaggctgggtccagaacactgaccggggcacagtgcaag

SEQ ID NO: 627665 - DNA, 83 bp, Homo sapiens
ccccatcaccaattcggctggggcgtgatggtgggcatgggtcagaaggattcctatgtgggcgacgaggcccagagcaagag

SEQ ID NO: 627666 - DNA, 82 bp, Homo sapiens
tgtctacaacatctacatccgcagatatgtgttcaagcttggtgtgctaggctgggcatctggaatcaagagacccatggca

SEQ ID NO: 627667 - DNA, 83 bp, Homo sapiens
ggagcgcattggccagttcgtctttgcccgggacgctaaggcagccatgcatcccagctatggctggcgattctaggaatgcc

SEQ ID NO: 627668 - DNA, 98 bp, Homo sapiens
accaccctttgcactcagtaggcctttgttttcctgcgtggaaagcggttgggccttatgacctatagaagccaggcggtgcaggaacatgccagcac

SEQ ID NO: 627669 - DNA, 98 bp, Homo sapiens
ggagcggccgggagcccgccgcgctggtagcggtgaacgggaaggagctctccaagctgtctcaggagcaaactctgcaggccctgcgctcctccaag

SEQ ID NO: 627670 - DNA, 50 bp, Homo sapiens
aagatacgaggctctaggagagcaggaacgaatgcaggaatttgggaact

SEQ ID NO: 627671 - DNA, 51 bp, Homo sapiens
ggatgagaaggacgacaagcccatccgagcctagggactccacgtacccca

SEQ ID NO: 627672 - DNA, 88 bp, Homo sapiens
catgtgctactgactacctatgaggcattctgaaggcaaatcctgtttagacccaggcaaaggttcctggtgacccaggctctcatga

SEQ ID NO: 627673 - DNA, 115 bp, Homo sapiens
cggaggtggctctgagggcagggacgtgttggacacgctgactttgtaggctccgccaagaggcgccgcaggaggagacctgagcctgccatactgagtctatggacagttccac

SEQ ID NO: 627674 - DNA, 96 bp, Homo sapiens
gagcagtgcttgctgctttttctaactatttcaagatgatatttattcaccaaacaagtgagtgtgtccgcttgaaaccaactgacatacagcccg

SEQ ID NO: 627675 - DNA, 100 bp, Homo sapiens
ggacgtggacttggtgtgcattaacctgccgccgcccctcaccagacagatcgctgtcaaaaccctaggtggatggaagcatgcctaggggaagatctgc

SEQ ID NO: 627676 - DNA, 100 bp, Homo sapiens
tacctccctctccactcccatcttcaggatgttgatgttagtgaagattcacctcctcccctacctgaaagaactcctgaatcgtttgtgttagcaagtg

SEQ ID NO: 627677 - DNA, 100 bp, Homo sapiens
ctcagccgcccgctggccgggagcggagcccctgtgggtgctgttcaagtcagtagaagaaccatttcttcgaattccttctcaccagaggtatttgtgc

SEQ ID NO: 627678 - DNA, 100 bp, Homo sapiens
cttcaggtcacgctggtcgactgccccgggcacgcctccctcatccggaccatcatcggcgttgaaatggatgcagtcagaactgaatgttgaagaagtg

SEQ ID NO: 627679 - DNA, 113 bp, Homo sapiens
gagcggacgggccatacccaataaccaggtgcttggcaaaatcgagcgggccattggtctcctctgagcctccggcctccataagacccaaaacagatgacacctcttcccag

SEQ ID NO: 627680 - DNA, 50 bp, Homo sapiens
caaattcatcccagaaatctaagaggacacattcagctaacgtattttag

SEQ ID NO: 627681 - DNA, 100 bp, Homo sapiens
acaggctcagtctgcggccaagactccatcctgcaagacataggaagaatcgtgagacagccagtgaacttttgatgaggttgaaggacaacagggatct

SEQ ID NO: 627682 - DNA, 99 bp, Homo sapiens
ctgccatctatcgaataactactacatttggtgaacatctgaatgaatgggagctacggacaccgtaccccgggctcagagaagagcctgctggacctg

SEQ ID NO: 627683 - DNA, 99 bp, Homo sapiens
acgactcagaggaacaaacagatagccatgggaagaaagaaattcaacatggatcccaaaaaggttggagaaacgtacggtaaggatataacctcccgg

SEQ ID NO: 627684 - DNA, 121 bp, Homo sapiens
cttggaccccgcggcgcccctcggcctcggagcaacgagcgcagcgccggtattgttgcagcatctggcagtgagactgaggatgaggacagcatggacattcccttggacctttcttcat

SEQ ID NO: 627685 - DNA, 73 bp, Homo sapiens
atgcacagggtatcagccgaaccaagtactgggaggtattgcaggcaatgggatatccaacaggctttgatgc

SEQ ID NO: 627686 - DNA, 74 bp, Homo sapiens
cagcgctgctggcgggcgttagggccaagtacctggcccagatcattgtgatgggcgtgcaggtggtgggcagg

SEQ ID NO: 627687 - DNA, 106 bp, Homo sapiens
gccggctgctccagtactcctgttgccccgtggtggtcctcccagacaccttggtgcctgtgtagatcatcctagaatacctgtgtggtgctgtccttcctcaaga

SEQ ID NO: 627688 - DNA, 75 bp, Homo sapiens
cgtagacgcagtggcctccaaggtgcagacagctgtgactatgaaggggtttgatgaaggccggaacaactttga

SEQ ID NO: 627689 - DNA, 82 bp, Homo sapiens
tccgaggcgaccactcctgtgatcgttgcggctggggctggaggggaggaagctgaaggaattgaagaatctgcagcagcaa

SEQ ID NO: 627690 - DNA, 80 bp, Homo sapiens
agagttggatactcagcgtcgctggcagccgctgtacttgagatagagtttcaccatgttgtccagggtggtctcaaaac

SEQ ID NO: 627691 - DNA, 83 bp, Homo sapiens
attatcagtttacaacctgcacccactaaaggatttttagactctgaggagcagttggagctaatccacattatggaaatgga

SEQ ID NO: 627692 - DNA, 75 bp, Homo sapiens
gggggtgaagctggagatatttcgggtgagaagccctaccactgcaactgggacggctgcggctggaagtttgcg

SEQ ID NO: 627693 - DNA, 83 bp, Homo sapiens
tatgggtgatcattccaagaagccaaagccttggctggacagtcagtacgaatctgtaaaggccccagggctgtgttttcccg

SEQ ID NO: 627694 - DNA, 98 bp, Homo sapiens
tggagacacactggatgtttttaccatcaccaaatgtggctccttcagatgtaggaggtggaggtggaagaaacagagagctgaccataacatgggcg

SEQ ID NO: 627695 - DNA, 98 bp, Homo sapiens
cgcagctatggggccacagccacatcaccggagctccaagagtcaggatcgcaagtcagaaagcaaagaaaagagagacatcttgtcgtttgataaaa

SEQ ID NO: 627696 - DNA, 83 bp, Homo sapiens
ctgctaacccgacccggattggcgctgaggtggcccgtggggcagaagacgatcaccttctccttattatagtcgatatagat

SEQ ID NO: 627697 - DNA, 100 bp, Homo sapiens
tgatgaagaaggaaggaaaaaattctttacacaggatatgaataatattcttctggaaaatcatgagtggaggatctcaagtccacattttttggggtgc

SEQ ID NO: 627698 - DNA, 100 bp, Homo sapiens
gatgtccctgaaacttcaccagctctatcgtccgagctttgtgcacccaggggctgccacagtccccaccatgtcagccgcatttcctggagcctctctg

SEQ ID NO: 627699 - DNA, 97 bp, Homo sapiens
tcttcagaaagcctccggaatctaaaaagccctcagtaccagagacagaagcagatggattcgtccttttaggggtgctgatggtctgtatagtgat

SEQ ID NO: 627700 - DNA, 100 bp, Homo sapiens
gtgaggcccgccgctcgcatgagcacctcatacggctgcttctggagaaggataccatggccaagcggaatacagtgataggaacaccattttggatggc

SEQ ID NO: 627701 - DNA, 82 bp, Homo sapiens
ctttcacaactgctggtcagagtatgccaccacgggctgttccctgaccctgcaccatacggagaaaccagaacatgaagac

SEQ ID NO: 627702 - DNA, 100 bp, Homo sapiens
ggcgaggagtctctgtccgggggcctggctaaggaaaccctattacctccagtgtcttgggacaaggtgcgcattcctggtgtgctgcagcgattgggag

SEQ ID NO: 627703 - DNA, 87 bp, Homo sapiens
atgggctcctcgcaaagcgtcgagatcccgggcgggggcaccgagggctaccacgttctgcgggttgatctcctatcaagagttttt

SEQ ID NO: 627704 - DNA, 73 bp, Homo sapiens
tcggacatgatcctcatcttttatacactcttagtgctgtccaggctcgcgggattgatgtgcaacaagtgtc

SEQ ID NO: 627705 - DNA, 100 bp, Homo sapiens
tagaactcgactgaaatcctgactccttcctttaggagctggattacctttgatccaagtattttagaacatgctcaagaggtgagcacttaacaataga

SEQ ID NO: 627706 - DNA, 100 bp, Homo sapiens
acctgaggacgccttattcttctttgtcaacaacaccatccctcccaccagtgctaccatgggccaactgtatgaggctggagtgcaatggtgcgatctc

SEQ ID NO: 627707 - DNA, 100 bp, Homo sapiens
ctgggccagcctgacctccccaaggagatggcctctctgtgatcaagtcttccataccagggaccaggccaaaaccagactgccactgcccctacttggg

SEQ ID NO: 627708 - DNA, 75 bp, Homo sapiens
ggccaggaagcggagggcgcgcgagggtttgtctacagattttgagcgttcgaagttgacccctgactaagtata

SEQ ID NO: 627709 - DNA, 90 bp, Homo sapiens
gacgaagtgtcgtgaataaaagaaaggagaccgcagaagtaaagaagtggggagtttagatcatgacaagatgtttaagatgagtgaaaa

SEQ ID NO: 627710 - DNA, 100 bp, Homo sapiens
gcaggactgcgccgcgtcttcctcaaggtggcgacagacaaagttgcagaaaagctgagctctactctctcatgggtgaagaacacagtatcgcatacag

SEQ ID NO: 627711 - DNA, 75 bp, Homo sapiens
ccagaactttccaagcgggggaaacttggcggcgggtaggtaggaaaggcagatgaacacaatgacgtacagaag

SEQ ID NO: 627712 - DNA, 51 bp, Homo sapiens
tggagggggagttctcagagtcattacaggatggatgaatgagatttacaa

SEQ ID NO: 627713 - DNA, 100 bp, Homo sapiens
caatggggaaattatagacatcttcaagccagtgcgcaagggtgatgaattagaagacaatggaaagaatttctacgaatctgatgatgatcagaaggaa

SEQ ID NO: 627714 - DNA, 90 bp, Homo sapiens
atcgactcggacacagaggacagcggcagcgacgagaacctggatcaggaaaatcaggaaaatgtttccaacctggtgattgaggacaca

SEQ ID NO: 627715 - DNA, 100 bp, Homo sapiens
aaaaaaggctgacttgctcgatactataaattcatgcatcaggataggcaagaaactaattctgaagcaagcccttatagttgtgctgcagtggtgtttc

SEQ ID NO: 627716 - DNA, 87 bp, Homo sapiens
ggcagcaagcgggtgctgctcatctgcctcgacctcttctgcctcttcatgggttattggagtgatgagtaaagaatacataccaaa

SEQ ID NO: 627717 - DNA, 100 bp, Homo sapiens
cagcgagtgggactggatggagttcgcgcggagacccacatcaagggcttcacactgaacgatgctgccaacagccgcctcatcataacgcaagttaggc

SEQ ID NO: 627718 - DNA, 75 bp, Homo sapiens
ctgccccggcaactccagggtgtctggtccacgacctatcctaggcgccatgattttaccaaatgttgcaagaac

SEQ ID NO: 627719 - DNA, 82 bp, Homo sapiens
attaggccacaatcttcaatgagtaaacatattcctaagaatcctgcaaaaatgtctctctatccatctctcgaagacttga

SEQ ID NO: 627720 - DNA, 75 bp, Homo sapiens
gtccctctgcagcagaacttccaggacaaccaaagagaggctgctcacccaacagacgtctccatctccaaaaca

SEQ ID NO: 627721 - DNA, 100 bp, Homo sapiens
aaaacaccgaagggacattctgtcttcatggacatttttgaacttgtgtaccatggggcgcaagttggaccctacgaaggagaagcgggggccaggccga

SEQ ID NO: 627722 - DNA, 83 bp, Homo sapiens
ttggaaacgacgtcatgtgttagctgtcctatgtgatgtccgggtacagatgctttgtctgccctgtggagtacaacaatgac

SEQ ID NO: 627723 - DNA, 80 bp, Homo sapiens
ccggaagatgcccacggactacatcaggaacggggtgctctacgtcacggagaagctgaagctcagggccctgtctgctc

SEQ ID NO: 627724 - DNA, 118 bp, Homo sapiens
aaataggctgcttggagaaaatgatggggaaacaagagctttgagcactgcagtttcctcctgaaggctggctccggctctccctcaataatggcagcatcacccacctggtgatccg

SEQ ID NO: 627725 - DNA, 82 bp, Homo sapiens
ttctggatctgtgcttgtgaaaggctccatggtcttgcctccttgcaggagtggagtcaacatatcaatggagcaagtcaca

SEQ ID NO: 627726 - DNA, 90 bp, Homo sapiens
tgcaattgaaggcggttgatggtgaagccattctgagtttatgtgttgactccgaatgtgacagtgatgataacatgggtgccaaaaata

SEQ ID NO: 627727 - DNA, 51 bp, Homo sapiens
attttgagacctctatgatctgtagaactgaccctgatgcttggtgtgacc

SEQ ID NO: 627728 - DNA, 120 bp, Homo sapiens
gcagctggagctgagcaaagtgcgtgaggagtttaaggagctgaaagcgcggttccctcgacccaggaccccctgttcccaggctatggcccccagtgccctgtagacctggcaggcccc

SEQ ID NO: 627729 - DNA, 107 bp, Homo sapiens
cagatgcgggccctgctggaccagctcatgggcacggctcgggacgcttcgagagctgtgcccaggagtgaacaaccagccctacctctgtgagagtggtcactgct

SEQ ID NO: 627730 - DNA, 97 bp, Homo sapiens
ttgctccttagttctatagagctggaggagctgaaagctgagaatgaacgtcctgaaggagcacgcagatgatgaccctagtctggccatcactggg

SEQ ID NO: 627731 - DNA, 75 bp, Homo sapiens
ccagcaactccagcctgtccggctcgtcggtgtcctccgggatggaagcttcctggcgccaggtggccggtggcc

SEQ ID NO: 627732 - DNA, 75 bp, Homo sapiens
ctgcactttggggagcctaagtcctgcgtcgagggcgaggcccccagcagtgagactggcacatccctggacagc

SEQ ID NO: 627733 - DNA, 75 bp, Homo sapiens
gggaaatggactgctatctccgtcgcctcaaacaggagctgctttagccagggccctctgaaggatgcacccaac

SEQ ID NO: 627734 - DNA, 96 bp, Homo sapiens
atggaatgttcttaacccagaagtagctgaatgtgttactccattgctgaggagtgttgcagaatgaagaagagtctggagaacctgaacaggctg

SEQ ID NO: 627735 - DNA, 99 bp, Homo sapiens
cggttccccggcccacagtgggggtgtgcaaacccgagagaactggactgggtttgtagatgaaactgaagctgccaaagtggaacgtgtgaaacagga

SEQ ID NO: 627736 - DNA, 100 bp, Homo sapiens
tttctgatcgggaagcctcatctagcccagaggatcggaatgacagataaggtagaagatagcaccatgccgattcgtcgaactgtgaattctacccggg

SEQ ID NO: 627737 - DNA, 75 bp, Homo sapiens
gtgagagatgtgatcactggtttcgtggcctgaccaaggacctccaagatcatgtttgagaccttcaacacccca

SEQ ID NO: 627738 - DNA, 123 bp, Homo sapiens
atgcatgctgcttttgatgtctgacaacgtggatcgttgttttgaaacaagcgcatactgtgctgcctccgtagcctcgctgaccaacatcatcactccagacctctttgagggcactgctga

SEQ ID NO: 627739 - DNA, 51 bp, Homo sapiens
ctggactcggattcgttgcctgaggttatgaaggacagaatctggcaaaga

SEQ ID NO: 627740 - DNA, 100 bp, Homo sapiens
gccgcccgggaactgctgacgcttgatgagaaggacccacggcgtctgttcgaaggctgttgagatcctgaagacagctcgtgaaatcagcatgcgtgtg

SEQ ID NO: 627741 - DNA, 99 bp, Homo sapiens
agtctctcgccacagcggcctcggcctccccttggattcagacgccgattcgcccagcaatggaagagttaatagttgaacttcgtctctttcttgaac

SEQ ID NO: 627742 - DNA, 100 bp, Homo sapiens
cacagttctgctggtagatatgttaggagacgctgcaaaccgttgaaggtggttattaacttggtgatgcttttggctgaaatgaaaatacaggaccgcg

SEQ ID NO: 627743 - DNA, 80 bp, Homo sapiens
gacatagaccaaatgttcagcactttgctgggagagatggatcttctgactcagtttaattggttggggtcagataagaa

SEQ ID NO: 627744 - DNA, 75 bp, Homo sapiens
ccagctggctgacctgtacaagtccttcatcaaggactacccaggtttcaagtgatcctcccgcctcagcctgcc

SEQ ID NO: 627745 - DNA, 116 bp, Homo sapiens
gctccgtggccttagctgtgctcgcgctactctctctttctggcctggaggctatccagcgcttgggcactgtttaaaggaaagttccgagaaggcatcgacaagccggaccctcc

SEQ ID NO: 627746 - DNA, 100 bp, Homo sapiens
tggcggtgaccggatattcagttgcacatccccacatcaatgcactgccaatgcaaaccctcctggggcttgcccatagatgctgttcagtgggatatct

SEQ ID NO: 627747 - DNA, 82 bp, Homo sapiens
ggcagggggccgtgcccaatctccagggctcctggggccactgctgacctgattttgggaaccagtaggacattgacataca

SEQ ID NO: 627748 - DNA, 100 bp, Homo sapiens
gtcaggtctggagctcgaccgggccaggaaaatggttctcctgaagaacatgcaatctatgtttgggatcatttcatagctcaggctgctgctgagaatg

SEQ ID NO: 627749 - DNA, 50 bp, Homo sapiens
atcaagaccggcgtggtgaagcggtttaccgacaagactgtgaaactttc

SEQ ID NO: 627750 - DNA, 100 bp, Homo sapiens
gccaggccttggagaacagcacgtccccgctgagtgccaaactgattatccaccagacactcagcgtcttagaagatattgtggagaatatctcggggga

SEQ ID NO: 627751 - DNA, 74 bp, Homo sapiens
aggagacgcgaaccaacatgctgctggagctcgcaagcctcctgacaaggtgatccgggcgggccccgcaggaa

SEQ ID NO: 627752 - DNA, 88 bp, Homo sapiens
agagctggagcaagcaaatgacgacctggaaagagccaagcgatagcagaccccacgttagctgaaatgggaaaaaacttgaaggagg

SEQ ID NO: 627753 - DNA, 82 bp, Homo sapiens
caggggcgcgcagcgcggggagctgccagggaaggtggccatccagaaggaggacttgcagaagtaccacaacagggacacc

SEQ ID NO: 627754 - DNA, 100 bp, Homo sapiens
cccctgttgcagggttttgtttatataactcaagttgtttggctaaattcttcaggcagagactccccctaatgggccagattgtggctatggctccttt

SEQ ID NO: 627755 - DNA, 100 bp, Homo sapiens
gttcaagcgacaatggcagcccaatacggcagtatgagcttcaaccccagcacaccaggggccagttatgtggaatgcagtagccctctgggcctgggat

SEQ ID NO: 627756 - DNA, 90 bp, Homo sapiens
aaaaaggatcaagtgactgctcaggaaattttccaagacaatactaacattctgagagagcctgtgtgtttaggaggatgtgagcacatc

SEQ ID NO: 627757 - DNA, 51 bp, Homo sapiens
agccggctctggtgctcccagaagaggaacaaaaggtcccaggtcattctt

SEQ ID NO: 627758 - DNA, 97 bp, Homo sapiens
acctgttcttcaggccatttttcttaacagcaattgctttgaacatctcatacgactgctacagaactgcaaggccggccggctgttcgaccacggc

SEQ ID NO: 627759 - DNA, 100 bp, Homo sapiens
tgtgggctgtgggacgagctgcggcgcgctgacatctgaaatgtttgaagcagatcttgagaaggcattgttactaagtaaactagaatatgaagagcac

SEQ ID NO: 627760 - DNA, 97 bp, Homo sapiens
ctctgccgagcgcagagcgccgcgcgttcgcgctcaagatcaacagtttgcagaaaaaacttcagcatgtgccaggaacacaacctcaccttgatca

SEQ ID NO: 627761 - DNA, 87 bp, Homo sapiens
ggcatttcacttgctcagcaggagagtgtgtctctagctcagataataaagttgggtatccctggtcagtaagaattatgagattga

SEQ ID NO: 627762 - DNA, 50 bp, Homo sapiens
tggctctgctgaccttgtgccttgtgcactggtgattgctgcggtgtttg

SEQ ID NO: 627763 - DNA, 50 bp, Homo sapiens
ctgagggcagagactctcccgggcctgccttaagtgtgaaagtaatgact

SEQ ID NO: 627764 - DNA, 100 bp, Homo sapiens
atgttcaatcaccactgtccaaattcagaagctcagaacgctggactctccctttgcagacgaaatctcacaaaactgtcccttatcttcagtcacatgc

SEQ ID NO: 627765 - DNA, 82 bp, Homo sapiens
ggaagtgggggttatggtgggaggagccgatactgagcttcttcctatttgccatggaggcatttcatccttcatgaagcca

SEQ ID NO: 627766 - DNA, 100 bp, Homo sapiens
ccctggtccctcagaccctggcccagctgtaaaccgaacagagagccccatgggggccctgcagccagatcctactatgttgacagacatgatgaaaggg

SEQ ID NO: 627767 - DNA, 98 bp, Homo sapiens
aaacccccatcctgggaaaaatggggaagctgaataatccagaatggctactctgatctatgttgataaggaaaatggagaaccaggcacccgtgtgg

SEQ ID NO: 627768 - DNA, 82 bp, Homo sapiens
ccaaagtcacctttcaaaaggaaaaggatcttaagattgaaagtgatgttcaagaaccaactgaaccagaggatgaccttga

SEQ ID NO: 627769 - DNA, 82 bp, Homo sapiens
cgacggggcggccgggggctcagagatccaagtgcgcgccctggcgggtccggaccaagcaggagcattggtttgaaaaggc

SEQ ID NO: 627770 - DNA, 101 bp, Homo sapiens
ataatggcactcagcagcaagcacagagtatgaccaccactattaaggtttggaaatcccttgtctccaggttgctgggattgacttcttgctcaattgaa

SEQ ID NO: 627771 - DNA, 50 bp, Homo sapiens
ggaatcagaaagcactacgctaaatgctggaattctatggggatcgagat

SEQ ID NO: 627772 - DNA, 90 bp, Homo sapiens
atgtcgctgaattgcccgtgcccccagaggccatgtggaagtgttacatcaccttttgcttggaaagatttactaagaagtcaaatagtg

SEQ ID NO: 627773 - DNA, 50 bp, Homo sapiens
ctatttacccagaagtagtccatatgatgtgagccctctggccaacctac

SEQ ID NO: 627774 - DNA, 82 bp, Homo sapiens
cgccgccgaagaagcatcgttaaagtctctcttcaccctgccgtcatgtctaagtcagaggacccatggatgaaggaccaga

SEQ ID NO: 627775 - DNA, 98 bp, Homo sapiens
aaaggacgtgtcattgaagatggagataagtgcaagactactgaatacagcaagatgaaaaatatgctattagatttacaaaatcaaaaatatattat

SEQ ID NO: 627776 - DNA, 100 bp, Homo sapiens
ccctcggcgcggagccccggcccgccgcggtcccgtctcctgggcctgtcccgcccgcgccctccgccggccctcaggatctaagcctttcccacgttat

SEQ ID NO: 627777 - DNA, 100 bp, Homo sapiens
agacttttggcaaagacatgcgcaagtacaaatggtgatgatcatcaggtcaaggatagtctggagcaattgagatgtcactttacatgggagttatcca

SEQ ID NO: 627778 - DNA, 98 bp, Homo sapiens
tttggggcaccacagagatgcgggtgtggaatatcaaacaaatgattaagttgacacaggaacatatagaggccctattggacaaatttggtggggag

SEQ ID NO: 627779 - DNA, 100 bp, Homo sapiens
ttttgggaccatgcgcggaggaggctttggggaccgggaccgggatcgtgaccgtggaggattttggaagatggcaaagttcatgacacccgtgatccag

SEQ ID NO: 627780 - DNA, 100 bp, Homo sapiens
atggaggccggctgaggagcgccgctgcctcgcctcgatcagacctattgtgaccgcctggtgcaggacacgcctttcctgacaggccatgggcgcttga

SEQ ID NO: 627781 - DNA, 90 bp, Homo sapiens
tccttctctgcctgttgcacatcttgtaaaattggacaatggctctttagagagttatctgagtgtcaaaatgcagatcttcgtgaaaac

SEQ ID NO: 627782 - DNA, 100 bp, Homo sapiens
tgtcgctaggagcctgctccactgtaagggtgtcaggatctgaagagctatggtgaaacaccactgaagcattgccaagaggcgtggagctatttcctat

SEQ ID NO: 627783 - DNA, 75 bp, Homo sapiens
ctcgaaaggtgtttgtaggcggattgcctccagacattgatgaagagacccagctaagttcctctgaaacttttg

SEQ ID NO: 627784 - DNA, 130 bp, Homo sapiens
ggctcttcatgattctttggctcaaaggagttgtatttagtgtgacgactgttgacctgaaaaggtgttacagttcgagtgcctcaaacaaccacatatgttgtaaacaatggactaaccctgggatcaa

SEQ ID NO: 627785 - DNA, 82 bp, Homo sapiens
ccctggccctgatcatcctgctgggcttcgtccagatcgggaagggcgtccgacctccgatcatgaacgggcccctgcaccc

SEQ ID NO: 627786 - DNA, 100 bp, Homo sapiens
ggagtacgtggcctgcgacctgcaccgcctagaggagctcgtgctcgacagcagtaccatcccactgatatcacgggcccgctcaacctctcagatccct

SEQ ID NO: 627787 - DNA, 90 bp, Homo sapiens
cggccaaatggagagaattatgcacctgacagcatctattacctttgccttggaatacaggagaatgacagggagagagtttttctctcg

SEQ ID NO: 627788 - DNA, 110 bp, Homo sapiens
tgttgctgatcgcctgggtggttgttggcgtgtccctgcagcgaaggatcctggttggtgagaagccctaccactgcaactgggacggctgcggctggaagtttgcgcgc

SEQ ID NO: 627789 - DNA, 100 bp, Homo sapiens
tcaggcgtgcgcggacggtgtgcggacactcgcctatggggacatgaaccacgagtggatcggcaacgagtggctccccagcctgggcctcccccagtac

SEQ ID NO: 627790 - DNA, 100 bp, Homo sapiens
tgtacatccactggacctaaaatatgaccctgatccaggcctaagatctggcaaacttggtgaacagtgtgaagcagttgttcgctttcccagacttttt

SEQ ID NO: 627791 - DNA, 98 bp, Homo sapiens
caaaatcccttgttaaaggaggtctgtgccggagggttcttgttcagagctcaaccttcaacaagactacacagaacctggcccagaagaagtgctgg

SEQ ID NO: 627792 - DNA, 101 bp, Homo sapiens
ggttggggctgtgggacttcgaaggagggctctcctgtctgccaccatcctgggttgacaattctacacaaggaggaatgtatacaaagactatcgcttcc

SEQ ID NO: 627793 - DNA, 74 bp, Homo sapiens
ggctgtgagaaagtgccaataaatacatcatgcaaccccacggctgaactggagaatgtgtctggggcgctgaa

SEQ ID NO: 627794 - DNA, 73 bp, Homo sapiens
gaaatgcagagtgatcccatctcaggagcacctgaatgaaaactctcccaccatgtcgcagaatggatacttc

SEQ ID NO: 627795 - DNA, 90 bp, Homo sapiens
gcagaagagtgcagtgaggtgcctcagcatgagaaaattccctgtattgaacactgatatacaaggaatgaatagaagtcaagaaaaaca

SEQ ID NO: 627796 - DNA, 98 bp, Homo sapiens
tgccaaccggccagaggacgagtgtgacagcaccagagcagttcccctccgaagagttcccaatttccgaatccaaagtcaacatggacgtgaatttc

SEQ ID NO: 627797 - DNA, 99 bp, Homo sapiens
tgaatgtgcggaaaatgccttcaaatcaggctgagctcattggaagtctcacccacaagctggagaccctccaggaggcgaaggggagcctgctcacgg

SEQ ID NO: 627798 - DNA, 100 bp, Homo sapiens
ggctaagcaaaaccctgcagaacggctgcctaatttacagcaaccatgagtaagtgtggacctttgtgtaccagagagaacatcatggtggctttcaaag

SEQ ID NO: 627799 - DNA, 100 bp, Homo sapiens
cctatgaacagtggaaggtcctcaacgagatcgatgcgatcgaacaccagggggacaagctggagatggcgagagagaaacatcaggcttcccagaagga

SEQ ID NO: 627800 - DNA, 75 bp, Homo sapiens
ctcgcgtttccacttcagagatctggttccagcaacagatagaaatgctttaagttcactctggggaaagctggc

SEQ ID NO: 627801 - DNA, 101 bp, Homo sapiens
aaattttttgagaagcatctttcaagtgtttactcatttgcctggacacttagtcggtctggatgaaccagcttcgggagctgggcaagaagctctgctta

SEQ ID NO: 627802 - DNA, 96 bp, Homo sapiens
accagatccagaaactggaggagtcccgctcgaagctagaacgctgtaaatgtaagcctattagagctacacagaagacctatttccggaacaatt

SEQ ID NO: 627803 - DNA, 97 bp, Homo sapiens
gctggctgactggatccacagcagtgggggctggatgtctttggtggacttgggaaagaggttgctagaagcagcaagaaaaggccaagatgatgaa

SEQ ID NO: 627804 - DNA, 85 bp, Homo sapiens
caaaccagggagcaacacattcggagagacaaggctaccagcaacatctgtacagctcagaacaccttccaccatgaccacctca

SEQ ID NO: 627805 - DNA, 75 bp, Homo sapiens
ccacaccgacaccatctggaggaggcgttgccgtgagggttggaaagggcaaagaaattacaagaacagcgagaa

SEQ ID NO: 627806 - DNA, 101 bp, Homo sapiens
gcctggcattgacccatagcctggtcctgcattacggtctctataagaagatgatcgtgtcagctgtgatgcatgtttaaaaggaaattttcgaggtcgca

SEQ ID NO: 627807 - DNA, 100 bp, Homo sapiens
tgctctggagctggatggtgaaagccagaggccaagaagagtaagacggccgcaaagaaaaatgacaaagaggcagcaggagagggcccagccctgtatg

SEQ ID NO: 627808 - DNA, 102 bp, Homo sapiens
gagcaaatagccgggaggcgctcggcatccaggacgttccctcccccgatccaagttggaattagcatcctctcgggggcgttactacaaggagacctctgg

SEQ ID NO: 627809 - DNA, 80 bp, Homo sapiens
ctttctaagagccacatgcttctctccacttctatggataaaactttcaagtctattgaagacaatgaagtatatttgcc

SEQ ID NO: 627810 - DNA, 121 bp, Homo sapiens
ttcggcatcgacatcatcatcaacaaccagacagggcagcacgccgtcattgacatcaatgccttcccagcctgccgagtgcctgcgattgcaggcgcgcgccgccacgcctgactggttt

SEQ ID NO: 627811 - DNA, 100 bp, Homo sapiens
cgtctatcattggatgaagtggctccggagataaatacacatggcttgataaaagccattatgcacttactacaaatgcaagctcttaaggaaggacaag

SEQ ID NO: 627812 - DNA, 100 bp, Homo sapiens
ccgggagtcgctgggtgcgtggggctgcctcgccgcgtctcgccacgaaatacatgctacaggatttaactatcagaatgaagatgaaaaagtcaccttg

SEQ ID NO: 627813 - DNA, 83 bp, Homo sapiens
ggccgctctgggatcccggccaccagcaattgtccggtatcgagaaccttccctgcgaacttcagaggaacttccagctgatg

SEQ ID NO: 627814 - DNA, 83 bp, Homo sapiens
caataaagtcagactcctccagcccccaaagagtgcagagacctcactggtgatcagcccatgacctaaacctccagacaaaa

SEQ ID NO: 627815 - DNA, 51 bp, Homo sapiens
tacacagacgagcatggggaagccaccaattaccctagttatgggcccatc

SEQ ID NO: 627816 - DNA, 100 bp, Homo sapiens
cacaacagaatgggccgccacaaaccccatttggccctcaaacaggtaatgaatttgggcatcctgaatggttagacttcccaagaaaaggaaataatga

SEQ ID NO: 627817 - DNA, 75 bp, Homo sapiens
tacaccgtggtgacattgtatcattggtgttactgaagctaaaggagatgtttaactccaagtttggatctattc

SEQ ID NO: 627818 - DNA, 75 bp, Homo sapiens
ccgctgtgggctcctggggagatggaggggccggggctgggctcgcaggagacatggtctcaaagtaccgagaac

SEQ ID NO: 627819 - DNA, 73 bp, Homo sapiens
gcagcttcaagcttaggaccacccaccatgcctatccaggtttcgacacagccccaactgctggtacctgaga

SEQ ID NO: 627820 - DNA, 100 bp, Homo sapiens
ccgggctacgctcctccatcacgtggtggtatgcaagattacaattatgtgtgggccaactgttttgagatcacattagaactgtcttgttgcaagtacc

SEQ ID NO: 627821 - DNA, 100 bp, Homo sapiens
cgacgaccggatcctgaggaggcagctgcggtggcagctgctgagttctcggtgaaggctcttgtcaggatggtgaagctgttcatcggaaacctgcccc

SEQ ID NO: 627822 - DNA, 90 bp, Homo sapiens
cagtatttcaagagtcacttctttacttggtgcaggaaggcagtctttgctacgtacagcaaaagaaaactttagaaactgttcctttgg

SEQ ID NO: 627823 - DNA, 98 bp, Homo sapiens
gagaatcccagcaagaatcacagtgatggccaccggttggcgagctttgcacagaccctacaggaaaccctgaaaggaatgggtaccacagaccatgt

SEQ ID NO: 627824 - DNA, 75 bp, Homo sapiens
gtcagtaactaaattggagaaaagcattgatgacttagaagggagactcatgcatctgtatgccgtgtgcgtgga

SEQ ID NO: 627825 - DNA, 87 bp, Homo sapiens
cacatctccagcatcgacatcaacagctcccggaagtttctgcagaggtttttgaggtgcacagccagagaacaacacatcacacac

SEQ ID NO: 627826 - DNA, 90 bp, Homo sapiens
cttccgagaggaacctctatgccgacatcgacgccgcctggcaggccctgcgcaccagatacttgccagaactaatacagctgatgaaat

SEQ ID NO: 627827 - DNA, 80 bp, Homo sapiens
tggtccccgcgtggagtctttactcaaaacagtaagactttgaccccgacgcaggcttcagtgattgccgcggatcagaa

SEQ ID NO: 627828 - DNA, 101 bp, Homo sapiens
aaccgggtccagacccacgcggcgccagttctccggcgggaaggaaaaccgcgcagagaggacctcagcagccatgtcgaagccccatagtgaagccggga

SEQ ID NO: 627829 - DNA, 83 bp, Homo sapiens
agaaggaggttgccgacgccatcaggctcaacgaggaactcaaagtggatgaggaaaacctgcctagagctggaacgttacct

SEQ ID NO: 627830 - DNA, 100 bp, Homo sapiens
taagatcgacgtgtaccactacgaggtggacatcaagccggataagtgtccccgtagagtcaaccgttgacatgaagacaatggagactgcagagaaact

SEQ ID NO: 627831 - DNA, 88 bp, Homo sapiens
gaagaaactcaagctggacatcgacaagagcgcaagaaataccgcccacgaatggatcaggaagtctctgaccaagccattagcagag

SEQ ID NO: 627832 - DNA, 75 bp, Homo sapiens
tgataacagcccacagtgttcacagagtcagggggcgctggccggcaggctgcggagcttctccatgcaggacct

SEQ ID NO: 627833 - DNA, 75 bp, Homo sapiens
cggctgcagacttggccaaatggacgggactattaagatggactcaccctgtcacccaggttggactgcactggc

SEQ ID NO: 627834 - DNA, 100 bp, Homo sapiens
gcggaggcagagaagggaacgcccggcccagccccagggagacgtggtgggcggtccttcctgtgacacgacccttgagtgacagttctatttgattgcc

SEQ ID NO: 627835 - DNA, 89 bp, Homo sapiens
ccttcatcgtggtgcagaagaggcaccacacccggctcttctgcactgacaagaacgagcggccaatggagatcttcgtggatgatgag

SEQ ID NO: 627836 - DNA, 83 bp, Homo sapiens
ctccttcggcagtccacccaccgccgccgcctcccagggaaagcaggcaggatgggagagtcgccgatagaaccacctcttcc

SEQ ID NO: 627837 - DNA, 100 bp, Homo sapiens
accctgcccagcagaatttgtatagagatgtgatgttggagaactacagaaacctggtctccctaggaaactgggaagaactggtgaagtacttgcagat

SEQ ID NO: 627838 - DNA, 100 bp, Homo sapiens
agaaggaagatggcggatctggaggagcagttgtctgatgaagagaagactttgaagattatccaatgagaattttatatgaccttcattcagaagttca

SEQ ID NO: 627839 - DNA, 75 bp, Homo sapiens
tttataccaaccgggcagcagcacagtactatctggaaactaatctggattcactccctctggttgatacccact

SEQ ID NO: 627840 - DNA, 100 bp, Homo sapiens
atgcaagaatatgcctgttcctgtgatgtggaggaaattttccgcaaggaggagatgttaaagtaacccatcttgcaggacgacattgaagattggtctt

SEQ ID NO: 627841 - DNA, 90 bp, Homo sapiens
tggaaggcctgggagtctacgttttcatcctggcttcactgtgtgactggaacaagcatctatcgagctgtgcctattcgagtcaatcca

SEQ ID NO: 627842 - DNA, 100 bp, Homo sapiens
ataaggaaatttcttttgacacaatgcagcaagaacttcagattggagctgatgatgttgaagcatttgttattgacgagccattggaacatccgttaat

SEQ ID NO: 627843 - DNA, 101 bp, Homo sapiens
ggtcaccagtcccaagtcgtccccctctccgccccccaggaggggcgagagggagccgcagctgatgtcaggacactggggttgggaaatcaagcatcgtg

SEQ ID NO: 627844 - DNA, 100 bp, Homo sapiens
ccccaactcaagcaagtaactcccagttcatccccattcatcaccctggagccttccctcctcttcccagcaggccagcgggtatttctgtgggacttgg

SEQ ID NO: 627845 - DNA, 98 bp, Homo sapiens
ctgtggggtgctgaatggcaatggcacaaagttctctcgatcagggcatacatctttcttcgacaaagggataacaaagccattgacctttgccgatt

SEQ ID NO: 627846 - DNA, 90 bp, Homo sapiens
atggactccaataaatacattgagcatctgctgactcagcttgaggagcaacacaggagtctctggagtaagtacaaggtggactgtgca

SEQ ID NO: 627847 - DNA, 82 bp, Homo sapiens
ttctgcctcttgatctccgccaccgtcttcaggccaggggtaggttcaaggtggtggtcagtgtcctgtctgcggttacgac

SEQ ID NO: 627848 - DNA, 100 bp, Homo sapiens
gggctgctcccatcattgatgtggtgcgatcgcccgagggcaacatccttcgagaccggttcaagagcttccagaggaggaatatgatcgagcctcgaga

SEQ ID NO: 627849 - DNA, 100 bp, Homo sapiens
tgataagccacccaagcttttgtatcctatggaaagtaaactgacaattcaggagacccagctgggttatgcaatggtctctgcaagatggtttattctt

SEQ ID NO: 627850 - DNA, 51 bp, Homo sapiens
taggaagacggctacaaatgatgttttcctttggaatatggataaatacac

SEQ ID NO: 627851 - DNA, 98 bp, Homo sapiens
tccctgtgggctggtgttccttgactggagacaacctgcagcctcctggcaccaaagtaaacgcgaaattattttctacaaaaattacttaatattgg

SEQ ID NO: 627852 - DNA, 82 bp, Homo sapiens
acagacaccgcctacaggagtatgatgcaagacgccaaattccagcgaaacagctgatgccagccagcttgaagacccctgc

SEQ ID NO: 627853 - DNA, 100 bp, Homo sapiens
cactcaagcaggacctggtgcacaaggaacaggagctgagccgcaagcagcagtggtacaagctgcactccaagccaggcaagaaggagaaggaacgcgg

SEQ ID NO: 627854 - DNA, 75 bp, Homo sapiens
tcggcctgagagccctggccccagaggagccaaggccacctttgatgccatttctaagacctacagctacctgac

SEQ ID NO: 627855 - DNA, 98 bp, Homo sapiens
ctatcattactcctccaacaccaatcatcccagacggaagagagaagggcacagttacctaagtatcaacgtaatcttcctcggccaggacaggcccc

SEQ ID NO: 627856 - DNA, 75 bp, Homo sapiens
aaattcagagaggggaagtgatttgcctcagcttgtactaaagtgactgagaccgaagatgatagtgatagtgac

SEQ ID NO: 627857 - DNA, 97 bp, Homo sapiens
acaggccctggcctgccttgggccggggatttaacacaggtcactgggcaaaaatagcttctgagctgccccatcggtctggctcccagtgtctgag

SEQ ID NO: 627858 - DNA, 100 bp, Homo sapiens
agctctagccctggcaaacctaaccacttgcaaccctgctaatgcaaagctgtattcatcaccaaagaaaaaacttacaccaatgcagaaatcggttagt

SEQ ID NO: 627859 - DNA, 89 bp, Homo sapiens
attttttctcatggatgttcttcttcgagtatttgtagaaggtggcctgaccaggaactactgcaggaatccagattctgggaaacaac

SEQ ID NO: 627860 - DNA, 75 bp, Homo sapiens
tggtgacacagccctgtcatctgatgaagaggctgtccaggcagccatcttgtctggagacaagtctgagaatgt

SEQ ID NO: 627861 - DNA, 75 bp, Homo sapiens
tgggaaacattgtcacaggggatgatattcagacacagattgagaggatccagaatccagatctctggaatagct

SEQ ID NO: 627862 - DNA, 76 bp, Homo sapiens
cctttatatagaagggagagtagttgtgctgcatggaaacaacctgttagtatttggaggtacgggcatcccattt

SEQ ID NO: 627863 - DNA, 51 bp, Homo sapiens
ttgtattcctcctgagataataatgaagcatttaaatattaggacactgac

SEQ ID NO: 627864 - DNA, 90 bp, Homo sapiens
cccgcggatctacgtgggcaacgcattgtgaataagtggaatacagctctcattggccttatgacatactttcgggaggctgtggtgaac

SEQ ID NO: 627865 - DNA, 100 bp, Homo sapiens
ttattgagcataagattgtcatagctgatgtcaagttggttgctgatttccaaagagtctctgggtggagagaacgtcattatacttggtgcagagtttg

SEQ ID NO: 627866 - DNA, 101 bp, Homo sapiens
ctgtgctgtttttgattggcgcctttctcattattataggctccctcctgctgtcaggctacatcagcaaaggggagccatgtctgaccaggacgtttgga

SEQ ID NO: 627867 - DNA, 75 bp, Homo sapiens
gcagaacagaggcttcgcatttgtgcagctgtcctctgcaatgctttcaccaacaatcaccagtggtttacacaa

SEQ ID NO: 627868 - DNA, 98 bp, Homo sapiens
agcagctaaacttagcttttcaatcgatcgcttttgaaagggaattgtatttctgtccccgtgcggaaatggcaagttccaatcctgtgtatatggag

SEQ ID NO: 627869 - DNA, 90 bp, Homo sapiens
aggggtcagtggtggaagtgagaccgaaatagactctgaagtaatatctggactttgaaattgttcagcctggagaaggaaataaagctg

SEQ ID NO: 627870 - DNA, 75 bp, Homo sapiens
cggaggccgcacccgcctccggcggggctctcagtcatgtttataactactgtactagtgttcaccagtcaaacc

SEQ ID NO: 627871 - DNA, 50 bp, Homo sapiens
tcgcagtggtcgcttcttctccttggattggcagccaccatttgcatgtg

SEQ ID NO: 627872 - DNA, 90 bp, Homo sapiens
aaggaactggtgctgcagcgagaggaaccttaaaggcggtgtttcaaggttggtgggtctcataactgctttgcttgcttttccctgaaa

SEQ ID NO: 627873 - DNA, 102 bp, Homo sapiens
ctgcagcgggagctggacggcgagcgcgagcggcgcgagaaagatgagacctgcacgcagtggctcacagcagcacgatttgtgacagcccgaggcggagaa

SEQ ID NO: 627874 - DNA, 100 bp, Homo sapiens
gacacagatttgagtttgacacccaaaactgatatgggtaagtgtcaccttaccaaaggcaaacaggctctagagattcgaagtagtttatctgagaaga

SEQ ID NO: 627875 - DNA, 105 bp, Homo sapiens
tggagcctcagttggaagcagccgatccagcctgcggagcctgtggggcagcccgttttacggagaagacttttactgtgaaattcctcggagctttcgtcacct

SEQ ID NO: 627876 - DNA, 100 bp, Homo sapiens
aagtatgagttggggcgcccagctgccaacaccaagatgtatcctccactcctcgctggccaccatcctgctgcccaacagaagaagctcttctgtctcc

SEQ ID NO: 627877 - DNA, 98 bp, Homo sapiens
ccttccacaccccctccgtgggtgtgtggtcaaaatgcagatcttcgtgaaaacccttaccggcaagaccatcacccttgaggtggagcccagtgaca

SEQ ID NO: 627878 - DNA, 100 bp, Homo sapiens
gaatgtagaccatcccattcatctaggaggccaggagtggtggctcacacctgtaatcccagctctgggaggccaaggccagtggattgcttgagcccag

SEQ ID NO: 627879 - DNA, 100 bp, Homo sapiens
ggatcaatccagatggcagccagtcagtggtggagttccaaagaggtgtttgaaagctcgagaacattttggtacagtaaaaacacatctaacatctttg

SEQ ID NO: 627880 - DNA, 82 bp, Homo sapiens
aggccggcgcgtatggaggcggtgggacgcctgcggcgcgggggcactatggcagacaaagttaggaggcagaggccgagga

SEQ ID NO: 627881 - DNA, 98 bp, Homo sapiens
ctgctcctgctggccgcctggacggctcgggcgctggagatcttcaggaattttactgggataattatccaaataaattgcaagcattctatccaaat

SEQ ID NO: 627882 - DNA, 82 bp, Homo sapiens
tagttgataccccaggatttggagatgcagtggataacagtaattgtggatccggattggtgccaatgtctccaacttcact

SEQ ID NO: 627883 - DNA, 100 bp, Homo sapiens
gcggggaccgtccagcccagcgattctcagtcagccgcagggccgtaggcagccatggcgcccagccggaatggcatggtcttgaagccccacttccaca

SEQ ID NO: 627884 - DNA, 129 bp, Homo sapiens
gacggtccagacaggaacaagacccggacattccaggccacagtcctgggaagtcagatgggattgaaagagttcagcaagaccagcagattggaagtatcaaagtggattatcatcctcatggctttc

SEQ ID NO: 627885 - DNA, 76 bp, Homo sapiens
tcttgtgccctagcaccccgagaaccgtcagtttgagccagatgaattaaacaaccaccatgtcgagcaaaaaggc

SEQ ID NO: 627886 - DNA, 75 bp, Homo sapiens
ggggccttgacaatttgcacttagtgaaagactggagaactgtgaatgaagaaatcaatgtggactgaacataaa

SEQ ID NO: 627887 - DNA, 87 bp, Homo sapiens
ctactttctggagtttgtgtaaaacaaaaatattatggtctttgtgcacatttacatcaagaacatttccccagaggagctcaaaat

SEQ ID NO: 627888 - DNA, 89 bp, Homo sapiens
tcggaccccagtaccaggcggtggtgcccgacttcgaccccgatttgatggtcctcgaagatttgaggatttagggtcaaggtgtgaag

SEQ ID NO: 627889 - DNA, 101 bp, Homo sapiens
ggcaacggccaacttcggcaagatccagatcgggatttacgtggagatcaagcgcagcgatgggaaatcctcattgacgattcaatttgttgaaggccaat

SEQ ID NO: 627890 - DNA, 90 bp, Homo sapiens
ggaacggcacatgacccaggcctatgccaatcagcatttcacattcctcatggttggttcaaaggtgggatgtgtgtgggctgaaattcc

SEQ ID NO: 627891 - DNA, 98 bp, Homo sapiens
tgatgactcagtacaacttcatgcctacatttcagacacagattttaacctaccgctctcagcagatataatcctgaccaaagaaaagaactcaagtt

SEQ ID NO: 627892 - DNA, 100 bp, Homo sapiens
ctgacagtgttaatggaagtgaaccaagcattcctcagatgctaatactggagaccgtggacagaccaataatgctgcttctgcatcagcttccaactcc

SEQ ID NO: 627893 - DNA, 80 bp, Homo sapiens
tttggggtagtgtctgggatccagtacgagttgaatcattgttcaaataagacactggaagaattgtcttaccaagctct

SEQ ID NO: 627894 - DNA, 100 bp, Homo sapiens
acctagaagtctactaatggacagttagtcacccacctacatgttgaggcatcatggccgccctcagaccccttgtgaagcccaagatcgtcaaaaagag

SEQ ID NO: 627895 - DNA, 100 bp, Homo sapiens
cctgcgtcgactttccaaagcgctggaattatgggcgtgagccactgtgcccagggcatggatgatacacaggtgcgaagtgctgctactgatatattct

SEQ ID NO: 627896 - DNA, 100 bp, Homo sapiens
cggttccccggcccacagtgggggtgtgcaaacccgagagaactggttggagatccaaaggctcagaactcggaattactgtatgcaacaggaaacacta

SEQ ID NO: 627897 - DNA, 100 bp, Homo sapiens
tacgaagaactaacagctcggagcaggagaggacgggactgccaagagacatgttagaaggacaagtaatttatggactcgcctaggatctgcacccaag

SEQ ID NO: 627898 - DNA, 75 bp, Homo sapiens
atttgggagaaacacagccagaaggtgtctgatgatttgtgagcctcaagtgactactctgtggaatcatctgtc

SEQ ID NO: 627899 - DNA, 50 bp, Homo sapiens
cagtctcccaaggtgctgggattacagaatccaggagtcctccagctgag

SEQ ID NO: 627900 - DNA, 97 bp, Homo sapiens
gggtcagctctacggctgcgaggttcagcaaaaggatgtcactgaaattgatattttagttaagaaccggggagtactcagacattcaaactatacc

SEQ ID NO: 627901 - DNA, 101 bp, Homo sapiens
aagcatggctggacgatcactgggactttaccttctcatactttgttagaaaagccaccagggccggtgcataaacttctcccgagttccatctcagtaaa

SEQ ID NO: 627902 - DNA, 75 bp, Homo sapiens
agaaaacttgtcagttcctctcaacctgtgaccgcatcaagcagtcagcagctggcaccaagcgtcgggtgttta

SEQ ID NO: 627903 - DNA, 76 bp, Homo sapiens
cctcgaccagctgctggacatgtcctactgacagcagccatggcgagcggcagtggagacagcgtcacccgtcgga

SEQ ID NO: 627904 - DNA, 90 bp, Homo sapiens
gtcgacatgttccaggtcccggatagcgagggcggccgcgccggctccagcacttgcacctcctgcgccgccgccccccatccaaggata

SEQ ID NO: 627905 - DNA, 97 bp, Homo sapiens
aaaatcagcttctgttgtatcatcagattccatttcaacttctgccgacaacttttctcctgatttgaggaggaggctgcggaggaggaggaggaag

SEQ ID NO: 627906 - DNA, 100 bp, Homo sapiens
cccgactctgcttaaaaccacgtggttcgatggctgccgcggctacgctgaggctctccgctcaggtgtcatggagaaactccagctgggcccagagatt

SEQ ID NO: 627907 - DNA, 100 bp, Homo sapiens
aaaactatccaagaatgtgacttcctggagtagagtcttttttcactgaggatttccatggtgtcagtgattcatattcctgataggacttataaactat

SEQ ID NO: 627908 - DNA, 100 bp, Homo sapiens
cctgtttgccttaccatgtgcttctgggggaatctttgttcttaagctacctccttatgacatacctggatttttacctcctataactccaccagaaaag

SEQ ID NO: 627909 - DNA, 114 bp, Homo sapiens
cggcgacgcggacctgcggactagcgaacccggaggtgtctgacttccagcaactgctggcctgtgccagggtgcaagctgagcactggagtggagttttcctgtggagaggag

SEQ ID NO: 627910 - DNA, 82 bp, Homo sapiens
tttgccgtgtacctcaatagcactggctaccggacagcccgttttacggagaagacttttactgtgaaattcctcggagctt

SEQ ID NO: 627911 - DNA, 78 bp, Homo sapiens
ttgctggaataatgaccttgaatagaggaaatgggatatcatctgagagtaaaacttgtctcggcacagagtcaagta

SEQ ID NO: 627912 - DNA, 76 bp, Homo sapiens
aaaacaaatctgctattgatgagattgatggagaaccttgtgacctgtctttgaatataacctggtatctgaaaag

SEQ ID NO: 627913 - DNA, 106 bp, Homo sapiens
caaaaattacttggagcaaagggcagtcggcggagcttcgccaaggctggcgcagtcgaatgtcatacccaggctatcccccaacaggctacccacctttccctgg

SEQ ID NO: 627914 - DNA, 101 bp, Homo sapiens
aaaatgcaaagatgtagatgagagaaatgagtacgaggatgtcgtccaggaaagattgtgcagatgactgaagcagaagttcgaggcttatgtatcaagtc

SEQ ID NO: 627915 - DNA, 98 bp, Homo sapiens
agacaatgaccagtggctgagcaccgtctcccagtacgaccgggacaagtactggaaccgctttcgagacggggcagcactgaaatacttaccaacga

SEQ ID NO: 627916 - DNA, 90 bp, Homo sapiens
cccccggagacagcggcacagaggtgcttctgccagtgtaaactggagttgctggtgggcagccctgcttcctgcatggaactggagctg

SEQ ID NO: 627917 - DNA, 100 bp, Homo sapiens
atccagatggcagccagtcagtggtggagttttttgctccactcaagcctgttagaatcaccatggaatacagctccagtgggaaggccactggagaagc

SEQ ID NO: 627918 - DNA, 75 bp, Homo sapiens
accttattggtgtggacgttgtctaaatttcggtagccatggcacaagaatataatttggcagctgatcggaagc

SEQ ID NO: 627919 - DNA, 95 bp, Homo sapiens
ggtactctacacttgcttccaatccatacaggcccaaaagagttcagaagttcttggagtctctgcggagtccctgggccagatctcacagtgaa

SEQ ID NO: 627920 - DNA, 75 bp, Homo sapiens
tcaaacgcaatcaagagaactttagctcggtcaagtctggcaccatctttgacaacttcctcatcaccaacgatg

SEQ ID NO: 627921 - DNA, 82 bp, Homo sapiens
tcccgcgtccgccgattcctcctccttggtcgccgcgtccttggctggcgtcctcttctgaaacagtctccctggagcaacc

SEQ ID NO: 627922 - DNA, 90 bp, Homo sapiens
gaattagaaaggagctgcttcccaataaggaaacagagtgtccagaggggtgggattcatccgctttgataagaggattgaggcagaaga

SEQ ID NO: 627923 - DNA, 75 bp, Homo sapiens
gaactggcaggcaagctacaaagcctagacctttcagccgctgccgaaatggatgcaaagaagggacctaacccg

SEQ ID NO: 627924 - DNA, 101 bp, Homo sapiens
ggaaagagagttgtgagtctctttcctgtttacctccagtgtcccttcttccacatgaaaaggataagattgtggtatctgaacgggaactatttggttct

SEQ ID NO: 627925 - DNA, 82 bp, Homo sapiens
cacgtctgtggcgaacgcggcatccatctcaggacatgttctgatgacttgtggggggaccacagtctggaggtggaggctg

SEQ ID NO: 627926 - DNA, 75 bp, Homo sapiens
agcatcgcatccacggattcctttgcttccgcagcagagaatgacagcccatatcaaggcggtgtattctttttg

SEQ ID NO: 627927 - DNA, 98 bp, Homo sapiens
ccatacttaactactgaatgtgaagatgtcctcttagtgcttggcagattagtactccttatgtttgatcatcggccaaggtcctggcgagaactgcc

SEQ ID NO: 627928 - DNA, 111 bp, Homo sapiens
gaaacgtcctagtcaggaagaggacacacagagtattggtcctaaagtccagagacagagcactaattaggtaaaataccatgaagattttgaaaaaacaaaggggagagg

SEQ ID NO: 627929 - DNA, 98 bp, Homo sapiens
gatcatgatcctgttcaggtttatccacgctgactggaaataccggcatgcaggattgatggccttatctgccattggtgaagggtgccaccagcaaa

SEQ ID NO: 627930 - DNA, 75 bp, Homo sapiens
cagatgttgtcaaggtggcctaccaggaggccaggggtgtcgccatggggaaaagagtttctttttacaaacgag

SEQ ID NO: 627931 - DNA, 75 bp, Homo sapiens
tacatgcagcagcttcctgtggatatcttgatattgcagagacaaatgatgcgaaggttggtacattagtggggg

SEQ ID NO: 627932 - DNA, 90 bp, Homo sapiens
gtgttccgtgtctctggattcaagtcccaggagtcctgaccagagagcaggtacaggtttgcagattccgccagcagcacagcaagctct

SEQ ID NO: 627933 - DNA, 74 bp, Homo sapiens
gcctgggggaaccaaggccccctgatgttgagaatctctatgagagcataaaaaatgaaccctttaaaatccca

SEQ ID NO: 627934 - DNA, 100 bp, Homo sapiens
gggctcctcaggttcagacccgaccgttatccagtcggttcgtggagaggagaggtacatccaagcagaagtccagttccctccaggtagcagatcagga

SEQ ID NO: 627935 - DNA, 100 bp, Homo sapiens
tggatttgcatcttgtaatgtgtttaacaaagccacgaataacctataatggtgtaggagctgcacgatctgggaacctcacgtttatggtgggaggagt

SEQ ID NO: 627936 - DNA, 50 bp, Homo sapiens
ccttattggaaaaacatttcttacgcaccatgactcctgtgaggatgcag

SEQ ID NO: 627937 - DNA, 76 bp, Homo sapiens
cgcgatgctggaccagttgatgggcacctcccgggacgatcaatgaactgagccatgttcaaatccctgttatgtt

SEQ ID NO: 627938 - DNA, 60 bp, Homo sapiens
ctcccgagtagctgggactgcaggctagagtaccgtggcacaatctcagctcattgcaac

SEQ ID NO: 627939 - DNA, 75 bp, Homo sapiens
tacgacttgggctcatgttcaaagtgaacacagactacaagtctagtttaaagactccagcgggaggaagaagag

SEQ ID NO: 627940 - DNA, 98 bp, Homo sapiens
cggggcttgccctggtcttgctcggccgatgaagtgcagaggtttttttctgaccacagcaccgggaagtccagtcagcggcagatggtgttcggggt

SEQ ID NO: 627941 - DNA, 83 bp, Homo sapiens
ctcacagctgttgctgttattacagtccaccctgggcgctgcctatggcacagccaagagcggtaccggcattgcggccatgt

SEQ ID NO: 627942 - DNA, 82 bp, Homo sapiens
ctcggccgcgcggactgaaggagactgaaggctttttcttctggggtggatctttccatggcttctccaaagctggtgactt

SEQ ID NO: 627943 - DNA, 100 bp, Homo sapiens
ggcggacttctacaaggaatttttaagtaaaaattttcagaagcacatgtattataacaggtgcagagcattgtagaccaaggagccatggataggagaa

SEQ ID NO: 627944 - DNA, 75 bp, Homo sapiens
cttccaaagcacaggaatctcactctgttaaagctggtctgttctaactgagtgccaaacccaagtctgaaatcc

SEQ ID NO: 627945 - DNA, 74 bp, Homo sapiens
gatgctagagtgagtgtgcccacctgcgtaagggggcagagacaggcttgtgacatcacgggaggactgtacct

SEQ ID NO: 627946 - DNA, 98 bp, Homo sapiens
atgtgcggggcgccctccgccacgcagccggccaccgccgagacccagcacatcgccgaccagagcacagggaaagatcgaagtttaagagtgaaagg

SEQ ID NO: 627947 - DNA, 90 bp, Homo sapiens
aacggagtcacaaaagaaatttttcaggcgaaagttcaccaaaaaggccccaactagcagctcccagagaagtttcgtggagtttatctt

SEQ ID NO: 627948 - DNA, 82 bp, Homo sapiens
gaggaggtgcagatggcactttccaaagtggatgcctccggggaggctttatcctgtggataaacgcagagtgaacgagttt

SEQ ID NO: 627949 - DNA, 82 bp, Homo sapiens
gttgtgcctcttcatattggcgatcctgttgtgtgctttgcaagatatcaccttgtcacagcagaccccctccacttggaag

SEQ ID NO: 627950 - DNA, 100 bp, Homo sapiens
gcggggagagcgaggcggggccgccggggccgccatggagcccgactcggtgattgaggacaagaccatcgagctcatgtcttcccacacaggttgagag

SEQ ID NO: 627951 - DNA, 50 bp, Homo sapiens
gcagcacattctcaagagcacacagaagtctcaggggatccagaactgca

SEQ ID NO: 627952 - DNA, 100 bp, Homo sapiens
agcctggactggcaccccaacaatgtgctgctggctgccggctcctgtgacttcaagtgtcgggctcgtgcaatccgcttcagacaggatggtaacgaag

SEQ ID NO: 627953 - DNA, 100 bp, Homo sapiens
ccgcagtatcatgctggccaagaagatcatcattaaggacggaggcacggttggctgttgaaggcacgaatggaatagataatcatgtacctacaagcac

SEQ ID NO: 627954 - DNA, 101 bp, Homo sapiens
ccttctcctgggagggggcttcgccatggccaaaggctgtgaggtggcatacactgtcctgggcttcatccctttcctcttcaaccagctggctccggaga

SEQ ID NO: 627955 - DNA, 100 bp, Homo sapiens
aaaggtgtcaagaagctcagaatggcacagtggacagtttggcacaatcaataacttcaggctgggtcgcctgcccagtgttcccgtggaatggaatgag

SEQ ID NO: 627956 - DNA, 116 bp, Homo sapiens
aaagcctcttctgaaggaaaagacagtgtagtcctgcaaaacattttgagggcaccagaactagcacctctgaaaagtaaaatgatctatgcaagctccaaggatgcaattaaaaa

SEQ ID NO: 627957 - DNA, 101 bp, Homo sapiens
gccaagcaagaagaaagacgtggcagcaagcgggagtcggggatagtgtcatcggttcggtaaagtttctgttctctgacatccacgacagcgatggcagt

SEQ ID NO: 627958 - DNA, 98 bp, Homo sapiens
aaaaatgctgaagtgctgtactcgatcgagtcagtttataggcaagcaataaacagcaagatgtttgaggtggatatgaaaattgctgcaatgcatgt

SEQ ID NO: 627959 - DNA, 98 bp, Homo sapiens
ttagcagcagctcagcagccacatatagtggatgacgtagtagatgaaagtgatgacaacgatgatattgatgtagaagctgaaaacgaaactgagaa

SEQ ID NO: 627960 - DNA, 75 bp, Homo sapiens
atttgttaaggattccaagtaactcttatttgatttcaaactaccaacgtgaagcccctgatgagggagttgaaa

SEQ ID NO: 627961 - DNA, 96 bp, Homo sapiens
tttactactgtgacaacattaacgataagccaatggacacgtcagtgttatctgaagaaggaggagagccttttcagaagaaacttcaaagtggtg

SEQ ID NO: 627962 - DNA, 100 bp, Homo sapiens
ggcggcgcgtggtctacgccgagtgacagagacgctcaggctgtgttctcagctgcaccaccaccgcctgtgctgatgcaccatggagagtcctcccagg

SEQ ID NO: 627963 - DNA, 100 bp, Homo sapiens
atcagggtataaatcaactacctaatgttatacaggctctggaaaaacatgaagcccgtggaacacagagcattcctaatgacagtcctgcccggggtga

SEQ ID NO: 627964 - DNA, 75 bp, Homo sapiens
ccctctgcgacctggggccctgggtgaagtgctccgccgcccttgcctccagacccaacatgagtgaagtttcct

SEQ ID NO: 627965 - DNA, 85 bp, Homo sapiens
gctgtgctctgtgaagaaccaggagcggattctccgcgaggtgtgcagagtgctgagaccggttttgggatttgagattgacgcg

SEQ ID NO: 627966 - DNA, 74 bp, Homo sapiens
tttgtgttatagaagatttctttgacactgcattggctggagtgcagcggcctgatgatcatagctcactgcag

SEQ ID NO: 627967 - DNA, 82 bp, Homo sapiens
aaatggtagtcatctggggactaagcaacaggtgtttcaaggaactaattctctgggacacatgacggaagtgtgtattttt

SEQ ID NO: 627968 - DNA, 75 bp, Homo sapiens
ggcgctgcagaaccagatccgggagcacgtcatctccatcgaggaagccaagtacaagaagctggagaagcgatg

SEQ ID NO: 627969 - DNA, 100 bp, Homo sapiens
ctacaactcgcccaccacgtccagcttcaccacgcggctgcacaactgcaggaacaccgtcacgctgctggaggaggttccagcaacagatagaaatgct

SEQ ID NO: 627970 - DNA, 50 bp, Homo sapiens
tgttacgctaggaatatggcaaacgttaaccccaaagattggctttcctt

SEQ ID NO: 627971 - DNA, 100 bp, Homo sapiens
gccatgatgatccaaacacctgcaacatcagatgctgacctgaaagaacatatggttggaatcatattcagcaggagtaagctgactaacttacaaaaac

SEQ ID NO: 627972 - DNA, 100 bp, Homo sapiens
cccggcccgggggtgagcgccgggctccgtggggaggaagcgggggccaccaagccaagacaatgcaaactccagtgaacattcccgtgcctgtgctccg

SEQ ID NO: 627973 - DNA, 74 bp, Homo sapiens
caggtgaagaaggcagctctcactcaggcaaaggtgttggagcgggccggagagaagtagagtgggctgcgagg

SEQ ID NO: 627974 - DNA, 75 bp, Homo sapiens
gagacacaccaggccggcaggctgagaaaagcgagaccgcgtgcgaggaccggccaagggccagccgtgacagag

SEQ ID NO: 627975 - DNA, 100 bp, Homo sapiens
ccaaagcctacctgcagaagcaagctaaagttgttcccatgactttgccgactaaagttctaagtgcccaccgtaaatcactgaatcttgttgattctcc

SEQ ID NO: 627976 - DNA, 82 bp, Homo sapiens
tgcagcgggagctggacggcgagcgcgagcggcgcgagaaaagcacgtgcccccggagctgtgggagcccttctataccgac

SEQ ID NO: 627977 - DNA, 100 bp, Homo sapiens
ggaaggctgtgtgggccagcccagccatggggctgctggccagaacaaacaacattctattaccaagaacacggccaagctggaccgggagacagaggag

SEQ ID NO: 627978 - DNA, 100 bp, Homo sapiens
cggcggtggcggcggcgcgtcctccagcggcggcagcggcgctcgcagcgcccgtggattaatccctcacctcctgggcgatgtggttttcttgtggggc

SEQ ID NO: 627979 - DNA, 101 bp, Homo sapiens
cgccaccaggtcaccctggaagagtcgctggccgaagaactcccccactggaaaggattctgaaagaaatgaagtcagccctcagaaatgaagttgactgc

SEQ ID NO: 627980 - DNA, 60 bp, Homo sapiens
gggaggctttcagccggagaagcgagtttcagctgtaacatctttaccagcaatgactga

SEQ ID NO: 627981 - DNA, 100 bp, Homo sapiens
ctaaagtatttgccgttggtgattcaaggggcaattaaagcatttcaagatgtcctttatgttgaccccagcttttgtcgagccaaggaaattcatttac

SEQ ID NO: 627982 - DNA, 80 bp, Homo sapiens
taacatagctgtttgcagttctaaggtcttcaaagcttcacctttctccaaaggcagatgtgaagaacttgatgtcttat

SEQ ID NO: 627983 - DNA, 75 bp, Homo sapiens
attaatcacaccaacaaaaagatcctgtggtacagataaggaagctgaggcacacagaggtagggaactaaccca

SEQ ID NO: 627984 - DNA, 90 bp, Homo sapiens
aatcacacacaacatattcgaattgagtcaagcccatttcctcttacaaactttccagaaatgatgaatagatataagcagctattgacc

SEQ ID NO: 627985 - DNA, 100 bp, Homo sapiens
acaacctcaccgtgcaccttcgcaagaagcaccagttcaagtggccctcagggcatccccgttttcggttgctgtgagtctaggtactccaattatgaag

SEQ ID NO: 627986 - DNA, 75 bp, Homo sapiens
ggggccgagcgcggccctgcaggcgatgtcgccgaaaccgggctgcaggcggaaactggcgatggaatatgagag

SEQ ID NO: 627987 - DNA, 75 bp, Homo sapiens
tcttccaacaccagtggaagatgatcacatcccagggtgaaaatcctatttataagagtgccgtaacaactgtgg

SEQ ID NO: 627988 - DNA, 82 bp, Homo sapiens
cagggtgggctggacgcagatctccgggccacctgccttgaagatcatggaagggaagtggttgctgtgtatgttactggtg

SEQ ID NO: 627989 - DNA, 90 bp, Homo sapiens
gaaaagtggaaaaccaccattacagaacaatgagggtgctggtgacagctttgtgggagctctggccttctacctggcttactatccaaa

SEQ ID NO: 627990 - DNA, 74 bp, Homo sapiens
ggagaggactgaatggtatcctgctttggtcgtttatacgcaatgcagactggaatgaagatcgatagtaaaac

SEQ ID NO: 627991 - DNA, 96 bp, Homo sapiens
gctgcgtcgcccgaggcgaggaggagcgctggcgaaaaatgtgatgagccacttgtctctggactcccccatgtggctttcagcagctcctcctcc

SEQ ID NO: 627992 - DNA, 117 bp, Homo sapiens
caacttgctgggaccatcccaaaatgacagagctctaccagtctttaggggcttcacaaaggtcagagttcacattcggcaggtcctaatggtgaacgacctctctcttccactggg

SEQ ID NO: 627993 - DNA, 100 bp, Homo sapiens
cccatgggttggccttacaaccctccttcccaggaaggcacagaccccacaggctcctcggacactgggtccatcacctcctgccccatcatccactcca

SEQ ID NO: 627994 - DNA, 50 bp, Homo sapiens
agccgggagttacaccgccaccgccagaatcaggaaacccaggcccaacg

SEQ ID NO: 627995 - DNA, 82 bp, Homo sapiens
caaggctgctagtgaacagcgacgtggaatactcccccagttgcaagaggcgcaggaccgtggaagacttcaacaaattctg

SEQ ID NO: 627996 - DNA, 75 bp, Homo sapiens
tggtccgtaggagccactatgaggagggccctgggaaggcatgagaaacttagtaaagaagtatgaaccacccag

SEQ ID NO: 627997 - DNA, 75 bp, Homo sapiens
cgaagtgttgtgtaaaggctacccttgcatcggctcaggccaggctcctctagcccagtgtgtggccctggccca

SEQ ID NO: 627998 - DNA, 98 bp, Homo sapiens
tcacagactcctatttgaagtatttgacgaaaatagactggagtacaagcgcaagctagccagagtttccctggtgcgcaaagaactcaggtcccgga

SEQ ID NO: 627999 - DNA, 100 bp, Homo sapiens
tcagggaattactactgcacagctgacaatggctttggtccccagcgcagtgaagtggtgagcctttttgtcactggttcttctgctggtgatgcagtgt

SEQ ID NO: 628000 - DNA, 124 bp, Homo sapiens
tttatcctaatcccaatgctgaagtaagattgtcttggaaatactaagttggtattattttggcgacttcaatttgccacgggacaagtttctaaaggaacagataaaactggatgaaggctgg

SEQ ID NO: 628001 - DNA, 83 bp, Homo sapiens
cccggccgcctccgcgagggcaccatggaggtgaatgcaggttttaaaatcaaagatgggaaaatcggagaaaattgcccttc

SEQ ID NO: 628002 - DNA, 76 bp, Homo sapiens
ccatgatgccccacttggtgaatggagatgcagctcagcaggtgattcatggcaggggacgtggaaggattctgtt

SEQ ID NO: 628003 - DNA, 90 bp, Homo sapiens
cacaaccatttcctacacagtttgcaccccagggagtcccatagagcctgactccgagagcctcgatctcccagggccagaggcagggac

SEQ ID NO: 628004 - DNA, 97 bp, Homo sapiens
ggagcaactgaggcgccgggaccggctgcagagacaggcgttcgaggagatcatcctgcagtttttcggctttgtgagaaaccttaccatcaaacac

SEQ ID NO: 628005 - DNA, 98 bp, Homo sapiens
cgacatcatccaccactggaacgccaaccggctggacctgttcgagatcagccagccgaccgagtgcagctgtctgcttcagaaagtgagggctccag

SEQ ID NO: 628006 - DNA, 90 bp, Homo sapiens
cccgagtccgcgggaagatggcggcgccgctcatccccctctcccagcaggctaaccttgccgcgggccgagccctgcctcgccatggac

SEQ ID NO: 628007 - DNA, 89 bp, Homo sapiens
ggcttcctgcgcgataaccaactctcagaggtggccaataagttcgccaaagcgacaggagctgctgggacacatgaagagctcctgaa

SEQ ID NO: 628008 - DNA, 96 bp, Homo sapiens
actgcaggactgtgaaggggacgctgggcaaggcctccaagcaggcaggaatgtcatccacgccagcgactccgtggagggggcccagcgggagat

SEQ ID NO: 628009 - DNA, 71 bp, Homo sapiens
gccgctctgccacggtctgcccacccaacgcgaagacggtaacacaagtggcaagacagccgggaacccct

SEQ ID NO: 628010 - DNA, 75 bp, Homo sapiens
gggctctgaggatgagctggaggaggggcggaatggccaaagactatgacgggtcttcctagcacatcagggaca

SEQ ID NO: 628011 - DNA, 101 bp, Homo sapiens
gaaaatgtatggatacaacttacgtttgatgaaagatttgggcttgaagacccagaagatgacatatgcaaattactcaaagactgtcctggtttcgtgtt

SEQ ID NO: 628012 - DNA, 100 bp, Homo sapiens
gcacgagccaagcatatggaaatgtctctaaaagtattccagactccatcatttctcgtggtgttcaggtgctcccacgagacacagcctccctcagcac

SEQ ID NO: 628013 - DNA, 100 bp, Homo sapiens
gttattgataactatgtttatgaacataccctgattttggctatggaaaggggaaatgttctaagcagagcccgtcaggagcccacgggacacattttgg

SEQ ID NO: 628014 - DNA, 83 bp, Homo sapiens
ctttcccagaagttgttctaacgctgcctttgctttaaaacagtattacttgcggtcagcccaaggccaaccccactgtcact

SEQ ID NO: 628015 - DNA, 75 bp, Homo sapiens
tccagcccggcccggcagcgacatggaaggttccttcaatggtgccttagctgctgttcctgtccaggacctggg

SEQ ID NO: 628016 - DNA, 90 bp, Homo sapiens
cgtgcccgacctcagcgtcgaggtcaacatctcctctgagacagctttcaagatgttagaaagttcaagccagaagtttcttcagggttt

SEQ ID NO: 628017 - DNA, 82 bp, Homo sapiens
catctttcagcagttggcacacatggttaaggaacaggaggaaaccattcagaggattatatgcgtcaggcaggagaagtga

SEQ ID NO: 628018 - DNA, 75 bp, Homo sapiens
cccgagccatcgcactgcaccccgtgatgggtgatgagctactcctgggtcatgagaaggcccctgccttcagag

SEQ ID NO: 628019 - DNA, 100 bp, Homo sapiens
agacgcagtggtggccctggagcagtatgccagcaaggtctctaattaacagaagatggcaaagcccagccacagcagctatgtccttcagcagctaaac

SEQ ID NO: 628020 - DNA, 80 bp, Homo sapiens
agcattagcatcattgcccaaggcctccctttttgtcgaagacgggtttggtacatgacgatgcctttagatcatctcca

SEQ ID NO: 628021 - DNA, 100 bp, Homo sapiens
ctgtgggtgctgggacttcccgtccgcggcgtggagggactgactgcattgcacagatgatggatatttacgtatgtttgaaacgaccatcctggatggt

SEQ ID NO: 628022 - DNA, 98 bp, Homo sapiens
tccgcgccgcttgtcattgggaggcgccgaaggtggagaggtcggctcggaaggaaaagataacggaggagatgatggatcaggcaaatgataaaaaa

SEQ ID NO: 628023 - DNA, 75 bp, Homo sapiens
agagcgcgaatatcgtcatcgttagaaggaggaagaacgtgcaaaacgtgaggagctagagcgaatactggaaga

SEQ ID NO: 628024 - DNA, 136 bp, Homo sapiens
atgggcagcgcccgcgccccgccgctgagccgtcgcggagccgcgcagccctcggagcacggtactccaaagattcaggtttactcacgtcatccagcagagaatggaaagtcaaatttcctgaattgctatgtgt

SEQ ID NO: 628025 - DNA, 83 bp, Homo sapiens
catcgacctggggaccacctactcctgatgtgtcttgctgaatcagggctctcttatccctgccatcgacttacagtgggaag

SEQ ID NO: 628026 - DNA, 75 bp, Homo sapiens
agcggagttccaggggcggcggtatcggtggctgccctactacagcgggcactccagtgtttgtccatgctggcc

SEQ ID NO: 628027 - DNA, 50 bp, Homo sapiens
gctggagatggtggagtccgtcagggctttgttatgcacctaaagccata

SEQ ID NO: 628028 - DNA, 97 bp, Homo sapiens
caggacccgaggccaggagccaggggcccagaagaaaaattgtatggcgacttcttgagctggaagctagaggaaacccttgcccagttccctttgc

SEQ ID NO: 628029 - DNA, 75 bp, Homo sapiens
tggagaagatctatgggtcagacagaattaaaccgaccagagggcaaagtgttggagacagttggtgtgtttgag

SEQ ID NO: 628030 - DNA, 50 bp, Homo sapiens
gttcagcagcgcggcagagtcatgggggccatcgaagacggcaatttgga

SEQ ID NO: 628031 - DNA, 83 bp, Homo sapiens
ggggaccaggacagtcgcgaggttcgagtgttgcagagcctgcggggcaagatctgctgccaaacgagggattctttcatctg

SEQ ID NO: 628032 - DNA, 80 bp, Homo sapiens
ctgacagcgcgcacttcacccgcagttggtatggttccgaccggcgtttagccgagctctctgattaccgccgtttatca

SEQ ID NO: 628033 - DNA, 116 bp, Homo sapiens
atatatatctccatttcatgatattccaatttatgcagataagctctattatcaagtcctaaattttggaatgattgtctcatcggcactaatgatctggaaggggttaatggtaa

SEQ ID NO: 628034 - DNA, 101 bp, Homo sapiens
agaaattgaggaaactgaggaaagaggctgcagcgaggaaagaagctggcagggcggagatgctggaccacgccgtcctgcttcaggtgatcaaagaacag

SEQ ID NO: 628035 - DNA, 100 bp, Homo sapiens
cactccaaggaaacacaagagaagtcctgcacaaattcactgtggatctcccaaagaaacacggacagtcattttgtttactcattcagccctgttgcag

SEQ ID NO: 628036 - DNA, 100 bp, Homo sapiens
gcaatcagaaaatcaagtaaaggaacccaacagagatctcttctgttctccactgctagggaatgaaagctactggttgattttaaagtgcctgggcctc

SEQ ID NO: 628037 - DNA, 83 bp, Homo sapiens
caatatctgtcttcggtggactccttcggcagtccacccaccgccgccgcctcccaggaacgcggcaggcaaagatggcaaag

SEQ ID NO: 628038 - DNA, 82 bp, Homo sapiens
cgggaggaaggaacgaggcaaggagctaaagcagcgtgcgttcagccctggggcattggaatggatacttgtgtcattcctt

SEQ ID NO: 628039 - DNA, 85 bp, Homo sapiens
ttacttgtaaatatgcagattatatttctagggacaaacctatcacatttactcagcaatctgcacatcgtgctgccacacgagg

SEQ ID NO: 628040 - DNA, 100 bp, Homo sapiens
actctctctgcaagtccttaactttgttcactcattccagggagtaactattcccagtcagaggcgctatgtgtattattatagctacctgttaaagaat

SEQ ID NO: 628041 - DNA, 100 bp, Homo sapiens
ggcccggccgcgcccgcggaaccagaccagatcagcttgaacgggtctttttacgacttggccatgctgaaacagatgaacaattacagaatattatatc

SEQ ID NO: 628042 - DNA, 75 bp, Homo sapiens
cagaactgcacactcagtccctctgtgctccaggactccctcaataattctatacgagatactccagccaaaaat

SEQ ID NO: 628043 - DNA, 95 bp, Homo sapiens
acctctacttagctcagcaattcttaccttaatgacagcccatatcaaggcggtgtattctttttgacaattcattttcctacagactacccctt

SEQ ID NO: 628044 - DNA, 75 bp, Homo sapiens
cctcggtttcctggacccattccgactcaggctgaactcacgggaatcaaatggcgtaggtacaattttggaggg

SEQ ID NO: 628045 - DNA, 76 bp, Homo sapiens
ttattgaatatcaagaggaggagttgttggctatggaaagggcaaatggaatggagctggatggtagaagaattcg

SEQ ID NO: 628046 - DNA, 74 bp, Homo sapiens
aagtggtagcgctgctgcggaggttcaaagtgtccgacgaggttggatggcaagcatgtggtgtttggcaaagt

SEQ ID NO: 628047 - DNA, 90 bp, Homo sapiens
catgggtcctcgacctgcagggagcagaggggacagaggcaccaaggacctccaagacaggttggagtgggtggagatcatcgaaccgcg

SEQ ID NO: 628048 - DNA, 100 bp, Homo sapiens
gggcccaggaaggcaagaagcagtataagatgatctgccatgtgttcgagtcggaggatatgttggagtccggggtgacctggtctcagtgaagaaatct

SEQ ID NO: 628049 - DNA, 74 bp, Homo sapiens
acgccggtctctgttccgcaggatgaaagtatgctgaggccttggattaccaccgtcaggcactggtgttgatt

SEQ ID NO: 628050 - DNA, 87 bp, Homo sapiens
tgtttcgccacagttcctaccttatgagctcggttttcttatgcttataagagtggaacagcagttggaattgatcacaccttttca

SEQ ID NO: 628051 - DNA, 100 bp, Homo sapiens
gctggatgttctcatcgtccctgccaactttccaagtctggggatggccaggcctttggacaagcacacacaaaccacaagaaggtggctgctgacggag

SEQ ID NO: 628052 - DNA, 75 bp, Homo sapiens
gtaaatgatgatgattttgagccatacttaagtagccagacaaatcaggtacaaacccgtagtgctgatgaacca

SEQ ID NO: 628053 - DNA, 96 bp, Homo sapiens
cagacctctctgcggccccaagtgttcgtgtttccagaaccacaagacagacccaagagggctgtgttggcaaaacaaatggcagagtggagctgg

SEQ ID NO: 628054 - DNA, 100 bp, Homo sapiens
tgagaattggtgtaagacatcacaatcccattattcagagcgcgtatggagtggaaacgcttgtagggcttcaccagctccattccgacttagacaaggg

SEQ ID NO: 628055 - DNA, 78 bp, Homo sapiens
ctacatcaagcacctcaaggatatttgtgaggagagaagccttataaatgcacctgggatggctgctcctggaaattt

SEQ ID NO: 628056 - DNA, 89 bp, Homo sapiens
tggtttgaatccttccttgatgatgaagagggcttcctactatgagatttcagttgatgatggtccatgggaaaaacagaagagttcag

SEQ ID NO: 628057 - DNA, 90 bp, Homo sapiens
cacatctgttggcaccccgttctggatggcccctgaggttcatcatgcctagtggcgtataagaagaccccgccaccggtccctccacgc

SEQ ID NO: 628058 - DNA, 100 bp, Homo sapiens
tgcccagcgccctggccctctcgctgttgctggtctctggctccctcctcccagggccaggcgccgctcagaacgaattagacctttacgagaagcacag

SEQ ID NO: 628059 - DNA, 83 bp, Homo sapiens
ctgggccggagcaggcgaggtggccggagccgtgtggaccaggaggagcgctgttacctgtgcatgacagatgagtggttctc

SEQ ID NO: 628060 - DNA, 82 bp, Homo sapiens
ccgaaccccttcatgcccaaatcccggaaactccagcgtgtctccagccgtgattgaggacgagacgcaggtgtcacgggcc

SEQ ID NO: 628061 - DNA, 80 bp, Homo sapiens
ttttcaccaaggaactggtgctgcagcgagaggtggataaattagatgcttcagaatcactgagaaaagaagaagaacaa

SEQ ID NO: 628062 - DNA, 75 bp, Homo sapiens
atcgtgatgggacaggtggtcggactcagctttgatgaccatgacccagctgtgatccatgagaacgcatctcag

SEQ ID NO: 628063 - DNA, 51 bp, Homo sapiens
tttgacttgtttggaggtgttgataacttcgatatgacctgccagcatcat

SEQ ID NO: 628064 - DNA, 50 bp, Homo sapiens
gttgaccctgttcaggcctcggtgaagatgcctgaggaagtgcaccatgg

SEQ ID NO: 628065 - DNA, 73 bp, Homo sapiens
cggcagtggcttactcccggtgccaggttcttggagctgtgagatctatgggagtcgtcagattatactggag

SEQ ID NO: 628066 - DNA, 100 bp, Homo sapiens
ctgtcatgatcgtgatggtgccgtcgctcatcaagcagcaggtccttaagaaccgggggcggctggcagacaagaggacagtcgccctgcctgccgcccg

SEQ ID NO: 628067 - DNA, 74 bp, Homo sapiens
cgacagagctgcagatttcctctcggagcctgagggaggcccagcttcctaaccaagcgaagccggcaggtctg

SEQ ID NO: 628068 - DNA, 100 bp, Homo sapiens
ctctgccagtataaatgcagtgacgtttgtggggacattcatggacaattctttgatttgatgaagctctttgaagtcgggggatctcctgccaacactc

SEQ ID NO: 628069 - DNA, 83 bp, Homo sapiens
atgctgtgagagagatggcctggggggtggagcaaggcctgttggatcccagttttgcacagtaataagttgactcacacaga

SEQ ID NO: 628070 - DNA, 100 bp, Homo sapiens
tgatgggcacggccgaggacttcgccgaccaggatggcggtcgttcccatcgtcatcagcctgaccctgaccacgctgctgggcaacgccatcgcctttg

SEQ ID NO: 628071 - DNA, 100 bp, Homo sapiens
gtttggaaatgatacaattacctgcacgacacatggaaattggactaaattaccagaatgcaggggaactaagcgtcttgtagaaggaactattaatcca

SEQ ID NO: 628072 - DNA, 82 bp, Homo sapiens
caaaagggagagccctctcccacatgggagagtaacatcacagagaaagactcagaatacgccagacaccttttgaaagcta

SEQ ID NO: 628073 - DNA, 100 bp, Homo sapiens
cctcatataactgctgcagagggtaaacttcacaacatgatagttgatctggataatgtggtcaaaaagcaggaggccactgtctgcagctcccgtgaag

SEQ ID NO: 628074 - DNA, 114 bp, Homo sapiens
tttctcgccctgctgggatcgctgctcctctctggggtcctggcggccgaccgagaacgcagcatccacgatgttgacgatgagtatgaggacgaggaccagtgggaggatgga

SEQ ID NO: 628075 - DNA, 100 bp, Homo sapiens
cacagtgcttccaccctggacgaagccacccccaccctcaccaaaatagcattcctttcgaacaccacggcaagtagctgctcgtctcccatcggaaggc

SEQ ID NO: 628076 - DNA, 100 bp, Homo sapiens
gcaaaccagatatatgacttgtcttatgcagggaaatatgtgccagccattgcacacctcatccattccctcaaccctgtgagagaggtgaagatcaacc

SEQ ID NO: 628077 - DNA, 90 bp, Homo sapiens
cgctgcaccagctccttggagggtcacagtgaggcagtcatttctgtggccttcagccctacgggaaagggccctcctcgccaaagacag

SEQ ID NO: 628078 - DNA, 90 bp, Homo sapiens
aaaggaaggactggtcatctctttcatatctcaaaaccatggctcagggccggatcgtggcacccagaggctgccaggactttggctggg

SEQ ID NO: 628079 - DNA, 83 bp, Homo sapiens
caccaagatgagcagggcccttgcggagttccgcgtccgaggtgtgaaggcttgggcactgtttaaaggaaagttccgagaag

SEQ ID NO: 628080 - DNA, 100 bp, Homo sapiens
agctgcatttagttgcgctttcctgcctgcttctagcaaaaccagacataagttcagaggaatctgtctccactgtagaagaacaagagaatgaaactcc

SEQ ID NO: 628081 - DNA, 96 bp, Homo sapiens
ctcaagaaggaggtcagccgggtgctgtgcaagcggtgcggcaagtatatcgcgtcaacacagcgacctgacgggacctggcgcaagcagcggagg

SEQ ID NO: 628082 - DNA, 83 bp, Homo sapiens
cttctacccactgagaccagagttagtggaatccacatatctcctctaccaggcaaccagccacagcaaggagtgactccgta

SEQ ID NO: 628083 - DNA, 75 bp, Homo sapiens
gcggcaggctcaggtgcagccgctgacttaattcagtgcacaaatgagatgaatgtgaacatcccacagttggca

SEQ ID NO: 628084 - DNA, 100 bp, Homo sapiens
tcacgcgtacggtcaagtaatcagttgccacgttcaaacaagcagctttttgaattactttgttatgcagaaagtctcggcatttaccagaaggcatttg

SEQ ID NO: 628085 - DNA, 50 bp, Homo sapiens
aaggatggagtgaaatacagggacccccaaagtggttgacatccccactt

SEQ ID NO: 628086 - DNA, 101 bp, Homo sapiens
agagcttcatcaaaaatagtgatagctttgataagagatggaataaactgagactgcaggacaaagagaaacgtctgaagctggaggacgattctgaggaa

SEQ ID NO: 628087 - DNA, 100 bp, Homo sapiens
gcagcgtccctgtgacctggccgatgaggaagtactgagcctgttggaggaactggcccggaaacaggaggaccaacttgtagagacagtttcatgtgga

SEQ ID NO: 628088 - DNA, 83 bp, Homo sapiens
acccgggagtaggagactcagaatcgaatctcttctccctccccttcttggttgtatggttcctggagctggtgcaattgaag

SEQ ID NO: 628089 - DNA, 75 bp, Homo sapiens
ctcgctgatcgcctaacttctactgacgaagcttggaagttgcagaaggggtcttgctcctcagaacaaaccaga

SEQ ID NO: 628090 - DNA, 82 bp, Homo sapiens
tggcaccagggacggtgactgtggttaagcagctttaccgatttgttacaactcaagcaagggccagcagaaattctctttt

SEQ ID NO: 628091 - DNA, 80 bp, Homo sapiens
gagtttccgatttaaagctgagctgcgaggaaaatggcggcgggaggtgacgccttctgggccccatctgtccttcctca

SEQ ID NO: 628092 - DNA, 90 bp, Homo sapiens
gcgtcccgggtcccctagcagggctctagagaccacgtgaagtctcctcgggacctggtggccttagtctttcaggtggaacggtgtgcg

SEQ ID NO: 628093 - DNA, 100 bp, Homo sapiens
ccaaagcctgcccagacggctcacctgtgcgggatggaacaaaagctgtccctttccccccaacacatcgcttgacatctgaagaagtatttgatttgga

SEQ ID NO: 628094 - DNA, 90 bp, Homo sapiens
atttcctgctcggaaccttgtttactaattgtgatgagacaaaccatgcttctgccacatcaacacaggactttctggatcaagtgactt

SEQ ID NO: 628095 - DNA, 101 bp, Homo sapiens
ccaccgctccctcttcccacgttctctcctgcgctatggtggaaacctgtccctccaaagtgccatgagtgtacgattcaacagcaacgggacccagctcc

SEQ ID NO: 628096 - DNA, 82 bp, Homo sapiens
atcaccagaacccagcagcttgccagcatcgttgcagagatcctacagtaaggaattgtttgaagaagttatttcaaagatg

SEQ ID NO: 628097 - DNA, 75 bp, Homo sapiens
tccccagtgagggtgtacaaatacccctttgaattaattatggctattgcagagggaatggcatacatcgagcgg

SEQ ID NO: 628098 - DNA, 100 bp, Homo sapiens
gaaagcactgctgcttggcatacttcttgtagtaaccctgtcaccgtctgctttttgaagctaaactaggaactcgtgtccctgaagccttgtaaagctg

SEQ ID NO: 628099 - DNA, 100 bp, Homo sapiens
cccgtgtctgctcgccctccgacgctgctcagggccgagatggtggtgcctgacttctcggagcttttcaaggagagagccacagcccccttctttgtat

SEQ ID NO: 628100 - DNA, 73 bp, Homo sapiens
agagtggctatggtgggcaaactaagccgattttccggaaaaagaattatatccatggaagcagtcaagccca

SEQ ID NO: 628101 - DNA, 100 bp, Homo sapiens
cggagatcgcccgccatggctttacttactgcggccgcccggctcttgggaaccaaggccccggggtcggcccaggtggctggactatgcgggcgcctaa

SEQ ID NO: 628102 - DNA, 98 bp, Homo sapiens
tcaaatttcagccatcagcaagatcagaaatgtcaatatgactcaaaatatcgtgctgccacatgttcaaagtacactgaacttccttatggcagaga

SEQ ID NO: 628103 - DNA, 90 bp, Homo sapiens
aggataagtcgaaggggaaggcgcctgaagaggacgaagaaaaacacaccttgactttagtcagatacatcactgtctgttaaaggaaac

SEQ ID NO: 628104 - DNA, 74 bp, Homo sapiens
cgacaagccgctggcagccgcggatctcaccgccgctcaggataatcaccagaatgggagtgaatgacttgtgg

SEQ ID NO: 628105 - DNA, 100 bp, Homo sapiens
gtctctgcgttacaaactcctaggagggcttgctgtgcggagacagatgtcatcaatgcttcttggtgggtcatgagcaacaagactcgggatgaactgg

SEQ ID NO: 628106 - DNA, 75 bp, Homo sapiens
gccatggctgccccgtgtttgctgcggcaaggacgagccggggcgctgaagtattatgcagatatgccagcagaa

SEQ ID NO: 628107 - DNA, 101 bp, Homo sapiens
attttagtggacaaaccaaatgaccaatcttcaagatggtcttcagagagcaactatcctccccagctaccatactgggaactgcccaatggagaggccca

SEQ ID NO: 628108 - DNA, 101 bp, Homo sapiens
tctgcccatgagcgtgtggtgaagagggaggacggggagaagctggccaaggttcacgcctacatcatcagctccctcaagaaagagatgcccaatgtctt

SEQ ID NO: 628109 - DNA, 71 bp, Homo sapiens
cgcccgccgccctggaagaagaggacgtgagagtccgcgggtgccgttcacagacctgctggatgcagcca

SEQ ID NO: 628110 - DNA, 111 bp, Homo sapiens
gcagaaaccccgttgacaaggcactgctttttcatgacgggccaattcctgtccccccagcagcatggcatcgtgtgctgaaccctctgagccctctgccccactgcccgc

SEQ ID NO: 628111 - DNA, 82 bp, Homo sapiens
cggagacccagtcgctacgggagcagccagaagttcctgagttggaggtagaagaagaaacccaagttcaagagatgacttt

SEQ ID NO: 628112 - DNA, 100 bp, Homo sapiens
gaaatttttgggaaggtgcaaggggtgtttttccgtaagcatactcagatcttgctgggtcagaaatacaaccactctgtggactggtggtccttcgggg

SEQ ID NO: 628113 - DNA, 80 bp, Homo sapiens
aatatactcatcatcagtctatttagaagagataccctgcagtgcactgtagaacagaagataagaacttttctctgaat

SEQ ID NO: 628114 - DNA, 98 bp, Homo sapiens
ctctggggctcttatgctcagaagaagggcagtgccattgataggttctacttgtccaattctgaaaaggaacgttatgaaaaagaattcagccaaga

SEQ ID NO: 628115 - DNA, 100 bp, Homo sapiens
ctgatagtctccagcgggcctggactgtgggctggtgtgtggaactggtctcacactctgaggatgactgtctagctttcaaagttcaccaatactttaa

SEQ ID NO: 628116 - DNA, 100 bp, Homo sapiens
ggtgggaggacgctactcgctgtggtcggccatcggactctccattgccctgcacgtgggcaccagagagcgtccttgccgagcactaccaggacctgcg

SEQ ID NO: 628117 - DNA, 87 bp, Homo sapiens
gagcttggtttcgggatctcggtgctgcagacggcgagacctcctgcacaggcaaaatacatatctcagtgcattgatgagatcaag

SEQ ID NO: 628118 - DNA, 100 bp, Homo sapiens
catggaattgctaagaaaagtagtagtccctgggatccgtatgtccattaaacttcatcagggcagcttgtgcagctggaagagaaagggcagggttcag

SEQ ID NO: 628119 - DNA, 75 bp, Homo sapiens
agggggtacacatatctgtatataggttcaaaccttgtactactcagctgatcacaagctgcttgatgggaacct

SEQ ID NO: 628120 - DNA, 75 bp, Homo sapiens
aacatgccaggagagcaatgcaaaaggctctgacgcccgctctgcggcttcggtgtttgaacaggccacagtcca

SEQ ID NO: 628121 - DNA, 96 bp, Homo sapiens
gcaaagcctacagcaccaccagtattgccagcgtcgctgaaaaccacagcttttggaccctaaaaggtctggattgatcgtactgctttctgaaag

SEQ ID NO: 628122 - DNA, 100 bp, Homo sapiens
ggaagatcttccgggagtgttggaagcaaggtcagctggagaagcgactggaggagtggttggggaggacattgcctggcagtgactggacacccaatgc

SEQ ID NO: 628123 - DNA, 100 bp, Homo sapiens
cgagcatctgggccgagaccattccgtatggagagccggggtaaaggagctggaagtgcgaaaattgatgcatgtgagaggagatggaccctggtattac

SEQ ID NO: 628124 - DNA, 83 bp, Homo sapiens
cacatcttcatccagctagctcggaacctgcccatggacacattcactgtggcaagctccaccagcccattggagaaaagtta

SEQ ID NO: 628125 - DNA, 101 bp, Homo sapiens
ccctacggcccgctggcggccagctccctgctcagccagcagtatgccgcctccctgggtctagctggaccagctattccttctgttgtggcgtatccgaa

SEQ ID NO: 628126 - DNA, 78 bp, Homo sapiens
ttaattcttccactgatatctcaaaaggtgatctggacaaaggaacaggtatctcagatacttgccagaactaataca

SEQ ID NO: 628127 - DNA, 100 bp, Homo sapiens
gcctgctacggcggatttgacctgtacttcattttggacaaaatgacatcttcgagtggtccagggaccaccgagcccaccacaagtactcagagacgga

SEQ ID NO: 628128 - DNA, 100 bp, Homo sapiens
atcacattgatacatgctggaggtctggctcaggtcctatggcagcgtatacaaagctattcataaagagaccggccagattgttgctattaagcaagtt

SEQ ID NO: 628129 - DNA, 100 bp, Homo sapiens
agatacatggcttgcaaaaagtaaaccacgatcgttatgctgagtacttttggagctggccttctcaaggaagcccagctccctgtgattgagaataaag

SEQ ID NO: 628130 - DNA, 82 bp, Homo sapiens
agagacatcccgatctggggaagatgaagccccacccgcccttcaggatgccagccttggcaacatcgtgagaccctgtttc

SEQ ID NO: 628131 - DNA, 74 bp, Homo sapiens
gactgttaaatcttgcacttcttctgagtgaggtcgacttatcaaaggatctccctcactggaacaagcttaaa

SEQ ID NO: 628132 - DNA, 100 bp, Homo sapiens
taaaaacaagactggggctgctcccatcattgatgtggtgcgatcggtcagaaagcaacattgaatgcagaagaaatggcggacttctacaaggaatttt

SEQ ID NO: 628133 - DNA, 100 bp, Homo sapiens
gcgattggcatcgatctctccatcccttccgaggcccgacttcggaaactttgagggaaattttgagtcactggaccttgcggaatttgctaagaagcag

SEQ ID NO: 628134 - DNA, 97 bp, Homo sapiens
agagcgcagcgccgagcgcggcccgggcgccatcgagccttggcggcggacgtgcaggcatctacatcctcatcgctgtgggcgctgtcatgatgtt

SEQ ID NO: 628135 - DNA, 75 bp, Homo sapiens
aaggcggtggaccagccgcgccaggttatcaatactctggctgaccatcatcatcgtgggactgactttggtgga

SEQ ID NO: 628136 - DNA, 100 bp, Homo sapiens
aatattttgcactccagcatgccgatagttcaaacttctatatcacagaaaaggaaagtttatatggactataatgcaacgactcccctggagccagaag

SEQ ID NO: 628137 - DNA, 100 bp, Homo sapiens
ctgctagagcggcgaaccgtgggcagtgagatggactctcactctgtcgcccaggctggagtgcattggaacgatctcagctcactacaacctctgcctc

SEQ ID NO: 628138 - DNA, 75 bp, Homo sapiens
attgagcctcaaaatgaagatggcacatggcccaggcagaccttgcagtcaaagcagttgcagtggtgcagaatg

SEQ ID NO: 628139 - DNA, 101 bp, Homo sapiens
cagaggctgttggcgttgatatcagtggcaggtttatgacctcaggaaagtggatcctcacaaagctacaagaagcaagagaaccttctccgagcctctga

SEQ ID NO: 628140 - DNA, 75 bp, Homo sapiens
tgtcaacaagaagagcagttcccaggatctgcataaagattagtgacaagagctggggttaggatccggttggac

SEQ ID NO: 628141 - DNA, 100 bp, Homo sapiens
agctgctccacatcaccgacatgaagggaacaggcatcatggactgtgcgcccaagtataaccccgttttcacacgaatggccccttcacatatttgaag

SEQ ID NO: 628142 - DNA, 83 bp, Homo sapiens
ggataatggagcttacaacgccaaaatcggttacagccatgaaaatgtgtcgagacccgatatatctgagatagaagaggcca

SEQ ID NO: 628143 - DNA, 73 bp, Homo sapiens
agacaaccgccctgtgagcttctacaattaatatgatcctctgttgaagcaagaagacaaactgtatggtgga

SEQ ID NO: 628144 - DNA, 50 bp, Homo sapiens
accttattttcctaaggatgagaatcaggaaacccaggcccaacggcagg

SEQ ID NO: 628145 - DNA, 76 bp, Homo sapiens
cgcaggattataatatgctttctgatgatgcccgtctcttcacagagggctctctaaatacgtacagattctgcga

SEQ ID NO: 628146 - DNA, 74 bp, Homo sapiens
tgacgtgtcatttctaagtactttctcctactccataaagacttcaagtgatgagacaaaccatgcttctgcca

SEQ ID NO: 628147 - DNA, 50 bp, Homo sapiens
aagatgccttctcagtcagttgagatgttttctggcaaaggccttcctgc

SEQ ID NO: 628148 - DNA, 100 bp, Homo sapiens
caacaagtccacaacctgcttctcacctacctgatagagaaggtgttcgccagcctcccgcaggtggagaggggcgtctccaagatcatcggcggcgacc

SEQ ID NO: 628149 - DNA, 88 bp, Homo sapiens
attcatgctctacatccccatagagttgttgtggaattataagctgaacctaactacagatcccaaatttgaatctgtggccagagag

SEQ ID NO: 628150 - DNA, 75 bp, Homo sapiens
caggaacgctccgtctggaacggcgcagatgtggagagattatccccaaaagagaacagtttaatgacctctcta

SEQ ID NO: 628151 - DNA, 100 bp, Homo sapiens
atggccccatggtgacggtggccctgtcagtggctctcttggccctcctgaaatgtacaaggcgagtggataattccaacacaagactggcagtccaaat

SEQ ID NO: 628152 - DNA, 50 bp, Homo sapiens
acggggctccgggccctaaggggcaccgtctgcgtcctgctgtccttccc

SEQ ID NO: 628153 - DNA, 75 bp, Homo sapiens
aggaacctagtaaaaagggagcacttaaggaagaatgtagccatagctgtaacgtataaccatgatgggtcttat

SEQ ID NO: 628154 - DNA, 51 bp, Homo sapiens
aaggattccaagtaactcttatttgactgattcttccagaccagagtttga

SEQ ID NO: 628155 - DNA, 98 bp, Homo sapiens
tgatggggctgatcttcgccaaactgtggagcctcttctgtaaccaagagccatccaaaactctgtttgtcaaaggcctgtctgaggataccactgaa

SEQ ID NO: 628156 - DNA, 74 bp, Homo sapiens
gaaaaactgcagtccaatcctctacagcatctctttgaagtgactattatatggttaaaaagattttggaggaa

SEQ ID NO: 628157 - DNA, 74 bp, Homo sapiens
ctgggaaacccacaggaggcaaccacactagtttaggtcaagtttacccatgggggaactggttccagccaaac

SEQ ID NO: 628158 - DNA, 100 bp, Homo sapiens
cagctttatgaaacagcttgcttcctacaggtcaagaaagtagtgaagactgtgacaacacggacagtacagccagtcgctatgggaccagacgggttgc

SEQ ID NO: 628159 - DNA, 100 bp, Homo sapiens
gatcaaatggcacttcattggccacctacagaaacaaaatgtcaacaaattgatggtgttggctgcaccaattctagaagtaagctctccaagttcagac

SEQ ID NO: 628160 - DNA, 100 bp, Homo sapiens
tgaaaacacgtggatcggcctgaacgacaggatcgtggagagagatttccagtggacggacaacaccgggctggccagcgatctgtacatgagacccagg

SEQ ID NO: 628161 - DNA, 100 bp, Homo sapiens
cccacagaccctggaagaaagcccctctcacacagggtgaggacgcttgagcggaagttagaagcaaaaatgatcaaggaggaaagcgactaccacgacc

SEQ ID NO: 628162 - DNA, 83 bp, Homo sapiens
aagagatggaggtgtccctggccaagcccaagcaccgcgtggcaccgttcctgccttgggcgctcatgggcttctcgctgctg

SEQ ID NO: 628163 - DNA, 134 bp, Homo sapiens
agttcagcttccaaagagatacagggcagaggaaaatgcaagaagactgatggagcaggcttgcaatattaaaatggactagaggcttttaccagatttcttaaaactgaattcagtgaagaaaatattgaatt

SEQ ID NO: 628164 - DNA, 82 bp, Homo sapiens
tgcatggcctgcagctcaagatgagcatcttgcaaccctgtattcagtggatcagctggcaccacccaaatagataaattgg

SEQ ID NO: 628165 - DNA, 75 bp, Homo sapiens
gggggcctcaagctgtcccaggacatggacacctgtgagccattgagacccagagcagcagttctgaagagatag

SEQ ID NO: 628166 - DNA, 82 bp, Homo sapiens
ggacagttagtcacccacctacatgttgaggagtccatagaggccactgtattctattgaagaacatgtctaacagtaacac

SEQ ID NO: 628167 - DNA, 100 bp, Homo sapiens
cctgccctgagctgccaccgggaagccagcctcagggactgcagcgacccccaaacacccctcccccagcccctaagacttgcagccccaagcagtttgc

SEQ ID NO: 628168 - DNA, 86 bp, Homo sapiens
gactggtgggtgctgtcaaccaccaccaagtcctgctgttctttcccaagatggatgaattgcagttgttccgaggtgacacagtg

SEQ ID NO: 628169 - DNA, 100 bp, Homo sapiens
ctttgacttcactcatccctgcgaccatgaggagattcgtgagaacctgagtctcaaaaatggaattattttaggaccaggaagcagcacgctgtttatt

SEQ ID NO: 628170 - DNA, 98 bp, Homo sapiens
ctggacctgcggccgcccgtgtgtgacgtcaggattcatcaaacgtgaggaagcctttggaaaccgggcaccgttgttccagctcctcttccctccct

SEQ ID NO: 628171 - DNA, 99 bp, Homo sapiens
tgaggatgaagattcaccaaataagctatatactttggttacctatgtacctgttaccactttcaaaaatggtcatccagactcagagctctctctaca

SEQ ID NO: 628172 - DNA, 75 bp, Homo sapiens
aatttttggatgatgatggatccatttctcctattgaggagtcaacggcaagaagtacaagcccctggacctgcg

SEQ ID NO: 628173 - DNA, 75 bp, Homo sapiens
ggtggtcccggaacctctcgtaaaccaggacagtatttatgatgaaatggaagagaagtggtcaaaacagaaggc

SEQ ID NO: 628174 - DNA, 75 bp, Homo sapiens
caaaatttctccataagcatgatttggatcttatatgtagagcccatcagtttcttaaacaattaggtctacatc

SEQ ID NO: 628175 - DNA, 82 bp, Homo sapiens
gccctgaccgagacctgggccggttaatgatgaaatggcaggtaattcacacttttggacagagcgcaccgcccccgtggaa

SEQ ID NO: 628176 - DNA, 83 bp, Homo sapiens
cattgctgagccagcggagctgcttggggctcacaacgaagtaagacagtagatgacaattctgcaaagcagactgcgcacaa

SEQ ID NO: 628177 - DNA, 75 bp, Homo sapiens
aaggaccggatcctggagaacatctcgctgtcggtgaagaaggtactggttttggattaggaattgttttctcac

SEQ ID NO: 628178 - DNA, 87 bp, Homo sapiens
taaaggaagcagaaaatgtgtggcggattactgggacagatggaactgtggctgcaccatctgtcttcatcttcccgccatctgatg

SEQ ID NO: 628179 - DNA, 100 bp, Homo sapiens
cgagaccgtgaccgagagcgtgaccgagagcgcgaatatcgtcatcgttagaaggttagcactctacgtatatgaatatctgctccatgtaggagctcag

SEQ ID NO: 628180 - DNA, 98 bp, Homo sapiens
caaggaaaatggattcagtttgcatctctccctcctttaaacagcttctccgggtctcagcatgacccaacatgagtgaagtttcctgcaagaaacgg

SEQ ID NO: 628181 - DNA, 145 bp, Homo sapiens
gacggggggactggccacatccctctgaaggagatgccggccgtgcagctggacacgcagcacatggctttatcttcaagccaggatgaagggagactgggcaagactcttacgccccacactgcaatttggtcttgttgccgta

SEQ ID NO: 628182 - DNA, 90 bp, Homo sapiens
gttgttgtagtggttttgggatatgtttacagagcaaaggtgttgtcctacatcaatggggtcacaacaagcaaacctggagtatccttg

SEQ ID NO: 628183 - DNA, 101 bp, Homo sapiens
acacgacatgttcatggacatggccatgctcgtggagagccagctttggcctatggtatcggggtaaagctgaatcctctgaggatgagaccagcagccct

SEQ ID NO: 628184 - DNA, 80 bp, Homo sapiens
gcccggaagctggtggaacagctacgcatagaagccgggattgagcgcatcaagccttatgccagcctggaccatcttgg

SEQ ID NO: 628185 - DNA, 75 bp, Homo sapiens
aggggaagagcaagatgcagtcagtggagattgggctaatggatactacagacaacagagaaaacttgttgaaga

SEQ ID NO: 628186 - DNA, 100 bp, Homo sapiens
tggcgccagcggtcaagagcgaggtcagcggggctgcgagcactatgacagaggatgtctcctaaaggaaagatgaatgggagggctgattttcgagagc

SEQ ID NO: 628187 - DNA, 100 bp, Homo sapiens
cagatcgggatttacgtggagatcaagcgcagcgatggacacagcaggccaggaaagatacaggactatcaccacagcctattatcgtggagccatgggc

SEQ ID NO: 628188 - DNA, 75 bp, Homo sapiens
ctgaggaaggaaaatggagcccggagcttcctgtctgtgctcgtgaaatacatatgggaggtcaagaacattttt

SEQ ID NO: 628189 - DNA, 100 bp, Homo sapiens
ccactgctcctactgtgataagtccttccggcagctctcccacctccagcagcacaccagacctgcctagagctggaacgttacctccagagcgagccct

SEQ ID NO: 628190 - DNA, 75 bp, Homo sapiens
cacggtccaagtcccagcccaagaaagaaatgaaggctaaatcacgttctaggagttggtggtgaccccgcccag

SEQ ID NO: 628191 - DNA, 116 bp, Homo sapiens
gtttccctttaagcactacttttgcctcatcctacaaattttgaacgtttattgaagatgaccttagaagagagacgcaaagaatacctaagagactatattcccctgaacagcat

SEQ ID NO: 628192 - DNA, 73 bp, Homo sapiens
gctggagagggggcgctgagctgttgggcacacaagagtcagaggtccaactgctacagaatgccaaacgttt

SEQ ID NO: 628193 - DNA, 100 bp, Homo sapiens
acaaagctgatttctgcattatccactatgccggcaaggtggtacggcccctccggacctttctgcacacagtgcagaggaaccagatgctcatgacccc

SEQ ID NO: 628194 - DNA, 75 bp, Homo sapiens
tgcctgtcgaatgccccccagccaccagctcgaccacagcaagctcctgggggctgcccttgagatggagttgct

SEQ ID NO: 628195 - DNA, 74 bp, Homo sapiens
gagcagagccaggcagaaatttatcataaccggtttgatgctgtgggtatgagtattatagaacaattagaccc

SEQ ID NO: 628196 - DNA, 100 bp, Homo sapiens
ctggagccgaggcgcaggtggcgctgggtggccatggtggaggtgcagctggagagtgaccacgagtacccaccaggcctgctggtggccttcagtgcct

SEQ ID NO: 628197 - DNA, 50 bp, Homo sapiens
caccaaagacctgcgactttgctcagtattctaccttgtaaatactgtta

SEQ ID NO: 628198 - DNA, 80 bp, Homo sapiens
accatcccactgcctgttgttgaacaaagggaccccggtgaaacagtaggtggagatgagattgtgatggtcatcaaaga

SEQ ID NO: 628199 - DNA, 96 bp, Homo sapiens
accaaggatggcgtggtggagatcaccggggcaccacttcacaggccacagaagccccgagaaggagcctgggacatggaggatgtggcccccaca

SEQ ID NO: 628200 - DNA, 100 bp, Homo sapiens
aaaaggttgtgaaaccttttaactctccacagtggagtccattatttcctctggcttcctcaaattcatattcacaggcttattgtgtaacagaacctgg

SEQ ID NO: 628201 - DNA, 87 bp, Homo sapiens
gaacctgttgccagatggtgcaatgttcaaagtactcaagatgaatttgagttggaaaatggatataccttatttgattatgatgtt

SEQ ID NO: 628202 - DNA, 88 bp, Homo sapiens
ggtgttggcaaaaccaccacagcttccctggtgtgtcagatgaggtggaggaccatcctgctacagtattgctttctcttgattacat

SEQ ID NO: 628203 - DNA, 75 bp, Homo sapiens
aaggggaggggagtggaaaggctctcagtgaaaaaggtgtgatgaatgcagactctgctaccattttggctgttt

SEQ ID NO: 628204 - DNA, 49 bp, Homo sapiens
ctcccgtgtagctgggattacaggcgtgatgtgggcctttttggggtgc

SEQ ID NO: 628205 - DNA, 100 bp, Homo sapiens
ctgaggagatgttcagggaggtcaagtattacgcggtgggcgacatcgacccgcagggtgttcctgaaaagccccatagtgattgagtcttcaaaaccac

SEQ ID NO: 628206 - DNA, 100 bp, Homo sapiens
ctgctcctcctcgcctgcgaagcatcacgtccgcttcccgacgctgagggcagccccgtccagggaatgccgtcttggaagccgattttgcaaagagggg

SEQ ID NO: 628207 - DNA, 116 bp, Homo sapiens
gttagctgttgatgctgtaattgctgaacttaaaaagcagtctaaacctgtgaccacccctgaagaaattgcacagttagttgatactactgtggagttggcaaacaaagtaggtg

SEQ ID NO: 628208 - DNA, 82 bp, Homo sapiens
tctgaaggcgaacgcttcgctggccatttaggagctctgctcaaagccagacggtgggcaccatgtccttgaagcttcaggc

SEQ ID NO: 628209 - DNA, 82 bp, Homo sapiens
agcccagctgcctggatgccttcccaaacctgaaggacttcatctcccgatttgaggagtctcgctctcagtcaaaatctcc

SEQ ID NO: 628210 - DNA, 100 bp, Homo sapiens
tctgagatatgccgtttacgggtcagtgtggagtatacagagaagatggtgtccatcagtaactaccccctttctgctgccctcacctgtgcaaaactta

SEQ ID NO: 628211 - DNA, 76 bp, Homo sapiens
tcaagaggagcaacctcgtcagcagcgaggaaggaaacagcgcgcccttgtggatgaattaaaggagagtatattc

SEQ ID NO: 628212 - DNA, 75 bp, Homo sapiens
gggctgctcatctctgtgatcaggaccctaataggagtattcataccagcagcagcagcagcagcagcagtagca

SEQ ID NO: 628213 - DNA, 106 bp, Homo sapiens
tcggagctcggcaggaagtgggaccggtgtctggcggatgcggtcgtgaagatagacaatgcagatcttcgtgaagactctgactggtaagaccatcaccctcgag

SEQ ID NO: 628214 - DNA, 75 bp, Homo sapiens
gcaggagaagcccccagaaccaggcccccaactcagccatctgcggaggtcaagctgtcaccactgactaaagaa

SEQ ID NO: 628215 - DNA, 50 bp, Homo sapiens
gaaaccagcacagactgtgacgggaggcacaacctcacggtgagagcagc

SEQ ID NO: 628216 - DNA, 99 bp, Homo sapiens
gttccccgccaaccgcaaccattgacgccatgtcgggttattcgagtgaccgagaccgcggccgggaccgagggtgccaacatcgcctctggtgaggaa

SEQ ID NO: 628217 - DNA, 100 bp, Homo sapiens
gcataggtcccggttggtagagggtttgagtccgcatcgccacagctgaaggctgcgagggactaagagcagattgttgacctcctgtactggagagaca

SEQ ID NO: 628218 - DNA, 90 bp, Homo sapiens
gtttaatgactttggtgccctcaacatctctcagagacgaaaggcagtcgatgatgtgaagaaaggttacatcaaagcagaagaaaagtc

SEQ ID NO: 628219 - DNA, 82 bp, Homo sapiens
gagcggagcagctgcgccacgggagtgcatccgccccaacccttttccccctcgtctcctgtgagaattccccgtcggatac

SEQ ID NO: 628220 - DNA, 141 bp, Homo sapiens
cgccatgggcctcactatctcctccctcttctcccgactatttggcaagaagcagatgcgcattttgatggaggctccagcgggagaagaagcccaataacttgaatgacaccatcaaggagctgttcagagtggtgcctg

SEQ ID NO: 628221 - DNA, 82 bp, Homo sapiens
gcgagccgtgcgatctggacgcggcgctgctgaccgacatcgaagatctctggaaacatggctacagaacatgttaatggaa

SEQ ID NO: 628222 - DNA, 74 bp, Homo sapiens
gcctcggtggttgccatggcaccagggacggtgactgtggttaagcaggccgcattgacaggaagattgagttc

SEQ ID NO: 628223 - DNA, 100 bp, Homo sapiens
tacatcaaggagttggtgaatgatatcaggaagttctcccacatgttactatatttgaaagaagccatattttcaggaaagaccacagcaagattctttc

SEQ ID NO: 628224 - DNA, 50 bp, Homo sapiens
gaaagtgcgattgtggaagctgctcgggccctggccaacgtcaacattgg

SEQ ID NO: 628225 - DNA, 100 bp, Homo sapiens
acctggtgtttggacttcaacttagcatggctagaatttatatttaaagttggagttcgttgctaaagatggcagacccagatgtcctcactgaagttcc

SEQ ID NO: 628226 - DNA, 50 bp, Homo sapiens
acccagactcatgtagcatctgccccaggacagttctttttactctgacg

SEQ ID NO: 628227 - DNA, 75 bp, Homo sapiens
ggccacgagttcctggagtttgagtttcgaccggacggtatccacaaattacccattatcaaaaacaaatagttc

SEQ ID NO: 628228 - DNA, 100 bp, Homo sapiens
agatctccgaccagtctgggggcgctggcggcctgcgcagccacctcaagaccaaacggaccctgtgagcatggggctgccagtgaaaggaggatgcctg

SEQ ID NO: 628229 - DNA, 96 bp, Homo sapiens
gatctatcttcagaacggacaagcagaagaagaaggtgtactcctttctattttaaagagccaagcctcagagacacatagattttcctataccat

SEQ ID NO: 628230 - DNA, 83 bp, Homo sapiens
cccgggagtaggagactcagaatcgaatctcttctccctccccttcttggcctgtctccactaactctggaccctaaaacagc

SEQ ID NO: 628231 - DNA, 112 bp, Homo sapiens
gcgggactcttggcctgtccctcacatccgatgcaccctttttgtcagattatcaggatgagggagtggaagctggacacactatgtgacttgtatgaaaccctgaccatca

SEQ ID NO: 628232 - DNA, 135 bp, Homo sapiens
gaagtcggggaggagtttcatgaagagcccaaaacctattacgaactcaaaagtcaaccgctgaagagcagattctgaaagtcaagaagacatcatccggaatattgccaggcacctcgcccaggtcggggacag

SEQ ID NO: 628233 - DNA, 75 bp, Homo sapiens
ttgttcttcgtgtatggagcataacctgaggaaacatggtagaatggtgcttacctcaagatattgaccttgaag

SEQ ID NO: 628234 - DNA, 102 bp, Homo sapiens
cccgccaaccgcaaccattgacgccatgtcgggttattcgagtgaccgagaccgcggccgggaccgaggatatttggagttcttacaacatggcagacattg

SEQ ID NO: 628235 - DNA, 74 bp, Homo sapiens
agatgataaccaaaaaccacctgtgggtgaagggctaaatagttagttgaatccatggacatgaaacccacaga

SEQ ID NO: 628236 - DNA, 74 bp, Homo sapiens
gaaattcactggggtgtcactttcactggcctccagccccctcctaggaaggcccttcagatatttcaacactc

SEQ ID NO: 628237 - DNA, 97 bp, Homo sapiens
tctgaagaagtggctgtagggagcatagctgctacactgaagatgaagcaaggcccaatgacccaggcggaaatggccaaggaggaccctgtttgcg

SEQ ID NO: 628238 - DNA, 98 bp, Homo sapiens
atggcgtcccgcggccggcgtccggagcatggcggacccccagagctggatcacctgctgttaccagctaccacccataacaagaccacaagaccaaa

SEQ ID NO: 628239 - DNA, 82 bp, Homo sapiens
cttgcaatctgccaggacaaagacaatacactacgtgagccaccaaaaccctcaacaggggcatctctgagttcatcgtgat

SEQ ID NO: 628240 - DNA, 74 bp, Homo sapiens
acccttgtagagtcattcctgcctttgagcggactcccttttaaggtgctggagaatctggtaaaagcaccatt

SEQ ID NO: 628241 - DNA, 73 bp, Homo sapiens
actcaagtcaccgtggagctccgccgccccgaaactttcaccgcgagcgggaatcccagtcagaagttccagc

SEQ ID NO: 628242 - DNA, 75 bp, Homo sapiens
gcttccatacgtgtctcagacaggttatcaatactctggctgaccatcatcatcgtgggactgactttggtggaa

SEQ ID NO: 628243 - DNA, 98 bp, Homo sapiens
aaagatgatgatatccttctcaaccttgtgggatgtgaaaactctgttactgaagaagctgcacacatacatgtaagagaagcaaaaatgtcagatga

SEQ ID NO: 628244 - DNA, 100 bp, Homo sapiens
cccgcaacaagttcaaccaggtggagagtgataagcttcgaatggacagagccatccctgacacccggcatgaccagaactgtggctgcaccatctgtct

SEQ ID NO: 628245 - DNA, 96 bp, Homo sapiens
ggtagaggcagtggcgcttgagttggtcgggggcagcggcagggaacagaaagaacagcttcaaaagatgaaagacttcgggtctgagccacagat

SEQ ID NO: 628246 - DNA, 100 bp, Homo sapiens
gcagagtttgcagccaaatttattgtaccttatgatgtgtgggccagcaactacgtagatacctatgaggaccagcacagcagtgaggaggaggaggaag

SEQ ID NO: 628247 - DNA, 95 bp, Homo sapiens
ttctcgaaggcccgcggcgccccgtgctgcaggactcaagagtagccttcctcgaggacctgcctttcccatttgctgcctgaagttaatgtttc

SEQ ID NO: 628248 - DNA, 90 bp, Homo sapiens
cctcaaggaagactaaccatctgcaatactagaagccatggctgaggttcttgggtgtctctggggagtccctgggccagaccttcctcc

SEQ ID NO: 628249 - DNA, 82 bp, Homo sapiens
aacggcgagagtgggcgagaacgtccactgcgggccggcgaaagctgggagcatcgagtacagctgtccggcctccaacgag

SEQ ID NO: 628250 - DNA, 97 bp, Homo sapiens
aataaaactggaagcagattttgaaaccgatgagaagattgtaaaatgtaccgagagacgagatttcaccgtgttggccagactggtctcgaactcc

SEQ ID NO: 628251 - DNA, 50 bp, Homo sapiens
gacccggagcgcacaaagcacagtgcaaaatgcaaatgcaagtttggcca

SEQ ID NO: 628252 - DNA, 90 bp, Homo sapiens
tgttatctgcttctatttggaggctggggacctctcaaagaaatatggctacacacacctttctgcaggagagctgcttcgtgatgaaag

SEQ ID NO: 628253 - DNA, 75 bp, Homo sapiens
cagcgcgcccgtggccgctgccgcctccgccccagacacgatgaggcgagtggtacgacagagcaagtttcggca

SEQ ID NO: 628254 - DNA, 75 bp, Homo sapiens
tgccaggccctgccctccgagggcttcagtctggagccgcccagagcacttgcacctcctgcgccgccgcccccc

SEQ ID NO: 628255 - DNA, 75 bp, Homo sapiens
ctgctgtttggaaaggtggcaaaggatagcagcagtgagtgagatcattggccgagacctgagtggcttccctgc

SEQ ID NO: 628256 - DNA, 90 bp, Homo sapiens
gctcgaggtggactatgaggctatccgcagcgagatggagcagctcaaggagatgcagaatcctgatacactatcagcaatgtcaaaccc

SEQ ID NO: 628257 - DNA, 101 bp, Homo sapiens
atgccttgaactactggctgaccatgtttcgaatcaggcgggggccggccccagcccagactggaagatgagattgacttcctggcccaggagcttgcccg

SEQ ID NO: 628258 - DNA, 100 bp, Homo sapiens
tgccccaaatgctgcagcatcaagcccgaccgagcccaccactgcagggacttgccatgaggtgttgaagccttgtttcactgagttggagagactggac

SEQ ID NO: 628259 - DNA, 82 bp, Homo sapiens
tcttcatcatcagcctgagcctactgatcggcgtagtcaagatcgtcagtatttaaacagatcacatcatgcgtgagtacaa

SEQ ID NO: 628260 - DNA, 83 bp, Homo sapiens
ttccccctcggaaaatggttcccactgccgggcgagggcgaagctgtgctcaggcccgggctggacgcagagccagagctgtc

SEQ ID NO: 628261 - DNA, 100 bp, Homo sapiens
gcttctttcttctggcatcattaacggaccttttaccatgaatagttctactccttctacaggtctcagcatcagaggagcccaggaggaggaccctccc

SEQ ID NO: 628262 - DNA, 97 bp, Homo sapiens
tgcacatgtctgggaggataattgggatgatgacaatgtagaggatgacttctctaatcagttacgaccatacccttttgtgttattctactctaaa

SEQ ID NO: 628263 - DNA, 98 bp, Homo sapiens
gcgacctcaagaagcagctccacgaaaggcagccgcggatcgccgcgctcagcgacaaacaagctctacagattctcccctgcccctggagaaggagg

SEQ ID NO: 628264 - DNA, 90 bp, Homo sapiens
tacaaacataggatgttttggcgagagatgtattcagtggaggaagctggtaacctgtctggtcagagtgcagcttcagtcttgcacccc

SEQ ID NO: 628265 - DNA, 100 bp, Homo sapiens
ctaggccaagtccaggggcgtggaggccgcccgggagcggatgttcaatggtgagaagatcaactacaccgagcgtgagtgcatctccatccacgttggc

SEQ ID NO: 628266 - DNA, 122 bp, Homo sapiens
gatcatgagcatgatctggaagcggctcaatgaccatggcaagaactggcgtcacgtttacaagacaatgcagatcttcgtgaagactctgactggtaagaccatcaccctcgaggttgagc

SEQ ID NO: 628267 - DNA, 83 bp, Homo sapiens
cgcagactccttctccagcatgggctcgcctgtcaacgcgcagatggcaggcagcagattctgagtttgggcatggacctgca

SEQ ID NO: 628268 - DNA, 96 bp, Homo sapiens
gaaaatccatgctggcgatgaagtgattcaagttaatcatcagactgtgattttagggaacccagcctctgcaggacgggtggatcacatgggccg

SEQ ID NO: 628269 - DNA, 90 bp, Homo sapiens
tgcacaggagagctgctaaaaattactgcggtgaacaggcgtgccgccgccagacggattactggcagttcgtgaaagacatccggtggc

SEQ ID NO: 628270 - DNA, 75 bp, Homo sapiens
tgaagatcctggtgtcgccatgggccgccgccccgcccgttgaagaaaggtgagcagccaacaggccagcagcgg

SEQ ID NO: 628271 - DNA, 82 bp, Homo sapiens
cacagaaattgtgacaaatttgaagtgaatacacagagcgtggcctacttagcagggactttccctgtggaccttaccaaaa

SEQ ID NO: 628272 - DNA, 75 bp, Homo sapiens
ctgctcttggctctcaacttattcccttcaattcaagtaacagaatatgtttcgacagcaacaaaagattcttca

SEQ ID NO: 628273 - DNA, 80 bp, Homo sapiens
caacatcctcctggccaccgactcctacaagcattactctactgactggcagagacaggagaggtagatgtccacgccca

SEQ ID NO: 628274 - DNA, 75 bp, Homo sapiens
cattgctgcatcaagaaacccaagctgctgagctttctaagaagtatggagtacatgtttgtggagaaggtggag

SEQ ID NO: 628275 - DNA, 102 bp, Homo sapiens
atctgcacttcgcattttggcattgacatttaattttagggtcctttatatagaagggagagtaggagccaaggcaaagagggaccactgtgctcatggacc

SEQ ID NO: 628276 - DNA, 100 bp, Homo sapiens
atactattattgctgcagcggctgtgaaatttaattcagatcagcttaatcatttgtttgttctcattcagaagtatattatttccggatcactcctggc

SEQ ID NO: 628277 - DNA, 100 bp, Homo sapiens
tgattttgtttcaactgccaagtatcggctatgcctccgttgtaattgtgtccctcctgaatgtctactacatcgtcatcctggcctgggccacatacta

SEQ ID NO: 628278 - DNA, 100 bp, Homo sapiens
ccagcctctgcttggcatccccttgctggacagtggctgtgggtgagaaaattcatgaagacatctttgacatcatagaccgagaagcagatggaagtga

SEQ ID NO: 628279 - DNA, 75 bp, Homo sapiens
aatccagccaaatacaactggaaaacagctttttgatcaggaactgtggctgcaccatctgtcttcatcttcccg

SEQ ID NO: 628280 - DNA, 100 bp, Homo sapiens
ctgaaaccggaccctgagccagatgacaagaatcaagtgttccttgcctgtatctccccttggttcaatagctaccagatttttggaagaggaggaactg

SEQ ID NO: 628281 - DNA, 90 bp, Homo sapiens
gtttctctccctctgcccccccttccccacgcaaccccagatccatttacactttacagtgaccatggaggaagaagatgagtctcgagg

SEQ ID NO: 628282 - DNA, 99 bp, Homo sapiens
cgaagaccagttcattcttagtgtcttctgaaataaaattaggtgtttaaaattatccaactgccatagagctaaattcttttttggaaaattgaaccg

SEQ ID NO: 628283 - DNA, 98 bp, Homo sapiens
ggagaagcacggagttcgggggatggcacagaatgggcagagcatcctggccagaacaagccaaggagccaagacgagagggacacacggacaaacaa

SEQ ID NO: 628284 - DNA, 90 bp, Homo sapiens
ctgaaaaggaagttttctggaatgggggcaccaccacgaggcgatttgtgggccataccaaggatgtgctgagtgtggccttctcctctg

SEQ ID NO: 628285 - DNA, 100 bp, Homo sapiens
gtttttaatgaccacaacaagcaagcatgcagcttactgcttgaaaggttgggataattcttcactattccacccttgccacagtactatgggtaggagt

SEQ ID NO: 628286 - DNA, 100 bp, Homo sapiens
tcaaaatacttgctggatggtggactcagagaccaataaaaataaactgcttgaacatcctttgactggttagccagaattctgcttggtcagaatcgtg

SEQ ID NO: 628287 - DNA, 90 bp, Homo sapiens
cgactccttgacaaactctccgagggacagtcctgccgtctccctgagtggaatccctttgcccacgtccagctgaagccgacagtgacc

SEQ ID NO: 628288 - DNA, 100 bp, Homo sapiens
attgggaccagacagttgagacagcacaaaggagattacctggggcaattgatgttatcggtcagactataactatcagccgagtagaaggcaggcgacg

SEQ ID NO: 628289 - DNA, 80 bp, Homo sapiens
ccggtgtctgctcctgtcgccttcgcctcctaatccctagccactatggccgactcgcgggccgctgcacccaccgccaa

SEQ ID NO: 628290 - DNA, 100 bp, Homo sapiens
gtgagcaccacatccacgtgcaggtcgcaggcttcatcatgtcctgaataccatgccttagcattttatagtgttgcggagataggaacatgggagagaa

SEQ ID NO: 628291 - DNA, 100 bp, Homo sapiens
cgggtggtactggtggccgtggacaagggcgtgttcgtgctgaataagaagaacaaactgacgcagagtaagtgtccctttaaaaaatcaaagccgcacc

SEQ ID NO: 628292 - DNA, 100 bp, Homo sapiens
aaaaacttcttgccaaccaaacaacccgatagcagaagggtcaactcttctgttggattttctgttttgcagcatacaagcaatgacccatattgctttg

SEQ ID NO: 628293 - DNA, 75 bp, Homo sapiens
aagaaaccagagtcatttttcactcaattcgatgctcgtgagtgcatctccatccacgttggccaggctggtgtc

SEQ ID NO: 628294 - DNA, 71 bp, Homo sapiens
tctttcctactatcatcaagataaggaggacatgtctcaggaaggctatggaactagatctcaacctcctc

SEQ ID NO: 628295 - DNA, 75 bp, Homo sapiens
tgttctttgctgaattgccacacacagaaaaatatccttgtggattatggactccgacgaatcacattcttgatt

SEQ ID NO: 628296 - DNA, 90 bp, Homo sapiens
acctggggatcgctacggaccttaaaatacccgcaacagccccttcgtcccaaccagagactgctgctactttgaaacgtacgatagagg

SEQ ID NO: 628297 - DNA, 75 bp, Homo sapiens
ctgtcagttgacctaccccttgcacacctaccctaaggatgaacgtgaagccagagaaaatgtgaagagagagca

SEQ ID NO: 628298 - DNA, 95 bp, Homo sapiens
aaagccaatgaccgtgaatataatgaaaagttccagtatgcggactggaatgtcacgtggaataccagcaaccccgacttcaccaagtgctttca

SEQ ID NO: 628299 - DNA, 100 bp, Homo sapiens
cttgtggagagctcgaattccagaatgatgaaattgtggcgatgccagtccctccactccagaggagaacgaaaccacgacaaccagcgccttcaccatc

SEQ ID NO: 628300 - DNA, 98 bp, Homo sapiens
atgctgtttgccctgaacatcatgaattcccaagaaggagggtctcttgcaacgtgtgagctgcctcttgccaagagtgagtggcaaaagaaactaac

SEQ ID NO: 628301 - DNA, 100 bp, Homo sapiens
gaaataaaaacagaacaggaggtggtagagggcatggatatctctactcgctccaaaggagctgcagaggctggagacagagttgggccaacccgctgag

SEQ ID NO: 628302 - DNA, 50 bp, Homo sapiens
cagacaactgtcctgacatgctgaaatctggcattttttaaagtttgcgc

SEQ ID NO: 628303 - DNA, 50 bp, Homo sapiens
caccccgccagctccagagccacgtttgaagaagaactgaccagcaagtg

SEQ ID NO: 628304 - DNA, 83 bp, Homo sapiens
ccaagagcaaggcccggcgtgaggaggaggaggagggatgtaatccctgttcattactacttaatacctccaccaacaaagac

SEQ ID NO: 628305 - DNA, 100 bp, Homo sapiens
gtggaaagaagttgcaaaacactgggagaaggaagccaacatccttttggagccatgaatattgtccgaactccatctgttgctcagattggaatttcag

SEQ ID NO: 628306 - DNA, 88 bp, Homo sapiens
cgcctgtctcttccgggctgtagacacgatgaggcgagtggtacgacagagcaagtttcggcatgtatttgggcaagcggtgaaaaat

SEQ ID NO: 628307 - DNA, 83 bp, Homo sapiens
cccatttcgcccctcgcgtccggagtccccgtggccaggtgacggcaattgcctcatgcatgccacttctcagtacatgtggg

SEQ ID NO: 628308 - DNA, 100 bp, Homo sapiens
gctcaccttagccccgcgcccgagggacccagacatggagctgcgggaagaagcctggtctccggggccgctggattctgaggaccagcagatggccagt

SEQ ID NO: 628309 - DNA, 100 bp, Homo sapiens
cagggccctccagactcaggcgccccaacagtttgtttggcagctgtgggcttagtgggagacttgtgccgtgccctgcaatccaacatcatacctttct

SEQ ID NO: 628310 - DNA, 74 bp, Homo sapiens
gactactctcagcctactatctgtctggagaagagctgcagaagaaagatcagcaactggagcctaaaaaaagt

SEQ ID NO: 628311 - DNA, 100 bp, Homo sapiens
cggtggacttggtctggagcatcccggattgcttctcgcacctgtctggcacctagtttccgttactatggcaatgacggcagggactacaacaaccttt

SEQ ID NO: 628312 - DNA, 124 bp, Homo sapiens
agcagctaccatggcccaggtggccggcgcggcgttgtcccaggcgggttgtactatactggcaattgctggagaagattttgcaattgttgcttctgatactcgattgagtgaagggttttca

SEQ ID NO: 628313 - DNA, 100 bp, Homo sapiens
tgctcttctccgccgcggcactgatccccacaggtcctcttcctgatggatgggaacaagccatgactcaggatggagaaatttactatataaaccataa

SEQ ID NO: 628314 - DNA, 95 bp, Homo sapiens
ctgagggtctcggggcgggcgccgcgggacctctccgggccatggatctattaatgagatgaagcggttggaagaaatgtcaaatatgtttcaga

SEQ ID NO: 628315 - DNA, 50 bp, Homo sapiens
catcaccggagcgtcccagctgcgaggagagactctccaacatgtgcctt

SEQ ID NO: 628316 - DNA, 100 bp, Homo sapiens
agcagagcaggaatgtatcagggacagtggcggatgtgcactgctacaggactctactatggagtccaccaatcgattactttgatgtatttaaagaatc

SEQ ID NO: 628317 - DNA, 51 bp, Homo sapiens
gcctgtcatggaggccatcaagacttgaccccttatttgggatgtgtgaaa

SEQ ID NO: 628318 - DNA, 80 bp, Homo sapiens
ccttctggaagctactactacgtggtgcttggaaagattgtggtggtgccatgcagcaagaatcagagagatgcagagtt

SEQ ID NO: 628319 - DNA, 90 bp, Homo sapiens
cggcctcggcggctgaggaaagcaggaggaggtggcggcggcgggaagatgtgaacctgatgcagcacatgaagctcagcacctcacgag

SEQ ID NO: 628320 - DNA, 100 bp, Homo sapiens
tgcagcagaagctggtggaccagaacatcttctccttctacctgagcaggagcccgatggtgctggagccaagtccccgacatgccagaaactgtccccc

SEQ ID NO: 628321 - DNA, 76 bp, Homo sapiens
tgccagagattgctcaggaagcaatggaggataagttctgaacgtcgaaaagaaaagtctcgagatgcagccagat

SEQ ID NO: 628322 - DNA, 100 bp, Homo sapiens
gcctcccaagtagctgggactacagatacagatccacgggttttagaaaaacaagaattacagcagccaacctatgttgccctgagttacataaataggt

SEQ ID NO: 628323 - DNA, 75 bp, Homo sapiens
agatgctgcatccttggaataatgaaggagcaccacctgaagacaagcactaagtcaggagattggaaaagcaaa

SEQ ID NO: 628324 - DNA, 96 bp, Homo sapiens
ttctccatcctctcagtgtttcccgagcgcctcggcttctgccagcaccacgacgacgaggttccaaaacatttctgaaaagctgcacatggaatg

SEQ ID NO: 628325 - DNA, 101 bp, Homo sapiens
gcccagcgagcggccctgatgcaggccatcaagtgtgtggtggtgggagacggtaaaacgatgtttgcagaaatggaaatcattggtcagtttaacctggg

SEQ ID NO: 628326 - DNA, 82 bp, Homo sapiens
gccagggaaccctggtcaccgtctcctcagatatggctcgtggacagcagaaaattcagtctcagcagaaaaatgccaaaaa

SEQ ID NO: 628327 - DNA, 76 bp, Homo sapiens
ctgtgtggacatcggcatgatgaaggagtgaggtgctcctgtaccctggccacagcccaatcctgccactgctgac

SEQ ID NO: 628328 - DNA, 100 bp, Homo sapiens
tgctgtgtaatcctgagaatggactgcaagagaggaaaaactgggcgtctgcttgggaatctattgtggaaacccaggtacggcttcaggtccagagcgt

SEQ ID NO: 628329 - DNA, 50 bp, Homo sapiens
tgcagggccaggaggaacatgagaagtttccaagggtcacttgtgtctcg

SEQ ID NO: 628330 - DNA, 97 bp, Homo sapiens
ccctcaccctggagcgcaccatcaacctagctgcagctttggaacagttcaagtctcttggtgctgagcccttggaggtggacttgaaggaatctgg

SEQ ID NO: 628331 - DNA, 75 bp, Homo sapiens
ctacgtcagtaacagccaccaaggagtctactcttcatcttgtgttgagacttcgtggtggtgctaagaaaagga

SEQ ID NO: 628332 - DNA, 83 bp, Homo sapiens
ctttcactaaaattcttatggatgaggctgtgagtggctggaagtttgaaattcatgtatgttgagtcgatgggatgatagcc

SEQ ID NO: 628333 - DNA, 100 bp, Homo sapiens
ccgtcgttgctgccgggattttggaggccggggccgcgctgagggcgcccagctgactgtgccctgtccacggtgcctcctgcatgtcctgctgccctga

SEQ ID NO: 628334 - DNA, 109 bp, Homo sapiens
tcctgtatgaagcggttggcaccactgaagtgaccgaatgaggagtttccagatgtcttggaatgcactgtatctcatgcagtagaaaagataaatcctgatgaaagag

SEQ ID NO: 628335 - DNA, 75 bp, Homo sapiens
ggggctgctcccatcattgatgtggtgcgatcgggaggagatgaaagaggactgctaagcctcgcattccatccc

SEQ ID NO: 628336 - DNA, 100 bp, Homo sapiens
acagaaatgagatccgcttcctgcccaacgatgagttgaccgtgccccgataccgcacagagaagccctccaagtcgcccccaccgccccctccccgccg

SEQ ID NO: 628337 - DNA, 75 bp, Homo sapiens
gattatatcaactgggtccaacagcaggcctatggaatggtatccaaatatatcttgtgagttgctcacttctga

SEQ ID NO: 628338 - DNA, 50 bp, Homo sapiens
gcaaactccccatccagctccaggtggaacacctgcagcaggagactgct

SEQ ID NO: 628339 - DNA, 50 bp, Homo sapiens
cctcccaaagtgctggggttacaggagtacttcttgcaagcagagctgac

SEQ ID NO: 628340 - DNA, 96 bp, Homo sapiens
tgaacatgagcctcctcctctccttctacctgctggggttgcttgtcagtagcgggcaagcacttttcaggattagaagaggctgtgtatagaaac

SEQ ID NO: 628341 - DNA, 98 bp, Homo sapiens
gccctgtccagagcctccagggccctgcgccttgctccttttgtctaccttcttctgatccagacagccctgggcgctgcctatggcacagccaagag

SEQ ID NO: 628342 - DNA, 96 bp, Homo sapiens
gcatcccaggaaggggttcccagaagtcagaatccaagatgaattatatccagatcgagagacagaagattctgaaagggttcaatgaaatgagag

SEQ ID NO: 628343 - DNA, 78 bp, Homo sapiens
agggcccagaaaggggatagcaggaggaccctgatgctcccataagacagaaaatgccccttgatgatctggatagag

SEQ ID NO: 628344 - DNA, 75 bp, Homo sapiens
cccaggtttaagcagttctcctgcctgagcctctcggattacagggcatgagccagaaggagagctctaagtctg

SEQ ID NO: 628345 - DNA, 100 bp, Homo sapiens
caggaccgtaggatgatgtttcctccgccagatgccattctaaatatggtgaatattgctgctaatattctgggagcaaaaactgaagacctgacagaag

SEQ ID NO: 628346 - DNA, 98 bp, Homo sapiens
ggagtgtcaagaaggatggggagtggaaggtgattatcctgaaccatccaggccaaataagcgccggctatgcccctgtattggattgccacacggct

SEQ ID NO: 628347 - DNA, 51 bp, Homo sapiens
gcctcctgagtagccaggattacagagtttcgctcttcttgcccaggctgg

SEQ ID NO: 628348 - DNA, 101 bp, Homo sapiens
ccggcgccatgggccagtgcggcatcacctcctccaagaccgtgctggtctttctcaacctcatcttctgggccctggccaacgtcaacattgggagcctc

SEQ ID NO: 628349 - DNA, 82 bp, Homo sapiens
gggaagactcatcggagcgtgtggatttgagccgccgcattttttaaccctagatctcggctttatcctgtggataaacgca

SEQ ID NO: 628350 - DNA, 82 bp, Homo sapiens
ggacagtgaggagctgggtggtcccagcctggagctgtgccagcctgacatggaattcggttccctcaaaattataaaggca

SEQ ID NO: 628351 - DNA, 98 bp, Homo sapiens
gaaaaagccagaagagaaaacctatgccctgttcattggtgacacagtgcttgtggatgaggatggagatgaagatgaggaagctgagtcagctacgg

SEQ ID NO: 628352 - DNA, 83 bp, Homo sapiens
agtctgaattctgtggattttcgtctaaaaataacaagaatgggaggagaaggggcaaaaaagtttatcttctggatgccaat

SEQ ID NO: 628353 - DNA, 100 bp, Homo sapiens
tgtggacgataattcaaaaacactatcccagggagtgcaagcttagagcgtctggccaagaatcagaggaagtgggttagcatggcctcattgaaagaac

SEQ ID NO: 628354 - DNA, 82 bp, Homo sapiens
taggaaaacggctcaacccaccgctgccgaaatgaagtataagagaatgcaactggatatcatcctgacaagtttgcaagat

SEQ ID NO: 628355 - DNA, 90 bp, Homo sapiens
ctatccttacccgacctcagatgctcccttctgctcctggagtctccccaggacagtgctatcacccgggatattaaccgaacattccca

SEQ ID NO: 628356 - DNA, 100 bp, Homo sapiens
catctccattgccctgcgcatcgatgaggatgagaaaggtgactctcctattccatctgtttcttcgggatcatcttcacctctttcagccacttctgcc

SEQ ID NO: 628357 - DNA, 101 bp, Homo sapiens
cgacaagccgctggcagccgcggatctcaccgccgctcagggacctcagcagccatgtcgaagccccatagtgaagccgggactgccttcattcagaccca

SEQ ID NO: 628358 - DNA, 75 bp, Homo sapiens
tgtgaaacgaataacatgatggaatatttgcctttccccatcttcctggttctgctccttcgtggcctagtcttg

SEQ ID NO: 628359 - DNA, 75 bp, Homo sapiens
ggatttaccttatcccctcaacaacttttcagtggcaagctggccttgggtgaccctctctgtcctgggattcct

SEQ ID NO: 628360 - DNA, 73 bp, Homo sapiens
tgaaaacatcagcaaatggcttagaaacatagatgagtcatccgtccttggctcaggatttggagagcttgca

SEQ ID NO: 628361 - DNA, 83 bp, Homo sapiens
acgggcgtgggggcctcaagctgtcccaggacatggacacctgtgaggccatgcggaccctcagttggaagcacaccctgggc

SEQ ID NO: 628362 - DNA, 116 bp, Homo sapiens
ccaccatggcggcgcccccgcagcccgtcacccacctcatctttgacatggacggacttcttctggaaagcagaagccactggagaaaaacggccaagaggcagacctaggaaatg

SEQ ID NO: 628363 - DNA, 90 bp, Homo sapiens
ggaaaacgctgtgaatttgtcatggaagtcacaaataaaacacgtgcagatgtaaagggcgacatggagtccaatgggaaatacatcacc

SEQ ID NO: 628364 - DNA, 100 bp, Homo sapiens
ccaccttcaatgtcactgtcaccaagactgacaagaaaactggcgatggaatatgagaggagccctctggaaagaaaaggacagaccctgtgctttcatg

SEQ ID NO: 628365 - DNA, 75 bp, Homo sapiens
taccagaggtactacagtttacagtctgactactggaaggtcaaagattctaaactgcctgcatataaggatctc

SEQ ID NO: 628366 - DNA, 98 bp, Homo sapiens
agagacatttctggctctgaaggcgaacgcttcgctggccatttaggagctctgctcaaagccagacgccactgaggcggctcccagctgcgttggcg

SEQ ID NO: 628367 - DNA, 100 bp, Homo sapiens
tagcagagaacagctctttgcatccggagagtggacaagaaaagctggaagtcgagtgtgctactcaactcaggagatttggagacaaactgaacttccg

SEQ ID NO: 628368 - DNA, 99 bp, Homo sapiens
tatcagacttaatccttaaaagaaggtgactctgacatcattagaagcatgccagaacagactggtgaaaagtaaaccttttcacctacaaaatttcac

SEQ ID NO: 628369 - DNA, 101 bp, Homo sapiens
gacgggcctgcgagggttgaagattgtgaagcaatagcctaaggacacattcagctaacgtattttagcaggtggagtgaggttgaagattcctgtgacag

SEQ ID NO: 628370 - DNA, 75 bp, Homo sapiens
ccatcattttgtatttcattccactgcggtacatcattttaatctgggaatttatccagttggcgaaggactttg

SEQ ID NO: 628371 - DNA, 100 bp, Homo sapiens
atggaggcatatctgaggtgaatcaacctgccgaattgatgccccagttttctacaattgagtacgtgatacagatatgaggccccaggattcctggcga

SEQ ID NO: 628372 - DNA, 82 bp, Homo sapiens
tggccacttgcttgggatcctttatcctggtcatcttctatttccaaagtatggtttaggaatgatttattacaagcaagaa

SEQ ID NO: 628373 - DNA, 100 bp, Homo sapiens
tgggcactatggaggtgaagagcaaggtgggagagttcagagcacacgctgctgagtggacagccaacgtcacagccgaattcaaagaaaccaggaggcg

SEQ ID NO: 628374 - DNA, 51 bp, Homo sapiens
caccaagtggcgaaggagccggctccaagagggagaccaagacatcattgt

SEQ ID NO: 628375 - DNA, 100 bp, Homo sapiens
gcaaagaacacagaagaaagcagaagtagaggggaaagacctaccagaacatgcggtcctcaaaatgaaaggaaactcttatcactactattgattctag

SEQ ID NO: 628376 - DNA, 73 bp, Homo sapiens
gccctggaatgtgaagagacatgagacagtagtcaaatactcagttttctggatatgccgcagaaggatccgt

SEQ ID NO: 628377 - DNA, 100 bp, Homo sapiens
gccttcagtgggactcccccagcagatacattctcagaagtcctggctgagcaaggttggaagccctagttctcgcattgaccgcacaaacttttctaat

SEQ ID NO: 628378 - DNA, 98 bp, Homo sapiens
aaaaacaaaattctgaactcaggacttggcaagaactttatattgctgttggaatatctggagccatccaacatttagctgggatgaaagacagcaag

SEQ ID NO: 628379 - DNA, 100 bp, Homo sapiens
agaccctcatttcaaaaggggtcccatcacataccctggaggaaggaatgttgcacggaggacgtaaaacgatgtttgcagaaatggaaatcattggtca

SEQ ID NO: 628380 - DNA, 82 bp, Homo sapiens
ctcctcagtgcgaagaagctgcagccgcacctggccaaggatacttcggggataaaatacagaacatcttctcagaggagga

SEQ ID NO: 628381 - DNA, 100 bp, Homo sapiens
aaaaccaaaattatcgccaagattcagcaacttacagctgcggattgcaacacgcggggctgaacagctggctgaaggtggaaggatggtgtattccacg

SEQ ID NO: 628382 - DNA, 90 bp, Homo sapiens
atcgtggggcccgcgaggcgggcagccggggcgtccagataatgctctaccacaagaaaatggcctctcacctggggccattgctggcat

SEQ ID NO: 628383 - DNA, 97 bp, Homo sapiens
aaatgttggataaatatatctatggagcacagcatgctacaagtgaaaactgatgagaaactgaatgtgtctgatgagaatacagcaagttgccctt

SEQ ID NO: 628384 - DNA, 98 bp, Homo sapiens
gagaatttctggagaattcagctgctcagaacaagatattaaggctaagacatactgcatttgtaataccaaagaaaaacgttcctacctcaaaacgt

SEQ ID NO: 628385 - DNA, 74 bp, Homo sapiens
cctgttcccggggcagatccaggttcaggctctggctccgctactgcatcgtgtgcttctgtccaagaggcaga

SEQ ID NO: 628386 - DNA, 87 bp, Homo sapiens
aagacataaactcaaccccttctcttccaaaaggttggtcaaagaaaaagtgatgtatgaaaaagaggcaaaacaacaagaagaaaa

SEQ ID NO: 628387 - DNA, 90 bp, Homo sapiens
gtggcggaagccttcgtctcccagattgcaggttgttattgatgccttcagattgatcaatgctaatatgatggtcttaggacatgaacc

SEQ ID NO: 628388 - DNA, 75 bp, Homo sapiens
catggctggtcgtctccagactccacactcctagcaagccagcggaagcctgccacctcctatgtgcggaccacc

SEQ ID NO: 628389 - DNA, 73 bp, Homo sapiens
agaagcctgtcgaaaaatgggggtgcctgagcttggtttatggcagctccaggacctcgcaccccgagacgga

SEQ ID NO: 628390 - DNA, 90 bp, Homo sapiens
gctggcgcgcctgcttctctgcgtcctggtcgtgagcgactccaaaaaactaatctggattcactccctctggttgatacccactcaaaa

SEQ ID NO: 628391 - DNA, 83 bp, Homo sapiens
gacgcgtcggcggaggtggcttcgtcccgcggagtccaggcttcaggattttttatcaagcagaaatgcatcgaacaacgaga

SEQ ID NO: 628392 - DNA, 100 bp, Homo sapiens
tacaaaccatgcggcctccagcgaagccttccactagcaaaggttgttcctcaaagtcattcaagctgtactcgccgaaggagcccccgaacggcaacgc

SEQ ID NO: 628393 - DNA, 100 bp, Homo sapiens
agtggcatcctgggattttgttgaagccacacaaagaacaaattgcagttgtttgagccacagatgaagatatccttgctaaaggaaaacagtccatcag

SEQ ID NO: 628394 - DNA, 87 bp, Homo sapiens
gaggcaggaagcctccttaggaaagcaggggtttcaatacaaaaacaggctccagatataggtgacctcggcacagttaacctcttc

SEQ ID NO: 628395 - DNA, 100 bp, Homo sapiens
atgtgatgatggagaactacagcaacttactctcactggctcaccagcgactggaaccagcaactctgtcagggattgtaggatttatccttagtctttt

SEQ ID NO: 628396 - DNA, 90 bp, Homo sapiens
cagcatggccagcgtcttggagcagctgaacgtcattaacggcatcctcttcattcctctcaggacagtgaggaggaatttggttctgag

SEQ ID NO: 628397 - DNA, 75 bp, Homo sapiens
accccggaatcccgcgcgctgcccacgattcgcttctgaggttctggctccttggcagcaatggctgtatttgaa

SEQ ID NO: 628398 - DNA, 82 bp, Homo sapiens
catcttttccccagaggcgtcggaatggacctgtgccacccaggagggccctcctggacccgggagcggaccctggtggcgg

SEQ ID NO: 628399 - DNA, 98 bp, Homo sapiens
gatgacagtgacaaggaaaaggatgaagaggacgaggtcattgacgagatttgctcccattcatgctgaggctccagagttcatggaaatgagtgttg

SEQ ID NO: 628400 - DNA, 82 bp, Homo sapiens
ctcctaagcccaccaaagtgcacattgggagactcacccggaatgtgacaaaggattttttatcaagcagaaatgcatcgaa

SEQ ID NO: 628401 - DNA, 90 bp, Homo sapiens
aggggcgctgtgtcgagggcgatccccccaaagcagcgtcccgtgctaaaggaaatctactttcttcaatgtgttaaccaatagtcaggc

SEQ ID NO: 628402 - DNA, 88 bp, Homo sapiens
cgctcttcttcttttctctctcgtcctcgctgctgtacttcgtctatgtggcgcccggcatagctcttcctgctgcccacattcctgc

SEQ ID NO: 628403 - DNA, 73 bp, Homo sapiens
tttgtgcttccttctacagccaatatgaaaaggcctagaaaaccaattctgtgtcctcggaggaccacagccc

SEQ ID NO: 628404 - DNA, 83 bp, Homo sapiens
aacaacctggatcttcgaacttttgacacggctttggaaacgacgtcatgtgttaggattattgcatcgagcttttagtgtct

SEQ ID NO: 628405 - DNA, 50 bp, Homo sapiens
cagtgcgtcaatcagagcgtcctgtgcgtatcctagaaggaaaacatcac

SEQ ID NO: 628406 - DNA, 74 bp, Homo sapiens
cgtggttcacccgctgccgggcaccgaggaccagctcaatgacagctttaccgatttgttacaactcaagcaag

SEQ ID NO: 628407 - DNA, 51 bp, Homo sapiens
cctacactgcctccattgaaaaacagagaagattctagtgttccagaaact

SEQ ID NO: 628408 - DNA, 75 bp, Homo sapiens
gagaactcaaggtcttcatagaccagaaccttagtcccgggaaaggttatctaccttgcctgctcctatgccaca

SEQ ID NO: 628409 - DNA, 51 bp, Homo sapiens
ccaagggctaccaggagaccatctcagatgcagttcttaatgaagctgctc

SEQ ID NO: 628410 - DNA, 75 bp, Homo sapiens
accgctgtgtggaggtagccgcagcgccagcaccaggtctccatcatcaccagttccagtagtgaaaaacagaac

SEQ ID NO: 628411 - DNA, 100 bp, Homo sapiens
ggaggcggcgtgggcggcagagagcggggcggcggcaggtactccaaagattcaggtttactcacgtcatccagcagagaatggaaagtcaaatttcctg

SEQ ID NO: 628412 - DNA, 100 bp, Homo sapiens
cagctatgcatgctgcttttgatgtctgacaacgtggatcgttgttttgaaacgaatcccttggcaccatgtcctgtgtgcattataaattttcctctaa

SEQ ID NO: 628413 - DNA, 50 bp, Homo sapiens
caccgccgcccgcgccctcaccagtaagactttgaccccgacgcaggctt

SEQ ID NO: 628414 - DNA, 100 bp, Homo sapiens
atgtctcgctccgtggccttagctgtgctcgcgctactctctctttctggcctggaggctatccagcggcaagttaaagtcttcagagccctgtatacgt

SEQ ID NO: 628415 - DNA, 75 bp, Homo sapiens
gacgactttactgccatccgaggcaactacagcctagaggctgctctttggcgtaaattgcaatcgattagggat

SEQ ID NO: 628416 - DNA, 82 bp, Homo sapiens
gagctgggcgcggattcgccgaggcaccgaggcactcagaggagatgcctgctctgtgcctgtatctgagatcatcgccgtt

SEQ ID NO: 628417 - DNA, 75 bp, Homo sapiens
aaatactactctgaggggcttagaaattaacagggttcggctttccagtttggcagcagcactacaaatttcaac

SEQ ID NO: 628418 - DNA, 126 bp, Homo sapiens
caagcggcgtggacgaccgttgctgagctggtgtggaacgtctgtgatcagggatataagggaattacctccttcttagtagatcgtgatactccgggccttcatatagggaaacctgaaaacaaa

SEQ ID NO: 628419 - DNA, 98 bp, Homo sapiens
gcggtgctcggcgcggcgctggcggccgcagccctcgtactgattgacttacgcaggattctcagcccttgcctgggagaacagttcaggagacagat

SEQ ID NO: 628420 - DNA, 100 bp, Homo sapiens
tggaagctctgcaaagacctacgctccttcatctaatccatggaaagacttcagtgaagttccttatgacttcccctgaaattgcttccttatcatgggg

SEQ ID NO: 628421 - DNA, 100 bp, Homo sapiens
gggggtcagagtgccggaccccagcacacagaagccgagacggatgcctaaatcaaaggaacttgtttcttcaagctcttctggcagtgattctgacagt

SEQ ID NO: 628422 - DNA, 90 bp, Homo sapiens
ccaccagcgctgggacgcggcggcagcggcggcggcggcggccctccgactcatctttcaagaggactttagactaattgcagataatta

SEQ ID NO: 628423 - DNA, 100 bp, Homo sapiens
gccggatagtgctgaagaggagggggcgttccccagaccatggcatctacggaaggaactctactacgatcgcgggaaccaccatgagtttgtgtccctg

SEQ ID NO: 628424 - DNA, 74 bp, Homo sapiens
gcggcctccagctccgacccgacatccacgacagcgatggcagttccagcagcagccaccagagcctcaagagc

SEQ ID NO: 628425 - DNA, 100 bp, Homo sapiens
tccagtccttgctgaagagactttccgttacatgagtgccaacaagctgcaggaggaggtgctgatccaggagtggttcaccctggtcaacaagaagaac

SEQ ID NO: 628426 - DNA, 75 bp, Homo sapiens
caagtcttccgttctgaccaacgaaaagatgcacaacaccatggagtctctgttagagcgaggtgagaagctaga

SEQ ID NO: 628427 - DNA, 100 bp, Homo sapiens
gacagcagcgactttggggcccgtcaccctcaggtgccacatcatctcacagttcaaccaaggcttctacgactgtgtcatagcaactgatgctgaagtc

SEQ ID NO: 628428 - DNA, 100 bp, Homo sapiens
catgtcggagtacagcaagcagatgcagagataatggagatttacagacagtcatctgggtggaggacacccttttgggatcagcactgaaagtgacgcc

SEQ ID NO: 628429 - DNA, 82 bp, Homo sapiens
cgccgcctctccttgctgcagccatggagggtggccgtgactggggagagcacaaccagcggctagaggagcaccaggcacg

SEQ ID NO: 628430 - DNA, 76 bp, Homo sapiens
tcagcatcagctggcccaacggcatctcagtggactaccaggtgggttcagtagaagaattccaaggccaagaacg

SEQ ID NO: 628431 - DNA, 100 bp, Homo sapiens
attcacaacctccggggatgcgaaaacacccggccttactgaggaacaaaggctgccaaggggccaagggatgagctggggccctccttcccaatggcat

SEQ ID NO: 628432 - DNA, 106 bp, Homo sapiens
tgctgttggagacgagaaagcctgatcaggttttccaatcttataaacctggaggtattgatgaagatgaccctactgctgatgataccagtgctgctgtaactga

SEQ ID NO: 628433 - DNA, 51 bp, Homo sapiens
tgccgctgctccctggccggtcatttcagtttttacccacctcttgatgaa

SEQ ID NO: 628434 - DNA, 107 bp, Homo sapiens
atcaaccagggcctggaccgcctgcgcagggtcagccaccagggctacagcactgaggctgacaatgcagatcttcgtgaagactctgactggtaagaccatcaccc

SEQ ID NO: 628435 - DNA, 98 bp, Homo sapiens
gagaagggcgactactacgaggcgcaccagatgtaccggaccctgttcttcagggaggagaagagggactccagaatggctgaggagaagaagctgaa

SEQ ID NO: 628436 - DNA, 74 bp, Homo sapiens
agacgccaggtcccccggaaacctagaaatgaatccagcaagctaaagtgcaaattcttcccgaatgtgtgttg

SEQ ID NO: 628437 - DNA, 100 bp, Homo sapiens
gggcggcgtttggtcccgggagcctcgccggattgtccccttggggcggaaagaagccaaggccaaggagctggtgcggcagctgcagctggaggccgag

SEQ ID NO: 628438 - DNA, 50 bp, Homo sapiens
agaagagtaaagagtagatctacaggaggcactacctggcagcaccatct

SEQ ID NO: 628439 - DNA, 75 bp, Homo sapiens
catgactgctctgcttatactggctggacagaattcaaagaagctttttcactatttgacaaagatggtgatgga

SEQ ID NO: 628440 - DNA, 48 bp, Homo sapiens
agatccatttacactttacaatgaggacggggacttggttgccttttc

SEQ ID NO: 628441 - DNA, 88 bp, Homo sapiens
gccgcgacagcatagtggggaccatgagaacctgatgaacgtgacgttgagaaagaagggccttaatggctgtgacagcccagacccc

SEQ ID NO: 628442 - DNA, 81 bp, Homo sapiens
ggcgccgcggtcggctctgggactcgtctggcgtccctcaggcatgtcgggccccaggcctgtggtgctgagcgggccttc

SEQ ID NO: 628443 - DNA, 98 bp, Homo sapiens
ttcgccaaggctggcgcagtcggtgtttgtggccagtcctcacaaaacacagcctattgtggagatcctgttaaaaaatcagcccaaactcattgagt

SEQ ID NO: 628444 - DNA, 100 bp, Homo sapiens
cgctcagcctcactgtagatgccaagacagagactgcggtcttcaaaagatgccgttggcaaccacaggtcattcagcgacaagaatggcctcaccagca

SEQ ID NO: 628445 - DNA, 100 bp, Homo sapiens
ctgccgcagagtcggcacctgaaggacatggaggcctactctgtgtatgatgaagacattgggtactgtcaagggcagtcttttcttgctgctgtattac

SEQ ID NO: 628446 - DNA, 75 bp, Homo sapiens
ggggagcagccgaccatggagccccagaggcggcaccttcctacttctgcccagccacagccctcccctcacagt

SEQ ID NO: 628447 - DNA, 100 bp, Homo sapiens
aatagtagttctcctctgggagaactttttgatcatggctgtgattcactatcaacaggtggtgatgatgtccagcaactctgtgaagcaggagaagagg

SEQ ID NO: 628448 - DNA, 50 bp, Homo sapiens
tcccagaagatggcggaggcggggatgtaaacagtgttctagtttgagat

SEQ ID NO: 628449 - DNA, 90 bp, Homo sapiens
ccgcaggtcagctccgccgaaggcgccgccaaggaagaggtgctggagaatctggtaaaagcaccattgtgaagcagatgaggatcctgc

SEQ ID NO: 628450 - DNA, 75 bp, Homo sapiens
ttgcctcaggccagtcgcctccaggccaagagggatccttcacccgtgtctgaatctgatgttccagcagaaatc

SEQ ID NO: 628451 - DNA, 100 bp, Homo sapiens
caggacttctcctggcggcgctgcggatccagggggtcggctgccaggtacagggcttatttcaaaacctttgtccctcagttccaggaggcagcatttg

SEQ ID NO: 628452 - DNA, 100 bp, Homo sapiens
acttcgagagccctgtcatcttctaaacagagcagcagcagcagagatgataacatgtttcagtacaatgccagtgtttcagtcccagacagcagtggcc

SEQ ID NO: 628453 - DNA, 100 bp, Homo sapiens
tgatctacaccatggagaacaagcccatcgtcacctggcatggtgctgatgtgaaatgtgtagactggcatccaaccaaagggttagttgtttcaggaag

SEQ ID NO: 628454 - DNA, 97 bp, Homo sapiens
tgggccccagaccgtgctgatcttcgatgagctctcggattccttatgcagagtggccgacttggtttctaagcatgaattgaggaacagaagaagc

SEQ ID NO: 628455 - DNA, 76 bp, Homo sapiens
tggagagaggccgcgtcctgggcagagacctcccaggagctacactgcctgatgtgggcctggaactggaggtgcg

SEQ ID NO: 628456 - DNA, 75 bp, Homo sapiens
cggtgctctgggactacacggccgacctggatgtgcacggcaaggcaaaccagtccagctacgggggcccagcca

SEQ ID NO: 628457 - DNA, 50 bp, Homo sapiens
caccagttagggcaagtccgccaaggttaacttgatgttaaatggaaaac

SEQ ID NO: 628458 - DNA, 98 bp, Homo sapiens
ttacttctccgccaacgcggtcatctcgcagaacgccatcaaccagctgcactggagatattattgctgtcatgataacagaattgaggggtaaggat

SEQ ID NO: 628459 - DNA, 78 bp, Homo sapiens
acagattaaggtgctggaggtgacggagggtagcacaggcggagtgcagcggaggcccctgccgctgccgtcatgccg

SEQ ID NO: 628460 - DNA, 100 bp, Homo sapiens
gacccggaggaggttcgaagctgagtatgtgacagctgatggtgagaccattctaaaaggcctccagtccattttccaggagcaggggatggcggagtcg

SEQ ID NO: 628461 - DNA, 120 bp, Homo sapiens
ttaccgattacctctcagtagccatgctcatgatcggcgtgtttggatgtactttacaggaatgaggggagaatcatacttcatcggaatgaggagcccagggcagcagggacacgtccc

SEQ ID NO: 628462 - DNA, 100 bp, Homo sapiens
ttggcagatcactctcttagcagaggaaccagactagcatttctcagtgggttccagtatgcagccgattgatacctgtgtctcctacccaaggacaggg

SEQ ID NO: 628463 - DNA, 88 bp, Homo sapiens
ccggcccgcctccctggccggggcgcagttcggaggttcaggagggctccccgaggactttctgaactccctggagaagatggaggac

SEQ ID NO: 628464 - DNA, 75 bp, Homo sapiens
ataagaccgttggttctgacgaggcacagcgtttcttgcaagaatgggaggctcagctatgtgaaccatgcagag

SEQ ID NO: 628465 - DNA, 100 bp, Homo sapiens
ccgcgggcaccgaggactccgctcctgcccagaactcacgtgctgtgtgtcagactgagctttccctgattcattctacaatccaagacttgctgcactg

SEQ ID NO: 628466 - DNA, 100 bp, Homo sapiens
gtgctcatagacgaactccgcaatgaggacgttcagatatctcttccaaacgcatgatgaaggaggtcttgtcaacagggcaaggcaatacagaagtgat

SEQ ID NO: 628467 - DNA, 100 bp, Homo sapiens
ttgctgctcagacgctccgagaagcttcaggcagcataacacttacagtattgcctaagtgtaatcttgaacatgggcggtgctgtgagtgctggtgaag

SEQ ID NO: 628468 - DNA, 90 bp, Homo sapiens
cacgatcgtaacaggatgtcacgacggacaaatatgtctctgggatctttcagtagaactgcaagtacatcaggaacgtctctatcaaga

SEQ ID NO: 628469 - DNA, 100 bp, Homo sapiens
gcgccatggagacaggtgtgcgcatctacaacgtggagcccttgatggagaaggggcatctgggattaaagcaaggagagccaatcatgactggcaaaac

SEQ ID NO: 628470 - DNA, 83 bp, Homo sapiens
cgcgctactctctctttctggcctggaggctatccagcgccacggcagagacaacgtgtgtaccccaagtgcacatggctgac

SEQ ID NO: 628471 - DNA, 51 bp, Homo sapiens
ctgggatcttagtacaaaacgtgttaaactgtctgtgatcctggaaacata

SEQ ID NO: 628472 - DNA, 75 bp, Homo sapiens
cgaggatgaacccaccctggatgtcatcgagacctgcatggcataccagggtgccatttggattgtactttagtg

SEQ ID NO: 628473 - DNA, 50 bp, Homo sapiens
cccgtccttccagaacgacgacagatccctctctgggcgcattgttggag

SEQ ID NO: 628474 - DNA, 102 bp, Homo sapiens
cagaacctgcgatatcctgaggattgctgagaaaaggcagaggtgaacacacagtgttcatcccctcaggaggacacagcttttgaggtaccatcttggaag

SEQ ID NO: 628475 - DNA, 82 bp, Homo sapiens
agaacatcgagtgttggataacttctctgacatagtagaagggaagtgggaaaactcttgcctttgccatcccaatgattca

SEQ ID NO: 628476 - DNA, 100 bp, Homo sapiens
agacaccaggtccgcgccaggcgtctcgggggtgggaaagtctgtgtctcatgagaacaaagaacaagattcttattcagtagaaagtgaaaagaaacca

SEQ ID NO: 628477 - DNA, 98 bp, Homo sapiens
tgcagcgctcccacccccggcggcggcacgatgccctttgacttcaggaggtttcaccttgcttaaatgtcctgtcacgactgttgtttagcagtgac

SEQ ID NO: 628478 - DNA, 100 bp, Homo sapiens
ttgtgggcagcaggtggaagtggatgacgaaaactggatatacagagcccagcccagaaaaggccatggtaggggaggagtgtgtaggtgccatcgtttg

SEQ ID NO: 628479 - DNA, 100 bp, Homo sapiens
ccttcacttcaagaacattgtccactgtgacttgaaaccagaaaacgtgttgctggcatcagcagacccatttcctcagcctcctgaccctgctctggac

SEQ ID NO: 628480 - DNA, 51 bp, Homo sapiens
catcctggaagctgggaaatgcaaactgaaaccgtgtcagttcagtcttcg

SEQ ID NO: 628481 - DNA, 75 bp, Homo sapiens
gtgaaatggagaggctggtcgcccaagattttttatcaagcagaaatgcatcgaacaacgagaatcaagatcact

SEQ ID NO: 628482 - DNA, 100 bp, Homo sapiens
agctggaggaggaacttcgaaccatggaccaggccctcaagtccctgatggcctcagaggaggaggcgctagatggggccttcacagaggagaaccgtgc

SEQ ID NO: 628483 - DNA, 100 bp, Homo sapiens
cagggcggacacggccaccgcctcagcgggagaggagtctccaccaggactgaccgctgccgcccagcacgtccaggtgagaacccagaagaaaggcggg

SEQ ID NO: 628484 - DNA, 74 bp, Homo sapiens
gttcatagatactacactgaatttcctacagttcttgatattacaggccctcgggaccaaggatcacgtcatga

SEQ ID NO: 628485 - DNA, 100 bp, Homo sapiens
gccaggggcccgagggcggggaccggcggcgctggaggagcgaggcagctgtactaggactgggaacggacctccttaactacgtgttttgctcaagaaa

SEQ ID NO: 628486 - DNA, 82 bp, Homo sapiens
aagagggtgttcgactgctagagccgagcgaagcgttgattcttcaccacactgaaaccattaggaaaaatccttgtggtta

SEQ ID NO: 628487 - DNA, 100 bp, Homo sapiens
gttggggccctcttgataaaaagagatgtggggggattctcgacctgctaacagaactggaccttttcgaagctccaccatgaggcgaggtggatggagg

SEQ ID NO: 628488 - DNA, 82 bp, Homo sapiens
ggaggatgacggagctgcagtcggcactgctactgcgaagacagctggcaggccatgtagggcaggaccgggtggactttgg

SEQ ID NO: 628489 - DNA, 100 bp, Homo sapiens
cgacagcgacggctacgccgaagcactcgttccgggggtgaagcctcctgcgccggccttgcctcgggccgccagatcccacccttggacccccatgaaa

SEQ ID NO: 628490 - DNA, 101 bp, Homo sapiens
gaggaatcagaaacctgaagttagaaaggctcaacgagaacaagctatcaggttgggattgagtttcaacagcatctctgctgttgacaatggctctctgg

SEQ ID NO: 628491 - DNA, 100 bp, Homo sapiens
ttatggaaaggttcatggagcaagtggtttttaaatatcttcgagctgaacctgaggaccattattttttaatggttgttggtgtagcccaggccatcaa

SEQ ID NO: 628492 - DNA, 90 bp, Homo sapiens
agatatcttctctttgcaagacagtttaaacccaagaaacagtccaactcttacgatatgttcatgagaggagaagaaatattgtcagga

SEQ ID NO: 628493 - DNA, 100 bp, Homo sapiens
gactccggagacagcccaaatatcctcggaagagcgctcccaggagaaacaaagagatcgatgtcttattgtgatgagtctcgactgtcatatcttcttc

SEQ ID NO: 628494 - DNA, 100 bp, Homo sapiens
gaacattgttcatcgtgatttaaaagctgaaaatttacttctggatgccaatctgaatatcaaaatagcagattcctcgaggtctgaacaagaaccactg

SEQ ID NO: 628495 - DNA, 50 bp, Homo sapiens
ctcgatccgcctgcctgcgcacctgcgattgttaaaatgagtcttcggaa

SEQ ID NO: 628496 - DNA, 100 bp, Homo sapiens
cgatccctgcgcgggctcgagagctcgccccgaacgggggtcttcctcctccgccgttgacaggccaactgtgatttgagacggcagattgatgaacagc

SEQ ID NO: 628497 - DNA, 100 bp, Homo sapiens
acggcgtcctgctgggggagcagctgatcaccatgtcctgcacggacaagatcgccaggaagggatgagaccatgcagcctgcgaaaccatcctttcttg

SEQ ID NO: 628498 - DNA, 100 bp, Homo sapiens
agaacagcacgtaccagaggtggaagtccaagtcaaacgcagaaggactgcctcactgagcaaccaagaatccaggtccagagagcatcgcagacatcga

SEQ ID NO: 628499 - DNA, 100 bp, Homo sapiens
gagcgccggcgtactctcaacaaggcccgggcctcccgctcctccgtacaggaaactatgccccagacgtccgttgtcttctccagcatccttgggccca

SEQ ID NO: 628500 - DNA, 96 bp, Homo sapiens
ccagaccctctcctttccctttgagaccgtgaagagaaagatgcaggtggattacaaagctgacgagtggctgatgaagaacatggatcccctgaa

SEQ ID NO: 628501 - DNA, 101 bp, Homo sapiens
gtgaaatttggctttcattcatgaatgaggaagattgttgatcgaatcgacaatgatggggatggctttgtcactactgaggagctgaaaacctggatcaa

SEQ ID NO: 628502 - DNA, 90 bp, Homo sapiens
aaaactcgctgacttcggccttgcccgcatctatagtttccagatggctctaacctcagtgataatgtacaacggccagccaattaccaa

SEQ ID NO: 628503 - DNA, 50 bp, Homo sapiens
ggaggaccccttctttgtggtgaaaggggcggaagcttcgacgtggcaga

SEQ ID NO: 628504 - DNA, 50 bp, Homo sapiens
acaagacgactcaataggaggaaggttacctacctgggcaaagtctccac

SEQ ID NO: 628505 - DNA, 100 bp, Homo sapiens
cagcggtattctggtgcttatggtgcctcaggtttgcctgcaatgagatttcattctctacatttaaaggacatcctttctgagctgctgtgaataaatt

SEQ ID NO: 628506 - DNA, 75 bp, Homo sapiens
ctgcagggacccggtgacagcgtgagagtttctgatgaagaattgaaaagaagagtagctgaggagctggcattg

SEQ ID NO: 628507 - DNA, 75 bp, Homo sapiens
gccacgtgagccacggccacggccgcataggtcctaaaaacatcctgagtttctttggcctgccagaaagtcacc

SEQ ID NO: 628508 - DNA, 100 bp, Homo sapiens
tgccttttgcctcccaccgtgattctgaggcctccccaaccatgtgcaattcaaagccacaacacttgagaaaacctatggacctgcatggatagcctat

SEQ ID NO: 628509 - DNA, 75 bp, Homo sapiens
ccagtgacagtgggacgggctgccctggctgtgcctgcgcccagaagcagctacacttcatggaccagttgctcg

SEQ ID NO: 628510 - DNA, 100 bp, Homo sapiens
gccagaagcagtatttgtcctggacaggctgcgggaggagctgcaggactgaggtacagaggccaggggcccagggcaggacccagcctggacttgactc

SEQ ID NO: 628511 - DNA, 90 bp, Homo sapiens
tggaatattgacccttatttatccagaagattgatcatcatatgggttgctcagtttatgaacctcttaaaagcattaatcttccaagac

SEQ ID NO: 628512 - DNA, 118 bp, Homo sapiens
tgttcaaacagcactgccaaatagcagaagaataccatgaggtcaaaaaggaaatcaccctgcttgagcaaaggaattactggggcttccggatgcagatgacgatgcgtttgaagag

SEQ ID NO: 628513 - DNA, 78 bp, Homo sapiens
gcaaagtactatcgggagcctcggaaaggaatacaggattctcagcaagttacagaagtatctttgacaactcttgtg

SEQ ID NO: 628514 - DNA, 75 bp, Homo sapiens
ctgacgtattcctgctgttcccagaagcgaagtggagagcgccagagtaatggcttagaccatgctcagcctcca

SEQ ID NO: 628515 - DNA, 75 bp, Homo sapiens
ggaataacaaggcttatctctaggatccataagctagaaaattatggcatgccgtttagcagaactgaagatggg

SEQ ID NO: 628516 - DNA, 82 bp, Homo sapiens
cggcctttctgctcctcgcggcccaggagccattccgtagtgccatcccgagcaacgcactgctgcagcttccctgagcctt

SEQ ID NO: 628517 - DNA, 80 bp, Homo sapiens
ctgagttaacggacgctaagcggggtaggggaaggaactgtggctgcaccatctgtcttcatcttcccgccatctgatga

SEQ ID NO: 628518 - DNA, 100 bp, Homo sapiens
tctcacctcaagaagtcacttaggcatggctgtaatatttcttttcactcccaggttaaagcggcaactggggaagaagtatctgctgaggatcttggag

SEQ ID NO: 628519 - DNA, 75 bp, Homo sapiens
caggttttgctgctgttgttagagaatttgagaacagtaaatgtcctgagggaacaaaacccatgctgatatttg

SEQ ID NO: 628520 - DNA, 98 bp, Homo sapiens
gcgacggttgtgtcgcaggtgctcccccacccccattctcttcaggggggcttcctctaactgtgccctgtccacggtgcctcctgcatgtcctgctg

SEQ ID NO: 628521 - DNA, 75 bp, Homo sapiens
gcctgcggccctggcctccgctgcagcgctcgcctggcccggaggcaatgccctgggaggagcggggacactgag

SEQ ID NO: 628522 - DNA, 90 bp, Homo sapiens
ccgcgggtctgctctgtgtgccatggacgggaaggtggacttttaaatattctccactgaagcaaatgctgcaacaatttgcatttcctt

SEQ ID NO: 628523 - DNA, 95 bp, Homo sapiens
ccagaagtcctgggacttcatgaagacgcatgacagacaatgcagatcttcgtgaagactctgactggtaagaccatcaccctcgaggttgagcc

SEQ ID NO: 628524 - DNA, 98 bp, Homo sapiens
ccgcggagacccttcgagaaatctcgtctcgaccaagagctgaagctgatcggcaagtagcctgcagtatgaaatgctgctgctgacggattctatct

SEQ ID NO: 628525 - DNA, 98 bp, Homo sapiens
atggatctggtaggagtggcatcgcctgagcccgggacggcagcggcctggggacccagcaagtctggcaagttctccggcagttctccggcgccccc

SEQ ID NO: 628526 - DNA, 98 bp, Homo sapiens
tctcccatccccagaagggtattcactggggattctgagctttggctactccagtttcccacgacacgatcttttgccagaaatgagggcatactggc

SEQ ID NO: 628527 - DNA, 100 bp, Homo sapiens
gggaaggtagaagcatttggcacagaagtgctgccaggagaaactaagttgctgaacggcccgtggccacccaggagcccgatgtgcaaggcaggtgtga

SEQ ID NO: 628528 - DNA, 82 bp, Homo sapiens
tggatatttgcttggaaaaacgtgtgggtacgaccttggtatcatgatattagctggtttgacatcaagtcatttgtgagtc

SEQ ID NO: 628529 - DNA, 101 bp, Homo sapiens
gttattgaatatcaagaggaggagttgttgtcagatatgtacagcttgggtgtggtcctgctagagctctttcagccgtttggaacagaaatggagcgagc

SEQ ID NO: 628530 - DNA, 90 bp, Homo sapiens
atgttcagcgtagagtcgctggagcgggcggagctgtgcgagagcctcctcacttggggtctcctatggacagaagtgcgggcaaggagc

SEQ ID NO: 628531 - DNA, 51 bp, Homo sapiens
aatgactgccctctaaaggaagaggagatctattgggaaactgattataac

SEQ ID NO: 628532 - DNA, 75 bp, Homo sapiens
agtcttggacggagagcagcataaacccaggaaaatgcaaagctgactataatgtaactgcaaactccaagctgg

SEQ ID NO: 628533 - DNA, 98 bp, Homo sapiens
aaaaattctgcagcaaaaattggaaaggacctggtgtccaagatgctacacgtggatccccaccagcgcctcacagctaagcaggttctgcagcatcc

SEQ ID NO: 628534 - DNA, 143 bp, Homo sapiens
ctggatgctggccgcgctcacgctgctcgtggtcttcctcatcttcgcagacatctcagagatcgaagaagaaatcggatttctatattcagatgaagttcaaattggtccagaaacagttatgaccactctttatactgcca

SEQ ID NO: 628535 - DNA, 83 bp, Homo sapiens
ggaaaaacttcttgccaaccaaagaggaaaacggcaaaccagttaaatctcagggaattcctattgtgtgtccagtttcacga

SEQ ID NO: 628536 - DNA, 100 bp, Homo sapiens
gttctccaaataccagctcgacaaagatggggttgtcctctttaagaagaaaaattctgtaggccgttggaaggaagctaccataccaggccacttaaac

SEQ ID NO: 628537 - DNA, 100 bp, Homo sapiens
ggaatttttaaagtctttagtatgttgaactggaaatataggacatgcgtttgagatctactgtgagaagtggcagtttttgtctttgataaaaaactga

SEQ ID NO: 628538 - DNA, 100 bp, Homo sapiens
ttgccggccggcttcgctgcgggtttgcactgcccgggttttaaatgcacagagagcaggatacaaggcagccatagttcacaatgttgattctgatgac

SEQ ID NO: 628539 - DNA, 100 bp, Homo sapiens
ctggttttaagtgtagttgccgacgcaatggcagcctttgcagtggaacctcaggggcccgcgttaggtgcgagaagatgtactaaattcattgaataac

SEQ ID NO: 628540 - DNA, 75 bp, Homo sapiens
tcacctccaacaacatccgcgagatcgaggttataaagtcagcccgggttatgaagaaggctgttggccacctta

SEQ ID NO: 628541 - DNA, 98 bp, Homo sapiens
accaaatgatagacattctgtcttccgaggaccctgggagcatgcttcaagccttagaagagttcttgacttacaaatagccatcgaaaacattactg

SEQ ID NO: 628542 - DNA, 83 bp, Homo sapiens
cgccggtcttggggggatggttccatcatggcgtcaatgcaggccagaagcggactcctagaagaggggagcagcaaggatgg

SEQ ID NO: 628543 - DNA, 98 bp, Homo sapiens
ttatatggccagcattttcccattgaggtgcggcattatttatcccagtggattgaaagccaagcatgttggaggtccccctccccactaagtgcctc

SEQ ID NO: 628544 - DNA, 80 bp, Homo sapiens
gtgccctctttgcaacatttcaggaaaacagagaaagaagtgataggagggctctgtagtgcctccggagccagcgtggt

SEQ ID NO: 628545 - DNA, 100 bp, Homo sapiens
tatgcagctgattgaagacttcagcacacatgtcagcattgactgcagccctcataaaactgtcaagaagactgctcaaagatcctctcaagacagtatc

SEQ ID NO: 628546 - DNA, 75 bp, Homo sapiens
ttgaagtagaagaagctgatgatttgacaagatcaaagctgcaggaaaatggacagtgaggttcagagagatgga

SEQ ID NO: 628547 - DNA, 82 bp, Homo sapiens
cagacttttgtgttgcagttcggggagactcatgcatctgtatgccgtgtgcgtggactgcctggaaggggttcacaagatc

SEQ ID NO: 628548 - DNA, 100 bp, Homo sapiens
aaaatgaagatgatgtagacactggactattaggtttctaagcatgaattgaggaacagaagaagcagagcagatgatcggagcagcatttgtttctccc

SEQ ID NO: 628549 - DNA, 75 bp, Homo sapiens
caaaggagtcagggatggctcttcctcagggaagcagctcgagagtgtcgtagaaagaagaaagaatatgtgaaa

SEQ ID NO: 628550 - DNA, 100 bp, Homo sapiens
cgagaggagccacaatggagacgccgccgctgcctcccgcgcattcctgcatcgcatccggcagaacgtggccgactcagtggagaagggcctcacggag

SEQ ID NO: 628551 - DNA, 90 bp, Homo sapiens
ggaagacctgcgtcctttttcgtttttcggatgatgccttcaatactacctttatttccaccatagggcatcgagattggtaaagtgcca

SEQ ID NO: 628552 - DNA, 83 bp, Homo sapiens
ccagtccccagtgagggtgtacaaatacccctttgaattaattatggctcagcctcccgcgacgatgcccctcaacgttagct

SEQ ID NO: 628553 - DNA, 100 bp, Homo sapiens
ctgggggccgtccccgggagacaggcggccttccgagagggactggagcaggccgtgcgatgaactgcctctcctcctccctgcctggggagcccagtgg

SEQ ID NO: 628554 - DNA, 75 bp, Homo sapiens
aagaggaagcggaaaccagtggccacagcatctttgtctagccccagtgcaggtactactgagcgagtgtgcttg

SEQ ID NO: 628555 - DNA, 107 bp, Homo sapiens
gggcgctgcggcacagctggtttgagcaactgaactggaaacaagatgcagtttgtggggacattcatggacaattctttgatttgatgaagctctttgaagtcggg

SEQ ID NO: 628556 - DNA, 101 bp, Homo sapiens
tctgtctgcctgtgtccctgaccatggctccctgcagtaccctttaacggcttactagaaagcagcacccgcctgaaacctcacgaagcccagaactacag

SEQ ID NO: 628557 - DNA, 122 bp, Homo sapiens
ccggctttgaccgcgctaagatggcgactcccatgcatcggctaatagcccggagacaagctgatcggagggtatggttggcatggaattgaatttcatctgtctgtgggaattgtaagcaa

SEQ ID NO: 628558 - DNA, 109 bp, Homo sapiens
atcctggggctgggcaccctccttccctggaacttcttcatcaccgccatcccgtgactgtgaagtgctgaccacactcaccccagacactggccgtatcctgtccaag

SEQ ID NO: 628559 - DNA, 80 bp, Homo sapiens
gaagccgcggctctccaagttctaccagccctaccttcatcactggtccagctgtaataccagggtacttctccgttgat

SEQ ID NO: 628560 - DNA, 75 bp, Homo sapiens
gtacagccatcaagaggatcttaaagtgtggtctttagtggaaaaaaagacagcccacctgaggatattgaccat

SEQ ID NO: 628561 - DNA, 100 bp, Homo sapiens
accgtcagtttgagccagatgttcacatgagagatcctaataatcaacttcacgtaattaaaaatttgaagatagcagtaagcaacattgtcacccagcc

SEQ ID NO: 628562 - DNA, 75 bp, Homo sapiens
ggataagatgaccttcagtgtgctgctcaaaaacagattcaagtcaatctgaaagtcccagccagccaagtgacg

SEQ ID NO: 628563 - DNA, 75 bp, Homo sapiens
tctactctgatgtcaatcttgagggctagtgcacgatctgattttctggagagatgtgaagaagactgggtttgt

SEQ ID NO: 628564 - DNA, 87 bp, Homo sapiens
aatacctaataaccagaacagaaagaaatgttgcagtatatggtggagaggccaggaaggtctacgatgatgcccacaatatgctga

SEQ ID NO: 628565 - DNA, 51 bp, Homo sapiens
ctactcctgctggggctcctccaggccgcaaaagataagtaccgtgaattg

SEQ ID NO: 628566 - DNA, 98 bp, Homo sapiens
agagccgtgcatggggctgctccccaggacctgagcaggaacctggagttttcagatttttgatgaaattgagtcatgaaactgtaaccattgaattg

SEQ ID NO: 628567 - DNA, 102 bp, Homo sapiens
gctatggtgaaacaccactgaagcattgccaaggttcgagaacttgtcttggacaattgcaaatcaaatgatggaaaaattgagggcttaacagctgaattt

SEQ ID NO: 628568 - DNA, 100 bp, Homo sapiens
ctcagctggccgtgtcctggcaggattccccagctttccgttgcacaaacagtgaagtgacagtccagcccagcccctatttgagttaccggctacccaa

SEQ ID NO: 628569 - DNA, 83 bp, Homo sapiens
cagaagataaacgaggggctggaacacctcgccaaagcagagaaataagacaagaggagcagcagcggcaccgcccctcaccc

SEQ ID NO: 628570 - DNA, 87 bp, Homo sapiens
gggagcagctcttgtacctgtatgccaggtacaaacaggcctactactactgtgccataatagaggatgtgattctgcgctttgctt

SEQ ID NO: 628571 - DNA, 90 bp, Homo sapiens
gcgacggcggcagcggccggagccgggccgggcagctagcagggcgcttcggacaatgcagatcttcgtgaagactctgactggtaagac

SEQ ID NO: 628572 - DNA, 111 bp, Homo sapiens
ggtgggtccatggcccgggtaggagccctgagtgagtgtccattccaaggggacgagtccatccacagtgcagagtggcagcagacgcaccaggtacgaggaaagcctgag

SEQ ID NO: 628573 - DNA, 82 bp, Homo sapiens
cgacaagcccgggagacacagtgtcagaattacaagtataatggaatgtgcttacaagggccagcaggagtgcctggtcgag

SEQ ID NO: 628574 - DNA, 75 bp, Homo sapiens
ctctgtcagtcatggagcaaaaggtttatcaccagatcttcaatctatggagcagattcggcgaattatgcgacc

SEQ ID NO: 628575 - DNA, 75 bp, Homo sapiens
ggaaaatcatattatagatggagtaaagagtccgatgggtggtccttttattcctgctgctcctgtcaaaactgc

SEQ ID NO: 628576 - DNA, 100 bp, Homo sapiens
aaaataagcaaaagcgtcccaggagcatgcttttcacttccactgcatctctcgctggctcaaaacacgacaggtgtgtccattggacaacagagagtgg

SEQ ID NO: 628577 - DNA, 74 bp, Homo sapiens
tctggagtgcgtgggggaccggctgttggcgggtgctgctgcatgaggaggcgggtgattctggctttgtcagt

SEQ ID NO: 628578 - DNA, 100 bp, Homo sapiens
aataatcgccacattagcctcgggtgccgttgctggaaggaaaatcacctcggcagtgtttgaaggaaggatactgcaactctttgaagtacgcattttt

SEQ ID NO: 628579 - DNA, 75 bp, Homo sapiens
ggcaggtgacagtctgcatgtgcagttttcagggccgagatggacgaaaaaatgtggttccttgtgttctctctg

SEQ ID NO: 628580 - DNA, 75 bp, Homo sapiens
tggagaccctcacggagctgggcgacgagctgaccctgggagacatcgacgacaagttggatggcttgaggactg

SEQ ID NO: 628581 - DNA, 80 bp, Homo sapiens
agagcctcgcctttgccgatccgccgcccgtccacacccgccgccaggtttggttttcctaaacaaatcctttcacaggg

SEQ ID NO: 628582 - DNA, 100 bp, Homo sapiens
catctgcccacctggattctatggagtgaactgtgacaaaggtcaagactgatacagttcttatattgtgtagaaagaaagtggaaaacacaaggtggga

SEQ ID NO: 628583 - DNA, 75 bp, Homo sapiens
cttagccagcccgagcaagtaaagattgtgattcgcctttgccagtctcatctcgtgtctgctttgttaagttcc

SEQ ID NO: 628584 - DNA, 82 bp, Homo sapiens
ggaggaggagctgcccaagagggtccgctctcggctgatatggctcgtggacagcagaaaattcagtctcagcagaaaaatg

SEQ ID NO: 628585 - DNA, 98 bp, Homo sapiens
ccatctctaccgacgaagaaaagagactttgctgttccagccaacatgcgctgtggggtgcagacacccactgcctgatctcacttctgtcagatgct

SEQ ID NO: 628586 - DNA, 75 bp, Homo sapiens
tgaactcattttatctgccacgacccagaaggaatggaagttggatacactttgtgacttgtacgagacactgac

SEQ ID NO: 628587 - DNA, 51 bp, Homo sapiens
cagtcaataatggatatgctccaaaggtctcagatgatgataaagaaaagg

SEQ ID NO: 628588 - DNA, 100 bp, Homo sapiens
agaaaatacaacttgggctgatatcgaagctatggtccccttcccctgagcccatctacaatagcgaggggaagcggcttaacacccgagagttccgcac

SEQ ID NO: 628589 - DNA, 74 bp, Homo sapiens
gctcatattttgaagtgtttacgggatgcaaagaagggacctaacccgctcatgagacgcaatagtgtcacccc

SEQ ID NO: 628590 - DNA, 50 bp, Homo sapiens
agccagaccaacccaattatggaagagagagaaaatccttcaaaacggag

SEQ ID NO: 628591 - DNA, 83 bp, Homo sapiens
gtccgaagtcggcgacagcggccggggcgcaggcgcccgtgcggaatggcaggtgttggagagcacaatggctgaacaagtcc

SEQ ID NO: 628592 - DNA, 97 bp, Homo sapiens
gacgctgcagttggagcaacagtccaagctcaaagccttcaatgtgatcaacgggggctcccatgctggaaacaagctggccatgcaggagttcatg

SEQ ID NO: 628593 - DNA, 82 bp, Homo sapiens
tgaagcaggacaacatagcggtgaaggcgaacgcggtctgcaagctgacgtatgacacaactcagatgggaagttcatcgcc

SEQ ID NO: 628594 - DNA, 98 bp, Homo sapiens
gaattggtggaaaggttgaagttcaagagctcagaccctaaaggtttcacaaactggactaaacgagattttaaccagtttattaaagctaatgagaa

SEQ ID NO: 628595 - DNA, 50 bp, Homo sapiens
gggagccccgcagatgaggtctctgaaggagggtgtgaagacagagaatg

SEQ ID NO: 628596 - DNA, 100 bp, Homo sapiens
cgcggtcctcgctctcgggcggggcggcggcgacgcggacctgcggactagcgaacccggaggaaggaagcagccaccctcgccatggcctccccgcccg

SEQ ID NO: 628597 - DNA, 82 bp, Homo sapiens
cctgcgtaactttctcccttgatccgggagtctttccactggccagagcagctgagttccagataaaaactgtcagacccgg

SEQ ID NO: 628598 - DNA, 75 bp, Homo sapiens
aagaacgacatgatgcaatcttcaggaaagtaagaggaacatgaacgattggatgcccatcgccaaggagtatga

SEQ ID NO: 628599 - DNA, 100 bp, Homo sapiens
gaacggagtaacgagtctcacgcagaaaaaggtcttgagagcaccttgtggcgcacccagtgtaactgtgacgggttatgtggtccgaatcagtggtggg

SEQ ID NO: 628600 - DNA, 100 bp, Homo sapiens
aaagaaactaaaaaatggcagctctcagaatgggaagaatgagagaagtcatatgcccggcacaaaatcaatgtggactgaacataaatcacctgatgga

SEQ ID NO: 628601 - DNA, 82 bp, Homo sapiens
cttacagacgctgccagcatcgccgccgccagctgtggtcgccaggacccccccagagccaagaccttctccagaaggtgac

SEQ ID NO: 628602 - DNA, 87 bp, Homo sapiens
ttgtatagagatgtgatgttggagaactacagaaacctggtctccctagccctgggcgctgcctatggcacagccaagagcggtacc

SEQ ID NO: 628603 - DNA, 100 bp, Homo sapiens
ctggtcgtagcggtgctggcatccgaacaccgggtggctggtgcagccgaggtcttcgggaattccagcgaggcactattcctgatcagagaactccagt

SEQ ID NO: 628604 - DNA, 82 bp, Homo sapiens
ctatcccagggagtgcaagcttagagcgtctggccaagaatcagaggaagtggggaaatcctcattgacgattcaatttgtt

SEQ ID NO: 628605 - DNA, 82 bp, Homo sapiens
tggggcccgaggccgaggggcccaggcagagcccggagaaaagccacatgggtcccctggaagtgacgctgactcagccagt

SEQ ID NO: 628606 - DNA, 96 bp, Homo sapiens
ggttgccattgtaggacctcaactctctatgtttgccagtggtttattttacaggaatttgagagcgtattttgcggtaaaactggccgaaggcta

SEQ ID NO: 628607 - DNA, 98 bp, Homo sapiens
gttcctggatagtttgcggctgagaatgcacttactggctcattcagtttctctgcaggtggatattgttcccagccagggggagatcagcgttggag

SEQ ID NO: 628608 - DNA, 98 bp, Homo sapiens
agagatcataatttggggttcaagattccagggctcacctgaaacttcatgtaccattgcacttcctgagaagctgtccccaatcccaggctcctagc

SEQ ID NO: 628609 - DNA, 75 bp, Homo sapiens
tggataattttgtggccttagctacaggagagctgctgcacaggttctggaacctctggcggtctcagattgagc

SEQ ID NO: 628610 - DNA, 76 bp, Homo sapiens
cttgtttgtggatcgctgtgatcgtcacttgctggagcagttcaacatgatggagaacgccatcagctccagcagc

SEQ ID NO: 628611 - DNA, 96 bp, Homo sapiens
actttctggcaaaaatctttcagaagttgtcaacagtatagtttgggttcgccagttggaattgaaggtaaaataccatgaagattttgaaaaaac

SEQ ID NO: 628612 - DNA, 75 bp, Homo sapiens
ggaggccatcaaaaagcctctgacagtgactcgaaaagccctgtttcctggtgactctgagattgaccagctctt

SEQ ID NO: 628613 - DNA, 100 bp, Homo sapiens
ggagcgcggcagggggccgggggcccagaggaggagacccacccggtggacttgagctcgctctccagtaagctactcccaggcttcaccacgctgggct

SEQ ID NO: 628614 - DNA, 110 bp, Homo sapiens
acctcggttggtgcctggggaaactttggaaaagagcttggggccagggaagaccacagctgagccccagcaccagtcacctccagcgaatgacaacagagctgctcaag

SEQ ID NO: 628615 - DNA, 100 bp, Homo sapiens
gtggaagcatttggcggcataccaccctgcactgtgaggaatactcccccagttgcaagaggcgcaggaccgtggaagacttcaacaaattctgcacctt

SEQ ID NO: 628616 - DNA, 78 bp, Homo sapiens
acggcatttttcaacaatgcttcagatgattcctccccggggctgtgcttatgtctgcatggttcatcgacaagatgc

SEQ ID NO: 628617 - DNA, 73 bp, Homo sapiens
cgagctggacccggaccggttttggagctagagccggtgcaggccacgcagaacaagacagggaagtatgtgc

SEQ ID NO: 628618 - DNA, 100 bp, Homo sapiens
ctctgaaaattgtttcgtagcagagaacagctctttgcatccggagagtggacaagaaagtgtatgcaacagcgttattgcaacaggctaacgaaaacag

SEQ ID NO: 628619 - DNA, 100 bp, Homo sapiens
caacggttagcggtggcaggggctgactgagagcgtctgcttgatttctcactatgtgcaatagacactttggcagtgttgtggcacaaaccattcggac

SEQ ID NO: 628620 - DNA, 100 bp, Homo sapiens
caaagtaggaaaactcagtgaaaattcatctgaaattaaaaagggaaggataaccccatcacaggcccagaggcagagctacacaaccatggaatccaaa

SEQ ID NO: 628621 - DNA, 100 bp, Homo sapiens
tcagtttgggaaatctggatgccaaacgagattggggccatgccaaggactatgtggagaccactctggctcacatcatagccagcaacagcaagaaaca

SEQ ID NO: 628622 - DNA, 50 bp, Homo sapiens
tggctctttgccgaaatgctagagaaatgattggcacttctctgtttgat

SEQ ID NO: 628623 - DNA, 82 bp, Homo sapiens
cggaagctggagccacctgcggagacgtcttgagtgaagatgaaaatgacaagaagcaaaatgcccagtcttcggacgagtc

SEQ ID NO: 628624 - DNA, 100 bp, Homo sapiens
cgggaccccctgaaagcctagaaatgctggattataaagttggctggaagaaactgaaggaagtatttagtatggctggtgtggtggtccgagcagacat

SEQ ID NO: 628625 - DNA, 100 bp, Homo sapiens
cagccccgtcccctccccgacgggcaccatcagttgaccacggcatgtttgagaatttgaacacagccctcactccaaagctccaggccagccgctcctt

SEQ ID NO: 628626 - DNA, 95 bp, Homo sapiens
cctgagcccagcccccagaaaggattgtgacatatcgttggacccagaattgagccctcgagcatgttccaaactcggttcgcttgtggaaagca

SEQ ID NO: 628627 - DNA, 98 bp, Homo sapiens
ccccgctggagcagcccggaggcagcgagcaaggagaaaggactcggagctcttcgacagcagtgtggaggccattgtgaatgccatctcacagcctg

SEQ ID NO: 628628 - DNA, 50 bp, Homo sapiens
cggcgaaggaggaggcgttgccggatctcccttgagtttagaaatctggc

SEQ ID NO: 628629 - DNA, 83 bp, Homo sapiens
acagtggaaaaaaaaagccttacgatctatgcccaagtccagaaaccaggtggccggaagcagctggaaaagactcagaaatc

SEQ ID NO: 628630 - DNA, 90 bp, Homo sapiens
cagggcccctccgcaagagctccctcaagaagggagggaggctggtggagaaggcaccacctgccctggtcagctccagccagtccctgc

SEQ ID NO: 628631 - DNA, 75 bp, Homo sapiens
ccttacctcgctgaatcatcacagccctaggagaaatggtggagtcaatgaagaaagtagcagggatggatgtgg

SEQ ID NO: 628632 - DNA, 75 bp, Homo sapiens
ccaggatctcgggctcggaacgagactgcacgtgataatatgcagcatgcatactgggaactgaagagagaaatg

SEQ ID NO: 628633 - DNA, 75 bp, Homo sapiens
tccacctccggcttttgggggatcactgtcctctctcggcagcaggactggtaccatcagtcctatgactgcgtc

SEQ ID NO: 628634 - DNA, 101 bp, Homo sapiens
agattatttacaatgctaccctgctttttctggtgtcctgaacctggaagttgtgctttttaagtgttggaaaaccttggacagacaattgtccccgattt

SEQ ID NO: 628635 - DNA, 100 bp, Homo sapiens
ctgaacgtggacagcctcatcacccggctgctggagggccggtctaattgaagccaacggagaactcaaggtcttcatagaccagaaccttagtcccggg

SEQ ID NO: 628636 - DNA, 101 bp, Homo sapiens
cactgcagctagtaatttgccttctggattgtggatcatccatgccatggagtatgaacttcagatccgtggcggagacaagccagccttggacttgtatc

SEQ ID NO: 628637 - DNA, 100 bp, Homo sapiens
gaaaaagaggatgtgattgtcttgtattagagccttcagaaatgattgtgatgccttcaattaagttgcagagttctgatggagagatatttgaagttga

SEQ ID NO: 628638 - DNA, 90 bp, Homo sapiens
gcagtggcgcctaaagtctgagagagggaagtcgcctctgtgctcgtgagtgcatggggtataaggggtcgggccccggctcagtggtcc

SEQ ID NO: 628639 - DNA, 100 bp, Homo sapiens
acccaacagttacaaactacttctccaaaggacaacagtagtagcagcagctgccttcttggacgcctttcagaaagtggctgacatggccaccaacaca

SEQ ID NO: 628640 - DNA, 83 bp, Homo sapiens
tggctgcctgctttgctagtgggagccaacacctttgcctcccacctcctctttgcaggtttgccaataggattatcctgctg

SEQ ID NO: 628641 - DNA, 100 bp, Homo sapiens
tgcttgcctgtgcgcgcgtgcgcggacatggcctcaaacggggtctaatgtgatggaagagcaggacctgcgggacatcggcatcagcgacccacagcac

SEQ ID NO: 628642 - DNA, 100 bp, Homo sapiens
aggaaatcatgactgagaaagatatggaattatttcgtgatatccaagaacaagcactgcaggcagcctgcttctgcaaagtggtacgatcgaagggact

SEQ ID NO: 628643 - DNA, 100 bp, Homo sapiens
ggcgagtcgggctctggaggaaaagaaaggaatacggggtgctttgcattcaggaatacagaaaaaacagcaaagtggagtcaagtacacgtaacaactt

SEQ ID NO: 628644 - DNA, 100 bp, Homo sapiens
aacgtggccttcggagcctttgaccagtggtgggagagcaaggaggagaaggccaaggttggatggcaagcatgtggtgtttggcaaagtgaaagaaggc

SEQ ID NO: 628645 - DNA, 87 bp, Homo sapiens
gaatttccttgtgcctccattcccgggaggggggagcggcgttggaggccaccgtttccaggttctgaagcaacactgtaactgctg

SEQ ID NO: 628646 - DNA, 76 bp, Homo sapiens
cttgggaattgcttcgtttgccattttcttatggagaactgtccttgttaattatatccagatcgagagacagaag

SEQ ID NO: 628647 - DNA, 100 bp, Homo sapiens
tctgtggaggtagttgctgagtggcactgggtaaaactaggtcttgactccactaacggggacttctcatacggctttgaacttggaccttggtgcataa

SEQ ID NO: 628648 - DNA, 100 bp, Homo sapiens
gaagaaacaaaagtgccaccgaagaggtacatgaaatcccgcttaacctataatcaaattaatgatgttattaaagaaatcaacaaggcagtaattagta

SEQ ID NO: 628649 - DNA, 50 bp, Homo sapiens
gtgatttctgcatttccgactgagctttttgcctgaattcatcaatggag

SEQ ID NO: 628650 - DNA, 82 bp, Homo sapiens
ggtcttcttcttaatcccatatctggacatctggaacatccatggttattctcgttcaagttaatccaggtgagactttcac

SEQ ID NO: 628651 - DNA, 75 bp, Homo sapiens
cgaaccttggagagaggagaacgaacatcttctggacctttgtccagctgatacgcctcctcctgcctatatgcc

SEQ ID NO: 628652 - DNA, 91 bp, Homo sapiens
gcaggtctcttgatgggaaggaccatttctggactacagctgagattgagaactgcttcataatcctcaatggagtcttgctctgtcgccc

SEQ ID NO: 628653 - DNA, 100 bp, Homo sapiens
ggaagattcgatggacatggacatgagccccctgaggccccagaactatcttttcggaatcctgttcacgatgctggtatttggaccagcctgcgggttt

SEQ ID NO: 628654 - DNA, 100 bp, Homo sapiens
ctcccgagtggctgggactacagcctgccgagtgcctgcgattgcaggcgcgcgccgccacgcctgactggttttcgtatttttttggtggagacggggt

SEQ ID NO: 628655 - DNA, 77 bp, Homo sapiens
caagatcccagtcacaattatcaccgggtatttagtatcttcaaccaatcttgtcactcctccagcagttgtcagta

SEQ ID NO: 628656 - DNA, 100 bp, Homo sapiens
ccagccacacatccagattaaaagccaggaagcacagcaaacgtcgagtgagagcggtcttgcgagtggctggttccctgcagaagagcacagaagtgat

SEQ ID NO: 628657 - DNA, 101 bp, Homo sapiens
ctggatttaagcactgctgcactttatgaggcattcctgcatcgcatccggcagaacgtggccgactcagtggagaagggcctcacggaggagaatgtcaa

SEQ ID NO: 628658 - DNA, 75 bp, Homo sapiens
catcgccgcgtcgcctggcgcccggctccggcggacccttctccggcagaaaacgttgtgtgacgtgatcctcat

SEQ ID NO: 628659 - DNA, 100 bp, Homo sapiens
catcgtggttctcaaccacaagtttgaaattgactttctgtgtggctggagcctgtccgaacgctttgggctgttagggacggcgatctcgatgtcgtgt

SEQ ID NO: 628660 - DNA, 83 bp, Homo sapiens
gttggcgtgtccctgcagcgaaggatcctggtgtccctggccagtgtccttccacctgtccacaagcatggggaacatcttcg

SEQ ID NO: 628661 - DNA, 100 bp, Homo sapiens
cgagatcttgggcaccgagagggactacgtgggcaccttgcgcttcttgcagtcggtcctagaccagaaggagcacaggctggatggccgtgtcattgac

SEQ ID NO: 628662 - DNA, 106 bp, Homo sapiens
gcaaacatagagaattctgggcttccacacaactccagtgctaactcaacaggtgtcatggagaaactccagctgggcccagagattctgcagcgggaaaatccaa

SEQ ID NO: 628663 - DNA, 100 bp, Homo sapiens
ggtccagacagtttagcagaacagcctccgcggctccggggagaagctcctcagagaaattttgaaattgccttcaagatgtttgatttgaatggagatg

SEQ ID NO: 628664 - DNA, 98 bp, Homo sapiens
tatagatattcagaagaaggatgctgttaaaagtactatactggcaattgctggagaagattttgcaattgttgcttctgatactcgattgagtgaag

SEQ ID NO: 628665 - DNA, 82 bp, Homo sapiens
ggattcatttagagctgcggaacaggacgccctctgatgctactgcagcactggggtgtcagttgttggtccgacccagaac

SEQ ID NO: 628666 - DNA, 49 bp, Homo sapiens
aggccaaagacgggtttcattagggtttttaatgaccacaacaagcaag

SEQ ID NO: 628667 - DNA, 90 bp, Homo sapiens
ttttgggttacaaaaatccagaccagggcagcccaatggatccaatggtgatgaagagacctcagttgtatggcatgggcagtaaccctc

SEQ ID NO: 628668 - DNA, 144 bp, Homo sapiens
ctgaataatgtcagattctcagcttataggactgccatgaaactccgaagactgcagaaggccctttgctgtttgtggtaaatatgccagctctagaacacatgaatcagattttacacatcttgtttgtatttttaccctttc

SEQ ID NO: 628669 - DNA, 75 bp, Homo sapiens
agccgcgcagggagctgctgacacagccctgcaggcagctgtgagtacccaggaagctgcaccgtgtggcctgga

SEQ ID NO: 628670 - DNA, 100 bp, Homo sapiens
catgccctatgttaagaaaaaagcagattgggccttgcgatggatagcagatagaaaatctacttttgggatgaccaaggtcaaagtgggtaaagaagac

SEQ ID NO: 628671 - DNA, 101 bp, Homo sapiens
gccatgtcgggttattcgagtgaccgagaccgcggccgggaccgagggaacccaagacagaccaggatgaggagcattgccggaaagtcaacgagtatctg

SEQ ID NO: 628672 - DNA, 90 bp, Homo sapiens
ggaggcggcggagcgcgagagcttcgagcggactcagggcgccctgcgtccggcagaggaggcgagcatcccgctcaggtgatgaggaac

SEQ ID NO: 628673 - DNA, 101 bp, Homo sapiens
ctcctgcttcccatcgaagctctagaaatgaatgtttccatctcttcagagatgaaccaggtctgctgagaacagacccagtccctgaggaaggagaagat

SEQ ID NO: 628674 - DNA, 50 bp, Homo sapiens
tctgtgcacccttacgaagtggccgagcggaagaccctgaagaccctgcg

SEQ ID NO: 628675 - DNA, 76 bp, Homo sapiens
atacaaggagaagcactggatccaaagcatgtctgcaacccagccattttcaggggagtaggttgcatctttgttg

SEQ ID NO: 628676 - DNA, 82 bp, Homo sapiens
ctggggccagggaaccctggtcaccgtctcctcagcgcgtggggacacacaaatcagaatcctggaagcctctgtcggtgac

SEQ ID NO: 628677 - DNA, 82 bp, Homo sapiens
ggcgggcctgaggcgaaggagcggccgggagcccgccgcgctggtagcggagcttactccacgggaacagcctctagataat

SEQ ID NO: 628678 - DNA, 100 bp, Homo sapiens
ggccgggacccggttccccggcccacagtgggggtgtgcaaacccgagagaactgggagtgggaatagctttgcgaaaaatgggcgcaatggccaagcca

SEQ ID NO: 628679 - DNA, 114 bp, Homo sapiens
cctgaagtagcaaaggcaagaaggcaacgacgttccatctgtggaaggacctaccaaccaggaactgtggctgcaccatctgtcttcatcttcccgccatctgatgagcagttg

SEQ ID NO: 628680 - DNA, 82 bp, Homo sapiens
gttcgagcgctgttctcgctccggagccgctgcacatttcgccaagacaatgcaaactccagtgaacattcccgtgcctgtg

SEQ ID NO: 628681 - DNA, 98 bp, Homo sapiens
ctcaggtgcccggccctgtgactgcagccatggccacaggcttagctgttaacgggaaaggtaacccaggtttttctgccttttatgtgccatttgca

SEQ ID NO: 628682 - DNA, 100 bp, Homo sapiens
tgacctgttcgcagaactgggaagccatggggaaccacttctggatcaagcagtgcattgagagtgggaagctttggggtggccggtttgtgggtgcagt

SEQ ID NO: 628683 - DNA, 90 bp, Homo sapiens
gttaaaacggaaatttgaacagttgaaacaggagagaattagtcgatatcagggggctgttgtggttccgactataaacagtacgtgttt

SEQ ID NO: 628684 - DNA, 98 bp, Homo sapiens
ctgctcccagctctactccaggccccgtccgcccgggggcgccgcccaccgcgcctcgctcgcaaacggggattcagcgtccgatcctttggaacagg

SEQ ID NO: 628685 - DNA, 83 bp, Homo sapiens
cctcggagtccttggggacggagcagcgcgtcgtggggcgagcggcagggaaagcaggcaggatgggagagtcgccgatagaa

SEQ ID NO: 628686 - DNA, 75 bp, Homo sapiens
agagttttggatataccaggacaggctaaagaattacctccaaagccattgtcaagaccacagcagtcatctgca

SEQ ID NO: 628687 - DNA, 100 bp, Homo sapiens
gggactaaactggcgggctccgtggaagcgtggccggcagcgtcccggacgaggagccaaacccatccaccagcatgaagaccgctgcttgaggttgaag

SEQ ID NO: 628688 - DNA, 83 bp, Homo sapiens
cgaaaagcggaaggtggcagcgctggagatcgagaaacctgcctagagctggaacgttacctccagagcgagccctgctatgt

SEQ ID NO: 628689 - DNA, 100 bp, Homo sapiens
gggcctgattacattccaacagaggaagaaaggagagtcttcgcagaatgcaatgatgaaagcttctggttcagatgtcttgagagctgatgacaataac

SEQ ID NO: 628690 - DNA, 100 bp, Homo sapiens
ctccgtattctctgaagcctggaaacgaggcactcagttggaagagtccagcaaggaacgagttgaagcagttaatatggctgaaggaatcattcacgac

SEQ ID NO: 628691 - DNA, 100 bp, Homo sapiens
tcctgatggagctgtaaagccacccacaaacaaactacccattttcttttttggaactcatgagacaaatgcactcggtgatggaaagagagccactatt

SEQ ID NO: 628692 - DNA, 97 bp, Homo sapiens
cgcggctgctgtcgcccagcgccgccccgtcgtcgtctgccttcgcttcacggcgccgagccgcggtccgagtccctgtgcgttttattgcgacctg

SEQ ID NO: 628693 - DNA, 98 bp, Homo sapiens
ttagaccttcctactggtgatggccagccatcccttgaaccccctatggctgctgcttttgttgcctttccccatcttcctggttctgctccttcgtg

SEQ ID NO: 628694 - DNA, 101 bp, Homo sapiens
aaggaagcagctggccgaatgtcaaaagcaccttggacaaattgaaaacccagtactataaagaacgtttcaccataatgaccctccagagctgggaaacc

SEQ ID NO: 628695 - DNA, 100 bp, Homo sapiens
tcagggttgcccgagccccaaggcggggggcggcaccggggtgctgaaaggcttcagcacctgccacctgagaagatggaaaggaaggagctgcccccag

SEQ ID NO: 628696 - DNA, 75 bp, Homo sapiens
tgtatatgaagactcacctttgacattaataaaggtttctgaagcactgcttgatggcagctttgggaactgtag

SEQ ID NO: 628697 - DNA, 100 bp, Homo sapiens
accaacttgcgcaaaaacaacagacagccctatgctgtcagtgaattagcaggtcaagtctggcaccatctttgacaacttcctcatcaccaacgatgag

SEQ ID NO: 628698 - DNA, 75 bp, Homo sapiens
ctgagggcacgtgtttgcggttcagccctttgatgaccgcagcaggtcggatccgcacaagacggcaaagctctg

SEQ ID NO: 628699 - DNA, 97 bp, Homo sapiens
gccaccgcaggtcgaggacggtcggactcccgcggcgggaggagcctgttcccctgaggtaatggtttttacaaaggaccaaacagaaaaggaaata

SEQ ID NO: 628700 - DNA, 75 bp, Homo sapiens
tccatctaaagcaccagtaaaatatggtgaactcattgtcttaggtgacttatcagatgccctggtcatcttcca

SEQ ID NO: 628701 - DNA, 75 bp, Homo sapiens
gctacatcacccagagtggcgcttccgggcatttgtggaggacagtgaggacgaggacggcgctggggagggcgg

SEQ ID NO: 628702 - DNA, 75 bp, Homo sapiens
caggatggctggataaactctctcctcaagggaatcacccttcggtcatcgtgcagcctgggaagagacctttac

SEQ ID NO: 628703 - DNA, 59 bp, Homo sapiens
agagcactagtgtctagaaggcactaaggatatggccgcgtggaaagtgtcaaaattct

SEQ ID NO: 628704 - DNA, 99 bp, Homo sapiens
ggcgcgcggcgagctgagggtggcggcggtcgacatgttccaggtcccggatagcgagggcggccgcgccggctccagagatcgagatggtgatcatgg

SEQ ID NO: 628705 - DNA, 75 bp, Homo sapiens
tttgaagtagaagaagctgatgaagcatcagatggtgaaggagaaggagacacagaagtgatgcagcaggagaca

SEQ ID NO: 628706 - DNA, 96 bp, Homo sapiens
aaaaaatgcagataaagtgtttgccatgaaaatattgaataaatgggaaatgctgaaaagagctgagcctgacattgagatggcttgggccatgag

SEQ ID NO: 628707 - DNA, 75 bp, Homo sapiens
agaggaggctggagattccacccaaatcctcttctccaagaagcctcaagctcgaatgtgacaagttggccagtg

SEQ ID NO: 628708 - DNA, 98 bp, Homo sapiens
ctgcgtgctggtgatcgcgctgatgttcctggcctggggggaagttggatatgtcaagtgaccagatagctgccaatctgcaagcagttattaatgaa

SEQ ID NO: 628709 - DNA, 100 bp, Homo sapiens
agtcgcatcaaacagatgactacccagggagaggaattacgggaacagaaagaaaagtccgaaagagctggtgaagatggagctggaaaaacaagcttaa

SEQ ID NO: 628710 - DNA, 78 bp, Homo sapiens
cggatggcccccggtgcaagaggcgcaaacaagccaatcccaggaggaaaaacgcaaacatgtcttgacggaagacat

SEQ ID NO: 628711 - DNA, 73 bp, Homo sapiens
aggaactcatctcctgtgccgactgtggcaacagtggaatttggagtagtttcaaatacaagattgattgctg

SEQ ID NO: 628712 - DNA, 76 bp, Homo sapiens
gaccgaagagacgagggagctcttggataaggatcagtttgacaacttagaaaaacacacacagtggggaattgat

SEQ ID NO: 628713 - DNA, 83 bp, Homo sapiens
tgtgcccgggcctgcaccatgagcgtcccggccttcatcgacatcagtgaagaagatcagcttaacagagcgttccaaaaaga

SEQ ID NO: 628714 - DNA, 83 bp, Homo sapiens
agagcgtcacggcgtacgccctcatggggaaaatctccccggtgactttcagatgattcagggataatttactgcctctccag

SEQ ID NO: 628715 - DNA, 100 bp, Homo sapiens
cagagcaaaacatcactgtaattcttgctgtagaaagcttaaacttccaggatgccttccgcgccttccaccctgacctggaattcgtgggcaagttctt

SEQ ID NO: 628716 - DNA, 75 bp, Homo sapiens
aggctctacactgggatgcatacggtcctggttacctacctgggcaaagtctccaccactggcatgcagtttttg

SEQ ID NO: 628717 - DNA, 75 bp, Homo sapiens
accaccaacaagctgtcagagaaacatgaagaaacagattgtctcagtttacctagctttgaaaatgccataccc

SEQ ID NO: 628718 - DNA, 50 bp, Homo sapiens
gttcaaagacctgttcttaaaaaaaggtgtcatgtgattctctgagggag

SEQ ID NO: 628719 - DNA, 100 bp, Homo sapiens
ccttccggagcttctcagaagacagagggttttcttttgagacattattgcaagagcatctcaagcagacgtcgttacaatcgtgatttggaacaggatg

SEQ ID NO: 628720 - DNA, 80 bp, Homo sapiens
agagcggctgacgaaccagcgagtaggagagagacctgcctagagctggaacgttacctccagagcgagccctgctatgt

SEQ ID NO: 628721 - DNA, 90 bp, Homo sapiens
tctcaatcgattccgacctgctctgtgcctgtgaccttgctgaagagaaaagccccaagatggagtttcactgtgtcagccaggatggtc

SEQ ID NO: 628722 - DNA, 100 bp, Homo sapiens
cttggagcattttagcttggtaacactgatcccctttcagtaattcgccaaaatgacgaacacaaagggaaagaggagaggcacccgatatatgttctct

SEQ ID NO: 628723 - DNA, 97 bp, Homo sapiens
aacgctgcggacccagctcgctcctggtagcaagacccgaactggcaagttaaagtcttcagagccctgtatacgtttgaacccagaactgtaagtg

SEQ ID NO: 628724 - DNA, 98 bp, Homo sapiens
ccgggatttgggtcgcagttcttgtttgtggatcgctgtgatcgtcacttggtgtgggcaagagcagtttactgttgcgttttgcagacaacactttc

SEQ ID NO: 628725 - DNA, 98 bp, Homo sapiens
ttcttcctcttcctcggccggcgggcgtgcatcatccacggggtgctgcagatcctgttccagttgagaagctgatgtctcctcgacttccaactgga

SEQ ID NO: 628726 - DNA, 98 bp, Homo sapiens
ccgcgccctgcggggctgtccaacgccttccagctccggctcccgctgcctgcaccatgtccgccagaggtttcctatgttattcgagatgaagtgga

SEQ ID NO: 628727 - DNA, 89 bp, Homo sapiens
cagatctgaagacctattttactgataagaaaacacatctttacacactaagtactccaaagattcaggtttactcacgtcatccagca

SEQ ID NO: 628728 - DNA, 98 bp, Homo sapiens
atttatccagaagattgatcatcatatgggttgtagtgtcgcctgcctctggtgggaccctattcagcggttactcttctcaggagcatctgacaaca

SEQ ID NO: 628729 - DNA, 83 bp, Homo sapiens
tcaaacatccatatcataagtggaattttggagatattcaaaggtttgatgagaagagggcagtgcagcagctgagagcatgt

SEQ ID NO: 628730 - DNA, 75 bp, Homo sapiens
tgccctgctctgaggactacgacagtcaccgcaggttcgaagaaaaaggctgggattggtatgtgtgtgaaggtt

SEQ ID NO: 628731 - DNA, 75 bp, Homo sapiens
gccctggggcccgggggcgcgggccggggtgaacaaaactattgtgagtcgaggtatcattttctgcactcagcg

SEQ ID NO: 628732 - DNA, 94 bp, Homo sapiens
cgtacatatgagagggttgccttttcgtgcaactgaaaatgacattgctaattaccatgcgggatactatgaagtatgtctatggacaccatgg

SEQ ID NO: 628733 - DNA, 82 bp, Homo sapiens
tcggagaagcagtggtgggttccatgtgatggtggagtaggaggcaggtctccgcggcccgtttcctcctttcaaaagtcaa

SEQ ID NO: 628734 - DNA, 78 bp, Homo sapiens
aaaaaggctgggtgccgccgtcccccagctgcgcaaccctaggaactctcgggatattccccgagtccctccggtggc

SEQ ID NO: 628735 - DNA, 121 bp, Homo sapiens
ctacagcgccgcggggcccaggccgggagccgaccggcacagcaggccgtcaccgatgggttgtatatactactgaaatgaatggcaaaaacacattctgggatgtggatggaagcatggt

SEQ ID NO: 628736 - DNA, 75 bp, Homo sapiens
caggattaacactgcagagtaatgttcccagtgacctgacagcagaggagcgtcaagaactggagaacatccgac

SEQ ID NO: 628737 - DNA, 75 bp, Homo sapiens
ctgatactaacagttttacgatttaaaacttcgccagaattttgtgcggtgaaacttgccaaaatggtgggttat

SEQ ID NO: 628738 - DNA, 75 bp, Homo sapiens
gttaaatctgttcgtgccttacttgatatggattgactatctgctgccaaactcttgactgaatatggcgttagt

SEQ ID NO: 628739 - DNA, 101 bp, Homo sapiens
agcgagccatgatgatccaaacaccttggccacagatgtctttaattccaaaaacctggccgttcaggcacaaaagaagatcttgggtaaaatggtgtcca

SEQ ID NO: 628740 - DNA, 100 bp, Homo sapiens
cttcattcagatgtggtggaatatgccaaggaaaaactggagagcttcatcaaaaatagtgatagctttgataagtgtacgaagccatcgacagcagaga

SEQ ID NO: 628741 - DNA, 82 bp, Homo sapiens
tacttgaagccctacgccgtggacttccagcgcagacatgaagacatcttatccatcctcactgctgtcaacgatgatgtga

SEQ ID NO: 628742 - DNA, 75 bp, Homo sapiens
cctgggtctcaccatccttgcttgtgagagcagctgtgctccattgaagtgacttgtgaatcagccagtgtgatg

SEQ ID NO: 628743 - DNA, 90 bp, Homo sapiens
aacagagagagaggtggacagatctgagagatactgaggtttcattgaaaacagatcctgcaaaagttccaggtgcccacactggaaact

SEQ ID NO: 628744 - DNA, 90 bp, Homo sapiens
gtggtgtgatagcggcagcgaggggctcggagaggtgctcggattctcgtagctgtgccgggtgttgacttcaaaatcaaaactgtagag

SEQ ID NO: 628745 - DNA, 98 bp, Homo sapiens
caagtgattttgcagttacagcctgtgcaacaaggctggagtcttttgtgcaattgtttctcaccctgctgattctgtggtatctgtgttgaataaag

SEQ ID NO: 628746 - DNA, 75 bp, Homo sapiens
ctaggagagcatttgtatgttatggtgaatgccaaatttgaagggtggtaaatctcgtgaaaaggtggtgaagct

SEQ ID NO: 628747 - DNA, 100 bp, Homo sapiens
caggtttttcctaagctcaactctagccagctaggttcctggtgctttgggggtgtgtatgatatagtgaataatcttggctcccttgtggccagattaa

SEQ ID NO: 628748 - DNA, 82 bp, Homo sapiens
agcaactgaggcagcggcaggctcaggtgcagccgctgattttgactaaaggagaagttcaagtatcagataaagacacaca

SEQ ID NO: 628749 - DNA, 100 bp, Homo sapiens
atttgctccatgataatctgagatacatgactgatggtggacttggcctctatacccgtcgcctgaaccggctccctgatgggatggctgtggtacggga

SEQ ID NO: 628750 - DNA, 75 bp, Homo sapiens
ctcaggggcgacacaggagtgtcaaggaaagaccacagcaagattctttcattcgtctcctcctagcctggggga

SEQ ID NO: 628751 - DNA, 98 bp, Homo sapiens
gagaagctgctgaatgactacctgaaccgcatcttttcctcttctgaacatgcacccccagcagccaccagcagtggaactgtcaccgctgttcccag

SEQ ID NO: 628752 - DNA, 100 bp, Homo sapiens
actcggcctcgaacatcgtcagcccccaggaggccttgccgggccggaaggaacagacccctgtagcgggagaagatggtataaactggtccatcagtga

SEQ ID NO: 628753 - DNA, 100 bp, Homo sapiens
aggagctgcacaagctgctggacaaggaccctgacctgcctgtcgtcgtggtggccaacaagcaggttttctgtctcaactggtctctgacaagcctctg

SEQ ID NO: 628754 - DNA, 87 bp, Homo sapiens
gcgcggcggacgcgcccgggacgcgcggcggcaccgggaggccgggccgagcggagaggcagatgcgaaccagaacaatgggacctc

SEQ ID NO: 628755 - DNA, 100 bp, Homo sapiens
ccgcgcctggccggggccgaggacaccgcggccgcccgggcctgcgggaagcgatggagcccgggaaggtcagtaacagatccaagagatggaaagagag

SEQ ID NO: 628756 - DNA, 75 bp, Homo sapiens
gatgattctagcaggttcctgagtcctcgagcgcgggaagaaagggacagaagatgagcctgtcggtcctggagg

SEQ ID NO: 628757 - DNA, 83 bp, Homo sapiens
cttattgttgattccttggttgccgtgctgagtcctgctttaaggaagcagatctggtaccaaaggagaatttggagagctgg

SEQ ID NO: 628758 - DNA, 75 bp, Homo sapiens
tcaggacaacccagatgtgcaacaaagtgcgatgctcccattgctatcacatgttttaccagaggcttggacatc

SEQ ID NO: 628759 - DNA, 100 bp, Homo sapiens
gtgaaggaatctggaggaaagctgaccaggcggcttgtgaacagtcaggctatgtggaggagatatagagccaagaaatatttatgtaaagtgaaagctg

SEQ ID NO: 628760 - DNA, 75 bp, Homo sapiens
ctgcccgccagggcccagatggtggccacagggcagccccatgagggctccagctactcttcgaggaaggactgt

SEQ ID NO: 628761 - DNA, 95 bp, Homo sapiens
tgatagaatgaagaccacaataaaagagacctctacttagctcagcaattcttaccttctgtgagccgtgagctttgaggcggtgggatgtgtca

SEQ ID NO: 628762 - DNA, 90 bp, Homo sapiens
ggactgaaaattcttcaaaccggagtcgggtcgggaggtatggaaacattggaacttcaaaaggacatcaaagaagaatcagatgaagaa

SEQ ID NO: 628763 - DNA, 75 bp, Homo sapiens
ttggcaggacctggggccaaaagccaaggttatcctacctacaaagaaaaagtaaagaaaaggcctggaggccgc

SEQ ID NO: 628764 - DNA, 88 bp, Homo sapiens
tatttaacttgcattcaaaaaacaggatctcagttctcctttcttgtaaagagcagacgcctccgcctagacctgaagcctaccccat

SEQ ID NO: 628765 - DNA, 100 bp, Homo sapiens
gtcacaggagctgtagagaggaccccggtacatctgaaagccgggaaatgttaaacacagtgggaatatcacttttgatgagattgtcaacattgctcga

SEQ ID NO: 628766 - DNA, 75 bp, Homo sapiens
cttgctaaagaggtagcaagaaagaaaattagagtgaatgtagttgcaccagggaggtggggaagacagggctcc

SEQ ID NO: 628767 - DNA, 87 bp, Homo sapiens
cgctgcgcctcgaggtgcgcgccggcccggactcggcgggcatcgccctctacagccgcacagagcatggagaatgatgaacttccg

SEQ ID NO: 628768 - DNA, 71 bp, Homo sapiens
gggagcagcgagccggagccccgggcgctcgaatgcaggatctgaattctacaaacacattgtgctttctg

SEQ ID NO: 628769 - DNA, 100 bp, Homo sapiens
tccactcgtggtatgagagtggataatataatcaactcctctgcctgtgaaactgcttttggttacaagggtctaaagatcctgttatactatattgctg

SEQ ID NO: 628770 - DNA, 80 bp, Homo sapiens
agcccttccggatcctgcgcgcagagcactggagatattattgctgtcatgataacagaattgaggggtaaggatatttt

SEQ ID NO: 628771 - DNA, 97 bp, Homo sapiens
acacagcatcaatggcaggaggtttcctgttgaggaagctgccctctgtcgacagctccccatggaagctgagactcttgccccagttcaggctgct

SEQ ID NO: 628772 - DNA, 75 bp, Homo sapiens
ggcaggctgggcacgaggaccatgctgggccggagcctccgagaatactatactggcaattgctggagaagattt

SEQ ID NO: 628773 - DNA, 98 bp, Homo sapiens
gactcaagcgatcctcccaccacctcagcctcctgagtagctggaaccatcatatgcaccagcacgcctggctaatgagccaagccccccgagaggcc

SEQ ID NO: 628774 - DNA, 97 bp, Homo sapiens
atcacgttgacgtccatttaccagtcttccctggcaagattcttctgaattgtgctgccttggccaaaagaggtgttcctgatccaagcagaaccct

SEQ ID NO: 628775 - DNA, 100 bp, Homo sapiens
ctcccaagtagctgggactacagtaatgtgtgtggctggtattggacttgttgtattattcttcagttggatgctctctatttttagatctaaatatcat

SEQ ID NO: 628776 - DNA, 50 bp, Homo sapiens
accatccctatcctctatgtcaaggtgtttgatgcgatcatgaatttcaa

SEQ ID NO: 628777 - DNA, 98 bp, Homo sapiens
acgcttcgtcctccacctctccctccaacgaggcactggctacaattaggcttctcgacgtcctgtgcgaaatgactgtgaatactgagctgctcggc

SEQ ID NO: 628778 - DNA, 139 bp, Homo sapiens
agccaacactgatcttgcaaactcagatgcgctgaagctagctaaagaagttgatcctcaagaacgctagccctaattaaaccagatgcaatatcaaaggctggagaaataattgaaataataaacaaagctggattta

SEQ ID NO: 628779 - DNA, 51 bp, Homo sapiens
cgcaaccagccttctagggcggcggagctgttccaaagacctaatgcgctt

SEQ ID NO: 628780 - DNA, 75 bp, Homo sapiens
caatgcaggactgctctcctactacacggcccacaatgccccgctgagccggtgcagcagctgagtggatccaag

SEQ ID NO: 628781 - DNA, 83 bp, Homo sapiens
atccaaagcatgtctgcaacccagccattttcaggaactgtggctgcaccatctgtcttcatcttcccgccatctgatgagca

SEQ ID NO: 628782 - DNA, 75 bp, Homo sapiens
tggcacaactgtccacgtaggcattcaccccagcaagggttttggtgcctttgaacgctcaatcttgactcagat

SEQ ID NO: 628783 - DNA, 83 bp, Homo sapiens
gcagaataaagctcgagccgaaggacatatggggcgagaggtcaatgatcttaaaagaaaatctccttcagatctttggaaag

SEQ ID NO: 628784 - DNA, 144 bp, Homo sapiens
tgggagctgtagaccggagctgttcctattcggccatctttgctcctccctgcaactaactccattcttaattgtcttactactttgaccgcgatgatgtggctttgaagaactttgccaaatactttcttcaccaatctcatg

SEQ ID NO: 628785 - DNA, 96 bp, Homo sapiens
cccagatgtctgacagccctgtgtgacaccaagataagtaacgttcctcatgagagtgctggactcctacggggatgactaccgggccagccagtt

SEQ ID NO: 628786 - DNA, 75 bp, Homo sapiens
ctgcgacatgcgggcagctgccctgtgtgacaagcattccaagcgaggcatccgctcgacggcgggagattgagg

SEQ ID NO: 628787 - DNA, 75 bp, Homo sapiens
tgcctcctatgtcttccatccagacaatgctagttcacatgagactctgaatatagtggaggagaagaagcgggc

SEQ ID NO: 628788 - DNA, 100 bp, Homo sapiens
gatgaggagatgtactcagcccacatgcccgctcacctgcgctgtgatgcctgcagagctgtggcttaccaggtgccaggaccattgacaccagaaatgg

SEQ ID NO: 628789 - DNA, 83 bp, Homo sapiens
atttacgcggatgtcggcgaagagttcaaccaggtttggtgcacctcgatttggaggaagtagggcagggcccttatctggaa

SEQ ID NO: 628790 - DNA, 50 bp, Homo sapiens
aagaatgaagccgcggaccctcacgatgggctatgtgcgggagtatattc

SEQ ID NO: 628791 - DNA, 100 bp, Homo sapiens
ctccggcctcgccatgaggctcttcctgtcgctcccggtcctggtggtggttctgtcgatcgtcttggaagaatcctcactatggatgggctcattgagg

SEQ ID NO: 628792 - DNA, 101 bp, Homo sapiens
gacggccccggggagacggacgcgtttggcaacagcgagggcaaagagctggtggcctcaggtgaaaaggaaaatttcatggaaatccaatgcatgtagct

SEQ ID NO: 628793 - DNA, 83 bp, Homo sapiens
atgttcgcctgctccaagtttgtctccactccctccttgaatcctcactatggatgggctcattgaggacattaagcatcggc

SEQ ID NO: 628794 - DNA, 106 bp, Homo sapiens
ctggaatgatgtcgtcagtaatgcctggaatgatgatgtctcatatgtctcaggcttccatgcagcctgccttaccggagcaatttacagcaatgagggatttata

SEQ ID NO: 628795 - DNA, 101 bp, Homo sapiens
cccgagtggaggaagcaatacatccagtatgagcattgcagtgtcgagatggctatgaaccctgtgtaaatgaaggaatgtgtgttacctaccacaatggc

SEQ ID NO: 628796 - DNA, 100 bp, Homo sapiens
taacatcacggagctgaatctgccgcagctagaaatgctcaagaaccagctggaccaggtggaatgaggtaccatctactgtctccagaggaccgagaag

SEQ ID NO: 628797 - DNA, 85 bp, Homo sapiens
ggttagtgtgctctgagggagggtccgagccagccgctgttttgccggaggagcccctcaggccatgctggctatgagtttgaca

SEQ ID NO: 628798 - DNA, 100 bp, Homo sapiens
aggtggagttgctgcccttccggagtccgccccgtgaggagaatggcaaactgtccttggaagaattcatcagaggtgccaagagcgacccctccatcgt

SEQ ID NO: 628799 - DNA, 51 bp, Homo sapiens
attaaaaccagggctccacagttaggagggcccgatgatgcacaacaaaaa

SEQ ID NO: 628800 - DNA, 80 bp, Homo sapiens
agacccagccggagcgagcaacaggtttaactatagatcaacacatcatcttgcatctcatgggttctatgaatttttaa

SEQ ID NO: 628801 - DNA, 104 bp, Homo sapiens
cccgaaaacggaagcgcagggagaaggaagaggtgtttgaaaaggtatggcctcacaagtcttggtctacccaccatatgtttatcaaactcagtcaagtgcct

SEQ ID NO: 628802 - DNA, 98 bp, Homo sapiens
aggatccgagcctgtggccgcccatcagggggaagaggcgtcctgttcttcctgggggactggcagaaaaacgttgacctcttggcgagaatgcaaag

SEQ ID NO: 628803 - DNA, 117 bp, Homo sapiens
cctgcagtacctgcagaaggtctctggagacatcttcagcagcaggatacagacgtccctcaccagtgccagcttggggtctgcagatgagaactccgtggcccaggctgacgatag

SEQ ID NO: 628804 - DNA, 100 bp, Homo sapiens
tgctccccgtcgcctcctcggcggcggcctcagattttaggtgatgggcaagtcagaaagtcagatggatataactgatatcaacactccaaagccaaag

SEQ ID NO: 628805 - DNA, 76 bp, Homo sapiens
ctcgagacactcagcctcttgttggctaagaggctgtggccaggccagctgggctcggggagcgccagcctgagag

SEQ ID NO: 628806 - DNA, 100 bp, Homo sapiens
cgggtgcctggcctcgcttctgtcccattgcacgtgcattatttaatcacatagacaagtcaggattgaaggatagttctgtcgaagaactcaagaaaag

SEQ ID NO: 628807 - DNA, 100 bp, Homo sapiens
ggacgccatgtccatggaggaccccttctttgtggtgaaaggataagatgctcccaagtcccttgcagctctcttcagaagaaaaatcactagtgctctg

SEQ ID NO: 628808 - DNA, 99 bp, Homo sapiens
acagggaatccgggtgtccctgtacctgcagctgctgcagctgctgcacagaaattaatgcgaacagacagacttgagtataaggatgcatttatgaaa

SEQ ID NO: 628809 - DNA, 82 bp, Homo sapiens
cagccagatctttattacgagtactacccgcacgtgtaccctgggcgcagggggtataaaattcccgtcattgaaaatctag

SEQ ID NO: 628810 - DNA, 96 bp, Homo sapiens
ctaactagaagggatacccttccatttcaaagaacagaatgctaaggaagctgtggcaagaaagaccacagcaagattctttcattcgtctcctcc

SEQ ID NO: 628811 - DNA, 101 bp, Homo sapiens
gcggacgctcggtcccgcgctgcgcatccccgcggacgccacagcgctgtctcggtccagctcgacttccagctcaggctccagcaccagcactggctcaa

SEQ ID NO: 628812 - DNA, 100 bp, Homo sapiens
gtcagtgggtccactggtagcccccacccctctccgtccatggccccagatgacacttcagacgctgaccggaaaggagattgagattgacattgaacct

SEQ ID NO: 628813 - DNA, 82 bp, Homo sapiens
tttgggaaagccactcgaaaaggtccagtggcattgcagagcacggatggttgcaggagccaacttttacattgttggacga

SEQ ID NO: 628814 - DNA, 76 bp, Homo sapiens
gaccgtaaaaggaattgatgcttctgattaccagacagtccagttggctgattgcaattctggcccaactcaaccc

SEQ ID NO: 628815 - DNA, 100 bp, Homo sapiens
agacgatctgcacttcgcattttggcattgacatttaattttagggtcctttatatagaagggagagtaggctgttcggctcttgaatcccagcgatgaa

SEQ ID NO: 628816 - DNA, 84 bp, Homo sapiens
caagagaaactttatgtgcctgtaaaagaatacccagatgtcttgtccaataagcatgtggctcctgatcatcttttgcaaatc

SEQ ID NO: 628817 - DNA, 126 bp, Homo sapiens
gcctgcggtgcctgagctgagtgaggccgaggccgggaggccgtgcccggaggatggaaaggcagatgtaaagtccctcatggcgaaatataacacggggggcaacccgacagaggatgtctcagt

SEQ ID NO: 628818 - DNA, 100 bp, Homo sapiens
ctacaaatgaggcagcctggggcagatgtggaattagaagaagctattagaagaagtcttgaggaaatgtaattaaagatattaccacacaacatcaagt

SEQ ID NO: 628819 - DNA, 100 bp, Homo sapiens
attgactataacgttgaacagtcctgtatcaaaactgaagatggtttgaaacagcttcacaaggcaatctgaaagcaaatcctgtttagatgcaggcgaa

SEQ ID NO: 628820 - DNA, 101 bp, Homo sapiens
cggctctcctccgcgcccccactcgcgctgcgatgacgcgctcactgttcaagggaaacttttgggaatgaatctgaagtctgctgcagtaaaacacagaa

SEQ ID NO: 628821 - DNA, 100 bp, Homo sapiens
ctgcgaaggccgggacccggttccccggcccacagtgggggtgtgcaaacccgagagaactgggacccaattcttcgaaggtctggaatgtatactgtag

SEQ ID NO: 628822 - DNA, 100 bp, Homo sapiens
tcagcgttcccctctggcgcctttgctgctcctctctctgcacggaaacctcgacctgtctcccagttggttgcacagcaggttactcagcagtttgtgc

SEQ ID NO: 628823 - DNA, 111 bp, Homo sapiens
ggaggccatcgtgggcctgggactcatgtactcgcagttgcctcatcacatcctagccgatgtctctctgaaggaaccctgagtgccgctatgtggccagcagctccaagg

SEQ ID NO: 628824 - DNA, 90 bp, Homo sapiens
tacatgaagagtggcttcaggactggtgtagaagacatcgtggccataatgattcctgagccaaaagggaaggagatagtaagcctgctg

SEQ ID NO: 628825 - DNA, 83 bp, Homo sapiens
cgggacccggtgtctgctcctgtcgccttcgcctcctaatccctagccactatgctgctgcggactctggagcgtgagaacca

SEQ ID NO: 628826 - DNA, 87 bp, Homo sapiens
aaaatggtggagtctgggaaggatttggagatttttcccccacagatgttcatagacaagccttggacaagattcgctatgagagcc

SEQ ID NO: 628827 - DNA, 75 bp, Homo sapiens
gtgaggcctccccagccacgtgaaactgtgctgaatgtggagtaaatgcagatgttgagaaacatcttgaattgg

SEQ ID NO: 628828 - DNA, 75 bp, Homo sapiens
gaaaccctttgccatcgacatatttcctgtcaccaacaaagatttcagtgtgaagcctcagtttaggtcatctgg

SEQ ID NO: 628829 - DNA, 100 bp, Homo sapiens
cgggatttgggtcgcagttcttgtttgtggatcgctgtgatcgtcacttggtgtaccgcaaaaccgtgattgcccagtggagggcgctggacctggatgt

SEQ ID NO: 628830 - DNA, 75 bp, Homo sapiens
gtggtgaatcccctgtttgagaaaaggcctaagaattttggcattggtacaaatctattgtcaagtacaagacag

SEQ ID NO: 628831 - DNA, 75 bp, Homo sapiens
ctgctacactgccgcagcctgcacaaggccatcatgcagaagggggatacaaacataaagcccatcctccaagtc

SEQ ID NO: 628832 - DNA, 75 bp, Homo sapiens
ggttattcgagtgaccgagaccgcggccgggaccgaggatgtgcactcccagcaacacccctgccacgccgccca

SEQ ID NO: 628833 - DNA, 100 bp, Homo sapiens
caacatttagaatttctacttattctgagacctgtcatttactccatcctttatagtgatgctacaggacgaagaggaatggataaaaacattggcgagc

SEQ ID NO: 628834 - DNA, 102 bp, Homo sapiens
gccgctcctaagcctgcacagccgcggcggcagcagcagtgagagatctggtggctggacccagagctgacctatggctgcgccaagcccttcgtcttcacc

SEQ ID NO: 628835 - DNA, 100 bp, Homo sapiens
cgagaccgggcccttcctcgaggcggtgtcccacctgccgcccttcttcggtggctgcgctggagcggcagatctttgacttcctgggctaccagtgggc

SEQ ID NO: 628836 - DNA, 100 bp, Homo sapiens
cgagacgacggcgatgaggaagggctcctgacacacagcgaggaagagctggaacttccactgctgggtggagtcgtggatgaccaggccggacctgcag

SEQ ID NO: 628837 - DNA, 98 bp, Homo sapiens
tcttccatgcccactgcctacaacacaggaatttttcacagacaacctatgggacacactcccttgctcatggcaggaagcattggatggactgaaac

SEQ ID NO: 628838 - DNA, 98 bp, Homo sapiens
gccaacagagagaagatgactcaggcgaggaaacgagacctctttcgttccttctagaaggtctggaggacgtagagttattgaaaatgcagatggtt

SEQ ID NO: 628839 - DNA, 72 bp, Homo sapiens
ccggcgccgaatcactgactggcacaggtgttggggaagtggagccagaatccacagatgtcattatccatc

SEQ ID NO: 628840 - DNA, 100 bp, Homo sapiens
gaacagattggcacccgaattgccaaagttttggaaaaggtttgcatcgccagcttctatatattacggcctttttttttgctggatattatcttgtaaa

SEQ ID NO: 628841 - DNA, 100 bp, Homo sapiens
gctgaggcggatggaagaaggccagtgcggttgttatggaagttgttgcgaagctctttggtgaataatagaactcaggccaaggtagcggaggagctgg

SEQ ID NO: 628842 - DNA, 121 bp, Homo sapiens
gccagctgccgaggcgttcggtcctgctgttgcggccgctgccccagggctgcggggacgaaaccaaggtgtatgttggtaacctgggaactggcgctggcaaaggagagttagaaagggc

SEQ ID NO: 628843 - DNA, 100 bp, Homo sapiens
cttccagtgccaaaccaaactggagctggtgcagcaggaattgggatcgtgtcgctgcgagtttatgtggccgaggcagacaagtggaattaggccttgc

SEQ ID NO: 628844 - DNA, 100 bp, Homo sapiens
ggagcttctgggagccaccgtctgaagactcggtgaaatacctggagtgctcagctctcacccagagaggcctgaaaaccgtgttcgacgaggccatccg

SEQ ID NO: 628845 - DNA, 75 bp, Homo sapiens
caggaccagcaccctcttctacggaggaaggaacgggcacagcaggctcggctggagcgggacttgagcaacaag

SEQ ID NO: 628846 - DNA, 75 bp, Homo sapiens
gagtgagagatggaacccgaagaagaaaggattcgttacagccagagattggctatgactttgcagccgtcctgg

SEQ ID NO: 628847 - DNA, 75 bp, Homo sapiens
cccgggggtggtgacagcaggtctgaggtgcagtcagcctcagtttccaaagccggaaaaggatcctctagtagc

SEQ ID NO: 628848 - DNA, 100 bp, Homo sapiens
gaggatgttcagcagcgcggcagagtcatggggctcaacgggacccaggtggagtctgtacagctcaaagtcaacatagcccgaaaacagcccatgctgg

SEQ ID NO: 628849 - DNA, 73 bp, Homo sapiens
ggaacggtcgtggagaagaagagctgctgatgaggactgggacagattcttgaagacctggatgaacaaattt

SEQ ID NO: 628850 - DNA, 90 bp, Homo sapiens
tgcgccccgctctgctgtgggcgctgctggcgctctggctgtgctgcgcgacccccgcgcatgacgcaaacatgcagatctttgtgaaga

SEQ ID NO: 628851 - DNA, 100 bp, Homo sapiens
ctgcaccactgtcgccttcacacaggtgacatgtatgaagtcggggcagagagtggccgctactactgtctgaacgtgcccctgcgggatggcattgatg

SEQ ID NO: 628852 - DNA, 90 bp, Homo sapiens
ctcaagaaggaggtcagccgggtgctgtgcaagcggtgcgccaaacatcatgtcaatggcaacagaacagtcgaacctttcccagaggga

SEQ ID NO: 628853 - DNA, 78 bp, Homo sapiens
aggacttcggcgcgggactcaagtacaactcccggcacgagccgtgctggtatagaggactctaagaagtggggcatg

SEQ ID NO: 628854 - DNA, 148 bp, Homo sapiens
ccgggaagcactacaagggtcctgaagtcagttgttgcatcaaatacttcatatttggcttcaatgtcatattttgggtcaaaatgcagatcttcgtgaaaacccttaccggcaagaccatcacccttgaggtggagcccagtgacac

SEQ ID NO: 628855 - DNA, 100 bp, Homo sapiens
ctggaagtagcaggccgcatgcttggaggctattgagggcacctacattgacaagaaatgccccttcactggtaatgtgtccattcgagggcggatcctc

SEQ ID NO: 628856 - DNA, 100 bp, Homo sapiens
acaaattatgattggaaggaactggaaaagcaatccctctgtgagagcgagcgggcacgagtccgggctgcacggaagcacatcctggtgtgggccccga

SEQ ID NO: 628857 - DNA, 100 bp, Homo sapiens
cggcctctgcgagccccgggtcccgccctggggccggcgatgtgccaccgaggctgaggatgatggtagattgccaggttcagtgggaaatcccacctgt

SEQ ID NO: 628858 - DNA, 119 bp, Homo sapiens
ctccgggccgcgaagtcgcagcgccagacccaaggcccccgagtgagcgcgggcgccgagacaatgcagatcttcgtgaagactctgactggtaagaccatcaccctcgaggttgagcc

SEQ ID NO: 628859 - DNA, 100 bp, Homo sapiens
tccacgaaaggcagccgcggatcgccgcgctcagcgacaaacaagttattcagcttctcaaggctggaaaagcgaaggaagtttcctacaatgcactagc

SEQ ID NO: 628860 - DNA, 82 bp, Homo sapiens
ggcggttggtgcggcctccattgttcgtgttttaaggcgccatgaggtccctggaggagtctgtaggaaagcctctgtacct

SEQ ID NO: 628861 - DNA, 101 bp, Homo sapiens
ggattttgcctggctggaatcattctcaccttgtatgctttacgtttgaagacagtgaaaaacaaatagattataagtcatttttctctgccctgaactgg

SEQ ID NO: 628862 - DNA, 71 bp, Homo sapiens
cgattgtcgatgggctcgctccagaggacatgagcaaggagcagctgctggagccagttctgcttctcggc

SEQ ID NO: 628863 - DNA, 82 bp, Homo sapiens
gagaaggcggcggctctctggtccgcagcggcaacagtaacgaaaaacagggctgaatgggcaaagaagtggggaatctgct

SEQ ID NO: 628864 - DNA, 75 bp, Homo sapiens
tggggatctcttatccatggaatcagagggtgcattcaaagctttggaactgcgacataactagcgatggctgct

SEQ ID NO: 628865 - DNA, 100 bp, Homo sapiens
ccttgagggatatctttcttcactcctcttcacttcttcactattgcagatcccaaccccctgctagactaataagtggagaggaacatttttcaagcaa

SEQ ID NO: 628866 - DNA, 74 bp, Homo sapiens
gggagaagcgcgatgacggctacgaggccgaaaaatggctacaaacttcctagcacatgagaagatctggttcg

SEQ ID NO: 628867 - DNA, 100 bp, Homo sapiens
tttacactgacagaagcagtggtcgaatccagtagaaaactggtcaaggaagcttgcctaagtgtctagagagctgagtgggttgcctcggatcggccag

SEQ ID NO: 628868 - DNA, 74 bp, Homo sapiens
aacaccagtggaagatgatcacatcccaggtgatgagacaaaccatgcttctgccacatcaacacaggactttc

SEQ ID NO: 628869 - DNA, 75 bp, Homo sapiens
gtctctggagacatcttcagcagagcttgggaaagtcgaggtgacggtgtttgaccctgactccctggaccctga

SEQ ID NO: 628870 - DNA, 74 bp, Homo sapiens
ccgcggctccggccctggccccgatggctctgtgcaacggagactccaagacatcaaaatttacaagctcttcg

SEQ ID NO: 628871 - DNA, 73 bp, Homo sapiens
agcaccccctgggacagcgccacattcgccggtacgactttactccgtgacataaaagaaggactacagaaag

SEQ ID NO: 628872 - DNA, 75 bp, Homo sapiens
agatcgaggttgaggaggaactctgcaagcaggtgaggaagaggatggagatgaagatgaggaagctgagtcagc

SEQ ID NO: 628873 - DNA, 90 bp, Homo sapiens
gaagacataaccgatcctgcaaaggtcagacatatttccaacatttgggtcaaaaccttgtccaacaagactttcttctgcaaagaaaaa

SEQ ID NO: 628874 - DNA, 129 bp, Homo sapiens
aggcactcagctcaaatacacacacctgttgccattatagagctggaattaggcaaatatggacaggtgtaaaatactagacagacatctggcaatattgtccaagaaacacctcgagaccaaattttt

SEQ ID NO: 628875 - DNA, 82 bp, Homo sapiens
caagaaaatggactccctggctgctggagagttgaatgccagccaccagccatggataatggcatcagctgctaaggaattt

SEQ ID NO: 628876 - DNA, 100 bp, Homo sapiens
gatgaaagtgagcagtccagaaagcggcttatcgaacagagccgggagttcaagaagaacactccagagttttgtgaggagtttaaagaaaagtgtccta

SEQ ID NO: 628877 - DNA, 101 bp, Homo sapiens
ataccaggcatacatttggcagaataaatgaaccaggttggaaaggtactttgttgggtgttgctatggctacagtgaatgctatgatagcagaatatggc

SEQ ID NO: 628878 - DNA, 100 bp, Homo sapiens
aagctatatttaacggagatcctgatgaagttcgagcactaatatttaagaaagaagatgttaactttcagactcctcagacccctgcacaattgagaga

SEQ ID NO: 628879 - DNA, 50 bp, Homo sapiens
tggccaagaatcagaggaagtgggctaaatgtgaacaataatgtcttgga

SEQ ID NO: 628880 - DNA, 90 bp, Homo sapiens
cctctctatgatatgctaagaaagaatcttgtcactttagccactgctactacaggtttattaatgccagaagaagaatagtacagccca

SEQ ID NO: 628881 - DNA, 75 bp, Homo sapiens
agcacaattgtggtggatgccattgatgtgttgaagtccaggtttacaaagaattggcagagggggtcgatttgg

SEQ ID NO: 628882 - DNA, 83 bp, Homo sapiens
cttcgctctttgcatcttaactgcagcaaacggggattcagcgtccgatcctttggaacagggactcacgtgaagcttccagg

SEQ ID NO: 628883 - DNA, 98 bp, Homo sapiens
caagctcttaagcatcgtggcgctggtggggggagtcctcatcatcatcgcctcctgcgtcatcaacttaggcgattcaagtcaatctgaaagtccca

SEQ ID NO: 628884 - DNA, 101 bp, Homo sapiens
ggcaacgagagcgtctaccccgaactctgctggccttgagcccaccaagaaaacacattgtggagcgctatacagagttttatcatgtacccactcacagt

SEQ ID NO: 628885 - DNA, 75 bp, Homo sapiens
tcgtgctgcagtacgtgcctcatgatcgcttcaacaaggggtgtcacacctgctgccctacttctacctcctcta

SEQ ID NO: 628886 - DNA, 51 bp, Homo sapiens
gggacctgggactgctcacagccaggtgatttgatgaaggctgctgcagga

SEQ ID NO: 628887 - DNA, 100 bp, Homo sapiens
ctgcgccgggccccgggccccgatggccccgaccgcgtgctggagctcttcgacccacccaaggaagagctaaagatggctgaatttctagatgaccagg

SEQ ID NO: 628888 - DNA, 50 bp, Homo sapiens
cagcaaaggaaccaagcagagtgacagtgagagggtccaagcctggtaag

SEQ ID NO: 628889 - DNA, 89 bp, Homo sapiens
acacagcaagttcctgcttctgggacagctctactgacgtgttctaagaacggaagcatctgggctggatggaatttagcatcaagcag

SEQ ID NO: 628890 - DNA, 90 bp, Homo sapiens
ccctcaagagctggatttgacacatcaagggcagccaattactgaggtatcagaacaaggtttaatagaaatccttaaaaaagtaagcca

SEQ ID NO: 628891 - DNA, 74 bp, Homo sapiens
ctcggttcgcgaaagccattgctgacgaccagcaatcccacagagtattgatgaggaaactgaagtttggagcg

SEQ ID NO: 628892 - DNA, 75 bp, Homo sapiens
cagaaactggccaaggacattcaggtgaataccagagaagaagttgaagatctttgccgcctagacaaaatgata

SEQ ID NO: 628893 - DNA, 98 bp, Homo sapiens
ccgcggcgccgagtcgaacggggagccgagctggagctgccgcggcgcagccagatctccaagacgacatagatccacatctccttccccttctcgac

SEQ ID NO: 628894 - DNA, 78 bp, Homo sapiens
aagccacgtgcagacatctacaaccttcgatctcctgacgagtggaaccgtcccaaaatgtcccttgctcagaagaag

SEQ ID NO: 628895 - DNA, 102 bp, Homo sapiens
cagcacctgtgccagctccgcaagatgccgaaagttcagtataaatcgaactgtaaaccatccacatttgcatatcctgcccctctggaagtaccaaaagaa

SEQ ID NO: 628896 - DNA, 100 bp, Homo sapiens
gtgggcgtctggcggggtccgcagtttcagcagagccgctgcagccatggccccaatcaagttatcaggaactgttgccgttattacatcagatgggaga

SEQ ID NO: 628897 - DNA, 90 bp, Homo sapiens
ggaccccgagctggtggtgaccgtgctgggagacctggagcagctgctcttcagccagatgctggatgcctgtgaggagccaccaacatt

SEQ ID NO: 628898 - DNA, 75 bp, Homo sapiens
gtcgtgccggcgccgcccggaccgccaggtttggaaggcgctttgagtccccgctgctgtggcagagcgccatca

SEQ ID NO: 628899 - DNA, 83 bp, Homo sapiens
gcggaagatcgtcgccacctggatgctggaggagcaggccgggctctcgccatgggtcactgtcgcctctgccacgggaagtt

SEQ ID NO: 628900 - DNA, 100 bp, Homo sapiens
agatggcggccaatgtgggatcgatgtttcaatattggaagcgctttgatttacagcagctgcaggttgaaatcacaaagattagacacctttttagata

SEQ ID NO: 628901 - DNA, 100 bp, Homo sapiens
gttttacttagtagaacatcgtgttgctcaggcaacaggagagactcctatagcagtcatgggcgagacactgccctaaccatcatggaggtggccgagg

SEQ ID NO: 628902 - DNA, 91 bp, Homo sapiens
attcgcagtggtcgcttcttctccttggttgagactgagctaaagttaatctgttgtgacattctggatgtactggacaaacacctcattc

SEQ ID NO: 628903 - DNA, 83 bp, Homo sapiens
gtgggccgcgtcgaagacatggaccagggctacggaggagcaggccgggctctcgccatgggtcactgtcgcctctgccacgg

SEQ ID NO: 628904 - DNA, 48 bp, Homo sapiens
agaatgaacaaacattgagagcaggtcagaagagatcaattctacaga

SEQ ID NO: 628905 - DNA, 80 bp, Homo sapiens
tgccaccagcttcccggttcatcattatattcgagcagttcctccaggccaaggatttggagtcccaccaggtggagcag

SEQ ID NO: 628906 - DNA, 97 bp, Homo sapiens
ccaggaaggttcttaaagaagtcagggtgcaggatgagaacaacgacttcattcacctctcagccacccatccctgcagtcctccctaagcaatccc

SEQ ID NO: 628907 - DNA, 100 bp, Homo sapiens
atgacagtaacaatgtggagaaagacattacaccatctgaattgcctgcaaacccagggttctccaaaaaatgtggaatcctttgcatctatgctgagac

SEQ ID NO: 628908 - DNA, 90 bp, Homo sapiens
tggacacgggcgccgaggaggacgtcgccagcaggcaggaaactgcatatcttctggtttacatgaagatggagtgctaatggaaatgcc

SEQ ID NO: 628909 - DNA, 98 bp, Homo sapiens
cacgagtctcagtccgaccgggctagctttggcgaggggacggagccggatcaggagccgccgccgccatatcagagtactattaatcccgtagatgc

SEQ ID NO: 628910 - DNA, 100 bp, Homo sapiens
ctcgaagtgcgcaaacttgacactcaccctgaccgttacatggacacagaacagtatgaagaagcagtacgagactatgaaaaagtataccagacagaga

SEQ ID NO: 628911 - DNA, 100 bp, Homo sapiens
aatccagagatttccacagaaggactgggatgatacaccttttccacagggaattgagttggttcgatacaagaggctgttttcctagcgtggcttgctg

SEQ ID NO: 628912 - DNA, 101 bp, Homo sapiens
gaaaagcgagcctcttctgataactcaggatttacttgaaacgaaaggagaacccaggcaacttcaggtgaccaaggaagaaaggcacattgttaaacctc

SEQ ID NO: 628913 - DNA, 95 bp, Homo sapiens
ccacaatgggaaaaggactataaccttcagccgatgaatgcctatggactcttcgatgaatacttagaaatgagaaatggcagcagtgtctgctt

SEQ ID NO: 628914 - DNA, 101 bp, Homo sapiens
ccggggggcagcaacggcgacatccagcaagctgtcaccactgactaaagaagagaaaactgcggcagagcaattcaaatttcacatgccagatttatgaa

SEQ ID NO: 628915 - DNA, 98 bp, Homo sapiens
agggagataactttcgtatcacaaaagcagatgctgctgaattctggagaaagttttttggagacaatcgtgagatggagaataaagaaactctcaaa

SEQ ID NO: 628916 - DNA, 82 bp, Homo sapiens
gtcagcatcccagccgtgctcacggtgcagcagtaccgcgtcgccatgactgccaaggactgctccatcatgattgcactgt

SEQ ID NO: 628917 - DNA, 82 bp, Homo sapiens
gggtcctcgcttgcagttcagcgaccacgagtccggcagcgtcttctcttgagggagcaatttggagaagagctggaaccca

SEQ ID NO: 628918 - DNA, 100 bp, Homo sapiens
atgcgctgcagccagctggcccccagggccctgcagtccttcagtgaatctacagacctattttctcaggagctcagcctggccttacttcagtgataaa

SEQ ID NO: 628919 - DNA, 97 bp, Homo sapiens
ggccttcaagtactttttgcagggaatgggctacagctgactgtgctgtcctgattgttgctgctggtgttggtgaatttgaagctggtatctccaa

SEQ ID NO: 628920 - DNA, 100 bp, Homo sapiens
cgctcagcgccgagggcgagatcgtgcagttagggcctagtcaaaattttgaagctgagtcaattcaagataatgcgcatatggcagagggcacaggttt

SEQ ID NO: 628921 - DNA, 74 bp, Homo sapiens
cgataaatctattcgaatctttcctgtagacaaaagtcgaagcagggtttgaagactgggatgtattatttaag

SEQ ID NO: 628922 - DNA, 51 bp, Homo sapiens
catcaaacatcttccaccacagcttagagatgaagtggccattctgcctgc

SEQ ID NO: 628923 - DNA, 100 bp, Homo sapiens
cacagaagagcttaatttacggtcactggcaggggaaatgctgtctgtagctgagcacttcctggagcagcagatgcacccaacagtggtgatcagtgct

SEQ ID NO: 628924 - DNA, 96 bp, Homo sapiens
cgccgccattttgatggcaggaagagtccggttctgggacagctggagacagtggtggtgactggtgcaagttctctcctgttgccctgagtgccc

SEQ ID NO: 628925 - DNA, 75 bp, Homo sapiens
gttatagatggagagacctataaaggcgtgcaatggaattgagttttgccctggtaaatgggaataatatccgag

SEQ ID NO: 628926 - DNA, 98 bp, Homo sapiens
cctgctcctgctgctcttggggctggtgcagctgctggccgtggcgggtgccgagggcccggacgaggcaatggccaatgtacatggtggactatgcc

SEQ ID NO: 628927 - DNA, 90 bp, Homo sapiens
atcattacactaagggccgaagataacgcggataccttggcgctagtatttgaagcaccaagggtggccgtgactggggagagcacaacc

SEQ ID NO: 628928 - DNA, 100 bp, Homo sapiens
gccgccagtgtttccgtcagtacgcgaaggatatcggtttcattaagcacaagctccgggtggataaggcagctgctgcagcagcggcactacaagccaa

SEQ ID NO: 628929 - DNA, 75 bp, Homo sapiens
ctgccaagttgaaaatggacgagtaatcgcctgctttgattcattgaaagctgtattcatcaccaaagaaaaaac

SEQ ID NO: 628930 - DNA, 98 bp, Homo sapiens
tccgcacctcggggacattattgcgcgtggaacggctgcttttggaagagcgcatcagcgaggaggtggggctgctgcagctccttggggaccccccg

SEQ ID NO: 628931 - DNA, 89 bp, Homo sapiens
gagctagcaaggaaaactcaggaccatgatggctcagtttcccacagctatgaatggtcggttgtacgccgtgcagcaagtcttttaag

SEQ ID NO: 628932 - DNA, 75 bp, Homo sapiens
aggggaaatgagttcaccagaaaccaacaggcagcacaggagttgattatggaagattcccacaagagtaccacg

SEQ ID NO: 628933 - DNA, 75 bp, Homo sapiens
ggaaagaattgaaccttcaccatataagctaatcacatatggctctgatagaactgaggcactgaagagaatggc

SEQ ID NO: 628934 - DNA, 100 bp, Homo sapiens
atgatccaccagcggttccatcctacacttggtcacccttggtgccctgtacttcactgtggtcctgaactgaagagctgtgtttttcaggaagacttgg

SEQ ID NO: 628935 - DNA, 80 bp, Homo sapiens
ccgccgctggagcgcgaggacagtgggaccttcagatgacagtcatgtccctttccagggacctcaaggacgactttcac

SEQ ID NO: 628936 - DNA, 101 bp, Homo sapiens
cggatttggagggaccctacgaaccaggagtcaggcgagccgatctggggctgcagagttggtcaaacgccatgctggggtgctaggacttggtgcatgtg

SEQ ID NO: 628937 - DNA, 101 bp, Homo sapiens
catggccatgttctccgctgctgaaccaaacgaaagaggactggaaggatcaccagcacatatgcggccagtcagcagctgtcaccgtccaggcagacgaa

SEQ ID NO: 628938 - DNA, 95 bp, Homo sapiens
gttactgatggtgctgctcacatctgtggtccagggcagggccactccagccgccgccatgtctgcgcatctgcaatggatggtcgtgcggaact

SEQ ID NO: 628939 - DNA, 51 bp, Homo sapiens
gatcatgggcaaaggacagatccaggtggacgacatccttggagaaggcag

SEQ ID NO: 628940 - DNA, 121 bp, Homo sapiens
aagacagcttgctggatcattgtattactcatcacagatcggaacggaggcctgtggaaatgacttgcagttgagtgagtctggcagtgacagtgatgactagtgctggatctttcgaaac

SEQ ID NO: 628941 - DNA, 75 bp, Homo sapiens
acctggccgaggacatcatgcgcctccgggagaatcctgtcctgatgccatcaaagaggtcttcgacaataaatt

SEQ ID NO: 628942 - DNA, 98 bp, Homo sapiens
gaaagcaccatgacgtccatccatttcgtggttcacccgctgccgggcaccgaggaccagctcaatgacagagccagagcccagaggtggagcagtta

SEQ ID NO: 628943 - DNA, 88 bp, Homo sapiens
gacaagagcctcatccacaccgtgttgctgcaaaaggactatcaggccaagactaaggggctgcagagcggggtggacattggcgtca

SEQ ID NO: 628944 - DNA, 100 bp, Homo sapiens
tttaaggattacccgccagccataaaaacaatgcagatcttcgtgaagactctgactggtaagaccatcaccctcgaggttgagcccagtgacaccatcg

SEQ ID NO: 628945 - DNA, 87 bp, Homo sapiens
gagcgccgcggacgcgtcatcgagtgtgacgtggtgaaagggggatatgagactttctactcggaatatcctgagtgttgcgtggat

SEQ ID NO: 628946 - DNA, 100 bp, Homo sapiens
ggatttgttaaggattccaagtaactcttatttgaagctgctgatgggagctccaccctgggagggggtgccggcaccatgggattgagcgcccgctacg

SEQ ID NO: 628947 - DNA, 80 bp, Homo sapiens
cctgtttgaccaggcccagaggtccgtgcggcagcagctccagagctttgtcaaagaatgggcttccccaaggatttatt

SEQ ID NO: 628948 - DNA, 82 bp, Homo sapiens
tctaggttctgggaagatggcgaaggtctcagagctttacgatgtcacttgggaagacaatgcagatcttcgtgaagactct

SEQ ID NO: 628949 - DNA, 100 bp, Homo sapiens
aaatgaatgaaagtaaacctggtgactcacagaaccttggcaagaaaattggatgtatattttgaatatgaagaaaaaataatgagcaaaactactctgg

SEQ ID NO: 628950 - DNA, 75 bp, Homo sapiens
cgactccctcaccgagtacgaagcgggcgtttgcgaagttgttgacctcctgtactggagagacattaagaagac

SEQ ID NO: 628951 - DNA, 99 bp, Homo sapiens
ttgcttttggcatctgcattaagaatgtgtccatgcaaaatgctgtgaatgagcctattttgacagagttggagcacagtgggattggaagaatcaaag

SEQ ID NO: 628952 - DNA, 82 bp, Homo sapiens
ctgcagagcgcgcagtacctccgcctgagattcctgaacgcctctgcgaacaaactggaaagccttcctccagccacgcttt

SEQ ID NO: 628953 - DNA, 82 bp, Homo sapiens
cccggagcagctgccacaatgggacatgtgcaaactctgtttgctggctacacggacaacctggtgcgagtgtggcaggtga

SEQ ID NO: 628954 - DNA, 82 bp, Homo sapiens
gaggaattcgccgtgcccgagaatagctccgtccagcagcaaccaaccagtggttcatcccagccgtgaggggggacattcc

SEQ ID NO: 628955 - DNA, 75 bp, Homo sapiens
atcttcgacgggcacgggggagagtattggtaaaggttttcaaggtgtcatgaaaagatggggatttaaaggcca

SEQ ID NO: 628956 - DNA, 75 bp, Homo sapiens
ccgccctggacatcaagattaaaagagcgaataaagtttatcacgccggggatcaactcactatcctgaaggtcc

SEQ ID NO: 628957 - DNA, 100 bp, Homo sapiens
ctcatttggtgatgaatgtagccaccacgcctacctgcatgaccagttctggagctactggaataggaagctgagctgaacacattacgatggatgatgg

SEQ ID NO: 628958 - DNA, 89 bp, Homo sapiens
taaatcagcttatagttcttttgtaaatctctttcgttttaacaaaggctaaaggttggtcttcaggttgtggcagtcaaggctccagg

SEQ ID NO: 628959 - DNA, 90 bp, Homo sapiens
ggggatcgctacggaccttaaaatacccgcaacagccccttcgtcccaagatgagctttctgatgttagccaaggcggatctaaagctac

SEQ ID NO: 628960 - DNA, 100 bp, Homo sapiens
gaacagactgatggccagcagagggcgaagtttcaagcagacttcacttgctcttgtacatgaggctgaagccgacgtagcttctctgaacagacgcatc

SEQ ID NO: 628961 - DNA, 100 bp, Homo sapiens
gcacggccgggagaagcatgggaaggaggccgagccgggatctcaggtcctcgggggcggcggccacgccaaggacggatataagcttaccaaagtcagc

SEQ ID NO: 628962 - DNA, 89 bp, Homo sapiens
ccaatgaaaggccagcttcgaagaaaagctgaaagggagacgtttgcaggaagaaggagaaagggccaacccctgaagaagcaatacag

SEQ ID NO: 628963 - DNA, 108 bp, Homo sapiens
acctcaaagactgtcataagaaaattgaagatctccaccaagtgaagaaggatgaaaaaagcattgaggttgaggccttggacaagattcgctatgagagcctgacag

SEQ ID NO: 628964 - DNA, 87 bp, Homo sapiens
agaaacaagccgtggaataggtgtatcaagtaatggtgcaaagcctgaacttatggaagtgacagggaaaaatcaggatgaatgcat

SEQ ID NO: 628965 - DNA, 89 bp, Homo sapiens
tgtttaatgactttggtgccctcaacatctctcagagacgaaaggttaatttggagtggcccctggagtcagtttcctacaccatccga

SEQ ID NO: 628966 - DNA, 82 bp, Homo sapiens
ggttattcgagtgaccgagaccgcggccgggaccgagggcagaggtgtccaggacctgcctgctcacggttcgtgtcctgca

SEQ ID NO: 628967 - DNA, 82 bp, Homo sapiens
gtgaagtggaggaaagggaagagatgatttctccatcctgaacgtgcagcgacaatgcagatcttcgtgaagactctgactg

SEQ ID NO: 628968 - DNA, 76 bp, Homo sapiens
ccccatgccatcaacctgcgtgaggtcaacctgcgcccccagatgtcccagggccgttgctccagggagaactgca

SEQ ID NO: 628969 - DNA, 90 bp, Homo sapiens
ttttgaagctaaagttaagcaggttgagactgagctaaagttaatctgttgtgacattctggatgtactggacaaacacctcattccagc

SEQ ID NO: 628970 - DNA, 100 bp, Homo sapiens
ctcctccagccgcccgcttcctccttgccaggagattgggctaatggatactacagacaacagagaaaacttgttgaagagattggctggtcctatacag

SEQ ID NO: 628971 - DNA, 100 bp, Homo sapiens
tcaagggcttcagcaccgcgcccatggcagagccagaccacggagccggtgggagaggagagcatctccgacgcagagaaggtggccatggatctcaagg

SEQ ID NO: 628972 - DNA, 89 bp, Homo sapiens
aactgcggacatgctgggtggatccggatcgcatggaagacgcagcctggccgcgctctcccagactctgtctactagtgacgatgtcg

SEQ ID NO: 628973 - DNA, 83 bp, Homo sapiens
ccagaagtcatcattgggtggtggcaagcatcagctgaccaagatgcggtgacctgccagcacctgccgcagccttcgtccgg

SEQ ID NO: 628974 - DNA, 76 bp, Homo sapiens
gtggggacctggccgactacctgcacgggggggccctcagcctcttggccttgaacgggctgttcatcttgattca

SEQ ID NO: 628975 - DNA, 100 bp, Homo sapiens
aggaaaggtgccacagcagagacgcgaaggagaggccctagaaccgtaaataccagctgtcccctacagtgaatatgccccaagatgacactgtcattat

SEQ ID NO: 628976 - DNA, 100 bp, Homo sapiens
ccgacaggccttggtcaaaaagcatgcccagacctttttggccctctgtgctacaggtgctgtaaaatacctggagtgctcggcgctcacacagcgaggc

SEQ ID NO: 628977 - DNA, 50 bp, Homo sapiens
gacgtcttgaaattataccttcggcaggaggatctccttatatagcagcc

SEQ ID NO: 628978 - DNA, 96 bp, Homo sapiens
gggtgccgcagacgcggggacgctggctcgctccctccctccctccctccgacgctatgacagtcatgtccctttccagggacctcaaggacgact

SEQ ID NO: 628979 - DNA, 83 bp, Homo sapiens
ggaagacacaaaagatggcatctggctggttcaggtgtttttccaggtctgaccacctggccctgcacatgaagaggcacctc

SEQ ID NO: 628980 - DNA, 98 bp, Homo sapiens
ggagtagttttctctagcaaagcacaatgaggcttttcacaggcattgttttctgctccttggtcatgggagtcaccagtgaaagctggcgttcgttt

SEQ ID NO: 628981 - DNA, 74 bp, Homo sapiens
ctgcggtcgaagaaggggacgccgacaagacctgcaggctgggacaatgaaaagaaaatagctattttacatga

SEQ ID NO: 628982 - DNA, 83 bp, Homo sapiens
gcgactgaaggaggaatatcagtcccttatccggaaactaatctggattcactccctctggttgatacccactcaaaaaggac

SEQ ID NO: 628983 - DNA, 100 bp, Homo sapiens
ggatgcaatgttcttaggatcctcctcccgtccttctcatccttcctgatgtagcccagcagttccagtatgctgtgcgggtgattggcagcaacttcgc

SEQ ID NO: 628984 - DNA, 73 bp, Homo sapiens
cactcacagctgctgcaccaccaccttccgcaggatgcacagatcatctctcagacctggccctacctaagca

SEQ ID NO: 628985 - DNA, 90 bp, Homo sapiens
cctctcgcttcctgacgctcctggcgcatctggtggtcgtcatcaccttattctggtcccgggttcatcctaagttccactataaacagg

SEQ ID NO: 628986 - DNA, 75 bp, Homo sapiens
gccctccgaggaggggcagagaccacagctgaccgggggccagctcttccgaggctccagcctgcttttccgccg

SEQ ID NO: 628987 - DNA, 74 bp, Homo sapiens
ccagccccagacacggaccccgcagggccataaaattttgagtagaaaaatccagaaatttgaaaatcagtatc

SEQ ID NO: 628988 - DNA, 50 bp, Homo sapiens
gggtgttcccgaactagagtgggtaaaacttccttttcctgtagatcaaa

SEQ ID NO: 628989 - DNA, 99 bp, Homo sapiens
aggagcagaacagagctaaaccggttcacctggtgcccagacggctaggtggatctccttacgtagcagccaaaataaatgaagcaaaagacttgctag

SEQ ID NO: 628990 - DNA, 80 bp, Homo sapiens
ctatcacctgccagctcatcacaaatggcggcttatttggcctccccaggacggactggagcatcagtagtgcctgagtt

SEQ ID NO: 628991 - DNA, 90 bp, Homo sapiens
cccataccactatttgttgagaaatgtgtggaatttattgaagatacaggtgcagaaaatgcttttaaagtgagacttagtatcagaaca

SEQ ID NO: 628992 - DNA, 83 bp, Homo sapiens
ctttgttcctgtgaaatgttaatctccatgccccttggtgtggccactgcaaggctctggcccctgagtatgccaaagccgct

SEQ ID NO: 628993 - DNA, 100 bp, Homo sapiens
agaacttagaaggcaaaagagggaggagatgcgactcgaagcagaaaggccaataagcaagaaatccttcctgcaacatgttgaagagctttgcacaaac

SEQ ID NO: 628994 - DNA, 97 bp, Homo sapiens
ccctcttgcagtctgcagcttctcctgtcatcggaaatgccaggccaaggtatgttatgcataaaagtggataatttacatgataaatgaaaatggc

SEQ ID NO: 628995 - DNA, 100 bp, Homo sapiens
actccaagataaagacaccatgaggggactgaaggtgggcaagtctctggatggtcgtcagatccgtgtggatcatgcaggcaagtctgctcggggaacc

SEQ ID NO: 628996 - DNA, 96 bp, Homo sapiens
gttccttgagctcggaaccaggatatcaagaccaaatggagttacactgttagaccttatgatagccaagataacgagtgatgagccactcaccaa

SEQ ID NO: 628997 - DNA, 74 bp, Homo sapiens
acgagtgtaagcagctgaacgagaaccaagtgcggacgctgtgcgagaaggtattatagctgcaaatgtccttg

SEQ ID NO: 628998 - DNA, 100 bp, Homo sapiens
taaatgtcagtggaaaggagagctaccatcactaaggtggtttgaagtgtcctgtttgcagctttgtatatggcaccaaatgggagttcaataggcactt

SEQ ID NO: 628999 - DNA, 98 bp, Homo sapiens
caaacagctatggtgatgattagagacatactaatgtacatgcctgtggacatctctacagcaatgagtgaacgggcacttgctcagaaaagactcag

SEQ ID NO: 629000 - DNA, 90 bp, Homo sapiens
atctttcgttctcttttttgactgtaataatgaggtaaagagaaatgtgtatgaccttacaagtatccccgttcgccaccaattatggga

SEQ ID NO: 629001 - DNA, 98 bp, Homo sapiens
atttaaaatatgggttattttcaactttttatctgaggacaagtatccattaattattgtgtcagaagaggttttgcacactagggaccaagaagccc

SEQ ID NO: 629002 - DNA, 94 bp, Homo sapiens
gcatctgcaaccgcaacatcgaccagaccatgctctccatcctgctcttcttccacaggtgtccttaagtttgctcgcttggtcaagtcctacg

SEQ ID NO: 629003 - DNA, 100 bp, Homo sapiens
gaaacacccacatacaggagacaccaaagaagagaaagacaaggatgaccaggaatgggaaagccccaggcaaatacgccatgcgagacctagtccacag

SEQ ID NO: 629004 - DNA, 100 bp, Homo sapiens
aggatcatggggcccaactatacccctgggaagaaggaggacctctacctgaagccaatccagagtgagagccacgagccaaggtgggcacttgatgtcg

SEQ ID NO: 629005 - DNA, 76 bp, Homo sapiens
ctgcgctgccgccgctctgaggagttaaaggtccctgtgcgttttattgcgacctgccggtgggaactttgtctcc

SEQ ID NO: 629006 - DNA, 76 bp, Homo sapiens
ccaggccacttttcacttctgctgcactgctttcagcatgcaagcctgggcaatatttaagggaaagtataaggag

SEQ ID NO: 629007 - DNA, 73 bp, Homo sapiens
gaggaagcgtgcgtccctggcgcttccttcttctcttccggcggagagcttcacgaggctgacattgtggtcc

SEQ ID NO: 629008 - DNA, 100 bp, Homo sapiens
acgcttcgttaagggactcaggcagtacgggaagaacttcttcagaattagaaaggagctgcttcccaataaggaaacatgatatttctgggggtaaacc

SEQ ID NO: 629009 - DNA, 100 bp, Homo sapiens
tcttcttcaaaggagaggagcaaaggtgaagagaagaagagtatgaactaccacgaaactcatttccctccgtccttcaatcaaatacaatgaccttcag

SEQ ID NO: 629010 - DNA, 75 bp, Homo sapiens
tgaaaagtcaatacaaaactaccatccttttgcaggcggtgcgtctttctacgtgaataggattttgtggctggc

SEQ ID NO: 629011 - DNA, 100 bp, Homo sapiens
gagatcatagcagagtacgatactcaggtcaaagggtgtttgtgaaccgaagtttagcaatggaaaagataaagtgttttggttttgatatggattatac

SEQ ID NO: 629012 - DNA, 75 bp, Homo sapiens
ctgtcgagcagcggacgccggtctctgttccgcaggatggttcgagaacttgtcttggacaattgcaaatcaaat

SEQ ID NO: 629013 - DNA, 100 bp, Homo sapiens
ggcgatgtggtgcgaatacaggagacgtgtggagcaattcaattaaaccccagctatatcagggcaatattgaggagagcagagttgtatgagaagacgg

SEQ ID NO: 629014 - DNA, 128 bp, Homo sapiens
agcagaacaactaaaacagtatgaaataaacgccactcctaaaggctggtcctgccactgggacagagactggtgaactagagaatgctgagtctggaggagacggaggcaggagaggagggaagcag

SEQ ID NO: 629015 - DNA, 75 bp, Homo sapiens
caaatcagcaatctgtggttaatagtctacttcatgtacacgagatcttccttgattgtcactacaattgggaat

SEQ ID NO: 629016 - DNA, 76 bp, Homo sapiens
gaccgagctggagagcgtggacaagagcgcggggcaagtggctcggaacacagatgttcctcctgctgatcaagag

SEQ ID NO: 629017 - DNA, 50 bp, Homo sapiens
ttcgggcatcttggctcctccttgaggtgaagagggaacagaaatctttg

SEQ ID NO: 629018 - DNA, 108 bp, Homo sapiens
gcaaacgaaaaagaacgacatgatgcaatcttcaggaaagtaagaggagagaagagagacccccaacccttagtgcttccttcagaacaatggctgaattcatggact

SEQ ID NO: 629019 - DNA, 75 bp, Homo sapiens
aaaagttgtcactgcagctgctcaagccaagcagaggtctccatccaaggcctcaggagagcgttaccatgtgga

SEQ ID NO: 629020 - DNA, 100 bp, Homo sapiens
ggcgacggccgcggggactcggagctgagaggagctgctgctcggaccagcgcgtattctaccttgtaaatactgttatttgtatatactgtaaatgatg

SEQ ID NO: 629021 - DNA, 100 bp, Homo sapiens
gaaggtgtgcatggatctgccaaattttatatttcagatttgtggaagacatatgtagagtgtgtcggtcagaaggaacacctgagaaaccgctttatca

SEQ ID NO: 629022 - DNA, 75 bp, Homo sapiens
cagaagatggctgtggagagcccgtccgacagcgctgagttccggaactttaagatcatttaccgccgctatgct

SEQ ID NO: 629023 - DNA, 98 bp, Homo sapiens
acacctcaggacacggcctacaacaccaagaggcgaggccttcttgggcagctttgtggccagcgggatggggccctcggcctcgtcccatgggagcc

SEQ ID NO: 629024 - DNA, 90 bp, Homo sapiens
gatcagtagcaccagtgtttatgaccagagtctcactgtcgcccaggctgcagtgcagtggtgccatcacgcgtcactgcaacctctgcc

SEQ ID NO: 629025 - DNA, 74 bp, Homo sapiens
cccagcccgggccgtccatcctcgcattgctgttgaatgaaggagatttaaccatagtagaaagaatggagaac

SEQ ID NO: 629026 - DNA, 99 bp, Homo sapiens
ccacagccactggagaaaaagaagaaaatgttaaaaagaacagatacaaggacatactgccatgaactaagcgtcttgtagaaggaactattaatccag

SEQ ID NO: 629027 - DNA, 100 bp, Homo sapiens
ctgaagataaaaagctttgaaaagtcgaattcatggtcgtggaagctgagcccatattaagagatgtcagggggtccactggacggggcctgagctacaa

SEQ ID NO: 629028 - DNA, 50 bp, Homo sapiens
ggatgataattgggcctccaagatgtgccggtccaacaaaagcccttggg

SEQ ID NO: 629029 - DNA, 89 bp, Homo sapiens
tgcaggaagtggatgagttccacctcattttagagtatcaagcagatcccagctctcactatgtgattaccctgaaagcatttaataac

SEQ ID NO: 629030 - DNA, 100 bp, Homo sapiens
tccagcccgcccccagcctgtggacgcctggcccaccctgagtgacagtcattttgtttactcattcagccctgttgcaggtcccaataaactcttcata

SEQ ID NO: 629031 - DNA, 100 bp, Homo sapiens
cgagcttcggagaagcagtggtgggttccatgtgatggtggagtaggaggcaggtctccgcgtttggatgctcttccaagagtcacatgtccaaaccatc

SEQ ID NO: 629032 - DNA, 90 bp, Homo sapiens
gagagagtcagctgcaacaggaagacccaatggatagatacaagatggttccttcatcagcttcaggccaagttcgaagtcactatgtag

SEQ ID NO: 629033 - DNA, 100 bp, Homo sapiens
cgccgcgatggctgcgcagggagagccccaggtcacgcatgaagggagcaccgtggagaagacagtggcccctacagaatgttcataggttctcaaccct

SEQ ID NO: 629034 - DNA, 100 bp, Homo sapiens
accccgagtctgcggaagtggtgacccgtgggacgcggctgagacagaccaggtgataggtttgatcgagacagaccgttgagaggacgtggaggcccga

SEQ ID NO: 629035 - DNA, 90 bp, Homo sapiens
gccctcgagatgattatcgtaggaggagtcctccacctcgtcgcaggtatgcttcagaagtgtccttctgttgatgacttcgtaagtgcc

SEQ ID NO: 629036 - DNA, 114 bp, Homo sapiens
caatggcatttacagaaagagtcaacagcagtggcaacagaggacatagatgaaaatctcttgttttgaacgaagattttaaagaactcaactttccagcatcctcctctgttc

SEQ ID NO: 629037 - DNA, 82 bp, Homo sapiens
cggaggcggcgggcggaggcggcgggtgagagggatacagacgtccctcaccagtgccagcttggggtctgcagatgagaac

SEQ ID NO: 629038 - DNA, 98 bp, Homo sapiens
aagatatagataagaatgctgatggtttcattgatctagaagagtatattggaagaatttttaactttgaccatagagcataggaaggggactcaagg

SEQ ID NO: 629039 - DNA, 100 bp, Homo sapiens
ccgctggcgcgcagcctcagctagggcatcgagcgcctcaaacgaaagaaccagcccagggagcacatggggagctggcagtcagtaaaggagacctttg

SEQ ID NO: 629040 - DNA, 83 bp, Homo sapiens
acagagcctatttacccagaagtagtccatatgcttagaccatgctcagcctccaagcagccttgtcatcgacaaagaatctg

SEQ ID NO: 629041 - DNA, 98 bp, Homo sapiens
taagaacccagtttataccactggaaggaaacctacgggcagctgcaatgactctccgcacggtattattgtcattgcaagcactattggcagctgca

SEQ ID NO: 629042 - DNA, 89 bp, Homo sapiens
tcagtgacgttgagaaggaaatggaaaccctcgtggaggccgtgaataagtcaaacgacaacttccttcttgccacttatcggtgccag

SEQ ID NO: 629043 - DNA, 80 bp, Homo sapiens
gttggagtgcgttcggtgtgccgtgggtccgcgctgcttccacccaacttcctgttagaaggtgcctaccagtaacacag

SEQ ID NO: 629044 - DNA, 100 bp, Homo sapiens
gaggacatacctttggttaaaggagctgccgtcagagtgaagatagtccaagtcctaagagacagcgcctctctcattcagtctttgattatacatcagc

SEQ ID NO: 629045 - DNA, 97 bp, Homo sapiens
tgtttaatgactttggtgccctcaacatctctcagagacgaaagagccaagcacacctgcaaaaagacattgctggaggaggtgcaggagctggaaa

SEQ ID NO: 629046 - DNA, 83 bp, Homo sapiens
gtcaaacaaggcttttgggaagaatttgaggtcattcccaaaagcaagttcgtcttggtgaagttcgacacccagtaccccta

SEQ ID NO: 629047 - DNA, 97 bp, Homo sapiens
ttcccgctggcggcgggcatcttcttcgtgaggctgctcttcgagcggatgtttcgtctgaactcactttctgctttggcagaactggctgtgggtt

SEQ ID NO: 629048 - DNA, 100 bp, Homo sapiens
tgggtcacaagcgatgaaaagagcaccttgaaggaagcagttcaggtacttttgaagcattctgcagatgttaatgctcgagacaaaaattggcaaaccc

SEQ ID NO: 629049 - DNA, 97 bp, Homo sapiens
caaacagggctttgccatccccggctccagcttcctggaatggaagttggatacactttgtgacttgtacgagacactgaccattacacaggctgtt

SEQ ID NO: 629050 - DNA, 74 bp, Homo sapiens
cccaccgccgcggctgcccccaccgggaccgaggttatttcttatgagggtcatggatatcccctatctaaact

SEQ ID NO: 629051 - DNA, 75 bp, Homo sapiens
gcaaaattgaaagtagttaagcatttgataagggagagcctggggatgtacaggagatgcctgctccagaatctc

SEQ ID NO: 629052 - DNA, 75 bp, Homo sapiens
ctcaacttattcccttcaattcaagtaacagtgtcactactccatccagaagggagctgcgtttctgggacttgg

SEQ ID NO: 629053 - DNA, 82 bp, Homo sapiens
ggatatttgcttggaaaaacgtgtgggtacgaccttgtattcctgcagctgcgctagacttatttgattacatgcttgcctt

SEQ ID NO: 629054 - DNA, 56 bp, Homo sapiens
ccctgaaagtttccaacaggaaatcatgaattgaatgatctggcacgggaccctcc

SEQ ID NO: 629055 - DNA, 100 bp, Homo sapiens
ctacaacacaaccattgtacttaccatcacagtaatataccaaggagactgcattgcttattgatccaaaaaattcctgttcttcatcccgccagtgggt

SEQ ID NO: 629056 - DNA, 104 bp, Homo sapiens
tccccgggcccctgagccatgcccatcgcagccgccccgaaggagccaggtacgtacctgtgggcatcatgttccttgttggaagcaagatcgtggaaatgaaa

SEQ ID NO: 629057 - DNA, 100 bp, Homo sapiens
ctcttggactgaacttaaatactgatagggtggacccgaactccccggtgctcttggaggacccagtcctttgtgccttggcaaaaaagcacaagcgaac

SEQ ID NO: 629058 - DNA, 100 bp, Homo sapiens
attggaactgtgtttgggagcctcatcattggttatgccaggtcacgagaagagaatgccttctagatgcaaaatcacctccaaaccagaccacttttct

SEQ ID NO: 629059 - DNA, 101 bp, Homo sapiens
gaaattgtatacactggaacagaatcaacccagaacggagagctccctcctagaaaagatacactctgtgcagttttagagagagacacactcagtattcg

SEQ ID NO: 629060 - DNA, 60 bp, Homo sapiens
tgcaagcagatactggtgcctacatttgtcttcaccgacagcccagacaaaggcctccag

SEQ ID NO: 629061 - DNA, 50 bp, Homo sapiens
cagccaggtcaccagcaccaagacaggttacgggcaggacttgagtggct

SEQ ID NO: 629062 - DNA, 100 bp, Homo sapiens
cggaagttagatgaattgtacggcacttggcgtaaagccgcttccctcaagagtaactacaaatttgcaggctgggaaggctagacttcctcagcccgag

SEQ ID NO: 629063 - DNA, 100 bp, Homo sapiens
atagagcgacgttattctgatctcaccaccctggtggcctttccctccagctctgtctatcctaccaagcttttgttaggagtgataaacccaaactgtt

SEQ ID NO: 629064 - DNA, 110 bp, Homo sapiens
caattattaggctctcagatgtaactagagagagaaggaacattccagaaactttggggaaatcctcattgacgattcaatttgttgaaggccaatttgtggactcctac

SEQ ID NO: 629065 - DNA, 75 bp, Homo sapiens
gccgatccagcctgcggagcctgtggggcaggtttgccaagtactacagagacctggctggcaacgagcagcgca

SEQ ID NO: 629066 - DNA, 90 bp, Homo sapiens
atgatgagcgccttaaggatctctttggcaagtttggtcacagatgtgacattgatgtgtccactgaagccatgtatgctgcaaccagac

SEQ ID NO: 629067 - DNA, 78 bp, Homo sapiens
gcacatcatgtgacgacacccctgatggggcaggaggggcctttgcagctcagctctccagtgaagaagccaagtctt

SEQ ID NO: 629068 - DNA, 90 bp, Homo sapiens
cttaggaccacccaccatgcctatccaggtgactctcctattccatctgtttcttcgggatcatcttcacctctttcagccacttctgcc

SEQ ID NO: 629069 - DNA, 123 bp, Homo sapiens
gctgaccatccagaaactctactgcttgatcgaaatcgtccacagtgacctcttcacacagcatgataacttgttcaaacccaaagaacggtgcatttcagagaaggagatgcatatgcgatc

SEQ ID NO: 629070 - DNA, 75 bp, Homo sapiens
tgacgaagaggtggtttttgaggatttttagactctgaggagcagttggagctaatccacattatggaaatggaa

SEQ ID NO: 629071 - DNA, 75 bp, Homo sapiens
ctgcctcctgctctgtcctcatccccggcttagcctgtgcaggagacatggcggacgcagcatctccgtgctctg

SEQ ID NO: 629072 - DNA, 82 bp, Homo sapiens
ctacgtgtacttcaggcaggtgaaggacagctctgtgaagaggggctacttccagaaggggccaaaccagtgctcctgccac

SEQ ID NO: 629073 - DNA, 80 bp, Homo sapiens
gtgggagctgcggaagacccgggatccacgggaggcggcggtcaaaatgcagatcttcgtgaaaacccttaccggcaaga

SEQ ID NO: 629074 - DNA, 74 bp, Homo sapiens
tttttgcagtgttttataccctcggcaatcttgctgcgttagccaggctgcaggggacagcgctggaccgtaca

SEQ ID NO: 629075 - DNA, 83 bp, Homo sapiens
ggatcatgtctgcgagccaggattcccggttcgtgctggccgtgggcagcgccgtctttgatgccatgttcaacgggggaatg

SEQ ID NO: 629076 - DNA, 98 bp, Homo sapiens
gctaaactgtgtggggcgcggatgggatccagctgttagtcgggtaggcataggctccatggtccccttctcgatgcgcatcttgcacgcggagcttc

SEQ ID NO: 629077 - DNA, 83 bp, Homo sapiens
gaggaagctaaggccgcgttggggtgagaccctcacttcatccggagcaggccgggctctcgccatgggtcactgtcgcctct

SEQ ID NO: 629078 - DNA, 90 bp, Homo sapiens
ttcaagagtaagctctcgtttgaggagactaacaattcctgttttcgccaggcctggtgggtaggagatgagttttttgcagatgtctgg

SEQ ID NO: 629079 - DNA, 98 bp, Homo sapiens
gaaaacctccttatgctgatatacatccaatgaggatcagcttgaacgggtctttttacgacttggccatgctgaaacagatgaacaattacagaata

SEQ ID NO: 629080 - DNA, 82 bp, Homo sapiens
gttgccagggttactgttagagggggaaaacagaagaaaaagatggtggggggaaggaggtgcggactcgagacatgggcgg

SEQ ID NO: 629081 - DNA, 100 bp, Homo sapiens
aaaccaagtggctggatatcaaaggaaatcatgctcagtctgcatctccaaagagaaaaaaacagcacaagaaatacagaagtgttatttcagacatatt

SEQ ID NO: 629082 - DNA, 82 bp, Homo sapiens
cgagaaccgtcagtttgagccagatgttactggctgaccaacaaagttcctatcaaaagacccagcacaggtcttctcatgt

SEQ ID NO: 629083 - DNA, 83 bp, Homo sapiens
gatgggcttgctgctcccgcccatctaattggctttggtctagggggatatgagactttctactcggaatatcctgagtgttg

SEQ ID NO: 629084 - DNA, 100 bp, Homo sapiens
ctttgggaaggaggaccttgatgatgctttcaaagatgaggacgatgtgcacagatgcggccgctgccaggcagagttcaccgccttggaggattttgtt

SEQ ID NO: 629085 - DNA, 100 bp, Homo sapiens
caagctcagatttgtgttgaaaccagcctcaagtttcacctatcctcactgatccgtggacttctgtatgatcaggtatgtgcactgcgcgtgaccagcc

SEQ ID NO: 629086 - DNA, 100 bp, Homo sapiens
ggtcatgatctaccagttcattgttcagcccctgaagaagatggccgaccggatcaggaagtatcagatcttgaacaatgaggtttttgccatcctgaac

SEQ ID NO: 629087 - DNA, 97 bp, Homo sapiens
ggagaagagccatgggtcctcgacctgcagggagcagaggggacagaggcaccaaggacctccaagacaggttcacagagtgtttccaaatgggctg

SEQ ID NO: 629088 - DNA, 51 bp, Homo sapiens
cgctgatggactgccgtagaccctctacaaccccacgtcagagtgtgggat

SEQ ID NO: 629089 - DNA, 100 bp, Homo sapiens
gacaactcaagagcaatcagtaccatctggagtacttttcgtcagggtttggtgattggaagtaaacctgtaatttacccagtgctccactggcttcttc

SEQ ID NO: 629090 - DNA, 90 bp, Homo sapiens
aaatactactacatcccgcagtacaagaactggagaggtgctggagaatctggtaaaagcaccattgtgaagcagatgaggatcctgcat

SEQ ID NO: 629091 - DNA, 75 bp, Homo sapiens
tatatggagctctacacgtatcctcctgcctagcgcagattcttgaagacctggatgaacaaatttatatcatta

SEQ ID NO: 629092 - DNA, 100 bp, Homo sapiens
tggactggagcagtgagaaagcaaaggctgctctgaagcgcacgacctccgactactttctccttcaaggttcacgcttacatcatcagctacctgaaga

SEQ ID NO: 629093 - DNA, 100 bp, Homo sapiens
tgttttggaactgtcaggtacctcaaagcagcaaatttttcagaacataaaacaagaatatagtcgttatcagaggtggagacatttagaagttgttctt

SEQ ID NO: 629094 - DNA, 111 bp, Homo sapiens
ggagtggacatcagccccaaacaggacgaaggcgtgctgaaggtgagaagccctaccactgcaactgggacggctgcggctggaagtttgcgcgctcagacgagctcacgc

SEQ ID NO: 629095 - DNA, 75 bp, Homo sapiens
ttctcattaaataaatctctgggagatgacaagtatgggcggaagatcattgtgtttagtgcctgtcgaatgccc

SEQ ID NO: 629096 - DNA, 83 bp, Homo sapiens
cgggccgcgggctgcggacgctcggtcccgcgctgcgcatccccgcggacgccacagcgctgccgagacgcatccagagcttt

SEQ ID NO: 629097 - DNA, 100 bp, Homo sapiens
agaaggtgtgaccccaacgaagagtggagaacggcaacccatccagatcaccatgccgggggtggcccgattctacaggtcacggaaaaagcacttgatc

SEQ ID NO: 629098 - DNA, 101 bp, Homo sapiens
cttcagtatctcaggcggcaccctgtccccgaggaggggaccatgacacatccagaatgacagggtccagaaactggcgagccacgagggacatgtgtagg

SEQ ID NO: 629099 - DNA, 74 bp, Homo sapiens
gaacaagacaacttatttgatgaaactggaggcgaccagtgcccagaatatcgagttcctacaggtgattgcca

SEQ ID NO: 629100 - DNA, 99 bp, Homo sapiens
gaggaaggaacgaggcaaggagctaaagcagcgtgcgttcagccctgggtcagagcaccataacatggtgtgggaagtgaagacaaatcagatgcctaa

SEQ ID NO: 629101 - DNA, 82 bp, Homo sapiens
atttccatcaccagggccgagaacgacagatgtccagctcgccgctgtccaagaaacgtcgcgtgtccgggcctgatccaaa

SEQ ID NO: 629102 - DNA, 119 bp, Homo sapiens
ggagagtcccgtattctcagagtaaaagttgtttctggaattgatctcgccaaaaaggacatctttggagccagctcttcacagatggaatcacaaataaacttattggctgttacgtg

SEQ ID NO: 629103 - DNA, 75 bp, Homo sapiens
aatgtggcctcagaaaccctcttgtctctggtaacagtgtatcatgtatgccactgattccaggggacactcccc

SEQ ID NO: 629104 - DNA, 82 bp, Homo sapiens
gatcatgtctgcgagccaggattcccgttgcagagtgggcaggatcttaagacccgataggtgcagaacccatctggacacg

SEQ ID NO: 629105 - DNA, 99 bp, Homo sapiens
tcaagaaaggcacagagatctgtaattacagctactccagcaacatcttgtccataaggctgaaccggcaaattaccttaacatccacgtggaaagaag

SEQ ID NO: 629106 - DNA, 83 bp, Homo sapiens
tgaaaatacaagtctttgggaactcaaaaaggacctgagggcactcgctttgctcctgtcagtacacactcccaaacagttaa

SEQ ID NO: 629107 - DNA, 83 bp, Homo sapiens
aagaagactatcagccactaatgaagttgggaactcagaccgtaccttgcaacaaggccctggagagtgaatttgtttcctgc

SEQ ID NO: 629108 - DNA, 82 bp, Homo sapiens
ggaggggacggcagtgctgaggcggaacaggccgggcaccaaggcgcaggactgatcctttgaaatactccagccatgacta

SEQ ID NO: 629109 - DNA, 82 bp, Homo sapiens
gaattcctgatgaatcgaaaatgctttgaggaggacttccggatccatgctggtgaagctgtgcagtggcatggtggaagcc

SEQ ID NO: 629110 - DNA, 97 bp, Homo sapiens
ggtgacaatgcagaatgcagagattttgttttgaattgtgaaatacttccacctcttttagagtatctgaaaactgaagagtggagaatatgttcag

SEQ ID NO: 629111 - DNA, 100 bp, Homo sapiens
tcggaccctggcctcttgggatgcaaaggtgtcatggagaaactccagctgggcccagagattctgcagcgggaaaatccaaggcttatttatgccaggc

SEQ ID NO: 629112 - DNA, 122 bp, Homo sapiens
ggcgctggggcccccagaagtgatcgctcagctggagaacgcggctaaagttctgatgcgcataaagtcaggcagagatggcagtgggggctcccgtggcaaaagagaaggaagtgctagcg

SEQ ID NO: 629113 - DNA, 75 bp, Homo sapiens
cccagacaagatggacaccgcggaggaaggagtaccagtcttgcaacaccaacccgtgtcctgagctgaagaaga

SEQ ID NO: 629114 - DNA, 75 bp, Homo sapiens
acgtgcacatcatggacgacatgattaaggccctagcacaaaacacagatcttaaagaacgcttacgcagaatcc

SEQ ID NO: 629115 - DNA, 100 bp, Homo sapiens
tacctggtcctcgatcttgctctgctgtttctgatggggattctagaagcagttcggttatacctggggactgccaaaaagagcaagatcctgtccaagg

SEQ ID NO: 629116 - DNA, 82 bp, Homo sapiens
gagcttctgggagccaccgtctgaagaaaggacctaagtgtgaaataccccgaagacgtccccatcacccttccaaacctgt

SEQ ID NO: 629117 - DNA, 75 bp, Homo sapiens
ctcaacttgattccatcaaccagtgagaaagatcagtctaaagaaaaggagaagaaagtgaaaaaaacaattcct

SEQ ID NO: 629118 - DNA, 100 bp, Homo sapiens
gcgggccagcctcagcaccgacagccgacgcgcagatagcagagccatccttggggacgtgttcctcatgatccggcgccacaagaccaccatcttcacg

SEQ ID NO: 629119 - DNA, 82 bp, Homo sapiens
gtgaggccggcatcgtctttccgtcctctgaggcgacggccgcggctgcacagatctgctacaacatcctggttctgtgcct

SEQ ID NO: 629120 - DNA, 76 bp, Homo sapiens
agaagttgccaaatttgaagcagaacgatcaaaagccaagtggcaaacgttcatcaatggtgctaaggaaatttgc

SEQ ID NO: 629121 - DNA, 74 bp, Homo sapiens
ccggagccgtgtggaccaggaggagcgctgatctaaacgctcttcccacagcaatgcttatttttatggcttct

SEQ ID NO: 629122 - DNA, 75 bp, Homo sapiens
ctggagaagagcgaccagctcactaagaacatggacagctaacccccgcatcggtgacgtgatccagaagctggc

SEQ ID NO: 629123 - DNA, 75 bp, Homo sapiens
caagatgtgaaactcgcaagtttggtgcagagaagatgccctgtacagacttttggggaactgggtactgatgaa

SEQ ID NO: 629124 - DNA, 83 bp, Homo sapiens
gcagctattctcaggatatgacaggggtaacacccttccagatgatttttgagaggtaccaatcttgggaaaaagaagcaaca

SEQ ID NO: 629125 - DNA, 100 bp, Homo sapiens
ggaggaaaaggtcgcctctttgctgcaccaggtgtcctggagacagattatttgcatgggtgcaaaagaaaatggtttgccgctggagtatcaagagaag

SEQ ID NO: 629126 - DNA, 75 bp, Homo sapiens
agcgtttccgcagacagaagtggggagaagcggagaatgcaggctcaacagtaccagcagcagcgtcgaaaattt

SEQ ID NO: 629127 - DNA, 124 bp, Homo sapiens
gcctccaggtgctcaacgattacctggcggacaagagctacatcgagggaaacaagctctgaacagactacgtgctcagcttagaaagaaaaaagaatctctagctgaccagtttgacttcaag

SEQ ID NO: 629128 - DNA, 50 bp, Homo sapiens
gtcggggaaccatggctgccccgagagacactcctagaatatgcagagaa

SEQ ID NO: 629129 - DNA, 100 bp, Homo sapiens
caaatgcagtcggcttgtcctggctcttgccctcatcctggttctggaatcctcagttcaaggggtcctactgggcaatagacaccaatccgaaggaaga

SEQ ID NO: 629130 - DNA, 76 bp, Homo sapiens
tgccctgtgcttgtgggctgcaagtggggtcctgtccaaaatgcattgctgtcttcacaagagtcagtgagccaag

SEQ ID NO: 629131 - DNA, 88 bp, Homo sapiens
cgaaaggctctggaaagatgtggtgatggggcattcttgctaacaacaaatcttattgcagacatatttggagaatctggtgatgaag

SEQ ID NO: 629132 - DNA, 97 bp, Homo sapiens
ggactcggattcgttgcctgagtttttctcacacccgtgatgaagtatgaaaagaggaacacaaacagcttcttaatatgcagcgtgttaagtgttt

SEQ ID NO: 629133 - DNA, 90 bp, Homo sapiens
ggctgagatcgtcaaaaggctgaacgggatttgtgcccaggtcctgccctacctctcccaagagcctgtgcaggagacatggcggacgca

SEQ ID NO: 629134 - DNA, 101 bp, Homo sapiens
cggagacacaactatgtcacacccaccaaatacctggaactcctgtctggatataagaaaataactgaagtgaagtgatggactccgatttggagagtagt

SEQ ID NO: 629135 - DNA, 97 bp, Homo sapiens
aggcgaaccgtggcaccgagagcaagaaaatgaataaaagccagggatccatctttgtccggatacacgccccgtggcaggtgctggccagagaggc

SEQ ID NO: 629136 - DNA, 98 bp, Homo sapiens
ctgtctacaccaatagcaggattggatctaaaatgtccactgaggcacaaagagttgatgacagtccaagcactagtggaggaagttccgatggagat

SEQ ID NO: 629137 - DNA, 100 bp, Homo sapiens
ccaccatctttcgggctgccgagggtgttcttgacgattaatcaacaggataagttctgaacgtcgaaaagaaaagtctcgagatgcagccagatctcgg

SEQ ID NO: 629138 - DNA, 124 bp, Homo sapiens
aaatttccagaaggtgcctgaccagaaaggaactcccaagcgactgcaggcagaagctgagacggctaagcaatcatttggggaagaatctacagttgctgatggacagagtggatgaaatgag

SEQ ID NO: 629139 - DNA, 75 bp, Homo sapiens
gcttgtgcttccctggtggtgctcagcttccctgagctcgagccctcccgcctcctgcccacaatggcctctgct

SEQ ID NO: 629140 - DNA, 51 bp, Homo sapiens
ttccagtagctccaaggaggttaaggatcttaaggagcctacgtggaagca

SEQ ID NO: 629141 - DNA, 104 bp, Homo sapiens
tctctccgccgcgctctcgctctggccgacgagtggagaaaaacatggtccaagacaattcctgggaaagttcagttcttctcaagtgagggttctgacacatc

SEQ ID NO: 629142 - DNA, 85 bp, Homo sapiens
aaagctggcgttcgtttttcaaggaggctctccaaggggcacaataggggacatgatgcagaagctctcagggcagctgagcgat

SEQ ID NO: 629143 - DNA, 96 bp, Homo sapiens
cgagaccgcggccgggaccgagggcaaaatacatatctcagtgcattgatgagatcaagcaggagctgaagcaggacaacatagcggtgaaggcga

SEQ ID NO: 629144 - DNA, 100 bp, Homo sapiens
cccactcacaagtctctgaagccgtgcccgttcttcctggagggaaagtgccgctttaaggagaactgcagcctacaaggagaagatgaaggagctgtcg

SEQ ID NO: 629145 - DNA, 75 bp, Homo sapiens
ggacctctaccgagatgtgatgttggagaactacaggaacatggtcttgctgggaatgttccggagaatcacagc

SEQ ID NO: 629146 - DNA, 75 bp, Homo sapiens
acggagatggtggctgagctgtgggctcacgaccccgaccccggcccggggggcaaccttcgcccagaagaggca

SEQ ID NO: 629147 - DNA, 98 bp, Homo sapiens
gcagcgctaaccaggccagaagagttatcctatgaagttatcaacatacaagccacccagttattgccttgtctgtcaagatccgcagttatgaagaa

SEQ ID NO: 629148 - DNA, 100 bp, Homo sapiens
tgggagtgaactcagatgtggagcactacctttgtgagcagtgtgacccaaggcctgtggacaggactcctgcccctgccacgagaacacaccctttcca

SEQ ID NO: 629149 - DNA, 90 bp, Homo sapiens
ggcggtatcggtggctgccctactacagcggacgtagacaagtttggcaacgagatcacccagctggcccggcccctgcctgtggagtat

SEQ ID NO: 629150 - DNA, 100 bp, Homo sapiens
gaagcctcctgcgccggccttgcctcggccgccgccatgtctgcgcatctgcaatggatggtcgtgcggaactgctccagtttcctgatcaagaggaata

SEQ ID NO: 629151 - DNA, 100 bp, Homo sapiens
gcaagagggccccgctgaccaggtggctgcagtactatactggcaattgctggagaagattttgcaattgttgcttctgatactcgattgagtgaagggt

SEQ ID NO: 629152 - DNA, 82 bp, Homo sapiens
attctcccagagattgcctggaacaccagctcgggtcctcgcacaccatcctggattttttatcaagcagaaatgcatcgaa

SEQ ID NO: 629153 - DNA, 100 bp, Homo sapiens
gatgatgacagcagagagtggcagggctgaggacccaaagtcatttcccaggctggcggagaacggtctggaaaatcccgaagcagaagcccgtattcat

SEQ ID NO: 629154 - DNA, 100 bp, Homo sapiens
caagggctcacgtggaaagtggggcctttatcatctgctggactcctggattggttttgttacttctagacgtgtgctgtccacagtgcgacgtgctggc

SEQ ID NO: 629155 - DNA, 80 bp, Homo sapiens
ggagtcacctgaaagccaggaaatgagtgcctggtgaagaatgtgatgggatcactagcatgtctgcggagagcggccct

SEQ ID NO: 629156 - DNA, 99 bp, Homo sapiens
cctgcaatccttccgagacacctaagctgctgaagtaaaaatgttgagtagttcaaaatctatgaaggaactcactgaagaacagcagaatttacagaa

SEQ ID NO: 629157 - DNA, 75 bp, Homo sapiens
acaatcaatttgaactctgcatcttcatggtttacagaaattggtgcagcctgcttgaatttcttgaaactgtgc

SEQ ID NO: 629158 - DNA, 51 bp, Homo sapiens
tggcaaccgccccgtctgagaagagaactatttatgcagttagaaagagag

SEQ ID NO: 629159 - DNA, 75 bp, Homo sapiens
gctctctgtaagaaatatgctgatcttgaaattcacagtatggccaacagcaagatgcataccagggaccacctc

SEQ ID NO: 629160 - DNA, 75 bp, Homo sapiens
ggaaaacgtggatgattactacgacaccggcgaggaacttggcaggtaccagcaactaaggtttcagagctgaac

SEQ ID NO: 629161 - DNA, 75 bp, Homo sapiens
cgcttctcccgcttcaacgaagaccgagactttcagagttaatagagtggatacaaccttgctgaagatgaagaa

SEQ ID NO: 629162 - DNA, 90 bp, Homo sapiens
ccggggagcagccggccgggcgagcctcggcatttcttatactgaagcagtggagatcttaaagcaagcatcccagaacttcacctttac

SEQ ID NO: 629163 - DNA, 100 bp, Homo sapiens
agaggatggaaatcagcgcggagttaccccagacccctcagcgtctggcatcttttaagtgctgtggggctgctaactacacagattgggagaaaatccc

SEQ ID NO: 629164 - DNA, 100 bp, Homo sapiens
gcggaggcgttggagcgcggaaatctggaaccgggatggcgacgtctacactgagtcggaggcgaagaagcagcgctatgcaaacaagcactgaagagga

SEQ ID NO: 629165 - DNA, 75 bp, Homo sapiens
tgtcagttgacctaccccttgcacacctaccctaagatcaaccagatggcaacagcaccagattctcagagatta

SEQ ID NO: 629166 - DNA, 82 bp, Homo sapiens
cccagcatgaagaccccggcggacacaggtcaaaatgcagatcttcgtgaaaacccttaccggcaagaccatcacccttgag

SEQ ID NO: 629167 - DNA, 87 bp, Homo sapiens
gaattaagtacaaacaaaaaccaactgaagcagctgacagaggtgtttgttgaaagctccgagactttggattaccagatggccttt

SEQ ID NO: 629168 - DNA, 75 bp, Homo sapiens
gaacggaagcgtctttgctcaaggatcccagttttctctggatgacgtgggcaccgcgtccgtgctgcagcgccg

SEQ ID NO: 629169 - DNA, 75 bp, Homo sapiens
tgtcaaacagtttattgcaccaggacctgagagtcagtatactaagactgcccaggagattgtgaacgtctgtta

SEQ ID NO: 629170 - DNA, 74 bp, Homo sapiens
gatgaattgtacggcacttggcgtaaagccgcttccctcaagagtaactacaatggaggaagaagcgaatgcgc

SEQ ID NO: 629171 - DNA, 100 bp, Homo sapiens
gatgcactgatctgcacagatgacttcattgccaaagttgttcaaagattctgcctgatcaatgcaggagtcctgtacctctacttcagcaattacctac

SEQ ID NO: 629172 - DNA, 96 bp, Homo sapiens
cgcttcgggaacccggtgccggactgcgcctgctgcatgtgaacgagtgtgaaacactacagggtgtatgtggagctgccctgtgtgaaaatgtcg

SEQ ID NO: 629173 - DNA, 73 bp, Homo sapiens
ggaaggcatctgtgtgaaggagcagatcccagacatgcgtcgggatgtccaggaaatttttcgcatgaccccc

SEQ ID NO: 629174 - DNA, 82 bp, Homo sapiens
gcagctcaacttctaccagttcctcggggtgcagcagaaatttccatgcagtatcggcatgatggagcttgcccaacaacta

SEQ ID NO: 629175 - DNA, 75 bp, Homo sapiens
gccctggtcttgctcggccgatgaagtgcagaggtttttttctggagctgttttggcccacaaaggatattttcg

SEQ ID NO: 629176 - DNA, 90 bp, Homo sapiens
ctgagacgcacagtctccgtgccggtggaggggcggccccacggcgagcatggcccctgtgtccgtctgggatgaggaggaggatggtgc

SEQ ID NO: 629177 - DNA, 75 bp, Homo sapiens
tcatcgtgaccaccggcctggtattgggatgatacatccagaaagtgcccagaagaaacttcctgctggaaaaaa

SEQ ID NO: 629178 - DNA, 75 bp, Homo sapiens
gccgctgcctctttcaaacatgtcagcccagcaggttcacaactacatgatgccacccctcgaccgaagctggag

SEQ ID NO: 629179 - DNA, 117 bp, Homo sapiens
acgccgagcggtgactccccgccgctcccgggggccgtgacgaaactgccaagttttggaccttatctggaacagcgcaagaaaatcatagcagaaaacaagattagactgaaagaa

SEQ ID NO: 629180 - DNA, 101 bp, Homo sapiens
cccgggaaggcctgagaagctttcggaagcaaggtggtttgctcgtgattgcatttgattgcaaggagacagggtgctggagaatctggtaaaagcaccat

SEQ ID NO: 629181 - DNA, 124 bp, Homo sapiens
ctcggccctgcctctggctgtggaaacaggcctccaagtacccaaggaatgaatctgaagtctgctgcagtaaaacacagaaggctttaaaatgttttcttgcataaaattcaaaacttttaag

SEQ ID NO: 629182 - DNA, 90 bp, Homo sapiens
catctcccaccccagagaacgagcagaaggtgatttactacctctgcatcttattgaaagatccagtggaaccacatgggatatcccaag

SEQ ID NO: 629183 - DNA, 95 bp, Homo sapiens
tccatggaaaaatctctcgggaagaatctgagcaaattgtcctgataggatcaaagacaaatggaaagttcctacagagtctcactctgttgccc

SEQ ID NO: 629184 - DNA, 100 bp, Homo sapiens
tgtccttctttgtggagagcaagaggtcctgggcctatgtcaagaagtgcaaaaacaacatgtgtccaaatcggggattggtgagccagctgctggaatg

SEQ ID NO: 629185 - DNA, 115 bp, Homo sapiens
ctagaggtccgggcttggagttcgcctcagacgcggtggagccgccggagtctgagaagtagtcaaatcagcctagcagaaacaaagtacgttaaccaatggaaaactgacggag

SEQ ID NO: 629186 - DNA, 100 bp, Homo sapiens
agacgagcaggacaaggagacggtcagagtccaaggtccgggtatcttaccaggcttctccagtgacagtgatctggtatctcttactgttgatgtggat

SEQ ID NO: 629187 - DNA, 116 bp, Homo sapiens
ctcctcttcttcctcttcttcctcctccgctaccaccaccacaccagaaactagcaccagccccaaatttcaacctcgtcgcgacatttctcagaagccatgacatgtccctgcgg

SEQ ID NO: 629188 - DNA, 100 bp, Homo sapiens
gtgaacgaagtcagaatttcctgtgttccctttgccgctcctggagttcactggtattggttgctctggcatctgaagaacttgccaaaggctggaccca

SEQ ID NO: 629189 - DNA, 100 bp, Homo sapiens
ttagcgctagccctgcagacagaggtgtgctgacgacctgctacaacagaagtttgctgggatgggaaacctgctcaaagtccttaccagggaaattgaa

SEQ ID NO: 629190 - DNA, 98 bp, Homo sapiens
ggaaccgaggggagcctgatcctatcgttttgacgccaggtgtgtgtggaggccagtatgaagctgaaaaagcaggtgacagtgtgtggggctgccat

SEQ ID NO: 629191 - DNA, 50 bp, Homo sapiens
tgaaaaagttggatgtcagttaaggctgtgctccattgaagtgacttgtg

SEQ ID NO: 629192 - DNA, 100 bp, Homo sapiens
cgcgtccccactgaccagcgcgcaggacagcgccttcctcaacgacgcggacatggtcatgagctttgtgaacctgggtcgctacccacaggagaacaag

SEQ ID NO: 629193 - DNA, 100 bp, Homo sapiens
gtacccgccgccgccgttggctggaggtcgcgtggggcaggcagtggcgctgcgggccaaggccttcggcttcaacgtgctcttctacgacccttacttg

SEQ ID NO: 629194 - DNA, 88 bp, Homo sapiens
ctctatgccgacatcgacgccgcctggcaggccctgcgcaccaggtggccctgctgcagttgatggagacgccagagctggcggggca

SEQ ID NO: 629195 - DNA, 75 bp, Homo sapiens
cctggccgccccgagcggagcctggaggctcggggcccccagttcccgccccagacctcttgatgcagatcaagc

SEQ ID NO: 629196 - DNA, 50 bp, Homo sapiens
gagagattggactgggagactcagcagccgtgctatcaagactaatcagg

SEQ ID NO: 629197 - DNA, 75 bp, Homo sapiens
gggcgctgtgtcatcatgtgtcagggctccaagaaggtacaatgccagggagtactacgaccacctgcccgagct

SEQ ID NO: 629198 - DNA, 83 bp, Homo sapiens
gtcggtgtttggagaaaaggactcaggtgaggactggagattaacgtcttcaaggacccagttgctgatcccaacaaaaggtc

SEQ ID NO: 629199 - DNA, 78 bp, Homo sapiens
cgaggagggcacaaggccaggttcccaagagctcaggtccgagctatacctgtggacattggtttctccattgaagag

SEQ ID NO: 629200 - DNA, 100 bp, Homo sapiens
tggagctgccgcagatcgccgtggtgggcggccagagcgccggcaagagctcggtgctcgagaacttcgtgggcagacggagtttcactgttgttgccca

SEQ ID NO: 629201 - DNA, 97 bp, Homo sapiens
aataagcattcctctcttgctggtacatgatatgtcagaggccgactcgcgggccgctgcacccaccgccaaggacaaaaggagcccagcgctacta

SEQ ID NO: 629202 - DNA, 75 bp, Homo sapiens
ttcaaccccaagttcatgacttttgccagtgcgtgttccaacatgggaccagccaccactgttgccttttcaaga

SEQ ID NO: 629203 - DNA, 82 bp, Homo sapiens
agagccccagctcctgtctggtctgtgagatgtcctcactgtttcaggaggagcatcagatccatgctgctgctgactcgga

SEQ ID NO: 629204 - DNA, 100 bp, Homo sapiens
cgagcccagcgcctcggaggccgcccccgcggcggccgcgctcttcgcctggtacttcctcgcgtattgctaaaggaggagttgaccacaccaaaatgag

SEQ ID NO: 629205 - DNA, 98 bp, Homo sapiens
ttccccctgtacagcctgatcactccccagacgtggtcagcaacgcacagctatcttgacccacccttgtctggccttaccaaggcagtgaaggagag

SEQ ID NO: 629206 - DNA, 100 bp, Homo sapiens
tgaaggatggggaggagcggggggaggaggacccagaaggtcactctggaatatagacccgtgatcgacaaaactttgaacgaggctgactgtgccaccg

SEQ ID NO: 629207 - DNA, 75 bp, Homo sapiens
gccatgtctgcttccaatttgatgcaccttttgtttttgcagagtattataatgactatggagatatcatcaaag

SEQ ID NO: 629208 - DNA, 82 bp, Homo sapiens
tagaagtgctccagaaacagcttctagaaatcatgttgttgatgtcagtgttgcggtcagtactcctgcaggactcatcaca

SEQ ID NO: 629209 - DNA, 75 bp, Homo sapiens
ggctcggagccctggaagcagcagctcaccgaggacggggactcgatgtacagttacccagcacgtgtacctcct

SEQ ID NO: 629210 - DNA, 82 bp, Homo sapiens
cttttgaactagatcgagctgatagagaccctagtaacatggagaatgcccacttcagcatctcagagtccttaattgctgc

SEQ ID NO: 629211 - DNA, 100 bp, Homo sapiens
aaaaaaaattggatgtggcaattttggagaattacgattaggaaggatatggagtaatagtactaaatcccaatgaaaactatattgaagtagaaaagcc

SEQ ID NO: 629212 - DNA, 83 bp, Homo sapiens
caggacttgctttttctgctctgagccggacgccggaatggagtttgaggaagaggcctatgaaaggaggttccctacatgtc

SEQ ID NO: 629213 - DNA, 100 bp, Homo sapiens
gccgccgccacccgcctcccaccatggctctgaagagaatccacaagtgtcaacctaagaaaaagtctacgccactgaagtatgaagttggagatctcat

SEQ ID NO: 629214 - DNA, 100 bp, Homo sapiens
tggcgagggcgccttccatggagacgcagtatcgggggccctgaggatcctcccagaagtaaaggtagagggggagctgggcggatcagttaccatcaag

SEQ ID NO: 629215 - DNA, 75 bp, Homo sapiens
atttttgggaagttggttttccttccactcagacttgtatggaaagagctggaggaaagcaggaatgttcagagg

SEQ ID NO: 629216 - DNA, 105 bp, Homo sapiens
gcggatcgggtggagtgtaggtcatatcgccgcgggacacttgacattcagggacgtggccatagaattctctcaggaggagtggaaatgcctggaccctgtgca

SEQ ID NO: 629217 - DNA, 90 bp, Homo sapiens
cgcctggacaaggagaacaccggaagttggagaaggtcacgggatggatagccggcctgccatggccatctttgaactcctggactatat

SEQ ID NO: 629218 - DNA, 74 bp, Homo sapiens
gagaccccgcgccgacggctgctcaaacatcaggaaggtggtcttctgccctgttaaagaagccctggaggtgg

SEQ ID NO: 629219 - DNA, 82 bp, Homo sapiens
caaggatgttcggctggtctcccttggctcccggcaggtggcagctatgcaggcaggtctgctgaaggtggtaccacaggct

SEQ ID NO: 629220 - DNA, 97 bp, Homo sapiens
tcattgaagataatgaactaaacatagttttggaactagcagatgctggcgacctatccagaatgatcaagtagacccaaatgatttgtacattgta

SEQ ID NO: 629221 - DNA, 82 bp, Homo sapiens
ggaagatgtaaagcaatatttcgagcagtttggcaagatggcccactgcgtgaccttggttcagctgtccatttcctgtgac

SEQ ID NO: 629222 - DNA, 74 bp, Homo sapiens
gcggggcggcggcggcggcggctgcggcccaatatagagccccagtttgagggacagcgggatatccaccatgc

SEQ ID NO: 629223 - DNA, 83 bp, Homo sapiens
gaaagaaaccgctgaggcttatttgggaaagaaggaccttaaaggctttgatccaggagagaaatactttcataacacatcat

SEQ ID NO: 629224 - DNA, 100 bp, Homo sapiens
caagtatggagctcaagttcttaattattcagaatgctgcggttttccaaggtacaggtttgcagattccgccagcagcacagcaagctctacagatgag

SEQ ID NO: 629225 - DNA, 101 bp, Homo sapiens
atttggaaccgttatttttgctggatgaggagttggaagatgaggagtaacacaacactttagatatacatgttaaaaacttataacaaatcatagatcat

SEQ ID NO: 629226 - DNA, 90 bp, Homo sapiens
ttgctcccatctactttcttctctagaatccacggccagtagacaagatttgactctggaggtgacgtctgagccaataggtatttggag

SEQ ID NO: 629227 - DNA, 112 bp, Homo sapiens
cgtccatccatttcgtggttcacccgctgccgggcaccgaggaccagctcaatgacagcatgttggcagataaattgaacatgactccagaagaagctgaaaggtggattgt

SEQ ID NO: 629228 - DNA, 98 bp, Homo sapiens
gcaaaacggaaaagcgtgtgtaggggagcggaaaaggaagtcaccaccgtggcctgcgacgacacgaagatcgattgagaagttattagaatgggaaa

SEQ ID NO: 629229 - DNA, 98 bp, Homo sapiens
tctgggcatcgggccctgtctgcaatacacctgcaggaagagctcgatcaggttcagatcttggccctgattgcattcatctgcatagagaccatcat

SEQ ID NO: 629230 - DNA, 101 bp, Homo sapiens
tgatgatccttctatggttgtatgtgccagtaatgaagatcacaaaatcgcttatgacccttctttgtcttcgcacgcaatgatagtaagaaatgctaaag

SEQ ID NO: 629231 - DNA, 100 bp, Homo sapiens
gacagctgcgcgggcgagcatccccacgcaagactgagtcgccctgtgttgcccaggctggtcttgaactcctaggctcaagagatcctcctgcctcagc

SEQ ID NO: 629232 - DNA, 83 bp, Homo sapiens
ggattcatttagagctgcggaacaggacgccctctgatatccagagacaatggccccgatgggatggagcccgaaggcgtcat

SEQ ID NO: 629233 - DNA, 100 bp, Homo sapiens
gagaggttcttgatcgctgcagcaaatggcaacttgtgcaggtatgttgaagaaagtacgcacatcttatcttctgaacattttgatggaattaaccaca

SEQ ID NO: 629234 - DNA, 74 bp, Homo sapiens
gcgaggcagcggcaccttcgagcgtctcctaggagggtgaggacaaaatcttcttaatcaacaagcttcactcc

SEQ ID NO: 629235 - DNA, 50 bp, Homo sapiens
cgacccagtgccgcgcagctgctggagatgatgattattccccaccttct

SEQ ID NO: 629236 - DNA, 75 bp, Homo sapiens
tcttgggttttttgtggcttccttcgttattggagccaggcctacaccccaggactgaagcttcaagatggctga

SEQ ID NO: 629237 - DNA, 82 bp, Homo sapiens
aagagcgacaagccgctggcagccgcggatctcaccgccgctcaggccgccaccggcacggccaggccagcatggtggacca

SEQ ID NO: 629238 - DNA, 74 bp, Homo sapiens
agatgccagcgtagctgaatccagtaccaaaaacgtcaacaacagttttacgatcactgtcgtcttcctgaaag

SEQ ID NO: 629239 - DNA, 98 bp, Homo sapiens
gctgcttttgcaaagaatccagtgggagagagtcaatggcctgcttgacgtgaactccaaagtcctcctggatgaaactgattccaagacagcctccc

SEQ ID NO: 629240 - DNA, 82 bp, Homo sapiens
gtactttataggcatttcattcagagtttatccaaaaattctccaaaacaccagtggggagaagaggaaccaaattctcaga

SEQ ID NO: 629241 - DNA, 145 bp, Homo sapiens
gtcccgggtgctgctggttagtgtgctctgagggagggtccgagccagccgctgttttgccggaggagcccctcaggccacctggccgagtgcaagctggtctcctttcccattggcatctacaaggtcctgcggaatgtctctg

SEQ ID NO: 629242 - DNA, 50 bp, Homo sapiens
cggggcgggacctggcgccaccttgcaggagtacaagcgcaagctagcca

SEQ ID NO: 629243 - DNA, 96 bp, Homo sapiens
ctctcgtcctcgctgctgtacttcgtctatgtggcgcccggcataggacacaactcagatgggaagttcatcgcccgggcacagcggatagagtac

SEQ ID NO: 629244 - DNA, 101 bp, Homo sapiens
cgggaagaactggtgagccaagggatcatgccgcgcagcagtgaggatgccagagttcatgggtttctagaagacaagttttcaactgcagatacaaacat

SEQ ID NO: 629245 - DNA, 88 bp, Homo sapiens
gaaggctatttcgccgctggcgtcaggactattttcacgttttaatgccgagaggccatcgaagacggcaatttggaggaaatggaag

SEQ ID NO: 629246 - DNA, 99 bp, Homo sapiens
aagcaaatggaaaagtaatcagatggacagagccgattcgaagacagtctcttacacctcctcctcagaacactattacatgggaagaatatatatctg

SEQ ID NO: 629247 - DNA, 100 bp, Homo sapiens
gcttgatggcttagaactctccacagccatcactcatgtccataaggaggttaaaggtgaatccttgtttcattctaagaaaatggacctgacagtaaat

SEQ ID NO: 629248 - DNA, 100 bp, Homo sapiens
cgggttccaaacccctagccacgacatggaagaatttttgcaacgcgccaaatctaaactggtgatctgtgaaaatggttcgctattcacttgacccgga

SEQ ID NO: 629249 - DNA, 75 bp, Homo sapiens
accgccgcgcgctctgacgccggttcttctgtgtggcagttcagaatgatggatcaagctagatcagcattctct

SEQ ID NO: 629250 - DNA, 75 bp, Homo sapiens
agcctggtggtggcccacgcgcagattcatgatgttgctatcaaaagttgagaaattgtcagaagaaatcatgga

SEQ ID NO: 629251 - DNA, 100 bp, Homo sapiens
ttcaaagggacggtggtcacgcctgttcaagtttgtttcgacgccggaccgcgtaagagacgatgatgttgggcacggaaggtggagagggattcgtggt

SEQ ID NO: 629252 - DNA, 100 bp, Homo sapiens
tgggcaggaagaacccatcgggcagctacacatcttgaaagagaagctcttcctgtgaggaaagaccacagcaagattctttcattcgtctcctcctagc

SEQ ID NO: 629253 - DNA, 100 bp, Homo sapiens
ggtcatccgaaatcaacttggaaagtcaaattacgtgtggcatatggactcctgacgaccaacaggacttcagacggctcctgaagaaggaagagaagcc

SEQ ID NO: 629254 - DNA, 75 bp, Homo sapiens
ggagatccgctcgcgcgccgaagagcattggggagtcagcaatgtccgttgtgttaaatcagctgctgcccatga

SEQ ID NO: 629255 - DNA, 100 bp, Homo sapiens
cgtggatccagtgggccgcctgctgctggtgcgcgtgggggtgatcagcttcgcccagaaggacccacgcagccacccagcctcagcactcatctgcgca

SEQ ID NO: 629256 - DNA, 60 bp, Homo sapiens
aaatcatctctaaatcccatcctctttcgaggtgttgggacaatctctatgggaagcaga

SEQ ID NO: 629257 - DNA, 50 bp, Homo sapiens
ctgagagtgactattccctgaggaatgcaagttctagccggtttttccta

SEQ ID NO: 629258 - DNA, 98 bp, Homo sapiens
ctcggtggaggtcttggatgtgcaacacaaccagctccttgagctcccacctaaccttctgatgaaggctgacaggtgtaccttccggtttcccagca

SEQ ID NO: 629259 - DNA, 106 bp, Homo sapiens
catcagtggagtccatgctacctgattgcccccgggtctcagcagagttggacaagttataaccatcaaagcaaaagttactagagcattcagcacaagcatggag

SEQ ID NO: 629260 - DNA, 75 bp, Homo sapiens
tcctggagccctgcagtcctggggcagagacagaatcaggacacagctcgaggcaacgcggtaaaaatattgctt

SEQ ID NO: 629261 - DNA, 96 bp, Homo sapiens
agactgtggtgcctacccccatcactgcttccctcagccataacaggcaaatactgtggtctggggttgcaaatgaaccattcaattgaatcaaaa

SEQ ID NO: 629262 - DNA, 75 bp, Homo sapiens
gttctcaaaggtgcctaccaaggtcaaaggctatgacaacctctttgctatggtccctcgccggctccctcgggg

SEQ ID NO: 629263 - DNA, 91 bp, Homo sapiens
atttaaatggttctggcaaactgctcaagggtggagagattcaaccagttagcgtgaaagttggagataaagttcttctcccagaatatgg

SEQ ID NO: 629264 - DNA, 100 bp, Homo sapiens
cattctcctgagaaattgtgcagcatcaggcagtgatcctacaggcatgcccaagagaatcgtaaatgcaaaaattgcttgccttgacttcagcctgcaa

SEQ ID NO: 629265 - DNA, 50 bp, Homo sapiens
ggatggagctgctggcgcacctgctggcctggggaggggccatggtgcca

SEQ ID NO: 629266 - DNA, 58 bp, Homo sapiens
ttcgagtgctagtggtggaacgggaccacacgcacgagggccgggaggaggatcagcg

SEQ ID NO: 629267 - DNA, 100 bp, Homo sapiens
gcggcggcggcggctccagcgtcctaagagatcagtgtactgttacccggacatacctattccttcacaagttctggttcttcagtgctgcttactattt

SEQ ID NO: 629268 - DNA, 100 bp, Homo sapiens
ttggttatgtggaactatgtgcaggaaacacagacacaaaattccaaaagctgcaatataaggatctctgtacagtaaaaagaacgtattctcatggtac

SEQ ID NO: 629269 - DNA, 87 bp, Homo sapiens
atggttagagaagaattttccaaatgaatttgcaaaacttactgtaggtgatctttgcagagctgtttcaacttccagcaccccctc

SEQ ID NO: 629270 - DNA, 111 bp, Homo sapiens
ctggatcgaaatgtccatgagaaaaagcttggagataaagttgctttttactggatagcagtgagattcacttcaaagtgaaaatgacaacacatctcaagaaactcaaag

SEQ ID NO: 629271 - DNA, 80 bp, Homo sapiens
acaaaagccaagaggaggacagttcgctacacagcaatgcatcgaggccctggccaacgtcaacattgggagcctcatct

SEQ ID NO: 629272 - DNA, 75 bp, Homo sapiens
tggagattttgatgtggatgatgccaaagttttattagcagagagagatcatcattgcctgaatttagctttgtg

SEQ ID NO: 629273 - DNA, 50 bp, Homo sapiens
cctcccgagtagctgggcttacaggtgccatgtttcagaacagagtaaga

SEQ ID NO: 629274 - DNA, 90 bp, Homo sapiens
ctgcagtctggtcagatccctggcagagaacgcagatcagatggccgaacagacccaattttggatgatgttggtgaagctttccagctg

SEQ ID NO: 629275 - DNA, 129 bp, Homo sapiens
gtgctggtgcctgtcggagaacatcgccaagcagcaacagctggcagcatcacccccggacagcaaggctctgaagggctccaagaagctggtgctgtctgtgtactcagcagggcgcatccctggggg

SEQ ID NO: 629276 - DNA, 75 bp, Homo sapiens
cgaagacggagttgtaaacttcttaaaattcctctctcgacacttcggtttgtttctgcgtcacatgatcttggc

SEQ ID NO: 629277 - DNA, 51 bp, Homo sapiens
gatatctatgagactgtcatctctctaggccgctacctgtctgaggaaccc

SEQ ID NO: 629278 - DNA, 71 bp, Homo sapiens
aggaggtgccacaaagggcaaagagtgtctcctttcctcttgggccgggcactttgggctgccagtcggtt

SEQ ID NO: 629279 - DNA, 100 bp, Homo sapiens
tttgaagagaaaaagaaacagcgtgaaattgagggtgtgggccgaagatatgctcatgtggtgttgaggaaagcagacattgacctcaccaagagggcgg

SEQ ID NO: 629280 - DNA, 83 bp, Homo sapiens
cggacagtgcagggaagcaactgcagagataaaagcttcgatgatgaagaatcagtggatggaaataggccatcatcagctgc

SEQ ID NO: 629281 - DNA, 50 bp, Homo sapiens
ttggcttcaatgtcatattttggaagattctagtgttccagaaactccag

SEQ ID NO: 629282 - DNA, 101 bp, Homo sapiens
gacgggtctaggtgagacagaagccaaacaggaggaggaagtggaggatcgcccaggaccacaccgcagcgtaactgcaggcctctcagcgaaaaaggggg

SEQ ID NO: 629283 - DNA, 100 bp, Homo sapiens
cctggtctttgtttgaggcctgacgtgggcatcattttaacaggtctcctctgagcctccggcctccataagacccaaaacagatgacacctcttcccag

SEQ ID NO: 629284 - DNA, 75 bp, Homo sapiens
ccggctctgggctacggactatgggcgaatagctctgaccacccggcgaagattagcctgaggcctgctcagtcg

SEQ ID NO: 629285 - DNA, 75 bp, Homo sapiens
ttttggggtagtgtctgggatccagtacgagttgaatcattgttcaaataagaagattaagattgcggccctgcg

SEQ ID NO: 629286 - DNA, 100 bp, Homo sapiens
ccaagtatgtactctcaggaactattccagctttctcagtatctacaggaagcccatgccatgtcctgaggacgggtgagcagcctggtggagagatcta

SEQ ID NO: 629287 - DNA, 75 bp, Homo sapiens
gtccagagagctgcaggtgctagatgggattgtatgcaggcccagaggtagatatatggagcagtggggttattc

SEQ ID NO: 629288 - DNA, 80 bp, Homo sapiens
gtaaaattggcaagacatatccttacaggcagagagcctctgcgacttgatatcaaaagaaagctaactgctagatctga

SEQ ID NO: 629289 - DNA, 75 bp, Homo sapiens
ggcggcggcccagccacgatgatgaacctggcctatgttaaagcagcagactgcatttcagaaccagttaacagg

SEQ ID NO: 629290 - DNA, 100 bp, Homo sapiens
cctgtggactgcagcctcggcggtcagcaggcgtcctgcctctgcggctctgccccctgcatcctgtgcagctgctgccccgccagccgcaactccaccg

SEQ ID NO: 629291 - DNA, 98 bp, Homo sapiens
tcaatcttgaaaataaaacttgccaggttccagactctatgacatctgctgcctgtgagaaagatcagtctaaagaaaaggagaagaaagtgaaaaaa

SEQ ID NO: 629292 - DNA, 75 bp, Homo sapiens
ctgccttcaccaaaatccactatcccaggtagcagtagctgatgtgcagtttggccccatgagatttcatcaaga

SEQ ID NO: 629293 - DNA, 98 bp, Homo sapiens
ggacaaagaagttaccctggagtatgtatcaagcctggatttttggtactgcaaacgagtgaaaaaccttttgaatgtccaaattgtcatgaacgatt

SEQ ID NO: 629294 - DNA, 100 bp, Homo sapiens
ctgttcagtactgtgggtgatatttgcctttagtgcactcttctccttcacagtaaagtggctgacatgggagtcccaccgtattgtccaggctggtctc

SEQ ID NO: 629295 - DNA, 100 bp, Homo sapiens
ttctccggggccacatccagcgcaggcatgcaggcgtggcagaaggtgggtaagggactgttctgaagaacctttccatttagtgatcaagatatggaag

SEQ ID NO: 629296 - DNA, 75 bp, Homo sapiens
ttaatctgttggattctaatgcagttcatcacatcattcatgattttcaggaccctgatgctcccataagacaga

SEQ ID NO: 629297 - DNA, 98 bp, Homo sapiens
ggggccaaggcttcctccgggcactctacacccccaagtgcatatgggtctgtcaaagcctatactaactttgatgctgagcgggatgctttgaacat

SEQ ID NO: 629298 - DNA, 75 bp, Homo sapiens
ggaacagctgcagccccttgaacagcttaacattggtatcccttccctgacaaagtgttgcaaccaacacgacag

SEQ ID NO: 629299 - DNA, 100 bp, Homo sapiens
aaatcaagcttggaatgatcatcaaacagctatggtgatgattagagacatactaatgtacatgtacgaattggagcaatgttggcttatacacctctgg

SEQ ID NO: 629300 - DNA, 75 bp, Homo sapiens
taatcctcacagcaacctatgaggtaccaggttgaattggaaaacctaaaagatgaatatgtaagaacacttgaa

SEQ ID NO: 629301 - DNA, 75 bp, Homo sapiens
agctggcatgacgtgcaggtctctagcgcggccatgctatgatagtggaagcttatccaaaataatagatccaga

SEQ ID NO: 629302 - DNA, 96 bp, Homo sapiens
agagcttcagccatcacgaggatgatttcggaacctggagaaaatgatgacgtagctttgccaaagacttagaagctaagcagaaaatgagcttaa

SEQ ID NO: 629303 - DNA, 80 bp, Homo sapiens
ctgcgtgagcgagcagaggcttaaggtcttcagcggggcgctccaggaggcactcacagcggacaaggcaaaatctcagc

SEQ ID NO: 629304 - DNA, 83 bp, Homo sapiens
cagaggggtccatacggcgttgttctggtctttcccagggaactccgatgaagtgttccaacaaaatgagcgagtgaaccaag

SEQ ID NO: 629305 - DNA, 100 bp, Homo sapiens
tcctactacgcgtacgtggtggagctctgcgtgtgatgctcgtcagaagttccgctctgttctggttgaagcaacggtgaaactggatgaactggtgaag

SEQ ID NO: 629306 - DNA, 100 bp, Homo sapiens
atttttggatgatgatggatccatttctcctattgaggagtcaacgtgcatgaatacctcagaagtaaactctgttcactgtatgaaaatgactgcatat

SEQ ID NO: 629307 - DNA, 75 bp, Homo sapiens
atcagtgcccttgtggcgaatggggctcacgtcgaatggtatagctgcatgctgggaaagaaatgcagcctggcg

SEQ ID NO: 629308 - DNA, 80 bp, Homo sapiens
cacagatggaaccagaaaagatacgaggctctaggagaggttgcaacaaggacagtgtcagagcaggctgtaaaaaatgt

SEQ ID NO: 629309 - DNA, 50 bp, Homo sapiens
taaacccatcgacaagaaggcacctgtctgatctcagagctgaagctggc

SEQ ID NO: 629310 - DNA, 100 bp, Homo sapiens
tgtatggattcatctcactgactgaaacctgagttttgattcaccagggtttcgaaaaaacgatgaaatgaaagctatggatgttttaccaattttgaag

SEQ ID NO: 629311 - DNA, 100 bp, Homo sapiens
tttaaagagcagaaaaagaattttgagagggagagacgaagctttacagaagccgctattcgcctgggattggagatctatgccctcaacagagtcatga

SEQ ID NO: 629312 - DNA, 100 bp, Homo sapiens
gccagagttgtgggccgccgtcggcagcaagaacagagagagaggtggacagatctgagagatactgaggctctgatagccgaggagaccagcagcaggc

SEQ ID NO: 629313 - DNA, 75 bp, Homo sapiens
gctattagatgggcttgctgctcccgcccatctaattggctttggtctaggtacatgtcccagagcaagcacacg

SEQ ID NO: 629314 - DNA, 75 bp, Homo sapiens
tcttgtcgcctccgaccgggtggccgccagcaatattgtccagatgaaggacggctcataaaggactcagtgcag

SEQ ID NO: 629315 - DNA, 75 bp, Homo sapiens
cggctgtacgcacacaccatcgcagtgtttctgaaagatctatccagcactccgatggccagcaacaacaccgcc

SEQ ID NO: 629316 - DNA, 75 bp, Homo sapiens
acagcatccaaacattatcactctaaaggattggacgtgatgctgaatccaggcagtgccacttcgaatgttgct

SEQ ID NO: 629317 - DNA, 100 bp, Homo sapiens
cacaatccaagttccacaatatattgactactgccacaattccggatgaagatgagctggattcccacaccatggtgaagactagtgtggagagtgtggg

SEQ ID NO: 629318 - DNA, 98 bp, Homo sapiens
cacagagaggctggaaaggtcatctcggagactagaggctggataccaaatagcagtggaaaccggcatcccgggcccaaatcctagacaaagccaca

SEQ ID NO: 629319 - DNA, 89 bp, Homo sapiens
cgccgcgcacgccatgggagccgtgactgacgatgacacacaataatttttggttgaagaagatagaaatcagtgtttcagaagcagaa

SEQ ID NO: 629320 - DNA, 99 bp, Homo sapiens
ttcctttcttgagaacaacctggaacagcttacaaaggttcacaaacagcttggagagggtctgggagtgaaggagacaccccagcaaaagtaccagcg

SEQ ID NO: 629321 - DNA, 113 bp, Homo sapiens
tggagctcagaaagctgtatggacctctgtgtggaaacattgctgaggctcttgtcagcaaaggtctagccacagtgatcagataccggcaggatgatgaccagagatcatca

SEQ ID NO: 629322 - DNA, 82 bp, Homo sapiens
ttattaccacgggggtcagaccaggatccacccgaggaaggaagttctactacatcaccctgctacgagaccccgtgtcccg

SEQ ID NO: 629323 - DNA, 87 bp, Homo sapiens
ctgggtgcctgtgcctcaggggatttcgcttctgtacagtgcaatcgcttccatactaagggcctggcttgaccagtgtgcagaaga

SEQ ID NO: 629324 - DNA, 83 bp, Homo sapiens
tggaaaatgcgctcgggctggaccagcaggtttccaatacttatctacaggaatcgccatgaccccagctctgagggaggcaa

SEQ ID NO: 629325 - DNA, 75 bp, Homo sapiens
atggtgcattgcagttgcgtgttgttcagaaagtattaattttaaagacccacagtttgctgaagattacatttt

SEQ ID NO: 629326 - DNA, 82 bp, Homo sapiens
caaggagcacgtggcagcgcaggaaacagtatggtttgaagtggtgaacatggatttttctcggcttcacatgtacagtcct

SEQ ID NO: 629327 - DNA, 90 bp, Homo sapiens
gcgggggcggctcctgctcttcctggactcctgagcagaggaccgtataatagacgctggccccaaaggaaactactctcgatttatgaa

SEQ ID NO: 629328 - DNA, 101 bp, Homo sapiens
cagcagtataaaccagactccactgcagcacctgatcagagagcaccagtcttcttggtatggagaatacagaatcccaaacaaggcaatgaacaaagaag

SEQ ID NO: 629329 - DNA, 100 bp, Homo sapiens
cgaacgtacagctgtatccactgcagagcacacctggccaatcatgacgagctcatctccaaggttggagtcagttagctgctatgcactgtgttatgct

SEQ ID NO: 629330 - DNA, 100 bp, Homo sapiens
ggcggggatacagcctggaaggtgcgtgtggggctgggtctcggagtgggagacgtggagtgcaggactgaccactgagcagatgctgagaaaagaccag

SEQ ID NO: 629331 - DNA, 74 bp, Homo sapiens
ctgcccgcactcctggtcctgctcggggctctgttcccaggaagaagccatggatttaataaatagagaaacaa

SEQ ID NO: 629332 - DNA, 124 bp, Homo sapiens
aaaagacaagctttccagagaatgtttcagagaaagttacgtggagcgtgggcgtttcgcagactcctaaggtctcttgcagctgaatggggtaaatatggaatgcgattcaatgtgattcaac

SEQ ID NO: 629333 - DNA, 98 bp, Homo sapiens
gattgtgaagaagaatttcgatctccgccctggggtcattgtcaggaacgtcaaggtcgtgggaaataaaaggcagttctacacagactgcagcaacg

SEQ ID NO: 629334 - DNA, 75 bp, Homo sapiens
gttcatgagcacatatgtcatgatgattgttttacaaggacatgctacaagagtaactgctaaatctcaacagag

SEQ ID NO: 629335 - DNA, 100 bp, Homo sapiens
ctggactgcctgtctaattacaaccctaaagatgatcgggaggctcagaggtcccccccgcctccagccagcctgtgcagacttgctgcctgctgtgtca

SEQ ID NO: 629336 - DNA, 90 bp, Homo sapiens
ctgaagggaaagctccagatactaagcctgccttctggtacaagatgcctgtggaatgttcggtgaagtgcacttggagttcaccatgtc

SEQ ID NO: 629337 - DNA, 82 bp, Homo sapiens
tagaactttggtagcagttggggccaaatttgggcaagttggactttgtgatttggcccgatgagagaaagggaaagttaag

SEQ ID NO: 629338 - DNA, 75 bp, Homo sapiens
aatcacctatgtttacagcgacaggctgaaagaatattctcagaggttagaaggattgagaattatagagttgaa

SEQ ID NO: 629339 - DNA, 75 bp, Homo sapiens
tagttacctcttttaaactcattctactggagcaaatggcccttccttctaccatgattatagtagcagtttatt

SEQ ID NO: 629340 - DNA, 100 bp, Homo sapiens
aggagcagcaatttatccgtgtgcagccccaaactggaaagaagatgctaattaaagtgaagacgctgtttggagatcttagagcaaatgaatgaggatg

SEQ ID NO: 629341 - DNA, 101 bp, Homo sapiens
acttcaactggggccgggttgtcgcccttttctactttgccagcaaactggtgctcaaggagacgaaaccagacagagggtcaagtttacagatgaccgtg

SEQ ID NO: 629342 - DNA, 83 bp, Homo sapiens
ccgcccgccggatcccccggaccccccgaccgttttgggatttgagattgacgcggtgaactctgtccagttttcaaaccaca

SEQ ID NO: 629343 - DNA, 50 bp, Homo sapiens
ccatcccctggcggaaccgcccccagactggtcgaattgacaaatcttac

SEQ ID NO: 629344 - DNA, 95 bp, Homo sapiens
aaataaaaagaagtgttaagaattgcctttgggactctgaaggctgaaggctatttagcagacatgacccacaagcagaagaagcattagcaaag

SEQ ID NO: 629345 - DNA, 100 bp, Homo sapiens
cgaatctatctggaacccccgaccatgcgtaagaagcgactactagacagaaaggagatccaggctacctggtatgagaaactgcacgagtgggaggatg

SEQ ID NO: 629346 - DNA, 80 bp, Homo sapiens
cctcttgcagccaaggtttttaaggatgacgatgactattcatcatctacgagtttgcttggtcagaagaagccaggata

SEQ ID NO: 629347 - DNA, 50 bp, Homo sapiens
ggagtgatcggcccccagagggaagagtggatgattcaacagccacacaa

SEQ ID NO: 629348 - DNA, 97 bp, Homo sapiens
agggtattcctgccgattggtatcgcagaatatggcccttatcctattgaaggaggactctttggatatgaggctgccagccttgagagcaccaccg

SEQ ID NO: 629349 - DNA, 82 bp, Homo sapiens
gggtgttcgactgctagagccgagcgaagcggggggccctcagcctcttggccttgaacgggctgttcatcttgattcacaa

SEQ ID NO: 629350 - DNA, 95 bp, Homo sapiens
gcctacaagcaaaccatcttctgctggtggagaacttcttgatttgctgggagacatcaaccttacaggtcctggacccaagccagaagcctctg

SEQ ID NO: 629351 - DNA, 101 bp, Homo sapiens
ctgccgaagagaacaagacgtgtgaagactcaggcatttataagacgctgtttggcatatcgaaaagaagatcgatttgatgtgcaccagctggcaaatga

SEQ ID NO: 629352 - DNA, 98 bp, Homo sapiens
cggactcctcagatgccaccaacaactccatccagcagtttcttcaccaagcctgaacagaaacagatggtggcccagcaggaatctatcagagaagg

SEQ ID NO: 629353 - DNA, 95 bp, Homo sapiens
gatgttgtcctgtgctggggctgacagatggggcattctcttctcccaccctcgggactttaccccagtgtgcaccacagagcttggcagagctg

SEQ ID NO: 629354 - DNA, 100 bp, Homo sapiens
tctgtggatgaaatgaatcatgattttcaagctcttgcattagaatctcggggaatgggagagggggaacacacctgaaactagaggaacagcttatgtg

SEQ ID NO: 629355 - DNA, 100 bp, Homo sapiens
gcggggcccggttctccatcgcgcgcacggcagcctagcgcaatgaggcgggcagcactgcggctgctttgattatgcaggttctacaactgactgcaga

SEQ ID NO: 629356 - DNA, 103 bp, Homo sapiens
accctggagcctcagttggaagcagccgatccagcctgcggagcctgtggggcaggtactccaaagattcaggtttactcacgtcatccagcagagaatggaa

SEQ ID NO: 629357 - DNA, 75 bp, Homo sapiens
tggaagaaatgatgatggaaatgaagtataataccaagaaagccccacttgaatttgaggaagccaggaagtggg

SEQ ID NO: 629358 - DNA, 100 bp, Homo sapiens
cgacgaggaagacgccgaggcctgggccatggaactggcggacgtgggggcggcagccagctcgcaggacctgaaggctgaaattgacaagttggccact

SEQ ID NO: 629359 - DNA, 90 bp, Homo sapiens
agtgaaggccccctgaagtggaagacagcattggtactaatggccaactcaaggtattgacctgatggacatggcttcggacatcctgca

SEQ ID NO: 629360 - DNA, 100 bp, Homo sapiens
catgtattgagcaaaataaagaaaatcagagttttgaaaatgaaactgatgagacgacaactgagagaacattgaaagtattctctaagctatttgaaga

SEQ ID NO: 629361 - DNA, 109 bp, Homo sapiens
ggcaaatcaggagctgccttctatgcaactgagggtcaccatcagaaaagctaagtttgctgtatagtgaggatcaggagatctgatcctgattgcagaaccttccctg

SEQ ID NO: 629362 - DNA, 101 bp, Homo sapiens
cgtgaccacgccatggtccctcttgaggaggctgcacaggagtaccaggtacaacttggccaagtagaaatcaaatgccccatcacagagtgttttgaatt

SEQ ID NO: 629363 - DNA, 101 bp, Homo sapiens
gtctgggaccttaacagggagccatggcatctatcgagctgtgcctattcgagtcaatccaagagtgagtaatgtgaagtctgtctacaaaacccacattg

SEQ ID NO: 629364 - DNA, 100 bp, Homo sapiens
ccacccaacgcgaagacggtaacccgtgtgactttgactggtatgtgccaagtgctctctgctgccccagcagagccagtatcctgacaggaaagtaccc

SEQ ID NO: 629365 - DNA, 88 bp, Homo sapiens
aaagagtggatttcagcctgcacggatggtcttgaaacacaaatggtttttggtttcaatatggtgttcctgctacctcccacctccc

SEQ ID NO: 629366 - DNA, 100 bp, Homo sapiens
cagagtcatgctcatccagccccaccagttgcaccagtgcagggacagcagcaatttcagaggctgaaggtactccaaagattcaggtttactcacgtca

SEQ ID NO: 629367 - DNA, 96 bp, Homo sapiens
agcagcagccgccgccagagaggcccgcccaccagttcgcccgtccccctgccccgttcacaatatttgcttgtaaatgcatcacgaagaggcagc

SEQ ID NO: 629368 - DNA, 50 bp, Homo sapiens
caacaacttcatgggctgccttaaagagaaaatgataccatctactggac

SEQ ID NO: 629369 - DNA, 101 bp, Homo sapiens
ccgagccggagctgcagcccgagcgcggtggtgccctcagccccgtcctcttgtcctcctcagcctcgttgctgtctctgctggccttcatctgtgaagaa

SEQ ID NO: 629370 - DNA, 51 bp, Homo sapiens
ggacacccctgaagccgagaaatggaacggaaaacagttcttccttcaaag

SEQ ID NO: 629371 - DNA, 100 bp, Homo sapiens
cctcctgagtagttgagattacaggggaggaagccgcagcccaaggaggtcgtcacttgccgggaaggtggctcgggccaggctgcactcaaaacccgtg

SEQ ID NO: 629372 - DNA, 75 bp, Homo sapiens
caccgacagtgccctgagggccttcgagagctaccgcgccagacagcctgacatttaccccggtaactgctgggc

SEQ ID NO: 629373 - DNA, 98 bp, Homo sapiens
gttttggcgagagtttgtggaagatggcgcctgttgtgacaggccacccctttgctgtgaagttgcttgcgctctgtaagaaagaaatcaagaattca

SEQ ID NO: 629374 - DNA, 83 bp, Homo sapiens
ctaaaagcacctggccccgctacagcaaaccaggtgctgggcctcgtgcgggtcccgctgtacacccagaaggaccgagtcgg

SEQ ID NO: 629375 - DNA, 74 bp, Homo sapiens
ccacccctaaaagcacctggccccgctacagcaaaccaggtgaccagaagtcagcagcttcccagaagccccga

SEQ ID NO: 629376 - DNA, 50 bp, Homo sapiens
ccgagaaccgcagggactggccgagatggaccagcttttgggaaatatga

SEQ ID NO: 629377 - DNA, 76 bp, Homo sapiens
tgaggaagaaaaagaagacttgcttcagcatttctcaagtaaagctgctgctaaagctggatcttctaaataccag

SEQ ID NO: 629378 - DNA, 102 bp, Homo sapiens
gatggaggagctggtggtggaagtgcggggctccaatggcgctttctacaagagctccctctttgcccactagcagggcattagctggtgctgaagacagtg

SEQ ID NO: 629379 - DNA, 75 bp, Homo sapiens
ccagagcgacccttcctggccatcctgggcggtttaattggttggggtcagataagaagaggagtgacaatcaag

SEQ ID NO: 629380 - DNA, 100 bp, Homo sapiens
ggagttcagtgaaaaactagaggaagcattcaaagctgtggaagatattcacgggctattctccttgtctaaaaaaccacctaaacctcagttgatggca

SEQ ID NO: 629381 - DNA, 75 bp, Homo sapiens
ggagtcgcgccggcagcagccatgagcggcggcgtgtacgggggaggtatgtaggaaaccttcccagaatatttg

SEQ ID NO: 629382 - DNA, 100 bp, Homo sapiens
ggggccttgataacacagagtttcaagaatggactgctgaattatgaagtatttcagacccagtagtagaacatcactctgccactcactcctttatctc

SEQ ID NO: 629383 - DNA, 75 bp, Homo sapiens
gtgaacttcaaaaaattggggaagaatgtccaagcacacagatgcagcagaagaggtgctattggaaaaaaaagg

SEQ ID NO: 629384 - DNA, 98 bp, Homo sapiens
cggcgctggaggagcgaggcagctgtactaggactgggaacggctgcatatctatgtgagactgaattttcctcttagacttcagctaaaactgtgta

SEQ ID NO: 629385 - DNA, 100 bp, Homo sapiens
acaatgaattcacaacctcaaacccgttctccgggttatataacaaactcatcacgagttgtgtctaataagtcatcagagttactgtttgacttgaccc

SEQ ID NO: 629386 - DNA, 82 bp, Homo sapiens
tgaagggaggcaaggaggcggactgagcgctcccaattgggaagtccattggaatattaagcccaggagttgctttggggat

SEQ ID NO: 629387 - DNA, 101 bp, Homo sapiens
caataatcggtctgccagttgcgatgccctcacagaacattgagctcaaggtggaagtagaaagtctgaagcgggaactccaggagagagagcagctgctc

SEQ ID NO: 629388 - DNA, 83 bp, Homo sapiens
gaagggccggcccgcctccctggccggggcgcagttcggaggttcagcaggagcattggtttgaaaaggccctacgagacaag

SEQ ID NO: 629389 - DNA, 100 bp, Homo sapiens
gtgctctgccatattgtgtcttccccggccggtccctcgcctcccggccgagctgacgggttactttgaaagttgcaatatacacagaaataggatagca

SEQ ID NO: 629390 - DNA, 90 bp, Homo sapiens
ccggggcacatgatcatctcagctgctggccctaaggttgagaacttgttgcttagtaaccaagggaccattaagctgtgtgactttggc

SEQ ID NO: 629391 - DNA, 98 bp, Homo sapiens
tggagagggagtgcgtggaggagctgtgcagccgcgaggaggcgcgggaggtgttcgagaacgaccccgagacgaccctggaagctgtcctgaatttc

SEQ ID NO: 629392 - DNA, 98 bp, Homo sapiens
gagaaagcttctggcaagaggtgctgatatcaacacggtcaacgtggacggcttgacagccctgcaccagatataattgaccctgcaatcctgcgccc

SEQ ID NO: 629393 - DNA, 106 bp, Homo sapiens
gttcaaaggagacaagtgtcacagcctggttggaaaacccaagatatttatcattcaggttgcagtattttacagagctagcccaaggcacaagatgaaaattatt

SEQ ID NO: 629394 - DNA, 88 bp, Homo sapiens
gtggtgttagcacctcagcccatcccaggaaacctgtccagtttaagtcgtcttggtctgagatataacagactgtcagcaataccca

SEQ ID NO: 629395 - DNA, 100 bp, Homo sapiens
cgggaagccggggcctccctgtccacccaggagctggaggaagcagggacggagctgtgcagctcggcaagatgtcggtgaaggagggcgcacagcgcaa

SEQ ID NO: 629396 - DNA, 51 bp, Homo sapiens
ctgtgtctgctagtgccggcattgtcttaggaaaagtcctcagtgctgtgg

SEQ ID NO: 629397 - DNA, 99 bp, Homo sapiens
gccaactgtgaaccgtaaggcacaggaggcagccgcagcagtgatgcaggctgctgcgaactcagcacaaagcagatccagctatgggacacagcagga

SEQ ID NO: 629398 - DNA, 80 bp, Homo sapiens
aaacccctttggccctgtatcaggagcacagaagcagctgacacaggatgatgatactgatgcggttgagattgctatcg

SEQ ID NO: 629399 - DNA, 82 bp, Homo sapiens
agcctgcggagcctgtggggcagctacccgtacagtgaggacgcccgccagggtgagcagtacatgaacacccggtgcccag

SEQ ID NO: 629400 - DNA, 100 bp, Homo sapiens
ctaaagatccgcaggcctcacgactaccagccgcttcctggcatgtcagagaacccctccgtctatgtgcctggctagcttgtcactttctgcaaaggtt

SEQ ID NO: 629401 - DNA, 100 bp, Homo sapiens
gaggctctatgcaggttccactgtcaagcccgaagatccctgttttgcatctcaaaaccgtgtgtacaatgacattggcaaggaaatgctcttacacgcc

SEQ ID NO: 629402 - DNA, 96 bp, Homo sapiens
aatggctgtagaggaacttcagtctataataaagagatgtctctatcgcctgacactagtgtttcagtctttacctggcaggtgaatatatatgga

SEQ ID NO: 629403 - DNA, 49 bp, Homo sapiens
cgagggactgggagtcgttagtgagtatctgaagaagctgcacacgcag

SEQ ID NO: 629404 - DNA, 100 bp, Homo sapiens
ggagctcccccaagagccggaaaggacctacaagaacagtgaggagcttcggtctcgtattgtgtctggaatcatcacacctatccatgagcagtgggaa

SEQ ID NO: 629405 - DNA, 75 bp, Homo sapiens
gacggccaatgaaacccccaagatgggcatctattacattccagatttacttaaatccattgtttcaagaatgaa

SEQ ID NO: 629406 - DNA, 100 bp, Homo sapiens
gcggcggaaaggataagcctcgacttagaagctaccgagttaccctaagaaagtgtacagtattttctccaaggtacactccgatcggaatgtataccca

SEQ ID NO: 629407 - DNA, 80 bp, Homo sapiens
ctcggagaccccgcgccgacggctgctcaaacatcaggagacaagaggagcagcagcggcaccgcccctcaccctggagg

SEQ ID NO: 629408 - DNA, 100 bp, Homo sapiens
agaggaagaggcccctggatggatgcatggggaagatcagccaaatggccgatgacacagtggcagaactggacaggcatctggcagtgaagaccaaaga

SEQ ID NO: 629409 - DNA, 51 bp, Homo sapiens
gcaagaaacgcaactatatcctagatcagaaaaagcttgtggtgaaggggg

SEQ ID NO: 629410 - DNA, 90 bp, Homo sapiens
gcatggtagaatcaattaaacactgcattgtgttgctgcagattgccaaagtcaccctgctgattgccttcatctgtgtgcggagctccc

SEQ ID NO: 629411 - DNA, 75 bp, Homo sapiens
ggcagcagagattcttctggagtgagaaccgtctcgcccaaatctgcagcagcatacggacccacaaatgagaca

SEQ ID NO: 629412 - DNA, 100 bp, Homo sapiens
gagctgaccctgggagacatcgacgaacctggtgaagcgccaaaaaattctcctagcatactagctatgctggaaacactacaaaatgctccctacctag

SEQ ID NO: 629413 - DNA, 100 bp, Homo sapiens
tggcgctgtcttcagtggcacagtggagcagctctgaagatgcaaaggctgactgtgctgtcctgattgttgctgctggtgttggtgaatttgaagctgg

SEQ ID NO: 629414 - DNA, 82 bp, Homo sapiens
tggtgaagtggaaaggatggcccccaaaaattcaattcgtcataatctgtccctacacagcaagttcattcgtgtgcagaat

SEQ ID NO: 629415 - DNA, 98 bp, Homo sapiens
ctcttggctcctgtcccgctggccctctgtctgcctgtgtccctgaccatggctccctgcagtaccctttaacgactctttttgatcagaacaatgct

SEQ ID NO: 629416 - DNA, 90 bp, Homo sapiens
gatacagcaataccaccttcagtacttggcaagatttgatgctcttgtgctcagtgacatcattcagatgcttgctctgtcaaggcacag

SEQ ID NO: 629417 - DNA, 83 bp, Homo sapiens
ttcgtttttcgccgtcatgggcgcctcggccgccatggtcttcagcgggtttccaggcctgaggtgcccgccctggccccagg

SEQ ID NO: 629418 - DNA, 75 bp, Homo sapiens
gagagattctttttaaatatgaagcctgaaattcagccttcagatacaagtttacaggcagcattaagagcagac

SEQ ID NO: 629419 - DNA, 82 bp, Homo sapiens
cgagaatggcttgtgaaatcatgcctctgcaaagtcatagcacacatcggacatttggaaaacagcagtggcaacaactgta

SEQ ID NO: 629420 - DNA, 100 bp, Homo sapiens
gcgcagaagctcctcaatggccagcgccagctgcagccccggctgcccactcgcctcacctgagcctgggggaatcccggaggcaagacacttgaggaga

SEQ ID NO: 629421 - DNA, 75 bp, Homo sapiens
aggggcggaggcggaggcagaggtggaggcgctttgaaagaaaccagggtggttatgaccgctactcaggaggaa

SEQ ID NO: 629422 - DNA, 83 bp, Homo sapiens
gctggccaagaagatcatcattaaggacggaggcacgaagctggcagggcggagatgctggaccacgccgtcctgcttcaggt

SEQ ID NO: 629423 - DNA, 50 bp, Homo sapiens
aggaaaatcctggcagaggacaagcactcaaatctacaggattgcgaacg

SEQ ID NO: 629424 - DNA, 75 bp, Homo sapiens
ccccaacttgacccagttcacggagcacttcaacaacatgtcctactggccaagaagacgctggagggaggctgt

SEQ ID NO: 629425 - DNA, 101 bp, Homo sapiens
ctatcattactcctccaacaccaatcatcccagacggactctcgttggggagatagagattcagaaggcacctggagaaaaggacctgaagcagattctga

SEQ ID NO: 629426 - DNA, 100 bp, Homo sapiens
tctacctaccaatcgtgaaaactatattcacaggtggtgaagcagtattttccaatttgaagattcatttgaaggtggctcctgccacctgctaatagca

SEQ ID NO: 629427 - DNA, 80 bp, Homo sapiens
atagagctgtggaatttaatcctcatgttccaaaatcttggccatttcatcacccagttaataagaaatttgttccagat

SEQ ID NO: 629428 - DNA, 100 bp, Homo sapiens
ttgtcccgctgcagccgagatgccgggggagcggggccttccacaccccctccgtgggtgtgtggggctcacaacgaagtaagacagtagatgacaattc

SEQ ID NO: 629429 - DNA, 74 bp, Homo sapiens
gtgagagttccccatctgaggcgtttgttgcagctacctgcacttctagatataaacctgaaaattgggatgta

SEQ ID NO: 629430 - DNA, 101 bp, Homo sapiens
agccattatttatgtcatcaagaagaatgacgatggtcactgaactgatgcaggagcagtcatacctgaagtctgaattgggcctgggacttggagaaatg

SEQ ID NO: 629431 - DNA, 50 bp, Homo sapiens
gctcaggcaatttgtaaaaagcagtgacttatcagatgccctggtcatct

SEQ ID NO: 629432 - DNA, 87 bp, Homo sapiens
gagctgcaccgccacgcccggcagagcctgcaagccctgcgcagaggtgattgatatgcccgagcacaaccctggcaatttgggagg

SEQ ID NO: 629433 - DNA, 101 bp, Homo sapiens
atcctaaaggagatggaagtgatgtaccatcatgggtagcctttgataaacagcaagagcagtatgaaagtaccatcggattcaaacttcccagttaccga

SEQ ID NO: 629434 - DNA, 75 bp, Homo sapiens
ctgagaaagatatggaattatttcgtgatatccaagaacaagcactgcagatccagacatttaatgtggatgcac

SEQ ID NO: 629435 - DNA, 101 bp, Homo sapiens
gagacggcctgggtgctggcgaagcggaggccggaggagttgatccctgaattttattatctccctgagatgtttgtcaacttcaataattataatcttgg

SEQ ID NO: 629436 - DNA, 100 bp, Homo sapiens
cgtcgacatgagtgatgtggaggaaaacaacttcgagggcagagtgcggccggccggacggacctactacgactgcgcagacggtttatgagggaccagg

SEQ ID NO: 629437 - DNA, 75 bp, Homo sapiens
agatttcctagttcaaataaaggaatcagagatcattgatttcttcctgggggcctctctcaaggatgaggtttt

SEQ ID NO: 629438 - DNA, 97 bp, Homo sapiens
tcgctgtgacagagacaacaccgagtatgagaatgaacagagtatctgtcaggcaagagctgctgtgatggtttatgatgatgccaataagaagtgg

SEQ ID NO: 629439 - DNA, 73 bp, Homo sapiens
agacgtcagcgtctaccggattccgccccgggcctccaaccgcggttacaggaaaaccagtagattcccagac

SEQ ID NO: 629440 - DNA, 74 bp, Homo sapiens
gttccctgcagccctcccacggactggggttcagactttccgcagagaccatgatcgtttctgggtcctagctg

SEQ ID NO: 629441 - DNA, 85 bp, Homo sapiens
gaggcctccccagccacgtgaaacttgacctgggagctgtcatttccctcctgctctggggacgacagctttttgcactgtactc

SEQ ID NO: 629442 - DNA, 83 bp, Homo sapiens
gttcagtatcgctacttcaaagggtactttttagaaccaaagatgcctataagaaaatcttagaaaccacaatgactccaact

SEQ ID NO: 629443 - DNA, 83 bp, Homo sapiens
ccttcacctgcagaagcgtgtcgttctgcaccagcgccttgatcgagtacttgaggtactccaaagattcaggtttactcacg

SEQ ID NO: 629444 - DNA, 80 bp, Homo sapiens
cgccgaggcaccgaggcactcagaggagccccagtggacaggaaagctaaggcctcagcgatgccggactccccagcgga

SEQ ID NO: 629445 - DNA, 100 bp, Homo sapiens
tgataaaggccatgaccaaggctcgcaattttgagagagttttgggaaaggaaatggaagttccagtattaccgaaaatctctctaccgatcaccagttc

SEQ ID NO: 629446 - DNA, 100 bp, Homo sapiens
ggccagccccggtcacagagtgcaccgtatcctgtcacttctggatgtgagtactatactggcaattgctggagaagattttgcaattgttgcttctgat

SEQ ID NO: 629447 - DNA, 50 bp, Homo sapiens
agaaaagctgccttatatgcgatggggaccagtgaagtacttgcggcctg

SEQ ID NO: 629448 - DNA, 83 bp, Homo sapiens
ccgagaccgcggccgggaccgaggctacctgaacgacctggagcgtattgcacagagtgactacatccccacacagcaagatg

SEQ ID NO: 629449 - DNA, 100 bp, Homo sapiens
tcacagatacacccccaaagagcaactgaagattcatacgcagctggcagatattatcatagttgctgcagggtgtactctgtgtgaccgcgcctatccc

SEQ ID NO: 629450 - DNA, 73 bp, Homo sapiens
ggctccttggtgagaagaccaccacagcggcagggtcctgatgaagaagctgttgtggatcttggcaaaacta

SEQ ID NO: 629451 - DNA, 78 bp, Homo sapiens
gtcttttccagcagctcattcagagttacacaacagccaatgcggagtctgacaatgagcgggactctgacaaagaaa

SEQ ID NO: 629452 - DNA, 74 bp, Homo sapiens
gtcgactgcccagagtccgcggccggggcgcgggagtgatggtcattgtcctccagagcagtgatggaggaaat

SEQ ID NO: 629453 - DNA, 82 bp, Homo sapiens
gggcagcggctgccgcgcctgtctgcccgagggaggtgagctccacctgacacctttacatggcatcctgcagctgcggccc

SEQ ID NO: 629454 - DNA, 50 bp, Homo sapiens
gccggaacttcatccgcaacagcaagacgatgcagggtgagggcccccag

SEQ ID NO: 629455 - DNA, 82 bp, Homo sapiens
ggagctgaaggcggcggcagagaacttgccggtgccagctgagccagggtgccgttccttttcactattgtgccattctctg

SEQ ID NO: 629456 - DNA, 90 bp, Homo sapiens
tttgaggagcaagctagtgcttttcaggaacaggtttcccaggcagctgcagacttgaaacagttctgtctgcagaatgctcaacatgac

SEQ ID NO: 629457 - DNA, 100 bp, Homo sapiens
tttcgccctacgttttcaacggaggggggaacgcctagtttgaaaatattatggctgaaccaagagccagaaatacaggttcggcgcttggacacactcc

SEQ ID NO: 629458 - DNA, 82 bp, Homo sapiens
gcgcgcggagcgggtgcgcagaagactggaggaggcggagcgccacaaggaggacttgaatccacattcatctcaatggaag

SEQ ID NO: 629459 - DNA, 87 bp, Homo sapiens
cctgtagaaattcaaaccctagtgaataaagccaagagagaccttggagtaattcgtcgacagtttcttgcctgtatccataatttg

SEQ ID NO: 629460 - DNA, 83 bp, Homo sapiens
tgggcagacggattcatttagagctgcggaacaggacgccctctgatactgattcttgctattccaaatcctcttccacgttg

SEQ ID NO: 629461 - DNA, 75 bp, Homo sapiens
gctcttgctcttcaaacctgctgaaaggaattcctagatctaaacaccagaatgtttctccatcccagagagatg

SEQ ID NO: 629462 - DNA, 82 bp, Homo sapiens
tgcaacatctgcaaggtccgcttcaccagggcggcgactggcggcgcgatggacctgaccgggctcctgctggacgaagaag

SEQ ID NO: 629463 - DNA, 51 bp, Homo sapiens
acatcatgaattcccaagaaggagatcttggcatatacagaagggctgcat

SEQ ID NO: 629464 - DNA, 100 bp, Homo sapiens
ggcccgcggctgcgcttccgacggggcggccgggggctcagagatccaagtgcgcgccctggcgggtccggaccaagcttgagtgtgcgtcagaatcccc

SEQ ID NO: 629465 - DNA, 98 bp, Homo sapiens
gggctggtgttgtctcgtgctctggctccccgcgtgcgtcgcggcccacgaattagactttcttgtacctaaggctggattcttctgtccaatttgtt

SEQ ID NO: 629466 - DNA, 75 bp, Homo sapiens
attctcgaatacctagaatggggtatctctggagacaaagtagagatagaccctgttacgaatcagaaagccagc

SEQ ID NO: 629467 - DNA, 75 bp, Homo sapiens
actaaaacagccggcccaattgcaagtgcacagaaacaacctgcggggaaagagccggtgaaacctgaagaaggc

SEQ ID NO: 629468 - DNA, 80 bp, Homo sapiens
cagctgtccagaagtttactattttgatagatgttactttgctgaaaatagaactggttgcacagtgaattaaaagatgc

SEQ ID NO: 629469 - DNA, 83 bp, Homo sapiens
cctggacgggagagtctgccggcggagaatataagatgaatctacgttctgtatttactgtagaacaacaaaggattttacag

SEQ ID NO: 629470 - DNA, 82 bp, Homo sapiens
tctagggacaaacctatcacatttactcagatgatatcatcaagttgaatcgaaaggaagggaagaagcagaattttccaag

SEQ ID NO: 629471 - DNA, 75 bp, Homo sapiens
caccgcctccagcttgccaccaaagacctgcgactttgctcaggtgcgcgcggagccatggttatcatgtcggag

SEQ ID NO: 629472 - DNA, 74 bp, Homo sapiens
gctccaaagacatccagtatctcaagaagatgggtgtgaacctgacacgcagcaacaaggagacggtgaagcac

SEQ ID NO: 629473 - DNA, 88 bp, Homo sapiens
aacgatattatagtgatcctcgatttctcaatctctggcttaaattagcggcttacagggagaacacagttggcctccaccgtttctg

SEQ ID NO: 629474 - DNA, 100 bp, Homo sapiens
ctggtgcaatgaccattgtgtccccaggaaccacagctgctcagaaggccagaggctggctatgtggctacccccatagctatggttcaggcagccatga

SEQ ID NO: 629475 - DNA, 100 bp, Homo sapiens
cctgagggccaatggacaattatggacaacaaggatgagttccacccgttcatcgaggccctgctgcctcacgtccgcgccttcgcctacacctggttca

SEQ ID NO: 629476 - DNA, 98 bp, Homo sapiens
tgaccaccgtgaacggacagtcccccccagggttgtgagtcccggcccagcccctccacccccctgcccccccgatgcgaccatgggctctggcagtg

SEQ ID NO: 629477 - DNA, 100 bp, Homo sapiens
ttcgtctgtgtcctattgagttttttcatggctagagtattcatgagaatgaaactgcctgtggacaacagtgagtatatgcggaatggagacttcttac

SEQ ID NO: 629478 - DNA, 100 bp, Homo sapiens
gtaccgcactgtgggcagcaatattcaggttcagaagctgctgaatgccttttttgggaaacagaagtacctgtgcgccagcagaaatgattgcactatt

SEQ ID NO: 629479 - DNA, 74 bp, Homo sapiens
gcaccgagagggactacgtgggcaccttgcgcttcttgcagtcgaccgagacatgggtgcccggcaccgcgccc

SEQ ID NO: 629480 - DNA, 99 bp, Homo sapiens
tgtcaccccgactcaacgtgagacgcaccgcccggactcaccatggtgttgacttcaaaatcaaaactgtagagctaagaggaaagaaaattagattac

SEQ ID NO: 629481 - DNA, 51 bp, Homo sapiens
tggcgaatggggctcacgtcgaattcacagttaatagaaggatctctatag

SEQ ID NO: 629482 - DNA, 83 bp, Homo sapiens
cactctgtaaagtatacgtttcccagcacccaccaccagcagattgttaatccaccaaaggacttgaagaaacctcgcggaaa

SEQ ID NO: 629483 - DNA, 101 bp, Homo sapiens
gcaaaggagactgaacagtgaaggatctcactcagaatcctgtccacaatctgtccagtttacaccttaccccaaagaggatagatcactgcgaccagagg

SEQ ID NO: 629484 - DNA, 75 bp, Homo sapiens
cagctgcagtctgacgagaggggttttgggatttgagattgacgcggtgaactctgtccagttttcaaaccacac

SEQ ID NO: 629485 - DNA, 75 bp, Homo sapiens
ggagtctccaccaggactgaccgctgccgcccagcacgtccagctatgtgatgatgatgccatttaaacgacagg

SEQ ID NO: 629486 - DNA, 102 bp, Homo sapiens
tggacggagaatgcagacgggtcaggcgctgtgaacttcctgacaggtcccgaacccctggtaatagaattgtttacctttataccaagaaggttgggaaag

SEQ ID NO: 629487 - DNA, 75 bp, Homo sapiens
tccaaaggacgcgaccataactctaaaagagaaagatgctggtttcgagttttggagatccttgttttttatgga

SEQ ID NO: 629488 - DNA, 92 bp, Homo sapiens
tgtactggagccacccgcgaaaattcggccagggttctcgctcttgatctcacattcttgaaggtggcattgaagagcactaagatcggaag

SEQ ID NO: 629489 - DNA, 100 bp, Homo sapiens
tatgtgtagaaagtgaaatcagaggagatgtaactatcggtggatatggttatagaagaagtggccgagataaatatggccctcctactcgcacagagta

SEQ ID NO: 629490 - DNA, 50 bp, Homo sapiens
cggtggattacttcattctcatcctgcagaccggaacatgaacattttgc

SEQ ID NO: 629491 - DNA, 73 bp, Homo sapiens
gataaatgcaggtttgctgggttttgccggaaaattgcagaaggtgctgggtaggccaggtttcagcatcgca

SEQ ID NO: 629492 - DNA, 75 bp, Homo sapiens
tttgcgttctctttccctctcccaacatggcggcctcagatgcccattcaccagaatctcaaggagctgctggcc

SEQ ID NO: 629493 - DNA, 75 bp, Homo sapiens
aggagaagaaaataaaagaactgcagaaaggggaggtcgttccaggggtagaggaggcatgaaggatgaccgtcg

SEQ ID NO: 629494 - DNA, 75 bp, Homo sapiens
gctttcctctacttgctgtcagctcctcgagaagccccaggcccaagtctgttttggtggtctgagaggaaaaaa

SEQ ID NO: 629495 - DNA, 83 bp, Homo sapiens
cgacaagccgctggcagccgcggatctcaccgccgctcaggatggacggggagtccgaggaggagcaggagtccgtggacacc

SEQ ID NO: 629496 - DNA, 100 bp, Homo sapiens
ccccaatgaaatgttcaagttcaatgaggagaactacggtgtgaagactacctatgatagcagtctttcttcttatacccatggttgggtgggtgaggcc

SEQ ID NO: 629497 - DNA, 102 bp, Homo sapiens
gcttgcattaactttaagacctcctccactggcaaagagtcacctaaagttaggcggcactccagccccagctcgatctgttattttgaaccacatggccag

SEQ ID NO: 629498 - DNA, 83 bp, Homo sapiens
attgttttggcctaggatcatccagatcgagatagacaatggggatgagttgactgcagacttcctttatgaagaagtacatc

SEQ ID NO: 629499 - DNA, 80 bp, Homo sapiens
aatgacgagggcctggagtgtgtgcccactgaggagtccaacatcaccatgcagaatctgtgcggagaccctgggagaag

SEQ ID NO: 629500 - DNA, 83 bp, Homo sapiens
accttcgggccctcctgccttccattggattcaaaggctaacaatttgtccagtctgtccaagaaataccgccaggatgcgaa

SEQ ID NO: 629501 - DNA, 101 bp, Homo sapiens
gcgaacgagcgacggcggaacccgtgggcctgtggactgcagcctcggcggtcagcaggtacatgtcccagagcaagcacacggaggcccgggagctcatg

SEQ ID NO: 629502 - DNA, 82 bp, Homo sapiens
cctgatctaacccagccaggcaggtggccttggataagggctgctcccaattccgcctggccgtcctggactggaaccagag

SEQ ID NO: 629503 - DNA, 100 bp, Homo sapiens
atcagatcgatctaagatggcgactgtcgaaccgatgagggcagaagtgcagttgaccaagcaggtggtgcacagattgtaattgaccatttaaggtcac

SEQ ID NO: 629504 - DNA, 98 bp, Homo sapiens
gacccggggggagcgcggggcgacgctggctgcagggacccggtgacagcgtgagaggttcgcagaggctacaacagaccaaaagcttatattgctgc

SEQ ID NO: 629505 - DNA, 90 bp, Homo sapiens
aagcaaatgaagcaactgaaaaaccccttggaaatagtcagcatacctgtgataaatgctgctcattctttctacaatggaacaacaacc

SEQ ID NO: 629506 - DNA, 98 bp, Homo sapiens
gagagactccttgggggtcgagcacataacggggttcgggtgtctcgtgtgtgaacatcacaggtatcattggaacatttcaagatcatcaaatcaaa

SEQ ID NO: 629507 - DNA, 127 bp, Homo sapiens
cgaaaggaagcaagcagttcagaagagccaaggaataaacatgcaatgaacccaaaagggcatgtgagcagcagtgacagagtgggcaagccttaccgtggcgtaaagcctgttttcagcattgggg

SEQ ID NO: 629508 - DNA, 51 bp, Homo sapiens
ggactcatggaggctgagcatttattcagctctattaccaggttttaaact

SEQ ID NO: 629509 - DNA, 100 bp, Homo sapiens
gcgggattgatgtgcaacaagtgtctttggttataaattatgatctacctaccaatcgtgaaaactatattcacagggtgtccgcaatgttgccagtgtc

SEQ ID NO: 629510 - DNA, 98 bp, Homo sapiens
gaagtttcccttttgcaaggagaaaattttggtggagaattatccaacaagaaaaagacctgtggctattaagatagcctcctgacaaggtgatccgg

SEQ ID NO: 629511 - DNA, 128 bp, Homo sapiens
ccgcgcgcagggcctgcagcgggagctggacggcgagcgcgagcggcgcgagaaactacgagttccagggagctctgtcctggtgaccgtgcccgggttatgacgactaatcccaaaccgaataaggc

SEQ ID NO: 629512 - DNA, 74 bp, Homo sapiens
gtgctcccccatccccacagtataaaaagggaacagtgttgataaagactgctgaagaattgatgaattttagt

SEQ ID NO: 629513 - DNA, 100 bp, Homo sapiens
ggagcttgctggaatgttcggccgaggagattgcggggggcttcctgaggctgcggtggtcacgcttcgcccgtgtcctcctcacccgctcctgcgccat

SEQ ID NO: 629514 - DNA, 75 bp, Homo sapiens
tgaccgccatgcacaagctctttgactgggccaataccagccggcgcggctctggattaatcgaattacagctgc

SEQ ID NO: 629515 - DNA, 100 bp, Homo sapiens
gggcgagcgaggaggatggcggagtcggggctcctgacgtttggtgccctggttgtcagatgttggaaagcagtaggacggaacatactcttcgtggttg

SEQ ID NO: 629516 - DNA, 75 bp, Homo sapiens
ccagacggctgcccttcaagtaccagtggtccgcaacatgacctccgagttcttcgctgcccagctccgggccca

SEQ ID NO: 629517 - DNA, 50 bp, Homo sapiens
tttgccctcaaaagaaatggcagataaacttctgcactggaggggcctct

SEQ ID NO: 629518 - DNA, 100 bp, Homo sapiens
gcttcacctgcgactgcaccatgacttcctatggaggccctgtctgcaatgatctcgggaagacgtctctgattacgaggttcatgtacgacagcttcga

SEQ ID NO: 629519 - DNA, 88 bp, Homo sapiens
ccttagctgtgctcgcgctactctctctttctggcctggaggctatccagcgccagctgcgggccgtccagcggctgtgccacttcta

SEQ ID NO: 629520 - DNA, 100 bp, Homo sapiens
tatgccgccaagaccgtctttgaggcctgctacaacttcatccgaagcatggccgcctacagcctcctgctgttcctgctgcagatcaaggacagacaca

SEQ ID NO: 629521 - DNA, 102 bp, Homo sapiens
agaagacagtgcatgaagccaggggacatccgccatgctccaaacaacttggcctcagtgcccaccagaagtatgtccgacaagcctggcagaaggcagaca

SEQ ID NO: 629522 - DNA, 75 bp, Homo sapiens
cgttggggagggggctgtgccgggcggagagaactcagcgaggattctgagggcccactggaaaatgacttggta

SEQ ID NO: 629523 - DNA, 100 bp, Homo sapiens
aagttgctgagtgtcctgatggcgctcaacgaacccaccatcgattatggtttccagaggttacagaaggtcattcctcggcaccctggtgaccctgagc

SEQ ID NO: 629524 - DNA, 95 bp, Homo sapiens
tatcctctccatgatgtcttcgttagaaaagtaaaaatgctgaagaagcccaagtttgaatatgatgaaggagcaactcccattaaaaggcggcg

SEQ ID NO: 629525 - DNA, 139 bp, Homo sapiens
ctgagttgttgcaacttttttcgaaagctgggtttcccgggagatcccaggcggtgacagagtggagccatggctagagctcaccatggatgatgatatcgccgcgctcgtcgtcgacaacggctccggcatgtgcaag

SEQ ID NO: 629526 - DNA, 100 bp, Homo sapiens
gacaccaagtctgtgtcagaaggccacctcaagaggaacatcgtggtgaagaccgtggagatgcgggatggagaggtcgtcatacctcagaagaaaggca

SEQ ID NO: 629527 - DNA, 100 bp, Homo sapiens
acccatcagcaggggcagcctgccttggagctgaaagaggagagcttcagagaccccgctgaggatcccagcatggtgagtgcctacatgtacccagcag

SEQ ID NO: 629528 - DNA, 87 bp, Homo sapiens
aattttgaagtacaccgtggtgacattgtatcattggtgatttaagtgccctgtatgctcaaaatttgtatcctcagatgaaatgga

SEQ ID NO: 629529 - DNA, 75 bp, Homo sapiens
tcaagtatatcaagcattcaaattgctcacagctgatcctaagatcatggggaatttcagaggtcatgccctccc

SEQ ID NO: 629530 - DNA, 82 bp, Homo sapiens
cgagcgcaaggacagcgcgaggtccgcgcagcccagcgcagccatggttggggtgctggaggactgcttcaccttcctgggc

SEQ ID NO: 629531 - DNA, 97 bp, Homo sapiens
aagatgaggctgtgggacctgcagcagctgagaaaggagctcggggactcccccaaagacaagtcctttgatgtgggccacagctttcccatcactg

SEQ ID NO: 629532 - DNA, 76 bp, Homo sapiens
caaggtcagctggtccacatgaacaggcttccaggaggaaatgaggttgtagatgagcatgagagtgtggagcaga

SEQ ID NO: 629533 - DNA, 75 bp, Homo sapiens
gcgagggaacagatgagaaacccggcaatgaaagctcaaactgtccaggttgctgaagttgaaccacagtcacag

SEQ ID NO: 629534 - DNA, 97 bp, Homo sapiens
cttgtgaaaggctccatggtcttgcctccttgcagcaaaccagtccagctacgggggcccagccagccagcagctgagtgggggttacggaggcggc

SEQ ID NO: 629535 - DNA, 83 bp, Homo sapiens
tgcccaccagctccccatcgcagaggccatgctgacctacaagcagaagagggcggctacttccctgagaatgtcaaggccat

SEQ ID NO: 629536 - DNA, 90 bp, Homo sapiens
ccgaaggctatttcgccgctggcgtcaggactattttcacgttttaatgccgagagcagcagccgctcttctaaaacattcaaaccaaag

SEQ ID NO: 629537 - DNA, 97 bp, Homo sapiens
agccaggcgtggaggaagaggcattgaggactttccttacctgtttttccagctcacccactgccagcagaggacataccgagggattgcatatgtt

SEQ ID NO: 629538 - DNA, 98 bp, Homo sapiens
ggccactgcatcggctacgcgcccacttggcgggccctggctggggatgtgcgagccagtgccaatatctgcaatgtggtcctgatgcggtacgggga

SEQ ID NO: 629539 - DNA, 76 bp, Homo sapiens
cgagctgtactaccataccacccagagttgaccaggacagcgctttgcacaacgatctccagatcctcaaagagaa

SEQ ID NO: 629540 - DNA, 74 bp, Homo sapiens
aatacaagattgattgctgctgctacttctgtatatgatcaagcggtgctgattcacgagagtggaagcctcca

SEQ ID NO: 629541 - DNA, 100 bp, Homo sapiens
atcccatgcggctactcctgcccagcgtggtggggcagcagaagctccagagcccagacttgcaggtgtcatggagaaactccagctgggcccagagatt

SEQ ID NO: 629542 - DNA, 100 bp, Homo sapiens
gaccagaggaactcagccctgattgcggtgtgactgcacagaaaagttacaaaacaaatttgactttttgcgctcacagttgaatgatatttcgtcattt

SEQ ID NO: 629543 - DNA, 76 bp, Homo sapiens
tgatgaagtaatacagaactgccccatcgatgtgcggcgcccgctgtataagggccgtgggtctggatttccagga

SEQ ID NO: 629544 - DNA, 75 bp, Homo sapiens
ctgtggcggaggagcataagaagacttgaaactgcatctgcagagcactgattatggtaacttcctggccaacga

SEQ ID NO: 629545 - DNA, 100 bp, Homo sapiens
aaacaagagatttccacagaagctggagaagcgactggaggagtggttggggaggacattgcctggcagtgactggacacccaatgcccagtttatcacc

SEQ ID NO: 629546 - DNA, 75 bp, Homo sapiens
tttcgtggcctgaccaaggacctccaagatgtggacgagtgctcactagcagaaaaaacctgtgtgaggaaaaac

SEQ ID NO: 629547 - DNA, 46 bp, Homo sapiens
agctctgctcaaagccagacgatgttgctatcggagctccacaaga

SEQ ID NO: 629548 - DNA, 83 bp, Homo sapiens
atctttacagaggaatagtctacaaaggaagacttgtaacctggagaagaggaactttatattgctgttggaatatctggagc

SEQ ID NO: 629549 - DNA, 100 bp, Homo sapiens
acccggggtcactccgtcgccgttctcctcttgtctacgtgctggacccggctgatgtttcagacaccgcaggaaatgggcttaatagtgatcgcggccc

SEQ ID NO: 629550 - DNA, 75 bp, Homo sapiens
cggggacattattgcgcgtggaacggctgcttttggaaggtacatgtcccagagcaagcacacggaggcccggga

SEQ ID NO: 629551 - DNA, 100 bp, Homo sapiens
cacttgtacaccttcacaggacaccgggatgcagtgtcgaactggaagaagttcgggaactcagagtttgacccccccggacccaatgtggccaccacca

SEQ ID NO: 629552 - DNA, 100 bp, Homo sapiens
gttcgtcctcccaaacaactgcttcctgaatctacccctgcaggaaaccaagaaatggagctcgaggccatgagcagatataccagcccagtgaacccag

SEQ ID NO: 629553 - DNA, 98 bp, Homo sapiens
caagtgcgacaagaccgtgtacttcgagtaatcaagtcagaggattatatgacttttatctgcctagagaagaactatggatctacaacatggagact

SEQ ID NO: 629554 - DNA, 75 bp, Homo sapiens
ttataatgtacaccagagcaaatccctgcataattctgaagccaaggtggtgccccagcagatcacgcacacttc

SEQ ID NO: 629555 - DNA, 50 bp, Homo sapiens
gccaccccgacctccaagggcagcctggtcatttggatccaggattccta

SEQ ID NO: 629556 - DNA, 51 bp, Homo sapiens
accaggacagtgcatggcacatagttcttggagtctctgcggagtccctgg

SEQ ID NO: 629557 - DNA, 75 bp, Homo sapiens
gggcgcgggctggctgcgttgcccggggacctgccctcctggacgcggagcctgctggcgcccatgcggctctac

SEQ ID NO: 629558 - DNA, 100 bp, Homo sapiens
caaatctattgtcaagtacaagacagctttctactccttctaccttcctatagctgcagccatgtacatgctccatcaaggaacagtccctgtttcttac

SEQ ID NO: 629559 - DNA, 100 bp, Homo sapiens
ctctaccagccgcaactgcgagggctggagctgtctgcttttctgtggagactgcgggttgcagacaccagcagccccctattgctgcacgtcaggtgtc

SEQ ID NO: 629560 - DNA, 50 bp, Homo sapiens
tcggctgagtcatcgcattccttaatagcccctctggctgtacattctgg

SEQ ID NO: 629561 - DNA, 100 bp, Homo sapiens
ccggcagcggctgcagcgctctcgtcttctgcggctctcggtgccctctccttttcgtttccggaaacatggtcaaaatgcagatcttcgtgaaaaccct

SEQ ID NO: 629562 - DNA, 100 bp, Homo sapiens
aaccacagcaagagcacctggctgatcctgcaccacaaggtgtacgatttgaccaaatttctggaagagctccagtcagcccggtcaagcatgacagcaa

SEQ ID NO: 629563 - DNA, 50 bp, Homo sapiens
tgcaaaggcttgagtgacatccaccacagctcatcagcatcggatcttcc

SEQ ID NO: 629564 - DNA, 112 bp, Homo sapiens
ccagaccctggagcctcagttggaagcagccgatccagcctgcggagcctgtggggcagacagagattgcgaagagactgaacacaattttagcacagatcatgcctttcct

SEQ ID NO: 629565 - DNA, 100 bp, Homo sapiens
ttacatctcatggctttgacaataccaaagagggtgttattgaagcaggagcatttcaaggttgatctcctatcaagagtttttggcatttgaatctgtt

SEQ ID NO: 629566 - DNA, 100 bp, Homo sapiens
cacccaggaggtctttaaggggtctgtcatggaaggtgctcttccaggcatccgtgtcattctggaccttactcccaactaccggggtgagaactcgtgg

SEQ ID NO: 629567 - DNA, 75 bp, Homo sapiens
cgagtgaccgagaccgcggccgggaccgaggtacgaggatgtcgtccaggaaagattgtgcagatgactgaagca

SEQ ID NO: 629568 - DNA, 101 bp, Homo sapiens
ccttcgcctccttcaccgccgcagaccccttcaagttctagtcatgggccaagaccagcttcaagtctccatggtaccagaaaacaacaacctcacagcac

SEQ ID NO: 629569 - DNA, 102 bp, Homo sapiens
tggaaatgtacagaaagaagtctcatcttcctttgaccacgttatcaaggagattgtctacaacctgttgtctctgcgcttcaactcacggatccgtgtgaa

SEQ ID NO: 629570 - DNA, 100 bp, Homo sapiens
gactctgaagaccctggactttgtgaagttgttagagtacatgagcattacttggaaacatcttgaggagcagattgctaaagttgatagagaatatgaa

SEQ ID NO: 629571 - DNA, 97 bp, Homo sapiens
ggagccggctgggcaaatactacgtcaaggagaggtctaaggttgtggcagcactgcctgaaggtatgagaccagattctaatctttatggttttcc

SEQ ID NO: 629572 - DNA, 83 bp, Homo sapiens
ccgcggacgcgtcatcgagtgtgacgtggtgaaagcaagagtgagccatggagctacgtgtggggaacaagtaccgcctggga

SEQ ID NO: 629573 - DNA, 82 bp, Homo sapiens
tcacttctttacttggtgcaggaaggcagtctttgctacgtacagcaaaagctctgaacagcaacatggggtgcaaagtcct

SEQ ID NO: 629574 - DNA, 75 bp, Homo sapiens
gaccgagtcatggctgagacctacgattcttcaaacttcatgagagaaagtgtgaacctattattatgactgttc

SEQ ID NO: 629575 - DNA, 100 bp, Homo sapiens
acaaggggctccgcgccctccccagaggcatgcccaaggatgtgaccgagcttgtagagtatgattttcggcagcaggaaggcaggttccatgaagtttt

SEQ ID NO: 629576 - DNA, 98 bp, Homo sapiens
ccctcaaccgtatttggggctgctcctggaggagctacgcagggacccacccgaggacgggtcaccatggctttggagcacctggtagtgtggcatgt

SEQ ID NO: 629577 - DNA, 82 bp, Homo sapiens
gtggatcctcagttccttacctacatggcactagaagaacgcttagcccaggctatggagggagaccactgtaattttagcc

SEQ ID NO: 629578 - DNA, 98 bp, Homo sapiens
gtggaaatattgtctatattcacataaggagagcgacttgcagttgtggaggtacagtgtgaacggctgaggatgctctaccgggactgtgctcggcc

SEQ ID NO: 629579 - DNA, 110 bp, Homo sapiens
tgacggcttggacgaagatggggagaaggaagcgagactcatacgcaacctcaatggtgagaagccctaccactgcaactgggacggctgcggctggaagtttgcgcgct

SEQ ID NO: 629580 - DNA, 75 bp, Homo sapiens
agaggagaccgaaaagtggatggaggaggcgatgcacatggaaacctaacgaagcatatgaaatctaaagcacac

SEQ ID NO: 629581 - DNA, 83 bp, Homo sapiens
aatccctcagaacactattttggtgcagactttgctgagggtgacccaggttaaagactcagtctctgagaaaacaattggac

SEQ ID NO: 629582 - DNA, 75 bp, Homo sapiens
gaaggtcaacgagacggtggagagcggctctgacactctgggaactcgaatcatttatgacagaaagtttctgtt

SEQ ID NO: 629583 - DNA, 82 bp, Homo sapiens
ggggatgtggacgaaggggccgacctcctaggtggcgacatgtctaagaatgtgagccagtcacagatggcaaaattgaacc

SEQ ID NO: 629584 - DNA, 90 bp, Homo sapiens
atcggattgtgctggctgcctgtagtgattacttctgtgccatgttcactagtgagactctgagatttgcccacctgatgaccttgccag

SEQ ID NO: 629585 - DNA, 82 bp, Homo sapiens
ggaccctcgcgcgcgaccgccgaatcgctcctgcagcagagaggctgggaggcggcagaatgcagccagaggagggcacagg

SEQ ID NO: 629586 - DNA, 101 bp, Homo sapiens
ccgcctcctacctccttctgcttcggagaagcagcgggagctggcccggaagggctccctgaagaatggcagcatgggtagccctgtcaaccagcaaccca

SEQ ID NO: 629587 - DNA, 100 bp, Homo sapiens
cctgttccagaactgctggaagctgagggtaagaagtaccaatgggatgcagaaactcaaggatggattctcggttcctttttttatggctacatcatca

SEQ ID NO: 629588 - DNA, 83 bp, Homo sapiens
tgggctcgctcttcgacgacgagggtgtgaagacagagaatgaccacatcaacctgaaggtggccgggcaggacggctccgtg

SEQ ID NO: 629589 - DNA, 50 bp, Homo sapiens
ctagattagaccatgaacgagccaagcttcttggacacttaatgattgtt

SEQ ID NO: 629590 - DNA, 74 bp, Homo sapiens
ggagctggacaagattacagccaagcacgcggccaaggggaaatgtggacgagtgctcactagcagaaaaaacc

SEQ ID NO: 629591 - DNA, 100 bp, Homo sapiens
tttttggctgttctgaagagtgttactgtgaacattcatgcacaaatttttatgtggaggccaagctataacatcagaaatggtgaatgaatacaagaaa

SEQ ID NO: 629592 - DNA, 101 bp, Homo sapiens
gctgatggtgatggagattttgatgtggatgatgccaaagttttattagaggcgaatctttagataacctggactccccccgatccaattcttggagacag

SEQ ID NO: 629593 - DNA, 75 bp, Homo sapiens
gctattgcaagcctttttgcttggactggagcacaagctatgtatcaaggtactagcaaaggccagacgtcttac

SEQ ID NO: 629594 - DNA, 88 bp, Homo sapiens
cagagagcggcggaaaggataagcctcgacttagaagctaccgagttaccctaagaaagaacatctaaatatattgctgtttgggtta

SEQ ID NO: 629595 - DNA, 96 bp, Homo sapiens
gaggacacgtggtccgggtgcataatgggagacactggggatggagaggatctggacagccaaggagacggcagcagccagcctgatacgatttcc

SEQ ID NO: 629596 - DNA, 82 bp, Homo sapiens
aggaatgagagggacaggagtatctgaggatggagaactcagcatgaatgaactcattcttaaacagaagcaaagatttgag

SEQ ID NO: 629597 - DNA, 85 bp, Homo sapiens
tgagagaacgaggaggaaggagagaaaatggcgtccacgggtgcaggccgtgaggctgatcgctgagggcaaagcccccagactc

SEQ ID NO: 629598 - DNA, 88 bp, Homo sapiens
acatttcctgaggatatcgtgacagccgctcaggaagcaatcttgcatgcgtctggaaatggcacaaccaaggactactgcatgcttt

SEQ ID NO: 629599 - DNA, 100 bp, Homo sapiens
cagatcgattttaccttggataccctgctttggaactgataaatttcaaacggaagagagtggcagcatttagaaagaatctaattgaaatgtctgaact

SEQ ID NO: 629600 - DNA, 83 bp, Homo sapiens
gcgggacgcgggcgccaggaccggccgaacgcagagggagcatcgagtacagctgtccggcctccaacgagtgtgagatcacc

SEQ ID NO: 629601 - DNA, 112 bp, Homo sapiens
actctcaggaactattccagctttctcagtatctacaggtcatggaaaatggaagatttgcaaaatacaaatattttacccatgtcatgatcaataagacagatatgctaat

SEQ ID NO: 629602 - DNA, 51 bp, Homo sapiens
catgaggccaaaggcagttgtattgactttctgctgacccctctgtcaccc

SEQ ID NO: 629603 - DNA, 98 bp, Homo sapiens
atggccaagaactaagtaacgatctggatgcccaggttcgtaagaagaactcgctgaaggactgcgtggcagtggctgggcccctcggggtcacacac

SEQ ID NO: 629604 - DNA, 82 bp, Homo sapiens
ccggcctgacaacttcatctttggacgtcttcctcatctgcttctccctcgtcagcccagcctcttatgagaacgtccgcgc

SEQ ID NO: 629605 - DNA, 80 bp, Homo sapiens
agcgcctacccgagtgtgcgaagctagccaaggatgatcggctgaatgtaacagaggaactaacgtccaacgacaagacg

SEQ ID NO: 629606 - DNA, 82 bp, Homo sapiens
caccgacatctgcctgctcaaagtctggggagcagggaggagccctgtgccctgtcccaggatccatgggtaggaacaccat

SEQ ID NO: 629607 - DNA, 90 bp, Homo sapiens
gaggctcagagcttggagacagacgtccctgtgccgtctcctctctgcccagagcctccaggatacactggccctgtgacccggactatg

SEQ ID NO: 629608 - DNA, 59 bp, Homo sapiens
tatggacgtgacagaggaatctttggtatagagtcaaagaagtttggcagagatcacgg

SEQ ID NO: 629609 - DNA, 50 bp, Homo sapiens
tctgaccctccgccaggcaaaaggaaggaagtttatctcgacaatgctag

SEQ ID NO: 629610 - DNA, 75 bp, Homo sapiens
cggggccgctgctcaagttccagatttggtttggtgcacctcgatttggaggaagtagggcagggcccttatctg

SEQ ID NO: 629611 - DNA, 80 bp, Homo sapiens
tccagctatacgatatcttctgtccctgaaaagcaaaggcctcatctccatggcacaggtgatgaaacaggaagactgaa

SEQ ID NO: 629612 - DNA, 96 bp, Homo sapiens
catggtttcaactgtgcagaatctacaaattttgctactgtcagatggattgactatggaaaagttgccaaattgatgccttcaattaagttgcag

SEQ ID NO: 629613 - DNA, 75 bp, Homo sapiens
ttctatgtttccacatcggtcagaaaaagatgtggagtctttcattttggatcaggatgatttggaaaatccaat

SEQ ID NO: 629614 - DNA, 101 bp, Homo sapiens
cttctgggagctgaggaaccagatatcttgaaaagctgccagaaagaaaacctacagagatttccgattgcaaggggtcctggactccaccttaaacagca

SEQ ID NO: 629615 - DNA, 90 bp, Homo sapiens
gtgtgttctgacaagagatgattgttttaaagggaaacgatggggagcccaggtagcaacacaagtcggaatagaatggaacctgtcccc

SEQ ID NO: 629616 - DNA, 75 bp, Homo sapiens
cgtcggccggagatgagccgaggcttatcgcctcaggcatggcgtacgtggagcggatgaactacgtccaccggg

SEQ ID NO: 629617 - DNA, 96 bp, Homo sapiens
acattgatggaaaagaactgttgaatcttacaaaagaaagtctggctgatgatttgaaaattgatgatggtggtgctaccccagtacaggatgaac

SEQ ID NO: 629618 - DNA, 90 bp, Homo sapiens
cttcaccgcgggcgccaatggggagcagaaggactcggacacaggtgctggagaatctggtaaaagcaccattgtgaagcagatgaggat

SEQ ID NO: 629619 - DNA, 74 bp, Homo sapiens
aacaatggtaaatgtgccacatattcatgcaagtatgaaaacccatggacaatcccgaatatgttgtcaatgac

SEQ ID NO: 629620 - DNA, 100 bp, Homo sapiens
cccatgagaagcagcagccgcagacaggagatccttccaagagtagctccaattccgatcggatcctcagagccgcagagcacacaacattgacctgaag

SEQ ID NO: 629621 - DNA, 100 bp, Homo sapiens
gaatgggcccgtgggcatatttagtcattcatttttgatcaggagaaagaagacagccatcatttgaaaggtcacctcatcatctcaaggaggagcattc

SEQ ID NO: 629622 - DNA, 75 bp, Homo sapiens
tgaagatgcaaaaccagcgtggcggccgcgctctcttccaggacatcaagtttttccaggggcattgttatttgt

SEQ ID NO: 629623 - DNA, 87 bp, Homo sapiens
gctctgctcccctagcaacgctcgccacacccttgttttgagatcctctctaagtgaaaatgcctcgtgtaaaagcagctcaagctg

SEQ ID NO: 629624 - DNA, 100 bp, Homo sapiens
aaaatcacccccaattgagaactactgctctaaactgtcttgagagctgatgacaataacatgggcaatggctgctctcagaagctggcgactgctaacc

SEQ ID NO: 629625 - DNA, 87 bp, Homo sapiens
agaaccgaggaacgaagaaacagacattcaacatgattgcatttgaagactacttccagcaacccagtctcctgccatgtccgaccc

SEQ ID NO: 629626 - DNA, 85 bp, Homo sapiens
cgtcagcactcagcgcgggccggctaccggctctctgaccagttccacgacatcctcattcgaaagtttgacaggcagggacggg

SEQ ID NO: 629627 - DNA, 83 bp, Homo sapiens
aaagtaactgctataaaatctgccatgaccttgcctcctttcctggagttcggtgtcccgtccccagcccacctcagagcctg

SEQ ID NO: 629628 - DNA, 74 bp, Homo sapiens
gccggcagaggatccagtgttcaccatcctggccccggaagctcctggcctgcgcggcttccggatccttggtc

SEQ ID NO: 629629 - DNA, 100 bp, Homo sapiens
aagaagcctggtctccggggccgctggattctgaggaccagcagatggccagtcacgagaacccagcctactttggggataaaggattatttggtcttct

SEQ ID NO: 629630 - DNA, 100 bp, Homo sapiens
gtctggcttgttcgggctcagcggccgcgaggccgcagctcccgctcaccatggatgatgatatcgccgcgctcgtcgtcgacaacggctccggcatgtg

SEQ ID NO: 629631 - DNA, 75 bp, Homo sapiens
cgcagtggtcgcttcttctccttgcattccaagaatcaagcactacaaagtgatgagcgtaggacaaaactacac

SEQ ID NO: 629632 - DNA, 100 bp, Homo sapiens
tggcgactgaggcacagagtgaaggggaggtgccagcccgcgaatccggccggaggacagtcattttgtttactcattcagccctgttgcaggtcccaat

SEQ ID NO: 629633 - DNA, 100 bp, Homo sapiens
aaataacccagctggagtcatgggaggagcccttcatgcctgcttgggaagttgtgacttcagccataccgagagggcttttccaagctgccactggtcg

SEQ ID NO: 629634 - DNA, 100 bp, Homo sapiens
gcagctctgatgacgatttggatgaatatacccttagaaaaaatgtggcagtgttatgcatgacatcctgggatgtaagatcacagaatccccctccagc

SEQ ID NO: 629635 - DNA, 100 bp, Homo sapiens
agcatttatgcttcttttcaaagatcttatcaaactttttgcttgctacaatgatggtgttattaacttactcgatctgttagtcaagtgtattggtgaa

SEQ ID NO: 629636 - DNA, 82 bp, Homo sapiens
cccactttctcggcgccgcggctcttttctaaaagtagttaaacatgaagtttctggagagacagtggtatttcaaggggga

SEQ ID NO: 629637 - DNA, 101 bp, Homo sapiens
attccagccaaaaatacatgatctgtcggaaaaggtaacagaagatggaactcgaaatcccaatgaaaaacctacccagcaaagaagcatagcttttagct

SEQ ID NO: 629638 - DNA, 100 bp, Homo sapiens
tcccctgtatgacattccttacatgtttgaggcccgggaatttcttcgaaaaaagcttattgggaagaagcagggaggagagagcgatggcttttttcac

SEQ ID NO: 629639 - DNA, 50 bp, Homo sapiens
ggtcgaggacattattttcacaaagatgctcatgaagcagcaggaccggc

SEQ ID NO: 629640 - DNA, 100 bp, Homo sapiens
ctgcgtcccgccaccggccgcttctgtcctcgccctgggcgctgcctatggcacagccaagagcggtaccggcattgcggccatgtctgtcatgcggccg

SEQ ID NO: 629641 - DNA, 75 bp, Homo sapiens
gcaagaaattgttattcttccttctctgaggcctgagtggccaacagtgttgcaaacaggaacccgaggttttca

SEQ ID NO: 629642 - DNA, 83 bp, Homo sapiens
agtagatgatgccagtgaaagagaatgtgaaaacctttgcatcttctgatagtctagccaaggtccaagaagtagcaagctgg

SEQ ID NO: 629643 - DNA, 83 bp, Homo sapiens
agccccgagcactgtggccgaggcccacctgctgacatctacctgccaggatgccggctccaggagcagcagtggaggtcggg

SEQ ID NO: 629644 - DNA, 98 bp, Homo sapiens
cggacttttcgtgtcccgctgtaaggaaacaagatggtccttaaaaccgaagaggaggacgggtgtttgtgaaccgaagtttagcaatggaaaagata

SEQ ID NO: 629645 - DNA, 97 bp, Homo sapiens
gtttgatttgatctggaaccgggctcagtcctgtccaacaataagaaggctgactgcacaatcacaatggctgactcagacttcctggctttaatga

SEQ ID NO: 629646 - DNA, 73 bp, Homo sapiens
ctcgtgaggtctcggtggatgacgctatgtccagcaaaggctccgtggttctggcctacagtggcggcctgga

SEQ ID NO: 629647 - DNA, 97 bp, Homo sapiens
gactcctggagatcgacccgtacttgaagccctacgccgtggacttccagcgcaggtcctgggaactccaacaagggagcaaatcagagaaatgaac

SEQ ID NO: 629648 - DNA, 74 bp, Homo sapiens
tggagatgggaccacatcagtaattattcttgagtgcctggtgaagaatgtgatgggatcactagcatgtctgc

SEQ ID NO: 629649 - DNA, 74 bp, Homo sapiens
gcatctgggttttacagcacttggccaagctagatgtcaaggaactcaatgttcgaaaagttacactgtctaca

SEQ ID NO: 629650 - DNA, 97 bp, Homo sapiens
ccgatatggaacccaagcagtggcgaagggaatcgcaaggctcttccctgaccattttctactgtccctgcgcgagaagatcctcaggaacgggaac

SEQ ID NO: 629651 - DNA, 100 bp, Homo sapiens
gacggctttcaggctctgcaaggcatcatccactcagaagatgttggatccagggttgatgacgtgttccaagcaagctatgtttcttaaccttgtctac

SEQ ID NO: 629652 - DNA, 100 bp, Homo sapiens
agcagggcaaatttggtgctgcagttctggggaaccacacagccagagagaggccagtaatagtagccatgagtctcgtattggtctagctgaggggttg

SEQ ID NO: 629653 - DNA, 98 bp, Homo sapiens
cttggttgactactccggagcagccactaagagggatgaacaggcctgcgtggaaattgaatgagattcactggatgtgtgtgagaagtggggagaaa

SEQ ID NO: 629654 - DNA, 76 bp, Homo sapiens
agaactgctaacctagggctactgttgattttgactatcttcttagtggccgcattaaagggcagtatttaaagtc

SEQ ID NO: 629655 - DNA, 78 bp, Homo sapiens
ccagaggtcgtggaggtggccgtggaggcagaggtggcatgggaaccgaacaatattttgggagtccaagtgacatgg

SEQ ID NO: 629656 - DNA, 80 bp, Homo sapiens
agtggtcgcttcttctccttgacctcagttggatgaacccattccactgtatgaggcaaaagtttccatggaagctgttc

SEQ ID NO: 629657 - DNA, 98 bp, Homo sapiens
ggccagcgccgcgcccggggccgtgcgctctcgggccactcggccgcagtacttcctcctgtgctggttccaagacacagcgaatataatcctcagca

SEQ ID NO: 629658 - DNA, 83 bp, Homo sapiens
ccaaagccgtttccgtggaatcaggccggctggaagccagcagacctgcagaacttggctcccgggacccacccaccatttat

SEQ ID NO: 629659 - DNA, 97 bp, Homo sapiens
aagaagacgaagaagcagaagcgtctgctcaggttgcagcaggagagaggtcattaaggagtccaagcaggagcacaaggatgtgatgtgaggcagg

SEQ ID NO: 629660 - DNA, 90 bp, Homo sapiens
cacgtcggaacaagtcgtgcctgttttggtaaagaactggaagaaggaatgcgccaagactaggaagatagaatcacttgaattcctgga

SEQ ID NO: 629661 - DNA, 100 bp, Homo sapiens
acgccacggggccgctgctcaagttccagatttgtgggtaattccagaattgattggccataccattgtcactgtattactgctcatgtcattgcactgg

SEQ ID NO: 629662 - DNA, 100 bp, Homo sapiens
cagactccagttatggctcaacccaaagaaggtgtagcccatcagtgttatcatggtttcatgaaggctgtccaggaaggaaacattcagtgggagagcc

SEQ ID NO: 629663 - DNA, 100 bp, Homo sapiens
ccaaaatgaagacctgtgttgatacctataccaaccgtttaaggaagatgagaagtttttgtctgaagtttttgcacaattaacagatgaggctacagat

SEQ ID NO: 629664 - DNA, 83 bp, Homo sapiens
cagtgactacccctaacgcacaataatatggctccgatgggctcaaagaacccagtgacttgattgtaaaaatttacagagcg

SEQ ID NO: 629665 - DNA, 98 bp, Homo sapiens
tttggacttccagcctccgaaatggttaccatggcctctactgtgaggaggaatataatgagtgcctctccgctccatgcctgaatgcagccacctgc

SEQ ID NO: 629666 - DNA, 89 bp, Homo sapiens
gaatcccctgcccagtctccgcttcctggaggagttgcatgggcaagaaggacgaccccaagctgatgcaggagtggttcaagctagtg

SEQ ID NO: 629667 - DNA, 101 bp, Homo sapiens
cggccgtctctggagagcagcagccacagcctggcagctctgatcaggaaagtgaggaacagcaacaattccggaacattttcaagcagatagcaggagat

SEQ ID NO: 629668 - DNA, 51 bp, Homo sapiens
gacatgcgtttgagatctactgtgagtacagcagggaagaactggaaactc

SEQ ID NO: 629669 - DNA, 75 bp, Homo sapiens
aagaagtgataggagggctctgtagcgtccgtctccaagagagtatgaagagagtgcgtctgtagggcagggaag

SEQ ID NO: 629670 - DNA, 90 bp, Homo sapiens
tggtatggaacgtgaagtagcagagtgaattctctggatctttgtcaggaagctggaagacttccgattagagaaaggtgaagaggaaag

SEQ ID NO: 629671 - DNA, 114 bp, Homo sapiens
ttgaatttgaagatccccgagatgcagctgatgcagtccgagagctagatggaagccatggcaatgacaggctcaacaccttgctcatccatgagtaaccacacaaaggaaagg

SEQ ID NO: 629672 - DNA, 100 bp, Homo sapiens
tactttgggcttcatcatggaggactacctgcagggttgtcgagctgctctgcaggtctgtcagtttgtcgtctctgtcaacgggctcaatgtcctgcat

SEQ ID NO: 629673 - DNA, 100 bp, Homo sapiens
gggacgtgatgttggagaactacaggaacctgctttctctcgatgaggataacatccctccagaagatgatggccgccctgctcccccaatgaaaggcca

SEQ ID NO: 629674 - DNA, 75 bp, Homo sapiens
gtgtttgcggttcagccctttgatgaccgcagcagaaatgcactcggtgatggaaagagagccactattctgaag

SEQ ID NO: 629675 - DNA, 96 bp, Homo sapiens
cattatctagtcctttccaccccgaaattcgccccgattaaagactgtgttgcattatcagaacttcaaggtagaatttgctttaaattgtgagtt

SEQ ID NO: 629676 - DNA, 98 bp, Homo sapiens
gcacggctgaggcccgcaagcgcaagatggagctaacacccattatggagattaaccacttttcatcaggtttttaacttaagtcgtgaggaatacaa

SEQ ID NO: 629677 - DNA, 75 bp, Homo sapiens
ccggtgtaaatgttgagcctttttggcctggcttgtttgcaaaggtatactgtagggtgcgcccactgggctttc

SEQ ID NO: 629678 - DNA, 80 bp, Homo sapiens
agagcaacaaagcaggcgactacagccacgtgaaggatattagaaatggctactccccagtcaattttcatctttgcaat

SEQ ID NO: 629679 - DNA, 100 bp, Homo sapiens
aacaagttcctgtcctatgcactcatagccgaggcctgcctggagccccagatcaccccttcctactacaccacttctgacgctgtcatttccactgaga

SEQ ID NO: 629680 - DNA, 75 bp, Homo sapiens
ctttccagcagtccagcacggccaagtcagccacctggacggagtgtggccatctggggccgtgtggtatttgcc

SEQ ID NO: 629681 - DNA, 100 bp, Homo sapiens
gatgaaatccttggagccctaacagaggaagagctgaggaccctggaaaatgagctggatgagctggaccctgatgaaaaatgccagctgtgggacaagg

SEQ ID NO: 629682 - DNA, 100 bp, Homo sapiens
agcagagtgtggaggacattctcaaagatcattggcaaaagtatggccggaatttcttcaccaggtcctcaaggtcctccaggctatggcaagatgggtg

SEQ ID NO: 629683 - DNA, 108 bp, Homo sapiens
cagaccctggagcctcagttggaagcagccgatccagcctgcggagcctgtggggcaggttctctacttttagagtcgaaaataaatcctaacactgcataccagaaa

SEQ ID NO: 629684 - DNA, 98 bp, Homo sapiens
agagagcgagctgagtggttgtgtggtcgcgtctcggaaaccggtagcgcttgcagcatggcctccaactttaagaaggcaaacatggcatcaagttc

SEQ ID NO: 629685 - DNA, 82 bp, Homo sapiens
ttgaaggagtttattatctacatcagaataacattgtacaccttgatttaaagatggaccacacatccccgacctacatgct

SEQ ID NO: 629686 - DNA, 100 bp, Homo sapiens
cccggccccgccccgctcccggcggactgcgagcaggaagagcgcagtggctctgccgacgccgcgttcagaaagggggggccctcagcctcttggcctt

SEQ ID NO: 629687 - DNA, 100 bp, Homo sapiens
agtaaagctcaatagtgaagaaatgaaagaagcctactatcaaactcttcatgaatactgtatgtctgagtatttgagaatgagtggcatctattggggt

SEQ ID NO: 629688 - DNA, 100 bp, Homo sapiens
cgccgctgcctcaggagcggaacaacgtcggcgagcgggttgttgacctcctgtactggagagacattaagaagactggagtggtgtttggtgccagcct

SEQ ID NO: 629689 - DNA, 75 bp, Homo sapiens
atagtccatcgaagaagagtccttggaacaagcaactggctattgaaaaggacctagatgtgaaggctggtggag

SEQ ID NO: 629690 - DNA, 75 bp, Homo sapiens
ttcctgctctgtctctacttggtgggcttcttgggcctattccactagaagcaagatggctgaactcaatactca

SEQ ID NO: 629691 - DNA, 100 bp, Homo sapiens
tgccgggggtcgctggctctgctgctgccgccggcgaaggaggaggcgttgccgggacagctttcctgcccgctttggaggagtccactttgtcaaccag

SEQ ID NO: 629692 - DNA, 75 bp, Homo sapiens
tgcagagcctgcggggcaagatctgaaaaatgctggcaggtggtgcaagcaaggacatctatgcatagaattctg

SEQ ID NO: 629693 - DNA, 90 bp, Homo sapiens
cgggtccggatagggctgacgctgctgctgtgtgcggtgctgctgagcttggcctcggcgtcctcggggccacactgtcccccactgccc

SEQ ID NO: 629694 - DNA, 50 bp, Homo sapiens
cgccgaccggcgccgggagatcctggcaattctgtggtgttcttggtcac

SEQ ID NO: 629695 - DNA, 50 bp, Homo sapiens
cagccacgaggaaatcatctatgtcagtattgaatatggtggtgaggcgt

SEQ ID NO: 629696 - DNA, 82 bp, Homo sapiens
agacctgctgctgcttcaatgtccgcatcgcaaccaccgccctggccatctaccatgtggatgaccgagtgggagacagcag

SEQ ID NO: 629697 - DNA, 100 bp, Homo sapiens
tgcaaataatcacagattagcttttactgtaaacacaccacctactccagaagacctgatgttaagtcaatatgtttaccgacccaagatacagatttat

SEQ ID NO: 629698 - DNA, 100 bp, Homo sapiens
tttgctggaagcctgcaaagtaaaccctttccccaaggacaggtggtgaagccccctaatgtcctgactccacagttcctgtcccatgaccagggccagc

SEQ ID NO: 629699 - DNA, 74 bp, Homo sapiens
tttgctgtctcctcctaatacggaactgcaagcacatgttgaccagataactgaaatggcagcagtaatgagga

SEQ ID NO: 629700 - DNA, 100 bp, Homo sapiens
cgagtcagtgactgaagcgcccgtccattccaagtgaataaccctataccttccaatttgaaatcagaagcaaaaaaggctgccaaaatattaagagaat

SEQ ID NO: 629701 - DNA, 100 bp, Homo sapiens
atttttttgtggagacttgctgagcagcttttatcaaaatacaactcaaacctagctactccaatagcaattaaagcagtgccacccagtaaaaggttcc

SEQ ID NO: 629702 - DNA, 98 bp, Homo sapiens
taagaagacgtttggtttaaagaattaaaaggaagaacaacttaagagcttcttcaaaggtacaacttggccaagtagaaatcaaatgccccatcaca

SEQ ID NO: 629703 - DNA, 100 bp, Homo sapiens
agtttctggaatcagaagatgaccctgtcataaagaaaattgcccttcgggaaatccgaatgctcaagatgatgaggagtctgatgaggaagctgtgaag

SEQ ID NO: 629704 - DNA, 80 bp, Homo sapiens
cacgaccggcgcctcggacaccttcgagggttggacctagaggatcaagacataatgggagcatttttagacaagccaaa

SEQ ID NO: 629705 - DNA, 99 bp, Homo sapiens
gagattctcagggtagtcatctctctccagctgacagcagaaaaaagggttgccaccccagttgattggaagtagacccaaatgatttgtacattgtag

SEQ ID NO: 629706 - DNA, 90 bp, Homo sapiens
ggactcccgcggcgggaggagcctgttcccctgaggtacaccaggggttggaaaaaccacactaggcaaagaacttgcgtcaaaatcagg

SEQ ID NO: 629707 - DNA, 90 bp, Homo sapiens
ctttctcatcctgtttatgtccgacgtgcagctgtggtgatctttgtgaagtctgtgcagcggtgcattgccttggcccagctactagtg

SEQ ID NO: 629708 - DNA, 100 bp, Homo sapiens
accagttagaagtatatatgatgacatttctagcccaggacttggatcaacacctttaacttcaagaagacagatctccagtctatgtgctgaagaagca

SEQ ID NO: 629709 - DNA, 100 bp, Homo sapiens
gaataatgggtactctttcctcgtggaatttgaagattctacagataaatcaggtggtcaagaggccccggaaggtccaggtggccgcacttcaggccag

SEQ ID NO: 629710 - DNA, 100 bp, Homo sapiens
attggagacaaatatgaatgagattgttacacaaattgatgcacaaaataagctggaaaaatctgaggacacagcagggcaagagcggtaccggaccatc

SEQ ID NO: 629711 - DNA, 99 bp, Homo sapiens
ggaaaatggcggacgggaaggcgggagacgagaagcctgaaaagtcgcagcgagctggagccgccggaggagccaaaaacctgtatatcatctccgtga

SEQ ID NO: 629712 - DNA, 96 bp, Homo sapiens
gtcggttctgcagcgctgtatcgtgtcgccggcagggaggcatagcgcctctctgatcttcctgcatggctcagctcaggtaccagacagtgatga

SEQ ID NO: 629713 - DNA, 83 bp, Homo sapiens
gcctacctcttcctctggcccgaagccttcctttatcgctttcagaaactccccaacttttaaatcatttgaagaaaaggtcg

SEQ ID NO: 629714 - DNA, 90 bp, Homo sapiens
ctcatgcccgagtgcagacctgcatcaacctgatcaccagccaggagtacgccgtcaagcgggctgacgcacgaggcacacaggaaggag

SEQ ID NO: 629715 - DNA, 88 bp, Homo sapiens
gcagaggcgctggagctgggtcagtccgccgctcaccccgcggccgcaccttcccgccttctcaggtctcggacagcccgggagacga

SEQ ID NO: 629716 - DNA, 132 bp, Homo sapiens
cgggccgagatgtctcgctccgtggccttagctgtgctcgcgctactctctctttctggcctggaggctatccagcatggccaccatgtctgggagatggaagcgaaaactgaccgggacctgtgcaagccg

SEQ ID NO: 629717 - DNA, 100 bp, Homo sapiens
atttgccagggcatgtagctctccaggcttgcaagcgattaccaggtactaggttttgacaagcttgcatcatgcgtgagtataagctagtcgttcttgg

SEQ ID NO: 629718 - DNA, 100 bp, Homo sapiens
cataggcgtggccgagaaggccttttggctgagcgttcacgggccccgagcaggtgtgcctaccgcatgttgccgctgctgtttctgctgggacgtctga

SEQ ID NO: 629719 - DNA, 100 bp, Homo sapiens
ttcggaaaattaactataaaggagagcgccaaaccattactgatgatgtggaggttaacagctatctttctgccttcacctaccaccatatccaggagat

SEQ ID NO: 629720 - DNA, 100 bp, Homo sapiens
ccgcggctggggttccctcctccgtttctgtatccccacgagttccagggtcacccccgagaggacaacaggcatctggaagtgctctctcgccactctg

SEQ ID NO: 629721 - DNA, 97 bp, Homo sapiens
atattaagcctgaaaaacggcctcgtagagtcaacaggtgtcatggagaaactccagctgggcccagagattctgcagcgggaaaatccaaggctta

SEQ ID NO: 629722 - DNA, 100 bp, Homo sapiens
cgactccggggatggcgaagcgttcctatatgatagtggactcttcagatcacgaccctggagaaaaagccagacttcagctgcctacaatgaaggagaa

SEQ ID NO: 629723 - DNA, 98 bp, Homo sapiens
tgagagtttaagaactcagaccagtgacttaggctctttggtgtaacgggaaactgcgctgcctgtagtaagctcatccctgcctttgagatggtgat

SEQ ID NO: 629724 - DNA, 108 bp, Homo sapiens
ccagggagttgaaggctgcagtgagccctgtttttgccaccacactccagcttggggacacttgacattcagggacgtggccatagaattctctcaggaggagtggaa

SEQ ID NO: 629725 - DNA, 75 bp, Homo sapiens
gaagtaacgtttgcggatgcacaccgacctaaattaaatgaagggactttttttatgaagacatggagtccttga

SEQ ID NO: 629726 - DNA, 100 bp, Homo sapiens
gaggagctcatcgggcagattagcgacatccgagtgcagaacctgcaaggtactccaaagattcaggtttactcacgtcatccagcagagaatggaaagt

SEQ ID NO: 629727 - DNA, 50 bp, Homo sapiens
caacacacctgcacgcaacagaagaagtgctggaattggccggacaggga

SEQ ID NO: 629728 - DNA, 75 bp, Homo sapiens
atctttgtctcatcttgttgtttatgtaccatctgttcgtggaagtaaggtttaagtttttgaaactgaagtagg

SEQ ID NO: 629729 - DNA, 75 bp, Homo sapiens
caacatggaggcggaggtcgataagctggaactgatgccacagaatgaatatattgaattacaccgtaaacgcta

SEQ ID NO: 629730 - DNA, 100 bp, Homo sapiens
atggaaaatcgcttggttaaaacctgacacttttaacaggttatacattggctcttcaaagacgttcacctcatcagagaaatccctgactcctttgcag

SEQ ID NO: 629731 - DNA, 75 bp, Homo sapiens
caaatactgcatatcagaaacaacaggtcagttctacagcaacggagggcattctgggaatgccagtggcggtgg

SEQ ID NO: 629732 - DNA, 75 bp, Homo sapiens
aaataattgaatttccggttgttttactgaatacgcatactttagaaatagtgggaaagcagtgccactctccgc

SEQ ID NO: 629733 - DNA, 82 bp, Homo sapiens
aggaggagtacaaggacatcctgcgcaaggccgtgcagaaggtgaaaggtgtagcagtcactcggcctacacccacagcatc

SEQ ID NO: 629734 - DNA, 85 bp, Homo sapiens
tgaagataacattccccagctggaagacgtttctcagttcctgcagaacctagctcctggaggtggggacgattggatctatgat

SEQ ID NO: 629735 - DNA, 100 bp, Homo sapiens
aagaaatgcagaaacgtaaagaaatgcaattgaggcaaatgggagagaccctttgaagtcaaggacaccgaggaagaggacttccacgtggaccaggtga

SEQ ID NO: 629736 - DNA, 100 bp, Homo sapiens
agtcattttaaactatggacgactccgaggaacattgagggatcgtgggactttaccagatcggtttgtaataacacctcgaagacgctatccgatccat

SEQ ID NO: 629737 - DNA, 98 bp, Homo sapiens
agcgcctacccgagtgtgcgaagctagccaagggaactctaatgatccaggacaaagaagttaccctggagtatgtatcaagcctggatttttggtac

SEQ ID NO: 629738 - DNA, 83 bp, Homo sapiens
gagcattttctctgtgccaccagagagtttcgtgtgcggatggacaaccggaaattttctacacattttggaattcagttact

SEQ ID NO: 629739 - DNA, 76 bp, Homo sapiens
ttcttggatgaattgcttgctttggaggagagctcaaaggatggctactgacatgcagaggaagagaagcagcgaa

SEQ ID NO: 629740 - DNA, 87 bp, Homo sapiens
aagcggagctcccccaagagccggaaaggtcctttcccataacctgtgcacggtgctgaaggttcctcatgacccagttgcccttga

SEQ ID NO: 629741 - DNA, 90 bp, Homo sapiens
gctcaactctagccagctaggttcctggtgctttggggcgggaagagaggcagagcacttgtcctccccttggggagaatcctcaccaga

SEQ ID NO: 629742 - DNA, 100 bp, Homo sapiens
cttcacttttgagtgcaactgccttccagagtcaacacagactgtccaagctctgcagtattcaactgttgatggtccactaacagcaagcaaagattta

SEQ ID NO: 629743 - DNA, 100 bp, Homo sapiens
cagctctttgcatccggagagtggacaagaaagtgtgaagcttacactctctgctctggtagatgggaagagcattaatgctggaggccacaaggttggg

SEQ ID NO: 629744 - DNA, 100 bp, Homo sapiens
tatggctttattgacctcgactcccatgcgatttccatggtgtcagtgattcatattcctgataggacttataaactatcctgcagaatattgtatcaat

SEQ ID NO: 629745 - DNA, 51 bp, Homo sapiens
gagtggattaagtgcattaagaagggcctgtcccagtcggctttaccctat

SEQ ID NO: 629746 - DNA, 100 bp, Homo sapiens
tgggaaccttctgcacccttctgtacccatcagtaacgatgagcactgttgcaagaattcaattccgtcttcctgatggttcttcctttacaaatcagtt

SEQ ID NO: 629747 - DNA, 83 bp, Homo sapiens
attgaccccactggactgcagtcacagtggactcccaaggggcaggtcagcccaaggccaaccccactgtcactctgttcccg

SEQ ID NO: 629748 - DNA, 100 bp, Homo sapiens
ctggttgtgagcagggtctgcacgaaataaagctcctgggcaaggggacgtctgcagctgaaaatgcactcggtgatggaaagagagccactattctgaa

SEQ ID NO: 629749 - DNA, 50 bp, Homo sapiens
atgccatgtcaactttgttcggaagggccggtgcataaacttctcccgag

SEQ ID NO: 629750 - DNA, 97 bp, Homo sapiens
gccctgcgcggtcctgccgaccgtgtgcgctccttatattcccccgcagagttgattcgatgtcatcagtcccgtggtggagcctgtggagacaaca

SEQ ID NO: 629751 - DNA, 99 bp, Homo sapiens
caaggaaaacatggaacaatttattattcaagagccctatgagtttgtctctctggaatggctgcaaaagtggttggatgaatcaacacctaccaaacc

SEQ ID NO: 629752 - DNA, 100 bp, Homo sapiens
atgatgtcatcctgacagaagctgaggctgaggtggcctccttgaaccgtaggatccagctggttgaagaagagctggaccgtgctcaggagcgcctggc

SEQ ID NO: 629753 - DNA, 75 bp, Homo sapiens
cgccggcggcatcaatcgcaccaagtaccccatcctgtgccaggcgagtctgtagaagaggcgacaccagggctt

SEQ ID NO: 629754 - DNA, 50 bp, Homo sapiens
tccgagtcaacaaccgcttcgagctggttggatggcaagcatgtggtgtt

SEQ ID NO: 629755 - DNA, 100 bp, Homo sapiens
tgtagagccatacttcaggaggatcctcagaagttttggacaagcctccccaaatgtggcagtatggaagagaagagagcgactggacaattgtgctatc

SEQ ID NO: 629756 - DNA, 100 bp, Homo sapiens
tttttaccttttgtgctgagccaactcgagccaggctgcaaaaaggcgccaagcccatctttgtgtgcttgcatccaactgtgatgagcctatgtatgtc

SEQ ID NO: 629757 - DNA, 83 bp, Homo sapiens
caaaaaaggaggccaaagactttgaaaatcaggaaaatgtttccaacctggtgattgaggacacagagctgaaacaggtggct

SEQ ID NO: 629758 - DNA, 100 bp, Homo sapiens
ctgtgctgagaaaagtaaacagctgaaggatgaaggagccagtttggctgaaaataaaagaatttggtgttcacttggcagaactgactgtagatcccca

SEQ ID NO: 629759 - DNA, 101 bp, Homo sapiens
cggcgaggcgcgctccctgcccggcagcgactcggagttcacacaaaagatgttggacaatttctacaattttgcttcatcatttgctgtctctcaggccc

SEQ ID NO: 629760 - DNA, 100 bp, Homo sapiens
gcagcacagtcaacaaatggcacgcatgcgtcctatggacccttctacctggaatactctcttcttgcagaattatgacgaagatgatcctgcagaagct

SEQ ID NO: 629761 - DNA, 100 bp, Homo sapiens
aggcctccatgtcccacgtggacaagttcgtcaagtttattcttcagtccaaggaagcaattcacagtcagctgttagagaagcagaaaatagcagaaga

SEQ ID NO: 629762 - DNA, 75 bp, Homo sapiens
gtgcggacgcagcggcgggggcctttgatgtggaaaatggcccttccccaggtcggagtccactggatccccagg

SEQ ID NO: 629763 - DNA, 117 bp, Homo sapiens
acagactagccactttgcattgactggaaacaatggcatttacagaaagagtcaacagcagtggcaacagattttaggtgatgggcaagtcagaaagtcagatggatataactgata

SEQ ID NO: 629764 - DNA, 90 bp, Homo sapiens
cgggaactaaaggtgtctctcctcctcaacctctctcggtgtcgcaggaaaatgaacagcagttgaagacatctcttcatcgaggactaa

SEQ ID NO: 629765 - DNA, 100 bp, Homo sapiens
gggcggcctgagcccggcgcaggtgaccggcgcgcgggagcgctacggccccaacgaaaaatggctacaaacttcctagcacatgagaagatctggttcg

SEQ ID NO: 629766 - DNA, 100 bp, Homo sapiens
tgggcctctgagatatgccgtttacgggtctccaaaaagtacagcgagattgaggagttttaccagaaactgagcagtcgttatgcagcagccagcctcc

SEQ ID NO: 629767 - DNA, 50 bp, Homo sapiens
gatctggacaaaggaacaggtatctcagtgtttgggaaatgggaagtaat

SEQ ID NO: 629768 - DNA, 100 bp, Homo sapiens
gaggaatcaattttggtatgcagataatcactgggctcatgggtcttgctctttacaaagagtagtttatgccaacgtgacttcattcatacagatgaac

SEQ ID NO: 629769 - DNA, 102 bp, Homo sapiens
aaggagccctcaattgcattggaaaagctgcgggaactcagctttagtgccttacccctcgtgaattcaactcttacggagctcgaagaggtaatgatgctg

SEQ ID NO: 629770 - DNA, 96 bp, Homo sapiens
gcgatgctgaggatcgaggaacgttgtctgatttggagcaagaggtggtggtggccttcccccgaagaaatttggtaatcctggggagcgtttgcg

SEQ ID NO: 629771 - DNA, 75 bp, Homo sapiens
ttgccaaggaactgggatttcaacctgaaagtggaggctgcgaaaataggtctagatgttgatggaatatatcga

SEQ ID NO: 629772 - DNA, 100 bp, Homo sapiens
tcttcagttctctggagccccagattcaacccgtgtacgtgcctgtgcctaaaaccatattttacatccttccacgcctttcaggccttattgaagatga

SEQ ID NO: 629773 - DNA, 82 bp, Homo sapiens
gacgaggaagttttctactgtaaagtcaccaacgagatcttccgccactacgagagccttcacgtaaatgggtccagtcatg

SEQ ID NO: 629774 - DNA, 50 bp, Homo sapiens
caggagtcctccacttgccactgggggccacttagaagatgtgtatgata

SEQ ID NO: 629775 - DNA, 100 bp, Homo sapiens
caagtgtcttaagtacatccttcaatggcagttggcaacactcattttgggaggaggtaacctgtgtatggtgactggaggtgctaacctaggaagaatt

SEQ ID NO: 629776 - DNA, 100 bp, Homo sapiens
gccacggtggatcagcgcctacccgagtgtgcgaagctagccaagcacccctgcagtggaccatgagtcggtaatgcccactgaggacctctgggagcca

SEQ ID NO: 629777 - DNA, 50 bp, Homo sapiens
taccgacgagggggccgaaaccgagagcaggtggcctgacggagcaagag

SEQ ID NO: 629778 - DNA, 100 bp, Homo sapiens
gctggcaaaggaggaaaaaccaaattcaccatagagaatgtgacacggacaaggatagttttggctgatgtgcgccaagcccatctttgtgtgcttgcat

SEQ ID NO: 629779 - DNA, 82 bp, Homo sapiens
atgccgccctggccacggggactctcttctggatggttttgggatttgagattgacgcggtgaactctgtccagttttcaaa

SEQ ID NO: 629780 - DNA, 50 bp, Homo sapiens
agtcctggaggttgttatgacacaaaggtgttacagttcgagtgcctcaa

SEQ ID NO: 629781 - DNA, 93 bp, Homo sapiens
cgacaagccgctggcagccgcggatctcaccgccgctcaggggactttgaacatgtcggggatcgccctcagcagactcgcccaggagaggaa

SEQ ID NO: 629782 - DNA, 98 bp, Homo sapiens
agcgcctgtcccgggcagcgcagccccggccgcaggtgagccctattcccagaggcaggtggtgctgaccctgtaacccaaaggaggaaacagctggc

SEQ ID NO: 629783 - DNA, 75 bp, Homo sapiens
aagaagatggtggttcagaagccccatgggactatggaatacactgttcagcaaaaggatgtcactgaaattgat

SEQ ID NO: 629784 - DNA, 75 bp, Homo sapiens
tcgccgggaacccttgccgctgctgtcctgcgaccccaagcaggtatgaaaatgaaagtcttcagaatggaagga

SEQ ID NO: 629785 - DNA, 75 bp, Homo sapiens
ctctcgctgtgagacatgtctgagactcctgctcagtgtagcattaagtacaaaattggacagctgtacatgatc

SEQ ID NO: 629786 - DNA, 90 bp, Homo sapiens
cattttggcattgacatttaattttagggtcctttatatagaagggagagtaggtgggaaagcagtgccactctccgcttcacagatgcc

SEQ ID NO: 629787 - DNA, 95 bp, Homo sapiens
ggaactggacgaccaggacacgtgcgggatagacggggacaatgaggaggagacggagcacgccaaagggcgtggatttgtccaagatagaaaaa

SEQ ID NO: 629788 - DNA, 75 bp, Homo sapiens
aagccatcggacgtcggcggtgagcagcctcccgcgacgatgcccctcaacgttagcttcaccaacaggaactat

SEQ ID NO: 629789 - DNA, 75 bp, Homo sapiens
gtcaggatgaattggcagagcttgacccaggcactaagttccacaaacatgtggagtttgatttccttattaagg

SEQ ID NO: 629790 - DNA, 100 bp, Homo sapiens
cggagaggactgaatggtatcctgctttgattagtgatgatgaaccaggttatgaccttgatttattttgcatacctaatcattatgctgaggatttgga

SEQ ID NO: 629791 - DNA, 100 bp, Homo sapiens
gccttgctgaatcctgctcagagaaaactctacagagatgtcatgctggagaccttcaagcacctggcctcagtaggtgtgatctaccatgcattgtctc

SEQ ID NO: 629792 - DNA, 75 bp, Homo sapiens
atgaggttgaagatctctatgagcttttgaaacttgttaaggatgaccatgaaagctgtggttctaattctacca

SEQ ID NO: 629793 - DNA, 100 bp, Homo sapiens
caccaagatgcggatccgggcctttccgcgtcgtctcggagatgcagccaagaaagccatcagtaaattgacaaccaggacagtaaagaagggtgacaag

SEQ ID NO: 629794 - DNA, 82 bp, Homo sapiens
ttcgagcctagctgctcgcacaggactcggccacctgcccttcctgcaccgactggccagctgcgcaaaccatgcaggatga

SEQ ID NO: 629795 - DNA, 75 bp, Homo sapiens
gaagcacggccgcggaagcagataccaggttctccagaagctggggaaggcagatgagaccaaggatgagcagtt

SEQ ID NO: 629796 - DNA, 90 bp, Homo sapiens
tgggatgcaaagacactgatggaatgctgtaggcctgatcatggttatactcatgacagacatgcacatgatggtgtccaagccagaaca

SEQ ID NO: 629797 - DNA, 100 bp, Homo sapiens
gccgccatgaagaagcagttcaaccgcatgaagcagctggctaaccagaccgtgggcagggttgagaatgcttgcaccaagcttgtccaggcagctcaga

SEQ ID NO: 629798 - DNA, 80 bp, Homo sapiens
agccctcagtaccagagacagaagcagatggattcgtccttttagccacttccggctcctgcgtcgctccggaagcctgc

SEQ ID NO: 629799 - DNA, 100 bp, Homo sapiens
ctaggaatctatgatgctgatggtgatggagattttgatgtggatgatgccaaagttttattagtttcagaagaggagccccgccgaggcatgagggccg

SEQ ID NO: 629800 - DNA, 100 bp, Homo sapiens
ttggatttaaaagacagtcctcgtcagcactgactttcagctatggaatcgatacttggcatatcgaaattttatgattgacacgtatcgtctaaacccc

SEQ ID NO: 629801 - DNA, 75 bp, Homo sapiens
gggtggcctgcccctccacatctgtgggatatctcatcaggaaaccagccatgtcctttgggctctgtggagagc

SEQ ID NO: 629802 - DNA, 82 bp, Homo sapiens
ttgtttctctccctctgcccccccttccccacgcaaccccagatccatttacactttacattaaacgagaagattcatcacc

SEQ ID NO: 629803 - DNA, 75 bp, Homo sapiens
cgcccaggagtcatcggacgccagaatctggtcaaaatgcagatcttcgtgaaaacccttaccggcaagaccatc

SEQ ID NO: 629804 - DNA, 83 bp, Homo sapiens
gaagccccttaaatgccgcaccctacggcatcgaaagggtgggctttgacagcgagaatcccggggacgacgggcagatgcac

SEQ ID NO: 629805 - DNA, 101 bp, Homo sapiens
atggaatcctgcatattggacatgccaaagccatcaatttcaactttggctatgccaaggtgagcatgggtttatgcgtcttaggcattattgtgatggcg

SEQ ID NO: 629806 - DNA, 100 bp, Homo sapiens
gtctccaagaagatgcccaagatcccagtgttggttagcagccagactgccttccgggtcactgccatggaggagccgcagtcagatcctagcgtcgagc

SEQ ID NO: 629807 - DNA, 100 bp, Homo sapiens
catgccaacatcctgaccaagcccgatccaagaaccttctggactaatgatgatccagattttaggtgatgggcaagtcagaaagtcagatggatataac

SEQ ID NO: 629808 - DNA, 100 bp, Homo sapiens
aagcaaaggagtcagggatggctcttcctcaggattacattgcagtgaaggagaagtatgccaagtacctgcctcacagtgcagggcggtatgccgccaa

SEQ ID NO: 629809 - DNA, 74 bp, Homo sapiens
atggcttctctaattattgttctgaaacgacacagcattgttggttttgccatgtactattttacctatgaccc

SEQ ID NO: 629810 - DNA, 90 bp, Homo sapiens
agcggcgtcgagaggaccatcctgggtgctggccctgtgctggaggagcgagttcagaagacctttcctcacccaattgataaatgggcc

SEQ ID NO: 629811 - DNA, 100 bp, Homo sapiens
ctggataatgtgctgccttctgctcagctgatgatggacaagtttgtgctgaagcacacggccttcgcccacctgcgggaggtgggctccttcccctgca

SEQ ID NO: 629812 - DNA, 75 bp, Homo sapiens
tcaggctatggccagagcagctattcttcttatggccagagccagaacagctcctctggacccttcccgctgccc

SEQ ID NO: 629813 - DNA, 75 bp, Homo sapiens
cgcagacggtgcgcctgtgcagccctcccaggtggagtacacggcagactggtttggaaatcccttgtctccagg

SEQ ID NO: 629814 - DNA, 75 bp, Homo sapiens
agcatatttgagtcatttccttcgtacccacagtgcttcatgagagcactctgatctacaaatttggaagaaccg

SEQ ID NO: 629815 - DNA, 59 bp, Homo sapiens
aaatgaaccctgcaaggctgtatatcagagggttaaaaggcttggaacaagttactaag

SEQ ID NO: 629816 - DNA, 100 bp, Homo sapiens
atcctgtgacctgcaggtactgggagatccatagggaggacggcggaacatctggaggctgggaaatggatagcagtgagattcacttcaaagtgaaaat

SEQ ID NO: 629817 - DNA, 98 bp, Homo sapiens
actccgtgcccagatgctcataaggattgtcctctttctacaaaagaagcctggaatggtcccccctccgccgggagaagaaagccagacggtcatcc

SEQ ID NO: 629818 - DNA, 100 bp, Homo sapiens
ccacagtggagtccattatttcctctggcttcctcaaattcatattcacaggtaccttgtggtctataatcctttagaacaagaccgaatctcgttggtc

SEQ ID NO: 629819 - DNA, 97 bp, Homo sapiens
aaccatgttgctgccacagggagtcacctctgcgttctcaggaaatctgaaatagagtactatgctatgttggctaaaactggtgtccatcactaca

SEQ ID NO: 629820 - DNA, 98 bp, Homo sapiens
cagattttggcagattatggctttgtccccacccagcactgatgatattataaagttatacattggctcttcaaagacgttcacctcatcagagaaat

SEQ ID NO: 629821 - DNA, 100 bp, Homo sapiens
ccactgacgccgggaccgggaccgccgccgccgccgccaccatgtaagactttgaccccgacgcaggcttcagtgattgccgcggatcagaagcctgagc

SEQ ID NO: 629822 - DNA, 74 bp, Homo sapiens
ttctccaggaagcagatcaaggacatggagaagatgttcaagcagtcttattagtaggtaagaaacagctgctc

SEQ ID NO: 629823 - DNA, 50 bp, Homo sapiens
ggagctgtatggccgccgtcgcaagaagagttgtaagacgttcatcgccg

SEQ ID NO: 629824 - DNA, 83 bp, Homo sapiens
cgctactggaggcggcccgcttcctggaatggcaagcgcagcaacaacagagagcacgtggctgaaggtgatgtggccgccct

SEQ ID NO: 629825 - DNA, 97 bp, Homo sapiens
tggagtctgcgaaggccgggacccggttccccggcccacagtgggggtgtgcaaacccgagagaactgggcgtttactgaagcatttgaaagggaac

SEQ ID NO: 629826 - DNA, 115 bp, Homo sapiens
aaagatccaaaacaagtggctgcggccgtcgcccaggagtcatcggacgccagaatctgtgtggacgaatgtggaacctcgctctgtggctgtgttcccttggcactccttagtc

SEQ ID NO: 629827 - DNA, 100 bp, Homo sapiens
ggaggacaccgtgacttcccggacgctgggaaatgtgacatgaagtccgagaggagacccccctcacctgacgtgattgtgctctccgacaacgagcagc

SEQ ID NO: 629828 - DNA, 100 bp, Homo sapiens
cggaggtgaggcggaactctgaggtcctaaagaagacgaagagaagccttcagcctcagcacttgagcagccggccaccctccaggaggtggccagtcag

SEQ ID NO: 629829 - DNA, 75 bp, Homo sapiens
gtgtctgaggtggtgcgcggctccgtgctcctgtatgcagatctcaatcgccacgtggatgccttgaatgcgtgg

SEQ ID NO: 629830 - DNA, 74 bp, Homo sapiens
agaagagaggtatcagaagcttaaaaagggaactgctcgcagaaagaagaaggtggttcatagaacagccacag

SEQ ID NO: 629831 - DNA, 98 bp, Homo sapiens
tgacttaccttaacatgttcttgaagtaccatggcgtggattaaaagccacagcatgttccgaagagatgattggaagatggaagtggagggttaaat

SEQ ID NO: 629832 - DNA, 75 bp, Homo sapiens
gcgaagctggccgagcaggctgagcgatacgacgttggtgagtttgtaagtgatgcccttctcgttcctgacaag

SEQ ID NO: 629833 - DNA, 75 bp, Homo sapiens
cccagtttgagttccttgtggcctactggaggagggagcctggtgccgaggagagtggtagaggcacagaagatg

SEQ ID NO: 629834 - DNA, 100 bp, Homo sapiens
tggtagaatatatcacccataatcggaatgtgatcacagagcctatttacccagaagtagtccatatgatggagtcccctgtttccacaccagcagtgct

SEQ ID NO: 629835 - DNA, 90 bp, Homo sapiens
gggactcgagcctagggaggcgaggttcccgcaccggatagttgcaacttcctggccaccgtcgtagcctctgtgggagcccagagcccc

SEQ ID NO: 629836 - DNA, 97 bp, Homo sapiens
ccagactgccagccctgacgggacagagccagggcactcaccaggctgcaagaacagtgctggggtagaagcattgaaagcattggaatggaggctt

SEQ ID NO: 629837 - DNA, 85 bp, Homo sapiens
tgcattgacccgaagctaaagtggattcaggagtacctggagaaagctttaaacaacaacacagtcactcctggcggcaaaccaa

SEQ ID NO: 629838 - DNA, 75 bp, Homo sapiens
cagccccggcgccggcggcgggaccgcggaccgtacggccaagtacagcgtgttgacatttctacctcgattctt

SEQ ID NO: 629839 - DNA, 100 bp, Homo sapiens
attgaacagactgatggccagcagagggcgaagtttcaagcagacttcacttgctcttgtacatgagattcacaatgacatcctttcaagaagtcccatt

SEQ ID NO: 629840 - DNA, 83 bp, Homo sapiens
ccaacacctttccccagctctgcgcgtaccgcgctctttggaaacgaattatgccatggacaatattaccaggcagaaccaat

SEQ ID NO: 629841 - DNA, 98 bp, Homo sapiens
cttcagtatcctcatcaacttgataaagctaaagccaattcaaatactttcaaatccactgtctacatacaatcagcaactatggctgacatgtgttg

SEQ ID NO: 629842 - DNA, 74 bp, Homo sapiens
tattcacgaatctatccttcataagtgcatcaaaacaggttatgtggtccgaatcagtggtgggaacgacaaac

SEQ ID NO: 629843 - DNA, 100 bp, Homo sapiens
aagtactgcaagaaggactatgagataattgacgaccttgccaacctagtggagaacacagatgaaaaacttcgcaatgaaaccaggcgggtaaacatgg

SEQ ID NO: 629844 - DNA, 101 bp, Homo sapiens
atgggtatccggtcttagaatacattccagaaaatgtatcaagggaacaacctatcttcagcactcgagctcatgtcttccaaattgacccaaacacaaag

SEQ ID NO: 629845 - DNA, 100 bp, Homo sapiens
gtttcagctgcacctgccatggagggtacactggcccttcctgcgatcaggacatcaatgactgtgaccccactgtcggaaaaggtaacagaagatggaa

SEQ ID NO: 629846 - DNA, 75 bp, Homo sapiens
gacagaatgaagacagggacagtggcattgctcgatcagagaatgtaactggtcactacatttccccctttcatg

SEQ ID NO: 629847 - DNA, 75 bp, Homo sapiens
agaatttgaaaaatgaagatgatgtagacactggactattaggcccctccagccagcgtcaggtgcagaatggcc

SEQ ID NO: 629848 - DNA, 75 bp, Homo sapiens
aagaaagctcagctggtggtgattgcacacgacgtggatcccatcgagaaatacccgcagcccaaagggcagaag

SEQ ID NO: 629849 - DNA, 100 bp, Homo sapiens
ggggagaggggcaggacgttcagccctgggattctggccgaccctcgccttccttctctgcagcttccccgcaggtagtagccatggttatgtgggttcc

SEQ ID NO: 629850 - DNA, 126 bp, Homo sapiens
gattgaatgccaagcagaaaattacctaaatgcactctttcgaaagaaagctagagatgatcgctatggaaaatcctgcagacttgaagaagcagttgtatgtggaatttgaaggagaacaaggag

SEQ ID NO: 629851 - DNA, 83 bp, Homo sapiens
caaagaagttaccctggagtatgtatcaagcctggatttttggtactgcaaacgaggtgaaaaggctgatagcttttacatca

SEQ ID NO: 629852 - DNA, 75 bp, Homo sapiens
cccctcagtcctgctctgaagatcctgccctgccctggggcctgtgaactcggagctgttcctgcgccatgttcc

SEQ ID NO: 629853 - DNA, 102 bp, Homo sapiens
aaggaggtggcgggaagcctgtgtgtgcttcaaatcgtcaccctcatggtcgctccggtgccgtgagcgatgtggagatgcaggaacactatgatgagtttt

SEQ ID NO: 629854 - DNA, 95 bp, Homo sapiens
agaactgcttcaagccccgcgagtcgcatctgctcaacgacgaggacctgacgcaggaaacatgccctgaactgtcacagaatgaaaccagcgct

SEQ ID NO: 629855 - DNA, 75 bp, Homo sapiens
gccctctgccatccagcagcgagccattctaccttgtatcaaggagctgaggcttcgaagacctcagaggacttc

SEQ ID NO: 629856 - DNA, 98 bp, Homo sapiens
gcttcgcagagattgttcttgccgtgcaattgggtatctcgaagagcagatcaagggcctaaaactatcgaacagattcacaaagaggctaaaataga

SEQ ID NO: 629857 - DNA, 99 bp, Homo sapiens
gtcttggccccgtccttacctcacaggatctgcataaagtattacaaacaaaatcctcttgatgagcaacacatttttcagctgccagtcagaccaact

SEQ ID NO: 629858 - DNA, 98 bp, Homo sapiens
tctgttcataccttttaatcccctggccgaaagtcatcctttaatagacgagtaccttctccaggcaaattccgttcccctgcagcaccatctccttt

SEQ ID NO: 629859 - DNA, 100 bp, Homo sapiens
tctgtgtgttaggagcatgcagaccaatgtaatggattgtgtgattctggatgatggtgggtttcttctgatggcaaatcatgatgattatactaatcag

SEQ ID NO: 629860 - DNA, 88 bp, Homo sapiens
tctgctgccgcccgcaagcagagggccgggcctggccttcatcgcctacccgcgggctgtcacgctgatgccagtggccccactctgg

SEQ ID NO: 629861 - DNA, 100 bp, Homo sapiens
tgaggacgctgatgaaataattcagtgtgacaattgtggcattacagtccatgaagcttgcccagtttcgacaaagaaaagctcagtcggatgggcagag

SEQ ID NO: 629862 - DNA, 98 bp, Homo sapiens
tggcctcgccggtcttggggggatggttccatcatggcgtcaatgcaggggatgccaacagacagatcagcgacctcaaatttaaacttgcaaaatct

SEQ ID NO: 629863 - DNA, 100 bp, Homo sapiens
ctggcggccaccccctcttcctcacttccctgtactctcatcgctctcggcctccgacacgaactggtcatgctgctggagtggtggtcctgcacggagt

SEQ ID NO: 629864 - DNA, 100 bp, Homo sapiens
gcgcaagtccccagttgccaaggaagtggagttcttgtccacgtccattgctcagctcaaagtggtacagaccaagtatgtggaagccaaggactgtctg

SEQ ID NO: 629865 - DNA, 84 bp, Homo sapiens
ttatggtcgatcgtcttcctactgtcttgttttttccctgcaacaggtggtgggcagcatggacgcccaccccaatcgctactg

SEQ ID NO: 629866 - DNA, 75 bp, Homo sapiens
tcaacgtggagcaggcgttccagacgattgcacggaatgcacttaagcagtgggagattcttcacagtcaagctc

SEQ ID NO: 629867 - DNA, 82 bp, Homo sapiens
cgggtattggatgattggtagctaagactcccgaatacttcagaagtggggaaatgcattttgaaagcgaagcagaagccgt

SEQ ID NO: 629868 - DNA, 73 bp, Homo sapiens
gccagtcggtctaatttgaaaggaaataatgaagatgtttcattttcaagaccagcagatcttgaccttattc

SEQ ID NO: 629869 - DNA, 97 bp, Homo sapiens
cagaagtcacagaagatcgccagcccaattctctgagttccgaggagcctccaaccaggtggagccgccaccaaaatgcagattttcgtgaaaaccc

SEQ ID NO: 629870 - DNA, 97 bp, Homo sapiens
ttatgtgggtgccaaagtcttcctcatctacgagggctgccacacttgtgtatcccttcttccttgaatttaaccaggagtgagcagtggacagctt

SEQ ID NO: 629871 - DNA, 90 bp, Homo sapiens
gatttttctttgttagaaaggaccacgggctaattaaaggagattgctataagctgctttcataaggaagtcactgtgcatagccatccc

SEQ ID NO: 629872 - DNA, 82 bp, Homo sapiens
tgtgactgcctgcttgcaggctgtgtcacagaagagaagatttgcagatttacagaatggctgcacattaatggaaagagaa

SEQ ID NO: 629873 - DNA, 90 bp, Homo sapiens
cctgtgatgttaaattcaaaaactacctcatccccaaggctggatctgctatgccgagaagactcacggcagcttcatcctcccccacat

SEQ ID NO: 629874 - DNA, 75 bp, Homo sapiens
agactgtcctattgcatctcaagccgagggccctcctggacccgggagcggaccctggtggcggtgaagcccgat

SEQ ID NO: 629875 - DNA, 75 bp, Homo sapiens
ccggacaaggagttccagaatgtcatgacctacctcaccagcatccccaggcaggtgacagcagggacatgtctc

SEQ ID NO: 629876 - DNA, 100 bp, Homo sapiens
gccgactacggccgcctcagcagccggctgcaggccagagagggcctcgggaagagatgcgaggatgacaaggactcacaccacccggcaagaactgctc

SEQ ID NO: 629877 - DNA, 101 bp, Homo sapiens
aaactgtcagaaaagagtagcctgggctgtctggaaatctgaggtgctggagaatctggtaaaagcaccattgtgaagcagatgaggatcctgcatgttaa

SEQ ID NO: 629878 - DNA, 101 bp, Homo sapiens
gcaagaactatatcagccagtattctgaaattgctatccagatgatgatgcacatggatctgctgtatatccttccaactcacattcaggcagcaagagcc

SEQ ID NO: 629879 - DNA, 74 bp, Homo sapiens
gaagattttgctattgatttgaatgggaagaaatatgcatggcaagtacgaattggagcaatgttggcttatac

SEQ ID NO: 629880 - DNA, 51 bp, Homo sapiens
tttccataagttttactttgagaatctgctctggtctggggtctctctgtg

SEQ ID NO: 629881 - DNA, 103 bp, Homo sapiens
ggttgggctgtgacgctgctgctggggtcagggcaatgacatcattgcagcagccaagcgcatggctctgctgatggctgagatgtctcggctggtaagaggg

SEQ ID NO: 629882 - DNA, 75 bp, Homo sapiens
tggacacttttgcttgcagttaggtcaagtggaggtgacagagctgaatgaacctctctccaatgaagatcgaaa

SEQ ID NO: 629883 - DNA, 75 bp, Homo sapiens
tgattcaagtgttggcggatggaagggaggagactcctgaccctcagaatgctcctccatttacaacctacaaag

SEQ ID NO: 629884 - DNA, 100 bp, Homo sapiens
gcggagaccgcaggctgaccccgcagcggccgggctgtcgcggcccccacctcagacactacaacaacaggagtgcaaacttctctacagccgaaaagag

SEQ ID NO: 629885 - DNA, 83 bp, Homo sapiens
gagccagtccagaccctgctgctgtcttcaaagaaggtgaattttattgtgagtgactctggagcacatgttttaaattcttg

SEQ ID NO: 629886 - DNA, 75 bp, Homo sapiens
aaggcagactttttgatattcagagccttggaagtcaacactgtcagtgcaggagaacccggggaggaggcccag

SEQ ID NO: 629887 - DNA, 50 bp, Homo sapiens
caaccacctcaaagacactggttatgcagacaatctctttgaacatgaat

SEQ ID NO: 629888 - DNA, 101 bp, Homo sapiens
ggcagtggagtatttccaggacaacagcccagacagcccggaactcaacaaagtgacttgttcgctgatatctaaattaagaagttggttcttgagtgaat

SEQ ID NO: 629889 - DNA, 82 bp, Homo sapiens
cgccaggacaatggggacccgggacgacgagtacgactacctattcaaagggaaatcctcattgacgattcaatttgttgaa

SEQ ID NO: 629890 - DNA, 90 bp, Homo sapiens
ttaaggtgtttgttgacctcttacctgctacacagtgtacaaaagaagagctaaagatggctgaatttctagatgaccaggaaactcgac

SEQ ID NO: 629891 - DNA, 100 bp, Homo sapiens
gcctcccgaatagctgggactacaggcatatatggtgctggttgtctcattacggaaggatgtcgtggagagggaggcattctcattaacagtcaaggcg

SEQ ID NO: 629892 - DNA, 90 bp, Homo sapiens
aactcgcgcaggtcctgcccccagatactctgcccaaccgcacggtcaccctgaaatttggtgagcggcctccacctaaacgacttacta

SEQ ID NO: 629893 - DNA, 75 bp, Homo sapiens
accgtcaccaacacccgcttctctgtggatgaagacaccaactctacaacattacctgtcatatactgaagaatc

SEQ ID NO: 629894 - DNA, 98 bp, Homo sapiens
tgcgcgccagagatcccagactgcgtggagcagaatgtggccccgtcccagagcaccacccgagacatcaggagcccatcgtgggctagggaagatcc

SEQ ID NO: 629895 - DNA, 83 bp, Homo sapiens
agccacctccacagtgactttgttgagtgtcaaaacatcctcaagcagaaaaatatggctcaggagactaaccagaccccggg

SEQ ID NO: 629896 - DNA, 87 bp, Homo sapiens
ctttactccatgtgtgggacattcattgcggaataacatcggaggagaagacccaacatgagtgaagtttcctgcaagaaacgggac

SEQ ID NO: 629897 - DNA, 75 bp, Homo sapiens
tagccagactcagggatcaaagagcaaacagattcagtggcctgcattgctccttgacctgtttatggtttggga

SEQ ID NO: 629898 - DNA, 101 bp, Homo sapiens
agccgtgcccgttcttcctggagggaaagtgccgctttaaggagaactgcagtctgaagttgcagccggagtgaagaagagcggaccgctgcccagtgctg

SEQ ID NO: 629899 - DNA, 90 bp, Homo sapiens
cttcttcctgcaccatttccagcaacggccctgggcagaggagagagagtggatttatggtctgtggggtgcattatgggagaaatggtt

SEQ ID NO: 629900 - DNA, 100 bp, Homo sapiens
tttccaagtctcttaaggagcgattaggcatgtcagctgatccagataatgaggatgcaacaggatcagatgtggccgcccagcagttgtgcacatagga

SEQ ID NO: 629901 - DNA, 100 bp, Homo sapiens
ttcggtcatctaaaggaggttttaaacagtataacagattctctaaccatggcacaggtagagaaacgtggaggtttgctccggaaatcttcagcctcca

SEQ ID NO: 629902 - DNA, 75 bp, Homo sapiens
tgatgctcgatgtgtgtttgacatggctctatacacagaatgggattttacatatgctggacagaaataagagaa

SEQ ID NO: 629903 - DNA, 100 bp, Homo sapiens
tttaatcaataaactgaataatgatgataatgtagatggcctccttgttcagttgcctcttccagatgtgagctgtgatgaatgggccttctctttgctg

SEQ ID NO: 629904 - DNA, 90 bp, Homo sapiens
cgacaagaaaaacaatcgcttcaatgatgggaaggtggatcccgccgggaggtactttgctggccggagcctcaacagaaagctccttta

SEQ ID NO: 629905 - DNA, 82 bp, Homo sapiens
cgacgtcatcatgctgaccaccaatcagatccgtaaggctgaaggggatgctaagggagataaagcaaaggtgaaggacgaa

SEQ ID NO: 629906 - DNA, 123 bp, Homo sapiens
tgaaatcaacctgatcgcttaccgagaagcccacaattactcagcgctgccattttatttcactgctaggtcaggcagctcgaaacatggtactccaggaagatgccatcttgcactcagaag

SEQ ID NO: 629907 - DNA, 95 bp, Homo sapiens
atcaccattaactaccgtctgggaatactagccatgggctccccaaaggaagtcattttctcagacatcactgaaaattcggctactgtcagctg

SEQ ID NO: 629908 - DNA, 83 bp, Homo sapiens
cggagattggctgcctcatccgcttctatgcagagcccaggctaccagagcacctgtccctcggccgcctggtacagctccca

SEQ ID NO: 629909 - DNA, 98 bp, Homo sapiens
aagagaccctgcaaagatcctgggagaccaaggccaccatggcggagctgcaggaggtgcagatcacagaggagaagccactgttgccaggacagacg

SEQ ID NO: 629910 - DNA, 90 bp, Homo sapiens
ccctctccgccccccaggaggggcgagagggagccgcagctgatgtcaggcacgtggactccctttaatccagtgactgtcaggtcgatc

SEQ ID NO: 629911 - DNA, 92 bp, Homo sapiens
gagcacataacggggttcgggtgtctcgtgtgtgaacatcacagttacgccccatggtgtccatcctgccagcagactgattcagaatggga

SEQ ID NO: 629912 - DNA, 100 bp, Homo sapiens
aagacttaacactgcaacaacaggtgcaatggatgagcttcatagtctggatccaagaaggcaagagttattggaagctagatttactggagttgcaagt

SEQ ID NO: 629913 - DNA, 100 bp, Homo sapiens
ccgagaagccagtcacgccgggagctggtacacagcctcagggtccacatatagcctcagttacattagctgcttatgaatgcaattcagttaattttcc

SEQ ID NO: 629914 - DNA, 80 bp, Homo sapiens
gaactgtaagctggctaccagggccaagccgtgcttcctcaaagactgggaaatgcacgtccacttcaaagtccacggca

SEQ ID NO: 629915 - DNA, 75 bp, Homo sapiens
ggcaactggaggtcaaggcgaatatttaacttatatctgcctgtcaggtactccaaagattcaggtttactcacg

SEQ ID NO: 629916 - DNA, 87 bp, Homo sapiens
ttaggtgcttttatattcatctcaaaaacaaaattctgaactcaggacttggcaaacacgttggtcgtcattgcctccgagcccact

SEQ ID NO: 629917 - DNA, 100 bp, Homo sapiens
tttggggcagaatacagagatatggaatcagatgttgatgatggagacacagtgacagatttcatggcccaagagcgagaaagaggcattactattcaat

SEQ ID NO: 629918 - DNA, 98 bp, Homo sapiens
gccaacattatgcgaagaactttacgtggacatcccatttaattctcagaagccgatcacaagacattccgtccagctgctatgctgatagaacgatc

SEQ ID NO: 629919 - DNA, 74 bp, Homo sapiens
tcacaccccgacggcagtccatgacggtgaagaagggagaggtcagcccaaggccaaccccactgtcactctgt

SEQ ID NO: 629920 - DNA, 101 bp, Homo sapiens
aagtattttagagtccaccagatcatccatgtgagtgaccatgcagcaaaagaaggagggtcctctcagtgattaagggcagctttggaagaagtagaagg

SEQ ID NO: 629921 - DNA, 96 bp, Homo sapiens
gaacatcctacaaagcatttagtacaagatggaaagtggggcagcaccaaaacaggagagcaggacggtctcataggcacagcgctgaactgtgtg

SEQ ID NO: 629922 - DNA, 75 bp, Homo sapiens
atctgcccacccctcctgtaacccagcctgtttcacttcttgttgcctgtgtccctggagtgttacacagtgcct

SEQ ID NO: 629923 - DNA, 83 bp, Homo sapiens
ccgctcctaagcctgcacagccgcggcggcagcagcagtgagagaggctgtgatcaatagccaggaatggactttgagccgct

SEQ ID NO: 629924 - DNA, 75 bp, Homo sapiens
caccggtttctcctgcttcatgtccaggtcaagacctcgtctccgttctcatagtcgtagcagtgaaaggtccag

SEQ ID NO: 629925 - DNA, 101 bp, Homo sapiens
tctcgtacatcggcgagggcgcctacggcatggtgtggtacctgcaccagtcaggggccctgaccatggaggccctggaggacccttcccccgagctcatg

SEQ ID NO: 629926 - DNA, 90 bp, Homo sapiens
cttcatgcctgtcctgggatttggcacctatgcgcctgcagaggattaaactgcaaatatctcatgaagctgctgcctgtatcactggtc

SEQ ID NO: 629927 - DNA, 82 bp, Homo sapiens
gggcaaactaagccgattttccggaaaaaggacacacacctcctctacgtactggcagctgccaacctgtatgcccagatgc

SEQ ID NO: 629928 - DNA, 75 bp, Homo sapiens
cagacgcggcacagagagggcctgggagcttgctgcagcttcagtgctctggaactgaacccgcagtatcttcca

SEQ ID NO: 629929 - DNA, 85 bp, Homo sapiens
atccaacaagaaaaagacctgtggctattaagataggctgaacaatgccgcaaaatatctgccagtttacagtcccaaagtcccg

SEQ ID NO: 629930 - DNA, 75 bp, Homo sapiens
taagcagatgctccagtttgagaaacctggatctgcgatctgtttgtgatggacttcagcagaaatctttatgat

SEQ ID NO: 629931 - DNA, 74 bp, Homo sapiens
gcctctggctcaagcccaggctttggtcaccagtgagctggagaagttccagtttctcagcaggttgtgtggcg

SEQ ID NO: 629932 - DNA, 75 bp, Homo sapiens
gagtaatcgcctgctttgattcattgaaactgtgctccattgaagtgacttgtgaatcagccagtgtgatggctg

SEQ ID NO: 629933 - DNA, 82 bp, Homo sapiens
cttcgatgttcttctaatactcctcctctaacatgtcagcgttattgtaatgcaacacctgtggaatcctctcaagaggaac

SEQ ID NO: 629934 - DNA, 82 bp, Homo sapiens
ctgaaccaccggcctgtgactgctgtggagatccagctgctgaactacctgggcccccctttcaacgagccagacttcaacc

SEQ ID NO: 629935 - DNA, 100 bp, Homo sapiens
tatgtgaaggtgaaagtgaatttctctgatagagtcttcaaagctgtttctgacatctgtaagacttttagtctctaattaacagaagatggcaaagccc

SEQ ID NO: 629936 - DNA, 76 bp, Homo sapiens
cagattcattctattcttgcaaagattggaccaaaagcaccaacaatgtttagcagtattcagcagagtgaaattt

SEQ ID NO: 629937 - DNA, 83 bp, Homo sapiens
ggatgagggagcccttcggaagctggattttttatcaagcagaaatgcatcgaacaacgagaatcaagatcactgagctaaat

SEQ ID NO: 629938 - DNA, 51 bp, Homo sapiens
gtacagcaagttctttgacctgcaggtgaaagaagaacgtccagaaaaaat

SEQ ID NO: 629939 - DNA, 51 bp, Homo sapiens
tacctcaacaagtacatcctggacaagagtgcctggtgaagaatgtgatgg

SEQ ID NO: 629940 - DNA, 80 bp, Homo sapiens
cagctcccctgagctccaggaagcacgttctctacgtggagcacagttttaattgataaagaccagagtccaaaatggaa

SEQ ID NO: 629941 - DNA, 98 bp, Homo sapiens
gctcctcccagcacacccacgtggaaggtccatccgagtatatcatggagacagtggatgcccagcatgtgaaggcctgggtgtctgacatccaagaa

SEQ ID NO: 629942 - DNA, 119 bp, Homo sapiens
ggaagaccgcgcgcagggcctgcagcgggagctggacggcgagcgcgagcggcgcgagaaaatataacacgtgggaaccggaggagaacatcctggaccccaggctgctgatcgccttc

SEQ ID NO: 629943 - DNA, 75 bp, Homo sapiens
acgtagtgagcgaggacctggtacaacaggatgtccagtgagaaagatcagtctaaagaaaaggagaagaaagtg

SEQ ID NO: 629944 - DNA, 117 bp, Homo sapiens
agaagaggtcccaatcccccactctttccgccctaatggaggtctccagtttcgggagagacaaaggcagcgctgccctcgggggagtattggccctggcggaacgcagcaaccacg

SEQ ID NO: 629945 - DNA, 83 bp, Homo sapiens
ctgagcccgtccgtccgccgccaccacccactccggacacagatcagaccaaacattgtctggcttgcactgtaaaactagtt

SEQ ID NO: 629946 - DNA, 75 bp, Homo sapiens
ggcagtatccttggggcactgtgcagggccgcaatgtttaccgaatgctttttaagagcaaagcatatgagcgga

SEQ ID NO: 629947 - DNA, 82 bp, Homo sapiens
ccaagctgtacagaagtcagaagaaggccatccattcaacaacacagtcactcctggcggcaaaccaaacaaaaccagagtc

SEQ ID NO: 629948 - DNA, 50 bp, Homo sapiens
ggcagaggtggaggcgctttgaaaggttactataacaacagtaccaaggt

SEQ ID NO: 629949 - DNA, 100 bp, Homo sapiens
gtctgggaccattgtacaggatcattaatatacagttcatctgtgttatcagatgttgtaaattttgatgacatagcttcctcagaaaacttgcttcatc

SEQ ID NO: 629950 - DNA, 100 bp, Homo sapiens
ctttcctgttggaaaaggcaatcactagggaagcacagatgtggaaagtgaatgtgcggaaaatgccttcaaatcaggagacagtgtttcacaaaatgat

SEQ ID NO: 629951 - DNA, 83 bp, Homo sapiens
cagcgctcggagctggaggcccacgtgggagcagtgagcggctgtgatgatgaacagtctacacagatggctgcaagttggga

SEQ ID NO: 629952 - DNA, 96 bp, Homo sapiens
aggctgatccctacaccaccaccaagcgctacaacctgcaaatctatcgtaatgagaggccctaagatcccagaggatgccataagaggaaaagtc

SEQ ID NO: 629953 - DNA, 98 bp, Homo sapiens
ctccaggcttccgacggcctggtcctgtgtttgaggaaccactggccaacctgttaaatgaacaacatcggacagtgaaggagctatttgaacagctg

SEQ ID NO: 629954 - DNA, 75 bp, Homo sapiens
cgaccccgttctgcggccgttgagtagttttcaattccggttgatctttgctgggaaacagctggaagatggacg

SEQ ID NO: 629955 - DNA, 75 bp, Homo sapiens
tgctgttttagagctggcagcagcatctcagcccaagagaaggactgctgtgtaagctatggtggcatgtggtac

SEQ ID NO: 629956 - DNA, 75 bp, Homo sapiens
caatattgaaggtgccccaggggctcctattggaaataccttccagaaaatatttacaccagcagctccagttca

SEQ ID NO: 629957 - DNA, 73 bp, Homo sapiens
tcctgcacaccattggcaaaactgtggagtatctgcactcacagggggtatcgaaggatgatcgcagtgatgt

SEQ ID NO: 629958 - DNA, 74 bp, Homo sapiens
tttcgagactcagaaaccagagtgtgtttaacttctgtgctattccacaggactcagaattcatgattgaagaa

SEQ ID NO: 629959 - DNA, 98 bp, Homo sapiens
acagaacttcaagcagaaagtggtagcgctgctgcggaggttcaaagtgtccgacgagatcctgcactggatggatcagcggacaacacacagaccgg

SEQ ID NO: 629960 - DNA, 90 bp, Homo sapiens
cgctgcctacggaggtggcagccatctccttctcggctccctgactggcagtcctcacctttccgagctgtctgtgaactcgcagggggg

SEQ ID NO: 629961 - DNA, 82 bp, Homo sapiens
cagcagaatttatagaggaatgttatgaaaacctggccttcctggagaaaagaaaccttgtttattccctgtgaaaatgaga

SEQ ID NO: 629962 - DNA, 98 bp, Homo sapiens
ctggagccgcctccggaagaggggaccggagaccgcggggacctcggagggagcccggcggcttcgggcacgtctgagaatggtggatgtggtggaga

SEQ ID NO: 629963 - DNA, 51 bp, Homo sapiens
gaaaataagtcctgttgcaccagcagcagctgtcgattcggcagaccgaag

SEQ ID NO: 629964 - DNA, 100 bp, Homo sapiens
gtagccggtaacaaacgagggttcccgggattggaccgacgcagccatgaaactggcgatggaatatgagaggagccctctggaaagaaaaggacagacc

SEQ ID NO: 629965 - DNA, 98 bp, Homo sapiens
ttaagggactcaggcagtacgggaagaacttcttcagaattagaaaggagctgcttcccaataaggaaacaggacagtatgatttggtgaaatgcctg

SEQ ID NO: 629966 - DNA, 75 bp, Homo sapiens
gagcaagtctgtcagcaccatctttctaacatttttggctttcacccccaaccagtgaccaaagacttgaccact

SEQ ID NO: 629967 - DNA, 50 bp, Homo sapiens
cctgctctcaactacaacatcgtttcaggataattttccccagatggccc

SEQ ID NO: 629968 - DNA, 80 bp, Homo sapiens
ctcaacagctttggtcagagtccctacctcgagttcccggggactgtccacctgggtcgcaatggaagaagagatcgccg

SEQ ID NO: 629969 - DNA, 95 bp, Homo sapiens
agattgattgatcctccagaattagacactcacatgttaacagttgatactgcctctccaagcccaatggaaacatctggatgtgcccctgcaga

SEQ ID NO: 629970 - DNA, 98 bp, Homo sapiens
atgaatggagcaaaatggcggatcatgtgcagaatatgacagatacctagcatctagcaaaataatggcagctgcttaccttgaccccaacttgaatc

SEQ ID NO: 629971 - DNA, 90 bp, Homo sapiens
ccttgatgaacagctcaaggtctttgtgtcccgacactctgccaccttctccagcattgtgaaaggtcctaggcctacttacaagcctcc

SEQ ID NO: 629972 - DNA, 100 bp, Homo sapiens
ggtgggaggatcgtgaatgacgaccagtccttttacgctgatgtgcacgtggaagatggcttgataaatggcaccctgtgctgcgcacactaaagaaccg

SEQ ID NO: 629973 - DNA, 90 bp, Homo sapiens
tgttggaatgccacaacctgatttctcctttcttaggatgccacaggggacggtattcagaattcgagcgcaggagctccgcttctccac

SEQ ID NO: 629974 - DNA, 90 bp, Homo sapiens
ccctacttcaagtactccgtcatgatcaacaaggccacgccctacaactacccaggtgaccccctccgcttccacgcccattatatcgct

SEQ ID NO: 629975 - DNA, 98 bp, Homo sapiens
agtggctcaacgagaacgccgtggagaaggtgaacatcaagccgcagcaacactttatggacagcagaataccttgcttaatcgtagctgcaaagtca

SEQ ID NO: 629976 - DNA, 87 bp, Homo sapiens
cagttcctgggaaggtggagccaccagcctctccctggtacagcctgtacacccgcacctggctcgggtacctcttctaccgacagc

SEQ ID NO: 629977 - DNA, 74 bp, Homo sapiens
aaaggcaagagtaacagcagcgccgtcccgtccgacagccaggcccgggagaattccaggatacacgtgccaga

SEQ ID NO: 629978 - DNA, 98 bp, Homo sapiens
ggcacctgtattgaccttgtgaaccatttcaagtgctcttgcccaccaggcactcgggaaataaactatcaatcttgcccagactggagaaaggactg

SEQ ID NO: 629979 - DNA, 97 bp, Homo sapiens
ctgatcgcctgggtggttgttggcgtgtccctgcagcgaaggatcctggttgcagcgtccgtctccaagagagtatgaagagagtgcgtctgtaggg

SEQ ID NO: 629980 - DNA, 100 bp, Homo sapiens
ggagcacgtcatcgccatcgaagatgcaacaaggagacgcgcctttgccctggtctctcaagcgtatacttcaatcatcgccgatgattttgcagccttt

SEQ ID NO: 629981 - DNA, 100 bp, Homo sapiens
gaggagccacctgcagtgcctgccccaataatgacaagtgtttggacaatctctgtgctagagttgggaagacatcactgattatgtctctggtcagtga

SEQ ID NO: 629982 - DNA, 83 bp, Homo sapiens
aaacaggcgccgcgggctccgcgcccggccggacccgggcccgaggagggtgtgaagacagagaatgaccacatcaacctgaa

SEQ ID NO: 629983 - DNA, 100 bp, Homo sapiens
aattcagcccagcgcactacctgctgcctctcctgcctgcgctggtcctcagcaccagagagccagctgctccccgggaacaacttcaccaatgagtgca

SEQ ID NO: 629984 - DNA, 75 bp, Homo sapiens
caccttcctcagtcgcgccgtgcaggaatcccttggcaccatgtcctgtgtgcattataaattttcctctaaact

SEQ ID NO: 629985 - DNA, 98 bp, Homo sapiens
cgatgagtggtctcggcaggctcttcgggaagggtggatgaagacctgatcattgaagttcaccagttatttttctcaagaatgtgaataacaatggg

SEQ ID NO: 629986 - DNA, 101 bp, Homo sapiens
agaaaactctagaagtctggatgtcggtgggcctctgagatatgccgtttacggtactatactggcaattgctggagaagattttgcaattgttgcttctg

SEQ ID NO: 629987 - DNA, 82 bp, Homo sapiens
aacaggggacaaaaccagccgctccgactccagggctcctgtctacgaccaggtggtcacagacctcaggctgtggatgcgg

SEQ ID NO: 629988 - DNA, 100 bp, Homo sapiens
cggtgctccgccagccccagcttggcgtcctgagaaatggtgatgtgtccaatctagatcccaacttctcatttgaaggcaccaaactggatgtggggaa

SEQ ID NO: 629989 - DNA, 80 bp, Homo sapiens
cgcccccgcggcggccgcgctcttcgcctgggttatacattggctcttcaaagacgttcacctcatcagagaaatccctg

SEQ ID NO: 629990 - DNA, 100 bp, Homo sapiens
gactggcggtgagcgcgagggaggctactgagaagcccggcgacggaggaacgcaggtctgctgccagataaacaggggtcacatgacgacagaagccaa

SEQ ID NO: 629991 - DNA, 97 bp, Homo sapiens
agccacccaggccttggtcctagcacccactcgagaattggctcagcagattatgtttgagaccttcaacaccccggccatgtacgtggccatccag

SEQ ID NO: 629992 - DNA, 75 bp, Homo sapiens
catattccttcatctaccatggctcagccgggaactctgaacctcaataacgagctctatcaaggcttgtcaagc

SEQ ID NO: 629993 - DNA, 101 bp, Homo sapiens
caggacctgacccaaccactgtctacgtggacatgagagccctgagacacgacagatgctgccactttggactctttcactgctgctgggagcagtagcag

SEQ ID NO: 629994 - DNA, 75 bp, Homo sapiens
gctggagagcctgttggagaaacacaaagagggattcgcaacagttcttgctgaagcagttacatccctggatct

SEQ ID NO: 629995 - DNA, 75 bp, Homo sapiens
cccaacattgaattgacctcgccacgcatgttcacctatgacaagttggatggcttgaggactggtactaaaagg

SEQ ID NO: 629996 - DNA, 75 bp, Homo sapiens
tctccagtcaggagcactggatgcaagtcggcagggaattccaatgcccactttcggaggcctcttcccctaccc

SEQ ID NO: 629997 - DNA, 96 bp, Homo sapiens
atgaagagtttagatctgatttagtcatcaagttccaagactatcttctttctcactgtgtcatggagaaactccagctgggcccagagattctgc

SEQ ID NO: 629998 - DNA, 75 bp, Homo sapiens
ctgaggagagtgagcgtcccctatccaagtagcctgctgtcgcccagccgcgctactctgacctacgacactctc

SEQ ID NO: 629999 - DNA, 83 bp, Homo sapiens
tctccgccgcggcactgatccccacagataacgaaggaggcccaacttcattcaataaggagcctgacggatttatcccagac

SEQ ID NO: 630000 - DNA, 101 bp, Homo sapiens
attcttccagtttctttatcctaaaactggtgtaacaggtatatttgcttacttaaactaccatgttcctcgaacgagacgagaaatcctggagaccctaa

SEQ ID NO: 630001 - DNA, 83 bp, Homo sapiens
agctggttaggaggcacagggcgtcggacctgcacgagctgtctgtccctgaagaggaaggagaaggaatatgagcatgaaat

SEQ ID NO: 630002 - DNA, 101 bp, Homo sapiens
tggaaacaatggcatttacagaaagagtcaacagcagtggcaacaggttcccaaaggtggtgtgacagagatctcagctgctgacaaagctgaggagtttc

SEQ ID NO: 630003 - DNA, 98 bp, Homo sapiens
aaagaagtagctcctgtcctcgtaaaatcagtgaagttctcacggacgacctcattgaggcaagttaaagtcttcagagccctgtatacgtttgaacc

SEQ ID NO: 630004 - DNA, 82 bp, Homo sapiens
tttagagctgcggaacaggacgccctctgatccgcttacaaacacgcagatggcaagaagattgatggcaggagggtccttg

SEQ ID NO: 630005 - DNA, 100 bp, Homo sapiens
gagcgacagtctttttgtgcttcatgtacagcgtgcggacaataagcaaaagggagatcattcgctgaaggaacatgagctcttggagcagcagaagcgg

SEQ ID NO: 630006 - DNA, 83 bp, Homo sapiens
tggagttgtacttaaatgcagacacaagggagagataatgcatgtgagaaaacttcatatatgtttctacgaaaggaacttcc

SEQ ID NO: 630007 - DNA, 75 bp, Homo sapiens
gaaaaggcttacattttcagccatcagttttagattttggaatacagcagacctgttatcctaaactaggtgagt

SEQ ID NO: 630008 - DNA, 50 bp, Homo sapiens
tgacagagaagatctttttgcaggggcaagattcttgccaagagaattaa

SEQ ID NO: 630009 - DNA, 100 bp, Homo sapiens
ggagtacggggaacaccactcatccatcatgcactgcagagggcttcagaggctgggaggtggagcatggcgggaacggctgggccatagaaaagaacct

SEQ ID NO: 630010 - DNA, 100 bp, Homo sapiens
ccatgaccagtgctctgcccatcatccagaagctagagccgcaaatactggagaaaatgaaactgggattgacccatcaagatgcttggctcaataagaa

SEQ ID NO: 630011 - DNA, 80 bp, Homo sapiens
gcaaacatgctccgccagatcatcggtcaggccaagaagcatccgagccccgttttacggagaagacttttactgtgaaa

SEQ ID NO: 630012 - DNA, 96 bp, Homo sapiens
gcaatcagaaaatcaagtaaaggaacccaacagagatctcttctgttctccactgctagggaaacagaagtacctgtgcgccagcagaaatgattg

SEQ ID NO: 630013 - DNA, 100 bp, Homo sapiens
ctgctggtggcaaccgcctacgagacactcaagtttgcccagtatgcggagatcgtccacttcaccctcccagatgggactcagaggagcgggcaggtgc

SEQ ID NO: 630014 - DNA, 100 bp, Homo sapiens
cggctctcttcctgcttctgctatttcgccggtgcatgctgctcagaaacaacgagttttcgtcgttcgaatcaggttgactggtccttcatccccccaa

SEQ ID NO: 630015 - DNA, 101 bp, Homo sapiens
ctctgtcagctctttccccgtcagcatcccagccgtgctcacggttggcgctgtacgtttatgagtacctgctgcacatcggtgcccagaagtcagcccag

SEQ ID NO: 630016 - DNA, 97 bp, Homo sapiens
tattctgaactcaacttctgaaatttacagaaacaaactacatctcagggagaacgcccatataaatgtgaactttgtccttactcaagttctcaga

SEQ ID NO: 630017 - DNA, 83 bp, Homo sapiens
aaaaagggtgcgggacccctcctcaccgtgcggtcacggacggcccacctccatggagacggcccacggcctcgccaccacca

SEQ ID NO: 630018 - DNA, 50 bp, Homo sapiens
gtttgtttttacctctgcctcctgaatgtgacagtgatgataacatgggt

SEQ ID NO: 630019 - DNA, 100 bp, Homo sapiens
cttgttcttaaccacctggatttccatctggatgttgctgtgatcagtctgaaatacaacttaattcagtgcacaaatgagatgaatgtgaacatcccac

SEQ ID NO: 630020 - DNA, 75 bp, Homo sapiens
cacaaagcatggagaccctccctccagcatctgggctgatgggccgtaccctgcaccgtgagccacccgcaggag

SEQ ID NO: 630021 - DNA, 100 bp, Homo sapiens
agcctggctcgaaacatctgaagggttcgcagtgataaaggaggcatttgacagcactagcaggaatccatcaacagcatcaagtccagactaagcaaaa

SEQ ID NO: 630022 - DNA, 97 bp, Homo sapiens
aacttctgctacagacgactcataacaaatgtggcaattattttggatctatcacctgtcatcataactggcttctgcttgtcatccacacaacacc

SEQ ID NO: 630023 - DNA, 100 bp, Homo sapiens
caagctgcggaaattcatctttaaggacgaagagagtgaggagctggtttcacctgaggacctgctggagtggctgcggcctttctgtgctgatgacgcc

SEQ ID NO: 630024 - DNA, 82 bp, Homo sapiens
gcttccagatcaagagtataaggacagtcattttgtttactcattcagccctgttgcaggtcccaataaactcttcataagg

SEQ ID NO: 630025 - DNA, 119 bp, Homo sapiens
caacaatctagacctggtgatcattcgagagcagacagaaggggagtacagctctctggaacatgaggatcaacggccaccccgggaagtccacgcgcctggcgggcttgtggaagctg

SEQ ID NO: 630026 - DNA, 83 bp, Homo sapiens
gttgccattgaaaaccctgctgatgtcagtgttatatcctccaggaatactggccagattgtgaagaggtctcttgaagtttg

SEQ ID NO: 630027 - DNA, 122 bp, Homo sapiens
gggcagcctgctggaccctgccaagaagtcgcccatcgcagcagctcggactggtgaccagttagaaacatggagcagctctacctggatggaatgaactttaagaagcaggtggatctgag

SEQ ID NO: 630028 - DNA, 51 bp, Homo sapiens
tcttccagagaataagaagcagcctcttagcaatgcataccacgagttagc

SEQ ID NO: 630029 - DNA, 80 bp, Homo sapiens
attggtttgatgaaagagcatggtatccactaggaagaatagtaggtggtactgtggtccagcatgacccatgtcggggc

SEQ ID NO: 630030 - DNA, 82 bp, Homo sapiens
tgcagcctcgtgcggacgctcgtgcacagatacatgccttggttcaagggatggaaagtcacccgtaaggatggcaatgcca

SEQ ID NO: 630031 - DNA, 50 bp, Homo sapiens
actgtaagaagaggaaagacttgtctcagttctgtggaagcaaatcattg

SEQ ID NO: 630032 - DNA, 100 bp, Homo sapiens
gaaagaaaccgctgaggcttatttgggaaagaaggtgcaggtgatggtcctaccagtgtgtctgttgaggtcacccgtcctaaagtgacctccctgaaag

SEQ ID NO: 630033 - DNA, 98 bp, Homo sapiens
cagcatcgaccgcatgttcgacaagaatctgcaggacttggtccgcggcatccgtaaccacaaggaggacgagtaagactttgaccccgacgcaggct

SEQ ID NO: 630034 - DNA, 75 bp, Homo sapiens
ctggtccccagtgactccaggggaacaggacaaaggccatgatggggtcaaggagctggacagcctaaacagtga

SEQ ID NO: 630035 - DNA, 78 bp, Homo sapiens
ctaggtgagtcgcggtgggtcctcgcttgcagttcagcgaccacgggagtgcatccgccccaacccttttccccctcg

SEQ ID NO: 630036 - DNA, 100 bp, Homo sapiens
gtgggtctgtaggttaagggagaagatggcggcgctaggggaacccgtgcggctggagagaggaaactactaaagttcctggggaagcaaagtagaattt

SEQ ID NO: 630037 - DNA, 82 bp, Homo sapiens
ctgaattgtgctgccttggccaaaagagggagtgcatccgccccaacccttttccccctcgtctcctgtgagaattccccgt

SEQ ID NO: 630038 - DNA, 59 bp, Homo sapiens
tcatcaactgcctggatgaggaccggcagagctcttggagcagtcggagtggcagccaa

SEQ ID NO: 630039 - DNA, 104 bp, Homo sapiens
aacccagatttgaagttccggatgtcctcacaagcaagccaagcactgtaaggtactccaaagattcaggtttactcacgtcatccagcagagaatggaaagtc

SEQ ID NO: 630040 - DNA, 90 bp, Homo sapiens
gtgtgcccaggccctgaggtgggccggacctgggagtggcagcgtcaagggttccacactgttgggagtcgctgcaagaatcggacaggc

SEQ ID NO: 630041 - DNA, 96 bp, Homo sapiens
agcctggacccccttgcaaaggagccaggacccccagggagtagagacgaccgactggaggcctcgggcaagtgctgttggtgagagactctggag

SEQ ID NO: 630042 - DNA, 98 bp, Homo sapiens
aagacatgctgagtgaggctttaattcaggcagagatcctacaagaatccaggatgatgatcccagattgccagcgcaggttggaagccgcatatttg

SEQ ID NO: 630043 - DNA, 75 bp, Homo sapiens
actttcaacgggactattatgataggcatgagtacagtaccagaagttatcgttgcacggcactgtggacttcga

SEQ ID NO: 630044 - DNA, 75 bp, Homo sapiens
gtggaagctgggccagggattgggaaaatctcttcaggcaaaaaatggccccatttatgatgtagtttggaattc

SEQ ID NO: 630045 - DNA, 100 bp, Homo sapiens
agccgctggtcgtgttcgtcctcggcggccccggcgccggcaaggggacccagtgcgcccgcatcgtcgagctcggccgcctgtcagtgcaatgctgccc

SEQ ID NO: 630046 - DNA, 90 bp, Homo sapiens
ccgaaagcgtctgaaccggaatgctcgacggaaggcagcgccgcggatcgaatggtggaaccgtcccaaaatgtcccttgctcagaagaa

SEQ ID NO: 630047 - DNA, 83 bp, Homo sapiens
gaggtgttgtttactgcatcagaaactacagataacgaaggaggcccaacttcattcaataaggagcctgacggatttatccc

SEQ ID NO: 630048 - DNA, 82 bp, Homo sapiens
cagcccagcctcttatgagaacgtccgcgccaaggcgctgagatgcgtctggagagccagagggcctgcctgaaggaatcac

SEQ ID NO: 630049 - DNA, 75 bp, Homo sapiens
gttgctggaaaactctccgtctttgctaatggagtcgtgacttcaattcaggcaagtagcctgcagtatgaaatg

SEQ ID NO: 630050 - DNA, 75 bp, Homo sapiens
aaggcacagcggctgtatccgacgccgcgagttcgcggaactcgaatcatttatgacagaaagtttctgttggat

SEQ ID NO: 630051 - DNA, 100 bp, Homo sapiens
gtgtcttccccggccggtccctcgcctcccggccgagctgacgatgatgattattccccaccttctaagagacaaagaccaacgagccaccacagccacc

SEQ ID NO: 630052 - DNA, 100 bp, Homo sapiens
ctgcggccccggagcgcccggcggcggtttcggcgcgcggccgggctggcgatggaagatggaaggaaggagcgcagcgtcactctccagttcttcaaga

SEQ ID NO: 630053 - DNA, 75 bp, Homo sapiens
cctcccgcggcgcggcctctggctgctcctggacagttcagtttgttcagggaatttttgttgaaaaatatgacc

SEQ ID NO: 630054 - DNA, 90 bp, Homo sapiens
gcttccttcagctcctgtgtgaaaaccacaaccgagacctgcagcttgcagttccccacaatgatgaatggacccgatttgccaggaccc

SEQ ID NO: 630055 - DNA, 75 bp, Homo sapiens
tttgactactggggccagggaaccctggtcaccgtctcctcagcttttcctccgcaaccatgtctgacaaacccg

SEQ ID NO: 630056 - DNA, 75 bp, Homo sapiens
ccccattcattctggattggtggatctgaagtacaaaatattttccaggacaaatcccaatctgctgaaatatgg

SEQ ID NO: 630057 - DNA, 75 bp, Homo sapiens
gacttacggcagtgggggctgacagagctccacctcagatcaggcgtcccaatcgagaagtaagacctctgagga

SEQ ID NO: 630058 - DNA, 75 bp, Homo sapiens
aaggacatcatggttcatttcaagcaggcaaatcctgatcctaactgttgtcttggagtatttgggctgagcttg

SEQ ID NO: 630059 - DNA, 100 bp, Homo sapiens
ccctgttggttccaatgctgggattggctgcttttcgacactcatgaggaccatgatacttccactgagaatacagacgagtccaaccatgaccctcagt

SEQ ID NO: 630060 - DNA, 89 bp, Homo sapiens
gagatatctggccgcctctgccgcagctggagatcccagcatggtgagtgcctacatgtacccagcaggggccactggggcgcaggcgg

SEQ ID NO: 630061 - DNA, 90 bp, Homo sapiens
aaattgaacagtaccgcctgcagagggagaaagaattcaaggccaaggaagctgcgggtcccctcctaaccgcaagcgtcctgctaacga

SEQ ID NO: 630062 - DNA, 80 bp, Homo sapiens
cctagagacatgtcaaaaattagaacctcttcgccaaagccttaatttatctgaaaggctccaaccaggaatggagacgc

SEQ ID NO: 630063 - DNA, 100 bp, Homo sapiens
gctacattccaattcaagaggaggagaggggttgttttataaactgcctggccgaatcagccttttcacgctcaagatgttatacatccaggctctacca

SEQ ID NO: 630064 - DNA, 100 bp, Homo sapiens
gaagcacagagttcagaagactttaacatgggctcttcctctagcagccagtatactttctgtcagccagaaactgtgctctgccctacctaaccttgcc

SEQ ID NO: 630065 - DNA, 98 bp, Homo sapiens
tgtggattttgtcgctggacgtctagagatgtgggcatggcagacaaatctgtaggtatagtggaggattacaagccaccgttctacgatgtggttcc

SEQ ID NO: 630066 - DNA, 80 bp, Homo sapiens
agaccctggagcctcagttggaagcagccgatccagcctgcggagcctgtggggcaggacttgccggagcagccttactt

SEQ ID NO: 630067 - DNA, 100 bp, Homo sapiens
ggctgtcctggccaacctgctgctggaggaggataacaagttttgtgcagattgccagtctaaaggtgacagagctgaatgaacctctctccaatgaaga

SEQ ID NO: 630068 - DNA, 101 bp, Homo sapiens
gataaaaacaaggtggaagattcttccaaggaaccagtgcgaaggtctctaattaacagaagatggcaaagcccagccacagcagctatgtccttcagcag

SEQ ID NO: 630069 - DNA, 75 bp, Homo sapiens
gcagctgcctcagttcttagcgcagatggtagtgaaaacctttatggatatggatcaggactcagaagatgaaaa

SEQ ID NO: 630070 - DNA, 82 bp, Homo sapiens
ctcctaagcctgcacagccgcggcggcagcagcagtgagagtaccatggggcgcaagttggaccctacgaaggagaagcggg

SEQ ID NO: 630071 - DNA, 76 bp, Homo sapiens
tgcagttggatggcggtgactgcgtggtggtgaaaactattggcttgagggaagtttggttctttggtctgcagta

SEQ ID NO: 630072 - DNA, 100 bp, Homo sapiens
gttttttttgggtcaaacagcaaccttggtatgaagtgtggcatccaaaatcagaggattgtggtccatcaggagtctgtgtgtgccacctatggaagtg

SEQ ID NO: 630073 - DNA, 51 bp, Homo sapiens
acatctgccaaggagccctgggcaggaggaaaggcaggagccagtccgtgc

SEQ ID NO: 630074 - DNA, 137 bp, Homo sapiens
cttcagtcatctgtccttctccttgagtgatgaacaggagaattctcacaccctcctcagtcacaacgcatgcaacaagaaatctggatggagaagcagtatttatctcaaagagaagtggacctagaggcttattt

SEQ ID NO: 630075 - DNA, 100 bp, Homo sapiens
gccagaagcgggcggcgcgggggagatgggcgccctgcgtccggcagaggaggcgagcatcccgctcaggtgatgaggaacccctcgcgcacccagcgca

SEQ ID NO: 630076 - DNA, 98 bp, Homo sapiens
ggcaggctcgcctcctccagctgttgttgctgctgatgttttactgtgcctggctaactatagtcgagggggtgatggtcctatgtgtcgcccagtaa

SEQ ID NO: 630077 - DNA, 100 bp, Homo sapiens
ccagccccatgcagggggactctctgaagctgtgcaggctgcctgtatgaccctatcagatttggatatgtccttcatatttgattggatttacagtggt

SEQ ID NO: 630078 - DNA, 82 bp, Homo sapiens
ttttgtgaagagttatgtagaaaagacgatcaccttctccttattatagtcgatatagatcacgatcaagatctcgttccta

SEQ ID NO: 630079 - DNA, 98 bp, Homo sapiens
tttggtcccaggcatcatcacagttattgacaccgaaaccgttggagagggccagaaagcggcgtggagcttttaacagcaagcaacttctgtatttg

SEQ ID NO: 630080 - DNA, 83 bp, Homo sapiens
cccctgcccattctaggacagccggcgccatgtcagaaccggctggggatgtccgtcagaacccatgcggcagcaaggcctgc

SEQ ID NO: 630081 - DNA, 101 bp, Homo sapiens
ttgtatggtagcgataagtttgatttgccctatgggatgagaacatcagtgcctccggagccagcgtggtggccatagacaacaagatcgaacaggccatg

SEQ ID NO: 630082 - DNA, 100 bp, Homo sapiens
ggatctggtgtaccaggcgaagctggccgagcaggctgagcgatacgacggttttagctgacgctgtctcacgcctggtcctgggtaagtttggtgacct

SEQ ID NO: 630083 - DNA, 80 bp, Homo sapiens
aatcagcagctggggtggcaaacctagtcccttttcaaagctggatcccaagaaggggtagaagagccatccaaaaaacg

SEQ ID NO: 630084 - DNA, 78 bp, Homo sapiens
gtgccgtggagggcctcgccatgtcctgctgcccgaaggagctggcaaacagccctgactgtccccagatgtgtgcct

SEQ ID NO: 630085 - DNA, 96 bp, Homo sapiens
gagaagatccaggcctcagaggaggagaaaggccggagccagccgagacaatgcagatcttcgtgaagactctgactggtaagaccatcaccctcg

SEQ ID NO: 630086 - DNA, 80 bp, Homo sapiens
tcatggttggctctttctacatccctgggggctatttcagctcaggtgaaatgacaatggatgctctgttggctcgattg

SEQ ID NO: 630087 - DNA, 75 bp, Homo sapiens
gtcagcttcatcctcggcggcggtggccgctagctccaaggaagtcaggaagcatctaaatatggtgtcctccgg

SEQ ID NO: 630088 - DNA, 51 bp, Homo sapiens
ctgagaaccatgctcaccgaccctgatagaccatgaagctgaaggaacttg

SEQ ID NO: 630089 - DNA, 83 bp, Homo sapiens
ttgtgatcgaaaccctgaccggatcccataaacactgtcgggtctgcgcttcgcagccgggatgaagctggtttccgtcgccc

SEQ ID NO: 630090 - DNA, 82 bp, Homo sapiens
gccgccctgttccccgcgctgcggcctggcggcttccaggcgcactaccgcggtgcgcgcggagccatggttatcatgtcgg

SEQ ID NO: 630091 - DNA, 75 bp, Homo sapiens
cgcaggagactctcaacgggggaatcaccgacatgctcacaggtttttagaacttcagccataaaaatgggcaga

SEQ ID NO: 630092 - DNA, 99 bp, Homo sapiens
gcttcgatatctcatccaagactccagtattctccagaaggtgctaaaattgaaagtggactatttaatagctagtaaagccatcaataaggcctatga

SEQ ID NO: 630093 - DNA, 100 bp, Homo sapiens
ataacgatcaggtcattgccagcggttcagaggactgcacggtcatgatgaggtggaaagtgagaaatggtacctgtctacagacttcccttcaacatcc

SEQ ID NO: 630094 - DNA, 123 bp, Homo sapiens
aaaggagaacttcatccgcttctccaaatctctgggcctccctgaaaaccacatcgtcttccctgtcccaatcggttcgtcacaaggcatcgcagaaggtttatgctatgaagcttcttagta

SEQ ID NO: 630095 - DNA, 108 bp, Homo sapiens
tacagcaaactctgaaagatggacagagagacaggagatggtcctttataatgcagtgtgatctgtgctgcaatagagattggacgactgattattggacagaatggc

SEQ ID NO: 630096 - DNA, 74 bp, Homo sapiens
gctgagggggcgcgaggggaacggaggccagagctgcggccagctcgctggcacaaagccaagaaggttcagct

SEQ ID NO: 630097 - DNA, 83 bp, Homo sapiens
actggaaaagaccctcttcagacttgaacaaggaagcttattttcgatacatggcagaaaacccaactgctggtgtggttcag

SEQ ID NO: 630098 - DNA, 50 bp, Homo sapiens
gtctatgtggcgcccggcatagttttcggctttgtgagaaaccttaccat

SEQ ID NO: 630099 - DNA, 75 bp, Homo sapiens
agaatgctcagaattaagtgaatttgtgtctagaaacctctgtagaggagcaggatgcaaccgacaggctgtggc

SEQ ID NO: 630100 - DNA, 98 bp, Homo sapiens
cacccgcctcatccaaatgagacccttcctggagaaccgggcccagcagcactgggggcctcatcctgtaccaccagcaccagcacagctgctgtgag

SEQ ID NO: 630101 - DNA, 100 bp, Homo sapiens
cctgttaaaaccatatgaaagcgtgatgaaggtgaaagcatgtattgccaatgtagaacccaaccaaacagtggagatcaatgagcaagaagcattggaa

SEQ ID NO: 630102 - DNA, 84 bp, Homo sapiens
gccggctatggccgtgccctggggctgagccctcaggagcaggccgggctctcgccatgggtcactgtcgcctctgccacggga

SEQ ID NO: 630103 - DNA, 75 bp, Homo sapiens
gcgtctgcgcttccccatggggctggcctgcggcgcctgggcgctctgagaattgccattgccttcagaaagtgt

SEQ ID NO: 630104 - DNA, 75 bp, Homo sapiens
accttccggagcttctcagaagacagagggttttcttttgaggctcacagaacatttcctgcctgttgctcacac

SEQ ID NO: 630105 - DNA, 74 bp, Homo sapiens
ccccccttccccgcagacgtggagaagcaaatgctggcacaaggataccctgcttacacgacatcgtgcgcctg

SEQ ID NO: 630106 - DNA, 83 bp, Homo sapiens
catttacagaaagagtcaacagcagtggcaacagcattttgaaagcgaagcagaagccgtagaatcagcggcgagcctgttga

SEQ ID NO: 630107 - DNA, 75 bp, Homo sapiens
cacaggtccagggcagaggaccaacatgggcattttgtttatgagcaaggtggtgctgtcccggcagtacggctc

SEQ ID NO: 630108 - DNA, 82 bp, Homo sapiens
ccaagcccctgtcccctacgtcctacatgagatccggaacatggtggcggtgctggaagtcatctccagcctggagaaatac

SEQ ID NO: 630109 - DNA, 75 bp, Homo sapiens
cgagacctgaccttgcagtacaacatctacaatgttggctcaagctaccagagattcactgactgctataagtgc

SEQ ID NO: 630110 - DNA, 74 bp, Homo sapiens
agatccccatggacaacaaggaggtgctgcagaaattggggaaagctgtagaaaccaaagatgaacgatttgaa

SEQ ID NO: 630111 - DNA, 113 bp, Homo sapiens
attggatttaaaagacagtcctcgtcagcactgactttcagctatggaatcgccctgaccctctattctgcaccctgtgagccaccgagactgaaccaaacccaggaagcggc

SEQ ID NO: 630112 - DNA, 100 bp, Homo sapiens
ccggagcaagcggagctcccccaagagccggaaagggagactgccagactcgggaggaggcagtggcgctcggcgtgggtctgtgcaacaatggcttcat

SEQ ID NO: 630113 - DNA, 82 bp, Homo sapiens
agcagaatgtgatttgcttgaagatatgagatatccctcctaaatgtacaatcaaggatttgctaccaaaagagaagagcag

SEQ ID NO: 630114 - DNA, 97 bp, Homo sapiens
gcgcgggtcggagtctgggggttcgcgcccgccgacccgcgccctgctccctctcagcacctgggcggacgtagaaaacccctttggtgaaacattt

SEQ ID NO: 630115 - DNA, 100 bp, Homo sapiens
tcgacgaagcttaaattttggtctgaagatgatgagaaactgaaaaagaggaaggagcgatttgggattgtcacaagttcagctggaactggaaccacag

SEQ ID NO: 630116 - DNA, 98 bp, Homo sapiens
gaagatggcgacggccttgagcgaggaggagctggacaatgaagactattactcgttgctgaacgtgcgcagggagttgcagaatgaagaagagtctg

SEQ ID NO: 630117 - DNA, 82 bp, Homo sapiens
tggttcattgctgctgacggtggtccaagagtgtccttctaccagctggaagcccatgaaacctttaatgagtggtttaagc

SEQ ID NO: 630118 - DNA, 82 bp, Homo sapiens
ggactccttcggcagtccacccaccgccgccgcctcccaggagctgacatggacccaaatcctcgggccgccctggagcgcc

SEQ ID NO: 630119 - DNA, 102 bp, Homo sapiens
ctttgcacaagaagcaggccggggctgcctacgtgccagaactcacccaacagttccctctgaaggttcaatgtatctatgcctgcctacctcaatctgcaa

SEQ ID NO: 630120 - DNA, 75 bp, Homo sapiens
gttcggttcccacaacagcctgttgctctaggtcgtaaccagcctttgaaaaaggagaaaccaaaatggaaaagc

SEQ ID NO: 630121 - DNA, 75 bp, Homo sapiens
tgggaattgcttcgtttgccattttcttatggagaactgtccttgttaattctatgattgaagcctctaaatgaa

SEQ ID NO: 630122 - DNA, 95 bp, Homo sapiens
ctaaatttgaggaagaacgcgccagagcaaaatgggacacatgtgggccaaactgaaattgcagaaggcttcagaacgatggcagcctgacactg

SEQ ID NO: 630123 - DNA, 75 bp, Homo sapiens
cacagaatcctcccgtctcaggctcccacatagccaggactacaggtaactgcgtcattgattggctggtatcca

SEQ ID NO: 630124 - DNA, 100 bp, Homo sapiens
tcgccgggcagactttaatcggggtggtggcaatggtcgtggaggccgagggcgaggagtgacccggggccagagcgggacctatggctgcagagtggag

SEQ ID NO: 630125 - DNA, 100 bp, Homo sapiens
atttacctgtgagatgtttcatcccaacagtcagaaagcaacattgaatgcagaagaaatggcggacttctacaaggaatttttaagtaaaaattttcag

SEQ ID NO: 630126 - DNA, 83 bp, Homo sapiens
ccaaaacggaagaaactgcaggaggagattctgttgaggtgtgatgaatgcagactctgctaccattttggctgtttggatcc

SEQ ID NO: 630127 - DNA, 100 bp, Homo sapiens
tgagagtcgaattggagaacttgttggagtgctggtgaatcatttcaagagacagctgatactgattctggaactctatagtcccaatgatgtttatgat

SEQ ID NO: 630128 - DNA, 101 bp, Homo sapiens
gaagcagccgatcatggcggatggcccccggtgcaagaggcgcaaacaagccaatcccaggaggaaaaacggcatagaatgtcaagctaaccaggcgtccg

SEQ ID NO: 630129 - DNA, 73 bp, Homo sapiens
cgaggtcttcgggaattccagcgagggtggccacaaagcgggcacaggcctggtgctacagcaaaaacaacat

SEQ ID NO: 630130 - DNA, 121 bp, Homo sapiens
tgcccttccatctacaaaagctgagtttacttctcctccttctttgttcaagactgggcttccaccgagcaggaaaatgtttataggaggccttagctgggacactacaaagaaagatctg

SEQ ID NO: 630131 - DNA, 85 bp, Homo sapiens
ttcagaaatcagaaaaacatttgggaggtgtctagcccagtggaccttctgaagctggtgctgccagaatactccatccatagcc

SEQ ID NO: 630132 - DNA, 100 bp, Homo sapiens
caaatctggaacgggtggccgattactgcgagaacaactacatacaggtaaagggagaagatgaggaagagaacaatttggaagtacgtgaaaccaaaat

SEQ ID NO: 630133 - DNA, 50 bp, Homo sapiens
attcaagacttcaaaacccattttcttggacctggtgtcaaagatgcttc

SEQ ID NO: 630134 - DNA, 100 bp, Homo sapiens
ggcgggcggcgcggccgtggtcatcaccgaacccgagcacaccaaggagcgcgtcagtgtgaacatggctacgcctcttcattcccgtccatgccgagcc

SEQ ID NO: 630135 - DNA, 100 bp, Homo sapiens
tattaaaagttaaaactgaaattgaagaagagctaaaatctctggacaaagaaatttctgaaggaatatattaaaggaatctgtgaacctgaactagaag

SEQ ID NO: 630136 - DNA, 74 bp, Homo sapiens
ccccaaaatcagtgattctacatctcaagctcatattttgaagtgtttacgggaaccgcggggaaaggcgaatg

SEQ ID NO: 630137 - DNA, 88 bp, Homo sapiens
cacctaacagtggacacttatgttatttgaaggattgaaggcatttcgaggagtagataataaaattcgactgtttcagccaaacctc

SEQ ID NO: 630138 - DNA, 100 bp, Homo sapiens
tccaactgaagaaatatgtaggagctgtccagatgctgaaaagagaaggtcaaacagctgaaggtggaaaacgaagctcattcccaacgtgcaaagccaa

SEQ ID NO: 630139 - DNA, 97 bp, Homo sapiens
aaatcttttgtgaaagtgtataactacaatcacctaatgcccacaaggccaaggtgatccgtgacaagcgcacaggcaagaccaagggctacggctt

SEQ ID NO: 630140 - DNA, 76 bp, Homo sapiens
tgaaaatgctgcacatcccttaatagtcatctacatagattaaatcggatttctttgaactattatctaatcatca

SEQ ID NO: 630141 - DNA, 78 bp, Homo sapiens
tttcagctaacagtaaccccaggggatgccaacagacagatcagcgacctcaaatttaaacttgcaaaatctgagcaa

SEQ ID NO: 630142 - DNA, 100 bp, Homo sapiens
gccaccccgaagagttctacaacctggtgcgcttccggatcgggggcaagcggaaggtgatgcccaagatggaccaggcaaatgttctgaaaaagactct

SEQ ID NO: 630143 - DNA, 75 bp, Homo sapiens
tcttggctctcaacttattcccttcaattcaagtaacaggatttacattaaaaaggtacagaagtttcctgaata

SEQ ID NO: 630144 - DNA, 98 bp, Homo sapiens
agagcaagagctgtagagtctagccctggggtgaggatgccacggctacccggctgttttggaggtgccctgggttaccttttgggtgctatagactg

SEQ ID NO: 630145 - DNA, 100 bp, Homo sapiens
gagcagcagtgagctcttcaccatctctgtgaatggcgtcctgtacctgcagtgtgaagcagtattctggaaagtttttctaagactagtgaagaactga

SEQ ID NO: 630146 - DNA, 80 bp, Homo sapiens
gaacaaaccttacctttattggagacaaaaccgtgaccaagaatatggcccaggtgaccaaagccctggacaaggccctg

SEQ ID NO: 630147 - DNA, 100 bp, Homo sapiens
ctctgagaaggtggatgactatgaacatgcagcaaagtacatgaagaacagtcaagtaaggttacctttggtattctcaagatatgaaaaacataggcag

SEQ ID NO: 630148 - DNA, 90 bp, Homo sapiens
aacccgaggcggaccgggcgacgaggggtcgggccccggctcagtggtcccaggcagctcgggtgtcggaacccccagacagttcacgcg

SEQ ID NO: 630149 - DNA, 75 bp, Homo sapiens
cgggccaaatgacaatgatacagttagaggacagatagtagaacaagttgaaatcatcgcagaaggataaagttc

SEQ ID NO: 630150 - DNA, 74 bp, Homo sapiens
aaaaagaggaaagtggactgtccggggccgggctcaggagcagagatgccatggacaatattaccaggcagaac

SEQ ID NO: 630151 - DNA, 96 bp, Homo sapiens
gagggagttaaggacattccaggcagaggcaaggtcaaaatgcagatcttcgtgaaaacccttaccggcaagaccatcacccttgaggtggagccc

SEQ ID NO: 630152 - DNA, 100 bp, Homo sapiens
gatggcggcgccctgtaggctggagggactgtgaggtaaacagctgagggggaggagacggtaggtgagctcgtgaaacaatatgaagaggagaaaatag

SEQ ID NO: 630153 - DNA, 74 bp, Homo sapiens
actttaccgtgccattggaaatatattgaaatggatgcagtcagaactgaatgttgaagaagtggtaaatgaca

SEQ ID NO: 630154 - DNA, 100 bp, Homo sapiens
gttcagaagttcttccttgaagaaatacagcttggtgaagagttactagctcaagctatatgccgctatcctctgggcatgtcaggaggccagattccag

SEQ ID NO: 630155 - DNA, 100 bp, Homo sapiens
cgcgccacaatgagctcccgcatcgccagggcgctcgccttagtcgtcacccttctccacttgaccaggctggccccttcacagatgtagtcactacaaa

SEQ ID NO: 630156 - DNA, 99 bp, Homo sapiens
cctcactgcggcctcaaactcctgggctcaagtgatcctcctgcctcagcctcccgagtacctgagattagcccagatgctttgctgactaatgttgac

SEQ ID NO: 630157 - DNA, 100 bp, Homo sapiens
gagctgcgacctctcacctgtgacgggcacgacacctggggcaggtgtccctggccagtgtccttccacctgtccacaagcatggggaacatcttcgcca

SEQ ID NO: 630158 - DNA, 100 bp, Homo sapiens
tgctgtttcttgggactgcgaagctatacaggctgctttgatgcggcctggaagaattgatagaatcatctatgtgcctttaccggatgcagcaacaaga

SEQ ID NO: 630159 - DNA, 100 bp, Homo sapiens
gaggcctttgaaaatgatatgctggctgttaacaataactgaagtgaagtgatggactccgatttggagagtagtaagacgtgaaaggaatacacttgtg

SEQ ID NO: 630160 - DNA, 95 bp, Homo sapiens
attggaaaaagtgcagattggatttgccagggcatgtagctctccaggcttgcaagcgattaccagatgcagtggcagaacgtggagcacgttgg

SEQ ID NO: 630161 - DNA, 75 bp, Homo sapiens
tagcaaacgatccagacggcagggagtgcatcaaaggtgtgaacacagcactgccagtgaaagatgtagaagata

SEQ ID NO: 630162 - DNA, 75 bp, Homo sapiens
acgctgatagctgatagcttttacagtgctcattcctaacagtggatttacttggcaagactggagagttaaatc

SEQ ID NO: 630163 - DNA, 82 bp, Homo sapiens
cggtgatgccgcaaagaatcaagttgcaatgaaccccaccaacacagtttttggtttactcctggcttgggggcattaggaa

SEQ ID NO: 630164 - DNA, 95 bp, Homo sapiens
tgccagtgtccgggaggccctgggggtggagtctcactactcaagcttggggccctggtccacagtcctgtcaactgtcccctgctgggtttctc

SEQ ID NO: 630165 - DNA, 100 bp, Homo sapiens
ccggatcctgaggaggcagctgcggtggcagctgctgagttctcggtgaagctgagctgactgctgcccactttggaggaggcggtgggctccttcacaa

SEQ ID NO: 630166 - DNA, 90 bp, Homo sapiens
ctcaggaccaagaagaacacagccattgtcaagcgctggagcgagttcctgcacttggccatcatccatgaagaaaaggcactgaccatg

SEQ ID NO: 630167 - DNA, 90 bp, Homo sapiens
caaggcactgctttttcatgacgggctaatctcgggccttgtcgaaggaagaggctgcagacgttaatgaggttagctgctggattccag

SEQ ID NO: 630168 - DNA, 100 bp, Homo sapiens
tctgccgccatcttggttccgcgttccctgcacagaagttattccaacttttgacatggctgtcaatgaaatcttctttgaccgttaccctgactcaatc

SEQ ID NO: 630169 - DNA, 101 bp, Homo sapiens
ttttgtttggattgcagcatgcagaattacagagcggactacagggaggagtgtgaagattatacaagcagattttacaaaagatgacatctacgagcata

SEQ ID NO: 630170 - DNA, 97 bp, Homo sapiens
caggtttccaaatatggtgacctggctaactggatgatacctattgccaaaatgctttggagtttttaactgaatctaagaaaagtccaaaatagat

SEQ ID NO: 630171 - DNA, 95 bp, Homo sapiens
gatctctatttctatgtgattggcagctcctatgaaaatgaggtacggttcctggagcagcagaacaagatgctggagaccaagtggagcctcct

SEQ ID NO: 630172 - DNA, 75 bp, Homo sapiens
gcaactgtgacacaggagcctttgagctcatctataagcagggaaaccggctcctgaaatcaggtgtcccattcc

SEQ ID NO: 630173 - DNA, 96 bp, Homo sapiens
ccaggctaaccaaaagtctgttctggaacattaatcctgatgttctttttgaagtacacaactataatataaccacagtggaaaactttcaacatt

SEQ ID NO: 630174 - DNA, 50 bp, Homo sapiens
aagcatcttgatctagaaaatataacgagtgctgagattgattctgatga

SEQ ID NO: 630175 - DNA, 82 bp, Homo sapiens
agaagcgaagtggagagcgccagagtaatggggttgaaaaataccggccacagaccctgaatgatctcatttctcatcagga

SEQ ID NO: 630176 - DNA, 80 bp, Homo sapiens
tggatgatggcctggatgaagcgttttcgagccacataaagaagatccctaatagtcatttctcaacaattatatagtca

SEQ ID NO: 630177 - DNA, 101 bp, Homo sapiens
cttcgcccggctttgcagcggggacttcggcggcggcgcctcaggcacctcggcccgggttttaaaatcaaagatgggaaaatcggagaaaattgcccttc

SEQ ID NO: 630178 - DNA, 101 bp, Homo sapiens
cgacatccgagtgcagaacctgcaagctcagagtcaagatctccactgaagttggcatcacaaatgttgatctttccaccgtggataaggatcagagcatt

SEQ ID NO: 630179 - DNA, 82 bp, Homo sapiens
gtgaactttccatccggataggtagagctgggcttctttcagagccagtcttggtgctctgtgttcacctggttcatctgag

SEQ ID NO: 630180 - DNA, 75 bp, Homo sapiens
ccttcgtacccacagtgcttcatgagaggggttctgaaggaacattaaatgactgcaagataatatctgtagatg

SEQ ID NO: 630181 - DNA, 80 bp, Homo sapiens
gagttcccgttacaatcactagtgttgcaggttccagcaacagatagaaatgctttaagttcactctggggaaagctggc

SEQ ID NO: 630182 - DNA, 82 bp, Homo sapiens
gaacccgcagcgccggcctggcagggcagctcggaggggctttgaccacgacctttgaagagcttcattttgagatcaagcc

SEQ ID NO: 630183 - DNA, 75 bp, Homo sapiens
cgacgcccgcaggtcctcgcggtgcgcaccgtttgcgacttggtcactcctggaagcaaggcggctctagctaat

SEQ ID NO: 630184 - DNA, 51 bp, Homo sapiens
agccaaggtcttagcagaagatgattgtcctgggtcacataatgccagctg

SEQ ID NO: 630185 - DNA, 83 bp, Homo sapiens
ctggcacccctgggaaaataggtctgcagccagaaaactgaaggtcagagagggtcagggagccgcaagccagccttcacaga

SEQ ID NO: 630186 - DNA, 51 bp, Homo sapiens
ggtggtgcccgacttcgaccccggaaatgtggctttagataatctacagat

SEQ ID NO: 630187 - DNA, 82 bp, Homo sapiens
agtacaatgaggcagccagcggatcttggactggccttatgggtttctagaaggaaaatcacagaggtaaagcatcatttca

SEQ ID NO: 630188 - DNA, 74 bp, Homo sapiens
gaggatatcgtgtctggagcagtggagcccaaagacccctggagacatggagtctctctctgtggccaccactg

SEQ ID NO: 630189 - DNA, 50 bp, Homo sapiens
cattggcaagctacaataatggggccaagtgaagacatttccacctggac

SEQ ID NO: 630190 - DNA, 98 bp, Homo sapiens
aacaaagctgaatgaactcattcaggttggatctctctcagccttgtctgcttatcacactggcttgatcgcgcccatgaagatccgcacagaggccc

SEQ ID NO: 630191 - DNA, 100 bp, Homo sapiens
ccagatgaactgtccttccaacggggtgacctcatccgtattctgagcaaggggaccctcacaatgatcccaatgctcagggggatgccttcaagactct

SEQ ID NO: 630192 - DNA, 50 bp, Homo sapiens
cctcgctggagatcgagtaccaagtggcgacagacaaagttgcagaaaag

SEQ ID NO: 630193 - DNA, 50 bp, Homo sapiens
agagatcaggccaagtttggaatcactggcctccacctcctggatgccct

SEQ ID NO: 630194 - DNA, 75 bp, Homo sapiens
ctttgctgaacacctaggctattcaaatggggtcatcaatggattaaatctcttgatgaacagtgtgtggttggc

SEQ ID NO: 630195 - DNA, 101 bp, Homo sapiens
tagacttccagctgaaggtttaaaggcagtaggtttaagaatgcaaagagctggacagtcaagatggtgtagacttgtgtggctgacagcatgagcatccc

SEQ ID NO: 630196 - DNA, 90 bp, Homo sapiens
caagaacgcgctcctccgcctgctgcccgggctgggcatttgaccaagccgtgaccaaggacacctgcatggcggttggcttcttccagc

SEQ ID NO: 630197 - DNA, 98 bp, Homo sapiens
tggtcgattacttcctaaatgtggccactgcccaggtgggcccatctggggcagggaagagcacaattttgcgcctgctgtttcgcttctacgacatc

SEQ ID NO: 630198 - DNA, 100 bp, Homo sapiens
gacaacgtgaaaatgccccgtgccggggcgtccaccggagtcctgccagctgtccggcgctgggctatcttaatgacttggaccgcgtagctgaccctgc

SEQ ID NO: 630199 - DNA, 100 bp, Homo sapiens
tcagaggcaactaacactgcggcttcctgagtctctggcatctctatcccctatgaggcaccacgtaagacctcctgcccttagctctcttgctcaccac

SEQ ID NO: 630200 - DNA, 100 bp, Homo sapiens
acctatagatattcaaacctggatccttggatacaggaaaccaacagtcacacatgtacattacagctggcaatatagcaactatgaagagaaaagctac

SEQ ID NO: 630201 - DNA, 75 bp, Homo sapiens
gttcttggcctcgctgacttgaagaatgaagccgcagaccctggcggtagcaacacaagtcggaatagaatggaa

SEQ ID NO: 630202 - DNA, 101 bp, Homo sapiens
tttgaaaagcagctggcctgcaaggtgcggtcttgctctgttgcctaggctggagtacagtggtatgagtatggctcaatgcagcctcaaccttctgagct

SEQ ID NO: 630203 - DNA, 90 bp, Homo sapiens
aaagatttttatcagtttaccttcaccttcgctaagaacccagggcagaaaggtttagggtcctgaggacaccgtgagccagccaggcct

SEQ ID NO: 630204 - DNA, 89 bp, Homo sapiens
ttacaagcggacacgggaatatatccgaagcctgaagatggttccaagtattccctatctagaatgtgacagtgatgataacatgggtg

SEQ ID NO: 630205 - DNA, 88 bp, Homo sapiens
gaggaggtctccctgtttcttacccggtccatccagaaggagatgatcccagactttaaacagcaaatttcagaattggagaaacaga

SEQ ID NO: 630206 - DNA, 83 bp, Homo sapiens
cgggactacgaccacctcttcaagctgctcatcatcggcgacagcggttgtgaccgagattcccgacgagagagactgagggg

SEQ ID NO: 630207 - DNA, 100 bp, Homo sapiens
ctcggccgatgaagtgcagaggtttttttctgactggatacacgtctgtttaactacgcaaaaggtaatgctggcatggcttactgggaccctaagtgtg

SEQ ID NO: 630208 - DNA, 121 bp, Homo sapiens
ctgacgggtctgtcctgcttcgtcaccccagaccttgccagagacctggcaaatgacatcatgacactgacaatgcagatcttcgtgaagactctgactggtaagaccatcaccctcgagg

SEQ ID NO: 630209 - DNA, 98 bp, Homo sapiens
cccggccgagccgagggccaccccctggtcctctgccctcgcgccccgctagggccaggagtgcctgtgaagaaaacggggtattgccctgaggctta

SEQ ID NO: 630210 - DNA, 80 bp, Homo sapiens
ctttatttaaaaatcacagaccaggatggagataaaggaactcaaagaatttgggaccgtatccttgatgagcttgacaa

SEQ ID NO: 630211 - DNA, 76 bp, Homo sapiens
ccaggcattgctggagatggatctgctgaccggtcctcagaatggttggaatgaccctccagctttgaacagagta

SEQ ID NO: 630212 - DNA, 100 bp, Homo sapiens
ccaaaacccaccccttcaagtgatatgttcttccaggttggaaagagaatatgctggagagctgtctcccacgtgcattttcccaaggtatactatgggg

SEQ ID NO: 630213 - DNA, 75 bp, Homo sapiens
ccagggaaccctggtcaccgtctcctcaggttttcctccctcaagcaattcgacatctcaagtgaagacatggcc

SEQ ID NO: 630214 - DNA, 100 bp, Homo sapiens
aagggaggaaatagtggcaggtgacagtctgcatgtgcagttttcagtggatgattcaacagccacacaaagcagcaacattttttggatgcattgggat

SEQ ID NO: 630215 - DNA, 75 bp, Homo sapiens
gcgagacggcccggctgcagcgagcgctggacggagaggaaagcgctatcagatattgtgaaaaatgtcagctga

SEQ ID NO: 630216 - DNA, 50 bp, Homo sapiens
tgaagcgactgagtccgcgatggaggaggcaagtgaggcctatctggttg

SEQ ID NO: 630217 - DNA, 100 bp, Homo sapiens
cagaggactgccatttcgccaaaggatgcttttgaaactcggcaggacttaaatgaggtcattgaatctttgggaattattatttataaagcactggact

SEQ ID NO: 630218 - DNA, 83 bp, Homo sapiens
ccaggatacagggtcaaaggagagcacaaccatcgcagttggaagcccatggggcagaacttcatggaggaacacggagtgac

SEQ ID NO: 630219 - DNA, 100 bp, Homo sapiens
ttggtggtgaccccgcccagttggcccagaggatctcttctaacatccagaagatcacacagtgtttgaccgaagctggctttggtgctgacatcggaat

SEQ ID NO: 630220 - DNA, 74 bp, Homo sapiens
cgcctcctgcctgccctgctgagatcctggtggctttgagacaccttcacttcaagaacattgtccactgtgac

SEQ ID NO: 630221 - DNA, 96 bp, Homo sapiens
gcctccccagccatgtggaactttggagtgcttagtgcagttggtgagagcgggagccacactcaacgtctccaccacacggtacgcgcagacgcc

SEQ ID NO: 630222 - DNA, 125 bp, Homo sapiens
gaccactgcaacctatgggcagaccgcctatgcaacttcttatggacagcctcccactggtggtgaagcagtattttccaatttgaagattcatttgaaggtggctcctgccacctgctaatagc

SEQ ID NO: 630223 - DNA, 101 bp, Homo sapiens
ccggagtcgccgctgggcctgtccgctggcgtcatggtgggcagcaatgctggcatcgtggggatgaccaaagaacacctgggcttggcactggcactcaa

SEQ ID NO: 630224 - DNA, 118 bp, Homo sapiens
tactcctgggctggggctccctgttgatcattctgaagaacgagggcttctattccagcacgtgcccaggtatgaatcctaggacccagaataaggattctctagaggacagtgtttc

SEQ ID NO: 630225 - DNA, 100 bp, Homo sapiens
gcctggaggattgtcactccaacctcttttcgctggaactgtggctgcaccatctgtcttcatcttcccgccatctgatgagcagttgaaatctggaact

SEQ ID NO: 630226 - DNA, 75 bp, Homo sapiens
gggttttgatcctgtcactgtgaacgtgcgcatcgaccccagtagcctgtccttcaacatgtggaaggagatccc

SEQ ID NO: 630227 - DNA, 88 bp, Homo sapiens
ggctttggtggtacgctagaaataaagaggagaattctgcctaagccaactcgaaaaagccgtacaaaaaataagcaaaagcgtccca

SEQ ID NO: 630228 - DNA, 113 bp, Homo sapiens
ggaagaaggaatcatcgaggcatgggggtccacactgcaatgtttttgtggaacatgggtggtgattccactgaagcaactgccaaaccaaagagaagtttttatgctgccag

SEQ ID NO: 630229 - DNA, 90 bp, Homo sapiens
ttcagctgtgcttcaagacgtgttctcctgaaagccagcagatttatggaaacctttcggggaatttgttttcttcattatctcaaggaa

SEQ ID NO: 630230 - DNA, 110 bp, Homo sapiens
ccgcagtatcatgctggccaagaagatcatcattaaggacggaggcacgcacatgattaagtaccggtacatcccgttcacacatgggaagagaaggtacagaggcaagg

SEQ ID NO: 630231 - DNA, 138 bp, Homo sapiens
gtcccctgtgtttctccattctgttggttttatgcatctttatccaatcaagtgcccttggacaaagcctgaaaccaggtttttagaacttcagccataaaaatgggcagaattttccttgatcatatcggtggtacc

SEQ ID NO: 630232 - DNA, 118 bp, Homo sapiens
aaagaatataacagggctcgagtctacctggatgaaaactacaaatcccaggagcacttcacgcgccatcatgaccgggtcctataacaacttcttcaggatgtttgatagagacacg

SEQ ID NO: 630233 - DNA, 100 bp, Homo sapiens
ggatggtgccacaggaggctgtgcgggccccgctccgcttcgaatggtgtttaactgctgaagagatcttttcccttcatggcttttcaaatgctaccca

SEQ ID NO: 630234 - DNA, 73 bp, Homo sapiens
gagcccccagcggaggaggagctctcaaaaggtcctcctcgactggattaatgacgtgctggtggaggagagg

SEQ ID NO: 630235 - DNA, 75 bp, Homo sapiens
gaaccaccgcatcaagagcttcaagaacaagggccgcgatgtggaaaaagtgaagtcactgcttttgctgtcttg

SEQ ID NO: 630236 - DNA, 74 bp, Homo sapiens
ttgttaacaacatgaactatcttccatttcccatcatacagggctgacaggacaactggatcagtttcattaaa

SEQ ID NO: 630237 - DNA, 90 bp, Homo sapiens
gcctgcttcccgtctgcgcgagtccacgcagctccccaggggaggatactgaggcacacagaggggagtcaccagccagaggatgcatag

SEQ ID NO: 630238 - DNA, 75 bp, Homo sapiens
agcccgccacgccgcccagcccggccccgcccgcgccggaagagccacgccggactggagactgatgcatgaggg

SEQ ID NO: 630239 - DNA, 90 bp, Homo sapiens
cacagccaggacatcctggaacctgggaaaggcaacttgtagagacagtttcatgtggaggaaatcttttgatgaatattgggcccacac

SEQ ID NO: 630240 - DNA, 90 bp, Homo sapiens
aacctaaccatgaagacttgaacttaatacagcaagaaagaccatcaagtttaccagataaggaagcctgtgtgggtaccaacaatcaaa

SEQ ID NO: 630241 - DNA, 96 bp, Homo sapiens
agctcgggaacatggccctggagcggctctgctcggtcctcaaaggtggatcatccatgccatggagtatgaacttcagatccgtggcggagacaa

SEQ ID NO: 630242 - DNA, 100 bp, Homo sapiens
gccagcatcccggtcaacacgcggtacctgaacctgcaagagaacggcatccagatgtccagctcgccgctgtccaagaaacgtcgcgtgtccgggcctg

SEQ ID NO: 630243 - DNA, 82 bp, Homo sapiens
atttaccagagataattgataacaccctgtaacagctgaaatttgccatctgccttagtaagtcatgtactaaatcctcaac

SEQ ID NO: 630244 - DNA, 109 bp, Homo sapiens
ttcctgatccaaacaagcttcattgttttcagctaacagtaaccccagggctgaagaagatgcagagcagcctgaagctggtggactgtatcatcgaggtccacgatgc

SEQ ID NO: 630245 - DNA, 80 bp, Homo sapiens
ccaagtacctgcagatcctgacctctctgatgagatggatcgacctgcctagagctggaacgttacctccagagcgagcc

SEQ ID NO: 630246 - DNA, 98 bp, Homo sapiens
gacatgagtgatgtggaggaaaacaacttcgagggcagagtctacttccccagcaggacagcatcattctcctatatcttctagacatcactcatctt

SEQ ID NO: 630247 - DNA, 74 bp, Homo sapiens
agccaccagggctacagcactgaggctgtctctgctttctatccgtcaagatgataaagtcgtgtgcccgagaa

SEQ ID NO: 630248 - DNA, 98 bp, Homo sapiens
ctgctcatgtgcagactcagactggccaaaattcaatccctgctttagctcaggagaaccagcagaaatccaccaatgtagtctatcaggcccaccat

SEQ ID NO: 630249 - DNA, 100 bp, Homo sapiens
gtttccagatgttgagaaattagaaaaggggctaaatgatctacagccttggcctcctttgaagtaaattttatggatgatgtaggtcagactctattaa

SEQ ID NO: 630250 - DNA, 90 bp, Homo sapiens
aggcatctctgggtgggcaacttacccgagaacgtgcgggaagagaagatcatcgagcatttcaaacgggatcatggcccaagttgcaat

SEQ ID NO: 630251 - DNA, 75 bp, Homo sapiens
agcctctcgagcagctggaactacagggcaaaataacatggcagccagacgaattacacaggagacttttgatgc

SEQ ID NO: 630252 - DNA, 75 bp, Homo sapiens
gctggagcggagccggccgtacgcggtgctgcgagggcagaacctggttatattccctgctcagagaggatacac

SEQ ID NO: 630253 - DNA, 83 bp, Homo sapiens
aggcagtcacgtttttcgatgatgtcacagtctacctgtttgaccaggaggaggacttcatccaacccagcagccgagaagag

SEQ ID NO: 630254 - DNA, 100 bp, Homo sapiens
cttgaaagaagctgcagcggaggaaggcgaggtttggtgcacctcgatttggaggaagtagggcagggcccttatctggaaagaagtttggaaaccctgg

SEQ ID NO: 630255 - DNA, 100 bp, Homo sapiens
ccccggcacacgcgcagccccggcctctcggcctctgccggagaaacaggacgagattgaggagctgcgggccgagatgctggagatgcgggacgtctat

SEQ ID NO: 630256 - DNA, 88 bp, Homo sapiens
ttgcccagggggccggagggccagggtctcccggaggcagtggagctactgctgtggttcaggcagccctatgcaaacccaggcaaga

SEQ ID NO: 630257 - DNA, 97 bp, Homo sapiens
ttcaagaacttcctcgcactgtgacatgtctgatcccttgctcccatccctgcagcatgaacaagagatctcggctcaccaaattccacaacctgaa

SEQ ID NO: 630258 - DNA, 90 bp, Homo sapiens
ggaagacgtcgctggtgctgcgctactgcgagaacaagtttaacgacaagcacatcaccactctgcaggagctcctccattcctgagacc

SEQ ID NO: 630259 - DNA, 88 bp, Homo sapiens
ggaggaagtagccccagtgagtgttagtgatgcagctctcctggccccagaggagatcaagatgctggagagcatgatcaagaagccc

SEQ ID NO: 630260 - DNA, 89 bp, Homo sapiens
accaggacctacggcaccagtggcctggacaacagacctctgtttggggagacgtccgccaaggattactacagcatcccatttcccac

SEQ ID NO: 630261 - DNA, 75 bp, Homo sapiens
tggatctttgctcctgcgccgcgttctagagcaaggtttggtgcacctcgatttggaggaagtagggcagggccc

SEQ ID NO: 630262 - DNA, 97 bp, Homo sapiens
tcatgtcctggacactaccacgttgatggctttctaaatccagggaatcccgttctgcttccagaagtggaagtgctcacggatcggggaaatctgc

SEQ ID NO: 630263 - DNA, 75 bp, Homo sapiens
ggtagaggttctagagaacactaataggaaatgaagatttgctcagcaattataaacctttttcatctgatcccg

SEQ ID NO: 630264 - DNA, 100 bp, Homo sapiens
ggctgtgcagaacttggaggactgggaggctgcagcccagacgccccccaggccggggccaccatcagcaccaccaccaccacccaaggaggggcaccag

SEQ ID NO: 630265 - DNA, 98 bp, Homo sapiens
ggcccatggaccccagtccaacgccgagggaataggaccatccaaaagcggaaccttcgcctcagaaaaagggatgaagagaggggagctctttgact

SEQ ID NO: 630266 - DNA, 104 bp, Homo sapiens
ggaaaacctaaccatgaagacttgaacttaatacagcaagaaagaccatcaagtttaccaatcaatgtccgagttaccaccatggatgcagagctggagtttgc

SEQ ID NO: 630267 - DNA, 100 bp, Homo sapiens
acggaagtaccgcgagcaaggagcgcggaatcggggagcgtccggagctagctggatcctctaggcaggtaatcaaatgcaaagcagctgtgctatggga

SEQ ID NO: 630268 - DNA, 80 bp, Homo sapiens
cggccaccgggaccggcgtgggagcgacgccagcgcctcaacagactgctgtggaattcctgagaaagagcaactgaggg

SEQ ID NO: 630269 - DNA, 100 bp, Homo sapiens
ctgaaagctgccgctgaagctgccgccgttgcctccgccgccaagagtgagcgagcggacccgcgatggtctccatctgctgctgcctcttcatcctctt

SEQ ID NO: 630270 - DNA, 75 bp, Homo sapiens
gcttgtgaccctgcagctcctcaaagctgctttgtaccgcctcagtggagactggaatcccttacacattgatcc

SEQ ID NO: 630271 - DNA, 100 bp, Homo sapiens
ctcgagtcctgccgcctcccgggagtgccgtgcgccgcagcccgggcccaggccccggcagcgcctgggacaagataacagtcttcactcctatgctgat

SEQ ID NO: 630272 - DNA, 147 bp, Homo sapiens
aatagcactaatttcttcaaagacagacactggaccaccagagagtttgaggagctaagatcatgtagagagtgaagccactgcctccatccagtgtgaaagcagaaattactataaacattggattattgaaaatatcttgggaaa

SEQ ID NO: 630273 - DNA, 50 bp, Homo sapiens
aatttggtcctcagcaaccacctactctaatggttcctggggctggctct

SEQ ID NO: 630274 - DNA, 100 bp, Homo sapiens
ccaaggaaggatgagaatagctactgaaagttttgcggcctccaggtggtggatccaatttttcattaggttttgatgaaccaacagaacaacctgtgag

SEQ ID NO: 630275 - DNA, 50 bp, Homo sapiens
gctggggactggcctcggggcgacttgagatattgcaatggcaaaatcag

SEQ ID NO: 630276 - DNA, 82 bp, Homo sapiens
ccatcgtcgggcgccccagacaccagggtgaaaatgggatggaggattgtgtcatggccctagaaaccttgtttagtgttct

SEQ ID NO: 630277 - DNA, 97 bp, Homo sapiens
aactggctgtgaataatatagctggtattgaagaggatcttcaagatgaagttcaaagggagaatactaatctgcaaaaactacaggcccagaaaca

SEQ ID NO: 630278 - DNA, 74 bp, Homo sapiens
ccaagatcaaggtgctggcaagagacagggtcttactctgtctcccaggctggagtgcagcggtgcaatcacag

SEQ ID NO: 630279 - DNA, 100 bp, Homo sapiens
actgaacaccaccggggcccgtccacctcccgcagccccaaactggataccacccacatgtccatcatcagtagaatggataaataaattgttgtgtatg

SEQ ID NO: 630280 - DNA, 80 bp, Homo sapiens
ccggtgcccgaggaggcagccaagctcgtggcctgcctctgcgtgccttgttctaaagacgaaggggaactccctagtgc

SEQ ID NO: 630281 - DNA, 100 bp, Homo sapiens
aatgctggaacgagttataggaagatgtagtccaacccacatcagcagggaaaccccaaagccacggagaaaatcagggaaggtaaaagaagagaaggag

SEQ ID NO: 630282 - DNA, 80 bp, Homo sapiens
cgggatttacgtggagatcaagcgcagcgatggatggtgattgctcacaccaaagccttggacccctcccagcctgtgac

SEQ ID NO: 630283 - DNA, 95 bp, Homo sapiens
cttgggatcctttatcctggtcatcttctatttccaaacccatcgatggtatacatgacaaggggattgtagaagacatccattgtggatccatg

SEQ ID NO: 630284 - DNA, 101 bp, Homo sapiens
gtggaccaccccatgaacctcgaacaccttccaccatgaccacctcagcaagttcccacttaaataaaggcatcaagcaggtgtacatgtccctgcctcag

SEQ ID NO: 630285 - DNA, 88 bp, Homo sapiens
agggtgaccagaggcaggtcattcccataccaagtattcacaatttagaagaccgtttgaagaaatatgaaaagaatgtatatgcaac

SEQ ID NO: 630286 - DNA, 75 bp, Homo sapiens
aaaaaggtcttgagagcaccttgtggcgcacccagtgtaactgtgacggtgccgacttcctggtgacggaggtgg

SEQ ID NO: 630287 - DNA, 95 bp, Homo sapiens
cgccgcgatcgtggggcccgcgaggcgggcagccggggcgtccagaataccaagctgctattttacacttgaagagggagcacaaagaagaaatt

SEQ ID NO: 630288 - DNA, 80 bp, Homo sapiens
ctacaggcctgctctctggttccaggtcagaaccatccagtcctggacatgggaccacatcggcgactgcagtggacgtg

SEQ ID NO: 630289 - DNA, 82 bp, Homo sapiens
gcaccccgaacgggttgcttcccccgctgcgagtgggcgacagatgcgaaagaaacgagttccagtgccaagacgggaaatg

SEQ ID NO: 630290 - DNA, 100 bp, Homo sapiens
accttgtggaagatttaattatttctgagttgcgagagaggtttccttcacacaggaacctacaagcagcaattggcgcctattatgactttgagagccc

SEQ ID NO: 630291 - DNA, 101 bp, Homo sapiens
gctatatccagaggtgccacccgaggagttccgcccctttctggcaaagatgagggggattcttaaggtaccacttaatgggcaagtttatgaacttttaa

SEQ ID NO: 630292 - DNA, 50 bp, Homo sapiens
cttagctcagcaattcttaccttgcttacatcaaaatctatcaaggagaa

SEQ ID NO: 630293 - DNA, 50 bp, Homo sapiens
cacaagtaccacaagcatggcaaggatctgcataaagtattacaaacaaa

SEQ ID NO: 630294 - DNA, 75 bp, Homo sapiens
caagacctcccccaaatcagaagaaaggtaaaaccccagaggaagtgctaaaaaaatatctacagaaagtccggc

SEQ ID NO: 630295 - DNA, 98 bp, Homo sapiens
tgcgcttggggatcctctgtacgcccgttcactggttcatgtagtattgaaactctggaagagtggattcagcctggataatggagaactcagaagct

SEQ ID NO: 630296 - DNA, 75 bp, Homo sapiens
cgctcacggccacggcgctggtcaccggggtctgcctgggtccttccaaccctcctgctaccatgaagattgcag

SEQ ID NO: 630297 - DNA, 82 bp, Homo sapiens
ctctgatgcaccaccagatgccaccacctcatccaccccagccagtgggaagaggagaggaactttggtgcatcccttttgc

SEQ ID NO: 630298 - DNA, 50 bp, Homo sapiens
cgccgcctggcaggccctgcgcaccagaaagtttcctacactactgaggt

SEQ ID NO: 630299 - DNA, 100 bp, Homo sapiens
aaaagctaaagaggcaccattcgtacccgttgactttatattcagagcaccaatcaaattaagcaagcctggggaacttcgtgaggaatatgaaagcttg

SEQ ID NO: 630300 - DNA, 100 bp, Homo sapiens
ccaaattaaaaaacgttcagcttctctaaactccaagataacatatctcactcatgcctgcatggacctcaagttaggagacaagagaatggtgtttgac

SEQ ID NO: 630301 - DNA, 50 bp, Homo sapiens
ttcacgccggggaccccaaggagacaccattcgcttttcacccaagatga

SEQ ID NO: 630302 - DNA, 49 bp, Homo sapiens
atgtcggcttgtagagagattgcatgagagtagcatgtttgtctccaag

SEQ ID NO: 630303 - DNA, 75 bp, Homo sapiens
atgtaatgcacgttggactacagaagagcagcttctcgccgtacaagtttaattggttggggtcagataagaaga

SEQ ID NO: 630304 - DNA, 74 bp, Homo sapiens
tgtcatccccccttcaagcaagggcatgatgcctccactaaaactggaccaggatcttaatgaagtcaaagctc

SEQ ID NO: 630305 - DNA, 96 bp, Homo sapiens
ctctggcacaacagctcacttttcttccaaggataagttgcaagaggacagtcattttgtttactcattcagccctgttgcaggtcccaataaact

SEQ ID NO: 630306 - DNA, 105 bp, Homo sapiens
aaactaccaccacagaaagaatattgtactattccggatatacaagatcactgggaggaggatttgacagctaaggatattgaagaaattattgatgagctcaag

SEQ ID NO: 630307 - DNA, 100 bp, Homo sapiens
ctacgattgaaggacatgtggttaaatgctattggggtaaagaatctcctgatatgactaaaaacttccaacagctcctgggcaacgtgctggtctgtgt

SEQ ID NO: 630308 - DNA, 51 bp, Homo sapiens
caggaggcagtagccaaacacccaggtcgggtcacaaatcttcgaagagtg

SEQ ID NO: 630309 - DNA, 121 bp, Homo sapiens
agtgtatatcaagccacaatttccatcaaaaagtgattaagcagagaatggagaagaaggttgattccaggtgacagagctgaatgaacctctctccaatgaagatcgaaatctcctctct

SEQ ID NO: 630310 - DNA, 75 bp, Homo sapiens
gacgatcctcaagttcccaagtagaggagaggaagcggcagagggagttcatagccctgatgaagcaagttactc

SEQ ID NO: 630311 - DNA, 50 bp, Homo sapiens
tcagttctgcacacgtgcgtcaaagatactaaaatgtctgatgatgctgg

SEQ ID NO: 630312 - DNA, 75 bp, Homo sapiens
ggtccttggctggaagaggctggataaaatactgcattgtttttcgttggaatatacgttgcacatttatggcga

SEQ ID NO: 630313 - DNA, 75 bp, Homo sapiens
gcagtggtcgcttcttctccttggtttcccaggcagctgcagacttgaaacagttctgtctgcagaatgctcaac

SEQ ID NO: 630314 - DNA, 90 bp, Homo sapiens
gaaatggattagtgataactcaagtttcatcacctgttatcctgaatacatgtctaacaattttccttgcaacgttagctgttgtttttc

SEQ ID NO: 630315 - DNA, 100 bp, Homo sapiens
cagcagccgtctgtggagggtgccgcggccctgcgcagctgccccatgtgccagaaggagttcgcccccagcaatttgagaactggcgagagaaccagcc

SEQ ID NO: 630316 - DNA, 80 bp, Homo sapiens
tgaatgccagccaccagccatgggatgacacagcaagaaggccctcaccagatgctgagcagatgccggcaccatgcctg

SEQ ID NO: 630317 - DNA, 95 bp, Homo sapiens
ttacctgtttggattaatatgtctctgttcaggtgactttcggatggtggttggagaagataaaacaaaagtgttgaatattgtgaagcccaata

SEQ ID NO: 630318 - DNA, 75 bp, Homo sapiens
ggtgaaacaccactgaagcattgccaaggcaccacactgtaactcgaggcatcaccaaaggcgtgaaggaggact

SEQ ID NO: 630319 - DNA, 90 bp, Homo sapiens
tgaagcacaatgatccttttgctcctggtggaacagttgttgcagcaagcgattcaggctgacttatccttgtataatgaattccgattg

SEQ ID NO: 630320 - DNA, 90 bp, Homo sapiens
ttttcgcaaagaaacgaacaacgctgctattataagtgcgggagatgttaaagatgagggactccaatggggcccgcatgttgaccttga

SEQ ID NO: 630321 - DNA, 100 bp, Homo sapiens
gcggcttcgttcttgaagttagtgagaccaaaaacccaccaattctggacacattgggattaaaggccagctttgctccaatggaggacaaactcaacca

SEQ ID NO: 630322 - DNA, 101 bp, Homo sapiens
ctgggtttgaaccttgttccaccagcacatcctacctctgtggcctggattaaaggtggtggctgtggccttgaaaacagtcatgtgaaaactcatcacct

SEQ ID NO: 630323 - DNA, 100 bp, Homo sapiens
agttcaccagcatccctgcagccttctggtataccatcgtcaccatgacaacactagggagagctggaggtgtttcagaaagatggggaacgaaaaattc

SEQ ID NO: 630324 - DNA, 85 bp, Homo sapiens
cctccacttgcagccagggactgggcatccacccggccaggttcccaggaagctgtcgcctggttgggcccggaaatgggacgtc

SEQ ID NO: 630325 - DNA, 100 bp, Homo sapiens
cagcaacagcagcgtcctccccaccccacctgccaccgaggccccctcttcgcctcctccagagcatgtctgttcgatcctggcttccctcctgcggaac

SEQ ID NO: 630326 - DNA, 101 bp, Homo sapiens
agactgttcaaaccactgaggatcagattttgaagagagatatgccaccagcatttattaagcaaaagtcaacaactctagcttaattggagtaggctata

SEQ ID NO: 630327 - DNA, 71 bp, Homo sapiens
ggtggagtccaccctggctgtgggatcagtgtccttcagggatgtggctatcgatttcagcagagaggaat

SEQ ID NO: 630328 - DNA, 100 bp, Homo sapiens
tttttcatcaccctttcctcgatgccagcccctcggtcaggaaatatgaaggtcaccgtgtccaaagggggcgaccgggacagtgacgacgacagcgtcc

SEQ ID NO: 630329 - DNA, 100 bp, Homo sapiens
gggctgtgcctcaaaggtgaaccagggagaatcaaataaagagttccagaagtgggagatggagggggtcccaagcactgccatcagggagatctcgctg

SEQ ID NO: 630330 - DNA, 101 bp, Homo sapiens
cctcccttctgggatgaggatcagcacaagctgtatcagcagatcaaggctggagcctatgataggggaaactgaggcctgagccgagaagggatggggag

SEQ ID NO: 630331 - DNA, 82 bp, Homo sapiens
tttatatttacttctgtttatattggtaaaataaaaggagcttctaaaggttgtgttacatgtttcctgaggttataggcgg

SEQ ID NO: 630332 - DNA, 100 bp, Homo sapiens
cctcgacccagggcccgcgggccaggagagcgctcggcgggtgacttaagagattaaaattaatttggttgctgttggttctgaacaaataatgagttct

SEQ ID NO: 630333 - DNA, 95 bp, Homo sapiens
cccagatcacctcgctcgacgtgttgcagcacatcctcatccgagcctttgatttgagtggcggccctgttctgtcattagctattagttctaat

SEQ ID NO: 630334 - DNA, 75 bp, Homo sapiens
agccctgcagacagaggtgtgctgacgacctgctacaacagaagactttgtgttttatgccccacgtctgagaat

SEQ ID NO: 630335 - DNA, 100 bp, Homo sapiens
cttaagttttccgtgtgcgggttgcaaggagcgtgcgtgcgtctgtgtgctggaattgatgttcgtctgtgtgatgttggtgaggccatccaagaagtta

SEQ ID NO: 630336 - DNA, 74 bp, Homo sapiens
tgagattctaagtgggaatcatttcagtaggataagttctgaacgtcgaaaagaaaagtctcgagatgcagcca

SEQ ID NO: 630337 - DNA, 100 bp, Homo sapiens
gaaccttggagcacaaacatatccagaaattattattactggatggagttcgctcttgttgcccaggctggaatgcaatggcatgaccttggctcactgc

SEQ ID NO: 630338 - DNA, 75 bp, Homo sapiens
gagctcaagtgcatggagctgcaggagatgatggaggagcaggggccacgcccagatttcttctaccgctgcttc

SEQ ID NO: 630339 - DNA, 76 bp, Homo sapiens
catcattctggatgaagcagacaggcgctttgctctgtccaccaagattcctgacaccaaaggctgcttgcagtgt

SEQ ID NO: 630340 - DNA, 74 bp, Homo sapiens
agttcttacaacatggcagacattgacaagtgatgaaacttatcaggacatatttcgtgatttttcccaaatgg

SEQ ID NO: 630341 - DNA, 101 bp, Homo sapiens
atgagggggaagggcctcaaagccagaaggctgtggaaaatctctgttctcacaaagtctccccaatgctctacaagcaactgcgtcaggcctgtgaagac

SEQ ID NO: 630342 - DNA, 100 bp, Homo sapiens
aggatgaagattcaccaaataagctatatactttggttacctatgtacctgttaccactttcaaaagacctgaaggagaagaaggagaaggtggaggaga

SEQ ID NO: 630343 - DNA, 100 bp, Homo sapiens
agtactagtggccaacaatagtgatacactcaagctgttgaaaatgagcagctgtcctcatgtctctccagcaggcacagttggtggatctgaaatctga

SEQ ID NO: 630344 - DNA, 83 bp, Homo sapiens
gatcacaaacaaatccttgaaagaagaagatggagaagaaatagttacctatgatcgtgcaggaagctgtttggagactctgg

SEQ ID NO: 630345 - DNA, 88 bp, Homo sapiens
agagcacaacggggtgttgcgtggatacatcctcaggttcaactactcaatttcatgctggcatgagaagataatcctttgaaacatc

SEQ ID NO: 630346 - DNA, 90 bp, Homo sapiens
tgcagctctgctgagagagtgcaagccgtggggtggaaaacgaagctcattcccaacgtgcaaagccaaggcagcgaccccaggacctct

SEQ ID NO: 630347 - DNA, 100 bp, Homo sapiens
cgtggagatatggcgcaactgcggcgccaccttgcagagtgaagtcaagcccatcctagagaagctgacccaggaccaggatgtggacgtcaaatacttt

SEQ ID NO: 630348 - DNA, 100 bp, Homo sapiens
aataaggacaaaagccaagaggaggacagttcgctacacagcaatgcatcgagatatgggacccgtacacatggactttttaagagactgggaattccag

SEQ ID NO: 630349 - DNA, 50 bp, Homo sapiens
ctgaagtgtatgtttgtgcaagttggttgaatctggcgatgtggaaccca

SEQ ID NO: 630350 - DNA, 100 bp, Homo sapiens
cgtaacattttatacaagaaaagctgcacttgaggcccagaatgcactgcacaatattaaaactttacctgggaaatatggctacacacacctttctgca

SEQ ID NO: 630351 - DNA, 74 bp, Homo sapiens
ctgcagcgtggatgagcctcggggacactgtgccgaatgaatgtgaccgcaacaagggaaaacatggcttatac

SEQ ID NO: 630352 - DNA, 101 bp, Homo sapiens
attggacgagtcttggattcgtgaacagaccacagtggaccacttctgggcgcccgggggctggagaaggccaggcagcagctgcaggaggagctccggca

SEQ ID NO: 630353 - DNA, 83 bp, Homo sapiens
actgccacaaacgccgcaccaggtcttgtagcagcgcctcctcgggatcgcttacacctgagacgaactacagaacagcacgt

SEQ ID NO: 630354 - DNA, 97 bp, Homo sapiens
cagagaccaagatcactgataagaaatgttctcgacagcaaggcatgaaagatggccagaagataacattccatggtgaaggagaccaagaaccagg

SEQ ID NO: 630355 - DNA, 50 bp, Homo sapiens
atttctagctcgaaggtttaagcaatctgcacatcgtgctgccacacgag

SEQ ID NO: 630356 - DNA, 75 bp, Homo sapiens
gcagaagccatagagagcagcctcgaggtggagaagaaggacaagcttgcgacccttcgcaggtgttacagtcgg

SEQ ID NO: 630357 - DNA, 73 bp, Homo sapiens
cgccttagaggagccatttttccaggtggaaaggagactatggaaccaggatccagcagtacttcccatccaa

SEQ ID NO: 630358 - DNA, 140 bp, Homo sapiens
attacccagcctgaaagaagaaaactttcagctttggctttgctctctcttctgccatctgataataggtgggaaatgaagaaggatgaaacactagaagaggaagaaaaagcaatactggagcacttaaaacaaatttg

SEQ ID NO: 630359 - DNA, 147 bp, Homo sapiens
ccaggccttctcgcgctgcctggtcgctggtgaagcccgcggcgcgcgcctctcccggaccctgcagggtactccaaagattcaggtttactcacgtcatccagcagagaatggaaagtcaaatttcctgaattgctatgtgtctgg

SEQ ID NO: 630360 - DNA, 50 bp, Homo sapiens
actcttcaacactgttattgtaaacaaagacctctgctcttccaggcaag

SEQ ID NO: 630361 - DNA, 75 bp, Homo sapiens
tcaggacagctgttccttggccatcccaaagctattctgggggcaacagaggtttgttggcatccaaagctgttg

SEQ ID NO: 630362 - DNA, 100 bp, Homo sapiens
cgtgcggttcaaggctcagctgaaggacccgcagggccccgggccagccgtgctatcaagactaatcaggaccttctcccagaaactccatggacgcaca

SEQ ID NO: 630363 - DNA, 76 bp, Homo sapiens
ccaagatgccggcctattttcagaggccggaaaatgccctcaaacgcgccaacgatgaagatgctggacagtgaga

SEQ ID NO: 630364 - DNA, 100 bp, Homo sapiens
tggactgatccaggctggacccacgtctgtctggtgataccaggggcagagggaccactctgacagacaaatttacatgtattggagaccagaccagaag

SEQ ID NO: 630365 - DNA, 88 bp, Homo sapiens
gaaagtgagcgaggagtcagaaactcagccactggttgccttggtaggcaataaaagtatgtgaggagcagcgctgtgaggaggaagt

SEQ ID NO: 630366 - DNA, 100 bp, Homo sapiens
ttgctgctaagtacatgctggattgtagaacttctctctctttggtaggaggacagtttgatctggaaatgaatttcattatccaagaaggtgagagtat

SEQ ID NO: 630367 - DNA, 75 bp, Homo sapiens
gctcatcgagaagtgctggaccgaggacgaagtggttaatgactccagagagtaagatcagattcgtccacaaag

SEQ ID NO: 630368 - DNA, 83 bp, Homo sapiens
gagacggcggccttcgaggaggtcatgaaggacctgagcctgacgcgggccgcgcgggatccctgctgccttggtgatcccgg

SEQ ID NO: 630369 - DNA, 90 bp, Homo sapiens
cgatctgacaatgctaggagcgatgcaggtttccaaatatggtgacctggctaactggatgatacctgtgttgacagctcttctaccaca

SEQ ID NO: 630370 - DNA, 75 bp, Homo sapiens
tgggacattcattgcggaataacatcggaggagaagggaaatcctcattgacgattcaatttgttgaaggccaat

SEQ ID NO: 630371 - DNA, 100 bp, Homo sapiens
ggtaccgtcgaggtcagtcatcgttacccgcagcggcgccattttgcccaaaccggtgaaattccatgccattgcagtgtcaactaggcctcagttactt

SEQ ID NO: 630372 - DNA, 115 bp, Homo sapiens
gatcacccgccgctccttgggctacgcgtatgtgaacttccagcagccggcggacgaacatccatgatagcagtcttctgtaaatcgaacttttcaagaattctctgaaggaacc

SEQ ID NO: 630373 - DNA, 75 bp, Homo sapiens
cctgtttgagaaaaggcctaagaattttggcattggcgtggtgaccaagatgaagatgcagaggaccattgtcat

SEQ ID NO: 630374 - DNA, 100 bp, Homo sapiens
tgttccaattcctgtgtttcatcataagaccaaggatgaatacttgatcaacaggtggtgaagcagtattttccaatttgaagattcatttgaaggtggc

SEQ ID NO: 630375 - DNA, 82 bp, Homo sapiens
aacttccggtgcgtttccgctgtaccggaacgtggggcgaggcggtgccattactgcaagtcatcctgccacgtgtcttccc

SEQ ID NO: 630376 - DNA, 98 bp, Homo sapiens
tgaacgtggacagcctcatcacccggctgctggaggtcagaatatcggtgaaagtattctttacctgtgggtggagaaaataagagatgttcttatac

SEQ ID NO: 630377 - DNA, 138 bp, Homo sapiens
gtgctcgtggtggaggctgctggcaatggcctacgtcgtcataccgggcttccttgccctgtccgggtgtaaacaggaacatcgataagtagtgtaaaaacttgcacaatgaaatccgaagccaaggatggagaggag

SEQ ID NO: 630378 - DNA, 90 bp, Homo sapiens
acatctacctccatcaggaccccagatgtctgacagccctgtgtgacaccaagataagtaacctccaaagacaacaggccctccctctgc

SEQ ID NO: 630379 - DNA, 100 bp, Homo sapiens
ccaaggcctgggccgcttcctgcaagaaaacaagcagcttctgcacgacgcactggcccaggacctgcacaaggccctacatcattcgaggaatggcgcc

SEQ ID NO: 630380 - DNA, 51 bp, Homo sapiens
ctgttgaactcagctgcctgtagatatatttttgccatcatggatcagttt

SEQ ID NO: 630381 - DNA, 75 bp, Homo sapiens
gttacaccaaccaggacagaaatcattatcttagccaccagccgcctgtcttggttagatggctctggattagga

SEQ ID NO: 630382 - DNA, 75 bp, Homo sapiens
gacagattcgcagtggtcgcttcttctccttggtgggaccatccagttgcaggaaaacaagcttgacacgcccac

SEQ ID NO: 630383 - DNA, 83 bp, Homo sapiens
acatcggtttcccttccagccattggaacaggtaattctgaattgctcagctctgcagagtttattgcatttgctgagtagcc

SEQ ID NO: 630384 - DNA, 101 bp, Homo sapiens
cgcgagggaggacccgacgcgcggcgtttacccagcgcagcgttccaccgctcgggtttggctgggcaagggcagaagactgtgaagagctgttacggata

SEQ ID NO: 630385 - DNA, 75 bp, Homo sapiens
cctggaatttgattaactcattcaaggttacccagttggcatctccttggaaacaatgccatctttgaatgtgag

SEQ ID NO: 630386 - DNA, 100 bp, Homo sapiens
gtatgccacggagaagaagcagaccaaggtggcttcttctcaacctgtatcttctgagatgtatagggatccatttggaaatccttttgcctaaattctg

SEQ ID NO: 630387 - DNA, 50 bp, Homo sapiens
aggattccaagtaactcttatttgggttttggccaaattgggcgagggca

SEQ ID NO: 630388 - DNA, 75 bp, Homo sapiens
atacgatagaaaatgtaaaggccaagatccaggataaggaaggaagcccgaaagatgagatcaatacaggaaacc

SEQ ID NO: 630389 - DNA, 50 bp, Homo sapiens
tatgtccctcacactgtgtacagtattctaccttgtaaatactgttattt

SEQ ID NO: 630390 - DNA, 83 bp, Homo sapiens
ggagttggcggaagcacttggaactcctttataagtgtcagctgtgagtaaagatgacggcgccttgaggtaagctacaggca

SEQ ID NO: 630391 - DNA, 100 bp, Homo sapiens
gcgaggtgcaaactgttacatttgacacagaagaagtaaagacattattttatggaagttttcacaaggtgaccaagaatatggcccaggtgaccaaagc

SEQ ID NO: 630392 - DNA, 98 bp, Homo sapiens
gaccattatatgctggaatggttccttgccctgagtaaccagcagaaggcggtgctgatgagcgagcgggtgatgggcaccgagcaccccaacaccat

SEQ ID NO: 630393 - DNA, 83 bp, Homo sapiens
gcgaagagcaggcggaggaacaaaggcgacccaagacacccagagagggacaggatttcttacaatctccagctacaacctgc

SEQ ID NO: 630394 - DNA, 75 bp, Homo sapiens
acagcacagttcctgggaaggtggagccaccagcctctccttggtaaagtcagtgataaatcttttgtttgctgc

SEQ ID NO: 630395 - DNA, 75 bp, Homo sapiens
ccctcgcgcccctcccggggtccccaggccggaaggtggtggtcgtacgctgtgaaggcatcaacatttctggca

SEQ ID NO: 630396 - DNA, 75 bp, Homo sapiens
ctttcctggaaaacctccaacttatgtcacagataatggctatgaagacaagagatgggggtctcactatgttgc

SEQ ID NO: 630397 - DNA, 48 bp, Homo sapiens
caaacgagagtcagcctttaacggcatcaagcagatcctgccacacca

SEQ ID NO: 630398 - DNA, 94 bp, Homo sapiens
aacccgcaccaagctctgctccacactgccaaccggccagaggacgagtgtgagctagagccggtgcaggccacgcagaacaagacagggaagt

SEQ ID NO: 630399 - DNA, 100 bp, Homo sapiens
gtcggcagcaagaacagagagagaggtggacagatctgagagatactgaggaagtcgggtattgtcaggggatgagccagatcacagctttactcctcat

SEQ ID NO: 630400 - DNA, 133 bp, Homo sapiens
ttggactcagtttgtttctgctgattacacccgtgcccaggagcttgacgccttagataacagccatcctattgaaaatagctgaaacctttggacttcaagaaaattatatcaaaattgtcataaataagaa

SEQ ID NO: 630401 - DNA, 76 bp, Homo sapiens
agctgtccctgctggaggagcgcttccggaggttgacggatatattcagacgttacgacacggatcaggacggctg

SEQ ID NO: 630402 - DNA, 89 bp, Homo sapiens
ccgtgaagattccaagttcaggagaactcgaccggcctctctctggaacgcctacccaactccatcgcctcccgcttccgcctgacaga

SEQ ID NO: 630403 - DNA, 83 bp, Homo sapiens
cccacattgcccccttacaactcccaggagggaaatagtcgtgcaaggctcttatcacgcgatggcatccactgtggaaggag

SEQ ID NO: 630404 - DNA, 95 bp, Homo sapiens
cctagtaaacggggctgctggtgggccgcgtcgaagacatggaccagggctacggagggctgaagaagatgcagagcagcctgaagctggtggac

SEQ ID NO: 630405 - DNA, 83 bp, Homo sapiens
gggaccgccaccccgcaggtacgggggcggtggctacggacgccggagccgcagttcaaatctgaacatcaatgatgtactag

SEQ ID NO: 630406 - DNA, 90 bp, Homo sapiens
gcagaagtttctctttcgctcttcgcgctacacacccagattggcttccagcgcgcaggtaagcggaagggtacagccaatgcccgaatg

SEQ ID NO: 630407 - DNA, 96 bp, Homo sapiens
ctggctgacgacgggcgcccccgagccgccgccgctgtccggagccccacagacaatgcagatcttcgtgaagactctgactggtaagaccatcac

SEQ ID NO: 630408 - DNA, 98 bp, Homo sapiens
gatctatcagtttcctacagatgatgagtcggtggcagagatcaatggaaccatgaactcaagtatcatcacgtgggcaaactgctgaaggaggggga

SEQ ID NO: 630409 - DNA, 83 bp, Homo sapiens
tttacttccagaagattggtggagcttgatctgaaggtctattctggataagcaggttttgtgaagacatttattctttcttg

SEQ ID NO: 630410 - DNA, 100 bp, Homo sapiens
tgggacaatcccgagagaggaaagcatgatgggagccacgaagggactgtgtattttaaatgcagggttaaagcacgaattgggagctctcagcgacatc

SEQ ID NO: 630411 - DNA, 98 bp, Homo sapiens
gagacccggtttctaatccctgctctgtcactaacaagctgcgtgatcttcggaagccagttgagggaagttctccatgaatgtacgtcacaatgatg

SEQ ID NO: 630412 - DNA, 87 bp, Homo sapiens
atttgctgggtatgaataatgactttcctccaagagcacattgcctggtaagatgatgatggtggtgctaccccagtacaggatgaa

SEQ ID NO: 630413 - DNA, 75 bp, Homo sapiens
ctctatgcgaccaatgcccaggctgcaagacaccatgcgagagacaccgatccgggagacacggaggactgttcg

SEQ ID NO: 630414 - DNA, 100 bp, Homo sapiens
aacaggctggctcccgtctccaggccccaaggagccacacctggaccagaccccaggaaaggtggagttgtgctcatatctggaacaggctccaactgca

SEQ ID NO: 630415 - DNA, 100 bp, Homo sapiens
ccgcgatggccacaacctcatctccctgctggaggtcctctcgggggacagcctggttcttaaagatgtgggattgaaaaaagaagatattgcaatgtgg

SEQ ID NO: 630416 - DNA, 75 bp, Homo sapiens
agacctggaatcgcccaagtccctctactcgcgagtacaaatggtgatgatcatcaggtcaaggatagtctggag

SEQ ID NO: 630417 - DNA, 90 bp, Homo sapiens
ttttgtgctgtacaagtgtttgcaggaaaatcagaggctccttaaaaatatgttcaaaatcggtgatttttgaaccagattcaatatccc

SEQ ID NO: 630418 - DNA, 128 bp, Homo sapiens
ctcattgcgcccagacgggccggcccagagctcccgggtcgtctttcgtgtggccgcgaggtgctggagaatctggtaaaagcaccattgtgaagcagatgaggatcctgcatgttaatgggtttaat

SEQ ID NO: 630419 - DNA, 100 bp, Homo sapiens
ccaagtagctacctatcacagagcaattaaagttacagtagatggacctcgggaacccagaaagactgacttgcataccaaatgtgtggtggatgtggat

SEQ ID NO: 630420 - DNA, 100 bp, Homo sapiens
ggatcagtaaagaaggaaaaagcagtaaagccagaggaagattggtccagaaaagggcgtggtgcacctggcgacagcggccgtcctaaacgcggtgtgg

SEQ ID NO: 630421 - DNA, 75 bp, Homo sapiens
caaatactttgcacaggaagctataagtgcgtccgtctccaagagagtatgaagagagtgcgtctgtagggcagg

SEQ ID NO: 630422 - DNA, 100 bp, Homo sapiens
ccttgcctcctaattactgccccttcactcctttctaaagattgctctggaagcagccaaagcactggatgacaagaactgctgggaaaagctgggagaa

SEQ ID NO: 630423 - DNA, 86 bp, Homo sapiens
gtacgctgaacgagatctactttggaaaaacaaaggatatcgtcaatgggctgaggtgggaggaggagctcgccaagcgcatgaac

SEQ ID NO: 630424 - DNA, 98 bp, Homo sapiens
ctccccaagtaagcctacacttgcctatccagaaagcaacagcagaggtatttataacagcaatgatgtagcagtatcgtttccaaatgtagtatctg

SEQ ID NO: 630425 - DNA, 82 bp, Homo sapiens
cgcggggaccgctgtgctctcgttaccggtattgtaagaacaagccgtacccaaagtctcgcttctgccgaggtgtccctgg

SEQ ID NO: 630426 - DNA, 98 bp, Homo sapiens
agctgcatagcctggctgccgtccagcagaactccatccgccacaacctttccctgcacgacatgtttgtccgggagacgtctgccaatggcaaggtc

SEQ ID NO: 630427 - DNA, 80 bp, Homo sapiens
accaactcacttcgagcatttatggatgtcaatggagacccgaccgcatgtctgtcatggacctcgccaatacttgctcc

SEQ ID NO: 630428 - DNA, 100 bp, Homo sapiens
ccttcagattccaagaccccaggcaggggtggcgccaaagagatgtggtatggtgtattcctgtgggcactggtgtcttctctcttctttcatgtccctg

SEQ ID NO: 630429 - DNA, 100 bp, Homo sapiens
catccgcctttgatcgtcttcctcttcagccatccaggttttgggcggaaagacgtagttgaatatttgcttcagaatggtgcaaatgtccaagcacgtg

SEQ ID NO: 630430 - DNA, 75 bp, Homo sapiens
tggagtccgcggctggccgcgtgagtaggcattctcatcaccaccatcgcttccaagggtgagctgcagatgtgg

SEQ ID NO: 630431 - DNA, 100 bp, Homo sapiens
tacatcttgttttttcatattacatctacaagaggggacaagtacctttatgaaccagtgtatcccaagtgctgtacttctttgcagtatacaaggacta

SEQ ID NO: 630432 - DNA, 100 bp, Homo sapiens
cacagtggttcgtcctcccaaacaactgcttcctgaatctacccctgcaggaaaccaagaaatggccttggacaagattcgctatgagagcctgacagac

SEQ ID NO: 630433 - DNA, 50 bp, Homo sapiens
ccgcctctgtattacttaccaggtggtgatgatgtccagcaactctgtga

SEQ ID NO: 630434 - DNA, 74 bp, Homo sapiens
agcgcagtaccaccttccagagatcgtgctcactgtgccatctgcacagaccgaatatggggacttggacgcca

SEQ ID NO: 630435 - DNA, 75 bp, Homo sapiens
aatttttaagtaaaaattttcagaagcacatgtattataacaggatatggatatagatgaagggcaagatggagt

SEQ ID NO: 630436 - DNA, 100 bp, Homo sapiens
atcaccttcaaggagcacaagtagctgctcttccaagcaaggaagtcgacagtttcagaaaattacaggtgatgctagaattcctttgcctctcgactcc

SEQ ID NO: 630437 - DNA, 100 bp, Homo sapiens
accaccacagagtctgtggaagaggtggttcgaggcgcctccttggcattataacaaaaaaagatatcctccggcatatggcccagacggcaaaccaaga

SEQ ID NO: 630438 - DNA, 100 bp, Homo sapiens
gcggcggcggcggcgcggggaccgaggtgtcatggagaaactccagctgggcccagagattctgcagcgggaaaatccaaggcttatttatgccaggctg

SEQ ID NO: 630439 - DNA, 90 bp, Homo sapiens
acaagagttctttagtttcatctctctataaagttatccaggagccacaaagtgagatccctaaagaagtggctgacatctttaacgccc

SEQ ID NO: 630440 - DNA, 100 bp, Homo sapiens
ccagattttaagcagcatgttcagataaatctgaatggaagagtgaggagagtagttatcttgatggaattagaagttttgaagtcagctgaagcagttg

SEQ ID NO: 630441 - DNA, 96 bp, Homo sapiens
cgccactacagttcatcaacatcaactacgtccctctgaagctttccaaggaatcccttcaatctgtggatgtcctccgagaggaagtgagtgaga

SEQ ID NO: 630442 - DNA, 80 bp, Homo sapiens
aagctcgccaaacaggcggaggagcccagagggctgaaatctctttaatgatggagggaagcaggcagacgcgagtgtct

SEQ ID NO: 630443 - DNA, 74 bp, Homo sapiens
ctcaagtcgacaggggatgggaccctaggtctgagcgggaaagttccgaagaataggagtggctgagttagcta

SEQ ID NO: 630444 - DNA, 88 bp, Homo sapiens
taaagtcacccggcggccaaaggccagtgactaccaacgtttggaccagaagggcttggcctctgtgttctccaaccgcacatcccgg

SEQ ID NO: 630445 - DNA, 90 bp, Homo sapiens
gcgggatccaaagtacagcttctagcgacccccaggagtactgagtgaacaagcaagtttgaaggatgacctctaggaagaaagtgttgc

SEQ ID NO: 630446 - DNA, 82 bp, Homo sapiens
cagggagctatgcaacagtttaaccaacgatacctctattcggtggtatggcaggacttcagtcaatgatgaggcagtttca

SEQ ID NO: 630447 - DNA, 95 bp, Homo sapiens
aaagctgtgaaatcaaagtctctacccctctgaagtttacccggatggcctgactcatcccagacacatcaaagctgcccaatgatctgcttgat

SEQ ID NO: 630448 - DNA, 100 bp, Homo sapiens
cgggacggctgccggcctgtgtggtggactgtggcacggggtttgatctgtggatgaaatgaatcatgattttcaagctcttgcattagaatctcgggga

SEQ ID NO: 630449 - DNA, 100 bp, Homo sapiens
tgggaggagcgcctggactcgcgggcggcggcgagcgcctttacaatggccctgaccctgtttgggatgacttgtcaagctcgaacatcatatactgaag

SEQ ID NO: 630450 - DNA, 50 bp, Homo sapiens
ggacaagcgaggaagtttctttaagctccatcaagtatgatggtgaagga

SEQ ID NO: 630451 - DNA, 98 bp, Homo sapiens
acccctttaatgccaagcagcccaccgacatggctcgccggcagcagaaggctaggcagctggaagagaaagaccgagtgctaaagaagcaggatgca

SEQ ID NO: 630452 - DNA, 100 bp, Homo sapiens
gccacttcacacatggagagatgcaagaccagtccatttggggaaatccttcggatggtgaactcattagaagtttgcctgcaatgagatttcattctct

SEQ ID NO: 630453 - DNA, 51 bp, Homo sapiens
atatattggagctacatggatgtcctgtaagtagtgttttggtgaataaat

SEQ ID NO: 630454 - DNA, 80 bp, Homo sapiens
tcccatatctggacatctggaacatccatgctcgatgcattctatttctcatcatttggctcataactggaggaaggcac

SEQ ID NO: 630455 - DNA, 75 bp, Homo sapiens
gtgaccgagagcgcgaatatcgtcatcgttagaaggaagctgcactgcaccaggaattacatccacctgaacctg

SEQ ID NO: 630456 - DNA, 74 bp, Homo sapiens
cggtgccaggaccaagtatctgccacagttccacaatggcgagtctgaggagagccacgagcagttcctgaagg

SEQ ID NO: 630457 - DNA, 75 bp, Homo sapiens
agaatatttggtgatccaaattctcatatggtgcttgtgaatgacttcttcttggtggcttgtcttgaggatttc

SEQ ID NO: 630458 - DNA, 82 bp, Homo sapiens
cccggaacacaagctgtgaaacactagaggctgaggctgcagtggccacccaggagacatccaccgtcaggctaaaggtcag

SEQ ID NO: 630459 - DNA, 75 bp, Homo sapiens
gcagcttcaagcttaggaccacccaccatgcctatccaggcgaggattaaatccaccacacagggtgaaatctat

SEQ ID NO: 630460 - DNA, 75 bp, Homo sapiens
ctcccaagtagctgggatcacaggatctccctaatactatgaacgcggcagagataacggacaagctcggcctcc

SEQ ID NO: 630461 - DNA, 100 bp, Homo sapiens
gtcagccctggtgcaccgctatctgacggggacctatgtccaggaggagtcccctgaaggtgtgggcccatcgctggatggatctgtcagaacacggctt

SEQ ID NO: 630462 - DNA, 74 bp, Homo sapiens
ggactctggagctgacagcgcgcacttcacccgcagttggactatgagagtaaattgcaggccttgcagaagca

SEQ ID NO: 630463 - DNA, 75 bp, Homo sapiens
aaactggtcaaatgcactgtccagacggagatccgggactcgctcagcagcagcctgaaaacttgctacaagtat

SEQ ID NO: 630464 - DNA, 78 bp, Homo sapiens
cagcggcatgaccattttcttcagcctccttgtcctagtttctgtagaaaatgtttcctgactgcaatgagggaaagc

SEQ ID NO: 630465 - DNA, 100 bp, Homo sapiens
ctgacatggtcatgagctttgtcaacttaggtaccgctagagcgacatgatggtggaatctgcctcggagacaatcaggtcggctccatctggtcagaat

SEQ ID NO: 630466 - DNA, 101 bp, Homo sapiens
ggaacacatccaggaaaagataactttcgacacacctgtagacgttcgccaggtaaagggtgctgaaaagtcacccaccacttcagctgaccttaagtcag

SEQ ID NO: 630467 - DNA, 75 bp, Homo sapiens
tgttgaaagactcagatggttattaatacgttttagcgatcctggccaatgtgatcattttcatctgtgggaacc

SEQ ID NO: 630468 - DNA, 75 bp, Homo sapiens
cagcagccctgcttcttcacagttctacacagtctcaccagtggtattcttggggcccacctaatatgcagtgta

SEQ ID NO: 630469 - DNA, 74 bp, Homo sapiens
gatgttctttcgatggtactgcagtggcaactaacaaagagcagtcattatggcgaaccttggctgctggatgc

SEQ ID NO: 630470 - DNA, 74 bp, Homo sapiens
tgcaaagggcgtggcattgaccagatgaggtggaggaccatcctgctacagtattgctttctcttgattacatg

SEQ ID NO: 630471 - DNA, 50 bp, Homo sapiens
ccgcttttcaacaccctgatgcctgaaggaccattcagacaatccccttg

SEQ ID NO: 630472 - DNA, 90 bp, Homo sapiens
cgaagtttagcaatggaaaagataaagtgttttggttttgatatggattatacccttgctggtagatataatctgtggtgatcacctgtt

SEQ ID NO: 630473 - DNA, 100 bp, Homo sapiens
ctgccgtctccgccatcgagcgcccctccgagctggggttggacgctgccagtttgcacagcagcagacccaacatgagtgaagtttcctgcaagaaacg

SEQ ID NO: 630474 - DNA, 100 bp, Homo sapiens
ccgacaccatccgctgcgtctacatcctggacccctggttcgccggctcctccaatgtgggcatcaacaggtggcgaaataagcgggttttgaaaacaaa

SEQ ID NO: 630475 - DNA, 50 bp, Homo sapiens
gccttcccagtagctggaactacagggccacgactgcttcccggtgctgt

SEQ ID NO: 630476 - DNA, 98 bp, Homo sapiens
gcggcggagcggccggtccacggaggagctcaccatctgctacctggatatgctgatgaccagtgaggagcgccggaagcagctgagggaccagtact

SEQ ID NO: 630477 - DNA, 90 bp, Homo sapiens
ctacatcatcgacctgcagtccatgcaccagtttcgccaggacacagcgtctgcttctgcgctttgcctgggagaggccctggtggcctc

SEQ ID NO: 630478 - DNA, 75 bp, Homo sapiens
accattccagaaaatgggattgcccaccacgataatgcagttcttattactagcaattcccttgactgaagacgt

SEQ ID NO: 630479 - DNA, 73 bp, Homo sapiens
tttagtgctgtctccgcttttctttcaccttcacagagtacctggagtagaacagaaaaattattatgtctgt

SEQ ID NO: 630480 - DNA, 100 bp, Homo sapiens
gctgggacgtacggagcccgcaagtcccggcccgagtaatcaagatgattaccaactggttcgaaaacttggtcggggaaaatatagtgaagtatttgag

SEQ ID NO: 630481 - DNA, 82 bp, Homo sapiens
agaagatacacggaccagaggagcctggaccgctcattcggactcgtcgggcagggcaaaagagttggtagtggtgcacaaa

SEQ ID NO: 630482 - DNA, 100 bp, Homo sapiens
aatgaatagacccagaaccctcatcataatgtgattcgcctttgccagtctcatctcgtgtctgctttgttaagttccatgatccagactcagcagttgt

SEQ ID NO: 630483 - DNA, 88 bp, Homo sapiens
ggctgtgcaaccatcttctggcttttgaaatatcggtgaactgcccctgtccctggccgcgtgcaccaaccagctgggcatcgtgaag

SEQ ID NO: 630484 - DNA, 100 bp, Homo sapiens
atcctgaccatgatcttggaatcattttgctctcagtcatccttacccctaaagaaggagagtccagggatgtggttattctcgttcaagttaatccagg

SEQ ID NO: 630485 - DNA, 80 bp, Homo sapiens
tcacgtatttaagagcctgaatattccaggtttgatctgtggatgaaatgaatcatgattttcaagctcttgcattagaa

SEQ ID NO: 630486 - DNA, 51 bp, Homo sapiens
cattggtcctgtgtcatcaataaacatggatgtaatccctgttcattacta

SEQ ID NO: 630487 - DNA, 100 bp, Homo sapiens
aaaaatttatttacagctcttaatgcagggttgaagctttgagagaagcagcaactgctgttgagcaagagaaagaaatccttctggaaatgatccacag

SEQ ID NO: 630488 - DNA, 75 bp, Homo sapiens
ggggaaccaaggagacgctcctggcactgcagtatatttgccttccctccatgatctccaacactatccgataaa

SEQ ID NO: 630489 - DNA, 50 bp, Homo sapiens
acttgaaataccggatgattttggagctagtaactgcacagacccatctg

SEQ ID NO: 630490 - DNA, 100 bp, Homo sapiens
gagcagatgtgaataaaactgaccatagccagagaacagccctccatcttgcagcccagaaggtaaaataccatgaagattttgaaaaaacaaaggggag

SEQ ID NO: 630491 - DNA, 80 bp, Homo sapiens
ctgaaggccgccagcccagccccagccccagccctacagagaactgtttgaggcgaagagatgctggtttgttgaatcag

SEQ ID NO: 630492 - DNA, 75 bp, Homo sapiens
gaaattttcaaacttagactaggacatctcaaaaagtgttgcatctgagccaagaaaactttatgaaatgccaaa

SEQ ID NO: 630493 - DNA, 100 bp, Homo sapiens
ttacactggaggaaggaaaaggagaccttgaggaatatggtcaggcagcggaggaggagaaagagatggacctcccggactcggcctcgagggtcttctg

SEQ ID NO: 630494 - DNA, 98 bp, Homo sapiens
ctgcatatctgaagcggctcccagtccctgaaagcattaccgggttcgctaggctcacagagaacacgtagcgactccgaagatcagccccaatgaac

SEQ ID NO: 630495 - DNA, 74 bp, Homo sapiens
gggaccccagggcagcgaagcagagtctcattctgttaccaggctggaatgcagtggcgtgacctcagctcact

SEQ ID NO: 630496 - DNA, 88 bp, Homo sapiens
gcgcagggcctgcagcgggagctggacggcgagcgcgagcggcgcgagaaaacccgggaaaaggagaagatgaaggaagccaaggatg

SEQ ID NO: 630497 - DNA, 82 bp, Homo sapiens
cctaaagctggagtattttgagattggagaattaaggtccggaggcgggggcccccggggcgactcgggggcggaccgcggg

SEQ ID NO: 630498 - DNA, 75 bp, Homo sapiens
agccaaaggatggtgagattgttggcctttcaggaagagtgcttaagaccaaactagagtcagaacgaatactag

SEQ ID NO: 630499 - DNA, 118 bp, Homo sapiens
actccagccaacactgatcttgcaaactcagatgcgctgaagctagctaaagaagttgatcctcaaggactggggttttaaggggtgtggcaggaggttttggactcgatgagtttcc

SEQ ID NO: 630500 - DNA, 100 bp, Homo sapiens
acctcaggacttgagtaacagcaacatggtgattttacaacgagatgctgctctccatagggatgctcatgctgtcagccacacaagtctacaccatctt

SEQ ID NO: 630501 - DNA, 98 bp, Homo sapiens
agatcagaactgaggaacaaaaacccccatcctgggaaaaatggggaagctggtggagccgccaccaaaatgcagattttcgtgaaaacccttacggg

SEQ ID NO: 630502 - DNA, 50 bp, Homo sapiens
ctcaatctccttttccttggctacccgaaagaccacagcaagattctttc

SEQ ID NO: 630503 - DNA, 123 bp, Homo sapiens
atgtgcattgccattgcgatttctcttctcatgatcctgatatgtgctatggctacttacggagcgtacaagaattcgtacagatgatgactgcaaaatgaagacctactttcaactcctttt

SEQ ID NO: 630504 - DNA, 100 bp, Homo sapiens
tgaacagaacgcggctcccagccacaccaagttcagataacagcatacaggttttccccccccaccccgtcatgtacagctgaatcatgcagaatttgaa

SEQ ID NO: 630505 - DNA, 100 bp, Homo sapiens
atcgcttgaacccgggaggcggaggttgtggctgccagagctgctgagggggagagcagacagaagttcttcacccaggatattaatggaatcctattag

SEQ ID NO: 630506 - DNA, 50 bp, Homo sapiens
tctgcactgtttacaggcacagctctaagcgaaagacatgaggcctcagc

SEQ ID NO: 630507 - DNA, 82 bp, Homo sapiens
ctgccaatgctttctcatttggacccagactccagatcgggagtttgtcactcaagccctatcagaaggttggtttgaattg

SEQ ID NO: 630508 - DNA, 100 bp, Homo sapiens
ccccccgccctgttcgagctgtgcgggcgggcggtgagcgcccatatgggggttctggagagcggggtgtgggggacgactggagtgagcactggcctgg

SEQ ID NO: 630509 - DNA, 109 bp, Homo sapiens
ccggcccaccctacatttagcgcatcatgtgatccgggctgtggaaaatctctgttctcacaaagtctccccaatgctctacaagcaactgcgtcaggcctgtgaagac

SEQ ID NO: 630510 - DNA, 75 bp, Homo sapiens
ccaccatctccatcacccaccaacaacaccacaataatccacagccaaggtgtgaaggaattacaagtccagaag

SEQ ID NO: 630511 - DNA, 88 bp, Homo sapiens
ccctccctcttgcccaacccacagacatattttacaacaaagaatactgaatggctcttctaacagggtgctgtggaatctattgcca

SEQ ID NO: 630512 - DNA, 99 bp, Homo sapiens
taaagattacagtgacaagaaaaacattgtttgaggattcctttcaacaggtgccagatgccagttttagattctggctccaccactgacacagctggg

SEQ ID NO: 630513 - DNA, 82 bp, Homo sapiens
aataaatccggattcttcaatcaacccccttggatttacactgggcaacgtggttggaatgtatctggctcagaactatgat

SEQ ID NO: 630514 - DNA, 95 bp, Homo sapiens
cgcaggacttctcctggcggcgctgcggatccagggggtcggctgccaggtacaggcctactctgtgtatgatgaagacattgggtactgtcaag

SEQ ID NO: 630515 - DNA, 100 bp, Homo sapiens
gccattaccagttcctacagctccactcgaggcatctcacagggaatgaccctgcataaaaaggcagctgaagatagactggcaagcacaggctcagggc

SEQ ID NO: 630516 - DNA, 100 bp, Homo sapiens
ggagcgaagagctgcttctgtatcttaaggatgtccatgaggagccccatctctgcccagctggccctggatggcgttggcaccatggtgaactgcacca

SEQ ID NO: 630517 - DNA, 100 bp, Homo sapiens
gtttctgactcacacgggggagtcgggggagtcgtaaacaaccctgaagagaacagccaggcctggtggccactaacacggacaccagccgaaatgccgg

SEQ ID NO: 630518 - DNA, 82 bp, Homo sapiens
ggctccggctggtctgtggtgaggtctgaggcccttcatccctgagaaggacagccagcacttcgagaacttcctggagacc

SEQ ID NO: 630519 - DNA, 90 bp, Homo sapiens
cgcatcggaagacctggaagccaatgagatcgtgagcctcttgacgtgggtcttaaacacctacacaagacctgcttttttaaaggctgc

SEQ ID NO: 630520 - DNA, 96 bp, Homo sapiens
ggaaaacctggccctcttcaatttctgacaaaagaacccagtgacttgattgtaaaaatttacagagcggaatcatatgctggtctccaagagttt

SEQ ID NO: 630521 - DNA, 75 bp, Homo sapiens
ggaatctggaagtgaactttctaaaacattattaaagagggtgtacgggagtttcttggtaaatccagaatcagg

SEQ ID NO: 630522 - DNA, 82 bp, Homo sapiens
tgctggtgtggttcggagccgcggtctgttatgttctgaacccacacatgttttcggaaggaccagatggctgacactggct

SEQ ID NO: 630523 - DNA, 97 bp, Homo sapiens
aaaatcaacgacaacttgagcacagagctattaagaatggcaaaggattgcatagcaagaaggaagtgcctatccaccgtgttgcagatatatctgg

SEQ ID NO: 630524 - DNA, 100 bp, Homo sapiens
cggacatcactttagaccctccacctaattgcaggtattttggcctctccccagtctgctcctggaaacttggacaatagtaaaagtggagaaattaaag

SEQ ID NO: 630525 - DNA, 96 bp, Homo sapiens
cagctacgaaggatggaatcttcaatcaatcatatttcacaactgtgctccattgaagtgacttgtgaatcagccagtgtgatggctgcgacactg

SEQ ID NO: 630526 - DNA, 82 bp, Homo sapiens
tggagtggccttcaacccatcagcgccccagacaatgcagatcttcgtgaagactctgactggtaagaccatcaccctcgag

SEQ ID NO: 630527 - DNA, 75 bp, Homo sapiens
tggatatctctactcgctccaaaggaacagcttgagaactatgacttcaccaaattccactcgctgaagcccaag

SEQ ID NO: 630528 - DNA, 116 bp, Homo sapiens
ttcatggattatcttacgtagataagacactgcaacacctgaagaaagttcgtggcaaagtctggaagcaaagaatatctagccctctgttcaacaccaaacaatacacaatggaa

SEQ ID NO: 630529 - DNA, 82 bp, Homo sapiens
gtcaagggcagtcatcagatccaccatctgcttcaacggtggagccttttgccagcttgaccgaggccgtgcggagctcagt

SEQ ID NO: 630530 - DNA, 90 bp, Homo sapiens
aatccctctgggagtcaccacatcagatacatcctactcagatatggctgctggatcagagttctctacttaaaagacaatgactactga

SEQ ID NO: 630531 - DNA, 82 bp, Homo sapiens
tggctgcggccgccctgggccgggccccaccggacggaacctggccactgctccttggtccttggcattatgacgggattcc

SEQ ID NO: 630532 - DNA, 100 bp, Homo sapiens
gcgaatgtggaggatagactacagtgccgctggtgctggagaatctggtaaaagcaccattgtgaagcagatgaggatcctgcatgttaatgggtttaat

SEQ ID NO: 630533 - DNA, 88 bp, Homo sapiens
agaagagaccatccatatttccagccatcgactacagtgacagcgccatgctccaagctcagcagctgctcctggggctgggctcttt

SEQ ID NO: 630534 - DNA, 100 bp, Homo sapiens
gagacgagctgtggggatctggcactgtggttcctgcatgaagacagtggctggcggtgcctggacgtacaagcgatcagtgggtgaccgcggctgcgag

SEQ ID NO: 630535 - DNA, 75 bp, Homo sapiens
gaagaattcgggaaaagcaacgtggggcattccagataggtgaaaatggtgatcccaaagccttcttaatagaga

SEQ ID NO: 630536 - DNA, 75 bp, Homo sapiens
ccaacgcatcatgccagggagccaagcgtcctgcccggccggatgtttcagcagcccctgagaaggaagaggagg

SEQ ID NO: 630537 - DNA, 82 bp, Homo sapiens
ggcgcggcgctggcgctgccggagctgtcgacccggcctggcgccggactagatgaacgactttcgaagtaaaatgcaatca

SEQ ID NO: 630538 - DNA, 83 bp, Homo sapiens
atctctttcaatgacaaaaagtttgtcattaaacccatcgacaagaaggcacctaattcagcggggtgccaagtcgttttctg

SEQ ID NO: 630539 - DNA, 102 bp, Homo sapiens
ctttcctaccatctaaaatacgaaggtttctggctggcacttttcaggattagaagaggctgtgtatagaaacatacaagcttgcaaggagcttgcccaaac

SEQ ID NO: 630540 - DNA, 73 bp, Homo sapiens
agacacgcttcttctggaagaccagccaacagagccctcaggactgcccccggaccctgctctcacccctggc

SEQ ID NO: 630541 - DNA, 95 bp, Homo sapiens
ggccacctggttcctgcgtgctacggccctgtgggcctgggagctgcctctgaggaacacgccgcagacatgcaagaaagcacttcagccaagca

SEQ ID NO: 630542 - DNA, 75 bp, Homo sapiens
tggagggagcaggagctggatccggcttccggaagtggacctgacgctggaccctgacacggctcacccggccct

SEQ ID NO: 630543 - DNA, 75 bp, Homo sapiens
ttcttttttgagaaaggaaggaatatatcctgactgattgatatcaatgcttacaattgtgaagagcccacagaa

SEQ ID NO: 630544 - DNA, 51 bp, Homo sapiens
gcttaaccctagttcacgaatcaaggtctatcatatgcaagtcacacggtt

SEQ ID NO: 630545 - DNA, 98 bp, Homo sapiens
tttttggaattttatctcctagtagtgatctcacagtggacccccaaaagtacaagggcatatttaacggattctcagttacacttaaagaggatggt

SEQ ID NO: 630546 - DNA, 89 bp, Homo sapiens
tcacctcggtgtctgcagcaccctccgcttcctctcctaggcgacgagacccagtggctaggtgtaccttccggtttcccagcacggcc

SEQ ID NO: 630547 - DNA, 98 bp, Homo sapiens
cactgcccccgagaaggccggagagaccggtgggtccgctgacacacaccaggatgcccaggctgaggaagagatcaagcaagagatgaacacactgc

SEQ ID NO: 630548 - DNA, 75 bp, Homo sapiens
gccggctcccctctcaggacaacccagatgtgcaacaaagtgcgatgactatttggagttttcctcgtcttactg

SEQ ID NO: 630549 - DNA, 75 bp, Homo sapiens
gaaagataggcggccatggtccaaccttgaagtcacccacaaaagctgtatataatgccagacattggaatcatc

SEQ ID NO: 630550 - DNA, 127 bp, Homo sapiens
cccagatctcccgggggatcccacagaaccggcccatcaagctcctggtcagagtgtatgttgtaaaggagaaggagcgctcctggcaccagcaggagctggcaaaggctctggagagcttagaaag

SEQ ID NO: 630551 - DNA, 100 bp, Homo sapiens
atgaggatgctgctcatgttttagcggaactggaggtaacgatgcaccatgctctcttacagagctgtggcagcttatcttcgtgccctaagtttgagtc

SEQ ID NO: 630552 - DNA, 96 bp, Homo sapiens
ccggcttggcgtgaccctcgcctgatccaggtcaccatggctgttattggctcccttgctgtccccagctgttccccaggtcacctccccaccttg

SEQ ID NO: 630553 - DNA, 83 bp, Homo sapiens
cacacgcgcagccccggcctctcggcctctgccggagaaacagttgattatggaagattcccacaagagtaccacgtcagaga

SEQ ID NO: 630554 - DNA, 100 bp, Homo sapiens
gaaagagcaccgaagaagcttcgaggatctgaatcccgtcacggggctgctgtcagccagccatgagcagaaggatgcctgggtgcgggataacatctac

SEQ ID NO: 630555 - DNA, 90 bp, Homo sapiens
gccgcagggtgtccttcggagtggacgaggaggagcgggtccgggtgctgcagggtgtccgggtaaagggagaagatgaggaagagaaca

SEQ ID NO: 630556 - DNA, 83 bp, Homo sapiens
catcttcatgagctgccagagtttaacctcatccactccctgagctccaacagacagaagcagagctcaggaaggtggatgag

SEQ ID NO: 630557 - DNA, 74 bp, Homo sapiens
ctcacctccggacgtgagaattacaggcttggatctcaaaccgccgcgctaaaaagacaaccccacttttgagc

SEQ ID NO: 630558 - DNA, 90 bp, Homo sapiens
gcctcgcctcactatggcagcagcacggcacagcacgctcgacttcatgctcggcgccaaagaattaacactgaatcctccggaaggaat

SEQ ID NO: 630559 - DNA, 95 bp, Homo sapiens
ctccctctgcccccccttccccacgcaaccccagatccatttacactttacaccatcactggtgcaagctatatttaacggagatcctgatgaag

SEQ ID NO: 630560 - DNA, 50 bp, Homo sapiens
caaagtgcccggacccaaaacaggaagaacaagtacttgttactcaacaa

SEQ ID NO: 630561 - DNA, 101 bp, Homo sapiens
atgctaacacatctgccaattatgatgtggagctacttcatcacaaagatgcacatgtagatttcctgaaaagtggggaaagacgcctcagccttcgccgc

SEQ ID NO: 630562 - DNA, 74 bp, Homo sapiens
ctgcagccacatactatccgtttgttcaggaaccaccagtgacagaacgtggcatacctctatgaatctttaag

SEQ ID NO: 630563 - DNA, 100 bp, Homo sapiens
cggcggcggcgcgcgggggcgacgcgcgggaacaacgcgagtcggcgcgcgggacgaaggttcttgggtgtctctggggagtccctgggccagaccttcc

SEQ ID NO: 630564 - DNA, 82 bp, Homo sapiens
atcctcatgttcactacccttcatgcatgaaagacaaagctactcagcactgaacctaccagatgtatttgggttggtcgtc

SEQ ID NO: 630565 - DNA, 88 bp, Homo sapiens
tgcccaaagaaatgtagccttggaccgagacatgatgaagaaagatgtacctgtgtggtctaagctggaatctggtcaccttccatcc

SEQ ID NO: 630566 - DNA, 82 bp, Homo sapiens
cagcagctccctctgccctatgaacagcttaagcacttttaccgaaaaccttctccccagccatccagtccaatggatcaga

SEQ ID NO: 630567 - DNA, 100 bp, Homo sapiens
aaggaaaacatgacgtctccagccaaattcaaaaaggataaggagatcatagcagagtacgatactcaggtcaaaggtttgggcaaaactacccctgatc

SEQ ID NO: 630568 - DNA, 98 bp, Homo sapiens
ggattttcttgttctctgctgctactgtaaaaacgaaatgagtgattgggaaaatgaggtacgttagtgttcgcgattttaaaggcaaagtgctaatt

SEQ ID NO: 630569 - DNA, 80 bp, Homo sapiens
atgtcgggacaccccggaagctgggaaatgctgtgccataagtaacgtgaagaaggtgtccctggaactgggcgggaagt

SEQ ID NO: 630570 - DNA, 100 bp, Homo sapiens
ttctgcagcagattgaattagatctaaaagccacccaggccttggtcctagcacccactcgagaattggctcagcaggaagccatcttcgacaagagcac

SEQ ID NO: 630571 - DNA, 90 bp, Homo sapiens
ccaagggtccttcaagtgtaaatgcaagcagggatataaaggcaatggacttcggtgttctggactccctggaggaaaagcggaagcggc

SEQ ID NO: 630572 - DNA, 60 bp, Homo sapiens
ggagtgcatcaaaggtgtgaacacagatatttgttcagtcgaatcaaggtgaagaggaaa

SEQ ID NO: 630573 - DNA, 83 bp, Homo sapiens
cgggcactgctttccactcggctcctgtcgtccgttctctcaggctcccgttcaggtcaaaatgcagatcttcgtgaaaaccc

SEQ ID NO: 630574 - DNA, 100 bp, Homo sapiens
cagagttctacagagtcaccactgaacaatatcagaaagctgctgaagaggtggaagcaaagttcaaattggactccttcttgtcctgagccagtgtata

SEQ ID NO: 630575 - DNA, 75 bp, Homo sapiens
ggagccggtgctgcagaaccagatccgggagcacgtcatcgccatcgaaggagcacagggatcagttgtccttgt

SEQ ID NO: 630576 - DNA, 50 bp, Homo sapiens
ctcctgagtggctgggactacaggttatttggacaagaggcacattgacc

SEQ ID NO: 630577 - DNA, 75 bp, Homo sapiens
tttttttgtctggaggaatggggacaccaaaactcatttggcagcagaggtgagataagttttttcagtcagcca

SEQ ID NO: 630578 - DNA, 96 bp, Homo sapiens
ctcgaggagggcctctgcggagcgtccgaggcctgtgtgaacgctgggagtgtccactcgccttccaccagcatggcaacgtcttcacagtaccgc

SEQ ID NO: 630579 - DNA, 101 bp, Homo sapiens
tggagcgtaagaacctgatcaccgtgtgcagctccttgctcggattgaacgtatggaaaggcggatgcagctggtaaagaaggataacgagaaagaaaggc

SEQ ID NO: 630580 - DNA, 100 bp, Homo sapiens
gcgttgaacaaccacagctctattcccatggacccagtgtttggaacagaaccagatatgatccgggatggatccaccattccaattgccaaaatgttcc

SEQ ID NO: 630581 - DNA, 100 bp, Homo sapiens
gactttccaatgggtgaagctcccagctaccatgccagagccagtttattttcactgtgcagctgttacaccagtctcaagattctgccctccaagaaag

SEQ ID NO: 630582 - DNA, 89 bp, Homo sapiens
ggtcgtccgctggacaagcacgagggcgcgctcgagacgctcctgaggagagtagttatcttgatggaattagaagttttgaagtcagc

SEQ ID NO: 630583 - DNA, 75 bp, Homo sapiens
caacaggttaacgtgtatggcgtgtgcgtgccagaaagtttcctacactactgaggtttaggggcactgtgaagc

SEQ ID NO: 630584 - DNA, 82 bp, Homo sapiens
cgtcgctggcagccgctgtacttggtacgaggaacagcaaattcaggaaaaagtggcgacctttcgactcatgttgctggag

SEQ ID NO: 630585 - DNA, 88 bp, Homo sapiens
gcggagaaggatgacaccggagtttgacgaagaggtggtttttgaggttatgaagttcatggaatggaaaaaataccagaagatggac

SEQ ID NO: 630586 - DNA, 100 bp, Homo sapiens
gaagaggcagtgcaagtcaaagagcagagcatcctggaactgggatctctcctggcaaagactggacaagctgcagagggctgtgctgaagtttgctgct

SEQ ID NO: 630587 - DNA, 75 bp, Homo sapiens
aaggacagagtcagtgatttccataaattgaagcaaaatggttcacaggcaccagccagaccccctaaaccacga

SEQ ID NO: 630588 - DNA, 98 bp, Homo sapiens
ctgcccgagtcctccccatcatgttccctgcactctacaggaactccaagagccactggaacaaccgtggtccttcagcatatctctgtgctgcagac

SEQ ID NO: 630589 - DNA, 75 bp, Homo sapiens
atatcctcattcacctgcctctcagtatcaacaggagcccaggatgtgcgagttcaagtgctacccgaggtgcga

SEQ ID NO: 630590 - DNA, 100 bp, Homo sapiens
cgcggggcccggcgaagggcaggggagcgatctctgaaatcgcccattcagtccgacttggatgcgttccactcgggatttcaaacatgcgccaaagaag

SEQ ID NO: 630591 - DNA, 100 bp, Homo sapiens
cgggcagttgcagtgttggagctaaaatttgtaagactccagggcctcccagccgtgaataatctgatggttcctgaaatgactggggaagcagacgctt

SEQ ID NO: 630592 - DNA, 75 bp, Homo sapiens
caagaggaggacagttcgctacacagcaatgcatcgagatacagatccacgggttttagaaaaacaagaattaca

SEQ ID NO: 630593 - DNA, 75 bp, Homo sapiens
ctcggggcctccgcagcgacaacatggaggccgtgaagaccttcaatagcgagacccaacatgagtgaagtttcc

SEQ ID NO: 630594 - DNA, 100 bp, Homo sapiens
gttctatgaggaacgagccaagaaatttccaactggagggcagcccaatggatccaatggtgatgaagagacctcagttgtatggcatgggcagtaaccc

SEQ ID NO: 630595 - DNA, 100 bp, Homo sapiens
acttaactggctatcttttgcaatatcagataagagctctttgttcaatgcctagccacctattcctacagacacggcagtggaaaggaaaagaaagtac

SEQ ID NO: 630596 - DNA, 75 bp, Homo sapiens
gggtttgcgctagcagcgtaagtttttggctttcacccccaaccagtgaccaaagacttgaccactcaaagtcca

SEQ ID NO: 630597 - DNA, 88 bp, Homo sapiens
aaccctacttgcctaaatgaggaatgtctttcctaccatctaaaatacgaaggtttctggctgggtatggcaggaggaaaatatcgtt

SEQ ID NO: 630598 - DNA, 75 bp, Homo sapiens
tgctacacggcgaactggaacccactcggggactctgccttttaccggttccaagaccaaagattaaattaagag

SEQ ID NO: 630599 - DNA, 101 bp, Homo sapiens
atgcgaccggtggcgccggcgcggcttctgcctggagagtccttctgagatgatggctctgggcgcagcgggagctacccgggtctttgtcgcgatggtag

SEQ ID NO: 630600 - DNA, 90 bp, Homo sapiens
ctggcatcagggaggctttcagccggagaagcgagtttcagctgggcgtctctggccgagcctctttttgtggaaaacgacagcagcagc

SEQ ID NO: 630601 - DNA, 100 bp, Homo sapiens
tttaacattccaacacataaaaattatttatccaacagctcctcccagtactatactggcaattgctggagaagattttgcaattgttgcttctgatact

SEQ ID NO: 630602 - DNA, 50 bp, Homo sapiens
ctttctggcctggaggctatccagcgctggagtgcaatggcgcgatctcg

SEQ ID NO: 630603 - DNA, 100 bp, Homo sapiens
gtctgtgatgtcacatctaggagcatctacccatggacagacatgtcttcccatggaggttcaccaggctggtttaacctgcgattattcagaacttcct

SEQ ID NO: 630604 - DNA, 100 bp, Homo sapiens
ctacctgttgggctcaagcaattctcccatctcagcttcctgagtagctggaccacaggcatttatgtttgaatcatctttaagtctggcggtcacaaag

SEQ ID NO: 630605 - DNA, 93 bp, Homo sapiens
tggagcctcagttggaagcagccgatccagcctgcggagcctgtggggcagttgattatggaagattcccacaagagtaccacgtcagagaca

SEQ ID NO: 630606 - DNA, 98 bp, Homo sapiens
gttaacagtgccaccggtgttccaactgtttaaagcatgcccaagagaatcgtaaatgcaaaaattgcttgccttgacttcagcctgcaaaaaacaaa

SEQ ID NO: 630607 - DNA, 100 bp, Homo sapiens
tgaggaaccatgtctccatccccgaccgccctcttctgtcttggccccttcacagatgtagtcactacaaatcttaaattgcgaaatccatcggatagaa

SEQ ID NO: 630608 - DNA, 100 bp, Homo sapiens
gaaactctggaatctccatgtcatgaagcatggacatatctgaagagatggattaagaatgctttggattaaggattgtggagcacatttcaatcatttt

SEQ ID NO: 630609 - DNA, 51 bp, Homo sapiens
ccattttgctaccaagaaagccaaaggggccaggagaagccaaactgactg

SEQ ID NO: 630610 - DNA, 75 bp, Homo sapiens
gaagaaaacacaggagccggagcagaagcaaagaggtggcaagtgggatgatactggtcatggctttctttctca

SEQ ID NO: 630611 - DNA, 90 bp, Homo sapiens
gtggccccgtagctgagagttggtgctacacacaggtggcaagttatggtgtgaagccaagatatggtctagtgacatatgccacatacc

SEQ ID NO: 630612 - DNA, 101 bp, Homo sapiens
aagatggagagaaaattgtggtccagggagagcctggggacgacttttacatcatcacggaggtgtcccgcatgagatgtctgcagaatgagacttacagt

SEQ ID NO: 630613 - DNA, 88 bp, Homo sapiens
actagtgtgcctctgcgaatttaaagctcatgaaaacaggaaacagagcaaatgcagcgttacaatcaaagacttattgaggaattga

SEQ ID NO: 630614 - DNA, 100 bp, Homo sapiens
ggagaatgcgctcttcaagcggatcttgcctggcacctgtgtttgctctgtttgtaccattttactgctccataccaagagtccaagtggcacaaattct

SEQ ID NO: 630615 - DNA, 100 bp, Homo sapiens
catgagaaggtggagctcacggcactcaggtcctggaagccatacgggtgacccgtcacaagaacgccatggcagagcgctgggaatcccgcatctacgc

SEQ ID NO: 630616 - DNA, 87 bp, Homo sapiens
caccagttcccgcaagcccagacaatgccggtggaggaatttgtggctggctggatctctggggcatatgatattttcctgaatgca

SEQ ID NO: 630617 - DNA, 74 bp, Homo sapiens
aagaagaagagcaaagggccttctgcaggtatggtggatattgcccgacagacggttgaatttctctacgaaga

SEQ ID NO: 630618 - DNA, 82 bp, Homo sapiens
gcagctggagcctcaggcggcagcgcttctagatgccttcaattaagttgcagagttctgatggagagatatttgaagttga

SEQ ID NO: 630619 - DNA, 82 bp, Homo sapiens
gaccatcgaggagttcgctgcagtgaaggctgggagcagaacggcctctatgagttcttccgagcaaaaatgcgggcccggc

SEQ ID NO: 630620 - DNA, 100 bp, Homo sapiens
ggctcgcctcctccagctgttgttgctgctggacaaagcagttccaattccagagaaaatgagtgaatgggcacctcgacctcccccagaatttgtccga

SEQ ID NO: 630621 - DNA, 90 bp, Homo sapiens
gatccacttaataactatgcagtcaagctgcattgttgtggaattcacaactactcagactgggaaaatacagattggttcaaagaaacc

SEQ ID NO: 630622 - DNA, 73 bp, Homo sapiens
ccacctggagctgaggaaccggaccccggcagcttggacagtttgcggttgtgaagaaatgccgtgagaaaag

SEQ ID NO: 630623 - DNA, 100 bp, Homo sapiens
catcaggagtgcatcatggaagaggacaatcgcgctccccaattgtggcgcaagggttgagaatgcttgcaccaagcttgtccaggcagctcagatgctt

SEQ ID NO: 630624 - DNA, 100 bp, Homo sapiens
ttgtacagggatgtgatgttggagaactacagccacctgatctcactggctgctgatgaagaagcatttgaagataattctgaggagtacataaggagag

SEQ ID NO: 630625 - DNA, 101 bp, Homo sapiens
gggacggtgctggtctgagctggaccttgtctgatggcttcctccaaccctcctccacagcctgccatagattgaaaaggaagatcaggccaaccccaaag

SEQ ID NO: 630626 - DNA, 98 bp, Homo sapiens
ctggaggcgccgccgcgacagcagcagccatggaggacgagatgcccaagactctttggctggagttgtcttccttggagtcgggctgtgggcatgga

SEQ ID NO: 630627 - DNA, 87 bp, Homo sapiens
gacggggaggaggagcaggagctggaggaggagccgccgccgccagggacctaatacctatcattgctgctctggaatataatcagt

SEQ ID NO: 630628 - DNA, 75 bp, Homo sapiens
aacttctgctacagacgactcaagcttagaagcaaagttaagagactcatcagattctgagctgctgcgggatat

SEQ ID NO: 630629 - DNA, 82 bp, Homo sapiens
tcagaagagtggagggagcgaatcgccaacacgagttccagggtctccctccactgctgtagtaacccgggtccggggcctc

SEQ ID NO: 630630 - DNA, 75 bp, Homo sapiens
agccacatactatccgtttgttcaggaaccaccagtgacagagacagtcattttgtttactcattcagccctgtt

SEQ ID NO: 630631 - DNA, 74 bp, Homo sapiens
gtgatttctgcatttccaactgagatgaacactgggcagcgtagggatggacctcttgtacttataggcagtgg

SEQ ID NO: 630632 - DNA, 82 bp, Homo sapiens
gggcgctcctgagaccctccagcgctgcctggaggagaatcaagagctccgagcaagagtgagccatggagctacgtgtggg

SEQ ID NO: 630633 - DNA, 96 bp, Homo sapiens
ctttagaagactccagcggagaactgtgtctccttgcttctggcctatgagagctacaagaagaaggactacacccaggtggactacttaatcaac

SEQ ID NO: 630634 - DNA, 75 bp, Homo sapiens
gaagatggatatcagctacagactttcctgagtcagggtgataaaagaaaatgtggctgaagttacccgaagttc

SEQ ID NO: 630635 - DNA, 74 bp, Homo sapiens
gccgccgccgctgtccggagccccacagtgagaaagatcagtctaaagaaaaggagaagaaagtgaaaaaaaca

SEQ ID NO: 630636 - DNA, 100 bp, Homo sapiens
ttaaaagcaaaatctgctagcatcagaagccccatgtgccactcccctgatctgcagcttcggtaggccggtggacctggagaaggacgactaccagaag

SEQ ID NO: 630637 - DNA, 80 bp, Homo sapiens
gaatccgagaagagcagagcggagggagccccagacacggctgaccccgcactacatctacccaccagccatcgtgcagc

SEQ ID NO: 630638 - DNA, 82 bp, Homo sapiens
gtttcatcattggcaagaaagggcagaacctggccaaaatcactcagcagatgccaaaggcagctggtgatgctatttctga

SEQ ID NO: 630639 - DNA, 96 bp, Homo sapiens
ctcacctatccatctccctcaaggcagcttttggttgaaatcacaaagattagacacctttttagataggtgttcttcagcaccactgacaacacg

SEQ ID NO: 630640 - DNA, 89 bp, Homo sapiens
gtggagtcggctgagggaaaagcgaggcaaggcaggcgggatcgaatcatcaatttagttgttggcagcttaacatccttattgattct

SEQ ID NO: 630641 - DNA, 100 bp, Homo sapiens
tggccggccctgggcactggaatgaccctgacatggtggtcctggctctgccatatgacacccccgtgcccggctacatgaataacactgtcaacaccat

SEQ ID NO: 630642 - DNA, 78 bp, Homo sapiens
tgagagagtcagagacttctgtgacaacagatagattctgttgctgttaacatttcaaacttggtgcttgagaatcag

SEQ ID NO: 630643 - DNA, 90 bp, Homo sapiens
cctcctggccaccgactcctacaagaaatggtggagtcaatgaagaaagtagcagggatggatgtggagctgacagttgaagaaagaaac

SEQ ID NO: 630644 - DNA, 50 bp, Homo sapiens
ctggacatcgatggacgcattcagaagagtatgctcaggtaatcaaaatg

SEQ ID NO: 630645 - DNA, 100 bp, Homo sapiens
caccgccctcgctgaccgtgcagagggcatgggccttggcctctccagcgtctttgctctgtgcctgggccacacctccagcttctgtgagtctgtggtc

SEQ ID NO: 630646 - DNA, 90 bp, Homo sapiens
ttgtgccagcctacaggaggaaaggccagactcacagaagcagcaaaccctctgctttgctccaccgcccgctaccactgcaagaacggc

SEQ ID NO: 630647 - DNA, 88 bp, Homo sapiens
aagtatccacattgaaacgtaaattggaccagatggtcatccagactcagagctctctctacagagaggaaattctccactgtgcaca

SEQ ID NO: 630648 - DNA, 51 bp, Homo sapiens
attttgcatctgaaaccatacgggacccagatgatgtggtaccagttggcc

SEQ ID NO: 630649 - DNA, 50 bp, Homo sapiens
ccgacagccaggcccgggagaagttatccaaatgtgaaacatttttcttg

SEQ ID NO: 630650 - DNA, 73 bp, Homo sapiens
tttgctctgtggacccgtgagcaagcataagctgccaaaccaagatattaataaggcagcggaaagaagaaat

SEQ ID NO: 630651 - DNA, 96 bp, Homo sapiens
gcctcggcctccccttggattcagacgccgattcgcccagacttatctaaaaacagactggttgaagttccaatggaattgtgccattttgtatca

SEQ ID NO: 630652 - DNA, 88 bp, Homo sapiens
tcctgctggacgacaactttgcctccatcgtcacaggggtggaggaggaaccttttgaagatgctctcaagaaccagcccttggggcc

SEQ ID NO: 630653 - DNA, 99 bp, Homo sapiens
tggaagtccaactacttccttaagatcatcgtactgggcctaatcgctacgtgcctctttggctatgatgcctatgtcaccttccccgttcggcagcca

SEQ ID NO: 630654 - DNA, 83 bp, Homo sapiens
agcagtggagccaccagcagcgggtgggcgacctcttccagaagctggctgaaggtgatgtggccgccctcaaccgacgcatc

SEQ ID NO: 630655 - DNA, 75 bp, Homo sapiens
aacttaggaaacttcatgtcagtgttgaagccttggtctgtcatagaaaaggctacaagacaggcagttgaggca

SEQ ID NO: 630656 - DNA, 76 bp, Homo sapiens
ccaggttcaagcgattctcccgcctcagcctcctgagtagcaattacaggtgaaatgacaatggatgctctgttgg

SEQ ID NO: 630657 - DNA, 50 bp, Homo sapiens
aagtgtgctgatgaagtcctctataaggctggagtgcggtggtgtgatct

SEQ ID NO: 630658 - DNA, 96 bp, Homo sapiens
ccatggcctcagaggaagtaaagcaagggcaaatgacacagctttgtgaactgatcaacaagagtggggaactccttgcgaagaacttatcccatc

SEQ ID NO: 630659 - DNA, 107 bp, Homo sapiens
gtggaacgggccaagcaggtgaccatggcagaactgaacgccatcattggggaaataatgcaaaaggtgtcccaaggctcctgaccagtgaacaaagatttgagaaa

SEQ ID NO: 630660 - DNA, 50 bp, Homo sapiens
ccgaaacgctctgaaaatcgagccggtgtggagagagtatgctctgtgtc

SEQ ID NO: 630661 - DNA, 100 bp, Homo sapiens
actggtgaaatcgcaaactgggcgtctgttccggcgccggacccctatttgcaaagagggctctgaactcctacttcgagcctccggtggaggagagcgc

SEQ ID NO: 630662 - DNA, 50 bp, Homo sapiens
gaagatgaaaatttccattacaaggtaatgagggatcctgcaagcaaaag

SEQ ID NO: 630663 - DNA, 90 bp, Homo sapiens
tctacatctcccacaggaagtgtcacacagcagtcaagtatgtcccaaacgtctctttctcctctaaatcttggtctcttgtttggaagt

SEQ ID NO: 630664 - DNA, 74 bp, Homo sapiens
gcctcgagtttcctgatcacaaaaagatcacgaacctaaaggcagacccagaagagctttttacaaaactagag

SEQ ID NO: 630665 - DNA, 95 bp, Homo sapiens
ttcagcaagtaaccaagaaaaagcaagagctgggcaaaggcttacccaggtttctcacactcatgaaaatgaaaattatctcttacatgaaaatt

SEQ ID NO: 630666 - DNA, 106 bp, Homo sapiens
atcagatggcaccagggactggcagctccactgccgtcaactcctgttctcctcagagcctgactgacttccttttggtagtactgcgtgatgttgttcaggctta

SEQ ID NO: 630667 - DNA, 75 bp, Homo sapiens
cgagctgggaagcctgtcatctgtgctactcagatgctgtccatgggcttctctgatgaaggcggctggctcacc

SEQ ID NO: 630668 - DNA, 75 bp, Homo sapiens
gcaggacctgggcggaggccgccaagacgatataaagacctgatgccacatgatttggctagagcagcgcttacg

SEQ ID NO: 630669 - DNA, 83 bp, Homo sapiens
cgacaagccgctggcagccgcggatctcaccgccgctcagggttttgagagattacctgaagttgcactcaaaagcaagatat

SEQ ID NO: 630670 - DNA, 51 bp, Homo sapiens
aaacaaagaggattttgagaaggatttgagcctccttgattttaatagaga

SEQ ID NO: 630671 - DNA, 100 bp, Homo sapiens
gactcatcaagtgacttgctgagcaaaccctgccgagaagaggttatggaaacgtggtggagttgcgcattaacagtggtgggaaattacccaattttgg

SEQ ID NO: 630672 - DNA, 138 bp, Homo sapiens
tatcgtggagccatgggctttattttaatgtatgacattacaaatgaagaatccttcaatgcagtacaagattggtggaaaaatcacaagtgcacagtcgacccttcactctctctccacatcttcgtcatcagtcac

SEQ ID NO: 630673 - DNA, 100 bp, Homo sapiens
tcctgtgggccgacagaagtgcagacaccaagctggatggtttccttttaggcaagaaggaggtcatcagcaggctcccaacaataatgccgaagttaac

SEQ ID NO: 630674 - DNA, 75 bp, Homo sapiens
tttaaccagcatggctacttcatattttggaaagcagtttttaagacaagccaatggaagcactgttgtgaagaa

SEQ ID NO: 630675 - DNA, 85 bp, Homo sapiens
tttatgcagatttgatggcaatacattaaaaactactcatgtgcatagtggtaaaatggatgaaaacagatttgtggcagttacc

SEQ ID NO: 630676 - DNA, 100 bp, Homo sapiens
tgccctttgggaatgtcgtgtctgccaaggttttcatagacaagcagacaaacctgagcaagtgttttgtctgggcccgcaggcaagccgcttcttgccc

SEQ ID NO: 630677 - DNA, 80 bp, Homo sapiens
cttttgtttatggcagaactcagatgactttgacttttcaaaaggaagtggcagagtggtagtcgctcttctaaaacttt

SEQ ID NO: 630678 - DNA, 75 bp, Homo sapiens
agctgctgcgcctcaaagccaagaggagagggcagtgagagataggaatctcctccaggttcatgaccataatca

SEQ ID NO: 630679 - DNA, 75 bp, Homo sapiens
ctgtgtcaaacatccatatcataagtggaattttggagatattcaaagtgccggtggtggtgtgcacattgagcc

SEQ ID NO: 630680 - DNA, 100 bp, Homo sapiens
gttccttcagccaaagaaacaagccgtggaataggtgtatcaagtaatggtgcaaagcctgaaaatctgaatctgaagctgaagaaggtgactgaatttt

SEQ ID NO: 630681 - DNA, 122 bp, Homo sapiens
ctaaagcaggaaaataaaactcttttgaaagttgtgggtcagctgaccaggttatcttatgatgaggcttttgctatggctaatgatcccttggaaggcttccatgaagtaaaccttgcttc

SEQ ID NO: 630682 - DNA, 78 bp, Homo sapiens
ccatctgaggcagtactgtctgctagaaataactgtgagcacacagctccataatgggagaagtaaagaacaaagact

SEQ ID NO: 630683 - DNA, 82 bp, Homo sapiens
gttcatggtggtgagattactcaacttctagttccacctgaaaactgtagtaaaaagcatgctttacgctgttattgtcaag

SEQ ID NO: 630684 - DNA, 101 bp, Homo sapiens
tgtctgaactgaagaagcttgggctcacttccacaaatgagcccagtttcctccaattgcagcacaagaccttccttttgttctaaaggctggctaccttg

SEQ ID NO: 630685 - DNA, 100 bp, Homo sapiens
caggtagctttggcctccataaccaagaactcaatattagtttaacttcaataggtttattggtggacccccaaaagtacaagggcatatttaacggatt

SEQ ID NO: 630686 - DNA, 83 bp, Homo sapiens
ccgaaaacaccctgcaatctttcagacaggcctgctggtgggtacccttgatgttgtgttggactccagcgcccgggtcgctc

SEQ ID NO: 630687 - DNA, 98 bp, Homo sapiens
gcgcctcgtcgacatgagtgatgtggaggaaaacaacttcgagggcagaaagcctggaatggtcccccctccgccgggagaagaaagccagacggtca

SEQ ID NO: 630688 - DNA, 100 bp, Homo sapiens
tcttcctgttataaatacgatgttgcagctcagccctgaagaaaagggaaaacttgctgcggttgctcaaggacgactgggtttggattcagaagaggat

SEQ ID NO: 630689 - DNA, 75 bp, Homo sapiens
tgactactggggccagggaaccctggtcaccgtctcctcaggacgtggtgggtcctctggtgcgaaattccggat

SEQ ID NO: 630690 - DNA, 99 bp, Homo sapiens
cgggaaggcgggagacgagaagcctgaaaagtcgcagcgagctggagccgccggagacttaattcagtgcacaaatgagatgaatgtgaacatcccaca

SEQ ID NO: 630691 - DNA, 104 bp, Homo sapiens
agccccgagcactgtggccgaggcccacctgctgacatctacctgccaggtgtctcgtgcctctgctggaccctgactctgggctcctggtcctggcaggaaag

SEQ ID NO: 630692 - DNA, 75 bp, Homo sapiens
cctcccacctggctacctatttccccagtttccaggaaggtgccatgcgggccagcgagacagtgtcggaggcca

SEQ ID NO: 630693 - DNA, 100 bp, Homo sapiens
gttcatctaccacgcctacgtgtatcacctcttctgggctcaagatggacaacaagaagcgcctggcctacgccatcatccagttcctgcatgaccagct

SEQ ID NO: 630694 - DNA, 95 bp, Homo sapiens
ccaactcggaggagatcgccttctatgggggccatgagggagctgctgttgacggaggcaagttggatgtcgggaatgctgaggtgaagttggag

SEQ ID NO: 630695 - DNA, 90 bp, Homo sapiens
attttgtttggaagatggaccaaagcgatacatggtgctgattactatgattacggacatggactcagtgaggagacttatgattcctac

SEQ ID NO: 630696 - DNA, 119 bp, Homo sapiens
cttcagtacttggcaagatttgatgctcttgtgctcagtgacatcattcagaatcaggaaacccaggcccaacggcaggtggatgcaagaagaaatgttccccaaaacgacccagtgac

SEQ ID NO: 630697 - DNA, 75 bp, Homo sapiens
tcaccaccccggatggagaagatggaatttcatctacgtcttccacacacttgatgaacaagagaactgggcaac

SEQ ID NO: 630698 - DNA, 74 bp, Homo sapiens
tgtggccttaatgagcatgttgacagcatcgatgctagacagacaggtgtgtccgcagccggccaggtggtatc

SEQ ID NO: 630699 - DNA, 100 bp, Homo sapiens
cgctcttctacgggacctgctccttcctcatcgtgcttgtcaacaaggcgctgctgaccacctacggacggtgtgaagggagacctgctgattgacatcg

SEQ ID NO: 630700 - DNA, 124 bp, Homo sapiens
aggtatatttttgtggaatgaaaaggaagtattagaaatgagctgaagaccattcacagaagtgtgtatctcatgtccaagtggatagcagagaacttgatcgaagaaaaacattgcaagttac

SEQ ID NO: 630701 - DNA, 75 bp, Homo sapiens
ctgcatgagactacaaagacacggaatggttcagacagaggagtttcataatagaagagcagagtttcttactat

SEQ ID NO: 630702 - DNA, 100 bp, Homo sapiens
cggggcctcccgggggacgtgaccaaccagatcccaccaaatattttggttgtgagctgggagcacagacccagtttgatgttaagaatgaccgttacat

SEQ ID NO: 630703 - DNA, 100 bp, Homo sapiens
caaaacctcctgcacgaaaggctctggaaagatgtggtgatggggcattcttgctaacaacaattcaattcgtcataatctgtccctacacagcaagttc

SEQ ID NO: 630704 - DNA, 100 bp, Homo sapiens
caaggaacagtgccaagttagatgccgattacccacttcgagtcctttattgtggaggggatcatggacattgaagcatatcttgaaagaattggctata

SEQ ID NO: 630705 - DNA, 108 bp, Homo sapiens
agcgccccagggcaagccccgctccggccaacaatctatcacagtacagcgatgagaatatgatggacccttataacctggccatttgctttggcccaacattgatgc

SEQ ID NO: 630706 - DNA, 75 bp, Homo sapiens
gtgccttttgcctcccaccgtgattctgaggcctccccaaccatgtgcaattaattcagaaggagctggcggaca

SEQ ID NO: 630707 - DNA, 75 bp, Homo sapiens
cacagatcaggacaatgaaatccgagccactgacctgcctgagaggttccagggcttccgttacaagatgaggtc

SEQ ID NO: 630708 - DNA, 100 bp, Homo sapiens
ttttatccagctctaaactttatttcctcccagaagacactccccagggcagaaatagcgaccatggcgagatgaatgatttcggaatcaagaatatgga

SEQ ID NO: 630709 - DNA, 121 bp, Homo sapiens
tggctcttcaagcaccgccgggtgcgctttctgcacgagaccgggctggccatgatctatgtattctaccttgtaaatactgttatttgtatatactgtaaatgatgacatcggtgggcac

SEQ ID NO: 630710 - DNA, 100 bp, Homo sapiens
gagggagggagccgcaggcgcagacccacccgccatgaagccccccgcagctgcaagctttcttcctggtggcagatgacatcatggattcatcccttac

SEQ ID NO: 630711 - DNA, 100 bp, Homo sapiens
gtgggcatatttagtcattcatttttgatcaggagaaagaagacagccatcatttgaaagaatgatatggaacctagcaaagctgttccactgaatgcat

SEQ ID NO: 630712 - DNA, 75 bp, Homo sapiens
ctcagttgtccatgaccctgaaggtccaggagtacccgaccctcaaggtcacggagctgctggacgtctccatgg

SEQ ID NO: 630713 - DNA, 80 bp, Homo sapiens
tacattctctatctgcgcaccttggagtccaagcttgtgctctttgaaatgggcaagttcatgaaacctgggaaggtggt

SEQ ID NO: 630714 - DNA, 74 bp, Homo sapiens
tgagccagagcccacagaagcatggaaggagtatggatgtgtccaacagccaaaaactcaagaaagtaaattga

SEQ ID NO: 630715 - DNA, 98 bp, Homo sapiens
cagacggctcacctgtgcgggatggaacaaaaggacactggggttgggaaatcaagcatcgtgtgtcgatttgtccaggatcactttgaccacaacat

SEQ ID NO: 630716 - DNA, 75 bp, Homo sapiens
gctctgcctccggggacaagaaactagagcaaataaccgttttgaaattgttaatctgaagcgaccttgtccttt

SEQ ID NO: 630717 - DNA, 100 bp, Homo sapiens
tggaagatcttccgggagtgttggaagcaaggtcagctctggattaatcgaattacagctgctagccaggaacatggactgaagtatccagcgctcattg

SEQ ID NO: 630718 - DNA, 97 bp, Homo sapiens
accgctcagccttcttcttctggggcctccacgagctggggagcaccagcgagacggtcacgaacgagatcacgccggtgctgtcgtactcctacct

SEQ ID NO: 630719 - DNA, 80 bp, Homo sapiens
gttaagataagaagtaatctggaatcagaaagcactacgctaaaacccagtgacttgattgtaaaaatttacagagcgga

SEQ ID NO: 630720 - DNA, 75 bp, Homo sapiens
agaggcgcttcgccaagggggtgcagtacaacatggagacctttggcgacttggcctttggcgacatcttcctcc

SEQ ID NO: 630721 - DNA, 82 bp, Homo sapiens
ctggccacatgaagctggtgtgtctgctgaccaagaagggagtgagaacaatgcagatcttcgtgaagactctgactggtaa

SEQ ID NO: 630722 - DNA, 100 bp, Homo sapiens
atgtctcagcctttcagccttaccaagcaacaagtgaaattgaggtcacaccttcagtccttcgagcaagaatgtcgttgtctgctgggtcttcccctct

SEQ ID NO: 630723 - DNA, 98 bp, Homo sapiens
acaaacaggacctggaacatccagggagcgtctgggctgcagaaccaggacaatcctgtgattgatgaaatagacttccttgaagcttttaaaaatat

SEQ ID NO: 630724 - DNA, 100 bp, Homo sapiens
catgggcagcgtggaggcttcttataagtgtttagcagcagctttgatagttctgacggagtctggcagattgccaacactcctgatagctgaatgtgtg

SEQ ID NO: 630725 - DNA, 89 bp, Homo sapiens
gacggtcacccgaatcgcagggagtcgccgctggagaggggctcggcgcccggcggggactgcagttacagaatgtctgaaggggacag

SEQ ID NO: 630726 - DNA, 51 bp, Homo sapiens
gtacgacccagggcggaaaaagatcagaatttggattgggtgcctctcacc

SEQ ID NO: 630727 - DNA, 74 bp, Homo sapiens
gcgcctgtaatgtttggcgagtctgtgattacagtggcgagatcttgaacaactgctgcgtcatggagtaccac

SEQ ID NO: 630728 - DNA, 100 bp, Homo sapiens
tccaggccgccggcattctcctccggctgccgcagatgagatccgaaatggcccataccgacagctcttccacccagagcagctcatcactgggaaagag

SEQ ID NO: 630729 - DNA, 75 bp, Homo sapiens
ggccagttccataagcagattgctgtcatgcggggccaggtgggtcatgataactgggtacgtggagttctgttc

SEQ ID NO: 630730 - DNA, 103 bp, Homo sapiens
cggcgagtttccgatttaaagctgagctgcgaggaaaatggcggcgggaggtgaaaggtgtagcagtcactcggcctacacccacagcatcgaccttgtgaac

SEQ ID NO: 630731 - DNA, 90 bp, Homo sapiens
ctcacacttgtcctctagcaattcatcaaaattaccacatcatcatggtaaactctgtctctgaccttcacggctacatcgacaaaagcc

SEQ ID NO: 630732 - DNA, 94 bp, Homo sapiens
gcaagaattgatgttgctgcagacctgtacggatttgctgctgccgggcccctcagatgagagctgcacccaggccagcaccagtcgctcagcc

SEQ ID NO: 630733 - DNA, 100 bp, Homo sapiens
cctcagtgtggtttgggcccaaagaggtgtccacagcttgtgccaccgccgtgctgggcaatcagaccagattatcaaaaattctcatgattaaaaagga

SEQ ID NO: 630734 - DNA, 124 bp, Homo sapiens
tccactcccttgacctcaggaccctacccagggttctagaaatccaggcaggcatctatcttgaaggatttccatttaaacagggttaatttggaagaatcttcaggagtggaaaactctccag

SEQ ID NO: 630735 - DNA, 96 bp, Homo sapiens
gcaaagtgaacacaacgtgtgccaagatgcagatgaatgcctactttttggacaagaaatctgcaaaaatggtttctgtttgaacactcggcctgg

SEQ ID NO: 630736 - DNA, 74 bp, Homo sapiens
aaagacccagtgaacaaatccgggggcaaggccaaaaagaagtcatctggggacctggagaatgatgagcaggc

SEQ ID NO: 630737 - DNA, 80 bp, Homo sapiens
ccgggccgggcagctagcagggcgcttcggggtgcttcaaggatgaccgcatcgtcttctggacttggatgttctccacc

SEQ ID NO: 630738 - DNA, 102 bp, Homo sapiens
ttcagaattagaaaggagctgcttcccaataaggaaacagtcctaaagaagacgaagagaagccttcagcctcagcacttgagcagccggccaccctccagg

SEQ ID NO: 630739 - DNA, 100 bp, Homo sapiens
ccatccagctcctggatgaacggaaatctcctgtggtggcagcactattcctgatcagagaactccagttgcttcaacacacagtatcagtagtgcagcc

SEQ ID NO: 630740 - DNA, 50 bp, Homo sapiens
tcacctgtgcgggatggaacaaaagtatgagaataatgttatcactattg

SEQ ID NO: 630741 - DNA, 75 bp, Homo sapiens
tataaactaggagacaagatccatggattcaccgtaaaccaggaaagtgatgaagcattgggcccaacaatgatg

SEQ ID NO: 630742 - DNA, 75 bp, Homo sapiens
atgcacgtgttcgaccggccctaccctctggctcccccgactccgcctccccggctaaagaattacctccaaagc

SEQ ID NO: 630743 - DNA, 83 bp, Homo sapiens
ggaaacgcttgtagggtttcaccagattcccaacttcttctggagcctggggatcggtcacactggtgcgtggtggcatactg

SEQ ID NO: 630744 - DNA, 82 bp, Homo sapiens
tgcgctcgcgcccggatccctcagacgctctgcacaaaagccaccatgcagacggtccgggccgccgacaccaatgaagtgg

SEQ ID NO: 630745 - DNA, 82 bp, Homo sapiens
agacaggaaaataattaaatattcttaccgagaaatggtggagtcaatgaagaaagtagcagggatggatgtggagctgaca

SEQ ID NO: 630746 - DNA, 82 bp, Homo sapiens
agaacgtgagcaagcccaggcacagccgacgccgcgggtaagaagacatgttggataacaagaagaggtgtagagtttgcat

SEQ ID NO: 630747 - DNA, 75 bp, Homo sapiens
caaagattaagactgtgaaaaggctggtgaaagttaaggacttggaaaacagtgtgggtgaacttagtgaaggac

SEQ ID NO: 630748 - DNA, 98 bp, Homo sapiens
aagagagagaagagggcagagccgtgcatggggctgctccccaggacctgagcaggaacctggagttttcagataaagactatttcctgattgtgatt

SEQ ID NO: 630749 - DNA, 98 bp, Homo sapiens
gaagtttgtcggcccttgccttggcagagctgaggttggattatctcaagatgcccaggatcaaatgagaaagatgctttgccaaaaagaatctaatt

SEQ ID NO: 630750 - DNA, 90 bp, Homo sapiens
ttcatgaagaaaagacaccagcaggaagaatagtggctgactgcctaacagattgttatcaggttgcaaaacttcctcaagttgttcaac

SEQ ID NO: 630751 - DNA, 98 bp, Homo sapiens
tgagttacaacaaactctctgagattgaccctgctggttttgaggacttgccgaacctacaggaagtcttctggtagatgaattgagagatgcagtgc

SEQ ID NO: 630752 - DNA, 98 bp, Homo sapiens
ggccgtggaaaccgcaaccgagggaaccgaggcagcggaggtggtggtggaggtggaggtaactatggccaagatcaatcctccatgagtagtggtgg

SEQ ID NO: 630753 - DNA, 75 bp, Homo sapiens
gtcccctgctagaagtgggggactcggcgggtgtttctgaaagatctatccagcactccgatggccagcaacaac

SEQ ID NO: 630754 - DNA, 90 bp, Homo sapiens
gcagaaggccgagaagctctacccactgccctcggcccgcggtaagaatgattgatgttggctgatattggagtgctcattcacatgaag

SEQ ID NO: 630755 - DNA, 100 bp, Homo sapiens
cctgctgcggttcctgcgcgcccgggatttcgatctggacctggcctggcgggatttgaatttgttgaaatgagcagtcgtaaatcaaagagtaacagct

SEQ ID NO: 630756 - DNA, 82 bp, Homo sapiens
cccagaccggccgctctcccctcctctcacggcacctcccaccatgaagagacactatggacagcgtgaagcagagcgcggc

SEQ ID NO: 630757 - DNA, 88 bp, Homo sapiens
gggacttcccgtccgcggcgtggagggagcttgaagaaatccgcaaatgtgggatgaaaaacttccgtaacatccaggttgatgaagc

SEQ ID NO: 630758 - DNA, 100 bp, Homo sapiens
gaccacacgcagaccctctttcagagctcccagctcctccagcagccgacaggaggcccgtcaagatgcaggcaggcattgccaccccagggatgaagac

SEQ ID NO: 630759 - DNA, 75 bp, Homo sapiens
cttactggccctgagtctttgggggcagcctgcagaggctgcgatcgtaaagctgaaaattgaaatcatgaaagt

SEQ ID NO: 630760 - DNA, 50 bp, Homo sapiens
ctggctaagctcatcattgttactgaaagcgaaattattattgacgatgg

SEQ ID NO: 630761 - DNA, 75 bp, Homo sapiens
agtcctgtgccattaaaaacaacaaggaagctttcagtgagaactgcgacacatcaccaagctgaagccctggag

SEQ ID NO: 630762 - DNA, 97 bp, Homo sapiens
gccgccatggcccgctggatcccgaccaagaggcagaagtacggggttggttccgctgtgtggcagctgattgcttccttcctgaggcttccaatct

SEQ ID NO: 630763 - DNA, 83 bp, Homo sapiens
aacaagaggacccaggagaaattcgccctcaaaatccggaacatggtggcggtgctggaagtcatctccagcctggagaaata

SEQ ID NO: 630764 - DNA, 75 bp, Homo sapiens
gccagccaggcctcggacgaggaggacgcgcccgccaccgacatctacttttttgagctggacatcgagcccaag

SEQ ID NO: 630765 - DNA, 100 bp, Homo sapiens
aaaaaatctccctgagtttgccgttagtcagtggaccaggctatgtgaactcaccatccctttggctattgagaattttctcagagaatcttctgaccag

SEQ ID NO: 630766 - DNA, 90 bp, Homo sapiens
tcggctttcgccagcgatctgctgcatctctacctcggcctgggcctcctcgctgcttctccaggcagccaccaactaccacaacgggca

SEQ ID NO: 630767 - DNA, 75 bp, Homo sapiens
gcggtggagcctttatatcatgggaagcactctcacttattaaagatcttggacccagatgatgtggtaccagtt

SEQ ID NO: 630768 - DNA, 96 bp, Homo sapiens
gaaaaaatggagaaaagcaatacaaactgggtggacattacccaagattttgaagaagcttgtcgagaaatgagccgtcagactgctacagcatta

SEQ ID NO: 630769 - DNA, 82 bp, Homo sapiens
tcgacgccatgcagaaagcctgcctgaatggctgtgccaagtgtccctggccagtgtccttccacctgtccacaagcatggg

SEQ ID NO: 630770 - DNA, 100 bp, Homo sapiens
gggatcctgaagataaaaagctttgaaaagtcgaattcatggtcgtggaagctgagcccatattaagagatgtcagctgagctgactgctgcccactttg

SEQ ID NO: 630771 - DNA, 75 bp, Homo sapiens
aaattaccattttatgatttactggatgaactgataaaacccaccagtctagaggaagaagcccctccagatggt

SEQ ID NO: 630772 - DNA, 107 bp, Homo sapiens
ttcctcggagaacaagactgcccacctccacaagggcttcctggccctctaccaaaccgtggactggttcatgtctcttggggtcggcctgctcaccttcgcctccc

SEQ ID NO: 630773 - DNA, 82 bp, Homo sapiens
ttggacttctcagcctccagaatggaactgtggctgcaccatctgtcttcatcttcccgccatctgatgagcagttgaaatc

SEQ ID NO: 630774 - DNA, 100 bp, Homo sapiens
cggcggcagcagctggaggaggatcgcactgctcatcttggccatcactatacacaacgttccagatatggatcagaaactttcgaagttggtagaagag

SEQ ID NO: 630775 - DNA, 136 bp, Homo sapiens
ggggtcatgcccatcgccatgagcatcaaggcaggcacggtggatgaggactcgtcaggctccgagtgaccaagaatatggcccaggtgaccaaagccctggacaaggccctgagcaccatggacctgcagaaggt

SEQ ID NO: 630776 - DNA, 74 bp, Homo sapiens
ccaagaacccccaggagcagaagtccttcttcgccaaatacgtgtggaaacaggaagagaactagaactggaag

SEQ ID NO: 630777 - DNA, 75 bp, Homo sapiens
gtgatccagaagtccagagctgaggactgcctgtttgcagtgaaagagtttctagccaaagccaaagaagacttt

SEQ ID NO: 630778 - DNA, 100 bp, Homo sapiens
caggattggccagccacctctctcaactgtatagctatcctctttttaagggctgggagaactcaggaagcctgcctcaggcccagagccagcacgagac

SEQ ID NO: 630779 - DNA, 100 bp, Homo sapiens
cggatcgatgctacgctaacctatcgggttctctctccgcgcgttcaggcatgtggagaccccaaggcaaaaccatcctatcttatcgacaaaaacctgg

SEQ ID NO: 630780 - DNA, 79 bp, Homo sapiens
aaagtttataccaagtcttctcatttaaaagctcacctgaggactcacactgaaatctccgagaagcaagggataatgc

SEQ ID NO: 630781 - DNA, 98 bp, Homo sapiens
ggaaacacctctacctcctgcgaggcctcccgggctccgggaaaactacactggccaggacgtggcccagtggaacatcgggagcctccggaccatcc

SEQ ID NO: 630782 - DNA, 98 bp, Homo sapiens
gcagcgctcctgctgtggattgtcagcagctgcctctgcagagcctggacggctccctccacgtcccgctaggcagctggaagagaaagaccgagtgc

SEQ ID NO: 630783 - DNA, 82 bp, Homo sapiens
ggatcatgtctgcgagccaggattcccgcagaaaaatatggctcaggagactaaccagaccccggggcccatgctgtgtagc

SEQ ID NO: 630784 - DNA, 90 bp, Homo sapiens
cccgacgcgcggcgtttacccagcgcagcgttccaccgctcgggtttggctggctgtgatgcagatccatccgccctagcaaaatatgtt

SEQ ID NO: 630785 - DNA, 50 bp, Homo sapiens
ccgaggggaagggatccgaggcagttgagcagctgaacagaggccatgcc

SEQ ID NO: 630786 - DNA, 100 bp, Homo sapiens
catgtatcagccgaggtggagctgcggggccctggcatgaaagagctgagctcaatgtgcagcaatggatgacgacagcctggatgagcttgtggcccgg

SEQ ID NO: 630787 - DNA, 102 bp, Homo sapiens
agtagcaggagccctctatcttttgttctctggcatggaaggggtcctcagagttactggggtatcgcaggacttccctttcctccaccccagtgagaccag

SEQ ID NO: 630788 - DNA, 112 bp, Homo sapiens
ggaagaggcattgaggactttccttacctgtttttccagctcacccactgccagcagagggtcctggcggcagagaccacgtcccagcaggagcggctgcaggccatcgcag

SEQ ID NO: 630789 - DNA, 75 bp, Homo sapiens
gagctgctgaatcctgcccgcgtgaaccacatgcccagcacgggtctcctctgagcctccggcctccataagacc

SEQ ID NO: 630790 - DNA, 100 bp, Homo sapiens
gaagtgactgggcggtgccggcgccggagacgatgccgttaagacacccactgcagacccccagcccagcctgctctgcggccccctgcggctgtcagag

SEQ ID NO: 630791 - DNA, 73 bp, Homo sapiens
aggaactctatcccaggaatacagctttgcattaggggggacacagcgattgccacgcgccattggaatgtcc

SEQ ID NO: 630792 - DNA, 100 bp, Homo sapiens
caggacttcatccaggcctacgaggaggtgcgcgagaagtacaaaggtcgcaatggaagaagagatcgccgcgctggtcattgacaatggctccggcatg

SEQ ID NO: 630793 - DNA, 101 bp, Homo sapiens
gaaaagctgcggcccacgctgttccggttggcgagtgacaccactgatgacgatgatgcactcggtagatgacattaatgctgataagaatatctcttctg

SEQ ID NO: 630794 - DNA, 75 bp, Homo sapiens
ggcgtgggcaggtcgacagtgaccactaaagtgaccctgtgcctcaatcaggaaccctgaagctgtcccacctac

SEQ ID NO: 630795 - DNA, 83 bp, Homo sapiens
gagctgacagcgcgcacttcacccgcagttggaacgtcaaggtcgtgggaaataaaaggcagttctacacagactgcagcaac

SEQ ID NO: 630796 - DNA, 73 bp, Homo sapiens
aaatggtggtgcaagtagtgattggagaacaaagaggtgaaggagtatttggtggacttgctttgtgaagaga

SEQ ID NO: 630797 - DNA, 114 bp, Homo sapiens
ctccacctccttttttaagagcaagttttaacccttcacaaccaccacctggaaatcatgaccagatctgaaatggctgaaaaaatgttctcttcagaaaagataatgtgattg

SEQ ID NO: 630798 - DNA, 115 bp, Homo sapiens
ccaggactcagaggccgccatcaaccgccagatcaacctggagctctacgcctcctacgtttacctgtccatgctatcagttgagggatttgcagttgataaaatggctggagag

SEQ ID NO: 630799 - DNA, 80 bp, Homo sapiens
agaccctgaactagagtcccaggtcaacctgtaaatagcctgggctggaagctcttctacgtcacaggctgcctgtttgt

SEQ ID NO: 630800 - DNA, 100 bp, Homo sapiens
caaacggctgtgtgctggcagtgtgggacacctgcttggaggacaagaagaggcaagcatctcctcatctccaggatgtgaggctggaggggaatccagg

SEQ ID NO: 630801 - DNA, 90 bp, Homo sapiens
gcgccttcgcggaccgagcctgacggagccggaggctgggagccgcggcggcctgggatcaggatcctcatgaccagccaaagagaagaa

SEQ ID NO: 630802 - DNA, 80 bp, Homo sapiens
ttcctgaggcctccccacccatggagaactccgaatatgtgggagtccatgtcctgcagtgtggcctgatgtaatcaaac

SEQ ID NO: 630803 - DNA, 100 bp, Homo sapiens
ctacacaaccgtctccagccttggtctgagtggactgtcctgcaggctcattggcggggttataggcagcggaagatttacctggagtggttgcagtatt

SEQ ID NO: 630804 - DNA, 100 bp, Homo sapiens
cgggagttcaagaagaacactccagaggcaacttggcattaagaacggaatgttttttgggcatgctaaacaactatgtcctaatcttcaagctgttcca

SEQ ID NO: 630805 - DNA, 75 bp, Homo sapiens
tcagtgtgttagctttccccaatgaaggacagaataacgggctcccagattcacaagccccaccaagaggatcac

SEQ ID NO: 630806 - DNA, 99 bp, Homo sapiens
gcccgggacccccgggggcgcagacccaacatgagtgaagtttcctgcaagaaacgggacgactatttggaatggccagagtattttatggctgtggcc

SEQ ID NO: 630807 - DNA, 83 bp, Homo sapiens
cggacttcgacacctacgacgatcgggcctacagcagcttcggcggcggcagaggaaagcgtggatacccatcaacgaagttt

SEQ ID NO: 630808 - DNA, 91 bp, Homo sapiens
tgaagagggaagacacgcggaaacaggttccgccgagcccgtcccttggcggtggtgtcactggatgctgggaagagatggtgggaagagc

SEQ ID NO: 630809 - DNA, 100 bp, Homo sapiens
cgagcggcgagccggagcgcggagcccggctcccgcaccatggaggaggacgacagctacggaaacagacacggacttagaggtggtgttggaaaaaaaa

SEQ ID NO: 630810 - DNA, 100 bp, Homo sapiens
actggcccctgatccggttcttggtgcccctgggcatcaccaacatagccatcgacttcggggagcaggatggtgatgggaatctttgcaaattgtatct

SEQ ID NO: 630811 - DNA, 96 bp, Homo sapiens
ccagggtgcgactacagctcaaaacaaatggacacctaccagggaacggagatgtgtatcaagaaaggctggcacgtttagaaaatgataaagaat

SEQ ID NO: 630812 - DNA, 131 bp, Homo sapiens
ccaagaagaagcagcctcatttgttttctggtgtcatcgtaggtggccacctatggcttttgggcaggggaaatgctgtctgtagctgagcacttcctggagcagcagatgcacccaacagtggtgatcag

SEQ ID NO: 630813 - DNA, 98 bp, Homo sapiens
tggacatcgagcctgagggaggggaaaggcgcaggggtggtgaaggaggagatctttgatgacaatgccaagcttccctgcttcaacggccgcgtggt

SEQ ID NO: 630814 - DNA, 100 bp, Homo sapiens
cggcctcactgggacccccaggaggtgaccctgcaggcacagtgtcttataaatgtaagtggtgatgcagtggtttttgttcgtgaatctgacttagaag

SEQ ID NO: 630815 - DNA, 100 bp, Homo sapiens
aatattgagcctagtgttcgcagctgcttccaacagtgatcctgccatgaagcagtttctgctgtacttggatgagtccaatgccctggggaagaagttc

SEQ ID NO: 630816 - DNA, 95 bp, Homo sapiens
tctctcgcgggcgggagaacggaaaactcccaacttcctggtgtcagcagttgagtctttggagggccccctgctccaggtggaaggactgagtg

SEQ ID NO: 630817 - DNA, 76 bp, Homo sapiens
cagcaaaagcagaggagaacctggctgtgattcaaagcgggggctcaacccccagacctccagaaatgacgtcaga

SEQ ID NO: 630818 - DNA, 100 bp, Homo sapiens
gaatattaaggatgaattcaggaaggcctgagaccatggaaaacttgcctgctctctacactattttccaaggagaggattaatgcagtatcgaatggac

SEQ ID NO: 630819 - DNA, 75 bp, Homo sapiens
atcgctgccttctgtctagcccagaagattcatgttacatgtaaagctgtcctcatttgtgactatggacctatg

SEQ ID NO: 630820 - DNA, 100 bp, Homo sapiens
acccgtgggcctgtggactgcagcctcggcggtcagcagacattgcctaagatactgagccatatcgccccagcattttgcatgagcagctgtagcttcg

SEQ ID NO: 630821 - DNA, 50 bp, Homo sapiens
agtcggtcggggaaggccacccaggcaaatgaaatctccagccatcacag

SEQ ID NO: 630822 - DNA, 90 bp, Homo sapiens
ggaaaatactatgaagtacatggaaacacttaagaataaactgtgcagtggttctcaccattcaggaagcccttcagctcactgttcaaa

SEQ ID NO: 630823 - DNA, 100 bp, Homo sapiens
taaaagagacctctacttagctcagcaattcttaccttacaggatcttgctctcttgcccagactggaatacagtggtgtgaacacggctcactgcagcc

SEQ ID NO: 630824 - DNA, 98 bp, Homo sapiens
cgaccccaagctctgccacgaaggtgccaccggaagaaatgcagagtaacgtggaagtggtccacacctaccgccagcacattgtgaatgacatgaac

SEQ ID NO: 630825 - DNA, 98 bp, Homo sapiens
ggcgatgcactaggcctcgctcagggcggctgccccgggacccgcagaaatcatgaccaccccaggaaaagagaactttcgcctgaaaagttacaaga

SEQ ID NO: 630826 - DNA, 50 bp, Homo sapiens
cgacagaagcgactttggtgagactctggggcccctgactgaaccttggg

SEQ ID NO: 630827 - DNA, 100 bp, Homo sapiens
agcagttcgtcgtcagtggcagccccatgcgagcacccgaggaaggttctccagctctatcagatcacccagatcaatcatggcctgatgatggtggggc

SEQ ID NO: 630828 - DNA, 83 bp, Homo sapiens
ggacaccccagggctctaattgaaaagagaatccaattacaccttccaaaggtcatctaatacatgggagaaacatggatttt

SEQ ID NO: 630829 - DNA, 100 bp, Homo sapiens
gagcctggagtctgcgaaggccgggacccggttccccggcccacagtgggggtgtgcaaacccgagagaactggcagataatcaccagaatgggagtgaa

SEQ ID NO: 630830 - DNA, 75 bp, Homo sapiens
gggaacacaccgaagcgctgcagctgctcaagcgacaactggcggagaccaagattcttggtgccaccattgaga

SEQ ID NO: 630831 - DNA, 100 bp, Homo sapiens
ccttagaaaaaatgtggcagttatcaccttttgccatgatagcatttctttcattggacagttccttacaagggctccactcagtgtctgtctgtattgg

SEQ ID NO: 630832 - DNA, 80 bp, Homo sapiens
agccagtgtcaacacgacaccggataaaccaaagacagcatctgagcacagaaagatggaccctgtgcagaaggctgtgc

SEQ ID NO: 630833 - DNA, 100 bp, Homo sapiens
atggaatcaacacagctatttaccaccctggtcacaggcaaaaactgattattccaagtggaagttgccctgttattctgaatacttacttttgtgagaa

SEQ ID NO: 630834 - DNA, 51 bp, Homo sapiens
ctgcagcgctgaagacttcaaggtgagtggagactgctgcacggactctgg

SEQ ID NO: 630835 - DNA, 137 bp, Homo sapiens
gcaccttgtccaggcgggcctcccgtttctggctccgggctgagcttcctggagaagaggaagaggtggggctggtgtccgagcacttctcgcaggccccgcagaggctgtccttctacagctggtacggcagtgcc

SEQ ID NO: 630836 - DNA, 100 bp, Homo sapiens
ctcagcttgggcaacgtgctcaactacctggacaggtacaccgtggcagtcaaggcggataagaaggcggcacaagaaaagatgatccagcaggagcatg

SEQ ID NO: 630837 - DNA, 83 bp, Homo sapiens
cgaggcaaggagctaaagcagcgtgcgttcagccctggggcctgttgcagtctccaaggcaccatgaatgccatcgtggctct

SEQ ID NO: 630838 - DNA, 105 bp, Homo sapiens
ctcaccctctgccgagtctcaatatctgtcttcggtggactccttcggcagtccacccaccgccgccgcctcccaggagtacgagagggcctccaaagtggacca

SEQ ID NO: 630839 - DNA, 50 bp, Homo sapiens
actactgtgacaacattaacgctgacatcatctctaccgttgagttcaac

SEQ ID NO: 630840 - DNA, 74 bp, Homo sapiens
ggagaactacaggaacctggagtctgtgggtcctactgctctgttggctcatgaaataggttttggaagtaaag

SEQ ID NO: 630841 - DNA, 97 bp, Homo sapiens
agctggaggtggacgccatcgtcaacgccggacgtggtgggtcctctggtgcgaaattccggatttccttgggtcttccggtaggagctgtaatcaa

SEQ ID NO: 630842 - DNA, 82 bp, Homo sapiens
aggcgctggcccggaggctccagaaacgggtcctgctgctcaccaaggtgccagtgacggggtggcccgtgagctgatgacg

SEQ ID NO: 630843 - DNA, 87 bp, Homo sapiens
gcagctgcctcagttcttagcgcagattcaaccctatgaaaagataaaggccaggggcttgcctgataatatatcttccgtgttgaa

SEQ ID NO: 630844 - DNA, 83 bp, Homo sapiens
ttgaagttggagatgctgaaaatgttgcttcatatgaatacataaagacttctggtaacgccactgttgatcacttatccaag

SEQ ID NO: 630845 - DNA, 100 bp, Homo sapiens
taggaaaatgtgatgcatgtctcagtgatattgatgatgttaagaagttcaaaccgggttacctggaagctactcttaattggtttagattatataaggt

SEQ ID NO: 630846 - DNA, 100 bp, Homo sapiens
acgcacactcgcgcgcgcatcctcccgccagcctgcccgcctgctcgccggcgcccggagcccgctctggccgtacaaggcgagtggataattccaacac

SEQ ID NO: 630847 - DNA, 51 bp, Homo sapiens
gccagcaagaacgaggaggacgcggggtgaatgaaaactttgccattgatt

SEQ ID NO: 630848 - DNA, 75 bp, Homo sapiens
cagagcccatacacctaccagatgcacgaaagcataaaggatgttattggcagaaagataaaaatttcagtgaag

SEQ ID NO: 630849 - DNA, 82 bp, Homo sapiens
cctaaatcctggatggaagatagcttgaacagggctgacaacatttttccttttccggtgattgtgaagacaagaacggaat

SEQ ID NO: 630850 - DNA, 75 bp, Homo sapiens
catcgttccaaccagttcaaagcttgttgtctttgatactacattacaagaaacagagcaaatgcagcgttacaa

SEQ ID NO: 630851 - DNA, 100 bp, Homo sapiens
gaaagcgttgcagaagatgatgcagaattaacattaaataaagtggatgaagaatttgtggtggttattaacttggtgatgcttttggctgaaatgaaaa

SEQ ID NO: 630852 - DNA, 75 bp, Homo sapiens
gatcccgctggtgaccctgccgctggcgagcgccaccgcatgggtctggcctacatctgcgagggcctcaaggag

SEQ ID NO: 630853 - DNA, 75 bp, Homo sapiens
tctccatcccttccgaggcccgacttcggttgaaatcacaaagattagacacctttttagataggtgttcttcag

SEQ ID NO: 630854 - DNA, 75 bp, Homo sapiens
aaaacgtccatctccaggtggattgttgaggggcagggcaggtgtttgtttgccagtggcagtccatttgggcca

SEQ ID NO: 630855 - DNA, 98 bp, Homo sapiens
gtcgccgaacgttctgctgcagaacctgtgctgcaggatcctgggcaggagcgaaggacatgaccgataatagcaacaatcaactggtagtaagagca

SEQ ID NO: 630856 - DNA, 74 bp, Homo sapiens
aatgatgatgtgaaaacagaagctgtggctaaacgatggaaagaactttctaaggaagacttatctcctgcctt

SEQ ID NO: 630857 - DNA, 50 bp, Homo sapiens
aaaaaagacagaggagtgacgaggggaagatggaagagttgagtcaggcc

SEQ ID NO: 630858 - DNA, 98 bp, Homo sapiens
cgagcggagaggagatgcacacggcactcgagtgtgaggttattccaatgttgcaggaatttataatcaacagattgggacgtgcattcattgaacca

SEQ ID NO: 630859 - DNA, 100 bp, Homo sapiens
agaagaagggctgtgctgtgtacctccacgtttcagtggaatttaacaaactgatccctgaaaatggtttcataaagggaagaactgctaaagctttgag

SEQ ID NO: 630860 - DNA, 83 bp, Homo sapiens
ggggcctttatttctcgtcggcggcgccctgcaccgcgcctcgcaaaggggatatgagactttctactcggaatatcctgagt

SEQ ID NO: 630861 - DNA, 96 bp, Homo sapiens
tggagagcgtcaacaagctgtaccaggacgaaaaggtgaaaggtgtagcagtcactcggcctacacccacagcatcgaccttgtgaacccagcgac

SEQ ID NO: 630862 - DNA, 85 bp, Homo sapiens
agaatctgtagagaaagcaactgctacgatcctgagcgagtcaagaattttcttaaggaaactgctggcttgaaggtaggggttt

SEQ ID NO: 630863 - DNA, 95 bp, Homo sapiens
gtctccttcctgcagatcaccgggggcgccctggaggagtccctgaagatctatgctcctctgtacttggaaataagatatgtggaacggagtta

SEQ ID NO: 630864 - DNA, 90 bp, Homo sapiens
gtttctcagacacattcatttttacaccccagcagcgtcaccctttacaccagaaagctggcgggcactatggggaaaaaacaaaacaag

SEQ ID NO: 630865 - DNA, 90 bp, Homo sapiens
atgacagcgagcacggccccaatcccatcctgggctcggaggtgcggccgggtgtgtggcaacattacttcatgatgcagccatgaaccc

SEQ ID NO: 630866 - DNA, 50 bp, Homo sapiens
cccggacagagcccgtggtcgcgcagttagagatgtttatgattacttcc

SEQ ID NO: 630867 - DNA, 75 bp, Homo sapiens
actgggcggtgccggcgccggagacgatgccgtttgaacagagtatctgccaagcccgggcttccgtgatggtct

SEQ ID NO: 630868 - DNA, 51 bp, Homo sapiens
cgcagcccaggcgcgggggcgacgacagaaatgcactcggtgatggaaaga

SEQ ID NO: 630869 - DNA, 75 bp, Homo sapiens
actcaggacggacaagcacagtcttcggaagatggtggatgcttccaaaagcatcgaagctgtccatgaggacat

SEQ ID NO: 630870 - DNA, 80 bp, Homo sapiens
cgacgggcccctctcggaccccatccaggtcaagacgcagcagggaggcagctgagtatgtcccagagaaggtgaagaaa

SEQ ID NO: 630871 - DNA, 100 bp, Homo sapiens
gtctaccagatcaacgtcctccgggaccggagtcagaaccctccgcagagtaaagctgcagaagaaagatcagcaactggagcctaaaaaaagtaccagc

SEQ ID NO: 630872 - DNA, 82 bp, Homo sapiens
ggagcgaacccgagagcgtggagcgggctgggccaggattttttatcaagcagaaatgcatcgaacaacgagaatcaagatc

SEQ ID NO: 630873 - DNA, 75 bp, Homo sapiens
tcaggaggtgctcaaaacgcccgtgcggaccacggcctgtcagcacgttttttccagaaaggaggagtcaaggaa

SEQ ID NO: 630874 - DNA, 100 bp, Homo sapiens
tgctccgcttgttggactgctgctgcaaaacttttctatacacagtaaaggttcagcgagagctggagttggatgaattagccctgcgtgcactgaaaga

SEQ ID NO: 630875 - DNA, 74 bp, Homo sapiens
aaaatactcaagccaggtggaatttggataaatctagggcaagttaaagtcttcagagccctgtatacgtttga

SEQ ID NO: 630876 - DNA, 100 bp, Homo sapiens
gctcgcggttagcccgtcagtccctgctctgtgcgcgcctccatctgggccatggatgggttaaaaagatcaagtggcatgagcagccttttggggaaaa

SEQ ID NO: 630877 - DNA, 83 bp, Homo sapiens
tgaacacatcttggtgtccgtggctgctggggtgtctctgagcaccctggaggagacaatgcagatcttcgtgaagactctga

SEQ ID NO: 630878 - DNA, 100 bp, Homo sapiens
gcacacggtcaactccaggcacgaggccagcctgaagttgtacaaggtcagcccaaggccaaccccactgtcactctgttcccgccctcctctgaggagc

SEQ ID NO: 630879 - DNA, 50 bp, Homo sapiens
cctgggcctcctgtgcaaaagcatgtttgcttcagatggtggatttcaaa

SEQ ID NO: 630880 - DNA, 100 bp, Homo sapiens
tgtgaccccagaaaatgggacaactaatggatacaaatcaggattcactcagacaggagcatctttccttgaagaagtacattattgacattgtggttga

SEQ ID NO: 630881 - DNA, 76 bp, Homo sapiens
tggagccctgcattcgcggcgtgtgcagctcaaattgaaattattccatgcaagatctgtggagacaaatcatcag

SEQ ID NO: 630882 - DNA, 76 bp, Homo sapiens
tgatgactgcctagacttgtgctcagtgctgtgttggggagaactgctacaggtgatccgcccaccttggcctccc

SEQ ID NO: 630883 - DNA, 90 bp, Homo sapiens
tggcggctgcagctgctccgcctcccgtgaaggactgcgagattgagcaagacagatcggcttgccaaaggatcagaatgttaccaaaag

SEQ ID NO: 630884 - DNA, 98 bp, Homo sapiens
aaaaaaaatgtacccttgaccaagctttcagaggtattctagaagaagaaatttccaagatcagccggctgcctgcttacttgaccattcagatggtt

SEQ ID NO: 630885 - DNA, 99 bp, Homo sapiens
cgctgcagccgagatgccgggggagcggggccttccacaccccctccgtgggtgtgtggaatggccaacctgctgacgggccccaaacggaacctgatg

SEQ ID NO: 630886 - DNA, 100 bp, Homo sapiens
catatttacatggatgccatgggatttggaatgggcaattgctgtctccaggaggagatgttaaagtaacccatcttgcaggacgacattgaagattggt

SEQ ID NO: 630887 - DNA, 75 bp, Homo sapiens
cacgccccggggggctggcagctacaccattatggtcctctttgctgaccaggaatatgatgaagaatgggctaa

SEQ ID NO: 630888 - DNA, 100 bp, Homo sapiens
ggatccctgaggaatcacagatgcaccttttgaactctgagcacttagccacccaagcagagcagcaagagactcctcagacccctgcacaattgagaga

SEQ ID NO: 630889 - DNA, 82 bp, Homo sapiens
atgaaagaacaccaaaagggaactctaaagatttagttggaaaagtaggattatgtgctggccgtggaggcgtatcattcgg

SEQ ID NO: 630890 - DNA, 50 bp, Homo sapiens
tacaggcacatatatgccaaagtcagtgcttgctatcagaggaagtggag

SEQ ID NO: 630891 - DNA, 75 bp, Homo sapiens
cggtgatatgatctgtcctgaatgtggcttggttgtagccagaaacgtttgagcatctttttatcaagcatacag

SEQ ID NO: 630892 - DNA, 50 bp, Homo sapiens
cgttggaataccggctctcagcggctgctctttattgagaaactaccaaa

SEQ ID NO: 630893 - DNA, 82 bp, Homo sapiens
gcccaggcagaccttgcagtcaaacttcctgcctgacacagctcacttcaagaagtgcacaatgtcagaacgtggaattaag

SEQ ID NO: 630894 - DNA, 100 bp, Homo sapiens
cgatgaagtgcagaggtttttttctgggtaaaatccagtacaaggaatatatcattgaaggatttgaaaacatgccagctgcatttatgggaatgctgaa

SEQ ID NO: 630895 - DNA, 80 bp, Homo sapiens
gacgtacccgccgccgccgttggctggagatgtgaagttcatttccaatccgccctccatggtggcagcggggagcgtgg

SEQ ID NO: 630896 - DNA, 75 bp, Homo sapiens
gccatcttgaatgtaaaagaacttggagatttgggaatggatgatgaaggagatgatgacccagttcctctacca

SEQ ID NO: 630897 - DNA, 75 bp, Homo sapiens
ggcactttccatagctgtaggactgctggagggaagatggctttatgctttattggcttgtcttgaaaagccttt

SEQ ID NO: 630898 - DNA, 75 bp, Homo sapiens
ctggtcatacaccagtactaccaaggacagcttttttcctgcaagctcatatgttagatttgatatcattcgaag

SEQ ID NO: 630899 - DNA, 98 bp, Homo sapiens
ttctctacatggcaatagatggagtgccagatgacgtgtactactgtggaataaagtacatcaaagatgatgtcatcttaaatgagccctctgcagat

SEQ ID NO: 630900 - DNA, 75 bp, Homo sapiens
gaaaacatgaccgctgagcccatgagactttaagtttgccatgtacccaccgtcgatgatcgcaactggaagtgt

SEQ ID NO: 630901 - DNA, 85 bp, Homo sapiens
cattctgaccttgtgggtttcctgtgctaatggacaaggtgaaggaaatacaggtgctgcagaatcttctttttctcaggaggtt

SEQ ID NO: 630902 - DNA, 49 bp, Homo sapiens
gccagggtgcttttggaaacgtctgggaggggctgaatgtggtgaagac

SEQ ID NO: 630903 - DNA, 82 bp, Homo sapiens
ggcgactccggggatggcgaagccatcagccactatgtgattgtcatgtccatgaccatctttttggtgttcctcaatggcc

SEQ ID NO: 630904 - DNA, 86 bp, Homo sapiens
gagcgacaagccgctggcagccgcggatctcaccgccgctcaggggcgccatgttttggaagtttgacctgcacacaagctcgcac

SEQ ID NO: 630905 - DNA, 90 bp, Homo sapiens
gatatcgacgtcgtgatccagaagtccagagctgaggactgcctgtttgcaggcttgctctttgcagtgaatgggaagcctcattttggg

SEQ ID NO: 630906 - DNA, 90 bp, Homo sapiens
ctgcagaaagacttaaacctcatggccccaggtctcactatacagcttggtgctaacagtggtttgcacatcatcatctttgatgaaatt

SEQ ID NO: 630907 - DNA, 50 bp, Homo sapiens
cccgctgtcgcttgtcatgcccaaggatgatgatgctgaagctatccttg

SEQ ID NO: 630908 - DNA, 90 bp, Homo sapiens
tgcagacttggccaaatggacgggactattaagctgcctgtggaggaaccgattgtgtccacagatgaggtcatcttcccactcaccgtt

SEQ ID NO: 630909 - DNA, 75 bp, Homo sapiens
gcggaggcgcgcggaacagtcgccgaggcgattcccgcccagctctattaccaggttttaaacttcgccatgatc

SEQ ID NO: 630910 - DNA, 100 bp, Homo sapiens
ccagtagctcagagggtgaaaaagactctcctccaccggagtgggattccgttccagttcacaaacctggcagctgctaaagaattacctccaaagccat

SEQ ID NO: 630911 - DNA, 76 bp, Homo sapiens
ggagggggaaaaaatcccaaggtctgcaaaggactgaatgtgggcccagttggcgtcattctgctttgacctaaac

SEQ ID NO: 630912 - DNA, 100 bp, Homo sapiens
tgggaaaggtggaaaccagctgcgctgtcctaaatgtggcgacttgtgcacacatgtagagacctttgtatgagccaggtgagaatttcaaggattatcg

SEQ ID NO: 630913 - DNA, 100 bp, Homo sapiens
tcctgaggacccggggctgcgtgagcgagcagaggcttaaggtcttcagcggggcgctccaggaggcactcacaggtctggtccttgcactcctgtttcc

SEQ ID NO: 630914 - DNA, 52 bp, Homo sapiens
ggagaaggcgctgcgcaagcacgctgaggagatcatcatgctcaggaacgac

SEQ ID NO: 630915 - DNA, 74 bp, Homo sapiens
aactctgaggagtccactgcagcagtaaggaagagcccaacactgctggaagtgagcatgccccatttcatgag

SEQ ID NO: 630916 - DNA, 90 bp, Homo sapiens
aagtctcgagagtggaaacaactctcacgctttctgtgaagaattggaatcaatgatacaggagcaatttaagaaggggaagaaccccac

SEQ ID NO: 630917 - DNA, 100 bp, Homo sapiens
cacagcagagctggtggattctctagaggccacagtcagcggcaagatggtggagcagttctggaggttttatagccacatggtacgtcctggggacctg

SEQ ID NO: 630918 - DNA, 100 bp, Homo sapiens
cccaggaatgtcgctgccgccgccaccgccggggccgctgccgttgaggaggagacggaggagaccgacgttgttagagttgctggagaatgtaacccta

SEQ ID NO: 630919 - DNA, 87 bp, Homo sapiens
aaaggctcctaaacatttaaaagcagttgatgcggatgaaattaaaaggctaggaaagagatttaagaagcttgatttggacaattc

SEQ ID NO: 630920 - DNA, 50 bp, Homo sapiens
ttagcattggccgaagagttaaggctttacaggaagtatggtgctggcat

SEQ ID NO: 630921 - DNA, 75 bp, Homo sapiens
ttttagggtcctttatatagaagggagagtagttcaatcaaatgcctggtaggaattgctagcgttgcccctgcc

SEQ ID NO: 630922 - DNA, 83 bp, Homo sapiens
ctggcctggaggctatccagcgaggcaagtgaggcctatctggttggcctttttgaagacaccaacctgtgtgctatccatgc

SEQ ID NO: 630923 - DNA, 88 bp, Homo sapiens
tataccttattggtgtggacgttgtctaaatttcggtagccatggcacaagaatatagtgctgactgggttacttttttaaacactag

SEQ ID NO: 630924 - DNA, 100 bp, Homo sapiens
ctggatttacctgttttctgggagcttcgaaggctgtgtctttctatcacggatttccacccggacacgtggaacccggcctggtctgtctccaccatcc

SEQ ID NO: 630925 - DNA, 100 bp, Homo sapiens
agaggatagaaattgaacagaactatgcgaaacaattgagcagcatctccctctcatcagcactgttgaaagaagaaaaaatgtcagtgctatctcctga

SEQ ID NO: 630926 - DNA, 82 bp, Homo sapiens
cggcacagtgacccagagagtgacttttatcgtgcacttggaggctcctcagctcttcatatcccagcttttccaggaggag

SEQ ID NO: 630927 - DNA, 87 bp, Homo sapiens
agcgatggcttcagacagcatatttgagtcatttccttcgtacccacagtgcttcatgagagaattcatggtttaaaatctgggaaa

SEQ ID NO: 630928 - DNA, 82 bp, Homo sapiens
ttcaacgtgcgtgtcacccacgcagacatcttcagccgctgccagaacaaccccgtgccgcgcagccgacgcgaggttcccc

SEQ ID NO: 630929 - DNA, 100 bp, Homo sapiens
ggccccttcacctgtgtaagcagagtgctgagccatcactgtttcagaaactatgttccaacttcctgtcaacaatcttggcagtttaagaaaagcccgg

SEQ ID NO: 630930 - DNA, 96 bp, Homo sapiens
gactacagctctggagtttaggcaacggattatcttacggttggaccgacagttacaagacatagtgtacaaattagtgatcaatctagaggaaag

SEQ ID NO: 630931 - DNA, 50 bp, Homo sapiens
cttggtttgcctatgtcaagatcacaggctgagaacatctctaaggacct

SEQ ID NO: 630932 - DNA, 50 bp, Homo sapiens
cgctgaggcttatttgggaaagaagctgtgctccattgaagtgacttgtg

SEQ ID NO: 630933 - DNA, 75 bp, Homo sapiens
cccgaagaagaaaggattcgttacagccagagattgggttggggtctgctaggtccccggaatgagttgtttgac

SEQ ID NO: 630934 - DNA, 74 bp, Homo sapiens
gatgccaagaagaatctagacagacaggcctttctagagagttggaaactcaactattggaacaatgtactgtt

SEQ ID NO: 630935 - DNA, 98 bp, Homo sapiens
agttttgtgcagattgccagtctaaaggtcatcatcagatttgaaatatttaaagtggatacaaaactatttcagcaatgcagacaattaagtgtgtt

SEQ ID NO: 630936 - DNA, 100 bp, Homo sapiens
tcaagacacgatcaaagagtctccctgagacaaggtctcaccatgttgcccagaatggacccgaactcctgagctcaagagatcctcctgcatcagcctc

SEQ ID NO: 630937 - DNA, 101 bp, Homo sapiens
tatttgtcacagcaatgggctaaagcctctggaagaggtgaagttgggaaactgcggattgccaagccagaagctgggcttacagagattctctaaaggca

SEQ ID NO: 630938 - DNA, 83 bp, Homo sapiens
aatgaagaccacaataaaagagacctctacttagctcagcaattcttaccttcaatgttcacagcatctttaccgggagcaga

SEQ ID NO: 630939 - DNA, 98 bp, Homo sapiens
ttcatgaggatagcaaaagcttatgctgcgagctatgaagacatgattggtgaggaggtgccatcggatcaatactactgggctcctttggcccagca

SEQ ID NO: 630940 - DNA, 100 bp, Homo sapiens
aaaactttcagatggagtggctgtgctgaaggtatctttaggtggtgttgatcttacagtccgggtgctcacgacaggatattggcccactcagtcagcc

SEQ ID NO: 630941 - DNA, 83 bp, Homo sapiens
ctcccacagcccctgcatgccccagtgacaagccagcaccagtccagaagcctccatccagtagccagcagccacccccgccc

SEQ ID NO: 630942 - DNA, 98 bp, Homo sapiens
gagatggctgacagtgtcaaaacctttctccaggaccttgccagagatggctgctccatgaggtcaagactgggtctcctccctcctcccccttcacc

SEQ ID NO: 630943 - DNA, 100 bp, Homo sapiens
acaaaatagatgacatgacagctgcacccatggacgttcgccagtgggttgacacagattgccaggtggagctcaacaggaaagtcctagcggatctggc

SEQ ID NO: 630944 - DNA, 100 bp, Homo sapiens
ggaagggaagctcacccacaagatcaacactgagagttctctctggagtctcgagcccgggaagtgcgttttggtgaacccagatactggctacatcaac

SEQ ID NO: 630945 - DNA, 75 bp, Homo sapiens
agagttctgcatgttgattcgaacaagaccctgcagatggagaagatcaaggctcgtttgaaggctgagtttgag

SEQ ID NO: 630946 - DNA, 83 bp, Homo sapiens
cagatggcggatgccctgcagtacctgcagaaggtctctggagacatcttcagcaggaacttgctactaccagcaccatgccc

SEQ ID NO: 630947 - DNA, 73 bp, Homo sapiens
gaccctgctcagagggacttgcagatccagttcctaatggtttgcgagctttgccagttttctatgcctgcac

SEQ ID NO: 630948 - DNA, 83 bp, Homo sapiens
gtaacagcagcgccgtcccgtccgacagccaggcccgggagaaccctgaccctctattctgcaccctgtgagccaccgagact

SEQ ID NO: 630949 - DNA, 98 bp, Homo sapiens
gtgaacatcagcgacagctttgagatgacctatagataggactactgagcccagccaggctgtatgccattgctgccaaagaaaaagatattcaagag

SEQ ID NO: 630950 - DNA, 88 bp, Homo sapiens
aggcacctacagacgatcaccctagataacaatccactacaatcacctcctgcacagcttggacagcttttagcagctacatgcaaag

SEQ ID NO: 630951 - DNA, 100 bp, Homo sapiens
ccttggaccgagccgatcgccgcggggcagttcgggccggctgtcctggcgcggtttttcttcccccagtccctcagctgctgctgctgctcaggaggtc

SEQ ID NO: 630952 - DNA, 100 bp, Homo sapiens
agcctctacatcgagatcccgggcggcgcgctgcccgaggggagcaaggacaggcaaaatacatatctcagtgcattgatgagatcaagcaggagctgaa

SEQ ID NO: 630953 - DNA, 100 bp, Homo sapiens
gggagctgcctgcgggaaggtgcggggagcggagccatggcctccgggcaattcatgatgttaaagccacagatctgggattaggtaaagtaagatttaa

SEQ ID NO: 630954 - DNA, 100 bp, Homo sapiens
cctggcggagaagactcgaacggctcccacagccgggcgttgggggaaagctcatgccagttactatgggagaatgaatgtgagagaggttctcagagag

SEQ ID NO: 630955 - DNA, 75 bp, Homo sapiens
tttgtgtgttctgcttgcagaaaagcttcagacagagcttgatgactgtccaagtgcctccaaagtgtacaaagc

SEQ ID NO: 630956 - DNA, 100 bp, Homo sapiens
ctcttcaaggtctttaccccagaagaagccgtgaacttcatcttgtcctgtctcgagaaaggccatcattctcactcgagaagccacaggccacttccag

SEQ ID NO: 630957 - DNA, 50 bp, Homo sapiens
ggggagggcccagcgcatccgacagtttgcctgagaatacagatcaaccc

SEQ ID NO: 630958 - DNA, 117 bp, Homo sapiens
gccgggccccgcgagtgccatggcggccgccctgggagcgagcggaggagcaggcgccggaggttattcagcttctcaaggctggaaaagcgaaggaagtttcctacaatgcactag

SEQ ID NO: 630959 - DNA, 101 bp, Homo sapiens
tttctacatcgcggtggtctttacctgcttcatcgtgaccaccggcctggtattgggatggacccagatgatgtggtaccagttggccaaagaagagcctg

SEQ ID NO: 630960 - DNA, 51 bp, Homo sapiens
caagaagctggtgtgcggagatgaaggtccgaaaggctcttcggagtgcag

SEQ ID NO: 630961 - DNA, 98 bp, Homo sapiens
gcttcattcagatgtggtggaatatgccaaggaaaaactggagagcttcatcaaaaatagtgatagctttgataattctgaaggctgagaagttcaag

SEQ ID NO: 630962 - DNA, 73 bp, Homo sapiens
ccaactggatgtccatctgcatgtacagctgtctgcgggagaggctcgggctgtgctgaagtgggcagatggc

SEQ ID NO: 630963 - DNA, 83 bp, Homo sapiens
tgggaggacaggccctcgtccgcaggggtgctggcactgtgggtcctggtgacgcacgtgatgtacatgcaagattattggag

SEQ ID NO: 630964 - DNA, 97 bp, Homo sapiens
ccagccagcctccaggcccagaacggagccgccttggcctcggggtctccctacaccaacgtacttaaattgtagcaggacaagccgcagacaaaac

SEQ ID NO: 630965 - DNA, 75 bp, Homo sapiens
caactacctctttccagattgcagggtgatttcaggacaccaagagttgggccatatggtgctcttcccagtctg

SEQ ID NO: 630966 - DNA, 82 bp, Homo sapiens
ttagacagtgaatgtggaaaggagattgacagtcacaattttgtaataaggtcaagaaagatcttaagactggtcattcaaa

SEQ ID NO: 630967 - DNA, 100 bp, Homo sapiens
cagtacttgggatcccccagttccaaagtgtcttaaagccaaaattgcctggaaaagagcagtgagaggagtccgggagatgtgtgatgcatgtgaagca

SEQ ID NO: 630968 - DNA, 82 bp, Homo sapiens
gcggaaaggggcccggcgtctgcctcgagactgaagaccggtacactgaggaggggacggctccgtcttcacattgtgcaca

SEQ ID NO: 630969 - DNA, 100 bp, Homo sapiens
ctattgcaaggcccccgggcctacccatgaggcaaatcagaaagtcacgggaatgattgacttagacaccagcaaaaataataggattgggaaaactggg

SEQ ID NO: 630970 - DNA, 100 bp, Homo sapiens
gtaacaacgtctcgaactttctatgtgcaggagtccaaaactacttacctggaagaccttccaccaccccctgagtatgaattggccccgtccaagttag

SEQ ID NO: 630971 - DNA, 82 bp, Homo sapiens
attagacaaatgttttgaaaatgtctgtgagctggatttgattttccatgtagacaagattgttaaaggaaatgggctggca

SEQ ID NO: 630972 - DNA, 83 bp, Homo sapiens
cgggctgccccgcaggatcatcaaggagccttcacgtaaatgggtccagtcatgcctcccagtaagaagccagaaagctcagg

SEQ ID NO: 630973 - DNA, 143 bp, Homo sapiens
aatgctccgttgagagacgcggctttcggcaagaactggattcgtggcgccacaagctcattcactgtgtagatctttaatctcatgaagtacgacagctacagccgcttcttaaagtctgacttgtttttaaaacacaagcg

SEQ ID NO: 630974 - DNA, 80 bp, Homo sapiens
acaagccgctggcagccgcggatctcaccgccgctcagggctctgaagggctccaagaagctggtgctgtctgtgtactc

SEQ ID NO: 630975 - DNA, 97 bp, Homo sapiens
agcagaatattataccagtcaatttagaccaatttccaactgataccatacagcgctcaaaatggatcagggctgttaatcgtgtggaccccagaag

SEQ ID NO: 630976 - DNA, 101 bp, Homo sapiens
tcgtccccgctctgcctcacccaggaatgaatctgaagtctgctgcagtaaaacacagaaggctttaaaatgttttcttgcataaaattcaaaacttttaa

SEQ ID NO: 630977 - DNA, 75 bp, Homo sapiens
aaattcttgctggaggctgcttgctgagacaaaggaaaacccactcccttggaggagcatgaccttttcctgtaa

SEQ ID NO: 630978 - DNA, 90 bp, Homo sapiens
caacatggtcttcattggaggtatcaactgtaagaagaggaaagacttgtctcaggtccttccaaccctcctgctaccatgaagattgca

SEQ ID NO: 630979 - DNA, 83 bp, Homo sapiens
ggctgctgcaggagccattttagcaattctgtggtgttcttggtcacacatttatggagtttctgaagggcagtggagattac

SEQ ID NO: 630980 - DNA, 100 bp, Homo sapiens
gatgtgtgagaagaccaccatcaacaatgagtacaactaccgctgctggaccacaaaccgctgccagaaaagttcacctttccttgccagtgaagatggc

SEQ ID NO: 630981 - DNA, 97 bp, Homo sapiens
atgggaactgctggtactgcaatcattcattttgtgccttgcaggctggtggaggacaccttcaccatagatgaagtctctgaagtcctcaatggat

SEQ ID NO: 630982 - DNA, 75 bp, Homo sapiens
ggctgtgctgcgcgacccccgcgcatgggggacttgatctcatcttcatgccaggccttgggtttgacaaacatg

SEQ ID NO: 630983 - DNA, 100 bp, Homo sapiens
gagagaggcaccgggatcgtgaccgagaccgtgaccgagagcgtgaccgagagcgcgaatatcgtcatcgttagaagggaccgtaagaagaagcggtttg

SEQ ID NO: 630984 - DNA, 75 bp, Homo sapiens
caaggctctccagcacagacgatggctacattgaccttcagtgccggtggtggtgtgcacattgagccccggtat

SEQ ID NO: 630985 - DNA, 90 bp, Homo sapiens
ctcagttgtcaccctggctgctaaagtaaaggaaatctgaaatagagtactatgctatgttggctaaaactggtgtccatcactacagtg

SEQ ID NO: 630986 - DNA, 50 bp, Homo sapiens
cgagaatagctccgtccagcagctgcggggtattgaatttgaggctgctc

SEQ ID NO: 630987 - DNA, 99 bp, Homo sapiens
tccccaacatatcttcagatgagtcttgtggaacggccaccagacagagaggctttctgggctgcattcggtctctgcagttgaatgggatgaccctgg

SEQ ID NO: 630988 - DNA, 82 bp, Homo sapiens
ttcttgcccccggggagctggtgtggacagaggagggctctgctgtgtgcgtgcaccagctgcctccaggccaactacacgt

SEQ ID NO: 630989 - DNA, 50 bp, Homo sapiens
aaacaactcggagaaaatgagtatggaggctggagggcagtggcatgatc

SEQ ID NO: 630990 - DNA, 82 bp, Homo sapiens
atcactcaatgaatataaactgcacttactggcatgctcaaggaatgggctattaaggcgaacagctgcttggagaactaca

SEQ ID NO: 630991 - DNA, 76 bp, Homo sapiens
agctgcgtggagttcagttacccggagctgctgctgtgcggagaacaacggataatttttatggtgggacgaggat

SEQ ID NO: 630992 - DNA, 76 bp, Homo sapiens
aaatgattgaatctggtgttatcaacttaaaagatgccacctctaaggctgaccaactgactgaagagcagattgc

SEQ ID NO: 630993 - DNA, 106 bp, Homo sapiens
ttccatctaattatgacctccttcgccacttacagtatgcaacacattttcctatacctctggtgaatgaaaactttgccattgatttgatagcagagcagcccgt

SEQ ID NO: 630994 - DNA, 82 bp, Homo sapiens
caatggggaacgctcacggactgtgtggtggcgacatgtctaagaatgtgagccagtcacagatggcaaaattgaaccaaca

SEQ ID NO: 630995 - DNA, 82 bp, Homo sapiens
agaggatcctggaggcctgggaagccaacgaccacacgcacaaattgtggctactaatttgccccctgaagatcaagatggc

SEQ ID NO: 630996 - DNA, 100 bp, Homo sapiens
tgaaggttctggatgaagcaacattaaaggcaactttggctttggggattcacgtggtggcggtggaaatttcggaccaggaccaggaagtaactttaga

SEQ ID NO: 630997 - DNA, 101 bp, Homo sapiens
ccggaagaagaaacagctcatgtgtccccatgaactcccttgtccccagttgaccaacctggcctgtagcttctcacaggcgtaccatcccatccccttca

SEQ ID NO: 630998 - DNA, 82 bp, Homo sapiens
cttgtgtgttaaagtaacagatgatttagttggctccagcggggccccacagacgagcaggatgcctgtccccatgagtgcc

SEQ ID NO: 630999 - DNA, 75 bp, Homo sapiens
gccagaggtcaacaaggttctggacaagatgaagtctttctgccagtcactctctgaaagagaacaaagtaattt

SEQ ID NO: 631000 - DNA, 97 bp, Homo sapiens
cggcgagcgcgagcggcgcgagaaagttcccagtagctgcagcagtgaaagacagtgattggctccagtgctcccagaaggatttgggctgaagcca

SEQ ID NO: 631001 - DNA, 100 bp, Homo sapiens
tgtgtgcccactgaggagtccaacatcaccatgcagatggactcaccctgtcacccaggttggactgcactggcctcaacctcctgagttcaagtgatcg

SEQ ID NO: 631002 - DNA, 98 bp, Homo sapiens
tgccacctggaccaggaataccacctctgatgcctggaatgccaccagcaggaaagctgtctgtggcttttcaaaatgcgcctggtagagcatggatg

SEQ ID NO: 631003 - DNA, 90 bp, Homo sapiens
aaaacatcaaagaggtctagcaaaggtgaaagaaaatggcccgaaccaagcagactgctcgtaagtccaccggtgggaaagccccccgca

SEQ ID NO: 631004 - DNA, 74 bp, Homo sapiens
gtcattttaaactatggacgactccgaggaacattgaggtcactcagctctatgtgccagcatccagacatgtg

SEQ ID NO: 631005 - DNA, 100 bp, Homo sapiens
aagaaaagcaactggcggagtacaacgcgcctgcgcattatcagactcagggacaggctggaacctcgccccatggagtctcactctgtcacccaggctg

SEQ ID NO: 631006 - DNA, 75 bp, Homo sapiens
ctgatgagcgctcaggaatcatgggctatcaaagcctacaccgatttcttcctcccgctgctaagccgctgtccc

SEQ ID NO: 631007 - DNA, 132 bp, Homo sapiens
tcggcctcatcagcccggcctacctcttcctctggcccgaagccttcctttatcgctttcaggatggaatccgacgtggtaggcccagagcagatactgtccgcgatttaataaatgaaggagagcattcat

SEQ ID NO: 631008 - DNA, 101 bp, Homo sapiens
agatggcacagaaaccgctgcgcctgaacgagctagagcgacagtttcttgaattgctgcagttcaacatcaatgttccttccagtgtctatgccaagtat

SEQ ID NO: 631009 - DNA, 87 bp, Homo sapiens
gggagggaaaagaggaggcagaagagacgaatgtgctgcccaaggttgctgaagcagaagattgttataatacagctctccgtctgt

SEQ ID NO: 631010 - DNA, 98 bp, Homo sapiens
ccgcgtctcgcgggaagacttcgagtgggtctacaccgaccagccgcacgccgaccggcgccgggagatcctgggacactctgattgtgtggtctgaa

SEQ ID NO: 631011 - DNA, 98 bp, Homo sapiens
tgccgccaaggtgttcggtccttccgaggaagctaaggccgcgttggggtgagaccctcacttcatccggctctgtgtgctccgggatggagcaggtg

SEQ ID NO: 631012 - DNA, 98 bp, Homo sapiens
agaccggccgctctcccctcctctcacggcacctcccaccatgaaggtcttcagaggagcagctgagccgcgcctaccgcctgctgatagcacagctg

SEQ ID NO: 631013 - DNA, 82 bp, Homo sapiens
caatgataagagctgtcagttttctgtggatgaaggcccgatgagagaaagggaaagttaaggatgctggagcagaacaatg

SEQ ID NO: 631014 - DNA, 74 bp, Homo sapiens
gagggcaacttctgaagacttcaacaagacaggggcaagtgtccgagtggtgaatcagctacttacagagatgg

SEQ ID NO: 631015 - DNA, 75 bp, Homo sapiens
gattggcaggagattatagctctgtatgagaaggacaacacctacttaggttgactatagtcaatggggccaatg

SEQ ID NO: 631016 - DNA, 90 bp, Homo sapiens
atttgaggagtgggaacaggcttcggcgaacacaaagctggccaaagtgagggaaaaagtgaaggatgtgcctgcccttgtggccaaatt

SEQ ID NO: 631017 - DNA, 100 bp, Homo sapiens
attttttaccatgaaatatgagctcctcacagccagtgaccttgcagccagtgacctcaaaggatttcagccacaggtaagttccactgatgcttttaag

SEQ ID NO: 631018 - DNA, 98 bp, Homo sapiens
tgcttacctggacaatctgcaggagagaacattgaaagtattctctaagctatttgaagagagtgactaaatgcacctgggtcaggctgtctgtgggt

SEQ ID NO: 631019 - DNA, 100 bp, Homo sapiens
gacccctcgggcacataccatgcctggaagcgactttccggccagggatactgcttttcagcttcgttacctcccctgttagctgctgcagcaattgagg

SEQ ID NO: 631020 - DNA, 75 bp, Homo sapiens
cgccgtgcccgagaatagctccgtccagcaggagtctccccaggacagtgctatcacccgggatattaaccgaac

SEQ ID NO: 631021 - DNA, 75 bp, Homo sapiens
agcagcatgaagaagaggacctggatgatgatgtcatcctgacagaattgctccgctctgctgctgattggtctg

SEQ ID NO: 631022 - DNA, 83 bp, Homo sapiens
ttcaaatccatcaagctcatcaaaagcattttgaaagcgaagcagaagccgtagaatcagcggcgagcctgttgaaagaaccc

SEQ ID NO: 631023 - DNA, 83 bp, Homo sapiens
ctacatactcatcatggggctcctgtacaagctgcctgtggaggaaccgattgtgtccacagatgaggtcatcttcccactca

SEQ ID NO: 631024 - DNA, 74 bp, Homo sapiens
tgggacaagatggtttacatctcgaacgcaccctggaggagaagaggttctgctggaacaagctggtgtagatg

SEQ ID NO: 631025 - DNA, 74 bp, Homo sapiens
caaatgtgctcacctttgacttcatgtcgaagccatctccagaacagtccacaggaagaggttgaactaaagaa

SEQ ID NO: 631026 - DNA, 50 bp, Homo sapiens
gtgcacctggtggagcgagtgcagagctctcaccaaggaccgaggggccg

SEQ ID NO: 631027 - DNA, 90 bp, Homo sapiens
tctcattgtaatagcccctgtacttttggtggttggatcatttgaagtggtgtctacacttataaaagaaagaccacagcaagattcttt

SEQ ID NO: 631028 - DNA, 90 bp, Homo sapiens
agctgaacagaagccgggagaaattgctgaagaactcgcaagctcctacgaaagaaagctcatcgagagctctgaggaacatgaatacag

SEQ ID NO: 631029 - DNA, 100 bp, Homo sapiens
tcctcctggcctcagcaacctgacaattctgtcgtgtcccggtctctgctgctgatgaagctgtgaccaaacgcacccaacccttggcagccatctgtcc

SEQ ID NO: 631030 - DNA, 90 bp, Homo sapiens
catgagcaggaaggaaccgctggaaacactgaagaggaaagaaattgagccttttctgccacctctgaagcctgattactgtgtgaagca

SEQ ID NO: 631031 - DNA, 96 bp, Homo sapiens
ttcatccgctacctcatctcgtccaacgtcggggaagttgtctggtggataattactgtaccttcctcatggaaaaagttttatttaaagtgttat

SEQ ID NO: 631032 - DNA, 74 bp, Homo sapiens
taattttggcagttctaaatttgaatttgagttgttataccacatttgcataagttagccttggtgaacaactt

SEQ ID NO: 631033 - DNA, 100 bp, Homo sapiens
tgactacgcggagcgggagagcggccacaccatgcgaggccgaatacatcaagcaatggtaacatctttaaatgaagataatgaaagtgtaactgttgaa

SEQ ID NO: 631034 - DNA, 100 bp, Homo sapiens
gcactggttaaagccatcgccacaacctggacaggcagcaagcccctgaagttatcagtgcccacgactatagccagcagtgtgacatttggagcatagg

SEQ ID NO: 631035 - DNA, 98 bp, Homo sapiens
gtcggccgccaccaggtcaccctggaagagtcgctggccgaaggcttgtctggagcgggaaagactactgtgagcatggccttggaggagtacctggt

SEQ ID NO: 631036 - DNA, 82 bp, Homo sapiens
aagcacaccggggccaagccttttaaatgctcccactgtgacaggtcgctttgctgttcgtgatatgagacagacagttgcg

SEQ ID NO: 631037 - DNA, 100 bp, Homo sapiens
gaggaggcaggacgtgcccggccccgcgtcgtctggcgccgccgccgccagcgcgggaagagtgacccattttgcttgttggagttaggcaatgaccgac

SEQ ID NO: 631038 - DNA, 75 bp, Homo sapiens
gaatccccccgaaaggaccccccagggaagaaacccttttttcttggagccagcaataattatcacaattactga

SEQ ID NO: 631039 - DNA, 91 bp, Homo sapiens
caagggcaacttcgctgtggtgaagctggggcggcaccggatcaccaagacggaggtgtccctggccagtgtccttccacctgtccacaag

SEQ ID NO: 631040 - DNA, 100 bp, Homo sapiens
cacccacgcagacatcttcagccgctgccagggctagttgcacatagtgatttagatgaaagagctattgaagctttaaaagaattcaatgaagacggtg

SEQ ID NO: 631041 - DNA, 98 bp, Homo sapiens
cgcccgcaagagcgagccgcctgccccggtgcgcagacagagctattccagcaccagcagaggtgagcgtccctatcaatgtccttactgtgaaaaag

SEQ ID NO: 631042 - DNA, 75 bp, Homo sapiens
tcgccgtggcgtcttggtgttctccacgctggttcgcagaaccacatgccctgggaagaaccagcaggtgagaag

SEQ ID NO: 631043 - DNA, 83 bp, Homo sapiens
gattaatgtattccaccacctccgccagttaagaggaaaaagctgccagccttgccctggctctgaatggcgtctttaccaac

SEQ ID NO: 631044 - DNA, 99 bp, Homo sapiens
acgaggcaaggagctaaagcagcgtgcgttcagccctggggtgtccttaagtttgctcgcttggtcaagtcctacgaagcccaggatcctgagatcgcc

SEQ ID NO: 631045 - DNA, 78 bp, Homo sapiens
atgttttggagtcacacaagctaaagacgggccattttccagacctcatccaggagcatcagatccatgctgctgctg

SEQ ID NO: 631046 - DNA, 90 bp, Homo sapiens
gtgcgggaagagaagatcatcgagcatttcaaacggttgggcccgaaggcatcctgcagaacggggctgtggacgacagtgtagccaaga

SEQ ID NO: 631047 - DNA, 82 bp, Homo sapiens
gccgtgccctggggctgagccctcagacgagccaaactcaggctgtaccttgagcagctcaagcaactggtgcccctgggcc

SEQ ID NO: 631048 - DNA, 96 bp, Homo sapiens
aacagacagccctatgctgtcagtgaattagcagcattgacaagatatctaaagtcacctctcctgtgttggtcattcatggtacagaggatgagg

SEQ ID NO: 631049 - DNA, 99 bp, Homo sapiens
taccaattttgaaggaaaaagttgcatacctttcaggtccacctaatcatcctgtgaaagtggtttctctatggaaagctttgtttgcttcctacaaat

SEQ ID NO: 631050 - DNA, 82 bp, Homo sapiens
ccaagatgagcagggcccttgcggagttccgcgtccgaggtgtgaagtatttttcagtgctgtacaagcgtcttgaattact

SEQ ID NO: 631051 - DNA, 100 bp, Homo sapiens
caacttagcgaagctgccggtgaagatggcagaaggtggtgaagggcagcctgacgcaccccttcaccctgacactctccggggacactctgcactggat

SEQ ID NO: 631052 - DNA, 100 bp, Homo sapiens
cagagtcggagtgaaaagaaggcacggaaggccctagactggagctggttacagacggaagaagaagagcacagctgcctggagcaggcctcatgatgtg

SEQ ID NO: 631053 - DNA, 75 bp, Homo sapiens
gcctttttgacagcttccgccgggactgcctggccgacgtggacaccaagcctccacctcagatatatgacaagc

SEQ ID NO: 631054 - DNA, 100 bp, Homo sapiens
gctgttccacgtggagccaggcctgcagaggctgttctacaggggcaaacagaaccacaccttcatcaagcggtccgaggtggaagaagtggattttgcc

SEQ ID NO: 631055 - DNA, 78 bp, Homo sapiens
tgaacagggccaaacggaaagcaggggtggatcctctggtaccgctgcgaagcttgtatgacgaggaagcgatggtgg

SEQ ID NO: 631056 - DNA, 75 bp, Homo sapiens
tggtgctgggtgcagatgcagtgtggctctggatagcaccttatggacaggcaagcaccggaagcaccccggcgg

SEQ ID NO: 631057 - DNA, 100 bp, Homo sapiens
ctgggaaaagaggattttatactccaaggcctggcaagaacacagaagcaaggttgaattgtttcagaaacattggcagttatggctgcagcttcgattg

SEQ ID NO: 631058 - DNA, 75 bp, Homo sapiens
caagagcacattgcctggtaagatgatatgaatgccacaatacgaaggattgaccagttaaccaacatcttagcc

SEQ ID NO: 631059 - DNA, 82 bp, Homo sapiens
agtgatgggcagaaggagagaaggtgttttggatgcattctagaacacagataacgaaggaggcccaacttcattcaataag

SEQ ID NO: 631060 - DNA, 100 bp, Homo sapiens
agcagccactgttcgtctctggaggagatgactataagattaaggaagagagaagggcacagttacctaagtatcaacgtaatcttcctcggccaggaca

SEQ ID NO: 631061 - DNA, 88 bp, Homo sapiens
gacgtgcggggccctgaagcccccggcgggcgcgcgctgcgggacgcgtgctgtggccttgctggtgggagagaaggtacaagaggag

SEQ ID NO: 631062 - DNA, 83 bp, Homo sapiens
agatcgccccgatagtttgagagtaaatgggttaccagaggaagagctaagacaatgcagatcttcgtgaagactctgactgg

SEQ ID NO: 631063 - DNA, 98 bp, Homo sapiens
gatacttgacacagagaggatgttggccaaaagtgccatgccaatagagctaatagctcgatttgaagaagaaacaagttccgtgggacgagaacaag

SEQ ID NO: 631064 - DNA, 82 bp, Homo sapiens
gaggagtctcagtcagcaccagtccagaaaaatgactcagttgtttctgtgggctggagtgtgttgggagtgtagccagtgg

SEQ ID NO: 631065 - DNA, 75 bp, Homo sapiens
aacaaggcgattccgcagtccccccgttccctggaggtcctgtggaatgatgcttgctctgtcaaggcacagcct

SEQ ID NO: 631066 - DNA, 75 bp, Homo sapiens
ttgaggctcgagttcagcctaatccatcaaaacatgagccagcaccgctctttgaccttgccatgcttgccttag

SEQ ID NO: 631067 - DNA, 76 bp, Homo sapiens
gcattttcggcaaccgctgctggcagttttgccaggtgtttgttaccttgggactttgaacatgtcggggatcgcc

SEQ ID NO: 631068 - DNA, 100 bp, Homo sapiens
tttctacgcagaagtctccctcaggatcagaccgtagcccttccggaaacctccatggtgactgtctctgtacaaccagcttcaaagtgataatcgtgag

SEQ ID NO: 631069 - DNA, 100 bp, Homo sapiens
cgctctccatgcgcccggcgcgaggtacctcaataataatgagttgacagcggtaccatccctgggcgctgcttcatcacatgtcgtctctctctttctg

SEQ ID NO: 631070 - DNA, 112 bp, Homo sapiens
gcgtgagggctccgggtcgctggcggcgtggacacctgagtcccggggtaggggtctcccgcgagcctctacggcagacacatgcaggccaacccagaaccaccgaagaaga

SEQ ID NO: 631071 - DNA, 98 bp, Homo sapiens
ttttccagagaagagaagctttactggtgttccagccctaaggactgggccggggtctgcagggctcagctgagcccatgagctcccagagctaaccc

SEQ ID NO: 631072 - DNA, 125 bp, Homo sapiens
agtctgtgcagtggcacctgcgcgaagctggccaaagcctgcccagacggctcacctgtgcgggatggaacaaaagtcaccttcaggccattcagaggaggaaagagaggggaatatgaagtcag

SEQ ID NO: 631073 - DNA, 90 bp, Homo sapiens
ggctcagcccgttcgctggactgcaaaccgagctcccgtctgccttgcagcttctcaataggtttggcatggacaagatctatgaaggcc

SEQ ID NO: 631074 - DNA, 100 bp, Homo sapiens
cccaggccatccttgaggccagcagcttcacggaccttgagaccatcgccaacctgggtctgggcaccatggctgaggaaacagctccagcagttcttga

SEQ ID NO: 631075 - DNA, 100 bp, Homo sapiens
ggcggtgggccccagccccacagaccagcccagcattcaggagcacgtgaattgcctctgcttacgttcaggccctgtcctaaacccagccgtctagcac

SEQ ID NO: 631076 - DNA, 74 bp, Homo sapiens
agcggcgtcgagaggaccatcctgggtgctggccctgtgctggagcttcaaggttactgactttttatgatgtt

SEQ ID NO: 631077 - DNA, 100 bp, Homo sapiens
tcattggaggagccacccgcacagacatctgccaaggagccctgggtgctggagaatctggtaaaagcaccattgtgaagcagatgaggatcctgcatgt

SEQ ID NO: 631078 - DNA, 51 bp, Homo sapiens
ggcctgacaacttcatctttgggcaaacttgaagataaatcttttgactcc

SEQ ID NO: 631079 - DNA, 100 bp, Homo sapiens
caccacgcactgggtcgtcacggaggacgggaaaatccagcagcaggaagagaatggagactacacatatgtggaaagagtgaagatacccttggatcat

SEQ ID NO: 631080 - DNA, 82 bp, Homo sapiens
gcggcagccgaggccgcgaactgcatcatggaggcttgggcactgtttaaaggaaagttccgagaaggcatcgacaagccgg

SEQ ID NO: 631081 - DNA, 100 bp, Homo sapiens
ttgctggccccagccgctggagacacaatcatatctttagattttggcagcaacgacatatctgaagagatggattaagaatgctttggattaaggattg

SEQ ID NO: 631082 - DNA, 90 bp, Homo sapiens
caaacccaaagatccccgttcctggagattctgattgaggttgaaatcacaaagattagacacctttttagataggtgttcttcagcacc

SEQ ID NO: 631083 - DNA, 100 bp, Homo sapiens
ggaaggagcacccaggagctgaagttaacaagcacaagccctggctggagcccacctaccacggcatagtcacagagaacgacaacaccgtgctcctcga

SEQ ID NO: 631084 - DNA, 74 bp, Homo sapiens
ggaaatgtgaatctcaggagagagcagccagagtggtaactgtgacatttgatgatgtggccttatatttttcg

SEQ ID NO: 631085 - DNA, 101 bp, Homo sapiens
tcttgctaaagaggtagcaagaaagaaaattagagtgaatgtagttgcaccagggtgaaaatcctatttataagagtgccgtaacaactgtggtcaatccg

SEQ ID NO: 631086 - DNA, 88 bp, Homo sapiens
ccaaagcctgaaggcttcctcccgccaccctttccgcccccggggacacctggtcgccatcacatggacacgctatttttgcactcga

SEQ ID NO: 631087 - DNA, 87 bp, Homo sapiens
tcgagaccaacgtggaggagctgtgggtggaagatctgactgcagccatgagcagcaatgagtgcttcaagtgtggacgatctggcc

SEQ ID NO: 631088 - DNA, 82 bp, Homo sapiens
tcatccagtggcagacactgaaaataatattggctggagttggcgatgactcagcagatcaaggctggaagactcattctcg

SEQ ID NO: 631089 - DNA, 80 bp, Homo sapiens
cactgctactgcgaagacagctggcaggatctgccagagcatcttttggagatcgaaaggtagaactttccagttcatcc

SEQ ID NO: 631090 - DNA, 101 bp, Homo sapiens
gggcggcccctggagatgattgagccgcgcacgctacagtacaaggaggaggaggaagagcagccgcaggcagcacagcctcccaccctgcccgtggagga

SEQ ID NO: 631091 - DNA, 101 bp, Homo sapiens
ccaaccaggaatggagacgccattggatgttttgtccagggcagcatctctggtgcatgctgatgacgaaaaacgtccgtctcacccgtgaaataaaacac

SEQ ID NO: 631092 - DNA, 90 bp, Homo sapiens
tgctcaacttcaagaagggatggatgtcgatcttggacgagcctggagagtgtgctctggcacctgtcagcccacccagttccgctgcag

SEQ ID NO: 631093 - DNA, 50 bp, Homo sapiens
accctgggctgcagctgcctaatgagaaaaattctgtaggccgttggaag

SEQ ID NO: 631094 - DNA, 87 bp, Homo sapiens
tcagcagcgaacggaagctcctggaggtcagaggccctttcatcatcaggctgtcattatttgtatcaaaaacaaagaatttgaaaa

SEQ ID NO: 631095 - DNA, 80 bp, Homo sapiens
gctagaagcctgaggagccggagagggtgctggctgccgcgcggccgagatgtgtcttgctgaatcagggctctcttatc

SEQ ID NO: 631096 - DNA, 85 bp, Homo sapiens
agcggagcgaacccgagagcgtggagcgggctgggccagtggattgtattacacagagcatgaatatacttctttaggttacacg

SEQ ID NO: 631097 - DNA, 100 bp, Homo sapiens
ggcggcggccgaggaggaggagggggaagcggcggcggcaaaggctccctcgtgaaagatgcttctgttcctctgattgatgttacaaacctccctactc

SEQ ID NO: 631098 - DNA, 99 bp, Homo sapiens
tcatgcaagcgagggacctgggactgctcacagccaggttccaagaccaaagattaaattaagagaaggtaaagctggacaaaatctgctggaaatgat

SEQ ID NO: 631099 - DNA, 75 bp, Homo sapiens
ggtgaagggggcttcctgaccgagactgagcctgaaatcatagaggaaaccaacattgacagagttcctgagccc

SEQ ID NO: 631100 - DNA, 96 bp, Homo sapiens
cagacagtgacgattatagcacaatatcaacctgaaggatttccatttaaacagggttaatttggaagaatcttcaggagtggaaaactctccagc

SEQ ID NO: 631101 - DNA, 74 bp, Homo sapiens
tttgaagataatggcctgcattttattggtctacaaagacagcagttaaatgtcaccaatattggccagaaccc

SEQ ID NO: 631102 - DNA, 95 bp, Homo sapiens
tacccctctgaagtttacccggatggcctgactcatcccagagacaggaagataatatgacctcagtaacaaaccacttttctcaatcaaagctg

SEQ ID NO: 631103 - DNA, 99 bp, Homo sapiens
tgagtgtgccacacaggtagccctggacggcattcagtgttttgtgtggcaaaggagcagagaactttgacaagttcttcacacgaggacagcccgtct

SEQ ID NO: 631104 - DNA, 100 bp, Homo sapiens
gctcattttggttctcagtttctacgagctggtgtcagagctgtaggtaaaacttgcctactgatcagttacacaaccaatgcatttcctggagaatata

SEQ ID NO: 631105 - DNA, 50 bp, Homo sapiens
tgcacctgctggtcggctttgtcttcgtgacgagccaaactcaggctgta

SEQ ID NO: 631106 - DNA, 118 bp, Homo sapiens
tcgggccaaggttccgcgccgggcgtggacggtgtggggcggtcccggccccgcagacaatgcagatcttcgtgaagactctgactggtaagaccatcaccctcgaggttgagcccag

SEQ ID NO: 631107 - DNA, 100 bp, Homo sapiens
tgaaaggggacactgtgaatgtgcggcggagtgtccgggtgaaaaccaaggtctggaggcggctggtggaaatccaattccccgcggagcatggctggaa

SEQ ID NO: 631108 - DNA, 82 bp, Homo sapiens
caaagtgattccccggaatcgtgtgctgggctggtcccccttgggtctgggggtggtggcatctcccctaaaggaagtggtc

SEQ ID NO: 631109 - DNA, 100 bp, Homo sapiens
accaattctgctcaggaatgtcagaatctggaggaacattttagtggacaaaccaaatgaccaatcttcaagatggtcttcagagagcaactatcctccc

SEQ ID NO: 631110 - DNA, 75 bp, Homo sapiens
gtccagttcattcaacaacatttctttaaaacacgatcttcagtgacatttagtgatgtggctatagacttctct

SEQ ID NO: 631111 - DNA, 83 bp, Homo sapiens
cgaagctggccaaagcctgcccagacggctcacctgtgcgggatggaacaaaagcccaagaagatgaaaggattgttcttgtt

SEQ ID NO: 631112 - DNA, 82 bp, Homo sapiens
atcagaagaactggatcttaccttgcccaccaacttcagagatttgtccaagtgtaaacaggaacatcgataagtagtgtaa

SEQ ID NO: 631113 - DNA, 76 bp, Homo sapiens
tcagcctccggagtagctgggactacaggaaggaagacttcaagaagtcattgaaacccttctctctctggaaaag

SEQ ID NO: 631114 - DNA, 96 bp, Homo sapiens
caaacagcggcgtttcacggtggcacatacatgactgccttccgggaaaatctggatgcttgccgtttaaaagccaatgaagcccctccacgtcct

SEQ ID NO: 631115 - DNA, 100 bp, Homo sapiens
aacttgggaaaaatggaagccagagtgtagtttctgaaggattgtcattcttgcatagcagtgtgaaaatggtgcatggaaatatcactcctgaaaatat

SEQ ID NO: 631116 - DNA, 99 bp, Homo sapiens
aagttagaagacatttgctaagtcaaatcacttcagctggtgaagacacacaacctgctgaccaccaggaactatatctttggataccacccccatggt

SEQ ID NO: 631117 - DNA, 100 bp, Homo sapiens
cacaatccaagttccacaatatattgactactgccacaattccggtcatgtttactggtgaaaatattcctgttcatcctcatgtttatagcaatggtca

SEQ ID NO: 631118 - DNA, 99 bp, Homo sapiens
cgagaagggcgactactacgaggcgcaccagatgtaccggaccctgttcttcagggtaccgtgagggttttctctggaagcgtggccgggacaacgggc

SEQ ID NO: 631119 - DNA, 73 bp, Homo sapiens
gcccacagacctcaaattcaaaggacgctgtgcagagctgcaagtccgtatcactgaggctgtggccacagcc

SEQ ID NO: 631120 - DNA, 97 bp, Homo sapiens
cgagggaggaacactctctgaggaagcccaactcctatgagctcctctctggcagtgagttttatgagtatcacgcactaatgatggaagaagaagg

SEQ ID NO: 631121 - DNA, 82 bp, Homo sapiens
ttggatcggcatctagtctttccgcttcttgaatttctctctgtaaaggaggtgatggcatcagctgagaagggaaggaagc

SEQ ID NO: 631122 - DNA, 100 bp, Homo sapiens
cgccattttgcccaaaccggtgaaagtagagttggctttgtgggacacagctgggcaggaagattatgatcgcctgaggcccctctcctacccagatacc

SEQ ID NO: 631123 - DNA, 74 bp, Homo sapiens
ggaagaggagggcaagaagggcaagaaggtagagctgagtaaagaagaagtaaaacgcctcattgctgaggcaa

SEQ ID NO: 631124 - DNA, 122 bp, Homo sapiens
gcaggaagcgggcagtgggggtggcacccgccgcctcccgggcagcccaagggcggcgactggcggcgcgatggacctgaccgggctcctgctggacgaagaaggcaccttctccctcgccg

SEQ ID NO: 631125 - DNA, 100 bp, Homo sapiens
aacgcttgcccagcaaatgcgaagggtctccgtctctccaccgggggcttcatccttccagggaggagaagagggactccagaatggctgaggagaagaa

SEQ ID NO: 631126 - DNA, 78 bp, Homo sapiens
agatcttgacaaagcctcttctgtttccaatggggatgtggagagcatcttgtgcgcaccatactggctagagaatgt

SEQ ID NO: 631127 - DNA, 96 bp, Homo sapiens
gcggcggcggcggcagcgggtcttgggtcctccgagagcagcagcggagggcctgaggctatggcaggaggagcaggagaggaaggtgcaagccct

SEQ ID NO: 631128 - DNA, 51 bp, Homo sapiens
cccatcccggaggtctccgccggctcccggtgttctagaacagatcagaca

SEQ ID NO: 631129 - DNA, 82 bp, Homo sapiens
ttaagctaaaagactggcaagaagaccccttgttgaaatgggacagttggcagcggctctgatgagcccgagaagaggcctg

SEQ ID NO: 631130 - DNA, 82 bp, Homo sapiens
ctttggctcaaaggagttgtatttagtgtgacgactgttgacctgaaaaggtggaacaatccaaagttttaatcaaagaagg

SEQ ID NO: 631131 - DNA, 100 bp, Homo sapiens
ccggggagaaggtgttgttgccggagctgagaccgggcggccacagtccgcagggatgaacctcgagttgctgggttacaagatgttcacctaagattga

SEQ ID NO: 631132 - DNA, 100 bp, Homo sapiens
ggaggcgaggccggacgcacctctgtttgggggtcctcagatgaccgcacctcgagcaggagtggggatgccacgtctgcccccagcgcccggccctctg

SEQ ID NO: 631133 - DNA, 130 bp, Homo sapiens
cattttaagaaaggacagcattcctgtgacctctgcctaccatccataaaatactcattcccctctcagtctcagaccagtatccttcaggggttctcttactctgatttgcggaaatttggcatcgtct

SEQ ID NO: 631134 - DNA, 97 bp, Homo sapiens
ggctgcagggggagagaagacaggatttgtgacagcacagtcattcattgccatgtggagaaatgttccttgcctgtatctccccttggttcaatag

SEQ ID NO: 631135 - DNA, 100 bp, Homo sapiens
aggcccagaaagatgaaatcatctgccccagctgtaataggactgcccatccactgagacatacctcaagcccttctcaggatgcgcaggatgccaggcg

SEQ ID NO: 631136 - DNA, 82 bp, Homo sapiens
cagttagcaggaatactttagcctggaagggtgtccgcaatgttgccagtgtctgtctgcagattggctacccaactgttgc

SEQ ID NO: 631137 - DNA, 75 bp, Homo sapiens
gagtatcaaggcaaaacggagaagcacgagtcccagaaaggcaaatgttgaacatctggtgcaaaagatgaaaac

SEQ ID NO: 631138 - DNA, 82 bp, Homo sapiens
ggcggtgggccccagccccacagaccagcccagcattcaggtggttccacgagtgtttgggcgcatggtgggtaaaagccgg

SEQ ID NO: 631139 - DNA, 96 bp, Homo sapiens
gagaagaggaggatcgcccacatccccaacccccgcctggctgcaggttaccacggcagcagctacagccccgaaggggtggagcccgtcagccct

SEQ ID NO: 631140 - DNA, 97 bp, Homo sapiens
gctactccagcaacatcttgtccataaggctgaaccggcaagtaataatagacgtggatggaatacaactagccagagatattccaatgtcatccag

SEQ ID NO: 631141 - DNA, 100 bp, Homo sapiens
agggtggctgtgctggctctggctgtggcaaatgtgactgccatggagtgaagggacaaaaggtttaagaattgtttaagctgcatcaatggagcacata

SEQ ID NO: 631142 - DNA, 104 bp, Homo sapiens
ccacatcctacctgaagatcatcttcttttggcttcttcaaagagggtgaaagacctccataaggcattagcatccctagccacagccactctggagtccgtcg

SEQ ID NO: 631143 - DNA, 75 bp, Homo sapiens
aaaccagtcatgaccactagacccacagctgttaaagcaacaggaataaaattgaagggtgtttttcttagagaa

SEQ ID NO: 631144 - DNA, 100 bp, Homo sapiens
gcgctgcggcatggcgcgcgcctgcctccaggccgtcaagtacctcatgttcgccttcaacctgctcttctggggggggccctcagcctcttggccttga

SEQ ID NO: 631145 - DNA, 46 bp, Homo sapiens
gccctggccatctaccatgtgcaatgttgtggagaagtgtgttact

SEQ ID NO: 631146 - DNA, 51 bp, Homo sapiens
tattctagcatccgtgaaggagcaggttgttattgatgccttcagattgat

SEQ ID NO: 631147 - DNA, 100 bp, Homo sapiens
cgggatggtgccacaggaggctgtgcgggccccgctccgcttcgaatgggcactggagatattattgctgtcatgataacagaattgaggggtaaggata

SEQ ID NO: 631148 - DNA, 100 bp, Homo sapiens
ctgattactatatcattgctggagtgatctatcaggcaccagacttgggatcagttataaactctagagtggattaaagcaaggagagccaatcatgact

SEQ ID NO: 631149 - DNA, 46 bp, Homo sapiens
accatggccagcaccatttccggagtctgctacaccatttttgatt

SEQ ID NO: 631150 - DNA, 100 bp, Homo sapiens
cctggcgtgcactccgcacctcggggacattattgcgcgtggaacggctgcttttggaagcttccatgaggcaggctgaacctgcagatatgcgcccaga

SEQ ID NO: 631151 - DNA, 83 bp, Homo sapiens
ggctgcacagtttctctggaatgcactttatcgctaccgaggcaaagccttccaagcaacagggagctggggatgcagaagag

SEQ ID NO: 631152 - DNA, 100 bp, Homo sapiens
ttcgttcagtgggacttgcttcacgcatcccagccatcactcttccacctgctccttagagaagggaagatgagtgagtcgagctcgaagtccagccagc

SEQ ID NO: 631153 - DNA, 98 bp, Homo sapiens
gacactccacgccacccggggggctgcactcctctcttgggggccgcgcatagctccgactacagcatgtggaggaagaaccagtacgtcagtaacgg

SEQ ID NO: 631154 - DNA, 100 bp, Homo sapiens
gatctctgagaagaacaaattagaatcagattatatggccgcatcttcacaactccgtcttacagagctgcccaacatgttcggcgaccttcggtccacg

SEQ ID NO: 631155 - DNA, 96 bp, Homo sapiens
cagagcaggagcaggatgcagaggagaacgggaccagttactctccacaagaaaattcacacaaccacagtgctcttcatagttcaaattcacatt

SEQ ID NO: 631156 - DNA, 75 bp, Homo sapiens
cgacaagccgctggcagccgcggatctcaccgccgctcaggctctaatggtaccaagtgacaggttggctttact

SEQ ID NO: 631157 - DNA, 51 bp, Homo sapiens
ttgtgtcagtgaatacaaacaggttcactactgtgatagacaaagtggcaa

SEQ ID NO: 631158 - DNA, 118 bp, Homo sapiens
agctccctgctgggcgatcttctctgtgctactgcaacttgctctgtgggattatcagaggtgccttggaaatgtgtgtaaatatgttgctgtggagctgaagtcagcctttgaggaa

SEQ ID NO: 631159 - DNA, 82 bp, Homo sapiens
aggccggccgcctggtcatggcgcagccgggcccggcttcccagcctgacgaattcagtttgcctgttctgtatgcaagttc

SEQ ID NO: 631160 - DNA, 83 bp, Homo sapiens
agcgcgaccggaccggggccggaggcggcgcgccctgcaagagggacccagacatggagctgcgggaagaagcctggtctccg

SEQ ID NO: 631161 - DNA, 83 bp, Homo sapiens
aggctgagctgctccaggacttgggatctgaacagaattaagacgaacgagctttcacaattgcagcagatgaagatccattg

SEQ ID NO: 631162 - DNA, 90 bp, Homo sapiens
tgggaagtatgagaaggtgcttgtggaagggggcccggctccctaggcgtcccatctcggatgacacgtacacagagagctacatcagca

SEQ ID NO: 631163 - DNA, 50 bp, Homo sapiens
gcgcttcggcccgggccgctcaggtgcagaaataggaaggttgttgatta

SEQ ID NO: 631164 - DNA, 100 bp, Homo sapiens
gcacgataaaggaactcaggcgcctcttcttagttgatgatttagttgattctctgaaggaaatgagtggcttatactctcctgtcagtgaggatagcac

SEQ ID NO: 631165 - DNA, 75 bp, Homo sapiens
cccaccaagtgctggccagtgagcccatcccgttctctgatttgcagcagatccagctatgggacacagcaggac

SEQ ID NO: 631166 - DNA, 75 bp, Homo sapiens
cgcacgggcttcaccttcaaatacagattcatgatgttgctatcaaaagttgagaaattgtcagaagaaatcatg

SEQ ID NO: 631167 - DNA, 101 bp, Homo sapiens
ggagagcacgccatgaaggcctcgggcacgacatggccaacctgtctctccacgatcacgatggctccagtggcgcctctgaccaggacacactggcccct

SEQ ID NO: 631168 - DNA, 100 bp, Homo sapiens
tgtacaaccagcgcctgcgcctacagaacgagcaccgagcacccagaaatactctccacaccatgctgcactgctgcggatgagggaaggatggtgtcgg

SEQ ID NO: 631169 - DNA, 100 bp, Homo sapiens
atgtctttctgtaaatgacatctcactacagtctctacctgaaaatattggcaagtttgccctgagatatttcaaggacacatccccagtctttcaaaga

SEQ ID NO: 631170 - DNA, 82 bp, Homo sapiens
ggagaagcagctgcggaaaatgctagaagggtggcccagttgaaatccttcccttcctctaccttggaagtgcctaccatgc

SEQ ID NO: 631171 - DNA, 118 bp, Homo sapiens
gtcactgaagtcacaacttgccaggaggttgtcatagccttagctcaagcaataggaaacccagcgtttgctggcagaaccagttcctggcatcaaagccgaaccagatgagagcaac

SEQ ID NO: 631172 - DNA, 100 bp, Homo sapiens
accattaatggacaaaaacatgagtcaatatgtattgtggcattcaaatcctagcactctgggagaggtattatagctgcaaatgtccttgtattctgtt

SEQ ID NO: 631173 - DNA, 95 bp, Homo sapiens
cgatgtgctctgcgtgttgctggattgttaaaggaaatgggctggcaggaagacagtgaaaatgatgaaacatgtgctcccttaactgaggatga

SEQ ID NO: 631174 - DNA, 75 bp, Homo sapiens
cagattcgcagtggtcgcttcttctccttggtattgcaggcaatgggatatccaacaggctttgatgcagatatt

SEQ ID NO: 631175 - DNA, 100 bp, Homo sapiens
cttgggccgcgtctcctttgaggatttacttcatttgggtcactaggtcacgggggcctcacttcattctcttccacgtcatttggtggtagtggcatgg

SEQ ID NO: 631176 - DNA, 99 bp, Homo sapiens
aggagatccggcggcagggcaagctgtgcgacgtgaccctcaagggttggggtctgctaggtccccggaatgagttgtttgacgcagccaaataccgag

SEQ ID NO: 631177 - DNA, 83 bp, Homo sapiens
gggcggcctgctgggctcctgcgcgccctggctcctggtcaactgcttggaccagcatgttcggaagtcccccgagagcgttg

SEQ ID NO: 631178 - DNA, 100 bp, Homo sapiens
cctcaagaatccattctattccttagaaatgcctatcagcaccttgcagagtgaagtcaagcccatcctagagaagctgacccaggaccaggatgtggac

SEQ ID NO: 631179 - DNA, 71 bp, Homo sapiens
ctctgttagcttggcctctgtccctgaagtcggatcctgacctcccagccgatgtgcagacaccatcctcg

SEQ ID NO: 631180 - DNA, 75 bp, Homo sapiens
gcactgcagcacagctcagagctggcgcccaaggatcttgtgctgtgaagacatttcccaagtgcttcatgttag

SEQ ID NO: 631181 - DNA, 100 bp, Homo sapiens
gctggagccccggctggctcaccccggggccgggcagaattgggctccagacaacacaggcagttctacataccggccaccccctcggacccgggaggtg

SEQ ID NO: 631182 - DNA, 100 bp, Homo sapiens
gggcggctggcgccgggggccggggagcgccaggaaggaaaatcacctcggcagtgtttgaaggaaggatactgcaactctttgaagtacgcattttttg

SEQ ID NO: 631183 - DNA, 80 bp, Homo sapiens
cggcttcggagcgggagtgttcgttgtgccagcgactaaaaagaggtgcatggctgcctcctaatcccatagtccagagg

SEQ ID NO: 631184 - DNA, 100 bp, Homo sapiens
gtgagtggagatgctttcagtggtggagaatggactggacccccaggctgccatcccgaaaagaacgccctatatcattaggaattttcccattacctgc

SEQ ID NO: 631185 - DNA, 100 bp, Homo sapiens
ttggaagcagccgatccagcctgcggagcctgtggggcaggtagaactttagacttcatagcactgaattaacctgcactgaaagctgtttacctgcatt

SEQ ID NO: 631186 - DNA, 50 bp, Homo sapiens
ctgtctgggccaaaggaataaggactgtgccgccctgttcttggccgtcc

SEQ ID NO: 631187 - DNA, 75 bp, Homo sapiens
tacaacaacgtgtgccgcaagttcccccgagacatgaaggccatgtccccagattggccgcgtaatccaggttgc

SEQ ID NO: 631188 - DNA, 95 bp, Homo sapiens
ggatcgtgaccgagaccgtgaccgagagcgtgaccgagagcgcgaatatcgtcatcgttagaagagccggtgccatctgtgggggctttgggcca

SEQ ID NO: 631189 - DNA, 75 bp, Homo sapiens
agggactgaaggtcacaccacagcgcatctattaatgagatgaagcggttggaagaaatgtcaaatatgtttcag

SEQ ID NO: 631190 - DNA, 100 bp, Homo sapiens
gtcaagaaatctgattttgaggtgttcgatgctttaaagttagattctatggaaagttctgagacatcttgtagagatatgtcttgtcgttcaagacttg

SEQ ID NO: 631191 - DNA, 87 bp, Homo sapiens
agaatatatcctctaaatctgatatacccagaaagcggtactctagaaatgaatgtcaaggatcttagaccacgagctagaaccatt

SEQ ID NO: 631192 - DNA, 100 bp, Homo sapiens
acatgatggaactgtttgacacaactgtagagcagctgtatagcatcttcactgtaaaggagcaggggaaggctagcctaatcagggatatgtccagttc

SEQ ID NO: 631193 - DNA, 75 bp, Homo sapiens
cctgttgtctaccaagtgcagtttaaataccacaatggtgcgcatgaatgtcctggcagatgctctcaagagtat

SEQ ID NO: 631194 - DNA, 75 bp, Homo sapiens
agtagagtcctagaggcactgagcatggcttctcgctgtttctgggatgctgacactgacaactatactcatgat

SEQ ID NO: 631195 - DNA, 100 bp, Homo sapiens
cccagcccctggtggaggcggcttggcggagattcggagccgtcagcaggagttggtgtcctgcctgcgctcaggatgagggggaatctggccctggtgg

SEQ ID NO: 631196 - DNA, 100 bp, Homo sapiens
cccaggatccatttcttacgttactatgcgagatgcagaagttgtggctgtgcccatggtgctcagtgccatgggcttcactgcggcgggaatcgcctcg

SEQ ID NO: 631197 - DNA, 83 bp, Homo sapiens
gtccggaccggagactttggggcctaactagcggagctggagtttgttcagatcatcatcatcgtggtggtgatgatggtgat

SEQ ID NO: 631198 - DNA, 80 bp, Homo sapiens
ctcatctctgagacccggaggaggttcgaagctgagtatgtgacagtgtccactataggatttggctttgtgctggacat

SEQ ID NO: 631199 - DNA, 75 bp, Homo sapiens
caagcaaaccgggaaaggagaggatcccggagccggcaagtagcctgcagtatgaaatgctgctgctgacggatt

SEQ ID NO: 631200 - DNA, 110 bp, Homo sapiens
attagtcctgaatccaataaagagaggcagcttggaaaattttaccttcaatgatgacttcagtcccagcagtaccagttcagcagacctcagcggcttaggagcagaac

SEQ ID NO: 631201 - DNA, 100 bp, Homo sapiens
caggcctgcgccggcggcagagaggatatcttgggcgggggatgtgagcgctgagcccttggcaggtggaccttcaatcctgctgttctcactaaagcga

SEQ ID NO: 631202 - DNA, 100 bp, Homo sapiens
attctcaacccctacaacttattcctgtccggagacagcctaaggtattctaccttgtaaatactgttatttgtatatactgtaaatgatgacatcggtg

SEQ ID NO: 631203 - DNA, 100 bp, Homo sapiens
cgccgctgccgctgcgtgggggtgaggggatcagctcatgatggagcagtccaagaagtcctccctcatggtggcccgcagtattctcaacaacaagctc

SEQ ID NO: 631204 - DNA, 100 bp, Homo sapiens
tgcagaaagtgaagcattatctcatcctgccggtgcaagaaagcctttgaggtgaaggtgtatgaaagtcatcataacagatgttttccaaaaacttgta

SEQ ID NO: 631205 - DNA, 101 bp, Homo sapiens
acagacccttcacccctcacctcgatgcagccagtagcttggatccttgtgggcatgatccataatcggtttcaagtttctctacaataattggagttggt

SEQ ID NO: 631206 - DNA, 82 bp, Homo sapiens
ccagaactgtactctccgagaggtcgttttcccgtccccgagagcaaggctgaaggggatgctaagggagataaagcaaagg

SEQ ID NO: 631207 - DNA, 100 bp, Homo sapiens
cgcgctactctctctttctggcctggaggctatccagcgtactttattaccaaggttgccatcggaaccaggaatgacattactcactatcagaattgag

SEQ ID NO: 631208 - DNA, 87 bp, Homo sapiens
acagtgtagtggaaaccagactcacttctccctgaggaaaaccaattctgtgtcctcggaggaccacagcccagttgggccccaggc

SEQ ID NO: 631209 - DNA, 83 bp, Homo sapiens
cggaagaccgcgcgcagggcctgcagcgggagctggacggcgagcgcgagcggcgcgagaaacgcccggcagaatggcgggaa

SEQ ID NO: 631210 - DNA, 75 bp, Homo sapiens
agatggcggggccccggcgggagatggcgaggcgggcccccaacaggcgggccccgagcattcctctgattcaga

SEQ ID NO: 631211 - DNA, 111 bp, Homo sapiens
cagaatttatatagagatgtgatgttggagaactacagaaacctcgtctccctggaggagcaggatgcaaccgacaggctgtggccggacagctgctgcccagcacatgga

SEQ ID NO: 631212 - DNA, 80 bp, Homo sapiens
attggagctcatgcagtcttcagtggataataccaaaatgggagtgcatccgccccaacccttttccccctcgtctcctg

SEQ ID NO: 631213 - DNA, 75 bp, Homo sapiens
gaacccgaagaagaaaggattcgttacagccagagattgggatcatagacggtatttctatgtaaacgaacagtc

SEQ ID NO: 631214 - DNA, 75 bp, Homo sapiens
agcaggaaaatgagatgttatccaggtgaaaggtgtagcagtcactcggcctacacccacagcatcgaccttgtg

SEQ ID NO: 631215 - DNA, 83 bp, Homo sapiens
cagtggataattttgtggccttagctacaggagagatcttgcaggagagagagttactgcctgtgaagaaatttgaaagtgag

SEQ ID NO: 631216 - DNA, 97 bp, Homo sapiens
gcaggaggctgcgaggagccggcgcggtcgcagtctccacggcgcaggcccacggtagcgcagccgctctgaggtaagaatgattgatgttggctga

SEQ ID NO: 631217 - DNA, 98 bp, Homo sapiens
tcggaatgcactacaacaggaaaatcatattatagatggagtaaaggtgcagacgccagaagtgagatttcagcagcagctggagcagctcaactcca

SEQ ID NO: 631218 - DNA, 100 bp, Homo sapiens
ctgcgcaaagccagcgtgaccatccaacagggagctgccaccaccgtgtactgtgctgctgtcccagaactggagggtctgggagggatgtacttcaaca

SEQ ID NO: 631219 - DNA, 75 bp, Homo sapiens
caaaggcaaaggattcggatttattaagcttatatcattctctgctggaactgggtgagaagcgtaaaggcatgt

SEQ ID NO: 631220 - DNA, 75 bp, Homo sapiens
tgtttttgacctcacagtgaacctcaatttcctgctctacgaaacgcactcttttgccttgaagcggcattggac

SEQ ID NO: 631221 - DNA, 75 bp, Homo sapiens
ttactcgatgatggaactctggtggtttcaggaaggtactaggttttgacaagcttgcatcatgcgtgagtataa

SEQ ID NO: 631222 - DNA, 71 bp, Homo sapiens
gatttacctgtgagatgtttcatcccaacaaaattgcatctgatggtctcaagggtcgtgtgtttgaagtg

SEQ ID NO: 631223 - DNA, 100 bp, Homo sapiens
gaaggaagcccccagccccttccaggccctgttctcagatccacatgaagaccatgcccgccgccatgttcaggctcctcacgggtcaggagaccccgct

SEQ ID NO: 631224 - DNA, 75 bp, Homo sapiens
cagtaggaaatattcaggcatctcaacaggggcactatgaacgaagaggagcagtttgtaaacattgatttgaat

SEQ ID NO: 631225 - DNA, 73 bp, Homo sapiens
gtgatcccggcgacatactacctctggccccgagatcagaatgccggttcactaagaatctttccccagacaa

SEQ ID NO: 631226 - DNA, 80 bp, Homo sapiens
gcaagttggagggagagatgcaaataccagctggaagacccctctgtgttcccagctgtgatcgtggagcaggtacccta

SEQ ID NO: 631227 - DNA, 50 bp, Homo sapiens
gcctacccgggatacggaggaggggccaagctataacatcagaaatggtg

SEQ ID NO: 631228 - DNA, 100 bp, Homo sapiens
gaagaaatccgcagaagcttattaaagttaagcttggtgctaacagtggtttgcacatcatcatctttgatgaaattgatgccatctgcaagcagagagg

SEQ ID NO: 631229 - DNA, 96 bp, Homo sapiens
gacaacgatggcattcctgatgacaaggacaactgcagactcgtgcccaatcccgaccagaaggactctgacggcttgatggtgtcaggctatgct

SEQ ID NO: 631230 - DNA, 95 bp, Homo sapiens
gggctgttctcctgcatcatcaacggggaggagcaggagcagacccaccgggccatattcagtggattgggccgtggaacaggcccacttcgccc

SEQ ID NO: 631231 - DNA, 51 bp, Homo sapiens
gaacatccagtttgatgtttactacaagtctgaaaggcactttattatgca

SEQ ID NO: 631232 - DNA, 80 bp, Homo sapiens
atttcacattgcccacttatatgaaacccagtgatgatgatgatgattttgatgatgaggaagctgaagaaaaagcgcca

SEQ ID NO: 631233 - DNA, 87 bp, Homo sapiens
ggaagggtttatgacctcttttgccttgttcatggtatgtgtagctgatagttttacaacaggaagagcaaccgaggtttcaatctg

SEQ ID NO: 631234 - DNA, 82 bp, Homo sapiens
gcgcctttgtgcgcgcgccgaggggacggcaaaacagaacagaaaggcggagataaaaagaggggtgttaaaagaccacgag

SEQ ID NO: 631235 - DNA, 49 bp, Homo sapiens
ttttgtggacctgctgatcctgaatatgatgaagaatgggctaagaaaa

SEQ ID NO: 631236 - DNA, 75 bp, Homo sapiens
aggataaacttgaccaggtttccagtgaaataagagaaggaagccaacatccttttggagccatgaatattgtcc

SEQ ID NO: 631237 - DNA, 100 bp, Homo sapiens
aggcggggctggaggcggtggctgcggttgcgggaccggccactgtgggctcgagtaggggatgaccacctgctgcttcttcagggagagcagctccgcc

SEQ ID NO: 631238 - DNA, 75 bp, Homo sapiens
ctccgacttatttctgtgggcagacattaacattcaggcacgtgtggttctcaaatataggcattctgatgggaa

SEQ ID NO: 631239 - DNA, 103 bp, Homo sapiens
gctatggccgtgccctggggctgagccctcagagtgcctggtgaagaatgtgatgggatcactagcatgtctgcggagagcggccctgggacgagattgagaa

SEQ ID NO: 631240 - DNA, 100 bp, Homo sapiens
ttggaaagaatcgcacctgtgcacattgattcagaagccataaggtcccctccttctttacagatgctgagaggcgatctgtgttagatgctgcacagat

SEQ ID NO: 631241 - DNA, 83 bp, Homo sapiens
cgttccctgcggggagtcggcccccgaccttgccggcttcaccctcctaatggagcaaatggaatgatgactttgaaaaccac

SEQ ID NO: 631242 - DNA, 100 bp, Homo sapiens
cagtgatgcctggaaacagtacatgagaaggtctacttggaaaatgtttcaacgtgcgcaagagttgcggtggcgggcagaggactaccacaaatgcaaa

SEQ ID NO: 631243 - DNA, 100 bp, Homo sapiens
gggatccacacagctcagaacagttggatcttgctcagtctctgtcagaggaagatcccttgcacttcaaatgcttcaccttcagaaggcgcaccactag

SEQ ID NO: 631244 - DNA, 50 bp, Homo sapiens
aagaagttgagcctgatgaagaagaagacttggtgaaatgtgaaaataag

SEQ ID NO: 631245 - DNA, 90 bp, Homo sapiens
attaaagagtaaagttgtgctcaacgattttacatcctgaagtccaaactctagatctacggagctgcgatatatcagatgctgctctcc

SEQ ID NO: 631246 - DNA, 131 bp, Homo sapiens
gacaaaagttgctatgcaattatggttggcagcactgtaacctttatagctggagtttatcaggattccagtgagagtagctcctctgcaccagccacacagttcatcatgttgcctctgcctgcctactc

SEQ ID NO: 631247 - DNA, 100 bp, Homo sapiens
ttcctgtacagcctgcagaactccggcagcaaaagtggaccaagaaaccttgacagaaatggtgaaacccagtattgattatgtgcgccacaaaaaattc

SEQ ID NO: 631248 - DNA, 83 bp, Homo sapiens
gcctgcaccgagccctgagcactcgagcccgagcgtgcggctgctgccctcaggtgaagcggaggctggacctggaaactgac

SEQ ID NO: 631249 - DNA, 91 bp, Homo sapiens
gagcctcagtgctgatcgtcggagcttgggagcaggaagatgtcgaatgaacttgagtattttgaaggtggcgtctcatctgtctacctct

SEQ ID NO: 631250 - DNA, 100 bp, Homo sapiens
gcggcggcggcggcagcgggtcttgggtcctccgagagcagcagcgcagtgcctgatttgagatggggtcccaggtctcggtggaatcgggagctctgca

SEQ ID NO: 631251 - DNA, 90 bp, Homo sapiens
acctcctagtagaaaaagttcttgggacaaacttcatttgagttgtggaaagtaaaaatgtagccctaccaaaaggaactattgtactgg

SEQ ID NO: 631252 - DNA, 100 bp, Homo sapiens
cacgctgctggtggcccgggtcttccagaaggctgtagaccagagtatcgagaaggtcctcagaatggttggaatgaccctccagctttgaacagagtac

SEQ ID NO: 631253 - DNA, 75 bp, Homo sapiens
gtagttccatgctgtctgttcagacttcagcttggtgttcttgattattacagacctctttctgaaaagcccgga

SEQ ID NO: 631254 - DNA, 100 bp, Homo sapiens
ttttttgcggaacctgaaaaattcaagaagttgaaaaacgcttttcacgtcacctggagagatgcacaggggcatatgatattttcctgaatgcaaaaga

SEQ ID NO: 631255 - DNA, 83 bp, Homo sapiens
tggagtacgcgcaggaggccgtcaagaagggctcgaccgcgcaattctgtggtgttcttggtcacacatttatggagtttctg

SEQ ID NO: 631256 - DNA, 100 bp, Homo sapiens
gaacttctggagctggccaacgtgcaggaggtcattcaacatttattcaaccaaaaatactaagtcagctctatacaaactaatggaaggatacagctat

SEQ ID NO: 631257 - DNA, 100 bp, Homo sapiens
ttgggatctgatatttttctactagtagataggactcttggtttggacatactacatggatcagtgggtaattccagaattgattggccataccattgtc

SEQ ID NO: 631258 - DNA, 82 bp, Homo sapiens
gacgagcaggaagctgcggctgagtcgggtccccagccccaccccagccccaaaggaggctgttcgagagggacgtcctccg

SEQ ID NO: 631259 - DNA, 100 bp, Homo sapiens
agctcaagcatgaaaagccttaggatattgctgttgtcccaggacagaaaccatccatcctgagaggcctgaagaagaaaggcattcaccacccaacacc

SEQ ID NO: 631260 - DNA, 75 bp, Homo sapiens
tcatcactaagaaatcaggtgtagttctgctgaatcctattcctaaggaatcttctgcggcttgtccatagtgtg

SEQ ID NO: 631261 - DNA, 75 bp, Homo sapiens
ggaagttcccagggagaaggcagcgcgttgtacccgagttaccttatcccatatcacacaactggtcctcagcca

SEQ ID NO: 631262 - DNA, 90 bp, Homo sapiens
gggatagcgttgcaaatccttaaaagagtcttaacgctgagatctgtatctgtggacctgaatgttgatccctcgcttcagattgacata

SEQ ID NO: 631263 - DNA, 100 bp, Homo sapiens
cggaggccgaggacgcggaggacgcggctctgccagctgttgacagtgtcttgaagaggatgacaataattggtgtaattttatccttccgatcattggc

SEQ ID NO: 631264 - DNA, 82 bp, Homo sapiens
ccattgcccactgctgccgcccagtgttaaaagtgtgatgaagaccacatggggtgtgctggatcctcctgtggggaatacc

SEQ ID NO: 631265 - DNA, 101 bp, Homo sapiens
gaagaaggccaggtgtgagtcacagcgagggctctacgtagcggcccagggagcctgccgaggagaacggcctcaaggaagactaaccatctgcaatacta

SEQ ID NO: 631266 - DNA, 87 bp, Homo sapiens
atcgtgaccgagaccgtgaccgagagcgtgaccgagagcgcgaatatcgtcatcgttagaagctgaaccaataacgtttccatctgg

SEQ ID NO: 631267 - DNA, 102 bp, Homo sapiens
tacactccaggagttggtggtgaccccgcccagttggcccagaggatctcttctaacatccagaagatcacacagtgttggtgaataactgtgtgggatttt

SEQ ID NO: 631268 - DNA, 100 bp, Homo sapiens
tgcctggatcttggactccctggcctccgtaatgggcagaaatttagcatctggagaggttggattttttccaagtgatgcagtcaagccttgcccatgt

SEQ ID NO: 631269 - DNA, 117 bp, Homo sapiens
cctgcttttgtggcgctcttgctcctctctccttggcctctcctgggatcggcccaaggccagttctccgcagcacccgacagctacaaagtgcaagataagaaaaatgcctccagc

SEQ ID NO: 631270 - DNA, 100 bp, Homo sapiens
gacatgggtaatacagaaagaatctgaggtggctcacgttgaccaactctttgatgatgcatccaggaattgaaatgcaccagcggttgtctaacataga

SEQ ID NO: 631271 - DNA, 100 bp, Homo sapiens
gcaccatggaggaggacgacagctacgatctttaatctcatgaagtacgacagctacagccgcttcttaaagtctgacttgtttttaaaacacaagcgaa

SEQ ID NO: 631272 - DNA, 50 bp, Homo sapiens
atgagagcctctttggagatatcaagaatcctggttttgacttcagtgga

SEQ ID NO: 631273 - DNA, 50 bp, Homo sapiens
caacaccacaataatccacagccaagtcggagtctagccagtcagaggcg

SEQ ID NO: 631274 - DNA, 87 bp, Homo sapiens
cggagcgccgcggccgcatctacatccaggcccacatcgacagggacgtcctcattgtcctcggtaaaatgtcggttccaggacctt

SEQ ID NO: 631275 - DNA, 75 bp, Homo sapiens
gtggaaagaagttgcaaaacactggggctagtgccacgaggtttacttgactgttgtgtgaaaagctgataagaa

SEQ ID NO: 631276 - DNA, 75 bp, Homo sapiens
ctgcggcgcgggccgagaaggaaggtcagcccaaggccaaccccactgtcactctgttcccgccctcctctgagg

SEQ ID NO: 631277 - DNA, 98 bp, Homo sapiens
cggcggcgcggctgccggctgccctgtgaatgggaagttacgcgaagtccacccagcgtttctgaggtcaactgcaacttggcctcttgatccaccaa

SEQ ID NO: 631278 - DNA, 100 bp, Homo sapiens
agttcagcaacacgggttttttttggccatgacagacgaccagcggatgagatctattcgatcttttgctaatgatgatcgccatgttatggtgaaacat

SEQ ID NO: 631279 - DNA, 88 bp, Homo sapiens
gtgcttggcgggtaactctatcggactctcccatcactctgcatggttgaccgttctggaagatatgtgccactgtttccaacttttc

SEQ ID NO: 631280 - DNA, 74 bp, Homo sapiens
attctcctgcctgcgggtctttaaagactgaggaatagctattcagtcagacagaaccacttatcacgttttgc

SEQ ID NO: 631281 - DNA, 75 bp, Homo sapiens
gctggaggactgggtatcaatctcactgctgcagacacaatcatggaagggaagtggttgctgtgtatgttactg

SEQ ID NO: 631282 - DNA, 51 bp, Homo sapiens
gacgaacgtggggcaggatggacggcaaagaggatctgacgaactactctc

SEQ ID NO: 631283 - DNA, 82 bp, Homo sapiens
gcagtttgtgaagcgaattggttatatgatcagcttcctgcctgacacagctcacttcaagaagtgcacaatgtcagaacgt

SEQ ID NO: 631284 - DNA, 100 bp, Homo sapiens
gcctgacatcggcgaggagggggcctcggacggcgactccggggatggcgaagcaaaataaagcagttggagtgatgaagtcgggccatgtatttacaat

SEQ ID NO: 631285 - DNA, 82 bp, Homo sapiens
tgaatcctgcggcagaagccgagttcaacatcctcctggccaccgactcctacaagggacagtatgatttggtgaaatgcct

SEQ ID NO: 631286 - DNA, 101 bp, Homo sapiens
agaagattatcattgacaaggaatattattacaccaaggaggagcagtgtgaacacacagtgttcatcccctcaggaggacacagcttttgaggtaccatc

SEQ ID NO: 631287 - DNA, 75 bp, Homo sapiens
gatgcagtgaaagaaacttcctcagtaaagcatttgggaatggatgatgaaggagatgatgacccagttcctcta

SEQ ID NO: 631288 - DNA, 83 bp, Homo sapiens
cagctgatgacctgctgctcgtgctgatctcagaacccagtgacttgattgtaaaaatttacagagcggaatcatatgctggt

SEQ ID NO: 631289 - DNA, 97 bp, Homo sapiens
agacacctgtccttccttctacagaccatgctggacttcttgtcggatcaggcccagcagaccgggttatcccagtccgaggtccagcgaaggattt

SEQ ID NO: 631290 - DNA, 100 bp, Homo sapiens
tggtgtttactacctgcactcccttcaaatcgcccactttgatcttaaggctgttaaaagacataatctgactaaaagatggcttatgaaaatcgtcgat

SEQ ID NO: 631291 - DNA, 134 bp, Homo sapiens
ggaccgtagctgcacagacataccatggctgctgctcttcatcctcttctgcattgggatgactctgagatttgcccacctgatgaccttgccagcttgccatcatgcaaagaaaatcctgaagatgttctgag

SEQ ID NO: 631292 - DNA, 100 bp, Homo sapiens
ccctcgcgtcgcggccctgggcgggcgccgcgagccggaaagtgagtgagaaggttggaggagctgaaggaaccaagctagatgatgacttcaaagagat

SEQ ID NO: 631293 - DNA, 90 bp, Homo sapiens
ggaggaaagtgggtcataaatcctagtggtggactgatttcaaagggacacccactaggcgctacagagaccatggcgagcccagggaaa

SEQ ID NO: 631294 - DNA, 75 bp, Homo sapiens
ggttccttgacttcaaagtcctaccccaggaagctgaagaggagcgatgggaaggagttcgagacacgactgaag

SEQ ID NO: 631295 - DNA, 83 bp, Homo sapiens
gtgggattcgttggcggtggctgaggagccttcacgtaaatgggtccagtcatgcctcccagtaagaagccagaaagctcagg

SEQ ID NO: 631296 - DNA, 82 bp, Homo sapiens
aggcgaggccggacgcacctctgtttgggggtcctcagtgcctccggagccagcgtggtggccatagacaacaagatcgaac

SEQ ID NO: 631297 - DNA, 50 bp, Homo sapiens
acaaatcaaattagtggttttgaacttaaataaacagtcctttgaccttg

SEQ ID NO: 631298 - DNA, 100 bp, Homo sapiens
ggagtccgtggatgaaggtggggtggcgtggcaagccggactaaggaccggggacttcttgattgagaaaactttagaaactgttcctttggagaggaaa

SEQ ID NO: 631299 - DNA, 82 bp, Homo sapiens
ggggacctccaaagactaaactgacaagccttcaaggagcccaggggtcaacaatgaagatccttttcgttcagccacatcg

SEQ ID NO: 631300 - DNA, 90 bp, Homo sapiens
cggcagcggcggcggctggactaaacaggtcacctgcaggaatatattaaaggaatctgtgaacctgaactagaagaaagagaatgttac

SEQ ID NO: 631301 - DNA, 75 bp, Homo sapiens
ggcgaaggaggaggcgttgccggaaggccaatgatgaggccaatcagagtgatacaagtgtctccttgtcagaac

SEQ ID NO: 631302 - DNA, 80 bp, Homo sapiens
ggacccaggagaaattcgccctcaaagtgaccattgtgaggtagatattttgttctaattttccagatgaggaagctgag

SEQ ID NO: 631303 - DNA, 82 bp, Homo sapiens
caggagcgcttccgcaccatcacctccacattttgcaagaacgaggctcaaggatgtgagggacacagtattgacagctgaa

SEQ ID NO: 631304 - DNA, 100 bp, Homo sapiens
agatggcggatgccctgcagtacctgcagaaggtctctggagacatcttcagcaggctccaccaagggtgccctggacatgctgaccaaggtgatggccc

SEQ ID NO: 631305 - DNA, 87 bp, Homo sapiens
acacggcttcccccaaggaatatacaggtatatttctccctcgagtggctgggaaacttggcaagagaccagaggacccaaatgcag

SEQ ID NO: 631306 - DNA, 74 bp, Homo sapiens
ctttcttcgttgccatgaggaaagaattctccgagttgatgcggatgaaattaaaaggctaggaaagagattta

SEQ ID NO: 631307 - DNA, 100 bp, Homo sapiens
cccgaccccaaaagagtattcttggatcttgcacaggaaggaattaaagcatgaagactttttgcttgccctacagatgaatgaagaacagtatcaaaag

SEQ ID NO: 631308 - DNA, 96 bp, Homo sapiens
cgcagccttgggcctcgcgccggctatggccgtgccctggggctgagccctcagaggccacaagaggaagctgaatgaagaggacgccgccagcga

SEQ ID NO: 631309 - DNA, 90 bp, Homo sapiens
tctgcccctagaataagaacatactagaagtcccttctgctaggacaacgaggaaagaccacagcaagattctttcattcgtctcctcct

SEQ ID NO: 631310 - DNA, 74 bp, Homo sapiens
tgcaggaatacgaagagcagctgaaagaaaatgccagcgagggatctctatgaagcaccagaattatcagtgaa

SEQ ID NO: 631311 - DNA, 98 bp, Homo sapiens
ggcacttcattggccacctacagaaacaaaatgtcaacaaattgatggtgaattttgaagattgcaccggtcgacaaaggacagcctatttttccctc

SEQ ID NO: 631312 - DNA, 75 bp, Homo sapiens
gtggagagccaaagatcaaagtgccaatgggtcatgtttggttagaaggtgacaatctacagaattctacagatt

SEQ ID NO: 631313 - DNA, 75 bp, Homo sapiens
gcggagcctggcgggcgtgggaacccaggccccgccgaggcggccagcggagcgtgctttggacaccatgaattt

SEQ ID NO: 631314 - DNA, 100 bp, Homo sapiens
ctacgagtccaagggcatcaaggctcacttcaacctggatgagagtggcgtgctcagtctagacagggtggagcccagtgacaccatcgaaaatgtgaag

SEQ ID NO: 631315 - DNA, 100 bp, Homo sapiens
agacaaagacactgcttcaaacgagaataaagaaaaaaatcctataaaagagaatttccctttcaacaacccctggcgacttgattattcttagaaatgc

SEQ ID NO: 631316 - DNA, 100 bp, Homo sapiens
cccactgagtgaggctggggacctcactgagaagtattttgctctgcgaaacatcatccagaagggacaggctggcctgacatggaaggtgaaacaaggc

SEQ ID NO: 631317 - DNA, 74 bp, Homo sapiens
tggattactctttggatataacaccaccttcaaaaatttctggaagaaggagaaagggccaacccctgaagaag

SEQ ID NO: 631318 - DNA, 90 bp, Homo sapiens
aacatctcaccaattttaaatcaggattactacagcatcccatttcccacacccactactccgctgactgggagggatggtagcctggcc

SEQ ID NO: 631319 - DNA, 100 bp, Homo sapiens
cctttgagactcccgaaatatttaggcctgaaggaattctcagtcaaagaggttgctaggaagaggctcaatgtttgtgttttcaccagatcagtttcag

SEQ ID NO: 631320 - DNA, 100 bp, Homo sapiens
cacggcggccggacggtggagaacatgagggtgctgacggagcttgtgtccaagatgcgggacatgcagatggacaagacggagctgggctgcctgcgcg

SEQ ID NO: 631321 - DNA, 82 bp, Homo sapiens
tgacggtggaggttcgcggctctaacggggctttctacaagatcaagcgacgtgcctcagaggctttgcccgaattgcttcg

SEQ ID NO: 631322 - DNA, 98 bp, Homo sapiens
aactgagacgtttcgaattccagggacctcccgaattccctggtaacagtgttcattctcttcaccttggatcattggtatgcactgcttcaggacgt

SEQ ID NO: 631323 - DNA, 100 bp, Homo sapiens
gagttgagaagaggaggaagaataatgggaggagacaggacctttttcaacttgacaaataggaagatttcgatgtcgatcattttgtgtctgactgtag

SEQ ID NO: 631324 - DNA, 89 bp, Homo sapiens
gaccaagctgatgagcccttgaagcacagcagctcatgatggagcagtccaagaagtcctccctcatggtggcccgcagtattctcaac

SEQ ID NO: 631325 - DNA, 100 bp, Homo sapiens
cacctgggccagcgccgcacttacctgcgggattggtgagagcgttttcgcgaggtcgcaaattccgggatcccattgaagataccacgctgcatgtgtc

SEQ ID NO: 631326 - DNA, 83 bp, Homo sapiens
aacagaatggacaagcttaataaaataaccgtccccgccagtcagaagttgagaaatgagccgtcagactgctacagcattac

SEQ ID NO: 631327 - DNA, 100 bp, Homo sapiens
acatgatcttcattggtggtatcaactgccatcagggaaagccgttgcctatggaggcaagatccaaactgagatggagactgttccagaagcaggaaca

SEQ ID NO: 631328 - DNA, 100 bp, Homo sapiens
cttcttcctcaactatctcgctgacacgcagggggtgatcgctgagctgaaggtgcgcagggacccccaggtgagccccatgcactgcctggacgaggaa

SEQ ID NO: 631329 - DNA, 74 bp, Homo sapiens
attatttgagatgagttacatcttggagtctaccctgacatttgcactatcagccttgtagcagtgagtgatgt

SEQ ID NO: 631330 - DNA, 100 bp, Homo sapiens
ctgaggtcttctaaatcagaatcaagatgttgagcaatgtttaaagcgtttgaaaaacatgaatttggagggctcaattcaagacctgtttgagttgttt

SEQ ID NO: 631331 - DNA, 120 bp, Homo sapiens
tttgatgattttaacctggaggatgcagtgaaagaaacttcctcagtaaagcacaaagggtggaggatatgaaagtgaaagtgcttacccaaatgcagaacttgtgttcttggagatcca

SEQ ID NO: 631332 - DNA, 90 bp, Homo sapiens
aagatcattaatgaagtaaagcccacagagatctacaaccttggagcccagagccacgtcaaagtgtatgcaacagcgttattgcaacag

SEQ ID NO: 631333 - DNA, 110 bp, Homo sapiens
gactcggtgattgaggacaagaccatcgagctcatgacttaattcagtgcacaaatgagatgaatgtgaacatcccacagttggcagacagtttatttgaaagaactact

SEQ ID NO: 631334 - DNA, 90 bp, Homo sapiens
gggagttttccgggaacggaggaagagcagtggaggggccatgtgtccttcaagcccagcttagaccaacagcgttcatgcccaacctgt

SEQ ID NO: 631335 - DNA, 90 bp, Homo sapiens
gcaaatgcagcgcaaaggcaagacgcacaggaattaggcacagcatttatcctggagaagagtggctggatctctgctctggtggtgccg

SEQ ID NO: 631336 - DNA, 100 bp, Homo sapiens
tcagctcttgctcttcaaacctgctgaaaggaattcctagatctaaacaccagtgcatttctaggtcccaaagacctttttccatataaggagtacaaag

SEQ ID NO: 631337 - DNA, 127 bp, Homo sapiens
aagggaccatcatcctgacagctgtgtactttgccctcagcatctcccttcatgtctgggtcatgatgtcagtattgaatatggtggtgaggcgtgaccctggcaacactgaacctgtgaaagccaa

SEQ ID NO: 631338 - DNA, 75 bp, Homo sapiens
cagcccttctggtgtcacctcccagggtgactcaactccagagtctgtagaagaggcgacaccagggcttccaaa

SEQ ID NO: 631339 - DNA, 100 bp, Homo sapiens
ggaggggcgccctgggggttcagattgcaaggtggcaaggagcagaagcagcccttacaagttgcaaagggaagagcaagaagagacgtctgcaattcga

SEQ ID NO: 631340 - DNA, 105 bp, Homo sapiens
cctccttcgccacttacagtatgcaacacattttcctatacctctgtatgccaccacgggctgttccctgaccctgcaccatacggagaaaccagaacatgaaga

SEQ ID NO: 631341 - DNA, 75 bp, Homo sapiens
ctagtccacaggaagacctgcaccactgtcgccttcacacaggtggaattaagaaatctggcaaaaagtaagctg

SEQ ID NO: 631342 - DNA, 83 bp, Homo sapiens
gaacacattacgatggatgatggaaacataaggtttccacttgagcggcacagtgacagaacctgcaatacaatcggagccag

SEQ ID NO: 631343 - DNA, 83 bp, Homo sapiens
acggcgtgaccgacccgagccggttttaaaatcaaagatgggaaaatcggagaaaattgcccttccccatggccagcttgttc

SEQ ID NO: 631344 - DNA, 90 bp, Homo sapiens
cttccctactatgatggtgtgtatgatggcctggcgacccattcaggcacttatggccatttcagccatgatgtcttggttcgtgtcccc

SEQ ID NO: 631345 - DNA, 100 bp, Homo sapiens
aaggcgtccgttggccttcgtacccgtcttgattgaggtgacttaagagattaaaattaatttggttgctgttggttctgaacaaataatgagttctttt

SEQ ID NO: 631346 - DNA, 51 bp, Homo sapiens
ccccccggagaaaaagttgaagcgttatacccaacatgagtgaagtttcct

SEQ ID NO: 631347 - DNA, 74 bp, Homo sapiens
gccctgctggacctggagaagctcccagaattcaacagtgtaccacatgaaggaagatggttgggtgaaagtag

SEQ ID NO: 631348 - DNA, 100 bp, Homo sapiens
cccatcattgtttgcggcataactgcagcagcgaacattaagaattacggcagtcggccaaacgcaccctacttattcagctgattctgaatcatcttac

SEQ ID NO: 631349 - DNA, 100 bp, Homo sapiens
cgaagcttccggacgacgaggaaccgcccaacatggcctcggaggtggagttctacttcctttcccagtacgtgtcgccagccgactccccgttccgcca

SEQ ID NO: 631350 - DNA, 74 bp, Homo sapiens
tgagcgactaactcctgcgcccctgaggggcatccgtttccgaggctttagtatccctgaatgccagaaactgc

SEQ ID NO: 631351 - DNA, 87 bp, Homo sapiens
agcctcgcgcccgccgccgcccgtccccagacctctgtgagtgaaagccttcagagggaagctgctaagaagcaggccatgaaacag

SEQ ID NO: 631352 - DNA, 82 bp, Homo sapiens
ctatacaagattaacattcagagcgcctggaccatgctgctgagcgcctactggcacggcctccacccgggctactacctga

SEQ ID NO: 631353 - DNA, 75 bp, Homo sapiens
ggggcgcggagaagctgcatcccagaggagcgcgtccaggagcggacccgaacaccttccaccatgaccacctca

SEQ ID NO: 631354 - DNA, 100 bp, Homo sapiens
tcgcccctcatgatggctgccaagacgggcaagattggggacaatctctatgggaagcagaaggcaaggaccccggtcattttaggtagaaacaacagca

SEQ ID NO: 631355 - DNA, 98 bp, Homo sapiens
ctggcaggacgtgaaggggaagaggcccaccctggagtaaccctcactggagaatccagaggtatctagaagagcagaagacagagaatggaaaagat

SEQ ID NO: 631356 - DNA, 75 bp, Homo sapiens
cagcactttcgggggcacacgggggcgggaattacatgaatgacagtcttcgaaccaatgtgtttgttcgatttc

SEQ ID NO: 631357 - DNA, 96 bp, Homo sapiens
agatttgggcctttggtagtagattggcctcataaagcagaaagcaagtcctattttccaccaaaagctcaccagcgactggaaccagcaactctg

SEQ ID NO: 631358 - DNA, 100 bp, Homo sapiens
gcttccggaagttcctggtccacaacgtcaaggagctggaagtgctgctgatgtgcaacaagtggaaccgtcccaaaatgtcccttgctcagaagaagga

SEQ ID NO: 631359 - DNA, 83 bp, Homo sapiens
gcccagaggtcttcccgctgctccaggaagccaggatgtaccacctttctggcaatgaggctggagtgcaatggtgtgatctc

SEQ ID NO: 631360 - DNA, 100 bp, Homo sapiens
gagaacccagatgccacctatgattacagaactctgtttgctggctacacggacaacctggtgcgagtgtggcaggtgaccattggcacacgctagaagt

SEQ ID NO: 631361 - DNA, 51 bp, Homo sapiens
gttggaaaataaattgccatctgatgctctctgtgtgggtatgtgtgtagc

SEQ ID NO: 631362 - DNA, 100 bp, Homo sapiens
gggcagagaagttgcaaaccgagtttccaaggaaagaaagaaatctcgttttgggaatgctttccacctgtgtcgggaagttctgcgtttgactaagctg

SEQ ID NO: 631363 - DNA, 75 bp, Homo sapiens
aactgaagattcatacgcagctggcagatattatcatagttgctgcaggagttggtaaaatattaaagaagatca

SEQ ID NO: 631364 - DNA, 100 bp, Homo sapiens
tcaacaccagcaccgcagatgttgtcaaggtggcctaccaggaggccaggggtgtcgccatgagatgaagtctccctatgttgcctgagctggtctcaaa

SEQ ID NO: 631365 - DNA, 100 bp, Homo sapiens
gaggaggcgccggaccggggggatatggttttggagaggcagggaagcctaaatttggcattgaacctaatgctgagcttatatatgaagttacacttaa

SEQ ID NO: 631366 - DNA, 83 bp, Homo sapiens
gagaacctgaacaagtcccagctgaagctgggcatctggggcggtatctctggagacaaagtagagatagaccctgttacgaa

SEQ ID NO: 631367 - DNA, 100 bp, Homo sapiens
gtcttgcctgcgatttttccaaaaagaagcctcatgcgagtgtgaatttgctgattcccttggaattccgtttttggaaaccagtgctaagaatgcaacg

SEQ ID NO: 631368 - DNA, 74 bp, Homo sapiens
agcgaggagaagcgagaaaagatgaaacggaccctatataacttccccaagtcacacagtggtatcagagctaa

SEQ ID NO: 631369 - DNA, 83 bp, Homo sapiens
ggcggcggcgccatggcagggcttgcagagaggtggagaagagcgagtacttgagaaagaagaggaagaagatgatgatgaag

SEQ ID NO: 631370 - DNA, 74 bp, Homo sapiens
agctgcctcagttcttagcgcagcttaaagaaagtggttattgtacaggtcatgaaccagattccctggagttc

SEQ ID NO: 631371 - DNA, 90 bp, Homo sapiens
aaagaaagctgctgttatcatcatggctgtagaggtatccacaaattacccattatcaaaaacaaatagttcatcaaatgatttggaagt

SEQ ID NO: 631372 - DNA, 83 bp, Homo sapiens
aggcggcgccatcttcgaacttagacttccggaaggactttggcgaggatacgtttgaaatggtttctgaagatgaagatggg

SEQ ID NO: 631373 - DNA, 83 bp, Homo sapiens
gtgccgcgcggctcggagccctggaagcagcagctcaccgaggacggggactcggcgtgatggtgggcatgggtcagaaggat

SEQ ID NO: 631374 - DNA, 74 bp, Homo sapiens
gcgggcgtccgcgtccggcacgcgagatggagcgccgtgtatatgaaaatgatgatcagctcctgtgggaccct

SEQ ID NO: 631375 - DNA, 95 bp, Homo sapiens
cgagtcagattggagcatttgtgttgatgaagatgaaagagactgcagactgaaggagcattaggttatgcgtattgggtctgcacaacattgca

SEQ ID NO: 631376 - DNA, 82 bp, Homo sapiens
cttgctttttctgctctgagccggacgccggaatggagtttgaggaagagaaaccagactgtgatgactgggagagcgggct

SEQ ID NO: 631377 - DNA, 96 bp, Homo sapiens
ttcctgtacagcctgcagaactatggacgtgcacatcctccggcagcagccctcagtacaacatctgcgagcagatgatccagatccgcgaggacc

SEQ ID NO: 631378 - DNA, 75 bp, Homo sapiens
cacggagttgcgtcccggggacttggggccgcagggaggtacccctgggatggcgtgagcactcccccagcgatg

SEQ ID NO: 631379 - DNA, 75 bp, Homo sapiens
ggcgcctcggccgccatggtcttcagcgcttgctatggcatcgttcaggtgccaacgggaccctggttctgccgg

SEQ ID NO: 631380 - DNA, 100 bp, Homo sapiens
aaagaggcacccccagccaaagggagagctggaccaggaacgactgaccaggcagcaagaactcacagccttataccagatgcagcacctgcagtaccag

SEQ ID NO: 631381 - DNA, 75 bp, Homo sapiens
aactaggtcgatggtcggcggcgcccggatgggcagctgagagagctgtagtacacatggatgaacgacgagaag

SEQ ID NO: 631382 - DNA, 100 bp, Homo sapiens
caggttactcgcacgcggatttggctggcgtcccgcgtggataatattaatgcagctgtgatggatttgaaaaaaaagaagatccgcagtctaagtgaag

SEQ ID NO: 631383 - DNA, 90 bp, Homo sapiens
gctggcgatgcagaggggtgcgcagtccagcgtgaactacagtcagggcagcctgaaggatgcagagtcatggccggcttcaacatgggg

SEQ ID NO: 631384 - DNA, 50 bp, Homo sapiens
gacagcctggaacaacgtcaagtacgcctacgaggacaagcagaaactca

SEQ ID NO: 631385 - DNA, 99 bp, Homo sapiens
tacaacaagaaaaagaagcgtatggactactatgactctgaacattacccggctgtatgtgaattcttacagcacaataacttgttatctatactccga

SEQ ID NO: 631386 - DNA, 80 bp, Homo sapiens
tgccagagacttcacagtttctgctctggcacgcggaataaaagatgctacagaaatcatctttgagatgtcaaaagacg

SEQ ID NO: 631387 - DNA, 83 bp, Homo sapiens
tgaccatcgaaaggagcaagagcaagatcaccgtgacatccgaggtgcctttctccaaaagtgagggccccaaggctgttgca

SEQ ID NO: 631388 - DNA, 100 bp, Homo sapiens
ggacgttcacgcctcagcatcacatttctctcaaagagtccaccgcaaagcagactggcatgaaatatagggactggtgattgcagctggaagtgcccat

SEQ ID NO: 631389 - DNA, 98 bp, Homo sapiens
tggttcctggcaagcccatgtgtgttgagagcttctcagactatccacctttgggtccctttctagagataggagaagagagagatcgctgtctcggg

SEQ ID NO: 631390 - DNA, 50 bp, Homo sapiens
gacaattcgttgatcaaccagatagagaatttgcttatggtggccatcct

SEQ ID NO: 631391 - DNA, 90 bp, Homo sapiens
caatgtattactggactctgaaggccacattaaactcactgactacggcatgtgtaagagtctcgctctgtcgtccaggccggagtgcaa

SEQ ID NO: 631392 - DNA, 101 bp, Homo sapiens
gtgagcaaggaggcctctccaaggagctgtttcaatccactggatgtgccaggactcaccaggaataaaagcttaaagaaagtggttattgtacaggtcat

SEQ ID NO: 631393 - DNA, 100 bp, Homo sapiens
cagcgaactaaagggaacctgaggtgttctaagaacggaagcatctgggctggatggaatttagcatcaagcagagtcccctttctgttcagagtgttgt

SEQ ID NO: 631394 - DNA, 82 bp, Homo sapiens
tgcagatgatgatgaagatgatgatgctaccactgctaagagccatctccaccagaagcctggccagacctggaagaacaaa

SEQ ID NO: 631395 - DNA, 128 bp, Homo sapiens
tcaccatgcaagctttgtcggaagaggaccggaggctctggatggaagccatggatggccgggaacctgccaagaataaggagacgggtgctttggctgcggccaaagtcattgaaaccaagagtgag

SEQ ID NO: 631396 - DNA, 101 bp, Homo sapiens
acgtggtggtaccgctggctgtgtcgcctgtctggggtgctgggggcagtctagatgctgcccccacccccttaggcccgagggatcaggagctatgggac

SEQ ID NO: 631397 - DNA, 90 bp, Homo sapiens
caaagataaatccaaatactgcatatcagaaacaacaggcctggaagaaacgctggtttatcctgcggagtggccggatgagcggtgacc

SEQ ID NO: 631398 - DNA, 90 bp, Homo sapiens
cagaagtctaatgccaggaagcctggaacgggggttctggccgtgttccacatgcagtcggtgaaatgccttaagtgtcaggaacagaag

SEQ ID NO: 631399 - DNA, 101 bp, Homo sapiens
agagcattgagatcgagaacctgcagaccagccacacccactcgcccgggtctatggccacggtcggagagtggtcctgtgtgcgctgcaccttcctgaac

SEQ ID NO: 631400 - DNA, 87 bp, Homo sapiens
actaccccagtgccggggagggttctgctgcttcgaaagctgcacaagcccaccgtactgttgtgtggatctgtattcacttcgtac

SEQ ID NO: 631401 - DNA, 76 bp, Homo sapiens
gaagcctgcaagctgttcgatgccacgctgacccagggtccggccccgccccctcccatccgggttcgagttcaag

SEQ ID NO: 631402 - DNA, 100 bp, Homo sapiens
ctcttatcatgttggtggaggtggccgcagccattgctggctatgtgtttagagataaggtgaagctagaggaaccagacctcatcagcccaacatcaaa

SEQ ID NO: 631403 - DNA, 73 bp, Homo sapiens
gacagtgcaaagcgatcggaggacagggagaagggagctctgattgaggcaaatgtttgcagactacggctga

SEQ ID NO: 631404 - DNA, 100 bp, Homo sapiens
aatcattctgccttattacgccgtctccaagatgtagctaatgaccgtggttcccactgagagccagagcccagaggtggagcagttagggagggttgtg

SEQ ID NO: 631405 - DNA, 50 bp, Homo sapiens
ccccttccaaagggccagaatgggttcttctgtgtggcagttcagaatga

SEQ ID NO: 631406 - DNA, 83 bp, Homo sapiens
aacctgctttgaaacgccagcgactagaaatcaattgccaggatccatctataaaggtgctggagaatctggtaaaagcacca

SEQ ID NO: 631407 - DNA, 78 bp, Homo sapiens
tcagcactgactttcagctatggaatcggttctggcctataggaacaagacattttcagtaatggaagaaggagcttc

SEQ ID NO: 631408 - DNA, 74 bp, Homo sapiens
tctgacagcgatgatgatcccttggaggcattcatggctgaagtggaggaacatttatcctatttccactttgt

SEQ ID NO: 631409 - DNA, 83 bp, Homo sapiens
gctgggcgcccccagaagcccgggaacaaacgattatattccatcacaacaagatattctgcttgccagaagacccaccaaag

SEQ ID NO: 631410 - DNA, 51 bp, Homo sapiens
cccaggaatacagctttgcattagttacatgggaataggactctcggctca

SEQ ID NO: 631411 - DNA, 98 bp, Homo sapiens
ccaagaggctcctcagtgtgggcgagtaaaatgccctgcgtgtgagaagcagaaataagcgggttttgaaaacaaaaaaaagaaggagtggaagaggg

SEQ ID NO: 631412 - DNA, 83 bp, Homo sapiens
ccggaagcttctgcaacaggaggacattgaaaataagatggaacccatccacataagatttggcagctgatcggaagctcttt

SEQ ID NO: 631413 - DNA, 82 bp, Homo sapiens
aaagacgctaaacgtgccctactctgccccgggggagagcggagctggagtttgttcagatcatcatcatcgtggtggtgat

SEQ ID NO: 631414 - DNA, 83 bp, Homo sapiens
atccaggctggtcagtgtggcaaccagatcggtgccaagtaaaatgtttattggaggcttgagctgggatacaagcaaaaaag

SEQ ID NO: 631415 - DNA, 51 bp, Homo sapiens
ctacttcacaggaattgccatttgccagtactgatgcaggcactgcaggag

SEQ ID NO: 631416 - DNA, 75 bp, Homo sapiens
cggccggaggaccggcctgccggcccccagaacaagggccagctcttccgaggctccagcctgcttttccgccgg

SEQ ID NO: 631417 - DNA, 101 bp, Homo sapiens
ggaaactggagcaggagaagctctccggtgtggtgaagagcgtccaccggcggctccgcaagaagtaccgagaagagttatggtgaatggttgcatggatt

SEQ ID NO: 631418 - DNA, 83 bp, Homo sapiens
ctccgccatgtcatccacttcgcccaacctccagtcaagtccatcatctccagaaccagctagtcttcctgcagaagatatta

SEQ ID NO: 631419 - DNA, 100 bp, Homo sapiens
tccaggcgctgcccagccccttgtcagccagggctgaacccccgcaggtgggtctacatcccctttcagcagccccatcacctccgacgaggaatacctg

SEQ ID NO: 631420 - DNA, 100 bp, Homo sapiens
aaaagaggctcttcctcctcctcccgcgacggaccaagccatatgtccttctatgttcgagcccacaaagggtcaacactttctcagtggtctcttggca

SEQ ID NO: 631421 - DNA, 110 bp, Homo sapiens
aagaaaacaaggcgattccgcagtccccccgttccctggaggtcctgtggaatgaaagcaagggcggaccatggtttgattccagatgtgaagttagaaaaaacagtccc

SEQ ID NO: 631422 - DNA, 90 bp, Homo sapiens
cacctcgaagccacgtcagggcagccccaggtcgggcgcgtgccagcagccagaggttcaaaccttgtactactcagctgatcacaagct

SEQ ID NO: 631423 - DNA, 100 bp, Homo sapiens
caggctggactgaaagaggacacgggaagaacaaagacttagactcgcaagaaggctcactttgtgctcaacattgcctgaataacttattgcaaggaga

SEQ ID NO: 631424 - DNA, 100 bp, Homo sapiens
cacgatgggggacagagtgaaaggagttcattgccgttagccagctccgcggctccacccagggcaagatcctctgcttctatggcccccctggcgtggg

SEQ ID NO: 631425 - DNA, 100 bp, Homo sapiens
accccaaggatatattattttattccaagaaagatcagaccttggttgcatgtacaagttatttagtcgtgtgccaaatggtttgaaaacaatgtgtgag

SEQ ID NO: 631426 - DNA, 75 bp, Homo sapiens
tgctgcggagccatgcgggagtcgcaatgtgtgcttggatcatcgaggattactggtttgaaacaaagatgtcag

SEQ ID NO: 631427 - DNA, 116 bp, Homo sapiens
gcgttgcgtgccctacttcaaggataagggcgacagcaacagctctgccggctggaaggtgtcgtgaaaactacccctaaaagccaaaatgggaaaggaaaagactcatatcaaca

SEQ ID NO: 631428 - DNA, 80 bp, Homo sapiens
ccagaagaggcgttcgctgcgcgtgcacattccggttcagcagctggacatggagaaccaacgctcatcacctctgtcgt

SEQ ID NO: 631429 - DNA, 75 bp, Homo sapiens
acttccgaacacccagcacccatgtgctgtctgagggggtcaagaagaccacattgtgcaacacatcattggaca

SEQ ID NO: 631430 - DNA, 50 bp, Homo sapiens
cttgacaagcctatagaatcgtgaaggtggtgtttttaaggctcatctta

SEQ ID NO: 631431 - DNA, 98 bp, Homo sapiens
gacacaaatatatctgttattttacctactgttcatgaggtggatattttcagttggattggatgctgctggcaagacaaccattctgtataaactga

SEQ ID NO: 631432 - DNA, 90 bp, Homo sapiens
gaccttgtgcggcacccctgagtacctggcccctgagattatcctgagcaaagactcagtggcctttgaggatgtggctgtgaacttcac

SEQ ID NO: 631433 - DNA, 100 bp, Homo sapiens
aggacggggcggcaggcgccttcgcggaccgagcctgacggagccggaggctgggagccgcggcggcctgggcgtccttgagactttgtgctgcgcgggg

SEQ ID NO: 631434 - DNA, 75 bp, Homo sapiens
tgagagaaatgcttacacacagaaatggacctccaggatatagtggctaccctgggccccaggtcagctacccac

SEQ ID NO: 631435 - DNA, 100 bp, Homo sapiens
agtcgcctccaggccaagagggatccttcacccgtgtctgcgaaaacagtgttacaccagaagagcagccggcctcctgtaccgatctccaacgcgacca

SEQ ID NO: 631436 - DNA, 100 bp, Homo sapiens
gaacgacagccgcttcactgacctaccccctggacctggtcagagcgcggatggccgtaaccccgaaggaaatgtcagcccaaggctgccccctcggtca

SEQ ID NO: 631437 - DNA, 89 bp, Homo sapiens
ttttgttctctggcatggaaggggtcctcagagttactggggccctggccaacgtcaacattgggagcctcatctgcaatgtaggggcc

SEQ ID NO: 631438 - DNA, 100 bp, Homo sapiens
agcagctgtatatcttctaagattccgctcctcaccaccatcagtttaagtgctgtggggctgctaactacacagattgggagaaaatcccttccatgtc

SEQ ID NO: 631439 - DNA, 83 bp, Homo sapiens
ggggatcgctacggaccttaaaatacccgcaacagccccttcgtcccaagattcactccttctccagttgcacagccacaccc

SEQ ID NO: 631440 - DNA, 109 bp, Homo sapiens
gggcagcgtgggtgagcggcgcagcggcggcagcggagagcgagagaggggagcaggaaacaatgtgatgagaaccattcatggggtgggagagatgatgacccagatg

SEQ ID NO: 631441 - DNA, 82 bp, Homo sapiens
gcgcgcggccgagtcgcggaggcgcctccgctgcagtcgctgcgtctccaagagcggttctggtgaggttggaaggatgcag

SEQ ID NO: 631442 - DNA, 75 bp, Homo sapiens
gagcccggctcccgcaccatggaggaggacgacagctacggtgacagagttagtccttgataattgcctgtgtgt

SEQ ID NO: 631443 - DNA, 50 bp, Homo sapiens
caagacggtgccgagaagcagctgcgaggcaagtatatcgcgtcaacaca

SEQ ID NO: 631444 - DNA, 83 bp, Homo sapiens
ccgccccctccggcgtgttcatgcccccgggcgtttgcctcagcatggagggcggggccgcggcagccacccccacagcactg

SEQ ID NO: 631445 - DNA, 101 bp, Homo sapiens
gtagagccggtggagcagctgggctcggcgctgaggtttcgccctggctacaacgaccccatgtcaggccacaggtggaattaagaaatctggcaaaaagt

SEQ ID NO: 631446 - DNA, 97 bp, Homo sapiens
agggccttgatgggcacagccatcttgtcatgtacctgggaaccacttctggtccatcggaggatccgagtgtgaatttcctgaagaacgttgggga

SEQ ID NO: 631447 - DNA, 134 bp, Homo sapiens
cggtcaagagagcgaactgcagcctggagctacccccggccagcggtccggccaaggacgctgagactgcagctgaatatgtaaaatctcgactcccagaggcccttaaacagcatcttcaggactacgagaaa

SEQ ID NO: 631448 - DNA, 85 bp, Homo sapiens
attaagtgcaaaagtttgtgacttgaagtggatacataatgcaagcctcccctatccagccccattctagaactgcattcagagg

SEQ ID NO: 631449 - DNA, 114 bp, Homo sapiens
aagaaccattgttagtgaacgtggacaaagctgttgtctcagggagcacagaagaaatctgaaatagagtactatgctatgttggctaaaactggtgtccatcactacagtggc

SEQ ID NO: 631450 - DNA, 96 bp, Homo sapiens
tgttcgagtctggggctgtcgctgtgctctgtgcaggctgccccatggatgccacacgtggcagcggggagaaaagaagtgattcggtccctgccg

SEQ ID NO: 631451 - DNA, 98 bp, Homo sapiens
ccggccgccctccgagcatcgctcttcggcaacccgaagccacaggatggaggagggggatcccagcaaaggtgctacaagacagatgatttttcacc

SEQ ID NO: 631452 - DNA, 100 bp, Homo sapiens
ccaggaataaggcattctgggaaacccctgcctccatgtgggatgatatcaacaacgtcggactcagagtcacccaccgaccaagaaaccaccggcgtcg

SEQ ID NO: 631453 - DNA, 90 bp, Homo sapiens
agcagcgtgtcctccgtgggagcccgaggtacatggacgcactggaacacgcgtacccaggaatacctgtatccgtctgataccacccca

SEQ ID NO: 631454 - DNA, 75 bp, Homo sapiens
tacggtgtagcgtctcagcacaacctgcccatgaatcctgaggttggcttgaagcctgtgtggtatagtcccaaa

SEQ ID NO: 631455 - DNA, 100 bp, Homo sapiens
tgcagcccaacttccagcaggacaagtggtccatgctgtggacggcaccgccgagaacgggatccaccccctgagctcctccgaggtggacgaactcatc

SEQ ID NO: 631456 - DNA, 100 bp, Homo sapiens
aattgggaggtcggcggccccaaaaagagaaatctcatcatctgtgcagccttcttaaagcaaactaagaccagagggaggattatccttgacctttgaa

SEQ ID NO: 631457 - DNA, 98 bp, Homo sapiens
catttccatttctaccttgtatgcctcaatttgctggatttaagcactgctgcactttatgagatctgcaacttgggcaggacttggcagaggcacct

SEQ ID NO: 631458 - DNA, 75 bp, Homo sapiens
aagatgatgaggatgaagacctttatgatgatccacttctacttattaaatatgcccatgacgcttccggagaca

SEQ ID NO: 631459 - DNA, 100 bp, Homo sapiens
aaaaatggttgacctcacccaggaggaagaacgtgcaaaacgtgaggagctagagcgaatactggaagagaataaccgaaaaattgcagaagcacaagcc

SEQ ID NO: 631460 - DNA, 75 bp, Homo sapiens
cccatcatttccagaaaggacatcacaggtgagaccaaggaccaggtagctaactcagcctttgtggaacgtctt

SEQ ID NO: 631461 - DNA, 75 bp, Homo sapiens
aaaaatctgaggttatcaatgacgaggaatcccgttctgcttccagaagtggaagtgctcacggatcggggaaat

SEQ ID NO: 631462 - DNA, 115 bp, Homo sapiens
cgcaaccattgacgccatgtcgggttattcgagtgaccgagaccgcggccgggaccgagggctgaccccgcactacatctacccaccagccatcgtgcagcccagcgtggtgatc

SEQ ID NO: 631463 - DNA, 99 bp, Homo sapiens
gtcacatctaggagcatctacccatggacagacatgtcttcccatggagatttgaaaaatgtgtgagtgctaaggaagctttggagactgatctttata

SEQ ID NO: 631464 - DNA, 82 bp, Homo sapiens
cgggagccagcgagccacgggagcgagccagcaatggctgccatccggaagaaactggtgattgttggtgatggagcctgtg

SEQ ID NO: 631465 - DNA, 100 bp, Homo sapiens
gaggctccttgtgccacattcttgcagctgcctacaaattcaagagtgaccagggatggtatgttgagtctaaaaaggacagagtcacagtagtcttcag

SEQ ID NO: 631466 - DNA, 90 bp, Homo sapiens
tccgtggagagcgactcagggacaaaatggctgaccggttccctgatgtgttacctgcttctgctactgatccaaactgcagaacttctc

SEQ ID NO: 631467 - DNA, 100 bp, Homo sapiens
tggccaacatcgcggtgcagcgaatcaagcgggagttcaaggaggtgctgaagagcgaggagatctgggacatgagcgatgatgagaccatctgagatgg

SEQ ID NO: 631468 - DNA, 101 bp, Homo sapiens
ctactcgctgccaagctctgggggtcatcacagagaaggagacccaggtgaacttgcgcgtgctgggggaggcgcagaccaaggcgcagcatcagcaggca

SEQ ID NO: 631469 - DNA, 100 bp, Homo sapiens
tcacgcgggcgcggatcgaccggagcagagagctggcgagcaaggtgacagagttagtccttgataattgcctgtgtgtcaatggggaaattgaaggcct

SEQ ID NO: 631470 - DNA, 75 bp, Homo sapiens
acccaccgccgccgcctcccagagagaagaagaaggaggttcctgctgtgccagaaacccttaagaaaaagcgaa

SEQ ID NO: 631471 - DNA, 106 bp, Homo sapiens
ggcgctgcagaaccagatccgggagcacgtcatctccatcgagggttatgcctccgcctcgttgccctgaaagccgcagcgacagcgaaaagggctaagattcggc

SEQ ID NO: 631472 - DNA, 101 bp, Homo sapiens
cttttcagaaggatttgtaccgggatgtgatgttggagatctacagcaacctgctatcaatggattgatgcctgggctcagctgaactctattcctggcca

SEQ ID NO: 631473 - DNA, 90 bp, Homo sapiens
ggcatattagcgctagccctgcagacagaggtgtgctgacgacctgctacaacagaagatagcatttctcaagacctgacttatggagca

SEQ ID NO: 631474 - DNA, 90 bp, Homo sapiens
ttgcattcaagtcactgctccccagccgtaaattctactggagagcatacggaattttctggggtgttacagcacatgaaggccgtgcag

SEQ ID NO: 631475 - DNA, 100 bp, Homo sapiens
cttagagagagtctcaaaggagctgcagacctgatggccaaaagaaaggaagaaaatttttcctctcctaaaaatgccaaaaggccaagacaagaagaat

SEQ ID NO: 631476 - DNA, 75 bp, Homo sapiens
ggggtcctcatggatctgtccaaaaggagattatgtggtcatgtctgtctactttgatctgagcagaagaatggg

SEQ ID NO: 631477 - DNA, 83 bp, Homo sapiens
acgtggaggtgaatggcagcaaggtgggcccggacggcacaccctacgttaccgtgctcaagatcgcaccccctccctccctg

SEQ ID NO: 631478 - DNA, 100 bp, Homo sapiens
cctggtgcacccccagtgggtgctcacagctgcccattgcctaaagaaggaaatgtttcaacgtgcgcaagcgttgcggcggcgggcagaggactactac

SEQ ID NO: 631479 - DNA, 74 bp, Homo sapiens
cagcaacagtcgcaggagatgatggaggatgactttgggaaattgctgctggctgaggccctcctggagcagtg

SEQ ID NO: 631480 - DNA, 50 bp, Homo sapiens
ctccttttccctctccctttccctaaggtggaagcagggaaaggcctgga

SEQ ID NO: 631481 - DNA, 80 bp, Homo sapiens
gacaagagcaagaaagaaaatgtggctgcagatatcccaatcacagttctggacatggcaagacatgtgccactctatcg

SEQ ID NO: 631482 - DNA, 99 bp, Homo sapiens
ggaccgaagcttccggacgacgaggaaccgcccaacatggcctcggagaggagaccttgcctattttgatggacttagtgagactattcttgctgtggg

SEQ ID NO: 631483 - DNA, 100 bp, Homo sapiens
ctcggacgggcaagccctggtcctgggcaggggacccctgacccaggttacggaccggaagtgctccagaactcaaggcgtggtgaccaagatgaagatg

SEQ ID NO: 631484 - DNA, 124 bp, Homo sapiens
cggcttctcccgcgcggggggcgagtaagccagcggcaggaccagcgggcgggggcccacgaagacgtctcccacaacctgctccgggcgctggacgttgggctcctggcgaacctctcggcgc

SEQ ID NO: 631485 - DNA, 100 bp, Homo sapiens
cctatcaggacagagttcacatccatgtgaaaggccagccaccagttcaggagcacttgggagtgatctaggagaagatgtatggtcttatgcaaaggga

SEQ ID NO: 631486 - DNA, 90 bp, Homo sapiens
actctcaaagcaataccaggatagctgttgtttcagagaaaggtatactgaaagctattctgatgatgattcaagtatggaagactaccc

SEQ ID NO: 631487 - DNA, 76 bp, Homo sapiens
tactgcgccaaatttggtgcctggagtaggagatatacatctccagatttcctctatgttcgttcttggttaccat

SEQ ID NO: 631488 - DNA, 100 bp, Homo sapiens
gtacagggtttcagggcagaaagcagacctgatggccaaaagaaaggaagaaaatttttcctctcctaaaaatgccaaaaggccaagacaagaagaattg

SEQ ID NO: 631489 - DNA, 76 bp, Homo sapiens
tgggaccttctccctgcctggacccctactattgcaacaaggcatctccttggaaacaatgccatctttgaatgtg

SEQ ID NO: 631490 - DNA, 83 bp, Homo sapiens
ggagtggagcttggtttcgggatctcggtgctgcagacggcgagacctcctgcacagcttcctgcctgacacagctcacttca

SEQ ID NO: 631491 - DNA, 118 bp, Homo sapiens
ggcagcagtgcatggaggagctggtgagcctcatcacacaggatccgcccctggacatggaggagaaggtccgcttcaaagtcactgctagttggattgaagcacacctgccagatga

SEQ ID NO: 631492 - DNA, 98 bp, Homo sapiens
tttagatgataccactgtgacattgtcgttatgccagctaagaaatgagagcctgacaaggagctgaatcctaagaagaagatttgggagcagatcca

SEQ ID NO: 631493 - DNA, 100 bp, Homo sapiens
ttcttcagaattagaaaggagctgcttcccaataaggaaacagtaggtgagctcgtgaaacaatatgaagaggagaaaatagccttttaaggaaattggc

SEQ ID NO: 631494 - DNA, 75 bp, Homo sapiens
ccccagcctccccatgtgcccaggtggaggtggtggcagcagaggtagttatggaggaggtgatggtggatataa

SEQ ID NO: 631495 - DNA, 100 bp, Homo sapiens
tcatgatcatcacagagttcatggagaatggtgcattggattctttcctcaggcatgcagcagattggaataaatatgatgaccgattgatgaaagcagc

SEQ ID NO: 631496 - DNA, 90 bp, Homo sapiens
tagcatcttcactgtaaaggagctgtctgtgatcctggaaacatacgtgtgactgaagctcccaaacacccaatctctgaagaactggaa

SEQ ID NO: 631497 - DNA, 75 bp, Homo sapiens
tcagcgtagagtcgctggagcgggcggagctgtgcgagagcctcctcacttgggctgacccagctggatgttgac

SEQ ID NO: 631498 - DNA, 73 bp, Homo sapiens
gcctggtatggagaacgagaggaaagaagtcccttatcacggctcccacatcaggacgagaaggagccctcga

SEQ ID NO: 631499 - DNA, 100 bp, Homo sapiens
gctgctgggaggagagcataaggaccgcctgagccaggtgctgcgagacctcgaggacgagagtacgcccattgtgaaactgggggatgccagcatcgca

SEQ ID NO: 631500 - DNA, 74 bp, Homo sapiens
gcagagcaaggggcttacgcagaaggacctggccacggcgaacctcttcccggccgctctggtgcacttgggag

SEQ ID NO: 631501 - DNA, 75 bp, Homo sapiens
gaagtgcagctgcctcagttcttagcgcaggtaatgcggaaatctcatgaagcccgtgaaaaattgctccgtctt

SEQ ID NO: 631502 - DNA, 121 bp, Homo sapiens
agaacttggagattttccctgtggatctgcagaagaaagctggccggggcctgggcctgagcatcgttgggaaacgactgacaatcacctgaaacattatttacatatcattgaaaacaaa

SEQ ID NO: 631503 - DNA, 82 bp, Homo sapiens
gccgagcgggaggcagccgtggccgaggaatgtctgatcacagatacggggatggtggctctactttccagagcacaacagg

SEQ ID NO: 631504 - DNA, 100 bp, Homo sapiens
agaagtggacgtcttcaccgccccacactggcggatgaagcagctggtggggctctactgcgacaagctatctcccctggttcgaggtattttataagct

SEQ ID NO: 631505 - DNA, 83 bp, Homo sapiens
aacaatggaggccagtggctggtctcaggaattgcattttgtgaaaaaagaacaagaattttctgcaaggatcatatctaagt

SEQ ID NO: 631506 - DNA, 98 bp, Homo sapiens
aagaattttccaaatgaatttgcaaaacttactgtagctcatctttgggtgaaaaattgtcgggatcttctgcagtccagctacaacaaacagcgctt

SEQ ID NO: 631507 - DNA, 75 bp, Homo sapiens
ttttgttctctggcatggaaggggtcctcagagttactgggggagaagaagagtttgatatgcctcagcctccac

SEQ ID NO: 631508 - DNA, 90 bp, Homo sapiens
tgcatattccgctccagaaattctgcttggtgatgagtatgatgcacctgcagtaggtgatggatgtggacacactgtactaggccctga

SEQ ID NO: 631509 - DNA, 74 bp, Homo sapiens
ccgcacacaggatggcaccgcgcagggcaaccggatcctccaggtcctattgacaatactaagattgcagtcac

SEQ ID NO: 631510 - DNA, 100 bp, Homo sapiens
cccaggagacccctctgctgcaccacttcatggagttggtgcccttgtgctaccgctgctccaccaacaacccgctgctcaacaacctgggcaacgtctg

SEQ ID NO: 631511 - DNA, 100 bp, Homo sapiens
tggcattggaacttcctgttctgatagcgtggaaggaatttagataatgggctgtgtgcaatgtaaggataaagaagcaacaaaactgacggaggagagg

SEQ ID NO: 631512 - DNA, 75 bp, Homo sapiens
ctgcgatctctgtggtaggcccagttggtctcttcccatggcgatgtccatctgccaccgtggcactggtattgc

SEQ ID NO: 631513 - DNA, 100 bp, Homo sapiens
atgacaataaccatcttattcagtgtataatggactctcagaataaaggaaagacctcagagtgttctcatgagaaggcaaccaaagtgcaggacatcaa

SEQ ID NO: 631514 - DNA, 75 bp, Homo sapiens
cgagttcagaaatgagtggaaaaatacccatggtgggcaggaagaggaactttatattgctgttggaatatctgg

SEQ ID NO: 631515 - DNA, 97 bp, Homo sapiens
cagccatcacctggatttacctgttttctgggagcttcgaaggtgaggacaccagtgatgaattctgaagcaaaagttctggtgcctgggattcctg

SEQ ID NO: 631516 - DNA, 76 bp, Homo sapiens
aacgttttgcaaattttaccggtggaaaaattgctaaggccttgtctgatgccattaaaaaatggcaggagctgtc

SEQ ID NO: 631517 - DNA, 100 bp, Homo sapiens
ctgggtctacgataacgcgcttttgctcctcctgaagtgtctttggtccaacgttgttccagcattaatcaagtctgatctgcgaagacacaacataaat

SEQ ID NO: 631518 - DNA, 100 bp, Homo sapiens
cttatcgaagtggtggctacaaaaaggccagagctgtgtttaaaagatcagagttgactgcaataatgaaaggagtgtccacactaaaacattacagaat

SEQ ID NO: 631519 - DNA, 98 bp, Homo sapiens
ttgggcccgcccactgcagcctccatcttggaagcggccgccggcgcctagggcagcatctcatcacggcagttgctgaccatctatttaagctgaag

SEQ ID NO: 631520 - DNA, 100 bp, Homo sapiens
tgtggatgatgccaaagttttattaggtcgcgtctccttcttcacctcggggtccgagaacctacaccgcgtggagaaggtccactggggcacccgttac

SEQ ID NO: 631521 - DNA, 74 bp, Homo sapiens
gaacgccccatgaagttcctccgggagcacttcgagaagctggagaaggttgagccagtgatacagagaggcca

SEQ ID NO: 631522 - DNA, 90 bp, Homo sapiens
aagcgctacaacctgcaaatctatccaataagagctaactgccatcaagagccatcagtatgtcttcaagctgcatgcccagaaagctgg

SEQ ID NO: 631523 - DNA, 50 bp, Homo sapiens
gtacctcacagcttagacctgtccaggtctggaagctccgagtttatctt

SEQ ID NO: 631524 - DNA, 100 bp, Homo sapiens
cagctcttccgcaacctcttccaccggcagggcttctcctatgactacgtctttgactggaacatgctgaaattcctgcaggacaagttcgagcatctta

SEQ ID NO: 631525 - DNA, 74 bp, Homo sapiens
atgtatgaaggtgtaggaagaatttggattggatgctgctggcaagacaaccattctgtataaactgaagttag

SEQ ID NO: 631526 - DNA, 90 bp, Homo sapiens
ctgaggtggtcacggggtttgcccagctcacaccaactgcagattctctcgggcctagccgtccttggaacccgatattcgggctgggcg

SEQ ID NO: 631527 - DNA, 82 bp, Homo sapiens
ctgcgaatctgcttgcttcatcccgttcagaagacagctttcatgcagatgtgttcagagcaacattgttttgttgacacaa

SEQ ID NO: 631528 - DNA, 100 bp, Homo sapiens
ggcgacagcagccaggagtcatgagcgacagcggcgagcagaactacggcgagcggtgaatggataccacgcatcagggaccccagcgcaccctccagag

SEQ ID NO: 631529 - DNA, 100 bp, Homo sapiens
agctggactgctccctggagcacgagttcaggaaggctcaggaagaggagagcagcaagcgggtgctggtgaatctggtaaaagtacaattgtgaagcag

SEQ ID NO: 631530 - DNA, 82 bp, Homo sapiens
cacggccgccgcgctgctggtcggctccagcaccctcttcttcgtgttcacagagtattatgagggaggccgaggacttcat

SEQ ID NO: 631531 - DNA, 90 bp, Homo sapiens
cataacaacaaatctgtgaatgaatcattgaacaatctttttattacagaagaagattatcaggccattggctgtggtattgtagaaagc

SEQ ID NO: 631532 - DNA, 100 bp, Homo sapiens
aagccggccaattccccccgcaccaaattgcatcgtttcccagattgaggaagacacatggcagaaatactacttggaaggagtctcaaatgaaatgtac

SEQ ID NO: 631533 - DNA, 82 bp, Homo sapiens
aggagggctcaggccgagacaccttgcagctgccgccgccgccaccgagccgccgctttggtgccctggttgtcagatgttg

SEQ ID NO: 631534 - DNA, 95 bp, Homo sapiens
gtcccgggagaacctgcggcggccggagcgaacatacatatgatagttgagaaagacacatattctgatcatgaagaaataaacacaagttaaat

SEQ ID NO: 631535 - DNA, 91 bp, Homo sapiens
gagaaacaataggacggaaacgccgaggaacccggctgaggcggcagggtgaaaaggctgatagcttttacatcatagagtctggcgaagt

SEQ ID NO: 631536 - DNA, 97 bp, Homo sapiens
ctcagttggaagcagccgatccagcctgcggagcctgtggggcagggagaccaaattttgaggaaggtggaccaacatcagtagggagaaagcatga

SEQ ID NO: 631537 - DNA, 83 bp, Homo sapiens
ctgacaaattgtactttgtcctagactacattaatggtggagaggcaaagatcatgccaagttttcaccagtggcaacagcca

SEQ ID NO: 631538 - DNA, 90 bp, Homo sapiens
gaaggacaccccagttcgggcagctggtctaccctgctggaggcgcccaggacaggctgcgcatatccccccacgtccatgtccaggagc

SEQ ID NO: 631539 - DNA, 100 bp, Homo sapiens
tcctttataagtgtcagctgtgagattttaggtgatgggcaagtcagaaagtcagatggatataactgatatcaacactccaaagccaaagaagaaacag

SEQ ID NO: 631540 - DNA, 83 bp, Homo sapiens
ctggaagctactactacgtggtgcttggaaagttgagaagctgatgtctcctcgacttccaactggaaccttgaacccccaca

SEQ ID NO: 631541 - DNA, 98 bp, Homo sapiens
tgctggtggaccacccgaacatcgtgaagttgcacaagtactggctggatacctctgaggcctgcgcgaggtttgccagtgctctgagcaagttcgtg

SEQ ID NO: 631542 - DNA, 82 bp, Homo sapiens
tcatcccctggatgggggaccacaagatcctcatcgacagatgtgaagttcatttccaatccgccctccatggtggcagcgg

SEQ ID NO: 631543 - DNA, 100 bp, Homo sapiens
aggcatctcctggaagcttaacttcttatccatcccatctcttggacagatgatgccagttaattactttgaatgacttaaagagagatctacttcagag

SEQ ID NO: 631544 - DNA, 100 bp, Homo sapiens
ctcaccgtgcaccttcgcaagaagcaccagttcaagtggccctcagggcatccccgttttcgagttaaacatgaagtttctggagagacagtggtatttc

SEQ ID NO: 631545 - DNA, 100 bp, Homo sapiens
cttcgcaacctcaaggactcggagcgcatgcagctgctgctgaccctggccttcaaccccgagccgctggtgctacagaataacaagcctttgtattcat

SEQ ID NO: 631546 - DNA, 75 bp, Homo sapiens
gaccaagatcgagcccagcgtcaacttcctcaagtcgcccaaagagcggttctggtgaggttggaaggatgcagc

SEQ ID NO: 631547 - DNA, 100 bp, Homo sapiens
cgaccctagtgctcgtcgccgtggcgccatgggtgttgtccgcagccgcaggtggatccataaagaacccagccaacccgcagagggaggggaggggctg

SEQ ID NO: 631548 - DNA, 96 bp, Homo sapiens
actacaatgaaacagctccaatgctggagcaggttaatttggagtggcccctggagtcagtttcctacaccatccgaggccccacccagcacgagc

SEQ ID NO: 631549 - DNA, 74 bp, Homo sapiens
cttcttccagctgcagcgcggagaggactcacggcagctgtgttctgatttcgtactactgctggggctgccac

SEQ ID NO: 631550 - DNA, 75 bp, Homo sapiens
cctgaagatatttcagcattccaaaccagatgtgtgccggcatgtgaagaatggggacattctgctactgaaccg

SEQ ID NO: 631551 - DNA, 98 bp, Homo sapiens
cccaatcttgcatcagtgggaacaagactacctcctcctttaccccagaacctcctttacacagtatcagaacgtgctggagaatctggtaaaagcac

SEQ ID NO: 631552 - DNA, 100 bp, Homo sapiens
agcggggcagctggagagtttggagccctgcagactgtccgcctggagcgttacaaggccttctacattaccgtctttaacacctctgtgtgaagatgac

SEQ ID NO: 631553 - DNA, 83 bp, Homo sapiens
cttgtttgcctggggcaatggagaaaagggccttcagaaggaagaagttgttttgcttacacatggagatagtgtagacaaag

SEQ ID NO: 631554 - DNA, 100 bp, Homo sapiens
aagtgagcagtccagaaagcggcttatcgaacagagccgggagttcaagaagaacactccagagtatttaggtcagttaacgtccataccaggatacctg

SEQ ID NO: 631555 - DNA, 51 bp, Homo sapiens
cttcctggagttcacgactctgagtgctgctcattcagaccaataagctga

SEQ ID NO: 631556 - DNA, 75 bp, Homo sapiens
ggcgggtttgctcccaacatcctggagaataaagaaggcctatggaggtgcctatgatgtcatgagctctaagca

SEQ ID NO: 631557 - DNA, 100 bp, Homo sapiens
tttcacaattgcagcagatgaagatccattggtaaattgatcaggatttttggcctaccctccaaagaaaagaaaaagcttgtggtgaaggggggcaaaa

SEQ ID NO: 631558 - DNA, 75 bp, Homo sapiens
agattgggatatttgagagtccaactggcactgatgaagatttgataaagtggaaggcactgtttgaggaagtcc

SEQ ID NO: 631559 - DNA, 82 bp, Homo sapiens
cgcaaccccagatccatttacactttacagccctgggaggagcggggacactgaggacctctctccaaattggcctctcaac

SEQ ID NO: 631560 - DNA, 100 bp, Homo sapiens
gggtgcctcttgtgagacactgtttctgagagcagcttttgtggcatcttacagggcagatttctgcatgcagccagtaaagatcccagagaagttcgag

SEQ ID NO: 631561 - DNA, 75 bp, Homo sapiens
ctggccctgggacgcaactcggagctgccaaacggaggcccgaagaaaaagaacctgaaaaagtaaatccacaga

SEQ ID NO: 631562 - DNA, 51 bp, Homo sapiens
ccctcgcctcccggccgagctgacgctttccccacaaataaaccagagaaa

SEQ ID NO: 631563 - DNA, 75 bp, Homo sapiens
tgctgggagccatctgtgccatcatcgtggtagttattgtaaggaaatcctcattgacgattcaatttgttgaag

SEQ ID NO: 631564 - DNA, 101 bp, Homo sapiens
gtcgcggaccatgggcgacaaagggacccgcattagtgccagcagtagttcccaagggctgtctcagccatccacccagacgactcagtatctgagagcag

SEQ ID NO: 631565 - DNA, 100 bp, Homo sapiens
atcataacaagcggttctctaccctgtaaagctctactgagatgaagaaagaaaaagaatacctgctcagctccagagacacgtaaagggacagagattg

SEQ ID NO: 631566 - DNA, 82 bp, Homo sapiens
ggcgcccggccgaggggctgcgtaggccccgcccggccaggcccagccgggccctggacagatgaatgatttcggaatcaag

SEQ ID NO: 631567 - DNA, 75 bp, Homo sapiens
tgctgtgccggcccctgtcctgcttccttatggagtgaatttgctagtgggtacagagagtggcctgatgctgct

SEQ ID NO: 631568 - DNA, 100 bp, Homo sapiens
caaggcttcactggacccagctgtgaaacggttcttcagtttggattcacaactatctttgtggcagcttttcccctagcaccacttctggccttactga

SEQ ID NO: 631569 - DNA, 75 bp, Homo sapiens
ctgacagacatccctgaatcttggtgtttggacataggagatgatgaataaggtatttggaggtactgtgcacaa

SEQ ID NO: 631570 - DNA, 75 bp, Homo sapiens
cttgccaaccctcccaagaagttcagaggatccatcagttacacaagtgacaagaaatgttccaccaggacttga

SEQ ID NO: 631571 - DNA, 50 bp, Homo sapiens
gcagagtggaccaccccatgaacctcgaaaaggaaccagtgatttacttg

SEQ ID NO: 631572 - DNA, 75 bp, Homo sapiens
ctcgcccggctttggggtcaagcagattgcttcggcatccgcctgctgccccaggcctctgaggacaagttcgac

SEQ ID NO: 631573 - DNA, 95 bp, Homo sapiens
gcctgaatgagatgcgctgcgcctacgaggtgacccaggccaacggaaagtgggaggtgctgatagggtgtccgcaatgttgccagtgtctgtct

SEQ ID NO: 631574 - DNA, 99 bp, Homo sapiens
tggagacttgacctaaacagcaaagagtggatccgacctttggcttcagggtgaacactttggaacaacggaagctacagaagccttctttgcaatgac

SEQ ID NO: 631575 - DNA, 100 bp, Homo sapiens
tttcgtcacctgtccttctacattttcgatagagacgttttccggagggattccatcatagtaagactttgaccccgacgcaggcttcagtgattgccgc

SEQ ID NO: 631576 - DNA, 83 bp, Homo sapiens
gggggctcccgcctccccggccacgcgagcgggaacagtctcctccactcggagcggtgacgctggagtgcccgggccacgag

SEQ ID NO: 631577 - DNA, 102 bp, Homo sapiens
cggccccagtagccgcgggccttgggcccgtaatctcacgacctccgcctgcggcctcctcgcaaaacaagtgtttaactgctgaagagatcttttcccttc

SEQ ID NO: 631578 - DNA, 96 bp, Homo sapiens
cagcaccaggagtccctctccgcccagttacaaggtgtcatggagaaactccagctgggcccagagattctgcagcgggaaaatccaaggcttatt

SEQ ID NO: 631579 - DNA, 50 bp, Homo sapiens
tgtccttacagaatatggtttaatcccagttgtgacatgatggaactaag

SEQ ID NO: 631580 - DNA, 98 bp, Homo sapiens
gcttgaagtgtggggagaacttggtgtgtctctgccaacagactcatgggtggtgccatgcagcttaccttccgcaagatggcgtttgactattaccc

SEQ ID NO: 631581 - DNA, 100 bp, Homo sapiens
cagaaacgtcactatcaagaagcttcttggacacttaatgattgttggcaagaaatgtgctgctgatctgggcctgaataagggttatcgaatggtggtg

SEQ ID NO: 631582 - DNA, 49 bp, Homo sapiens
atgaatatgagcagctgtcctctgaagggcggcgactggcggcgcgatg

SEQ ID NO: 631583 - DNA, 82 bp, Homo sapiens
ggaggacttgcaacactccgaggccaggaacgctccgtctggaacggcgcaggaactgtggctgcaccatctgtcttcatct

SEQ ID NO: 631584 - DNA, 100 bp, Homo sapiens
ccagccagcatgaccctgctcttccaggagtctggccacaaaaaccagcctggacaccaagtctgtgtcagaaggccacctcaagaggaacatcgtggtg

SEQ ID NO: 631585 - DNA, 74 bp, Homo sapiens
aaacaagctcctacttccagaaaaagtgctcctgggactccaggataccaggccaaagaactgccaactctgaa

SEQ ID NO: 631586 - DNA, 50 bp, Homo sapiens
ggcagctgctgagttctcggtgaaggaagatgatccctatgatcttgaag

SEQ ID NO: 631587 - DNA, 50 bp, Homo sapiens
agaatattccacctgccttgacatgtggtaaggaagatactccctcatta

SEQ ID NO: 631588 - DNA, 98 bp, Homo sapiens
ggaaactagctcatctgtagagactgatttgcaacccttccgggaagccatagctctgcatgaccagagtgaactccgagcaggaacacttcctcatt

SEQ ID NO: 631589 - DNA, 97 bp, Homo sapiens
ccgggaccgggatcgtgaccgtggaggaaattgataaagaaggtgtgattgaaccagacactgatgctcctcaagaaatgggagatgaaaatgcgga

SEQ ID NO: 631590 - DNA, 101 bp, Homo sapiens
ttcaaacaaccaaccctgatttcctgcttctccttttcatgagtgttcctgtggtctctgcacctcctttctggctcaagggttcttgttgatgcacgaga

SEQ ID NO: 631591 - DNA, 75 bp, Homo sapiens
aggagacttatttcagaatggagaatttgcaactcatcatagtcctgtgctgcctccatctagtacaaaacctcc

SEQ ID NO: 631592 - DNA, 82 bp, Homo sapiens
ctctgatgatgaactaatgactgaaggtgaagaccagtttgatggaggcctcagcggggcaacagtcattgactccctcgat

SEQ ID NO: 631593 - DNA, 99 bp, Homo sapiens
gacatttctttgtggtttatctaaaaaccaaagtgcgaccaagaccagtgcattcagagcaccaaattcgttttgcaggctgcagccacgcccctgctg

SEQ ID NO: 631594 - DNA, 74 bp, Homo sapiens
taatgaggacattgtggagagaaacatccgaattatgtcagaagccaatgacctggccctgaggctggctcgcc

SEQ ID NO: 631595 - DNA, 80 bp, Homo sapiens
caactattcgcggagctggaatgactggcaacccagcatgtagagcgcatgaagtacaggacaataaagcttcctacaca

SEQ ID NO: 631596 - DNA, 108 bp, Homo sapiens
cagatatgcctgctaacatggataagcatgccctgaaaaagtatcgtcgagaagcctatcatcgatctttaatctcatgaagtacgacagctacagccgcttcttaaa

SEQ ID NO: 631597 - DNA, 100 bp, Homo sapiens
ccgcccgtctgttcgcgctgctgctgttcttcgtaggcggagtcgccgagtcgtaatctatgccagcaattatgacaatgttagcagaccatgcagctcg

SEQ ID NO: 631598 - DNA, 75 bp, Homo sapiens
tgaaaactcatcctctgtaacatcttgtcaggctagtctttggatgggaaggtggatgcccggagcataccagtg

SEQ ID NO: 631599 - DNA, 75 bp, Homo sapiens
cccctgccggggagggcccagcgcatccgacagattagatcctgtgctgaaagagaaaccaagaaaaaagatgac

SEQ ID NO: 631600 - DNA, 100 bp, Homo sapiens
tttaagaagaaaaagaaggccctgagtcaaagaagatgcctcgaactaaacaaattcatcccagaaatctaagagatgagcgtgaagccgtgcagaagaa

SEQ ID NO: 631601 - DNA, 76 bp, Homo sapiens
gtacctgcagaaggtctctggagacatcttcagcaggtatagctgtggaccaactgtatatgatcatgcgcacctt

SEQ ID NO: 631602 - DNA, 82 bp, Homo sapiens
cagaaataccagtccccagtgagggtgtacaaatacccctttgaattaattatggctatgatgaagaacgagagcttcaaat

SEQ ID NO: 631603 - DNA, 100 bp, Homo sapiens
aggagcagcagcagctccagcaggcgctggctcctgctcagaccaagatcactccatggatgaaatgacagctgtggtgaaaattgaaaaaggagttggt

SEQ ID NO: 631604 - DNA, 102 bp, Homo sapiens
ggatttaatactacgacagccactttgggctttggagccccccaggccccagtagggcggcgactggcggcgcgatggacctgaccgggctcctgctggacg

SEQ ID NO: 631605 - DNA, 75 bp, Homo sapiens
ctctgctaaactgaacaagcccttcctgtttgacaccaagcctctcattgttcatgcctggatcaaagtggaaca

SEQ ID NO: 631606 - DNA, 100 bp, Homo sapiens
atgggacttccccgcgtgacagcacagagataacggccagccctgggcgaagaatttacatagtacatgacgaagttaaggataaagcttttgaactaga

SEQ ID NO: 631607 - DNA, 105 bp, Homo sapiens
gttaaggattccaagtaactcttatttggtgcagtagacattgttgcaatcatgatcggcaatctgaaaggcacaaaaattctgcaatctattcaaagaggcata

SEQ ID NO: 631608 - DNA, 80 bp, Homo sapiens
tctgccaccatcttcgacttgagcgaagttttatgcaagatcatggaagggaagtggttgctgtgtatgttactggtgct

SEQ ID NO: 631609 - DNA, 76 bp, Homo sapiens
cagcatcaccagcaccacatgttttccaacatggctagatccatcagaaactgaagccgtggagaacgctctcggg

SEQ ID NO: 631610 - DNA, 89 bp, Homo sapiens
ttacacttcgactctcaaagcaataccaggatagctgttgtttcagagaaagatgcaaataatacggcactccgaacagacactaaaaa

SEQ ID NO: 631611 - DNA, 83 bp, Homo sapiens
ctctgcctgatttctcctgaatttggaaactatttaatccacattcatctcaatggaaggatcctgccttaagtcaacttatt

SEQ ID NO: 631612 - DNA, 82 bp, Homo sapiens
gcccagatgatgcggtggtgggggacctgccggcacgcgactccccccgggcccaaagtgctgctgcatgaggaggcgggtg

SEQ ID NO: 631613 - DNA, 101 bp, Homo sapiens
gagtcttcccgagaaggcagaacgttgtatttgtcaagtgaccacaggaccctcctgaaatcgtctaagaggtcttggctccaggaagtgtacctaacaga

SEQ ID NO: 631614 - DNA, 75 bp, Homo sapiens
cgcagtggtcgcttcttctccttggaatcatgggtaaagaaggaagacaggctgcaagaaacagtgactatgcaa

SEQ ID NO: 631615 - DNA, 98 bp, Homo sapiens
gtgaatgttttccagggacacacggaaaaagggagatttcattgccctggatcttggtgggtcttcctttcgaattctgcgggtgcaagtgaatcatg

SEQ ID NO: 631616 - DNA, 98 bp, Homo sapiens
aacagtcagagccaccagccaatgatcttttcaatgctgcgaaagctgccaaaagtgacatgcagaactatgaatagactgacccagctggaaagact

SEQ ID NO: 631617 - DNA, 80 bp, Homo sapiens
tgttaagacattcttggaagccttaccgaatagagtatgagcctttggttgcatgctcttcttgtttagatgtctctggg

SEQ ID NO: 631618 - DNA, 143 bp, Homo sapiens
agcttttgttaattatcttaaatacttgctttactggaaagacccagaatatgccaagtatctaaagatctagtgaaaagccatttgatgtatgcggtcagagaagaagtggaggtcctcaaagagcaaatcaaagaactaat

SEQ ID NO: 631619 - DNA, 74 bp, Homo sapiens
tttaaggctccattttatccaattcagtatctaggggattttcttttagagttccatgccattgcagtgtcaac

SEQ ID NO: 631620 - DNA, 98 bp, Homo sapiens
gaccgagctcaccaactgcgtgcccggcgtgctggaccgccgcgactccgccgcgctgcgcacgcccagacctatgaggaccagcacagcagtgagga

SEQ ID NO: 631621 - DNA, 102 bp, Homo sapiens
ctccacagctccagggaaggcactcaaaagtggggggcaggaaagattctgaaggaagatttccattaggtaatttgtttaatcagtgcaagcgaaattaag

SEQ ID NO: 631622 - DNA, 85 bp, Homo sapiens
caaccccaccatcccaccaaagggggctgctgaccgagagagctcactcagccagtggatccggattggtgccaatgtctccaac

SEQ ID NO: 631623 - DNA, 100 bp, Homo sapiens
ttcgcagtggtcgcttcttctccttgacaggggcaagtgtccgagtggtgaatcagctacttacagagatggatggtctggaagcacgccagcaggtttt

SEQ ID NO: 631624 - DNA, 71 bp, Homo sapiens
gcgggacagcgcggcggggagcgacgattacttcatgtgaaaacaaagatggttggaagagcatgcttgtt

SEQ ID NO: 631625 - DNA, 80 bp, Homo sapiens
cagcctcctaagtagctgggactacaggtacatgtcccagagcaagcacacggaggcccgggagctcatgtactcgggag

SEQ ID NO: 631626 - DNA, 51 bp, Homo sapiens
gcatccaaacattatcactctaaaggattggaggaagaagcgaatgcgcag

SEQ ID NO: 631627 - DNA, 83 bp, Homo sapiens
catgtctgcgagccaggattcccgatctctggaaacatggctacagaacatgttaatggaaatggtactgaagagcccatgga

SEQ ID NO: 631628 - DNA, 74 bp, Homo sapiens
ggcaccgaggcactcagaggagcagcgtccgtctccaagagagtatgaagagagtgcgtctgtagggcagggaa

SEQ ID NO: 631629 - DNA, 80 bp, Homo sapiens
aaacatccatatcataagtggaattttggagatattcaaaggtcatacttacctggttgcttgcgcatctagtaatgttg

SEQ ID NO: 631630 - DNA, 76 bp, Homo sapiens
ccctaacacagggggaatgggagcctattgtccagcccctcaggaaaatcctgccttgcttcgttgggcctatgca

SEQ ID NO: 631631 - DNA, 75 bp, Homo sapiens
ctcctcatagacccggaaaactgattagaaggcagaggtgctggagaatctggtaaaagcaccattgtgaagcag

SEQ ID NO: 631632 - DNA, 60 bp, Homo sapiens
gtcagccaagagatgtgttaaagtttgctgctttgtggtgcacaagcggtgccatgaatt

SEQ ID NO: 631633 - DNA, 100 bp, Homo sapiens
gcactgagcggccgcggccatggcgtacgcctatctcttcaagtacatcataatcggcgacacaggcagatgcccgccagactctgaaggagcatgtgca

SEQ ID NO: 631634 - DNA, 73 bp, Homo sapiens
ggaaatgaagtttcggaaaacatggaggaggaggaggatgaagaaggttataacgatggagaggtagatgacg

SEQ ID NO: 631635 - DNA, 75 bp, Homo sapiens
aggtgccgcccccaaccgtgcccatggactactcctgggccagggatgcagaaaatgcgattgtgcatatgggcg

SEQ ID NO: 631636 - DNA, 98 bp, Homo sapiens
caaagaagaattgctaaaatgctgtttgcaactcctcctagttccacctatgagaaggtttgagtacaagctcagcttcaaaggcccaaggctggcat

SEQ ID NO: 631637 - DNA, 100 bp, Homo sapiens
gcacaagttgcggcagctgcctgagcgatacatgatgaacagcgtcctggaaaacttcaccatcctccagcagagacagggtttcaccgtgttagccagg

SEQ ID NO: 631638 - DNA, 80 bp, Homo sapiens
ctggaaaagacaattgatgacctggaaggaaatacttttagtagtttggcagggatgatgtttgagtggagcattgccca

SEQ ID NO: 631639 - DNA, 82 bp, Homo sapiens
ttccgactctggttcagtcactgaaatccgcaatatcatctctgtcaagataacgaaggaggcccaacttcattcaataagg

SEQ ID NO: 631640 - DNA, 152 bp, Homo sapiens
atgtgagccgcctgatcggcggccgccatgttaggagcgcagtggcggcgcaaccagccttctagggcggcggagcgccatcatgaccgggtcctataacaacttcttcaggatgtttgatagagacacgcggagggatgtgaccctggagg

SEQ ID NO: 631641 - DNA, 93 bp, Homo sapiens
ggagcttggtttcgggatctcggtgctgcagacggcgagacctcctgcacagctgtgagccgtgagctttgaggcggtgggatgtgtcagcag

SEQ ID NO: 631642 - DNA, 74 bp, Homo sapiens
ccgaagctaagagcccccttcagtcgcagcctcactctaggatgctggtggactgtgtgcccctggtggaggtg

SEQ ID NO: 631643 - DNA, 101 bp, Homo sapiens
gatcactgaaaatgatttatgcaagtttaagattagccgatgaattacatatgccatctctccctgaaatgatgtttggagacaacgttttaagaatccag

SEQ ID NO: 631644 - DNA, 50 bp, Homo sapiens
acgctttttggggaactggtgtggagtctattatcctcccagtccacaac

SEQ ID NO: 631645 - DNA, 83 bp, Homo sapiens
tgaaaagactgggcttgtccttgctggtgcatgcgtcgtcggcctctgggcagcagatttctttcaactggtaaaacatcata

SEQ ID NO: 631646 - DNA, 75 bp, Homo sapiens
gctagggaggacctcacttccccggggtgtaataatgttaactgagcccgtgccccgcatcatggtgcagtcagc

SEQ ID NO: 631647 - DNA, 74 bp, Homo sapiens
ctctcttccctggctggacttgcggagtccccgccgaagaacccgaggttggtgaactcttgaaagattggcga

SEQ ID NO: 631648 - DNA, 75 bp, Homo sapiens
cccgacactaatgtgttactgcaccagatgctctgaacgttcttctcatcatcgtggatgacctgcgcccctccc

SEQ ID NO: 631649 - DNA, 100 bp, Homo sapiens
gcaaggggctgaactatcggtatcacctgggttgtaactgcaagaatgtggccccgtcccagagcaccacccgagacatcaggagcccatcgtgggctag

SEQ ID NO: 631650 - DNA, 100 bp, Homo sapiens
atacactccacacctcgggactccataatattggacaaggctggaaggcccatttggctcctgcagcctcttatgcagcttgtcctccggacacctttgg

SEQ ID NO: 631651 - DNA, 82 bp, Homo sapiens
ctgggaccaacctacttagatgacaatgtcaagaaagaaaactcctccttgtacctagacaagcagaatgatgtggagatcc

SEQ ID NO: 631652 - DNA, 74 bp, Homo sapiens
ctcggtaccttgactaccccagtggaaggtcttgatatacagttggagggtggttgagtttgcctcttatggtg

SEQ ID NO: 631653 - DNA, 51 bp, Homo sapiens
caccagtgagatccactgctccagttgccatcaacctgatcgtgcagcaca

SEQ ID NO: 631654 - DNA, 90 bp, Homo sapiens
gcaaatgctgccttccttgttggatgctacatggactgtggaaacaacgagcttcaatttgttgctgaagacagatgatgactgttacat

SEQ ID NO: 631655 - DNA, 129 bp, Homo sapiens
cgccgctgctgggagatgggcctactcgcccgccaccctgcgctgccgccgctctgaggagttaaaggaaaagcaggtgatattctcagtggagaccaggacaaggaacagaaagacccttactttgtg

SEQ ID NO: 631656 - DNA, 50 bp, Homo sapiens
gcgaaggaagttacacgtcaagtcaaacatcagaagagctaacaattgct

SEQ ID NO: 631657 - DNA, 76 bp, Homo sapiens
cgttacgaaattgactccttgataggcaaaggttcctttggacagtacaaaattggacagctgtacatgatcagca

SEQ ID NO: 631658 - DNA, 75 bp, Homo sapiens
cacccaccgccgccgcctcccaggagctctgtgtgtcgtctgagcagtcgcgagaagatttccctccaggacttg

SEQ ID NO: 631659 - DNA, 90 bp, Homo sapiens
caaccaggcactactgaccaagatcttgtcaagctgtgtcagccgcatcgttggcttcacagtatgactgatgatcctccaacaacaaaa

SEQ ID NO: 631660 - DNA, 82 bp, Homo sapiens
atttggaattttcgtatacgtggattccagaggggtgacagcgaaataccttaactgatgtaagaaatctcaaatttccacc

SEQ ID NO: 631661 - DNA, 100 bp, Homo sapiens
ccaagtcaattctggacagctgggtatggggcaagcaaccagagcacagcaatggaggaaacagctatatgggaacaacatacagtgacgcttcacaggg

SEQ ID NO: 631662 - DNA, 75 bp, Homo sapiens
cggaagtgcagctgcctcagttcttagcgcagtcagaggctaactgttctgccatgtttggaaaactgatgacca

SEQ ID NO: 631663 - DNA, 83 bp, Homo sapiens
gagcaccaggcccaccgtgaaaggttctgagagtgaatgcattgggcactttaagttgatattttctcttctccgagttcatg

SEQ ID NO: 631664 - DNA, 98 bp, Homo sapiens
tcagagctgaggtacttcgtgaagggggagagcaaggacctgctgtttatcttgacagcgaagtacaatgcctgcatcctggagtataaacagagtgg

SEQ ID NO: 631665 - DNA, 100 bp, Homo sapiens
agctgagacggcagcggcagcttctcagctcctggtggacccatgtggaaatgggacctccagatcccattctgggagtcactgaagcctttaagaggga

SEQ ID NO: 631666 - DNA, 82 bp, Homo sapiens
gttgaatatactcatgacagcaacaccgatatgtttcagctctatcgtccgagctttgtgcacccaggggctgccacagtcc

SEQ ID NO: 631667 - DNA, 74 bp, Homo sapiens
actgaaggctgaagattttatagtggatgcctatatgaacccaatagcaatggcgagatcaaggggtccaatcc

SEQ ID NO: 631668 - DNA, 102 bp, Homo sapiens
ccagctgaagagcgacaagccgctggcagccgcggatctcaccgccgctcaggaacccagtgacttgattgtaaaaatttacagagcggaatcatatgctgg

SEQ ID NO: 631669 - DNA, 100 bp, Homo sapiens
acttggaacccacagtcattggtctgagagtcactggagctaccagaagcatcatggggccctggggagagccagagctcctggtgtggcgccccgaggc

SEQ ID NO: 631670 - DNA, 74 bp, Homo sapiens
ttctcgacctgctaacagaactggaccttttcgccgtgtaggagactcaccaatacctggagctggagcctatg

SEQ ID NO: 631671 - DNA, 74 bp, Homo sapiens
tcttcttaatggaaaggatcctgattcctcttcaaagctgaatgcaatatccatacatctccttctccgggaat

SEQ ID NO: 631672 - DNA, 100 bp, Homo sapiens
tttccccctgttgcagggttttgtttatataactcaagttgtttggctaaattcttcagctgttccaaagacctaatgcgcttgctgtccagcagttgac

SEQ ID NO: 631673 - DNA, 82 bp, Homo sapiens
caactctgatgtggagttcttgaagcaactaagatctattccagaggggagcttcaccacttcattgacggctttaatgaag

SEQ ID NO: 631674 - DNA, 75 bp, Homo sapiens
ggcagcgaggtcgcggcaggttcgagtgagacggtttaagcggaagcatcttactgccattgactgccagcattt

SEQ ID NO: 631675 - DNA, 80 bp, Homo sapiens
ttcctggtgaatatcgaagaaaggagaacggtttaagggaagaaagtcggaggctggctttggctgcgaaaagagaaaaa

SEQ ID NO: 631676 - DNA, 100 bp, Homo sapiens
gatcttcgaaatcaagactcccagccgggttattaccctgaaggtgcggaatgacctgactggagttctgtatggcgaggacattgagatttcagacacc

SEQ ID NO: 631677 - DNA, 101 bp, Homo sapiens
ccgggtgctgctggttagtgtgctctgagggagggtccgagccagccgctgttttgccggaggagcccctcaggcctaaactgtttcacgttagacctgta

SEQ ID NO: 631678 - DNA, 75 bp, Homo sapiens
cgcgcggccccttattcgctccgacaaggaaccaaggtgtttgtgatgcccaatgggatgctgaaaagcaaccag

SEQ ID NO: 631679 - DNA, 80 bp, Homo sapiens
aaccccgttgacaaggcactgctttttcatgacgagaagatggcgaattagaagatggtgaaatagacgatgcaggattt

SEQ ID NO: 631680 - DNA, 76 bp, Homo sapiens
tgtacaaaacatcgtgggaatcttgtgtcggaagcccgtgcctctactactggatcaagattatgttaatttaaag

SEQ ID NO: 631681 - DNA, 82 bp, Homo sapiens
cgctacgctcgccggggctgcggccgcccgagccctgggcgctgcctatggcacagccaagagcggtaccggcattgcggcc

SEQ ID NO: 631682 - DNA, 125 bp, Homo sapiens
acgcattcgactgcagaaaaagttccagaaacaatttggggttaggcagaaatgggatcagaaatcacagacttacagccagctggcccaccccatccagcaggccaaggcactgggtctccagt

SEQ ID NO: 631683 - DNA, 76 bp, Homo sapiens
gttcagtgtattcgttctgtgcctgaactcaaagatgcccttaaaagacctccaactcgggcagtttctatccttc

SEQ ID NO: 631684 - DNA, 100 bp, Homo sapiens
ggggagcggcgttggaggccaccgtttccaggtattatagctgcaaatgtccttgtattctgtttatggagagtaccttctctgcagcggacaatgatca

SEQ ID NO: 631685 - DNA, 100 bp, Homo sapiens
acaacgactaccaccgcagcgacgagcaggcctccggtgtggctgtctctgatggtgtcatcaaggtgttcaacgacatgaaggtgcgtaagtcttcaac

SEQ ID NO: 631686 - DNA, 82 bp, Homo sapiens
atggacactatagatgtttccaatctaaataggcagtttttatttaggacagagcgggatgccaccagcttgtccaaaggga

SEQ ID NO: 631687 - DNA, 76 bp, Homo sapiens
cggatccggtgttgcatccttggagagagctgagagctggagatacgtttattcataccacaaagtaaacactatt

SEQ ID NO: 631688 - DNA, 75 bp, Homo sapiens
atcaagttcaaggagtctcttgttaatgtaaagagtgtgtacaacagttagctgaaaacaccaggtatttcagga

SEQ ID NO: 631689 - DNA, 100 bp, Homo sapiens
gaagaagcagcgtaccaagaaaaataaagaagaggctgcagaatatgctaaacttttggccaagagaatgaaggagtctactcttcatcttgtgttgaga

SEQ ID NO: 631690 - DNA, 117 bp, Homo sapiens
aaacggaaacagagcacccaagatgaagatgctgttagcctttgcagtctcgacataagtagctcttcagtatccccatcagccagtttccgaggtgctgagaagcacagaaactcc

SEQ ID NO: 631691 - DNA, 98 bp, Homo sapiens
gtccatagaagctttggggctcttcctctaatcaggagaaagctggtggtttacatcttggagaaaaaacattctcgagcagcaaccggcttcctcaa

SEQ ID NO: 631692 - DNA, 83 bp, Homo sapiens
aacatcaagggagttttccggggccctctcagcaagaacgggaacaaaactctggaggagcatattatttaatatctagaagt

SEQ ID NO: 631693 - DNA, 100 bp, Homo sapiens
taaatatatttccaaagagaaaagctgcatatgattcaaatggcttattgtgtaacagaacctggagcaggctctgatgtagctggtataaagaccaaag

SEQ ID NO: 631694 - DNA, 51 bp, Homo sapiens
tccagatgatcatctgatagaagagacgtgaacttatgaattcaacaggtg

SEQ ID NO: 631695 - DNA, 75 bp, Homo sapiens
aagatgatgacgatgatgatgaagaggatgatgatgaagaggattaatgaaaatcaagttccatcctcagacaag

SEQ ID NO: 631696 - DNA, 75 bp, Homo sapiens
cctcccaaagtgctggtattacagcacaccgttccggaaggcaaaagccttgtatgcctgcaaagctgaacatga

SEQ ID NO: 631697 - DNA, 50 bp, Homo sapiens
agcaacaggggatatcaaagtgacagctttccatgaagtctcagtttacc

SEQ ID NO: 631698 - DNA, 100 bp, Homo sapiens
cccaggtcactatcggctactctggagaggacttgctacagctagaatgaagcacatcaacctatcatttgcagcgtgtggatttctgggcatttaccac

SEQ ID NO: 631699 - DNA, 100 bp, Homo sapiens
tcggtcccaggtcccggcctccgtaatgagagcccggaaccactctttgtgccgcagcttcgcagatcaacctctccacttctcctacacctgcacagtt

SEQ ID NO: 631700 - DNA, 100 bp, Homo sapiens
ggtgacggagaacagcaaagcctggaagcaagccgccgtggagaaggaagaactgtgctgagatggcctctccagaggagaagtgtcaacaagtcttgga

SEQ ID NO: 631701 - DNA, 100 bp, Homo sapiens
gggagggatcgggttctcctaggaagtttcaggtgaatggtgtggctctgcagggcgccgagcaccacgaggccgtggaggcgctccggggggccggcac

SEQ ID NO: 631702 - DNA, 75 bp, Homo sapiens
gaggcacaaggaggacgccggcgtcttctgctcaggtttacccaaggtccagcctagcccctaggcaccatgtcg

SEQ ID NO: 631703 - DNA, 49 bp, Homo sapiens
cgccgccgcttgtgctgcagccatgctgcatcttcctcccgtgaggctg

SEQ ID NO: 631704 - DNA, 75 bp, Homo sapiens
ggaaacccagccgcttctggggcctcctggcggcagtactgccttccccaggccctgcccttccccaagaggaaa

SEQ ID NO: 631705 - DNA, 100 bp, Homo sapiens
cggcttgtagagcttttgccgttctccagcgctttacaggggttatcgcacttaagcctcggaacaactttaccaggtcatcatcagatttgaaatattt

SEQ ID NO: 631706 - DNA, 75 bp, Homo sapiens
caaatggcgtgcaggcacagatggctaagaccagcatctcagacatgtcgaaaaagatgttttgatccctaaaat

SEQ ID NO: 631707 - DNA, 96 bp, Homo sapiens
agaagaatccaatgagtttactaatgactggggcctgaattattggaacaactttggaaagccagagctgaaaaaaagaaactacgcaaaacgttg

SEQ ID NO: 631708 - DNA, 82 bp, Homo sapiens
atgcgcccagcggattctacattgcctccggaggtggaaatgagttctcaacagtttcctcggttaggagccccttctaccg

SEQ ID NO: 631709 - DNA, 75 bp, Homo sapiens
gcgctctggtggaagcccaaggctccgaggaggcgagtttctccgaacatccagtcatggataaaaatgagctgg

SEQ ID NO: 631710 - DNA, 89 bp, Homo sapiens
atttggaaccttcgggcaaacaggattccacagtgtcctctggaaaatgcttcagtatcagacacagcacagcagccatctgaagagca

SEQ ID NO: 631711 - DNA, 90 bp, Homo sapiens
gctctatgatgttgttgcagtttttccaaagacagaaaagctttttcatggtttggacagaggagccaaaggccaaatttccactttcag

SEQ ID NO: 631712 - DNA, 100 bp, Homo sapiens
aagtccaagtactcagacatcaccatcatgtttgagatggtggatgcttccaaaagcatcgaagctgtccatgaggacatccgcgtgctctctgaggacg

SEQ ID NO: 631713 - DNA, 51 bp, Homo sapiens
cccagcttcacttcagaatcaaccaaacagtgcacagccagagaacaacac

SEQ ID NO: 631714 - DNA, 82 bp, Homo sapiens
ttattcgagtgaccgagaccgcggccgggaccgaggctgagcgggctttggacaccatgaactttgatgtgattaagggaaa

SEQ ID NO: 631715 - DNA, 100 bp, Homo sapiens
ctggtcggctccagcaccctcttcttcgtgttcacgaaggtgctcgggtcttcggggcactgggtcccatcggtccctcctcacctgggctcaccctcgg

SEQ ID NO: 631716 - DNA, 100 bp, Homo sapiens
catcatagtcaactgcgtggaagagaaggaaacttggatttaactggccagaagcaggtattcaaagcagagaacaatccctgggtgacccccattgcag

SEQ ID NO: 631717 - DNA, 90 bp, Homo sapiens
atgacatcaataccagtgataagcttgaagtacatctggattccttatgtgtgcatgttagcagcatttggtgtatgttctcccgaactt

SEQ ID NO: 631718 - DNA, 100 bp, Homo sapiens
cactacattctgggtgacacgctgggggtcggcaccttcggcaaagtgaaggcctctgaagagccaatccattcaggatgggaaaccacgcaggcaaacg

SEQ ID NO: 631719 - DNA, 82 bp, Homo sapiens
ggccagaacagcccaagatggccgacttcgatgatcgtgtgtcggatgaggagaagaacagtgcaaccctgaaactcgtcct

SEQ ID NO: 631720 - DNA, 50 bp, Homo sapiens
accgatttgaagattcaatatactaagagcctgtgtggtgcccctatctc

SEQ ID NO: 631721 - DNA, 75 bp, Homo sapiens
cgccgccgccgccttgctgctgctcaaagctgctgccgccccttgggctaaaagagtgatcagcagctggactgt

SEQ ID NO: 631722 - DNA, 48 bp, Homo sapiens
tgggagccaagaccacacactgagaaccatggaaggacccccaacctt

SEQ ID NO: 631723 - DNA, 76 bp, Homo sapiens
aaaccaccctttaaattttcaagggaaggacaggatgatcctttcaaaaataaagccttgttatttagcaacaaca

SEQ ID NO: 631724 - DNA, 90 bp, Homo sapiens
ctctcgctgtgagacatgtctgagactcctgctcagtgtagcattaagactgtacaatttgttcaaggaatttttgtagaaaaatacgat

SEQ ID NO: 631725 - DNA, 100 bp, Homo sapiens
gcgtggctggggaggcgaggccggacgcacctctgtttgggggtcctcagctttctgaaacaaaggtcttcactgcctcatctgctccagcagagaatca

SEQ ID NO: 631726 - DNA, 50 bp, Homo sapiens
tcggtagccatggcacaagaatatactctattatcaagtcctaaattttg

SEQ ID NO: 631727 - DNA, 100 bp, Homo sapiens
acctggcctgaagacatttcctctcctcccctctggatttctcagaggtcagtgatgcaggacttctggaggaggagctgcttggggggatgggggccca

SEQ ID NO: 631728 - DNA, 75 bp, Homo sapiens
ctcgggtggaagaagtggggccatacacctacaggaaaagagcactggttgccattggtacccatgatttggaca

SEQ ID NO: 631729 - DNA, 75 bp, Homo sapiens
tgctggcatcagcacagacaccgctttgccgatagccgattccacgactcttctttgcgggagaacatacgatcc

SEQ ID NO: 631730 - DNA, 82 bp, Homo sapiens
gagttcctcagcaaggtctccatcctaggtgtggacactgccagcggctgcagccgacttggaatgacctgggagacaaata

SEQ ID NO: 631731 - DNA, 101 bp, Homo sapiens
gggaagatggctgcagacaagcctgcagggtctccgtctctccaccgggggcttcatccttccagggaggagaagagggactccagaatggctgaggagaa

SEQ ID NO: 631732 - DNA, 82 bp, Homo sapiens
acgggccatagtagatgcagccaggcattgcgacttgcagtatgtaatagtgttgtgatcctctgacatagcctctgcctct

SEQ ID NO: 631733 - DNA, 50 bp, Homo sapiens
cgcggccctgctgaaagtggcgcaaatgtcaggtcaattcagtgaagata

SEQ ID NO: 631734 - DNA, 100 bp, Homo sapiens
cggatctataccaacgccaaacgcacgagtattacccctatctcagcagtgatggggagagccatagcgatggagttccgtgttctcagaacccaacaga

SEQ ID NO: 631735 - DNA, 75 bp, Homo sapiens
tgaaaggcatggtcacaaagaactcaagaaaatcttcgaagacttttcagacctgatcccaaccttgaagaaagt

SEQ ID NO: 631736 - DNA, 119 bp, Homo sapiens
ggactcagagaccaataaaaataaactgcttgaacatcctttgactggttagccaggtcatggaaaatggaagatttgcaaaatacaaatattttacccatgtcatgatcaataagaca

SEQ ID NO: 631737 - DNA, 75 bp, Homo sapiens
ccaggagcctcaaggcggcccggcgggcgactggacggccggacaggagcatcagatccatgctgctgctgactc

SEQ ID NO: 631738 - DNA, 78 bp, Homo sapiens
ggcaacccggagaaggtctacagagcggcctgcgccagcgaaacaatccatttcacagatgaagaaacagactcagtg

SEQ ID NO: 631739 - DNA, 100 bp, Homo sapiens
tttttgctccccttcctggaagagttctggcataaagcatgcttccattgcgagacctgcaagatgacactgaacatgaagaactacaagggctacgaga

SEQ ID NO: 631740 - DNA, 51 bp, Homo sapiens
ccggaccaagcgggcccagaagcgggaaagaccacagcaagattctttcat

SEQ ID NO: 631741 - DNA, 100 bp, Homo sapiens
gttgaacaaatttgatttccggagtcagtcattttactgtcaagacatttcttcggcattctgcaacagctggagaatgctggaggagaccttaaggatg

SEQ ID NO: 631742 - DNA, 100 bp, Homo sapiens
catgacttggatatgctgacgactgtgcaggaagaaaacgagccagtgatttacaatagagcaaggtttgtggtaaatatgccagctctagaacacatga

SEQ ID NO: 631743 - DNA, 95 bp, Homo sapiens
aaaaaaccacaaatgtttttctgttttgcctgaatacatgatttaaacaagagatttccacagaagacaaatttacatgtattggagaccagacc

SEQ ID NO: 631744 - DNA, 76 bp, Homo sapiens
agaggagcagcattcggccagagcccccttgctggattatatctacaggctgagatctgtatctgtggacctgaat

SEQ ID NO: 631745 - DNA, 95 bp, Homo sapiens
ggatcattttgaaaaacagtattccaaagaactcggagatgcctggaatacagtaaggtgatctcttcagcgtcctggacttcccattcctgtac

SEQ ID NO: 631746 - DNA, 80 bp, Homo sapiens
tcacacagctgcttccattggccagtatgaagtggtgaaggagtgtgtgcagcggtgtttcccattaaacactaccagga

SEQ ID NO: 631747 - DNA, 75 bp, Homo sapiens
tccaagcaatgttcattttactccgcccagaagacaacatcaggctgtttgaacgccatgaccctgtggatggga

SEQ ID NO: 631748 - DNA, 100 bp, Homo sapiens
agaccctggagcctcagttggaagcagccgatccagcctgcggagcctgtggggcagctcaaactggaggattataaggatcgcctgaaaagtggagagc

SEQ ID NO: 631749 - DNA, 100 bp, Homo sapiens
cggccatggcgtacgcctatctcttcaagtacatcataatcggcgacacaggtcctcaaggtcctccaggctatggcaagatgggtgcaacaggaccaat

SEQ ID NO: 631750 - DNA, 90 bp, Homo sapiens
agagcgcgagagatggagatgggcagacggattcatttagagctgcggaacaggacgccctctgataggctgggaggcggcagaatgcag

SEQ ID NO: 631751 - DNA, 82 bp, Homo sapiens
aagtaccagccagcgccagctgcagccctggccgcgcactcgcctcagctgagcctggatgaacaagagaactgggcaaccc

SEQ ID NO: 631752 - DNA, 50 bp, Homo sapiens
tctccgccctggggtcattgtcagattccaaacagaggcattgatttact

SEQ ID NO: 631753 - DNA, 78 bp, Homo sapiens; identical to SEQ ID NO: 489789

SEQ ID NO: 631754 - DNA, 100 bp, Homo sapiens
cggaggccgagaccagacgcggagccatggccgaggtgttgcggacgctggccgaacccttaggagaaatcttgagagtggacagcaattgtgaagatcg

SEQ ID NO: 631755 - DNA, 100 bp, Homo sapiens
cagcaatccttggctcactgaggaggtttggagcatggggaagtgattgactgtgtgcaggagctgagccactccgtgaacaagctgtttggtctggcgt

SEQ ID NO: 631756 - DNA, 95 bp, Homo sapiens
tcgtcgaaaggattggattggcatctttagaggctattcacgaaaagcagcagctctagagttcttaaaccgctttgaagaagccaagcgaacct

SEQ ID NO: 631757 - DNA, 75 bp, Homo sapiens
ctgcgttgtaccatccgcctgtgggacacctaccaggttttaaaatcaaagatgggaaaatcggagaaaattgcc

SEQ ID NO: 631758 - DNA, 100 bp, Homo sapiens
ctgaaagtatcaatgaaggccttttgaaggtctcccaagaggccattgaaaatggaattcacagcgcatgtctccaaggaggacgaatccatgaaccaac

SEQ ID NO: 631759 - DNA, 100 bp, Homo sapiens
ccccacctccccccggagccaggctggtttcggaaatgcccttacagcagcaggtcttgctcagtgtgcagaactctgctggcagctgagaggggaagcc

SEQ ID NO: 631760 - DNA, 101 bp, Homo sapiens
gaactgactgccccgcatcaccggagcgtcccagctgcgaggaggtgatggcttggacaacagtgtagcttcccccagcacaggtgacgatgatgaccctg

SEQ ID NO: 631761 - DNA, 106 bp, Homo sapiens
cttcgattcatccttctcacctaacactggtctctgctggatgaaccgaatcctaacagtccagccaatagccaggcagcacagctttatcaggaaaacaaacgag

SEQ ID NO: 631762 - DNA, 93 bp, Homo sapiens
ggcagagagaggtgctcatgttttctcttgtgggtatcaaaattctacaaggttattgagccacatgatatatcagtggcactcaacacccga

SEQ ID NO: 631763 - DNA, 82 bp, Homo sapiens
cttcgccttcgtgcgcttcgaggacccccgacccctctgccatgaaccagtccatcccagtggctcccaccccaccccgccg

SEQ ID NO: 631764 - DNA, 83 bp, Homo sapiens
tgaccaagatcttgtcaagctgtgtcagcccatcagacatcgatgagtcatcagtgatgcagctggccgagatgggtttcccg

SEQ ID NO: 631765 - DNA, 75 bp, Homo sapiens
atttggctttgcctttctggacacagaagtatttgtgacaggaagacaactgttagttttgtggcttactgctgc

SEQ ID NO: 631766 - DNA, 99 bp, Homo sapiens
agttgcacatccccacatcaatgcactgccaatgtgatatcctgagagaagatgggaaagggctgcaaggttgtggtttgtggattgttatctgtgggg

SEQ ID NO: 631767 - DNA, 100 bp, Homo sapiens
ctatctgacaagagcatcaaccctctgacacaggctcagtctgctggagcgggtcagtgccgaggctgtgaccaccaccctgcaccaggtgacccgggag

SEQ ID NO: 631768 - DNA, 100 bp, Homo sapiens
cggcgcgcaccctcacgggggccctcaacgcccacaacaaggcggcggtggactggtgaggacgccgagcttccaggtacttggaaaaatggacaaggat

SEQ ID NO: 631769 - DNA, 75 bp, Homo sapiens
gaataacggctgcacctggagattgacgcagagtgggcggcggtggtgactggtcgaattgacaaatcttaccct

SEQ ID NO: 631770 - DNA, 100 bp, Homo sapiens
ttccgacgttacaatggtggagttggcaggtgtgcgcagtaacaaatgtggcaattattttggatctatcacctgtcatcataactggcttctgcttgtc

SEQ ID NO: 631771 - DNA, 143 bp, Homo sapiens
ccatctgggagccttcctgatccgggagagtgagagctccccaggggagttctctgtgtctgtgaaggcggcgactggcggcgcgatggacctgaccgggctcctgctggacgaagaaggcaccttctccctcgccggcttcc

SEQ ID NO: 631772 - DNA, 75 bp, Homo sapiens
gtaaagaaagacgcagagttaaaggcggttcaaaccttgtactactcagctgatcacaagctgcttgatgggaac

SEQ ID NO: 631773 - DNA, 100 bp, Homo sapiens
ctcatgtacaaaattacaagtggaaatccacaaggattcttttcaatacatcctaaaacaggccccttcacagatgtagtcactacaaatcttaaattgc

SEQ ID NO: 631774 - DNA, 100 bp, Homo sapiens
ctgaggacgttcagcagcattcccgtctcacggatatgcaagtcttactactttgaccgcgatgatgtggctttgaagaactttgccaaatactttcttc

SEQ ID NO: 631775 - DNA, 89 bp, Homo sapiens
gtgaaggtccggggcttgccctggtcttgctcggccgatgaagtgcagaggtttttttctggatcatgttctaattgagctcacccagg

SEQ ID NO: 631776 - DNA, 74 bp, Homo sapiens
cacagatgatacctttgatccagaacttgcagcaacaatagtgtaatgttcaagctcagaaatgccttatgtgg

SEQ ID NO: 631777 - DNA, 75 bp, Homo sapiens
gcctccggggacaagaaactagagcaaataaccgttttgaaattgtgctgactgggttacttttttaaacactag

SEQ ID NO: 631778 - DNA, 98 bp, Homo sapiens
tccaaatccaggtcgcgatcgaagagtccccccaagtctcctgaagaggaaggagcggtgtcctcttaagaaaatggaagcttaaagaacctgcttct

SEQ ID NO: 631779 - DNA, 90 bp, Homo sapiens
aaaagacagtcctcgtcagcactgactttcagctatggaatcggtgtgatgaatgcagactctgctaccattttggctgtttggatcctc

SEQ ID NO: 631780 - DNA, 98 bp, Homo sapiens
gccggtcgcggctgtgtcggtcgccgctgctcccgctcctgctgggagaggcagagtcacctgatatgaaaaaggagcaagacccccctgccaagtgc

SEQ ID NO: 631781 - DNA, 80 bp, Homo sapiens
ttcattgtgggagagatgaagaacctgagtcaggacgtaaatggaaccctgggccagctctcaatgttgcaagaaaaaat

SEQ ID NO: 631782 - DNA, 96 bp, Homo sapiens
ccctggaatgcaggaagagctccagcagatcattgattgtctggataccagcattcctgagacaatccgaaacatgacagctgccctacaggcagc

SEQ ID NO: 631783 - DNA, 100 bp, Homo sapiens
tctagctattgccttattttttctcatggatgttcttcttcgagtatttgtagaaggaccaagatcactccatggatgaaatgacagctgtggtgaaaat

SEQ ID NO: 631784 - DNA, 80 bp, Homo sapiens
tcacaactcatccagaagtttatctctgtgctgaaatcagtcccactttctggtcgctgcggaggagctttgctgtctgc

SEQ ID NO: 631785 - DNA, 76 bp, Homo sapiens
cagggggatttggaaatgtcatccgatggcacaatcagattactacagcccggccatgctgggcctgaagaccgac

SEQ ID NO: 631786 - DNA, 78 bp, Homo sapiens
tttggctgcccaggctcgcctcgactccaaatggttgaaaacagatatacaggtatctgcattagttaccatgtatag

SEQ ID NO: 631787 - DNA, 100 bp, Homo sapiens
ttgtgtcagccaccttgttctctaaagatttccaggccctccacctgtcaacaatgtggcatcctcacatgcaccataccaaccctctgcacaatcttct

SEQ ID NO: 631788 - DNA, 83 bp, Homo sapiens
ccggctctcgtcagcctcccgccggccgtctccttaacaccgaacaccgatttaagtgccctgtatgctcaaaatttgtatcc

SEQ ID NO: 631789 - DNA, 100 bp, Homo sapiens
caatttggagagctatctgaagagacaaagttggaaatcaggaagaatgtggccattagccttcggttctggcatgggattaggaatggcttattccaac

SEQ ID NO: 631790 - DNA, 100 bp, Homo sapiens
cggaggaggaggaggtggagttgctgcccttccggagtccgccccgtgaggagaatgcaaactgccctatgatgtgacccctgagcaggcgctagctcat

SEQ ID NO: 631791 - DNA, 125 bp, Homo sapiens
gggaggggcttcagcatcgtcacggacactcctgagctacagagactgaagaggactcaggagcaaatcagtaataacactcgtgaaactgctcaggccatcaagggtatgcatatacgaaaagc

SEQ ID NO: 631792 - DNA, 50 bp, Homo sapiens
ccgggacctcctggaagccaaaaatgggaaacactactatgaagtatcct

SEQ ID NO: 631793 - DNA, 75 bp, Homo sapiens
gttggaatggtgacaacatgctggagccaagtgctaacctgtgttccagatcatctccctggtaatttaccccgt

SEQ ID NO: 631794 - DNA, 73 bp, Homo sapiens
aagatgcaagcggtttgggaccttgaacaaggcaaatatggttttgttctggagagtcttggcttctgggagg

SEQ ID NO: 631795 - DNA, 100 bp, Homo sapiens
catgggaacctgacctgtgacaccatcttcatccagcacaacggactcatcaagattggctctggtgtgcctaccgcatgttgccgctgctgtttctgct

SEQ ID NO: 631796 - DNA, 82 bp, Homo sapiens
ggtgttcaagagctagatgaagggtgtccttctgtgctgaacatgtccgtaggaatgccctggcacttcatgctcaaatgaa

SEQ ID NO: 631797 - DNA, 98 bp, Homo sapiens
ccggagccgctgcacatttcgggaccttgctgcaagaaactgcctggtaggtgaaaataatgttctgaaaatcagtgactttggaatgtctcgtcaag

SEQ ID NO: 631798 - DNA, 50 bp, Homo sapiens
tttggatcggcttatcataaccagacactctgacctggtcacagccagag

SEQ ID NO: 631799 - DNA, 90 bp, Homo sapiens
tgccaactccttcttcccacgctgctactgcctgggggctgaggatgacaaaaaagccttcataggtgagaatgagatggtgatcatgag

SEQ ID NO: 631800 - DNA, 100 bp, Homo sapiens
ctgtaagtgccaacatgactgtgaagctgccactgcagagccccgccatggaagacacgccgttggtgatatcgaagcagaagacggaggtggtgtgcgg

SEQ ID NO: 631801 - DNA, 75 bp, Homo sapiens
catgctctggaaatgttcccagaacattgcacgatgcctcctgatgtaccaaagcttcagcctcatccgggattg

SEQ ID NO: 631802 - DNA, 100 bp, Homo sapiens
aatctgttcgtggccaagatattttcattatacagacaatacccaggtacctgaaagaattccgcacagagcagtgcccactctttgtgcaacacaaatg

SEQ ID NO: 631803 - DNA, 100 bp, Homo sapiens
ttaggatatgaaaaaatggccaaggctactgggaaactaaaggtggacccccaaaagtacaagggcatatttaacggattctcagttacacttaaagagg

SEQ ID NO: 631804 - DNA, 100 bp, Homo sapiens
ggcgcatcgtgttcgaggcggagaccgagggggagccccgcgcgcggcgtcgccttttgtcatacatgatatggagacactgtgtatggctgagaagacg

SEQ ID NO: 631805 - DNA, 50 bp, Homo sapiens
tacgagttgaatcattgttcaaataagtggaatgcagtagccctctgggc

SEQ ID NO: 631806 - DNA, 98 bp, Homo sapiens
tccatgttcacactgggtgaaggaagctgaaaccacagacatgactgagtcctccatgaagaggcacagactccatcaagatggagaacgggcagagc

SEQ ID NO: 631807 - DNA, 98 bp, Homo sapiens
ctgccctgatgggcagtcaacagctaaaaccttcctcaccgtgtactggctcacctgcttgaggaaacaggaactgcctcggggcagccagccccgcc

SEQ ID NO: 631808 - DNA, 87 bp, Homo sapiens
caacaccacaataatccacagccaagcagcaacaactccaggcccagcatttatcacatggacatggtctccccgtacctctgactc

SEQ ID NO: 631809 - DNA, 100 bp, Homo sapiens
aacctcacctttgtctccccgatctacggggctgacatcagcggctctttgtatgatgacgccctgtttgtgctcttcgtcctggcctacatccacatcg

SEQ ID NO: 631810 - DNA, 75 bp, Homo sapiens
aacttggtggagaatagaaggcaaatgatattctctaagccgctttcatcatgggagaaatagagcagaggccga

SEQ ID NO: 631811 - DNA, 50 bp, Homo sapiens
gttcaaagtactcaagatgaatttgaggtcagtaacagatccaagagatg

SEQ ID NO: 631812 - DNA, 100 bp, Homo sapiens
tcaaggcggtgtattctttttgacaattcattttcctacagactaccccttcaaaccacctaagagagcagcacttgaggcatgtcacaagggctggggc

SEQ ID NO: 631813 - DNA, 100 bp, Homo sapiens
gaggcaactaacactgcggcttcctgaggtgatcagactctgagaatatgggatgtgaaggcagcaggagtaagaatcgtgattcctgcacatcaggcag

SEQ ID NO: 631814 - DNA, 82 bp, Homo sapiens
gccagagcgtcggggaggcaagatgatccaccagcggttccatcctacacttggttctggacttcagtgaccccttcagcac

SEQ ID NO: 631815 - DNA, 97 bp, Homo sapiens
tagtgcttactaccaggttgggcagacgggcaaggaggggaccgagaatcaaggcgttgagcctcaagcggcaacctttggcactgcatccatgagc

SEQ ID NO: 631816 - DNA, 83 bp, Homo sapiens
aggccggggtgctcagccaggccgactacctcaacctggtgcagtgcgagacgctagagggccctggccaacgtcaacattgg

SEQ ID NO: 631817 - DNA, 98 bp, Homo sapiens
gctgcacgtcctcgaacgcgaggccaacagccccgtgtcagaaatttggagaatatcataaagatgacccaagttccttcagattttcagaaactttc

SEQ ID NO: 631818 - DNA, 82 bp, Homo sapiens
cggagagctgacaatgatgaatctcatgagaaagatcagtctaaagaaaaggagaagaaagtgaaaaaaacaattccttcct

SEQ ID NO: 631819 - DNA, 100 bp, Homo sapiens
gccaaggtgttcggtccttccgaggaagctaaggccgcgttggggtgagaccctcacttcatccggcggataaaacggtcccatcaagactgagaaaaag

SEQ ID NO: 631820 - DNA, 75 bp, Homo sapiens
cggcgctccagtagcaggacccggtctcgggaccagccgtgcctgatcaactttctagcgggagaacgatcatgg

SEQ ID NO: 631821 - DNA, 97 bp, Homo sapiens
ttcctgaggaagcgcgggcggacgacagaggatgccgaaccactccagccactgcagaacaaattagacttgcacagatgatttcggaccataatga

SEQ ID NO: 631822 - DNA, 51 bp, Homo sapiens
gccgaagatggcggaggtgcagtgattcgcctttgccagtctcatctcgtg

SEQ ID NO: 631823 - DNA, 100 bp, Homo sapiens
gagttgtggtccaaagaagctcctaaagcttgcagaaattttatccaactttgtttggaagaaagcataacccctactgtagaactaaatgcactgtgca

SEQ ID NO: 631824 - DNA, 100 bp, Homo sapiens
tgacagctgtgtactttgccctcagcatctcccttcatgtctgggtcatggtaccacgaaaggcagtggtagaaaagccagctcgggcagcagagcgaga

SEQ ID NO: 631825 - DNA, 100 bp, Homo sapiens
acctgatcctgctggccctcatgacagtggtcatggccgtgtgctccctgcctctcacgctgggacgatgccggagtgtgaaggagtttgagaagctgaa

SEQ ID NO: 631826 - DNA, 50 bp, Homo sapiens
cctgaagcctcaaagtttcatggaattaagtagactggctggacagattc

SEQ ID NO: 631827 - DNA, 83 bp, Homo sapiens
gttgctttgtggaaaaaactcactggggatactacacctggccaaagaaattcaatcatatctgtgaacagacaaggttcaaa

SEQ ID NO: 631828 - DNA, 71 bp, Homo sapiens
cgcagggacaagaactgcgccaagagcctctctggttacgtcgctggatttgtagacttggaggtgagcaa

SEQ ID NO: 631829 - DNA, 95 bp, Homo sapiens
cggagacagcggtgtcctgcgcgtcttcgggggtagaaatatttctgtcatggctcattcaaagactaggaccaatgatggaaaaattacatatc

SEQ ID NO: 631830 - DNA, 100 bp, Homo sapiens
ccgcaagcagcaagccaatttccattaattaccgaacagtgatgcagaagaccacaagcctttgaaaaaaggaagtcgaactccttcagacaggactgtg

SEQ ID NO: 631831 - DNA, 82 bp, Homo sapiens
aattttgctaactttgcacatttcaacagtcatgcagcaagccttcaatgccacggctgtggtgcggcacatgaggaaactg

SEQ ID NO: 631832 - DNA, 75 bp, Homo sapiens
tttgtgcacactggtgacaactcaagagcaatcagtaccatctggttgtggggatgttccatccctccgttcagt

SEQ ID NO: 631833 - DNA, 100 bp, Homo sapiens
cagcctgttccaagaaagaggtgttagaaggtgtttgatgcgatcatgaatttcaagaaagaggagacagcaaaactgatagagaaactggacatcaaac

SEQ ID NO: 631834 - DNA, 75 bp, Homo sapiens
tgcaagagaaggcactcaagtttatgtactatactggcaattgctggagaagattttgcaattgttgcttctgat

SEQ ID NO: 631835 - DNA, 74 bp, Homo sapiens
tttacctgtgagatgtttcatcccaacacatttaaatcaaacggtattgagatggattgggttatgaaacataa

SEQ ID NO: 631836 - DNA, 75 bp, Homo sapiens
ccgggggctcccaggggagcgtgcgcggaacctccaggcccagcaggactcgctcagcagcagcctgaaaacttg

SEQ ID NO: 631837 - DNA, 80 bp, Homo sapiens
cctggcccgaaaggagagcctccccaggaccaaattaccatcacagggtacgaaaagaacacagaagctgccagggatgc

SEQ ID NO: 631838 - DNA, 98 bp, Homo sapiens
gtattccaattagatggctgtgtgatggaattcatgactgtgtggatggcagtgatgaagagaactgtgaaagagggaggcttgtggatcagaatctg

SEQ ID NO: 631839 - DNA, 83 bp, Homo sapiens
gcagcaaagggagctggagcgcatggctgaggtcttggtcaccggggaacagctacggtgacagtggatagtggaaacaggag

SEQ ID NO: 631840 - DNA, 75 bp, Homo sapiens
cctcatcttcaagaatccgtaggaattctcccatggttctatatcagagtttaaaagatttattggagtatgaag

SEQ ID NO: 631841 - DNA, 74 bp, Homo sapiens
ccgccactacctcctggctgccgtgaataggcagcctaaagatgatgccatggagagcagcaagcctggtccag

SEQ ID NO: 631842 - DNA, 88 bp, Homo sapiens
agctcgcgccggatgcggagcgcggtgctgccggtggagcttcagcgagtaaccagctcataaatcacatcgaacagtttttggatac

SEQ ID NO: 631843 - DNA, 82 bp, Homo sapiens
ctgcaccgacctcgacgtcttgcctgtgtcccacttgttcgcggcctatagccgtgctatcaagactaatcaggaccttctc

SEQ ID NO: 631844 - DNA, 75 bp, Homo sapiens
acggcgacgacgggggaatgtggcgctggatccggcagcagctggttattctcgttcaagttaatccaggtgaga

SEQ ID NO: 631845 - DNA, 90 bp, Homo sapiens
gaaaaagagcaaagataagaagagaaaaagagaagatgaagaaacccagcttgatatgttgaggcattcgacttacagcagtgtgcggcc

SEQ ID NO: 631846 - DNA, 90 bp, Homo sapiens
gaacatcagcgacagctttgagatgacctatagatattctgtttctggcgtctgcatacgcaagtccccaactcgctgaggagagctgtt

SEQ ID NO: 631847 - DNA, 101 bp, Homo sapiens
tgcccgccgtggacaagctcctgctagaggaggcgttgcaggacagcccccaggtcctcagaatggttggaatgaccctccagctttgaacagagtaccca

SEQ ID NO: 631848 - DNA, 75 bp, Homo sapiens
gatccggaccctgagactcccctaaaggccagaaagggttatgtaccgaaggactctaccgtgtcagcgggaata

SEQ ID NO: 631849 - DNA, 123 bp, Homo sapiens
ctgctgagagcaagatgggtcaccagcagctgtactggagccacccgcgaaaattcggccagggttctcgctcttggaaaggttatttgtcaatgaagaaaatgttaatgagtttcttgaaga

SEQ ID NO: 631850 - DNA, 100 bp, Homo sapiens
gagctgagtggttgtgtggtcgcgtctcggaaaccggtagcgcttgcagcatggattctggactctacttataatatccctaactgctggattctcctgt

SEQ ID NO: 631851 - DNA, 100 bp, Homo sapiens
ttcgcgtctctctgctgcggcgcggggaccgctgtgctctcgaaccaaaaacttttgctagaaaatcagcttttacgagagaaaactcatggccttgtag

SEQ ID NO: 631852 - DNA, 101 bp, Homo sapiens
agagaaaatctaccagcagagaagtctagtgcccaagacaggagcaggacattgtgttcctgatcgatggctcaggcagcatctcctcccgcaactttgcc

SEQ ID NO: 631853 - DNA, 100 bp, Homo sapiens
aagcgaagccttgaaaaagctgccctgagacggtgtcccgccgaaagttcaggacctcaaggggctcggctatgagaaggggaagcctgtgggtctagtg

SEQ ID NO: 631854 - DNA, 98 bp, Homo sapiens
ggaggcagagcggctgccatggtgcatgtgagggaaccctggcttgttcaacctgtcacctcatctttgaagatcacatatatgagaagttagatgca

SEQ ID NO: 631855 - DNA, 50 bp, Homo sapiens
gttatgtggacgagctgttaaaccagaagttggtgagatggcaaagcagt

SEQ ID NO: 631856 - DNA, 74 bp, Homo sapiens
ccagagattgtggagcagatggatgcctgtgaggagccaccaacatttgaagctatggagctcattggtaaacc

SEQ ID NO: 631857 - DNA, 104 bp, Homo sapiens
gtcatacagtgtcagaacaaaggctgggatgggtatgatgtacagggcaaacactgtatccttgatgtgtctggaaatgccataaagagattacagattgcaca

SEQ ID NO: 631858 - DNA, 101 bp, Homo sapiens
cctggtgcccttctgcaggacccctacttcatccagtcgtggtggctgaatacattttggaagagagtttttcatcttagagattggtgaacaagtgtgag

SEQ ID NO: 631859 - DNA, 75 bp, Homo sapiens
acgagatggtggaggaggcggtggaagttgatattcactgatggactccaaagaatcattaactcctggtagaga

SEQ ID NO: 631860 - DNA, 75 bp, Homo sapiens
ccagattgttgtggaggcctctcacccgcacaggtgtcatggagaaactccagctgggcccagagattctgcagc

SEQ ID NO: 631861 - DNA, 51 bp, Homo sapiens
gacggcaggaggaagagagagagagggacccctaccatggaggagaccatc

SEQ ID NO: 631862 - DNA, 76 bp, Homo sapiens
ctccagccgaaggagaagggggtgaccaaagacttgaccactcaaagtccagctccccagaacactgctcgacatg

SEQ ID NO: 631863 - DNA, 100 bp, Homo sapiens
gccatacgcgctctccctgtttagccatcctggtgatcgagttcatctacgccatcgtgggcatcgtctggctcactcagtactacacctcctgcaacga

SEQ ID NO: 631864 - DNA, 75 bp, Homo sapiens
ggtcagtacaccctgccttggacctgcatgcaacaaggtatcgggggaaatggattcgggtagaacgaagtcgag

SEQ ID NO: 631865 - DNA, 98 bp, Homo sapiens
ttaaaagatgatgagaaataaggacaaaagccaagaggaggacagttcgctacacagcaatgcatcgaggtttgatgagaagagggcagtgcagcagc

SEQ ID NO: 631866 - DNA, 100 bp, Homo sapiens
gtccagcgtcgccgcagccccccaatgcggccgcgagaagcagcgggggggcaggcgatcgaaggacattggctccctggattatcaagagtttgtagtt

SEQ ID NO: 631867 - DNA, 100 bp, Homo sapiens
caggaaggcagtctttgctacgtacagcaaaagcgtctgcttctacgctttgcctgggagaggccctggtggcctcgttcctggcgcccggagtccctgc

SEQ ID NO: 631868 - DNA, 82 bp, Homo sapiens
tcctcagccccaagacccagcaggcgtctgaggacaatgcagatcttcgtgaagactctgactggtaagaccatcaccctcg

SEQ ID NO: 631869 - DNA, 83 bp, Homo sapiens
cccagaagtgcctgcagttcagacccttctctcccctccactttctcccggcaattctgtggtgttcttggtcacacatttat

SEQ ID NO: 631870 - DNA, 73 bp, Homo sapiens
atctcgtacaagatccttctttcatccttcccactgctttcatgggcacggcaatgatctttacctgcttcac

SEQ ID NO: 631871 - DNA, 89 bp, Homo sapiens
tgagggagccccgcggatcgtttaggaaagccggccagcgctcctggttgcagccagaatgcatgacttcaggaggactgtgaaggagg

SEQ ID NO: 631872 - DNA, 100 bp, Homo sapiens
aagcagactctgaagatgatcagacaaggcaaagcgaaattggtcattctcgctaacaactgcccagctttgaggcgctttgacttccgtccaaaacctg

SEQ ID NO: 631873 - DNA, 75 bp, Homo sapiens
tgggccgcatgttcaagcaattcaacaagttaactgaggtactccaaagattcaggtttactcacgtcatccagc

SEQ ID NO: 631874 - DNA, 95 bp, Homo sapiens
taaaaacagtcctttctactatggtggtgatctttgtgaagtctgtgcagcggtgcattgccttggcccagctactagtggagcagaacttccca

SEQ ID NO: 631875 - DNA, 75 bp, Homo sapiens
tttgcaattatgaggaagccagagagatttttgtggatgaagataaaacggctgctgagcttcgtgcttatctga

SEQ ID NO: 631876 - DNA, 100 bp, Homo sapiens
cgacaatgtggtccggaaacaggcagaggcagacatctggtccctgggcataacagctattgaacttgcaagaggggaaccacctcattccgagctgcac

SEQ ID NO: 631877 - DNA, 98 bp, Homo sapiens
tttttcttatgaagcttcttctggttggaaacttgtcaaatttcatcagttacgccccatggtgtccatcctgccagcagactgattcagaatgggag

SEQ ID NO: 631878 - DNA, 83 bp, Homo sapiens
ctggtgcagccccgggccaggccgcggccggggcaggagcgcaggaatatattaaaggaatctgtgaacctgaactagaagaa

SEQ ID NO: 631879 - DNA, 88 bp, Homo sapiens
accaccctctcctgaccctgaagaactgtggctttatcctgtggataaacgcagagtgaacgagtttggggagtcctacgaggagaag

SEQ ID NO: 631880 - DNA, 88 bp, Homo sapiens
acctctactagccgagccggccgctgtgcccgctcggtcttcggcaacattaagtaaaagcagtctgggcgcaggctggggacccaga

SEQ ID NO: 631881 - DNA, 97 bp, Homo sapiens
gaagatcggccactacattctgggtgacacgctgggggtcggcaccttcggcaaagtgaagggtgtcatggagaaactccagctgggcccagagatt

SEQ ID NO: 631882 - DNA, 75 bp, Homo sapiens
ccctgaccattttctactgtccctgcgcgagaataactgcacaaagacttgcccacctgaataagtgcttgatga

SEQ ID NO: 631883 - DNA, 101 bp, Homo sapiens
ctgctgctgctcctggaaaccgacctgtcgattgttacgacacatatctgggacagaacctctggaaataacctgtatacatgcagaggagacatttcagg

SEQ ID NO: 631884 - DNA, 96 bp, Homo sapiens
aatcgagttgagtacttggatagacttatacctcaggcgggagacactatattcaatcgtgctaagctcctcaatgttggctttcaagaagccttg

SEQ ID NO: 631885 - DNA, 96 bp, Homo sapiens
ggaggatgagctggacaccaagctaacccgtatccccagtgccaagaagtacaaagaataatccagaatggctactctgatctatgttgataagga

SEQ ID NO: 631886 - DNA, 90 bp, Homo sapiens
acgaggattgagcgtctccacccagtgaaggaaatactcatgaccagccagatgtcttaaggaatgcttttgaaaagaacagaggcgtac

SEQ ID NO: 631887 - DNA, 100 bp, Homo sapiens
cgcaaggtcgctgagcaggacccaaagcgcccgggggctggagaaggccaggcagcagctgcaggaggagctccggcaggtcagcggccagctgttggag

SEQ ID NO: 631888 - DNA, 95 bp, Homo sapiens
gatccctctacttcattcgcgcttctctcagtatgtgcccggcacagatttgagtcgctcttgcagtgtttactcaacttcctcaggatacaagt

SEQ ID NO: 631889 - DNA, 75 bp, Homo sapiens
atgctgctgaaagagtaccggatctgcatgccgctcaccgtagacgagcaacttcactgtgtggtggttggaagt

SEQ ID NO: 631890 - DNA, 75 bp, Homo sapiens
gaggctgagtacgacagcctcaaacaggagctggagcagctcaaagagaggagattttgaagacacacatcgcac

SEQ ID NO: 631891 - DNA, 83 bp, Homo sapiens
gccgctcctaagcctgcacagccgcggcggcagcagcagtgagagtgttgcaatctggttcctaaggaggaagaggaaggcag

SEQ ID NO: 631892 - DNA, 100 bp, Homo sapiens
tttgaaagaagccatattttcaggtgtgatgaatgcagactctgctaccattttggctgtttggatcctcctttgaaaaagtctcctaaacagacaggct

SEQ ID NO: 631893 - DNA, 100 bp, Homo sapiens
ggcgacagattgaccggggtgtcacccacctcaacgagctccggcagcagctggggcaccgcctgcagctgaacgacctcctcatcaaacctgtgcagcg

SEQ ID NO: 631894 - DNA, 97 bp, Homo sapiens
gtccagatctccatctccaaaaagaagattccttctggaaccccaacgccttcgagacggattccgacctgccggctggatggatgagggtccagga

SEQ ID NO: 631895 - DNA, 100 bp, Homo sapiens
aagcctatatcacatgtttatgttctatgctccctaatgaagatgctattaaggagggcccttctagcccaatccagagctgtaccatggcagagacaag

SEQ ID NO: 631896 - DNA, 75 bp, Homo sapiens
gaaaacctggccctcttcaatttctgacaaaaggggctaagtgatggatcttgtactccgtgttgcagattacta

SEQ ID NO: 631897 - DNA, 100 bp, Homo sapiens
tattccttgggctgcctttcctgcagctacaaagcgttttcttttacctgttggcttacatatgctggaaagaagctgtgccaagtgagaaactacagaa

SEQ ID NO: 631898 - DNA, 100 bp, Homo sapiens
cgcgccgggccctgtcgcgaacctccggcgcgctgccccgccggaccgtggctgagtcatcactagagagtgggaagggcagcagcagcagagaatccaa

SEQ ID NO: 631899 - DNA, 100 bp, Homo sapiens
agagtgctgaagacggggtagccacgaggtctgccatcatggatgttctcgcagaagcaaatggcacctttgccttaaaccttttgaaaacgctgggtaa

SEQ ID NO: 631900 - DNA, 50 bp, Homo sapiens
aaacatgaccgctgagcccatgagcatttttgaaacgttggggttgttgg

SEQ ID NO: 631901 - DNA, 75 bp, Homo sapiens
gcttcccctttccagagagccagaaagaagagcggcctattgccaattcatggacatgctcttccctggctgcat

SEQ ID NO: 631902 - DNA, 100 bp, Homo sapiens
ggccaggtcatcaccattggcaatgagcggttccggtgtccggaggcgctgttccagccttccttcctgggttatctgagttcattggagtgggtgcttg

SEQ ID NO: 631903 - DNA, 75 bp, Homo sapiens
ggccgtcttcatgtttgctttcgcttccctctacacgcaaatcccaggcctcagcaatctggcccctcgaaccct

SEQ ID NO: 631904 - DNA, 75 bp, Homo sapiens
gtgaaggagggttggctgcacaaacgagctgctgcggactctggagcgtgagaaccagcgcctggaggctgtcct

SEQ ID NO: 631905 - DNA, 83 bp, Homo sapiens
gagtccttggaagtgcagagaggtgagacactcgccgcaccccgacaggaccctcctggaggctgagaactcccggctgcaaa

SEQ ID NO: 631906 - DNA, 98 bp, Homo sapiens
gtcaccatcaaaatggaatgtaaccctagccaggtgaatggctcaagtctgcgggccaggcatcgacatccgcaacgactatcagcagctgaagcgcc

SEQ ID NO: 631907 - DNA, 100 bp, Homo sapiens
cacgaatattgcctggatttctggaggtacaacttggccaagtagaaatcaaatgccccatcacagagtgttttgaattcttggaagaaacaactgttgt

SEQ ID NO: 631908 - DNA, 75 bp, Homo sapiens
aagggcgatgggatgcgggggctcgcggtgttcatctccgacatccggaactatcatggaagggaagtggttgct

SEQ ID NO: 631909 - DNA, 100 bp, Homo sapiens
ctgtgactatcagctctttcaagtccttcctggggaccggggccttgctgtctctaaccctgatctgatctcctgccttgagcaaataaaagagccctgg

SEQ ID NO: 631910 - DNA, 51 bp, Homo sapiens
tgagtcgcttcaagtttatcggttccagcaacagatagaaatgctttaagt

SEQ ID NO: 631911 - DNA, 120 bp, Homo sapiens
caggagtccagggctggagagaaaacctctgcgaggaaagggaaggagcaagccgtgaaactcgtttccagatcgaccctaagacgacagggaaaggagagcagcaaagaaggaaatggg

SEQ ID NO: 631912 - DNA, 88 bp, Homo sapiens
cgcagaggacgccggaacaccctggaagccgagaaatgagtgatcagcagctggactgtgccttggacctaatgaggcgcctgcctcc

SEQ ID NO: 631913 - DNA, 90 bp, Homo sapiens
tttatgatttgtatttgactgagagaaacccactgaagacgtctgcgtgagaatagagaccaccgagatgaatgatttcggaatcaagaa

SEQ ID NO: 631914 - DNA, 75 bp, Homo sapiens
cccgctctttgccgtgacaacaccgttcccccagccgggctgggcgtctctggccgagcctctttttgtggaaaa

SEQ ID NO: 631915 - DNA, 75 bp, Homo sapiens
agcgctctccatgcgcccggcgcgaggtactggcggaggacattgggcatgcaagtccgctatgttcaccatgaa

SEQ ID NO: 631916 - DNA, 74 bp, Homo sapiens
gaggacctccatgtccgaagccgcaaccaggtggtcctgtcaaggctatggaagaaatgaatggcaaagacttg

SEQ ID NO: 631917 - DNA, 83 bp, Homo sapiens
gctgcgcgggcgagcatccccacgcaacaatgcagatcttcgtgaagactctgactggtaagaccatcaccctcgaggttgag

SEQ ID NO: 631918 - DNA, 98 bp, Homo sapiens
attacgtgtggcatatggactcctgacgaccaacaggctgaccggttccctgatgtgttacctgcttctgctactgatccaaactgcagaacttctca

SEQ ID NO: 631919 - DNA, 90 bp, Homo sapiens
cggcgggcctgaggcgaaggagcggccgggagcccgccgcgctggtagcggcagaggtggaggagacactgaagcgactgcagagccaga

SEQ ID NO: 631920 - DNA, 51 bp, Homo sapiens
cacccagggaacaggtggtgatgagatttgttcccgacaaggagttttctg

SEQ ID NO: 631921 - DNA, 75 bp, Homo sapiens
cggagtcggggacccaggagtttcctgtgtccagcgctgccggagccgcctgagatggagccttgctctgttgcc

SEQ ID NO: 631922 - DNA, 75 bp, Homo sapiens
gggcctcccggtccgcaagcagacacaaatgccagaccctaagaccttcaagcagcactttgagagcaagcatcc

SEQ ID NO: 631923 - DNA, 74 bp, Homo sapiens
gcggcgcggcgctcgctcctacgatgccctgtacagacttttggggaactgggtactgatgaacccgaacagga

SEQ ID NO: 631924 - DNA, 83 bp, Homo sapiens
ccacaatcttcaatgagtaaacatattcctgcggtgcgtctttctacgtgaataggattttgtggctggccagatacactgca

SEQ ID NO: 631925 - DNA, 100 bp, Homo sapiens
gagcgcgcgggcacagggtgccgctgaccgctgagatctgtatctgtggacctgaatgttgatccctcgcttcagattgacatacctgatgcgctcagtg

SEQ ID NO: 631926 - DNA, 87 bp, Homo sapiens
acattccaaaggaaaaatttcaggatgaagtaggtgttccaggtagcaattcagctgacctattgcgctggaccactgctaccacca

SEQ ID NO: 631927 - DNA, 75 bp, Homo sapiens
gaatggagacattaaagggggaaacgaagaagctagactcagatcaggaattgaatgatctggcacgggaccctc

SEQ ID NO: 631928 - DNA, 88 bp, Homo sapiens
gttcacggtgaccttcgcttggtgtcctcctggcctcagcaacctgacaattctgtcgtgtcccggggataaaaacattcagatggca

SEQ ID NO: 631929 - DNA, 80 bp, Homo sapiens
catggatatctctactcgctccaaaggagccgggtgtgggctgagccctgcctgattgatgctgccaaggaggagtacaa

SEQ ID NO: 631930 - DNA, 107 bp, Homo sapiens
cccggcagcactctagttccaacatggttatcatgctcattgggaataagagttttcggctttgtgagaaaccttaccatcaaacacgatggccagcaacgttacca

SEQ ID NO: 631931 - DNA, 80 bp, Homo sapiens
ccagcctgcggagcctgtggggcagactcgtttgtgaacagccaggagtggacgctgagccgctccgtaccggagcttaa

SEQ ID NO: 631932 - DNA, 82 bp, Homo sapiens
ccgcagccttgggcctcgcgccggctatggccgtgccctggggctgagccctcaggcctccaggatcatgtggtatgtcagc

SEQ ID NO: 631933 - DNA, 100 bp, Homo sapiens
aaatcatcgcctttctggtgggaggcttgattgatgctgaaattttcttctaaggagaaatatcccttatttacttttgtaaatggtcattccagagact

SEQ ID NO: 631934 - DNA, 50 bp, Homo sapiens
acaaaggagagctccgtggagagaaggtgcaggatttcagacgagtagcc

SEQ ID NO: 631935 - DNA, 98 bp, Homo sapiens
atcgaagccccttcccaggtcctcaactttgaagagatcgactacaaggagatcgaggtggaagagataaacaggggtcacatgacgacagaagccaa

SEQ ID NO: 631936 - DNA, 79 bp, Homo sapiens
ggggccagggaaccctggtcaccgtctcctcaggtccggcctctttggcctacccccgttggctccgctgccccaggtc

SEQ ID NO: 631937 - DNA, 100 bp, Homo sapiens
gaagaaacataaattaaaagaagaattgcggcaagattacagacgttatcttactcaggtgcaaattcgaccatggaacctaagtgacagtgactttgta

SEQ ID NO: 631938 - DNA, 100 bp, Homo sapiens
ggaccaatgggtccccagctcttcatgccagatcagaaaagggagctcaggtaccttccagagagtgagacccagcgcccttgtctcgcacccagtaggc

SEQ ID NO: 631939 - DNA, 76 bp, Homo sapiens
ctaaagttcgtgaatctcaacttatcatatactcctatgaaaggaggaatctccaatgtatggtttgacagattta

SEQ ID NO: 631940 - DNA, 75 bp, Homo sapiens
actatggaagaagccagcagaggaactccttatttggcagctgatcggaagctctttcgtcttgtctccaatgac

SEQ ID NO: 631941 - DNA, 100 bp, Homo sapiens
attcgggtcaccgtcaagacccccaaggacaaggaggaaattgtgatctgcgatcgagcctcggtcaaggagggaaatgcaataccttatttccagatga

SEQ ID NO: 631942 - DNA, 76 bp, Homo sapiens
tcggttagccagccacgaagttctcgcgagagtcgtctcctcgataccaagtgctggagaatctggtaaaagcacc

SEQ ID NO: 631943 - DNA, 74 bp, Homo sapiens
tgctgctgctgccctggttccccggccccacccgatgcggcctccaagggcagctggtggaatttttgaagaaa

SEQ ID NO: 631944 - DNA, 101 bp, Homo sapiens
ggaccttcaagactgtctttgctgagcacatcagtgatgaatgcaagaggcgtttctataagaattgaggctgacccgcggctgattgagtccctctccca

SEQ ID NO: 631945 - DNA, 82 bp, Homo sapiens
ccacggccgggggcgtctttcagagcattacggtgtcgtgaaaactacccctaaaagccaaaatgggaaaggaaaagactca

SEQ ID NO: 631946 - DNA, 97 bp, Homo sapiens
ccaatcagcatgctgtgtctagctcaagttgttgacctcctgtactggagagacattaagaagactggagtggtgtttggtgccagcctattcctgc

SEQ ID NO: 631947 - DNA, 74 bp, Homo sapiens
cctctgcccggccacgaccccgtctgggaggtatttaacagactcccgacaaaaagcagaatgatcagcgaaat

SEQ ID NO: 631948 - DNA, 116 bp, Homo sapiens
ccgccgtggcatccgaggagctgtggtccagcctgcgcggcgggaagcggcggcggcggctccagcgtcctaagaggcaggagtagggctgattggagccattgtacagtgtcggg

SEQ ID NO: 631949 - DNA, 50 bp, Homo sapiens
caacttcctcttcagtcatcagtgtgacttaagagattaaaattaatttg

SEQ ID NO: 631950 - DNA, 100 bp, Homo sapiens
accacgtggagcagcatcacctccaccgctttcaccacagcccagggagaaggtgagcagtattgatttggagatcgactctctgtcctcactgctggat

SEQ ID NO: 631951 - DNA, 90 bp, Homo sapiens
tagagatgttatcacccatgtggtatgcaccaattttacagctcccagcacagtaggaaagagaaatttgagtcctagtcaagaggaagc

SEQ ID NO: 631952 - DNA, 82 bp, Homo sapiens
cccagtcacaattatcaccgggtatttagaacatacatatgatagttgagaaagacacatattctgatcatgaagaaataaa

SEQ ID NO: 631953 - DNA, 97 bp, Homo sapiens
aacaattgaagaggaggaagcaaatgaaggcgttgtggaccaccaaacagaactttctaatttagccaaggaagatcctgataacttaagtgactct

SEQ ID NO: 631954 - DNA, 83 bp, Homo sapiens
attgaagccgcctctgtattacttaccaggtattatcgggggacccacggggtcattgtggtttacgacgtcaccagtgccga

SEQ ID NO: 631955 - DNA, 100 bp, Homo sapiens
tcactcaccagtattttgtagattttactactttagacggcagctgctcttttgccgggtaaccttgggaaagtctttcctgcagttcagtgcaatgaaa

SEQ ID NO: 631956 - DNA, 83 bp, Homo sapiens
tgatccagctcaccaccaagacgcagcctgcctgctccgcttcagcggactctcgctggtctacctgctcttcctgctgctgc

SEQ ID NO: 631957 - DNA, 98 bp, Homo sapiens
acacctggaccagaccccaggaaagttggttgaatctggcgatgtggaacccatggatatggagggctgactatatacaccatgttttttcctggcac

SEQ ID NO: 631958 - DNA, 50 bp, Homo sapiens
ggacttctcagcctccagaatgaacacgagaccaatggtgtggcaaagag

SEQ ID NO: 631959 - DNA, 82 bp, Homo sapiens
tcttgataaaaagagatgtggggggattctcgacctgctaacagaactggaccttttcggttgtggcagcactgcctgaagg

SEQ ID NO: 631960 - DNA, 97 bp, Homo sapiens
agtcaactccttcaagcatataagtggtcaaacaagagtgatcagcagctggactgtgccttggacctaatgaggcgcctgcctccccagcaaatcg

SEQ ID NO: 631961 - DNA, 90 bp, Homo sapiens
gtccctgctggagcactctctgccttggccagagaagagaacagggtgtcaaattgagaaccaggtagatccccaccacctacagtaaaa

SEQ ID NO: 631962 - DNA, 101 bp, Homo sapiens
gaattatggcatagatcttgggaaaattgcgttcaattttgtggggaagattcttggaccacaagggaatacaatcaaaagactgcaggaagagactggtg

SEQ ID NO: 631963 - DNA, 82 bp, Homo sapiens
ctaaaggagcaacagtttacagcccttccagatacagctaccagcagatataatttctacagtagaatttaatcattctgga

SEQ ID NO: 631964 - DNA, 82 bp, Homo sapiens
gcatttctgaagatctcaagatctggactactgttgaaaaaatttccagtgaggtctataagggagaattccaactacctga

SEQ ID NO: 631965 - DNA, 90 bp, Homo sapiens
gttttccttcagcaaggacaaaggaagatgttaccgagtacttcagtgaattccttagtgcaggggaacggagtcttgaattccagggat

SEQ ID NO: 631966 - DNA, 75 bp, Homo sapiens
tcaaaccgtacaagaaaaagtcgtgtttctgtgtctccagggagaacttcagcattagtgccagcagtagttccc

SEQ ID NO: 631967 - DNA, 100 bp, Homo sapiens
cttccctcaagtttttccttaataagccgatgcttgccgatgttgtcttcgaaattcaagacagacagagctgtgcagttgctgttggaaacaagtgcag

SEQ ID NO: 631968 - DNA, 75 bp, Homo sapiens
cgggagccgtggccctgatccagacctgggcaggaactaagcgtcttgtagaaggaactattaatccaggagaaa

SEQ ID NO: 631969 - DNA, 82 bp, Homo sapiens
agcagaaggcccggaagaaagaggagcggcagagcctgctggtattaaaggtggaagaaggtccatatctttttctgtgggt

SEQ ID NO: 631970 - DNA, 78 bp, Homo sapiens
atttttaaagcttcaaaatcctaagactcagcactgttgcgggatccatccttttacaatccctgctattattcgtcc

SEQ ID NO: 631971 - DNA, 75 bp, Homo sapiens
tggggacagcagcctcaccaacacagcaccaacagcttccaagatagtaacagaattaaacaaccaccatgtcga

SEQ ID NO: 631972 - DNA, 125 bp, Homo sapiens
gatggctgatgaagtaatttgcagtgaaattttaagcgactgtgactctgctgcaagttccccagatcttgaggctgagactcgggctgagtttgcggagaggtcagtaactaaattggagaaaa

SEQ ID NO: 631973 - DNA, 89 bp, Homo sapiens
gagaaggcggcgcgggaggtgaagttgctgctgttggacgttggcacggtgctgaaggtgatctcggtccccaagggcagtaggcccag

SEQ ID NO: 631974 - DNA, 83 bp, Homo sapiens
tgttctttttaagaatttgagaaggaaaacgtagttcccagctacttttatataatgtaatagcctgcagctggtgttttgag

SEQ ID NO: 631975 - DNA, 60 bp, Homo sapiens
tccaaagctcattgacttttctgctcagaagagaagctgaatttggacgacagccagtgg

SEQ ID NO: 631976 - DNA, 90 bp, Homo sapiens
aacacatcatgaaggctagtttggatgtggaggggaatagactccatctatccatatgagatagcagaccccacgttagctgaaatggga

SEQ ID NO: 631977 - DNA, 74 bp, Homo sapiens
tgggagatggaagcgaaaactgaccgggacctgtgcaagccggattgaaagaaggtggcaagaggaagaagcag

SEQ ID NO: 631978 - DNA, 75 bp, Homo sapiens
ggatggtgaagaaggagggaacaagaggcccatgccctgatttggaatccagatatgacactaaaaagttatttc

SEQ ID NO: 631979 - DNA, 80 bp, Homo sapiens
ggccacagggatgtcttttactataggattttttatcaagcagaaatgcatcgaacaacgagaatcaagatcactgagct

SEQ ID NO: 631980 - DNA, 100 bp, Homo sapiens
ccagatcaacctggagctctacgcctcctacgtttacctgtccatgaatggaggctccagagtgaaattaatgacactttgtcgatgaagatcttgattg

SEQ ID NO: 631981 - DNA, 90 bp, Homo sapiens
ctcagctggacacggccatcgggcagtggctccgctgggataaggctattcagcttgaccctgaagaaactcgtcatgctaaaagaaatg

SEQ ID NO: 631982 - DNA, 101 bp, Homo sapiens
cgagaagcaggtcatgatgttcagtgctaccttgagcaaagagatccgtccagtctgccgcaagttcatgcaagatcggaagatggagaaccgtgattacc

SEQ ID NO: 631983 - DNA, 90 bp, Homo sapiens
cggaggctgacgaggaggcggatcccccggcgtcagcttttcctccgcaaccatgtctgacaaacccgatatggctgagatcgagaaatt

SEQ ID NO: 631984 - DNA, 100 bp, Homo sapiens
gtgaccgagagcgcgaatatcgtcatcgttagaagacttatcagatgtagacttcctagatgattcttcaacggagagtttgcttctgagtggggatgaa

SEQ ID NO: 631985 - DNA, 50 bp, Homo sapiens
gaaacaattggacccttgagtgaaggaggccctcgggaccaaggatcacg

SEQ ID NO: 631986 - DNA, 98 bp, Homo sapiens
cacgtcctgaacatgagcctcctcctctccttctacctgctggggttgcttgtcagtagcgggcaaggcacccagtcagtcagagtcagagccagaga

SEQ ID NO: 631987 - DNA, 100 bp, Homo sapiens
cagtacctgccttgtgaagatcattaatgaagtaaagcccacagagatctacaaccttggagcccagagccacgtcaaatgtgacttcaccgaagaccag

SEQ ID NO: 631988 - DNA, 82 bp, Homo sapiens
tcctgaccagcggcggcgacgcgcaaggtggttttacgcacgacgagctgctgaaggtgtggaaaggactgttttattgcat

SEQ ID NO: 631989 - DNA, 100 bp, Homo sapiens
attactttaaaaatcgccaaaaattacttggagcaaagggcagtcggcggagcttcgccaaggctggcgcagtcgttgaagcttcttgtcatgacgggga

SEQ ID NO: 631990 - DNA, 75 bp, Homo sapiens
gtgtctccggcatcatgtgtgaaattccagtgtagaagttggcataagtagccaggaaaagatgcaatctgtgca

SEQ ID NO: 631991 - DNA, 101 bp, Homo sapiens
aagaacttcacaatcaagaaatgcagaaacgtaaagaaatgcaattgaggaagcatcggagagcaagagacaggtccagatcctcctcctcttcctcccag

SEQ ID NO: 631992 - DNA, 88 bp, Homo sapiens
tgaaccaggaaaaactcgccaaactgcaggcacaagtgcgcattggtgggaaagaattgaatgatctggcacgggaccctccagcaca

SEQ ID NO: 631993 - DNA, 101 bp, Homo sapiens
caggtcgtgccggagatggaaacaggaaagcctgttgttttgtcgtcccaggccgaatacatcaagcaatggtaacatctttaaatgaagataatgaaagt

SEQ ID NO: 631994 - DNA, 97 bp, Homo sapiens
ccattaaaaagaaagaccttcatcacagcaatggagaagagaaagcacaaagcatggagaccctccctccaggtgaagatggagctggaaaaacaag

SEQ ID NO: 631995 - DNA, 74 bp, Homo sapiens
aaagagtagcctgggctgtctggaaatctgaggttgtttttcaccattcagaacattgcctgaagcaggtccac

SEQ ID NO: 631996 - DNA, 75 bp, Homo sapiens
aatcattcctggaggacattcggaaggcagcctggcatcctcgctacaacctcattgttgtgggccgatacccag

SEQ ID NO: 631997 - DNA, 100 bp, Homo sapiens
ccaaatgaccttgtggaagttaggttgctggtaaaattcctcctagtgtccaagtggaggcagcttgtcttctgtcccagcattttggtgctcctcccgc

SEQ ID NO: 631998 - DNA, 83 bp, Homo sapiens
actgtcactggagtggccttcaacccatcagcgccccaggttttaaaatcaaagatgggaaaatcggagaaaattgcccttcc

SEQ ID NO: 631999 - DNA, 75 bp, Homo sapiens
ctgactttccagttgactgaacctggaaaagagccgtattgcctaagtgtaatcttgaacatgggcggtgctgtg

SEQ ID NO: 632000 - DNA, 75 bp, Homo sapiens
acatgatagagcagagtggaccaccccatgaacctcggcacgtgtggttctcaaatataggcattctgatgggaa

SEQ ID NO: 632001 - DNA, 101 bp, Homo sapiens
acacaaaccatcagccaaggggccattgaaaagggtgaatcgaaacgcatcaccctggtcctccagcagccacagtctggaggtccccaaggacatcggca

SEQ ID NO: 632002 - DNA, 75 bp, Homo sapiens
aatcacattggaccctcctcccaactgtagagatggtttcgagcaagattacaagaaaagagatttattcagaaa

SEQ ID NO: 632003 - DNA, 100 bp, Homo sapiens
cttggaattctgcccactctgcggagttagcagtcacgacctccagcacagtgcttggcatcaagaaaatacagcaaaaatgtaataatggaggagctca

SEQ ID NO: 632004 - DNA, 75 bp, Homo sapiens
ccacaccctgctggcccctgagatccggcactccacccagagcctctttgagtacatgaagggcattcagagcga

SEQ ID NO: 632005 - DNA, 100 bp, Homo sapiens
gagatcttcgaaaccctcatcaagggcctgcagcggctggagtacagaggctacgactcggcagccacataaagaagatccctaatagtcatttctcaac

SEQ ID NO: 632006 - DNA, 74 bp, Homo sapiens
cgtggaggcagaggtggcatggggtgtggcttggcgttggccctcaacaagctctcccagtatttggacagctc

SEQ ID NO: 632007 - DNA, 75 bp, Homo sapiens
gacatttcttcggcattctgcaacagcttttctgggagaagaggctacaaggacttagtgcatcagatgtaacag

SEQ ID NO: 632008 - DNA, 50 bp, Homo sapiens
aacatcatgaattcccaagaaggagtttgctgctttgtggtgcacaagcg

SEQ ID NO: 632009 - DNA, 51 bp, Homo sapiens
ctcggaacccgtggtcctccgcttcatgcgacgttgtggacgtttaccagc

SEQ ID NO: 632010 - DNA, 100 bp, Homo sapiens
cgggcggctccgtgagaaaggcggtggacagtttgcggttgtgaagaaatgccgtgagaaaagcaccggcctccagtatgccgccaaattcatcaagaaa

SEQ ID NO: 632011 - DNA, 90 bp, Homo sapiens
gggcggcggaaaatagcctttgccatcactgccattaagctatcatggtgaacttacttcagattgtgcgggaccactgggttcatgttc

SEQ ID NO: 632012 - DNA, 90 bp, Homo sapiens
gacggattcatttagagctgcggaacaggacgccctctgatttgtttgagagccatacgggtacttcagaagaacggacatgtgccaagt

SEQ ID NO: 632013 - DNA, 75 bp, Homo sapiens
gcactgtctctccgacgcaagactgtcccggcccggcagtgggagacatttagtgaacgctcttcaagctcacaa

SEQ ID NO: 632014 - DNA, 76 bp, Homo sapiens
tggacaagatcatgggcaaaggacagatccaggctttacaggaagtatggtgctggcatctgcttggcttctagag

SEQ ID NO: 632015 - DNA, 100 bp, Homo sapiens
gaactggaaaacatcatccaggaggacagtcattttgtttactcattcagccctgttgcaggtcccaataaactcttcataaggttgacagaagcaccct

SEQ ID NO: 632016 - DNA, 100 bp, Homo sapiens
acaagacagtgactccaggatttctgaagactattgtggaagaagcatccattaagtgtaaacaggaacatcgataagtagtgtaaaaacttgcacaatg

SEQ ID NO: 632017 - DNA, 82 bp, Homo sapiens
ctgagaaggacttctttggacgtgtggtcgtcaggagcacagcagtcccgagtgcagttactgtggaatacacgatcctgcc

SEQ ID NO: 632018 - DNA, 75 bp, Homo sapiens
ctgagcttgccagagacgggcggcgcaagcctggaatggacaatgtgctggactacggcctggaccgagtgacca

SEQ ID NO: 632019 - DNA, 98 bp, Homo sapiens
agcaaataaaaaagaagtagactatgaagcaggggatattccaacagaatgggaaggattgttaaaatgagtcttcggaagcaaacccctagtgactt

SEQ ID NO: 632020 - DNA, 100 bp, Homo sapiens
tcatctcttgccaacatactttgtagatactgcaatctactctgacatatcaggagacagatgggaccgtgttcagaattcacacaaaagctgaaggatt

SEQ ID NO: 632021 - DNA, 90 bp, Homo sapiens
ctacgacccggagcacccgacccctgacactttcatttggacccgtggatacccattgaacagatgcttgaaacctgcaagtaatcttca

SEQ ID NO: 632022 - DNA, 100 bp, Homo sapiens
agttcaccaccgtggtggccgacacgggcgacttccacgacaatgcagatcttcgtgaagactctgactggtaagaccatcaccctcgaggttgagccca

SEQ ID NO: 632023 - DNA, 75 bp, Homo sapiens
tgttaacgtctgctccagctcgcagcccgctgctgggtgtggacactgccagcggctgcagccgacttggaatga

SEQ ID NO: 632024 - DNA, 83 bp, Homo sapiens
gcctgcgacgctgccccacggccgttttcatggctgcttaaaatggtctatggtctgtctctacggttgatgatgaagcgccg

SEQ ID NO: 632025 - DNA, 74 bp, Homo sapiens
cagacttgaaagtcttgtgtaatgaagcaggaatgaattcttccaaaacaaaactagaactgcaaaagcacctg

SEQ ID NO: 632026 - DNA, 100 bp, Homo sapiens
tgggagcgctgtagcagctgagaaggggctgaggcaccgccgcttcgctgacagccggccaccagctatcccaagctccagtgtcctcccttcggctccc

SEQ ID NO: 632027 - DNA, 97 bp, Homo sapiens
ctaacatcacctgcttcatccttgtttaatgactttggtgccctcaacatctctcagagacgaaaggcatttattgaaatggcaaccacagaggatg

SEQ ID NO: 632028 - DNA, 83 bp, Homo sapiens
taccaagctgtttcctaccaggtcacacactgttgcagcacaggcttgctttgcatctctggtgagtcaggactatgtcaatg

SEQ ID NO: 632029 - DNA, 82 bp, Homo sapiens
cctggtcctgctcggggctctgttcccagatattctctaagccgctttcatcatgggagaaatagagcagaggccgacccca

SEQ ID NO: 632030 - DNA, 80 bp, Homo sapiens
agatcaaagcagcatatctccaggaaacaggaaaggaactgtggctgcaccatctgtcttcatcttcccgccatctgatg

SEQ ID NO: 632031 - DNA, 100 bp, Homo sapiens
tggtgaagctggaacagccagaattggacccgaaaccatgcctcactgtcctaggcaaggcatacttccgacagggtgttgccctccagtaccttggacg

SEQ ID NO: 632032 - DNA, 100 bp, Homo sapiens
ccaagacctcatcaacaattaagtgggatgaagctctcttgactatgagtaaaggagaaaaggctcgactggagattgaaccagaatgggcttacggaaa

SEQ ID NO: 632033 - DNA, 100 bp, Homo sapiens
aaagcaattaaacacaagaagttctcgaaatgggagtttgaagacctggaatgggggagcttcttgttggatctgaggattttgatatccgagtttttaa

SEQ ID NO: 632034 - DNA, 75 bp, Homo sapiens
atggaatcaagttcatggagaccagcgcgaaggccaacatcaatgtggaaaatgaacaagtacttgttactcaac

SEQ ID NO: 632035 - DNA, 83 bp, Homo sapiens
ctgctggctaagatcaccaacacagacgtgatgtgggaagaatatcctgatgtttatggggtcaggcggtcaaaccgaagcag

SEQ ID NO: 632036 - DNA, 82 bp, Homo sapiens
tgaactcccagattatttgatgtttattcttcagtccaaggaagcaattcacagtcagctgttagagaagcagaaaatagca

SEQ ID NO: 632037 - DNA, 50 bp, Homo sapiens
acgacaatgatcctgagaatagccctggtacctgacagtgtaaagaagga

SEQ ID NO: 632038 - DNA, 90 bp, Homo sapiens
gccgggccgcgggccctgtgtcttgcaggagtaccagcagttcagcgaggaagaaaggacccggtttcaggagctgctggccagtccggc

SEQ ID NO: 632039 - DNA, 75 bp, Homo sapiens
caacagcaagcacatgcagaagaatcccccagggcccagaggctaggcagctggaagagaaagaccgagtgctaa

SEQ ID NO: 632040 - DNA, 87 bp, Homo sapiens
cccgtgttgccatcctcaaggctaacctgcgcaagtccccagttgccaagtcctcctgtcaggcgccagagaggaagaagggatcgt

SEQ ID NO: 632041 - DNA, 82 bp, Homo sapiens
ctcggagcccggagcgtgcctcggcggcctgtcgggaagaggcagaaatccaggcagaacttgaacgtttggaaagagtcag

SEQ ID NO: 632042 - DNA, 106 bp, Homo sapiens
taccgacttacggtgtccattattatgcagtaaaggctggattctagtgacatttataacgaattgaaagaaacatatcctaattatcttcctctgtacgttgcac

SEQ ID NO: 632043 - DNA, 100 bp, Homo sapiens
gtagaatacttgggtgacatctgcctgagagatctccaagaattacagccatacacactgctgctatggatatgctgggaggacctggtatcgaaagcca

SEQ ID NO: 632044 - DNA, 100 bp, Homo sapiens
ccaaatgtctcatcaaaaatgtgcaaatatgaagtaaatggggcaaaatcttaataagaagtgaatgtagatgagtaatctggagtgaagtatttttaag

SEQ ID NO: 632045 - DNA, 80 bp, Homo sapiens
acgtggaggagctcaaggggatgtcgctgctggttcgggcagagtccgacgcttccaatcagaagactatacaacctcct

SEQ ID NO: 632046 - DNA, 90 bp, Homo sapiens
agcggacgcagtgatttgctccccctcgtgcagcaacccccacacccagcaccagaggagcaggagcggcttcgcttggagcaggagcga

SEQ ID NO: 632047 - DNA, 75 bp, Homo sapiens
gcgtccgagtctccgccgctgcgggcccgctccgacgcggaagcaaacggggattcagcgtccgatcctttggaa

SEQ ID NO: 632048 - DNA, 75 bp, Homo sapiens
ggcctcttcagcaactacagcaccgtgaacctatgggtcgtggaacaaaagttatcctacacctgaaagaagacc

SEQ ID NO: 632049 - DNA, 99 bp, Homo sapiens
ggagccctcgccgctgccgttctcagccggctctggagtgcgggcgggggcgacagggccgattccggagtggtccccaaagctccagagatagatcca

SEQ ID NO: 632050 - DNA, 104 bp, Homo sapiens
aagtcaccaacgagatcttccgccactacgagggctggcgtcttcttcctgtcctcggccgagggggagcagatcagcttcctgttcgactgcatcgtccgagg

SEQ ID NO: 632051 - DNA, 100 bp, Homo sapiens
taagtcgattcacaggagcaacaatatttgaggtggtgaagcagtattttccaatttgaagattcatttgaaggtggctcctgccacctgctaatagcag

SEQ ID NO: 632052 - DNA, 75 bp, Homo sapiens
gttctgtgcctgaactcaaagatgcccttaaaaggcatcaagcatgatggaaccatgtgtgatacctgccgccag

SEQ ID NO: 632053 - DNA, 90 bp, Homo sapiens
tccagttactctaacaagtctggagaatgcctaccgcaggaatgggatggcttttctagcctgctgatgtgacaactgtgatgtgcctgc

SEQ ID NO: 632054 - DNA, 75 bp, Homo sapiens
ccagcatgctctcaaattacctaaagagcctaaagactgcttttcaggaagccttggacgctgcaggtgataaac

SEQ ID NO: 632055 - DNA, 101 bp, Homo sapiens
gtttgaacctggctgttcctccaccaagatttcatttgccatctatcaatcgctgccttattttgaatcatttggcacttattccaccaagctgccctttg

SEQ ID NO: 632056 - DNA, 129 bp, Homo sapiens
tcaatcatagcattttctggacaaacctcagccctaacggtggtggagaacccaaaggcatgcccaagagaatcgtaaatgcaaaaattgcttgccttgacttcagcctgcaaaaaacaaaaatgaagc

SEQ ID NO: 632057 - DNA, 75 bp, Homo sapiens
ggggtcatcaaggctgtgctggatggagtgaagttaaaggcattaggatttcctgaaggacttgtgatacaagcg

SEQ ID NO: 632058 - DNA, 75 bp, Homo sapiens
cgaaaagtggatggaggaggcgatgcacatgcctgattacatcaaccccagagccgtgcagctgggctcccttct

SEQ ID NO: 632059 - DNA, 134 bp, Homo sapiens
cagactcatggaggccagattttctccaattaaccagatcttgccctggtgcagacaagacttatgagaatgaggctctgtggcgggaggtggccagccttcggcagaagcatgcccagcaacagaaagtcgtc

SEQ ID NO: 632060 - DNA, 90 bp, Homo sapiens
ggggaggttacgcagcaaaccatccagaaggagctgtccaagatcacgatgccaatcgccttcaacgagcctctgagcttcttgcagcgg

SEQ ID NO: 632061 - DNA, 88 bp, Homo sapiens
tatggctcaaagaaagatgattatcctgcggcgagagggctacaccgtgcaggtgaacgtgaacgactatctggatatttactgcccg

SEQ ID NO: 632062 - DNA, 75 bp, Homo sapiens
cttgctccctacgatgagaactggttctacacgcgagctgactcagatgccactgcatcatcagataacagcgag

SEQ ID NO: 632063 - DNA, 75 bp, Homo sapiens
cccgactcaacgtgagacgcaccgcccggactcaccatgacaggtgatttggcttctgcacagttaggaggagca

SEQ ID NO: 632064 - DNA, 90 bp, Homo sapiens
catgtccaaaagttaaatctactacagggacaagtttcagagctgccactcagactcctgggagagttggctctcaaggttctgatttag

SEQ ID NO: 632065 - DNA, 83 bp, Homo sapiens
ggagaggtcagcaacagggacatcgtggagacggtgctcaacctggtcctaggcctacttacaagcctccagtctcaaattat

SEQ ID NO: 632066 - DNA, 100 bp, Homo sapiens
ccgatggcatcaaggtctttcccaacgaggaggacctcaccgacctccaggtcaccatcgagggccctgttccagggtcacccccgagaggacaacaggc

SEQ ID NO: 632067 - DNA, 90 bp, Homo sapiens
ggactccaaagtgaaagtggcggtgcggatacgacccatgaaccggcgagaaatgcactcggtgatggaaagagagccactattctgaag

SEQ ID NO: 632068 - DNA, 95 bp, Homo sapiens
cttctctacagaagagcttctcctcatcaactggggatgattacagttcttcctaaaaaaggttgagataagtcgaagagtgactctggaaaaac

SEQ ID NO: 632069 - DNA, 100 bp, Homo sapiens
gccagtttggctgaaaataaaaggggctaaactgcacggtcaagaatagtaagtcatctttttctgttcttcttcttgttgccttcttaatcaagtgaga

SEQ ID NO: 632070 - DNA, 100 bp, Homo sapiens
gagccaccgtgcctggctgaagattaccagagactgatgactgtggcggagacgattacagctctcatgtttcctttccagtggcagcatgtctatgtcc

SEQ ID NO: 632071 - DNA, 82 bp, Homo sapiens
aaagccctcccagcccccatcgagaaaaccatctccaaagccaaaggggccggtgagcccaacttcgatggcctggagagta

SEQ ID NO: 632072 - DNA, 101 bp, Homo sapiens
caaggaaaaactggagagcttcatcaaaaatagtgatagctttgataacagcacagcacccagagactcagctagatttgcagaagccagatgtgatcaag

SEQ ID NO: 632073 - DNA, 73 bp, Homo sapiens
cgaggacgaggcggcgccgccgggctgtggagctgagctgactgctgcccactttggaggaggcggtgggctc

SEQ ID NO: 632074 - DNA, 89 bp, Homo sapiens
tgatggctgatcttgaaggtttacacttgtcaacttcctcttcagtcatcagtgctaactatatgtcagaaagcatcagcttttctcga

SEQ ID NO: 632075 - DNA, 100 bp, Homo sapiens
ggcacgacgcgctcgacacgcgggtgcggggcgacctcggtggcccgcaggttgaagatgacagcgatgcagagacctatggagaagagaatgatgaaca

SEQ ID NO: 632076 - DNA, 90 bp, Homo sapiens
ctgcagccatgatctccttaacggacacgcagagtgattgtagagaaggctccaaaagccagggtgcctgatctggacaagaggaagtac

SEQ ID NO: 632077 - DNA, 90 bp, Homo sapiens
gccagccacggacccatcaaagcctatgctgtcattctcaccaccggggaagagtcgtttttcccttggatattgtgattttgatttaag

SEQ ID NO: 632078 - DNA, 100 bp, Homo sapiens
aagaactaagaatattattagcacaagagcaccatactttgagggacgagattgaggagctgcgggccgagatgctggagatgcgggacgtctatatgga

SEQ ID NO: 632079 - DNA, 100 bp, Homo sapiens
cagttgcatcatcaggccttcccagcatcccagcccagcccatcagtgcagacattgcctcccgcctgctgagttccacaggcgcatgggccacgtttcc

SEQ ID NO: 632080 - DNA, 134 bp, Homo sapiens
gcgggggctgcgccgcgcccgcacccgcgccgcgcgccgaggacctcagcctgggagtgctcattcttggaatcccagaacaggccttaagtcttctccacatggccatcgagcccatcttggctgacggggct

SEQ ID NO: 632081 - DNA, 100 bp, Homo sapiens
ggcccttcctatgggctctcggccgaagtcaagaacaaggagatgccaaaattggcaataacagtgtcagctctttaaagaatgatgacttcaccatgag

SEQ ID NO: 632082 - DNA, 82 bp, Homo sapiens
agggagtgggctgcagtgacagccggcggcggagcggccggtccacggaggagaatgacatcttcgagtggtccagggacca

SEQ ID NO: 632083 - DNA, 100 bp, Homo sapiens
gttgtccacgtccagcattatgagaacatggacacgagaacccccataaataatcttcgtgcgcccattggagcgccgcaagtatatgctcaagtcgttg

SEQ ID NO: 632084 - DNA, 95 bp, Homo sapiens
acgtgaacctggcatatctgggcgccaagccgcggagcctccagacggaacccagtgacttgattgtaaaaatttacagagcggaatcatatgct

SEQ ID NO: 632085 - DNA, 83 bp, Homo sapiens
atttagcctcagtacaacatgtgaaaaatctgttacttgatgaacttcagaaggaactgtggctgcaccatctgtcttcatct

SEQ ID NO: 632086 - DNA, 100 bp, Homo sapiens
ttccagaggatgatgatgatgatgactaacaggaaacaagcctccaggtctgcttccccgcaaaggactatacatggcaaatgacttaaagctcctgaga

SEQ ID NO: 632087 - DNA, 100 bp, Homo sapiens
ccataatgtcaggaattattcgaaactcagggcaaaatcaccacccctctccacaggaatacagacgaaggccttcatccaccacgagctgctggcctac

SEQ ID NO: 632088 - DNA, 96 bp, Homo sapiens
acggccaagcccgccgcgggccggcgtgcgctggtcactgaggcccaggtcgccgccgcggcgcgtagagacggggttttaccgtgttagccagga

SEQ ID NO: 632089 - DNA, 106 bp, Homo sapiens
ctccggcgcgtcacgggcctcagctgggattcccgcgcccctcggacggccacgagactcggccagagactgctgctactttgaaacgtacgatagaggccctgat

SEQ ID NO: 632090 - DNA, 82 bp, Homo sapiens
aaatggcaagacgaactcaaccagcacaacaggctttatcctgtggataaacgcagagtgaacgagtttggggagtcctacg

SEQ ID NO: 632091 - DNA, 100 bp, Homo sapiens
gtgaaacccaaacaacatctcctgctattccttgggctgcctttcctgcagcactgtgacttctgccgtgttcaccgtgggagacaacgtggtttcaggc

SEQ ID NO: 632092 - DNA, 90 bp, Homo sapiens
tatgaagggacacagtacggtagtcaaacccccagtggtgccaccgaacatcgcagaactgaagaatttggaggtgctcaacttttttaa

SEQ ID NO: 632093 - DNA, 100 bp, Homo sapiens
ccaggtctctggccttctgctgctggacgcggcgctctacggcctcgccacctggtacctggaagctgtgtgcccaggatcaagcaccccaacattgtag

SEQ ID NO: 632094 - DNA, 100 bp, Homo sapiens
gcggcctcctgcaccatgtcggtggccggcctcaagaagcagttccataaagccactcagcccctggcgaagcggtgctgcctccagcccagagatgccg

SEQ ID NO: 632095 - DNA, 75 bp, Homo sapiens
gcgcgggaggcaggttccgcacggagcttactccacgggaacagcctctagataatctgagttgttgaaaatacg

SEQ ID NO: 632096 - DNA, 75 bp, Homo sapiens
aactctgtgaagcagcggcctctccaggcctacaagccgggaatatgcactgaagaggcagcgaacctactaacc

SEQ ID NO: 632097 - DNA, 100 bp, Homo sapiens
tggatttgaaattccagacaagtttgttgtaggatatgcccttgactataatgaatacttcagggatttgaatagtgatcagcagctggactgtgccttg

SEQ ID NO: 632098 - DNA, 100 bp, Homo sapiens
aggaggaggccatcatcatgaaggacgtgcccgactggaagaaaaatggctacaaacttcctagcacatgagaagatctggttcgacaagttcaaatatg

SEQ ID NO: 632099 - DNA, 75 bp, Homo sapiens
cgacccaattgagaggattatgtggagctaagttttaccaatcaggtacttaagagattatggcatcagaaaccc

SEQ ID NO: 632100 - DNA, 100 bp, Homo sapiens
cccagctggaagacgtttctcagttcctgcagaggaatccctgtgctgatcgtggggcatcatatcctgtatgggaaaatcatccacctggagaaacctt

SEQ ID NO: 632101 - DNA, 83 bp, Homo sapiens
cctccggagccagcgtggtggccatagacaacaagatcgaacaggccatggcatagatcaagatcccgatcccgggagcgtcg

SEQ ID NO: 632102 - DNA, 75 bp, Homo sapiens
cttacaaagggcatcattaccctggacctggaaaccatttttattcaaggcctcttccagatgtagccctgactg

SEQ ID NO: 632103 - DNA, 100 bp, Homo sapiens
tttgcttggcctggaagacggatacttggctttggttaagaatcttcctcactgatatgatcatctatcagggcagtctgcggcggtgttctggtgcacc

SEQ ID NO: 632104 - DNA, 90 bp, Homo sapiens
cccttcctgctagtcctggtggatctgcagtacgaaggaagccagcagacctgcagaacttggctcccgggacccacccaccatttataa

SEQ ID NO: 632105 - DNA, 100 bp, Homo sapiens
ggaacccgaagaagaaaggattcgttacagccagagattgctcaatgtcaattgctgcaagcttagtgagtgaagatacaaagaccaagtttttgaacaa

SEQ ID NO: 632106 - DNA, 80 bp, Homo sapiens
gacatcagcgccatccccgagcagcggtggaagctggactctccttcagcaactccagaagcttcagactttggtgatgg

SEQ ID NO: 632107 - DNA, 92 bp, Homo sapiens
ggctctgatccccccctgccggggagggcccagcgcatccgacagggcgaccattgacgaggtggagacggacgtggtggagattgaggcca

SEQ ID NO: 632108 - DNA, 100 bp, Homo sapiens
cgagaccgcggccgggaccgaggattgaaactgcttctgccttggctagaggccagaattcatgagggctgtgaggagcctgctactcacaatgccttag

SEQ ID NO: 632109 - DNA, 100 bp, Homo sapiens
gtacctgcagaaggtctctggagacatcttcagcaggttttttgcatgtctgacacccatgactccacctggaccttatggctccacccagaagcaattc

SEQ ID NO: 632110 - DNA, 75 bp, Homo sapiens
tgatgatgatgatgactaacagggccttggtgtaccttgttgtagtgtttgaaaacatctgaggctgcatccatc

SEQ ID NO: 632111 - DNA, 80 bp, Homo sapiens
ggaaacacttagaggaagttctggagatgaagactgatcctttgaaatactccagccatgactaaaagagaagcagagga

SEQ ID NO: 632112 - DNA, 76 bp, Homo sapiens
caaaacgccaggcggatctcagaaggccagttcaaaggtgaaataaacagcgttgttgctcacacaaagcctgttt

SEQ ID NO: 632113 - DNA, 75 bp, Homo sapiens
agatcctgagacccggacagtggcagtgaaacagagcgtcacggggttcggacgtcagatgatcgagaaaaccaa

SEQ ID NO: 632114 - DNA, 80 bp, Homo sapiens
caatatctgtcttcggtggactccttcggcagtccacccaccgccgccgcctcccagaacctgagagccagaagcaacaa

SEQ ID NO: 632115 - DNA, 95 bp, Homo sapiens
cgcgaggaggcgcgggaggtgttcgagaacgaccccgagacggcagacctcaacaccaacatcgaggatgaaggcagctccttctatggggtctc

SEQ ID NO: 632116 - DNA, 108 bp, Homo sapiens
tgattgctttgcatgactgcaatggagatgtcaacagagctatcaatgttcttctggaaggaaacccagacacgggttaaagcacgaattgggagctctcagcgacat

SEQ ID NO: 632117 - DNA, 97 bp, Homo sapiens
tttgtgcgcacagtgctggtctgcctgacatctattgacctgaaaagtggttctggaaaagtgtaccaaggccctgcaaaaggtgctgctgatacaa

SEQ ID NO: 632118 - DNA, 75 bp, Homo sapiens
gataggtgatagttgggaatggagaccatcaaaggtgaagctttgttctaagaatatttgtttcatctagtttat

SEQ ID NO: 632119 - DNA, 83 bp, Homo sapiens
gttaaggattccaagtaactcttatttgaccaaagagagtctacagtatgcattagaaaccttgactatgaatggctgctcag

SEQ ID NO: 632120 - DNA, 75 bp, Homo sapiens
tgaagggacttgggatatttaattggataatagaagattgaaggagtcatcttagtgggatttggggaagcaaca

SEQ ID NO: 632121 - DNA, 100 bp, Homo sapiens
gttaaggatacctgtaagaaaggccttagtaggcctttctaagtctcctaaaggatgtgtgagaaagatcagtctaaagaaaaggagaagaaagtgaaaa

SEQ ID NO: 632122 - DNA, 87 bp, Homo sapiens
acagacctagcactgtacattaaatcacatgtacatgaagacaatggaaagttatttccttcatccagtctacaaatacccaaggac

SEQ ID NO: 632123 - DNA, 75 bp, Homo sapiens
caataattgaatgtttagatcatcctgatcccattattaaaagagagacttccattagtttgatgaatctgactt

SEQ ID NO: 632124 - DNA, 96 bp, Homo sapiens
gaagaacaagaccaagagccacaggatctctttgcagcggcagactgaaggacgggtgcctgttttcagccatgaggtagtccctgaccatctgag

SEQ ID NO: 632125 - DNA, 75 bp, Homo sapiens
gaccctcacagccaccagcgtaccctctttcatcaaccatccactgggtttctacgataaagacagttcagggtg

SEQ ID NO: 632126 - DNA, 97 bp, Homo sapiens
tttgcctctgcacagtttcccaatgttccagtctcatcagattttccatgtcctggtggtggcagcagcctttgtccacttctatggagtctccaac

SEQ ID NO: 632127 - DNA, 75 bp, Homo sapiens
ggggccgccgcagcaccatggcgaccaccgtcagcactcagcgcgggccgtgtcaggggaagctgatggagaatc

SEQ ID NO: 632128 - DNA, 98 bp, Homo sapiens
aagaagtgaacgagcttttaagctaacccgggatgctattgagttaaatgcagccaattatacagtgtgattgctgtcgtggctgtgatgtgcaaacc

SEQ ID NO: 632129 - DNA, 90 bp, Homo sapiens
ccggtatggctgaagtcagcatcgaccagtccaagctgcctggagtcaaggaagtgctgaagctgctgaaagatggcagaagaagtggtg

SEQ ID NO: 632130 - DNA, 82 bp, Homo sapiens
cagcatcaagatgatttatggtaataagatcagacactcctctaatttacaaagcagtgcccagctggtttgtgcgagtgga

SEQ ID NO: 632131 - DNA, 75 bp, Homo sapiens
ttttcccaaaagacaggctcttcacctgaaggtacaccaggggttggaaaaaccacactaggcaaagaacttgcg

SEQ ID NO: 632132 - DNA, 75 bp, Homo sapiens
gatgtactgatcaaatctatggctcagcatttgatagagaactccaaagttaagaacctaaaggcagacccagaa

SEQ ID NO: 632133 - DNA, 100 bp, Homo sapiens
tgccctcggacttcatctcattgctcagcgcggacctagacctggaatcgcccaagtccctctactcgcgaggaaggtggtttgaagttgacatttcaga

SEQ ID NO: 632134 - DNA, 83 bp, Homo sapiens
ccgagaccgactgagggagcgacctgcgcagggcccggggagtcatggcgtgatggtgggcatgggtcagaaggattcctatg

SEQ ID NO: 632135 - DNA, 76 bp, Homo sapiens
acttgttgaacttctcgttcagttggcaagatatgccttcatgcccttaatagatgattctgatgatgaaattgag

SEQ ID NO: 632136 - DNA, 80 bp, Homo sapiens
ggactgcaaaccgagctcccgtctgccttgcaggaggacaagaagacctcattctttcctatgagcctgttacaaggcag

SEQ ID NO: 632137 - DNA, 90 bp, Homo sapiens
cataagggatgcttctatggccgctgcctgggcttccagatttggagcaagaggtggtggtggccttcccccgaagaaatttggtaatcc

SEQ ID NO: 632138 - DNA, 106 bp, Homo sapiens
agatgctgccagggtccctgaagagggaagacacgcggaaacagaatgttgtaccatctttgggtaggcagacttccctgacgacatcagtgatacccaaagctga

SEQ ID NO: 632139 - DNA, 131 bp, Homo sapiens
ccgcgctggccccggccgcccggctgctgctggccgggctgctgtgcggcggcggggtctgggccgcgcgagcaaacagtgagtttttccagattctcagtcagaatggagcacctcaggcagatgtgagc

SEQ ID NO: 632140 - DNA, 80 bp, Homo sapiens
tccttctcaaccttgtgggatgtgaaaactctgttactgaagggctgtgcttcctggaagtggtattatccatttcatta

SEQ ID NO: 632141 - DNA, 90 bp, Homo sapiens
catgattgcatttttcttcatcatcatttacctgggaccaatggttttgatgataatcggtcctgagaacattatctgtagctgtatctc

SEQ ID NO: 632142 - DNA, 100 bp, Homo sapiens
caccaatgtgcgccaggggcgccggcaatctgctgccgcagcgggaaccgcaagagcttggtggtaggaacgccctccccgaccctctcccggcccctgt

SEQ ID NO: 632143 - DNA, 50 bp, Homo sapiens
agtttgatgaggagcgagcccagcaccctggaggagaagaggttctgctg

SEQ ID NO: 632144 - DNA, 74 bp, Homo sapiens
tcctgggctacaagacgctggccgcgggctccatcagcatggctgagaaaagttgccagacggccagcattgcc

SEQ ID NO: 632145 - DNA, 90 bp, Homo sapiens
acttgtgtcactaacggaccgtttatcatgagcagcaactcggcttctgcaggatcatccagcagctcgtcaacggcatcatcacgcccg

SEQ ID NO: 632146 - DNA, 75 bp, Homo sapiens
cagtttcttcaggattcatggtgcaaatgttaacagggatttattttgccttcctactttggggataaaggatta

SEQ ID NO: 632147 - DNA, 83 bp, Homo sapiens
aaaacaacttcgagggcagagaatctttgtctgaagtggaagaaaaatacaagaaagccatggtttccaatgcacagttagac

SEQ ID NO: 632148 - DNA, 75 bp, Homo sapiens
cggctcgggacggaggacgcgctagtgtggctattatcatggaaaactaatttttcccagagaatttcctttcaa

SEQ ID NO: 632149 - DNA, 50 bp, Homo sapiens
ctcccaagaagctgggactacagactgcctgcgctgctgacttaaggccc

SEQ ID NO: 632150 - DNA, 100 bp, Homo sapiens
gccaagttgctgtgcgaccaggtggtcggtgcgcccatcgcggtctcggccttctatgtcggtaaaagtttcatttgatctgaatagtattaaaataaaa

SEQ ID NO: 632151 - DNA, 90 bp, Homo sapiens
ctcttgctggggggagcctgggcagtttgaagaaaacaggtctgaaacaaggtcttacccccagctgcttctgaacacagtgactgccag

SEQ ID NO: 632152 - DNA, 100 bp, Homo sapiens
cccctacatttggagcctggacacgcagtacagcaagggtttgccttcccggattgggcctacaagccagagtcgtcccctggctcaaggcagatccagc

SEQ ID NO: 632153 - DNA, 100 bp, Homo sapiens
ccggcttcccggatggagcccgcgccccggtcgacattctcggactgcagagagacagggacactggtaaaggaagggctttatgaccagtgtgttgtgc

SEQ ID NO: 632154 - DNA, 75 bp, Homo sapiens
gtactggctattggaaggaggagattctgaagataaggaggtgaaagaacttgtcctggacaacagtcggtcgaa

SEQ ID NO: 632155 - DNA, 100 bp, Homo sapiens
ccaaaagcagcaaaaacacagactttttcattggcaagccaactctgagagaggttgcaatgaatgtgtatgagttatcatcagctgccggattaccttg

SEQ ID NO: 632156 - DNA, 115 bp, Homo sapiens
tgaaaagactgggcttgtccttgctggtgcatgcgtcgtcggcctctgggcagcagccgcttacaaacacgcagatggcaagaagattgatggcaggagggtccttgtggacgtg

SEQ ID NO: 632157 - DNA, 75 bp, Homo sapiens
ttagacacatcagtggagtccatgctacctgattgcccccgggtctcagcaggatcttggaaacaaagacctcaa

SEQ ID NO: 632158 - DNA, 75 bp, Homo sapiens
agacagaatgtacgaccttgttgctgttgtggttcactgtggaaggttacttcctcagaatgttggcctcctgta

SEQ ID NO: 632159 - DNA, 98 bp, Homo sapiens
cggtcacgaggctcttcccaaattccttcaatgataaattttgtgatcagatgatggccactcctcaggatagtcaggaaggaacctttgggtcagag

SEQ ID NO: 632160 - DNA, 90 bp, Homo sapiens
agacgaagcctatacgctagaagaatttcaacatcttctaccaaaaatgaaagggcaacgggcatgaggaggtagttgcatgcgcctggg

SEQ ID NO: 632161 - DNA, 75 bp, Homo sapiens
cctcttgggactgggctcgatttgaggagctgcagaggctggagacagagttgggccaacccgctgagcgctgga

SEQ ID NO: 632162 - DNA, 75 bp, Homo sapiens
gcaagcgagcaatttccacctctgtgtgtgtacgagctcatggttatcaatactctggctgaccatcatcatcgt

SEQ ID NO: 632163 - DNA, 100 bp, Homo sapiens
gagagcgcctcggcctctccagctgtccgcggttttccagggaaattttgacaatgacactcacagaaaaaatgtcatcgaccctcccatctatgcacga

SEQ ID NO: 632164 - DNA, 75 bp, Homo sapiens
gaaggcccgagcgcccgaggcgtctgggatggtgtgggaccggcaaattcaacacccaacagcttccttaatagc

SEQ ID NO: 632165 - DNA, 100 bp, Homo sapiens
cagaaagcagctggagaggatggaggccggtctctctgagctgagtggcagcgtggcccagacagtcgagcaaaagatgtgataataccagcaaagccac

SEQ ID NO: 632166 - DNA, 88 bp, Homo sapiens
taatttgcagtactttgctgtgaccaacaacaatttgtcgagatgtccacagaaggaggatttggtggtactagcagcagtgatgccc

SEQ ID NO: 632167 - DNA, 75 bp, Homo sapiens
gacagagtgatgggaaacgcgtgagccaggccgagagaaatcaatgtggactgaacataaatcacctgatggaag

SEQ ID NO: 632168 - DNA, 75 bp, Homo sapiens
gcgggagaagcggcgctccaccggcgtggtcaacatccctgccgcagaggaaacccagcgtttgctggcagaacc

SEQ ID NO: 632169 - DNA, 75 bp, Homo sapiens
gagcatggggcatccccatcaggagctgtgtggagctgaaccggtctgcattcctggaaccagagggattatcca

SEQ ID NO: 632170 - DNA, 74 bp, Homo sapiens
cctgctcaacagaccccgagaatatattcagctacacagtcttataaaatctgctttaggagacagaactgggc

SEQ ID NO: 632171 - DNA, 75 bp, Homo sapiens
caaggccgacagccacaaggagcaggctccaaagccatctgagcagaagggtaagggactgttctgaagaacctt

SEQ ID NO: 632172 - DNA, 99 bp, Homo sapiens
ctggctacgtggagcggctgaagggcatgtccctgcttgtcagggctgagagcgacggtggtagctgagcacccagatgcttcaggtgaggagattgaa

SEQ ID NO: 632173 - DNA, 83 bp, Homo sapiens
ggaagacagcgccgcccgcgcaccgccagcgacctccgccgcagagtcccaccgccacagctcaccatggatgatgatatcgc

SEQ ID NO: 632174 - DNA, 75 bp, Homo sapiens
ggtgtgcgacgtggagatccgaaggaatgaaatccggttatgcaaagggtgacctggacatatcttacatcacat

SEQ ID NO: 632175 - DNA, 90 bp, Homo sapiens
gaacttccccctgtgcggtcgcgacgtggcgcgctggttcccgggccacatggccaagggcagtaccaagaagcaagagagacctatctt

SEQ ID NO: 632176 - DNA, 88 bp, Homo sapiens
cggggtctggtggaaaaacaagcccaagtggctcctccagggcatcttcactcaagactgcttgcaactgattgcagacagtgaaaca

SEQ ID NO: 632177 - DNA, 90 bp, Homo sapiens
ccaagatgtctgacatggaggatgatttcatgtgcgatgatgaggaggactacgacctggttctcatcccaggccttgtggagggatcta

SEQ ID NO: 632178 - DNA, 95 bp, Homo sapiens
tgggtgcatgttagtgctcaagagcctcattatctaccacccgagatgccccaagaaaaggatgcgcctccacttagcaaggctgggcaggatgt

SEQ ID NO: 632179 - DNA, 88 bp, Homo sapiens
ttctctgtcagctctttccccgtcagcatcccagccgtgctcacgaggcagaagaggcctggaccttggcgcacacagacccaggaac

SEQ ID NO: 632180 - DNA, 50 bp, Homo sapiens
ggaaatgtcatccgatggcacaatcagaatttaagggacgctgtgaagca

SEQ ID NO: 632181 - DNA, 82 bp, Homo sapiens
cggcgagccgagcgaggcagctctgagccgcgcggtttggtgcacctcgatttggaggaagtagggcagggcccttatctgg

SEQ ID NO: 632182 - DNA, 100 bp, Homo sapiens
gtcaggacttcagaatccttgaccgataccaggaaactggagcacccatcctaactgatgatgttagcctgcaggtgttcatggaccatttgaagaagct

SEQ ID NO: 632183 - DNA, 90 bp, Homo sapiens
ctgcactaccagctgatagccagcatgagcctgccagccagacatgcgtcgggatgtccaggaaatttttcgcatgaccccccacgagaa

SEQ ID NO: 632184 - DNA, 101 bp, Homo sapiens
agaagaaaccgttcctagggatgcccgcgcccctcggctacgtgccggggctgggccgggggacggcggctccctggaccaggtgctgaaagaggccaaga

SEQ ID NO: 632185 - DNA, 122 bp, Homo sapiens
cttgcctaaatgaggaatgtctttcctaccatctaaaatacgaaggtttctggctggggtcacctctgtccagtcagccagtcttaatcaccgtccagcggcagctaccacaggccatcaag

SEQ ID NO: 632186 - DNA, 90 bp, Homo sapiens
ctgaagggggactacaggttcgagactccagaacctgggtatcaacccagcaaacattggcttcagtaccctgactatggagtctgacaa

SEQ ID NO: 632187 - DNA, 90 bp, Homo sapiens
agagctcaaaagaatggttggagcccaagcccctttgttttatggaggagcagaggtttaataggcaagagaaagagaaaggaaaacagc

SEQ ID NO: 632188 - DNA, 82 bp, Homo sapiens
gagtcctcaatccaacagcccagtgcttctgtctcgactgcactttgagaaggccacacgtgtctacacttagcctctatcc

SEQ ID NO: 632189 - DNA, 82 bp, Homo sapiens
gcagatccgatggagaggctgagctgctccaggacttgggaaaaactgcttaaggttgaaaagagaaatttaagaaattgct

SEQ ID NO: 632190 - DNA, 100 bp, Homo sapiens
ccggcgtgctcttcttcgctgacgacgacaacacctatagtctggagctcttccaggagtgggatgaagctctcttgactatgagtaaaggagaaaaggc

SEQ ID NO: 632191 - DNA, 96 bp, Homo sapiens
gggaggagccttaacaagcgcacggagccctcaaggtgctggagaatctggtaaaagcaccattgtgaagcagatgaggatcctgcatgttaatgg

SEQ ID NO: 632192 - DNA, 98 bp, Homo sapiens
ttgtcacctcgaattgagcacggagctggagttcgcccaaatcatcatcatcgtcgtggtggtcacggtgatggtggtggtcatcgtctgcctgctga

SEQ ID NO: 632193 - DNA, 75 bp, Homo sapiens
cggccgagcggcgacggaccgcgagtcattgaaattatgagactatcattcaaatggaagcattatagttcttcg

SEQ ID NO: 632194 - DNA, 75 bp, Homo sapiens
gcccctacaccctggacaggcacagtctctatgtcaatgttgctgggctttgccatcagctaacaaatgcacttg

SEQ ID NO: 632195 - DNA, 73 bp, Homo sapiens
agcaggtcacagcccctcgaggcgacagcggccccgccgcaccagagcaggtggggaagaaaacatgacagaa

SEQ ID NO: 632196 - DNA, 82 bp, Homo sapiens
cagcacctacgtcccgctgccgtcgccgccgccaccatgcccaagagaaagcccctggcgaagcggtgctgcctccagccca

SEQ ID NO: 632197 - DNA, 75 bp, Homo sapiens
ctaaagttcgtgaatctcaacttgttgctgcttttgctcagaggacatccatgaccctaatggtctttttgttca

SEQ ID NO: 632198 - DNA, 88 bp, Homo sapiens
gtctgcatactcgctgcccgccggctccctcccccgcgtccctgcgaccgccgcggcgaagatggtaagaatgattgatgttggctga

SEQ ID NO: 632199 - DNA, 78 bp, Homo sapiens
gatgatgaaggagacgttcaagtacttcctccgggagctggaagtcgagtgtgctactcaactcaggagatttggaga

SEQ ID NO: 632200 - DNA, 89 bp, Homo sapiens
aagaatgattcgtgaatccggaatgggtgacagcgtcatcacggcattttattggcagtttggagcatgtgaacaccttgagccttgat

SEQ ID NO: 632201 - DNA, 85 bp, Homo sapiens
gaaacgaggcactcagttggaagagtccagcaaggttccaatggtcctcagctgtttacaatagagcaatggggcagtcctgaga

SEQ ID NO: 632202 - DNA, 82 bp, Homo sapiens
gggaaaaggctaatggcacaactgtccacgtaggcattcaccccagcaagaattatgatctagcccttaagtatttccagaa

SEQ ID NO: 632203 - DNA, 75 bp, Homo sapiens
ctagctccgaccggctgaggcggcgcggcagcggagggacggcagtctcgcgcgatatgaggccccaggattcct

SEQ ID NO: 632204 - DNA, 100 bp, Homo sapiens
ctttggacgccggtggagacgcaggcgaggtgtgagttcttgatacgaatgaaaggccaagagtttgttgatgagattcaaggtagatatcctcatcttc

SEQ ID NO: 632205 - DNA, 100 bp, Homo sapiens
gaagcggaagcggtgggaaatggatcgagacaagtccaaaactcttcgcagaagaggagtttctgccattggatccaacccaggaactgatatttcctcc

SEQ ID NO: 632206 - DNA, 99 bp, Homo sapiens
caggaattggatctactagtgcagcgtttgctgccaattgatggggcaaatgatctcttttttcagccacctccactgactcctacctccaaagtttat

SEQ ID NO: 632207 - DNA, 80 bp, Homo sapiens
cttgggactacacaaaccccaatctcagtggacaaggcagtataccttaaatggcaagaaggaaataaatcatctgacat

SEQ ID NO: 632208 - DNA, 100 bp, Homo sapiens
ctgaggcatgcagtagctgctacagatcaatgagctgagcaatgttcctgttcctgtcatgctaatgccagatgacttcaaagcctacagcaagatcaag

SEQ ID NO: 632209 - DNA, 75 bp, Homo sapiens
ctgctctgtggggctctggccgcgcctggcctggccgggaccatgaggccacaagaggaagctgaatgaagagga

SEQ ID NO: 632210 - DNA, 99 bp, Homo sapiens
cccgggttcgccgagccgcaggagagacacgctgggccgaccccagagcggcgctggacaggtaaaaccttgttagccaaagcagtagcaaaccaaacc

SEQ ID NO: 632211 - DNA, 74 bp, Homo sapiens
cttccagcaccgttctgtgtcctggtcgcagttcaacaaggctcctcctgctggaccctccagccccgggcctc

SEQ ID NO: 632212 - DNA, 75 bp, Homo sapiens
cacaagtagaacttgtagtttcaaggcctattgggacgtctgctcactggagatgacacgtgcgtggggtgttgg

SEQ ID NO: 632213 - DNA, 75 bp, Homo sapiens
atgtcaagcgaagccttgaaaaagctgccctgagacggtgtcccgccgaaagtggatgaggatcgcagtacggaa

SEQ ID NO: 632214 - DNA, 98 bp, Homo sapiens
gagttcctgcccggcgcctggcggggcctccgcgaggacgagttccacatcagtgtcatcagaatgcatacacagccacagctatcaacagcaccaac

SEQ ID NO: 632215 - DNA, 98 bp, Homo sapiens
ggccaaccacgccgtggcagaggaacccgcgggcacgcattgaacctggccacatcccaggtaccgtgaacatccccttcacagacttcctgagccag

SEQ ID NO: 632216 - DNA, 74 bp, Homo sapiens
ctcacgggcgggctccttactctggatggtggccacttcgccaggtttttcacgactgaaaacaacatagcaaa

SEQ ID NO: 632217 - DNA, 50 bp, Homo sapiens
ttttgcttgcagttaggtcaagtggagcagcccctgtcaaagggaacagg

SEQ ID NO: 632218 - DNA, 50 bp, Homo sapiens
gggcacaccaaactccatctggtgccaagtcctgccctgccaacttcttg

SEQ ID NO: 632219 - DNA, 83 bp, Homo sapiens
ggacaagtttgcagatcgggagcgcaaggtcgccctcaaggccatgatcaaaacgcaacatgagtgagaatgaggaagaggaa

SEQ ID NO: 632220 - DNA, 96 bp, Homo sapiens
tgggacctattgttcagttacaagagaaactttatgtgcctgtaaaagaatacccagattattctaccttgtaaatactgttatttgtatatactg

SEQ ID NO: 632221 - DNA, 100 bp, Homo sapiens
cctgaactatgatcccattaccacagcaacagatatgtgagtaaagatggcaaaagtccactgcacatgacagctgtccatggaaggttcacacggtcac

SEQ ID NO: 632222 - DNA, 74 bp, Homo sapiens
agggaccacggtcaccgtctcctcaggattttttatcaagcagaaatgcatcgaacaacgagaatcaagatcac

SEQ ID NO: 632223 - DNA, 100 bp, Homo sapiens
ctggactcctcaggcctctcctctgagcgctcagactcagaccaaggactgagcagggggaggaacatttaagctgatggaagtggaagtggaagttgct

SEQ ID NO: 632224 - DNA, 83 bp, Homo sapiens
ccggccctgcgcctcccgccgcgcccgggatgtattcgtccccgctctgcctcacccaggtgaaatgacaatggatgctctgt

SEQ ID NO: 632225 - DNA, 98 bp, Homo sapiens
ctctaggttctgggaagatggcgaaggtctcagagctttacgatgtcacttgggaagtttcaccagtgatcattaaagaatgggcagcttacaaagga

SEQ ID NO: 632226 - DNA, 100 bp, Homo sapiens
tggatgttcttcttcgagtatttgtagaagggacggagaggagcaggaggagccgcgtggcaaggaggagcgccaagagcccagcaccacggcacggaag

SEQ ID NO: 632227 - DNA, 50 bp, Homo sapiens
gccgggagttacaccgccaccgccaggagcttgaagaaatccgcaaatgt

SEQ ID NO: 632228 - DNA, 100 bp, Homo sapiens
ccgcccgtgaaggccacgccattaaagcgcttcagtcaaaccctgcagaagtctggctagataatcccaaaatgtggctccgagataatcaagacaacct

SEQ ID NO: 632229 - DNA, 97 bp, Homo sapiens
tcgcttcttcctctttctcgactccatcttcgcggtagctgggaccgccgttcagcttctgaaagttctgctgaagacagtgagcaggaagatgaga

SEQ ID NO: 632230 - DNA, 90 bp, Homo sapiens
ttccagaccacttgccacattgtcaatgcggaaaacgccatgcggtacataaatgggacgcgtctggatgaccgaatcattcgcacagac

SEQ ID NO: 632231 - DNA, 100 bp, Homo sapiens
ctctgctgcggcgcggggaccgctgtgctctcgaaagtggtggagagagagctggatgctcttttggaacagcaaaacaccattgaaagtaagatggtca

SEQ ID NO: 632232 - DNA, 96 bp, Homo sapiens
gggccggccccggcctggtcctggccccggagctgttgctggacccctggcagggcccagcgctggcgcagtgagaacttcgagagacccgtggac

SEQ ID NO: 632233 - DNA, 100 bp, Homo sapiens
tagggtccaggacagcaggaccaagccagcagaaacagcctgagcccaccgcagactgaagtcttgcagctgaagggaggcactccttggcctccgcagc

SEQ ID NO: 632234 - DNA, 74 bp, Homo sapiens
aaaattcctctacatctcagagacagtctccatctatctgggtctctcacagccttcctacagcaacttcccac

SEQ ID NO: 632235 - DNA, 97 bp, Homo sapiens
ctggcactgagcggccgcggccatggcgtacgcctatctcttcaagtacatcataatcggcgacacagagataattgacgaccttgccaacctagtg

SEQ ID NO: 632236 - DNA, 100 bp, Homo sapiens
cccttacgtccccgagtgcggcagtaccgcctccttcccagccgcgcggcttcctccagacctctcggcgcggggcgaccattgacgaggtggagacgga

SEQ ID NO: 632237 - DNA, 95 bp, Homo sapiens
tctgctctcggggaactgtcatcattgacaataagcgctacctcttcatccagaaactgggggaggggttatcaatagtctggctgtctatcgtc

SEQ ID NO: 632238 - DNA, 50 bp, Homo sapiens
attgttcatcctggctgcctccaggacatgggcaagttttgcctcacata

SEQ ID NO: 632239 - DNA, 75 bp, Homo sapiens
ggcaggaggtttttgatgataaagcaaaggtttcccttgggggctttgaaataacaccaccagtggtcttaaggt

SEQ ID NO: 632240 - DNA, 74 bp, Homo sapiens
ttaaatgattttgctagtacagttcgtatcctagaggttgttaaggcagcctggcatcctcgctacaacctcat

SEQ ID NO: 632241 - DNA, 100 bp, Homo sapiens
gccccgctctgctgtgggcgctgctggcgctctggctgtgctgcgcgacccccgcgcatggttttgacacaagggcgcatatcttcaaagcacctagtac

SEQ ID NO: 632242 - DNA, 82 bp, Homo sapiens
gaagccgcacttacctatgaggccagcaagcggaggtgctgggagcgagttggctgaaaacactttctaccaggacttttct

SEQ ID NO: 632243 - DNA, 75 bp, Homo sapiens
aatgttggagaactatagtaacttggtgtcactggggccacccgttcatcgtgcagttcaatgatggaaatgccg

SEQ ID NO: 632244 - DNA, 100 bp, Homo sapiens
tcctcgctgaccccatcactgtgcaagctggggctgcaggtagctttgcagtttggggagggctgttttccatgattgactgtagtatggttcaagtcag

SEQ ID NO: 632245 - DNA, 75 bp, Homo sapiens
ccaccactgacctgggacagtgaatctgagaaggcaaccaaagtgcaggacatcaaaaacaacctgaaagaggcg

SEQ ID NO: 632246 - DNA, 82 bp, Homo sapiens
gcggatcgggtggagtgtaggtcatatcgccgcggtgaaatgacaatggatgctctgttggctcgattgaaacttctgaatc

SEQ ID NO: 632247 - DNA, 100 bp, Homo sapiens
aagactccagtaacactcaagcaaagaagagttgagcacaatcaggaaagaccacagcaagattctttcattcgtctcctcctagcctgggggaccaggc

SEQ ID NO: 632248 - DNA, 75 bp, Homo sapiens
caagtactggaaccgctttcgagacatctttgtagaatttgatggctgtaactggaagcaacactcctgggtaaa

SEQ ID NO: 632249 - DNA, 75 bp, Homo sapiens
gcagggtctgcacgaaataaagctcctgggcaaggggacgtctgcagctgagtcactggaaggactgagcgcatt

SEQ ID NO: 632250 - DNA, 100 bp, Homo sapiens
cagctgatgcatttgcacctgtggcttatctacgctttttagaattgcacttggaggacaagatacaaggcagatccaaccatccccaccgtggtcctac

SEQ ID NO: 632251 - DNA, 100 bp, Homo sapiens
gccaccacttccagtgaggagctgccaaagaaggaggctccgtacacgcttgtgaaaccagcctggacaccaagtctgtgtcagaaggccacctcaagag

SEQ ID NO: 632252 - DNA, 90 bp, Homo sapiens
caccaagacaggcatctcaaatcggctgattctgcatctggaaactgccttcatcttgaaagaaaagtgccctgcaggagtcattaaatc

SEQ ID NO: 632253 - DNA, 75 bp, Homo sapiens
aagatggcgactgtcgaaccggtggtttgtgatgaaaatggttccaagggctatggatttgtacactttgagacg

SEQ ID NO: 632254 - DNA, 74 bp, Homo sapiens
ggcggccaaaggccagtgactaccaacgtttggaccagaagggcacctttcacagccagcaggcattggaatat

SEQ ID NO: 632255 - DNA, 83 bp, Homo sapiens
caatgtaatcatggtttctgctattggcaatgacggacctctttatggagctcaggccccggggcctccagcggcaccagcgg

SEQ ID NO: 632256 - DNA, 49 bp, Homo sapiens
cggcggcttctttgagtctttcaaggagggtgaggacaaaatcttctta

SEQ ID NO: 632257 - DNA, 82 bp, Homo sapiens
tactctttgccgtacccaccggagcctggcgcagcctccctctattaccagcgccgtgccgtccctgcagtgacaccgaggt

SEQ ID NO: 632258 - DNA, 106 bp, Homo sapiens
cttctacagaccatgctggacttcttgtcggatcaggaatatgacagatacctagcatctagcaaaataatggcagctgcttaccttgaccccaacttgaatcaca

SEQ ID NO: 632259 - DNA, 75 bp, Homo sapiens
ctgcccaacgacatcgatggcctggagaagcatggcctgtatgagaagaaaaagacctcaagaaagcaacgaaag

SEQ ID NO: 632260 - DNA, 83 bp, Homo sapiens
ctggttaggaggcacagggcgtcggacctgcacgagctgtctggattatatctgtccaagatgcgagtctggttttatcgagg

SEQ ID NO: 632261 - DNA, 80 bp, Homo sapiens
ctctccagggagtgctctgttcacggctccatcgctgttagtgtcatggagaaactccagctgggcccagagattctgca

SEQ ID NO: 632262 - DNA, 88 bp, Homo sapiens
gggcagattctggctgccttttaatttcgtccttcacctgatatctgtgccagagaatggtgtgatgaatgcagactctgctaccatt

SEQ ID NO: 632263 - DNA, 137 bp, Homo sapiens
gatttgacaggaacatcgcctctttccatcgaacattccgagaatgcgagagaaagagcctccgtcaccacatagcatgaagtcatcaatatcaacctgaaaaataagcctgagtggttctttaagaaaaatccctt

SEQ ID NO: 632264 - DNA, 100 bp, Homo sapiens
atcttacccctggtgcagaacgatcctcgaattcagcacagaaatttcagcagatttcaaggagccgccatccctgccagggaaggagaagccatccccg

SEQ ID NO: 632265 - DNA, 100 bp, Homo sapiens
gaccctctaggacaagactgtatgatagtgttagttccacagatggggaggacagtctagagagaaagagtgtcaatccatatctacaaggacagagact

SEQ ID NO: 632266 - DNA, 75 bp, Homo sapiens
tgaggctgccaaggaagctctggaggggcttctggaagacaagagtaaccagcttttcttcgggaaagtgggccg

SEQ ID NO: 632267 - DNA, 82 bp, Homo sapiens
aggccagcaagcggaggtgctgggagcgagttggctgatgtgaagttcatttccaatccgccctccatggtggcagcgggga

SEQ ID NO: 632268 - DNA, 75 bp, Homo sapiens
ctcctgccgtgcaaatgttcctcagcagcacatagcacctatcgggaagcatccaggatgtgggaacattgtgac

SEQ ID NO: 632269 - DNA, 75 bp, Homo sapiens
gaggagcagggcctgactgcgcagacacagagattgactggaaggcctacatggccgaggtagaaggcgtcatca

SEQ ID NO: 632270 - DNA, 82 bp, Homo sapiens
caagaagcgaaatgtgctcattggccattcctacggatgaggacggggacttggttgccttttccagtgacgaggaattgac

SEQ ID NO: 632271 - DNA, 100 bp, Homo sapiens
tgacgggcgcccggccggctgcggtccgtgcggaggctgagccggccgcgggcgcgaccggaggcaggggacatagtgagcctggagaagcatcattttt

SEQ ID NO: 632272 - DNA, 75 bp, Homo sapiens
gtctgatcatcaattgtctctctgggcggccacctatgagacttcatctgtgtgacctaatctgggagcctgcaa

SEQ ID NO: 632273 - DNA, 50 bp, Homo sapiens
catcaagaaaagttccatctggattgcaatgaacttcctccaagaagaaa

SEQ ID NO: 632274 - DNA, 100 bp, Homo sapiens
cctaggcattttgctgtctcctcctaatacggcgtctgtagaggcttctggtgaaatcgcattatgcaagactggatttcctgaagatgtttacagtgca

SEQ ID NO: 632275 - DNA, 100 bp, Homo sapiens
gcgtccagctcgcccagctcgcccagcgtccgccgcgcctcggccaagacatgtcatgctgcccaaggacatagccaagctggtccctaaaacccatctg

SEQ ID NO: 632276 - DNA, 74 bp, Homo sapiens
aacatgaagatggcggtggagataagaccttctactagtcgaaagcggccccgtgaaggggaagccgagggtgc

SEQ ID NO: 632277 - DNA, 99 bp, Homo sapiens
cagccaccactattctagcatccgtgaaggagcaggttgaagtaaagccatatgtgctggatgatcagatgtgtgatgagtgccagggcacacgctgtg

SEQ ID NO: 632278 - DNA, 90 bp, Homo sapiens
agagagcgccaggtgcttagcaggtctgtttatgatggtgaagaacatggacgtttcatggagaagcttgaaactcgtatccgtaatcac

SEQ ID NO: 632279 - DNA, 106 bp, Homo sapiens
ggcgcggcgctggcgctgccggagctgtcgacccggcctggcgccggactagggcgtgatggtgggcatgggtcagaaggattcctatgtgggcgacgaggcccag

SEQ ID NO: 632280 - DNA, 83 bp, Homo sapiens
caacaacctctcctcttcgtctccgccatcagctcggcagtcgcgaagcagcaaccatggaacaggcagaagctgaagggtgt

SEQ ID NO: 632281 - DNA, 82 bp, Homo sapiens
ggtgattgaggacaagaccatcgagctcatggtttattcttcagtccaaggaagcaattcacagtcagctgttagagaagca

SEQ ID NO: 632282 - DNA, 97 bp, Homo sapiens
aagaccaagaagtgggattactggattatatggtgaccaagaatatggcccaggtgaccaaagccctggacaaggccctgagcaccatggacctgca

SEQ ID NO: 632283 - DNA, 83 bp, Homo sapiens
gagaatggttcatttttccccggattctcatcaccatgaggtgaggacgcttgagcggaagttagaagcaaaaatgatcaagg

SEQ ID NO: 632284 - DNA, 96 bp, Homo sapiens
gttcagagcaaaaactaacagggatcttgaaattaaagatcaggttcaaatggtgaaagacgatgacccctcctggaagcccacttttatcgtgaa

SEQ ID NO: 632285 - DNA, 97 bp, Homo sapiens
tcggctacagcttcggcggcgaaggtcagcgccgacggcagccggcacctgacggcgtgaccgacccgagccggtgtcatggagaaactccagctgg

SEQ ID NO: 632286 - DNA, 102 bp, Homo sapiens
cagctttaggcatatgtatgtgtttggagacttcaaagatgtattaatcattgcgatgatgagtccagaggacagctgggtctccaagtggcagcgagtcag

SEQ ID NO: 632287 - DNA, 100 bp, Homo sapiens
gcagcttcaagcttaggaccacccaccatgcctatccagacaggggcaagtgtccgagtggtgaatcagctacttacagagatggatggtctggaagcac

SEQ ID NO: 632288 - DNA, 83 bp, Homo sapiens
ccgaaacctagccccggacgagaagcgcagcaacgtgcggtgggaccacgagagcacaatgcagatcttcgtgaagactctga

SEQ ID NO: 632289 - DNA, 50 bp, Homo sapiens
gccggccacggagcgcctgcagatcttagcaaagcaatgtctcaagatgg

SEQ ID NO: 632290 - DNA, 90 bp, Homo sapiens
ctgaggccccagaactatcttttcgttcatggcctcccacgggaacgacgccgcgagagccaggtttgagtccaaagtaccctccttcta

SEQ ID NO: 632291 - DNA, 75 bp, Homo sapiens
cacgtgttccgagaaaacgaagagcagctgttcaaagtcgacgtgttgatgcccaatgttggtgagattgtggga

SEQ ID NO: 632292 - DNA, 100 bp, Homo sapiens
cccgtgcgggccgcctccagagatttctccacagtcgaactcctctaggcccacctgtgcccgtcacctcaccttgggcacgggagacgggggccctgcc

SEQ ID NO: 632293 - DNA, 88 bp, Homo sapiens
ggaagcggcggcggcggctccagcgtcctaagaggcatcaagcatgatggaaccatgtgtgatacctgccgccagcaaccaatcattg

SEQ ID NO: 632294 - DNA, 82 bp, Homo sapiens
ttcatactacaatgtgacatactggcccctctggtatattgttgtgctgcatggaaacaacctgttagtatttggaggtacg

SEQ ID NO: 632295 - DNA, 95 bp, Homo sapiens
atgaccccagaagggatctcttcagggtggaatacgtcattgtgccggtggtggtgtgcacattgagccccggtatagacagttcccccagctga

SEQ ID NO: 632296 - DNA, 74 bp, Homo sapiens
cagtggtcgcttcttctccttgatcaacaggcggtccttcgggtcggagtggacatcggatggtggcctggaag

SEQ ID NO: 632297 - DNA, 71 bp, Homo sapiens
gccgacggcaaaggtgtcgtggtggtcattaagcggagatccggggcagtagtaggtgctcaaaacatcac

SEQ ID NO: 632298 - DNA, 75 bp, Homo sapiens
gcgggtttccaccccggcgggagctgtcaggttggctccgcccgagtcgtccggaaatccattgcccgtgttctc

SEQ ID NO: 632299 - DNA, 82 bp, Homo sapiens
agcgtcccggtgcggctgcacgtctcgcggatcatgctgtactccaaagattcaggtttactcacgtcatccagcagagaat

SEQ ID NO: 632300 - DNA, 83 bp, Homo sapiens
agctcataaaaagatgcacaagcaccaaaagcaccacaagtaccacaagcatggcaagaatagcctaacatggcagaccagag

SEQ ID NO: 632301 - DNA, 90 bp, Homo sapiens
ccatgtttctggacgcggatttttggcctcatactctgttatagataaacaaggtgggtttggaggatttgggacaacatctacaactgc

SEQ ID NO: 632302 - DNA, 101 bp, Homo sapiens
ctgagactgggcctgaagggagagtttcagttcttcattgacgaacaaagaactttgagtctggcaaggcttataagacaacatggggagatggtggagaa

SEQ ID NO: 632303 - DNA, 89 bp, Homo sapiens
agaagctggtgtgcggagatgaaggacattgccgagaatggctgcgcccccaccccagaagagcagctgccaaagactgcaccgtcccc

SEQ ID NO: 632304 - DNA, 90 bp, Homo sapiens
agcgtgaccgagagcgcgaatatcgtcatcgttagaagggtgtgagatggcagacaggtttgcaggaaaccctcagaaagggggctggag

SEQ ID NO: 632305 - DNA, 82 bp, Homo sapiens
ttttgtggccttagctacaggagagaaatctgacccggtcgtctcgtaccgcgagacggtcagtgaagagtcgaacgtgctc

SEQ ID NO: 632306 - DNA, 75 bp, Homo sapiens
gctgagcagctcgcagagagcagagatatagatcagctatcaggaagggacttctgccattcaaagaaaatgaca

SEQ ID NO: 632307 - DNA, 100 bp, Homo sapiens
gatgcctgcttgatttacctcagtgtcaaacagcccgtgaaattacaagaggctgccaggaggacagagttcattcaaagaggcaggatttcaatcacag

SEQ ID NO: 632308 - DNA, 95 bp, Homo sapiens
actcattttctacgtgtgtgttgagtgcaccatttgagatcacggaacagcaaatttctgagaagttgaagactatcatgaaagaaaatacagaa

SEQ ID NO: 632309 - DNA, 75 bp, Homo sapiens
caaggaccagtccctcggggggaacgtggtcatcagtggtcagtgggggcttttatcttgagaacatggtgtctg

SEQ ID NO: 632310 - DNA, 101 bp, Homo sapiens
tggagctaagtagccaaggattctggaaaactggcatccgttctgatgtctgtcagatgttaattattcatactgcatgactgaggattttggaggcagag

SEQ ID NO: 632311 - DNA, 50 bp, Homo sapiens
ctggattgaactcagagaagccgggatatcctctgagagccaagcaaaga

SEQ ID NO: 632312 - DNA, 51 bp, Homo sapiens
gtggaaaatgcgctcgggctggaccagcagatcttcctcagaagaataggc

SEQ ID NO: 632313 - DNA, 75 bp, Homo sapiens
agattcccccgccgcccccggaaggacatttcatatatatggatttcacagctacactcgatccacgccccacac

SEQ ID NO: 632314 - DNA, 100 bp, Homo sapiens
cccaactacagaaatggtttcaaatgaatctgtagactaccgagctacttttccagaagagtgtgaacatggctacgcctcttcattcccgtccatgccg

SEQ ID NO: 632315 - DNA, 118 bp, Homo sapiens
gacgtttccgggcaagagaccgactggcggagcaccgccttccggcagaagctggtcagtcaaatgccacagttgtaagggatcttgtggctgtcaggatggcagaggagcaggagtt

SEQ ID NO: 632316 - DNA, 74 bp, Homo sapiens
gacgacgaggaagaggaggtttctgagctgccattcgatttcacatggaagatgctaaaggacaaattcaacga

SEQ ID NO: 632317 - DNA, 90 bp, Homo sapiens
aatctcaacttcatgtacatagaagttgataaagtaacagagaggttgtggacatcggatacccaaggagacgaagctgaagcaggagaa

SEQ ID NO: 632318 - DNA, 75 bp, Homo sapiens
gacgctgtcctggaggaattcaagcgaggcatgggcatccagtggcgagacctcctgagtcccgtcaacgtggac

SEQ ID NO: 632319 - DNA, 75 bp, Homo sapiens
tcgtcaccccagaccttgccagagacctggcaaatgacatcatgacactgactgattcttgctattccaaatcct

SEQ ID NO: 632320 - DNA, 75 bp, Homo sapiens
agatggacgtactttgtctgactacaatattcaaaaggggggtacatggtatggagtagacatcaacaacgagga

SEQ ID NO: 632321 - DNA, 101 bp, Homo sapiens
ccatcctcccacctcagccttgtgcagcagtaccgcgtcgccatgactgccaaggactgctccatcatgattgcactgtctccctgtctgcaggatgccag

SEQ ID NO: 632322 - DNA, 100 bp, Homo sapiens
gaaatagccctcaagatagtccaagaaatttctcccccagtgcctcagcccatttttcatttgcacggaggcatatatggtgctggttgtctcattacgg

SEQ ID NO: 632323 - DNA, 100 bp, Homo sapiens
cgatccgctgctcgcacgggagccagctgggtgcttagaccatgctcagcctccaagcagccttgtcatcgacaaagaatctgaagtttacaagatgctt

SEQ ID NO: 632324 - DNA, 95 bp, Homo sapiens
gccctgcgccccgctctgctgtgggcgctgctggcgctctggctgtgctgcgcgacccccgcgcatggggacggcaaaacagaacagaaaggcgg

SEQ ID NO: 632325 - DNA, 83 bp, Homo sapiens
ggcaacgacgttccatctgtggaaggacctaccaaccagacaagttggatggcttgaggactggtactaaaaggaaacgtgac

SEQ ID NO: 632326 - DNA, 75 bp, Homo sapiens
agatcctgtgctttactctgaagactcgcgcctccttggcattataacaaaaaaagatatcctccggcatatggc

SEQ ID NO: 632327 - DNA, 90 bp, Homo sapiens
cttggtgcctgaccctggctgccattatgaccaactaattgaaattaacctcagtgaggtggaggagaaccgccagtaccgcatgcacag

SEQ ID NO: 632328 - DNA, 90 bp, Homo sapiens
tttttttcaaagttccctgtgttgtgaactgagcttgggtgaagtgaaatctttgaggtaccgagcccctgaactgctgttgggaaccac

SEQ ID NO: 632329 - DNA, 82 bp, Homo sapiens
tactggaaagttgctatgttttgaatgaagatgagctttgcgttgactttcaggtcagcaaaaggccgttggatcgcaaacc

SEQ ID NO: 632330 - DNA, 100 bp, Homo sapiens
ccatgtattcttcagccccataaactgggatgacctgtaccacaagaggctaactccacccttcaacccaaatgtgggtctcactctgtcgcccaggctg

SEQ ID NO: 632331 - DNA, 75 bp, Homo sapiens
agctgtaatcaattgtgctgacaacacaggagcccaataacttgaaggcccgcaattccttccgctacaacggac

SEQ ID NO: 632332 - DNA, 100 bp, Homo sapiens
tcccagaacgcaccgcaagctccctcctcggtggtgatctttgtgaagtctgtgcagcggtgcattgccttggcccagctactagtggagcagaacttcc

SEQ ID NO: 632333 - DNA, 100 bp, Homo sapiens
tcggagagcagtgcagcgtgtgtggggtcgagcttcctgataacgaggctgtggagcagcacagactatcttgctaatcatggccggttaaatgagtctg

SEQ ID NO: 632334 - DNA, 100 bp, Homo sapiens
gctcagctgagccctttggactctgagacactggagatgagcattcaagaatatgaactaatccataaagagaaagaggatgaaaactgccttcgtaaat

SEQ ID NO: 632335 - DNA, 75 bp, Homo sapiens
gttctcagggacagtgcacgcagactcaagaacctggagctagctgctgtgagaggatcagatgtccgtgtgaag

SEQ ID NO: 632336 - DNA, 98 bp, Homo sapiens
cgtggtatactcgcagacaacccaaccggtatacaatgttcctacaacagcagccagtacccctgatgccgttgacaagtatctcgagacacctgggg

SEQ ID NO: 632337 - DNA, 83 bp, Homo sapiens
cctgcgcctcccgcctcctgccgcagcccggaacgtcaaggtcgtgggaaataaaaggcagttctacacagactgcagcaacg

SEQ ID NO: 632338 - DNA, 50 bp, Homo sapiens
tttgaaaagcagctggcctgcaagggaaagcaggcaggatgggagagtcg

SEQ ID NO: 632339 - DNA, 98 bp, Homo sapiens
ccggggccgcgggaaggccgaccgactgccgcggtatgacgctgggcgggatggcttcatcgacctgatggagctgaagctgatgatggagaagctgg

SEQ ID NO: 632340 - DNA, 75 bp, Homo sapiens
gttttgcctgaatacatgatttaaacaagagatttccacagaagatgaagtggccattctgcctgcccctcagaa

SEQ ID NO: 632341 - DNA, 51 bp, Homo sapiens
gggatgatgaagaagacctgctggatgtcactgatcccaagaaccataccg

SEQ ID NO: 632342 - DNA, 90 bp, Homo sapiens
tggaccccaactcagccttcctgcataccctggaccagcagaaacctagagtgatggtgatggaatttcctgataatgtgttaaatctcg

SEQ ID NO: 632343 - DNA, 100 bp, Homo sapiens
tgagtttttctcccaagccattcacagctattacagtgaccacggatcaagatgaagcatcagatggtgaaggagaaggagacacagaagtgatgcagca

SEQ ID NO: 632344 - DNA, 98 bp, Homo sapiens
cgttggtgctgtttgcggatgctgatgcagataacgaaggaggcccaacttcattcaataaggagcctgacggatttatcccagacggtagaacaaaa

SEQ ID NO: 632345 - DNA, 90 bp, Homo sapiens
gtacaacttccccgcaggcggcgtgggcatgggcatgtacaacaccgacgagttcccatccgctcttgtagggtaattaaaaccatggag

SEQ ID NO: 632346 - DNA, 100 bp, Homo sapiens
acctctgcaaggtcagcaacgatgtgggcgcagacgtcagcaagtccatgtacctcacggttaaaaagtttatagaaacctattcaccaaaatggcatcc

SEQ ID NO: 632347 - DNA, 90 bp, Homo sapiens
tggccaccgtcaccaaggcgcccaagaagcaccttgtctcagtgcatccatgctgctgccgcactgctctaccccttcagctgggcgcac

SEQ ID NO: 632348 - DNA, 83 bp, Homo sapiens
tttggaaacgacgtcatgtgttagaatgtgaaaacctttgcatcttctgatagtctagccaaggtccaagaagtagcaagctg

SEQ ID NO: 632349 - DNA, 74 bp, Homo sapiens
ccgcccggatgggaccaccagagtgctgtacatcaggaacgtctctatcaagaatacaatttcagcaaggctga

SEQ ID NO: 632350 - DNA, 100 bp, Homo sapiens
caaagacactgattctaccaaagagcctctggatgaccttttccccaatgatgaagacgacccagggcaaggaacttagcagtgtctgcaaaaacgaatc

SEQ ID NO: 632351 - DNA, 75 bp, Homo sapiens
cctcgtgtcacatctgaaactcatctgtacctcacttagaaagtttcatgatcaacatgggagactcccacgtgg

SEQ ID NO: 632352 - DNA, 101 bp, Homo sapiens
acatctggcgtggactactctgatgattgctgacagaactggaatctcctgcttggtggccctttagctccaagctttggaagacaccaccggaaacaaag

SEQ ID NO: 632353 - DNA, 100 bp, Homo sapiens
tggaaaagtgacatcagaggaggttctctcaagtagtgctgccagtagtaccatcacagcactgtcacctggaggggcacttatgcagggaggaacacag

SEQ ID NO: 632354 - DNA, 74 bp, Homo sapiens
gcctttgccgatccgccgcccgtccacacccgccgccagtccaagtggtaagaagttcagaagcaagcctcagt

SEQ ID NO: 632355 - DNA, 97 bp, Homo sapiens
tcaagatcagctccaggcctgggaaagtgaaggctggagtacgatggcgcaatctccgctcactgcaatctccactgactacaacctccgcctcccg

SEQ ID NO: 632356 - DNA, 91 bp, Homo sapiens
ttgaagtgggagcccagttggaagcccgggaccgtttaaaaaactggtgagccctattcccagaggcaggtggtgctgaccctgtaaccca

SEQ ID NO: 632357 - DNA, 76 bp, Homo sapiens
gagagagaggtggacagatctgagagatactgaggtacaggtttgcagattccgccagcagcacagcaagctctac

SEQ ID NO: 632358 - DNA, 75 bp, Homo sapiens
ggagtgttcagtctggaatttcaagattttgtgaataaatgacacctcacgtgtgccagccccacgctgaccacc

SEQ ID NO: 632359 - DNA, 90 bp, Homo sapiens
tcatcgcagtcctggacacgggggtcgacccgggggctccgggcatgcagatttccatcgttgcatttacaactgctacaaaaatgccag

SEQ ID NO: 632360 - DNA, 51 bp, Homo sapiens
acatcctgctcctgctcatggacgacagcaaacgccctggaggagcagctg

SEQ ID NO: 632361 - DNA, 83 bp, Homo sapiens
actcgtcctacgtaacacagccagttagacacatgcctcactcctgtcagcagttccaccttttcatggttgaggagcacatg

SEQ ID NO: 632362 - DNA, 100 bp, Homo sapiens
aatgttggagcatttgattgaaaaatccttcttagccattttaaagaatctacctgttactcgtattttggacaatcttatggagatgaagtcaaacccc

SEQ ID NO: 632363 - DNA, 80 bp, Homo sapiens
aattggcggcatcaccattgcttggaagtttgattctcgaagcacaagcctatgcagacgacaacagtttgctgttcatg

SEQ ID NO: 632364 - DNA, 100 bp, Homo sapiens
gggtaaacatggtggacagaaagtcagcctcttgtgtgaagctgtggtctaccaatctagacaactcagtggcaagcattgaggcaaaggctaatgtgtg

SEQ ID NO: 632365 - DNA, 98 bp, Homo sapiens
ttggtacctgtggaccagtttcaactttatcagaggttaaaatttgaaagaggtactccaaagattcaggtttactcacgtcatccagcagagaatgg

SEQ ID NO: 632366 - DNA, 82 bp, Homo sapiens
ctcggaaaccggtagcgcttgcagcatgttcaaggagcagggacaagttacaggaatgttctccaagcagcaatccaaaaga

SEQ ID NO: 632367 - DNA, 98 bp, Homo sapiens
ttagccacgcagaagtcgcgtgtctagagacacctatggctgccgatgaaggctcagcagagaaacaggcaggagaggcccacatggctgcggacggt

SEQ ID NO: 632368 - DNA, 100 bp, Homo sapiens
aaacaagactggggctgctcccatcattgatgtggtgcgatcggttatctaccttgcctgctcctatgccacagtgtacctgatctacctgaaatttaag

SEQ ID NO: 632369 - DNA, 100 bp, Homo sapiens
cccggcggcagcacgaaagtaccatctattgacctgaaaagtggttctggaaaagtgtaccaaggccctgcaaaaggtgctgctgatacaacaatcatac

SEQ ID NO: 632370 - DNA, 100 bp, Homo sapiens
ccccgatattccgccgaggggagaaactgcgtgtgatttctgaatttgctaatggtcgttctactgggctgattttggacagtggagccactcataccac

SEQ ID NO: 632371 - DNA, 75 bp, Homo sapiens
gcattaattccagactctgatcacacgccaggttttcctttggaatatggataaatacaccatgatacggaaact

SEQ ID NO: 632372 - DNA, 75 bp, Homo sapiens
gttgttgcatcaaatacttcatatttggcttcaatgtcatattttgggagcagttgcagaagctcgaggttgaac

SEQ ID NO: 632373 - DNA, 82 bp, Homo sapiens
ttcaccgcagtgggctaccataaacacatcaccttgatttttaatcccacgatggtggatgcttccaaaagcatcgaagctg

SEQ ID NO: 632374 - DNA, 101 bp, Homo sapiens
caaatacccctttgaattaattatggctttcctggtccagaactttacacagaaaaggtgctcaaaggatatttgtttaatgaatgtggtatgctgacatt

SEQ ID NO: 632375 - DNA, 90 bp, Homo sapiens
tcaatccagatggcagccagtcagtggtggagggctgtgggacagatgatgtctaccatgttctacccactggtcacctttgtcctcctc

SEQ ID NO: 632376 - DNA, 101 bp, Homo sapiens
atgaggatgaagattcaccaaataagctatatactttggttacctatgtacctgttaccactttcaaaaatggtatgttacttacggtcatgaactgattt

SEQ ID NO: 632377 - DNA, 75 bp, Homo sapiens
cgctctcttccctctgctgggcgtcctgttcttccaggagcaatacttcaagtcagctgcaatgaccctaaacga

SEQ ID NO: 632378 - DNA, 50 bp, Homo sapiens
cgtttccagtcattttaaaaattcagacgtccttctatggccgcttcagg

SEQ ID NO: 632379 - DNA, 129 bp, Homo sapiens
ggggatccgacttgccggcagaacttacgctgcgggaccccgggcactgttgctgctgcgggagggtgaatgtggacttccagaagcagacggtagatcctatgcaagtctcctttaacacatcagaca

SEQ ID NO: 632380 - DNA, 90 bp, Homo sapiens
tggcagtgcgaatggataaaccagcacatatgaagcatagtggtgccggtggtggtgtgcacattgagccccggtatagacagttccccc

SEQ ID NO: 632381 - DNA, 75 bp, Homo sapiens
tccgggctacaggcgacagagctgagccaagcgtttactgggcagctgttacgggatctgctggaggaaggaaag

SEQ ID NO: 632382 - DNA, 83 bp, Homo sapiens
actttgcattgactggaaacaatggcatttacagaaagagtcaacagcagtggcaacaggattcagtggtcccaatttaaagg

SEQ ID NO: 632383 - DNA, 99 bp, Homo sapiens
gagagcgtgaccgagagcgcgaatatcgtcatcgttagaagaaaacatcggttgtgaagagaaagccaaaaagaatgccaacaagcctttgctggatga

SEQ ID NO: 632384 - DNA, 82 bp, Homo sapiens
agacagtcctcgtcagcactgactttcagctatggaatcggctccctggggaagggaatgcagggttgctggggctgggccc

SEQ ID NO: 632385 - DNA, 109 bp, Homo sapiens
atcgactacaaacggaacttgccgcgtcgaggactgtcggatgaccaaaataactgtcctgtgaaaccctgttacctcaatatcttggaagatgagcaacctttaaata

SEQ ID NO: 632386 - DNA, 100 bp, Homo sapiens
caggagcttttcgtaaagggaagtcatttctactggacttcatgcttagatacatgtataacaagattcaaccctatgaaaagataaaggccaggggctt

SEQ ID NO: 632387 - DNA, 96 bp, Homo sapiens
ggttgggtggacatcatgtacgatgggctggatgctgtgggcgtggaccagcagctctttcgacgtgtagcagcagctttgccgggaatggaaagc

SEQ ID NO: 632388 - DNA, 75 bp, Homo sapiens
cttgtattcttaaatgggcagagtctgaagatgatgagaaactgaaaaagaggaaggagcgatttgggattgtca

SEQ ID NO: 632389 - DNA, 100 bp, Homo sapiens
agactcatgtagcatctgccccagcaaaaaatcgtggaattgccattccagtggatttggacagccaagttaatactcttttcatgaagagccattcaaa

SEQ ID NO: 632390 - DNA, 96 bp, Homo sapiens
ttcccccgagggtcaacgagaaagagatcggtattgagaaggggcaaatcctgtcttcagcagcagacattgctgccacagtacagcacacaatgg

SEQ ID NO: 632391 - DNA, 78 bp, Homo sapiens
ggcgctccaaggcccgcccgggagggccggggccgcgctcaggttgaagtcaaggaccaacaaagcaagcaggcttta

SEQ ID NO: 632392 - DNA, 100 bp, Homo sapiens
tagctaataaccaactgcaattcctacctccagggaatggatttgtaaactcaagagcttctccaaatttgattggagctactggtgcaaatagcttagg

SEQ ID NO: 632393 - DNA, 100 bp, Homo sapiens
gggacacaggagtcttcctacagtacacacacgcccgcctccacagcatgttggcagataaattgaacatgactccagaagaagctgaaaggtggattgt

SEQ ID NO: 632394 - DNA, 73 bp, Homo sapiens
ggggagtcccagacagtacttagcagtggctcagacccaaaggtatggtgctgggtgcagatgcagtgtggct

SEQ ID NO: 632395 - DNA, 74 bp, Homo sapiens
gccacacagtgtccagatacgaggtggacgtgatgctgaatccaggcagtgccacttcgaatgttgctatttct

SEQ ID NO: 632396 - DNA, 95 bp, Homo sapiens
ccgaagcttccggacgacgaggaaccgcccaacatggcctcggaggaaaaaagggttgctcattttgggtatcactggagtctgatggaaagaga

SEQ ID NO: 632397 - DNA, 100 bp, Homo sapiens
cgggctgaagcgactgagtccgcgatggagataagtttataccatggatagcacaaaggagaagtgtgacagttacaaagatgatcttctgcttaggatg

SEQ ID NO: 632398 - DNA, 50 bp, Homo sapiens
tggaaactgtacattgaagcagagacaggtgcagttcaggagcagatgag

SEQ ID NO: 632399 - DNA, 97 bp, Homo sapiens
ttttgagccactatattaaaactgctaagggatcatagacggtatttctatgtaaacgaacagtcgggcgagtctcagtgggagtttccagatggtg

SEQ ID NO: 632400 - DNA, 82 bp, Homo sapiens
gaaaacggcgagagtgggcgagaacgtccactgcgggccggcgaaagctggagccttcacgtaaatgggtccagtcatgcct

SEQ ID NO: 632401 - DNA, 100 bp, Homo sapiens
ctacttggtgtttgcattggagaaaagcgaaggattgtggtcccgcctcacctggggtatggagaggaaggaagaggtatctctgatgaatatataacac

SEQ ID NO: 632402 - DNA, 82 bp, Homo sapiens
ggtccctgctggagtatgctggctctattaccaggttttaaacttcgccatgatcgtgtcttctgcactcatgatatggaaa

SEQ ID NO: 632403 - DNA, 100 bp, Homo sapiens
gaatgaaggaatcctctccatctggttcgaagtctcagcggtattctggtgcttatggtgcctcagctcctctggtgcaagtgtggtagctattgacaac

SEQ ID NO: 632404 - DNA, 82 bp, Homo sapiens
caactgaacttcatcgctcctgacaagcatgagtgctacacacgcagggccctgtcgatggcagcctttacgcgaaggtgag

SEQ ID NO: 632405 - DNA, 50 bp, Homo sapiens
atttaggagctctgctcaaagccagacgcaacgcacctcttgctttttcc

SEQ ID NO: 632406 - DNA, 82 bp, Homo sapiens
gtgggcctgtggactgcagcctcggcggtcagcagggcagcgaggtcacaggccccacctttgctgatggcgagctcatccc

SEQ ID NO: 632407 - DNA, 90 bp, Homo sapiens
ccgccagcatgttgggcgccccggacgagagctccgtgcgggtggctgtcagttttgtaccaatggctagaagcagatcgtcatggcaag

SEQ ID NO: 632408 - DNA, 75 bp, Homo sapiens
ccccaagcccccacagctactccaacccaaacaacaaccaagccagtttaatgggaggttatattcaaaagaaaa

SEQ ID NO: 632409 - DNA, 95 bp, Homo sapiens
cgagccgggccgcggcgccgagtcgaacggggagccgagctggagctgccgcggcgcagccagaccatggtgaatccgggcagcagctcgcagcc

SEQ ID NO: 632410 - DNA, 101 bp, Homo sapiens
acatttcaacgagtttgtcatcatgtgagagagaataggtggttatcactaggctaaaactggacaaagaccgcaaaaagatcctcgaacggaaagccaaa

SEQ ID NO: 632411 - DNA, 83 bp, Homo sapiens
cagatttgcagatggctctgctgtagtacagctggacagtgccacatcgcttatccaggcagctaaaaacctgatgaatgctg

SEQ ID NO: 632412 - DNA, 75 bp, Homo sapiens
atcatttgcagcaaactcagcactttactggggcttccggatgcagatgacgatgcgtttgaagagtacagtgct

SEQ ID NO: 632413 - DNA, 90 bp, Homo sapiens
tgtggaagaaatgggcatgccagatgcctggaagatcagaggctcacattccagggcagagcggcttgggtaaatccaccttaatcaaca

SEQ ID NO: 632414 - DNA, 100 bp, Homo sapiens
aaccagaaaagatacgaggctctaggagagtggctggcacatgtgtatcaatcccaaggaatgatgagagctgcagagatgtgttacagaaagagtctac

SEQ ID NO: 632415 - DNA, 100 bp, Homo sapiens
ccagcactctgatccgccaagtcttggacgccgtgtactatctccacagaatgggcatcgtccacagagacctcaaggaggatgaactctgcgactctgg

SEQ ID NO: 632416 - DNA, 83 bp, Homo sapiens
cttaaaacggaggaacaaatccaaaaagaataacagcagtagcaggtaatttggcaatctgaaagcaaatcctgtttagatgc

SEQ ID NO: 632417 - DNA, 100 bp, Homo sapiens
taattgagtacacgttcctgttgagtacacgttcctgttttaatgctgctgacaataaacagagggataagaacatgacttgtattaaagtttctattga

SEQ ID NO: 632418 - DNA, 100 bp, Homo sapiens
gacaccttctaagagtttggcgagtcagtgactgaagcgcccgtccattccaaggtgtcatggagaaactccagctgggcccagagattctgcagcggga

SEQ ID NO: 632419 - DNA, 100 bp, Homo sapiens
cgtgtggaaccgcacgcgtggcatacggaaggccagcgatctgtacatgagacccaggaattatttccaaagcaagattcatatgctgaaggggtaacag

SEQ ID NO: 632420 - DNA, 97 bp, Homo sapiens
gaggactgcctccccacaccaccgaccaggacctggtgaagctctgtcaaccgtgtaactgtgtggaaccgcataatcccagcaatggcacattgaa

SEQ ID NO: 632421 - DNA, 95 bp, Homo sapiens
gtcatcatgctgaccaccaatcagatccgtaagggactttgaacatgtcggggatcgccctcagcagactcgcccaggagaggaaagcatggagg

SEQ ID NO: 632422 - DNA, 100 bp, Homo sapiens
ttcctttttcgacgcctccgccgccgcctgaggaggcgagctagccgggagttacaccgccaccgccaggcccagaaggatgtggatgctgtggacaagg

SEQ ID NO: 632423 - DNA, 82 bp, Homo sapiens
cggaacccgagcggggcctaccggtgagaagccctaccactgcaactgggacggctgcggctggaagtttgcgcgctcagac

SEQ ID NO: 632424 - DNA, 90 bp, Homo sapiens
tttcgaccttcaatccagttccaaggactccacggggttcagacagtaactttaattccaggagatggtattggcccagaaatttcagct

SEQ ID NO: 632425 - DNA, 75 bp, Homo sapiens
gattacaatgatgcagacatggcgcgtcttctggagcaatgggaggatagatcactgcgaccagaggaaattgaa

SEQ ID NO: 632426 - DNA, 98 bp, Homo sapiens
gcgccccgctggaggagctccccagctggtggctggagcgaccccttgttctttggtggcgctggtatctctcctaaatgtgtgatcaaggaattacc

SEQ ID NO: 632427 - DNA, 75 bp, Homo sapiens
gcaagagaatctgaacctcgtctgtattcccacttccttccagtttgtgaagtgtggatatgcaggctctaactt

SEQ ID NO: 632428 - DNA, 89 bp, Homo sapiens
tgctgctgttagatgaaagacaagatgtccatcttctcatgaccaactgtatcaagaaggcctgcttccgcgaggccaacatcccaacc

SEQ ID NO: 632429 - DNA, 80 bp, Homo sapiens
gcagcgcgtcgtggggcgagcggcaggaacttgctactaccagcaccatgccctaccaatatccagcactgaccccggag

SEQ ID NO: 632430 - DNA, 83 bp, Homo sapiens
caagaacctccaaagagcattgaagaattcttaaagtttcaaaattggggagtggagcttggtttcgggatctcggtgctgca

SEQ ID NO: 632431 - DNA, 96 bp, Homo sapiens
gaataccaagctcggatccctgaatttgatccaggatgcatcatctgcagacatcagaaaagcatatcgtaagctttcactaactttacatccaga

SEQ ID NO: 632432 - DNA, 80 bp, Homo sapiens
ccgaggaggcagccaagctcatggcctgccactgcgtgcctttgcccgaagtttttacatacaaattctactagtcacac

SEQ ID NO: 632433 - DNA, 100 bp, Homo sapiens
taccgcaagggcaccatctccttctttgagattgatggacgtaagaacaagtctgcagatctccaggggagcccaccagcctagtcaacatggcctcgga

SEQ ID NO: 632434 - DNA, 100 bp, Homo sapiens
gagttcattgcaaatctgcaaggggtaaatgagggtgttgatttctccaaggatctgctgaaatcttcccaagggattgttgaagaaacttctgaagagg

SEQ ID NO: 632435 - DNA, 90 bp, Homo sapiens
gggctcagttgattctcccgcctcagcctcctgagaagctaggactacagtcaaacgcttcagagaaccaaagcatgaaagacgtccgtg

SEQ ID NO: 632436 - DNA, 100 bp, Homo sapiens
cacgggccctggggaagagaagcagttcctggagaacattaaccaggtggtatttgttggaaatttcttgagaattaatacgatcgccatgcggcttttg

SEQ ID NO: 632437 - DNA, 76 bp, Homo sapiens
agcaaggtcttggacaagtcaaaggcggcaggtccaaagaggactggtgatctacgtgtgctttttcaagggagct

SEQ ID NO: 632438 - DNA, 100 bp, Homo sapiens
cgtacccgccgccgccgttggctggagttatagctgaggtggtaccagtttaagaagtgagaacttcttcactgactgaaatttgcatatcaatccaaat

SEQ ID NO: 632439 - DNA, 100 bp, Homo sapiens
cgccgcccgcagcctgccgcccgccgcagggcgctgacggtcccgcacgtctgccgctgccaccggcgcgcccgaatggcccactgcgtgaccttggttc

SEQ ID NO: 632440 - DNA, 50 bp, Homo sapiens
accatgtacagtgaactgcctgaagaggacaacataacgatgcacggatg

SEQ ID NO: 632441 - DNA, 97 bp, Homo sapiens
ccctggtccagctgcagccactgacagtcgttccccatcaggaagtcctcgcagaagtgcaagtcctgaaagaatggactgaagctctcaagttcac

SEQ ID NO: 632442 - DNA, 83 bp, Homo sapiens
atatctgtcttcggtggactccttcggcagtccacccaccgccgccgcctcccaggaatcccagtcagaagttccagcctgcc

SEQ ID NO: 632443 - DNA, 98 bp, Homo sapiens
ccctacatgaaggatcttggtgcacaggtctgggaggggctgaacgtggtgaagacaggccgagtgatgcttggggagaccaatccagcagattcaaa

SEQ ID NO: 632444 - DNA, 100 bp, Homo sapiens
cttctgggacgcacagagaccgtgaagattccaagttcaggagaactcgaccggtgaagtatttgactatttggttgcacatggcaggatgaaggaaaaa

SEQ ID NO: 632445 - DNA, 99 bp, Homo sapiens
cagaataccaagaacgctgccggcaggaggtgcaagagcttctgaaggaccgtgagcctaaagagattgaatggatgccacagctgagcctgtcctcgc

SEQ ID NO: 632446 - DNA, 80 bp, Homo sapiens
agcagcgtcctccccaccccacctgccaccgaggccccctcttcgcctcctccaggtcaaaatgcagatcttcgtgaaaa

SEQ ID NO: 632447 - DNA, 75 bp, Homo sapiens
tgctatgatgatgaatgctgtctttgtaaagcttcataaacaagcagatatgcaagaagagaaaaaccgaatcga

SEQ ID NO: 632448 - DNA, 74 bp, Homo sapiens
aggatggaatccactggcctccttgaagactgggatagtttccaagctattttggatcatacctacaaaatgca

SEQ ID NO: 632449 - DNA, 80 bp, Homo sapiens
aactcaagtcaccgtggagctccgccgccccgaaactttcaccgcgagcggggcgccctgcgtccggcagaggaggcgag

SEQ ID NO: 632450 - DNA, 96 bp, Homo sapiens
aaactcttgaaaaaggatccaggaaacgaagtgaagctaaaactctacgcgctatataagcagggtttctttcggagaagtattcaacaaaacatc

SEQ ID NO: 632451 - DNA, 50 bp, Homo sapiens
ctcagagcttggagacagacggtacatccaagcagaagtccagttccctc

SEQ ID NO: 632452 - DNA, 75 bp, Homo sapiens
gagtgatattgaccatgatggaatgcttgacagagatgagtttgcagttgtgaattttaagaaggacaccacttc

SEQ ID NO: 632453 - DNA, 51 bp, Homo sapiens
tgacatgccagcccagactttcatattgtgttcagtgtggacccctccgag

SEQ ID NO: 632454 - DNA, 80 bp, Homo sapiens
cttcgaggaacagagaaaatgaaaccagcagacagaatttgtcagagaagaagagctgtgtcatcattccagttcttcaa

SEQ ID NO: 632455 - DNA, 98 bp, Homo sapiens
cggggtcctccctgcaccgggggagcgctacgagtcccagcggagcgccgcagcacagcgccatggacaaactggtttccatggatctcaatagtgcc

SEQ ID NO: 632456 - DNA, 100 bp, Homo sapiens
caggaccagctgcagctgctgtggattttcaagacacgaatgctcggagtctggcagaaaggaagagagaagaggagaagcagaagcacttggataaaat

SEQ ID NO: 632457 - DNA, 75 bp, Homo sapiens
gaaggcgctgatcccctgcaagaggggaaggggaggagttacagcccggccagttggagttgtagtaccacgagg

SEQ ID NO: 632458 - DNA, 91 bp, Homo sapiens
gatggaaaaccagttattgaatatcaagaggaggagttgttgagacgagttgtactgctgtcacaggaaatggacgctggattacaagcat

SEQ ID NO: 632459 - DNA, 82 bp, Homo sapiens
cagggcctgcagcgggagctggacggcgagcgcgagcggcgcgagaaacctggcagcaggtgcaacagcagctggatggtgg

SEQ ID NO: 632460 - DNA, 101 bp, Homo sapiens
ttttgatggctactatgctgaacggtgcagcagtgatggatgcagctcttctgttgataggagctgatggtacacacatggatggtgatcaaattgttgtg

SEQ ID NO: 632461 - DNA, 90 bp, Homo sapiens
ggttaagggaaagcgccgagatgacgggctttctgctgccgcccgcaagcagagtgggcaggcttggctgaaatgagaactgctgaagca

SEQ ID NO: 632462 - DNA, 96 bp, Homo sapiens
aacccggccatcgaggccctgctgcacgacctcagctcccagaggatcaccagcgtgggagtgcccgtgcgcagcggagatgccaccttccccaaa

SEQ ID NO: 632463 - DNA, 75 bp, Homo sapiens
cgcagatgcccaccggaatggagaaggaagaggagtcgggtgaagagggaacagaaatctttgccccctgacttt

SEQ ID NO: 632464 - DNA, 90 bp, Homo sapiens
atgccaacaagattcagaagaactgttgaaactagcaacatctataagtgaaaccttggaagagaaggaacttacaatgtctcagaaaaa

SEQ ID NO: 632465 - DNA, 100 bp, Homo sapiens
gacaagagcagttagaaagggaacagctggaatgggagagagagcgcagaatatcaagtgctggttgccgaggagcccaagtagaagaaatatggagttt

SEQ ID NO: 632466 - DNA, 90 bp, Homo sapiens
tttcaaccataaagacatcttaattgggcacgaaagaggtcgttcttccctctttccaatagatgatggcttgcttgatgatggtcacag

SEQ ID NO: 632467 - DNA, 101 bp, Homo sapiens
atcatgggtagcctttgataaacagattctgaaaagaaatcatctctcctgtcagaggaacaacaagaaacaagcactttagtagaaaccatcaggcagag

SEQ ID NO: 632468 - DNA, 75 bp, Homo sapiens
atgtgcggcgcccgctgtataagagctcagagttctacagagtcaccactgaacaatatcagaaagctgctgaag

SEQ ID NO: 632469 - DNA, 51 bp, Homo sapiens
gctgaggtcagcttcccagagaggaagatggagtctcgctttgtcgcccag

SEQ ID NO: 632470 - DNA, 90 bp, Homo sapiens
gttgaagttgtttatacaattggatcacaccaagctcatcttgtgcccactgatggcagccgtgacctacatcgacgagaagcgggactt

SEQ ID NO: 632471 - DNA, 99 bp, Homo sapiens
aggagggaaaaatatccagcaaaaccgctgctaaattgtcaactagtgctaaaagtgccggtggtggtgtgcacattgagccccggtatagacagttcc

SEQ ID NO: 632472 - DNA, 75 bp, Homo sapiens
cacaaatgcaaatacttgtgcactgggagaggaggcaagtgaggcctatctggttggcctttttgaagacaccaa

SEQ ID NO: 632473 - DNA, 75 bp, Homo sapiens
atcgccgcctcagccgccgccgccgccgttttcgcctgcagctgctcaccgaactcctctttcctaaaatggagt

SEQ ID NO: 632474 - DNA, 100 bp, Homo sapiens
cgaggctgctaagagactaaaaactggcgatggaatatgagaggagccctctggaaagaaaaggacagaccctgtgctttcatgaaagtgaagatctggc

SEQ ID NO: 632475 - DNA, 149 bp, Homo sapiens
gcagacccctacgaggaagcctggaaccagatgctgctccggaggcagaaggcccggcagctggagcagaagctgtcggaaaaggtaacagaagatggaactcgaaatcccaatgaaaaacctacccagcaaagaagcatagcttttag

SEQ ID NO: 632476 - DNA, 98 bp, Homo sapiens
aatgagaagaagcccttagcctaatgaagcgataaggtggagccgccaccaaaatgcagattttcgtgaaaacccttacggggaagaccatcaccctc

SEQ ID NO: 632477 - DNA, 83 bp, Homo sapiens
gtacgggggtggtgccgcgctcctggccccgcgcgggcggacggcggaggcgcctcccagcacttgcacctcctgcgccgccg

SEQ ID NO: 632478 - DNA, 75 bp, Homo sapiens
aaaaatattatggtctttgtgcacatttacatcaaggatgaccagtgtcccagtgaaggaacgagtgaaggtgtc

SEQ ID NO: 632479 - DNA, 98 bp, Homo sapiens
ggagcccagaagctgccaccgaaccaagcttccaccaacactttcttccaaatatcctgaagatgacccagactactgtgtgtgggtcccacctgaag

SEQ ID NO: 632480 - DNA, 75 bp, Homo sapiens
cgagctggacccggaccggttttggacccgaaaaatcctgtctgcctgtgagaagaatcccacagatgcctacca

SEQ ID NO: 632481 - DNA, 90 bp, Homo sapiens
ctcttcatcaccttcgtggtcgtctggtcctactacgcgtacgtggtggagctctgcgtgttttgcccagtatgcggagatcgtccactt

SEQ ID NO: 632482 - DNA, 51 bp, Homo sapiens
tcgcatctgagcctgccgatgacactgaattctgcttggtcagaatcgtga

SEQ ID NO: 632483 - DNA, 95 bp, Homo sapiens
cgggacggctgccggcctgtgtggtggactgtggcacggggtagtaagcattaataatgtctttcatctttgagtggatctacaatggcttcagc

SEQ ID NO: 632484 - DNA, 83 bp, Homo sapiens
gctgagtaccgcggcgggcgcgagcgaggcgccctagacatcttctccctcccttgcctcagtatcgtcagtgaagcaggagc

SEQ ID NO: 632485 - DNA, 100 bp, Homo sapiens
cctgtccctcggccccctgagtgagtccggtctcccggcgaaagtgagcgaggtttgcccggagcgcgcacgagaaacgagaggtgaataccgttttggc

SEQ ID NO: 632486 - DNA, 75 bp, Homo sapiens
gcgcgctgcaacacaagatcaagaactccatctggacacattcagctaacgtattttagcaggtggagtgaggtt

SEQ ID NO: 632487 - DNA, 118 bp, Homo sapiens
ccgcgccggatctgctcggccgcccgggaccgccagctctgtccgctgcccacagcctagcagtcgggaccgtactgagacagcccacctgaggatattgaccataaggactcatatc

SEQ ID NO: 632488 - DNA, 86 bp, Homo sapiens
ggggtggagcgtgtgtggtgtgtggctgcggcctgggcaagagccgccgcggaccatgagggcaaggggacgcgagataaggtcct

SEQ ID NO: 632489 - DNA, 95 bp, Homo sapiens
aaccacatcgtgggcagtcccttcaaggccaaggtgacagcttcttggacacttaatgattgttggcaagaaatgtgctgctgatctgggcctga

SEQ ID NO: 632490 - DNA, 101 bp, Homo sapiens
gacaaaaaaattcctggaaaaagaagtccaagaagcaaaaaagggactgctaagaagataccaccagaccctcaaactgacacaagacctacagagaaaac

SEQ ID NO: 632491 - DNA, 79 bp, Homo sapiens
gcgagcgcccggattggggatgagtatgcggaggacagctctgatgaggagggaaaaagacctcgatgaagttctgcag

SEQ ID NO: 632492 - DNA, 100 bp, Homo sapiens
gcccgagccaggccggagctgaggagaacgactgggttcgcctgcccagcaaatgcgaagaagtaaaatgcccattcccatcaagaccagacaatggatt

SEQ ID NO: 632493 - DNA, 100 bp, Homo sapiens
tatgttcaatataagaaatattggaaagacgctcgtcaccaggacccaaggaaccagtggtggaggtggatacagcagtcggagaacatctggcagagac

SEQ ID NO: 632494 - DNA, 90 bp, Homo sapiens
cacgtgggccggcggtccacggccggaatggcagcaagctcaggttatgatgtgattgctcaagcccaatctgggactgggaaaacggcc

SEQ ID NO: 632495 - DNA, 82 bp, Homo sapiens
gccctgaggctgcaccaagtggcgaaggagccggctccaagccccctcggaaaaccacactgagagttgcattaaaaaccag

SEQ ID NO: 632496 - DNA, 100 bp, Homo sapiens
agagttgtccgtaatgcctttcatttctgctggatttacaaggctgagatctgtatctgtggacctgaatgttgatccctcgcttcagattgacatacct

SEQ ID NO: 632497 - DNA, 51 bp, Homo sapiens
ggagaggagcgtcaacagcagcaccatggggccgttgctccagggagaact

SEQ ID NO: 632498 - DNA, 75 bp, Homo sapiens
aagctcatcgagaagtgctggaccgaggacgaagtgtcattggagaaatcgatgaagaaacagattctgcgcttg

SEQ ID NO: 632499 - DNA, 75 bp, Homo sapiens
ggcagagcttgacccaggcactagtatctctggagacaaagtagagatagaccctgttacgaatcagaaagccag

SEQ ID NO: 632500 - DNA, 74 bp, Homo sapiens
gcagatgttgtcaaggtggcctaccaggaggccaggggtgtcgccatggttacgggtaaattccggggaggtgt

SEQ ID NO: 632501 - DNA, 127 bp, Homo sapiens
tgttgatttagctcaaattattgaagcctgtgatgtgtgtctgaaggaggatgataaaggcattgaatgccccagaggagcccgaaacctcccaggcttggtgcaggaaggagagcccttcagcgag

SEQ ID NO: 632502 - DNA, 87 bp, Homo sapiens
tcaagcttaggaccacccaccatgcctatccagattagtgatgatgaaccaggttatgaccttgatttattttgcatacctaatcat

SEQ ID NO: 632503 - DNA, 82 bp, Homo sapiens
cagccattgaaaagtgtggagaagctgctttaaatagctattaagaatggcaaaggattgcatagcaagaaggaagtgccta

SEQ ID NO: 632504 - DNA, 100 bp, Homo sapiens
gggctatttgattattgaagaagattttaatattgcactaggagtttttgctttagctggactaacagatttggggaaatcagccttatggtcccacctg

SEQ ID NO: 632505 - DNA, 75 bp, Homo sapiens
cactccccagggcagaaatagcgaccatggcgagaggcatcccaacacgctgtcttttcgctgctcgctggcgga

SEQ ID NO: 632506 - DNA, 75 bp, Homo sapiens
gcctgaaggaggagaatgagaaactgcgctcgctgactttcagcctggggacaagcaggccttcgcactatcacg

SEQ ID NO: 632507 - DNA, 83 bp, Homo sapiens
agaagatggtgcagaagaaaccagccgaacttcagggtttccaccgttcgttcaaggaacccaagacagaccaggatgaggag

SEQ ID NO: 632508 - DNA, 100 bp, Homo sapiens
gtcttcgcaagtgccatgatgcatgccttagaagtgttaaattcacaggaaacaggggccgttgacatttagggatgtggtcatagaattctctcaggag

SEQ ID NO: 632509 - DNA, 88 bp, Homo sapiens
aatggaagatgatccacgcagggcaaaagaagctgaaattatgcttcactacattgaaagtagagacagggtttcgccatcttggcca

SEQ ID NO: 632510 - DNA, 98 bp, Homo sapiens
aaagaatgaaattcttcatctgaaattacctctcagactttctgtaaaggaaaacaagctgtcacgggaagtctttttaggataaacgtaggcctgcg

SEQ ID NO: 632511 - DNA, 115 bp, Homo sapiens
atgaccctaatggtctttttgttcaagataaagtgattttttgcctttgttgattaactggacaaattcagaggctgataaaataccagtaatgcgtggacagtggtttattgac

SEQ ID NO: 632512 - DNA, 89 bp, Homo sapiens
tttgacttgttcaagtgtccactgtggaagctttctaaaaccaatttttccaacaacaacgatttccgtgctcttctgcagtctttgta

SEQ ID NO: 632513 - DNA, 110 bp, Homo sapiens
cctcccttgtagctgggactacaggtaagaagaaagcagcggcattgttcgacagccaggccccaatttgccccatctgccaggtcctgctgaggcccagtgagctgcag

SEQ ID NO: 632514 - DNA, 83 bp, Homo sapiens
gggaaaaggcaaaaatcccatctaccgcaactctcagttcgagagtaaagaagctggcagggcggagatgctggaccacgccg

SEQ ID NO: 632515 - DNA, 82 bp, Homo sapiens
ttcggtttcagttggagttggaatttgtgcaatgtttagccaacccaaattaccttaattgaaatcatcgagttccccatcc

SEQ ID NO: 632516 - DNA, 98 bp, Homo sapiens
agtgtgtccacaaagggactcctgaaactgactgagagccagtggatttgccagcagtctgatcagacactcctctaatttacaaagcagtgcccagc

SEQ ID NO: 632517 - DNA, 75 bp, Homo sapiens
gacgcgtgccgcggcgcctggttgcctgcagcggcccggacccgagagctggagttaaccgaatttcatactggc

SEQ ID NO: 632518 - DNA, 83 bp, Homo sapiens
cgacgcggacagcgggctggagcctgacgagctggcggaacatgaaaggctcccggagcagcgctgactcctccaggaaacac

SEQ ID NO: 632519 - DNA, 140 bp, Homo sapiens
ggccggaggacatgcgggagagagaatgagccagagggacacgctggtgcatctgtttgccggaggagtcagtggcctttcccccttcatgggagacaacgataacgaaaccttggccaacgttacctcagccacctggg

SEQ ID NO: 632520 - DNA, 90 bp, Homo sapiens
gcttgccgccctgtaggcttggcgctgggctctcggcattggaggtgatccttttaatggaacagattttattgactgcctcgaaatctt

SEQ ID NO: 632521 - DNA, 82 bp, Homo sapiens
cggctacagcctgtgcccgggccgggagctgggcagatgccgctcctacgaggactgctgtggctccaggtgctgtgtgcgg

SEQ ID NO: 632522 - DNA, 83 bp, Homo sapiens
aagatctcaagatctggactactgttgaaaaaatttccagtgaggctatgactttgcagccgtcctggagtggttcgcggagc

SEQ ID NO: 632523 - DNA, 82 bp, Homo sapiens
aagatccttctgtagtatattttcagtgctgccgtatcgcgacagtacccaagtcgggagctctgccagtgccggccgggag

SEQ ID NO: 632524 - DNA, 100 bp, Homo sapiens
tcaagcaacttgaagataacattcagagagttgtggaaagtaaaaatgtagccctaccaaaaggaactattgtactggcttctccaggctggacaacgca

SEQ ID NO: 632525 - DNA, 85 bp, Homo sapiens
ttgacaagtgatgagaagctgtcggagcttcccaaggagttaaagttcctcgtaattttcgcttgttggaagaacttgaagaagg

SEQ ID NO: 632526 - DNA, 100 bp, Homo sapiens
gcctagaatgcatcagtgcccttgtggcgaatggggctcacgtcgataaaatcacctatgagactcagatctccccacggccccaacctgaaagtgtcag

SEQ ID NO: 632527 - DNA, 75 bp, Homo sapiens
atcaactgtagctggttcataagggcaaacccaggcgaaatcattactataaggcagcttgaaatccactctcca

SEQ ID NO: 632528 - DNA, 82 bp, Homo sapiens
cgctgcactaacgcaggatccggctgccgaaggtcctcgccagatgaaggatttgggggcagagcacttggcaggtcatgaa

SEQ ID NO: 632529 - DNA, 100 bp, Homo sapiens
ccgggccgtgccccagatgcccaccgggatggagaaggaggaggaatcgatgcctggaatgatgtcgtcagtaatgcctggaatgatgatgtctcatatg

SEQ ID NO: 632530 - DNA, 50 bp, Homo sapiens
ttggaatctcgagcgggaaaagacggcctttcttagcatcttgatgagat

SEQ ID NO: 632531 - DNA, 82 bp, Homo sapiens
cctctcctcgccctgctcccccaaaccggcgtggctccccgggcaccaaggtgtgggtacgccacgctgcatcacgtcattg

SEQ ID NO: 632532 - DNA, 83 bp, Homo sapiens
ctgagctgctccaggacttgggagagaagaagaaggaggttcctgctgtgccagaaacccttaagaaaaagcgaaggaatttc

SEQ ID NO: 632533 - DNA, 51 bp, Homo sapiens
cctggtcctggacatcgttgagggtggcggagagaggtgcgcatcaagaag

SEQ ID NO: 632534 - DNA, 101 bp, Homo sapiens
gctatggccgtgccctggggctgagccctcaggttttaaaatcaaagatgggaaaatcggagaaaattgcccttccccatggccagcttgttcatggtata

SEQ ID NO: 632535 - DNA, 75 bp, Homo sapiens
caagccaacaacagtgacggaatgcctccatacatgttggtcaaagaaaaagtgatgtatgaaaaagaggcaaaa

SEQ ID NO: 632536 - DNA, 100 bp, Homo sapiens
cgggaccacatgcttcgcgggatgcccttaagcctggctgagaaacgcagcctgcgggttcagcgacccctactgcctgctgggcattgagcagggggta

SEQ ID NO: 632537 - DNA, 98 bp, Homo sapiens
aatatattcattttggcattgtgcagaggtccgcccgtctgcgcccctcacaggaagccggagggtcgctctgatcccgaatctcccacaggcgtgaa

SEQ ID NO: 632538 - DNA, 100 bp, Homo sapiens
gtgataaccatgtttgtacagcgacagaaactgccagaggcatgcagcattggtgatggaaagccctttgtcatgaatctgcaggatctgtatatggcag

SEQ ID NO: 632539 - DNA, 82 bp, Homo sapiens
tcagtcatcttcaagtgtctggagcccgacggtctctacaacaaaatctagtgaattcattttccttgaactacacaatcct

SEQ ID NO: 632540 - DNA, 95 bp, Homo sapiens
gtggcgcctaaagtctgagagagggaagtcgcctctgtgctcgtcactcctggaagcaaggcggctctagctaatttatgtattggagatgtaat

SEQ ID NO: 632541 - DNA, 87 bp, Homo sapiens
ctgctgggcctgcccttcaccctctacatggccggtctaattgaagccaacggagaactcaaggtcttcatagaccagaaccttagt

SEQ ID NO: 632542 - DNA, 82 bp, Homo sapiens
ctgtgtctgtttttgtttcatatggtcaagaatgttttagaaactctccagaaagagcaacagtaatggagtacatgagcac

SEQ ID NO: 632543 - DNA, 98 bp, Homo sapiens
atgaagcgcaccccgactgccgaggaacgagagcgcgaagctaaggtatctgcccaaactggaacttatgctgtagacatttctttgtggtttatcta

SEQ ID NO: 632544 - DNA, 90 bp, Homo sapiens
ctggattataaggatgtcatccccatggctgatgcagcaggcatcatccgctatgcaattgggacagcacccaagaaaacctcatttggc

SEQ ID NO: 632545 - DNA, 109 bp, Homo sapiens
gggggccgaaggcagttctgcaagaggagctattctgatcttggttgttcctcaaagtcattcaagctgtactcgccgaaggagcccccgaacggcaacgcctttcccc

SEQ ID NO: 632546 - DNA, 100 bp, Homo sapiens
aaggccctggacacagcaatatctctgggctttcacagatctcatggtggatgttcctggacatggaaaggtgatggtggacattgcatatggcggtgca

SEQ ID NO: 632547 - DNA, 100 bp, Homo sapiens
agcaaggcgacgaaccttggagagaggagaacgaacatcttctggacctttgtccagggttatgtaccgaaggactctaccgtgtcagcgggaataaaac

SEQ ID NO: 632548 - DNA, 100 bp, Homo sapiens
tgcggtggcagctgctgagttctcggtgaaggtccccttcccctgagcccatctacaatagcgaggggaagcggcttaacacccgagagttccgcacccg

SEQ ID NO: 632549 - DNA, 100 bp, Homo sapiens
gggaaatgggaatgtacacgataattaaagagtaaagttgtgctcaacggtgctggagaatctggtaaaagcaccattgtgaagcagatgaggatcctgc

SEQ ID NO: 632550 - DNA, 82 bp, Homo sapiens
ggagcagtccagcggcatgaccattttcttcagcctccttgtcctagcgatgtgcattttgtaagcactttggagccactat

SEQ ID NO: 632551 - DNA, 89 bp, Homo sapiens
tcgtacgctgtgaaggcatcaacatttctggcaatttctacagaaacaagttgaactatcgtggctccacgggctttggccaggacagc

SEQ ID NO: 632552 - DNA, 74 bp, Homo sapiens
gctgtgggaagagctccctgctggctgccatcgctggagagctccacaggcagcggaggaggagaaagagatgg

SEQ ID NO: 632553 - DNA, 75 bp, Homo sapiens
agaccttcaagtttgtcgtcgtcggggtcctgctgcaggtactccaaagattcaggtttactcacgtcatccagc

SEQ ID NO: 632554 - DNA, 80 bp, Homo sapiens
tctgggctcctgttccctgtgagctgcctggtcctgctgcaggtggcaagctctgaccccccaaagacacacgtgaccca

SEQ ID NO: 632555 - DNA, 90 bp, Homo sapiens
gtggaaccgtaaaagccccaatcttagcaagtgcggggaagagctgggtcgactcaagctgtgtcagcgtgttatgatgccgtcccgtac

SEQ ID NO: 632556 - DNA, 100 bp, Homo sapiens
acgcggtgctcctcgggcgccaagcgtttaatgcgctgaaggttcccgtgccagaggataaatatactgcccaggtggatgccgaagaaaaagaagatgt

SEQ ID NO: 632557 - DNA, 85 bp, Homo sapiens
tgatcaggtggaacagattcagaaggagcaggattaccaaaggtgctttgacctggagtcgtacctgcagctcaactgtgagcgg

SEQ ID NO: 632558 - DNA, 100 bp, Homo sapiens
tcgactcggtcctgtttcgacagcgaacatgtcgcggcctgtcagaccttacacataggaagctcacacctggctccgccaaatccagacaagcagtttc

SEQ ID NO: 632559 - DNA, 51 bp, Homo sapiens
ctcggctacaacatttggcagaggactgatcctttgaaatactccagccat

SEQ ID NO: 632560 - DNA, 100 bp, Homo sapiens
cttcaagtatggatgagtatgtccatcaggctttgatgacagtagggaaagaaccatttcctaccatttacgtagattcacaaaaagaaaatgagaggtg

SEQ ID NO: 632561 - DNA, 75 bp, Homo sapiens
gattgaatacgatcctgaaagaagattaggtggtgaagcagtattttccaatttgaagattcatttgaaggtggc

SEQ ID NO: 632562 - DNA, 98 bp, Homo sapiens
tcccagctactcgggaggctgaggtggtatgcagatcttcgtgaagaccctgaccggcaagaccatcaccctggaagtggagcccagtgacaccatcg

SEQ ID NO: 632563 - DNA, 75 bp, Homo sapiens
cgagtggggcggacgcgcgcagcccgcccgcccggcgaccagcaagtggaagatagatgataagcctgtaaaaat

SEQ ID NO: 632564 - DNA, 99 bp, Homo sapiens
ggtcaatggaaatggagtagtagtaacaccaggtactcatttgcaattgtgggcatcaatataactgacctggcatataatctactggtcagcggagct

SEQ ID NO: 632565 - DNA, 75 bp, Homo sapiens
cagcaactcacccagcacacaaaatggatctcttacgttccttccaaagaacctgcacttggtctgcgtggacat

SEQ ID NO: 632566 - DNA, 100 bp, Homo sapiens
gagaaagtcctcgctcgtcaccagcaagcttgcgggccccgtggcccctgcccctctcctactctctgtggcagtttcatatttgctaagacgaatttgc

SEQ ID NO: 632567 - DNA, 100 bp, Homo sapiens
agaaccccgacctcagagaagatggatgagacaatgcagatcttcgtgaagactctgactggtaagaccatcaccctcgaggttgagcccagtgacacca

SEQ ID NO: 632568 - DNA, 116 bp, Homo sapiens
acatagtaaagagggacatagataacttagtgcagcgaaatatggatggaaagagatgctgcatttacacagaaaaaggcagaaagggcatgcctcagagttcatctcagagaaaa

SEQ ID NO: 632569 - DNA, 97 bp, Homo sapiens
tcaaattcctcacaggctttgaaaccaagcagaggcagcagctgcccccactgtggctcctggccctgcccagcctgggcacgtgtccccgacacca

SEQ ID NO: 632570 - DNA, 99 bp, Homo sapiens
tgaacaccgaagtgggctggttccgcaacaaatcaaagggaaatcctcattgacgattcaatttgttgaaggccaatttgtggactcctacgatccaac

SEQ ID NO: 632571 - DNA, 100 bp, Homo sapiens
tacagaaacctggtctccctagggtaattgggatacttctggcagcgaactgagtgaaggggaattggaaaagcgcagaagaacccttttggagcaactg

SEQ ID NO: 632572 - DNA, 50 bp, Homo sapiens
caggacaacggcaggacgtgtaaggcaggacttgctgtgctcagatcctc

SEQ ID NO: 632573 - DNA, 51 bp, Homo sapiens
tttatcagcttgtgaaaaattatgacatgtagagcgcatgaagtacaggac

SEQ ID NO: 632574 - DNA, 51 bp, Homo sapiens
agccttcccagtagctgggaccacagacagccagctaaaggtgtggatgag

SEQ ID NO: 632575 - DNA, 100 bp, Homo sapiens
cctctacaggacccgctttctaccattaagagtgcatcggatggcttctggaaatctgtggccactcgagtgcccaaggagccccctgagattcgaatcc

SEQ ID NO: 632576 - DNA, 90 bp, Homo sapiens
atgagattgagcaagatcttactcagagatttgaaggttcaaaactggtcaaatcaatggtgatttgctgatataccatgtcttactgac

SEQ ID NO: 632577 - DNA, 99 bp, Homo sapiens
gaactggccattagtactttctggcctaacttttatcaggagctctgccagtgccggccgggagaaggcaattgctcctgctgtaaggagtgcatgctg

SEQ ID NO: 632578 - DNA, 95 bp, Homo sapiens
tgatatcttcgtcaccagtttcggacccgtttcagaccatgatatgtgaagcagccgacacgagtcgttgttcataaaacagcttttgaaagttg

SEQ ID NO: 632579 - DNA, 90 bp, Homo sapiens
cccgagtccgcgggaagatggcggcgccgctcatccccctctcccagcaggtgcccaaggaccaagtccttgacactgtctacctgttcc

SEQ ID NO: 632580 - DNA, 100 bp, Homo sapiens
gtttaagttggatttccttccagaaatgatggtggatcattgctctttgaattccagtcccgtcattcctctgaatattgatttgctgaatagcccagac

SEQ ID NO: 632581 - DNA, 83 bp, Homo sapiens
caagcctctcaccattaacaggattttcaaaggtggtgtttggactctagaccatgtgcctaggtagaagtttttcctttctc

SEQ ID NO: 632582 - DNA, 110 bp, Homo sapiens
ctgtcttcggtggactccttcggcagtccacccaccgccgccgcctcccagacgaagggaacgtcatcgtttggaaagcgtcgcaataagacgcacacgttgtgccgccg

SEQ ID NO: 632583 - DNA, 50 bp, Homo sapiens
agtggcgtttggaggagactcggcttccgaagatcttctcaaggaacact

SEQ ID NO: 632584 - DNA, 100 bp, Homo sapiens
ttttttacctgccaatcaaactgctacaagacaacaccctgatctggcatggacatggaagttgaaagaatggagcctcatactgtatggcacagcagag

SEQ ID NO: 632585 - DNA, 75 bp, Homo sapiens
aggaactgcttttgagtgagatggtcccagaggcctggaggagcggactgatccgctttatcctcatccagaacc

SEQ ID NO: 632586 - DNA, 99 bp, Homo sapiens
tcatcctgctcctgggtgccgtggcatgtcgatttgtccttcactacaggacaggaagatgtcacccaagcgcatagctaaaagaaggtcccccccagc

SEQ ID NO: 632587 - DNA, 71 bp, Homo sapiens
actccatcacaggggaacacagccaactgttagtccaagtggtaagaagttcagaagcaagcctcagttgg

SEQ ID NO: 632588 - DNA, 75 bp, Homo sapiens
cagcgacgccggcgccgagggacaccgcagtatgaggcagagagctggtggagttgagatctataatggagatcg

SEQ ID NO: 632589 - DNA, 98 bp, Homo sapiens
gagccgcgaggagcgcactccgtggccccgatggagcggtacaaagacagctcttgcagaggatcaactccgtcagcaatctcaggtagaagaacaga

SEQ ID NO: 632590 - DNA, 100 bp, Homo sapiens
ctggggagtggggaatgaggcgggggtcggcccggggctcggagaatgggcagatgtcggtgcagatctcttgtccatgtgccagcgaaacattgccctc

SEQ ID NO: 632591 - DNA, 100 bp, Homo sapiens
caccaggcaaaccaccatcacatctcattttgcaaaggggtctccatcatcaccagttccagtagtgaaaaacagaacccaacaaactcaaaatacatta

SEQ ID NO: 632592 - DNA, 50 bp, Homo sapiens
ggctgtgctgcgcgacccccgcgcatggaattcagaaattggtattagca

SEQ ID NO: 632593 - DNA, 100 bp, Homo sapiens
ctgggaaggtggagccaccagcctctccctggtttggaattcacccagttgcaggccgaatgcctggtcagcttaatgtgctgctggctgaggctggtgt

SEQ ID NO: 632594 - DNA, 75 bp, Homo sapiens
acctaaaaattgtataccgcagattcaggtatggatcctggcgggagccagtcaacccctattatgtcaatgccg

SEQ ID NO: 632595 - DNA, 80 bp, Homo sapiens
ctttcccatccgtgactcctggaatgcagggcttcgtgggacacatatgcaacatgcctatgatttttacaagcctgata

SEQ ID NO: 632596 - DNA, 90 bp, Homo sapiens
gtgggttgggccgggccggttgctaagacttggcgaagcgctgcgctcgcgcccggatccctcagacccagccgatgcccaatcctgtgg

SEQ ID NO: 632597 - DNA, 100 bp, Homo sapiens
gaatagacccagaaccctcatcataatgttcattatgctgacatatcttttcatgttggcctggctgggagtcacggctttcacctcactgccagtttac

SEQ ID NO: 632598 - DNA, 100 bp, Homo sapiens
cgacgactccattttcctcggtgggggcttagcgcactggaggagcggcgggcttcagacagggtgactgttggatctgtatggaactcatgtctacctc

SEQ ID NO: 632599 - DNA, 83 bp, Homo sapiens
gctggaccgtcgccttgctcctcgccgcggcggggactgcaggtactggctgtgatcgaacttctcaaccctcagagacttag

SEQ ID NO: 632600 - DNA, 75 bp, Homo sapiens
ttgggggttgatacagcagagacgtcatacttggaaatggctgcaggttcagactgctgtgacttactcgaagcc

SEQ ID NO: 632601 - DNA, 100 bp, Homo sapiens
aaatatttggacaactcagagattttccttcagactgtcacacaactgtaaggccagctaagccacctgtggtggacaggtccttgaaacctggagcact

SEQ ID NO: 632602 - DNA, 75 bp, Homo sapiens
ggagcccgcggccggagaagggctgcgggttagggggccggcgcccgcggttcagttcctccaactcctctgcca

SEQ ID NO: 632603 - DNA, 100 bp, Homo sapiens
gtcggcagtgtgaggagctgctatggtgctgagtttcctggtagagccggccgagctgaggcggtcgcggccatgaagtgtgcacctaattggcctattg

SEQ ID NO: 632604 - DNA, 138 bp, Homo sapiens
aagggcttccggacgctggatgttgacctggacgaagtgtactgccttaacgactttgaagaagatgacacagggaagcctatagcaaacttttgtctcaccttggacagatgggacaagatgagatgcagagactgg

SEQ ID NO: 632605 - DNA, 83 bp, Homo sapiens
atctgcgccgggtcgccacatactggtgatgtgtccaatctagatcccaacttctcatttgaaggcaccaaactggatgtggg

SEQ ID NO: 632606 - DNA, 82 bp, Homo sapiens
gatcatatctcatgaggctgtaggctccttcaacccgtggctgatagctgaaagttggaatcgaagcctcttaaaatggcag

SEQ ID NO: 632607 - DNA, 89 bp, Homo sapiens
ccggcttcggagcgggagtgttcgttgtgccagcgactaaaaagaggtattgatgaagatgaagtggcagcagaggaacccaatgctgc

SEQ ID NO: 632608 - DNA, 75 bp, Homo sapiens
cattggagcaagccaagaaagaatccgaagatcagaaacggcagtactacgagatgctttacaacacagctgacg

SEQ ID NO: 632609 - DNA, 103 bp, Homo sapiens
ctttcacaataagagcagaggatggaacacttcagtgcattcaagcgtttagtgggctacagatggcatggcatctaaaaccttacaatgcttgattttcata

SEQ ID NO: 632610 - DNA, 95 bp, Homo sapiens
ctctggctccaggatgctgtccccctggccacggctccaggtcacggcccccagcgcagcctgcatgttccaggatgccaggccaaggtggagca

SEQ ID NO: 632611 - DNA, 83 bp, Homo sapiens
cggagcggcccgcgcctgggctgccggcacttcgcggcaggattctgaaaccttccttgtatccctcctgagacatctttgct

SEQ ID NO: 632612 - DNA, 96 bp, Homo sapiens
gaatgtaccagctggacattacattaagaaggggtcaaagtttagctgctcgagatcgaggagtctgtttcatcttcataaaaacgctgctttcag

SEQ ID NO: 632613 - DNA, 100 bp, Homo sapiens
gccgggaagaagagagtgattgtcattggcatttctgtgggactctctgaggaggagggggccagtgggggagcagtccattcagacattgggagcagca

SEQ ID NO: 632614 - DNA, 78 bp, Homo sapiens
ggggttggtgtgattagcttcgcagtctggaaagctttaggagttcacagtgatgtgacacgtggcagcaggatggca

SEQ ID NO: 632615 - DNA, 50 bp, Homo sapiens
gaacaacctgtcttggagcgcttgcagataacgaaggaggcccaacttca

SEQ ID NO: 632616 - DNA, 100 bp, Homo sapiens
ttgacagtttcctgccaggcgccatcatcggcatagcccgggagatgcagccagtttacagacccaacatgagtgaagtttcctgcaagaaacgggacga

SEQ ID NO: 632617 - DNA, 101 bp, Homo sapiens
gcagtggatccgggccaagtacgagcgacaggagttcatctacccggagaagcaggagccctactcggcagttctgtggctcctgatggatctgagaagat

SEQ ID NO: 632618 - DNA, 100 bp, Homo sapiens
cttggatgtagacctcgaccttcacaggactcttcattgctggttggcaatgatgtatcggaagaggagcaggacttggatggtgagaaggggccatcat

SEQ ID NO: 632619 - DNA, 98 bp, Homo sapiens
gatgtctttctgcttgactgaactgcacctgtggtctttgaagaataccttacacattgcggattcaaccctatgaaaagataaaggccaggggcttg

SEQ ID NO: 632620 - DNA, 98 bp, Homo sapiens
gaagttattaaagtctgttggtgcacaaaaagacacttatactatgaaagaggtgatttggatatctactctggagataaagttggttcatcgttaaa

SEQ ID NO: 632621 - DNA, 86 bp, Homo sapiens
gccaagcaggacacggtgcgcgtggccttctgctccgttccagggtctccctccactgctgtagtaacccgggtccggggcctcgg

SEQ ID NO: 632622 - DNA, 75 bp, Homo sapiens
tagttgatctggataatgtggtcaaaaaggatatacaccacaaagtattatctctgaacttcagtgaatgtcata

SEQ ID NO: 632623 - DNA, 88 bp, Homo sapiens
ctaaaccatctgaattggctcaatgatgagcacgtagaaaatctaattgtgtgaaagaagtagaaaaactgcaagaaaaacgagagaa

SEQ ID NO: 632624 - DNA, 98 bp, Homo sapiens
atgcctacctcaaagccatcatcttctttgacccagggaccccagtggcccagatgacagaggatgccgtcgacgcggaacggctgaagcacctcatt

SEQ ID NO: 632625 - DNA, 98 bp, Homo sapiens
aaactgctccacttaccaagaattattatactgtgaatggccacatctgttgctcagtggatccacagtgccttcaggaactgtgaagttaactgtct

SEQ ID NO: 632626 - DNA, 149 bp, Homo sapiens
tgtggatcaagcaggttttaaatcaagatttaacattccaacacataaaaattatttatccaacagctcctcccagatccaggaggctgcaagccagggcctgaaattcgttggtgttatacctcagtaccattcctctgtgaactcgg

SEQ ID NO: 632627 - DNA, 100 bp, Homo sapiens
cagatggcggatgccctgcagtacctgcagaaggtctctggagacatcttcagcagagtcttgctgcgacacccaggctggagtgcaatggcgctatctc

SEQ ID NO: 632628 - DNA, 75 bp, Homo sapiens
cttcggcagtccacccaccgccgccgcctcccaggtgacacttggacagaaacactggcctatgtgctcttctgg

SEQ ID NO: 632629 - DNA, 130 bp, Homo sapiens
cccgcgtcctcttctagcctcaccctctcccgaggccccagcgttgggggactaccgggtgagaagccctaccactgcaactgggacggctgcggctggaagtttgcgcgctcagacgagctcacgcgcc

SEQ ID NO: 632630 - DNA, 100 bp, Homo sapiens
ctcccctcacccaacgtcgtggtgaatcatttgatgtaaaagacttgactccataatctgcatctgtcctaatgctgtcatctggagtagagactcagcc

SEQ ID NO: 632631 - DNA, 51 bp, Homo sapiens
cagaaaagcgaccggcggccacaggtgagcgagtgctgtgctttcatgggc

SEQ ID NO: 632632 - DNA, 99 bp, Homo sapiens
ccgtacattaaagtccgcatctgctttgttgctggagccacgttactaatagcagtgtgatccgccttattatgcagtacttgaaggagaacagtttac

SEQ ID NO: 632633 - DNA, 100 bp, Homo sapiens
cgatgggttgtccgactgggagcagaggaagccttgaggacctactcacagataggaattgaaggtaattgtgggacttctcaagttttggcccaagacc

SEQ ID NO: 632634 - DNA, 120 bp, Homo sapiens
gtcttcgaggagccgcaccaatggcttccgtgctgtcctacgaaagcctggtccacgccgtggccggagccgtggggaggtaactccaggactatctcaggtggaatatgcacttcgcag

SEQ ID NO: 632635 - DNA, 75 bp, Homo sapiens
gtgatcgtgcccaaagaggagggcgtcatcagcgtctccgaggacaggactcacaccacccggcaagaactgctc

SEQ ID NO: 632636 - DNA, 124 bp, Homo sapiens
gagaaccctacttgcctaaatgaggaatgtctttcctaccatctaaaatacgaaggtttctggctggatgtgggcgctatctccaactgtctttgcacttctgagtaagaatctgatgattgtg

SEQ ID NO: 632637 - DNA, 74 bp, Homo sapiens
cctctgcgctatgtggacattgccatcccatgcaacaacaagggagcctgcacacatgatcctgaccgtcggaa

SEQ ID NO: 632638 - DNA, 50 bp, Homo sapiens
ctctttgcatccggagagtggacaagaaataatctcaggggcgatataat

SEQ ID NO: 632639 - DNA, 74 bp, Homo sapiens
gtggaactcagcagcggaggctggacgcttgcatggcgcttgagggaccacttaatagtgagtcttccaaccag

SEQ ID NO: 632640 - DNA, 100 bp, Homo sapiens
gtggacgtcattgccgggaacgagcgagtcgccgctgcagccctagtgactgcggcctgcatcccgactctatcaagaagaatatctaatccgtaccttg

SEQ ID NO: 632641 - DNA, 100 bp, Homo sapiens
catctctctataaagttatccaggagccacaaagtgagaatataagtatgtccgtggaaggagattatacttacttgcgaatcaacttttattgcccagg

SEQ ID NO: 632642 - DNA, 75 bp, Homo sapiens
cagcaaggctcctgcctacgtccgggactgcgtggaagggactttgaacatgtcggggatcgccctcagcagact

SEQ ID NO: 632643 - DNA, 83 bp, Homo sapiens
gctggccctctgtctgcctgtgtccctgaccatggctccctgcagtaccctttaacgatcttgcttctgaaatatctacctgg

SEQ ID NO: 632644 - DNA, 100 bp, Homo sapiens
tgtgtgtaataagggagatatgttgtgaaagaagcagtagcagtgaatctacagggacgccatcgaatccgcatggagccaagttagttttgtatttgtc

SEQ ID NO: 632645 - DNA, 82 bp, Homo sapiens
ccctttgcgcagccgccgggaccctggcccctgtcgagtgtcaacagcatctccaccctggagcctgtgagccggtgccagc

SEQ ID NO: 632646 - DNA, 75 bp, Homo sapiens
gaatggaagcatacagatctgggaccgaaatttgactgcaaaagaatggaccccagcaggaaaagcaaagcaaga

SEQ ID NO: 632647 - DNA, 100 bp, Homo sapiens
ctcctggctgggcctgcccaacaacgccgagagagtcctccttaccacacagggtatcctacagcttcttcagtcaagaacatcccgaaaattcctagca

SEQ ID NO: 632648 - DNA, 100 bp, Homo sapiens
ccgcgcttctggccgcgggaaggagaggcagcctggcatcctcgctacaacctcattgttgtgggccgatacccagatcctaatttcaaaagttgtaccc

SEQ ID NO: 632649 - DNA, 75 bp, Homo sapiens
gccacctacagaaacaaaatgtcaacaaattgatggctattgacctgaaaagtggttctggaaaagtgtaccaag

SEQ ID NO: 632650 - DNA, 102 bp, Homo sapiens
tctggcgcctggcataaggtagcccccggaggcaatgagggccagcaggagtctcgcgcgcctgcgacgcgggtaaggagacaggaggagtaggaggaggca

SEQ ID NO: 632651 - DNA, 97 bp, Homo sapiens
ttgagctgcactgtattcctgaagggaatttgaaggagaagaagaatatctggagatccttggcatcaccagggagcagtcaggcaaatatgagtgc

SEQ ID NO: 632652 - DNA, 100 bp, Homo sapiens
cacaccttcgtccccatcttgggcattcatgggggcgcatctatgatcatggctgacaaggtggtggcggtggcggcccgcgatctgagccgtgcgaagg

SEQ ID NO: 632653 - DNA, 97 bp, Homo sapiens
tgaggtgaaccttcgaccttggacttctcagcctccagaatggatgaagtgaagctgccggccaaactgagcatcagcaaatcgctgaaagagtcgg

SEQ ID NO: 632654 - DNA, 83 bp, Homo sapiens
ccacaaccaccaccttcaagggagtcgaccccaacagcaggaatagctcccgcaattctgtggtgttcttggtcacacattta

SEQ ID NO: 632655 - DNA, 96 bp, Homo sapiens
atcgagagaagactcctcaacaagttgctgcaatgtctgtgtctaatctatcatggcctcattgctacgatttcagagtaccctggtaatagctga

SEQ ID NO: 632656 - DNA, 98 bp, Homo sapiens
tgctgcaacatagagctgacattaactgtcagaaggagctggcaaacagccctgactgtccccagatgtgtgcctataagctggtgaccatcaaattc

SEQ ID NO: 632657 - DNA, 90 bp, Homo sapiens
ctcggcgcccggcggggactgcagctcagcctgggcggcacagccagatgcgagatgcgtctctgctgatctgagtctgcctgcagcatg

SEQ ID NO: 632658 - DNA, 97 bp, Homo sapiens
cttacttgaagagttacagcaggggctttcccaggcaaagagggatgttcaggaacagatggttggctatacagtgcgctttgatgatgtcacctca

SEQ ID NO: 632659 - DNA, 87 bp, Homo sapiens
agccgatcgccgcggggcagttcgggccggctgtcctggcgcggtgcgcgcggagccatggttatcatgtcggagttcagcgcggac

SEQ ID NO: 632660 - DNA, 76 bp, Homo sapiens
tgagtttgaccaggagattgacatgggctcactgaacccgggaaagcaactcttagcagtgtctgcaaaaacgaat

SEQ ID NO: 632661 - DNA, 100 bp, Homo sapiens
atcaaacagctatggtgatgattagagacatactaatgtacatgggtgcaacaccggaggatttcagcaacctcccacctgaacaaagaaggaaaaagct

SEQ ID NO: 632662 - DNA, 75 bp, Homo sapiens
tcggactatttgtagtcatgtacagaacatgatcaagggtgttacactggagatgttgcagtaaagatcctaaag

SEQ ID NO: 632663 - DNA, 87 bp, Homo sapiens
tggtgtgcaatgtgaagagtccttcaaaaatgccagaaatcaacgccaagtgagtttatggtcgaggagcacgagctgcggaaggag

SEQ ID NO: 632664 - DNA, 100 bp, Homo sapiens
ggccactggccagaggtacttcctcaattggttcgactatgcaatgagggcgcccggaagatggaaaggactgagatgatgtacacaattaactcccagc

SEQ ID NO: 632665 - DNA, 90 bp, Homo sapiens
cttagaggacttccctttggatgtagcaaggaagaaattgttcagttcttctcagacaacacctgccactttgaggatgagaagatctgt

SEQ ID NO: 632666 - DNA, 109 bp, Homo sapiens
gcgcagcccccggccgcagcgcaggcagcccagcaggaaagaccacagcaagattctttcattcgtctcctcctagcctgggggaccaggctcgaactgaccctggaca

SEQ ID NO: 632667 - DNA, 100 bp, Homo sapiens
ccagcgcctgcgcctacagaacgagcaccgagggagccggctgctggcatgggtgctgtggctgcaggcctggcaggtggcagccccatgcccaggtgcc

SEQ ID NO: 632668 - DNA, 83 bp, Homo sapiens
cagatgttttacttcaagcaggggctgatttattgatattcactgatggactccaaagaatcattaactcctggtagagaaga

SEQ ID NO: 632669 - DNA, 50 bp, Homo sapiens
ctgcgaatttaaagctcatgaaaacagccttatgtttgatcatcggccaa

SEQ ID NO: 632670 - DNA, 100 bp, Homo sapiens
gatctattcgactttttcagagactgggacttggagcagcagtgatgaagttggagcccttgtttttgacattggatcctatactgtgagagctggttat

SEQ ID NO: 632671 - DNA, 74 bp, Homo sapiens
agaactcgcgtttccacttcagagatctggaatacctgaacagtattttgcaacatgcaaaagattttaaggaa

SEQ ID NO: 632672 - DNA, 83 bp, Homo sapiens
gtccccggcgcgaagaggctggactcggattcgttgcctgaggcaaggggagagccagttgcgcagagccctgcaaccagcag

SEQ ID NO: 632673 - DNA, 100 bp, Homo sapiens
aattcgatattgtgcttcctgctacagaattccttgatcagaacagagggagcaggaagagagaagggcacagttacctaagtatcaacgtaatcttcct

SEQ ID NO: 632674 - DNA, 100 bp, Homo sapiens
cgggatgtggccgagctcttctaccggaagctgacgggactgccaggagacgagtccccggttgtcatgtgcacagccagaggacaacacatcacacaca

SEQ ID NO: 632675 - DNA, 100 bp, Homo sapiens
aagatacagcaaaaccagtctattagacggccaagtcgacagcttgccccaaacaaacctagattaattgcctaaggaattgcaaaacctatcaagccag

SEQ ID NO: 632676 - DNA, 100 bp, Homo sapiens
cgacgctcggctgctggcgcccccggggcggaaccccttcgtgcacgagctgcgcctcagcgccctgcagaaggcccaggctaccggctctctgaccagt

SEQ ID NO: 632677 - DNA, 51 bp, Homo sapiens
tgtgggatgtgaaaactctgttactgaaggggccaatctcaaagtcatcag

SEQ ID NO: 632678 - DNA, 98 bp, Homo sapiens
gctcgggtcgttgtggtgcgctgtcttcccgcttgcgtcagggacctgcccgactcagtgccggagcggttgcagggcacacattactcggtgcagtc

SEQ ID NO: 632679 - DNA, 82 bp, Homo sapiens
agattcgcagtggtcgcttcttctccttggactcacagaaaacactggacttccccggaagctacttgaaaaacatgacccc

SEQ ID NO: 632680 - DNA, 100 bp, Homo sapiens
agatgttgggatgagagtcggagccgaataccaagctcggatccctgaatttgatccaggttgcactgctgtgatccatcctcatctcctaaagatgcat

SEQ ID NO: 632681 - DNA, 100 bp, Homo sapiens
tgtctggcatgggcctctccaccgtgcctgacctgctgctgccactgccctgggcgctgcctatggcacagccaagagcggtaccggcattgcggccatg

SEQ ID NO: 632682 - DNA, 75 bp, Homo sapiens
cagcttcatccacagagatctggtgttggggatgtcctttgcactgaccctgaactgccagattgacaaaaccag

SEQ ID NO: 632683 - DNA, 80 bp, Homo sapiens
aagtcgagtatctggtgaagtggaaaggatggcccccaaagctttatcctgtggataaacgcagagtgaacgagtttggg

SEQ ID NO: 632684 - DNA, 82 bp, Homo sapiens
tgccgctgtcgtctttgcttcagccgcagtcgccactggctgcctgaggtgaaatgacaatggatgctctgttggctcgatt

SEQ ID NO: 632685 - DNA, 75 bp, Homo sapiens
cgaaaacggaagcgcagggagaaggaagaggtgtttgaaaaggattatgaagaagctgtgctcttgctgttagaa

SEQ ID NO: 632686 - DNA, 95 bp, Homo sapiens
gaggcacagagtttgctgcgagctctcttcaaacggaacccctgcaaccggctgggtactccaaagattcaggtttactcacgtcatccagcaga

SEQ ID NO: 632687 - DNA, 80 bp, Homo sapiens
ggttcgcggggctgccggagaccggccgcatggggagagaagtcttttttcctccagccaggagagcagctggaacaagg

SEQ ID NO: 632688 - DNA, 100 bp, Homo sapiens
caagaagtgtaaccgccttgaagagctgatgaaggttggatggcaagcatgtggtgtttggcaaagtgaaagaaggcatgaatattgtggaggccatgga

SEQ ID NO: 632689 - DNA, 51 bp, Homo sapiens
cttaggctactttcacagggcagaacaagtctccctctccctctctttcca

SEQ ID NO: 632690 - DNA, 75 bp, Homo sapiens
ccagaagcgagtccccaatgcctacgacaagacagccttggctttggagctggacccacaaaccgtggagaccaa

SEQ ID NO: 632691 - DNA, 100 bp, Homo sapiens
gcttcctggtggagcccatcagctgccacgcctggaacaaggaccgcaccctatgacatgatgggaagaaatcagactgctgtgagagaagagatgattc

SEQ ID NO: 632692 - DNA, 99 bp, Homo sapiens
ggcgccgccccaagaccatcacttacaccccggggacctgcgagctgctcagagctagcattggatatgtggaggaaattgatggttgaaccacttcag

SEQ ID NO: 632693 - DNA, 100 bp, Homo sapiens
ggacgctccgcagcccgcccgccagccggcccgccggccgccgcaggaatactcccccagttgcaagaggcgcaggaccgtggaagacttcaacaaattc

SEQ ID NO: 632694 - DNA, 100 bp, Homo sapiens
caagctcatcgagaagtgctggaccgaggacgaagtgattgggaaaatgaggtacgttagtgttcgcgattttaaaggcaaagtgctaattgatattaga

SEQ ID NO: 632695 - DNA, 98 bp, Homo sapiens
aattatgatccttataagcccctggacatcacaccacctcctgatcagaaggcgagcagttctgatgatacttgttgatgccactgttatcatcctcc

SEQ ID NO: 632696 - DNA, 82 bp, Homo sapiens
gcctttcctacgcccaccccagttctgacacatgattttctgccgtctcttggcaaaaatggcaaataatgatgctgttctg

SEQ ID NO: 632697 - DNA, 101 bp, Homo sapiens
gagacttcttcctgttataaatacgatgttgcagctcagccctgaagaaaagggaaaacttgctgcggttgctcaagaatcagcttaaaatggctcgtttc

SEQ ID NO: 632698 - DNA, 75 bp, Homo sapiens
cccagaggtcgtggaggtggccgtggaggcagaggtggcatgggatacagccttttcctccctctccatgaactc

SEQ ID NO: 632699 - DNA, 100 bp, Homo sapiens
agtctcgactttcctgggctcagacaccattcgcttttcacccaagatgatttgatgtcttataaaactctgatgaaccatgatggctacacagacatta

SEQ ID NO: 632700 - DNA, 75 bp, Homo sapiens
tggatgaaggagtaggacttgtgcattcaaacatagcaactgaggtagtatagatcaatcagtgttaaaagaatt

SEQ ID NO: 632701 - DNA, 101 bp, Homo sapiens
cgaagagttggatactcagcgtcgctggcagccgctgtacttggtgctggagaatctggtaaaagcaccattgtgaagcagatgaggatcctgcatgttaa

SEQ ID NO: 632702 - DNA, 100 bp, Homo sapiens
gatcgcgctgcacacgcagagacaggccgaggagacgcgggccttcgagcagctcatgaccgacctcaccctgtcgcggagaagtttcacttcaagtcat

SEQ ID NO: 632703 - DNA, 102 bp, Homo sapiens
gtcgcgtgtctaggtgagtcgcggtgggtcctcgcttgcagttcagcgaccacgggtggcccagttgaaatccttcccttcctctaccttggaagtgcctac

SEQ ID NO: 632704 - DNA, 82 bp, Homo sapiens
gaggaggtggcaggcctcggcgggacgcactctctgagatattttcgcctgggcgtttcggatcccatccatggggtccctg

SEQ ID NO: 632705 - DNA, 50 bp, Homo sapiens
gaatttccatgtcaacatagtccagtgagtttatggtcgaggagcacgag

SEQ ID NO: 632706 - DNA, 75 bp, Homo sapiens
tcgccgttaccttcttgctggcgttggtgggagccgtgctctacctctatccgaacaccttccaccatgaccacc

SEQ ID NO: 632707 - DNA, 100 bp, Homo sapiens
gcagtccttcgcgccctcctcgccctccccaccgacatcatgctccagttcctgttggagtcattcgttgcccagtttgcagccaagaatgtgcagagag

SEQ ID NO: 632708 - DNA, 89 bp, Homo sapiens
acacaggaagaggatcctcctgctggagcaggtgatcgcagcaggagctggggccattgtccatgagaagcacccgggcaaacttgctg

SEQ ID NO: 632709 - DNA, 83 bp, Homo sapiens
aggagtgtgagctcatgctacaggggaacgcccttttgcttgtgactggcagggctgcgacaagaagttcgcccgctccgacg

SEQ ID NO: 632710 - DNA, 100 bp, Homo sapiens
tatttgaaacttttatctcatctggcttggcgcctgaggttctcccattaggtcatgctttcagaacgaaaaggcacagatgagctctatgctgtgaaga

SEQ ID NO: 632711 - DNA, 102 bp, Homo sapiens
cctcgcgcccttgccgcccacctgctcacccagctcaggggctttggttatagtgtcaagtgtgagtactcggcgcacaaagagggcgtcctcaaagaggag

SEQ ID NO: 632712 - DNA, 100 bp, Homo sapiens
atcaaagccatcaaccagggcaactatggatttttgcacgataagaatagcagggaattcctctactacaggaagaaggtggctgagataagaaaggaag

SEQ ID NO: 632713 - DNA, 90 bp, Homo sapiens
cggaccgcgtcctgcgccggagcaggctgaagccgacgtagcttctctgaacagacgcatccagctggttgaggaagagttggatcgtgc

SEQ ID NO: 632714 - DNA, 50 bp, Homo sapiens
gtcctacacttgcgcaaatgtctccggccatggttgcttgttatccgggc

SEQ ID NO: 632715 - DNA, 82 bp, Homo sapiens
tgtgcatctacaccgacaactccatccggcccgaggagctgctgacaatgcagatcttcgtgaagactctgactggtaagac

SEQ ID NO: 632716 - DNA, 100 bp, Homo sapiens
tttgtggaccacaatagaagaactaccacctatatagatccccgcacaggaaaatctgccctatacaccatcagttaagattataccatcgactcctttt

SEQ ID NO: 632717 - DNA, 76 bp, Homo sapiens
gccgtgatgcttggctgggcgcggcagatgccgacaaaaggatcaaggtggcgaagcccgtggtggagatggatgg

SEQ ID NO: 632718 - DNA, 87 bp, Homo sapiens
acaattcacctgcctcctatgtcttccatccagacaatgctaaacgctatgtattagaggaagctgagcaactggagcctcgagtta

SEQ ID NO: 632719 - DNA, 100 bp, Homo sapiens
ctgtttgagaaaaggcctaagaattttggcattgggactttgaacatgtcggggatcgccctcagcagactcgcccaggagaggaaagcatggaggaaag

SEQ ID NO: 632720 - DNA, 83 bp, Homo sapiens
ctgccttctaacgaaagggcagtacagactttggcagtgggtaattccagaattgattggccataccattgtcactgtattac

SEQ ID NO: 632721 - DNA, 98 bp, Homo sapiens
ccgcagatgcccaccggaatggagaaggaagaggagtcgatctgttacctaaagcaataaaaaatggccagaggatcagtgtccgatgaggaaatgat

SEQ ID NO: 632722 - DNA, 100 bp, Homo sapiens
cgagcagcgccagcggccgagcgggcggcttcctggcctgggcgctccggtggcggcggagattggtttatcttggaagctaaagggcattgctcatcct

SEQ ID NO: 632723 - DNA, 98 bp, Homo sapiens
ttcgccatcgccagcatcgccaacccggactggatcaacaccggggagtctgcggccaaactgattatccaccagacactcagcgtcttagaagatat

SEQ ID NO: 632724 - DNA, 96 bp, Homo sapiens
aggaagtggtatcatgagagatatagcccacttagaaatcacagcagcacagtcagtgctgatttcattatttgaactcaataccccagagtttac

SEQ ID NO: 632725 - DNA, 75 bp, Homo sapiens
ccaaagatccccgttcctggagattctgattgaggagccttcacgtaaatgggtccagtcatgcctcccagtaag

SEQ ID NO: 632726 - DNA, 101 bp, Homo sapiens
gaagatgccggactccggaacagcaagaactgcaccgaaccagggatggatgaatgagatttacaactatgatccagaaacctaccatgcgactttgacac

SEQ ID NO: 632727 - DNA, 100 bp, Homo sapiens
atctttcgttctcttttttgactgtaataatgagttctaccaagatgtaaaggactggtggctcttcgggttctatttctgtatgcccttggtgtgcact

SEQ ID NO: 632728 - DNA, 87 bp, Homo sapiens
aagctgcagccgcacctggccaaggaatgatctctgcctttcacaaagaccacctttgtgcatccatgcctactcttcagaacacca

SEQ ID NO: 632729 - DNA, 85 bp, Homo sapiens
taaaggaggccctcataagctatgcagtcatgcagatcagtatgtgcaaaaaggaaatccccatttggaagtacagaaagaaaga

SEQ ID NO: 632730 - DNA, 98 bp, Homo sapiens
ctctcccaacatggcggcctcaggacataagcagctctatgaccaatagcacagctgccagtagacccccggtcaccctgaggctggtggtccctgct

SEQ ID NO: 632731 - DNA, 74 bp, Homo sapiens
ctacactgactctgatagatacaccaatttggaggagcatgctcatgcacattcatctggatacttcatcactc

SEQ ID NO: 632732 - DNA, 75 bp, Homo sapiens
aaacctgtttcaaattgggaagtgcacttcttattagagacactattgcctttgttccattgaatgttcccaata

SEQ ID NO: 632733 - DNA, 82 bp, Homo sapiens
gacagtcagtgtggaaaaactgcgctgctccatgtcttcgccaaggactgcttccccgagacgctctgcacaaaagccacca

SEQ ID NO: 632734 - DNA, 82 bp, Homo sapiens
agattttacatcagatcctgcttgatgaaactctgaaagatttgtcccatcagatgaaaagaagaaacaaggttgtcaacga

SEQ ID NO: 632735 - DNA, 94 bp, Homo sapiens
ttgagggcccgcgccgcatggaggccggctgaggagcgccgctgcctcgcctcgatgtgaagttcatttccaatccgccctccatggtggcagc

SEQ ID NO: 632736 - DNA, 74 bp, Homo sapiens
tgcaacttgggccccttttcagataaacctctacttgaaaatggagaaaaaacctaacaaaaaggaggaactga

SEQ ID NO: 632737 - DNA, 98 bp, Homo sapiens
ttcagaaggagcaggattaccaaagggttgctccttgagggcaggacagttcttatggctttatccgttgcgtaagcacagagaggtctgcgaggtca

SEQ ID NO: 632738 - DNA, 85 bp, Homo sapiens
cagcgctccgcgcctgcacgagcagcgcgtgcgggacatccagaagcaggtcattcttaactgttcagccctaccttgccttctc

SEQ ID NO: 632739 - DNA, 108 bp, Homo sapiens
cttgctaatctccacgcccagaaattcagacaagagcattctccttatctcatctgcacaggaagcaggtctaaggtggattgtctcattgttagtgctgaatcttct

SEQ ID NO: 632740 - DNA, 100 bp, Homo sapiens
aaccacttctggatcaagcagtgcattgagaattggcagagggggtcgatttgggaggaaaggtgtggctataaactttgttactgaagaagacaagagg

SEQ ID NO: 632741 - DNA, 80 bp, Homo sapiens
ccgagaccgcggccgggaccgagggaagtcctgagttgaggcttgcgggatcctttccggagaaagcgcaggctaaagcc

SEQ ID NO: 632742 - DNA, 90 bp, Homo sapiens
caatggaggaaacagctatatgggaacaacatacagtgacgcttcacaggattgatcattcttagaagagctgctgtaacacatagggga

SEQ ID NO: 632743 - DNA, 100 bp, Homo sapiens
ggcggagagaccgtccgaggtaattgtctgccacgagtgcacattctgaaaacagggaggtggggaagacagggctccagctaccacaggacgggctctg

SEQ ID NO: 632744 - DNA, 75 bp, Homo sapiens
gaaggacggtgagaaaggccagtacacacacaagatctaccacctgcagaggttggcaaaagcagcttttgatga

SEQ ID NO: 632745 - DNA, 75 bp, Homo sapiens
ggaaagcaggaggaggtggcggcggcgggaagatgatgtacagttacccagcacgtgtacctcctcctcctccta

SEQ ID NO: 632746 - DNA, 75 bp, Homo sapiens
ccagggagaaaacaaaggcggccggcctggtgcgcaaggccccgaacaacagaatgtctacacaaggaagtacag

SEQ ID NO: 632747 - DNA, 80 bp, Homo sapiens
taggaggcaaaatgttggataaatatatctatggagcacaggagttaacagagcagtttcataaagttgaatctcaactg

SEQ ID NO: 632748 - DNA, 100 bp, Homo sapiens
caaacctttgttctggctcctgaaaacgtcgaaatgctgagcagcatggattctgcatcggttcgcattatcaaaccctttcctgcgccccagactccag

SEQ ID NO: 632749 - DNA, 75 bp, Homo sapiens
tggttaaaacctgacacttttaacaggttcgagaacttgtcttggacaattgcaaatcaaatgatggaaaaattg

SEQ ID NO: 632750 - DNA, 100 bp, Homo sapiens
ggagatgccccgcggcagccgcgctcggggctctaagatcacttatttgagacatagtcctcaagtggaattatgaaatcaaagagtgactccataaagt

SEQ ID NO: 632751 - DNA, 74 bp, Homo sapiens
ggaagtgtctcttagcagcgcgcggagaagaacggggagccagaatccggggcaccagctaccagagccctcac

SEQ ID NO: 632752 - DNA, 101 bp, Homo sapiens
gggatgtgacgggcaccagaatgctccctctccaaaggatctaaggaccaaagctgacagtttctttacttggcagaaggagaagacagcctgaagaagat

SEQ ID NO: 632753 - DNA, 75 bp, Homo sapiens
gagtgtgagaaaaaaataaactcctatttgtttatggcaaggactgcctccgggcctgccaggagcagatcgaag

SEQ ID NO: 632754 - DNA, 98 bp, Homo sapiens
tggaaatagcttgtgctgctgctgctgctgctgctgcatgtctaccaggagaggagggaactgcggagcgggttgacaggactgaggtgattcgcacc

SEQ ID NO: 632755 - DNA, 75 bp, Homo sapiens
caccacggagcatgaagacagagcgggtgactggaggtggctccccaggatgtttcgtctgaactcactttctgc

SEQ ID NO: 632756 - DNA, 100 bp, Homo sapiens
gcctgcttcctctgctcgcggttagcccgtcagtccctgctctgtgcgcgcctccatctgggccatggatggatttattcctgacgacattgaatgccac

SEQ ID NO: 632757 - DNA, 83 bp, Homo sapiens
ccaggcccgcgaccgtccgccagtcgtcccgagcgggctgacgcacgaggcacacaggaaggaggtggagcaggtgtatctgc

SEQ ID NO: 632758 - DNA, 74 bp, Homo sapiens
gcggcggcgccccgccctcccgaggtgtgggcagaagaaaaagctagtgatcaacagtggcaatggagctgtgg

SEQ ID NO: 632759 - DNA, 110 bp, Homo sapiens
ttatgtgctacagtctgcggaacggagcagtatttcaatgtggaggttttagctgaattttgggacatggccactgcttcaccaaggtctgatactagtaataaccacag

SEQ ID NO: 632760 - DNA, 51 bp, Homo sapiens
aatggtgcagatgagggaactgatgctgttgatggagtaatgaatggtgaa

SEQ ID NO: 632761 - DNA, 97 bp, Homo sapiens
ccatcatggtgtccaacatgctagcacaggacagccacctgctgtcgggccagctgcccacgatatctgtgtgaggctggattttctttgcctactc

SEQ ID NO: 632762 - DNA, 98 bp, Homo sapiens
gctgattggattcgttactgctttgcaacgcgcacctaactccaggaccccaacttcagagggtgcagcctctgaaagagactgtgaatctatatata

SEQ ID NO: 632763 - DNA, 100 bp, Homo sapiens
gaaagcaaacagaaatttgtgctcaaaacccccaagaggttctgtccggaagcagattctaaaaccatgttgcagtgcttgaagcaaaataaaaacagtg

SEQ ID NO: 632764 - DNA, 89 bp, Homo sapiens
gggcaagatggcgcctcccaagaacgctccgagagatgccttggcacattcaggaccccgcgagccagcggctgacgtggaacaagtcc

SEQ ID NO: 632765 - DNA, 140 bp, Homo sapiens
cttcttcaccgccaggacctccttcttcaggagagcgccccagggcaagccccgctccggccaacaagtactaggttttgacaagcttgcatcatgcgtgagtataagctagtcgttcttggctcaggaggcgttggaaa

SEQ ID NO: 632766 - DNA, 100 bp, Homo sapiens
gaggaggaagaaggcgagaagcacaggtgggaactttgaggctcagagacagagcagaagacagaacctggtcttctgattccctgtgttctgctttttt

SEQ ID NO: 632767 - DNA, 83 bp, Homo sapiens
ccctcactaccctgtttaagtacatagatgaaaatcaggatcgctacattaaggtgggtttgctgagttctctcgttgtttcc

SEQ ID NO: 632768 - DNA, 97 bp, Homo sapiens
acaaaaaagatgattgttggatatgcataagagggacaatgactcattcttcccaggacactggttcttgtggcattcaggaagatggaaagcttta

SEQ ID NO: 632769 - DNA, 95 bp, Homo sapiens
tttctgaggaagtaaccaaacaagaagacctcatgagagagtgaagtaagaactctgctagagaggaaatggctgcttcatcatcatcctcctca

SEQ ID NO: 632770 - DNA, 75 bp, Homo sapiens
acttggcggaggtggtgggctaccaggtcctactgctctgttggctcatgaaataggttttggaagtaaagttac

SEQ ID NO: 632771 - DNA, 100 bp, Homo sapiens
attatagacaacaagcagcctattatgcccagacaagtccccagggaatgccacagcatcctccagcacctcagctgtcggaaaaggtaacagaagatgg

SEQ ID NO: 632772 - DNA, 75 bp, Homo sapiens
aacatcgatgggcttgagagagatatcatggtgacagagtacgtggagcacggacccctggatgtgtggctgcgg

SEQ ID NO: 632773 - DNA, 83 bp, Homo sapiens
gacaatcaacagcaggcctattatctgttccgtggtatcacacctgtgtatcataatatgtttgctttaatgagtgaaacaga

SEQ ID NO: 632774 - DNA, 98 bp, Homo sapiens
tgaggaggatgaggaggaaagtgacaaccaggtgcagcggaactgctgcctgacgctctgcaacttcagcatccccgaggagctggaattccagtacc

SEQ ID NO: 632775 - DNA, 75 bp, Homo sapiens
tcagatgctgccagggtccctgaagagggaagacacgcggaaacaggtcttgggcgtctttggtactggcttttt

SEQ ID NO: 632776 - DNA, 76 bp, Homo sapiens
tggctttgcctttctggacacagaagtatttgtgacaggtcctgcgttcaatttcctggatgctcctgctgttcgt

SEQ ID NO: 632777 - DNA, 100 bp, Homo sapiens
cagtggtggccatcttcccatctcccatgatgtatgctggaccaactgaggttttgcgtgtgaagctgtgtggaaatgtgaaatactaccagtcacacca

SEQ ID NO: 632778 - DNA, 123 bp, Homo sapiens
ccggggccggcaaggccatcggcgtgctgaccagcggcggggatgctcaagttcaaggagcagggacaagttacaggaatgttctccaagcagcaatccaaaagagtctcaaggatccttcaa

SEQ ID NO: 632779 - DNA, 134 bp, Homo sapiens
tcggcggtggcggcggcaccaaggcccccaagccctccttcgtgtcgtacgtacgccctgaggcgcacctatgttggcagcatgcctggtcgcatcatcaacggcttgaagactgtgggagtgaacaacccagt

SEQ ID NO: 632780 - DNA, 82 bp, Homo sapiens
ccggtgccggcctagcgtcctggaattacttcaatcaaacctagaggatcaagacataatgggagcatttttagacaagcca

SEQ ID NO: 632781 - DNA, 90 bp, Homo sapiens
ctcacctgcagtgatcctggcatctaatgcagtaatagtggccttgtcttcaaaatcatgggatgtagagactgcaacagaattgcttct

SEQ ID NO: 632782 - DNA, 100 bp, Homo sapiens
catcattaacggaccttttaccatgaatagttctactccttctacaggggaaactgactctactctgtgatgccaagacagatgggagtttccttgtaca

SEQ ID NO: 632783 - DNA, 98 bp, Homo sapiens
ggcccccaagccctccttcgtgtcgtacgtacgccctgaggatggtgattgctcacaccaaagccttggacccctcccagcctgtgacctttgtgacc

SEQ ID NO: 632784 - DNA, 98 bp, Homo sapiens
gctcgccgtcctgccccccttggagagaaactgaaaggtgttgccacatctgcaaacttcctgggagagtaatggggattcgagtgcttcgattatct

SEQ ID NO: 632785 - DNA, 101 bp, Homo sapiens
ttcagtgcgacaggacagttgtaaacggcatcatcgcaaccgtcgtggtcaggatcagattttattaagacctctactggaaaagaaacagtaaatgccac

SEQ ID NO: 632786 - DNA, 75 bp, Homo sapiens
attcagaaggaacttgcagaaatcacattggaccctcctcccaactgtaggcagttgcagtggtgcagaatggct

SEQ ID NO: 632787 - DNA, 98 bp, Homo sapiens
ggcaatatttttaaactacagaaaagatggaaactttggacttcaagaacttggattaaagaacttgacagggcggcgactggcggcgcgatggacct

SEQ ID NO: 632788 - DNA, 75 bp, Homo sapiens
ataagaggaaggcaaagaaaatcattgactctgagatgaggagctggagacaagagcccacagagtagctactga

SEQ ID NO: 632789 - DNA, 100 bp, Homo sapiens
gatcaaatggcacttcattggccacctacagaaacaaaatgtcaacaaattgatgggctggatctccagaactgttctctggaggaccctggtccaaact

SEQ ID NO: 632790 - DNA, 90 bp, Homo sapiens
taaaatgagaatggttgccttttcttcattatcaagagatggtgagttgtcctcctgtgttggagcgggccggagagaagtagagtgggc

SEQ ID NO: 632791 - DNA, 51 bp, Homo sapiens
tgcagacggcgagacctcctgcacagagtgcctggtgaagaatgtgatggg

SEQ ID NO: 632792 - DNA, 74 bp, Homo sapiens
gtttgacgacactgatggtttggtgtaccttgaaagacttttaacatacgcagagatagatatctgtccggcca

SEQ ID NO: 632793 - DNA, 74 bp, Homo sapiens
ttctgtatatggctgcgccccaaatcaggtgtttgtaaaatgtatgaagaacatctgaaaagaatgaatcccaa

SEQ ID NO: 632794 - DNA, 100 bp, Homo sapiens
tgaagactctggaagcccacaaagactcccataaggaggacaaacagaggatgtgcagatgctcctgcgctttggggcagatcccactttgctggatcga

SEQ ID NO: 632795 - DNA, 72 bp, Homo sapiens
aagagatcgaggttgaggaggaactctgcaagcaggaattgtttacggtacttcctgcctccaagtttcccc

SEQ ID NO: 632796 - DNA, 98 bp, Homo sapiens
ccgacagcacagacagaatccctgctaccaggatacccacccaccatcccagggtctacaacatccacagccggaccgtcacccgctatcctgccaac

SEQ ID NO: 632797 - DNA, 87 bp, Homo sapiens
acagatggttatgcttttcagaatcttatcaatgacttttttgaacgaaccattctgtgcaacagccttgtgtggagttgtgctgtg

SEQ ID NO: 632798 - DNA, 100 bp, Homo sapiens
cgacgaccctagtgctcgtcgccgtggcgccatgggtgttgtccgcagccgcagctgcatatctatgtgagactgaattttcctcttagacttcagctaa

SEQ ID NO: 632799 - DNA, 50 bp, Homo sapiens
aagcgcttctcgggcaccgtcaggtgtgtgcagtggcctcagggatccgg

SEQ ID NO: 632800 - DNA, 82 bp, Homo sapiens
gaaatcagtaccaaccaatggctggaaatgcaaagtggtgccaccaccacaacagaatgatcttgagattcctgaaagtcct

SEQ ID NO: 632801 - DNA, 97 bp, Homo sapiens
ggagccatgccggagaagcgcgcgggcgcgcaggccgcggggagcacctggaggaagaacttgtcgcttttcctaagcattagtttgttaattttct

SEQ ID NO: 632802 - DNA, 75 bp, Homo sapiens
tccgccatgccggccgccgggagtaacgagccggacggcgtcctcagctatcagctgactacacagacttagtct

SEQ ID NO: 632803 - DNA, 82 bp, Homo sapiens
ctcggggcctcctcctgtccccaaagagacggtggactctttcctcgacctggccaggtttttagaacttcagccataaaaa

SEQ ID NO: 632804 - DNA, 74 bp, Homo sapiens
ctcacctgcgctgtgatgcctgcagagctgtggcttaccaggtctcagccttagatccaaggacagtccaagga

SEQ ID NO: 632805 - DNA, 100 bp, Homo sapiens
ataccatctcaacttcctgaagaaaagattgctggtacttgtcttgcattatgtttatcaagtgatttgaaatcattatcagtggtcacagaagtctcta

SEQ ID NO: 632806 - DNA, 82 bp, Homo sapiens
gagaccgagcatcggggtataggaagagaggtccgaaacccaagcggcttctgctgcaggccctcgggaccaaggatcacgt

SEQ ID NO: 632807 - DNA, 100 bp, Homo sapiens
ttcctttccgtctggcggcagccatcagtgtctttgcaagatataacaatgaggaaagctttccgaagttctacaattcaagaccagcagcttttcgatc

SEQ ID NO: 632808 - DNA, 98 bp, Homo sapiens
acatcaagaggcaggcagctcccaggcagtgcagtgtgccctgaaccgccctgccttctttgctgagaggctctactatgctatgaaaggtgctggca

SEQ ID NO: 632809 - DNA, 90 bp, Homo sapiens
cgagggcttcggcgacatcgaggaggccgtggtcatcaccgaccgccagacggtctcaggggccagccaagcccccacccccaaggaagc

SEQ ID NO: 632810 - DNA, 74 bp, Homo sapiens
gtttcctggtagagccggccgagctgaggcggtcgcggccatgaaggttgtggcagcactgcctgaaggtatga

SEQ ID NO: 632811 - DNA, 98 bp, Homo sapiens
tcagcgcgacgtcgtgtcgagttcccaaaaagctccgcaggggctgtagggaggtgtccaaggcagctgcagatttgatggcctactgtgaagcacat

SEQ ID NO: 632812 - DNA, 75 bp, Homo sapiens
acattttgtgttgcagttgactccctcaatggattggtttacataggtcaagaattacatgaatgacagtcttcg

SEQ ID NO: 632813 - DNA, 88 bp, Homo sapiens
cttattcatcagtttgttgtgcttgtcaagatcaggttttgatggtacagtccaggtctatgatgccacatcttgggatggaacacgg

SEQ ID NO: 632814 - DNA, 74 bp, Homo sapiens
gccagatagtaccatgatagctgtatcagtatcacacctgtgtatcataatatgtttgctttaatgagtgaaac

SEQ ID NO: 632815 - DNA, 75 bp, Homo sapiens
gaaaactgcactttattgcaatttcagagactcctccactctctgggaatgacacggactccctctcctgcgaca

SEQ ID NO: 632816 - DNA, 75 bp, Homo sapiens
atgcaagagtcaccttctcaactgttgtcctcatgatgtcctttctggaactagtcttgttctgtcacccaggct

SEQ ID NO: 632817 - DNA, 100 bp, Homo sapiens
caagcccagcctcgccaggactaccttaagggactgagtatcattggggtatggtgtggtggactttctttgagtactgggatgcaggttccaagtgctg

SEQ ID NO: 632818 - DNA, 98 bp, Homo sapiens
gaggaaggaacgaggcaaggagctaaagcagcgtgcgttcagccctgggatggagttttaacattgaatgcggagaacactaattatgcctatcaagt

SEQ ID NO: 632819 - DNA, 75 bp, Homo sapiens
gagaactacagaaacctcgtctccctggtagtggtgggggtggtggaggaggcggcggcggtggaggtggaggtg

SEQ ID NO: 632820 - DNA, 73 bp, Homo sapiens
aggtctttgtcaagaacccagagtcggataaaaactggatatgcatctaaaacaagatgtaagtcactgaaga

SEQ ID NO: 632821 - DNA, 100 bp, Homo sapiens
atggctcaccgcagtctcgactttcctgggctcaggcaatttcttgcaaccaccaccgaggccccgaaaagcactggtcgtcagggagctcctccccttg

SEQ ID NO: 632822 - DNA, 50 bp, Homo sapiens
gcaacctggaccccaaaattaccgaaaacctctgcgccatgagagccaag

SEQ ID NO: 632823 - DNA, 82 bp, Homo sapiens
gaacggcagccccaagaacggaaaggtgtggacactgccagcggctgcagccgacttggaatgacctgggagacaaatacaa

SEQ ID NO: 632824 - DNA, 75 bp, Homo sapiens
ggcctataaaatgcttcaagtagtcctgtgctcaacattgcttatcgatgaaagttttagacaaagccgatcaaa

SEQ ID NO: 632825 - DNA, 82 bp, Homo sapiens
gccagcatgccccagtccaaaggctctgacgcccgctctgcggcttcggtgtttgaacaggccacagtccaggagcgcttac

SEQ ID NO: 632826 - DNA, 101 bp, Homo sapiens
cgccgcgccccacttgctcgtgcactttacacacatgaggctgacaaacgggctcatcataatgcactggaacgaaaacgtagggaccacatcaaagacag

SEQ ID NO: 632827 - DNA, 50 bp, Homo sapiens
cagcaccgcgcccatggcagagccagaccctgctacaggagctgagagac

SEQ ID NO: 632828 - DNA, 100 bp, Homo sapiens
gaagaagatccgcagctccacgcagcaagacccgcgccgccgggacccccaggacgacgtgtacctggacatcaccgatgtcatggcacccccagtaccg

SEQ ID NO: 632829 - DNA, 75 bp, Homo sapiens
atgagtggcaggcccttcagccagattacctaaaaccagatccatggatgatcttctttctgcctgtgacacaag

SEQ ID NO: 632830 - DNA, 100 bp, Homo sapiens
caaccatcaccattgaatctgaaggaaaaggttccacctttgctaaggatcactactcttggaatcaaagataaatccaaatactgcatatcagaaacaa

SEQ ID NO: 632831 - DNA, 100 bp, Homo sapiens
attgtgtttagtgcctgtcgaatgccccccagccaccagctcgaccacagcaagctcctgggtgaacagcagagaatttcaaaggaccttgctaatatct

SEQ ID NO: 632832 - DNA, 83 bp, Homo sapiens
ctgacctctctgatgagatggatcggtgacttaagagattaaaattaatttggttgctgttggttctgaacaaataatgagtt

SEQ ID NO: 632833 - DNA, 88 bp, Homo sapiens
tggcgcgcaggacagcgggcggtatcccacgttcatcgatgccctgcgggacctggacgatgccctctccatgtgcttcctgttttcc

SEQ ID NO: 632834 - DNA, 90 bp, Homo sapiens
agaacatttggcaggaacaacctcattctaaagttggtttccctttcctggacaagcgttataggaagattgttgatgtcaattttcaat

SEQ ID NO: 632835 - DNA, 100 bp, Homo sapiens
gtcctactacgcgtacgtggtggagctctgcgtgtaaactgttcatacttggtgcgctgtggactcttgtgataattaaccaagagtagctctatttgtc

SEQ ID NO: 632836 - DNA, 97 bp, Homo sapiens
acggacggtgatggtggtcgccgcggcggcgtgtgcgcccctcagattcacggcccttccacagtaccttccacaataccagtgctaatctgactga

SEQ ID NO: 632837 - DNA, 75 bp, Homo sapiens
ttgggataataaaacacctgtttgtgacaagaacatcaccaccctgaagccagagactaacactgcaggactcag

SEQ ID NO: 632838 - DNA, 101 bp, Homo sapiens
gccgctaccgctcaggtgctgcaggcacagcccgagaaaccgcagcactacacttcctctgtgacgagggtgcaggtatctctggggactacatcgatcgc

SEQ ID NO: 632839 - DNA, 50 bp, Homo sapiens
actgaaaatgatttatgcaagtttaagatggcttttccctgccgcaggtc

SEQ ID NO: 632840 - DNA, 100 bp, Homo sapiens
ctgccacccattgtgtcttctcaagaagaaaaacacaccttgactttagtcagatacatcactgtctgttaaaggaaaccaagcgtgaagtggaagtcta

SEQ ID NO: 632841 - DNA, 98 bp, Homo sapiens
tccttctcctggagacgcaactcaagatcacccggaagttcaggctgaattctgaaggcaaacttgagcagacggtctccatggcaaccacgacacag

SEQ ID NO: 632842 - DNA, 100 bp, Homo sapiens
gtccagccagcatggaaccaaagcggatcagagagggctaccttgtgaagaagatactgcttttgcaaaaaataaagatgatggaaaatggtactatttt

SEQ ID NO: 632843 - DNA, 83 bp, Homo sapiens
ggatttcagcaacaatgcctctgttcaaactcccagcacaaacacagagcagtctaaagcaaccgagcactgagaaaaatgaa

SEQ ID NO: 632844 - DNA, 75 bp, Homo sapiens
cgggcactggaggagggctcggtatgtgacgcattcccagactcttcagccaactgagcatcagcttcttcacag

SEQ ID NO: 632845 - DNA, 100 bp, Homo sapiens
caactacggacactgtgacttttcagccatcacaattgtgtacggacattgctgcaggagaagaggttgccatcaagcttgaatgtgtcaaaaccaaaca

SEQ ID NO: 632846 - DNA, 80 bp, Homo sapiens
acccggagccgcgagggacgaccgggattttcggctttgtgagaaaccttaccatcaaacacgatggccagcaacgttac

SEQ ID NO: 632847 - DNA, 98 bp, Homo sapiens
ggaaaagcactttccttaatccggttcccactgatgacaattgaggaatttgcagcaggtcgagtctatgctgtcttgtcaaagagagaaggtcgggt

SEQ ID NO: 632848 - DNA, 100 bp, Homo sapiens
cacatttcggattactaaagcagatgctgcggaattttggagaaaagcttttggggaaaagaaagtggagaatgaggacatgaataaagaccagatcttg

SEQ ID NO: 632849 - DNA, 75 bp, Homo sapiens
ccgcgggtccgtgcgcccagcgtcccagggcccaggccgagcagatgtcagtattgaatatggtggtgaggcgtg

SEQ ID NO: 632850 - DNA, 82 bp, Homo sapiens
cagagagggaagagattcagccagcacactcctcgcgagcaaggatgttttagaagaatgtatgtctcttcccaagctatct

SEQ ID NO: 632851 - DNA, 50 bp, Homo sapiens
gaaacccggagaccaaatccttgtctcaaaccatgaattatgtgggacag

SEQ ID NO: 632852 - DNA, 95 bp, Homo sapiens
tcctctacaacgtgctggagcggccgcgcggctgggcgttcatctaccacgcctacgtcctcttcgagcactactgctactcccggggcggcatg

SEQ ID NO: 632853 - DNA, 100 bp, Homo sapiens
tcaggctgctgtcgccgctgctgggagatgggcctactcgcccgccaccctgcgctgccgccgctctgaggagttaaagagagctggcggtcaccatggc

SEQ ID NO: 632854 - DNA, 98 bp, Homo sapiens
cggaacaggctaccaagtccgtgctgtttgtgtgtctggtaatctatgccagcaattatgacaatgttagcagaccatgcagctcgtcagctgcttga

SEQ ID NO: 632855 - DNA, 75 bp, Homo sapiens
gctgggattcgcgctgctgggcacccacggagcctccggggctgaacctgcaaccatggtcgtgccactagccag

SEQ ID NO: 632856 - DNA, 104 bp, Homo sapiens
gcagccgagtctgacggcgccggttcgctgcccggtccgcccgcggtgagagatgacgtccggttgtttgccttcgtgcgcttcaccaccggggatgccatgag

SEQ ID NO: 632857 - DNA, 98 bp, Homo sapiens
ttgaaagtagggcatccttcacccatctgaagggaggaaatagtggcaggtgacagtctgcatgtgcagttttcagagaatttggatggagagacccg

SEQ ID NO: 632858 - DNA, 97 bp, Homo sapiens
gaaggcgctggagaccttacgacgggttggggatggcgtgcagcgcaaccacgagacggccttccaagagtaagcaggaaattcacaggaggtctgc

SEQ ID NO: 632859 - DNA, 89 bp, Homo sapiens
tcgtagggggtgagggtggaagctgggaaacccacaggaggcaaccacactagtttaggtagagtctcactttgtcacccaggctggag

SEQ ID NO: 632860 - DNA, 100 bp, Homo sapiens
tgcacccttggaagagttctacagctttggcgagtctatgtgtgtgtagctgggacggtgctggtctgagctggaccttgtctgatggcttcctccaacc

SEQ ID NO: 632861 - DNA, 101 bp, Homo sapiens
gggtaaagcagcctgtcgcttgccgggcagctggtgagtcggtgacctggcctgtgaggtccttgaatgggcaagagggcacatgaagtacggcgtcctcc

SEQ ID NO: 632862 - DNA, 102 bp, Homo sapiens
aggttaccatcactggatctgctgccagcattagcctggctcaatatctaatcaatgtcaggaagatgttaccgagtacttcagtgaattccttagtgcagg

SEQ ID NO: 632863 - DNA, 100 bp, Homo sapiens
ggacacgggctgcaacctgcagcacatcagcgaccgggagaacatagacgaaccctggggttattagtaaaacgattggagaaaggtggtaaagctgaac

SEQ ID NO: 632864 - DNA, 100 bp, Homo sapiens
ctggccccggctctctggaccttgtctcgctcgggagcggaaacagcggcagccagagtgatgtcttggcattgcccattttcaagcaggaagattccag

SEQ ID NO: 632865 - DNA, 100 bp, Homo sapiens
gcccggatgttcggtgcagctgccagatccgctgatctagtgcttctcgaaaaaaaccttcaggcggcccatgggtttggcaaacatcgaaaagatgaca

SEQ ID NO: 632866 - DNA, 97 bp, Homo sapiens
cggggggctgaaatccatcttcatcctaccgctccgcccgtgctggagaatctggtaaaagcaccattgtgaagcagatgaggatcctgcatgttaa

SEQ ID NO: 632867 - DNA, 96 bp, Homo sapiens
gagcattgcagcagccactggctttgtcaaaaaggaccagttgggcaagatcccaaaatccaggagtgagggatctattcaggcccacagagtact

SEQ ID NO: 632868 - DNA, 82 bp, Homo sapiens
acatccgagtgcagaacctgcaagcctacagacctggtacctggatttttgcccgagatgattcctaccaccttactactga

SEQ ID NO: 632869 - DNA, 100 bp, Homo sapiens
ggcagctggcctctgggcaccggcggcccctctgcctcgcggaaaagcctcatattcctgaagcccaacctggagatgctggacttctttgacctgctat

SEQ ID NO: 632870 - DNA, 83 bp, Homo sapiens
cttcacttagctctacaatcaacccatgtggaaaagcttttgacatcacctatgtgcgtctcaagttccacaccagccgcccg

SEQ ID NO: 632871 - DNA, 50 bp, Homo sapiens
gtgagacacgttaaaatttcagggggctgtggggtcaccttctcttcctc

SEQ ID NO: 632872 - DNA, 75 bp, Homo sapiens
aaaattcaatccctgctttagctcagtgaaaaatgtgaggttttacaatattctgcaagggaagctcaagattca

SEQ ID NO: 632873 - DNA, 101 bp, Homo sapiens
agactacagctggttcttgaagctgctgctctcttcaatctaattcccgtgggcctgcgtgtagtggccatccaaggagtgaaggctagcctctatgtggc

SEQ ID NO: 632874 - DNA, 73 bp, Homo sapiens
gttctgaaaatggaagttgctgttttgaaaaagctgcaagatacctgcactcaaataacatagttgtggttcc

SEQ ID NO: 632875 - DNA, 97 bp, Homo sapiens
ccacccatttgagtttgacttctatctgtgcagccacgcaggcatccagaagttcaccatgtctattctcaagatccatgccagggagatctttgac

SEQ ID NO: 632876 - DNA, 100 bp, Homo sapiens
aacaagggaaagagccctggatggttgtgagggatgagaaaagaagatggactctaggttatgatgtgattgctcaagcccaatctgggactgggaaaac

SEQ ID NO: 632877 - DNA, 90 bp, Homo sapiens
tttggcaagagcttcgcgcagaaatctggctacttcctgtgccttagttctctgggcagcctagagattgaccctgttcctaacacccac

SEQ ID NO: 632878 - DNA, 100 bp, Homo sapiens
aggttttcaggaaacttgcagcaaagccattcgggttggagtaattggttaacacagaaatctgcctcctgggccatgccgcttctaaggcctgtttctt

SEQ ID NO: 632879 - DNA, 82 bp, Homo sapiens
cgagcatcgctcttcggcaacccgaagccacaggatggaggagggggatcccagcaaagagggtcaccatgaagttcaatcc

SEQ ID NO: 632880 - DNA, 100 bp, Homo sapiens
ccatggacctccacgaacttgaatcaattgtagaggatgccacatctgaccttggataccatggacttgcaattgtgaccaaatatattacaaagggctg

SEQ ID NO: 632881 - DNA, 50 bp, Homo sapiens
gaaaaacctaaaggataccttagagacggagtttcgtcatgttggccagg

SEQ ID NO: 632882 - DNA, 101 bp, Homo sapiens
atccccactcctccaagaaccaacccccaaattggctgggacagtaccttaaggcaggttctatgaaagatcctctgctagatgaccatggtgattttatt

SEQ ID NO: 632883 - DNA, 96 bp, Homo sapiens
cagcagtgtcccacggacagcagagctggcgggcatcaccacacttgatgaccccctgggaaacgggagacccagaagttctgcctcactcccaga

SEQ ID NO: 632884 - DNA, 75 bp, Homo sapiens
gtttagccaacccaaattaccttaattcctccatcttccaagaagagcgatggttctgggacatatactaagttg

SEQ ID NO: 632885 - DNA, 100 bp, Homo sapiens
ctcaattccccgtccctccaaaatctcagaaggctcagggactaagaaacaagccttgtatagttcacttagcagccatggaaggccaccttcactgttt

SEQ ID NO: 632886 - DNA, 82 bp, Homo sapiens
tccaactggccaatacaaatcccttgtatccgtactgtccaagaagctggaacattattatccagcaagaatgttcgtgtca

SEQ ID NO: 632887 - DNA, 75 bp, Homo sapiens
ctggcccgtgctggaaaagtgagaggtcagactcctaaggataagtgcaagaaggctgcttccagctccaaagca

SEQ ID NO: 632888 - DNA, 74 bp, Homo sapiens
aaagacaaggatattgcagttattgccgtgtgcagtataataacctggaacagatgcctggaatgatgtcgtca

SEQ ID NO: 632889 - DNA, 76 bp, Homo sapiens
caggttcaaatggctggtataattataggcaccagattgagaggatccagaatccagatctctggaatagctacca

SEQ ID NO: 632890 - DNA, 75 bp, Homo sapiens
ggacatcttcatttacagagcaacttgatgaaggtacacccaatagagagattcgagaaatgatggagtccttcg

SEQ ID NO: 632891 - DNA, 99 bp, Homo sapiens
gccatgatgcttcaggagcagctggacgccatcaacaaagagatcaggttgatatccctgaaagtacttaatagcatcgtgctgttggggaaatcgtgc

SEQ ID NO: 632892 - DNA, 100 bp, Homo sapiens
agattatttgccttatgttatgggctatttgtgtagcagaagttccaaagaactactggttcagattttagctcttcccaagttgtgaaaatagtgaagg

SEQ ID NO: 632893 - DNA, 50 bp, Homo sapiens
cagaacctgaggagagaatggcatgccagcctctcttctagatcaagtca

SEQ ID NO: 632894 - DNA, 150 bp, Homo sapiens
ggaatctccttagtgaggctcagagatgcctgtaccgtgatgtgacgctggagaacctggcacttatatcctccctggaatccagggcctgaaaacccagaatgaacttgtgtccatcccagagatcactgcagatgtcatgaggtaccc

SEQ ID NO: 632895 - DNA, 75 bp, Homo sapiens
atgcatgttatgaaagatctccttccagaaaccacctaccgactccaagaatgaaaaggctctgggccgcaaaat

SEQ ID NO: 632896 - DNA, 50 bp, Homo sapiens
ctccccagccatgtggaactgaatagatggacatggcctggcagatgatg

SEQ ID NO: 632897 - DNA, 100 bp, Homo sapiens
ctcggacctcagtatgggctggaacctgacacttggcatgacagtgtctctagtgatccctgaaaagttccagcatattttgcgagtactcaacaccaac

SEQ ID NO: 632898 - DNA, 100 bp, Homo sapiens
cctggaagctgatgctgctggacgccactttccggggtgcacagcaagtgcttcgcctcaacagcatcaagaagctgtccaccatcgccttggcccttgg

SEQ ID NO: 632899 - DNA, 96 bp, Homo sapiens
gcctgctgactcgtcagagttgctcatggaggtgcacggaaatgggaagaggcccagtccagagaggctggtgcttgagttcagcctcctgtctta

SEQ ID NO: 632900 - DNA, 100 bp, Homo sapiens
ttgtccagatcagaggctccgttccgctgttctgggaacagccagggcttcaggctggtccccacagacggcttgccatttctatgactggatgctgaga

SEQ ID NO: 632901 - DNA, 100 bp, Homo sapiens
ggctgttgagtgaagaaaaagagcaggaagtcattacatgactcagcaggcatgactggagagggaagtcccaatggtgctagaatggtgctgcagtggc

SEQ ID NO: 632902 - DNA, 75 bp, Homo sapiens
ctgcctcattcctggaaattgcactggaactgtctgattaaggaactgtggctgcaccatctgtcttcatcttcc

SEQ ID NO: 632903 - DNA, 56 bp, Homo sapiens
ctgaggcctctccagccatgtggaactgactgtgtctggctggccgtaggaggagt

SEQ ID NO: 632904 - DNA, 100 bp, Homo sapiens
catagcatttgataacgtggagggcctcttcttccctgcggtcagcctgaacaggaacgtgcagagggtatattacctctctctggaattttacatgggc

SEQ ID NO: 632905 - DNA, 51 bp, Homo sapiens
gcccacaggtgttgaagaagataaaggcgccatggctgcggagcggacccg

SEQ ID NO: 632906 - DNA, 100 bp, Homo sapiens
agcgaataaagtttatcacgccggggacggctgtcctcagcgaggggccgtgcacccgctcctgagcagcgccatgggcctgctggccttcctgaagacc

SEQ ID NO: 632907 - DNA, 90 bp, Homo sapiens
ctgacgttctcttctacccactgagaccagagttagtggaatccacatatctcctctaccaggccaagaataaggagacgggtgctttgg

SEQ ID NO: 632908 - DNA, 75 bp, Homo sapiens
ggacagcttcagcaaacactacaagtccacggtgggaggtggtcatcaagtatgtgccgtacgtgggtgacagca

SEQ ID NO: 632909 - DNA, 131 bp, Homo sapiens
cgaataattccaggtggaattgctgatagacatgggggcctcaaacgtggagatcaactcctctctgttaatggagtggatctagtgaaaagccatttgatgtatgcggtcagagaagaagtggaggtcct

SEQ ID NO: 632910 - DNA, 82 bp, Homo sapiens
ttgcagccactgaagatcctggtgtcgccatgggccgccgccccgcccgttggttttaaaatcaaagatgggaaaatcggag

SEQ ID NO: 632911 - DNA, 100 bp, Homo sapiens
cttgcgtcccaaccagagcgctggccacctcgccgcccagctcacgccgcgcccgcgctcccaggctccggaacgctttaccctgtacagctctaaaaac

SEQ ID NO: 632912 - DNA, 82 bp, Homo sapiens
cagaatctaatcaagcgagacccgccggcctacatcgaggaggtagctacagcaagctgggtagcaggcagatccaaaggat

SEQ ID NO: 632913 - DNA, 98 bp, Homo sapiens
gtgggtgaggaaggtcaggtctagataatttttatggtgggacgaggatacctgtctccagatctcagtaaggtacggagtaactgtccaaaagccat

SEQ ID NO: 632914 - DNA, 100 bp, Homo sapiens
ggcaggcgcggctgccggcggctgggactgaagagggacgggtcccgcggcgagcgagctcctgaggtacggcgtcgggcccccctggtggacctcactc

SEQ ID NO: 632915 - DNA, 75 bp, Homo sapiens
cgaccagaactgggccatccgcgccatcgagaccctctcggattcttgaagtgaaaagtccaataaagcaaagca

SEQ ID NO: 632916 - DNA, 75 bp, Homo sapiens
tggcagtgaagagctgctgaagtacatgcttcatagtccttgcgtctctctcttaatcttctccatacagagctg

SEQ ID NO: 632917 - DNA, 90 bp, Homo sapiens
cgggaccgccgccgccgccgccaccatggaaatcatcgagttccccatcctaaagctaaatggccggaccatggagattgagtctacctt

SEQ ID NO: 632918 - DNA, 50 bp, Homo sapiens
caagatcggccccctgggtctggaagctttgcagaagatgctggatcagg

SEQ ID NO: 632919 - DNA, 82 bp, Homo sapiens
agaggagctggcgcctcaggccatacctgggctatgactggattgcagtatccagcaggttacccttcagataaagaaggga

SEQ ID NO: 632920 - DNA, 83 bp, Homo sapiens
ggctggactcggattcgttgcctgagctacagcaattcaattctgaattcttctgcagtccctcacagctcagccttgaaacc

SEQ ID NO: 632921 - DNA, 75 bp, Homo sapiens
aaacctttattctgatgatattcctcatggagtgtgtcatgaacaatgtcacctgtactcggatctatgaaaaag

SEQ ID NO: 632922 - DNA, 90 bp, Homo sapiens
gagccgcggcccgggcgggctgctcggcgcggaaagtgagtctgaggatagttcagatgatgaacctttaattaaaaagttgaagaaacc

SEQ ID NO: 632923 - DNA, 100 bp, Homo sapiens
tttttgattggcgcctttctcattattataggctccctcctgctgtcaggctacatcagcaaaggggaagaggagttgtacgcatgtcagagaggttgca

SEQ ID NO: 632924 - DNA, 100 bp, Homo sapiens
agtagataatcagccagaagaattagtgcgtagtgctgaagatgactatcttgctaatcatggccggttaaatgagtctgaagccaggcgaaaattctgg

SEQ ID NO: 632925 - DNA, 50 bp, Homo sapiens
caacttcgcccgggacttcatgggtttggaaatcccttgtctccaggttg

SEQ ID NO: 632926 - DNA, 100 bp, Homo sapiens
ggtagaagttccttgaaagaaatagaaccaaatctgtttgctgatgaagattcacctgtgcatggtgcgtatagcagcaaaattcatcattcatgcccct

SEQ ID NO: 632927 - DNA, 100 bp, Homo sapiens
caccctcccatccgtccgcgggtccgtggagctggagcagatcccccagccggctgagacaggccaactacacagacccccagagcaaactgcggttcag

SEQ ID NO: 632928 - DNA, 90 bp, Homo sapiens
gggcgagaacgtccactgcgggccggcgaaagctgatttctacctggacaaggactggtactatacccacagataggagacaaattggat

SEQ ID NO: 632929 - DNA, 50 bp, Homo sapiens
ccgagtgggaggatggcggaagcccacaatgccccgctgagccggtgcag

SEQ ID NO: 632930 - DNA, 75 bp, Homo sapiens
cacctttcggcttctgagacggcggcagcagcggcattcagattagaagcccaggacccaggaaggagacacagg

SEQ ID NO: 632931 - DNA, 100 bp, Homo sapiens
gtcgtcagtaatgcctggaatgatgatgtctcatatgtctcaggcttccatgcagcctgccttaccggaaaacagttcctcctgaggatttcagagaaga

SEQ ID NO: 632932 - DNA, 75 bp, Homo sapiens
gttccttggaagaagatgtctgcagaggttagagcagccagcgggtacagaatggattttggaagagggagtcac

SEQ ID NO: 632933 - DNA, 83 bp, Homo sapiens
ttgtaattaagcctcgcacaatatggtcatgaaacgagtgcgtaccgagcagattcagatggcagtgtcctgctacctcaaac

SEQ ID NO: 632934 - DNA, 97 bp, Homo sapiens
ggctggcggcgctcgccgccttgggcaggacccacctcgccttcctcccggcgtggcagatgctccaggtttacccaaggtccagcctagcccctag

SEQ ID NO: 632935 - DNA, 100 bp, Homo sapiens
agccgcaccacctaacgctggccgacaacagcctggcgtccgccacgccctctgggatgagtctgatgacagtaactcagaaattgaggctgctttacgc

SEQ ID NO: 632936 - DNA, 73 bp, Homo sapiens
gcaaacttgacactcaccctgaccggaagcgttgttgacgaccatggacatcatccacgatggatttggattc

SEQ ID NO: 632937 - DNA, 51 bp, Homo sapiens
ccacccaccgccgccgcctcccaggtgtgatgaatgcagactctgctacca

SEQ ID NO: 632938 - DNA, 100 bp, Homo sapiens
ctcagagaagaaataatggcaaataacttttccttggagagtcataacatatcactgactggaacagcatatgccatatatgagctggctgtggcttcat

SEQ ID NO: 632939 - DNA, 98 bp, Homo sapiens
ccatcagataaatgatgccagtcgtggtactttaagcagctatagtcttgtattgatggttttgcactatttacaaaataacaacgaacttgatgcaa

SEQ ID NO: 632940 - DNA, 101 bp, Homo sapiens
cgttctctatcactacgtggccgtcaacaatcccaagaagcaggaatgaaagtggcgctttctccgccccaggaaaatctctaacttccaaggtcccacca

SEQ ID NO: 632941 - DNA, 75 bp, Homo sapiens
aatgagaaaacaccgaagggacattctgtcttcatggacatttttgaacttgtgagacggggtttcgccatgttg

SEQ ID NO: 632942 - DNA, 80 bp, Homo sapiens
aatcattccttctcacttggcctatggaaaacggggatttccaccatctgtcccagggtcctgggcccagtctgccctga

SEQ ID NO: 632943 - DNA, 100 bp, Homo sapiens
tgctgtgggatttacaggaaagctcgagccaggctgtggactcgggtcaagctggaaagcctggaagacgcctacattctgcggggagatgatgattccc

SEQ ID NO: 632944 - DNA, 100 bp, Homo sapiens
caaacagtgtcaatacaaagatactctccccaaggaacaagctgaaagctggatacctaatgtcagtggagtcttctgagtgtttcctggaagaagtcgg

SEQ ID NO: 632945 - DNA, 82 bp, Homo sapiens
aaggaaggccggaacctggttgtccgagatcgctgtgactaatagggatgccaaaggaaaaatatgatcctccagatcctcg

SEQ ID NO: 632946 - DNA, 100 bp, Homo sapiens
gaaatgctgactaaggaacaaggtgatgtaataggaataccatttaatgtggatgttacaacccttgtaaacaccaatagtaaagggccctctaataaga

SEQ ID NO: 632947 - DNA, 109 bp, Homo sapiens
ctctactttgtattttgtgtggattcctcagagagtgaacttggaatcttggacctcatccaggtatttacatgaggaatttccagagtcctggtcagttcccaggttg

SEQ ID NO: 632948 - DNA, 115 bp, Homo sapiens
ccgcgcgcagggcctgcagcgggagctggacggcgagcgcgagcggcgcgagaaagccaagactaaggggctgcagagcggggtggacattggcgtcaagtactcggagaagcag

SEQ ID NO: 632949 - DNA, 50 bp, Homo sapiens
gcaccgcggccggagctgtgggctgaccaaagagaaccctgtacagtaag

SEQ ID NO: 632950 - DNA, 74 bp, Homo sapiens
agcagactgaaatcacttgtccaaaggtgctgaccggatatctgaactacatggtccagctggggaagctgctg

SEQ ID NO: 632951 - DNA, 83 bp, Homo sapiens
ctcagctcctggggctgctaatgctctgggtctctgaaatcatgaccaccccaggaaaagagaactttcgcctgaaaagttac

SEQ ID NO: 632952 - DNA, 52 bp, Homo sapiens
atctccgcactctggagcataatgtctgtgctgtcgtcatgcctcaaacccg

SEQ ID NO: 632953 - DNA, 50 bp, Homo sapiens
gaccatcacaacctgagcagcacaggaatgtgggtgccggcaggacaggc

SEQ ID NO: 632954 - DNA, 51 bp, Homo sapiens
cgaatcatggaatcccttgcatggctctcaacacttggcatttcacctgaa

SEQ ID NO: 632955 - DNA, 83 bp, Homo sapiens
tcctctggaccctcgcggccgtgggcagcggctgccgcgcctgtctgcccgagggaggaatagccaggccagaagaaggaagg

SEQ ID NO: 632956 - DNA, 83 bp, Homo sapiens
ctgaccacaggtgaagctgagacccgcgtccccactatgaggctctgacgcccgctctgcggcttcggtgtttgaacaggcca

SEQ ID NO: 632957 - DNA, 75 bp, Homo sapiens
aggatccagtgttcaccatcctggccccggaagggtgtgggccgaagatatgctcatgtggtgttgaggaaagca

SEQ ID NO: 632958 - DNA, 114 bp, Homo sapiens
ctcaatatctgtcttcggtggactccttcggcagtccacccaccgccgccgcctcccagcaaattgtggctactaatttgccccctgaagatcaagatggctctggggatgact

SEQ ID NO: 632959 - DNA, 100 bp, Homo sapiens
ccgcacacgcagcggcgcaaggagatactggctgaaccttagccggccgatcgaggagcagggccccctggacgtcatcatccacaagctgactgacgtc

SEQ ID NO: 632960 - DNA, 95 bp, Homo sapiens
gaagatctatgggtcagacagaattaattcagacctaccttcagtcaacaaagccaattattgacttatatgaagaaatggggaaagtcaagaaa

SEQ ID NO: 632961 - DNA, 83 bp, Homo sapiens
ccacctgagccgcgtctaccccgagcgtccgttggctcctgtgcctgtgccggctcctgcaaatgcaaagagtgcaaatgcac

SEQ ID NO: 632962 - DNA, 82 bp, Homo sapiens
gtggaggcaggaggaggagcaggacgccgggcactgctgatgctgctttcgctggggggagtgcatccgccccaaccctttt

SEQ ID NO: 632963 - DNA, 100 bp, Homo sapiens
ctctgccctcaagagtgaaatccagaaggagatgggcttccccaaggatttattgacattgctacttgagtgtgaacagttacctggaaatactgatgat

SEQ ID NO: 632964 - DNA, 51 bp, Homo sapiens
ttctatgtgccacaggtggagcaggggtccacctcattcatttaaccgaga

SEQ ID NO: 632965 - DNA, 100 bp, Homo sapiens
ctgaggcctccgaaaccttccctagctggatttggggacagaggagcgctgatatgcagcagcctatgaatgtgatgactcaaagttttggagctgtgaa

SEQ ID NO: 632966 - DNA, 75 bp, Homo sapiens
agcatgaggctgagagaggaggagtcacccggacccagccacacagtgtggacactgccagcggctgcagccgac

SEQ ID NO: 632967 - DNA, 98 bp, Homo sapiens
gcgcggaggggaaatggctgccgaaaacaagccggaaggtgacagagctgaatgaacctctctccaatgaagatcgaaatctcctctctgtggcctac

SEQ ID NO: 632968 - DNA, 92 bp, Homo sapiens
cctagaggtccgggcttggagttcgcctcagacgcggtggagccgccggagtctgagaagtgcactagtgaaattgatgaataagtcaatag

SEQ ID NO: 632969 - DNA, 101 bp, Homo sapiens
agcagcagcccccgctgcccgagcgggaagagactggagatgaggaggatgggagtcccatcggttcagcgtcttccatttctttcaagctcaaatctttc

SEQ ID NO: 632970 - DNA, 100 bp, Homo sapiens
aaaagataaaccaaaggtttgaccatgaaatgtttggcctgaagcctaaacacagacaagtcattacgttttcatttctcacaactgggctgagcacaac

SEQ ID NO: 632971 - DNA, 98 bp, Homo sapiens
ccctaactccagactccaccagatgtgcaggcttcttccagaccagctggtcttgcttctggagcatctcttggagcagaagactctgagcccccgaa

SEQ ID NO: 632972 - DNA, 90 bp, Homo sapiens
gctgccccggctgcctcctccctgagatgatcatgacgcagtcctgaggtttaatggggcacccacagccaacttccaacaagatgtggg

SEQ ID NO: 632973 - DNA, 73 bp, Homo sapiens
gaggcagaggcacttatgcttgtcaggggtatcatcttatttcgtccttcacatctcactaacaagtttgagg

SEQ ID NO: 632974 - DNA, 100 bp, Homo sapiens
cgatttacaaggaatacgaatccatcctcaaccaagatctcatgattggccgcgtaatccaggttgctgctgggagcagcaacctcaagagagtgacctt

SEQ ID NO: 632975 - DNA, 82 bp, Homo sapiens
gttctgtgcctcctatctatgtgcctcctggatatgccccacaggctttggaagtgataaagcagttaaaagagaaaatgaa

SEQ ID NO: 632976 - DNA, 105 bp, Homo sapiens
gacttgctcgggcaaaagttgtgcattggcccgatcaagcctgacttctagccaaggatttttcaagccacattcaattgataggatgaaaaaatttaagagaag

SEQ ID NO: 632977 - DNA, 75 bp, Homo sapiens
cgctactctctctttctggcctggaggctatccagcgtggcccgaggcagccgggatgacagctctccccaggaa

SEQ ID NO: 632978 - DNA, 100 bp, Homo sapiens
gcagctcgctctgggagcctagaatgcatcagtgcccttgtggcgaatggggctcacgtcgagtttgacatctacaggaaggtgcccaaggaccttacgc

SEQ ID NO: 632979 - DNA, 100 bp, Homo sapiens
agtgactgcgtcaggcatctcaatcatgacgccatttggaatgaacaggaaaaggctgaactttttacagataagttttgtcaagtatgtggagtgatgc

SEQ ID NO: 632980 - DNA, 103 bp, Homo sapiens
ccggcccggcggctgctgctgctgctgacgctgctgctgcccggcctcgggacctcctgccccccgaggtctgcagtctcctgaacccagcagccatctacgc

SEQ ID NO: 632981 - DNA, 50 bp, Homo sapiens
ctggatgggaaaacatctcaaggtctccaattgagaaacatggcactgtt

SEQ ID NO: 632982 - DNA, 51 bp, Homo sapiens
gaggagtgtcacttccgtcaggagagtgaactttgaggcgctgatcatcac

SEQ ID NO: 632983 - DNA, 75 bp, Homo sapiens
tgtactttgtggacttgcaggatgacttagacgacttgatgttacagcctttcgattatgatcccaatgagaaaa

SEQ ID NO: 632984 - DNA, 88 bp, Homo sapiens
ctggagatgattgagccgcgcacgctacagtacaaggcaagaagaattccatcctcctgcacaaggtgcagcatgacctcaactcggg

SEQ ID NO: 632985 - DNA, 75 bp, Homo sapiens
cttcaatcccatccagacccaggatgaggctgctgtcatttgtggtgttggctctatttgctgtcactcaagcag

SEQ ID NO: 632986 - DNA, 100 bp, Homo sapiens
gtgactacaggacctgtctgacgatagtccaaaaactgaagaagatggtggataagcccacccaggtgaacagtggtatagcagccactccagcctctgc

SEQ ID NO: 632987 - DNA, 100 bp, Homo sapiens
gatcgagcccagcgtcaacttcctcaagtcgcccaaagttggccacggacagagcgaaggggagaggatggtagtgtctgacttccacgttttcgtcagg

SEQ ID NO: 632988 - DNA, 83 bp, Homo sapiens
atgtatttggaacaaaaaaaggagatgcctggcagccccgctctctgcagttgttgatcattatgaaaatcctagaaacgtgg

SEQ ID NO: 632989 - DNA, 90 bp, Homo sapiens
ctttcgtttgcagaacccaaaagccagagtgcctgaacaacggattgagctatatcaggaagagagaagggcacagttacctaagtatca

SEQ ID NO: 632990 - DNA, 49 bp, Homo sapiens
gggcaatggcctgggctgtgggcacctgcagcagcatgagagtggtgta

SEQ ID NO: 632991 - DNA, 100 bp, Homo sapiens
gaaaacatatgtgcaagaacattctgtagttgatcctgtagagaaaacaatggaacttaaatctactaatgagaggagttcattacttcggaagtggtac

SEQ ID NO: 632992 - DNA, 75 bp, Homo sapiens
gaggacacgaggcggcgggctggagacatggaccgcggcgagcaagggacagagcagaatgggctgatatagatc

SEQ ID NO: 632993 - DNA, 50 bp, Homo sapiens
agagcgactgggcgcaagccctcaggcagatataatgcacctgactgact

SEQ ID NO: 632994 - DNA, 82 bp, Homo sapiens
agcgccgtcccgtccgacagccaggcccgggagaaatgcgtctgttactagagtggagagtctaccttcgtctcacatgtgc

SEQ ID NO: 632995 - DNA, 100 bp, Homo sapiens
tacgtgtccatcctgctggagagcgacaagaagctcacccaggaacaagtatctgacagacggaatcagtccccaatgcctggaaattcctcattggatt

SEQ ID NO: 632996 - DNA, 100 bp, Homo sapiens
agggcagataaaaaggaaaaaatgaggcataaccatttcattaagacagcacagccctaccgaccaaagtttccatagggctgcctgttgtctgcatccg

SEQ ID NO: 632997 - DNA, 101 bp, Homo sapiens
gggaccccatccttcctgtcttcgcagaggagtcctcgcgtgctgaagtcctgagcgaggagcccattttgaagtggtataaagatgcacatgttgcaaag

SEQ ID NO: 632998 - DNA, 103 bp, Homo sapiens
gatcttcacagcacagttcctgggaaggtggagccaccagcctctccttggtcattagtaattatcagcactttagatgggagaattgctgccttggatcctg

SEQ ID NO: 632999 - DNA, 75 bp, Homo sapiens
ccgaaaggtctgtgataatacattagatattatagcgccaccaccaaagatccctgacaagcagttagatgaaag

SEQ ID NO: 633000 - DNA, 50 bp, Homo sapiens
gacagtgaaggacgaggctcatcagtgacacagattctcatgtatccagt

SEQ ID NO: 633001 - DNA, 82 bp, Homo sapiens
gagcagctgtatagcatcttcactgtaaaggagccatcccaatggaaattgcttcgacaggaactgttgaagtacctggaat

SEQ ID NO: 633002 - DNA, 100 bp, Homo sapiens
gctgaacggatggctgagggagccccgcggatcgtttaggaaagccggccagattgctcgagactttaatcccaactggatgagtgctgtggaaatcttg

SEQ ID NO: 633003 - DNA, 83 bp, Homo sapiens
gcgacggcgtcgggagagcgcgcctagccggctcgcgagggcccagaagacacctgctttgagtttggtgtttttcctgccat

SEQ ID NO: 633004 - DNA, 101 bp, Homo sapiens
cctcacatcaacttccagtgagagtgacacaggtcaggaagcagaatattccttatatggaaaaccgtcttcagatacagtccctaagcccaagagagccc

SEQ ID NO: 633005 - DNA, 98 bp, Homo sapiens
caagccgtcccgatccttctctaggtctcgtaggttggtagcacccacagaaggatcactagaatgggatattcttgaagttaagcgcctccttgatc

SEQ ID NO: 633006 - DNA, 100 bp, Homo sapiens
tgctcaaccttgtgctgccaaacttgtccctcgggcccatcgactccagcgtgctctctcggaataagacagagccaaaagaatgcaatggtgtaaagat

SEQ ID NO: 633007 - DNA, 83 bp, Homo sapiens
caagaccatgctggcaagtctgaaggtcaaggagtgcatccgccccaacccttttccccctcgtctcctgtgagaattccccg

SEQ ID NO: 633008 - DNA, 88 bp, Homo sapiens
aggatctcgggctcggaacgagactgcacggaaacctcgacctgtctcccagttggttgcacagcaggttactcagcagtttgtgcct

SEQ ID NO: 633009 - DNA, 96 bp, Homo sapiens
ctcaccggcaaggagcccggaaaatcgtcaggggcggcggcaaactttaaggaagcctcctatttcagtttctcaacatgaaagtcatcaagcaat

SEQ ID NO: 633010 - DNA, 135 bp, Homo sapiens
tcatgtttgtgaacatttctccactggaagagaacgtctccgagtccctcaactctctacgctttgcctccaagcttgtacaataactgcatctgcgacgtgggagccgagagcttggctcgtgtgcttccggac

SEQ ID NO: 633011 - DNA, 76 bp, Homo sapiens
caaaaggcagactttttgatattcagagccttggaagtcaacactgtcagcagctcacagtgtgccaccatggagt

SEQ ID NO: 633012 - DNA, 100 bp, Homo sapiens
ccccagcctcatctccaggcttggctaagccccagatgcccccaggggtccccacggagtctggaccatggaggagcgaggtctggcccccaagttcgac

SEQ ID NO: 633013 - DNA, 75 bp, Homo sapiens
ccaggatctcgggctcggaacgagactgcacggcttcacaggctgctcaagaagccgagatcaatgccagaaaag

SEQ ID NO: 633014 - DNA, 75 bp, Homo sapiens
tggcacttcattggccacctacagaaacaaaatgtcaacaaattgatgggagtgggaatagctttgcgaaaaatg

SEQ ID NO: 633015 - DNA, 100 bp, Homo sapiens
cactacttcgtgctgtgcgggatcgacgcggacagcgggctggagcctgacgagctggcgggatagagggaggaatcagcagcttggaaattcaagcacg

SEQ ID NO: 633016 - DNA, 101 bp, Homo sapiens
tgatttaaacaagagatttccacagaaggatgatcacggacgtgcagctcgccatcttcgccaacatgctgggcgtgtcgctcttcttgcttgtcgttctc

SEQ ID NO: 633017 - DNA, 83 bp, Homo sapiens
ggaagactacgaaccttacccggatgatggcatgggtttaagcggctgcagggcaagaggaaccgagggagagaagaaatcaa

SEQ ID NO: 633018 - DNA, 75 bp, Homo sapiens
gtgaggccggcatcgtctttccgtcctctgaggcgacggccgcggctgcacagacctgcctagagctggaacgtt

SEQ ID NO: 633019 - DNA, 106 bp, Homo sapiens
ggatgagcaagacctaaatgagcctcttgccaaagtgtcccttttaaaagatcatgatgctgcgattaatagatatagccgtttatcaaaaaaaagagaaaatgac

SEQ ID NO: 633020 - DNA, 116 bp, Homo sapiens
tcggcccggccctgaggatggacccaggagatcccgctggtgaccctgccgctggcgagcgccaccgcatgggtggagccgccaccaaaatgcagattttcgtgaaaacccttacg

SEQ ID NO: 633021 - DNA, 90 bp, Homo sapiens
atgatgatgatggggggtccagcaaatatgacatcttggcctcagaggatgtagaaggaaataatgaagatgtttcattttcaagaccag

SEQ ID NO: 633022 - DNA, 83 bp, Homo sapiens
ctgcaatcatttttcttcagctttatcagaggtgaagaaataccaccggttgaaagaagaagccagcaagagagcagctaccc

SEQ ID NO: 633023 - DNA, 85 bp, Homo sapiens
agaaagaagctgtgaatctgcaacaagatgcctttgtagttattggtagagataccaggttcgacgaggtgctttataaatcatc

SEQ ID NO: 633024 - DNA, 97 bp, Homo sapiens
gggtcatccttgcccttgtcctcccctttcatccctatgtggaaaacgaggatgatgtggacctggaagccctggtgaacgatatgaatgcatccct

SEQ ID NO: 633025 - DNA, 83 bp, Homo sapiens
ggactgaagtatccagcgctcattgggaatttagttaagatgagcagcaccagcagtaagagggctccgaccacggcaaccca

SEQ ID NO: 633026 - DNA, 83 bp, Homo sapiens
tccccttttcccctcagtcgcctcgcgcctgcagatcgtcttattaggcatagagcctgtgctttaagagatactgcctatgc

SEQ ID NO: 633027 - DNA, 88 bp, Homo sapiens
tgggggctgagagccagatgatcgtgctgaggccatcatctgtgcgatctctgcggtggacgaggtggactacaagacggctgaggag

SEQ ID NO: 633028 - DNA, 100 bp, Homo sapiens
ggaatccgtggccccctaccaagggcccagcagggacccagaccagaaaggcaagggaggtggggaagacagggctccagctaccacaggacgggctctg

SEQ ID NO: 633029 - DNA, 100 bp, Homo sapiens
cagagccaaggtccagggggcaaggtcgtgatctacggaatccagaggcagcattgtctccaaccttccgtagtgacagcccagtgcctactgcacccac

SEQ ID NO: 633030 - DNA, 87 bp, Homo sapiens
tacacaatgcgttgcctggctccacgccctgctgggtcctacctgtcagagccccaagggctggagcggctctgggctccggaatcg

SEQ ID NO: 633031 - DNA, 75 bp, Homo sapiens
aagcggagagagtcagcctctggttcagactgcagtaaccaaaactggcgatggaatatgagaggagccctctgg

SEQ ID NO: 633032 - DNA, 82 bp, Homo sapiens
gctgctgctgggggccttcccgccggccgccgccgcccgaggtcgcgtggggcaggcagtggcgctgcgggccaaggccttc

SEQ ID NO: 633033 - DNA, 95 bp, Homo sapiens
atcagacccaagtgccaagttatttactttcccatcaggtttcctgatgtgagcaggtatgttgagtctaaaaaggacagagtcacagtagtctt

SEQ ID NO: 633034 - DNA, 100 bp, Homo sapiens
gctctgccatattgtgtcttccccggccggtccctcgcctcccggccgagctgacggagaaatcaatggttctgccaattatgagatgtttatatttcac

SEQ ID NO: 633035 - DNA, 76 bp, Homo sapiens
agcagtggcagcttcgaagccagcccagatcttactgtgccgagatcgctcacaatgtttcctccaagaaccgcaa

SEQ ID NO: 633036 - DNA, 100 bp, Homo sapiens
tggaaataattaatgaccgaacagaaacccctcctcccctagcttcactcaatgttagtaagataattcgtgtccagtccccggatggagtgaagcggat

SEQ ID NO: 633037 - DNA, 83 bp, Homo sapiens
gtggaacactacagacatttgagattcttcccgtggtgtgtgatgagaacggctctaagggttatgcctttgtccacttcgag

SEQ ID NO: 633038 - DNA, 83 bp, Homo sapiens
gtctccaggctggcgagcgcccagcttccccgggcgctgcctggacaggcctgcctgcgtgctgggacatgtctggcctccaa

SEQ ID NO: 633039 - DNA, 91 bp, Homo sapiens
tcctgcatgccagtaaaactactcatgtcagctgttctgcaggatcccatgagaagattagaagacctgcgagtaaaactgaagaaagaag

SEQ ID NO: 633040 - DNA, 100 bp, Homo sapiens
gggaggtttggcagatggagaacctgatcgaacttcggatctcactggcatcgaatctatggatcagtgtcgccataccttggaacagcataactggaac

SEQ ID NO: 633041 - DNA, 80 bp, Homo sapiens
cccgtcagccccgcagggccacaccggccccatggcgttcccgctgacaatgcagatcttcgtgaagactctgactggta

SEQ ID NO: 633042 - DNA, 75 bp, Homo sapiens
gaggacttcggctacagtgctttaggtccggcgccagctgccagtcgaggaaccgaacccagccaaaaggcttct

SEQ ID NO: 633043 - DNA, 82 bp, Homo sapiens
ggagtccaactcggctgcccacaaggaggttcacagagtgtttccaaatgggctggcctcccaggaagggactattcagaag

SEQ ID NO: 633044 - DNA, 100 bp, Homo sapiens
gactgcgttcgaatccataacaagttccgatcagaggtgaaaccaacagccagtgatatgctatacatgaggtcctgctgtactagccaccaaagcagct

SEQ ID NO: 633045 - DNA, 101 bp, Homo sapiens
tgagctggttgccggggcaggggcggaggcggaggcagaggtggaggcgctttgaaaggaagtggcagtttttgtctttgataaaaaactgattgacaagt

SEQ ID NO: 633046 - DNA, 100 bp, Homo sapiens
tcatattccctgaccctgccctccctgcgagaactccagtccgggctccacaaagggcgcggcacccagcatgggcaccctcatgggggtgtacctgccc

SEQ ID NO: 633047 - DNA, 98 bp, Homo sapiens
gcggaggcggctgaggtgcgagccgcacaatcctggaggaagagaaggctcagcaagaagagcgcatgaggatggagtccagaagacaggccacagtg

SEQ ID NO: 633048 - DNA, 101 bp, Homo sapiens
cctcgggccgacgccatgaagatcaaagatgccaagaaaccctgcgcctgaacaagaataagctgcaagtccttccagaattgcttttccagagcacgccg

SEQ ID NO: 633049 - DNA, 96 bp, Homo sapiens
ggacgcagttggggctcacttttcttcagctccttctcatctcgtccttgccaagagcaaatgccagatgttaatgtaagctgggatggagagggc

SEQ ID NO: 633050 - DNA, 51 bp, Homo sapiens
gtcagcatcaccagcaccacatgtaccggagagcaatggtgtgatctccgc

SEQ ID NO: 633051 - DNA, 100 bp, Homo sapiens
tgtatcccacggagaaggtgaactgtctggataaggtcaaaatgcagatcttcgtgaaaacccttaccggcaagaccatcacccttgaggtggagcccag

SEQ ID NO: 633052 - DNA, 96 bp, Homo sapiens
ggggtcagcagggggccagctcaggacacacagacccagctggaactcgttacttcaatgagaatcaatacccagatgaagcaaagagggaagaaa

SEQ ID NO: 633053 - DNA, 82 bp, Homo sapiens
aaggatttcagcaacaatgcctctgttcaaactcccaggtggtgttcccactgatgaagagcaggcgactgggttggagagg

SEQ ID NO: 633054 - DNA, 82 bp, Homo sapiens
cagaccctggagcctcagttggaagcagccgatccagcctgcggagcctgtggggcagtttgtgaatagcacaatggaagaa

SEQ ID NO: 633055 - DNA, 83 bp, Homo sapiens
ctctgactccacctttacttttacctacgttggcggccccagaagccctggcctcccacgactacatcctgaagattgtgccc

SEQ ID NO: 633056 - DNA, 75 bp, Homo sapiens
ctgtgtacagtgcagattcccaccagctggagatcagggggtgcactatagccatctggagctgagccctgggga

SEQ ID NO: 633057 - DNA, 101 bp, Homo sapiens
gctatattatttgcacccagtcctgcagcgccagcagctggactatggcatctatgttatcaaccaggaaactatggtccaggaggcagtggaggaagtgg

SEQ ID NO: 633058 - DNA, 75 bp, Homo sapiens
tccaaagggagatgtacaaggtgcatgagaaaaatcgtttgtcccgctggctggaagcctggcagtgacacgatt

SEQ ID NO: 633059 - DNA, 101 bp, Homo sapiens
cctctaccttgcgagccgtcttccccaggcctgcgtccgagtctccgccgctgcgggcccgctccgacgcggaaggtccagcagactctggaggcccgagc

SEQ ID NO: 633060 - DNA, 98 bp, Homo sapiens
tgaagactgggctttttttcctatgtctcttgggaactgcagctgcaatcccgcatggactggaggaaacagctgccaaatgcaagggactgggtgcc

SEQ ID NO: 633061 - DNA, 101 bp, Homo sapiens
ccccacccattcctttaaatccggagggggaaaaaatcccaaggtctgcaaagttagaacctggcccattagatgaaacccagatcgctactatattaaga

SEQ ID NO: 633062 - DNA, 94 bp, Homo sapiens
ccggcgccgccgcgtcttcccggtctcctttcccggccgcacagggggctttgttatgcacctaaagccatattggaagctccagaagaaagag

SEQ ID NO: 633063 - DNA, 75 bp, Homo sapiens
acaacaaggaagggactttaatcactgaccatcccaatatacagggaaaactgcctttgcttctgagccggatga

SEQ ID NO: 633064 - DNA, 82 bp, Homo sapiens
cttcggcagtccacccaccgccgccgcctcccaggctctgtgtgctccgggatggagcaggtgtgcagagggtgagaaccca

SEQ ID NO: 633065 - DNA, 73 bp, Homo sapiens
cagattggaaaataccacaggatggagactacgagtttagggagccggtccttgctgcacctgtgccgtcccc

SEQ ID NO: 633066 - DNA, 75 bp, Homo sapiens
agattcgcagtggtcgcttcttctccttgtctcacaccattttgctggtacagcctaccaagaggccagaaggca

SEQ ID NO: 633067 - DNA, 99 bp, Homo sapiens
aactacaatgcttctcaagatgtggagctctccttgcagatcggtgacacagttcacatcctggagatgtacgaggaggctgtgacaacactgaaaaca

SEQ ID NO: 633068 - DNA, 82 bp, Homo sapiens
cggcgcgcatcagggacactcggtgtgcgacgtggagatccgaaggaatgaaatccgggacggggaggtttactgcatcgac

SEQ ID NO: 633069 - DNA, 100 bp, Homo sapiens
tctcttgggtgagaagatcctgggcagcctccagcagggacctgtgacagtcacctgtgtgccgcccgcctgtggtcctgggagcccgaggccagcccgg

SEQ ID NO: 633070 - DNA, 83 bp, Homo sapiens
ggatatttgcttggaaaaacgtgtgggtacgaccttgacctgcctagagctggaacgttacctccagagcgagccctgctatg

SEQ ID NO: 633071 - DNA, 101 bp, Homo sapiens
gtcctggaagccaccaccctgcagcctcaggaatttgaagcctacattaatgcttctggagaacatggaattgtggttttctctttgggatcaatggtctc

SEQ ID NO: 633072 - DNA, 82 bp, Homo sapiens
gggggagccccgggagccgcacggagcaggccgggctctcgccatgggtcactgtcgcctctgccacgggaagttttcctcg

SEQ ID NO: 633073 - DNA, 90 bp, Homo sapiens
attaccatggcgaggagtctctgtccgggggcctggctaaggaaaccctattacctccagactgaccccaattcttggcattcagaaaca

SEQ ID NO: 633074 - DNA, 50 bp, Homo sapiens
agtttgtccttctgctattgatcctgaagtctcagaccagtatccttcag

SEQ ID NO: 633075 - DNA, 101 bp, Homo sapiens
cttttctttgtatgtcaagtatcaagtggccatacaccaggatccacccgatgaatgtgggaagactgaggtttgccatgcagaacttgaattggggactt

SEQ ID NO: 633076 - DNA, 104 bp, Homo sapiens
agcagaagaacgcttagaaagagatcacatctttcgacttgaaaaaggtttggattcaggatttgttcctagtgtccaagattttgataagaaacttacagaag

SEQ ID NO: 633077 - DNA, 90 bp, Homo sapiens
tctgctcctgggctacaagagctccgaggagacaaggacggcagcaaggtgacaacagtggtggcaactcctgggcagggtccagacagg

SEQ ID NO: 633078 - DNA, 100 bp, Homo sapiens
cctgttcccggggcagatccaggttcagatggcggtgggaccccccgactgccctgtgggagggccgctgaccttccctggccggggttctggggctggg

SEQ ID NO: 633079 - DNA, 75 bp, Homo sapiens
ctgctctgtgcgcgcctccatctgggccatggatgggtcacaaggcacttaaagcattgttgaggtcattggtag

SEQ ID NO: 633080 - DNA, 100 bp, Homo sapiens
cgggagagccgggtaccggccgtggaagcggccaccgactactgtcagcagctgtgccaggaactgcaagcacatgttgaccagataactgaaatggcag

SEQ ID NO: 633081 - DNA, 83 bp, Homo sapiens
gtacaggctttaacagaaattcaggagttcatcagctttataagcaaacaaggacattggctccctggattatcaagagtttg

SEQ ID NO: 633082 - DNA, 100 bp, Homo sapiens
gcagagcctgaggaagctgaagcagaggtttcccagtgtgatgcctaccaacatgttatgatgcagcaagaaggctctcaccagatggtggcatctttat

SEQ ID NO: 633083 - DNA, 75 bp, Homo sapiens
accaaggaccagcaattcaactggacctgtgatctgcagaatgctgagttatcccccaactcgccgagctttaat

SEQ ID NO: 633084 - DNA, 75 bp, Homo sapiens
cggccgggagggcggccgcagcaggaacccacttccagcgggtgatcccagaagatggccctgcagctcagaacc

SEQ ID NO: 633085 - DNA, 82 bp, Homo sapiens
tcggatctgctggacgaggtcttcttcaacagcgaggtggacgagaaagtgggggggccctcagcctcttggccttgaacgg

SEQ ID NO: 633086 - DNA, 82 bp, Homo sapiens
tcaatgacagtcaagtggaaacaactgtctgtccaacatgtttaccgtggctgatgtgttgagtcaagatgaactgcgcaaa

SEQ ID NO: 633087 - DNA, 51 bp, Homo sapiens
aacttaattaaagaactggccagccaaaccaaacaggaagcttacttttct

SEQ ID NO: 633088 - DNA, 75 bp, Homo sapiens
cagattcgcagtggtcgcttcttctccttgaaggagaacttatggattgtgatggaaaatcagaatctagtcctg

SEQ ID NO: 633089 - DNA, 82 bp, Homo sapiens
gctgaggggctgggagccgcgcacaccaccatcacggcttggcaactcttgtgaaatttcatagatctcgtcgcttactggg

SEQ ID NO: 633090 - DNA, 100 bp, Homo sapiens
ctgatcttcgatgagctctcggattccttatgcagagtggccgacttgccatccagtccaatggatcagatgggcaagatgagacctcagccatatggcg

SEQ ID NO: 633091 - DNA, 51 bp, Homo sapiens
gatgctatagcattgtcagtaatttaagggacgctgtgaagcaatcatgga

SEQ ID NO: 633092 - DNA, 82 bp, Homo sapiens
ctggctctgaaggcgaacgcttcgctggccatttaggagctctgctcaaagccagacgcattttgaaagcgaagcagaagcc

SEQ ID NO: 633093 - DNA, 100 bp, Homo sapiens
cagcggcttggtgcgggagctggaggagctgcgctcggagaacgactatctcaagctgagatctgtatctgtggacctgaatgttgatccctcgcttcag

SEQ ID NO: 633094 - DNA, 75 bp, Homo sapiens
ggcaccgaggcactcagaggaggtggaagttaaacgagctgagcctcgggacagcaagagccaagcgccgggaca

SEQ ID NO: 633095 - DNA, 96 bp, Homo sapiens
gccccaggtgtaagcgcagaaagcaggcgaacccgcggcgcaataacggttaaagatcgaggtccggaagccactaggagattttttaattggttt

SEQ ID NO: 633096 - DNA, 74 bp, Homo sapiens
gcggggggagaacgttactgtggagaaccaaccaagagctcagagttctacagagtcaccactgaacaatatca

SEQ ID NO: 633097 - DNA, 75 bp, Homo sapiens
acctctgcatgaagctgctattaaagggaagatcgatgtgtgcattggaccacctgtagagctgcgccaaagaaa

SEQ ID NO: 633098 - DNA, 74 bp, Homo sapiens
gacggagctgcggtggcgtctccacacggaatctgaacctgtgatgttaagaaatcagtaaatattaaaaagaa

SEQ ID NO: 633099 - DNA, 50 bp, Homo sapiens
ggggagccggccttggacacggtggagtctcactctgtagcccaagctgg

SEQ ID NO: 633100 - DNA, 100 bp, Homo sapiens
gcgtggccgtcaaggagctggacctctacctggcctacttcgtgcgtgagcgaggttcattgtcggatcctccaaatattgctggcttaagtcatttttg

SEQ ID NO: 633101 - DNA, 75 bp, Homo sapiens
gttagcttcagagttctttgtggatggacttgattctgatgagaggttgaaatcacaaagattagacaccttttt

SEQ ID NO: 633102 - DNA, 100 bp, Homo sapiens
gacggctcaagagtttagccttgcgactggcccagtatccaggtcgaggttctgcagaaggttgtgactttagtatacaaaaaggtgtgagcggtactgg

SEQ ID NO: 633103 - DNA, 58 bp, Homo sapiens
cggcctcgtgcgccgcgctttgaggatgataatgaagataattcaaatgatgggaccc

SEQ ID NO: 633104 - DNA, 100 bp, Homo sapiens
aagaacatcccgcggatcacgggtggagagcactgttactaccatggaagcatcagaggcgtcaaagactccaaggtggctctgtcaacctgcaatggac

SEQ ID NO: 633105 - DNA, 80 bp, Homo sapiens
gactcatagtcactgccagaaagttaccggtattgtaagaacaagccgtacccaaagtctcgcttctgccgaggtgtccc

SEQ ID NO: 633106 - DNA, 51 bp, Homo sapiens
ggagaaaatggagcagacattcaggcccaagacctgcaaaatttacagagc

SEQ ID NO: 633107 - DNA, 100 bp, Homo sapiens
tgtgaagaaagcctcctaccttgattgcatcagggccattgcggttcctaaaagtaaagctttagaggccaccaaattggcaattgaagctggcttccgc

SEQ ID NO: 633108 - DNA, 100 bp, Homo sapiens
cgtgttcgtcctcggcggccccggcgccggcaaggggacccagtgcgcccgcatcgtcgaggtttcaggcacagaactgtatatccaataatagtgaaat

SEQ ID NO: 633109 - DNA, 98 bp, Homo sapiens
cagaaaatcctcactctgagtacggtctcacagacaacgttgaggagaatgaggaaaatggggagcaggaggctgacaatgaggtagacgaagaagag

SEQ ID NO: 633110 - DNA, 90 bp, Homo sapiens
ccactcctccaagaaccaacccccaaattggctgggacagatcaagtggcctgtgcagatccagagatctgccagaagatctgcagcaac

SEQ ID NO: 633111 - DNA, 75 bp, Homo sapiens
gccgcctctcggtgatgggctgcgatgtactcaaagactactccaaaggattcggcgggaagtatggggtgcaga

SEQ ID NO: 633112 - DNA, 96 bp, Homo sapiens
atgacatgctgccttccgtcctcagtgcagatttgtgttcccttctgggaggcgttgatagagatttaccgcattgtttctcagaagcaaatgtca

SEQ ID NO: 633113 - DNA, 90 bp, Homo sapiens
gcggaactcggcggccgccatggcgtccaacatggaccgggagatgatcctggcggattttcagtatgttcatgcggatgctcctaccaa

SEQ ID NO: 633114 - DNA, 100 bp, Homo sapiens
gctaagtgaaaaatcatcaacctttctaatgaagatggagaggagaaaacctatggtggctgtgaaggacctgatgccatgtatgtcaaattgatatcat

SEQ ID NO: 633115 - DNA, 80 bp, Homo sapiens
tataaaagcaaacacaggattcaccacagtacttcacatcgtcgttcacatgggggctttttggtggtgctggagttggc

SEQ ID NO: 633116 - DNA, 97 bp, Homo sapiens
agagcaagagctggatctcgtctttctgtggatccaaagcagttgctggaagatggaataaggaaagagcttgtgaagcgcgttgcctttgccctgc

SEQ ID NO: 633117 - DNA, 100 bp, Homo sapiens
ctaaaggaaggcgtccgttggccttcgtacccgtcttgattgagaaatgagccgtcagactgctacagcattacctaccggtacctcgaagtgtccacca

SEQ ID NO: 633118 - DNA, 90 bp, Homo sapiens
gttaatctcctcagaaatcactaaatactactctgaggggcttagaaattaacaggattcaacacaactgcaatcaaaatcccagcaggc

SEQ ID NO: 633119 - DNA, 101 bp, Homo sapiens
ggtgtacttgcaagaaacctcaggacttgagtaacagcaacatgaacgacaaatcctccacccctgggctcaagtccaacacaccaaccccaaggaacgac

SEQ ID NO: 633120 - DNA, 101 bp, Homo sapiens
atgttgaatggttttgggggagatgcaccaaccttaagattactatgcagcataacaggtgacagtatgttgactgctgtctctgtggccagagattgtgg

SEQ ID NO: 633121 - DNA, 82 bp, Homo sapiens
aaaactgttgctggctactggttacacacaaactttgtgtaaaagatgatgtggtttaccgacaagactgtgaaactttcgg

SEQ ID NO: 633122 - DNA, 75 bp, Homo sapiens
ggagaatcgaggagctcaacaaggtgtccttaagtttgctcgcttggtcaagtcctacgaagcccaggatcctga

SEQ ID NO: 633123 - DNA, 100 bp, Homo sapiens
acagctggatgtttgcgacatcccagagagcttccagagtttggacaaagaaacctgtttgatcccagctgtgcaggagccgaagtttccacagaactac

SEQ ID NO: 633124 - DNA, 51 bp, Homo sapiens
ccgagggcggaggcgacactctcagaatcaaaggcatgggaggttgatacc

SEQ ID NO: 633125 - DNA, 75 bp, Homo sapiens
ccttccttactttgtcttggtatactacatggcaaaatgggaaaggtgtttgatcagtatgtaaagaccagggca

SEQ ID NO: 633126 - DNA, 98 bp, Homo sapiens
cattatcctcagtggaggcgaattcataagtccattgagagtgtgtttcctgtaacaaatcgttcaagaaactctggtcccttcatgaacatatcaag

SEQ ID NO: 633127 - DNA, 97 bp, Homo sapiens
cgaaccttggagagaggagaacgaacatcttctggacctttgtccaggctggaatgagctgctcatcgcctccttctcccaccgctccatcgccgtg

SEQ ID NO: 633128 - DNA, 100 bp, Homo sapiens
gctctggatagcaccttatggacagttcgtgccctcgtgaggctggcatgcaggatggcaggacagcccggccacatgccccatggagggagttccaaca

SEQ ID NO: 633129 - DNA, 98 bp, Homo sapiens
cgcagtggtcgcttcttctccttgaattcagtttgcctgttctgtatgcaagttccgtagctttgatgacgaagagatccagaagcatctgcaaagca

SEQ ID NO: 633130 - DNA, 75 bp, Homo sapiens
ggttaatcaagaattctctatttctgctccgtcatccatgccactagccctgaggatgatgacaggaaggtccga

SEQ ID NO: 633131 - DNA, 90 bp, Homo sapiens
ctgctgaactgggtgctttatataggattggccatctgcaagcttcccttctccgtggagagcaggaagacagtcatgggacctcaggga

SEQ ID NO: 633132 - DNA, 74 bp, Homo sapiens
gtcaaaacgggccagcttgcagccatcaaggttatggatgtcacagggatatcttcaaaggaggaagaagaaag

SEQ ID NO: 633133 - DNA, 75 bp, Homo sapiens
tggactccatcctcttcctttttgaaagacggtaaagaacaggtccaagaaaagctcaaagaaagcaaataccag

SEQ ID NO: 633134 - DNA, 98 bp, Homo sapiens
tttccgcggagcggacccagcaatgacggtttggaattacaagcttcggcgctgtcttttcacattgcttgggcacttagattatattcgcaccacgt

SEQ ID NO: 633135 - DNA, 101 bp, Homo sapiens
gaggtgaagttgagcagttggattcaagagcacttcccctttgccttcatcaggtttttcgttggaatatacgttgcacatttatggcgattctgagtgtg

SEQ ID NO: 633136 - DNA, 89 bp, Homo sapiens
gggggattctcgacctgctaacagaactggaccttttcgattccgtcctatttcagtgttccgggaagccaatgaagatgagagtggct

SEQ ID NO: 633137 - DNA, 75 bp, Homo sapiens
agggaaaagggacgtaggaagaagggcaggacctgggcggaggccgccaagacgcttgtagaccctggagttaag

SEQ ID NO: 633138 - DNA, 82 bp, Homo sapiens
ggataacccggtggtgcagctgggcctgaccaacccgaaaacattgctaggatattagaaatggctactccccagtcaattt

SEQ ID NO: 633139 - DNA, 52 bp, Homo sapiens
gtagtcgctggagtccgcgcctccctggctacatcaaatgggtctttggagg

SEQ ID NO: 633140 - DNA, 101 bp, Homo sapiens
gaagtactgagcctgttggaggaactggcccggaaacaggaggaccgcgagcccagcattgacctgctgcaggccttcgtggagcactggaagggcatcac

SEQ ID NO: 633141 - DNA, 82 bp, Homo sapiens
tccccttgaactacccaaccagtggctctgggatattatcgatgagttcatctaccaggatgttcaagatccttcagtattt

SEQ ID NO: 633142 - DNA, 100 bp, Homo sapiens
atgcagatgagaaggttcagttggcaaaccagatatatgacttggttatatgtcaccacacccatctccattaggagccccagagcacgtctccagccct

SEQ ID NO: 633143 - DNA, 100 bp, Homo sapiens
ggatatcgtgtctggagcagtggagcccaaagacccctggagacatgagccggtgccatctgtgggggctttgggccaggggtctccggacagcatgagc

SEQ ID NO: 633144 - DNA, 95 bp, Homo sapiens
aaagactcatatcaacattgtcgtcattggacacgtagattcggtaagactttgaccccgacgcaggcttcagtgattgccgcggatcagaagcc

SEQ ID NO: 633145 - DNA, 100 bp, Homo sapiens
caggggagacaccaatttctatggcaaacaggaggctgagtgcccctagagggcagggacccgtgagtcctctctgcatcccaacaacagcaaagagcct

SEQ ID NO: 633146 - DNA, 48 bp, Homo sapiens
ggcctaagaattttggcattggaactctaatgaatcattgattgacca

SEQ ID NO: 633147 - DNA, 82 bp, Homo sapiens
attttaagaaaaggcattgaggaactcaatcaaaccagtattcttttcacacagatgttggagaagagcatcagtctccagg

SEQ ID NO: 633148 - DNA, 75 bp, Homo sapiens
gccgccgttttcgcctgcagctgctcaccgcaccagtggcagttcgcagcctccaggacttggctcgcatcgcca

SEQ ID NO: 633149 - DNA, 100 bp, Homo sapiens
attcctgaagtcaactgggttttgcagtatgaccctcccagcaatgcaagattcggaggaacctgagtgcctcagtcatcgccgtcaccatccagggggg

SEQ ID NO: 633150 - DNA, 116 bp, Homo sapiens
ttttgttggtgttatgggaatgagatcctactactatggaaaattcatgcctgtaggtttaattgcaggtgccagaacgtggaatcttgtagaaggaagatcagcattcataaaaa

SEQ ID NO: 633151 - DNA, 100 bp, Homo sapiens
aaaaggggcatcaactccagctggattattttggagcctgcaaatatccacaggatgagcaggaacggatcgaggaaaggctggcttatattgctgatca

SEQ ID NO: 633152 - DNA, 97 bp, Homo sapiens
cagacttcagattcgtttctgagatttccttcgtccctgacatcatctctgtgcactgataataaccctgcaggaactgcttcacaagattaaagga

SEQ ID NO: 633153 - DNA, 82 bp, Homo sapiens
gagagtggtattatggtgtaaacaacgattctttggaggtcagaatggcggcagcggagcatcgtcattcttcaggattgcc

SEQ ID NO: 633154 - DNA, 75 bp, Homo sapiens
ccggctggcgcacctgggcgtgcagcttcaggatgagttagagaaaggtgaacgggacaatgcagaactgcagga

SEQ ID NO: 633155 - DNA, 75 bp, Homo sapiens
gatatgatgactaccgagactatgacagtccagaggactacaaatccctccaggatatcattgccatcctgggta

SEQ ID NO: 633156 - DNA, 101 bp, Homo sapiens
gggtgatttctgcatttccatctgaggaagctgcacaagccttaatttatgctgagatggcaggatcaagcctagaaaatattcaagaaaaaataactgag

SEQ ID NO: 633157 - DNA, 78 bp, Homo sapiens
atcaagaaatgcagaaacgtaaagaaatgcaattgaggcaggaggaagagcgcaggcgccgtgaagaagagatgcggc

SEQ ID NO: 633158 - DNA, 90 bp, Homo sapiens
ttatcgcagaatgcaacgccattcgccaggctcttcaggatctgctttcagagtacatgaacaacatgtcctgtgaagtcaacgagtgcc

SEQ ID NO: 633159 - DNA, 98 bp, Homo sapiens
caggcccttgttggggcacaaggtggcagagaacgcattcgactgcagaaaaagttccagaaacaatttggggttaggcagaaatgggatcagaaatc

SEQ ID NO: 633160 - DNA, 97 bp, Homo sapiens
gtggacggactcactgccctgcaccaggggatggagaagtttatgtttgggatgtgaactcaaggaagtgccttaacagatttgttgatgaaggcag

SEQ ID NO: 633161 - DNA, 82 bp, Homo sapiens
cgtgggcgacccggtgtgtggcgcgcccagagccccgcgtttcagccctagggaagacttcccaagtaagaagcggaagagg

SEQ ID NO: 633162 - DNA, 100 bp, Homo sapiens
cttccctcatctctcccaactggctggtctctgccgcacactgctacatcgatgacagaggattcagttctccaaggatgtcctagtaaacatctattct

SEQ ID NO: 633163 - DNA, 106 bp, Homo sapiens
gctagcaatcagcgagattccgtgggcgtaggaccctctgagccaggcttccatctgtatcacaagttgcccacaatagtgcctgagagctgccttcttataatgg

SEQ ID NO: 633164 - DNA, 100 bp, Homo sapiens
cagagctccagtgaacagtgcaggtgaccaagaatatggcccaggtgaccaaagccctggacaaggccctgagcaccatggacctgcagaaggtctcctc

SEQ ID NO: 633165 - DNA, 78 bp, Homo sapiens
agcgtgaccgagagcgcgaatatcgtcatcgttagaagatgacttgtggggggaccacagtctggaggtggaggctgg

SEQ ID NO: 633166 - DNA, 97 bp, Homo sapiens
gggacattattgcgcgtggaacggctgcttttggaaggacctgaaggagaagaaggagaaggtggaggagaaggcaagccggaaagagcgaaagaaa

SEQ ID NO: 633167 - DNA, 100 bp, Homo sapiens
gcagcggcggcccaggccagcattcccgcactggtggcagcgatcgtgtttatcagttttggcgtggtggccgccttctgctgcgccatcgtggacggcg

SEQ ID NO: 633168 - DNA, 84 bp, Homo sapiens
ctgccgctgtcgtctttgcttcagccgcagtcgccactggctgcctgaggtgagaagccctaccactgcaactgggacggctgc

SEQ ID NO: 633169 - DNA, 80 bp, Homo sapiens
gcctctccttgctgcagccatggaacctgcttttttaaaggctgcagaaaacttcactcttttggttaagaacaacatct

SEQ ID NO: 633170 - DNA, 74 bp, Homo sapiens
tggtgcagatcatctacgacgagaaccgggcttgcagccctgagtgatcgagagactcggctgcaggaggtgcg

SEQ ID NO: 633171 - DNA, 76 bp, Homo sapiens
gctacgagtgccgctgtgccgaggcggtgaccacccgtcaggtgcgtaccattgtggaagaggtccaggatggcaa

SEQ ID NO: 633172 - DNA, 75 bp, Homo sapiens
ggaggccaggggtgtcgccatgcttgccagagtgatctctcggcttgccgactttgctaaggaacgagccagtct

SEQ ID NO: 633173 - DNA, 88 bp, Homo sapiens
aggttcacagatgatacctttgatccagaacttgcagcaacaataggatggactcagggtcccgaggcaagtcagactgttgcagagg

SEQ ID NO: 633174 - DNA, 82 bp, Homo sapiens
tcgttgcggccatcgccctgccggaccgcgcctcaggctcccccaggtcccgcggcagtgctggtggccatggttcccgtag

SEQ ID NO: 633175 - DNA, 82 bp, Homo sapiens
cgcgcgaggaaatggccgaggggccggagccacaggtgctatacttggtagatcagaaactcaggagtgtcttttctttaat

SEQ ID NO: 633176 - DNA, 71 bp, Homo sapiens
attcctcgtcagcaacatgctcctagcagaagcctatggatctggagtccctctccaagatcctggatgtg

SEQ ID NO: 633177 - DNA, 82 bp, Homo sapiens
cccacgtcgccggcctggaggggcgaagaggacgagggggccaaggcttcctccggggtgacttaagagattaaaattaatt

SEQ ID NO: 633178 - DNA, 97 bp, Homo sapiens
caaagcctgaacaggcagggccagacccaggaaagaccacagcaagattctttcattcgtctcctcctagcctgggggaccaggctcgaactgaccc

SEQ ID NO: 633179 - DNA, 90 bp, Homo sapiens
gcctcttctgataactcaggatttacttgaaatgaaaggagattccaacctacttcaggtaagaccattgcaattggaaaagttctgaaa

SEQ ID NO: 633180 - DNA, 100 bp, Homo sapiens
cgactcataccccacagaccactatcacctcgatcagtgcctgtccattggggtcctggacatcttcgggtttgaagacttcgagaggaacagctttgag

SEQ ID NO: 633181 - DNA, 101 bp, Homo sapiens
acagccaggaggaggaagaagaggagctcttgaggaaagccattgctgaaagcctgaattggatcctcacaaagctacaagaagcaagagaaccttctccg

SEQ ID NO: 633182 - DNA, 96 bp, Homo sapiens
tggctaaagcacatcgaggtgaatgggagcaagattggcccagacaacctgccttatgtccagatcttgaaggatgacgacagatatgagcaggcg

SEQ ID NO: 633183 - DNA, 83 bp, Homo sapiens
gtgagggtgtacaaatacccctttgaattaattatggctgccaaacgtaccaagaaagtcgggatcgtcggtaaatacgggac

SEQ ID NO: 633184 - DNA, 75 bp, Homo sapiens
ggaaatgaagtataataccaagaaagccccacttggtcagtttacgttgcgagacatgtatgagcaatttcaaaa

SEQ ID NO: 633185 - DNA, 88 bp, Homo sapiens
ccgtgtgcgtgctgaagggcgacggcccagtgcagggcatcatcaatttcgagcagaagaaaccagactgtgatgactgggagagcgg

SEQ ID NO: 633186 - DNA, 98 bp, Homo sapiens
gtcagtttcccgagtacccaccagagggcgccactaaactgggctggtggttcgtgagcacttctgaggagcagggctgggtccctgccacctacctg

SEQ ID NO: 633187 - DNA, 99 bp, Homo sapiens
gtttgtggcaggaggcccccacccacagcactggaccaaggcctgtcccctcagttcccaggtgccatgaggaagcctcgtcggaagtcccggcagaat

SEQ ID NO: 633188 - DNA, 117 bp, Homo sapiens
ccctcaagcgggaaaaagaccgactagtacatcaattaaagcagcagaagaaatgtctggaagtgctacagccattttgcaactgtgaaggcaaaactcacactctaaagatatcag

SEQ ID NO: 633189 - DNA, 95 bp, Homo sapiens
gacagtgtccgcgcttgtgcttccctggtggtgctcagcttccctgagctcgagggcggcacatggagttcaggaagctccgaggaatggagacc

SEQ ID NO: 633190 - DNA, 80 bp, Homo sapiens
tgaaacagagaaagataggcggccatggtccaaccttgaagaaacaggtggcatctgcatcgcaccacggccctcggaag

SEQ ID NO: 633191 - DNA, 90 bp, Homo sapiens
cggctgtgaagtggggaggctggcaacagttttcttcagcgcccaggatgcagccggctaaggttaagaatgtctgaggggtcaggcggt

SEQ ID NO: 633192 - DNA, 51 bp, Homo sapiens
agacaggtggcgacggcagaggaataaaataccatgaggagtttgagaaga

SEQ ID NO: 633193 - DNA, 100 bp, Homo sapiens
aattaaacactgcattgtgttgctgcagattgccaaagctggaggcgtggcatctggattaaatcatgttcttacgaacgacctgacagccaagaggctc

SEQ ID NO: 633194 - DNA, 100 bp, Homo sapiens
ctcctccacttacgtggaggagctcaaggggatgtcgctgctggttcgggcagagtccgacggcgctttgacttccgtccaaaacctgatccttattgtc

SEQ ID NO: 633195 - DNA, 75 bp, Homo sapiens
gccgggtgctgggcacggtcccgcgagctatttactctggccgagagcttgggaggattcgaaagccttgctgag

SEQ ID NO: 633196 - DNA, 100 bp, Homo sapiens
cttctttatacttgcacagaggcagctctatgagggatgtgtggacactgcactgaagacaggtgaaagaactcttttcttctttgggagtcgaatgtaa

SEQ ID NO: 633197 - DNA, 82 bp, Homo sapiens
ggagctctttgggatccggccagatgattacttgagatgccctgtatccaagcccaatatgggacaccagcaccgagtccgg

SEQ ID NO: 633198 - DNA, 73 bp, Homo sapiens
ttcactgtggatctcccaaagaaacacgggatttccacaagatcaaattcgattgtggcccatgcaagcaagg

SEQ ID NO: 633199 - DNA, 89 bp, Homo sapiens
ttcagcccaggggccggcgcacgcttcttggacacttaatgattgttggcaagaaatgtgctgctgatctgggcctgaataagggttat

SEQ ID NO: 633200 - DNA, 100 bp, Homo sapiens
gcaccaggttcacggacgagtatcagcttttcgaggagcttggaaagtactaggttttgacaagcttgcatcatgcgtgagtataagctagtcgttcttg

SEQ ID NO: 633201 - DNA, 98 bp, Homo sapiens
aggagtcagagacattacatcaggaagatactgcagagatattctactccatctcattcattgtacagttttccaaagaaattagaccattttcttcg

SEQ ID NO: 633202 - DNA, 78 bp, Homo sapiens
tgctactgcctgggggctgaggatgacaaaaaagccttcataggccgcatctggctggacaacttgagctgcagtggg

SEQ ID NO: 633203 - DNA, 100 bp, Homo sapiens
cagcaggggcagcctgccttggagctgaaagaggagagcttcagagaccccgctgaggctttaccactcctgaaggccctaaaccccgttccagatgctc

SEQ ID NO: 633204 - DNA, 100 bp, Homo sapiens
taatgtatttcaaaacaaaatacatgtcagttatcaagagactcaacagatgcagatgaagcaatcccacagagtattgatgaggaaactgaagtttgga

SEQ ID NO: 633205 - DNA, 100 bp, Homo sapiens
atcgagatgtccatgccctggattctaacggaccatatcctggaaaccaaagaaccttccatgatggagatctcagaccgtggtggaggaatcgctcaca

SEQ ID NO: 633206 - DNA, 90 bp, Homo sapiens
aacagggctgccagtgcatctgaatctgccctccaggctcttcttcgtggggtcccgggaaggccacctgccctccatcctctccatgat

SEQ ID NO: 633207 - DNA, 101 bp, Homo sapiens
tgaggtcagagaagtcgaaggggtgctggcgagacgggggtgatgcccacccgggcgagaaaggcctaccccaattatttactgggcaaaggaagatggaa

SEQ ID NO: 633208 - DNA, 50 bp, Homo sapiens
aagaggccccagcccgtgaaaagtgaggcaattgaagatgaaggtggtaa

SEQ ID NO: 633209 - DNA, 98 bp, Homo sapiens
tcagatcagtggccgaggccccagagggagcagattaagcgagtaaaagactcggatgatgtacctatggtgctagtgggaaacaagtgtgatttgcc

SEQ ID NO: 633210 - DNA, 100 bp, Homo sapiens
gcccagtagggcgcactggaggacgctccgctgcgggaggttttgaggttttgctgaagatattcctgaagaatcatcccaggtgccacactaaaaaaat

SEQ ID NO: 633211 - DNA, 74 bp, Homo sapiens
tctccctctttgctggaggcatgctgcgtgaagcctctgcgggccttcttttcgtcttatttgaagtcattgcc

SEQ ID NO: 633212 - DNA, 50 bp, Homo sapiens
aaaaggacgcaaagttctccggcgagggagtgcatccgccccaacccttt

SEQ ID NO: 633213 - DNA, 90 bp, Homo sapiens
aaagcttagctctggaagtggagcagcagctgggcctggagatccagaagctgactgcacagatccagacaattcttccccactcccagc

SEQ ID NO: 633214 - DNA, 87 bp, Homo sapiens
tcctgtacccagaatgccgtttgagcccagaagaatcagtgcggtttctgtggcagagcgagttgcatttgaaagaggagaagagcc

SEQ ID NO: 633215 - DNA, 98 bp, Homo sapiens
gaagatggaacatggccaaggggtccttctactcctaacactcgactatgacatcaacattgaggagattgggtgaagacatttttaaaggagtggta

SEQ ID NO: 633216 - DNA, 150 bp, Homo sapiens
aacgctgctcagatggctggagctttgatgctaccaccctggatgacaatggaaccatgctgttttttaaaggagctgccaaggccatgtctgttccatcatcactgagccagtcggccattaatgccaacagccacggaggccccgcac

SEQ ID NO: 633217 - DNA, 75 bp, Homo sapiens
actcagtaatctagctgcagttttgatgcacagagattctctcgggcctagccgtccttggaacccgatattcgg

SEQ ID NO: 633218 - DNA, 111 bp, Homo sapiens
tcacaggatcctgctcagcccagaatgcctccttggatttacaatgagagtttggttccagctttggacatcagacagtgcaggagaagaatgtgatgcggcagaaggggc

SEQ ID NO: 633219 - DNA, 100 bp, Homo sapiens
tcaccctgctcttgctgctgctcctgggactagaagatcaagtcccagcagagcgaggtgacccgaatcctggatgggaagcgcatccaataccagctag

SEQ ID NO: 633220 - DNA, 82 bp, Homo sapiens
actacttctaccatggcctttcctggccccagaaagggatctggtaaaacctaaatatgacctggatagaacagatccatta

SEQ ID NO: 633221 - DNA, 100 bp, Homo sapiens
aacatcgcctctttccatcgaacattccgagaatgcgagagaaagagcctccgtcaccacatagttgctgatgacggctatggtgtgtcgtacatccttg

SEQ ID NO: 633222 - DNA, 98 bp, Homo sapiens
tgaactcaagtcaccgtggagctccgccgccccgaaactttcaccgcgagcgggatttccagatgtgacttgcactcagaagatcagtggtcaacttc

SEQ ID NO: 633223 - DNA, 50 bp, Homo sapiens
ctagtagatgatgccagtgaaagagaatgatatggaacctagcaaagctg

SEQ ID NO: 633224 - DNA, 100 bp, Homo sapiens
agaaatgaaaactgaagatggcaaagtagaaaaacactatctcttctatgacggagaatccgtttcaggaaagtttgaacgccatgaccctgtggatggg

SEQ ID NO: 633225 - DNA, 100 bp, Homo sapiens
agcagccttcctcatccctctgctggtctggatcaccacacttcccaaaattgacagacctgaaggctgaaattgacaagttggccactgagtatatgag

SEQ ID NO: 633226 - DNA, 83 bp, Homo sapiens
cgcggaggggtctgcgcagtgcaggcagataccgtttgacaccaccaggaagtcgagacaacatgagtgtgattttgatctgt

SEQ ID NO: 633227 - DNA, 129 bp, Homo sapiens
agagggacttgtacagggatgtgatgttggagaactacagcaacctgatctcattggaccctgctctctattccagaggtggtgaggggatgcaaagaactacagggattgctggaatttctgagctaa

SEQ ID NO: 633228 - DNA, 75 bp, Homo sapiens
tcatattatagatggagtaaagggcattttgtcagtgatgctgatctttgccttcttccaggaacttgtaatagc

SEQ ID NO: 633229 - DNA, 75 bp, Homo sapiens
gatcacctctacctttcatcaagctgttgaaggctggattctctttgtaactggagtccatgaggaagccaccga

SEQ ID NO: 633230 - DNA, 100 bp, Homo sapiens
gttctgcagccagtgcggagagaggctgcctcctgcagcccccatagcagatcctgaggaggatgaaggggctggccctggaggccgagagtgagctgga

SEQ ID NO: 633231 - DNA, 51 bp, Homo sapiens
acctggtgattgtgggtcctgaagacccagatgatgtggtaccagttggcc

SEQ ID NO: 633232 - DNA, 97 bp, Homo sapiens
agtgcgacgtctttacgtgtccaaaggcttcaacaagaacgatgcccccctccacgagatcaacgggcacggccgagcagatgaggactgtgtggac

SEQ ID NO: 633233 - DNA, 100 bp, Homo sapiens
atttctgcatgaatagaccagtaagagaatttcagccaatgtttggaatccaagctagaaaacagtccagtggaaaatgttactgctgcttcgactctgc

SEQ ID NO: 633234 - DNA, 100 bp, Homo sapiens
gcacctgtgggaggactaggaaaattaaagatgattatagccaaaaatggcccagacacagaaagttatttctcaaactctgaggctgcggagttcacac

SEQ ID NO: 633235 - DNA, 88 bp, Homo sapiens
cccctactcctggctgggcttcgaggaatcgggcgcctgattgctgagtgtcatctcaaccccatcatcctgcccctgtggcatgtcg

SEQ ID NO: 633236 - DNA, 75 bp, Homo sapiens
agtcagtgtgacagtccatatgtaaccaaatattatggatcctatctgaagacaagttggatggcttgaggactg

SEQ ID NO: 633237 - DNA, 94 bp, Homo sapiens
tgtcgaggtggaacaagagagcttctttgaagggaagaacatggcacttttcgaggctttatcctgtggataaacgcagagtgaacgagtttgg

SEQ ID NO: 633238 - DNA, 82 bp, Homo sapiens
cgtgctgctcgacgtgctgtgcttactggtcggcgtccgagctgggccacagcctgaacgagaacgtcctcaagcctgcgca

SEQ ID NO: 633239 - DNA, 75 bp, Homo sapiens
aaaagacagtcctcgtcagcactgactttcagctatggaatcgggttgtgagtcccggcccagcccctccacccc

SEQ ID NO: 633240 - DNA, 82 bp, Homo sapiens
cgaaaatgcccccagcaaggaggtgctcgattcgttcctggatcttgcgagcttaaagcttttcaagccaggccaagaagct

SEQ ID NO: 633241 - DNA, 51 bp, Homo sapiens
ctggatttggtgctgttggttcggtaaaataccatgaagattttgaaaaaa

SEQ ID NO: 633242 - DNA, 82 bp, Homo sapiens
ggaggcgtcgctgattccagagagctaaagccgatggtttttagaacttcagccataaaaatgggcagaattttccttgatc

SEQ ID NO: 633243 - DNA, 90 bp, Homo sapiens
agtaattctcctgcctcagcctcccaagcagctgggtctacagatccagctccaggtcccacaggggctcttcttccccacgaaaaagat

SEQ ID NO: 633244 - DNA, 100 bp, Homo sapiens
ggagcagctgtcctacttctgtgacaagtgccaaaaatggataccagccaaaacgcttcgttaagggactcaggcagtacgggaagaacttcttcagaat

SEQ ID NO: 633245 - DNA, 100 bp, Homo sapiens
aaacaaggtggaagattcttccaaggaaccagtgcgaagttgtggaagatatcaataagcgcagagagccgctccccagcctggaggctgtgtatctcat

SEQ ID NO: 633246 - DNA, 90 bp, Homo sapiens
gagaagccgactgccccacagacctggaaatggccgcccccaaaggccaaggcttcagcgctgtggtgctcctgaagggcacgcctcccc

SEQ ID NO: 633247 - DNA, 96 bp, Homo sapiens
tgaggactcagaccggtctctgcaagaaagaaattttggaatccataagagccaaaaagggagacattgataatgttaaaagcccagaagaaacag

SEQ ID NO: 633248 - DNA, 83 bp, Homo sapiens
ccctggcttaggcatgtcctctgccggatcgagctgggagatgtgacaccacacaatattaaacagttgaaaagattgaatca

SEQ ID NO: 633249 - DNA, 83 bp, Homo sapiens
gtgaagctcaccgagacggcgatccgggcgctcgagacttaccagagccacaaggaatgggtaccacagaccatgtcatcgtc

SEQ ID NO: 633250 - DNA, 97 bp, Homo sapiens
cagaaatacaaatggagaactggtcaaaagatttggtgcttccagatgtgagttatcaggtggaatccagtgaggaggatcagtctcagactatgga

SEQ ID NO: 633251 - DNA, 75 bp, Homo sapiens
aagagctatggtgaaacaccactgaagcattgccaagatttcgatggggtcctctatcatatttcaaatcctaat

SEQ ID NO: 633252 - DNA, 90 bp, Homo sapiens
accctcctgccaaaaggaaatgcatctttatgtcagaaacacaaagcagcccaaccaaagggtaagaatgattgatgttggctgatattg

SEQ ID NO: 633253 - DNA, 83 bp, Homo sapiens
cgagaggccgtgcgggacgcgggcgccaggaccggccgaacgcagagccgattacacctcaacaagaaggcaactgacaaaca

SEQ ID NO: 633254 - DNA, 83 bp, Homo sapiens
cgttgaactctcagtggtcctacctggggatattatcaaatctactactgttcatggcagcaaatgcagccctgaggatttgg

SEQ ID NO: 633255 - DNA, 85 bp, Homo sapiens
gtgagttgaaactcttggaggaagcaaccatttcagtctgcaggtcattaggcgttgacccggacgacacctataatgagacccc

SEQ ID NO: 633256 - DNA, 85 bp, Homo sapiens
agcctctaagagctcctagacggagccacctgtgttctggcccccaagttctctacttcctgcttctgggatgactgtcggcagc

SEQ ID NO: 633257 - DNA, 90 bp, Homo sapiens
cagagctgaaacggtcgctgccttccaccgacacgagactccggccagaccagaggtcccacgtacctcggagatttatgtccaccgaag

SEQ ID NO: 633258 - DNA, 101 bp, Homo sapiens
gggagttggccaagcacgccgtgtccgagggtactaaggccgtcaccaagtacaccagcgctaagtaaacagatgtacagttacccagcacgtgtacctcc

SEQ ID NO: 633259 - DNA, 98 bp, Homo sapiens
tgactaccacccaaccttgaggcacagtgaagacatcggtggccactccaataacagcagatgatgaggagtctgatgaggaagctgtgaagaaaacc

SEQ ID NO: 633260 - DNA, 82 bp, Homo sapiens
ctgctttccactcggctcctgtcgtccgttctctcaggctcccgttcaggagaactacgatgacccgcacaaaacccctgcc

SEQ ID NO: 633261 - DNA, 98 bp, Homo sapiens
agaaggggaggccatggaaatctgctctgagcctgtggcagcctcccctgcaccggcagctgttccatttcctccaagtcaccggcttacagcaaaag

SEQ ID NO: 633262 - DNA, 75 bp, Homo sapiens
ggggaccttgccttgcccgggttagcaaaaggtgtgacaagcaacctgcctatgccccaaccaccacagaccacc

SEQ ID NO: 633263 - DNA, 98 bp, Homo sapiens
tgcctcactgagcaaccaagattggtgacaaagttcctgctgatataaggttaacttccatcaaatctaccacactaagagttgaccagtcaattctc

SEQ ID NO: 633264 - DNA, 80 bp, Homo sapiens
gaagcagctgggggccttggctgtaaggacccctaaggtaagactttgaccccgacgcaggcttcagtgattgccgcgga

SEQ ID NO: 633265 - DNA, 98 bp, Homo sapiens
ccttgaggaggtttgaaaaaaaaatgcttggacagaagagatgagtactatttccactaaggcctagaattgcctactgtacaaatagtcctgatcag

SEQ ID NO: 633266 - DNA, 100 bp, Homo sapiens
tgggggagaacctgaagaccctcaggctgaggctacggcgctgtgaacaagctgaaagctggatacctaatgtcagtggagtcttctgagtgtttcctgg

SEQ ID NO: 633267 - DNA, 75 bp, Homo sapiens
ttattcgagtgaccgagaccgcggccgggaccgaggctgattgctgaggaaggggtggacagcctgaatgtcaag

SEQ ID NO: 633268 - DNA, 96 bp, Homo sapiens
agaattcgaagggagttggtaaacgctgatcaccggcgtaatcaacccagcgttggacaaatactttccgtcagactctggagtgagaatcatagc

SEQ ID NO: 633269 - DNA, 100 bp, Homo sapiens
cacggaccattaatggacaaaaacatgagtcaatatgtattgtggcattcaaatcctagcactctgggagagtttcccccccagactgctgcttccccgg

SEQ ID NO: 633270 - DNA, 100 bp, Homo sapiens
gagaaatgaaataacctttgacaagattttcaatcagaaaattgcctccgggaggagttcctgggacacagccattgctgcccaattctatggatcccac

SEQ ID NO: 633271 - DNA, 75 bp, Homo sapiens
cgaggaggactcagcagaggcagagcgcctcaaaaccgaagagagagcaggagattcggatgggtcagatggcta

SEQ ID NO: 633272 - DNA, 83 bp, Homo sapiens
gtggaagcagcagtcagaaggggaacggatctgtgtgcccacagctcctggagccccacaggacctgaagaagtacggggcta

SEQ ID NO: 633273 - DNA, 98 bp, Homo sapiens
tggcagtgccacgaccatctcgcactaccctgactacagctggagcgcccagaggcgagccctggtggaggaagagaatggcaacatcacagagctcc

SEQ ID NO: 633274 - DNA, 75 bp, Homo sapiens
gcggggccttccacaccccctccgtgggtgtgtgctgcatcttcctcccgtgaggctggccgagctccacgctga

SEQ ID NO: 633275 - DNA, 75 bp, Homo sapiens
tgccgcgagcgcggcctgcaggagcttcctgcctgacacagctcacttcaagaagtgcacaatgtcagaacgtgg

SEQ ID NO: 633276 - DNA, 100 bp, Homo sapiens
gctttggtcacggtccagcggtcacctacccccagcaccacctccagcccctgcgcctcgcttagaccatgctcagcctccaagcagccttgtcatcgac

SEQ ID NO: 633277 - DNA, 100 bp, Homo sapiens
ttgtagcattgatttcccggatctggtaacatggcaaaagatgctactgcagcactggggtgtcagttgttggtccgacccagaacgcttcagttctgct

SEQ ID NO: 633278 - DNA, 100 bp, Homo sapiens
ggaaatgctgcttggggatgagcatgatcttagtaagagccctaagaccatgaaaaagctgctgcccaagcgcaaacctgaacggaagccttcagatgag

SEQ ID NO: 633279 - DNA, 80 bp, Homo sapiens
tgaaggtccaggagtacccgaccctcaaggtttggtgcacctcgatttggaggaagtagggcagggcccttatctggaaa

SEQ ID NO: 633280 - DNA, 90 bp, Homo sapiens
cgcccggtgacggcggagaggcgccccccgcagcagagatcctgaaggagctagacgagtgctacgagcgcttcagtcgcgagacagacg

SEQ ID NO: 633281 - DNA, 85 bp, Homo sapiens
ccaggggtgggccaaacccgtttcttaggaaaccaggaatccagggaaggcagttctggagagtcttggcttctgggaggaagtc

SEQ ID NO: 633282 - DNA, 99 bp, Homo sapiens
cagaatgctcttggtgctgttcctgctgctgcctatcttgagttctgcaaaagctcaggttaatccagaccagttaaagaccctgcagaggaattacgg

SEQ ID NO: 633283 - DNA, 50 bp, Homo sapiens
gacaccagcctgggcaacacgggccgttgctccagggagaactgcaaata

SEQ ID NO: 633284 - DNA, 100 bp, Homo sapiens
aaacagttttatattaatgttgagagagaggtcttttccaatggtcaccttggaagtgaagaatatgatgttcctccccggctttctcctcctcctccag

SEQ ID NO: 633285 - DNA, 134 bp, Homo sapiens
tggcaccagaccttcgccaggacttcaacatgatggagcaaaagaagagggtgtccatgattctgcaaagccctagacgagttgtactgctgtcacaggaaatggacgctggattacaagcatggcagctcagg

SEQ ID NO: 633286 - DNA, 90 bp, Homo sapiens
ccagattttcccctgcgaaatgattccagctgttcttccattaatagaagataaacttcaacattctaaatggaccagtggccatggttg

SEQ ID NO: 633287 - DNA, 83 bp, Homo sapiens
ccccgatccggacaaagaaacgagcgctcgggggatatgagactttctactcggaatatcctgagtgttgcgtggatgtaaaa

SEQ ID NO: 633288 - DNA, 100 bp, Homo sapiens
acacggcagagcatggccaagtccagatatatggagctctacacgtatcctcctgcctagcgcaggtgatctgcaactctttcaccatctgtaatgcgga

SEQ ID NO: 633289 - DNA, 90 bp, Homo sapiens
gcctcaaactcccaggctcaagcagtcctaccatgtcagccttcccagtagctgggaccacagatatacatcaggggatgtgagagtgtg

SEQ ID NO: 633290 - DNA, 74 bp, Homo sapiens
cggagagccccggagtgagcggagtagcgagtcggcaacccggagggggatatgagactttctactcggaatat

SEQ ID NO: 633291 - DNA, 75 bp, Homo sapiens
ttagcaagtgcggggaagagctgggtcgactcaagctatccgtcagtccatctccaaagccctggtggcctatta

SEQ ID NO: 633292 - DNA, 90 bp, Homo sapiens
cgcgatgaagcccagacctgcagggttcgtggataataaactcaagcagcgagtcatccagacgatgttccacaggagcccgtgcccacg

SEQ ID NO: 633293 - DNA, 74 bp, Homo sapiens
gcggcggcggggagagcggcgagactctgacctgtttttgttggacacccgtgtagtatgggcctcagaagaag

SEQ ID NO: 633294 - DNA, 90 bp, Homo sapiens
gcggaaaggaagtttacttatctgggtccttcaacaactggagtaaacttcccctcaccagaaggagtaccaggctcaagtggaagaaat

SEQ ID NO: 633295 - DNA, 75 bp, Homo sapiens
cgctgcgcaccgtgtcctcctccgtcatcgagcagctcttcttcgtccgtttggaaaccactgattgcttgtgtg

SEQ ID NO: 633296 - DNA, 75 bp, Homo sapiens
ctggggctcctgctgctctggctcccaggtatcatgaactgatcactaaatatgggaagttggagcctttggcag

SEQ ID NO: 633297 - DNA, 82 bp, Homo sapiens
gccacgtgtggtctgtaagtagatggagtcatcagaacccactgtgaggaagtgacttctccttgaggtcacccagacactc

SEQ ID NO: 633298 - DNA, 90 bp, Homo sapiens
ggaccgggttcagaagaaaacgttcaccaagtgggtcaacaagcacttaatgaagaattccttttgatgtagaaactcagagttgacagg

SEQ ID NO: 633299 - DNA, 96 bp, Homo sapiens
cccgccgctgcgcccgacgctccctgtctgggaccttctccctgcctggacccctactattgcaacaagccatgaagctcatgactgctctggtga

SEQ ID NO: 633300 - DNA, 88 bp, Homo sapiens
gcgcgaccagaccggcccccccgagagtcttcctgcgagcaattaatcagtatgcagatatgctgaacaaaaaatttctggatcaagc

SEQ ID NO: 633301 - DNA, 75 bp, Homo sapiens
gccaatcagcatttcacattcctcatggttggttcaaagaggcttcggtttcgtcacgttcgcagacccagcaag

SEQ ID NO: 633302 - DNA, 83 bp, Homo sapiens
cccgaccccgtcccgaccctggccgccccgagcggagcctggagggtcctcactgagcagcgagtcgtcccccgtgtcctctc

SEQ ID NO: 633303 - DNA, 83 bp, Homo sapiens
ccgccatgtcccagaaacaagaagaagagaaccctgcggaggagaccggcgaggagaagcagctgccactggtgacatgccaa

SEQ ID NO: 633304 - DNA, 100 bp, Homo sapiens
tttctcttttgactactatgcattcctgattctaataatgatctcctacattccaatcaccaggagactaaagtccatcaaaaacatccagaaaattacc

SEQ ID NO: 633305 - DNA, 100 bp, Homo sapiens
aggaggaaaatgttttgccacgtggatgtgaagatttcctctaaaaggtaagaatcaggccttattggagacattcaagcaaaggttggacaactacttt

SEQ ID NO: 633306 - DNA, 75 bp, Homo sapiens
gagaggatccaggaggaggagttgcagaggatggctgcagctcctccaagttactgttttgttgccttccctcca

SEQ ID NO: 633307 - DNA, 83 bp, Homo sapiens
ccggagaagcgagtttcagctggttttgattcccaccatggccatcacccagtttcggttatttaaattttgtacctgcctag

SEQ ID NO: 633308 - DNA, 112 bp, Homo sapiens
tcgcgcccgggaggaaggaacgaggcaaggagctaaagcagcgtgcgttcagccctgggtcaccttcaggccattcagaggaggaaagagaggggaatatgaagtcagccaa

SEQ ID NO: 633309 - DNA, 98 bp, Homo sapiens
tgggcaccaggccctgactaccagagggctgtgctgaagtttgctgctgccactggagccactccaattgctggccgcttcactcctggaaccttcac

SEQ ID NO: 633310 - DNA, 95 bp, Homo sapiens
gccgcgaccacggcgtcctggacgccctgcacgtgctcgagggcctcttccgcaccgaccccgaggccaagtgccggatggagtgctgtgatgtg

SEQ ID NO: 633311 - DNA, 82 bp, Homo sapiens
aatgccaagacagtggagtgggactggaaactgctcacctatgtcatggaggaagagtcgggaacatgccctgtgtgccgcc

SEQ ID NO: 633312 - DNA, 94 bp, Homo sapiens
aatacctcttgggactgggctcgatttgagggctgtgggacagatgatgtctaccatgttctacccactggtcacctttgtcctcctcctcatc

SEQ ID NO: 633313 - DNA, 75 bp, Homo sapiens
cgcatcaacaagatgttgtcctgtgctggggctgacaggggcagattctctgtcgttaagaaatgtgatcagaaa

SEQ ID NO: 633314 - DNA, 74 bp, Homo sapiens
gtcctcatgtggggggtaaaccactcggaatactcccccagttgcaagaggcgcaggaccgtggaagacttcaa

SEQ ID NO: 633315 - DNA, 75 bp, Homo sapiens
ccatccccgctggccccagacccgccaaggatcatcctgcctacgagcactgcagtttcctcctgaaggctggct

SEQ ID NO: 633316 - DNA, 98 bp, Homo sapiens
caccagcttccagttagtggatatagcacaccatccccagccaggagccatttgtgcaggccaagctgcggcccgaggacggcctgtacctcattcac

SEQ ID NO: 633317 - DNA, 100 bp, Homo sapiens
gcatgaagaaggggtaaggcgtgagcccccaagatttcacgggtccaacagatacaattgctaggacgagatatgaagggacctgctcatgataagcttt

SEQ ID NO: 633318 - DNA, 100 bp, Homo sapiens
aggcctcctaacatctctccagaatcaagttaaccaggctgctgatactttggctgtgaggcaaaaaaggagaatttatgatatcaccaatgtcttagag

SEQ ID NO: 633319 - DNA, 143 bp, Homo sapiens
ttggagatgccagaaaccatgtgaaaaggcaccttgggatgagggaatacaagtgtcatgtctgtggaccttcacggcatggtgcaactcccacctgcggaaggcaggcacacagatcgagaacattgatgaggacttccgag

SEQ ID NO: 633320 - DNA, 83 bp, Homo sapiens
cttacggatttactggaccccagtgtgaaagaggtttaccgacaagactgtgaaactttcgggatggtggtgaaaatgctgat

SEQ ID NO: 633321 - DNA, 88 bp, Homo sapiens
aagcgcacgggcctcgccgccagaacgacacctggatttcattagcatcatgacctacgattttcatggagcctggcgtgggaccaca

SEQ ID NO: 633322 - DNA, 85 bp, Homo sapiens
aggcaagaccaaccaagatgagggtggagatctgcccagtgtggaagaggtagaggtacctgctccgcccttgctgctgcagtgg

SEQ ID NO: 633323 - DNA, 82 bp, Homo sapiens
gagaacgtccactgcgggccggcgaaagctggtgaaatgacaatggatgctctgttggctcgattgaaacttctgaatccag

SEQ ID NO: 633324 - DNA, 91 bp, Homo sapiens
cagaagttcggcaccttatttctctgctgagtgtccagatcctccaaagacagatctggagtccaaaactacttacctggaagaccttcca

SEQ ID NO: 633325 - DNA, 98 bp, Homo sapiens
cccgtgtggagtgcgcacggggaagtggtgtttccccaggatctgctggagaaaggcctcgaagcaaacaactttgccatgctgggacttggagatgt

SEQ ID NO: 633326 - DNA, 74 bp, Homo sapiens
aacaagccgtggaataggtgtatcaagtaatggtgcaaagcctgaagtaacacaagtggcaagacagccgggaa

SEQ ID NO: 633327 - DNA, 98 bp, Homo sapiens
caccggccgcttctgtcctcggtacaagaatattccacagatgtcctttgatgatacagaaagggagccagatcagacctttagtctgaaccgggatc

SEQ ID NO: 633328 - DNA, 50 bp, Homo sapiens
acccgtctacatcagaagcagtggaagagaagttaaacttctagagaaac

SEQ ID NO: 633329 - DNA, 100 bp, Homo sapiens
ccaaatggtctttatccaaattatttgaaccccagaacagggcgctggggtcagtgtgatctgtgaaaatggttcgctattcacttgacccggagaaccc

SEQ ID NO: 633330 - DNA, 75 bp, Homo sapiens
atctgaacctcgtctgtattcccacttccttccaggattggattcagcatcaaaatacatctactcatattgaga

SEQ ID NO: 633331 - DNA, 75 bp, Homo sapiens
caactggaggccaccctgtggttcaggccacacgtgtctacacttagcctctatccatggctacctgggcatcgt

SEQ ID NO: 633332 - DNA, 82 bp, Homo sapiens
catccagcagacgaagcccctcaccctggagcgcaccatcaaccttggttatagccaagaggtggtgtgctacacattagga

SEQ ID NO: 633333 - DNA, 75 bp, Homo sapiens
gcggtggctgtcgccccccaccctgcagccaggactcgatggagctccctgccctggaggaccagctcagcaccc

SEQ ID NO: 633334 - DNA, 100 bp, Homo sapiens
cctggtggagctcaagaggcaggccctgaggttgctcctcccggggcccttcccgggcaaggtggacaagagcaaggaccaagtgtggaaggtcttaatg

SEQ ID NO: 633335 - DNA, 75 bp, Homo sapiens
cacagctgcttccattggccagtatgaagtggtgaaggagtgtgtgcagcgatggtgggcagtggtggtgctggc

SEQ ID NO: 633336 - DNA, 50 bp, Homo sapiens
agttgacctgtgctgactctggtgatgcagacaactaaactggtaggtgg

SEQ ID NO: 633337 - DNA, 76 bp, Homo sapiens
gcaatgcaaagctcctgagaaacatgccagctcaaagcttggattctgccgtgccactcacgaatggcgacacaga

SEQ ID NO: 633338 - DNA, 74 bp, Homo sapiens
aagatgaagctttgagtaacattgccagagagggcgatttgatgaaactgttatcgaagagagaagacaatgtg

SEQ ID NO: 633339 - DNA, 50 bp, Homo sapiens
caagaagcatgctggattgtaatcagaaacgaaatcctgaagttcgacat

SEQ ID NO: 633340 - DNA, 100 bp, Homo sapiens
tttgatttctctagtggacagataacccaagtcaaatctaagcatttaaaagacaggaatggcagtggaagacacagttgcagccaaactcatctatgat

SEQ ID NO: 633341 - DNA, 76 bp, Homo sapiens
ccaaaaggaaatgcatctttatgtcagaaacacaaagcagcccaaccaaaggtggctgctaatttacagaagattg

SEQ ID NO: 633342 - DNA, 100 bp, Homo sapiens
aagaataaatactgactttgagtaacggccttgagataagtgccatagagttcatttccatttgccgtatcgatggcaattcttggatagaggcaaatgg

SEQ ID NO: 633343 - DNA, 134 bp, Homo sapiens
atctgcacttcgcattttggcattgacatttaattttagggtcctttatatagaagggagagtaggtgccacatcatctcacagttcaaccaaggcttctacgactgtgtcatagcaactgatgctgaagtcct

SEQ ID NO: 633344 - DNA, 75 bp, Homo sapiens
cgctagcgttcgccttcagccaccatggggaatgggatgaacaaggtgctggagaatctggtaaaagcaccattg

SEQ ID NO: 633345 - DNA, 75 bp, Homo sapiens
gtcgcgagtctcaagtgtccatcttgcagtccttgtttggagaggatgcgactctgtacaagtgtcacagaaagt

SEQ ID NO: 633346 - DNA, 100 bp, Homo sapiens
cccggatggagtgaagcggatcacagcaacaaagagagaaacagcagcaacatttttgaaaaagccgaatttgccacatacctgaatttctgccgttcct

SEQ ID NO: 633347 - DNA, 75 bp, Homo sapiens
cgagactacggtgtgctgttagaaggttctggtcttgcactaagtgaaaattctcgactggctgctgaggtttac

SEQ ID NO: 633348 - DNA, 75 bp, Homo sapiens
ttctgggagctgaggaaccagatatcttgaaaagctgccagaaagacatatgaagaagttggagatgatgcattg

SEQ ID NO: 633349 - DNA, 98 bp, Homo sapiens
ctgcaacaaatatcactgaaatgattcatttctggaagcattctactgtgtggaatatcaaacaaatgattaagttgacacaggaacatatagaggcc

SEQ ID NO: 633350 - DNA, 50 bp, Homo sapiens
tgacgacctgctacaacagaagagtgctaacaggaatgaatgaaacttct

SEQ ID NO: 633351 - DNA, 101 bp, Homo sapiens
cagagacatcccgatctggggaagtggtctttgggaagaagcttcctgcctttgccaccatccccatccaccagctgcagcatgagaagaaatatgatatc

SEQ ID NO: 633352 - DNA, 75 bp, Homo sapiens
ccagggcatcccgggcgcggccagtggtgtcttcctggctccaccgggggacggctacgtgcaggcggacgcccg

SEQ ID NO: 633353 - DNA, 50 bp, Homo sapiens
aagacgagaaagcaccccaacttatgatgcggtgacctgccagcacctgc

SEQ ID NO: 633354 - DNA, 83 bp, Homo sapiens
tggatcagtttctttgtcatgtagccaagactggagaaacaataacagggataactacatccgttcctgcagattgctccctg

SEQ ID NO: 633355 - DNA, 83 bp, Homo sapiens
cttggactgagtcctgcaggacacagctgcctgtggaggaaccgattgtgtccacagatgaggtcatcttcccactcaccgtt

SEQ ID NO: 633356 - DNA, 82 bp, Homo sapiens
ttcaaatgagcgagaggaacatttggctaaaatatttgatatgcctgaatattcagtcacaaatgaattttgtcgcaaacac

SEQ ID NO: 633357 - DNA, 75 bp, Homo sapiens
cgcggagtcccaatgaaacgggcagccatggccctccacagcccgcagcaaattgtggctactaatttgccccct

SEQ ID NO: 633358 - DNA, 100 bp, Homo sapiens
aatttggtcctcagcaaccacctactctaattagcctgaggcctgctcagtcgttcctaatgaataaaaatcaagtgccaaagcttcagccccagataac

SEQ ID NO: 633359 - DNA, 83 bp, Homo sapiens
taaccagcatggctacttcatattttggaaagcagtttttaagacaattagaagaacccgaagaacctaaagtgctaacacca

SEQ ID NO: 633360 - DNA, 100 bp, Homo sapiens
ctatggccgtggcattggggagtggcattgccaacctttacagacctatccaagtaaatgaagaaggcagtgaagcagctgcaagtaccgctgttgtgat

SEQ ID NO: 633361 - DNA, 75 bp, Homo sapiens
gagaacgtggacaccactatgaagcggagcccatcgtggtgaggcttaaggaggtccgactgcagagggacgact

SEQ ID NO: 633362 - DNA, 100 bp, Homo sapiens
gagagcgcgaatatcgtcatcgttagaagaacttggtgagaacttgcccattgaagatagagagaccataattatgaatcaaattctgccttatataaag

SEQ ID NO: 633363 - DNA, 100 bp, Homo sapiens
tgaggcccccgcctgtggccggtgacctccctcctccgagggaggggggttgtgaccccaggaaaatgttggggcttttcaggaagcataataagattcc

SEQ ID NO: 633364 - DNA, 100 bp, Homo sapiens
agcaagcagttcagaagagccaaggaataaacatgcaatgaacccaaaaggcggtttgctgtgtttcaaagaagggtgctgaccacagtagtgctccccc

SEQ ID NO: 633365 - DNA, 83 bp, Homo sapiens
caggagctgaatccagaaaccagcacagactgtgacgccggatcgagctgggagatgtgacaccacacaatattaaacagttg

SEQ ID NO: 633366 - DNA, 100 bp, Homo sapiens
tttcagtgctgatgaaacttgggactctgcaatagatacatggagcccatcagaatggcagatggcttatgaaccacagcaagccgatcgggattggtac

SEQ ID NO: 633367 - DNA, 90 bp, Homo sapiens
caccgcctccgaatttgcaaagaggaggaaggagggacttcttggcttctcccagcatagccccagttaattggccttggtcctcacagc

SEQ ID NO: 633368 - DNA, 100 bp, Homo sapiens
aatgcctcatctgtaaagaacaggttcaatccaggacaaaggttatgagtgccagtgagccgccttagatagaagcatcgtcagcactttattaatgatg

SEQ ID NO: 633369 - DNA, 100 bp, Homo sapiens
cgaggagtcgacccggagcgaggaggtgaccagggaggaaatggcggcagctgggctcaccgtgactgtcacccacattcaaatctgaacatcaatgatg

SEQ ID NO: 633370 - DNA, 98 bp, Homo sapiens
ctcgccgccaccgcccaggaccgccggccgggggacgagctcggagcagcagccaggactggcattgcggactgacctccagggagaggcccagatct

SEQ ID NO: 633371 - DNA, 100 bp, Homo sapiens
ggcgaggagtctctgtccgggggcctggctaaggaaaccctattacctccaggttatttccgatgttgaagaagatgccggggaactaagcagagagagt

SEQ ID NO: 633372 - DNA, 100 bp, Homo sapiens
gcttcaaagagaaaaggcaacatcctgtcacaggccatgctctggcaaaaacgctgctccagttacagcaccacccggccgctgcacccggctgctccca

SEQ ID NO: 633373 - DNA, 82 bp, Homo sapiens
ggcacgtcctgttacaccaaaagtggcatgatcctttgcagaaatgactacattagcattactctactgactggcagagaca

SEQ ID NO: 633374 - DNA, 89 bp, Homo sapiens
tggtctgatttacccatatgttatgcaacattttgtgattttccaaaaataaaccatggaattctatatgatgaagaaaaatataagcc

SEQ ID NO: 633375 - DNA, 75 bp, Homo sapiens
cccgttcggcctggaggagccgcagtgggtcccggacaaggagcatcaagatggtgctcatgtggaccagtggtg

SEQ ID NO: 633376 - DNA, 89 bp, Homo sapiens
cagtggctctgttttcccacaacagaataatgcatatactgccatgtcagattcctacttacccagttactacagtccctccattggct

SEQ ID NO: 633377 - DNA, 83 bp, Homo sapiens
gatgtacatcaaggcctccggcagctatgcagatgtgaagttcatttccaatccgccctccatggtggcagcggggagcgtgg

SEQ ID NO: 633378 - DNA, 74 bp, Homo sapiens
cggcgcctgggactgcaccgcaccgagggcgagctccagctgagatctgtatctgtggacctgaatgttgatcc

SEQ ID NO: 633379 - DNA, 75 bp, Homo sapiens
ctcgcatcttgcccgaagccgggcggaggagagctcaagctaagtacttacaactacgattcaacaaaccagttc

SEQ ID NO: 633380 - DNA, 100 bp, Homo sapiens
ggctccgcggagccgaggcgtggagtgttgatgggaaccattttcagcatcctgctggtgactgtcatccttatggcattttgtgtctacaagcccattc

SEQ ID NO: 633381 - DNA, 50 bp, Homo sapiens
tcagtgcagtgtctgacttgtgacaggattcagcttctgttgcagtattt

SEQ ID NO: 633382 - DNA, 95 bp, Homo sapiens
cgatgatctggcagacctcagctgcctggtaatctgaccacagagacgaactcagtgattggtcattagctccaacagaggaagagagggagagc

SEQ ID NO: 633383 - DNA, 99 bp, Homo sapiens
gtcatgagtcgcttcaagtttatcggtgttggtaaatcatgcttattgctacagtttacagacaagaggtttcagccagtgcatgaccttactattggt

SEQ ID NO: 633384 - DNA, 83 bp, Homo sapiens
cgtctggagcctgggcatcaccatgacaatgcagatcttcgtgaagactctgactggtaagaccatcaccctcgaggttgagc

SEQ ID NO: 633385 - DNA, 73 bp, Homo sapiens
atctacacagtaccagaggtggggactgttgttggaggaacactttccaggccccactactctgtcctggggc

SEQ ID NO: 633386 - DNA, 98 bp, Homo sapiens
ctggtgttcgcaggctgctgcagtaacgtgatcttcctagagctcctggcccggtcgtcaaagtcctacattttagctttcagtgctgaacttccttc

SEQ ID NO: 633387 - DNA, 75 bp, Homo sapiens
agggaatgggcggcggctccacctggggattcctgaggccgtgtttgtggaatttatcatggcatccagcattga

SEQ ID NO: 633388 - DNA, 104 bp, Homo sapiens
ggagcggcggggagaagacggcggtcgtgatcgacctgggagaggcctttaccaagtagtatttatgaagattcatgtgctagtcatggtccaatgagtttggg

SEQ ID NO: 633389 - DNA, 100 bp, Homo sapiens
ccagcccaaccacatctgcaacaaccagcagcatcagagaatgtgaaagatgttgcagaagtgttccagaagtggctgaagatagaaggaaaaaagtgcc

SEQ ID NO: 633390 - DNA, 90 bp, Homo sapiens
cggatgatgccttcaatactacctttatttccaccatagaaaccgtgtcagcatggttgcctggctacctgctcatgaaggacttgatta

SEQ ID NO: 633391 - DNA, 113 bp, Homo sapiens
agagcgagctgagtggttgtgtggtcgcgtctcggaaaccggtagcgcttgcagcatgtctttcccagggaactccgatgaagtgttccaacaaaatgagcgagtgaaccaag

SEQ ID NO: 633392 - DNA, 97 bp, Homo sapiens
ttcttctaaaggagcaattctccaatacttacagtaatctcatattaacaggatgtggagagcatcttgtgcgcaccatactggctagagaatgttc

SEQ ID NO: 633393 - DNA, 83 bp, Homo sapiens
ggagatcactgccctggcacccagcacaatgaagatcaagatcatgaagagtgaagtgttgagagtcacccatgagctccaag

SEQ ID NO: 633394 - DNA, 85 bp, Homo sapiens
cgccgctgccccggctgcctcctccctgagggacaggccttcagtatttggcatcacctttacatggagcacaaagatgatgatg

SEQ ID NO: 633395 - DNA, 82 bp, Homo sapiens
agaagaagaagttgcgaaggatccccaacggggaggccaacgtgaagaaggacccgagtgtatagccctccagagtggatcc

SEQ ID NO: 633396 - DNA, 98 bp, Homo sapiens
gtggccctcgccctcctctggggatcgctgtgcgccggcatcatcctctcactggccctggctggcattcttggcatctgtattgtggtggtggtgtc

SEQ ID NO: 633397 - DNA, 100 bp, Homo sapiens
gaagcagccaagaaaaaaagacgaaagaagaagaagagcaaagggccttctgcagcttgctgatgaccgtatggcactggtgtcaggcatcagcttagat

SEQ ID NO: 633398 - DNA, 75 bp, Homo sapiens
ccaagagcagcggaaaatgatccagtcacagactctaaaatagagctcaagcttgagaagagagaaccactaaag

SEQ ID NO: 633399 - DNA, 122 bp, Homo sapiens
gttggaagtgaaggaactttccaaagagatgatgctcctgcatctgttcattcgaaaacacagatcctggtgccgaacatgaggacagggcaggccgaaggagaaagtggaaggaggggagc

SEQ ID NO: 633400 - DNA, 50 bp, Homo sapiens
tgtggtgcgggcctcctcggcttccagttggtgagtttgtaagtgatgcc

SEQ ID NO: 633401 - DNA, 75 bp, Homo sapiens
ggcggactatgtccgaagcaaggatttccgggactacctcatgaggtcaaaatgcagatcttcgtgaaaaccctt

SEQ ID NO: 633402 - DNA, 97 bp, Homo sapiens
tcacactatatcatcagttcgaagagcagcattggaaactctgtttacgttattatcaacacaggaccagggagtaactattcccagtcagaggcgc

SEQ ID NO: 633403 - DNA, 100 bp, Homo sapiens
ccttgtcgagcacggtgcaaccccaggaatgtatcctgtcaggtataatgtcagtgaatggcaagaaagttcttcatatggatcgaaacccttactacgg

SEQ ID NO: 633404 - DNA, 90 bp, Homo sapiens
acctggcccatgagatgatagctgtggaagctgcaccaaagccagctggagcttcaggaggtgcgtctctcctgccgacagctgcaggtg

SEQ ID NO: 633405 - DNA, 100 bp, Homo sapiens
atcaatgcttatggacataggcacaaactaattaaaggagtcgagagacttatctccggacaacaagtcaccaggagactaaagtccatcaaaaacatcc

SEQ ID NO: 633406 - DNA, 100 bp, Homo sapiens
attgactttgcagccatgtagtgaatggaaagaaattatgcaccttttatggaccaaatttttctgaaaaatatgtcgtaactgcaagtgtggccaagaa

SEQ ID NO: 633407 - DNA, 82 bp, Homo sapiens
cgctcacctgcgctgtgatgcctgcagagctgtggcttaccaggacattcaccatggcaatggcacccagcaggcgttctac

SEQ ID NO: 633408 - DNA, 124 bp, Homo sapiens
ctgtatatgtttactataaactggcaagaggatggcctgaagtttgggctggaagtataatgaaattttcaccagaaagtgttgcagcgtttatagcagtccttggcattctttccattattgc

SEQ ID NO: 633409 - DNA, 87 bp, Homo sapiens
tgtgatcagttcacctttgaatttatgagtgcctgattattacaaaataattaaaaatccaatggatttgtcaaccatcaagaaaag

SEQ ID NO: 633410 - DNA, 76 bp, Homo sapiens
gccatagaatggccgggcgcctaccccaaactcatggaaattgatcagatacaaggcagatccaaccatccccacc

SEQ ID NO: 633411 - DNA, 96 bp, Homo sapiens
tatcctggagaaagatcactttgattcaggaactcattatacaatgacaaatggaggcagcattaacagttctacacatttactggatcttttgga

SEQ ID NO: 633412 - DNA, 100 bp, Homo sapiens
ggggcctccgcagcgacaacatggaggccgtgaagaccttcaatagcgaggctcgggttatgtatgattttgctgctgaacctggaaataatgaactgac

SEQ ID NO: 633413 - DNA, 75 bp, Homo sapiens
cagccacctacaggcctccaggaatggctaaaaatgtttcagggaataaccagcaagtacctgtcaagaatgaag

SEQ ID NO: 633414 - DNA, 82 bp, Homo sapiens
cttaggagttggtttggaaacaaagactttcaggccctacctatactagctaggttttaaaatcaaagatgggaaaatcgga

SEQ ID NO: 633415 - DNA, 101 bp, Homo sapiens
tggggagaagaggattggaggtgtcagtgttaaaggaacctctacaacgaaggtgaagccacggaagataaggccagaagcggactcctagaagaggggag

SEQ ID NO: 633416 - DNA, 74 bp, Homo sapiens
ggaaaatcgcttggttaaaacctgacacttttaacagggtgcaactggaaactgacttgaagattgagaaggaa

SEQ ID NO: 633417 - DNA, 90 bp, Homo sapiens
gaccacatttgtcatgatgacagtgacaaggacctagatgtgaaggctggtggaggctgtgtaatgaccattggagaaatgctacgatct

SEQ ID NO: 633418 - DNA, 98 bp, Homo sapiens
ccctggaggaagaagaggatggagaggagctcattggagatggcatggaaaggccttttccctcagaggagaccacagagaatgacgatgacgtctac

SEQ ID NO: 633419 - DNA, 100 bp, Homo sapiens
ttgtcttccagttacctagatctgctaactctctcttacaagcctgggaggacagtgacaagttcatacctaaacatggagtttcactcttgtcgcccag

SEQ ID NO: 633420 - DNA, 82 bp, Homo sapiens
aggtgagactttcacaataagagcagaggatggaacacttcagtgcattcaagcaactggatgatgctcgcaacaaagctga

SEQ ID NO: 633421 - DNA, 101 bp, Homo sapiens
tctctcgctgtgagacatgtctgagactcctgctcagtgtagcattaagaacctaaaggcagacccagaagagctttttacaaaactagagaaaattggga

SEQ ID NO: 633422 - DNA, 75 bp, Homo sapiens
gtgggtccctccctgctgcgggacagcagctggtcacagtgctgtcgatatcaccaaggtggctagaagacatcg

SEQ ID NO: 633423 - DNA, 98 bp, Homo sapiens
tcccagggcggacagcagcctcgggtgcaatcctggagccccccagtgaggggtcttgctctgttgcccacgctggagtgcagcggcgtgatctctgc

SEQ ID NO: 633424 - DNA, 75 bp, Homo sapiens
catgtcccaacattacatcccaattgatcagggaccatgaaaagaaacttgtgcttcaccgaagaaaaatatcta

SEQ ID NO: 633425 - DNA, 100 bp, Homo sapiens
catctttctgtctcttatcatgttggtggaggtggccgcagccattgctggctatgtgtttagagataaggttgtggaacttttagcaagtgctcttatg

SEQ ID NO: 633426 - DNA, 100 bp, Homo sapiens
cgagcattctgacttgaccgaagctgttgttcggaatctagcaacacatctttatcttcctgggcatgaaaagggacaaggagtaatagaagagaatgaa

SEQ ID NO: 633427 - DNA, 100 bp, Homo sapiens
gactggaaactgattggaaactctttgggaaagccactcgaaaagttgtggacatcggatacccaaggagacgaagctgaagcaggagaaggaggggaaa

SEQ ID NO: 633428 - DNA, 100 bp, Homo sapiens
agctcaattagccaagataaaatgggtgataagtgtcgctttctacgtattgcaggtaaaaccacctcagctaattgattatctgcagcagaagaaaaca

SEQ ID NO: 633429 - DNA, 75 bp, Homo sapiens
ttttgctgggtacagagctttgtgttgcaataagagctaactgccatcaagagccatcagtatgtcttcaagctg

SEQ ID NO: 633430 - DNA, 75 bp, Homo sapiens
cggcctcagcaggcggggaagatgaaaggtgagccacgtattgttagtagaattttccagtgttgtgcttggaat

SEQ ID NO: 633431 - DNA, 83 bp, Homo sapiens
gagtatgcaaagcagaaactggacttcttcatcagaacaagtgatagttttgacaattgaatgcaatgataacagaaagcaag

SEQ ID NO: 633432 - DNA, 82 bp, Homo sapiens
ctcccgggctggactcaggcttctcagtgtactaatggtcacttgatgtgcgctggctgttttatccacctactagcagatg

SEQ ID NO: 633433 - DNA, 75 bp, Homo sapiens
tcgcaatgcttgcatagagtgttctgtgaaccagaattcaatcaggaacctggagcaagagatttcttttgactt

SEQ ID NO: 633434 - DNA, 100 bp, Homo sapiens
aaatcatgtgaaatgtgtaaagatgctcttaggtgcagattcactttataggaacagcttcagcttcagtgatgaaaaactgaattctccaacagactct

SEQ ID NO: 633435 - DNA, 101 bp, Homo sapiens
gtcggaggagccgcgggcggcgcggcccagctcgttccaggggtcgggccccggctcagtggtcccaggcagctcgggtgtcggaacccccagacagttca

SEQ ID NO: 633436 - DNA, 100 bp, Homo sapiens
gaaaacagaaatcgaaacagatacagagatgtaagcccatgctggcagtgatggtgaaagcataggaaactgccccttttcccagaggctcttcatgatt

SEQ ID NO: 633437 - DNA, 151 bp, Homo sapiens
ggccaacatgcatgaaagcctggaatggttggcaagtcgaacaaagtcagctttctccaatctttctacatcccagagggaagcaagcacttatttggctacttggtgtccatggggaaagaattcctaatgctccttatgtgttagagga

SEQ ID NO: 633438 - DNA, 100 bp, Homo sapiens
gcctcagtctcgtgagtagctgggattacagggccggtattaccgcaccaaccacactgtgatgaccatgggctcggacttccaatatgagaatgccaac

SEQ ID NO: 633439 - DNA, 98 bp, Homo sapiens
ctgctacggctgttgccatgaggcgaggctagggaggacctcacttccccggggtgtaataatgttaactgagcaagaaaagcctaggcttctcgagc

SEQ ID NO: 633440 - DNA, 113 bp, Homo sapiens
ttctgccccagaaccggtcgaaaaccgtgtatgagggattcatctcggctcagagagaaaaggaacagttccgtaagctctttattggtggcttaagctttgaaaccacagaa

SEQ ID NO: 633441 - DNA, 90 bp, Homo sapiens
gtccgaatcagtatcagatctacagtgagtcattcaaacagcatgacataactgaacccagcttagactagaaagtctagaagacacaca

SEQ ID NO: 633442 - DNA, 74 bp, Homo sapiens
gaaagttttgaaattagagacgcagacaggtgtgatgaatgcagactctgctaccattttggctgtttggatcc

SEQ ID NO: 633443 - DNA, 100 bp, Homo sapiens
ctgcccaccccgggtggtccagagccaggggacagggagtgcctgcagggcaccatccgcaacagccaggaggcggaggtctcctgccccttcattgaca

SEQ ID NO: 633444 - DNA, 90 bp, Homo sapiens
gcttggtttcgggatctcggtgctgcagacggcgagacctcctgcacaggtccgcgggagagctgtggggcttggtgagtgtttcgtggc

SEQ ID NO: 633445 - DNA, 75 bp, Homo sapiens
gacttccggaaagctctgttgactttggcagatgagagcctgacaaggagctgaatcctaagaagaagatttggg

SEQ ID NO: 633446 - DNA, 75 bp, Homo sapiens
ataaagaacttcttcccaaaatgggtagattggggtcaactggactacttagttgtagacatgccaccaggaact

SEQ ID NO: 633447 - DNA, 100 bp, Homo sapiens
ccgactgcaactgctggattgctgcaaggctgagggacgagaacgagaatgacagcccatatcaaggcggtgtattctttttgacaattcattttcctac

SEQ ID NO: 633448 - DNA, 100 bp, Homo sapiens
ttaagcatgaaaatattgttgccctggaagacatttatgaaagcccaaatcacctgtacttggtcatgcagctgattttttatcaagcagaaatgcatcg

SEQ ID NO: 633449 - DNA, 74 bp, Homo sapiens
caaactctaaaccatctgaattggctcaatgatgagaattttctgggttcctgtgaccctcaggttattttaaa

SEQ ID NO: 633450 - DNA, 90 bp, Homo sapiens
catggttataatcaaaagtggtcttcagaatcttctttggccaatggaagcactgttgtgaagaacttatgaaaattgagattatgtcac

SEQ ID NO: 633451 - DNA, 83 bp, Homo sapiens
gcaagtccttggcctcagcaaacttgcgaggaaccttcagaagtttagtctttttggagacataagtgttctacaacagcaag

SEQ ID NO: 633452 - DNA, 75 bp, Homo sapiens
cttactcgggagctggctgaagatggctactctggagttgaggcatccttctttaaaagagaaatccacgttagc

SEQ ID NO: 633453 - DNA, 75 bp, Homo sapiens
cagattcgcagtggtcgcttcttctccttgatgaaatcagacatcactgaaggagttgatattccaaagaaacct

SEQ ID NO: 633454 - DNA, 99 bp, Homo sapiens
tcttcgtgggcggtcttgactggagcacgacccaagccaagaagtatgatgcgtttttggcctcagagtctctgatcaagcagattccacgaatcctcg

SEQ ID NO: 633455 - DNA, 75 bp, Homo sapiens
tccacggatgctatccctggtcaaatcagaggcgtggtgtccctcgtggccgttcacccctccaccgtcaacccg

SEQ ID NO: 633456 - DNA, 74 bp, Homo sapiens
aacgtgtgaaggagacgcagaagcacattagctcgaaatcaatgtggactgaacataaatcacctgatggaagg

SEQ ID NO: 633457 - DNA, 51 bp, Homo sapiens
tgagaccatgaagtccaacccagaatgctgaccccctgaaggtgtacccgc

SEQ ID NO: 633458 - DNA, 75 bp, Homo sapiens
cgccacagacagcagcgcagtaccaccttccagagattgcctgaagacctctcattagaagagagagaagaactt

SEQ ID NO: 633459 - DNA, 50 bp, Homo sapiens
gaagctgtgcaggctgcctgtatggtagatcatgccactaatcgtaccca

SEQ ID NO: 633460 - DNA, 100 bp, Homo sapiens
atgcatcattgtgcgtccctgtatgcatactaccttgtactggagtttccagatgtcttggaatgcactgtatctcatgcagtagaaaagataaatcctg

SEQ ID NO: 633461 - DNA, 82 bp, Homo sapiens
cagatggcagccagtcagtggtggaggtgtctgacttccagcaactgctggcctgtgccagggtgcaagctgagcactggag

SEQ ID NO: 633462 - DNA, 82 bp, Homo sapiens
cgcaccatgccgctcctaagcctgcacagccgcggcggcagcagcagtgagagattgtctaaagccccaggaaaaatggtgg

SEQ ID NO: 633463 - DNA, 75 bp, Homo sapiens
tactgtcatcaagaactgtaatacttctggaatccagacagaatgtatccctctgaagaagatatgatcgaatgg

SEQ ID NO: 633464 - DNA, 87 bp, Homo sapiens
gagcaggaggaagcggtgattctccaggccttggacatgcaagaaagcacttcagccaagcagaagggagccagctggacgaggtgc

SEQ ID NO: 633465 - DNA, 100 bp, Homo sapiens
ccgcggcgtcctcggcgctgaaggggttaattcaacagttcaccaccattaccgattcacaatgacatcctttcaagaagtcccattgcagacttccaac

SEQ ID NO: 633466 - DNA, 50 bp, Homo sapiens
ccttgggctgcctttcctgcaggtttaccgacaagactgtgaaactttcg

SEQ ID NO: 633467 - DNA, 96 bp, Homo sapiens
aactgtgggaactctttccagcttgtgtctggtaactgacgatgccctggtgtacagcaccttcctgctccatgacccccgccccgtgggaaacct

SEQ ID NO: 633468 - DNA, 98 bp, Homo sapiens
ttttcatactgttgcttcaaggacacagcttgcattgaaaaagttggtgattcaaggaaagcacattgcaatgcattatagcaatcccagacctaagt

SEQ ID NO: 633469 - DNA, 75 bp, Homo sapiens
tttgattttgactatggaaattgtattaaaggtggaagaaggtccatatctttttctgtgggtgcttcaagtgtt

SEQ ID NO: 633470 - DNA, 82 bp, Homo sapiens
cgacgcggggccatgtgcaggaccctaacgacaggcgcctccggcccatttacgcattttgaaagcgaagcagaagccgtag

SEQ ID NO: 633471 - DNA, 100 bp, Homo sapiens
ccgtggcccctgcagcggaaccggacccagtccctgagccgcccctacacccacagatcatggaagggaagtggttgctgtgtatgttactggtgcttgg

SEQ ID NO: 633472 - DNA, 90 bp, Homo sapiens
tccaagtctaatagacctaaagccacagtcttcaagagcccacggacaccacctcaacggacagcctcgggggtaacagcaagaccgcca

SEQ ID NO: 633473 - DNA, 100 bp, Homo sapiens
ccaggctgcaggagccgcccaggccaccccctctcatatgagaaagggcaacaccatgcagcagttcctgcagaaggcgctcgagatccttcggaaagac

SEQ ID NO: 633474 - DNA, 111 bp, Homo sapiens
cgcaaggagatgatgaaggagacgttcaagtacttcctccggggtgcgggccagtgctattgcccaggacgcggaccagaactacgactacgccagcaacagcgtgatcct

SEQ ID NO: 633475 - DNA, 133 bp, Homo sapiens
tgcctgtccagccagcatggaaccaaagcggatcagagagggctaccttgtgaagaaggtaaacactacacgtgaagagtggtgaaagggaacattgattactgaagtgccctggagagggaaagcactggtc

SEQ ID NO: 633476 - DNA, 90 bp, Homo sapiens
caactggatgtaccatttaaagttaaagttggtcacataggcctatgttgtccttggccagtttctggtgctaaagaaagatgaagacct

SEQ ID NO: 633477 - DNA, 74 bp, Homo sapiens
ctttcaacgtggagtttgatgactctcaggacaaagcagagatggtgccaaatgatattcaatctgaattgaaa

SEQ ID NO: 633478 - DNA, 75 bp, Homo sapiens
tcagggtctagcccagccgaatccgcgtcgggctgtaactcgagtgccagggggatatgagactttctactcgga

SEQ ID NO: 633479 - DNA, 90 bp, Homo sapiens
ctaaaacttatagctgatgtaggcctagtagggtcccgcagcccccggaagccaatagactccctcagggactctcggtccctcagctac

SEQ ID NO: 633480 - DNA, 82 bp, Homo sapiens
atcttggaggcctcaccgtgagaccttacaaagccgggtgtcagctgtgatgcatgtttaaaaggaaattttcgaggtcgca

SEQ ID NO: 633481 - DNA, 100 bp, Homo sapiens
ctggagcaggagcggggccggaactggagccgaggcgcaggtggcgctggtaagactttgaccccgacgcaggcttcagtgattgccgcggatcagaagc

SEQ ID NO: 633482 - DNA, 82 bp, Homo sapiens
ctgcggcacgggatggcggaggcgcctcctgtctcagaaatcatgaccaccccaggaaaagagaactttcgcctgaaaagtt

SEQ ID NO: 633483 - DNA, 100 bp, Homo sapiens
tagagacggggtttcaccgtgttagccaggagctgcttcaagaagaaacccggcagaagctcaacgtgtctacgaagctgcgccagctggaggaggagcg

SEQ ID NO: 633484 - DNA, 116 bp, Homo sapiens
gtccgccccgcgagcacagagcctcgcctttgccgatccgccgcccgtccacacccgccgccaggatgccggctccaggagcagcagtggaggtcgggaacgcctcattgtggagc

SEQ ID NO: 633485 - DNA, 95 bp, Homo sapiens
ctccaaatggctgctctctggcgttcctcacactccccctgaagttcatctaagatcttcattcttcaaagaggactactgagcccagccaggct

SEQ ID NO: 633486 - DNA, 100 bp, Homo sapiens
tgggcggagatggctgcgacgcgtgcgcagagaagatggcgaattagaagatggtgaaatagacgatgcaggatttgaagaaatacaagaaaaagaagca

SEQ ID NO: 633487 - DNA, 71 bp, Homo sapiens
aggcagattcaagcagctgcaagcccaaggcttattgatatttgcggagttgatttctgcgattaagagga

SEQ ID NO: 633488 - DNA, 100 bp, Homo sapiens
cggaaacttaggggccacgtgagccacggccacggccgcatagggctccaacaaaagaatcctctgaagaggagtatgactctggagttgaagaagaagg

SEQ ID NO: 633489 - DNA, 100 bp, Homo sapiens
ggagcagttgctagtggccatttacaggaatcagccacttcagttcaggccagagatcctcagcaggagcctatggaagagatagaaaatttgaagaaac

SEQ ID NO: 633490 - DNA, 100 bp, Homo sapiens
atcaccaccagggaatatatgaacatatcactcttgcttattctgagtgaaagctggtggaatgcgaattgtgcagaaacacccacatacaggagacacc

SEQ ID NO: 633491 - DNA, 82 bp, Homo sapiens
gaagaccccggagcccctttagccatgtggatacctacggagcacgagaaatacggcgtggagcatgcttgagaagggagga

SEQ ID NO: 633492 - DNA, 50 bp, Homo sapiens
acatccgaggtgcctttctccaaaagagacatgaggctgagctggttccg

SEQ ID NO: 633493 - DNA, 90 bp, Homo sapiens
caagaagaaccacaaggccatgaacgcccgggagattcacagagagacgagcccaggaggctgactgagctcaaaggaacaggatggcac

SEQ ID NO: 633494 - DNA, 118 bp, Homo sapiens
aataaagaagtggagcgtgtcctgaaggagttccaccaggccgggaagcccatcgggatgccggctccaggagcagcagtggaggtcgggaacgcctcattgtggagcccccgctccc

SEQ ID NO: 633495 - DNA, 88 bp, Homo sapiens
gtgtggaacggaagatgcaaggtggggtttgaggaaaagagttacaagcctgccgagtgcctgcgattgcaggcgcgcgccgccacgc

SEQ ID NO: 633496 - DNA, 82 bp, Homo sapiens
tcacacagcagtcaagtatgtcccaaacgtcttgtactaatggtcacttgatgtgcgctggctgttttatccacctactagc

SEQ ID NO: 633497 - DNA, 100 bp, Homo sapiens
gcctcgcgggcgcaatgaatccgcggcagggtacagccaaagaccggagctttggagagatgaagtttaaacagtgtcctacagagaacatggctcgtga

SEQ ID NO: 633498 - DNA, 100 bp, Homo sapiens
tacagagaagaaactaagtttacttgcattgatcctattgtgcttcaggatcaaagtgcttgactttgttggttgaaatccaccctgttaacaatgtgaa

SEQ ID NO: 633499 - DNA, 100 bp, Homo sapiens
ggtgagtgccagagggccccagtcacccagaacccccaccccgagtcaaagcgctgaaatgagccccgcggcaggtatgaatcctaggacccagaataag

SEQ ID NO: 633500 - DNA, 90 bp, Homo sapiens
aaattgtatacaggacctggcttagctattcattgcatgcagcgaaaactagaagctgaacttcttcaaatagaggaacgacaccaggag

SEQ ID NO: 633501 - DNA, 100 bp, Homo sapiens
ggaggacatcgacatccaggcgaactcggcctatcgctaccctccgaagtccgatagcctgggctggaagctcttctacgtcacaggctgcctgtttgtg

SEQ ID NO: 633502 - DNA, 100 bp, Homo sapiens
gttgcccagtccagcagagcagcacggtgcccaggacacagagctcagtgcaggcactggcaacttctatttggatgttaaagtctttagtgaagatggg

SEQ ID NO: 633503 - DNA, 75 bp, Homo sapiens
cactgacagtattgaggaggaggctgcacaccatagtcaccagcaagtgatggcatcagctgagaagggaaggaa

SEQ ID NO: 633504 - DNA, 100 bp, Homo sapiens
caggaggagacccttctacgcctggttacccaagtgtcgtggcttttcatggcctgccactgaaaatcaagaaagaaccccacagtccatgttcagaaat

SEQ ID NO: 633505 - DNA, 75 bp, Homo sapiens
ggccatccttgctccgtgggagagaattttcttaggcggtataaatgcagttctgatcactggattggactgaag

SEQ ID NO: 633506 - DNA, 100 bp, Homo sapiens
agggactcctctccgtctccctggaccgctgtgtaggcacctgagttaacggacgctaagcggggtaggggaagctcaggaatcttgcttttaagaaaat

SEQ ID NO: 633507 - DNA, 90 bp, Homo sapiens
gcggagggagaggctgcagagcgagggcaggagcctaaattaacaatggcgaaatgcaggcgaaatgtggaaaatttcctagaagcttgc

SEQ ID NO: 633508 - DNA, 100 bp, Homo sapiens
gggagccagccgctgcagccaccaccgccaccatgtcctaccaaggcaagaagaacatcccgcggatcacggaaaatggttctcctgaagaacatgcaat

SEQ ID NO: 633509 - DNA, 50 bp, Homo sapiens
acagtcaagacgatcatagtcactgccctcatgcaactggagtctgtttt

SEQ ID NO: 633510 - DNA, 90 bp, Homo sapiens
taagagtttggcgagtcagtgactgaagcgcccgtccattccaaggtctacttccccagcaggacagcatcattctcctatatcttctag

SEQ ID NO: 633511 - DNA, 75 bp, Homo sapiens
ccaggaggaaaatgctgcttgcaatttcaggtccttattccttaaatggatacagagtgagagtatatagacaag

SEQ ID NO: 633512 - DNA, 90 bp, Homo sapiens
aatctgtacactctctgctattgtctgctgcatccaaatcttctccctggacctcgtgcatacgaccccaccaacaactgaacgctttgg

SEQ ID NO: 633513 - DNA, 88 bp, Homo sapiens
cggcgcccagcggtagccctccttgcgcctccgattcccaggaatcccgttctgcttccagaagtggaagtgctcacggatcggggaa

SEQ ID NO: 633514 - DNA, 89 bp, Homo sapiens
caactggtctttcattcactgtccagggggcagaccgggccgttccagtgctgatcattggcattctggtgttcctacccggattttac

SEQ ID NO: 633515 - DNA, 100 bp, Homo sapiens
taactggcaaccaaaggttgcaccaacaaccgcttggaatgctgcaacaatggtgcaaacagctgcacagcaagtggcagaggataaatttgtttttgac

SEQ ID NO: 633516 - DNA, 88 bp, Homo sapiens
ggtttttgctgcgccaacgcagtgaccgaaggctccgctcacgcccgggctcctggatttggatttggaattgcaatatctggtggac

SEQ ID NO: 633517 - DNA, 100 bp, Homo sapiens
gaaattctgggccgaaatgatccgcctgcctcagcctccaaagtagctgagactacaggtgtaatcgaatcctggaccggaaaggggaagcagtgccatt

SEQ ID NO: 633518 - DNA, 100 bp, Homo sapiens
gacatggaacagggactcactgggggcttccagacagttcgtgttgggacagtgggcacccctgtgggcaccatcactctttcttgtgcttacagaatta

SEQ ID NO: 633519 - DNA, 82 bp, Homo sapiens
tcagttggaagcagccgatccagcctgcggagcctgtggggcaggcccaagaggatgctgagaaacttcggtccgttgtgat

SEQ ID NO: 633520 - DNA, 100 bp, Homo sapiens
gggactacgcccaccagcacggcatccctgacgagacctgcaacaactaccaggccaaggaccaggcctatgtgcttcccaagctgtatgtgaagctaca

SEQ ID NO: 633521 - DNA, 100 bp, Homo sapiens
atgatatcctgagacaggctttggcagttggataccagacagcttctcacaacagggaagtcgagataacatgagtattgtactagtttgcttttcaaat

SEQ ID NO: 633522 - DNA, 75 bp, Homo sapiens
aagttgtgttcgtgttgttggcacaacatttcatggaactggtgtgcgatgactgtgtggtgttgcgtagtaaca

SEQ ID NO: 633523 - DNA, 100 bp, Homo sapiens
ggcggagagaagaggattccggcgggaactcgactcttggcgccaccgcctcatgcactgtgtaggagagcctgacaaggagctgaatcctaagaagaag

SEQ ID NO: 633524 - DNA, 100 bp, Homo sapiens
gggagaacctgcggcggccggagcggttattcagcttctcaaggctggaaaagcgaaggaagtttcctacaatgcactagcctcacacataatctcagag

SEQ ID NO: 633525 - DNA, 98 bp, Homo sapiens
gtcagctcagtgctgtgcgggccaggggttgggcatgttccaggatctgtctatcgacttctctcaggaggaatgggagggcctggacactgctcaga

SEQ ID NO: 633526 - DNA, 75 bp, Homo sapiens
caggacgaggcccctggggaccccattcagcagctcaacctcaagggctctgcagaacattgctgccatcagcct

SEQ ID NO: 633527 - DNA, 89 bp, Homo sapiens
gggcagtacaagcttacgtctctgctcttcagtacaatcctgccctgtctctgcccctggtggtcatcgtccatggcaaccaagacaac

SEQ ID NO: 633528 - DNA, 95 bp, Homo sapiens
caataccagagtaagttggagagtgagcttcggaagctcaagttttcctacagaatcactggcgttatccttcttgcagttggcatttggggcaa

SEQ ID NO: 633529 - DNA, 90 bp, Homo sapiens
aagaatatgagcttataataaagaagaagcatcgagacttggacacttggtataaagaacagtcagccgcatcttcttttgcgtcgccag

SEQ ID NO: 633530 - DNA, 100 bp, Homo sapiens
ccagaatttcagcttccgtagccaagaagatatgaatgagccattgaaaagggattctaaaaaagatgatggcgattcatgaaaatgcctcgtgtaaaag

SEQ ID NO: 633531 - DNA, 80 bp, Homo sapiens
aaccctcccccatgggctcctgcctgcctgccaggttaatttggagtggcccctggagtcagtttcctacaccatccgag

SEQ ID NO: 633532 - DNA, 83 bp, Homo sapiens
ggaaaatggctgtgctggccaatggtgtgatgaattccttgcaggagtacgaccccagcaaagcgacctttgtgaaggtggtg

SEQ ID NO: 633533 - DNA, 75 bp, Homo sapiens
gacaccattgttatggccaatctggtctatgttaacaatgaatgggcaaccagtgttggggaaggagggagcttt

SEQ ID NO: 633534 - DNA, 90 bp, Homo sapiens
ccagatgaaaaagaaaagactaccgcactgaaagatatgaagagcattttaagaggtgcagcctctggaagtggatcaaactagaactca

SEQ ID NO: 633535 - DNA, 82 bp, Homo sapiens
gtcaaatttactgcccaggaaatttatgattgtgtttctcagactgagtatagaaccactcacgaattcttgtttggtgccc

SEQ ID NO: 633536 - DNA, 100 bp, Homo sapiens
gcgacggcgaccatagctctcgtgtccctggccagtgtccttccacctgtccacaagcatggggaacatcttcgccaacctcttcaagggcctttttggc

SEQ ID NO: 633537 - DNA, 100 bp, Homo sapiens
agacagtgagcgttgccaacctgggtgctgcaggtgttcaagtgcagggagttcccgttacaatcactagtgttgcagatgacgggtctaagccgacacc

SEQ ID NO: 633538 - DNA, 51 bp, Homo sapiens
ctccgattccccatcaccaattcggctggattcttcacggaaaaatccagc

SEQ ID NO: 633539 - DNA, 71 bp, Homo sapiens
atagacactgagtctctctgtgttgttgctggtgaaaaggaagtgctaaacatgctgaaggaaagcaaagc

SEQ ID NO: 633540 - DNA, 75 bp, Homo sapiens
tcatttcacatcgaagccatgatttaaatatcggcgttaaggcttcctgtgtccagtaccggttagtggtccggg

SEQ ID NO: 633541 - DNA, 100 bp, Homo sapiens
gcaaaaaagggactgctaagaagataccaccagagagattggaacaattatcaggtcattaggatgctgtcctacggaaggagagctgcatgatctgatt

SEQ ID NO: 633542 - DNA, 100 bp, Homo sapiens
agatgcgccgcgccagctcctactcctccctcaactccctcatcgattttgcaagaacgaggctcaaggatgtgagggacacagtattgacagctgaaga

SEQ ID NO: 633543 - DNA, 50 bp, Homo sapiens
gttgattaactggacaaattcaggtgacttaagagattaaaattaatttg

SEQ ID NO: 633544 - DNA, 75 bp, Homo sapiens
ccacagcccggactccatcgactcccccggctcttagactaaacaccgaaaagctttggaggatttcactcttga

SEQ ID NO: 633545 - DNA, 82 bp, Homo sapiens
acaccgttcccccagccgggctgaaactagatgatggccatttaaacaactctttgagctctccagttcaagcggacgtgta

SEQ ID NO: 633546 - DNA, 100 bp, Homo sapiens
gacaaacttataaatgacttctcacagatagaaaaggcaatgaatcgctccctggctaatgtgattcttggaggctatggcaccacttcaacagctggtg

SEQ ID NO: 633547 - DNA, 100 bp, Homo sapiens
ggaagttgctcaacaaaaaaaggaacgggtatattgacatatctgaagagatggattaagaatgctttggattaaggattgtggagcacatttcaatcat

SEQ ID NO: 633548 - DNA, 100 bp, Homo sapiens
cctctgcctttctggttcaagcaattctcatgtttcagcctcccagatataagagttcggaccgcccagcacacaaggtcagcatgctgctcctctgtca

SEQ ID NO: 633549 - DNA, 88 bp, Homo sapiens
gagacggcggcaggagctgggcccagagacgcggggacgggccgtgggcccccggaacgaggcaaagcgaaggctggagctaggagaa

SEQ ID NO: 633550 - DNA, 75 bp, Homo sapiens
tagtgacattgaagctcgccttaatagttggaatcttggggcttctccagggaaagtgaccgaggcagtgaaaga

SEQ ID NO: 633551 - DNA, 100 bp, Homo sapiens
ccgcgagctatatctgcgcgtggagctgagtgacgtacaggtgatcctgctatctgggctgggctaatggcagcctgtcacgctgatgataaactggcct

SEQ ID NO: 633552 - DNA, 95 bp, Homo sapiens
gcccgggagaagaagctctatgccaatatgtttgagaggctggctgaggaggagaacaaggcagtggctctgccaatgatcctgtgagtattcag

SEQ ID NO: 633553 - DNA, 101 bp, Homo sapiens
caacggccaacttcggcaagatccagatcgggatttacgtggagatcaagcgcagcgatggtggatggaagtttgcttagttgaagaattgccaccaacca

SEQ ID NO: 633554 - DNA, 75 bp, Homo sapiens
ggtcggggccggctgaccaggaacctgggcgagcagcggcgggggcccgagggatgaaggatttgggggcagagc

SEQ ID NO: 633555 - DNA, 101 bp, Homo sapiens
ggtccatggtggtcatcgaggtgttcacccccgtggtgcagcgaatcctcaagcataacatgattggaaacctggaagattactaccatttttatcacagc

SEQ ID NO: 633556 - DNA, 74 bp, Homo sapiens
agggaataggagctggggagcccttctgcgccacagggtcatggaggacgctggcggcggcgaggagaccccgg

SEQ ID NO: 633557 - DNA, 50 bp, Homo sapiens
gtctacactgagtcggaggcgaagagcaagtgcaccggcacctggaccaa

SEQ ID NO: 633558 - DNA, 90 bp, Homo sapiens
ctctgatcaccaaagaggaagcctctggaagttctgtcacagctgaggaagccaaaaaggctgaggctgaggtggcctccttgaaccgta

SEQ ID NO: 633559 - DNA, 74 bp, Homo sapiens
cacagccttggatatgcgaggacgatgcagtgctggacaaaagatgcggaaaacgccatgcggtacataaatgg

SEQ ID NO: 633560 - DNA, 83 bp, Homo sapiens
gcctcggaggcgttcagctgcttcaagatgaaggtcctcagccagcagagccacgttccttatgagcaccgtgggtttatttc

SEQ ID NO: 633561 - DNA, 75 bp, Homo sapiens
atacgatgtcaccaggaaccctcatctcaacaagcatgccttggactttattgtgggaagaccctattatttaaa

SEQ ID NO: 633562 - DNA, 100 bp, Homo sapiens
cggctgtaaagatggcggcttcctagtgagtcggcggctgatttagaaggaggttcaggctacggtgagccgaagacctgcgaccgcatcaagcagtccg

SEQ ID NO: 633563 - DNA, 82 bp, Homo sapiens
cgcatttcaagaagaacaacctaactccagatatctacctaattgattgggctgaaatctctttaatgatggagggaagcag

SEQ ID NO: 633564 - DNA, 75 bp, Homo sapiens
cagaaagtgaacttggcattttagatctaattcaaagtgtgaacatggctacgcctcttcattcccgtccatgcc

SEQ ID NO: 633565 - DNA, 158 bp, Homo sapiens
gtccggcttgccccgctatgacgtgctgggggtcatcgacagctgcaaggaggccgtcaccttcaaggccgtcagacaagatgcccatggaaaccctgtgtcacctgaggaccaagtcagcctcgctcagcagatttcagatgtggtgaagcagccgg

SEQ ID NO: 633566 - DNA, 50 bp, Homo sapiens
cgcggagcttgacccgtccatcgctgtggagtacgagagggcctccaaag

SEQ ID NO: 633567 - DNA, 88 bp, Homo sapiens
tatgtggtaccttcctgggtgggcccaagccaccccagaggaaagtggagaatgaggacatgaataaagaccagatcttgctggaaaa

SEQ ID NO: 633568 - DNA, 111 bp, Homo sapiens
cgggtacctgcggccaattcggtggaacgaggacgcggactgcgaaggcaggcttctcacggcattcagcagcagcgttgctgtaaccgacaaagacaccttcgaattaag

SEQ ID NO: 633569 - DNA, 90 bp, Homo sapiens
agtcgatgtatttgtacaccaattttctggatatgccgcagaaggatccgtgccagaagcaagcctgtgagatacagaaatgtttacaag

SEQ ID NO: 633570 - DNA, 90 bp, Homo sapiens
cggggaccttgccaaccctcccaagaagttcagagatccatttgaaccacagcgacgtctccccgcgaagaaaagtcgacaacaacttca

SEQ ID NO: 633571 - DNA, 98 bp, Homo sapiens
ctggaacagccagaattggacccgaaaccatgcctcactgtcctaggcaaggtccccctgaggaccgcctgagtttaaaatttctgccatcaagtgag

SEQ ID NO: 633572 - DNA, 74 bp, Homo sapiens
cttgattgatatatatgctgacgaggagttcaaccaggcccagatggtacaggaagacttggagaagacccgtg

SEQ ID NO: 633573 - DNA, 75 bp, Homo sapiens
gagcgacgtggctattgtgaaggagggttggctgcacaaacgagggtaacaagatgctcaactatagtgctccca

SEQ ID NO: 633574 - DNA, 100 bp, Homo sapiens
gagaagagcaaggccacgccggccgcgcgcgccagcaagaagatcctgctgcccgagcccaggttggagcaaaacgtcccactcactggaggcacctgag

SEQ ID NO: 633575 - DNA, 75 bp, Homo sapiens
gattccagcttcggaacaagagaccctgggtttaatgaagaaattcattcgatgttctacacgtgtaactgtggg

SEQ ID NO: 633576 - DNA, 82 bp, Homo sapiens
tgaagagacaggaggcagtagccaaacacccagataagccaatggacacgtcagtgttatctgaagaaggaggagagccttt

SEQ ID NO: 633577 - DNA, 98 bp, Homo sapiens
gtaaccactcctttgtggaggtcgccagggtcattgtcgtggatttgcacagtcggctgggcggtgcaatggcgacagcccacctgaggatattgacc

SEQ ID NO: 633578 - DNA, 95 bp, Homo sapiens
tttgtcaccgttatgtgggaagcgaatccactgatccaccttgagatcaagccggccatccggaaccagatcatccgcgagctgcaggtcctgca

SEQ ID NO: 633579 - DNA, 82 bp, Homo sapiens
cagccacgtcgctttgttttcccacgctaggagctaccacaacagctatacacagaatgggattttacatatgctggacaga

SEQ ID NO: 633580 - DNA, 90 bp, Homo sapiens
gtgactgtaagctgtgatctcagtatacaaaggttcacctgcttccaggcgggcagggcgttgtattcatccctcgtcatgtctagtgca

SEQ ID NO: 633581 - DNA, 98 bp, Homo sapiens
gaagcggaaaaaagaaaactctagaagtctggatgtcggtgggcctctgagatatgccgtttacgggttgaatgtcaaagctttcattagcaatgtga

SEQ ID NO: 633582 - DNA, 96 bp, Homo sapiens
aggaccttcaggatccagctttctaaacttctgcagcatccagaactgagtaatagtcaacttctggcagactttctttcccctaatggtggggaa

SEQ ID NO: 633583 - DNA, 100 bp, Homo sapiens
ccgccttctctgtcagctctttccccgtcagcatcccagccgtgctcacgactagacgcttgaagcaaagctgccatcccagaagacgacatgctctcag

SEQ ID NO: 633584 - DNA, 111 bp, Homo sapiens
gggatactgtgttgcaggctatacagtctctgaaattgccagacaaaaccctcattgacctctatgaacagaacagtccacaggaagaggttgaactaaagaagttgaaac

SEQ ID NO: 633585 - DNA, 90 bp, Homo sapiens
gttcgcggctctaacggggctttctacaagctggagaatgctggaggagaccttaaggatggccaccaccactatgaaggagctgttgtc

SEQ ID NO: 633586 - DNA, 75 bp, Homo sapiens
aaaaaggaggccaaagactttatatggctcgtggacagcagaaaattcagtctcagcagaaaaatgccaaaaagc

SEQ ID NO: 633587 - DNA, 50 bp, Homo sapiens
gaccaacataactttagtccaagatgcaagaaacctattggaattcgaga

SEQ ID NO: 633588 - DNA, 100 bp, Homo sapiens
tgtgaacttaaaggatcagtagcaatttggagcggtaagcccccaatatgtgaaaggagtggttttcagagacatttcagaaagtgaaggagaaactcaa

SEQ ID NO: 633589 - DNA, 83 bp, Homo sapiens
tgttacccatttgtgcaggaaaaccagtccaatagcactattcatggccgaattgatcaagtcaaccaactccttgaactgga

SEQ ID NO: 633590 - DNA, 51 bp, Homo sapiens
aggattgtgaccgcagaccgagcgagtgatagacagccaagcagagaaact

SEQ ID NO: 633591 - DNA, 100 bp, Homo sapiens
tttggatctctgcatcatgtcccggacctgtcttgccgtggatggcataccattctcatcgttgaaatactcagcagatcattacacacctttcccttct

SEQ ID NO: 633592 - DNA, 50 bp, Homo sapiens
tggatgctggtgccactaatattggtcgggcccctcggggccgcgtggcc

SEQ ID NO: 633593 - DNA, 75 bp, Homo sapiens
agaagagtgagtagcttggttggtggtaccctaaaattagggcatgattaaggattgacttctaaggactcttgg

SEQ ID NO: 633594 - DNA, 98 bp, Homo sapiens
gcatctaatatttttggaccaacagaagaacctcagaacatacccaagaggacaaatcccccagtgtttcacttcaagcccactacggtggtgacaag

SEQ ID NO: 633595 - DNA, 83 bp, Homo sapiens
gcatctgtctgaggagcggtcagtgacgcgatggagcgggcaaggtgagaagccctaccactgcaactgggacggctgcggct

SEQ ID NO: 633596 - DNA, 99 bp, Homo sapiens
atgagcgggaactcctgggccaacatggggcaggagtgcatcaagtgccacatcaacgtgtatccacacaagcagaaacgaaatcctgaagttcgacat

SEQ ID NO: 633597 - DNA, 100 bp, Homo sapiens
atgatgtttcagcaagttcatcggaagcccatggcatcttttgttaccactcctgttccaccagactttaccagttacagatgtagagctaaaacgactg

SEQ ID NO: 633598 - DNA, 83 bp, Homo sapiens
ctccggagggaccgggggagctcccaggcgcccgggtactccaaagattcaggtttactcacgtcatccagcagagaatggaa

SEQ ID NO: 633599 - DNA, 99 bp, Homo sapiens
gtcgcgtctcggaaaccggtagcgcttgcagcatgcattttgaaagcgaagcagaagccgtagaatcagcggcgagcctgttgaaagaacccacaggtg

SEQ ID NO: 633600 - DNA, 90 bp, Homo sapiens
gccctcatggggaaaatctccccggtgactttcagtgacatgggctcgagggttggctaccccgctcaggtttacaaaactgccagtgca

SEQ ID NO: 633601 - DNA, 100 bp, Homo sapiens
aggcagcaccggaggcccaggtctccgtgcagcccaacttccagcaggacaaggatgagaaatactacttacggtcacttggagaagaccctagaaaggt

SEQ ID NO: 633602 - DNA, 50 bp, Homo sapiens
cagccctccatcttgcagcccagaaggaggaggaagccaagaatctggtg

SEQ ID NO: 633603 - DNA, 98 bp, Homo sapiens
acaaccctacctgaaagccatctcaagactcctcagatgccaccaacaaccccatccagcagttccttcaccaagaataagaccacagcttgccaaag

SEQ ID NO: 633604 - DNA, 100 bp, Homo sapiens
gccaagaatcagaggaagtggcagcagcaggcgctctttagtcatttctcccccagttcgaacagctacagtctccagtcctcttacctcacctactagt

SEQ ID NO: 633605 - DNA, 100 bp, Homo sapiens
ggcatttcctgaacgcgtgtacgtcatggaggatatcacattcaacgtgaaggcatttggtttcaaccctctggaagattattatgtctccaagtctgca

SEQ ID NO: 633606 - DNA, 100 bp, Homo sapiens
atgcgcagcagcacaggcgagcccttccgtgtgctcgtgtgccccatctacacctgcctcagggagggctgttgataatcaggtgtatgtggccacagcc

SEQ ID NO: 633607 - DNA, 100 bp, Homo sapiens
gcggcggctgctgctgctgcagtgggacaggtggcggcgaccggcggcgtccgaggagggaaaggaacacaggtctggaagaagaaaggagccatctatg

SEQ ID NO: 633608 - DNA, 75 bp, Homo sapiens
acccatcgggcagctacacatcttgaaagagaagctcttcctgtgaggagttggtggtgaccccgcccagttggc

SEQ ID NO: 633609 - DNA, 96 bp, Homo sapiens
ctgtaatacttcgaggcgaacctgaaaagttaggtcaggcgttgactgaagtctatgccaaggccaacaatggcatctgttttctgcgttttgatg

SEQ ID NO: 633610 - DNA, 75 bp, Homo sapiens
aaggcctgcggcaaagagatgagcttattgagcttcctgcctgacacagctcacttcaagaagtgcacaatgtca

SEQ ID NO: 633611 - DNA, 100 bp, Homo sapiens
gaaggtttctgcccctctcagatttcctgccatgaatgaaagaccctcctggatgacttccttctcacgtacactgtcttcatgacaactgatgacttgt

SEQ ID NO: 633612 - DNA, 73 bp, Homo sapiens
atgatgagtgtggacgagaccctcatgtgctctttccagatccggatctgggcccggcccagtgccattgcgg

SEQ ID NO: 633613 - DNA, 85 bp, Homo sapiens
ggaggacgcgcccggcgcccctgagccggccgagcggcgacggaccgcgagatgcctgaggaaacccagacccaagaccaaccga

SEQ ID NO: 633614 - DNA, 74 bp, Homo sapiens
ctcgcacgcggatttggctggcgtcccgcgaagcgttgttgacgaccatggacatcatccacgatggatttgga

SEQ ID NO: 633615 - DNA, 90 bp, Homo sapiens
ggagtacaggactcgcctcctcagggttccctgtgctgccacttttcagccatggccacaaggggccaccttatcttagttccagaattt

SEQ ID NO: 633616 - DNA, 75 bp, Homo sapiens
ggctgagcagaggacccggcgggcggcctcgcgggtcagagtaacagttacccctcaatgagcgacccctacctg

SEQ ID NO: 633617 - DNA, 100 bp, Homo sapiens
cctcgctccttcagctgggcactcgctttctgcaaggcctgctggaaactgcaggaggaatccagatacctcaccaccaaggagcagtttcaccaattcc

SEQ ID NO: 633618 - DNA, 100 bp, Homo sapiens
gaccaatgaaatcgccaatgccaactccctattgaagctgcttctggtggtaaagctgaagttatcacttgtgatgtactcttggtttgcattggccgac

SEQ ID NO: 633619 - DNA, 100 bp, Homo sapiens
agattctgcagttgttgctctaggagctgaaaccagtgggtagatgtcgttctgaaacgcaggcagtggagctactgctgtggttcaggcagccctatgc

SEQ ID NO: 633620 - DNA, 83 bp, Homo sapiens
gcttgcacagctttagcccattttcagacaatgcagatcttcgtgaagactctgactggtaagaccatcaccctcgaggttga

SEQ ID NO: 633621 - DNA, 82 bp, Homo sapiens
ctcgctccggagcgcggcgccgagcgcagggatacggcgcccagcgggatgcctgaggaaacccagacccaagaccaaccga

SEQ ID NO: 633622 - DNA, 83 bp, Homo sapiens
acttctctggggactctgaacttccctggtcgaacagttttttctaatggctattcaagtgtatcctactcagtacatgtatc

SEQ ID NO: 633623 - DNA, 75 bp, Homo sapiens
gaacaagggccgcgatgtggaaatgccttcaattaagttgcagagttctgatggagagatatttgaagttgatgt

SEQ ID NO: 633624 - DNA, 100 bp, Homo sapiens
ctctgcagccagaagaacaagaagtaggcattgaccccttgtccagttactctaacaagtctggaggagccaaaaacctgtatatcatctccgtgaaggg

SEQ ID NO: 633625 - DNA, 75 bp, Homo sapiens
tcttgaatgacatccgagcgaaagagaaagagattgactggggcgactttggggtagaggcagtgtctgagggga

SEQ ID NO: 633626 - DNA, 82 bp, Homo sapiens
ctactctctctttctggcctggaggctatccagcagccccccaagatgaacccagtggtggagccactgtcctggatgctgg

SEQ ID NO: 633627 - DNA, 87 bp, Homo sapiens
caacctattgataccacagctgaactttcttctaagtgccacagtgaagacccagatgatgtggtaccagttggccaaagaagagcc

SEQ ID NO: 633628 - DNA, 100 bp, Homo sapiens
atgcagcactggctcagagggtcaggaacagagtcaatttcagggtgtgcaactgaggaacatggctcaagaaactaatcacagccaagtgcctatgctt

SEQ ID NO: 633629 - DNA, 77 bp, Homo sapiens
cagttattgccgtgtgcagtataataacctggaacaggacatggatttgattgacatactttggaggcaagatatag

SEQ ID NO: 633630 - DNA, 50 bp, Homo sapiens
aagaacaacgtcgtcatcaactataagctatcatggtgaacttacttcag

SEQ ID NO: 633631 - DNA, 82 bp, Homo sapiens
gattttaggcggtatcaaatggaaagtttttccaaatattcatctgtacagatttggagcaagaggtggtggtggccttccc

SEQ ID NO: 633632 - DNA, 75 bp, Homo sapiens
ccatggcgtacgcctatctcttcaagtacatcataatcggcgacacagaacacacgcaggacttgaaagatgtta

SEQ ID NO: 633633 - DNA, 100 bp, Homo sapiens
gatgatgtggaaccttaccctgaggtagacatctttagactcatcagaacttcctacgagccaaacaggcaggactcgtgaaattgtgatgccttctagg

SEQ ID NO: 633634 - DNA, 50 bp, Homo sapiens
gaagtttctaggaaaggccggacaccagattccaacaatgtctcacccat

SEQ ID NO: 633635 - DNA, 75 bp, Homo sapiens
gacgaaggtactcgcagcacttggagcgcagaaccggccgcgcccggggacggcaaaacagaacagaaaggcgga

SEQ ID NO: 633636 - DNA, 83 bp, Homo sapiens
gatgaagtccgtgtccctggaggggcccaggaagggcgaggaaagcggagtggacacatctccatcccccagcctgactgccc

SEQ ID NO: 633637 - DNA, 89 bp, Homo sapiens
ttcgcattttggcattgacatttaattttagggtcctttatatagaagggagagtaggaacgtcaaggtcgtgggaaataaaaggcagt

SEQ ID NO: 633638 - DNA, 88 bp, Homo sapiens
ttgtgcctccattcccgggaggggggagcggcgttggaggccaccgtttccagtgtggggtgatcagccccagatttgacgtgcaact

SEQ ID NO: 633639 - DNA, 110 bp, Homo sapiens
gaagaggaggagaggccggggacgagcccgcctccagctccaggccggtccgctgccagggctgttgataatcaggtgtatgtggccacagcctctcctgcccgggatga

SEQ ID NO: 633640 - DNA, 100 bp, Homo sapiens
ggaatctaatcaggaggttgctaacccagaacactatattaaacatcccctacagaacagaacatccagtcatggataaaaatgagctggttcagaaggc

SEQ ID NO: 633641 - DNA, 82 bp, Homo sapiens
gttcagaccgcgctccgccgagcacaggaagtcctggagaacctgaaggaccgctggtaccaggcggacagcccccctgcag

SEQ ID NO: 633642 - DNA, 75 bp, Homo sapiens
agagccataaagaaagcaaagcgcagaaatgttggatttgaaagagagcaggagattcggatgggtcagatggct

SEQ ID NO: 633643 - DNA, 88 bp, Homo sapiens
gaactcaaagaggcctttgcaaaagttggaactttccgctgtactttttgccatacagaggtagaagaggatgaatcagcaatgccca

SEQ ID NO: 633644 - DNA, 100 bp, Homo sapiens
gtagaacagcagccagattatcgcaggcaagaaagcagtaatgatgtagacatggaaacagatcactactccaatggagttggagaaacttcatccaatg

SEQ ID NO: 633645 - DNA, 50 bp, Homo sapiens
cgagtttgaagagttccctgccgaaggttgtttgatgtgtgcacagtgtc

SEQ ID NO: 633646 - DNA, 90 bp, Homo sapiens
tgtgtcccacttcatctttaataagctggaaactgacaaactagctctcccgatgagccccagcccgcttagcccgagccccatccccag

SEQ ID NO: 633647 - DNA, 74 bp, Homo sapiens
gttgctccgcttgttggactgctgctgcaaaacttttcttgctgacttgctcatcagttttgcacagtggcaat

SEQ ID NO: 633648 - DNA, 100 bp, Homo sapiens
gtgtacgtgggcagcggcggctggcgcttcctgcgcatcgtctgcaagaccgcgaggcgagacctcttgaaaggtggagagatctgtgagcagctgcgag

SEQ ID NO: 633649 - DNA, 89 bp, Homo sapiens
gaggccaggggtgtcgccatggtggtctgtttttctggggggccaccaacacctcccgtgaatctaccatgtacccaaaagcagtgcag

SEQ ID NO: 633650 - DNA, 95 bp, Homo sapiens
atgagcaagaaaagcctctgggagcagaagggaggctccaagacctcatcaacaattaagggagactcatgcatctgtatgccgtgtgcgtggac

SEQ ID NO: 633651 - DNA, 74 bp, Homo sapiens
taccaaacaggcacgagataaggtggctgtggacagaagctggagcccagtctgaacttgagaccgcgttgggg

SEQ ID NO: 633652 - DNA, 90 bp, Homo sapiens
gtggaaagtacaggtcctgacagctggatcccatgacagattctgttgtcacgtctccttacagagtttgagcggtgctgaactgtcagc

SEQ ID NO: 633653 - DNA, 101 bp, Homo sapiens
ggtgtcggtgagcgcgtttcccgcctgagcgcaactagcggcgggtcgtgggcacctccagtttgaaggatgacctctaggaagaaagtgttgctgaaggt

SEQ ID NO: 633654 - DNA, 75 bp, Homo sapiens
agtgattctacatctcaagctcatattttgaagtgtttacggcttggctgaagaggaaataaaaacagaacagga

SEQ ID NO: 633655 - DNA, 75 bp, Homo sapiens
cctttatgaagatattcttgagggattacaaggcagaggaagacccagcaaaatttaaatctatcaaaacaggcc

SEQ ID NO: 633656 - DNA, 100 bp, Homo sapiens
aatacccgtgtctgaagtcttcaggcgagctcaccacatgctacagattgatgcactgagtaaaagaagcaaggaagctgaagcagctttcttgaatgtc

SEQ ID NO: 633657 - DNA, 100 bp, Homo sapiens
ctgaagtatcaggcttcgaaatccccataaatggactttctgaagttgactatagtcaatggggccaatggagccaagtgtatggaaacccacaacagta

SEQ ID NO: 633658 - DNA, 83 bp, Homo sapiens
gtggaaggaagcagctagcaaggtgacccatgcattggttaatatcaggagcagtgaggagaatgaataccttccaagaccag

SEQ ID NO: 633659 - DNA, 76 bp, Homo sapiens
gaaactgaaacatacagtcagatctcaggaatggaaggtaaaaatgcatttgcaaagggagaaaatgaaggccaaa

SEQ ID NO: 633660 - DNA, 80 bp, Homo sapiens
cgccaccctgtggacatcagcgccatccccgagcagcggtggaagctggcctgacctctcgggacacacccagccctgtg

SEQ ID NO: 633661 - DNA, 98 bp, Homo sapiens
gcgcctctcccaggacccgcctggctgcgagatatgctttggaatggatccatgacaatggcgagttctacctttccacacacacctccacgggctcc

SEQ ID NO: 633662 - DNA, 50 bp, Homo sapiens
gtggcgggggagaatctcttgcaaagaaatgatgactttattgaattaga

SEQ ID NO: 633663 - DNA, 82 bp, Homo sapiens
aaccccgctgcccgccatcgtgcccgccgcccggaaggccaccgctgcggcataagatgcacatttttctgctctggagccg

SEQ ID NO: 633664 - DNA, 89 bp, Homo sapiens
gagagagggggactctgtgtgagggaaagaaaacaatttctcctgctctgcagcttctgttcaggttttagctaaagaagatactgagg

SEQ ID NO: 633665 - DNA, 97 bp, Homo sapiens
acaagtttggatcctgtgttccccatcaggtcgcagccagttccccgctcggtactggtgctcaacattcctgatatcttggatggcccggagctgc

SEQ ID NO: 633666 - DNA, 83 bp, Homo sapiens
ggaaatcatgtcaagcgaagccttgaaaaagctgccctgagacggtgtcccgccgaaagtttttggctttcacccccaaccag

SEQ ID NO: 633667 - DNA, 75 bp, Homo sapiens
gtctggccaagaatcagaggaagtggcttccatgaggcaggctgaacctgcagatatgcgcccagagatatggat

SEQ ID NO: 633668 - DNA, 74 bp, Homo sapiens
gtgagatcagccgcccggccaagctatcttctcgctagcaggtgctggagaatctggtaaaagcaccattgtga

SEQ ID NO: 633669 - DNA, 98 bp, Homo sapiens
tgcagttaatggaatcagagcagaaaagggtgaacaaagaagagtctctacaaatgcaggttcagggtaggagtcaatgaagacatcttagtcttaac

SEQ ID NO: 633670 - DNA, 100 bp, Homo sapiens
ggagctggcattggagcaagccaagaaagaatccgaagatcagaaacgaatgcaggctcaacagtaccagcagcagcgtcgaaaatttgcagctgccttc

SEQ ID NO: 633671 - DNA, 100 bp, Homo sapiens
tggcccggaaacaggaggacagaggtggagaagagcgagtacttgagaaagaagaggaagaagatgatgatgaagatgaagatgaagaagatgatgtgtc

SEQ ID NO: 633672 - DNA, 100 bp, Homo sapiens
gtccgtgcccccgttcctcgcgccagcctcggcggtggcaagcgctgtcccccagcagaggtgtccctggatacaggttatgagtccagggacaatatgg

SEQ ID NO: 633673 - DNA, 82 bp, Homo sapiens
tcaatcgacagaagattcggagccttgatgtggtgtatgtatggatctatgacccagttcactttaaaacatttgtcatggg

SEQ ID NO: 633674 - DNA, 75 bp, Homo sapiens
tgacagtctgcatgtgcagttttcagatcattcattatcatggtgtagtaaagtccatgttaggtcttggtcagc

SEQ ID NO: 633675 - DNA, 101 bp, Homo sapiens
tgatgtgcgacaaggagttcatgtgggccctgaaaaacggagacttggatgaggtgaaagactatgtggccaaggtcatgctttcagaacgaaaaggcaca

SEQ ID NO: 633676 - DNA, 82 bp, Homo sapiens
tgaaatatggaaacgactcctcggccgagctgagtgagctctccgatgcggagataatggggaagctcttggcatggttggc

SEQ ID NO: 633677 - DNA, 82 bp, Homo sapiens
ggaacaaaaaaaggagatgcctggcagccccgctctctgcaataatcagcaactgctgtgatgagatgctgcctttaatgct

SEQ ID NO: 633678 - DNA, 87 bp, Homo sapiens
ccatgtcaggagacggagccacggagcagtgatgtcttggcattgcccattttcaagcaggaagattccagccttccattggatggt

SEQ ID NO: 633679 - DNA, 100 bp, Homo sapiens
ggtgatctacgtgtgctttttcaagggagctgataaagaacttcttcccaaaatggactatgaaagtgatgacgactcttatgaagtgttggatttaact

SEQ ID NO: 633680 - DNA, 87 bp, Homo sapiens
cgttaaagtctctcttcaccctgccgtcatgtctaagtcagagaaatgtgatacctcaaagcacaaagtgctggtagtgtctgtgtg

SEQ ID NO: 633681 - DNA, 82 bp, Homo sapiens
tcaaggagttcaccacacgcacgcaggcccccctcgatgacttacgagccctcaaggggaagcattttctcctggacccctt

SEQ ID NO: 633682 - DNA, 75 bp, Homo sapiens
ggtggaactagtcggacaaagccctcgcgtcggacccttgccagaactattgagaaaatcatgagttctattgga

SEQ ID NO: 633683 - DNA, 75 bp, Homo sapiens
gtacagtcgccaactgatgtctacagggcactgtttgaagaagcaaacatggtagcatcaagcattccttgaaat

SEQ ID NO: 633684 - DNA, 100 bp, Homo sapiens
atccagcctgcggagcctgtggggcaggatgcctttgtggaactgtacggccccagcatgcggcctctgtttgatttctcctggctgtctctgaagactc

SEQ ID NO: 633685 - DNA, 75 bp, Homo sapiens
caccggtgaaaacccagaggttcccttcccccgggacatgattgacttagaggacgccaggaaagcatgtgcaga

SEQ ID NO: 633686 - DNA, 75 bp, Homo sapiens
ccaagctcgtggtgggtggaaaagtgttcgccgaggtacccattcctggcccagtgggtaacaagagaatggttc

SEQ ID NO: 633687 - DNA, 90 bp, Homo sapiens
ctgagcttgcaagaggatcaacatgcctgcttgggcactgtttaaaggaaagttccgagaaggcatcgacaagccggaccctcccacctg

SEQ ID NO: 633688 - DNA, 100 bp, Homo sapiens
gaagcagcgggggggcaggcgatcgaagatcggccatggatatggaacattccttatgtcaaagcaccggatacgcatgggaacatgtgggtgccctcct

SEQ ID NO: 633689 - DNA, 88 bp, Homo sapiens
tgagtcgcttcaagtttatcggtgctgactgggttacttttttaaacactaggaatggtaatttctactcttctggacttcaaactaa

SEQ ID NO: 633690 - DNA, 82 bp, Homo sapiens
aagaagtttgattccagtcatgatagaaatgaaccatttgtctttagtcttggcaaagtgctgcttttgacacaaaaacggg

SEQ ID NO: 633691 - DNA, 87 bp, Homo sapiens
ccagagaactgccaagaggtggtggccctggtagagggtgtgacctggatgtctgaggaggaagcgggacctggacttcaccatcga

SEQ ID NO: 633692 - DNA, 96 bp, Homo sapiens
tccaaaccacaagttctcaaaactctctgaaaaatggctccctccgagttaagaacatatgctgtcaggaggataagagatgccttcagagaaaat

SEQ ID NO: 633693 - DNA, 87 bp, Homo sapiens
ggcagagttgttatttttcagcgtgaacaagaggtatattgagatcttcagaagtagcaggagtgaaatcaaaggattttatgatcc

SEQ ID NO: 633694 - DNA, 90 bp, Homo sapiens
ggaactaagatctagagtatctcctcgaggaagtacaactggaattgaatgatctggcacgggaccctccagcacagtgttcagcaggtc

SEQ ID NO: 633695 - DNA, 100 bp, Homo sapiens
aatctggaactaatgtcacagcatggatgtaatgcctggaaagtatacaatgaatttggacacctcccacactgagtccccaaccccccatgactcaaat

SEQ ID NO: 633696 - DNA, 95 bp, Homo sapiens
cttcaagataacttgccaaaatcttgagaaattgattgaaaagaattactttcttcataagtcagcccaggaagcatataagtcatacatacgag

SEQ ID NO: 633697 - DNA, 74 bp, Homo sapiens
atgatattccaatttatgcagataagggttatgtattaagctctattgaaggccgagtggcagttgagtatttg

SEQ ID NO: 633698 - DNA, 90 bp, Homo sapiens
aagacagcaaaaagacttgtcaaagtcaagcttcacagcgcatcgaactccatttaaaccacagcagaggctttatagaaagcatccgcc

SEQ ID NO: 633699 - DNA, 50 bp, Homo sapiens
cggaggagaagctgcaggagaaaggttcgttccaccagtcataaaccaga

SEQ ID NO: 633700 - DNA, 94 bp, Homo sapiens
tcctggatcagtttctttgtcatgtagccaagactggagaaacaatgtttctgagtcccttcaacatgatcctgggaggaatcgtggtggtgct

SEQ ID NO: 633701 - DNA, 80 bp, Homo sapiens
cagaaggtctctggagacatcttcagcaggttgtgcagcctgactctgaagaagctggtggtcttcaaggagctggagaa

SEQ ID NO: 633702 - DNA, 85 bp, Homo sapiens
aatcagccctggacctggcagatccttcagcaaaagctgtccttacaggtctggagcccccaactcccttgacagtgtacgctgg

SEQ ID NO: 633703 - DNA, 100 bp, Homo sapiens
ccggcagctggagatgtccgagcccaaggcaattgatcccaagttgtcgacgaccgacagggtggtgaaagggctattgagtggccagacttccccaaca

SEQ ID NO: 633704 - DNA, 100 bp, Homo sapiens
tgcaaactctggaaaaaaacttgggttgcaccccttaaggatcttcctgtaaatgatgagcatgtcaccgttcctccttggaaagcaaacagtaaacagc

SEQ ID NO: 633705 - DNA, 100 bp, Homo sapiens
gagccgggccgcgccgccgctgccgccgccgcgcgcggtgccggtggtggtgtgcacattgagccccggtatagacagttcccccagctgaccagatccc

SEQ ID NO: 633706 - DNA, 96 bp, Homo sapiens
gcggaggcagaggtggaggcgctttgaaagataaactcatcctgaaagtcgctgttgttctcctgctgagcaagaatggaggccccactggtgagt

SEQ ID NO: 633707 - DNA, 75 bp, Homo sapiens
agccctccaagtacccacatgtgccccctcaccctgctgaccaaaaagaaaaactaattgagggactcaaatctc

SEQ ID NO: 633708 - DNA, 75 bp, Homo sapiens
ttaaattgcttactggtaaacgcgttcaactggcggaagacctcaacgaagttatacggaagcgtctcctcattg

SEQ ID NO: 633709 - DNA, 100 bp, Homo sapiens
cccctgaagatgtgcacctagggggcggctaccccgtgggtaatctatgccagcaattatgacaatgttagcagaccatgcagctcgtcagctgcttgat

SEQ ID NO: 633710 - DNA, 75 bp, Homo sapiens
gtcatgtcaacagtagcacaagttcttcgtgccatgaaggaggacagtgaaaaagttccgagcttgttaactgat

SEQ ID NO: 633711 - DNA, 75 bp, Homo sapiens
gctgatcgcctgggtggttgttggcgtgtccctgcagcgaaggatcctgttccagggtctccctccactgctgta

SEQ ID NO: 633712 - DNA, 101 bp, Homo sapiens
tttgaggagtgggaacaggcttcggcgaacacaaagtggctggcacatgtgtatcaatcccaaggaatgatgagagctgcagagatgtgttacagaaagag

SEQ ID NO: 633713 - DNA, 75 bp, Homo sapiens
agcaactcccagctcaatgcaatggaataatcaagctgggaaggtggaaccctctccccctcagttatgtgacag

SEQ ID NO: 633714 - DNA, 75 bp, Homo sapiens
gaaaaagcagggaggttatgaggcttaataaagaagggagtgttgacattcagggatgtggctgtagaattctcc

SEQ ID NO: 633715 - DNA, 75 bp, Homo sapiens
gcgccgcatggaggccggctgaggagcgccgctgcctcgcctcgcaggtcaatggccagcaaggaggggggtccg

SEQ ID NO: 633716 - DNA, 75 bp, Homo sapiens
ccaggccggcaggctgagaaaagcgagaccgcgtgcgaggaccggtagtgaagcgcgcagtggcgagccagccag

SEQ ID NO: 633717 - DNA, 100 bp, Homo sapiens
agtctcagaactgttccttcagccaaagaaacaagccgtggaataggtgtatcaagtaatggtgcaaagcctgaaatggggaataaacggtggaattcct

SEQ ID NO: 633718 - DNA, 101 bp, Homo sapiens
tgtgaagccacacagtgtccagatacgaggaggactacacagaaagtctgctccagctccacgatgctgagattgtgcggttaaaaaactactatgaagtt

SEQ ID NO: 633719 - DNA, 100 bp, Homo sapiens
aaccatcaatcgcttcctcatgaggaaagattgccctcagtcccaataatcacgaagtgcacatctataagaagaacgggagccagtgggtgaaagctca

SEQ ID NO: 633720 - DNA, 50 bp, Homo sapiens
cacagccgcggcggcagcagcagtgagagcaccacacactggaagcagac

SEQ ID NO: 633721 - DNA, 100 bp, Homo sapiens
ccgcggtggcggcgctgccgcctgaagtgcgggcgcagctggcggagctggagctggagctctcggaggcttttgccttatgaacagtcctctcttttgg

SEQ ID NO: 633722 - DNA, 100 bp, Homo sapiens
gaaggagcgcgagcttgaacgcagcgtgatcgccacatcacagaatcgtatctatctcacagctgacaaccttgtgctgaacctacaggatgaaagtttc

SEQ ID NO: 633723 - DNA, 83 bp, Homo sapiens
atacttggaatgaatccttctagagacgtccacggtgacttaagagattaaaattaatttggttgctgttggttctgaacaaa

SEQ ID NO: 633724 - DNA, 75 bp, Homo sapiens
tagatgatccaagtcaccaagaaattactgtctcaagtgatacggtggtaccatagaaacattaccagaaatcag

SEQ ID NO: 633725 - DNA, 100 bp, Homo sapiens
gaattagaaacaattcatttggaaaatgaaggcctgaaaaagaaacaagtaaaactggatgagcagctcatggaggtcaaaatgcagatcttcgtgaaaa

SEQ ID NO: 633726 - DNA, 90 bp, Homo sapiens
cgaaacttgtccaaaatcacacaacttgtaaagggcacagccaagattcagagccagcaggcattttggagatcaaagatgggtagaaaa

SEQ ID NO: 633727 - DNA, 124 bp, Homo sapiens
taaaacacaaagcaagagaaaaaccttatgatagtaaaagtttgcggacactctgtttgctggctacacggacaacctggtgcgagtgtggcaggtgaccattggcacacgctagaagtttatg

SEQ ID NO: 633728 - DNA, 87 bp, Homo sapiens
actacagaaacctgatcttccttggtggacccccaaaagtacaagggcatatttaacggattctcagttacacttaaagaggatggt

SEQ ID NO: 633729 - DNA, 83 bp, Homo sapiens
gcaatggtctcaatctctggaaaaacttcttgccaaccaaagtacaatgactcttcttgcttttcacctaagttgaataagca

SEQ ID NO: 633730 - DNA, 75 bp, Homo sapiens
aaaccagcagacagaatttgtcagtgcaccgtccaggtgaggttagagctggggcatcgcgcccaactgcgcaag

SEQ ID NO: 633731 - DNA, 109 bp, Homo sapiens
gtcgctcacgctgggagctgtagaccggagctgttcctattgggccatcttggctccaccaccctgggaaatcctcattgacgattcaatttgttgaaggccaatttgt

SEQ ID NO: 633732 - DNA, 75 bp, Homo sapiens
aatagatcaagctagtgacttgttctcaaaagtctatggtcctgtgttcaccgtgtattttggcatgaatcccat

SEQ ID NO: 633733 - DNA, 83 bp, Homo sapiens
cagtacgccacctactattacccccagtatctgcaagccaaggaagctcttcgtgggcggtcttgactggagcacgacccaag

SEQ ID NO: 633734 - DNA, 51 bp, Homo sapiens
acacagacgcacctgacacggcgacagggcagctttggaagaagtagaagg

SEQ ID NO: 633735 - DNA, 96 bp, Homo sapiens
caacacgcagcagccgctgccgccgccgcgggagccgctgcccgaactcccggcccgaactccaggctgaaggtgatgtggccgccctcaaccgac

SEQ ID NO: 633736 - DNA, 75 bp, Homo sapiens
ggacaacatggaaaactacaggaagctgctctccctcggtgttgacttcaaaatcaaaactgtagagctaagagg

SEQ ID NO: 633737 - DNA, 50 bp, Homo sapiens
cctcctgagtagctgagaccacaggttccaagaccaaagattaaattaag

SEQ ID NO: 633738 - DNA, 82 bp, Homo sapiens
acgacgcgtgcttcgtggcccggcaccgttccgcggacgtgctcgatgatgattattctccaccgtctaagagaccaaaggc

SEQ ID NO: 633739 - DNA, 100 bp, Homo sapiens
ccatcgtccccgtgcgcagaggctactgggggaacaagatcggcaagccccacactgtcccttgcaagaccccaccaacaactgaacgctttggtcaggc

SEQ ID NO: 633740 - DNA, 100 bp, Homo sapiens
ttgaatcagaacaccttgctgctggggaagaaggtggtccttgtaccctacacctcggagcatgtgcccagagacgagttgtactgctgtcacaggaaat

SEQ ID NO: 633741 - DNA, 100 bp, Homo sapiens
acaaccttcgatctcctgacgagatgaccggaaagaagggatgaccgcgtttgtggaaaagagaaaggccaacttcaaagaccagtgagaaccagctgcc

SEQ ID NO: 633742 - DNA, 82 bp, Homo sapiens
gcccggcggctgctgctgctgctgacgctgctgctgcccggcctcgggccctgggcgctgcctatggcacagccaagagcgg

SEQ ID NO: 633743 - DNA, 100 bp, Homo sapiens
gcaccctggggggctgcatccagataatgtgaagattccccactgctccaatgcatcacctcagttccttgtgttttctgcactgccagcatgatacaca

SEQ ID NO: 633744 - DNA, 50 bp, Homo sapiens
caggcacactacagaactaaatatgcattgggacacagcaggccaggaaa

SEQ ID NO: 633745 - DNA, 88 bp, Homo sapiens
ttgaaacaattaaaatctgtgatgtaggagtctctctaccactggatgaaaatatgactggtagtgggcagcagtcagtgacaggtgt

SEQ ID NO: 633746 - DNA, 100 bp, Homo sapiens
tgcaagctttgtcggaagaggaccggaggctctggatggaagccatggatggccgggaacctaaccagaggcaggagaagtgtcccctccagtcggtgcg

SEQ ID NO: 633747 - DNA, 100 bp, Homo sapiens
ctcaagtacagggtcatcaagggcacttcctgtccacttccaacgaagcggtctataagatctttgatgacagcccctgcccatttactgcgaaaacctg

SEQ ID NO: 633748 - DNA, 100 bp, Homo sapiens
gtgcagccgtcagaccaagttggcaaagtcatctacaagcagttcaaacagcaggtggcgaaagcagtgaacaatgccactgcacagtcgctggtcctta

SEQ ID NO: 633749 - DNA, 80 bp, Homo sapiens
gccaatgtgggatcgatgtttcaatattggaagcgctttgatttacagcagctgcaggttatgaagacagtatggagttt

SEQ ID NO: 633750 - DNA, 87 bp, Homo sapiens
tctgtggaaaaaccacagccacgagtccatggtctgagaaagaaccccagtttaagtttatctacttcaaccacatgaatctcgccg

SEQ ID NO: 633751 - DNA, 75 bp, Homo sapiens
ttgccgcagttcatcttcctccctgtgtactttccatttgccttcctgggtgtgcaactgaggaacatggctcaa

SEQ ID NO: 633752 - DNA, 74 bp, Homo sapiens
gcaaccccaagatgtcggagacacggtggaaacgcttatgaaggacagaataacgggctcccagattcacaagc

SEQ ID NO: 633753 - DNA, 82 bp, Homo sapiens
cgagacggcgatccgggcgctcgagacttaccagagccacaagactgctctggcccatttagagtctcttgcagtggatgtt

SEQ ID NO: 633754 - DNA, 110 bp, Homo sapiens
cggcggcggcggcagcgggtcttgggtcctccgagagcagcagcgtactatactggcaattgctggagaagattttgcaattgttgcttctgatactcgattgagtgaag

SEQ ID NO: 633755 - DNA, 96 bp, Homo sapiens
caagattctgaatctggtgatgaacttagcagcagctccactgaacagataaggtgctacagttgaaactccagcagcgccggacccgggaagaac

SEQ ID NO: 633756 - DNA, 90 bp, Homo sapiens
gtggtggctgccatgatgatttccattgtggggcacttcaggtggcaagacagctccttcttcagcagcaacagcagcagcaagttagtg

SEQ ID NO: 633757 - DNA, 100 bp, Homo sapiens
ttctgcattttgcagtctttggcattgacgtgtcaagctgtattagtcgacaggaccatttacatttcaggacagataggcatggacccttcaagtggac

SEQ ID NO: 633758 - DNA, 100 bp, Homo sapiens
cgggccttcgccctggggcttccgcctggtgggcggccgggacttcagcgcgcccctcaccatctcacggagctgaagaagcaggtggagagtgccgagc

SEQ ID NO: 633759 - DNA, 49 bp, Homo sapiens
aaacggattgccagagaattggcagaagacagcatgagtatctatgacg

SEQ ID NO: 633760 - DNA, 83 bp, Homo sapiens
gcctggctagccggcgacttgagtgacgaccgcggcgagtcctttgcacatgttggcaacacacgcatccgcatcggcctccc

SEQ ID NO: 633761 - DNA, 100 bp, Homo sapiens
gtgcttaattcaaggtcacacaatgtcggggatggacctccagatttccttactgaagcctaaagaaactgttccaactcttgctccaaaaactctttca

SEQ ID NO: 633762 - DNA, 100 bp, Homo sapiens
cgccggggccgcctcctcccgcacggacccatgaaccagccgggcggcgcggcggctccgcagatcagcttgaacgggtctttttacgacttggccatgc

SEQ ID NO: 633763 - DNA, 126 bp, Homo sapiens
ccgcttcgagaagcgccacaagaacatgtctgtacacctgtccccctgcttcaggtgaagaatttcatgacgtggaggatgcagagacctacaaaaagatgctggctcgggacgagcggcgtttcc

SEQ ID NO: 633764 - DNA, 104 bp, Homo sapiens
cagaaacatagatttggcaactcctttacatcatacttggacatatcaagcattggtgcacgatgtactgatggtatacctcaagtttactatttcggcccttg

SEQ ID NO: 633765 - DNA, 100 bp, Homo sapiens
gagggcatttgagtgtgggacccatgccctgcatttcttcgctaccccacagcttctgctcatgtgcagcctgggagctctattccaccttacaacaccg

SEQ ID NO: 633766 - DNA, 60 bp, Homo sapiens
cttcaactctgttcacctgcttgcagagatgaggactcagtgtgtcgtcgtggctgctct

SEQ ID NO: 633767 - DNA, 75 bp, Homo sapiens
cgggaatatatccgaagcctgaagatggttccaagtattccctatctagggccgcgatgggcctcttggaacatt

SEQ ID NO: 633768 - DNA, 51 bp, Homo sapiens
ggaacacgaccagctgctcctcaagtgcaagcggtcttctctgtcttcttt

SEQ ID NO: 633769 - DNA, 100 bp, Homo sapiens
ttgttggggagaagaggattggaggtgtcagtgttaaaggaacctctacaacgaaggtgaagccacggaagataaggacacattcagctaacgtatttta

SEQ ID NO: 633770 - DNA, 83 bp, Homo sapiens
cttcaggtgaccacggattcgccatcgattttttatcaagcagaaatgcatcgaacaacgagaatcaagatcactgagctaaa

SEQ ID NO: 633771 - DNA, 82 bp, Homo sapiens
aaccacctcacagattccagcttcggaacaagagaccctgactgtgctaacctgatgaaaaagtgtgtgcagtgtcgagcag

SEQ ID NO: 633772 - DNA, 100 bp, Homo sapiens
ttttccactccttgcttactgggtcctacgccaacagatatgggaggggcaaccttcgcccagaagaggcacttcaggctctcaccatatatgaggggaa

SEQ ID NO: 633773 - DNA, 98 bp, Homo sapiens
tgatcgagaggatctggtgtaccaggcgaagctggccgagcaggctgagcgatacgacggatgaagactccgggaaggctgacagcgacgtggctgac

SEQ ID NO: 633774 - DNA, 50 bp, Homo sapiens
ctgcaggccatcgacccccagagcaacggagaagaaatgggtgaccgttg

SEQ ID NO: 633775 - DNA, 75 bp, Homo sapiens
tagagggtgaagctggcggagcaggaggatgggcggtgaacagccatataccaggaataggataccagatttttg

SEQ ID NO: 633776 - DNA, 100 bp, Homo sapiens
tggccttcgcgtctgcccggccaagaggcaaaggggaggttacgcagcaaaccatccagaagaccttcacggcatggtgcaactcccacctgcggaaggc

SEQ ID NO: 633777 - DNA, 78 bp, Homo sapiens
tttcctgcttttggtttccctggcaggggttgaactgtggagtgtgtggggattttttaacctggccctgctaatcga

SEQ ID NO: 633778 - DNA, 83 bp, Homo sapiens
atgccgtcggagaagaccttcaagcagcgccgcaccttcggtgatgtgtccaatctagatcccaacttctcatttgaaggcac

SEQ ID NO: 633779 - DNA, 90 bp, Homo sapiens
ccagcactgtctccaccctagaggttgacagatttgcaatggaattagaacaaagccgaaatttgagcaataccatagtgcacattgaca

SEQ ID NO: 633780 - DNA, 101 bp, Homo sapiens
ggaaggagcagttggttcaatctctggaatggactgctgaattatgaagtatttcagacccagtagtagaacatcactctgccactcactcctttatctcc

SEQ ID NO: 633781 - DNA, 100 bp, Homo sapiens
tcaaaagcttcccaccacatttacccatattcttcctcacaagacgatgctgaggatcctgtggaggagaccatcgcagcccgcagtccaccgggatcag

SEQ ID NO: 633782 - DNA, 83 bp, Homo sapiens
gaattttaccagatcgaatctgggccaaatagaaagggtatgcagaagttggctagtcaatacctgaagagagattggcctgg

SEQ ID NO: 633783 - DNA, 100 bp, Homo sapiens
cggtgcagctgctggtcaccctgagcttcctgcggagcgtcgtcgaggcgcagtgggtaattccagaattgattggccataccattgtcactgtattact

SEQ ID NO: 633784 - DNA, 98 bp, Homo sapiens
ggattgactatggaaaagttgccaaattgcttggaattgcgattgggttcttggtccctcctgttttggtacccaacattgaagaccgggacgagctt

SEQ ID NO: 633785 - DNA, 87 bp, Homo sapiens
tcagcttcccaagtaactgggactacagtgtgtgctgtatttatggagtttaaagattaatcatcccaaaacattgtttctgcttcg

SEQ ID NO: 633786 - DNA, 90 bp, Homo sapiens
gcgagtcttcggagcgaccccggcaggatttgaactcagaggatcaaaaagccttcagtgttgaacatacaagctgcaatgaggaagaaa

SEQ ID NO: 633787 - DNA, 82 bp, Homo sapiens
cgtcctcatcgggcttatgttcgagtttttcagaagaagtgaagtcaagatgaagaaccatttgcttttctggggagtcctg

SEQ ID NO: 633788 - DNA, 88 bp, Homo sapiens
ttcagtctgcaagtatggagctcaagttcttaattattcagaatgctgcggttttccaagctgccttcaccagtgagcacaaagccac

SEQ ID NO: 633789 - DNA, 100 bp, Homo sapiens
gctgctgctgctgctggcgctgtgcggctgcccggcccccgccgcggatgctgaagttccgaacagtccatgggggcctgaggctcctgggaatccgccg

SEQ ID NO: 633790 - DNA, 75 bp, Homo sapiens
gcgggacccggcgaagacgcgaccgcggcgcgagtcaccatgttaaacacagtgggaatatcacttttgatgaga

SEQ ID NO: 633791 - DNA, 145 bp, Homo sapiens
agaagaacttatcagagattgagaatgtccatggatttgtttctcattctcatatttcaccaataaaggttttaaaatcaaagatgggaaaatcggagaaaattgcccttccccatggccagcttgttcatggtatacacttgta

SEQ ID NO: 633792 - DNA, 100 bp, Homo sapiens
gaacagaaaatcgtcttatagttgagaatttatcctcaagagtcagctggcagatgctttgggaaaatggaattaatggcattttagcagatgaaatggg

SEQ ID NO: 633793 - DNA, 100 bp, Homo sapiens
cacgcgggggcgaggcgaggcgaggcggccgccggtcgctccgggacgcggaccgccagataatcaatatgcatttccaagccttttggctatgtttggg

SEQ ID NO: 633794 - DNA, 100 bp, Homo sapiens
gacaagccccctgaaaccaaggagtctgcaatgaataatgctgacatcgctattgcggttccgaggcagtgggaagagatgcggcccctggacatcgtcg

SEQ ID NO: 633795 - DNA, 95 bp, Homo sapiens
aatgtcgcaaatttttatcaaagttaatggatcagttagaagctgttgggtatctacagccattggttgctgttcaggtcagctttgctcctaac

SEQ ID NO: 633796 - DNA, 50 bp, Homo sapiens
cggagctggaatgactggcaacccaggtgagctccacctgacacctttac

SEQ ID NO: 633797 - DNA, 82 bp, Homo sapiens
tttgctcttacgtatttgtgtgacttgactcttcaaacacaaagcattttgaaagcgaagcagaagccgtagaatcagcggc

SEQ ID NO: 633798 - DNA, 90 bp, Homo sapiens
gggaaacctgtagggtatggtccagctgtgccgcaccgaggcgagcaggagcagggaacagaacatgttgagtcagaattgcttcatacc

SEQ ID NO: 633799 - DNA, 100 bp, Homo sapiens
gattggattggcatctttagaattgatgtggacatcttcgagccccaggggatcagcaagctggatgcccaggcctctttcctgccgaaggaactggcag

SEQ ID NO: 633800 - DNA, 75 bp, Homo sapiens
gtagcgctcgtctggcggagctgggaatcctatccatcttcttcaccgatatggtttgtggattctgaagaccca

SEQ ID NO: 633801 - DNA, 90 bp, Homo sapiens
gctctctctccagtccttgctgaagagactttccgttacatgaaataacaagcctttgtattcatttgaagataatgcagactatgttta

SEQ ID NO: 633802 - DNA, 97 bp, Homo sapiens
cgggcgcctaccagccggcagctccggagctgcccgcgccatgtccgcgcacaatcggggcaccgagctcgttttttgctccactcaagcctgttag

SEQ ID NO: 633803 - DNA, 99 bp, Homo sapiens
gcaaaacaggaagatgtctctgttcagctagaagccttggatattatggctgatatgttgagcagatgcactgggccaggtcttgaaggctgtccaacg

SEQ ID NO: 633804 - DNA, 49 bp, Homo sapiens
aaagggagatcacactactggggttcgtgacaataaaaaattaagagta

SEQ ID NO: 633805 - DNA, 74 bp, Homo sapiens
atgctggccaagaagatcatcattaaggacggaggcacgtggttggatttcatcccttactggtctcaaccaaa

SEQ ID NO: 633806 - DNA, 100 bp, Homo sapiens
cctagagaacatccatttgtcttgcaaagtgttggaggacagacattaacagtatttactgagagctcatcagattatggattggatatgtctacttctg

SEQ ID NO: 633807 - DNA, 78 bp, Homo sapiens
gaaaattcggccagggttctcgctcttggtataatttgggcgactacaatggagagatcatgtctgaggttatggcac

SEQ ID NO: 633808 - DNA, 50 bp, Homo sapiens
tctggaacaactcctaattctagctttatcctgtggataaacgcagagtg

SEQ ID NO: 633809 - DNA, 82 bp, Homo sapiens
atcccctggatgggggaccacaagatcctcatcgacagagcctggagacacaggccccatccttcccaatggggacacttca

SEQ ID NO: 633810 - DNA, 75 bp, Homo sapiens
cttcttcaagagaaatggagcccttctccaagtgtggcaaaggagcagagaactttgacaagttcttcacacgag

SEQ ID NO: 633811 - DNA, 51 bp, Homo sapiens
tgtcatcaagcagcacattcaaggtggatcctctgaaggccatggaatcct

SEQ ID NO: 633812 - DNA, 100 bp, Homo sapiens
gtcacctttaaaagcaccaacccctacggctttggaatcgaagcctcttaaaatggcagatgacttggacttcgagacaggagatgcaggggcctcagcc

SEQ ID NO: 633813 - DNA, 83 bp, Homo sapiens
ccccgcgcagcccccggccgcagcgcaggcagcccagcaggtcgcgtggggcaggcagtggcgctgcgggccaaggccttcgg

SEQ ID NO: 633814 - DNA, 75 bp, Homo sapiens
cgcgactgctccagcatttttccttcaaggtgaaatgacaatggatgctctgttggctcgattgaaacttctgaa

SEQ ID NO: 633815 - DNA, 100 bp, Homo sapiens
aaattatacagaccctagtattgatgttcagagaaacagaaaccgagtcatcacgcctgaacacattggcagctaagaaagacaaggtctcattttgttg

SEQ ID NO: 633816 - DNA, 98 bp, Homo sapiens
ccgctcgtcccgctcgtcatggcctacccgggatacggaggagggtttcagaagaggagccccgccgaggcatgagggccgtgctccccccagaggaa

SEQ ID NO: 633817 - DNA, 100 bp, Homo sapiens
ctggcagagaggggcagttttggagccatggaatgcagatgtaaacgtgctccccattccagaccacaaattaattgtcagcgtgccctgtactcttcac

SEQ ID NO: 633818 - DNA, 100 bp, Homo sapiens
ctgggctccggggacactttgcgttcgggctgggagcgtgctttccacgacggtgacacgcttccctggattgggaagaggagcaggacttggatggtga

SEQ ID NO: 633819 - DNA, 50 bp, Homo sapiens
gctgcggacaccaagggttgctatacatagtggaatgtcatgggatcacc

SEQ ID NO: 633820 - DNA, 105 bp, Homo sapiens
ctttcttctatttcttgtggatattatggctaataacacaacaagtttagggagtccatggccagaaaacttttgggtcactcaagactgcttgcaactgattgc

SEQ ID NO: 633821 - DNA, 90 bp, Homo sapiens
gtgggggtgtgcaaacccgagagaactggaccctgcacttgatggaccagctggcaccacccagatcaataaactggcttatttgaattt

SEQ ID NO: 633822 - DNA, 100 bp, Homo sapiens
cggaggcgacggtggcggctctcggagccggcgcgaatccggcccccgcagcgggacccggaaagtctgcaccaaatgtgggatcgaggcctcccctggc

SEQ ID NO: 633823 - DNA, 82 bp, Homo sapiens
ctgtggaacgggccaagcaggtgaccatggcagaactgaacgccatcattgggataacgaaggaggcccaacttcattcaat

SEQ ID NO: 633824 - DNA, 82 bp, Homo sapiens
cggccccggcgccaagccgccgtcatcttcttcctgtgccagaattcagaaggagctggcggacatcactttagaccctcca

SEQ ID NO: 633825 - DNA, 75 bp, Homo sapiens
ctcttcattagggcaccaaagcgaagggaacatttacggatgagaagtcaaaagcttcccaccacatttacccat

SEQ ID NO: 633826 - DNA, 95 bp, Homo sapiens
cctttccaacacagatgtccaagctgccaaaatttacatagtacatgacgaagttaaggataaagcttttgaactagaactcagctgggttggtg

SEQ ID NO: 633827 - DNA, 100 bp, Homo sapiens
gtggttccacctctagaaacaggactgaaagatcctttcaagtatagctatccaccactagtagatgatgacttccagaccccactgtgtgagaatgggc

SEQ ID NO: 633828 - DNA, 87 bp, Homo sapiens
tcctaccagcagaactccatggggagctatggtccccaggggggtcagtatggcccacaagaggctgacccgcggctgattgagtcc

SEQ ID NO: 633829 - DNA, 90 bp, Homo sapiens
cacaagtgttctccacggcccacccactgaaaacacaggattttggcattagagaagctcggtgctgtcttcaatcaagtagccttccca

SEQ ID NO: 633830 - DNA, 98 bp, Homo sapiens
cgagttacatgttgagccatttcaggacaaccctccatatgataagggagccttcagaatcgaaatcaactttccagcagagtacccattcaaaccac

SEQ ID NO: 633831 - DNA, 100 bp, Homo sapiens
gggggagactggcatgttctccttgagcaccatccggggtcaccaggattacaaggcagaggaagacccagcaaaatttaaatctatcaaaacaggccga

SEQ ID NO: 633832 - DNA, 50 bp, Homo sapiens
cccagggcaagccccgctccggccaacaacccgtggaccgggagcccgtg

SEQ ID NO: 633833 - DNA, 90 bp, Homo sapiens
cccaccctccaactttgcgacggaaatgtgtcatcgaaagccaggtcggattgtttgtgctgaacgaactgtcctcttgcttcagaagcc

SEQ ID NO: 633834 - DNA, 87 bp, Homo sapiens
tctcacgcggatgtggttaatctgctgaagaacgcctacgggcgcattatcctgcaggactgtggaaacaacgagcttcaatttgtt

SEQ ID NO: 633835 - DNA, 50 bp, Homo sapiens
aaatccttcagaccttttggaggctaccacatactgttgattgtgatgaa

SEQ ID NO: 633836 - DNA, 90 bp, Homo sapiens
tggcacttcattggccacctacagaaacaaaatgtcaacaaattgatgggcatggatgagttgatggaggtgtctttctcgcccctggcg

SEQ ID NO: 633837 - DNA, 50 bp, Homo sapiens
agagaatcaagcttcagatttggcctcacgattttgatgaatgtcgattt

SEQ ID NO: 633838 - DNA, 80 bp, Homo sapiens
gtccttgctggtgcatgcgtcgtcggcctctgggcagcagggcgatgccagtccctccactccagaggagaacgaaacca

SEQ ID NO: 633839 - DNA, 50 bp, Homo sapiens
ccaagttctaccagccctacgtcacgagaagagaatgccttctagatgca

SEQ ID NO: 633840 - DNA, 90 bp, Homo sapiens
ctaccttactggacagtcaaatcagcccaatcaattgagcagagactgatgaaaatggatcacactgcaatccacccacatctacttgat

SEQ ID NO: 633841 - DNA, 75 bp, Homo sapiens
gtgggcagccagggtcggtgaaggaagatgatccctatgatcttgaagatgtttctgcacagaaatgagggaaat

SEQ ID NO: 633842 - DNA, 100 bp, Homo sapiens
attttttctcatggatgttcttcttcgagtatttgtagaagggatgctgaaaacgccattcaacagatgggtggccagtggcttggtggaagacaaatca

SEQ ID NO: 633843 - DNA, 72 bp, Homo sapiens
ccagcagggaaacgaactccgatgtgcgcccattgtaaccaggtcatcaggctgtattcatcaccaaagaaa

SEQ ID NO: 633844 - DNA, 100 bp, Homo sapiens
taaagcatgaacaggcatctaatgttcttagtgacattagttcggtggtagatgattggatagaatcatacaagcatgaccgagatatagcacttcttga

SEQ ID NO: 633845 - DNA, 75 bp, Homo sapiens
atatggacagatggacttcaaatgctgtttgtattccagagactaggatgccttccgtgccttccatcaagatct

SEQ ID NO: 633846 - DNA, 101 bp, Homo sapiens
atcgtggcctctcgagagcaagcaatggtacaacagctccatgaacgtgatctgcacctggttgacggaccggatggacttacagcttcatatttatcagt

SEQ ID NO: 633847 - DNA, 129 bp, Homo sapiens
aacttcctcttcttcgggcccctgggattcagcttcttcttcaacatgctcttcgtcacggatgataccatcggggaccttaagaagctgattgcagcccaaactggtacccgttggaacaagattgtc

SEQ ID NO: 633848 - DNA, 100 bp, Homo sapiens
cttggcttctcagctgacagccctgcggcaacagaaatgtgtgctatactggccggaaaagagagggatatatggaaaagttgaggttctggttatcagt

SEQ ID NO: 633849 - DNA, 97 bp, Homo sapiens
aggacttcatgaggaacctgcagctcaggaagacagtgacccgcccattcatgaaagtctcagcatagaaaatacattgtgggcaagcaccattgtt

SEQ ID NO: 633850 - DNA, 100 bp, Homo sapiens
ccaataggacatgatccaggaagagcagtaagggactgagctgctggatgaatttcacccattcatcgaggcacttcttccacatgtccgtgcaattgcc

SEQ ID NO: 633851 - DNA, 75 bp, Homo sapiens
ctgcttatccagatccccgaggaattaacaaatgtggcaattattttggatctatcacctgtcatcataactggc

SEQ ID NO: 633852 - DNA, 98 bp, Homo sapiens
ctcccggggtccgccgtcctagccgctgctgtcttcgtgggaggcgccgtgagttcgccgctggtggctccggattcaaggcctcttccagatgtagc

SEQ ID NO: 633853 - DNA, 100 bp, Homo sapiens
aaatagtaaccctgccaaatacatcagcttgtaggagacagaggtttctgttatcagtggaacctatcttggtttggattacatgagtaagcaaaatgga

SEQ ID NO: 633854 - DNA, 100 bp, Homo sapiens
tcagcccaggtcactggcaaggcaggcattttgatgacactgtggatctcaggcaaggggatcaaaggagcatcaggtaatagcctgcagctggtgtttt

SEQ ID NO: 633855 - DNA, 101 bp, Homo sapiens
ctggggttgggaaatcaagcatcgtgtgtcgatttgtccaggatcactttgaccacaacatcagccctactattggatatttcacattttcaggaacaaaa

SEQ ID NO: 633856 - DNA, 101 bp, Homo sapiens
aaccagaaagtgtggatttgtgtggagcacacattgaatgggccaaggaaaaatcgagcagaaagaatgtctttcaggttcgtgagccacacatctcccca

SEQ ID NO: 633857 - DNA, 100 bp, Homo sapiens
tcacacaagtgttatgacatcgttccaaccagttcaaagcttgttgtctttgatactacattacaaggaaaaggacttggaggccaagttcattattcag

SEQ ID NO: 633858 - DNA, 82 bp, Homo sapiens
caacggatgcttatggagtcataaattttcaagggggttctcattcctacagagctaagaggaagtccacaaatgaagggga

SEQ ID NO: 633859 - DNA, 75 bp, Homo sapiens
caggggacgtggcttttgtgaagcacagcacggtactggagaacacggatgatctgactgcagccatgagcagca

SEQ ID NO: 633860 - DNA, 97 bp, Homo sapiens
aaggggtgacggcgggaaagatcgccagcaacgtgcagaagaagctcacccgcgcgcaggagaagatctattaatgagatgaagcggttggaagaaa

SEQ ID NO: 633861 - DNA, 100 bp, Homo sapiens
ccaagacgcaggggggatatccacagttcgatcaagatgagcgtgaagccgtgcagaagaagaccttcaccaagtgggtcaattcccaccttgcccgtgt

SEQ ID NO: 633862 - DNA, 98 bp, Homo sapiens
ttcagcctccaggctctccagtttttcgtcgagagattcactatggaatcggtaattcatttgcacacctgttagcaagaaacagaagttgaaggact

SEQ ID NO: 633863 - DNA, 107 bp, Homo sapiens
gccgcacggccgacttcgtcttcatgtttctcttcgggggcgtccttatgaccatgtatgtccctgggaagctgcatgatgtggaacacgtgctcatcgatgtggga

SEQ ID NO: 633864 - DNA, 95 bp, Homo sapiens
cctcacctggggtatggagaggaaggaagagatgacgagttccagttattacagagaaatttcatggacaagtactacctggagtttgaagacac

SEQ ID NO: 633865 - DNA, 82 bp, Homo sapiens
ttcgtacccacagtgcttcatgagaggcgagaaccgaagtttggaggtagacgagcaggcgagcggtttgcccgggcgcaga

SEQ ID NO: 633866 - DNA, 127 bp, Homo sapiens
gttgctcatcggtttaaagatttgggagaagaaaatttcaaagccttcactcctggaagcctgcactttccgtagaccttaaaatctcagaggtagggctgccaccaaggtgaagatgggaacgcag

SEQ ID NO: 633867 - DNA, 75 bp, Homo sapiens
gtgcaaaagtttgtgacttgaagtggatacatagcggctgagccagaggccaactgcagaggaactggaacagag

SEQ ID NO: 633868 - DNA, 73 bp, Homo sapiens
cgatcatgtctacaagggctgcttcgacggcaacgtcaccttgacggcaggatgaagatggaaaggaactgtc

SEQ ID NO: 633869 - DNA, 74 bp, Homo sapiens
cgacctcgacgtcttgcctgtgtcccacttgttcgcggcctataggcaaatgttctgaaaaagactctgcatgg

SEQ ID NO: 633870 - DNA, 82 bp, Homo sapiens
atctacaagaggggacaagtacctttatgaaccagtgtatcccaagatacctacctggtttatattctaaatgaattggctg

SEQ ID NO: 633871 - DNA, 100 bp, Homo sapiens
gccttcgagtcgttcttgctcttcgagggcgagaaggaggtggggaagacagggctccagctaccacaggacgggctctgggtatagccgttccagtcag

SEQ ID NO: 633872 - DNA, 99 bp, Homo sapiens
tatattcgaaatcatcatgttgcttccctttctttttatacccctgaaatacctggaaggtctttgagagctggatgcaccattggctcctgtttgaaa

SEQ ID NO: 633873 - DNA, 110 bp, Homo sapiens
cagctgcctacagaaccgtcccaaaatatggcaaagaaacctattctgagccagagtccaaagtgcctcatctgttggatgacagtgcttggaagccctgccaatgaaat

SEQ ID NO: 633874 - DNA, 100 bp, Homo sapiens
atgctgatcgggacccccccgcagaaggttgttggaaaggacaccaatgtcatgttggtggctttggcagcaaaatgtcttactggcctggctgttgggc

SEQ ID NO: 633875 - DNA, 100 bp, Homo sapiens
ctggacgatttgggaattcaaaacttgggacaaactgtcagccttggtggaaaaggattattcatacctgaaggagatatgtgatcaccaagccgaacag

SEQ ID NO: 633876 - DNA, 147 bp, Homo sapiens
gatttgtttgagtacgaagggtgcaaagtgggacgcggcacctacggtcacgtctacaaggcgaggcggaaagatggatctgagtgggacatacttttgaaggatgtgcaatgttcaatcataagtgtgacaaaaactgacaagcag

SEQ ID NO: 633877 - DNA, 74 bp, Homo sapiens
gcctgtgttccaccgttcaccatcgaggtgaagaaaccccaatgatgggaatctgccctgctggccacgctaca

SEQ ID NO: 633878 - DNA, 102 bp, Homo sapiens
aaggaggccgagccgggatctcaggtcctcgggggcggcggccacgccaaggacggtcaagctgtattagtcgacaggaccatttacatttcaggacagata

SEQ ID NO: 633879 - DNA, 100 bp, Homo sapiens
gtggaggggcgcgcagagggcaccgggcgccgggagcaggcggcgcagcaccagtttcgccgtgaggaagatgcggaaaaggctgtgattgacttgaata

SEQ ID NO: 633880 - DNA, 82 bp, Homo sapiens
aaaaatatacagccattctggtgaagcaatgtcctgtgaagtcaacgagtgccgaaaaattgagagtcttgaaaacttgtat

SEQ ID NO: 633881 - DNA, 100 bp, Homo sapiens
cggagctatcggcgccgcggcaagagccagcccgagcgggaagaagttccgcagcaagccgcagctggcgcgctacctgggcggctccatggacctgagc

SEQ ID NO: 633882 - DNA, 100 bp, Homo sapiens
cagcagtagcgccactcataaaaggtgtatttaaaggttgctccggttgctaagaagactatgaacaagtcagagaacctgctgtttgctggttcatcat

SEQ ID NO: 633883 - DNA, 100 bp, Homo sapiens
caagatcacgttctaggaggaggaggactccctcatcttctagacacagttttttgctccactcaagcctgttagaatcaccatggaatacagctccagt

SEQ ID NO: 633884 - DNA, 90 bp, Homo sapiens
ctgaataaagctgttttggaactgtcaggtacctcaaagcaagatctcttaggctttctgctcagaaggatttggaacagaaagaaaagc

SEQ ID NO: 633885 - DNA, 50 bp, Homo sapiens
ctcatgaaccacttggcaaactggcctgctgctgtgggtctgcaggctgc

SEQ ID NO: 633886 - DNA, 100 bp, Homo sapiens
gcactatggatggagcaattgctgctgccttgctgatgtttggtgatgcagctctggtagctgaagaacatctcacagtggacgccagggtctattccta

SEQ ID NO: 633887 - DNA, 135 bp, Homo sapiens
aggatgacttggttacagtcaaaaccccagcgtttgcagaatctgtcacagagggagatgtcaggtgggagaaagatggctgatcactgggaaactgcacctcgtcacatgatgcgtctagatattcgttctttg

SEQ ID NO: 633888 - DNA, 50 bp, Homo sapiens
ggatgagccacctttattagaagttgctctaggtcgtaaccagcctttga

SEQ ID NO: 633889 - DNA, 100 bp, Homo sapiens
tggctacgttccgggctcggtctctgcagcctttgttacttgccccaacgagaaggtcgccaaggagatcgccagctcacctctggacccagccttgcct

SEQ ID NO: 633890 - DNA, 51 bp, Homo sapiens
tgcctggcatctctctctcccgaacgtgaagctcttggagcaatttgtctg

SEQ ID NO: 633891 - DNA, 96 bp, Homo sapiens
ggatattcagttgcacatccccacatcaatgcactgccaatggtgtcatggagaaactccagctgggcccagagattctgcagcgggaaaatccaa

SEQ ID NO: 633892 - DNA, 75 bp, Homo sapiens
atggcgctgaaacggattaataagcacagtgaacactagtctgaatgtataccgaaataaagatgccttaagcca

SEQ ID NO: 633893 - DNA, 100 bp, Homo sapiens
ctgagatttccttcgtccctgacatcatctctgtgcactgataataaccctgcaggtttttgaagaggatgctctcagctgggaagataagctgaacagg

SEQ ID NO: 633894 - DNA, 90 bp, Homo sapiens
aaaacctaatagaagaataaggagggagtctacgcaagcttgcgggttcgagtacacctctaaacttcagcgcatgtttcaagacattgg

SEQ ID NO: 633895 - DNA, 50 bp, Homo sapiens
tgaaactggggaaaagtgcaatgcagggaacctcagaacctgttctggat

SEQ ID NO: 633896 - DNA, 100 bp, Homo sapiens
atatgggaaagatcctccccgaatacctcagcaactggaccatggaaaaagtcagacgagagcctcagcttaagggtatagttaccaagctatacagccg

SEQ ID NO: 633897 - DNA, 100 bp, Homo sapiens
ctgccggccagcgtcctctggccatggacaccccggaaaatgtccttcactgatccaccttgagatcaagccggccatccggaaccagatcatccgcgag

SEQ ID NO: 633898 - DNA, 83 bp, Homo sapiens
gcatccaaatcttgcggcaacgcccccgggacatgcatcgtcccctggactctctcaagctggcagtgatggtgaaagcatag

SEQ ID NO: 633899 - DNA, 100 bp, Homo sapiens
agcacaaccacagcaagagcacctggctgatcctgcaccacaaggtgtacgatttgaccaaatttctggaagagaaaggggccaggggtcaagctttctg

SEQ ID NO: 633900 - DNA, 78 bp, Homo sapiens
cggactgcacaactagcaagacttcaggactctgtctactagtgacgatgtcgaagacagggaaaatgaaaagggtcg

SEQ ID NO: 633901 - DNA, 75 bp, Homo sapiens
ttgatttggagaaatataaacttctgccagatcactctgagaggagtgataccaatgaaaaaaggtcagttgatt

SEQ ID NO: 633902 - DNA, 78 bp, Homo sapiens
cctgcagcagtcagcccaaaggaaggagaagtattcttgcagattaaagggccactggaagatatttataaaatctac

SEQ ID NO: 633903 - DNA, 51 bp, Homo sapiens
caaccacgtgctgaagggaaaagacaccaagacggagtttcaccgtgttag

SEQ ID NO: 633904 - DNA, 80 bp, Homo sapiens
atggacaacctgctgcgggatcccaaatcggaagtgaattcggattgtttgctgtaaaggcatgacttcctggcaccaca

SEQ ID NO: 633905 - DNA, 90 bp, Homo sapiens
ggaaaccggagtgaccagaggagggacacggttgcaagaaagctcaagtagcctatggagaggatgcaaggcttccagctgatgccctca

SEQ ID NO: 633906 - DNA, 111 bp, Homo sapiens
aaatcgaagtagagagcgaaaccatcttcaagttagcagcgtttattttacaggatatgttcaaggaatgagtgatttactttcccctcttttatatgtgatggaaaatga

SEQ ID NO: 633907 - DNA, 100 bp, Homo sapiens
ggcagtcctgcctggcccccagccagttccctgctgaagatggccagatccccttgtctggaaagaccacagcaagattctttcattcgtctcctcctag

SEQ ID NO: 633908 - DNA, 80 bp, Homo sapiens
gtgtctggagcagtggagcccaaagacccctggagacatgacctcctgccccccgaggtctgcagtctcctgaacccagc

SEQ ID NO: 633909 - DNA, 98 bp, Homo sapiens
gcagctggctggcttcagtggaccagcagcggaggaggagaaagagatggacctcccggactcggcctcgagggtcttctgcggccgcatcctgagca

SEQ ID NO: 633910 - DNA, 50 bp, Homo sapiens
gggctgtgtttcgaaatgaagacagcatgaacttacgagaggtgttaaaa

SEQ ID NO: 633911 - DNA, 60 bp, Homo sapiens
cgcgtacccccgtagcggaaaaacgaggaggaggaggaggcccggctggccagcatgccc

SEQ ID NO: 633912 - DNA, 75 bp, Homo sapiens
ttcactgtggtccagaagcagatatcggtgagattgacgtgagtgaattcagatataactcaagcttgttagagg

SEQ ID NO: 633913 - DNA, 75 bp, Homo sapiens
cgccgcttcctggacaacttcgactcctctgagaaggacgggcaggtcacgcatgaagggagcaccgtggagaag

SEQ ID NO: 633914 - DNA, 100 bp, Homo sapiens
tttacgtcaagatcaacttattcttcaaatcatttcactcatggacaaggatggccgggctggtgtggttgcaaatgatgccggtgaccgagttactcca

SEQ ID NO: 633915 - DNA, 100 bp, Homo sapiens
aaggtggatgaggcccaggctgatgggaaggagcacccaggagctgaagtatcgtcgtcctccccgcagtcaggctgcccatcacccaccattccagcag

SEQ ID NO: 633916 - DNA, 75 bp, Homo sapiens
tcctacagaggccagatttgattccaactgtatcacaccagtggatgcaactgaagactcaaaaaagaatgagcc

SEQ ID NO: 633917 - DNA, 100 bp, Homo sapiens
gcttccgcggggcgctgggccgccagcctcggcaccgtcctttcctttctccctcgcgttagcagcctcccgcgacgatgcccctcaacgttagcttcac

SEQ ID NO: 633918 - DNA, 96 bp, Homo sapiens
catggaagcgccgcgatgttcgccccccggctgctggatttccagaagacgaaatacgcgagggagctgcaggaggagagcggtctgacagtggac

SEQ ID NO: 633919 - DNA, 100 bp, Homo sapiens
acagatatggctgctcatgaagaaagagttaatgaagtgaaccagtttgctgccaaactcatacagtctccaaaaaaagttggtgatgacattgccaagg

SEQ ID NO: 633920 - DNA, 75 bp, Homo sapiens
tggaaacgaactgaatactgtccgagaaattataggtgatgaactagtccagactgatggtgcatctgcaatgtt

SEQ ID NO: 633921 - DNA, 100 bp, Homo sapiens
aaggaccacaaatgaagctattctgttgtgtgaaggagcgggatatgacataattcttattgaaaccgttggttttagattcaggaagactgaaagaata

SEQ ID NO: 633922 - DNA, 98 bp, Homo sapiens
gaagaccccggcgctggtgaacggagccctctggcacaaatggaagaagaaagaagggagcaagtagctaaaattaagaagatggagatggagatgga

SEQ ID NO: 633923 - DNA, 74 bp, Homo sapiens
atggagtacataggcctggactcagcctcctgacaaggtgatccgggcgggccccgcaggaattttatcccctc

SEQ ID NO: 633924 - DNA, 100 bp, Homo sapiens
gggtcattgacgattgcattggtaactggtggagaccaaattttgaacctcctcaggcgaggaaacgagacctctttcgttccttctagaaggtctggag

SEQ ID NO: 633925 - DNA, 100 bp, Homo sapiens
actgtgcgagtgtgtggaactgtgaccttcatctttcagatggggaaggtcatggcctccatgttctatgaagtgagcacacggaccagcagctcctttg

SEQ ID NO: 633926 - DNA, 125 bp, Homo sapiens
ccgctgtgtggttgcaacggagataaattcccggaaccgcgattcggcgtgtcagttggtgttggtattaggagatctgcacatcccacaccggtgcaacagtttgccagctaaattcaaaaaac

SEQ ID NO: 633927 - DNA, 73 bp, Homo sapiens
tgggactctacgaggatttgtcatcagctggggacattactgaggtgattgcatactcggaacatcgttaccg

SEQ ID NO: 633928 - DNA, 87 bp, Homo sapiens
cccttccacgcccaggtgggctccctgtacatcgtcctcggggagctccagcatcagcaggatagggatgaggaagaaatgaccaaa

SEQ ID NO: 633929 - DNA, 86 bp, Homo sapiens
gattcgcagtggtcgcttcttctccttggcttcacaggctgctcaagaagccgagatcaatgccagaaaagccaaaaactctgtta

SEQ ID NO: 633930 - DNA, 100 bp, Homo sapiens
atccccaacggggaggccaacgtgaagaactctgcttatgataatgtcaacaaagttcgagtagctatcaagaaaatcagcccctttgagcaccagacct

SEQ ID NO: 633931 - DNA, 75 bp, Homo sapiens
aaaaaaaggagatgcctggcagccccgctctctgcagagatcatttggcatttagctgtgatgttgctaaagaac

SEQ ID NO: 633932 - DNA, 83 bp, Homo sapiens
aagaggtcccagaagacgcctagtacaccacgaagggtcacacaaggacaatataaggcttcaagattgctcagcactatgtg

SEQ ID NO: 633933 - DNA, 109 bp, Homo sapiens
gccaggacaaattgggaagagtatatgcagtaatatgtgacctaaacctgcctagggtagttaaaagacgagtgaatgctctcaaaaacctgcaagttaaatgtgcaca

SEQ ID NO: 633934 - DNA, 100 bp, Homo sapiens
cgctctgcgtattcaggcgttgaagttgggcttttaaggataccggaaaaacacccgtggagccggaggtggcaattcaccgaattcgaatcaccctaac

SEQ ID NO: 633935 - DNA, 100 bp, Homo sapiens
cggccatctttgctcctccctgcaactaactccattcttaattggtacgagcaggtgataataaatatatgcacttgaaagtattcaaaagtcttcccgg

SEQ ID NO: 633936 - DNA, 98 bp, Homo sapiens
ttcagtggtgtttttctcaggtgaaaggagcagtagatgatgatgtagcagaaggtgtttgtagccaatcctaacaagacgcagcccatcctagacat

SEQ ID NO: 633937 - DNA, 100 bp, Homo sapiens
ggaactctttccagcttgtgtctgatttggagcaagaggtggtggtggccttcccccgaagaaatttggtaatcctggggagcgtttgcgtaaaaaaaag

SEQ ID NO: 633938 - DNA, 82 bp, Homo sapiens
gaattactatgttcgggccgtcctgcatctccttaagactttgaccccgacgcaggcttcagtgattgccgcggatcagaag

SEQ ID NO: 633939 - DNA, 100 bp, Homo sapiens
ggggccctctcagcaagaacgggaacaaaactctgaagctccaccatgaggcgaggtggatggaggaagcgagctgaaaatgatggctgggaaacatggg

SEQ ID NO: 633940 - DNA, 49 bp, Homo sapiens
attttcttttttggaactcatgagacagaccatcatgcagacatcagag

SEQ ID NO: 633941 - DNA, 75 bp, Homo sapiens
acaaaatggcgccctacagcctactggtgactcggctgcagataaggatgacattcggctgctgccgtcagcatt

SEQ ID NO: 633942 - DNA, 75 bp, Homo sapiens
ctggaccagcccattgggagttacttcagcgaagccgtgttatgtgccaagaaccttgcaaagaaagacttcttc

SEQ ID NO: 633943 - DNA, 100 bp, Homo sapiens
caggccagggcaggccccgcccgaccaggaggccctgcaggtcctggatgcctcatcccttagtttcaacaccagattgaaatggtttgccatctgcttc

SEQ ID NO: 633944 - DNA, 98 bp, Homo sapiens
ttcgtctcttacgtctgcggaagtgcagctgcctcagttcttagcgcagtgtcggagatgtatgcagtgtgacgccaagtttgactttctcaccagaa

SEQ ID NO: 633945 - DNA, 115 bp, Homo sapiens
cacttcgtattcaaagtgggaaaccgcttccagacggcgcgtttctatcgggacgtcctggggatgaaggtggaagcagggaaaggcctggagatgaggaagctggttctctcgg

SEQ ID NO: 633946 - DNA, 50 bp, Homo sapiens
caaaaatagtgatagctttgataattgtggacatcggatacccaaggaga

SEQ ID NO: 633947 - DNA, 90 bp, Homo sapiens
gagcgagctgagtggttgtgtggtcgcgtctcggaaaccggtagcgcttgcagcatggtgccgacgccaccgccgagcccatgatcctgg

SEQ ID NO: 633948 - DNA, 100 bp, Homo sapiens
actagggaagcacagatgtggaaagtgaatgtgcggaaaatgccttcaaatcagctaaaagatggcggcaaggcagcccaggcaaatgtaagaataggcg

SEQ ID NO: 633949 - DNA, 88 bp, Homo sapiens
cctgctcgcagaattaccgcctcttctttagtccagcccagaatcaaatgcaggttccatctggatatggattgcatcatcaaaacta

SEQ ID NO: 633950 - DNA, 82 bp, Homo sapiens
ggcgctcggcgatggtaggcgtccctggagcggccgccttccagcgacaatcatatcctgattcagcccttcctccacaaag

SEQ ID NO: 633951 - DNA, 100 bp, Homo sapiens
gaaacgtcaggaatttactacacagaaaccaccatcatgggttcgggtcccatagaccccaaagaacttctcaagggcctggacagcttccttaaccgag

SEQ ID NO: 633952 - DNA, 98 bp, Homo sapiens
cttcctggagtagagtcttttttcactgaggcctttctgagaaaagtctacagcattctttctctgcaggttctcttaactacagtgacttcaacagt

SEQ ID NO: 633953 - DNA, 83 bp, Homo sapiens
ctggagcctcagttggaagcagccgatccagcctgcggagcctgtggggcaggacgagcctgtggagtgggagacacctgacc

SEQ ID NO: 633954 - DNA, 83 bp, Homo sapiens
agggtctccagggttctttggggcccgagaactcctttaatgtgaaagtttttgctggcatcacttcttctgggacatcttca

SEQ ID NO: 633955 - DNA, 75 bp, Homo sapiens
gagtatctccagcctttcaaggacaaactagaggagttcttccaaaaagatggaatcagtgtgagtggctttccc

SEQ ID NO: 633956 - DNA, 51 bp, Homo sapiens
ctctgctacagtcctgtacagttcaggtactgggcctaatcgctacgtgcc

SEQ ID NO: 633957 - DNA, 80 bp, Homo sapiens
tacacctctgcatgaagctgctattaaagggaagatcgatgtgtgcattgggtttgaaagtattcttgaagggctgtttg

SEQ ID NO: 633958 - DNA, 98 bp, Homo sapiens
ttgaccttgaacgcaaagtggaatctttgcaagaagagattgcctttttgaagaaactccacgaagaggtcgatgaaacaggtgtagaagttaaggac

SEQ ID NO: 633959 - DNA, 101 bp, Homo sapiens
agcattcctcgtcagcaacatgctcctagcagaagcctatggatctggagattctggacaatcaggaagtccaagccacaatgatcctgccaagaatcctc

SEQ ID NO: 633960 - DNA, 83 bp, Homo sapiens
ggagagcagcaccgaggccagcaagacgctgcccgccatcgaggtaactaggatttctacctcaaccgcgagacctatgcaag

SEQ ID NO: 633961 - DNA, 71 bp, Homo sapiens
aaaccagcgactggaacagctactacgcagacacgcaggaggctagaaaatattaaccctgaagaaaatga

SEQ ID NO: 633962 - DNA, 74 bp, Homo sapiens
tgaatgctgtgtatgataccttacttaatactgttgtaaggatgcgaggcagcgggaggcagtgctggatgacg

SEQ ID NO: 633963 - DNA, 75 bp, Homo sapiens
cgatactgagcttcttcctatttgccatgggtactgataggagtcgagaagacagtccagagctgaacccacccc

SEQ ID NO: 633964 - DNA, 90 bp, Homo sapiens
gcttgtgtgagagcaatcgcgtggatgccaagaccaaattagaggctcagctctattaccaggttttaaacttcgccatgatcgtgtctt

SEQ ID NO: 633965 - DNA, 96 bp, Homo sapiens
tatcattcggaccctccggaaggacattgccaactacaacaaggaggatgacattgccttcccttcttcttggtggtgttcttgagtaagataatc

SEQ ID NO: 633966 - DNA, 100 bp, Homo sapiens
cggcacctgcacacctggatccaggataacggaggctgggctggagcacagtggcatgatctcggctaactgcaacctctgcctgcctcccaggttcaag

SEQ ID NO: 633967 - DNA, 88 bp, Homo sapiens
cagggagggctccgctagcccggggggccctccccgcggggcagatggaaattcgaaatgagtcccatgactatcctcatagagtggc

SEQ ID NO: 633968 - DNA, 107 bp, Homo sapiens
cgcgcccgcctcatttgcgccttgcagcactgctggaccagtatggcatgcagctgtaccagaattatatgcatccatatcaaggtagaagtggctgcagttcacag

SEQ ID NO: 633969 - DNA, 75 bp, Homo sapiens
gctgaagatgctttgtcagctgagaactggttaagagaaagtgggtgaaatgacaatggatgctctgttggctcg

SEQ ID NO: 633970 - DNA, 74 bp, Homo sapiens
ttttactgtcaagacatttcttcggcattctgcaacagatcaccgaagtggccttggagtacaacaactgtcat

SEQ ID NO: 633971 - DNA, 75 bp, Homo sapiens
ggaaggaacttggttccccctccctcagcttccgccccaaaaggttcagcttgttggtttagatgaggagagttc

SEQ ID NO: 633972 - DNA, 90 bp, Homo sapiens
gaaaacaaatgtttttctggtcttcacttttttgaggcaggaagacctctcacttgactatgcctctcagccagcaaatcttcagttccc

SEQ ID NO: 633973 - DNA, 98 bp, Homo sapiens
tacatattaggatataaccctgagacaagatgcctgtgaggagccaccaacatttgaagctatggagctcattggtaaaccaaaaccctactatgaga

SEQ ID NO: 633974 - DNA, 75 bp, Homo sapiens
accagtctcgatctggcccaatctctcctgcaagtatcccaggctctctatgagaacatgctggtggagctgccc

SEQ ID NO: 633975 - DNA, 90 bp, Homo sapiens
ggctctgctgaccttgtgccttggttgttcctcaaagtcattcaagctgtactcgccgaaggagcccccgaacggcaacgcctttccccc

SEQ ID NO: 633976 - DNA, 100 bp, Homo sapiens
gccggcgtgggcaaaggccggacggtggccggagtcatcctggagaaccacctgcgcggccggaagaaagcattgtgaaaacatcggttgtgaagagaaa

SEQ ID NO: 633977 - DNA, 74 bp, Homo sapiens
aacattcaagtgaagcaaaagcctttcatgattatgtacccactgatggtaatgctggcctgctggctgaaccc

SEQ ID NO: 633978 - DNA, 78 bp, Homo sapiens
tcatcatgagcgatgttaccattgtgaaagaaggttgggttcagaagaggggaaaccaagtgctacctcctggagctt

SEQ ID NO: 633979 - DNA, 89 bp, Homo sapiens
aggctgccctgggcacaggcgctgagcccacctgcagccaggcgagaaccctctgcccacagtggagattgccatccggaacacgggcg

SEQ ID NO: 633980 - DNA, 51 bp, Homo sapiens
tgagggcttctgcagatgctaagaaggttcatgcagcatcccaagaacttt

SEQ ID NO: 633981 - DNA, 75 bp, Homo sapiens
ctccaggaccctctggaagcctagaaatgggaatcccaggatttcctggaaaccgaggattaatgggccaaaagg

SEQ ID NO: 633982 - DNA, 75 bp, Homo sapiens
ctggtggctggagcgaccccttgttctttggtggcgctgaatccaggaattgatgtctgatgatcagagagaagc

SEQ ID NO: 633983 - DNA, 89 bp, Homo sapiens
cctgtacctgatgcactggccttatgcctttgacgggctcccttactactggaatgcagacacagaccttgtatcctggctctccccac

SEQ ID NO: 633984 - DNA, 74 bp, Homo sapiens
gcctctgcaggcttgccgaagaagggagggggatatgagactttctactcggaatatcctgagtgttgcgtgga

SEQ ID NO: 633985 - DNA, 98 bp, Homo sapiens
gcaaggagctgagagaccctgtgacctcgggactcaacacctcggtgcctttggattatgagactcgcccagcgcaaagcctcatcattgtcgtggag

SEQ ID NO: 633986 - DNA, 100 bp, Homo sapiens
ctggctctcctggtccagctctcaggacaagaacaaagtgtgctgcaaatgcagccctgaggatttggctactgcatataacaacagggggcaaatcaag

SEQ ID NO: 633987 - DNA, 100 bp, Homo sapiens
agtttatgagactgcatcagaaatgatcttagttctggaatacagcagccgctcttctaaaacattcaaaccaaagaagaatatccctgaaggatctcat

SEQ ID NO: 633988 - DNA, 75 bp, Homo sapiens
cgtgtacgtgcctgtgcctaaagtgaaatgacaatggatgctctgttggctcgattgaaacttctgaatccagat

SEQ ID NO: 633989 - DNA, 95 bp, Homo sapiens
acttcaaccagcctttggtcatcaccaggtacgacgatctaccccattacgggggcatggatggagtaggcatcccctccacgatgtatggggac

SEQ ID NO: 633990 - DNA, 100 bp, Homo sapiens
aaagcaccatgacgtccatccatttcgtggttcacccgctgccgggcaccgaggaccagctcaatgacagggacacagcaggtcaggagagattcaacag

SEQ ID NO: 633991 - DNA, 93 bp, Homo sapiens
caaatttttggatgatgatggatccatttctcctattgaggagtcaacggtgatcagcccatgacctaaacctccagacaaaataaaacggaa

SEQ ID NO: 633992 - DNA, 131 bp, Homo sapiens
ttccaaacttatttgtggtgggatatgccttagattacaatgaatacttcagagatctgaatgttacaatgcccttttaagatatgaaggatttgaaaatgactctggtctggacttctggtgcaatatat

SEQ ID NO: 633993 - DNA, 100 bp, Homo sapiens
ctggctccccatactagtcgccggttcaccatcattaatagcaaacaaatgggaagttattcttgtttctttcgagaggaaaaggaacaaaggggaacat

SEQ ID NO: 633994 - DNA, 83 bp, Homo sapiens
cagcgacgccggcgccgagggacaccgcagtatgaggcagaggttccccctaaaggactcaaaacgtctaatccaatggttaa

SEQ ID NO: 633995 - DNA, 49 bp, Homo sapiens
ggcggcactccagccccagctcgaatcattccgcgcacccacgttttca

SEQ ID NO: 633996 - DNA, 89 bp, Homo sapiens
atagccagtgtccagcttgcagagtccccatcactcctgaaaatccttgcaaagaaattatagagtggagattggagaattggaagagg

SEQ ID NO: 633997 - DNA, 83 bp, Homo sapiens
tcagatctgtggagcagatccgatggagaggctgagctgctccaggacttggggggcacgatacaactgcagctgcaataaac

SEQ ID NO: 633998 - DNA, 51 bp, Homo sapiens
gcgaaaaactatgctgaccagaggactgctgagatgtcctctattcttgaa

SEQ ID NO: 633999 - DNA, 98 bp, Homo sapiens
ccccagcagcgggagaagctgtctctgatccgcaagcatgctcagaccttcattgctctgtgtgccaccgctcgatcaagtcatccgccaaagaagcc

SEQ ID NO: 634000 - DNA, 100 bp, Homo sapiens
caataactcgagaaagccacacacatagggatcggccatcacaacagcagcctcttcgaaatcagagtaaacatcagtctccaaagataactacatccct

SEQ ID NO: 634001 - DNA, 83 bp, Homo sapiens
ccgggaggcccggcggaggatcgacctcaacctggatatcagcccccagcggcccaggcccaataatggcatcagctgctaag

SEQ ID NO: 634002 - DNA, 75 bp, Homo sapiens
ccggggaggtcacctgacgaggaggttttaaaatcaaagatgggaaaatcggagaaaattgcccttccccatggc

SEQ ID NO: 634003 - DNA, 100 bp, Homo sapiens
gatgaatacaaggtcatcagcacaggatatgccttgtcagatctgctacttgaactaccctaactcgaaatacatgctacaggatttaactatcagaatg

SEQ ID NO: 634004 - DNA, 100 bp, Homo sapiens
agagcagagacatcccgatctggggaactgcatcttcctcccgtgaggctggccgagctccacgctgatctgaagatacaggagagggacgaactcgcct

SEQ ID NO: 634005 - DNA, 100 bp, Homo sapiens
atggtgggattgtcgggcggtcagcggacttcgtggtagaatccattggctctgaagtggggtctctggagaggtgagagacttcagaggctgccctttc

SEQ ID NO: 634006 - DNA, 100 bp, Homo sapiens
ccgaagacgaccatgacgagctctagctggatgggcgcagagggaagtgctcagcggctgcactggacgtcctcgccaatgtcttccgggaggaactgct

SEQ ID NO: 634007 - DNA, 75 bp, Homo sapiens
tgacttgagcctgcagtgtgctgtgagagatctaccactagtactatactggcaattgctggagaagattttgca

SEQ ID NO: 634008 - DNA, 101 bp, Homo sapiens
tcagacccgggagcgtccgggacgcggagcccggagctggggcgacgaggcgattgcgggggcctgggctagcactcactgaaaatgaccgagacagccag

SEQ ID NO: 634009 - DNA, 75 bp, Homo sapiens
cgtcgggccgcagccgccggcaatgccgcgaaggaaggtgtttcccattaaacactaccaggacaaaatcaggcc

SEQ ID NO: 634010 - DNA, 100 bp, Homo sapiens
tggacagagccatccctgacacccggcatgaccaatccgtaatgcctcctgcctgcctctttcaagatggaggtgaaacctgtgggagaacctactcaag

SEQ ID NO: 634011 - DNA, 100 bp, Homo sapiens
ggtggagcaggagcggctgggcatcctcctgagactccggggtcagacgcccactccaggtactccaaagattcaggtttactcacgtcatccagcagag

SEQ ID NO: 634012 - DNA, 90 bp, Homo sapiens
gaataaataattccagtgggatgtcattaacagctgaagagaagacgattacagaaaagcaccttgaattatgccctagacccaagcaag

SEQ ID NO: 634013 - DNA, 75 bp, Homo sapiens
acctacccattggtctaaacttgatccaaagacaatgaaggatattaatgcacacgcctgtgttactggtaaacc

SEQ ID NO: 634014 - DNA, 100 bp, Homo sapiens
tttaactcaaatatttggagccaagatgaacatgatgccatcatttaaggaaatccatggaccaaggatggaatacagattgatgctgccctatcaatta

SEQ ID NO: 634015 - DNA, 75 bp, Homo sapiens
gctaccccactcctgggccgtccctgaagacccaagaagcttcgcttccacccaaagcagctgtacttctccgcc

SEQ ID NO: 634016 - DNA, 74 bp, Homo sapiens
cggcacagaggtgcttctgccagaaatcaatgtggactgaacataaatcacctgatggaaggacttactactac

SEQ ID NO: 634017 - DNA, 100 bp, Homo sapiens
tgggaatatgttggccaagaaccttctatttgaaaaaggatcacattacaggggaatttcaaatcctataacaacatccaagatcacatactttaagagg

SEQ ID NO: 634018 - DNA, 110 bp, Homo sapiens
aaccccttcatgcccaaatcccggaaactccagcgtgtctccagccgtgggggatatgagactttctactcggaatatcctgagtgttgcgtggatgtaaaacccatttc

SEQ ID NO: 634019 - DNA, 101 bp, Homo sapiens
gtttctgtacatggattatctggagattacctggggcaattgatgttatcggtcagactataactatcagccgagtagaaggcaggcgacgggcaaatgag

SEQ ID NO: 634020 - DNA, 82 bp, Homo sapiens
gacgacgaagagttggagaagaaacgaaggatttgatgccctggatccctttattcccatcctggtttccaactataaccca

SEQ ID NO: 634021 - DNA, 100 bp, Homo sapiens
cacagtggaccagctcgagtctcaagtggacaatggtatggcccatctcctgtacgcttggagcgacctttggctacgtggctggccttgttatttcacc

SEQ ID NO: 634022 - DNA, 75 bp, Homo sapiens
aagaactttcggcccgacgaccccacccgcaaaaccaaagccctgctgcagagtccattgagaccatgcggaccc

SEQ ID NO: 634023 - DNA, 75 bp, Homo sapiens
agatcctctctgacagacagcagcatcccccaaatacatcaagatgtttgtactggatgaagctgacgaaatgtt

SEQ ID NO: 634024 - DNA, 100 bp, Homo sapiens
cggttcatggctttggccgccgcgccaccatctttcgggctgccgagggtgttcttgacgattaatcaacaggtgaaagaagaacgtccagaaaaaatac

SEQ ID NO: 634025 - DNA, 101 bp, Homo sapiens
ctgatatgcaatgtcacttacaacattaatcagatactgcatttaaggctgctctttggcgtaaattgcaatcgattagggatcgtttctcagaatcaagt

SEQ ID NO: 634026 - DNA, 90 bp, Homo sapiens
gaggaattaagaggaaatgtgctttcactggagtgcattgcagaaggactggacagagcagaatgggctgatatagatccggtgccgcag

SEQ ID NO: 634027 - DNA, 104 bp, Homo sapiens
tagcatcagtgactcacaaatcagcaacacagaatttctgcaagtaattgcttcctgcctgacacagctcacttcaagaagtgcacaatgtcagaacgtggaat

SEQ ID NO: 634028 - DNA, 100 bp, Homo sapiens
gattatagagaaggacaccaagtacagtgtcattgtgatccggattgtgctgcatggaaacaacctgttagtatttggaggtacgggcatcccatttgga

SEQ ID NO: 634029 - DNA, 75 bp, Homo sapiens
ggccacccaggaacccacagataaccaagtcagacttcgtaagagaaagggccgttgctccagggagaactgcaa

SEQ ID NO: 634030 - DNA, 88 bp, Homo sapiens
cgcagctggtgggtgtacacactgctgtttaccttggcgaggcctttcaccaagtccatgactgacaaagtgaagctgacatggagag

SEQ ID NO: 634031 - DNA, 73 bp, Homo sapiens
ttcgcggtggagagcatcgagaagaagcggatccgcaaggtacagcacatgggaaccggaggaaaacatcctg

SEQ ID NO: 634032 - DNA, 82 bp, Homo sapiens
ctaaacggactcatgtactttgtcagatgacgacaacccccccgtgtcttttgtgaagttctccccgaacggcaaatacatc

SEQ ID NO: 634033 - DNA, 49 bp, Homo sapiens
aattgataacaccctgtaacagctgaaaccatatttatttagagtcaga

SEQ ID NO: 634034 - DNA, 100 bp, Homo sapiens
ttttatgatgctgatgaattccatcaaagtggctcatccccaaagcgcttaatagaatgtgtcttgctgaatcagggctctcttatccctgccatcgact

SEQ ID NO: 634035 - DNA, 100 bp, Homo sapiens
accatgaaatgattgaatctggtgttatcaacttaaaagatgccacctctaaggagcaagaagatttgtgaccttggattttgggaggcctatattgttg

SEQ ID NO: 634036 - DNA, 75 bp, Homo sapiens
ccgggcccaggccccggcagcgcctgggacaaggtgcactttacaggtccccgatgaaccaagagaaccctccac

SEQ ID NO: 634037 - DNA, 135 bp, Homo sapiens
ctgaaagtcccagatttttgctcattaacagaaaagaagaggagaatgctaagcagacattcgacttaagagtctcaatgccaacacagatataacttccctggcaaggaaggtggttgaagaatgtaaactcat

SEQ ID NO: 634038 - DNA, 74 bp, Homo sapiens
atgaacagttttgtggaatagatgaccaaatgattaaactgcaaatatctcatgaagctgctgcctgtatcact

SEQ ID NO: 634039 - DNA, 100 bp, Homo sapiens
cagacttcatgggtcatcagttactccagcttttgttgaatttgacacatcacttgaagggtttgggctgcaataggatctgtggctttggacacagcaa

SEQ ID NO: 634040 - DNA, 100 bp, Homo sapiens
gggcgcagtctttaaccatggcgtccctcttcaagaagaaaaccgtggatgcaatacgagaattggagacccaaccagccagacagcttcttttctgctg

SEQ ID NO: 634041 - DNA, 80 bp, Homo sapiens
caatcaaaacttaactcctggatacaggctggacgtaaagaaagaagtgatgcactcaattctgcaatagataaaatgac

SEQ ID NO: 634042 - DNA, 96 bp, Homo sapiens
ggggacttggggccgcagggaggttttgtagtgcatccctgagcatgagcacagaatgaagcggcgtttggatgaccaggagtcaccggtgtatgc

SEQ ID NO: 634043 - DNA, 74 bp, Homo sapiens
ccgtctcctggctgctgcttgcatatcaaagaatggccgagtggattctgaggaccggaggagccgccactgcc

SEQ ID NO: 634044 - DNA, 75 bp, Homo sapiens
gaagaaaatcgcatgctgccccagattgacctgcgttacgaagctcagaatctagaacacttccaggtcaacttc

SEQ ID NO: 634045 - DNA, 74 bp, Homo sapiens
gctgaggctgagtctcagtgttgccctgttcagtctgagattactgacagccctgtcctaggagcacaacgtcc

SEQ ID NO: 634046 - DNA, 83 bp, Homo sapiens
gccactgtggccttctgcgacgcgcagtccacgcaggagatccatgagaaggtgcccgtggttgacacgagctgtgtccccag

SEQ ID NO: 634047 - DNA, 100 bp, Homo sapiens
gagatgaagatgaggaagctgagtcagctacgggcaagcgggcagctgaagatgatgaggttatcagtgagctgaatggaaaaaacattgaagacgtcat

SEQ ID NO: 634048 - DNA, 83 bp, Homo sapiens
gtggaatattggggggctcggctgcagacttggccaaatggacgggactattaaggtcaaaatgcagatcttcgtgaaaaccc

SEQ ID NO: 634049 - DNA, 100 bp, Homo sapiens
acccgattcaggtttgctggatggatttatgacgcggacaaggcaaaatctcagcaagttcggacctctagtacaataaggcgaacctcctctttggata

SEQ ID NO: 634050 - DNA, 100 bp, Homo sapiens
ccgctgcccgacgagcaggacttcatccaggcctacgaggaggtgcgcgagaagtacaaaggaaagaccacagcaagattctttcattcgtctcctccta

SEQ ID NO: 634051 - DNA, 98 bp, Homo sapiens
agccacagaagaaatgtcaagaatatgaaatgagtctggaaaactgggccaaagcagtgaaacgctccatgaattggattttatggaagaccttgggt

SEQ ID NO: 634052 - DNA, 90 bp, Homo sapiens
ggaagtttgtctggattttcctgtagaactgagggcaggagctgacatggacccaaatcctcgggccgccctggagcgccagcagctccg

SEQ ID NO: 634053 - DNA, 75 bp, Homo sapiens
caacattcacaatgtccatatatagaatttgaatcatttgacaaggagataggaacaggtggcacatgtcagtgg

SEQ ID NO: 634054 - DNA, 100 bp, Homo sapiens
cagatcctggaccaggttgagctgcgcgcaggcttaccataacagcttgggggaaagaccatgaaaaagatgcttttgaacatattgtaacacagttttc

SEQ ID NO: 634055 - DNA, 100 bp, Homo sapiens
aggaggaggtgcaatccttcggttacaagcggtttggtccccgtgggcacgctggtgaaggagggaggcagagttgtggccgacctgtcttgcgtgggag

SEQ ID NO: 634056 - DNA, 98 bp, Homo sapiens
cgcagacggccatgtccgaaacctacgatcaccatcccgaggggaaaggacggctttggcttcaccatctgctgcgactctccagttcgagtccaggc

SEQ ID NO: 634057 - DNA, 100 bp, Homo sapiens
gacggctgctgattctggggctggtcaggaaaccaagagcgtttcccaaagtgtattctgcggaactagcacctactgtgttctcaacaccgtgccacct

SEQ ID NO: 634058 - DNA, 94 bp, Homo sapiens
ttgcacttcagtatctcaggcggcaccctgtccccgaggaggggaccatgacacaggcgtgatggtgggcatgggtcagaaggattcctatgtg

SEQ ID NO: 634059 - DNA, 100 bp, Homo sapiens
cggccgtgacatccttcacccctgcccccatggcatgcatgatccattagggaggaccgtctgcacaaagtttgcagaaaaaacttcagcatgtgccagg

SEQ ID NO: 634060 - DNA, 83 bp, Homo sapiens
tgagctcgtcaagcagctgtcggccaagctcatcgccaacgacaatgcagatcttcgtgaagactctgactggtaagaccatc

SEQ ID NO: 634061 - DNA, 100 bp, Homo sapiens
ccgagaacccgctggtttattgcgacgggcacggctgcagcgtcgcggtgcatcaaggtaatgattgatgaatccctttcatccgatgaccctgattcat

SEQ ID NO: 634062 - DNA, 82 bp, Homo sapiens
tggacgtcccaccgggcaggatgaaggcagagcgtgtggcatctccacctcaaggggaaaaagaccttgatgaagttctgca

SEQ ID NO: 634063 - DNA, 140 bp, Homo sapiens
ctcttccgctcggatcccttggcgtacacggtgtgcaaggggagtcgtggcgtcgtctgcgaccgctgccttctcggcaaacggggattcagcgtccgatcctttggaacagggactcacgtgaagcttccaggaccagc

SEQ ID NO: 634064 - DNA, 71 bp, Homo sapiens
gccagctctccagagagaaaagggtcaaaaattgcatgttcaaacaaaaggaggcaaagtgatctgtctgg

SEQ ID NO: 634065 - DNA, 83 bp, Homo sapiens
aggagaacatcctggaccccaggctgctgatcgccttccagaacagatggcagaaacggtggacacaagcgaaatggtcaacg

SEQ ID NO: 634066 - DNA, 75 bp, Homo sapiens
cctgtggagacacggccagatctgccctccagctatgaaaggagaaaagggaattggtggagcagtcacagctac

SEQ ID NO: 634067 - DNA, 74 bp, Homo sapiens
ttagaaacttttgccagcacattcttacgacagggagcccagaaggaattgaatgatctggcacgggaccctcc

SEQ ID NO: 634068 - DNA, 99 bp, Homo sapiens
ttttgtccctttgcctcatcccaggttgccttggaaaatgccaacgccgtgtctgaaggccgagacgcatccagagctttcgtgaccggggactgttct

SEQ ID NO: 634069 - DNA, 51 bp, Homo sapiens
ccaaacattatcactctaaaggatactcacagatgaatgcttctcacccgg

SEQ ID NO: 634070 - DNA, 75 bp, Homo sapiens
cagtggatatagcagtgtgccagatgggaaggacaccgtggtttctcatgccaatactggtggaaaaatttccat

SEQ ID NO: 634071 - DNA, 75 bp, Homo sapiens
ccgagggggagccccgcgcgcggcgtcgattgggctaatggatactacagacaacagagaaaacttgttgaagag

SEQ ID NO: 634072 - DNA, 105 bp, Homo sapiens
aagggaaggaaatcatgtcaagcgaagccttgaaaaagctgccctgagacggtgtcccgccgaaaggtaagaatgattgatgttggctgatattggagtgctcat

SEQ ID NO: 634073 - DNA, 75 bp, Homo sapiens
caattgccacacggtggggcccaacgaggcgctggtggtttcagcagcaaagtggggcaccaaggccctgtgcta

SEQ ID NO: 634074 - DNA, 100 bp, Homo sapiens
ctgaggaaagcagtcggaccctccagggcacctggagatcaggcctggactcaggccctcccgtcggtcattaaggtgaccctggcaaagatgagagtgc

SEQ ID NO: 634075 - DNA, 100 bp, Homo sapiens
cggaggaggagtaggtgcgggtgaagatggcggcagccgaggccgcgaactgcatcatggaggtgaacttcacggtagaccagatccgcgccatcatgga

SEQ ID NO: 634076 - DNA, 100 bp, Homo sapiens
cgccacggaagaaaagcactattatcatatcagggatctccaagattggcccccgccgcatccacacagtccgtgtgcggggaggtaacaagaaataccg

SEQ ID NO: 634077 - DNA, 100 bp, Homo sapiens
cctgctgcacgagtcattgtttggatctgttgctgatgatcagaaacttatgatgttggatggcaagcatgtggtgtttggcaaagtgaaagaaggcatg

SEQ ID NO: 634078 - DNA, 80 bp, Homo sapiens
cggagagcggcctgcgggcgatcgggccgagccagtggaatcctgaagggcttcgacccactcctcaaccttgtgctgga

SEQ ID NO: 634079 - DNA, 75 bp, Homo sapiens
gctcttctgcctcttgatctccgccaccgtcttcaggccaggtttcagaaccttctgtggtccagaaagacattt

SEQ ID NO: 634080 - DNA, 75 bp, Homo sapiens
tgggaaccaaactttttcctgccccgggacagacacgaagcatgagtgggaaaagcatgggacctgcgccgccca

SEQ ID NO: 634081 - DNA, 112 bp, Homo sapiens
ccgaggcagcatggagaggggccgtggcccctgcagcggaaccggacccagtccctgagccgcccctacacccacagaaatggtggagtcaatgaagaaagtagcagggatg

SEQ ID NO: 634082 - DNA, 75 bp, Homo sapiens
tgtcaccaccgtcatcgacaatttctacatctgcccgaccaacaagaggaaggaattgaaagatgttggccatcg

SEQ ID NO: 634083 - DNA, 90 bp, Homo sapiens
cgatttctgacatcattgcaatcaagtcacctgacacatttgtgagaactatttatgcagccctctttgattccatgcacagcagccagg

SEQ ID NO: 634084 - DNA, 75 bp, Homo sapiens
cggaacccaagatggctgcgctgttgctgagctatggcattgctggttctaccaacgtgacaggtgatcaagtta

SEQ ID NO: 634085 - DNA, 75 bp, Homo sapiens
ttttactgaaagtgaaagattcccagactccaactcccaggttctcaccctgctcctgctcagcgtcccacaggc

SEQ ID NO: 634086 - DNA, 83 bp, Homo sapiens
gcgcacgtgggccgaggccgcgcgcctgctggagaagaagcaggcgctccctccattccagccacagatcacagacgactacg

SEQ ID NO: 634087 - DNA, 75 bp, Homo sapiens
gagcagccgcagtagatctcgaagtatctcaaaaagtcgctcccgcttcagctttagctgcagctgcctctgttc

SEQ ID NO: 634088 - DNA, 74 bp, Homo sapiens
ggacaaaacccaccaagatccagattgaagctattcctttggccttacaagcattccagtgtatcagagtatca

SEQ ID NO: 634089 - DNA, 100 bp, Homo sapiens
aagaaaaaaaccacaaatgtttttctgttttgcctgaatacatgatttaaacaagagatttccacagaagatgccttcaattaagttgcagagttctgat

SEQ ID NO: 634090 - DNA, 82 bp, Homo sapiens
agttcatcatggagaccaagctgaagccactgagaaaaggggatatgagactttctactcggaatatcctgagtgttgcgtg

SEQ ID NO: 634091 - DNA, 83 bp, Homo sapiens
tgtcgatctacgttccaattggggccgtaccatggcggagaagactcaaaagagcacatggattaattgatgtatgttgagtt

SEQ ID NO: 634092 - DNA, 51 bp, Homo sapiens
acaccattcttcgccaggccaggaatgaagacagaatctatgattcaaaaa

SEQ ID NO: 634093 - DNA, 74 bp, Homo sapiens
caagtttaatcagacctgctcacacttcagaatagagaaggctttggaagtgataaagcagttaaaagagaaaa

SEQ ID NO: 634094 - DNA, 140 bp, Homo sapiens
gccgctgccaccatccgcgaggcaggagagaggaggaggagtgcggcgcggcggccccgggaccaaggaggggccagcagcctcccccgatgggtcgtcagcaacgagggtgcctcaggatgtgacgcagggccctgggg

SEQ ID NO: 634095 - DNA, 98 bp, Homo sapiens
cggagccagcggctgaggaggggccccagcagcccccgaaggccctatcaggacatggagtatgaaagacggttgcccccaagtttcctggcagtgtg

SEQ ID NO: 634096 - DNA, 92 bp, Homo sapiens
cctgcacaactttgtttctcccaactggctctcacgtacttattcttcccacgtttcctggattacaggaaacgtgggaagaataagtacgt

SEQ ID NO: 634097 - DNA, 101 bp, Homo sapiens
gctcgggcaaaagttgtgcattggcccgatcaagcctgacttctagccaaggataacctctgagaatgtggctgagcggtttggcatttcacgggagaagc

SEQ ID NO: 634098 - DNA, 51 bp, Homo sapiens
tggaggaggagccgccgccgccagtgtcttgggacaaggtgcgcattcctg

SEQ ID NO: 634099 - DNA, 83 bp, Homo sapiens
agatgcagtacgccacggggccgctgctcaagttccagatttgttgtcgagatgtccacagaaggaggatttggtggtactag

SEQ ID NO: 634100 - DNA, 112 bp, Homo sapiens
cgaggatggtcgggcctggcgttgggcgtgcggcgggctgtcttgcagcttccagggcatgactacggggccccccaggaggcgactctcggggccaacaaggtgatcgaag

SEQ ID NO: 634101 - DNA, 97 bp, Homo sapiens
ctcagttggaagcagccgatccagcctgcggagcctgtggggcagaggctgggaggcggcagaatgcagccagaggagggcacaggctggctgctgg

SEQ ID NO: 634102 - DNA, 99 bp, Homo sapiens
gggattttcagctcgatacaatttcacacctggtgaggaattttaaattggaacaagagcaagaaaaaaacaaaatcttgtcagaagcactggagacgc

SEQ ID NO: 634103 - DNA, 115 bp, Homo sapiens
tgccctacggcttctccgccatgcaaggctggcgcgtctccatggaggtttccaaggtgctattgggagctcatgcactcttggccaacgggtctgtgatgtcacgggtagggac

SEQ ID NO: 634104 - DNA, 107 bp, Homo sapiens
cagcggcttccgagaaaacggctcgagcagcgacaacccgtcctctcccgagtttttcatgtcaaaatgcagatcttcgtgaaaacccttaccggcaagaccatcac

SEQ ID NO: 634105 - DNA, 80 bp, Homo sapiens
gcgtagagtcgctggagcgggcggagctgtgcgagagcctcctcacttggatctctggaaacatggctacagaacatgtt

SEQ ID NO: 634106 - DNA, 138 bp, Homo sapiens
ccggactatttttgtatgcgatgaagatgctactttagaattaagagttaaaactgtgaaatactttaaaggatgtcaaacttggcacaatttgactctgatttttaccaatctaattttactattgataaccaggag

SEQ ID NO: 634107 - DNA, 98 bp, Homo sapiens
cgcaggcggcaggaatcctcctccggcgatagttatagctgaggtggtaccagtttaagaagtgagaacttcttcactgactgaaatttgcatatcaa

SEQ ID NO: 634108 - DNA, 86 bp, Homo sapiens
gaaccaattgttttacagtctgttccgcatgatcgttataataaggtgacaaccaaagccaagcaactgaaggattcagtgacctg

SEQ ID NO: 634109 - DNA, 83 bp, Homo sapiens
cgcggcggcagcagcagtgagaggaagttctactacatcaccctgctacgagaccccgtgtcccgctacctgagcgagtggcg

SEQ ID NO: 634110 - DNA, 90 bp, Homo sapiens
cagatgtggaaagtgaatgtgcggaaaatgccttcaaatcaggtgggtttggaggatttgggacaacatctacaactgcaggttctgcat

SEQ ID NO: 634111 - DNA, 82 bp, Homo sapiens
tttagagctgcggaacaggacgccctctgatggaggcagtgtggaagaagggaaaatgaggaggagagggtgccttggagcc

SEQ ID NO: 634112 - DNA, 100 bp, Homo sapiens
tcatgagcttttgattaacaccttaataaccagcggagctgacacagccaagagtctgcactatggaaacaacctgtcaatccagctcaaggcacacata

SEQ ID NO: 634113 - DNA, 75 bp, Homo sapiens
agacgccatgatccccaccttcacggctctgctctgcctcgatgtggaaactaaagcccagagagaaagtctgac

SEQ ID NO: 634114 - DNA, 75 bp, Homo sapiens
gttcctgggaaggtggagccaccagcctctccttgagcctccattatggcatgctgaatttaccaaagaagaatt

SEQ ID NO: 634115 - DNA, 74 bp, Homo sapiens
aaaggagaaagaattgcttatacatgaaagaggggcatcagtgttctaagaacggaagcatctgggctggatgg

SEQ ID NO: 634116 - DNA, 100 bp, Homo sapiens
gcacataccagtatattactgagttttttagtgagggctggaaagccatatgatttacagcacttgctagaagtaaattctttaaagcacctgacaagac

SEQ ID NO: 634117 - DNA, 74 bp, Homo sapiens
tcgaggtaagaaacggttgtggatcttgaagctttggaaaggtaaaagacctcatgagtgtggaatctgtaaaa

SEQ ID NO: 634118 - DNA, 100 bp, Homo sapiens
cgagccagccgggaggacacttactacagctgctcagaagcaccactggaaactcagcaggaaccgaatattgtatctgacgcatcctgtaatactgaag

SEQ ID NO: 634119 - DNA, 75 bp, Homo sapiens
agagccccttgcagaagacgccgtacgagctggtgctcaagaccgaatcggctgggcttttggcctaggattaga

SEQ ID NO: 634120 - DNA, 87 bp, Homo sapiens
aaacggattgccagagaattggcagaaggaaagcttagatatgccaacaacagcaattacaaaaatgatgtcatgatcagaaaagag

SEQ ID NO: 634121 - DNA, 82 bp, Homo sapiens
gggcaagatcctgtgcactgactgcggaggaattttgttgtcagagaataaaaggaggttgtccataattgactttaagcag

SEQ ID NO: 634122 - DNA, 75 bp, Homo sapiens
cccgacctggcggggccaggacgctggttcatacactccaaggctgttgaagctcaaatccgaagttttggacag

SEQ ID NO: 634123 - DNA, 74 bp, Homo sapiens
catctctccaccatcgactacgtggaggacggtatgggttcgaaggggtcatcctctccatctatggcttagac

SEQ ID NO: 634124 - DNA, 82 bp, Homo sapiens
aacaaggtcgtcggctggcggagcggcttccctgaaggatggctgccatattgggagacaccatcatggtggctaaaggcct

SEQ ID NO: 634125 - DNA, 98 bp, Homo sapiens
ttttggcattgacatttaattttagggtcctttatatagaagggagagtagtacataccgagcatcaaatattaaggcacccggagaacagacagtac

SEQ ID NO: 634126 - DNA, 87 bp, Homo sapiens
cagtggtcgcttcttctccttgggctttgggaatctccccatctgcatggctaaaacacacttgtctttgtctcacaacccagagca

SEQ ID NO: 634127 - DNA, 122 bp, Homo sapiens
ggagggggcggccgggtccgcatcgagaagatgagctcagaggtggtggattcgaatccctacagaagcatcagatggtgaaggagaaggagacacagaagtgatgcagcaggagacagttc

SEQ ID NO: 634128 - DNA, 74 bp, Homo sapiens
gaaatccgagccactgacctgcctgagaggttccagggcaattgaaggaacagactaaaaatcgtgtcctggaa

SEQ ID NO: 634129 - DNA, 96 bp, Homo sapiens
ttccaaagcagtttgtgcctgctgtagaaaaggatatgctgcaggctgctagtcattatcgccaaaatagaaactctttgtatagaagagaagaat

SEQ ID NO: 634130 - DNA, 100 bp, Homo sapiens
ctctgttgattcttagaactggggttcttagaagtggtgatgcaagaagtttctaggaaaggccggacaccaggttaaacccatccagagtaatggctgc

SEQ ID NO: 634131 - DNA, 101 bp, Homo sapiens
tgaaattaattttttcccaggagagagatgtcttatcaggggaagaaaaatattccacgcatcacgggtatgctggttttcatcatcagtggccttgtcat

SEQ ID NO: 634132 - DNA, 100 bp, Homo sapiens
ggggcgaggagctttgcagttgtgtgcgagtgtgtacagggttctccaaaaaatgtggaatcctttgcatctatgctgagacattctcctcttacacaga

SEQ ID NO: 634133 - DNA, 83 bp, Homo sapiens
aactgaaacatgaaaacatcgtggccctgtacgacttccagttctgggaagtcatcagtgatgagcatggcatcgaccccagc

SEQ ID NO: 634134 - DNA, 90 bp, Homo sapiens
ggagaccggcacccagacaggtggcgaaggcagaggacccgagcgggaagaagttccgcagcaagccgcagctggcgcgctacctgggcg

SEQ ID NO: 634135 - DNA, 99 bp, Homo sapiens
gcggagactgggcggccggccgacccttcctgtcgctgacggcgactgcgggaggccagaccccatatcatgtgaacctcctcctggctggctatgatg

SEQ ID NO: 634136 - DNA, 52 bp, Homo sapiens
agagagagacagctcacgttccggatctgttacctaaagcaataaaaaatgg

SEQ ID NO: 634137 - DNA, 75 bp, Homo sapiens
ctggtgaagcactggtaccaccaggtggacccaagtggagagattgtggaactggcgaaaggtgcatgtccctgg

SEQ ID NO: 634138 - DNA, 101 bp, Homo sapiens
tttgcaattataaaaatgccagcagttctgacattttgccttctgattctaactgcaaaggcttcttcagctccaagagcaaatgcgagccctttataaag

SEQ ID NO: 634139 - DNA, 95 bp, Homo sapiens
tgcaggccatgggctggcgggaaggctctggcttgggacgaaagtgtcaaggcattacggctcccattgagggttggggtctgctaggtccccgg

SEQ ID NO: 634140 - DNA, 82 bp, Homo sapiens
atcagaattccgagaaggagtgcggaagattgcccgagagcaaaaagaactgggcacctccgggctgtgaaaagttagggaa

SEQ ID NO: 634141 - DNA, 100 bp, Homo sapiens
ggatgatttatctggtgacagaatatgctagtggaggggaaatatttgtcaagtctctatttatgaggtggacaagcaagattgtcgcaaattttgcact

SEQ ID NO: 634142 - DNA, 90 bp, Homo sapiens
aagatctcgtgtgtaacccagtccacagatgaggacggggacttggttgccttttccagtgacgaggaattgacaatggccatgtcctac

SEQ ID NO: 634143 - DNA, 75 bp, Homo sapiens
cagcagccaggagtcatgagcgacagcggcgagcagaactacggcgagcggatgtgtatatctcatgattgatat

SEQ ID NO: 634144 - DNA, 75 bp, Homo sapiens
gaatcatccacgcacctgcagctctgctgagagagtgcaagccgtgggttacttacacgccaagtcaatcatcca

SEQ ID NO: 634145 - DNA, 75 bp, Homo sapiens
tgttttgccggaggagcccctcaggccgataaggaagcctgtgtgggtaccaacaatcaaagctacatctgtgac

SEQ ID NO: 634146 - DNA, 83 bp, Homo sapiens
attcaattagaacaaatggtgtgcttctatttataccaaggaacatgtttgacaagctgaaccgtgatgcctttcatataatt

SEQ ID NO: 634147 - DNA, 88 bp, Homo sapiens
cctgaatgggggcggcgtgcccgccggggggctagtggccacgctgcagagcctcgatgacgatttaattcaagatttcttgtggatg

SEQ ID NO: 634148 - DNA, 100 bp, Homo sapiens
agatacttacaagctgctttttgcaattataaaaatgccagcagttctgacattttgccttctgattctaactgcaaagtcttccccagctcctcaggag

SEQ ID NO: 634149 - DNA, 50 bp, Homo sapiens
aggagaggctgcttcttgtagagacactggctctgagaccccgactgccc

SEQ ID NO: 634150 - DNA, 51 bp, Homo sapiens
cccatgaccagcatgcggtgctaggctttcccctttgctcggctctccttc

SEQ ID NO: 634151 - DNA, 51 bp, Homo sapiens
ctcgcgccggctgctctttccgggcacctgaatggacagaagaggacctca

SEQ ID NO: 634152 - DNA, 50 bp, Homo sapiens
gagcttctctccagagtagaaagaatagttctgtcccaagaagaactctg

SEQ ID NO: 634153 - DNA, 75 bp, Homo sapiens
ctctcaagtagctgggactacagatatttcagttgaaggaagaaatagctcttctcctaagatggaatctgtggt

SEQ ID NO: 634154 - DNA, 100 bp, Homo sapiens
agaatacattttatgaaacattaccagtggcaattaatggaaatggacccaccaaggtatttaaaccatgtcagagctgcctcaccacaggaccttgctg

SEQ ID NO: 634155 - DNA, 75 bp, Homo sapiens
gtttcagcctccagtactggggatttgccaaaagcgtttggcaacatattgactgcatggggattgataggcagc

SEQ ID NO: 634156 - DNA, 75 bp, Homo sapiens
gattctctacgggatctcatagcagattcaaatccaatgggtgaggccgagttcaaccgcatcatgagcctggtc

SEQ ID NO: 634157 - DNA, 74 bp, Homo sapiens
atgatcacgcagctggctggcttcagtggaccaaatgaatctgagctttttggacgtacaattcgtgtcaattt

SEQ ID NO: 634158 - DNA, 83 bp, Homo sapiens
acatggtcatgagctttgtgaacctgggttaacacagaaatctgcctcctgggccatgccgcttctaaggcctgtttcttctc

SEQ ID NO: 634159 - DNA, 75 bp, Homo sapiens
agaaattctggaacacctatatgagtgaagacatttccacctggacacctgaccatgtgcctgccctgagcagcg

SEQ ID NO: 634160 - DNA, 96 bp, Homo sapiens
gttgatggccgccatcctcatgacatcatcgatgacatcaacagtggtgctgtggaatgcccagccggagccccagactctggtaaatgctctgct

SEQ ID NO: 634161 - DNA, 75 bp, Homo sapiens
tgaaactccatgatgaaaccctaacgtatctcaatcaaggtggcagatatctacctagcatctcagtacacatcc

SEQ ID NO: 634162 - DNA, 75 bp, Homo sapiens
cgagccccgcccggcccgggccatgtcggtgggcgagctctacagccagatcccgactgggcctcctacactctg

SEQ ID NO: 634163 - DNA, 100 bp, Homo sapiens
ctataagaaatcaataagaaacctgtttaaaaacattccttttgtccttctgttgatcacttatgcttagcagtgtctgcaaaaacgaatcttttcctac

SEQ ID NO: 634164 - DNA, 80 bp, Homo sapiens
atggggtgaagcgttcagcctccccagacgacgatgtgtcttcaaaaacaaacatatttaaaagattttacttctcatct

SEQ ID NO: 634165 - DNA, 50 bp, Homo sapiens
gaagacttgtaacctggagaagagtggagttggatcacaggattgatttt

SEQ ID NO: 634166 - DNA, 78 bp, Homo sapiens
cagtttcgggaggagttcaaccttcctgcctgacacagctcacttcaagaagtgcacaatgtcagaacgtggaattaa

SEQ ID NO: 634167 - DNA, 98 bp, Homo sapiens
ccttgtaagacagccaagaaaacaggaagagggttggaggcaaagttccgaatagggatgaggcatacgtggatttccagatgtgacttgcactcaga

SEQ ID NO: 634168 - DNA, 75 bp, Homo sapiens
tagcgtgagtgatcactctcaatcccgggttcttgggtgtctctggggagtccctgggccagaccttcctccaga

SEQ ID NO: 634169 - DNA, 88 bp, Homo sapiens
ttcactccatttcaggctgaagagatagatacagatctggatttggactcaacgatgactctgaataatgtcaccatgcgccagggca

SEQ ID NO: 634170 - DNA, 85 bp, Homo sapiens
ggcgagcgcgagcggcgcgagaaagacttgatcatcttccctgacgactgtgagttcaagcgggtgccgcagtgccccagcggga

SEQ ID NO: 634171 - DNA, 83 bp, Homo sapiens
atccttcagaaaaagcatccccgaggaggaagacgaatcgttaaacatctgaaagggtcaggaggagaacatttgcctgcact

SEQ ID NO: 634172 - DNA, 82 bp, Homo sapiens
cgcgctactctctctttctggcctggaggctatccagctgaaaaatgtactctgacctgaatcctgaattttccttgatggt

SEQ ID NO: 634173 - DNA, 98 bp, Homo sapiens
agtgcctgtgatggcatctttcatctaacacagatcatgatgcagccgtccttttggatttctttttaataatgtgtgacccttcacctttgatcccc

SEQ ID NO: 634174 - DNA, 75 bp, Homo sapiens
gaactgcttttgtggcatcccataagttttggtgctggagaatctggtaaaagcaccattgtgaagcagatgagg

SEQ ID NO: 634175 - DNA, 90 bp, Homo sapiens
ctgcgcggctgcggggcttccctgcggctggagggagtgcatccgccccaacccttttccccctcgtctcctgtgagaattccccgtcgg

SEQ ID NO: 634176 - DNA, 82 bp, Homo sapiens
cgagcgggcggcttcctggcctgggcgctccggtggcggcggaggttaacacagaaatctgcctcctgggccatgccgcttc

SEQ ID NO: 634177 - DNA, 100 bp, Homo sapiens
cgacagtcagccgcatcttcttttgcgtcgccagggccgagaactactggtggcgtggccagaacacacggacgctgtgtgtggggcccttccctcgcaa

SEQ ID NO: 634178 - DNA, 74 bp, Homo sapiens
caacaacatgaagaatgtatttgcagaacctcagggtaagggactgttctgaagaacctttccatttagtgatc

SEQ ID NO: 634179 - DNA, 100 bp, Homo sapiens
gggcaggcagcgcgatccctctaccagctggtgactgggtcgctgtccccagataaatttgcgcctcattttggtaagcggaaaaacaaaagagttcctg

SEQ ID NO: 634180 - DNA, 50 bp, Homo sapiens
ccgctcccgggggccgtgacgggttacgactcactgattaaaaagaggga

SEQ ID NO: 634181 - DNA, 98 bp, Homo sapiens
gccacgctgcgccccacggccccgaggactcagccccacagttttctaaactgtaccccaatgcttcccaacacatgcattgaatgccccagaggagc

SEQ ID NO: 634182 - DNA, 74 bp, Homo sapiens
cgaagatccggactctgggtgttttgctaccgtgaccgtttagaaatcatgttgttgatgtcagtgttgcggtc

SEQ ID NO: 634183 - DNA, 82 bp, Homo sapiens
tatgccaaggaaaaactggagagcttcatcaaaaatagtgatagctttgataaggtcaaagaattgactgtagatccaactg

SEQ ID NO: 634184 - DNA, 100 bp, Homo sapiens
cctaagtggattgcagttgggagactttctcattaagactaaatgtgttaaatgggcttgccaacaatatggatgatttgaagataaacaccgatattac

SEQ ID NO: 634185 - DNA, 99 bp, Homo sapiens
aaatggaagcccagtcctctcctgttcttatttgctttatatatcatgtgtgttcctcactcagttgaccacgttgttcctgagcctgggacaagcctg

SEQ ID NO: 634186 - DNA, 100 bp, Homo sapiens
agaagaattcagaagaaacaaaagtgccaccgaagagctctgagaaagtggccgaaagaaaagaaactgaattttttagctctttacccctgaagatgaa

SEQ ID NO: 634187 - DNA, 75 bp, Homo sapiens
ccatggacgctaggaaatgccaaccatgacgggggcagtacccaaaggaaacgctacgaaagaatacatggagag

SEQ ID NO: 634188 - DNA, 82 bp, Homo sapiens
tggagcctcagttggaagcagccgatccagcctgcggagcctgtggggcaggtgccgtgagcgatgtggagatgcaggaaca

SEQ ID NO: 634189 - DNA, 97 bp, Homo sapiens
atcgacgtgcccgcaggcactgccaccctcggccgccgcctggtaaacatcaccatcatcaaggagcaaggtgttgagccagtgcaggttcaggaaa

SEQ ID NO: 634190 - DNA, 97 bp, Homo sapiens
ccacatcaacgtgtatccacacaagcaggactccaaggctctaaggatggaagagtcataattggaaagagcctgggtacctgaatcactgtatgga

SEQ ID NO: 634191 - DNA, 100 bp, Homo sapiens
agcggcggaggcgacggtggcggctctcggagccggcgcgaatccggcccccgcagcgggacccgggtgtcatggagaaactccagctgggcccagagat

SEQ ID NO: 634192 - DNA, 100 bp, Homo sapiens
atttgcatttcgttagctttctggattatatcaatgactgcaagcacctattatggaagcccatgaaacctttaatgagtggtttaagcatatgaattca

SEQ ID NO: 634193 - DNA, 76 bp, Homo sapiens
cctcatgcaagcgagggacctgggactgctcacagccaggttatatcttaagtgtggtgctgctaacattgcccag

SEQ ID NO: 634194 - DNA, 100 bp, Homo sapiens
ggagctgctgcatgaactctacaatttcctggccatccaagctggcaagaatgtgcggcggtccatccagggcgtggggcacatgatgtccaccatggtg

SEQ ID NO: 634195 - DNA, 98 bp, Homo sapiens
caagaagctgtccgggacagactcggagcaggagattatgccgacaagcccctggagaagcctctaaagctagtcctgaaggtcggaggaagtgaagt

SEQ ID NO: 634196 - DNA, 100 bp, Homo sapiens
tatacaaggagtatgctgaagatgacaacatctatcaacagaagatcaagctttggagtttaacccttctgccaatccagaggcaagcacaatattccag

SEQ ID NO: 634197 - DNA, 78 bp, Homo sapiens
cccgacgcaaaccaaggatctggggatcttcgcactatcccaaggtgagcatgggtttatgcgtcttaggcattattg

SEQ ID NO: 634198 - DNA, 98 bp, Homo sapiens
gtcatcctgctgctgaagatctggaagacgcgctcctgcgccgggagtaccctgacttctaccggaagctctacggcctcttggacccctctgtcttt

SEQ ID NO: 634199 - DNA, 126 bp, Homo sapiens
ggttgcggaagggccacgcgtcccccagtaggagaatgactccgattcgtgaccctcagcgccggtgcatgtcgatgtggttctggaatggagccgagatcaataccatgttttgtttgattccta

SEQ ID NO: 634200 - DNA, 90 bp, Homo sapiens
cagagatctcccacctcagtgtgggttccatcttacttgtcacgcaacagatcccctaatttgtggctgaaagatgttctcaaggaagaa

SEQ ID NO: 634201 - DNA, 98 bp, Homo sapiens
cggggcaagagcccgcaggctaccttccccgggcaggggcgctcaacccaaccggctccagggcactggaatggcggcgctagatagtaaggcatcag

SEQ ID NO: 634202 - DNA, 101 bp, Homo sapiens
atatcaagtcgtcagtgttggaaccattctgatcgactaataaggtggtcgctctggccgaaggcagagagtggtctctggagtcatcacctgcccagaac

SEQ ID NO: 634203 - DNA, 50 bp, Homo sapiens
acaaattcatcccagaaatctaagagggggaaactcggccgatatcctcc

SEQ ID NO: 634204 - DNA, 83 bp, Homo sapiens
ctgaagcaaacaaaaacgccagcattttgttagaggagttagacttggaaaaggaatttatctcactaatatcttgaaaacag

SEQ ID NO: 634205 - DNA, 80 bp, Homo sapiens
ctgtgccatcatcgtggtagttattgtaagaggaatttggctacaatgcagagacacagaaactactatgcaagaatggg

SEQ ID NO: 634206 - DNA, 80 bp, Homo sapiens
gttcatcgagcagaggctgctcatgttctccttcgtcaacgaccgacctcctgccccccgaggtctgcagtctcctgaac

SEQ ID NO: 634207 - DNA, 100 bp, Homo sapiens
tgccaaggacaatgtttaccacctggactgctttgcatgtcagctttgtaatcagagccctgtatgatgagattcgtcagtttcgcaaggcctgtgggga

SEQ ID NO: 634208 - DNA, 100 bp, Homo sapiens
ggaccctcaccaggaaccacatctgccagcaccttgatcttgaacttctcagcctccagaacggatccagaagttgccacggctgctagttgcgtcatcc

SEQ ID NO: 634209 - DNA, 87 bp, Homo sapiens
gggtggtggttaaaccatgttaaggaggattttacagaggcttgtgatgaatggaaaatactaccaaaaccaaatcttcatagagat

SEQ ID NO: 634210 - DNA, 51 bp, Homo sapiens
aattgccatgtgatactccaggacaagggtgtgatgaatgcagactctgct

SEQ ID NO: 634211 - DNA, 75 bp, Homo sapiens
ccgaatccggagatcctgaggaggaggaagaggtggtggacaagatggatgatgatgtcttcctgcgctgcatcg

SEQ ID NO: 634212 - DNA, 88 bp, Homo sapiens
cgaagtggagagtgacatgcagttggatggcggtgactgcgtgctgagatctgtatctgtggacctgaatgttgatccctcgcttcag

SEQ ID NO: 634213 - DNA, 98 bp, Homo sapiens
ctctgggcgaggagcgcctctacaaccccttcctgcgggtggcgttgaatcgctcctagctgacccctcacgtctcttatgatacgtacagaaagcaa

SEQ ID NO: 634214 - DNA, 82 bp, Homo sapiens
gcacttgtcttagcagttctcgctgaccgcgctagctgtcctcccaaaccgaaggaccctgtatctgcagctgtgccagcac

SEQ ID NO: 634215 - DNA, 100 bp, Homo sapiens
caggaccccaccagctgcccagcccccattggcgagtttgagaaggtgtagtattgagtcctgtttgagctattgttctctttttcctgaaaaatggcac

SEQ ID NO: 634216 - DNA, 100 bp, Homo sapiens
tgccataccaagctgcatcatcagattcttcagcagcaccaaatatgcaaggtggacccccaaaagtacaagggcatatttaacggattctcagttacac

SEQ ID NO: 634217 - DNA, 153 bp, Homo sapiens
gctgaatgtcgtaacctgaatggctgtgatactggacatgcaaaaatcacatgtggctatgaccttcctgcaaaatgtttgccaagatggtggataagaatatttacatcattcaaggggagattaacattgtggttggggccatcaaacgaa

SEQ ID NO: 634218 - DNA, 100 bp, Homo sapiens
ctgctaacatggataagcatgccctgaaaaagtatcgtcgagaagcctatcatcgctttcaccaacaatcaccagtggtttacacaacattgcaaggagc

SEQ ID NO: 634219 - DNA, 137 bp, Homo sapiens
gcggccgggcgggggagatggcggcgcgatggagcagcgaaaacgtggttgtagagttccgtgactcccaggtcctggacccaagccagaagcctctgcaaagcttccttccagacctgcagataactatgacaact

SEQ ID NO: 634220 - DNA, 75 bp, Homo sapiens
gcttcctctcgggcatgaccggaaaggccaaggtgtttaaaattatccaactgccatagagctaaattctttttt

SEQ ID NO: 634221 - DNA, 88 bp, Homo sapiens
acgaactacgaacccctggacgggagagtctgccggcggagaatataagagtaattccctcctggtcccagacagtctaagaggcaca

SEQ ID NO: 634222 - DNA, 101 bp, Homo sapiens
actgatctggattgagtctgtcattgagaagttctcccacagccgcgtggagatcatggtcaagcctttagaagaagccacactctctgaattaaaaactg

SEQ ID NO: 634223 - DNA, 76 bp, Homo sapiens
ctacttcatccccgccaccggccactcggccaggcctgccgacacctgcttcacctggccattcagcggcaccccc

SEQ ID NO: 634224 - DNA, 82 bp, Homo sapiens
cagcaacagcaagctcccgggcaggatccacctgatggctggccgagtaccccagggagctgatcgaatagcagtcaaggct

SEQ ID NO: 634225 - DNA, 100 bp, Homo sapiens
gactgcagcagagtccccgagtcctttgatgcaagggtctaggtacaccagaggatcgcttcctggcagaatttgggagctgtttattgcagcactgttg

SEQ ID NO: 634226 - DNA, 98 bp, Homo sapiens
agcgatggccgggatcctggagcactcggtcatgtacccggtggactcggtgaagctcctctggtgcaagtgtggtagctattgacaacaaaatcgag

SEQ ID NO: 634227 - DNA, 82 bp, Homo sapiens
ctgagcccgtccgtccgccgccaccacccactccggacacagaaagttcaggagccctggaaaggagaaggaataagacggc

SEQ ID NO: 634228 - DNA, 98 bp, Homo sapiens
aaacaagtgctcctacattctggtaagaagaaagcagcggcattgttcgacagccaggccccaatttgccccatctgccaggtcctgctgaggcccag

SEQ ID NO: 634229 - DNA, 76 bp, Homo sapiens
cggccatctgtgtgtctgggcagtgcaagggaacgtgttgagaataccagtcacccaggagagatgcaagtaacca

SEQ ID NO: 634230 - DNA, 90 bp, Homo sapiens
aacagggcagacgttagcgtgagtgatcactctcaatcccgggaatgggtaccacagaccatgtcatcgtcctggcgtccacgaaccgag

SEQ ID NO: 634231 - DNA, 76 bp, Homo sapiens
ggacggctccctccacgtccctgacccaggaggctctcacgtggagtccccagaacagcatcaactcctcacgatg

SEQ ID NO: 634232 - DNA, 100 bp, Homo sapiens
tccgcgcagcgggttgcctccgctccccatacggcggccccagattttatcatgtgggcaacctgctgcaactggttctgcctggatggacagcctgagg

SEQ ID NO: 634233 - DNA, 50 bp, Homo sapiens
cagcagctgcctcaagaggagcaggaatcagagatcattgatttcttcct

SEQ ID NO: 634234 - DNA, 100 bp, Homo sapiens
ccttctcaaccttgtgggatgtgaaaactctgttactgaaggtttactgccacctccagagaagctcactgccgaggtcctaggaatcatttgcattgtc

SEQ ID NO: 634235 - DNA, 50 bp, Homo sapiens
ctcgcttgcagttcagcgaccacgtaaaatgtttattggaggcttgagct

SEQ ID NO: 634236 - DNA, 83 bp, Homo sapiens
gggaagagccggggccgtggctgacatggagcaggcatgtcgggccccaggcctgtggtgctgagcgggccttcgggagctgg

SEQ ID NO: 634237 - DNA, 71 bp, Homo sapiens
tcctgtcgtccgttctctcaggctcccgttcagtgtgtgttttaatagaaaagttgtcactttccaaaatg

SEQ ID NO: 634238 - DNA, 82 bp, Homo sapiens
ctaagtccgtgagcggtggcagtcgcgaccgcgggtgcatccagtttctgcgcccagctggatgctgacaaatatgagaatg

SEQ ID NO: 634239 - DNA, 89 bp, Homo sapiens
aagattaatagatagaataaaaactgtctgtgaggttgtgaatttaacaaatttacattgtatcctgggtagatatagcacacctatgc

SEQ ID NO: 634240 - DNA, 75 bp, Homo sapiens
tactctttcctcgtggaatttgaagattctacagataaatcagcaatatgttatgttgcatgacatggtggcaac

SEQ ID NO: 634241 - DNA, 101 bp, Homo sapiens
cgtcgccgccgtcagagccgccctatcagggtcagtttgaaaaggaggatcgagctcactgtggagtatccatggagatgtggagccttgtcaccaacctc

SEQ ID NO: 634242 - DNA, 101 bp, Homo sapiens
gacaagcgactctccatggtttctctcaggttctgagactctaggcaggctggcaggcaacaccttaggggaacgtgctcagtcactttcaatgggcacca

SEQ ID NO: 634243 - DNA, 100 bp, Homo sapiens
tacctctccaacggacccctgtctcccggaggagcgcgcaccttcctgggcttcccgatggactcgagtttttactatgtgagcatcccggtgcctgcac

SEQ ID NO: 634244 - DNA, 100 bp, Homo sapiens
tctgccacacatccagcgtgagagcagcccgacggccatggaggctgaagagacgatggaatgccttcaggagttccctgaacatcataaaatgatcctc

SEQ ID NO: 634245 - DNA, 89 bp, Homo sapiens
ccaatgcaaaccctctctctaccacgagcagcgccctgggagccctcacgagtcccgggtttgtgtttagtgaatcagagggatctgca

SEQ ID NO: 634246 - DNA, 75 bp, Homo sapiens
gaacatgacatttttgttccagaggatgatgatgatgatgactaacagtttgatggtgacagtgcctacgtgggg

SEQ ID NO: 634247 - DNA, 50 bp, Homo sapiens
cggcagcggagggacggcagtctcgcgcgtgatgtcttggcattgcccat

SEQ ID NO: 634248 - DNA, 98 bp, Homo sapiens
cttccgaacctgacttggctggacctccggtacaatagaattaaagcgcttccttctgggattggagctcaccaatgttccatttaagcagacctctt

SEQ ID NO: 634249 - DNA, 71 bp, Homo sapiens
cccccgcttcctgtcggccgaagccatcggcatcatgagaagggcctactttaaggctggccaattctgca

SEQ ID NO: 634250 - DNA, 90 bp, Homo sapiens
ccagactgtgagccaaggaattttgtgtttcttgccatcttacaagaaactggcgatggaatatgagaggagccctctggaaagaaaagg

SEQ ID NO: 634251 - DNA, 75 bp, Homo sapiens
gggagtggcagagagtatgcattaaaggtccctggtgctgaaccgcctgcgtccagttgccagcgggggtgggaa

SEQ ID NO: 634252 - DNA, 100 bp, Homo sapiens
gtttatataactcaagttgtttggctaaattcttcaggagccactggaagtggggaaatggtctgtacaatatgtcaagaagagtattcagaagctccca

SEQ ID NO: 634253 - DNA, 75 bp, Homo sapiens
ctgccgctcgtggcgggccgagccatatacaacttccaaggcagcggagccccccagctctccctgcagatcggc

SEQ ID NO: 634254 - DNA, 75 bp, Homo sapiens
gaacagggttcctggggcatcgacgatctccatatttcattgcaaggactgaatgtgggcccagttggcgtcatt

SEQ ID NO: 634255 - DNA, 88 bp, Homo sapiens
ggaactaaggcggaggaactgagacgtttcgaattccagctccgggaagcagtttgttcgctatataaacatgttgataaacgacacg

SEQ ID NO: 634256 - DNA, 100 bp, Homo sapiens
gcggatggccccaggtgtaagcgcagaaagcaggcgaacccgcggcgcaataacgctgcactgggtgttcaacagccatcactccttggagcatctccta

SEQ ID NO: 634257 - DNA, 100 bp, Homo sapiens
ccgcgactcgggctgagggagctcgggccaatcagagggacggccccagaatggcatgagcatcctggccagaacaagccaaggagccaagacgagaggg

SEQ ID NO: 634258 - DNA, 98 bp, Homo sapiens
ttcttttggaagttcgagcccaggtagctacagcaagctgggtagcaggcagatccaaaggatatcatgaagtttccagggcctttggaaaaccagag

SEQ ID NO: 634259 - DNA, 100 bp, Homo sapiens
tttgttaactatttggttcgaataaatgaaataaagagtgaagaagttccagcttttgggttatcaggaactgttgccgttattacatcagatgggagaa

SEQ ID NO: 634260 - DNA, 82 bp, Homo sapiens
gtcggacgtgggcgaggggcggggtgtctggactggaacctctgggcccacatgaggacggggacttggttgccttttccag

SEQ ID NO: 634261 - DNA, 121 bp, Homo sapiens
tattgcaatcatggtgcagaaataccagtccccagtgagggtgtacaaatacccctttgaattaattatggctaatctgatgttccagcagaaatccaggtgttaaaagaacccctacaac

SEQ ID NO: 634262 - DNA, 50 bp, Homo sapiens
agaaccgtcagtttgagccagatggtgatttttgaagtgataacttctgg

SEQ ID NO: 634263 - DNA, 100 bp, Homo sapiens
cagggagtggagcttggtttcgggatctcggtgctgcagacggcgagacctcctgcacagaggctgaggggatctggcggtggagcgctaggatcagacg

SEQ ID NO: 634264 - DNA, 98 bp, Homo sapiens
ctaagaaagtggtgaatcccctgtttgagaaaaggcctaagaattttggcattgaaaccagcccaaaagacttcctcttttgaaagagaaggatggtg

SEQ ID NO: 634265 - DNA, 100 bp, Homo sapiens
gccgtgatcgtgcccaaagaggagggcgtcatcagcgtctccgaggacagtgtctttctcgagaagcaggtggaaacatgagcattcagtttcttggtac

SEQ ID NO: 634266 - DNA, 89 bp, Homo sapiens
gagcctcgtggtgtggtgtatggccgtgggcatctcctacattagcgtctacgaccaccaagcatccagcacagtgagcggcccctggg

SEQ ID NO: 634267 - DNA, 50 bp, Homo sapiens
tgcaaggaagtgtcagcgtgaaggattggatagctttagtcaaagcagct

SEQ ID NO: 634268 - DNA, 100 bp, Homo sapiens
ctgtggtattcgccggcacgcgaagtggccgcatccgcaaggtcccaggtgtgacaccttcagcaggtctcagggaagatggcagccctaggggacattc

SEQ ID NO: 634269 - DNA, 82 bp, Homo sapiens
ggttgaaccctcggatacgatagaaaatgtaaaggccaagatccaggataaggaagggaggagatatcaccaaacatgatgg

SEQ ID NO: 634270 - DNA, 100 bp, Homo sapiens
agcgagaaccccgagtggaagtggttcatcgagcagaggctgctcatgttctccttcgtcaacgaccgctgtttttggaaggaagaaagatggaaagcgg

SEQ ID NO: 634271 - DNA, 75 bp, Homo sapiens
gtgcgctgtcttcccgcttgcgtcagggacctgcccgactcagtggttgaaatcacaaagattagacaccttttt

SEQ ID NO: 634272 - DNA, 85 bp, Homo sapiens
tccgtgcgtccagctgtcttgcagcctctgctgcgagaagttctggagaagcagccagtgctaagccagaccgaggcccgcgact

SEQ ID NO: 634273 - DNA, 80 bp, Homo sapiens
attaagcgtggcttttgaggaagatgtgacaactaccggaggttcgagaacttgtcttggacaattgcaaatcaaatgat

SEQ ID NO: 634274 - DNA, 75 bp, Homo sapiens
gctttgtctcctttttcaacaaatggaatacagattctgttcatcttgctctgaaattaaataattctgaactca

SEQ ID NO: 634275 - DNA, 50 bp, Homo sapiens
cgcgaatatcgtcatcgttagaaggaggaatgcaggctcaggttggaatg

SEQ ID NO: 634276 - DNA, 75 bp, Homo sapiens
tggggcggggaccttgccttgcccggggcaaatcctgatcctaactgttgtcttggagtatttgggctgagcttg

SEQ ID NO: 634277 - DNA, 101 bp, Homo sapiens
tccgtggcaaggcgaggccccgggggcgggccggggtcaccacgcctgccccagggaaccgcacaggtttttcgttggaatatacgttgcacatttatggc

SEQ ID NO: 634278 - DNA, 98 bp, Homo sapiens
gacaaggacagaatcaccagcactggctgaagggtgtccggtggagagctgtttgaccggatagtggagaaggggttttatacagagaaggatgccag

SEQ ID NO: 634279 - DNA, 100 bp, Homo sapiens
gaggaccgggcccgcttctttctcgagtcggccggctgggacttgcagcttcttggacacttaatgattgttggcaagaaatgtgctgctgatctgggcc

SEQ ID NO: 634280 - DNA, 112 bp, Homo sapiens
cggcgggctcctgcgagaagcaagcggaacttcctgagcgctgtgcttcgccgtgagccgctcgctgctgctgacgtgcctggtgccggccgcgctgctgggcctgcgctac

SEQ ID NO: 634281 - DNA, 100 bp, Homo sapiens
tggtccggacccgcatgcaggcacaagctctctggtggctgtgagctgacagtggtgatccatgacttcaccgcttgcaacagcaacgagctgaccatcc

SEQ ID NO: 634282 - DNA, 75 bp, Homo sapiens
tgggcacagatggcatgtcaccgatgtctggtgtatctgggggatttgtagacgagttgtactgctgtcacagga

SEQ ID NO: 634283 - DNA, 75 bp, Homo sapiens
ccaggagaaatggaaaaacaaaaatgaatgaatcaagagtgatttgttaattctcaggtatgtctttatcagcag

SEQ ID NO: 634284 - DNA, 100 bp, Homo sapiens
cacctttattctctcagcacactgcagagtgcctggaagagctgggatgtctggttgagtcctatggcatgaatgtttgccaaccaaccccaggaaaagc

SEQ ID NO: 634285 - DNA, 83 bp, Homo sapiens
ttctctccctctgcccccccttccccacgcaaccccagatccatttacactttacaagctggaagtcgagtgtgctactcaac

SEQ ID NO: 634286 - DNA, 97 bp, Homo sapiens
tcctgcagaagtccagggacctcaaattcctcacaggctttgaaaccaagtttcttgcagaacataaattattaggaaacattaaaaatgtggccaa

SEQ ID NO: 634287 - DNA, 75 bp, Homo sapiens
ataagaccgttggttctgacgaggcacagcgtttcttgcaagaatgggagattacctctctagtgacccttcagc

SEQ ID NO: 634288 - DNA, 82 bp, Homo sapiens
ctggagcagtggagcccaaagacccctggagacatggatcatccagcagctcgtcaacggcatcatcacgcccgccaccatc

SEQ ID NO: 634289 - DNA, 80 bp, Homo sapiens
acctactcatggatggcggctacatcaacaatctgccagggatcaagtttgtggttctagcagatcctaggcaagctgga

SEQ ID NO: 634290 - DNA, 90 bp, Homo sapiens
tggaattttgccgatttcatgactaaccagtttccgatgaagttaaattccgtcaagatttaatgaatattgcgggcacaacattatcct

SEQ ID NO: 634291 - DNA, 75 bp, Homo sapiens
ggagctggtgcctgtgcaagttgttgaggacatggatttgattgacatactttggaggcaagatatagatcttgg

SEQ ID NO: 634292 - DNA, 100 bp, Homo sapiens
aactgggcagtgccttctatgacatggccaggcggtctatgcttgcttggtgcttatgctgacagtgatgacgatgacaatgatgtttccgaaaaactag

SEQ ID NO: 634293 - DNA, 100 bp, Homo sapiens
atgtgtgtggccgcctcggacaagagacccagggagtaccctgacttctaccggaagctctacggcctcttggacccctctgtctttcacgtcaagtacc

SEQ ID NO: 634294 - DNA, 75 bp, Homo sapiens
ctacactcggagcccctgtcacagttgtctttctactcgggacactcttcctttgggatgtactgcatggtgttc

SEQ ID NO: 634295 - DNA, 82 bp, Homo sapiens
tatggaaaacggggatttccaccatctgtcccagaggctgacccgcggctgattgagtccctctcccagatgctgtccatgg

SEQ ID NO: 634296 - DNA, 75 bp, Homo sapiens
gcggggtgcgccggcagaggatccagtgttcaccatcctggccccggaagggctcttggtggtatcgctcaatac

SEQ ID NO: 634297 - DNA, 82 bp, Homo sapiens
ctggatgatgcaatcaaagctcgacttctcaatcccaagtggccaaaggattttcctaagcccagtgaagagaagattaagt

SEQ ID NO: 634298 - DNA, 74 bp, Homo sapiens
ttgggactgtctaatgagattggagctattgaaaaggctgtggatgaattgtaaaagcaacatcagcttgacca

SEQ ID NO: 634299 - DNA, 130 bp, Homo sapiens
tcatgctgaagatttcttagaagtagttcaacgaatgcagttagatttacatgaacctccactgtcccagcctaaaatgaccaatgtgtgatttcagtggaataaatggcgtccaaagtcacagatgcta

SEQ ID NO: 634300 - DNA, 100 bp, Homo sapiens
cggagaggcacggaggagccgctggggctgccgccacggccgcccggaggttcgatacaagaggctgttttcctagcgtggcttgctgcctttggtaaga

SEQ ID NO: 634301 - DNA, 83 bp, Homo sapiens
ctcctggctcccttctgccccagctccgtctcggcggcggcggagctctgagctcttcaccctgacctatggtgccctggtca

SEQ ID NO: 634302 - DNA, 80 bp, Homo sapiens
aggttcttcactcgcgactgacggagctgcggtggcgtctccacacggttaacacagaaatctgcctcctgggccatgcc

SEQ ID NO: 634303 - DNA, 101 bp, Homo sapiens
cgagcgctgcctgcagctgctgcgacccggaggcatcctcgccgtcctcagagtgtcctggggaagtgtcgctacgtttactatgggaaaaactcagaggg

SEQ ID NO: 634304 - DNA, 90 bp, Homo sapiens
ggacggtaggagcctccgtgcggagaccactgttcaaggccacagaaatgcactcggtgatggaaagagagccactattctgaagaacac

SEQ ID NO: 634305 - DNA, 96 bp, Homo sapiens
actaagagaagttgttaccgaacatctcataaataagattctcctgagaatgatattcctatggagatcaccacggcagaaccacaggtttccgag

SEQ ID NO: 634306 - DNA, 100 bp, Homo sapiens
aggagaaatctaagagcctcgccaagctcaagaacaagcatgaggcaatgatcactgacttggaagggcgatgctggatcttttcttgtctgaatgttat

SEQ ID NO: 634307 - DNA, 100 bp, Homo sapiens
gacagccttcatttctctgaacatactgccttatgggacagatcaagtttgcctgcaatgagatttcattctctacatttaaaggacatcctttctgagc

SEQ ID NO: 634308 - DNA, 90 bp, Homo sapiens
cgagaaggtggacgtgctggtgtctgagtggatggggacctgcctgctgaccatcaagtgcctgctgatccaccctaaccccgagtctgc

SEQ ID NO: 634309 - DNA, 75 bp, Homo sapiens
gtggataattttgtggccttagctacaggagagggctttgactctatcctctcctgaagttcgattccacatgga

SEQ ID NO: 634310 - DNA, 52 bp, Homo sapiens
gacacggccagatctgccctccatcttgctggaggtttgttaaatttattta

SEQ ID NO: 634311 - DNA, 75 bp, Homo sapiens
gtccgcggcttcattcttgaaagctatcagcttcccagtttgcacaattcatcaagaaattatgcggggtcaccg

SEQ ID NO: 634312 - DNA, 83 bp, Homo sapiens
gaccacaaagtggaagagtcctgtgccattaaaaacaacaaggaagctttcagtggaacagctgccaccaacaatatatcagc

SEQ ID NO: 634313 - DNA, 90 bp, Homo sapiens
ggtcgctggtgaagcccgcggcgcgcgcctctcccggaccctgcagggtaaacctagcctttaagcaacctggaaagaggctagaacacc

SEQ ID NO: 634314 - DNA, 100 bp, Homo sapiens
gtccagatctacatctgcaaacaatggacggagattcttcactttacagaggtaacctgacctctccactgaagggcgtgtggctttctgatgacagtag

SEQ ID NO: 634315 - DNA, 100 bp, Homo sapiens
ccttattcctgcactttattctgttggagctagacagaaacgtcaaggttacagcaaaaaggttgctgctgactcagccattctagaagttcttcagtcc

SEQ ID NO: 634316 - DNA, 88 bp, Homo sapiens
tttgggatcccgctgtggtacttctcgcagtccccgcgcgtggtcatccaggaaggaagcagccaccctcgccatggcctccccgccc

SEQ ID NO: 634317 - DNA, 89 bp, Homo sapiens
cttttttgaagccatccgcagaaggggagacacattttatgttgtgtcatttcgaaggtggtgaaatagggccttctaaacctgtggag

SEQ ID NO: 634318 - DNA, 75 bp, Homo sapiens
caaagagcttgctccctacgatgagaactggttctacacgcgagctgattacagtacctatagccaagctgcagc

SEQ ID NO: 634319 - DNA, 100 bp, Homo sapiens
ccccacgggctctacctgaccctgcaggtggatcatccatgccatggagtatgaacttcagatccgtggcggagacaagccagccttggacttgtatcag

SEQ ID NO: 634320 - DNA, 100 bp, Homo sapiens
gttcgaggactctgtgaatctgtggtggaagcagacctcgtggaagcgctggaaaaatttgggacaatatgcaacactgcccactcagcgaggaagcagc

SEQ ID NO: 634321 - DNA, 75 bp, Homo sapiens
ggaaagcgccgagatgacgggctttctgctgccgcccgcaagcagaggttgctgtcttcctcgtccctccggccc

SEQ ID NO: 634322 - DNA, 90 bp, Homo sapiens
cagacccagaccgccaagctgcaggtcaagaagcaggtctcgatcccggaccagaagttcctctaggtctcgtagccgatcccgttcccg

SEQ ID NO: 634323 - DNA, 100 bp, Homo sapiens
ggagagagaggaatgtgctcttgtcctggcattgcatccacaggaggggcaggaaattctttgaagatctttgtagaatttgatggctgtaactggaagc

SEQ ID NO: 634324 - DNA, 100 bp, Homo sapiens
tctggatgatggagtggatgaacaagtactgatggaactaaaaactgagcgaatccgtttagctcgacagattgagaaatctgagtatcggaacttccag

SEQ ID NO: 634325 - DNA, 100 bp, Homo sapiens
acagagatttattcgtaatgcgactcaaagctgcacggcagtctgtttatgaggtaaccacatggtggatattggggatattatatttactttgaatgag

SEQ ID NO: 634326 - DNA, 75 bp, Homo sapiens
ctttttgaagcctttgcaaaaggaggttatattcaaaagaaaaaggaactgtggggaatctgtatctttattgca

SEQ ID NO: 634327 - DNA, 71 bp, Homo sapiens
agcagggagcggagtaccagcacttcatccagcagtgcacaggtctggagcccggcactgtggtcataaca

SEQ ID NO: 634328 - DNA, 74 bp, Homo sapiens
gagggagatcatcagtgacccgctgatcacaagatttctgttgtgaaggatgtggctctgccatgaaggatgtc

SEQ ID NO: 634329 - DNA, 51 bp, Homo sapiens
actttcaacgggactattatgatagaaattagtgaatttccatcagaatgt

SEQ ID NO: 634330 - DNA, 75 bp, Homo sapiens
aacatgtggaaggtgcgcgagctggtggacaaagcatgagtgaccgaggaggtggcgttcctttgaggaaaattg

SEQ ID NO: 634331 - DNA, 75 bp, Homo sapiens
gctgggatcggtatctgaccaaccaaaagcttgtggaatatacccgtgctgatggcacagttggccgaagagtga

SEQ ID NO: 634332 - DNA, 50 bp, Homo sapiens
gaccacggtcaccgtctcctcagatcctgataacttaagtgactctctct

SEQ ID NO: 634333 - DNA, 98 bp, Homo sapiens
cactcaggactgtcagaatgcccatcagggacgaaaaggaggttgtgctaaagggaaaggaggatcgatgcacatgtatgccaagaacttctacgggg

SEQ ID NO: 634334 - DNA, 50 bp, Homo sapiens
aaacagcttcatccacagagatctggtggtaccatagaaacattaccaga

SEQ ID NO: 634335 - DNA, 100 bp, Homo sapiens
tgaatatctgtgccacttagaggaagccaaaaggagcgagaacccgagcagcgccatgagcaacactaccgtcgtccccagcactgcaggtccgggcccc

SEQ ID NO: 634336 - DNA, 83 bp, Homo sapiens
gtctgatcccttgctcccatccctgcagcatgaacaagatacccagaaagcggtactctagaaatgaatgtcaaggatcttag

SEQ ID NO: 634337 - DNA, 100 bp, Homo sapiens
gtgaaatatctgaatctacccccgtggaagttgggtatctacagccattggttgctgttcaggtcagctttgctcctaacaacactgggaaagaagtaac

SEQ ID NO: 634338 - DNA, 90 bp, Homo sapiens
gaaacgcagacactgaactttgggcctgaatgttaaacacagtgggaatatcacttttgatgagattgtcaacattgctcgacagatgcg

SEQ ID NO: 634339 - DNA, 100 bp, Homo sapiens
cccacggcaacatgtaccccagcaacaagaagaaaaaggtgtggagagaggagaaaggttttgaagtacaggaagaaggttatctggcaaaaatcctggt

SEQ ID NO: 634340 - DNA, 97 bp, Homo sapiens
cttgccttctacctgctctccttcttctattacctgtacagggggggccctcagcctcttggccttgaacgggctgttcatcttgattcacaaacac

SEQ ID NO: 634341 - DNA, 75 bp, Homo sapiens
cgagtggaaaccagccatggagattagctgccgtctcaacgagggtatcccctgaaatactgacttcaggtcgaa

SEQ ID NO: 634342 - DNA, 83 bp, Homo sapiens
ctcgtagcctgccactccgtgcagcgtgccaggaagatgtcgagcccgggcatcgacggcgaccccaagcctccatgcttgcc

SEQ ID NO: 634343 - DNA, 123 bp, Homo sapiens
ccagagaactcagagactgaacccaaccagtacagccccgatgactccgagctcttccagggttgaagctttgagagaagcagcaactgctgttgagcaagagaaagaaatccttctggaaat

SEQ ID NO: 634344 - DNA, 100 bp, Homo sapiens
cagtggatgggccccgagaacctcgaaatcagtgtactgttacccggacatacctattccttcacaagttctggttcttcagtgctgcttactattttgg

SEQ ID NO: 634345 - DNA, 50 bp, Homo sapiens
tcaggagtgttgcaacggttacagaatcggctacagtctcaaagggcaat

SEQ ID NO: 634346 - DNA, 100 bp, Homo sapiens
gctgcctccccgggtgtgcgtgtccctcaagaacattgtggatgaggacttcctctatgcagggcgtttacagtccctaattaaaaatattacacttaga

SEQ ID NO: 634347 - DNA, 80 bp, Homo sapiens
ccgtccgccgccaccacccactccggacacaggaagtcctgacggccacgctggatctggaggacgtccggagctacagg

SEQ ID NO: 634348 - DNA, 83 bp, Homo sapiens
gggattttcagggctttgaatgcatcagaaccatgcacgcatcgtcatcagacagtgaggaggacccagaagccttggagaag

SEQ ID NO: 634349 - DNA, 82 bp, Homo sapiens
aggatgtgcggggtgcgccggcagaggatccagtgttcaccatcctggccccggaagatggagttttaacattgaatgcgga

SEQ ID NO: 634350 - DNA, 83 bp, Homo sapiens
ggccttctctagaccttgccaagatggcacagttctaatacccgatttacaattacattgaactacaaggatcccctcactgg

SEQ ID NO: 634351 - DNA, 97 bp, Homo sapiens
tatgtcgagatcccctgtgtggccaagaagctggtgtgcggagatgaaggagttcatgatcaagtgttgcccacaccaaatgcttcatccagagtca

SEQ ID NO: 634352 - DNA, 75 bp, Homo sapiens
gggctggtgggcatagtggctgccctgctggtggaaagagtggaacgagaaaacctttcagactattgtgttctg

SEQ ID NO: 634353 - DNA, 96 bp, Homo sapiens
gggattacaggagcatgccaccaggttaatggtgcaatgtaagaaacctttaaaagtttctgatgaattagtgcagcaatatcaaattaaaaacca

SEQ ID NO: 634354 - DNA, 82 bp, Homo sapiens
ccaccgctgccctcagctccgagtccagggcgagtgcctacaccaactaatgttacaattgaatcctataacatgaacccta

SEQ ID NO: 634355 - DNA, 83 bp, Homo sapiens
aagccccatccttgccaggaagctctgtgaagggtgccttcaccagggatggaagaggcaggctgcagcagagagatgcagag

SEQ ID NO: 634356 - DNA, 75 bp, Homo sapiens
tacaaccagagcttcttccagagccttctcaaagccacaggaagcggggagaggtggtgagagatgacccctgtt

SEQ ID NO: 634357 - DNA, 99 bp, Homo sapiens
cggctcccttcgcctccaggatgcgctgagccctacaacacccccagcggccgccggctcccccacgaggactttccttatcccagttgattgtgcaga

SEQ ID NO: 634358 - DNA, 100 bp, Homo sapiens
gtttgaatctgttgacaagattctgaaagctgaacagagaattctggcactgcactgggtaggaaaaagtggctgtgtggagtggtgtgaatgtggcagg

SEQ ID NO: 634359 - DNA, 83 bp, Homo sapiens
caggtgggcacgctgtttgccaacattgaggacatctacgagttcagcaggtaatagcctgcagctggtgttttgagaagccc

SEQ ID NO: 634360 - DNA, 76 bp, Homo sapiens
ctgtggagaatatgcctatgtaactgtgggttatggttttgtgaaattcacagatgaactggaacagaagcgagcc

SEQ ID NO: 634361 - DNA, 76 bp, Homo sapiens
catactgtagaaaaatattcctttgaagagggttacacatcattttggaatgactgtatatcatctggattacgtg

SEQ ID NO: 634362 - DNA, 113 bp, Homo sapiens
cgatcctgaaagatacttgaaatcaacaggaaagagaggttcttgatcgctgcagcaaatggcaacttgtgcagatcaatgaactgagccatgttcaaatccctgttatgttg

SEQ ID NO: 634363 - DNA, 51 bp, Homo sapiens
gaagacactctggacaccactatggacagttccagtgtctcgccccatcct

SEQ ID NO: 634364 - DNA, 98 bp, Homo sapiens
aggactccaaaatggcgtcagttggtgagtgtccggccccagaggcatttcatccttcatgaagccattcaggattttgaattgcatatgagtgcttg

SEQ ID NO: 634365 - DNA, 50 bp, Homo sapiens
tgcagctgcctcagttcttagcgcagaaatcatgaccaccccaggaaaag

SEQ ID NO: 634366 - DNA, 132 bp, Homo sapiens
agaccccgcacatattgctgaaaggcatggtcacaaagaactcaagaaaatcttcgaagacttttcagctttgatgcggcctggaagaattgatagaatcatctatgtgcctttaccggatgcagcaacaag

SEQ ID NO: 634367 - DNA, 100 bp, Homo sapiens
gtggtcgcctagtaaacggggctgctggtgggccgcgtcgaagacatggaccagggctacggagtctgaagaggataaacagcttcaagatgaactggag

SEQ ID NO: 634368 - DNA, 82 bp, Homo sapiens
gtcatcatagtcagtctgggatatggcatcgtcaataatggaggggaaagttccagtcgcagcgctgagaagcgatcagctg

SEQ ID NO: 634369 - DNA, 75 bp, Homo sapiens
tcgtggtggtcggatttcaccacaagaagggctgccaggaccccagccatgataggctgctcgttcgtggtcaac

SEQ ID NO: 634370 - DNA, 100 bp, Homo sapiens
cgcagctggcagatattatcatagttgctgcagggttacacatcattttggaatgactgtatatcatctggattacgtggctgtatgttaattgaattag

SEQ ID NO: 634371 - DNA, 82 bp, Homo sapiens
gcaaccattgacgccatgtcgggttattcgagtgaccgagaccgcggccgggaccgaggaaagccattgatctggtgacgaa

SEQ ID NO: 634372 - DNA, 100 bp, Homo sapiens
agtggagatgctgccctggcttcaccgggagcaactgtgatgagggtgtcatggagaaactccagctgggcccagagattctgcagcgggaaaatccaag

SEQ ID NO: 634373 - DNA, 74 bp, Homo sapiens
gccccgccgcggccatggaggacgagcggaaaaacggagcctacgatcagccatccacgggcgaggcctgttct

SEQ ID NO: 634374 - DNA, 75 bp, Homo sapiens
acctgtgtggtggaattccagttcatgctgcccacatctcatccaaacagagctggaagtcgagtgtgctactca

SEQ ID NO: 634375 - DNA, 90 bp, Homo sapiens
gtgacgggacagagcggtcggtgacagcctcaagggcttcagcaccgcgcccatggcagagccagaccaaactcatcactgctatatatg

SEQ ID NO: 634376 - DNA, 105 bp, Homo sapiens
cactggaaaacgaaaagagaatcccatcgaagacgatttgatctttcgagtgggcagaaaccactaatactagcctcttgcaggtgcaactggaatgcagtttac

SEQ ID NO: 634377 - DNA, 51 bp, Homo sapiens
tgcatgtgaagttatcaaaaacagttgtacaatggtagatggagtgatgat

SEQ ID NO: 634378 - DNA, 100 bp, Homo sapiens
cgtttgttcaggaaccaccagtgacagagcagcctggcatcctcgctacaacctcattgttgtgggccgatacccagatcctaatttcaaaagttgtacc

SEQ ID NO: 634379 - DNA, 75 bp, Homo sapiens
cctggatcagtttctttgtcatgtagccaagactggagaaacaataggagattcttcaagcttagttgctgaact

SEQ ID NO: 634380 - DNA, 100 bp, Homo sapiens
tgaagatgctactttagaattaagagttaaaactgtgaaatactttaaagattttgtggaagtataatactttgtcattatgagatgtcgtctctcggtg

SEQ ID NO: 634381 - DNA, 73 bp, Homo sapiens
ggcggcggcggcagcgggtcttgggtcctccgagagcagcagcgcacttttcaggattagaagaggctgtgta

SEQ ID NO: 634382 - DNA, 120 bp, Homo sapiens
ctcacccccaccagctgtagctgaacgtctggatggtggagaagagcaggcctgattgcagagcagttcctggagaccaccgcggcccagctgacctaccacggactgtgtgagctgaca

SEQ ID NO: 634383 - DNA, 51 bp, Homo sapiens
tcaatactacctttatttccaccatagggtatgagtattatagaacaatta

SEQ ID NO: 634384 - DNA, 101 bp, Homo sapiens
ccggcttccagatcaacctcaacccgctcaaggagccactcggcttcatcaaggtcctcgagtggaagtttccaagggtcacttgtgtctcgtccgtggga

SEQ ID NO: 634385 - DNA, 100 bp, Homo sapiens
ctgacagcagccatcgaggcgagccagagcctgcagtcccacacggaagaaatgttggctatttggcgatgagaggtggtgaacagtgaccatactggta

SEQ ID NO: 634386 - DNA, 74 bp, Homo sapiens
cacacagaggggcagcttcaaaatgaagaaattgtggtttctaagcatgaattgaggaacagaagaagcagagc

SEQ ID NO: 634387 - DNA, 96 bp, Homo sapiens
tgccgagacagaactcgtcagattcttgcctgcagcctttagaagaagccacactctctgaattaaaaactgtcctcaagagcttcctaagtcaag

SEQ ID NO: 634388 - DNA, 119 bp, Homo sapiens
ccgctgggcacactggcttcacgccggctccgcctcaccagcaagcgcattcccagagataattgacgaccttgccaacctagtggagaacacagatgaaaaacttcgcaatgaaacca

SEQ ID NO: 634389 - DNA, 100 bp, Homo sapiens
cagaagacagcgaaaagagaagcagaagccccggtggcaagagtctgaaggatcttcctcaggaaatggaaaagttgcaacagctccgacaaggtactac

SEQ ID NO: 634390 - DNA, 90 bp, Homo sapiens
gaaagttccgccatgagctggggcacggagctgtggatggcccactgcgtgaccttggttcagctgtccatttcctgtgaccatctcatt

SEQ ID NO: 634391 - DNA, 99 bp, Homo sapiens
gcgaagcggagcaagagggaccccagaaactgatccgcaaagtgtctacctcggggcagatccggaccaagaggcgtggagctatttcctatgacagtt

SEQ ID NO: 634392 - DNA, 90 bp, Homo sapiens
tgctaacgtttagagagtgcttccccttgccgagcactggcagagtcacctgatatgaaaaaggagcaagacccccctgccaagtgccac

SEQ ID NO: 634393 - DNA, 82 bp, Homo sapiens
gggcggcttcctggcctgggcgctccggtggcggcggagttgatattcactgatggactccaaagaatcattaactcctggt

SEQ ID NO: 634394 - DNA, 100 bp, Homo sapiens
cagagaaaggagacctcattccaagttccaggattaattctgaatatgagttggaagtaaagagggtgcaagacattctttcgggaatagagaaaccaca

SEQ ID NO: 634395 - DNA, 82 bp, Homo sapiens
atatcgtgtctggagcagtggagcccaaagacccctggagacatgagttctaaagttcctgttgcttcagacaatggatgag

SEQ ID NO: 634396 - DNA, 75 bp, Homo sapiens
cgttgaccgctcctccaactaaccagacaagaaatggattctcagtcatgaagatgtcatattgggagaattact

SEQ ID NO: 634397 - DNA, 75 bp, Homo sapiens
ccaaggcatcacatgagcatgaagataaaagtcctgaaacagttttgcagtcgggctcaagcacctcttactgcc

SEQ ID NO: 634398 - DNA, 49 bp, Homo sapiens
ctataaaaaagttatcagccatggggaaagtactgaaatcccaccttat

SEQ ID NO: 634399 - DNA, 75 bp, Homo sapiens
ctacctgccctaggcgttcgtgaagagaagcagctgttgctattggaggagctctattaccaggttttaaacttc

SEQ ID NO: 634400 - DNA, 101 bp, Homo sapiens
cgaagagctcggaccaagcgctcaggttctgtacagagtaatgagatgtgtgacggctgcaaaccaggtgtttttttctgaggctgtgttgacagctgcta

SEQ ID NO: 634401 - DNA, 82 bp, Homo sapiens
cgatactgagcttcttcctatttgccatggctttgacagatccaaatgcttctgctgcccagcaggctgttctccagcagca

SEQ ID NO: 634402 - DNA, 83 bp, Homo sapiens
cctggatcgacacagctgatggctctgccaatcaccgggcccgggtcaccaccaggcttttatcttgagaacatggtgtctgg

SEQ ID NO: 634403 - DNA, 90 bp, Homo sapiens
acttattcctgtccggagacagcctaaggtgggtaattccagaattgattggccataccattgtcactgtattactgctcatgtcattgc

SEQ ID NO: 634404 - DNA, 118 bp, Homo sapiens
cttgaaaagactgggcttgtccttgctggtgcatgcgtcgtcggcctctgggcagcaggggacggcaaaacagaacagaaaggcggagataaaaagaggggtgttaaaagaccacgag

SEQ ID NO: 634405 - DNA, 82 bp, Homo sapiens
agcctggcatggcttctggggacctttacgaggaaatgaatggggtgctgaaaggaatgctctcagaatggttttcctccgg

SEQ ID NO: 634406 - DNA, 75 bp, Homo sapiens
aagaacgtgagcaagcccaggcacagccgacgccgcggggtgattatccagggttttcgaagttacagagatcaa

SEQ ID NO: 634407 - DNA, 98 bp, Homo sapiens
gtaaagccacccacaaacaaactacccattttcttttttggaactcatgagacaagacgccaaaagactcatgtacccatgttacaggtatggactgc

SEQ ID NO: 634408 - DNA, 90 bp, Homo sapiens
gagaagccggaggaggacaacgactaccaccgcagcgacgagcagaggactaccccaatggcacctggctgggcgacgagaacaaccccg

SEQ ID NO: 634409 - DNA, 90 bp, Homo sapiens
tcatcatcaagcagacatactcaagggttttgactctgggaggagggctgccttatttggagcaccttaatctctctggttgtcttacta

SEQ ID NO: 634410 - DNA, 101 bp, Homo sapiens
cccccacccgccggggacggtggacaagaagatggtggagaagtgctggaagctcatggacaagagtgcctggtgaagaatgtgatgggatcactagcatg

SEQ ID NO: 634411 - DNA, 75 bp, Homo sapiens
gggagatgagtgaatttggctacatcatggaattgatagctaaaggcaaggttttgaacgaagaatgtgatcaga

SEQ ID NO: 634412 - DNA, 97 bp, Homo sapiens
ggggccgctgctgctgctgctgcttgcccggcccccgcctgcctccgccggctacagcgggaagagcggtctggtgaagctgggggttcactgcgtc

SEQ ID NO: 634413 - DNA, 75 bp, Homo sapiens
gacgctgaccaggacatgatgatggcagggatgattgaccctgctacgggaatggttatgaatctggctgatctc

SEQ ID NO: 634414 - DNA, 83 bp, Homo sapiens
ccagggcccgcccaggacccccaagccgccgcggacgcagtcttgctatgttgctcaggctggtcttgaacccctgagctcaa

SEQ ID NO: 634415 - DNA, 74 bp, Homo sapiens
cagaagaaggctgctattgaaagagagtatgcacaggctgctctttggcgtaaattgcaatcgattagggatcg

SEQ ID NO: 634416 - DNA, 100 bp, Homo sapiens
cttggaaatcgatcacaaccaggcattaagttcacagacatggatttgattgacatactttggaggcaagatatagatcttggagtaagtcgagaagtat

SEQ ID NO: 634417 - DNA, 100 bp, Homo sapiens
ggatattacctccaaaaaagacaggggagtattaaagtccaaaattgaagacattagagcagaacaagagagagaaggtgagaagctgatccgcctccac

SEQ ID NO: 634418 - DNA, 90 bp, Homo sapiens
ggaagtcatttctttacccaagaatgacctgctgcagagacttgatgatgctggctatgagtttgacatctgcttcacctcagtgcagaa

SEQ ID NO: 634419 - DNA, 90 bp, Homo sapiens
cggctactacctggagatgctgatcgggacccccccgcagaaggtcaaactgtgctgaaaatatccgcaaacacattctgcatactggca

SEQ ID NO: 634420 - DNA, 75 bp, Homo sapiens
atgaaatcagtaccaaccaatggctggaaatgcaaaatcgccaaactgaggcagcaactacaacgcagtaaacag

SEQ ID NO: 634421 - DNA, 98 bp, Homo sapiens
gaatcttcaagaacttcctcgcactgtgacatgtctgatcccttgctcccatccctgcagcatgaacaagatttcctttgacctcgctgagtacactg

SEQ ID NO: 634422 - DNA, 100 bp, Homo sapiens
tgttccttcagccaaagaaacaagccgtggaataggtgtatcaagtaatggtgcaaagcctgaatctctggaatctgttctgcgccacccggcagataat

SEQ ID NO: 634423 - DNA, 100 bp, Homo sapiens
cagcgcagtgcccactaaacacgccaagccatgaagtcggggggcacgcagctgaagctcatcatgaccttccagaattacgggcaagcgctgttcaaac

SEQ ID NO: 634424 - DNA, 96 bp, Homo sapiens
gcagatttgaacctatctgctttcaagctggtcatcatgatgaaacttagacacattccttcagtgatccttaaagagtggtctgcctataaaggg

SEQ ID NO: 634425 - DNA, 100 bp, Homo sapiens
gcatgtagacatggatctggccactttacctccgaccactgccatggctgtacttctctataatagatgaaagaagattcaggagtggatcccaccttca

SEQ ID NO: 634426 - DNA, 98 bp, Homo sapiens
ccaagtcgtccccctctccgccccccaggaggggcgagagggagccgcagctgatgtcaggcattgaatgccccagaggagcccgaaacctcccaggc

SEQ ID NO: 634427 - DNA, 75 bp, Homo sapiens
agagtgacataggagaagtgattcttgtgggtggcatgactaggatgcccaaggctcttacagcactactttcag

SEQ ID NO: 634428 - DNA, 100 bp, Homo sapiens
aactacccagccccgtccagtcatgcaggtgcaggatgatggagtcaacctcatcccctttgccaagagtctcgctctgtcgccagactggagtgcagtg

SEQ ID NO: 634429 - DNA, 76 bp, Homo sapiens
ctggaggtggctgctgaggccttgaaggccacttctgcttttctgagggcagctgcaatgactctccgcacggtat

SEQ ID NO: 634430 - DNA, 75 bp, Homo sapiens
cttcaatgcagattctagccaacataaaggctttcatgagaaggacaagaagccatattgccgaaaggatttctt

SEQ ID NO: 634431 - DNA, 80 bp, Homo sapiens
cacggagctgggcgacgagctgaccctgggagacatcgacggtggccatggtggaggtgcagctggagagtgaccacgag

SEQ ID NO: 634432 - DNA, 100 bp, Homo sapiens
tgttttttctacctgttgacgtgtcaagcactaactcctgcagcagaaaccacggacggagagcgaagtgcgaaaaagccagctgtccagaagaagaagc

SEQ ID NO: 634433 - DNA, 101 bp, Homo sapiens
ttgttctcagttgagtgaaagattggagaagcagcagacagccaataaggtggaaattgagaaaattcggcaggttcaggagaagtggcacctggtggagg

SEQ ID NO: 634434 - DNA, 76 bp, Homo sapiens
ccactttggaggaccagattatgaagtaaaaatgtctccatcgtatcatcagtccaaaggggatcccactgctaaa

SEQ ID NO: 634435 - DNA, 100 bp, Homo sapiens
atcagcttcgaggaggagcggatccagcacacggaagacatggagaacgagatcgacgagctgctgcaggagttcgaggagaagagtggccgcacctttc

SEQ ID NO: 634436 - DNA, 90 bp, Homo sapiens
agcagggctgagatgggcaccgcggatctggggccgtcctcaggtacagaggtgcagttccatggtacaccataaatcttgacttaccac

SEQ ID NO: 634437 - DNA, 100 bp, Homo sapiens
ttgaaatcccaaagattgatgtctacctctatgaggtagatattaaaccagacaagtgtcctaggagagtgaacaggtgggagcaggtgctccgtgtcgg

SEQ ID NO: 634438 - DNA, 89 bp, Homo sapiens
gtctcctcctcggcgggagccctcgcgacgcgcccggcccggagcccccagcgcagcggccgcgagcaaacatgaacgttggagttgcc

SEQ ID NO: 634439 - DNA, 100 bp, Homo sapiens
gttggagaaataaaaatgacttcccattatgtgattgccatctttgccctgatgagctcctgtttagccactgcagaaggccaatgatgaggccaatcag

SEQ ID NO: 634440 - DNA, 90 bp, Homo sapiens
cttggaggagaccatgaagcagctggaggagcgggagaagattgtggctcccatcagtgactccccgaagccaccgccacagcgtgtgac

SEQ ID NO: 634441 - DNA, 100 bp, Homo sapiens
gatatctgtgataaagttggtcagtctcgcactgggtttgtatttcagcagtcagaaaaatttgcaaaggtggaaaaccaataccagttactgaaactag

SEQ ID NO: 634442 - DNA, 82 bp, Homo sapiens
tctgggacacagcggggcaggagcgcttccgcaccatcacctccacgctgaaggtgatgtggccgccctcaaccgacgcatc

SEQ ID NO: 634443 - DNA, 78 bp, Homo sapiens
ggaacatgtggctgctcccagctctactccttctctgcctctcaggtaacaactccgtgggtgccatccagtgccctg

SEQ ID NO: 634444 - DNA, 100 bp, Homo sapiens
gaaaagagggactgccataacattcccaaagggggtcctgatgacaacttaattgaaggtggaggaacaaaatttgtctgcaaacctggagccagaaaca

SEQ ID NO: 634445 - DNA, 100 bp, Homo sapiens
gacacctgcatggcggttggcttcttccagcgaggagtggccaacttccagctggcaagggtgcccctccggcctcgccatgaggctcttcctgtcgctc

SEQ ID NO: 634446 - DNA, 75 bp, Homo sapiens
ctcctctccatctgctcacttcttacagattgcaaccctgatcttttcagtgatctggataagtgttctgaccag

SEQ ID NO: 634447 - DNA, 75 bp, Homo sapiens
cattcgttgccgccggaggggaagcttgggatcatggctgctgcatctgaagccccccaggatgtgacctacgcc

SEQ ID NO: 634448 - DNA, 75 bp, Homo sapiens
tgaggcgccagcctgcgaaggtggcggcgctgctgctcgggctgctcttggagcttcgagagctgtgcccaggag

SEQ ID NO: 634449 - DNA, 90 bp, Homo sapiens
tcctcaccaagtacgctgaggccgagaacaccattgaccagctacgcctcggggccaaggcaaactaggcgtggcaactgctggctgcgt

SEQ ID NO: 634450 - DNA, 96 bp, Homo sapiens
acacctgtcttcaaaaaagaaagaatctcagttacaagagtttgcaggcctttcagatatatccatctcacaagacatccccgtagaaggagaaat

SEQ ID NO: 634451 - DNA, 100 bp, Homo sapiens
agggcattttggaagtgtcaaaggccagggacatccctgttgtcatcgacgcgaatggtggtttgggccacatgaacatcgcactcttgtcagacttaac

SEQ ID NO: 634452 - DNA, 80 bp, Homo sapiens
tcagggagagagtttggaaaccccaacaggcctgtggccagcacccgtggtacaggagctgcagcaggccatctccaagc

SEQ ID NO: 634453 - DNA, 75 bp, Homo sapiens
acaatggttagagaagaattttccaaatgaatttgcaaaacttactgtaggacacatgacggaagtgtgtatttt

SEQ ID NO: 634454 - DNA, 83 bp, Homo sapiens
gttgctgcgggggattgtgggagtctccgcgtcccgctcgctgggagagagcccgtgccccgcatcatggtgcagtcagccag

SEQ ID NO: 634455 - DNA, 83 bp, Homo sapiens
gtactcttcagggatgagtcatgtggcagtggaaaatgcgctcgggctggaccagcaggacaggtcccagaagaggaggccag

SEQ ID NO: 634456 - DNA, 100 bp, Homo sapiens
ctgacatggaggatgatttcatgtgcgatgatgaggaggactacgacctgccagagactgctgctactttgaaacgtacgatagaggccctgatggacag

SEQ ID NO: 634457 - DNA, 52 bp, Homo sapiens
tcagtccttcacacagttccctggaaatgctgaccagtgcaccggtcttcag

SEQ ID NO: 634458 - DNA, 92 bp, Homo sapiens
cagagagggaagagattcagccagcacactcctcgcgagcaagatgatatcatcaagttgaatcgaaaggaagggaagaagcagaattttcc

SEQ ID NO: 634459 - DNA, 50 bp, Homo sapiens
ctccggagtagctgggactgcagtggctgtcgctgggcgcggactccaac

SEQ ID NO: 634460 - DNA, 83 bp, Homo sapiens
aaaagcaaaaaaatgctcttggcctgctcaacctgctgatgaacctgcagaaaaggctgatgaaccaatggaacattaagtga

SEQ ID NO: 634461 - DNA, 75 bp, Homo sapiens
gatgcagttgccagaactgcccaaggacatcagaaaattcttcttctgggtattctgaaaattattgaaagtgat

SEQ ID NO: 634462 - DNA, 133 bp, Homo sapiens
agagcaaaatcgcgacgactaaatacccgtgtctgaagtcttcaggcgagctcaccacatgctacaggttcaaaatgagcctgtttggaacaacctcaggttttggaaccagtgggaccagcatgtttggcag

SEQ ID NO: 634463 - DNA, 74 bp, Homo sapiens
ttaatgttagctggtgctttgtgtgctcagaagggagcagtatgcagaggggaagatgagaggggctgccccag

SEQ ID NO: 634464 - DNA, 90 bp, Homo sapiens
aaattacctaaatgcactctttcgaaagaaaggattactacagcatcccatttcccacacccactactccgctgactgggagggatggta

SEQ ID NO: 634465 - DNA, 76 bp, Homo sapiens
tgcattgttttggtgactgaacttatgacgtctggaacacttaaaacatacgtaggtaacctttccagagatgtga

SEQ ID NO: 634466 - DNA, 100 bp, Homo sapiens
cttgttaaaaagatcaatagattgcctacccccattgcaggactggaatcacccttcggtcatcgtgcagcctgggaagagacctttacctgtggaatcc

SEQ ID NO: 634467 - DNA, 97 bp, Homo sapiens
aaaagacgaaataccaccggaactggtcgaatgaggcacctaaaaattgtataccgcagattcagggaagtatggccacggctgcattaccggaaag

SEQ ID NO: 634468 - DNA, 75 bp, Homo sapiens
acgggcggcccctggagatgattgagccgcgcacgctacagtacaagaacatttccccagaggagctcaaaatgg

SEQ ID NO: 634469 - DNA, 75 bp, Homo sapiens
cagcctactggtgactcggctgcagaacttgaaggtgcacattcttgatactgaaagttttgaaactacatttgg

SEQ ID NO: 634470 - DNA, 80 bp, Homo sapiens
gacccacagggctgaaggaagctgccttgtacccacatctcccgccagaattcagaaggagctggcggacatcactttag

SEQ ID NO: 634471 - DNA, 73 bp, Homo sapiens
gactgtgctgtcaaaccatgtcaatctttactgaatcaaatggatggatttgatactctgcatagagttaaaa

SEQ ID NO: 634472 - DNA, 98 bp, Homo sapiens
gagaagatgtcttcgcggacggtgctggccccgggcaacgatcggaactcggacacgctgaacatccatgtgggaaacatttccctggtggaccagtt

SEQ ID NO: 634473 - DNA, 100 bp, Homo sapiens
gccaccaccaccaccaccaccacagagtctgtggaagaggtggttcgagcagcctcgtcttacagcgtgactgcaaagaaaaagacttttgttttgcaaa

SEQ ID NO: 634474 - DNA, 98 bp, Homo sapiens
ttgtatttaatttttggaacaatttgatgagctaggagatgtcccctagctgtgctgacctctgcactgtgtagtgttgtcatctggtggattgtttg

SEQ ID NO: 634475 - DNA, 82 bp, Homo sapiens
tgctgctccgtggagatcgtcccgcgcctgccgcccgtgtccaggagccccgccaggtgcccgcgccaggccctcagtcttc

SEQ ID NO: 634476 - DNA, 83 bp, Homo sapiens
gggggacacagagactcacgggagcttcgtccaagcccttgcagacaatgcagatcttcgtgaagactctgactggtaagacc

SEQ ID NO: 634477 - DNA, 75 bp, Homo sapiens
agaatctagacagacaggcctttctaggctggtgcagtggtgtcatcttggctcagtgcagcctcgacttcctgg

SEQ ID NO: 634478 - DNA, 88 bp, Homo sapiens
cagacaaaggcatcattgctttgcgtcatttaaggaccctggttaggagtagaatgggacaatcccgagagaggaaagcatgatggga

SEQ ID NO: 634479 - DNA, 75 bp, Homo sapiens
gtcaggacccatagaaggtctttgagcagagcagataaaatccccccatctctgtactccacctactgccaggcc

SEQ ID NO: 634480 - DNA, 100 bp, Homo sapiens
ctccagttaaggttggaaagatggatgctacttcctattctaccaaaccaaacaggaagcttacttttctctacctagccaatgatgtcatacagaacag

SEQ ID NO: 634481 - DNA, 101 bp, Homo sapiens
ccaacacataaaaattatttatccaacagctcctcccagggtctcacttgtcacccaggctggagtgcagtggcacaaacatgggtcactgcagcctcgac

SEQ ID NO: 634482 - DNA, 98 bp, Homo sapiens
cagccggcgccgagggcttggaatctcgagcgggaaaagaggttggaaagaaccatgactgtattcaggaaggcacatgaactgaagcttctgtcaga

SEQ ID NO: 634483 - DNA, 75 bp, Homo sapiens
tccacagctaagactccaggaccctctggaagcctagaaatgcttggaagctcgaagtctggctgtggccatggg

SEQ ID NO: 634484 - DNA, 75 bp, Homo sapiens
gtacacttactactatcctcattatctccaaaccaagaatactattgtggaggcttctattcagcttcctccttc

SEQ ID NO: 634485 - DNA, 50 bp, Homo sapiens
gcggagctcccccaagagccggaaagagacaagaggagcagcagcggcac

SEQ ID NO: 634486 - DNA, 100 bp, Homo sapiens
accggcctcggcctggatgggcagcgccagagaaaactgtcgctgaaaagcaggagaagagaaatcaggatcgcttgaggaggagagaggagagggaacg

SEQ ID NO: 634487 - DNA, 75 bp, Homo sapiens
tcgtacccacagtgcttcatgagagcaagaagatccttataggaagaaaaagcttcaggagaaaagagaaggaaa

SEQ ID NO: 634488 - DNA, 90 bp, Homo sapiens
gggggcgttagccccgcgcagccgccggcgtcgccgccatggacctaggtgtggatgaggtcaccattgtcaacattttgaccaaccgca

SEQ ID NO: 634489 - DNA, 73 bp, Homo sapiens
cgcctgcgcagccaggatagcatgagctcagacaccgccagggcatgaagacaacagtgagcgaggcagaaca

SEQ ID NO: 634490 - DNA, 100 bp, Homo sapiens
catgagtttgcgacgggaccagtgtgtcttgatgatgagaatgagtttcctcctgttatgaagacagtatggagtttccagaccatagtagacatttgct

SEQ ID NO: 634491 - DNA, 100 bp, Homo sapiens
gtatgaccagccctgggagtggaagaaggagcggatttccaaagcctttgcaggaagagctgaagagagacctgaaaattaagaaagaaaaagacctgat

SEQ ID NO: 634492 - DNA, 100 bp, Homo sapiens
agaccatggagttggtgatctgggatctgggtttgctgatatttctcaccgtggagtctgtgtctgtgctcaacctcttcaccaggatccggtaaacctg

SEQ ID NO: 634493 - DNA, 100 bp, Homo sapiens
tcaagtgataaccaaggaattcaattaagtgcagttcaagctgctagtgttcgaccacctaagaaaagttggaaaaagatcttcaacctttcgggaggag

SEQ ID NO: 634494 - DNA, 50 bp, Homo sapiens
cagctgtactaggactgggaacggggacccagacatggagctgcgggaag

SEQ ID NO: 634495 - DNA, 75 bp, Homo sapiens
gcaattaatcccaagttgcttcagttggtcgaagacagaggttcagctgcgtcaagagaggcccaggacaccaag

SEQ ID NO: 634496 - DNA, 82 bp, Homo sapiens
ctcggacgaggaggacgcgcccgccaccgacatctactttgagccttcacgtaaatgggtccagtcatgcctcccagtaaga

SEQ ID NO: 634497 - DNA, 75 bp, Homo sapiens
ggacacctgaggttcagattaagaaatctgccccaaagtcttagaactgggaactcaaccctatgtatgaaggat

SEQ ID NO: 634498 - DNA, 118 bp, Homo sapiens
ttcagaattgtcagatttcgctttgatgaatcaggtcccgaaagtgctaaaaaggtactaggttttgacaagcttgcatcatgcgtgagtataagctagtcgttcttggctcaggagg

SEQ ID NO: 634499 - DNA, 82 bp, Homo sapiens
acgacagactcagatccaagtcaacagttgcaccaattccagctggacatcactgtgaaaatgggacgggataaagtccgag

SEQ ID NO: 634500 - DNA, 101 bp, Homo sapiens
cggcaatagggaaagtgaggcagctgcaaggagggcggcgggactgcactcgagtgtccagacctgctcgatgggccaagaccagcttcaagtctccatgg

SEQ ID NO: 634501 - DNA, 80 bp, Homo sapiens
cgcccggaaggccaccgctgcgacattgtatgcaaacctgttccattctttcttcgtggacaacccattccaaaaagaat

SEQ ID NO: 634502 - DNA, 75 bp, Homo sapiens
ggcacatggcccaggcagaccttgcagtcaaagtatttgggaataagatgatcattccttccctggatggagccc

SEQ ID NO: 634503 - DNA, 100 bp, Homo sapiens
gtgtttacagttgagcctggatgatcatgttgttgccgtgtgtgctggaaacaaaatattcatgctggatattgagatactgcaggcaaacagctcgccg

SEQ ID NO: 634504 - DNA, 90 bp, Homo sapiens
cagtaatgcctggaatgatgatgtctcatatgtctcaggcttccatgcagcctgccttaccgagcacgaacttccaggagccggtgcagc

SEQ ID NO: 634505 - DNA, 74 bp, Homo sapiens
agccgatggaattcggctctataattcactgaagtcaagtgagagccacgagccaaggtgggcacttgatgtcg

SEQ ID NO: 634506 - DNA, 75 bp, Homo sapiens
agctgctgctggacgccaaccagctccgcgagctgcccgaggaactgtggctgcaccatctgtcttcatcttccc

SEQ ID NO: 634507 - DNA, 100 bp, Homo sapiens
ctctgctctgcctgtgatgtcgagaacactggcacagaagttgggcctcattgggcctccaccacctccactgtcatcagatgaatgggagaaggtgaaa

SEQ ID NO: 634508 - DNA, 82 bp, Homo sapiens
ctttgacaagtttgagtgttgctggaacggttcggataggtcagggaagtcaaagatgcatccctgagttcttcctagcagg

SEQ ID NO: 634509 - DNA, 51 bp, Homo sapiens
gtctggtacagcagcttaagcagcagggtcttactctgttacccaggctgg

SEQ ID NO: 634510 - DNA, 76 bp, Homo sapiens
cccgcggcgcaggaggcggtggagcgcagagcgggcgagcgcggatgaccagtgtcccagtgaaggaacgagtgaa

SEQ ID NO: 634511 - DNA, 98 bp, Homo sapiens
gagctggggcaacctgatctcggctgtcggagtgggtgtcctcaagaaaggtgacttggtcctcgcggacgccagacagatgtacagaagattttaag

SEQ ID NO: 634512 - DNA, 75 bp, Homo sapiens
cttcacagctggctgggcatcaccactgtcttcctcttcgcctgccagctcttccattcctatcctcctgcagtg

SEQ ID NO: 634513 - DNA, 100 bp, Homo sapiens
tgattggacaagcaatcagcagttctcgccgggctggtggtgagattgatcagggaccatgaaaagaaacttgtgcttcaccgaagaaaaatatctaaac

SEQ ID NO: 634514 - DNA, 100 bp, Homo sapiens
ctcagcgccgcacccggaagatgaggctcgccgtgggagccctgctggtctgcgccgtcctgggtgtcatggagaaactccagctgggcccagagattct

SEQ ID NO: 634515 - DNA, 100 bp, Homo sapiens
gcggaaaggataagcctcgacttagaagctaccgagttaccctaagaaagcgggtccatatggaatatttgctggtagggatgcctccagaggactggcc

SEQ ID NO: 634516 - DNA, 82 bp, Homo sapiens
cgcagcactactatgaggggggtgagaagccctaccactgcaactgggacggctgcggctggaagtttgcgcgctcagacga

SEQ ID NO: 634517 - DNA, 75 bp, Homo sapiens
cggcatgtacttctgcatgaacatctccagccaggctacgagttccagggagctctgtcctggtgaccgtgcccg

SEQ ID NO: 634518 - DNA, 83 bp, Homo sapiens
ccggggcagtttcagtctccaccccaaatgcagggccatgatccaaaggaaccagagcagttgagaaaactgtttattggtgg

SEQ ID NO: 634519 - DNA, 96 bp, Homo sapiens
caggatccggctgccgaaggtcctcgccagaatgtctacacaaggaagtacaggatttggcttttctagatgtcgtatccaaacttcgcagtcatg

SEQ ID NO: 634520 - DNA, 98 bp, Homo sapiens
cactcggacttagagctggacacaccgtataaaagagtctaccgagttcaccaagacatctgcttcaaagagagctgtgaaagcacaagcctcaagaa

SEQ ID NO: 634521 - DNA, 80 bp, Homo sapiens
gcttccccttgccgagcactggaccgagaaggacatcctgctgcgacctgagctggaggaactcaggaacaaacattctg

SEQ ID NO: 634522 - DNA, 85 bp, Homo sapiens
tttattcagcggcagtggtgctttcccgaatctcagaatgcctacagaatacgccatcaataaattgcggcaagaaggaagcgag

SEQ ID NO: 634523 - DNA, 82 bp, Homo sapiens
ctgtcccatcaaatcgcgcaaaggggatgtcctgcacatgcactacacgtctattatcctcccagtccacaacgctgaaccg

SEQ ID NO: 634524 - DNA, 100 bp, Homo sapiens
agcagcaagaagcccgcccggaaagggttggggtatgacccccagtgacagaccaggaaatggaggtttcaggagctcaagagctcgtctaagaacatgg

SEQ ID NO: 634525 - DNA, 100 bp, Homo sapiens
ggggcagggaagtgtggtttggattccatcagtctgttcggcctgccatgtggaaaatgatgcttaatatcgatgatcatgacaagatgtttaagatgag

SEQ ID NO: 634526 - DNA, 100 bp, Homo sapiens
tgtggcgacttcatctggggcgtcgtgcgcaaaggcctgcagtgcgcgccgcgagcccagcattgacctgctgcaggccttcgtggagcactggaagggc

SEQ ID NO: 634527 - DNA, 75 bp, Homo sapiens
tatgacatgctggttgaaatcctgagagcaagcaagcgatgaagaacgatacagatacagggaatatgcagaaag

SEQ ID NO: 634528 - DNA, 83 bp, Homo sapiens
ggtacggtccttggagtacggagcctgcagagggtcccacggtggaagcgagagaggaggctgctgatgcaaggaatcccctg

SEQ ID NO: 634529 - DNA, 97 bp, Homo sapiens
ggaggttcgcggctctaacggggctttctacaaggtccaggtcaagacctcgtctccgttctcatagtcgtagcagtgaaaggtccagtcacagaag

SEQ ID NO: 634530 - DNA, 73 bp, Homo sapiens
ggaagcaggactcggggcacttgggtgtttgtaaaatgtatgaagaacatctgaaaagaatgaatcccaacag

SEQ ID NO: 634531 - DNA, 123 bp, Homo sapiens
cagcattcctgaaatacatccaggaaagacatggagattctcttaaaaagggtgataaaagaaaatgtggctgaagttacccgaagttcagcttgcagtgtaattcagaagagttaagaccag

SEQ ID NO: 634532 - DNA, 90 bp, Homo sapiens
cgctgctgctcgccgcgctgcgcccttcggccgcctacttcggggggggccctcagcctcttggccttgaacgggctgttcatcttgatt

SEQ ID NO: 634533 - DNA, 100 bp, Homo sapiens
ctcaagtgaagcaaaagccttccatgattacgagacgcaggtcagaatggaaatgggctgcagaccgggcagctattgtcagccgctggaactggcttca

SEQ ID NO: 634534 - DNA, 74 bp, Homo sapiens
tccgccatcagctcggcagtcgcgaagcagcaaccatggtttggtgcacctcgatttggaggaagtagggcagg

SEQ ID NO: 634535 - DNA, 101 bp, Homo sapiens
cctgtggcctcgctcctcggaggacatttctcttgggaagttgtgcatctgacaggaatatagtactgtacgatatgaggcaagctactcctttgaaaaag

SEQ ID NO: 634536 - DNA, 50 bp, Homo sapiens
tacccagaagtagtccatatggcctatatgaacccaatagcaatggcgag

SEQ ID NO: 634537 - DNA, 75 bp, Homo sapiens
gcggcccgcgcgctgtggcccctgcggcgcttctggaggagcacaggcttctgccacacccactcgcccgggtct

SEQ ID NO: 634538 - DNA, 90 bp, Homo sapiens
gtggttccattaaactgggtgcaggagatgccattgctgaagaaaatgtagatggattccagcagaagttcaccttccacagcaaggaga

SEQ ID NO: 634539 - DNA, 95 bp, Homo sapiens
gaatttaatgctcctgatatattcatgggagtactggccaagtccaagtgtcctcgattaagagaatttttgagagatatcttcaatctcctgtt

SEQ ID NO: 634540 - DNA, 100 bp, Homo sapiens
tcatcttttatacactcttagtgctgtccaggattttgcctaccattttacagtatttgtcttctattttggagcctttttattggaagcagcagccaca

SEQ ID NO: 634541 - DNA, 74 bp, Homo sapiens
atgtgctctgggacctggttgacaggataggtgagggccccaaggctgttgcagctcctcgacctgatcggttg

SEQ ID NO: 634542 - DNA, 82 bp, Homo sapiens
gttcttgtttgtggatcgctgtgatcgtcacttgataaaatttgatgctgggactctccttcttagtacacaccgactgatt

SEQ ID NO: 634543 - DNA, 50 bp, Homo sapiens
cattggggaccatcaccaaacgaaccggccccctggccactgttctaggt

SEQ ID NO: 634544 - DNA, 100 bp, Homo sapiens
tgagatgatccttacggaaaaggaacagattgttcctaaaccagaagaggaggttgcccagaagaaaaagatgttggtcccattccaagatactcctgtg

SEQ ID NO: 634545 - DNA, 101 bp, Homo sapiens
ttcttgggcgtcgttgtcaccatcgtctccgccttccagttcggagagggcaccagtgtcttgtcacctggactccacataggactaattattatactggc

SEQ ID NO: 634546 - DNA, 101 bp, Homo sapiens
ggaacttgactggagatgtgtgtgctgtgatgagtacagaacctgctaaggccatcaaacctattgatcggaagtcagtccatcagatttgctctgggccg

SEQ ID NO: 634547 - DNA, 97 bp, Homo sapiens
ccacaagttccatctaggcctacgagggccccgcccagtgtcccaaggtgaccatgctcttctgtgtgtcagaatcaacaacatagcagtagctgtt

SEQ ID NO: 634548 - DNA, 98 bp, Homo sapiens
cagcttcttcagttccaggaagatgcctttgggaagcatgtcaccaacccggccttcaccaaactccctctgaggatcctgtggaggagaccatcgca

SEQ ID NO: 634549 - DNA, 75 bp, Homo sapiens
ggagttggaatttgtgcaatgtttagccaacccaaattaccttaattgaaactaaatatattttgccaactttgg

SEQ ID NO: 634550 - DNA, 100 bp, Homo sapiens
ctgaggaaacggaatgtggactcgagcggcaacaagagcgttttgatggagcggctgaagaaggctgcaggccaacttcaccatccgggaagatgccaac

SEQ ID NO: 634551 - DNA, 100 bp, Homo sapiens
attcgcagtggtcgcttcttctccttggatgttcgacagcgtcacagatatctctctcacttgccactcacctgtgagttcagcatctgtgaactggctt

SEQ ID NO: 634552 - DNA, 75 bp, Homo sapiens
tttggacatctggtttgatagcggaacttcatggtcttatgttcttccaggagaaagttctgccactaatgaacc

SEQ ID NO: 634553 - DNA, 90 bp, Homo sapiens
gaaatgatagtgatccttggtcaaatggatagccctacacagatatttgagcatgtgttcctgagagctggcggtcaccatggcaatgcg

SEQ ID NO: 634554 - DNA, 51 bp, Homo sapiens
ccaagacactgctggaaaacacagatggactttgagaaaagccgaagtcag

SEQ ID NO: 634555 - DNA, 75 bp, Homo sapiens
gccgccgtgggagggagccatgaagcattacgaggaagctcttcgtgggcggtcttgactggagcacgacccaag

SEQ ID NO: 634556 - DNA, 75 bp, Homo sapiens
aagcccaaggtcctcctcaaccacttcatgctgtgcatcagtgggatgatgagacggacatggcccagctggagg

SEQ ID NO: 634557 - DNA, 83 bp, Homo sapiens
agcagtggagcccaaagacccctggagacatggtgtgaagcttacactctctgctctggtagatgggaagagcattaatgctg

SEQ ID NO: 634558 - DNA, 74 bp, Homo sapiens
ggccagtgggccaccgacctctacagtggctatctggcctttgtttggtgcgagtactccagaaggaactggct

SEQ ID NO: 634559 - DNA, 50 bp, Homo sapiens
ctgaggaaattaggaacctgttggcagctttataaaaagctcaatactca

SEQ ID NO: 634560 - DNA, 75 bp, Homo sapiens
ccctggagtttctgcttcctccagagccaggtcgccatgggctactcacactccttggtgatagcaagagatgaa

SEQ ID NO: 634561 - DNA, 122 bp, Homo sapiens
gctgtgctcgcgctactctctctttctggcctggaggctatccagcgcagcctgcttctgcaaagtggtacgatcgaagggactatgtcttcattgaattttgtgttgaagacagtaaggat

SEQ ID NO: 634562 - DNA, 100 bp, Homo sapiens
taggaagactgccacacctagactgatgcttattagtcatcaccgttattcctactaacgtcctgtgtcactgagttaagtgggcagaccaacatccacc

SEQ ID NO: 634563 - DNA, 75 bp, Homo sapiens
cgaagcacctcccggcgccgggacgcttcttctgtcctgggaactccaacaagggagcaaatcagagaaatgaac

SEQ ID NO: 634564 - DNA, 100 bp, Homo sapiens
gtggaagcaggactgcgccgcgtcttcctcaaggagctccttcccttaacagagctgagagaggcatctggagctgcagcatggaccagcgagagcccct

SEQ ID NO: 634565 - DNA, 83 bp, Homo sapiens
catcaaggagctcatcaaggacgggaagtcactcataagcgcgctcaagagttggacgtgataagtatgagcctgcagctgtt

SEQ ID NO: 634566 - DNA, 100 bp, Homo sapiens
atgactgtgggccatgagtgaccttcaaaggaaagccgggtatctgtggtctttaagatgtggtaagaatgattgatgttggctgatattggagtgctca

SEQ ID NO: 634567 - DNA, 117 bp, Homo sapiens
ccaggtgtaagcgcagaaagcaggcgaacccgcggcgcaataacgggccaattcctgtccccccagcagcatggcatcgtgtgctgaaccctctgagccctctgccccactgcccgc

SEQ ID NO: 634568 - DNA, 90 bp, Homo sapiens
atggaggagtgggttaaattcctcaggagagttgctggcacaccctgtggaggttcttcacacacccccattcggcgtagtacccagaga

SEQ ID NO: 634569 - DNA, 75 bp, Homo sapiens
gcgtgtctgatcctttcattcctcttcaagtacctgatgcaccaggattcctccttggtcacttttcagcagcag

SEQ ID NO: 634570 - DNA, 75 bp, Homo sapiens
tacctggcccaggaggatgggcccgttgtgttagtgtgactctggatccagatacagctcatcacgaactaattc

SEQ ID NO: 634571 - DNA, 74 bp, Homo sapiens
cgacccggcccgtagtgtggaagcagcttcagactccaggttcttcggcctttggactcttggacttacatcag

SEQ ID NO: 634572 - DNA, 75 bp, Homo sapiens
gaccagttgatgggcacctcccgggacggtgctggagaatctggtaaaagcaccattgtgaagcagatgaggatc

SEQ ID NO: 634573 - DNA, 75 bp, Homo sapiens
tcagaaatgcgcagagcaaacatctttcaaagaactcccccactggaaaggattctgaaagaaatgaagtcagcc

SEQ ID NO: 634574 - DNA, 128 bp, Homo sapiens
caggactctagtaacccgcgaaatgatgggatagcgttgcaaatccttaaaagagtcttaacgtcgacagaggtacgttcttggagacacagcaatgcagaagatggccaagtcccatgttttcttaa

SEQ ID NO: 634575 - DNA, 50 bp, Homo sapiens
cgaccgcggcgcgagtcaccatggtaatagcctgcagctggtgttttgag

SEQ ID NO: 634576 - DNA, 82 bp, Homo sapiens
gattttttagtctaaatgatgggcagtcatggtcccagaaacgtcactatcaagaagatgtttccattcctgaaaaacccaa

SEQ ID NO: 634577 - DNA, 99 bp, Homo sapiens
ttacctgggtgagacagcttgagccccatcgtggattccaagacatccctgctgagagagccaaggctggtgtgcagtggtgcgaccacggctcacggc

SEQ ID NO: 634578 - DNA, 137 bp, Homo sapiens
ccccgacatgattccttacttctccgccaacgcggtcatctcgcagaacgccatcaaccagcttagtttatgccaacgtgacttcattcatacagatgaaccaaggatcgggatagcagtataaaattagaatcaag

SEQ ID NO: 634579 - DNA, 136 bp, Homo sapiens
gaacatccgcgtggttcgttgtggcggcagcgagttgaactttaggagagctgtgttctctgcagattctaactgctctgttaaaagcgaaaatgaaacaattgcctgcggcaacagttcgactcctttcaagttc

SEQ ID NO: 634580 - DNA, 98 bp, Homo sapiens
ggagctcgggcgggtcctacagagacagttatgacagttacgtggatgctacccctgacacccgggagctggaattcaatgagatcaagacacaagtg

SEQ ID NO: 634581 - DNA, 90 bp, Homo sapiens
ggagcagctcttgtacctgtatgccaggtacaaacagctgtatttaaacttgaaacagatagaagtatatggcccttgataagaatctat

SEQ ID NO: 634582 - DNA, 76 bp, Homo sapiens
ggaagctatcaggaccaattacaatgacagatacgatgagctgattgggcagaaagtggcccatgctctggcagag

SEQ ID NO: 634583 - DNA, 50 bp, Homo sapiens
gccgcggcggcagcagcagtgagagctccctgatggctcggagatcccgc

SEQ ID NO: 634584 - DNA, 96 bp, Homo sapiens
ggaacaacaacttgcagctcatctctattgatgggccatgtttatgagtggactaagtgaaagcaaacaaacccatgtacacctgaggaatgtcga

SEQ ID NO: 634585 - DNA, 82 bp, Homo sapiens
ctacatccaggagagaatgctgacagtcctgcaggccaatagcttcaccgtctcctctgtcgccgccccttcctggcttcac

SEQ ID NO: 634586 - DNA, 101 bp, Homo sapiens
gtgttgtccacccaagatggagttcctcctggggaacccgttcagcacaccagtggggcagtgcctcggaattgaatgaccttcatatagaagcacttgca

SEQ ID NO: 634587 - DNA, 83 bp, Homo sapiens
agagtcaaccagaaagagattgggtacttaatgagcccacaggcggttttgtgagctgcttccccaggagcagcggagcgtgg

SEQ ID NO: 634588 - DNA, 90 bp, Homo sapiens
aagactaaaatgcttccgatgtggagcagacaagtttgggcaagtgtccagagaatggctgggatgaaagtacacttgaactctttttac

SEQ ID NO: 634589 - DNA, 97 bp, Homo sapiens
aatcttcgcctgaagcagcaaagtgaattgcagagtcagggtttggacagaggagccaaaggccaaatttccactttcagcagttttatttcagctg

SEQ ID NO: 634590 - DNA, 50 bp, Homo sapiens
ccgagatctacgagttccatgagccaaggcaaagagggaccactgtgctc

SEQ ID NO: 634591 - DNA, 100 bp, Homo sapiens
ggccctcagggcacagcccaaggctgtcagcctcccggcccagcccacctttgacacagttttttcttgattgtggaggactagctcgaacagataagaa

SEQ ID NO: 634592 - DNA, 87 bp, Homo sapiens
caggtgctagtaattgagcctcaaaatgaagatggcacatggcccaggcagaccttgcagtcaaagaaatctgaaatagagtactat

SEQ ID NO: 634593 - DNA, 83 bp, Homo sapiens
cagatctgcgcttccagagcgcagctatcggtgctttgcaggaatagctattcagtcagacagaaccacttatcacgttttgc

SEQ ID NO: 634594 - DNA, 90 bp, Homo sapiens
ggactgaagtatccagcgctcattgggaatttagttaagggccatgatccaaaggaaccagagcagttgagaaaactgtttattggtggt

SEQ ID NO: 634595 - DNA, 89 bp, Homo sapiens
ccggaggcggcgggacagagcgcctgcgaccccagtcggtgctccggggaggtcacctgacgaggaggaaacatgccctgaactgtcac

SEQ ID NO: 634596 - DNA, 100 bp, Homo sapiens
tattgatatctatgcgtgtgcattagatcagacaggtctcctggagatgaaatgctgtcccaaccttactggagaaagcaaccagcgagatgaatactgc

SEQ ID NO: 634597 - DNA, 75 bp, Homo sapiens
tcgagacttaccagagccacaagataacgaaggaggcccaacttcattcaataaggagcctgacggatttatccc

SEQ ID NO: 634598 - DNA, 101 bp, Homo sapiens
ttcacagtgctcctgcagtctctctgtgtggctgtaacttacgtgtactttaccaacgagctgaagcaggagagacagcgtctggagaccatcctcagtct

SEQ ID NO: 634599 - DNA, 100 bp, Homo sapiens
aaaagcatccccgaggaggaagacgaatcgttaaacatctgaaagggtcagaacacgatgatgaacgcgttaatttccctcaaagaaagaagaaaggccg

SEQ ID NO: 634600 - DNA, 87 bp, Homo sapiens
cctcaagaatctcgtgctcaccggtttctcccacatcgacctggttcatctttgtcatgcctcctgtggaggcacctcccccttccc

SEQ ID NO: 634601 - DNA, 50 bp, Homo sapiens
aagctgcccgagcctcttttcactgatgatccactgtgtgtggagagtaa

SEQ ID NO: 634602 - DNA, 101 bp, Homo sapiens
cttgaagctggaaaccacttggatgactgcagttggtctttcagagatggcagcagaagctgcatatcaaactgaagctgaaatattccagaagaaacttg

SEQ ID NO: 634603 - DNA, 100 bp, Homo sapiens
gtgaatgaagaacgaacgctggaagtagaaatagagcctggggtgagagacggcatggagtacccctttattggagaagcttttctgaagctcagcagca

SEQ ID NO: 634604 - DNA, 83 bp, Homo sapiens
cgtcggatggggaacccctgagccgcatggactcggaggacagacaatgcagatcttcgtgaagactctgactggtaagacca

SEQ ID NO: 634605 - DNA, 88 bp, Homo sapiens
ccggtaccgctgcagccaccgcggcccccgcggttccctgacatcgtggagttctgcgaggccatggccaacgccgggaagaccgtaa

SEQ ID NO: 634606 - DNA, 82 bp, Homo sapiens
gaaaaaactagccttcttgttgaaagtgaaagtgggagatacattggatcttctcattggagaggataaagaagcaggaaca

SEQ ID NO: 634607 - DNA, 99 bp, Homo sapiens
catggcaatcatgggtttcagcgaggaggagcagctatgcgggatgtagctcattttgggatacgagtctccatcgtggagcctggcttcttccgaacc

SEQ ID NO: 634608 - DNA, 75 bp, Homo sapiens
tcggcggcctacagtcagctcacagttcaagtgctgtgctgtggctttcattgagaagctagacgcccagtcttt

SEQ ID NO: 634609 - DNA, 74 bp, Homo sapiens
gcggcccctggagatgattgagccgcgcacgctacagtacaagatacatcagcccacagcaaggcgggctccag

SEQ ID NO: 634610 - DNA, 83 bp, Homo sapiens
ctcggagttgttggcagctttaaaggtggtttcctagaaacatgattgtttattggcattgatctcacagtctggtgaggact

SEQ ID NO: 634611 - DNA, 50 bp, Homo sapiens
cgccttagaggagccatttttccagttcagtgaattctacagtcttggtg

SEQ ID NO: 634612 - DNA, 75 bp, Homo sapiens
gagctggcggagagcggcctgcgggcgatcgggccgagcacccaccaaggctccggatgtgttccccatcatatc

SEQ ID NO: 634613 - DNA, 99 bp, Homo sapiens
cgccagcccctccgccgcgcggagcccacgaaggggacagcgcagccggcccagagctcgggtctccggggaccgagtctgcagatctccaggggagcc

SEQ ID NO: 634614 - DNA, 89 bp, Homo sapiens
ctggaaactgtacattgaagcagagatatgcacccaatgtccagggagcgtgcaaaatttgtcaaaagtggccttttattgtaaaacga

SEQ ID NO: 634615 - DNA, 100 bp, Homo sapiens
gccagggcctgggcctcgtggcggtcttcagctctgctcctcctgcttgtcccaggaacccaagacagaccaggatgaggagcattgccggaaagtcaac

SEQ ID NO: 634616 - DNA, 100 bp, Homo sapiens
tcaaatgaagaacactttcaagaaccagaatatgcttttaaggctattaaccagggtggccttacatcagtagctgtcagagggaaagactgtgcagtaa

SEQ ID NO: 634617 - DNA, 90 bp, Homo sapiens
ccggtgctaggggtgcaggaggaggacggcagcaaccgcagcagcagccttcaggggtccctgtgaaggtgaccaacgtcaaggatggca

SEQ ID NO: 634618 - DNA, 50 bp, Homo sapiens
ctgcctgctatcaccatcctgggcgagatccctccaaaatcaagtggggc

SEQ ID NO: 634619 - DNA, 87 bp, Homo sapiens
gaagcatacagatctgggaccgaaatttgactatggatcctgagcttgaaaaaaaactgaaagagaataaaatatctttagagtcgg

SEQ ID NO: 634620 - DNA, 101 bp, Homo sapiens
ctggaccccacaatgtttgcagagatgttcaggcccgcagccgtgccgggtgctcttcagcatgtccttcatcccggtggccgaggattccgacttcccca

SEQ ID NO: 634621 - DNA, 100 bp, Homo sapiens
agggccatcccgaaactgtgattgttttctgtctctggatggtcgtcagatccgtgtggatcatgcaggcaagtctgctcggggaaccagaggaggtggc

SEQ ID NO: 634622 - DNA, 74 bp, Homo sapiens
gttattttggaggaagtctgtatgctagacaaggaggtgacaaaaggtgagacactcacctagaacagtgccgt

SEQ ID NO: 634623 - DNA, 88 bp, Homo sapiens
acttggaaatcgatcacaaccaggcattaagttcacacggttcaagctctacgttcgtgacatcaaacctcctgttgggccatttccg

SEQ ID NO: 634624 - DNA, 100 bp, Homo sapiens
tttcattgctttcaaagttcctttgcaaaagaaaatgcatccgatgcagatttatggctcctgaacagttgcactgtaaaaaacccagctgaagaccact

SEQ ID NO: 634625 - DNA, 100 bp, Homo sapiens
cgtgatcttcgtaattccagagcggggcaaactgcttggcacctcttcaataggtgacattcaatgagcagcctgccctacgagtacaagatcgtgatcg

SEQ ID NO: 634626 - DNA, 98 bp, Homo sapiens
acgaatctgcccacccctcctgtaacccagcctgtttcacttcttgtgggtaattccagaattgattggccataccattgtcactgtattactgctca

SEQ ID NO: 634627 - DNA, 100 bp, Homo sapiens
aggaaggccaacgtggaggcctcacgcagctccacagacagccccagctcggtgttcctcagtgtatgtggtagaagaccaaagaagagatgagctagga

SEQ ID NO: 634628 - DNA, 100 bp, Homo sapiens
agttcacgactctgagtgctggtagttacttttggtgacgctgtccagttcccacaatgtatcattccttatctgaaactagacatcctctgcagccaga

SEQ ID NO: 634629 - DNA, 100 bp, Homo sapiens
gcagttcgaaaactggataacactaagtttagatctcatgaggtggatgacaatattccacttagggtaatgctgcttctcatggatgaagtattcgact

SEQ ID NO: 634630 - DNA, 90 bp, Homo sapiens
cgggcggctccgcagtgaccggactcgggggagacgcaaacatgcagatctttgtgaagaccctcactggcaaaaccatcacccttgagg

SEQ ID NO: 634631 - DNA, 76 bp, Homo sapiens
tatcacaaagctatcatcctgccaaactccaggctcagatgtcacagggagaaaactaaagttgccaaagttagcc

SEQ ID NO: 634632 - DNA, 96 bp, Homo sapiens
cgggacgggacgtgcggcccagcgagttggtcggtcccggggtcacccgctacgggaagcaggcctcgccacaggaaatggctagtgatgagctga

SEQ ID NO: 634633 - DNA, 100 bp, Homo sapiens
aactgaacagccagaagaaaccttccctaacactgaaaccaatggtgaatttggcatcctgacatcgaggcccaggagagaggagtccggtgtctacttg

SEQ ID NO: 634634 - DNA, 83 bp, Homo sapiens
cccgcccagagtcatggcggcagcagccgctctgagggcgcctgctcaggtgaaatgacaatggatgctctgttggctcgatt

SEQ ID NO: 634635 - DNA, 50 bp, Homo sapiens
tccagtacccccttgccatggcagcaaagagtacgagagggcctccaaag

SEQ ID NO: 634636 - DNA, 82 bp, Homo sapiens
tgccctgcagtacctgcagaaggtctctggagacatcttcagcaggcacttccgttccggcgcccctccggtcatcaacccg

SEQ ID NO: 634637 - DNA, 88 bp, Homo sapiens
ctttggacttttgtttcaggaaagccctgagcagaaaatccccgtcgaggtcaagatcaagatccaggtctatttcacgaccaagaag

SEQ ID NO: 634638 - DNA, 82 bp, Homo sapiens
aaaccggtagcgcttgcagcatggccatccacggcttccgagagacagagaagtcgcgctggtcagaagccagccgggccat

SEQ ID NO: 634639 - DNA, 98 bp, Homo sapiens
agagatttgaaactggacaatgtattactggactctgaaggccacattaaactcactgactacggcatgtgtaagagtctcgctctgtcctccaggct

SEQ ID NO: 634640 - DNA, 75 bp, Homo sapiens
gagagtgaaggagaaagaagctgaacttaaggaggcagagaaagaggctcatccaaaatacttgagttgtattgc

SEQ ID NO: 634641 - DNA, 89 bp, Homo sapiens
tgagaaatggatggaacgaatacacctcaatgtctctgttctcctgtgcctcctgttggctctctttgcatctggcctcatccaccgag

SEQ ID NO: 634642 - DNA, 100 bp, Homo sapiens
accacgccatcgtccagtatgagtgggcactgctgcagggggacccgtcagtggacatgaaggccacctcaagaggaacatcgtggtgaagaccgtggag

SEQ ID NO: 634643 - DNA, 82 bp, Homo sapiens
gtgctgggcctctgctgcgtcctgctgaccttcgagtgcctggtgaagaatgtgatgggatcactagcatgtctgcggagag

SEQ ID NO: 634644 - DNA, 98 bp, Homo sapiens
gcaccaggacctcgctgggcagctggtggtacatgaactcttttccagtgtccttcaggagatctgtgatgaggaggaggagggggccagtgggggag

SEQ ID NO: 634645 - DNA, 98 bp, Homo sapiens
tgatgaacgggtctgtgggggacctggactatgagaagagtgtggagacaatcaatgatggaaacttccacattgtggaactacttgccttggatcag

SEQ ID NO: 634646 - DNA, 101 bp, Homo sapiens
agtccctcttacttgaagcatgtctttcagagcccggcaccacccatcttgagtatctgctttccagagtgttgaatcttccaccagaaaacttgatcaca

SEQ ID NO: 634647 - DNA, 88 bp, Homo sapiens
ggtggtcaagcgggccacgcacctcgtcaccaaggccaagcatttcttatactgaagcagtggagatcttaaagcaagcatcccagaa

SEQ ID NO: 634648 - DNA, 75 bp, Homo sapiens
gaaaagaagcccaaagttttaaagatttgcctgaagacctggataatctccatttttgtcatggactgttaaaac

SEQ ID NO: 634649 - DNA, 90 bp, Homo sapiens
aagaagtaaaagaagctattattacaagaataaaggcaggaatcaatccattcaatgcaaagccaacaccacttgacctgaggaacaaca

SEQ ID NO: 634650 - DNA, 50 bp, Homo sapiens
aaattacttcttccctggcacagtaacaacccttcagcagcgtctgttac

SEQ ID NO: 634651 - DNA, 83 bp, Homo sapiens
ctccgccgcggcactgatccccacagctgtggcggggccttcgtgggcccgcgatgccaggaccccaacccgtgcctcagcac

SEQ ID NO: 634652 - DNA, 101 bp, Homo sapiens
ccatcatcctgacagctgtgtactttgccctcagcatctcccttcatgtctgggtcatggaaaagcagaccatttggagatgactccatgggctgtgtctg

SEQ ID NO: 634653 - DNA, 83 bp, Homo sapiens
cccgtttccgagccataaaaggtctaggaccgcttcccccgagccagcaggttcggagatgatcgagacgcaggaggacatct

SEQ ID NO: 634654 - DNA, 74 bp, Homo sapiens
tgcagatcgccgtggccaacgcgcaggagctgctgcagggctgggttacgacccctacaaccctgagctgccca

SEQ ID NO: 634655 - DNA, 75 bp, Homo sapiens
tgtggcggcgcccaattacaggcacccacctttaccagtaccgaggtgtgacgtatgcagccaaaggctactttg

SEQ ID NO: 634656 - DNA, 83 bp, Homo sapiens
gagtaaagcaaagagaaaggaagcaggcccgttggaagtggttgtggtgtccgcaatgttgccagtgtctgtctgcagattgg

SEQ ID NO: 634657 - DNA, 100 bp, Homo sapiens
ccaagaagcttggcttcaaacatccagttattggggagaagcaggaagagctagcaaggaagcatgcaaggtttgtcctgtcactcaaccaaactatgga

SEQ ID NO: 634658 - DNA, 75 bp, Homo sapiens
caactatacacctagaagtaatggctcaactgatttacagacaaatcaggagcagtgaggagaatgaataccttc

SEQ ID NO: 634659 - DNA, 75 bp, Homo sapiens
cagcgggtgggcgacctcttccagaagctggattttttatcaagcagaaatgcatcgaacaacgagaatcaagat

SEQ ID NO: 634660 - DNA, 85 bp, Homo sapiens
ccggaaagctgcccagccaccagcaaccccccaggtgatgatgaacagtctacacagatggctgcaagttgggaagatgataaag

SEQ ID NO: 634661 - DNA, 75 bp, Homo sapiens
cccgtggtgaagctcctgcacaaccgcagtaacaacaagtactcctacaccagatctccttcgctgactacaacc

SEQ ID NO: 634662 - DNA, 100 bp, Homo sapiens
agtgttgattctgacagcaatcttctggctctcattcgagatgtcttacttccccaccaacagctcatcaaggaagtggatgccaaaactactcatggaa

SEQ ID NO: 634663 - DNA, 76 bp, Homo sapiens
ggatcaatatttctggattcctgtatgggtgtcgttcagggtcttactgaagtaacacaaagcttaaaaatggaaa

SEQ ID NO: 634664 - DNA, 90 bp, Homo sapiens
gcctgggtgacaatgccttggtttcaacactatcggaatggatctcaaagatttcatgagacaagctggggaagtaacgtttgcggatgc

SEQ ID NO: 634665 - DNA, 75 bp, Homo sapiens
gggtgagaagcccttcgcctgcacctggccaggctgcggctggagccttttgtcatacatgatatggagacactg

SEQ ID NO: 634666 - DNA, 100 bp, Homo sapiens
ctgtcctccagcccgcccccagcctgtggacgcctggcccaccctgagtggtgtgggccgaagatatgctcatgtggtgttgaggaaagcagacattgac

SEQ ID NO: 634667 - DNA, 75 bp, Homo sapiens
gcactacccgtcttgaggaatacctttccaaagtgaaactgatgagatttgatgatccactgttggggcctcgac

SEQ ID NO: 634668 - DNA, 90 bp, Homo sapiens
ccgggagtgggagagattggactgggagactcagcagtgcgcgtcccgggacgactggcgctgtgcgcgctccatgcacgagttttccgc

SEQ ID NO: 634669 - DNA, 90 bp, Homo sapiens
aaagtttgtttgctaccaaacctggaggaaccaagtgagaagaaggtacctctggacatgtcattgttccttaagctccagaagcgggtc

SEQ ID NO: 634670 - DNA, 100 bp, Homo sapiens
cttggctgtacagctcgatctaggttctgcggcacgggatggcggaggcgcctcctgtctcagatgctgttccactgccagggactccctccccatatct

SEQ ID NO: 634671 - DNA, 82 bp, Homo sapiens
tgcagtacctgcagaaggtctctggagacatcttcagcaggttgttttttgagccagtaacaaccccttgcggacattcgtt

SEQ ID NO: 634672 - DNA, 101 bp, Homo sapiens
tgggaatctgcgtcagaagtcactcgcagtcccgtcagcccagattgtatccagccttcagtcatcagacatgttcgttcttggagcaacatcccgtttat

SEQ ID NO: 634673 - DNA, 50 bp, Homo sapiens
catgcccatacgattaaacctgcttgcaggacgaggagcggaggcggcag

SEQ ID NO: 634674 - DNA, 100 bp, Homo sapiens
atcacagcccggaacactggcatcatctgtaccattgtccccagtcctgacttcagttttcatgctgatgagtacctagaagtctacgtttctgcttctg

SEQ ID NO: 634675 - DNA, 83 bp, Homo sapiens
aaggctaccgggcccagcacagccagcaccgcacgccctgcaagggaggaactgtggctgcaccatctgtcttcatcttcccg

SEQ ID NO: 634676 - DNA, 82 bp, Homo sapiens
ggaccacttgccgtgcagttttgaatcctttatgggtagaagagcagaggatggctctgtcattgattatgaactgattgac

SEQ ID NO: 634677 - DNA, 82 bp, Homo sapiens
agatgcccaccgggatggagaaggaggaggaatcggatttttagactctgaggagcagttggagctaatccacattatggaa

SEQ ID NO: 634678 - DNA, 75 bp, Homo sapiens
ctggcggcgggcatcttcttcgtgaggctgctcttcgagcggtataccaagcttggctacgcaggcaacactgag

SEQ ID NO: 634679 - DNA, 75 bp, Homo sapiens
tcactgacggagaagcagtggctcaagggttctcatgtatcagccatcttctgtaagggtgcccagtgtgacttc

SEQ ID NO: 634680 - DNA, 75 bp, Homo sapiens
ggtacctgcactccaaaggtgtatttcaccgcgacctcacatccaagggggcaatggcggcttcctgtgttctac

SEQ ID NO: 634681 - DNA, 71 bp, Homo sapiens
tgaacatcctttgactggttagccaggtcccttcaccgatgttgtcaccaccaacctaaagcttggcaacc

SEQ ID NO: 634682 - DNA, 82 bp, Homo sapiens
gaccataactgatgatgtgcgggttcaggaggtacccaaactgaaggccttggacctccagtctcggatactgaagcgagtt

SEQ ID NO: 634683 - DNA, 83 bp, Homo sapiens
ctcacaatgaggctccctgctcagctcctggggctgctaatgctctgggtctctggtttctttacctccagaaagaagaatat

SEQ ID NO: 634684 - DNA, 82 bp, Homo sapiens
tgggtcctcgcttgcagttcagcgaccacggtggcagtagagaagagcatcacagaagttgctcaggagctgacagagctgg

SEQ ID NO: 634685 - DNA, 83 bp, Homo sapiens
cgggaggaaggaacgaggcaaggagctaaagcagcgtgcgttcagccctgggacaggtgatttggcttctgcacagttaggag

SEQ ID NO: 634686 - DNA, 83 bp, Homo sapiens
ctgcaatcttcacccttgcccggagaccaagcggaactgtggctgcaccatctgtcttcatcttcccgccatctgatgagcag

SEQ ID NO: 634687 - DNA, 83 bp, Homo sapiens
cttggacagatgatgccagttaattactttgaatacaatgcagatcttcgtgaagactctgactggtaagaccatcaccctcg

SEQ ID NO: 634688 - DNA, 120 bp, Homo sapiens
cgcggcggctgcgaaggcggcggctcctgccctctcgctttccctctcgcgtctctggctgcagacaatgcagatcttcgtgaagactctgactggtaagaccatcaccctcgaggttga

SEQ ID NO: 634689 - DNA, 100 bp, Homo sapiens
ctgacagtccgtatagtgtagtgtgcaagtattttcagcgagggtactgtatttatggagaccgctgcaggcccttcctgtaaaacctggctgacacaca

SEQ ID NO: 634690 - DNA, 75 bp, Homo sapiens
gtggaaaacctggctggcctcaagtacagggtcatcaagggcaaggattcttttctcaaaatgctctggcatttg

SEQ ID NO: 634691 - DNA, 100 bp, Homo sapiens
gagtctgggggttcgcgcccgccgacccgcgccctgctccctctcagcacctgggcggacgacaagttggatggcttgaggactggtactaaaaggaaac

SEQ ID NO: 634692 - DNA, 82 bp, Homo sapiens
cgcgaggtccgcgcagcccagcgcagccatgtgtgaacccacatccctgcccccagggccacctgcaggacgccgacaccta

SEQ ID NO: 634693 - DNA, 90 bp, Homo sapiens
gcgggactcacggcagaagtgagctggaaggtcttggagcgaagagctcggaccaagcgctcaggttctttgcagatgtagttccagcag

SEQ ID NO: 634694 - DNA, 75 bp, Homo sapiens
ccgcatcttcacaactccgtcttacagaggagcaggcttcctgggtgtgccagtgtgatgacaacatggttcaga

SEQ ID NO: 634695 - DNA, 100 bp, Homo sapiens
caggagcatcctgaagctgacccaggtagtactctgtggatatccccttggacaaaactgtcgtcaataaggatgtcttcagagatcctgctcttaaacg

SEQ ID NO: 634696 - DNA, 100 bp, Homo sapiens
agcaaaagatttgatgaaagtacttcagggagtcaacggtgagttaaagccttccatctgaagtatgatgaagttcgtctggatccaaatgttcagaaat

SEQ ID NO: 634697 - DNA, 82 bp, Homo sapiens
tcagccatggacgcgtccctggagaagatagctgatctggccaatgaagatactccacagttgtatgtggcctgtggtaggg

SEQ ID NO: 634698 - DNA, 50 bp, Homo sapiens
atcccaccccagtccccaagtacagaggagcctcctcaacaagcccaaga

SEQ ID NO: 634699 - DNA, 100 bp, Homo sapiens
aagaaggtgccggtggtgcgagtcttcggagcgaccccggcagggcttccttctgaactctccccagctattgaggaagaagagtcaaagagtggcttag

SEQ ID NO: 634700 - DNA, 100 bp, Homo sapiens
catctccttctctaagagatgcctgcagcctgccatgggacgtggggtccaccggtacaggctccctggggaagggaatgcagggttgctggggctgggc

SEQ ID NO: 634701 - DNA, 101 bp, Homo sapiens
ctgacggcataaaagggcagaaccatagcagggtgcggggttgccctgctgtcagacgtctatcctgagaaaatcttgccggacttgttggctcaatatga

SEQ ID NO: 634702 - DNA, 100 bp, Homo sapiens
tgcacgagaccgggctggccatgatctatgagacagagtttcaccatgttgcccagactggtctcaaacacctggattcaagcaatccactcgccttggc

SEQ ID NO: 634703 - DNA, 83 bp, Homo sapiens
cgcctgcgacctgcccgcctggggaaatcctcattgacgattcaatttgttgaaggccaatttgtggactcctacgatccaac

SEQ ID NO: 634704 - DNA, 75 bp, Homo sapiens
gagaacacaaagaagtgtgatgtcccacaggatcacatgttgaatggtgtaaacagcttatagctgctacaattt

SEQ ID NO: 634705 - DNA, 90 bp, Homo sapiens
ctgaactgaagaagcttgggctcacttccacaaatgtcatttggatccaggattcctagcaagtgacaaaacatctggcaatgcgccact

SEQ ID NO: 634706 - DNA, 75 bp, Homo sapiens
gggcacccaacttcagcctggagcggacactggcagccgagatggatctggacgttggtggttggctatgtgttg

SEQ ID NO: 634707 - DNA, 100 bp, Homo sapiens
cagctatttacagtggacagaaactgaaggggtgaaagaaaacccaaggtcatcatcagatttgaaatatttaaagtggatacaaaactatttcagcaat

SEQ ID NO: 634708 - DNA, 74 bp, Homo sapiens
ggacggcgagcgcgagcggcgcgagaaagtgaccagcgccatgtccagccaggtggtgggcattgagcctctct

SEQ ID NO: 634709 - DNA, 100 bp, Homo sapiens
atcaagattaagaatgaagttgactctactttgaccttccgaagatcatgcagagaaggttggatggcaagcatgtggtgtttggcaaagtgaaagaagg

SEQ ID NO: 634710 - DNA, 82 bp, Homo sapiens
gatcatggccgcagccgctctggggcaggttgggcccgaaggcatcctgcagaacggggctgtggacgacagtgtagccaag

SEQ ID NO: 634711 - DNA, 101 bp, Homo sapiens
ccggctgtaaggagccgcggcggggggaaaatggagcccttcaccaatgaagagttaccttgtacatgcccactatgtacctcagacagagggagctgtgt

SEQ ID NO: 634712 - DNA, 50 bp, Homo sapiens
ctggtcttgaactcctaacctcaggtgatctgcctgcctcagcttcccaa

SEQ ID NO: 634713 - DNA, 100 bp, Homo sapiens
ggagactctccctggaaaacttcccttccctttcggattaacacagattcctcagatccagaagactgaaatttcctttcgtcctaatgatcccaagagc

SEQ ID NO: 634714 - DNA, 83 bp, Homo sapiens
tccacccaccgccgccgcctcccaggtgacaaggagccctgtgcacatcccaactctcgattttgtgccccggctcgccagtg

SEQ ID NO: 634715 - DNA, 96 bp, Homo sapiens
gcagcggcggcggggagcgaccgggagcggcggcagcggcggcgcggaggcggctgaggtgcgagccggtgccaatgggtcatgtttggttagaag

SEQ ID NO: 634716 - DNA, 98 bp, Homo sapiens
tcgccctctgggaggcttaccgagagtttgaaagtgcgattgtggaagctgctcgggtggctgtgaaaaacaatatcgatgtcttctacttcagctgc

SEQ ID NO: 634717 - DNA, 141 bp, Homo sapiens
caacctttgagggagaaggacatcatcatcaagagggagatggtgtcccaatacttgtacacctccaaggctgaacagattatggcctttgcaagcaaatgagtactcctctcctaaagaaagattacgttgatgaaaaag

SEQ ID NO: 634718 - DNA, 100 bp, Homo sapiens
gtgacactgaccaccaggccaacttaacatcagcagatatcctgtctcagatgaagagattatcgaatgtctgaaagaaaacaagaagcagctaagcacc

SEQ ID NO: 634719 - DNA, 100 bp, Homo sapiens
agttacatggagatttcattgttccagccagaatcctatccatcttcttcaccgatatggtttgtggattctgaagacccaaatctgacatcagttctgg

SEQ ID NO: 634720 - DNA, 147 bp, Homo sapiens
taaggctcagttatctaaacagagttcttttgcatctttattaaatactaatattcccattggaaataagaaagatgaggaaattgaggcacagagattaactaatctgaaccagataatgccataagtagtagaactgcgatgcaa

SEQ ID NO: 634721 - DNA, 75 bp, Homo sapiens
cttccaggttacatacagcttacatcttgcatcctcaagcggcccctagcagtcttcttgatgctttggaacaac

SEQ ID NO: 634722 - DNA, 90 bp, Homo sapiens
cggcggtgtggacatggtcacggacgatgaccgtcgctggaaggcggtgtggcaaaggagcagagaactttgacaagttcttcacacgag

SEQ ID NO: 634723 - DNA, 82 bp, Homo sapiens
gaatgtgatttgcttgaagatatgaggcttattgtgtaacagaacctggagcaggctctgatgtagctggtataaagaccaa

SEQ ID NO: 634724 - DNA, 100 bp, Homo sapiens
cctgagcctgacgcccgagcagtggaagtcccacagaagctacagctgccagggaagtatgtgggctcgcgccccatcaagcttcgcaagagcatgtgga

SEQ ID NO: 634725 - DNA, 100 bp, Homo sapiens
atgaagagagagaagagggcagagccgtgcatggggctgctccccaggacctgagcaggaacctggagttttcaggccagatcagaaaagggagctcagg

SEQ ID NO: 634726 - DNA, 74 bp, Homo sapiens
atgggagacgagatggatgccatgattcccgagcgggagatgaaggtccagctgggagctccccgacctccagg

SEQ ID NO: 634727 - DNA, 71 bp, Homo sapiens
tctgccctgcaagcgataggagtggaagcccaccaggcataagggccatgtgttctgaaattattttgagg

SEQ ID NO: 634728 - DNA, 83 bp, Homo sapiens
gtccacccaccgccgccgcctcccagcctcctgcccgaaggccacctgaacctaacggctccctgcaacgctgcctgcagctg

SEQ ID NO: 634729 - DNA, 88 bp, Homo sapiens
tgactccaacccagaaccgggagaaatggatctactactgcaatggccatggtacgcagattttctgaggcattcttttgttttgagc

SEQ ID NO: 634730 - DNA, 100 bp, Homo sapiens
atcgcccccgagcgctgcgtcctgcgggtgggccaccctggagaaatgtgccacgtgctcccagcccatcctggaccggatcctgcgggctatggggaag

SEQ ID NO: 634731 - DNA, 98 bp, Homo sapiens
tcggctgcagacttggccaaatggacgggactattaagcactttcctgagcacctggaccactttacggagaacatggaggacttctccaatgacctg

SEQ ID NO: 634732 - DNA, 51 bp, Homo sapiens
cttcgtacccacagtgcttcatgagagtgagctgatccagtttattacaac

SEQ ID NO: 634733 - DNA, 90 bp, Homo sapiens
ccaacaacttcaaagtaaaatcagtttaatttcagaaaaggtttctgaaggattgtcattcttgcatagcagtgtgaaaatggtgcatgg

SEQ ID NO: 634734 - DNA, 82 bp, Homo sapiens
gctgctgcctcgcgcccgggagcaggaggagctgctggcgcccgcagatgttctccaaggagaagtacatcctggactcatc

SEQ ID NO: 634735 - DNA, 50 bp, Homo sapiens
cctggcaggccctgcgcaccaggatgatgactttgagttcactggcagcc

SEQ ID NO: 634736 - DNA, 96 bp, Homo sapiens
aagacaacgctgaaggctcggtgcagcagccctgcaaaggaaacttttgagaagaactttgaaagagaaacccataaaataagtgagcaaaatgat

SEQ ID NO: 634737 - DNA, 115 bp, Homo sapiens
ttcagtgagtcatcgctgacagctgaggaagtctgcatccacattgcacataaagttgacagccgatcgccagtacatggagggcttcaacgacgagctggaagccttcaaggag

SEQ ID NO: 634738 - DNA, 75 bp, Homo sapiens
cgcccgaggcgtctgggatggtgtgggaccggacaatgcagatcttcgtgaagactctgactggtaagaccatca

SEQ ID NO: 634739 - DNA, 90 bp, Homo sapiens
gtgcggggcgccctccgccacgcagccggccaccgccgagacccagcacatcgccgaccagggccacccccttaaccctcgggactactg

SEQ ID NO: 634740 - DNA, 101 bp, Homo sapiens
caggcggcgcagtacaccaacgcggtgcgcgaccgggagctggacctccgggaacatggtccaagacaattcctgggaaagttcagttcttctcaagtgag

SEQ ID NO: 634741 - DNA, 82 bp, Homo sapiens
actttgtggtagattactatgagaccagcagcctctgctcccagccagctgtggtcccatcgatggtatacatgacaagggg

SEQ ID NO: 634742 - DNA, 83 bp, Homo sapiens
ctggacgttaaagggaagcgggtcgttatgagatgacagtcatgtccctttccagggacctcaaggacgactttcacagtgac

SEQ ID NO: 634743 - DNA, 100 bp, Homo sapiens
gcccagaggatcggaatgacagatgtgcctgtgtagatcatcctagaatacctgtgtggtgctgtccttcctcaagactacctcattctcactggctcgg

SEQ ID NO: 634744 - DNA, 97 bp, Homo sapiens
gtcacctgttggctggtcacaatggcccactgcgtgaccttggttcagctgtccatttcctgtgaccatctcattgacaaggacatcggctccaagt

SEQ ID NO: 634745 - DNA, 98 bp, Homo sapiens
gagagtgaagctggaagattctggtgtccacgtgatcattggggggcacgattctccctctcctagaggcgtgggcatccccaccatcagatggtgcg

SEQ ID NO: 634746 - DNA, 100 bp, Homo sapiens
aaattattttagttttggaaagatcctcttcagaaataccactatcttcctgaagtgttcaagtgaccttgatccttcgatgatattggacactggagag

SEQ ID NO: 634747 - DNA, 97 bp, Homo sapiens
aaatcgggctgaagcgactgagtccgcgatggaggaagccagttgagggaagttctccatgaatgtacgtcacaatgatgatgaccgaccaaatccc

SEQ ID NO: 634748 - DNA, 85 bp, Homo sapiens
aaaaggaaaaaaacgaagacagtgaaaatgattggagtattaacattgttctcaaaagtctatggtcctgtgttcaccgtgtatt

SEQ ID NO: 634749 - DNA, 74 bp, Homo sapiens
caggagcgcttggggatcctccaaggaacaaccttatattatcagcctggcctcctgtatggtggatctgtgga

SEQ ID NO: 634750 - DNA, 100 bp, Homo sapiens
gctgaccatctaccacctcaggaatcaagattgcagaatacatcttcaagacctggaatgtatccggatgaaaactttcggaagagaaagttgcctgtgg

SEQ ID NO: 634751 - DNA, 83 bp, Homo sapiens
atctgcgccacttgtccgcttcacactccgccgccatcatggtgaagctcgcgaagacaaatttacatgtattggagaccaga

SEQ ID NO: 634752 - DNA, 51 bp, Homo sapiens
atctccgtgctggccgatgagtaccagatgctgagatgaatcgtcacctgt

SEQ ID NO: 634753 - DNA, 98 bp, Homo sapiens
aagattcgaggcggcgggggacaagtcggcgccccagagcggacgaggtagatcgacacttgagaaagctggatcaggaactggctaagtttaaaatg

SEQ ID NO: 634754 - DNA, 90 bp, Homo sapiens
atcgtactgatggatttgctgaagcaattcagcagtgtcatcattaggctgtctttgtgccttaacagtattgatcaggtattgtaatag

SEQ ID NO: 634755 - DNA, 74 bp, Homo sapiens
ttgaggagaatgtatatgctgtcatgggttaatctctcaggtggagattctgcctcagggccatgagagtccca

SEQ ID NO: 634756 - DNA, 75 bp, Homo sapiens
ctaaaaccggcaacggggagattgtgaaatatatccttgaccacggaactcaacagaggcaattattatcccgac

SEQ ID NO: 634757 - DNA, 75 bp, Homo sapiens
ctgctatctccgtcgcctcaaacaggagctgatacggagacatggtgcctaagacgattgcagggaagatcttcg

SEQ ID NO: 634758 - DNA, 101 bp, Homo sapiens
cgtgtctcctcctagtgcttcccgtctcagaggcaaactacatccacgacagcgatggcagttccagcagcagccaccagagcctcaagagcacagccaaa

SEQ ID NO: 634759 - DNA, 100 bp, Homo sapiens
atgaagaaaattaaaaaactggagaatgacaccatttctaagcaacttacattagaacagaatgacatcactcctttacatgttgcatcaaaaagaggaa

SEQ ID NO: 634760 - DNA, 125 bp, Homo sapiens
tcgcggctcacgctgagagggacacgcagtgacgagcggccgaagcagctttgcgttccagggtctccctccactgctgtagtaacccgggtccggggcctcggtggtgctcctgatgcccctca

SEQ ID NO: 634761 - DNA, 100 bp, Homo sapiens
tcagctgtgcacaagatagaagagggacatattggggtatattacagctcgggttcatgacgctctcgatattcctgtgcagaaacctggaccacgtcta

SEQ ID NO: 634762 - DNA, 97 bp, Homo sapiens
ggcgcgggcccgggcagccgaggttgaatcgctcctagctgacccctcacgtctcttatgatacgtacagaaagcaagagcagcccatgccgtccgg

SEQ ID NO: 634763 - DNA, 100 bp, Homo sapiens
tagagttattcacaatgcctccataatgaatgctgtaggctgctgtggtttacagaaaacaacagttttgttggcatgtgaagctccagtttcctcaaag

SEQ ID NO: 634764 - DNA, 82 bp, Homo sapiens
cctgagatcgtcaagtctcccagcgaccccaagcaataccgcttaaagcttttcaagccaggccaagaagctgtgaagtacc

SEQ ID NO: 634765 - DNA, 90 bp, Homo sapiens
gtggccatggggagcctcagcggtctgcgcctggcagcagattccaacaatgtctcacccatcttggctgccacccaaaagcactggtga

SEQ ID NO: 634766 - DNA, 100 bp, Homo sapiens
tctccagatgctagggttatgggggaaaacatatccatttcggggcgcctttccaccagtatggaatcccattgcatatttggattacaataatctgtgg

SEQ ID NO: 634767 - DNA, 82 bp, Homo sapiens
ccagactgattgtcatgctcagggaccctgtggagagccacaacacatgcgtgtatcttgcttgggctatcttccctgctct

SEQ ID NO: 634768 - DNA, 100 bp, Homo sapiens
cgcaagatcgtcttcagctgttcatagctgccttgtctttgaagatgctcccaatggggtggaggcggccctggcagctgggatgcaggtggtcatggtt

SEQ ID NO: 634769 - DNA, 97 bp, Homo sapiens
aatcatatctgtgaacagacaaggttcaaaaactaagcatccagaggccctgagcagctttcagcactggagacctgcctgaccagtgcacgcccaa

SEQ ID NO: 634770 - DNA, 83 bp, Homo sapiens
atacagcctgtgcacatcctgacttctgtgagctcattgcgcgggactagggaggtagctacagcaagctgggtagcaggcag

SEQ ID NO: 634771 - DNA, 90 bp, Homo sapiens
gcgcgggcaggcgggaggcaacggagctaccagccgcataagcagtactataatggatgtagacagcacaatttccagtgggcgttcaac

SEQ ID NO: 634772 - DNA, 50 bp, Homo sapiens
aaagaagtgggaaggatctgcgcggagctggaagtcgagtgtgctactca

SEQ ID NO: 634773 - DNA, 99 bp, Homo sapiens
ctgaccctcaaacagcagtatgatgaactggaggctgagtacgacagcctcaaacaggagctggagcagctcaaagagacctggcgcactgtcatgcct

SEQ ID NO: 634774 - DNA, 90 bp, Homo sapiens
ctcgactaccacaaccccgccggcttcaactgcaaaggttttaattacaacaagaacggctgctgataattttagcacccagtatgtttt

SEQ ID NO: 634775 - DNA, 91 bp, Homo sapiens
cgagatatctggccgcctctgccgcagctggaggaacttgctactaccagcaccatgccctaccaatatccagcactgaccccggagcaga

SEQ ID NO: 634776 - DNA, 75 bp, Homo sapiens
gaagaaaggaggtcattgaaggaggccctggcttaggcatgtcctctgcttaaagcttttcaagccaggccaaga

SEQ ID NO: 634777 - DNA, 100 bp, Homo sapiens
gatcggcagaaagtgttgacactggaagaacgttgcagcaaattagaagcttgaagctcaactagagaaaaaggaccaacaatttaaagaacaagaaaag

SEQ ID NO: 634778 - DNA, 105 bp, Homo sapiens
ggcgttatgacaggaagcagagtggctatggtgggcaaactaagccgattttccggaaaaagtttcgccgtgaggaagatgcggaaaaggctgtgattgacttga

SEQ ID NO: 634779 - DNA, 99 bp, Homo sapiens
gatgcacatgatgttaaagatgtgtgcctgacatttttggaaaaaggagccaatcctaatgcaatcaactcatcttggccatttcatcacccagttaat

SEQ ID NO: 634780 - DNA, 99 bp, Homo sapiens
gggcatgcacgtgatactcacacagtggcttctgctcaccaacagatgaagacagatgcaccaacgaggaatggcggcgctagatagtaaggcatcagg

SEQ ID NO: 634781 - DNA, 80 bp, Homo sapiens
accatgaagacttgaacttaatacagcaagaaagaccatcaagtttaccaggatagctgggagtatggccaccctgctcc

SEQ ID NO: 634782 - DNA, 97 bp, Homo sapiens
ttatgtggtgcagttctactaatagtatagggtaaaaggacaaacttgcgtaaaactggctcagagcgtatcgctcatggaatgagggtgaaattca

SEQ ID NO: 634783 - DNA, 100 bp, Homo sapiens
cctgcatggagtcttgtgaaatcgcgtggactgcaacacccagcagcgcggtgtgatgaatgcagactctgctaccattttggctgtttggatcctcctt

SEQ ID NO: 634784 - DNA, 80 bp, Homo sapiens
atctcgctcggctgcgggaaatcgggctgaagcgactgagtccgcgatggagattcttttcctgggcccactgatgcagc

SEQ ID NO: 634785 - DNA, 83 bp, Homo sapiens
atcacggcggccgcagtggcgtcctggagccctcctcaggcatgtcgggccccaggcctgtggtgctgagcgggccttcggga

SEQ ID NO: 634786 - DNA, 80 bp, Homo sapiens
tgaagtgtgagcactgcacgcgcaagactgaaatcgccaagagattgaatacgatttgtgcacaagtcatcccatttctg

SEQ ID NO: 634787 - DNA, 51 bp, Homo sapiens
gaccaccaaacaggctttgttgccacaatagagtgatatttaagcaactcc

SEQ ID NO: 634788 - DNA, 100 bp, Homo sapiens
cggcaagatccagatcgggatttacgtggagatcaagcgcagcgatgaacactctgctccagccaaggtggtgagggcagctgttcctaaacagcgcaaa

SEQ ID NO: 634789 - DNA, 74 bp, Homo sapiens
ccttgcccgcatctatagtttccagatggctctaacctcagtggattggattcagcatcaaaatacatctactc

SEQ ID NO: 634790 - DNA, 78 bp, Homo sapiens
agggggatttggaaatgtcatccgatggcacaatcagtcatccgtccttggctcaggatttggagagcttgcaccacc

SEQ ID NO: 634791 - DNA, 100 bp, Homo sapiens
cctggacggcttcatcctcaccgagcgcctgggcagcggcacgtacgccacggtgtacaaggcctacgccaagatgaaataccgagaccgagctgcagaa

SEQ ID NO: 634792 - DNA, 75 bp, Homo sapiens
gttcgttgtgccagcgactaaaaagagataatcagcaactgctgtgatgagatgctgcctttaatgctgctgcat

SEQ ID NO: 634793 - DNA, 74 bp, Homo sapiens
ttaaagtaacagatgatttagttaataactgaagtgaagtgatggactccgatttggagagtagtaagacgtga

SEQ ID NO: 634794 - DNA, 100 bp, Homo sapiens
catgcatctgatgctctctctccagtccttgctgaagagactttccgttacatgagaactgcaaccatgaatgaagaaaatatagatggaacaaatggat

SEQ ID NO: 634795 - DNA, 128 bp, Homo sapiens
cttcaagaaagacttgatggtctggtagaaacaccaacaggatacattgaaaggcctccccatggccacccatggaccagtcggcattcacttcctcccttctgcggcccataaaagccctgggttca

SEQ ID NO: 634796 - DNA, 106 bp, Homo sapiens
gtgtatatcaagccacaatttccatcaaaaagtgattaagcagagaatggagaagaaggttgattccagatatttggagttcttacaacatggcagacattgacaa

SEQ ID NO: 634797 - DNA, 88 bp, Homo sapiens
ccgagagcgcgaatatcgtcatcgttagaaggtagcaatgaagtgatgaggatactgatctctagaagcctgcttcaggagtagaacc

SEQ ID NO: 634798 - DNA, 118 bp, Homo sapiens
ttctaaatgaaccaaatatccaagacccagctcaagcagaggcctacacgatttactgccctgggcgctgcctatggcacagccaagagcggtaccggcattgcggccatgtctgtca

SEQ ID NO: 634799 - DNA, 83 bp, Homo sapiens
ggaaagggccgcctcgtctccgctcctgggggaccgcagcaataccaagaaggagggtgacctgatagctgctcaggctcggc

SEQ ID NO: 634800 - DNA, 75 bp, Homo sapiens
tgcagaatgcagaaatcatcagaaaaatgactgaagaatttgatgagataggactgaggctttcagtgcatactg

SEQ ID NO: 634801 - DNA, 73 bp, Homo sapiens
ggcgcccaggcctggggcaccgcgagtgccgaaccttcggctggaggcagtggagaaggtgacacagcacatc

SEQ ID NO: 634802 - DNA, 100 bp, Homo sapiens
gtctttaataggcccaggatagagaccttgcagaaagaaaaagtgaaaggagttaccaatcagactggacttaagggtctcgctgtcgcccaggctggag

SEQ ID NO: 634803 - DNA, 100 bp, Homo sapiens
agcattgtttctagaacatgaggatttaagtgccctgtatgctcaaaatttgtatcctcagatgaaatggatttgcatcttgtaatgtgtttaacaaagc

SEQ ID NO: 634804 - DNA, 90 bp, Homo sapiens
tggcaggatcctggtatccgctaacaggaggagccgaggaaggtctgcttcacctacgacctgttcctgaacctggaaggcaacccgccc

SEQ ID NO: 634805 - DNA, 75 bp, Homo sapiens
cgggtacctgcggccaattcggtggaacgaggacgcggactgcgaaggcaggctggagtgcaacggtgcgatctc

SEQ ID NO: 634806 - DNA, 100 bp, Homo sapiens
gccatcgtgactctagggttagcagaaccatccaccaacataagtttcccattggtcactgtacacttggaaaaaaagtatcaccttgggtaggcttgcg

SEQ ID NO: 634807 - DNA, 100 bp, Homo sapiens
gctttctaaacaactctgtaatgattctcacctatgccctcatgaacgatgatgaggacagtgattaccaccaggaggcctacaaggagtcctacaaaga

SEQ ID NO: 634808 - DNA, 83 bp, Homo sapiens
agaaactgcaccggaaatgtgcctaccaggtaaatgagctggatggtatcccgttgatcctggacaactgcaacatcagtgac

SEQ ID NO: 634809 - DNA, 100 bp, Homo sapiens
ggactacgacgtccctcaaaccttgcttctaggagataaaaagattttctctgtgggcagttctttttgttttgggaagacttctgactttaattctttc

SEQ ID NO: 634810 - DNA, 75 bp, Homo sapiens
ggagcctcagttggaagcagccgatccagcctgcggagcctgtggggcaggtattctctgaaaccaaatgaccaa

SEQ ID NO: 634811 - DNA, 100 bp, Homo sapiens
cagtttacaccttaccccaaagaggagctggtggtgtctgtcgattgactgagtgctggagctggcagccctgtgcaggctgccacctttgcccctttac

SEQ ID NO: 634812 - DNA, 132 bp, Homo sapiens
ctaaatcaagcttggaatgatcatcaaacagctatggtgatgattagagacatactaatgtacatggtaagtggaggtatacttcgaatttttccagaaggcaaagcccagtttgctgacattgaacccaaa

SEQ ID NO: 634813 - DNA, 88 bp, Homo sapiens
cgggacccggttccccggcccacagtgggggtgtgcaaacccgagagaactgggctctgacgcccgctctgcggcttcggtgtttgaa

SEQ ID NO: 634814 - DNA, 75 bp, Homo sapiens
tttaattttagggtcctttatatagaagggagagtagcttgttggggagttcctggaagtgacttgcatcaatcc

SEQ ID NO: 634815 - DNA, 50 bp, Homo sapiens
ggccctaaccacagagtcaccttgaggcctatgaacgctctgagagcttg

SEQ ID NO: 634816 - DNA, 83 bp, Homo sapiens
ctgtaaagtcatcacctcctgggatcagatgtgcattgagggtggagccagccatcctgagacgtccgtacagcccgtactgg

SEQ ID NO: 634817 - DNA, 82 bp, Homo sapiens
ctcacagttgaagcctgattgcagagcttactcacatagcatattggtatatcaaaatgaaatgcaaggaaccaaaaataac

SEQ ID NO: 634818 - DNA, 100 bp, Homo sapiens
acttcatccagtttgctacggtctacggggcagagcaggccggatcacctcaacagtcacgtcagacaagtgcactcaacagaacggcccttcaaatgtg

SEQ ID NO: 634819 - DNA, 75 bp, Homo sapiens
cggcactgctactgcgaagacagctggcaggacactcatgaggaccatgatacttccactgagaatacagacgag

SEQ ID NO: 634820 - DNA, 75 bp, Homo sapiens
caaaaagtgattaagcagagaatggagaagaaggttgattccagtttgcagttaacatgtttcgaacattaccac

SEQ ID NO: 634821 - DNA, 75 bp, Homo sapiens
aactggaggaaaaggtcgcctctttgctgcaccaggtgtcctggagacagtcaccttcaggccattcagaggagg

SEQ ID NO: 634822 - DNA, 100 bp, Homo sapiens
gaacagcgatctgaactttctggggaacagaccagttgtgatggctctgagagattcctctgcgaatctgtttttagctatcaagtggcatccacgctta

SEQ ID NO: 634823 - DNA, 110 bp, Homo sapiens
ccctgcactgccgcttcggtcactactcaatgtacttctccagttcctacccttcctcaagtggggaactcaggagaccaagcaggggcaactgtacttcggatggtcag

SEQ ID NO: 634824 - DNA, 87 bp, Homo sapiens
ccaaagtcatgaccgtgtccctgcacaaattctccccaggatttttcccagaaatgacagactttttcattgaatgatgaggacaca

SEQ ID NO: 634825 - DNA, 83 bp, Homo sapiens
tgcaagctctttgacacacagcagttcttgtcagaccaaactagagtcagaacgaatactagcatcagtggggaagaaacctc

SEQ ID NO: 634826 - DNA, 83 bp, Homo sapiens
tgacgagggctttgcgtacagctcccaggagaaggcttgccgagggcccaaagctcagtcggacaagtgcgttcctgaccgag

SEQ ID NO: 634827 - DNA, 76 bp, Homo sapiens
agggtcggactcccggggccatggccggaatgcagtaccctcagcagcaggctatagaaagcgcaattggtggtaa

SEQ ID NO: 634828 - DNA, 89 bp, Homo sapiens
ggtactactgcttgctgtggcatttggacatgctttagagagagcagtcagtggaagagcatctgcaatgtcaaacactcctacccaca

SEQ ID NO: 634829 - DNA, 82 bp, Homo sapiens
ctgaagacagagggctctgatctgtgcgacagaaaacgcttcgttaagggactcaggcagtacgggaagaacttcttcagaa

SEQ ID NO: 634830 - DNA, 113 bp, Homo sapiens
gcccggaccgtgtcgccgacgccaaaggggacagcgagtcggaggaggacgaggacttggaaggtatcctgctgtccatcggcccgcagctagtctatccacccaaccgcccg

SEQ ID NO: 634831 - DNA, 100 bp, Homo sapiens
aagaaattgggaacattatcacaaagctatcatcctgccaaactccaggctcagatgtcacaggtacatctccgttcatggatgcattaacagccaatgg

SEQ ID NO: 634832 - DNA, 100 bp, Homo sapiens
caagcatggtgctttttatgaagaggatagacattgcgggcctaggccactgtgacttcatgaacagaccagtgtggatgggatcactgctcagcctttt

SEQ ID NO: 634833 - DNA, 73 bp, Homo sapiens
gcggacggtgctggccccgggcaacgatcggaactcggacacgctgcccgaaaccatgttaatagaatgtgcc

SEQ ID NO: 634834 - DNA, 90 bp, Homo sapiens
ctgaactacacagcctactacccaagggttgtctacaaccggagctctgggctcgtgtccaacgcccctggtgtccagatccgcgtccct

SEQ ID NO: 634835 - DNA, 82 bp, Homo sapiens
cctgctgggcttcgtccagatcgggaaggccgccaagctgagccaccaaagaaggaggctgccaccacggggccgcaggtga

SEQ ID NO: 634836 - DNA, 100 bp, Homo sapiens
gtcgtcgtctgccttcgcttcacggcgccgagccgcggtccgagtgcttttgaagatgatgatatcacgcacgttgaaggaagtgtagatcctattcgag

SEQ ID NO: 634837 - DNA, 100 bp, Homo sapiens
cttagggtgaaacaaatacctttgaggtttaaatcagctctctatcaatatcagctcacatcattgaaaagataattttgaagacatgttttgctgaaaa

SEQ ID NO: 634838 - DNA, 99 bp, Homo sapiens
agatgggaccacatcagtaattattcttgatgttggagtccggggtgacctggtctcagtgaagaaatctttaggccggaatcgactccttcctcaggg

SEQ ID NO: 634839 - DNA, 100 bp, Homo sapiens
cagaaaatcattctgccttattacgccgtctccaagatgtagctaatgaccgtggttcccactgagtgtggaatcttccgacgtgaactggaaaaagaag

SEQ ID NO: 634840 - DNA, 82 bp, Homo sapiens
ggcttcagtgcagacgcagtggtggccctggagcagtatgccagcaaggagcacgtgaattgcctctgcttacgttcaggcc

SEQ ID NO: 634841 - DNA, 75 bp, Homo sapiens
ccccgcccggccagccgccccgtccgggagcttcgagagctgtgcccaggagtgaacaaccagccctacctctgt

SEQ ID NO: 634842 - DNA, 75 bp, Homo sapiens
tcacggagattgtcttctgtgctgtcacctcgaatgagcaggtcaagcaggtgagctcaggagataagatggaag

SEQ ID NO: 634843 - DNA, 75 bp, Homo sapiens
ttccagaaatgatggtggatcattgctctttgaattccagtcccgtgtgcaatggatgagcttcatagtctggat

SEQ ID NO: 634844 - DNA, 85 bp, Homo sapiens
agaagatgtcttcgcggacggtgctggccccgggcaacgatcggaactcggacacggaatcctcgtagcccactacctccagagc

SEQ ID NO: 634845 - DNA, 98 bp, Homo sapiens
cctctggcactgggatgcttccacagatgtacctgaaaagtcgtcactctttcaccaagaaagttactgtggcccatgtcctaaaaactggatatgtt

SEQ ID NO: 634846 - DNA, 113 bp, Homo sapiens
atcagacctgagcagttgctccggcggcgctcggggagggagccagagagaagaagaaggaggttcctgctgtgccagaaacccttaagaaaaagcgaaggaatttcgcagag

SEQ ID NO: 634847 - DNA, 75 bp, Homo sapiens
ctgtggactgtcttgggcagcatgcagtgctttctgggaggtccagatggttcctgtgactccagcttcagtagc

SEQ ID NO: 634848 - DNA, 75 bp, Homo sapiens
aaagaggagaggcacccgatatatgttctctaggccttttagaaaacatgtgatacccagcgccgcaaccctcat

SEQ ID NO: 634849 - DNA, 50 bp, Homo sapiens
ctccggtacaggttgaggctactaaggaaatactcttaattctaaggaaa

SEQ ID NO: 634850 - DNA, 100 bp, Homo sapiens
aggaagggactttaatcactgaccatcccaatatacaggtaaattcgaaccaccattatttcacccgaatgtgtacccttcggggacagtgtgcctgtcc

SEQ ID NO: 634851 - DNA, 75 bp, Homo sapiens
ctcaaatgagagagatgctatatcgtggtaccaaaagaagcactagaaagtttgggatttggctcttacatcagt

SEQ ID NO: 634852 - DNA, 50 bp, Homo sapiens
ggatccatttctcctattgaggagtcaactcttatgatgtaatcagcgcg

SEQ ID NO: 634853 - DNA, 88 bp, Homo sapiens
tcgatcagagatcggcggagaccctcgaagtgcgcaaacttgacactcaccctgaccggctgaggctgaggtggcctccttgaaccgt

SEQ ID NO: 634854 - DNA, 75 bp, Homo sapiens
gctgccagcatcgccgccgccagattttgcaagaacgaggctcaaggatgtgagggacacagtattgacagctga

SEQ ID NO: 634855 - DNA, 100 bp, Homo sapiens
accttctgtgacctggatccacaggaaagaaagagcagctggctgacctcaaggaagatctggacagggatgactgtaagcaggaggctgaggtggtcat

SEQ ID NO: 634856 - DNA, 82 bp, Homo sapiens
gggaccacaagatcctcatcgacagatggagcagcctcttcagtaagcacgaaacatgctctcatcatggatgaagtagatg

SEQ ID NO: 634857 - DNA, 98 bp, Homo sapiens
gttgggtccggccgctctgcgggactctgaggaaaagctcgcaccaggatccagtttgtgtgttctctgtgcaaataccggaccttctatgaggacga

SEQ ID NO: 634858 - DNA, 100 bp, Homo sapiens
ttagcttcgcagtctggaaagctttaggagttcacagtgaagatgagaatgtgcctactgctcctgatcctccaagtcaacatttacgtgggcatgggac

SEQ ID NO: 634859 - DNA, 82 bp, Homo sapiens
cccctatccccagtggagccggagtgcgggcgcgccccaccaccgccctcaccatggtgcgcgcggagccatggttatcatg

SEQ ID NO: 634860 - DNA, 96 bp, Homo sapiens
cctagagcttcagacgccctatggcgtccgcctcgacccaaccggcggccttgagcgctgagcaagcaaaggcttgccttgcgccatggactggca

SEQ ID NO: 634861 - DNA, 100 bp, Homo sapiens
tgctctggcggacgctcaagtacctgtggaccgtgtgctgccactgcgggggcaagacgaaggaataccagctgatgtcagtccgccagccaaaaccagg

SEQ ID NO: 634862 - DNA, 100 bp, Homo sapiens
ggagctctgcattgaaggcactggggttctccagttgctactggaacagggacacttctgctgatcctgtctgatgtgaatgacaacgcccccataccag

SEQ ID NO: 634863 - DNA, 75 bp, Homo sapiens
tttgtcctgcacaccattggcaaaactgtggagtatctgcactcacaggggttccagggtcacccccgagaggac

SEQ ID NO: 634864 - DNA, 83 bp, Homo sapiens
agatgttcagcgtagagtcgctggagcgggcggagctgtgcgagagcctcctcacttggaacatccagtcatggataaaaatg

SEQ ID NO: 634865 - DNA, 78 bp, Homo sapiens
gccgtccttctccactttcgccagcccgtgccgcgagcgcggcctgcaggaggttttaaaatcaaagatgggaaaatc

SEQ ID NO: 634866 - DNA, 74 bp, Homo sapiens
cgagtgacccgggtgccgaggagcgggaagagttgctggggagtgtggccatctggggccgtgtggtatttgcc

SEQ ID NO: 634867 - DNA, 83 bp, Homo sapiens
acatccggagggaattcattgagaaatatgacaagtctctccaccaagccattgagaccctgtgtgagcagcttcggaaggag

SEQ ID NO: 634868 - DNA, 100 bp, Homo sapiens
gccgccgactcacacaaggcaggtgggtgaggaaatccagatggtgtcggacggcatgacaggcagcaatcctgtgtcccctgcctcatccagttcccca

SEQ ID NO: 634869 - DNA, 50 bp, Homo sapiens
ctgggaccccctcgcgtccgcagcaggtactccaaagattcaggtttact

SEQ ID NO: 634870 - DNA, 75 bp, Homo sapiens
ccggcgctcagctgggcttgaggagaagaaactgaggcctggaatttgattaactcattcaaggttacccagttg

SEQ ID NO: 634871 - DNA, 82 bp, Homo sapiens
tacgtgttgtcggaagaccgccgggaggaccgacgtgcagctgcacccacctccaccctcacctgtgactcaggaccacaga

SEQ ID NO: 634872 - DNA, 74 bp, Homo sapiens
taggtgtctgtgttcactccaggctgaagttacaggtctgagactgtggtggagaggatgctgtccaactggat

SEQ ID NO: 634873 - DNA, 100 bp, Homo sapiens
cagctctgcctggagcactcgctggccgactgcgccgagctgcacgtcctcgaacgcgaggccaacagccccggtacatgtcccagagcaagcacacgga

SEQ ID NO: 634874 - DNA, 76 bp, Homo sapiens
ctggaacagaatcaacccagaacggatagctccctcctggaaaaggtttggcagttctctaccagtggaccaatct

SEQ ID NO: 634875 - DNA, 96 bp, Homo sapiens
gcagccaccccgtctgagaaatgccggcgatcgcggtgttggcggcggccgccgcggcgtggtgcttcctccaagtcgagagccggcacctggacg

SEQ ID NO: 634876 - DNA, 87 bp, Homo sapiens
aatgatctcgtcactcctttctttgtggtcttcatttgtgaatacatagattctggaaaccaaaatggaggaaatgatgataagact

SEQ ID NO: 634877 - DNA, 75 bp, Homo sapiens
aaaaccctgctgatgtcagtgttatatcctccaggaatactggccaggtgattggcgaggacaacgtggcagtcc

SEQ ID NO: 634878 - DNA, 90 bp, Homo sapiens
ccgtcgtggaagcaggactgcgccgcgtcttcctcaagggagccagcgccggcagccaccatggcgtcacgcatagggttgcgcatgcag

SEQ ID NO: 634879 - DNA, 85 bp, Homo sapiens
cagcccgtgccgcgagcgcggcctgcaggagcagggtttccaggcctgaggtgcccgccctggccccaggagaatgaaccagccg

SEQ ID NO: 634880 - DNA, 101 bp, Homo sapiens
agaagagcatctcccagaagaaggtgaagatcgagctggataagagccttattctaccagattccatgaaagtattgccagtgtacatgaattgcttgttg

SEQ ID NO: 634881 - DNA, 74 bp, Homo sapiens
gagatttcatctcgaaacctggcgctgcgccagggccccgcggggctggggcccaaaaagcgtgcggagcctca

SEQ ID NO: 634882 - DNA, 100 bp, Homo sapiens
gacgtgtaccactacgaggtggacatcaagccggataagtgtccccgtagagtcaaccgtttggggattctcagcagttgcggctggtccgtattctgcg

SEQ ID NO: 634883 - DNA, 80 bp, Homo sapiens
gaatcctgtgtataacgaaatactgcggggcactccacagaaggatgttattatcaagtcagatgcaccggacactttgt

SEQ ID NO: 634884 - DNA, 95 bp, Homo sapiens
cccacggctgcatccaccacaacagtgtggagaggcggaggaagcgctggcggaccatcaagctgctgctgcgccggggcgcggaccccaacctg

SEQ ID NO: 634885 - DNA, 75 bp, Homo sapiens
tccagctcatttctgaattttgcttagcagtgtctgcaaaaacgaatcttttcctacaacctgttaactgactgg

SEQ ID NO: 634886 - DNA, 123 bp, Homo sapiens
ctcaaaggaacggagagaaccgggacccccctgcggggacccggaactgagacgagttgtactgctgtcacaggaaatggacgctggattacaagcatggcagctcaggcagcagaagttgca

SEQ ID NO: 634887 - DNA, 75 bp, Homo sapiens
cgagaacgtgcgggaagagaagatcatcgagcatttcaaacgccctcccaggcccaatacttcaaagcatcctac

SEQ ID NO: 634888 - DNA, 100 bp, Homo sapiens
actgtatccacacgagccaactgctgtatttaacatctgcctgcaaatggacaaagtacttgatatgtggaaggaatgaaggccagctgaatggtgaaac

SEQ ID NO: 634889 - DNA, 90 bp, Homo sapiens
caggtctggagctcgaccgggccagacctcctgccccccgaggtctgcagtctcctgaacccagcagccatctacgccaacaacgagatc

SEQ ID NO: 634890 - DNA, 98 bp, Homo sapiens
ttcatggctgggcaccaggccctgactaccagcatgtgcagtctttgccaacaaaaaaaattaccaagaaacctattccagatgagcacctcattcta

SEQ ID NO: 634891 - DNA, 100 bp, Homo sapiens
cgccgaagatgtccccggcgcagcgcgacaggcccgcgatgctcccagcccggtgagacctgcctgaatggcgggaagtgtgaagcggccaatggcacgg

SEQ ID NO: 634892 - DNA, 82 bp, Homo sapiens
cttcggtgcctctctccagcagactgcgattcctaagcggctgtacaaggccctctccctgctgaagaaggaatttgaactg

SEQ ID NO: 634893 - DNA, 100 bp, Homo sapiens
aaggggcttacgcagaaggacctggccacgtcggtggagaactgcgtgtgcatcatgcggaacctgtcctaccacgtgcacaaggaggtgcccggggccg

SEQ ID NO: 634894 - DNA, 82 bp, Homo sapiens
ctaaagaatctggccttctccccagccaccatggcgaaactaatctggattcactccctctggttgatacccactcaaaaag

SEQ ID NO: 634895 - DNA, 100 bp, Homo sapiens
gtcaagaggctctgcaccctggatggaaagcagacacgaagatcgattgagaagttattagaatgggaaaacaataggttataccacaaggtgagtacca

SEQ ID NO: 634896 - DNA, 96 bp, Homo sapiens
acctacggcaccagtggcctggacaacagacctctgtttggggagacgtccgccaagttctgatagtatcagcagtgatgaggaggagctaaggac

SEQ ID NO: 634897 - DNA, 100 bp, Homo sapiens
ctcagccacccagatgtaagcgatctggttcccacctcagcctcccgagtagttcaatgacaactcctgcaaactggaattcccctctgaggcctggtga

SEQ ID NO: 634898 - DNA, 76 bp, Homo sapiens
tgcaggaaagtagagaattactgcaaagcaacatggccaacgccctggccagcgccacttgcgagcgctgcaaggg

SEQ ID NO: 634899 - DNA, 90 bp, Homo sapiens
gccgcgtgcagggcacccgctggcgccacggccaggacagaatccctttgcccacgtccagctgaagccgacagtgaccaacgacaggtc

SEQ ID NO: 634900 - DNA, 83 bp, Homo sapiens
caccatctccatcacccaccaacaacaccacaataatccacagccaaggtgctatacttggtagatcagaaactcaggagtgt

SEQ ID NO: 634901 - DNA, 75 bp, Homo sapiens
ttgaatttcaatgtgcctcatattaaaaacagcacaggagaaccagtatggaagatggagtctcgctttgtcgcc

SEQ ID NO: 634902 - DNA, 74 bp, Homo sapiens
aaaaaaactttgctgccaatactctggtgttccttgcctgtatctccccttggttcaatagctaccagattttt

SEQ ID NO: 634903 - DNA, 74 bp, Homo sapiens
tggccgacaacagcctggcgtccgccacgtgggtgaatttgtaagtgatgtcctgctagttccagaaaagtgcc

SEQ ID NO: 634904 - DNA, 96 bp, Homo sapiens
cttcctttgaacagagctctagcctgacagaaatgttcgcttacgcagctagccctgcctcagtttgtacatctacctgtcggctgagacatcaga

SEQ ID NO: 634905 - DNA, 90 bp, Homo sapiens
gggggcagcaacaacgatgccggatacaggagggacgtgcaccaggaagtggttacctggaaggaaaggagctgcagaacttgatccagg

SEQ ID NO: 634906 - DNA, 100 bp, Homo sapiens
gatgccaactctgcccttatggaattggacaaaggtaccaggatcatctatgaccggaaattcctgatggagtgtcggaactcacctgtgaccaaaacac

SEQ ID NO: 634907 - DNA, 75 bp, Homo sapiens
agaattgaaagatccaacagatcattaccatgcgcagcctttagagtctgttggacgagctcccccagtcagtgc

SEQ ID NO: 634908 - DNA, 100 bp, Homo sapiens
aagcgcccagcctgccgcctcgctgtccctgcggcttctgggggatgtttgccacacgagtcactcgagagaatctctgagtcctggcgagggctttctg

SEQ ID NO: 634909 - DNA, 126 bp, Homo sapiens
gggacattatgcttatgattgtcatcgttacagccggcgaagaagaagcaggtatgcgccaggggaacgaccatggcactcagtaccgctcggccatctacccgacctctgccaagcaaatggagg

SEQ ID NO: 634910 - DNA, 83 bp, Homo sapiens
gcgcggtgtggggctctgaagcatggagggggtgttgtacaagtggaccaactatctcacagatggctcggactcaaaagaac

SEQ ID NO: 634911 - DNA, 101 bp, Homo sapiens
tgttggggagaagaggattggaggtgtcagtgttaaaggaacctctacaacgaaggtgaagccacggaagataagggatcgcttacacctgagacgaacta

SEQ ID NO: 634912 - DNA, 98 bp, Homo sapiens
gaaccatctcagaagccatgcccctcaggctggaacttgccctgtctcctcgcagatgagatattgatgatgttaagaagttcaaaccgggttacctg

SEQ ID NO: 634913 - DNA, 74 bp, Homo sapiens
actggggttcgcgggagcacgagctgcagcaccacttccgggtcccagttactaagaagactaccaaaatggca

SEQ ID NO: 634914 - DNA, 80 bp, Homo sapiens
gccgcacgcggcgatatggaagaggagggcaagaagggcaagaagaggagaaggcagagcccccccaggctatgaatgcc

SEQ ID NO: 634915 - DNA, 98 bp, Homo sapiens
aggatttcaacatgcctctgacaatctctagtagagtgattgactgcctggaggatgagaaggcaaccctcaccttggccatggctgactggctgcgg

SEQ ID NO: 634916 - DNA, 51 bp, Homo sapiens
ccgccatgacagcgagcgaggcggaggtactccaaagattcaggtttactc

SEQ ID NO: 634917 - DNA, 75 bp, Homo sapiens
cattcttgtcacactgaaatttccttctactgatctccaaaggattatattcgttatgcccatggtctgatatct

SEQ ID NO: 634918 - DNA, 75 bp, Homo sapiens
cgttcctcaaactccgtgaccagattccttacatggcttgacagatggagtattcatctttgaagctgtttccac

SEQ ID NO: 634919 - DNA, 101 bp, Homo sapiens
cctgctgcaacttgggccccttttcagcaccactgccggaactgtggccacatcttctgcaacacctgctccagcaacgagctggccctgccctcctaccc

SEQ ID NO: 634920 - DNA, 74 bp, Homo sapiens
agcccggcccggcagcgacatggaagagtactattaatcccgtagatgcaatatatcaacctagtcctttggaa

SEQ ID NO: 634921 - DNA, 82 bp, Homo sapiens
agagtgctgatgtgaaaaataccacgacaaaaccaccctaatggtgctttctcagctattgcctatggctgaacaactgcta

SEQ ID NO: 634922 - DNA, 82 bp, Homo sapiens
ggcgagcagcctcggcggccgcacctccgcaaagcgccgcggccgctacgatgatgaaggatttgggggcagagcacttggc

SEQ ID NO: 634923 - DNA, 95 bp, Homo sapiens
ccctgcagtcaggggcagcattccgacggaagagagggccccgtcaagacaacccctcccaacctgagaccagcctccctggcatttctgcccag

SEQ ID NO: 634924 - DNA, 74 bp, Homo sapiens
cttcaaagagaaaaggcaacatcctgtcacaggccatgctctggcaaaaacattgaccgactcatcagtcacgg

SEQ ID NO: 634925 - DNA, 100 bp, Homo sapiens
cgttacaatggtggagttggcaggtgtgcgcagctggaagattctttatgggtatcattaacagatcagcatgtccagctccccatggcaatgactgcag

SEQ ID NO: 634926 - DNA, 75 bp, Homo sapiens
gtcgacatgagtgatgtggaggaaaacaacttcgagggcagagttctcaccagaaaatacagagcttcttacaac

SEQ ID NO: 634927 - DNA, 80 bp, Homo sapiens
ccagaagctacatgacccctaaacgaccaaactagagtcagaacgaatactagcatcagtggggaagaaacctccccagg

SEQ ID NO: 634928 - DNA, 99 bp, Homo sapiens
cccgctcccgggaaccgttcccgggccgttgatcttcggccccacacggtgctggagaatctggtaaaagcaccattgtgaagcagatgaggatcctgc

SEQ ID NO: 634929 - DNA, 74 bp, Homo sapiens
aagaagaacagctcgagagagcattacaagccagcctctgggaccgagcctggagcattggtaagcgtcacact

SEQ ID NO: 634930 - DNA, 96 bp, Homo sapiens
gctgggcagaggcttgggccgccgagctggacccggaccggttttgggccggaaggtggtggtcgtacgctgtgaaggcatcaacatttctggcaa

SEQ ID NO: 634931 - DNA, 100 bp, Homo sapiens
tcctccctgggacaggagcatgggtggtaccctggacctgtacagcattgatgctgaaagtacccatggcagacaagcctggtaacacagtgaatttccg

SEQ ID NO: 634932 - DNA, 100 bp, Homo sapiens
tgtgctctcactttctgaaatggaacctcaggatcttgagctagagttggaagctgaaggtgttcctgaagtatctgaaaaatatgaaattagctctgtt

SEQ ID NO: 634933 - DNA, 100 bp, Homo sapiens
tatgaatctaatgaatgggacactgaaccccttcaagtctttgtggtgcctcattcccataacgacccagtacctggagtagaacagaaaaattattatg

SEQ ID NO: 634934 - DNA, 100 bp, Homo sapiens
ctggaaaagagggtggaaaaagcagggaggttatgaggcttaataaagaagctgcagaaccttggcctgaaaatgctacattatatcagcaattgaaagg

SEQ ID NO: 634935 - DNA, 74 bp, Homo sapiens
ctctgatgagattttgttatcattgacaagaaaggtgtgatccctcacatccacaaatctctgattggaaagaa

SEQ ID NO: 634936 - DNA, 97 bp, Homo sapiens
ccgagagcgcgaatatcgtcatcgttagaaggacacattcagctaacgtattttagcaggtggagtgaggttgaagattcctgtgacagcgatgcca

SEQ ID NO: 634937 - DNA, 82 bp, Homo sapiens
cagatcttcacagcacagttcctgggaaggtggagccaccagcctctccttggttatacattggctcttcaaagacgttcac

SEQ ID NO: 634938 - DNA, 75 bp, Homo sapiens
ggaagactacctcattcaaagacggtaccccaatctgaagtcagtaaatgaactaatctacaagcgtggttatgg

SEQ ID NO: 634939 - DNA, 95 bp, Homo sapiens
ctagatgtaaatgtcagtggaaaggagagctaccatcactaaggatctaaaatgtccactgaggcacaaagagttgatgacagtccaagcactag

SEQ ID NO: 634940 - DNA, 75 bp, Homo sapiens
gaagaatccgccatgggctactcagtttacagccactgcagtatcacagccaggccagtacacaacaggccgggg

SEQ ID NO: 634941 - DNA, 75 bp, Homo sapiens
aggatgatttcggaacctggagaaaatagcagttgaagacatctcttcatcgaggactaacccctacagttatgc

SEQ ID NO: 634942 - DNA, 75 bp, Homo sapiens
tcgagttcaacatcatggtggtcgcggccttgcaggccactcgagccctaatggtggtctccctggtgctgggct

SEQ ID NO: 634943 - DNA, 50 bp, Homo sapiens
gaaggacgaggctgaggcgagaaacgagataaacaacccagacatgcgag

SEQ ID NO: 634944 - DNA, 82 bp, Homo sapiens
tcctcaaagaagtttgtccttctgctattgatcctgaagggaagcagtttaagtgcacggtgtgtgactacacagcggccca

SEQ ID NO: 634945 - DNA, 74 bp, Homo sapiens
gaccacaagatcctcatcgacaggtccagcccagaatcaaatgcaggttccatctggatatggattgcatcatc

SEQ ID NO: 634946 - DNA, 100 bp, Homo sapiens
actgctcaggcagctccgtagcatgaggaagagtcaggggcacagagagatggagagagacctagttagggccatgaagcccccaggaggagaatcgagc

SEQ ID NO: 634947 - DNA, 88 bp, Homo sapiens
ataccaaggaagagaagaaggaacggaaacaaagttattttgctcggaaataaagtctttgcttttgctttttggaggtcagtttgcc

SEQ ID NO: 634948 - DNA, 100 bp, Homo sapiens
ttaaagtcacagctggtggcttctcaggaaaagcccaagaagatgaaaggattgttcttgttgacaacaaatgtaagtgtgcccggattacttccaggat

SEQ ID NO: 634949 - DNA, 51 bp, Homo sapiens
gcccagctctactgagaagaatgctgctgagtatgcccatcgtggtttctc

SEQ ID NO: 634950 - DNA, 114 bp, Homo sapiens
gggcgtctccgccggctactgccgcttcagttctcccggtgtggccacgagtcgggttatgaagacagtatggagtttccagaccatagtagacatttgctacagtgtctgagc

SEQ ID NO: 634951 - DNA, 88 bp, Homo sapiens
agaagtatatgcaggaaattttgtggaactactacccacagatggcatgatccgaaaacactctcatgtcaagatagggcgttaccat

SEQ ID NO: 634952 - DNA, 96 bp, Homo sapiens
gagccagcaataattatcacaattactgatgggagcaagttgactaccaccagtggagtccaggatgaggcactccactgctggtgaggagaagca

SEQ ID NO: 634953 - DNA, 90 bp, Homo sapiens
acactctgcaccgctaggccgtccccgaccttgcctgaacaagagttttgattcatcatggataatctgtcatcagaagaaattcaacag

SEQ ID NO: 634954 - DNA, 83 bp, Homo sapiens
tccattctcctgccacccccagacctcctcagctccaggctctattccgttcgctggttcgccacctcaggggaacgatggcc

SEQ ID NO: 634955 - DNA, 101 bp, Homo sapiens
aaatgggatccgggtgatgagcatgacgcacacaggagagccaggattcatgctctacatccccatagaggtttacccaaggtccagcctagcccctaggc

SEQ ID NO: 634956 - DNA, 50 bp, Homo sapiens
tagccgacgctaccgtccgctccctggagagagcaggagattcggatggg

SEQ ID NO: 634957 - DNA, 100 bp, Homo sapiens
aaatatatagatcagaaatttgtattacaggtacgagtggctgctttacagaatctggtgaagataatgtccttatattatcagtacatggagacatata

SEQ ID NO: 634958 - DNA, 76 bp, Homo sapiens
atttgttaaggattccaagtaactcttatttgctgtcattcttctctacagaagagcttctcctcatcaactgggg

SEQ ID NO: 634959 - DNA, 100 bp, Homo sapiens
aacaagtatcgaaaccagtattgcacattcaatgatgatattcaaggttttaaaatcaaagatgggaaaatcggagaaaattgcccttccccatggccag

SEQ ID NO: 634960 - DNA, 100 bp, Homo sapiens
tagctgcttatggctataaaattacagttccaggcatgaaccgatacttccagcctttctaccagcccaatgagtgtggcaaagccctctgtgtgaggcc

SEQ ID NO: 634961 - DNA, 100 bp, Homo sapiens
tatggaattatttcgtgatatccaagaacaagcactgcagcctatatatgcaaacagatttgcagtaccaacctatgcagccaagcaacctcagcagttc

SEQ ID NO: 634962 - DNA, 82 bp, Homo sapiens
cctgaaccgcgcggccgaaccctccggtttggtgcacctcgatttggaggaagtagggcagggcccttatctggaaagaagt

SEQ ID NO: 634963 - DNA, 75 bp, Homo sapiens
gggctacaaccagtggcagcagggtaaatatggctacacacacctttctgcaggagagctgcttcgtgatgaaag

SEQ ID NO: 634964 - DNA, 90 bp, Homo sapiens
gcatcttcccaccaccttaaaccactgagccatcatcaaccactttaaccccaaaattgagtcctacgctgctgtgaatcacatatccca

SEQ ID NO: 634965 - DNA, 50 bp, Homo sapiens
tgagagtcccatcttcagcagaggttctgcggggagtgtctccagccctg

SEQ ID NO: 634966 - DNA, 83 bp, Homo sapiens
gtccagagctgaggactgcctgtttgcagtcttgactcgtctgctgaacaaatcctctgacctcaggccggctgtgaacgtag

SEQ ID NO: 634967 - DNA, 90 bp, Homo sapiens
atgcatctaaagttgatgagaactttgactgtgtagagcagggagagcaacaagccccggccctcagagctcagccggatgagcgcagcc

SEQ ID NO: 634968 - DNA, 101 bp, Homo sapiens
aaccattgaagcttgagagaaaagcccccaaaagcagctattcagagactcaccgcactgtgttaaaccagatcctacggcagtccacgacccaccttgct

SEQ ID NO: 634969 - DNA, 100 bp, Homo sapiens
ttcagtggtggaatgctgttttcatcatgctgctgattggtgtggatgaggtcaccattgtcaacattttgaccaaccgcagcaatgcacagagacagga

SEQ ID NO: 634970 - DNA, 75 bp, Homo sapiens
ggtttacatacaggaaaaactttccagccattgggtgtccgcaatgttgccagtgtctgtctgcagattggctac

SEQ ID NO: 634971 - DNA, 75 bp, Homo sapiens
cctgacccggtccttcagtggactgagaggggctgccgacagggagaagatagcattcttcacaaggccaaggat

SEQ ID NO: 634972 - DNA, 90 bp, Homo sapiens
atcgggataccatgatgagtcttctgaagactgtggtcattgtgcttgtctgtccatgtgaatgtgctgtgtggaagagttaaagggccc

SEQ ID NO: 634973 - DNA, 78 bp, Homo sapiens
aatcaccatttggaaggaacagtacagagttgtacaggaggaaaaccaggcagcagtacctgtccaaagatcgcttta

SEQ ID NO: 634974 - DNA, 85 bp, Homo sapiens
tgaaaccataatgctacaaactctagaaaatcctgagcgagcagctctgtactttgtttctggcgtgtgcatcgggctggtgctg

SEQ ID NO: 634975 - DNA, 82 bp, Homo sapiens
gccgccgctctgaggagttaaaggtttccacttgagcggcacagtgacagaacctgcaatacaatcggagccagaaactgtt

SEQ ID NO: 634976 - DNA, 100 bp, Homo sapiens
gcaagatggacgcgggatttttccgcgactttccttatcccagttgattgtgcagaatacactgcctgtcgcttgtcttctattcaccatggcttcttct

SEQ ID NO: 634977 - DNA, 89 bp, Homo sapiens
cctctttgtaaccgaggagtcaagaaatggggggccctcagcctcttggccttgaacgggctgttcatcttgattcacaaacacaacct

SEQ ID NO: 634978 - DNA, 82 bp, Homo sapiens
gggagaggatatgtagcgaggaggaacgcgctaaggcaaagcacctgacaacagcagttctgtagagagtttaaatatgaag

SEQ ID NO: 634979 - DNA, 83 bp, Homo sapiens
cagccccgggcacggcggaggcagcggagccctgggccatcgatttctccacccaggtgaactcctccctcacctccccgacg

SEQ ID NO: 634980 - DNA, 100 bp, Homo sapiens
agcgtcacgctgctggtggcccgggtcttccagaaggctgtagaccagagtatcgagaaggacactgtaatttatgatcgactggcagagacgtcaaaat

SEQ ID NO: 634981 - DNA, 100 bp, Homo sapiens
gtttctttgtcatgtagccaagactggagaaacaatggacaagcagatcttttgaaatatgctaagaatgagacattggagaacctgaaacaaatccatt

SEQ ID NO: 634982 - DNA, 90 bp, Homo sapiens
ccccgaacccctgaaggcgcggcaggctctggagagcggggtcttgtgcgcctgggccagcaagagacagagcgacatgagagattggac

SEQ ID NO: 634983 - DNA, 98 bp, Homo sapiens
ggccgcgagctccggaggatgagtgacgagtttgtggactcctttaagtttcagctcctggcatcagctctattcaaatctggttcagattttacagc

SEQ ID NO: 634984 - DNA, 74 bp, Homo sapiens
gctgaagatggctactctggagttgagagccccacagtcttcgttacaacctcatggtgctgtcccaggatgga

SEQ ID NO: 634985 - DNA, 95 bp, Homo sapiens
ttgatgcagatgaaatcattgtcttggatcagcatctgacagatacgtctcatggtgtaagaaataagtgcctgcagttacttggcaatcttggc

SEQ ID NO: 634986 - DNA, 100 bp, Homo sapiens
tttccatattgggtcagatgaacatcaagatatagatgtagcaatacttactgcactgctaaaagatatggctcgtggacagcagaaaattcagtctcag

SEQ ID NO: 634987 - DNA, 100 bp, Homo sapiens
tcttctcaacatttctgcagactgcctcaacagagtgataggtgacagtatgttgactgctgtctctgtggccagagattgtggaatgattctacctcag

SEQ ID NO: 634988 - DNA, 90 bp, Homo sapiens
cactgcctctggcatggatgagtactcaagaaaaatggggttatcccagagccatccaagctaccttatataaaagcagcaaatgagaac

SEQ ID NO: 634989 - DNA, 100 bp, Homo sapiens
ccatcatggagagtttgagtaaaggtggaaacataatggaacagaattttgagggtcttgctctgttgcccacgctggagtgcagcggcgtgatctctgc

SEQ ID NO: 634990 - DNA, 90 bp, Homo sapiens
actgtttggccttcacatgttgttttctggatatgccgcagaaggatccgtgccagaagcaagcctgtgagatacagaaatgtttacaag

SEQ ID NO: 634991 - DNA, 110 bp, Homo sapiens
gagtgcaaaaatactgatcaggaagagtctaccatttcatccaaggttttagctaaagaagatactgaggcagctattcaatcaatattatacaaagaaaattctgtaat

SEQ ID NO: 634992 - DNA, 90 bp, Homo sapiens
gaactgcggcagtctctccctgccaggctcttcatccaaggccacggcagagacaacgtgtgtaccccaagtgcacatggctgaccaccc

SEQ ID NO: 634993 - DNA, 75 bp, Homo sapiens
aaggattcgttacagccagagattgctgaatgccaagggaacagaagcacccgcagtagtgacagaggaggagga

SEQ ID NO: 634994 - DNA, 50 bp, Homo sapiens
ccgacgagaggacctcagctccaaggtttggtgcacctcgatttggagga

SEQ ID NO: 634995 - DNA, 100 bp, Homo sapiens
attgaaccagacactgatgctcctcaagaaatgggagatgaaaatgcggagccccatgttatagtacattgtgcagcagagagaagaccagatgttgtag

SEQ ID NO: 634996 - DNA, 90 bp, Homo sapiens
cttcgccacttactttaatgagaagatctccattcctgaggaggaggcagcacagcattctcagaagcagtctactgagctcttccagtg

SEQ ID NO: 634997 - DNA, 100 bp, Homo sapiens
agtcgggacatgaacgaggccaagcggagggtgcgcgagctctaccgcgcctggtatcgggaggtgccgaacactgaatacagattctgttcatcttgct

SEQ ID NO: 634998 - DNA, 101 bp, Homo sapiens
atcagtcggcctattgtcaacctctttgtttcccgggaccttggtggcagttctgcagccacagagacccgggaagaaggtaaggccttactccggcaaat

SEQ ID NO: 634999 - DNA, 75 bp, Homo sapiens
tcatagtctcctatgtgcatatgtgtacctcatggcagggccaggttccagcagtgaggaggatgaggcctctca

SEQ ID NO: 635000 - DNA, 89 bp, Homo sapiens
cacaggtcacagtaaggccaaaaatgtgcatactcacagagttagagagagggatggtgtttgtgaatagcacaatggaagaagctgga

SEQ ID NO: 635001 - DNA, 87 bp, Homo sapiens
agtggggtgtcggcgcctcattcgggtggagctgagccggagacagagttgcatgctgagaatttgaaaaatgaagatgatgtagac

SEQ ID NO: 635002 - DNA, 100 bp, Homo sapiens
ggaggggagtctgatattgaagaggaagaactgaccagagctgatcccgagcagcgtcatgtacccctggagaccaaattttgaggaaggtggaccaaca

SEQ ID NO: 635003 - DNA, 77 bp, Homo sapiens
atccaaacctttataatgatggcaagggcctgcagttgccatcacccactgcaaccagccagctcccgctcgaatct

SEQ ID NO: 635004 - DNA, 100 bp, Homo sapiens
ctcggggccccagaggccgcggacaccgacctggagggttatatcctgtgttgtgacctcatggtttaagtgggaataaagatgagtataagcagtgatg

SEQ ID NO: 635005 - DNA, 146 bp, Homo sapiens
tgcttccccatgcggggtagaacctttgctgtcctgttcaccactctacctccagcacagaatttggcttatgctgcattacaggcactaaagagaaagaagaggttcgagaaacagctcactcagattgatggcacactttctac

SEQ ID NO: 635006 - DNA, 75 bp, Homo sapiens
gactttgaggagaaggtgaaacaaatttgtttagtgaatgaccctaggccccagcacaagtacaacaaactttac

SEQ ID NO: 635007 - DNA, 74 bp, Homo sapiens
gaacagatttcagtgtcctccttagctctgcaggctcctggatttggatttggaattgcaatatctggtggacg

SEQ ID NO: 635008 - DNA, 83 bp, Homo sapiens
ggatggcgtgcagcgcaaccacgagacggccttccaaggcaactttgtccctaacaaaatgtggaagggattagtcaagagga

SEQ ID NO: 635009 - DNA, 88 bp, Homo sapiens
aggccagtgatcgtcctccattattcctccaatgtcaccaagctgttggatgcattgctgcagtgccacatcatctcacagttcaacc

SEQ ID NO: 635010 - DNA, 115 bp, Homo sapiens
tggcggatcaggatcggaagcctgcgtaactttctcccttgatccgggagtctttccactggacaatgcagatcttcgtgaagactctgactggtaagaccatcaccctcgaggt

SEQ ID NO: 635011 - DNA, 74 bp, Homo sapiens
gcaaggacctgaagcatctcatctattatcgtttcaacacggtcttagtacccactgtgtctatggttggaaag

SEQ ID NO: 635012 - DNA, 97 bp, Homo sapiens
tcgatggcagcgacacaattgtctgtgacagtaacagtacttgggatcccccagttccaaagtgtcttaaagtggctctgtttctcagtactttgaa

SEQ ID NO: 635013 - DNA, 83 bp, Homo sapiens
aatctccctgctccgcagcgacatcaccaagctggaggtggacgccatcgtcaacgccgatcgcaccccctccctccctggcg

SEQ ID NO: 635014 - DNA, 82 bp, Homo sapiens
ggaagatcgggagcgggtccttcggagatatctacctgggtgagcatgggtttatgcgtcttaggcattattgtgatggcga

SEQ ID NO: 635015 - DNA, 75 bp, Homo sapiens
agaatccgctttatccaattacagtggaacactggatccgagcagaggactttggtgtcctcagtcccatgcacc

SEQ ID NO: 635016 - DNA, 73 bp, Homo sapiens
ttgtgacatatcgttggacccagaattgagggccaattcctgtccccccagcagcatggcatcgtgtgctgaa

SEQ ID NO: 635017 - DNA, 75 bp, Homo sapiens
cgtccgagtctccgccgctgcgggcccgctccgacgcggaagtattgactcggagacaaaaagaggccaagacca

SEQ ID NO: 635018 - DNA, 99 bp, Homo sapiens
aagatgtttgcatattcttacaaagattctttacttactgaaccaggaatattcaacgaagcagctgaccaatctggtgaatgtttgcctgggatccca

SEQ ID NO: 635019 - DNA, 74 bp, Homo sapiens
aagaaagaattgaaaccgcacagcagatgccttcaattaagttgcagagttctgatggagagatatttgaagtt

SEQ ID NO: 635020 - DNA, 74 bp, Homo sapiens
gcccggcagctgctgcgggacggcaggaaggaccagcgtttcccccggggcagacagcgccggtggtgttcagt

SEQ ID NO: 635021 - DNA, 99 bp, Homo sapiens
atttctcttttgtctgcccctattgtaagtgcagatggaacacaacagtactatactggcaattgctggagaagattttgcaattgttgcttctgatac

SEQ ID NO: 635022 - DNA, 98 bp, Homo sapiens
tgagtcaacactcccgacctggtaaacaacctgctcagggctctggtgaacaagctgtaggccatcgaagacggcaatttggaggaaatggaagagga

SEQ ID NO: 635023 - DNA, 75 bp, Homo sapiens
ctgagaatcctcagtgtttgctaggtgttggggatgtcctttgcactgaccctgaactgccagattgacaaaacc

SEQ ID NO: 635024 - DNA, 83 bp, Homo sapiens
aagaccgaaatccagactctttttaagaggcttcgcgcagttccaaccaacaagcaccgaacaagatttgtgatgaaatggag

SEQ ID NO: 635025 - DNA, 75 bp, Homo sapiens
gaataaggagaaggataagtcgaaggggaaggcgcctgaagaggacgaagaatatatacagccctgctctgggac

SEQ ID NO: 635026 - DNA, 98 bp, Homo sapiens
cctcggtaccatggccgggatcatcaagaaacaaatcttgaagcacctctccaggaggaattcaagaaattgctttatggcctgtgtttctttcatgc

SEQ ID NO: 635027 - DNA, 80 bp, Homo sapiens
tgggaggtaggagttggcgagtagtagcgaggagacgaagtactgccaaatctgtcgaaagggagataatgaagaactgc

SEQ ID NO: 635028 - DNA, 100 bp, Homo sapiens
tcacctgtctcaaatgaagattatcactccacttgatgaacatcttagaagcagaccaaacgaaaatgcaacatggcagcagcaatggaaacagaacagc

SEQ ID NO: 635029 - DNA, 89 bp, Homo sapiens
tggagaggggccgtggcccctgcagcggaaccggacccagtccctgagccgcccctacacccacagttaaacacagtgggaatatcact

SEQ ID NO: 635030 - DNA, 89 bp, Homo sapiens
cacacgttctgcaaagtcgacaagaatctcaataacagtatgggaacccaccaagaccaacctggtcacattcttccataccgacctca

SEQ ID NO: 635031 - DNA, 100 bp, Homo sapiens
tcggcactgggaacagctgtgcgtagaccagaccagtgacttataaggtggatcaagtttgaagaaaaagtggaacagggtggggaaagatggagcaagc

SEQ ID NO: 635032 - DNA, 74 bp, Homo sapiens
cctacgatgagaactggttctacacgcgagctggtctccagtgggggctgcagactaagcaaaatgaggcggtt

SEQ ID NO: 635033 - DNA, 75 bp, Homo sapiens
gtgaatcccctgtttgagaaaaggcctaagaattttggcattgtccaagtggtaagaagttcagaagcaagcctc

SEQ ID NO: 635034 - DNA, 82 bp, Homo sapiens
cgcctcgcgccggctgctctttccggctgctgccccggcgcaccgactggaccgggaaggagcatcccaggacctaccagaa

SEQ ID NO: 635035 - DNA, 100 bp, Homo sapiens
gaagcagtgaaggagtgcagaggcatcacctgaaagggcaattgaaggaacagactaaaaatcgtgtcctggaaggaaactacaggtactaccagggatt

SEQ ID NO: 635036 - DNA, 75 bp, Homo sapiens
gccccatcatcgtgcccttcgctctttgctgaagagcaagcagagggtcccaaccgcctgctgtacaaagacggc

SEQ ID NO: 635037 - DNA, 75 bp, Homo sapiens
taaagacgggcaggtcgatgcccgattctttggacaacatgacaggattttttatcaagcagaaatgcatcgaac

SEQ ID NO: 635038 - DNA, 98 bp, Homo sapiens
ctgcggggtcatggtgtgcttccgcctcttcccggttccgggctcagggctcgttctggtctgcctagtcctgggtttttcttcccccagtccctcag

SEQ ID NO: 635039 - DNA, 90 bp, Homo sapiens
ccctgaactctgcaccaagtccttttaatccacaaggacagagtcagattacagaatgcctaccgcaggaatgggatggcttttctagcc

SEQ ID NO: 635040 - DNA, 75 bp, Homo sapiens
ctgcagtaacactccaccatatagacccggctttaccttatatcagggatgtttttgaactaaatttcatgaacg

SEQ ID NO: 635041 - DNA, 87 bp, Homo sapiens
agcagttggaggctgtgtctgcttgatccaaggattattcgaccatttatagcagaatgccgtcaaactattgccaaacttgataat

SEQ ID NO: 635042 - DNA, 75 bp, Homo sapiens
cgcagccttctacttgtcccatgagtatatgcagttcattcggctgctagaaaagttattgacatcgcagtgtgg

SEQ ID NO: 635043 - DNA, 75 bp, Homo sapiens
gggctgctccccaggacctgagcaggaacctggagttttcagctcggcttattccaggggtgtgtttcgtcgaga

SEQ ID NO: 635044 - DNA, 100 bp, Homo sapiens
tttgaagtatatgttgaagtggcctatcccaggacaggtggcactctttcagaacaagttgaaatcatcgcagaaggataaagttcgtcagtttatgatc

SEQ ID NO: 635045 - DNA, 142 bp, Homo sapiens
cagaaaggcgacaaaggtgatcctggtatttcaagcattggtcttccaggtcttcctggtccaaaggtgaccaagaatatggcccaggtgaccaaagccctggacaaggccctgagcaccatggacctgcagaaggtctcct

SEQ ID NO: 635046 - DNA, 87 bp, Homo sapiens
gctgcaaggagaagctgcacgacgtggacttctacaaggcccgcatggagatacagatcacttggattcagtcgagtttgctttgct

SEQ ID NO: 635047 - DNA, 90 bp, Homo sapiens
agtacggctggcagggtggacctcaggagcctcctaaaaccacagacatatgtagagtgtgtcggtcagaaggaacacctgagaaaccgc

SEQ ID NO: 635048 - DNA, 100 bp, Homo sapiens
cgagagcacggacagactcatggggaagggccaggtccaggcaaaggaaaacgacaggcccttgccttcccggtcctcaagggtcagctgtaagatgatg

SEQ ID NO: 635049 - DNA, 100 bp, Homo sapiens
gatggcggatgccctgcagtacctgcagaaggtctctggagacatcttcagcagggggtccactggacggggcctgagctacaacttcacccacctggac

SEQ ID NO: 635050 - DNA, 100 bp, Homo sapiens
cgaggtgccttctgtgaggcaaagattaagactgtgaaaaggctggtgaaagttaagttttgcacagtaataagttgactcacacagacttaaagcctga

SEQ ID NO: 635051 - DNA, 98 bp, Homo sapiens
gacgatattgatattgaagcaatgcttgaggctccttacaagaagagtaccaagtatggtgtccttggaagagacaaagttgtatactggacttgaat

SEQ ID NO: 635052 - DNA, 100 bp, Homo sapiens
ctcagagtgaagatgagttgacaccttttgacatgagcatccagccagagccctgcatgcccaacactgccttgctcatcaagaaccccttggctgccac

SEQ ID NO: 635053 - DNA, 82 bp, Homo sapiens
agcgggcggacggccggcgggggcggcgtgcggcctagcgtctcaggaggagccgaggaaggtctgcttcacctacgacctg

SEQ ID NO: 635054 - DNA, 98 bp, Homo sapiens
ggaccaaaatgaacacagtcactgggctgaagaagcatctgtagggaatccagaaggagcgttcatgaagatgttacaagcccggaagcagcacatga

SEQ ID NO: 635055 - DNA, 83 bp, Homo sapiens
gcacccggaagctcccggcgtctgcaccccggcagcgcgaggaaatgcccaaaggaatcccagtcagaagttccagcctgcca

SEQ ID NO: 635056 - DNA, 83 bp, Homo sapiens
tgggcatgcccatgtgcctgcggctgtggcagattaataaagcgtgcacaacaagaggaacaaggaaaaggattttagtgaag

SEQ ID NO: 635057 - DNA, 46 bp, Homo sapiens
tccaggatgtctacaaaattggtgattatttgcatgggtgcaaaag

SEQ ID NO: 635058 - DNA, 83 bp, Homo sapiens
agagcgcgaatatcgtcatcgttagaaggtttgtgaaatggctgctgacatttctgaatccagcggggctgactgcaaaggag

SEQ ID NO: 635059 - DNA, 100 bp, Homo sapiens
cccaggacctgagcaggaacctggagttttcaggctctgtgtgctccgggatggagcaggtgtgcagagggtgagaacccagctctgggaccaagtcact

SEQ ID NO: 635060 - DNA, 90 bp, Homo sapiens
aaagctgttttggaactgtcaggtacctcaaagccatgtttcgccaagggatgcatgacttgaaagtctggcctaatgtagaagcagatg

SEQ ID NO: 635061 - DNA, 100 bp, Homo sapiens
cgcctgggttccacttccagcaacagctcctgcagcagtaccgagtgccccggggaagccattccccaccccccagatggagtctcgctctgtcgcccag

SEQ ID NO: 635062 - DNA, 51 bp, Homo sapiens
ctgagcgagggggccattgcgatcaaaagcagcatggatctgcctgtggat

SEQ ID NO: 635063 - DNA, 75 bp, Homo sapiens
tgagcacctcatacggctgcttctggagaaggtggccccaatgtcagtgtatgcttgtctgggcaatgatgcggc

SEQ ID NO: 635064 - DNA, 50 bp, Homo sapiens
aaaaaccttcaggcggcccatggagattcagttgtggaaattctttttga

SEQ ID NO: 635065 - DNA, 75 bp, Homo sapiens
cgaacaccgacctcgtcccggcccctgcagtccggatactcacgccagaaggtgctggagaatctggtaaaagca

SEQ ID NO: 635066 - DNA, 88 bp, Homo sapiens
agagcctttattcatcgactcagtcagtctcttggtttggtctctaaaagtaaagggggtaaaagcatgtctacgaagaaaagtatgt

SEQ ID NO: 635067 - DNA, 96 bp, Homo sapiens
agcagagaaacaagaaaatggactccctggctgctggagagttgaatgccagccaccagccatgggaagacagagatgtcaatgaccccatgccca

SEQ ID NO: 635068 - DNA, 98 bp, Homo sapiens
tctcaggtcctcgggggcggcggccacgccaaggacgggtaattttttctgcaggatgaattaagagaagagacacttgctcatcaggcatggagagc

SEQ ID NO: 635069 - DNA, 73 bp, Homo sapiens
aatatttagaatgcaggatggagagagagaactcgatgccaccgcaacggtattggcgaaccggcaggatgaa

SEQ ID NO: 635070 - DNA, 82 bp, Homo sapiens
ctgggacttcccgtccgcggcgtggagggtgagaagccctaccactgcaactgggacggctgcggctggaagtttgcgcgct

SEQ ID NO: 635071 - DNA, 100 bp, Homo sapiens
gatcttgaaggtttacacttgtcaacttcctcttcagtcatcagtgtggcatttttctgaagttgttcattaagacttcccagcattcctacagatataa

SEQ ID NO: 635072 - DNA, 82 bp, Homo sapiens
attgacatcgtggagaaccgcttcattggaatgaagtcccgagtgtactaatggtcacttgatgtgcgctggctgttttatc

SEQ ID NO: 635073 - DNA, 89 bp, Homo sapiens
ttaatttcagaaggaaaatgggtcaagcttgaaaaaacaacgtacatggatcctactggtaaaactagtcggatacttctggagactat

SEQ ID NO: 635074 - DNA, 75 bp, Homo sapiens
cagaactgaaatggaggtcagagcttcattacagaaggacactcatgaggaccatgatacttccactgagaatac

SEQ ID NO: 635075 - DNA, 75 bp, Homo sapiens
gttattcgagtgaccgagaccgcggccgggaccgagggtgatagaaattgaagatgcttcacccaccaagtgtcc

SEQ ID NO: 635076 - DNA, 75 bp, Homo sapiens
aatccaaggccaagagcaaggcccggcgtgaggaggaggaggagggaatagccaggccagaagaaggaaggcctg

SEQ ID NO: 635077 - DNA, 96 bp, Homo sapiens
agagaaccaccagcattgccaccaccaccaccaccaccacagagtctgtggaagaggtggttcgagaatgtgacagtgatgataacatgggtgcca

SEQ ID NO: 635078 - DNA, 96 bp, Homo sapiens
gatgaattcaggaaggcctgagaccatggaaaacttgcctgctctctacactattttccaaggagaggaactagccagctgtggatggagtaagaa

SEQ ID NO: 635079 - DNA, 83 bp, Homo sapiens
gcgggaccacgtccactgcttggtcaatgcaaaatcatgctgccgtgttccgtgtgggaagcgtgttgcaagaaggttgtggg

SEQ ID NO: 635080 - DNA, 90 bp, Homo sapiens
gtgctcttctcgcccctcctccccgccgtgcagatcatcaagctgctgctcgtcttctatgtcaagaagatgaagttgggaagggtaaca

SEQ ID NO: 635081 - DNA, 83 bp, Homo sapiens
ctgtcttcatctttacagaggaatagtctacaaaggaagacttgtaacctggagaagagaactcccccactggaaaggattct

SEQ ID NO: 635082 - DNA, 98 bp, Homo sapiens
atcgtggtgtgcaaagaacagacgtcggaaaccttggaagtgggatttatttcagtgattcgctcagcggaccgagaaactgctggagaccattgacc

SEQ ID NO: 635083 - DNA, 103 bp, Homo sapiens
aatacatccaggaaagacatggagattctcttaaaaaggactccctggaggaaaagcggaagcggcagcggtctgaacgcctggaacggattttccaacttag

SEQ ID NO: 635084 - DNA, 90 bp, Homo sapiens
ggtcagtgtgcttgcttggagatcaggacgcaaagggccgttgctccagggagaactgcaaatatcttcatccacccccacatttaaaaa

SEQ ID NO: 635085 - DNA, 80 bp, Homo sapiens
atcaggcagatggcgtatcagatctgccagtcaataaattactctgtttgctggctacacggacaacctggtgcgagtgt

SEQ ID NO: 635086 - DNA, 101 bp, Homo sapiens
aacagattcagtggcctgcattgatctctctggcccagtgatatctttggcagttgtgaagatgaccctgtacagacactgttacatatatatttccatca

SEQ ID NO: 635087 - DNA, 100 bp, Homo sapiens
gctccagagctttgtcaaagagtttgttgaagaggaccatattccttacataaatgcttttcagcattttccagaacagatgaaattatatggacgtgac

SEQ ID NO: 635088 - DNA, 100 bp, Homo sapiens
ctcctctttgctaaacctgtgcctgaacattgtgcctcggtgatgatgaacagtctacacagatggctgcaagttgggaagatgataaagttacagaagc

SEQ ID NO: 635089 - DNA, 126 bp, Homo sapiens
cgaaactcggcggccttgggggcggccctacgtagcctggcttctgggtttaactatagatcaacacatcatcttgcatctcatgggttctatgaatttttaaattggtttgatgaaagagcatgg

SEQ ID NO: 635090 - DNA, 100 bp, Homo sapiens
ccatctcacatttccaagtacattctcaggtggagacctaccaagaggatgctggtggaaaagatgggccgagaagctgtggagctagggcatggggagg

SEQ ID NO: 635091 - DNA, 120 bp, Homo sapiens
gggaaaggcaaaggcaaaggcggctcgggagattcagccgtgaagcaagtgcagatagatggccttgtgacttcaggtggaacattcattggcattggacggaaaacaccagattgccaa

SEQ ID NO: 635092 - DNA, 74 bp, Homo sapiens
cgggacaagaaaattcatgcgggaatgggtactgttcaaaaaggaatgccccacaagtgttaccatggcaaaac

SEQ ID NO: 635093 - DNA, 100 bp, Homo sapiens
ttacgccaagagtcagcctgacatggccattatggccgtcaacacctttgtgaagttgaaggagaagagccaggcgtgcggagggaacttggggtccatt

SEQ ID NO: 635094 - DNA, 103 bp, Homo sapiens
agaacacagttggagaaaatcggcagctgagacggccttggccgacaatgcagatcttcgtgaagactctgactggtaagaccatcaccctcgaggttgagcc

SEQ ID NO: 635095 - DNA, 88 bp, Homo sapiens
cgcgtcgcatttggccgcctccctaccggagggtgtgaagacagagaatgaccacatcaacctgaaggtggccgggcaggacggctcc

SEQ ID NO: 635096 - DNA, 75 bp, Homo sapiens
gggactggcagctccactgccgtcaactcctgttctcctcagagcctgattacaggaatgaagaactgttgccta

SEQ ID NO: 635097 - DNA, 73 bp, Homo sapiens
accacccatcacagcccggaacactggcatcatctgtaccattggcatatctttttcttgcacatcaaggagg

SEQ ID NO: 635098 - DNA, 96 bp, Homo sapiens
gttccgagagcctctgattctcctgtgccagattatggtgacaagctgaacatggagctgagtgagaaatacaagctggacaaagagagctaccca

SEQ ID NO: 635099 - DNA, 51 bp, Homo sapiens
tgatgaccgtcaccaactggttcaaaaatggaatctatttggaatttgcag

SEQ ID NO: 635100 - DNA, 100 bp, Homo sapiens
gattcaggcgcttccgagcctcacctttattctctcagcacactgcaggccctcagtctccgaggaggatctcaaggtcctgttttccagcaatgggggc

SEQ ID NO: 635101 - DNA, 75 bp, Homo sapiens
gaggattggccggctggccaacttcggagcgagccatccagcaggctgtgggaagctccctgcagggggacctgc

SEQ ID NO: 635102 - DNA, 90 bp, Homo sapiens
gtggaggagcagaatttactacagcatgtgatttcaggatagcactgtgagagtgatctgggcctaccaccatgaagatgcaggagaagc

SEQ ID NO: 635103 - DNA, 75 bp, Homo sapiens
cagcaacagctcggcgggctggaagagacgtctcccacaacctgctccgggcgctggacgttgggctcctggcga

SEQ ID NO: 635104 - DNA, 75 bp, Homo sapiens
cggacagcctatttttgccaatatcacactgccaggtatagaagccttaagcattttaactatgatgtctgccag

SEQ ID NO: 635105 - DNA, 78 bp, Homo sapiens
aaatgcgattagttgatgtggcctgcaagtctctgctggatgaaccgaatcctaacagtccagccaatagccaggcag

SEQ ID NO: 635106 - DNA, 83 bp, Homo sapiens
tacacaatgattaatccagtgccgcctggaggcagccggtccaacgtcaaaatgcagatcttcgtgaaaacccttaccggcaa

SEQ ID NO: 635107 - DNA, 90 bp, Homo sapiens
ctccgggccgcgctgcccgcgctcctgctgccgttgctgggcctcgccgctgctgccgtcgcgggtactccaaagattcaggtttactca

SEQ ID NO: 635108 - DNA, 75 bp, Homo sapiens
gcagaagttttgagccactatattaaaactgctaagatttggagtcagcatatgaaaataagagtttacctacag

SEQ ID NO: 635109 - DNA, 100 bp, Homo sapiens
gcaagccagccatcctgggaccccaggcgtgcaggttctctttgagggcttaaatcaagtgatgcttacaaaaaagcctggggcaataatcaggacggag

SEQ ID NO: 635110 - DNA, 83 bp, Homo sapiens
cccgggccgggggacccgcccgccatggccaccaagccatcactggtgcaagctatatttaacggagatcctgatgaagttcg

SEQ ID NO: 635111 - DNA, 82 bp, Homo sapiens
aaccggtatggccagaacggcgacttcacgcgcgctctcaagaccgtcaataagaattctgcctgatcaatgcaggagtcct

SEQ ID NO: 635112 - DNA, 75 bp, Homo sapiens
ggaaaactgtggtctccagatgaagaggtttcccctgaagtactagcaaagggcttccgttacaagatgaggtct

SEQ ID NO: 635113 - DNA, 83 bp, Homo sapiens
atgaacaatccgtctggatcacggatgtaggaagtgatttggtgcttccagatgtgagttatcaggtggaatccagtgaggag

SEQ ID NO: 635114 - DNA, 73 bp, Homo sapiens
ctgactcggagtcttagtgtgtctttctcaagtcaaagaaggccctgtcctagcaactagttcaggagctggt

SEQ ID NO: 635115 - DNA, 88 bp, Homo sapiens
taagtcagctcagaacagaggctcagcagtggcccggcaggaactctccggagtcctttctgtattgttgtgattttgcttctggagc

SEQ ID NO: 635116 - DNA, 99 bp, Homo sapiens
ggctgcacacggtcaactccaggcacgaggccagcctgaagttgtacaagctgaagcagtttgaacgactggaacaggaggtgtcacggcccatagacc

SEQ ID NO: 635117 - DNA, 75 bp, Homo sapiens
cgaccccgacccggcccggtcaggccccatactcagatggagctggaggagacagaaccgcccctggagcctgag

SEQ ID NO: 635118 - DNA, 100 bp, Homo sapiens
gtccatctgagtcagaggccagattccgcattgactcactctgtgacttcctggagactcacttcctagatgaggaagtgaagcttatcaagaagatggg

SEQ ID NO: 635119 - DNA, 97 bp, Homo sapiens
caagatggttcatcttttgccctagagcaattgaagacaatctccaccatgaaagtgatgcagtttcagggtatgaaacgcaaagccagttctcccg

SEQ ID NO: 635120 - DNA, 83 bp, Homo sapiens
gacgaggcgattgcgggggcctgggctagaaataaactatcaatcttgcccagactggagaaaggactgcagcaacaaccctg

SEQ ID NO: 635121 - DNA, 74 bp, Homo sapiens
ccgggggcgccgcccaccgcgcctcgctcgtgtaacctcacctccagctctcacacccttacatacagctactg

SEQ ID NO: 635122 - DNA, 100 bp, Homo sapiens
ttgttaaggattccaagtaactcttatttggtctacttccccagcaggacagcatcattctcctatatcttctagacatcactcatcttcctcacaatca

SEQ ID NO: 635123 - DNA, 83 bp, Homo sapiens
caggacccgaagcctaaattccaggagggtctcggcgcggaagatggccggcggcgtggacggccccatcgggatcccgttcc

SEQ ID NO: 635124 - DNA, 100 bp, Homo sapiens
gtggacggtgtggggcggtcccggccccgcaggcctccggtgtggctgtctctgatggtgtcatcaaggtgttcaacgacatgaaggtgcgtaagtcttc

SEQ ID NO: 635125 - DNA, 90 bp, Homo sapiens
gaagatgaccttaacacagtagcagctggaaccatgacaggcatgttgtataaatgtacagaaggaagaatcctgctcaaaaatgaggtg

SEQ ID NO: 635126 - DNA, 75 bp, Homo sapiens
tcttccccaacaaggagacgatgagaatcactagatttgatctacttggcgactttggaaggtttaattggctgg

SEQ ID NO: 635127 - DNA, 100 bp, Homo sapiens
cttgaaatacagactgttggggaacaagagagtacagtccctgacatcacacactgcagagatggataaccaaggagtaatctactcagacctgaatctg

SEQ ID NO: 635128 - DNA, 110 bp, Homo sapiens
ggcctgattcagctgttaccccttcagacagttctgaaattaaagctgacttcatgagaccgaggatctcgttcgttgatcgatgctacatattcagcatgttagataat

SEQ ID NO: 635129 - DNA, 100 bp, Homo sapiens
aggatctgtgtggtcattgacctcgatgaaacccttgtgcatagctcctttaaggaatgtatcctgtcaggtataatgtcagtgaatggcaagaaagttc

SEQ ID NO: 635130 - DNA, 74 bp, Homo sapiens
acaagtccccagggaatgccacagcatcctccagcacctcagaaccatttgttgggaagagcctgcttctgcct

SEQ ID NO: 635131 - DNA, 101 bp, Homo sapiens
gccacaaggaagcaaccagctcatgaacaccctcagtttctaagcatgaattgaggaacagaagaagcagagcagatgatcggagcagcatttgtttctcc

SEQ ID NO: 635132 - DNA, 100 bp, Homo sapiens
cttgtgcctccattcccgggaggggggagcggcgttggaggccaccgtttccaggtagtagattccatggatgcattagataaagttgtccaggaaagag

SEQ ID NO: 635133 - DNA, 50 bp, Homo sapiens
cctgggagctggaggaaccgcggctgaattggccagtccactgaacgagg

SEQ ID NO: 635134 - DNA, 75 bp, Homo sapiens
ccgaaggcctcggcctttcacattcgggaagcgtcgggattaggtgaaaattcatgatgttgctatcaaaagttg

SEQ ID NO: 635135 - DNA, 74 bp, Homo sapiens
cgttagaactcgcgtttccacttcagagatctggtgaccaagaatatggcccaggtgaccaaagccctggacaa

SEQ ID NO: 635136 - DNA, 82 bp, Homo sapiens
gagcgaactgcagcctggagctacccccggccagcggtccggccaaggacgctgagccgttggacataccagatggtcgaag

SEQ ID NO: 635137 - DNA, 99 bp, Homo sapiens
cctcgcggatcccggctcgcggccagcccgagcggctcggttggtgagtttgtaagtgatgcccttctcgttcctgacaagtgcaaattcttacaccag

SEQ ID NO: 635138 - DNA, 115 bp, Homo sapiens
agccgcaccatgccgctcctaagcctgcacagccgcggcggcagcagcagtgagaggggcagaaccccttcgagctggccttctccctagaccagcccgaccacggagactctga

SEQ ID NO: 635139 - DNA, 98 bp, Homo sapiens
cgttcctgtaaaagaggacaccaacagtgtggtggagaaagcaatggatgaaatcaaatcccaagatgatatgaagttgtcagaaatagattttccta

SEQ ID NO: 635140 - DNA, 75 bp, Homo sapiens
gcgtgcccacccggacttgtccttctacctcaccacctttgttgcgtggaggagtacaaactggctcctgatgga

SEQ ID NO: 635141 - DNA, 75 bp, Homo sapiens
cctcaagtctatccgagagtttgcagcaaagatcattgaaggtgcaatggatgagcttcatagtctggatccaag

SEQ ID NO: 635142 - DNA, 88 bp, Homo sapiens
cagggagcgggagccgccgccgccgccgccgccgccggagctaacctcggggaccgagatgcaggttgcttatggaaccacagagaac

SEQ ID NO: 635143 - DNA, 98 bp, Homo sapiens
gcggcatcacctcctccaagaccgtgctggtctttctcaacctcatcttctgggaatcctatccatcttcttcaccgatatggtttgtggattctgaa

SEQ ID NO: 635144 - DNA, 90 bp, Homo sapiens
ctacagaagagagaagccatgagagacagttgagatctttaagcaagcgacaatgaaggcattgcggaaaaaatctgttttgctaactgg

SEQ ID NO: 635145 - DNA, 90 bp, Homo sapiens
aagatgaaattggagaattttctgataatattgagttttatgcaaaatcagtatattgtctgtggctccagcagccttgtttctagcagc

SEQ ID NO: 635146 - DNA, 98 bp, Homo sapiens
gttccttcagccaaagaaacaagccgtggaataggtgtatcaagtaatggtgcaaagcctgaaaggttggaaagaaccatgactgtattcaggaaggc

SEQ ID NO: 635147 - DNA, 75 bp, Homo sapiens
ggcggcgagacggcggcaggacggcggcaggtttccaatacttatctacaggaatcgccatgaccccagctctga

SEQ ID NO: 635148 - DNA, 51 bp, Homo sapiens
attcgcagtggtcgcttcttctccttggatgtcactgattttatcagtcat

SEQ ID NO: 635149 - DNA, 100 bp, Homo sapiens
tgtctggagcaaataaaagagccctgcaatttgaagatacatgagacagcagccaaacccccaggtgaatcaggtctaggaaaatcgactctcataaaca

SEQ ID NO: 635150 - DNA, 100 bp, Homo sapiens
ggaggcgccgcggactgtcctttcgtggctcactccctttcctctgctgccgctcggtcacgcttgtagagacggggtttcaccatgttagccaggatgg

SEQ ID NO: 635151 - DNA, 118 bp, Homo sapiens
atgacgccatcctgccgcagctggcgcagcccacgctcatgatcgacttcctcacccgcgcctgcgacctcgtgcagggctcgcggcctggcaagaatgtacagctgacagagaacga

SEQ ID NO: 635152 - DNA, 100 bp, Homo sapiens
gcaagtcggaggaaacgctagtgcagtctgagaaagaaccccagtttaagtttatctacttcaaccacatgaatctcgccgagaagagcacagttcacat

SEQ ID NO: 635153 - DNA, 96 bp, Homo sapiens
gaagcaatgtttgaacaaactcgaagaacagctgtggaaagaagttgcaaaacactggggggcagtacccaaaggaaacgctacgaaagaatacat

SEQ ID NO: 635154 - DNA, 75 bp, Homo sapiens
cgcttgatgagaaggacccacggcgtctgttcgaaggcccgttcttccgctaccgcacctacctggactggctgg

SEQ ID NO: 635155 - DNA, 100 bp, Homo sapiens
ctgccgccgccgccgccgcggtttgtcgccagaaggaagatggcggatctggaggagcagttgtctgatgaagagaagaaacctctgcgccatgagagcc

SEQ ID NO: 635156 - DNA, 74 bp, Homo sapiens
ttcgctacacagcaatgcatcgagacaacagcagttctgtagagagtttaaatatgaaggaatggcaggacggg

SEQ ID NO: 635157 - DNA, 82 bp, Homo sapiens
acacccggcatcagacctggcactacttgtccaagacgtactggtggcgaggaagaggatcacctagcccgggtagaagagg

SEQ ID NO: 635158 - DNA, 88 bp, Homo sapiens
ggacaagagacgatcattctgcaagcaggcaacctgaatacaggaagctgaatatggtgggcatgatcagatagatttgtatgacgat

SEQ ID NO: 635159 - DNA, 82 bp, Homo sapiens
ttcagcgcgaccacgaaggccgctactccgaggcggtgttttattacaagattgagaggatccagaatccagatctctggaa

SEQ ID NO: 635160 - DNA, 75 bp, Homo sapiens
ctggacctggcagatccttcagcaaaagctgtccttacagatgtaacctcgggtatggtgaaagacccaccggac

SEQ ID NO: 635161 - DNA, 100 bp, Homo sapiens
tccctgtgttcgcctgctcaacgccactcatcagattggctgccagtgcgttgacccggacgacacctataatgagaccccctacgagaaaggtttctgc

SEQ ID NO: 635162 - DNA, 83 bp, Homo sapiens
aagcacatatttggtagcctttgcatacaagaatgtgaaatttgttctcaagcacaagtccattttagcttcctatctcctga

SEQ ID NO: 635163 - DNA, 78 bp, Homo sapiens
aactgaagaaaatgtttgaagcaacaagattgcttgcaacaattgttatgcttgaatcctgcaatatggcgaacataa

SEQ ID NO: 635164 - DNA, 75 bp, Homo sapiens
tacgtgtaccgcctcaaccgcgacgccgaggtgaggtccagagatatatccagagaggagtggaagggctcggag

SEQ ID NO: 635165 - DNA, 100 bp, Homo sapiens
ttttgtccatgtcactgatctttctggcaaattcagtccctggcaaggatgcaccaagctcgaaagcgctatcgagatcgcctgcagtacttccgggacc

SEQ ID NO: 635166 - DNA, 89 bp, Homo sapiens
attgtttacaaaatagatgacatgacagctgcacccatggacgttcgccagtgggttgacacagatggctgcgaataaaggagaccaag

SEQ ID NO: 635167 - DNA, 74 bp, Homo sapiens
ttgactgagatcagaggccctgtgatgatcgtgtcaggcaaatgttctgaaaaagactctgcatgggaatggcc

SEQ ID NO: 635168 - DNA, 75 bp, Homo sapiens
cgccagatcaacctggagctctacgcctcctacgtttacctgtccatgactgtgccctgtccacggtgcctcctg

SEQ ID NO: 635169 - DNA, 100 bp, Homo sapiens
gtggccatgagctcagccatctttacggctctggggatcgtgatgggacaggtggtcggactcagcactattcctgatcagagaactccagttgcttcaa

SEQ ID NO: 635170 - DNA, 100 bp, Homo sapiens
tttctactgcatctcgacagcatctcgggtaacaaccgagcccctcctcgcagcgccggatcacctcaacagtcacgtcagacaagtgcactcaacagaa

SEQ ID NO: 635171 - DNA, 89 bp, Homo sapiens
ccgttgacaaggcactgctttttcatgacgtaatgttgcaggtcagtggaatccagtttttatgcagcctctgccagaggaagagattg

SEQ ID NO: 635172 - DNA, 75 bp, Homo sapiens
tcatcggaggctatgctgatggagagagaacgggcctctccccctcaagtaccgtgtccagccagcctgcaagcg

SEQ ID NO: 635173 - DNA, 98 bp, Homo sapiens
tcacaggtttccagaccgaatactaccaagttcatcaatggtgctaaggaaatttgctatgctcttcgagctgagggttattgggctgactttattga

SEQ ID NO: 635174 - DNA, 75 bp, Homo sapiens
agctgcccagcgagatcctcggggccccagaggccgcggacaccgacctggagaagccccatgtgccactcccct

SEQ ID NO: 635175 - DNA, 51 bp, Homo sapiens
ctacgagaaggtggaggatgcctgccaggggtcctatccttcccccaaagc

SEQ ID NO: 635176 - DNA, 80 bp, Homo sapiens
gcttacatcttgcatcctcaagcgatccagaatataagaagtttttagaaacctactgtgtggaggaagagaagaccagt

SEQ ID NO: 635177 - DNA, 75 bp, Homo sapiens
aaagaagcagagccgttgtgtaaaagagctctggaaatccgagaaaagagtaacacagcatctggtggaatgaca

SEQ ID NO: 635178 - DNA, 80 bp, Homo sapiens
tcatgtctgcgagccaggattcccgcaaaatgatgcttcaacacccaggccaggtctctgcctcggaagtgagtgcttct

SEQ ID NO: 635179 - DNA, 83 bp, Homo sapiens
catggaccccctgagactatcattattacctcctagggccaggaagccagatacttctgggaaccccaggcgtcagtctcctc

SEQ ID NO: 635180 - DNA, 133 bp, Homo sapiens
tccaagatgcagttttttgatgctgaggagctcctggtcgatgaagaggatgatgtttttggtgaaggtactccaaagattcaggtttactcacgtcatccagcagagaatggaaagtcaaatttcctgaatt

SEQ ID NO: 635181 - DNA, 74 bp, Homo sapiens
tagggtcctttatatagaagggagagtaggatttaagaggggtgcagatcccggaatgcctgaaccaactgttt

SEQ ID NO: 635182 - DNA, 82 bp, Homo sapiens
ggagaatgcaaatatatagagcacctggaagcagtaacatgcaagaaacgtaaatattttcaccacgatcgattagactggg

SEQ ID NO: 635183 - DNA, 74 bp, Homo sapiens
tcagacattacgagaaatgttagagaagaaagacagctttgtggaagagacatcgctattgcggttccgaggca

SEQ ID NO: 635184 - DNA, 100 bp, Homo sapiens
aagaaactggcctccagaaaaggatttggagttccatggagtgatgagattttattttcaagataaagctgctggaaactttgcaacaaaatgtattcgg

SEQ ID NO: 635185 - DNA, 90 bp, Homo sapiens
gtcagtgttatatcctccaggaatactggccaggagctggatggcctgttggaaatcaaccgcatgacccacaagctgctgagccggtac

SEQ ID NO: 635186 - DNA, 82 bp, Homo sapiens
cggcggcggcggctgcggcccaatataggtatggcctcacaagtcttggtctacccaccatatgtttatcaaactcagtcaa

SEQ ID NO: 635187 - DNA, 75 bp, Homo sapiens
cagtgaatcaacggttgaagttgcagtgtgtgaaaggcaaatggagtccaaaactacttacctggaagaccttcc

SEQ ID NO: 635188 - DNA, 100 bp, Homo sapiens
gaaactaaagtacatttattctgccaggatgaccagtgtcccagtgaaggaacgagtgaaggtgtctcagaactggagactggggcgctgccgagagggg

SEQ ID NO: 635189 - DNA, 71 bp, Homo sapiens
gaaagtccggctgagcgtctatggagccctgggcatttcacaagtgttatgtgccaagaaccttgcaaaga

SEQ ID NO: 635190 - DNA, 75 bp, Homo sapiens
tgctaaacctgtgcctgaacattgtgcctcggctaagacatcaagcacacaaagaattttatgcctacaaacagg

SEQ ID NO: 635191 - DNA, 97 bp, Homo sapiens
ttttcctgaggcacctgaagaggaccagaggcagggcacaccagaagccagtggtcatgatgaaaatggtgatgtacctgctcccccttcaccttct

SEQ ID NO: 635192 - DNA, 98 bp, Homo sapiens
aaatcaatggccggacgaaactactgaggaaaaggcacataggaaatgacatcgtcaccatcgtcttccaggagcctggggcacttccttttactcca

SEQ ID NO: 635193 - DNA, 88 bp, Homo sapiens
ctgctggagttttacaagatccactacctggacaccaccaccctcatcgagcctgcgcccagctacctctacccagatggaaagaccc

SEQ ID NO: 635194 - DNA, 100 bp, Homo sapiens
ccctctcagaaaacgagcaactgaagaaagaaaatggaacactgaagcggcagctggatgaagttgtgtcagaggtgacagagttagtccttgataattg

SEQ ID NO: 635195 - DNA, 82 bp, Homo sapiens
tcacctgtccagcatccgaccaccgaggctggagggggagaacacccagggttcagtttggcaaagacttggtgcagatgtg

SEQ ID NO: 635196 - DNA, 100 bp, Homo sapiens
tggcctgcaggaagcgctggaaatagccagagagatgtacttggggtgcattgaagttctgcgctcaatgaggtctcttgacttcagtacaagaacacaa

SEQ ID NO: 635197 - DNA, 51 bp, Homo sapiens
ggaggaggtggcaggcctcggcgaagatggtccaggagaagctcattccat

SEQ ID NO: 635198 - DNA, 90 bp, Homo sapiens
ggagaaccagtaccggctgacctcgctgtacgccgagcacccaggcgactgcctcatcttcaaggaggaatgccagctcctgagcaggcc

SEQ ID NO: 635199 - DNA, 75 bp, Homo sapiens
gtccccatcttagctgatgagatctatggagacatggacggtgaagtgattggaattaacactttgaaagtgaca

SEQ ID NO: 635200 - DNA, 83 bp, Homo sapiens
cttgaatgtaaacaatattgttggaataagaaacacattccttctcagaacttatgcataccaatgttaccttatggttgtct

SEQ ID NO: 635201 - DNA, 100 bp, Homo sapiens
cagaaccagtcagcattctacaaccccagaccaccgttaatccagatcgcatcaaacaaacatatctgaagagatggattaagaatgctttggattaagg

SEQ ID NO: 635202 - DNA, 75 bp, Homo sapiens
ccgggtgccgaggagcgggaagagttgctgggattttgcaagaacgaggctcaaggatgtgagggacacagtatt

SEQ ID NO: 635203 - DNA, 100 bp, Homo sapiens
ttcccgcccgccttccgccgtctcttcgagttcttcgtgctgctcaaggaagggaaaaggccgaggcatcagcgtgtgaagaccgcaaagacgatcccga

SEQ ID NO: 635204 - DNA, 82 bp, Homo sapiens
ggcgggtgttgtgagcgggaagcctcttctgaaacagtctccctggagcaaccatcagagcagtggctggggcactggaagt

SEQ ID NO: 635205 - DNA, 83 bp, Homo sapiens
cttcaggcggcggaggcagcaccgaggaagcatttatgaccttctacagtgaggtcaaaatgcagatcttcgtgaaaaccctt

SEQ ID NO: 635206 - DNA, 107 bp, Homo sapiens
atgtgaaactggcctcccaagccctgataagtgatgatgaacagtctacacagatggctgcaagttgggaagatgataaagttacagaagcatcttcaaacagtttt

SEQ ID NO: 635207 - DNA, 96 bp, Homo sapiens
gcggcaaaatggcggaccgcttctcccgcttcaacgaagaccgagactttcaggaagaagattccctccttaatatctgcaaggagattgtggaac

SEQ ID NO: 635208 - DNA, 88 bp, Homo sapiens
aacagaggcgacggctagaagaggatcactactcttggaatcaaagataaatccaaatactgcatatcagaaacaacaggcaagtagt

SEQ ID NO: 635209 - DNA, 82 bp, Homo sapiens
atgaactgataaaacccaccagtctaggtccctgtcccaccaattttgggtttttatcaaatgaaggaggaagaagtacaac

SEQ ID NO: 635210 - DNA, 82 bp, Homo sapiens
ttgatgttaatgaatggtgctatacttgaattttctaaggtgtcattaggcttttattgagatggagacaagagaagatgca

SEQ ID NO: 635211 - DNA, 81 bp, Homo sapiens
aacctcaccccaagatcttcacattctggatctcagctgctcttgaaggcttgaagtagaaaatgccatgatgagaaaaac

SEQ ID NO: 635212 - DNA, 82 bp, Homo sapiens
gaagttgcaaagcaacagtaatagaagcctcagttttggagaggaagagccaggctttagcctcccatctcaggggtcgggg

SEQ ID NO: 635213 - DNA, 100 bp, Homo sapiens
aaacatggggattggaattcgtagaacttcatggaggaacacggagtgacccaaaccgaacatatggctaccatagaagcacatgcagtggcccagcaag

SEQ ID NO: 635214 - DNA, 50 bp, Homo sapiens
agaaggagaattcttattacagcattgtcttcagtgttaagaaatgtgga

SEQ ID NO: 635215 - DNA, 100 bp, Homo sapiens
tgaaattttaagcgactgtgactctgctgcaagttccccagatcttgagccccaactggaccctaggcaaaagtgagtggcactcctctgccaggactcc

SEQ ID NO: 635216 - DNA, 50 bp, Homo sapiens
tttagagattgggaagaccctgatggaggctgacaacaagaatgatatcc

SEQ ID NO: 635217 - DNA, 75 bp, Homo sapiens
gcggtctgccaggagctgcggccccgtccggcccgggctgactagacgcttgaagcaaagctgccatcccagaag

SEQ ID NO: 635218 - DNA, 50 bp, Homo sapiens
ctttggagcggctaaaaacctctctccttcctccactaagagcggaaaat

SEQ ID NO: 635219 - DNA, 80 bp, Homo sapiens
cttggtgttgaaagtgaaatgtcatgcctctgaaaatgaaggtcctaggcctacttacaagcctccagtctcaaattatc

SEQ ID NO: 635220 - DNA, 80 bp, Homo sapiens
tcagcagttggcacacatggttaaggaacaggaggaaaccattcagaggactcaagagtagccttcctcgaggacctgcc

SEQ ID NO: 635221 - DNA, 50 bp, Homo sapiens
cgagcggttccttgtgggctaggttcagaacctcatggcccgagctgaat

SEQ ID NO: 635222 - DNA, 100 bp, Homo sapiens
aagagaagaaaaactacctgtggtaggaattggaaagcatctgtgtggtatggcaacagggcggcgactggcggcgcgatggacctgaccgggctcctgc

SEQ ID NO: 635223 - DNA, 96 bp, Homo sapiens
gacggaaacccagagctcctgtcaaccagccaggaccctgatgcttggtgtgacctgagtaaatttgacctccctgaggaaccatctgcagaggac

SEQ ID NO: 635224 - DNA, 100 bp, Homo sapiens
tgacaaagcagttactgctatgggaattctgaatacaattgatacacttcttagtgtagttgaagatcataaagagagggaaccccttacctggaatctg

SEQ ID NO: 635225 - DNA, 80 bp, Homo sapiens
cgggtggcttacagacgctgccagcatcgccgccgccagcggagctggagtttgttcagatcatcatcatcgtggtggtg

SEQ ID NO: 635226 - DNA, 75 bp, Homo sapiens
tctgatgtctggagcttaggaatctcttttatggagatccctttcagctccctgcaaaaacagaaccaataaaag

SEQ ID NO: 635227 - DNA, 101 bp, Homo sapiens
cacatccaggttgttttgaagcaaagtccaagcattgtatcacttcatctgcaaatatttcaataagtacccaaaagggacttaagtcacaacagattatc

SEQ ID NO: 635228 - DNA, 80 bp, Homo sapiens
tcctttgagctccggaaagttggtactccaaagattcaggtttactcacgtcatccagcagagaatggaaagtcaaattt

SEQ ID NO: 635229 - DNA, 100 bp, Homo sapiens
tccagcaatcgggccatcccggacactcgccatctgagatgaccctgatgatctgcaatgtaagcggggagaacatgttgcgctggctaactggcagaac

SEQ ID NO: 635230 - DNA, 100 bp, Homo sapiens
ggccaagtcagccacctggacggaccgtataatagacgctggccccaaaggaaactactctcgatttatgaatcacagctgccagcccaactgtgagacc

SEQ ID NO: 635231 - DNA, 76 bp, Homo sapiens
ctcaccccggggccgggcagaattgggctccaggactgaaaactggatatttggtccccatggactttctggtcac

SEQ ID NO: 635232 - DNA, 100 bp, Homo sapiens
agacctggtggaggtgttaaatgaaaagttttccgtctgatgaaggttggccatttgcaaagtatcttggagcttgtggaagaatggtggctgtaaatta

SEQ ID NO: 635233 - DNA, 100 bp, Homo sapiens
ccttctggatgctttgtctgaggacttctctggtccacaaaatgcttcatctcttgaccctgatgctcccataagacagaaaatgccccttgatgatctg

SEQ ID NO: 635234 - DNA, 51 bp, Homo sapiens
gggaagggcctcaaagccagaagccaaaactggacaagccaaggcatctgt

SEQ ID NO: 635235 - DNA, 48 bp, Homo sapiens
cggatgggatccagctgttagtcggtacgaggatgtcgtccaggaaag

SEQ ID NO: 635236 - DNA, 83 bp, Homo sapiens
gcgcctccgctgcagtcgctgcgtctccaaggattatatctgtccaagatgcgagtctggttttatcgaggagcttccggaag

SEQ ID NO: 635237 - DNA, 75 bp, Homo sapiens
gctgcgggtctgctcgggggtctacttcgagggtgaatgaaaactttgccattgatttgatagcagagcagcccg

SEQ ID NO: 635238 - DNA, 100 bp, Homo sapiens
ccagtattgtgtctaaattctgtggatgatgttttctcacccagtcatggggataattctatttaaagaaaaagccaaggaagcattgggtaaagccaaa

SEQ ID NO: 635239 - DNA, 78 bp, Homo sapiens
gcggcgaggagaacgtcccgctggatctgacccgagtggccacagatgtctttaattccaaaaacctggccgttcagg

SEQ ID NO: 635240 - DNA, 101 bp, Homo sapiens
tgaaatcattgaagtgcttggagtgcagaactgaaagaggtgaacacacagtgttcatcccctcaggaggacacagcttttgaggtaccatcttggaagca

SEQ ID NO: 635241 - DNA, 101 bp, Homo sapiens
cgaggatgatgcggaaattaaccccaaggcccttccttctaccatgattatagtagcagtttattgtcctgtgatagctgctgttttcattgttctgaaga

SEQ ID NO: 635242 - DNA, 90 bp, Homo sapiens
aggctgaaactgatgatgctgtggagggggtgctgagaactgaagtctttgaggagctcctatgacttctagaagtacatctacttggag

SEQ ID NO: 635243 - DNA, 50 bp, Homo sapiens
ggaaaatgtagcttcccggttaagatccatcatgttacacaaaatggagg

SEQ ID NO: 635244 - DNA, 87 bp, Homo sapiens
ttgaacattcaggaccctgacaaacgaaaagaatttcttaaaacctgtgttgggcatttttagatgaattcactaactggtcaagaa

SEQ ID NO: 635245 - DNA, 100 bp, Homo sapiens
gagtctcggagaagatgtggtggcttccgtttgttggtggaggaggtggcaggcctcggcggaattgaatgatctggcacgggaccctccagcacagtgt

SEQ ID NO: 635246 - DNA, 90 bp, Homo sapiens
ctcctgtaacccagcctgtttcacttcttgaaatcttcccaaggctgcagacaccgacggatttgctttgggagccagagtagctgccgc

SEQ ID NO: 635247 - DNA, 80 bp, Homo sapiens
gtgactcttgttgaagatcctgcggtgtcccgacccaggctaagcttgagcatggctgagcaggagcccacagccgagca

SEQ ID NO: 635248 - DNA, 51 bp, Homo sapiens
caccaagtgaacgcttggagcaggaactcttttctggaggcaacactggga

SEQ ID NO: 635249 - DNA, 98 bp, Homo sapiens
atggactggcccccttgagcctgtcccaagccctggtgccaggtgtccatccccgtgctgaggactttgtgttttatgccccacgtctgagaatcaac

SEQ ID NO: 635250 - DNA, 83 bp, Homo sapiens
tatcagggacagtggcggatgtgcactgctacaggactctactatggagcgtcagcctcgagtttgaccagcagcaggggtcg

SEQ ID NO: 635251 - DNA, 100 bp, Homo sapiens
agcgcgggatcccagcctcaggcgtgcgcggacggtgtgcggaacaccttccaccatgaccacctcagcaagttcccacttaaataaaggcatcaagcag

SEQ ID NO: 635252 - DNA, 100 bp, Homo sapiens
ttcacctccctcttctctctggaatgtgtgctgaaagtcatggcttttgggattctggtcccttgccgatggaggccattgagaagatggccagcctgtg

SEQ ID NO: 635253 - DNA, 98 bp, Homo sapiens
aattttccacccgggattatatcatggaaccctccatcttcaacactctgaagagggaccatgctggcgggaatgagaaactggtcaagctggagtcg

SEQ ID NO: 635254 - DNA, 75 bp, Homo sapiens
gttattggaattctgttcggtgtttaagccagcaatgccaagatctgttgtgttaatatgatcctctgttgaagc

SEQ ID NO: 635255 - DNA, 90 bp, Homo sapiens
cgaccgcctcatgaagcagatctcctccttcatgtcagaaatctcggatgaattcaagctactcccgagcccggagaggacccacgcgtg

SEQ ID NO: 635256 - DNA, 50 bp, Homo sapiens
gtatctaccaggcaatgaacaagctcgggttcatgacgctctcgatattc

SEQ ID NO: 635257 - DNA, 82 bp, Homo sapiens
tttttaccaactgtgtaaaggatgaaaatgtcaagcagatcaggatcctcatgaccagccaaagagaagaagaattaggaag

SEQ ID NO: 635258 - DNA, 101 bp, Homo sapiens
cggcgcacgccttgcccgcccagcgctccattagcttccgcagtgagagccgccctgacatcctcgccccccgaccctggtccagaaatgccgccccctcg

SEQ ID NO: 635259 - DNA, 83 bp, Homo sapiens
agattttgcatctagaggaattgaaacaattgtctggtttgtggtaccacaatcgaacccaccaccctgacgtatttgctgct

SEQ ID NO: 635260 - DNA, 75 bp, Homo sapiens
agaccctaaaggatcaaccctctgcatacagtaaaagagaactcgatgccaccgcaacggtattggcgaaccggc

SEQ ID NO: 635261 - DNA, 75 bp, Homo sapiens
tttacaaatacatcgtaaaatattttgatgaggaggacgaatccatgaaccaaccaggaccaatcaaaaccagac

SEQ ID NO: 635262 - DNA, 100 bp, Homo sapiens
aggaatccattatggtgtcattacatgtgaaggctgcaagaatgtcgaggtcttggcgagcaggagcaacacttcagagcaagaccaggcggggactgaa

SEQ ID NO: 635263 - DNA, 75 bp, Homo sapiens
tgtggttgtgcagccagatgcctggacagaggacaatggcttccatgtttatgtgaagaaccagctcagtgggac

SEQ ID NO: 635264 - DNA, 100 bp, Homo sapiens
taactaaaagaatgctcatgtttgacccagttcctgtcaagcaagaggccatggaccctgtctcagtgaaacgtgttcagttgatcatcaaatacttaaa

SEQ ID NO: 635265 - DNA, 100 bp, Homo sapiens
caaggcgccaggcaggacgacagcagcagcagcacgtctccttcagcactgggttctgatcttcacgttgatgtgaagggttacaaggatggagggatcc

SEQ ID NO: 635266 - DNA, 80 bp, Homo sapiens
catttcagtcactggtttgcagagtccagaacatacatatgatagttgagaaagacacatattctgatcatgaagaaata

SEQ ID NO: 635267 - DNA, 74 bp, Homo sapiens
attgtctgacaatatgtgaaaacatagtggcacagtctgtcagaatgtcatacccaggctatcccccaacaggc

SEQ ID NO: 635268 - DNA, 116 bp, Homo sapiens
ggtactcttcagggatgagtcatgtggcagtggaaaatgcgctcgggctggaccagcaggtcaaaatgcagatcttcgtgaaaacccttaccggcaagaccatcacccttgaggtg

SEQ ID NO: 635269 - DNA, 98 bp, Homo sapiens
tccgaagtgattttagctacatcaagtgatgaaaaacacccacctgaaaatatcattgatggacatcccagttaccagtgtccttgaattgatagtgg

SEQ ID NO: 635270 - DNA, 75 bp, Homo sapiens
acaaacgaaaagaatttcttaaaacctgtgttggaaccaggctttagcaaagatggatatattggtgactgagac

SEQ ID NO: 635271 - DNA, 95 bp, Homo sapiens
gagaggatgatttttggatcctgagaattgatctatgttggatcaaaggaagaggcccagcagaagggactcgctgagccaccccccgccccact

SEQ ID NO: 635272 - DNA, 101 bp, Homo sapiens
gataccagtctcctgtccgagtctacaagtacccgtttgagctggtcatggcggcctgtttaaagaagaaaacccgtatgctagatttgaaaacaactaaa

SEQ ID NO: 635273 - DNA, 82 bp, Homo sapiens
cgaggaaacgcgctcttagaccatggcgacccaggcgaagcgtccacgggtgagaagccctaccactgcaactgggacggct

SEQ ID NO: 635274 - DNA, 98 bp, Homo sapiens
acagtgaaaccctttgccatcgacatatttcctgtcaccaacaaagatttcagttgtctgtgctgtgaatgccctcgcccaccatgtgctcaacaagg

SEQ ID NO: 635275 - DNA, 76 bp, Homo sapiens
aaaaaattcatctgggcggtatctggaacttgccaagccctataccaagtcctgttttggggcgaaagccaaatgc

SEQ ID NO: 635276 - DNA, 100 bp, Homo sapiens
gtggggtcgacgacgaagacagcggagaggagagcggtgcggaggactgagacatgcaagaaagcacttcagccaagcagaagggagccagctggacgag

SEQ ID NO: 635277 - DNA, 75 bp, Homo sapiens
gtgacccggttcctgggcccacgctaccgggagctggtcaagaactgccaaagtggaacaggtgaagttcgatgc

SEQ ID NO: 635278 - DNA, 94 bp, Homo sapiens
cggtgcccgaggaggcagccaagctcgtagcctgccactccgtgcggtcggcactcttcaccctcccgagccctgcccgtctcggccccatgcc

SEQ ID NO: 635279 - DNA, 50 bp, Homo sapiens
gttaacacttcctagataacggaacccttaggagaaatcttgagagtgga

SEQ ID NO: 635280 - DNA, 90 bp, Homo sapiens
ataactgactctgatctcaacattttggctgaagtgtctgctttttcaacgtgggagaaggagttgcacaagatagtttttgatccccgg

SEQ ID NO: 635281 - DNA, 74 bp, Homo sapiens
agcctgaaatgctagatctacattgtgataaggcatttgacattatcacagactgacatggcagcattaacagg

SEQ ID NO: 635282 - DNA, 87 bp, Homo sapiens
acgatgagctcaatcggcactgggtaagactttgaccccgacgcaggcttcagtgattgccgcggatcagaagcctgagcactttgg

SEQ ID NO: 635283 - DNA, 89 bp, Homo sapiens
aggttcagttggcaaaccagatatatgacttgatactgatggaacgtcgaattagaccatggattaataagaaaatcatagaatatata

SEQ ID NO: 635284 - DNA, 50 bp, Homo sapiens
caagcagcagccagagaatgggagcctcgtcacgtgttcaatatgctaaa

SEQ ID NO: 635285 - DNA, 82 bp, Homo sapiens
ttcagcctatgtagacagccacaaatgggaagcaagagaaaaagaacattactgtcttgggagtgcatccgccccaaccctt

SEQ ID NO: 635286 - DNA, 82 bp, Homo sapiens
caagtttgcagatcgggagcgcaaggtcgccctcaaggccatgatcaaaactttgttgcatattctaaggacccagacatag

SEQ ID NO: 635287 - DNA, 51 bp, Homo sapiens
tttgcttaatattacagaaccagttctggatggagtcttgctttgtcaccc

SEQ ID NO: 635288 - DNA, 97 bp, Homo sapiens
gcccaccttgtggccctgggctttaccatctttgtggctgtgcttgccaggcctggctccagggtctgtcctccagcctcagcagatgagactttta

SEQ ID NO: 635289 - DNA, 101 bp, Homo sapiens
ccagattccatggaaccactcagtattgcaccatgaagagatgattgggaaagctgggggagtgtctctgtcaaaatttgaaaaagggcgcatctatacgt

SEQ ID NO: 635290 - DNA, 83 bp, Homo sapiens
tatgaggagagaactcagcgacactacctgggccatacagactgtgtgaaatgggtaaaaggacaaacttgcgtaaaactggc

SEQ ID NO: 635291 - DNA, 74 bp, Homo sapiens
aagagttgattgaaattatctctggtgctgcagctcttcggcagaaccaattgaaagaccaacagcaacagcaa

SEQ ID NO: 635292 - DNA, 82 bp, Homo sapiens
tgccagctccaaggacgccatcaagaagaagctgacagttcaggcttcagagagcccctgacgcctgcaggaacatggcaga

SEQ ID NO: 635293 - DNA, 82 bp, Homo sapiens
agaacatcctctttaacccagttcccaccctcacagtcaggctgaccccgcactacatctacccaccagccatcgtgcagcc

SEQ ID NO: 635294 - DNA, 82 bp, Homo sapiens
agagaacaaaaaacaccacagtactatcgtctatcattggatgaagtggctccggagatggtggcccagttgaaatccttcc

SEQ ID NO: 635295 - DNA, 88 bp, Homo sapiens
tggacctggctgggaacaacatccctggagacgtcctcagagccgtgggggagagaatggccctgggggcttcatcgtgctcaagtcg

SEQ ID NO: 635296 - DNA, 88 bp, Homo sapiens
aggccaagaaaggagaggaagctttatttacaaccagggagtctgtggttgactactgcaacagactggaacgtgagaaacgagcccg

SEQ ID NO: 635297 - DNA, 78 bp, Homo sapiens
gatattagaaactcactgcagaatctttcacagaggcggggtttcaccatgttgcccagactggtcttgaactcctga

SEQ ID NO: 635298 - DNA, 96 bp, Homo sapiens
gaccacacttgtgcgggagctaattgatggaaaactcatcctggctctcaaaattagagagatgtgtaattgtccaccactgtctaatccagaccc

SEQ ID NO: 635299 - DNA, 75 bp, Homo sapiens
cacagccgcccacttctggaaggttccatcccctgcaggattacattgcagtgaaggagaagtatgccaagtacc

SEQ ID NO: 635300 - DNA, 133 bp, Homo sapiens
ctttgacgttcaccagcgtgatcgaatgcgagaagccaaacaacgacctgagtaggtttcgcggctgcatggagttctgggaaatcgttcattcatttacagatgaacagaaaagactcttcttgcagtttac

SEQ ID NO: 635301 - DNA, 50 bp, Homo sapiens
gccggcgaaggaggaggcgttgccggttgctgatatgtgttcaagatgag

SEQ ID NO: 635302 - DNA, 101 bp, Homo sapiens
attttgaattttttggcagcagaagggcgactgagtactcaacatattgactgtatttgggctgcagcacaggtgcccttcgctttatgaggcggataatt

SEQ ID NO: 635303 - DNA, 50 bp, Homo sapiens
agcgcagccatcggtgcgctgcagaagctgacgggtcgcctcatgctggc

SEQ ID NO: 635304 - DNA, 85 bp, Homo sapiens
accatgtcagccttcccagtagctgggaccacaggaactgcctcctgagcgtggagcctgccattagcaccaagcacctccctta

SEQ ID NO: 635305 - DNA, 110 bp, Homo sapiens
agagggaacatgctgagaaactgatgaagctgcagaaccaacgaggtggccgaatcttccttcaggatatcaagacaacgtgtcctggagagacagcacaatgggctcta

SEQ ID NO: 635306 - DNA, 100 bp, Homo sapiens
tgagcactgctctcagtgagaagcgcacgctggagggcgagctgcatgatctgcggggccaggtggccaagacccctgtccaggatccgggatccggcat

SEQ ID NO: 635307 - DNA, 75 bp, Homo sapiens
ttttgaagggaatttctgcccagatagtgtctgcagctgatcctcagtcttccacaatgaaccctgtttacagcc

SEQ ID NO: 635308 - DNA, 50 bp, Homo sapiens
tgcaaaggttgcagcaaccaaaagccagcacttaaatatagatccggtgg

SEQ ID NO: 635309 - DNA, 100 bp, Homo sapiens
gggaggaaaaggccaagagtagctggtttggcttgagagaagccaaggacccgactcagaaacccagactgattcttgctattccaaatcctcttccacg

SEQ ID NO: 635310 - DNA, 75 bp, Homo sapiens
gcctcaatgaggtgaagatttacagcctcagctgcggcaagtcccttcctgaggatatcaatgcttacaattgtg

SEQ ID NO: 635311 - DNA, 97 bp, Homo sapiens
tagcagccagttccggcccgaggacaccgactaccagcagatgaagactggcccatttgcagagcactccaaccagctgtggaacatcagcgccgtc

SEQ ID NO: 635312 - DNA, 50 bp, Homo sapiens
tgaagcaaaatgcttctttcagatgcgtctgttactagagtggagagtct

SEQ ID NO: 635313 - DNA, 51 bp, Homo sapiens
agcagctcccgcgaggaccacccggagtccaaaactacttacctggaagac

SEQ ID NO: 635314 - DNA, 83 bp, Homo sapiens
aggagaactaaatgggagaagaggaatgttccctgacaatttcgttaaggtgagccagccatgagagggtatcttgtggccat

SEQ ID NO: 635315 - DNA, 101 bp, Homo sapiens
ccagctcaagaagatcatcaagcgcaagcacaccctaccgaattacaagatcaggaacgagctagagcgacagtttcttgaattgctgcagttcaacatca

SEQ ID NO: 635316 - DNA, 100 bp, Homo sapiens
gaaagagccactgaacagttacagcgagctgcttactatcaggtgacagagctgaatgaacctctctccaatgaagatcgaaatctcctctctgtggcct

SEQ ID NO: 635317 - DNA, 98 bp, Homo sapiens
ctgcgcaggaggagtatgtcaagcgagccctggagatcgacaactgttaccaccgggcggccgagggccgcgcgcccaagatcgagaagcagatccag

SEQ ID NO: 635318 - DNA, 85 bp, Homo sapiens
catctttaagctcatcactgggaccctcagcaaagatgaggtttatataactttccaagacaaggaagttgtgcaaagcctcaca

SEQ ID NO: 635319 - DNA, 100 bp, Homo sapiens
aagagctccatggcggcggcggccaagcccaacaacctttccctggtggtgcacggaccgggggacttgcgcctggtctggagggtgagcgacctgcgag

SEQ ID NO: 635320 - DNA, 75 bp, Homo sapiens
gagtttccgatttaaagctgagctgcgaggaaaatggcggcgggaggatttttagactctgaggagcagttggag

SEQ ID NO: 635321 - DNA, 82 bp, Homo sapiens
aaggggtagcgggagtgatgtctgtggggccgccggcggcccggcttcaggttttaaaatcaaagatgggaaaatcggagaa

SEQ ID NO: 635322 - DNA, 100 bp, Homo sapiens
ccccatgccccgcgcgggctgacgggccggagcccgcacggagcggccgggcgggacagtcgtggcattcctggtggctttccatcagaacaagcagctc

SEQ ID NO: 635323 - DNA, 90 bp, Homo sapiens
ggaatatgaagagacacagtatggtagccacacccccaggtcctgggtgccccttctttccgcatgctggcctggcacgttctcatgggg

SEQ ID NO: 635324 - DNA, 108 bp, Homo sapiens
ccagctgaagagcgacaagccgctggcagccgcggatctcaccgccgctcaggactcggtgaaatacctggagtgctcagctctcacccagagaggcctgaaaaccgt

SEQ ID NO: 635325 - DNA, 50 bp, Homo sapiens
cggcggtggaggagccggagcataatggattaagcatgaaaatattgttg

SEQ ID NO: 635326 - DNA, 75 bp, Homo sapiens
acatgggagacccggggtcggaattgtatatgaacacagatcaagattagagaaatccttgcaaaaagaaagact

SEQ ID NO: 635327 - DNA, 100 bp, Homo sapiens
ccagctttaccgcaaccaccgccaccagtccacggagggcatgagccgccccgggggaaggtgcggaggacgcagacagcgggcccgagagccgcagcgg

SEQ ID NO: 635328 - DNA, 80 bp, Homo sapiens
cacacagctgcttccattggccagtatgaagtggtgaaggagtgtgtgcagcgcttcgcctcaacagcatcaagaagctg

SEQ ID NO: 635329 - DNA, 75 bp, Homo sapiens
gcgaacacagtagtggaagatgtaaagcaatatttcgagcagtttggcaaggccaagtcctgtatctgccatgtc

SEQ ID NO: 635330 - DNA, 98 bp, Homo sapiens
cgagatgccgggggagcggggccttccacaccccctccgtgggtgtgtgtttttgaaatcatgaatcctgtttatagtcctggatcttctggggttcc

SEQ ID NO: 635331 - DNA, 75 bp, Homo sapiens
gaagaggctggactcggattcgttgcctgagtcgtcattgaattttgagaagcattctgaaaactttgcatggac

SEQ ID NO: 635332 - DNA, 101 bp, Homo sapiens
ctgcctgtccagccagcatggaaccaaagcggatcagagagggctaccttgtgaagaagacaattcctcctcgcttcaagaagatgaagaagtagagatgg

SEQ ID NO: 635333 - DNA, 74 bp, Homo sapiens
tcacacctgcaatcccagcactttgccagcagaaaactgagcttccggtcacagagaacgtgcagacgattccc

SEQ ID NO: 635334 - DNA, 100 bp, Homo sapiens
attgagaaaatgttgttggaagaagataatgcaattcttcattcagcatatagcgagacatttcttctgcctcatttgaaagacatcccagcacagcata

SEQ ID NO: 635335 - DNA, 100 bp, Homo sapiens
gaagctgtgggacacgcggttcttctccagcgccctggcctccctcaccttggacacctcgcttgggtgtcatggagaaactccagctgggcccagagat

SEQ ID NO: 635336 - DNA, 104 bp, Homo sapiens
ccagatcgacccctcggatcgaataacgataaaaggagaggagacgccgtgagcgggacgaccagatgtaccgagagcggctgcgcaccttgctggtcatcgcg

SEQ ID NO: 635337 - DNA, 82 bp, Homo sapiens
cgggacctgggctgggaacccgcggtggagcgggacacgaacgtggctgaaggtgatgtggccgccctcaaccgacgcatcc

SEQ ID NO: 635338 - DNA, 90 bp, Homo sapiens
gaaccatgtgactttgtcacagcccaagatagttaagtgggctgtattgctaactttagtatgtggagtttttggtgcaactaaagggaa

SEQ ID NO: 635339 - DNA, 140 bp, Homo sapiens
gggcgatggcggagcgcggcccggccttctgcggcctgtacgacacgtcctcgctgctgcgatactgcaacggagcctcctcaacaagcccaagagtgagatgaccccagaggagctgcagaagcgagaggaggaggaat

SEQ ID NO: 635340 - DNA, 97 bp, Homo sapiens
gagagagagagaaagaggaggggaggaggaggaggattcagggaataggagctggggagcccttctgcgccacagggttattttggagctgttggag

SEQ ID NO: 635341 - DNA, 50 bp, Homo sapiens
accagtcccagcttccagtcacagcatagatatctcccggggccaattca

SEQ ID NO: 635342 - DNA, 75 bp, Homo sapiens
ttggacgtgttcttccacttgagactgagacgaagttatacggaagcgtctcctcattgatggagatggtgctgg

SEQ ID NO: 635343 - DNA, 83 bp, Homo sapiens
gagactagacctcgtaattacattctctcggccagcgcctccgcggctctgcattagctgctaatgtatgtaaaaagattact

SEQ ID NO: 635344 - DNA, 87 bp, Homo sapiens
cggcggggagcacacggagcactgcaggcgccgggtcaaaatgcagatcttcgtgaaaacccttaccggcaagaccatcacccttga

SEQ ID NO: 635345 - DNA, 83 bp, Homo sapiens
cgagacttttctcagatgttggatatttgcttggaaaaacgtgtgggtacgaccttgggacaagtggtagaaaacttaaaagc

SEQ ID NO: 635346 - DNA, 100 bp, Homo sapiens
agagatgcctgcagcctgccatgggacgtggggtccaccggtacagggtgtccgtgccgctgctgaagacgctggaccacgtgctcacccacggctgctt

SEQ ID NO: 635347 - DNA, 75 bp, Homo sapiens
cggaaagtggtatctcgggaatcaggagaggagaggcagcagcatggcgagtgtcctgtcccgacgccttggaaa

SEQ ID NO: 635348 - DNA, 100 bp, Homo sapiens
aaggttcatacctttgtggtagactgcagcaaccgagaagatatttacagctctgcaaagaaggtgaaggcagagtctctggggattcctcagaaaatgc

SEQ ID NO: 635349 - DNA, 78 bp, Homo sapiens
tgctctagatccgcaggagtacccgagagggctaacagtccagagaagattttcagttcccaaacccgcttttatctc

SEQ ID NO: 635350 - DNA, 94 bp, Homo sapiens
attttaccagatcgaatctgggccaaatagaaaggactttttttatgaagacatggagtccttgacgcagatgcttagggccttggcaacagat

SEQ ID NO: 635351 - DNA, 83 bp, Homo sapiens
tttggattgaagccgcctctgtattacttaccaggtgaaagaaaatggcccgaaccaagcagactgctcgtaagtccaccggt

SEQ ID NO: 635352 - DNA, 82 bp, Homo sapiens
ctgggattggagattccacccaaacttgctggtcactgggagattctgaaagtcaagaagacatcatccggaatattgccag

SEQ ID NO: 635353 - DNA, 100 bp, Homo sapiens
tttctctcaggctttcctacaactcatgcccagcagcagcaagcagtgaatggtagtgtctagaaagggtatgtcccttcaagagagaggtgccaatgtc

SEQ ID NO: 635354 - DNA, 98 bp, Homo sapiens
gaagcgcgcgggcaaggaagtgctgctggaagcatcatctgagggttctccataaacacggttagccttccaagctgctgtcctgccagttgatatga

SEQ ID NO: 635355 - DNA, 98 bp, Homo sapiens
aataccagtccccagtgagggtgtacaaatacccctttgaattaattatggctgaggcacgcggacctccagtggccggctccggaggcttggtgact

SEQ ID NO: 635356 - DNA, 87 bp, Homo sapiens
tgagggggccacctgtgatgaggaagaggatgaggtgcagctcaggtcaaccagtgataccatgtgtgggaagttgttctgtcaagg

SEQ ID NO: 635357 - DNA, 51 bp, Homo sapiens
aaacaactttcacattcagacaaggactgagcagggggaggaacatttaag

SEQ ID NO: 635358 - DNA, 51 bp, Homo sapiens
ttttctttataaattacccagtctcaggcatcagcttctggtgatgtgagc

SEQ ID NO: 635359 - DNA, 98 bp, Homo sapiens
cacatgcgctggctggtctggattatggcttccgtgggcaccatctatgtcttcttcttccatgagcggtgtggaccactacaacgaggtgaagagcg

SEQ ID NO: 635360 - DNA, 50 bp, Homo sapiens
ttcagacccatttccagtcatgaacagagtttcactcctgttacccaggc

SEQ ID NO: 635361 - DNA, 75 bp, Homo sapiens
ggaaattgtggtgtacttgtggagattcttcaagcaatcactatgtcaacagacacaggtgtttcccttccttca

SEQ ID NO: 635362 - DNA, 83 bp, Homo sapiens
ccgatgaggaagtactgagcctgttggaggaactggcccggaaacaggaggacctggtaggtgagtgctgtcctcggctcact

SEQ ID NO: 635363 - DNA, 75 bp, Homo sapiens
gccatacccaataaccaggtgcttggcaaaatcgagcgggccattgggccgagaactactggtggcgtggccaga

SEQ ID NO: 635364 - DNA, 99 bp, Homo sapiens
cggaaggctccctcggtcgcgagtatctccgtttcctggatgtgaacgaagatgtggacaaggcagtgaaggccgcccgggccgccttccagctgggct

SEQ ID NO: 635365 - DNA, 95 bp, Homo sapiens
ttccgtgacttcctgaagatagccctggataagaacccagaaacccgacccagtgccgcgcagctgctggaggcacattcaggaccccgcgagcc

SEQ ID NO: 635366 - DNA, 75 bp, Homo sapiens
ctggggttcggcgctatggaggagctcgatggcgagccaacagtcactaatatggtgcacctgaagattgggaac

SEQ ID NO: 635367 - DNA, 76 bp, Homo sapiens
gtgccacctggtttcaagaccctacccgcttcactggcaccatggtgtggacacagctgctccgggccttggagga

SEQ ID NO: 635368 - DNA, 82 bp, Homo sapiens
ggacaagcttaataaaataaccgtccccgccagtcagaagttgaggtctctaattaacagaagatggcaaagcccagccaca

SEQ ID NO: 635369 - DNA, 75 bp, Homo sapiens
tgcacgtggctgctgccaagggctacattgaggtgatgagtgtgtgttttaatagaaaagttgtcactttccaaa

SEQ ID NO: 635370 - DNA, 90 bp, Homo sapiens
ttttggggtagcaggtcaacttacaagtgtcctgccatacttcgtagctacaaaactggctaaaatccggaagccaactttggataagcc

SEQ ID NO: 635371 - DNA, 74 bp, Homo sapiens
gtgattcgaagctacttaggggcatacattactaagggaaagttggggacatgctgctacaatacggctaatct

SEQ ID NO: 635372 - DNA, 87 bp, Homo sapiens
gcagagtggaccaccccatgaacctcgttcatggaatgtctgatgattggtcgggatctcgtaagactacttcagaatgttgctagg

SEQ ID NO: 635373 - DNA, 82 bp, Homo sapiens
ggtctcagccgccaaagaccccgtccggtaggtgagaagccctaccactgcaactgggacggctgcggctggaagtttgcgc

SEQ ID NO: 635374 - DNA, 50 bp, Homo sapiens
gagaaagacgagactgagtcgcttggggagatctgaatctcaatgtggta

SEQ ID NO: 635375 - DNA, 83 bp, Homo sapiens
ctcggggcgggcgccgcgggacctctccgggccatgggctaccggctctctgaccagttccacgacatcctcattcgaaagtt

SEQ ID NO: 635376 - DNA, 83 bp, Homo sapiens
atcgtgcacatccaggctggtcagtgtggcaaccagatcggtgccaagcgtcgagggcgaggcccccagcagtgagactggca

SEQ ID NO: 635377 - DNA, 75 bp, Homo sapiens
aagtggcggtgcggatacgacccatgaaccggcgagacaatgcagatcttcgtgaagactctgactggtaagacc

SEQ ID NO: 635378 - DNA, 82 bp, Homo sapiens
accagtccccagtgagggtgtacaaatacccctttgaattaattatggctgtgaaagaccttttatgtgtgaaacatgtggc

SEQ ID NO: 635379 - DNA, 97 bp, Homo sapiens
agccacagagagaaccaccagcattgccaccaccaccaccaccaccacagagtctgtggaagaggtggttcgagatgatacaccccctgaagactcc

SEQ ID NO: 635380 - DNA, 82 bp, Homo sapiens
cccggacgagttcgatgacttcgtcacctatgagacttcccaagtaagaagcggaagaggagccgctggaaccaagacacaa

SEQ ID NO: 635381 - DNA, 90 bp, Homo sapiens
gatgccctgcagtacctgcagaaggtctctggagacatcttcagcagaaggaagaggcccagcagaagggactcgctgagccaccccccg

SEQ ID NO: 635382 - DNA, 83 bp, Homo sapiens
aggagaggttcaaccgcgccctggtgaaagaaaatggcccgaaccaagcagactgctcgtaagtccaccggtgggaaagcccc

SEQ ID NO: 635383 - DNA, 75 bp, Homo sapiens
caggctgaagacagagggctctgatctgtgcgacagacgttacagtgtttctgccacctctgtacaaaagacaat

SEQ ID NO: 635384 - DNA, 75 bp, Homo sapiens
gctgcccggagtccggataagccgggcgggagcccctcggccagatccgtgggcgtgagcgcttcgagatgttcc

SEQ ID NO: 635385 - DNA, 90 bp, Homo sapiens
gccggagagggtgctggctgccgcgcggccgagtgtcttgggacaaggtgcgcattcctggtgtgctgcagcgattgggagtgacatact

SEQ ID NO: 635386 - DNA, 80 bp, Homo sapiens
aaaagaatacattcctgattacctgccacccattgtgtcttctcaagaagtttttcagaagaagtgaagtcaagatgaag

SEQ ID NO: 635387 - DNA, 100 bp, Homo sapiens
gccgggcaccgaggaccagctcaatgacagacggagatgcggctgcaggaccagcaactggccagacagctcatgcgcctgcgtggcgacatcaacaagc

SEQ ID NO: 635388 - DNA, 90 bp, Homo sapiens
ttcgagagccctgtcatcttctaaacagagcagcagcagcagagatgataacatgtttcagggccattatgctgtgatgaacaaccccac

SEQ ID NO: 635389 - DNA, 75 bp, Homo sapiens
tagaagcccactcaactgatgaatttaaagatgtttctgcaacagaaccacgcaggccagaaagcagacccaggg

SEQ ID NO: 635390 - DNA, 90 bp, Homo sapiens
ccaccatttgccagggcctcgctcgagttgccgaacaagcaaccggaaaagcttaataggcaatgggcagtcaccagcattgcctcgacc

SEQ ID NO: 635391 - DNA, 75 bp, Homo sapiens
gacaggcagagtgctgatgtgaaaaataccacgacaaaaccaccctaggccatgatccaaaggaaccagagcagt

SEQ ID NO: 635392 - DNA, 100 bp, Homo sapiens
ctgaccgtgggataccagattcggttagaaagtgtcaagatcctccccacagctcagcgtctcctggacgaactcctgtcttcccagtcaacagccatca

SEQ ID NO: 635393 - DNA, 50 bp, Homo sapiens
tggaaccattatccatgtgaaagacatggcccatgaacatggacatgagc

SEQ ID NO: 635394 - DNA, 100 bp, Homo sapiens
tgctttaaacttaaagacctctttggacccgaaattgtaaggtggatccataaagaacccagccaacccgcagagggaggggaggggctgagctgtgagg

SEQ ID NO: 635395 - DNA, 97 bp, Homo sapiens
gctatatactttggttacctatgtacctgttaccactttcaaaagtcagaagacatgtcttcatctacatggcatctttccttacctctatgtgcca

SEQ ID NO: 635396 - DNA, 73 bp, Homo sapiens
tcagattccccgtactccagaaaacttgaattttctggcatccttaaatcttgtgtcaaggattggttataat

SEQ ID NO: 635397 - DNA, 74 bp, Homo sapiens
ctggcgcccatccgcagcaaggacgtccgcagcaggtattagaaaactactcggatgctccaatgacaccaaaa

SEQ ID NO: 635398 - DNA, 96 bp, Homo sapiens
agtgctttggtctgttgtgctggcttggtgacgctcacagtgctgggaaggaatctatccaagcacgtctccttcctgccatcttgtgaagaagtg

SEQ ID NO: 635399 - DNA, 83 bp, Homo sapiens
tcaggcttcaatagtgtggacagtggtgataagagatggtcagggaatgaattgctgtcatcctcacctaatcgtattcctag

SEQ ID NO: 635400 - DNA, 98 bp, Homo sapiens
atgctatgaatttatacaaggagaagcactggatccaaagcatgtctgcaacccagccattttcagggagagtcccgtattctcagagtaaaagttgt

SEQ ID NO: 635401 - DNA, 98 bp, Homo sapiens
cgaggtgtgcgctgactgcagcgggccgggtactaggttttgacaagcttgcatcatgcgtgagtataagctagtcgttcttggctcaggaggcgttg

SEQ ID NO: 635402 - DNA, 100 bp, Homo sapiens
tggataacgggaggtgaatttccatgtcaacatagtcctggtccgcgggagagctgtggggcttggtgagtgtttcgtggcctctcgggttggtcagcac

SEQ ID NO: 635403 - DNA, 82 bp, Homo sapiens
gcggaagatgatcagccaggcacagaaggagaacatattgtgatgttcgtgcctcagagctaaaactatgagtgaatttcgg

SEQ ID NO: 635404 - DNA, 75 bp, Homo sapiens
gagatctagaatcaactgagagagatgcttaaaaatcaccagttactttaatgatgacaaaggagagcatgcttc

SEQ ID NO: 635405 - DNA, 75 bp, Homo sapiens
ggcgctctcctggctggaccagcactgctccctgcccatcctcaggccgagttcagattctggagatgccctcca

SEQ ID NO: 635406 - DNA, 75 bp, Homo sapiens
cgccgccgcgcacaaccgcacgtgcagcaaaagctggcaggctgacagaggcggcctcaggacggaccttctggc

SEQ ID NO: 635407 - DNA, 75 bp, Homo sapiens
ctggaccttgtctgatggcttcctccaaccctcctccacagcctgccatagggtctgaatccagggaaagctatt

SEQ ID NO: 635408 - DNA, 52 bp, Homo sapiens
cgcagaagtaaagaagtggggagtttagaaagggctattgcaagacacgaag

SEQ ID NO: 635409 - DNA, 82 bp, Homo sapiens
ggacaaactcagacatcgtggagtatgagccgcacagcctacacggtgggagccctgcttctcctcttggggaccctgctgc

SEQ ID NO: 635410 - DNA, 90 bp, Homo sapiens
ggagattttgatgtggatgatgccaaagttttattaggtacactgaggaggggacggctccgtcttcacattgtgcacagatctgaggat

SEQ ID NO: 635411 - DNA, 96 bp, Homo sapiens
taaactgcagcatgatgttctgaagcttgaggaaaatcaactctattatgatccttccactggaatttattactattgtgatgtggaaagtggtcg

SEQ ID NO: 635412 - DNA, 95 bp, Homo sapiens
acagctgcttccattggccagtatgaagtggtgaaggagtgtgtgcagcggagccctctggcacaaatggaagaagaaagaagggagcaagtagc

SEQ ID NO: 635413 - DNA, 75 bp, Homo sapiens
ttcggccaagggaccaaggtggaaatcaaacgtaaagaattctccggaaatcctatcaaggtctcatttgctact

SEQ ID NO: 635414 - DNA, 50 bp, Homo sapiens
ctaacctcggggaccgagatgcagatctttaatctcatgaagtacgacag

SEQ ID NO: 635415 - DNA, 100 bp, Homo sapiens
caggactcatttgggtttaattcaagttccactgaaagtaaaagacatccctgaattgacttaattcagtgcacaaatgagatgaatgtgaacatcccac

SEQ ID NO: 635416 - DNA, 82 bp, Homo sapiens
cgcttcgaagccgagaaagcccgctgggaggccgagcgcgccgagttacagacttcccaagtaagaagcggaagaggagccg

SEQ ID NO: 635417 - DNA, 75 bp, Homo sapiens
ccagcacctacgtcccgctgccgtcgccgccgccaccatgcccaagagaaagggggcatcccggggcccatcgcc

SEQ ID NO: 635418 - DNA, 73 bp, Homo sapiens
gaagcgtcgggattaggtgaaaatgtgtatatctcatgattgatatggagaaactagtcatgggccaaaggtc

SEQ ID NO: 635419 - DNA, 100 bp, Homo sapiens
ggcattgacatttaattttagggtcctttatatagaagggagagtaggcctacgagaagcagcggggcacccggcgcgaggagcagaaggagcttcagcg

SEQ ID NO: 635420 - DNA, 83 bp, Homo sapiens
gctgtgcagccgcgaggaggcgcgggaggtgttcgagaacgaccccgagacggggttcagtcggctgccgtcaatgtcatctg

SEQ ID NO: 635421 - DNA, 97 bp, Homo sapiens
cggagcatcttggacgtcagcatgggggcgcaggagccctcccggcccctattttcccttataaaggttctgaagaaggccttccaggccacgctca

SEQ ID NO: 635422 - DNA, 100 bp, Homo sapiens
atgtattggagaaggccaatttggagatgtacatcaaggcatttatatgagtccagtatttaacatgaagtcgctccagattgtgttacctgcccgagca

SEQ ID NO: 635423 - DNA, 100 bp, Homo sapiens
gctcttgcaactgacgcagtcactgcagcactggtggaacttgagattctggacaatcaggaagtccaagccacaatgatcctgccaagaatcctccagg

SEQ ID NO: 635424 - DNA, 118 bp, Homo sapiens
tacacggggaaggctccaaacctcgacaaaatggctgatgatttgctggcagctgctgacaagcccaggaaccaaattacttgctttacctcattgtgtaagacaagcgtcaaaaaca

SEQ ID NO: 635425 - DNA, 100 bp, Homo sapiens
tgaggagatggacattttggaccagggagccctacagcgtctcttcaaaaagcaatacttcatgctgttgctgctgactgatggtgctgtgacggatgtg

SEQ ID NO: 635426 - DNA, 82 bp, Homo sapiens
ctcgtatgcaacctcaggcttcagccagcctgttacatgaacagaatatggcaaaaatgagactacttacttttatgggaat

SEQ ID NO: 635427 - DNA, 90 bp, Homo sapiens
agcccaggtggataaggaacatctcttcccagcggctcagccctgtgtactgtgttgcatctgacagagagacttttccttgaccacccg

SEQ ID NO: 635428 - DNA, 100 bp, Homo sapiens
tttggctccatgaacggtggtgtgtttgctgtctccaggctcttgcagccaatgccggaacaggatttgctgttgctgagcctcaaatcgcaatgttttg

SEQ ID NO: 635429 - DNA, 80 bp, Homo sapiens
gcctacccccatcactgcttccctcagccataacaggcttcccagctggcgtgtatgttgtaaagagagttcttcagctt

SEQ ID NO: 635430 - DNA, 90 bp, Homo sapiens
cgaagatggtggcggctactcctcctgtggaaagaggcaaaacctgatgaattaatggattccaaattgagatgcgtatttgaaatgccc

SEQ ID NO: 635431 - DNA, 100 bp, Homo sapiens
ctggactctgctcagagagatttgtatagagatgtgatgttggagaactatagcaacttggtatcactagaggaattacggaggttgagctggtccggaa

SEQ ID NO: 635432 - DNA, 80 bp, Homo sapiens
tggacttcattcctggaaaaagaagttcatcagattcaaggagtgtggccatctggggccgtgtggtatttgccactcag

SEQ ID NO: 635433 - DNA, 75 bp, Homo sapiens
atggaccacaaatgcaagatgccttcttgtcacctttatctaataaagatgagtgtcaaatgcctgaacactttt

SEQ ID NO: 635434 - DNA, 100 bp, Homo sapiens
aggcaattgaaaagctgcaggccggtgctcttgcaactgacgcagtcactgcagcactggtggaacttgagtctattgcgtctgcagacatggatttcaa

SEQ ID NO: 635435 - DNA, 100 bp, Homo sapiens
gcacatccacactccgctgctcgacagcccacacatcttgctgacttcactcaagtgcaaaccattcagtattcaaacagtgaagacaaggacagaaaag

SEQ ID NO: 635436 - DNA, 75 bp, Homo sapiens
tgaagaatgtaaagacttgaacatatttggatctattatggctgcagcttcgattgccaatattgtaaaaagttc

SEQ ID NO: 635437 - DNA, 100 bp, Homo sapiens
gggtgagagactatagcaagcagggtgactgtgaagatcacgctaaccttctgtgcagccttcttcttggatatggattagaagcctttgtttgtgttgg

SEQ ID NO: 635438 - DNA, 100 bp, Homo sapiens
gaagtggtccgctttgccaagaagatggacaagatggtgcagaagaagaacgcgcattactctactgactggcagagacaggagaggtagatgtccacgc

SEQ ID NO: 635439 - DNA, 83 bp, Homo sapiens
tatagatattcagaagaaggatgctgttaaaagggtgtcttttatgaataatcaaaagcagcaaaagccaacgctatcaggcc

SEQ ID NO: 635440 - DNA, 75 bp, Homo sapiens
cgtggtcgtttgtttctccaaggtttgaaaagcagctggcctgcaaggtggtggacataatgcgagttaacgtgg

SEQ ID NO: 635441 - DNA, 90 bp, Homo sapiens
cgatgacaagctcaacaaaattaacgatcgttggcaacatctttttgatgtcatcggatcaagctaaagcctggagaaaagcctgttcca

SEQ ID NO: 635442 - DNA, 100 bp, Homo sapiens
tgccgcgccaccgagtccggaccggagactttggggcctaactagtgctgggcctaaaggagataacatttatgaatggagatcaactatacttggtcca

SEQ ID NO: 635443 - DNA, 98 bp, Homo sapiens
cgcgggggagccccgggagccgcacggtaaaacctgtttcccagcctggtggcatcctgtggaaagttggtcagctgcaacctggggtgtgaaggact

SEQ ID NO: 635444 - DNA, 82 bp, Homo sapiens
gtatatagatacttgcaagagtcaggccttggatggtatactgtaaattcagcatatggagataccattatcataccttgcc

SEQ ID NO: 635445 - DNA, 98 bp, Homo sapiens
gctgacagagatgctgcagagctcaacacagtcactcctggcggcaaaccaaacaaaaccagagtcatctggggaaaagtaactcgggcccatggaaa

SEQ ID NO: 635446 - DNA, 74 bp, Homo sapiens
gcccttccaaataagcggcataaagcaattgagaattcagaatagttctgtcccaagaagaactctgaagatga

SEQ ID NO: 635447 - DNA, 100 bp, Homo sapiens
cgcgggatcccagcctcaggcgtgcgcggacggtgtgcggctggtgagtgacacacggagagtgtctgacatccagtggtttcgggaggcctatggggcc

SEQ ID NO: 635448 - DNA, 115 bp, Homo sapiens
tactcactccattccagaaaacactaacttcccagcaggaattgagccacagagtaattatattccaggatgaaatctgtaagtacagacctgagaattctgttgctaatgacac

SEQ ID NO: 635449 - DNA, 98 bp, Homo sapiens
aggagtcatcggacgccagaatctggacaggctgcgggaggagctgcaggactgaggtacagaggccaggggcccagggcaggacccagcctggactt

SEQ ID NO: 635450 - DNA, 101 bp, Homo sapiens
acctgcgtcctttttcgtttttcggatgatgccttcaatactacctttatttccaccatagagttttgattcatcatggataatctgtcatcagaagaaat

SEQ ID NO: 635451 - DNA, 83 bp, Homo sapiens
ccacgctttctccttctgcctttatcctgagggcgctgtgtgccatcgcctccctggggagcagcgacctcctcccccaggag

SEQ ID NO: 635452 - DNA, 74 bp, Homo sapiens
atggacactagaagatgaaatccacagtccagcccacccagtccttcagcctcaagtccaaagcctggtgacat

SEQ ID NO: 635453 - DNA, 75 bp, Homo sapiens
gccacagctgctgctcaactggggagtacaaattgccaagttaaaggcattaggatttcctgaaggacttgtgat

SEQ ID NO: 635454 - DNA, 118 bp, Homo sapiens
tgcaggactccaagatttacttccttccctttccagcagaattacctgagacgaaaatgaccatggttgacacagagatgccattctggcccaccaactttgggatcagctccgtgga

SEQ ID NO: 635455 - DNA, 82 bp, Homo sapiens
cgccgctcaccccgcggccgcaccttcccgccttctcaggtgtgagatgcacaatgcgaaacctaggccccagcttttacac

SEQ ID NO: 635456 - DNA, 50 bp, Homo sapiens
ctaacattttgtgaagttgtaaaacagggtacagccaaagaccggagctt

SEQ ID NO: 635457 - DNA, 50 bp, Homo sapiens
cagaacctgactgtcggcagccagacaggctggagtgcagtggcgcgatc

SEQ ID NO: 635458 - DNA, 100 bp, Homo sapiens
gcctggggagaagcgccccaagtttgttggacgtgataagtatgagcctgcagctgtttcagaacaaggtgataaaaagggcaaaaagggcaaaaaagac

SEQ ID NO: 635459 - DNA, 100 bp, Homo sapiens
cctccacacgtcccccccgctggacagggcagctactcagcaccgacgctgacagggatggtgcctggaacctctttcaggagctataaaagaaagggag

SEQ ID NO: 635460 - DNA, 75 bp, Homo sapiens
gacgccgaggcctcgggcgggggctggcccggggttccagtctgcgctcctcagaccaccggcaggtgaacagcc

SEQ ID NO: 635461 - DNA, 75 bp, Homo sapiens
ctcctttaaagtgggcactgcaaaagtgaactggtcatgctgctggagtggtggtcctgcacggagtgtacactg

SEQ ID NO: 635462 - DNA, 133 bp, Homo sapiens
gtttattaaccacttaacctctcagaactgaacaaagacaacattgttcctggaacgccctctttttaaaaaagggtactgccagggggatggttaccgcatcggctttggccagtgtgctggaaaagtgctg

SEQ ID NO: 635463 - DNA, 100 bp, Homo sapiens
aactctaactgaagatggtttagatctttgggggattcaacgagtggaaaatgcacgagtcatttcctacagtgtaaagaggacaacccggactttgaag

SEQ ID NO: 635464 - DNA, 75 bp, Homo sapiens
agcagtcaaagccatctcttcggcggtgcgcaaggcgggcatcgcgcacctagttgtggaaagtaaaaatgtagc

SEQ ID NO: 635465 - DNA, 80 bp, Homo sapiens
agacccaataggataactcaagttactgactatatcatcatgtacatagaaaaatccaaaggattctgcaaaaaagctac

SEQ ID NO: 635466 - DNA, 50 bp, Homo sapiens
agttctctatatcatgaagaaaccatcagaattcaattcgtcataatctg

SEQ ID NO: 635467 - DNA, 95 bp, Homo sapiens
ccaggcggtgacagagtggagccatggctagagttttgagtatccgaggagcccaggaggaggaacccacagacccccagctgatgcggctggac

SEQ ID NO: 635468 - DNA, 98 bp, Homo sapiens
aaaaatgccatatagaagatttggactttgcagatgcttctgatgatctagatgacttgaacttctttaatcaaaagaaaaagaagaaaaaaactaaa

SEQ ID NO: 635469 - DNA, 50 bp, Homo sapiens
caatcgccgggacagctgcaaggcccctgtcccagctggccctgccccag

SEQ ID NO: 635470 - DNA, 90 bp, Homo sapiens
ttttgctggcagcaggatcatgtgacttcaaatgcagcaatggccaatgtacatggtggactatgccggcctgaacgtgcagctcccggg

SEQ ID NO: 635471 - DNA, 79 bp, Homo sapiens
cctcagttggaagcagccgatccagcctgcggagcctgtggggcaggtgtccctacctgcaccggacgacgggggacac

SEQ ID NO: 635472 - DNA, 75 bp, Homo sapiens
ttgaacaaactcgaagaacagctgtggaaagaagttgcaaaacactggctcggagtgaggatgccaggtcatctc

SEQ ID NO: 635473 - DNA, 51 bp, Homo sapiens
tcgaggctataactacgatgaaggcatcagcaatgcagaagcacggcagcc

SEQ ID NO: 635474 - DNA, 100 bp, Homo sapiens
gtcatgatgggcagcaagatggcgtctgctagtagggtcgttcaggatttgaactcagaggatcaaaaagccttcagtgttgaacatacaagctgcaatg

SEQ ID NO: 635475 - DNA, 100 bp, Homo sapiens
catccctcagggctccttggcctacctggagcaggcatctgccaacatccctgcacctctgaagccaacgtggctgcctctttgatgagccgtatagcac

SEQ ID NO: 635476 - DNA, 75 bp, Homo sapiens
caagattgtggtgcacacgccctgcatcgagcagctggagaagaacaagagccccaagacccgggacatccagga

SEQ ID NO: 635477 - DNA, 74 bp, Homo sapiens
gacccagacccggacgacccccattgctgagccagcggagctgcttgggaaggtatcaactctacactgcaaag

SEQ ID NO: 635478 - DNA, 90 bp, Homo sapiens
tgcaggccatcaagtgtgtggtggtgggagacggtgcacctggagcagagaggggccctcccgaggaccgcgacgccgagcctcagcctg

SEQ ID NO: 635479 - DNA, 82 bp, Homo sapiens
ccgcggcggaggacgcgcccggcgcccctgagccggccgagcggcgacggaccgcgagcctgtggacatctctacagcaatg

SEQ ID NO: 635480 - DNA, 73 bp, Homo sapiens
aggaagagtcaggggcacagagagatggagagagacctagttagttccgagactactgtgctatctgcttaag

SEQ ID NO: 635481 - DNA, 98 bp, Homo sapiens
caccatcgagatcccggatcagccctgctggagccagacccgagggcaacatccttcgagaccggttcaagagcttccagaggaggaatatgatcgag

SEQ ID NO: 635482 - DNA, 50 bp, Homo sapiens
gtcaagctacactgaatatgtcttctaccagatccgtgctcagctcacag

SEQ ID NO: 635483 - DNA, 100 bp, Homo sapiens
aagactgtctttgctgagcacatcagtgatgaatgcaagaggcgtttctataagaattggtatgcggatcctggtgaacctgctcctggacacactgccc

SEQ ID NO: 635484 - DNA, 98 bp, Homo sapiens
cttggagtccggacatctgaaacttggctcttgtcaggatggtgaagctgttcatcggaaacctgccccgggaggctacagagcaggagattcgctca

SEQ ID NO: 635485 - DNA, 100 bp, Homo sapiens
cttggtttcactggtgttgctttgctgttgtatgccttgttccacaagatatcaggtaatggaactgctggtccatctgaataaacgtataaaaagccgc

SEQ ID NO: 635486 - DNA, 90 bp, Homo sapiens
ctggaatggaggtcttatgagctgctattgaacacggcaggatggctccagaggtgatcttagctatggatgaaggacagtatgatggga

SEQ ID NO: 635487 - DNA, 100 bp, Homo sapiens
gcgcggccccggaagcacccgtctgcgctcctcagaccaccggcaggtgaacagcctgatgcagaccgaggagtgcccacctatgctagacgccacacag

SEQ ID NO: 635488 - DNA, 100 bp, Homo sapiens
gaggaccccgggacatctgaaagccaggaaatggctgttcggctcttgaatcccagcgatgaaaccaggaactcactttcccgggatgccgagtctccat

SEQ ID NO: 635489 - DNA, 100 bp, Homo sapiens
cccggtcacctccaaatcttgctgcttttaattcaactcagagccccgagcctggagatgagggggagccggggcggtcgggactggagcttgaaccaga

SEQ ID NO: 635490 - DNA, 100 bp, Homo sapiens
tcttctgaatctctttcaaagagcagaactttcaaagaatggagaatgtattagttcagaagcaggcctagaaattgatagccagcaggaagaagagccg

SEQ ID NO: 635491 - DNA, 100 bp, Homo sapiens
tggattcacgggtagagattggcttcgggctgagctagcagtgagcaccttttggcccaatgaatatcaggttttacagaaggcgacacatgttgttcag

SEQ ID NO: 635492 - DNA, 75 bp, Homo sapiens
gcatgatccataatcggtttcaagccaaggccacctttgatgccatttctaagacctacagctacctgacccccg

SEQ ID NO: 635493 - DNA, 98 bp, Homo sapiens
cctctcggtgttcccgctggcggcgggcatcttcttcgtgaggctgctcttcgagcggcaatggatcacttggagtcctttattgctgaatgtgatcg

SEQ ID NO: 635494 - DNA, 75 bp, Homo sapiens
cttgccacggttttgacttacatctgcaactccaaggctacaggcaggaagttcgtgctggccgtgggcagcgcc

SEQ ID NO: 635495 - DNA, 98 bp, Homo sapiens
tttcttttccggaccctgcagtggcgcctaaagtctgagagagggaagtcgcctctgtgctcgtctcagccttagatccaaggacagtccaaggaagt

SEQ ID NO: 635496 - DNA, 125 bp, Homo sapiens
gaggaatatgcgatgggaggaagagcgagacctaagagggtacctgtagctgggaatgtcctacgtgttaccgactcagacgatgccctgctgaagatgaccatcagccagcaagagtttggccg

SEQ ID NO: 635497 - DNA, 75 bp, Homo sapiens
cggccgtgtcccgaggaagtgcaagacccgactagacgcttgaagcaaagctgccatcccagaagacgacatgct

SEQ ID NO: 635498 - DNA, 100 bp, Homo sapiens
atggcaatgggtccaagtgcgaccttaatgggaggccccgggaggccgaggttcggatcaatgagctcagccaggtgcctcccccggtgatgctgctgcc

SEQ ID NO: 635499 - DNA, 100 bp, Homo sapiens
aaatgacttacctgtaaatagtggtgtaacccgaataagctgtcagactttgatagaagacccttttgaggacttctttgggaatcgaaggggtccccga

SEQ ID NO: 635500 - DNA, 100 bp, Homo sapiens
gcgagggaggaagagaactactcctttttacctttggttcacaacatcatcaaatgaatcctcactatggatgggctcattgaggacattaagcatcggc

SEQ ID NO: 635501 - DNA, 100 bp, Homo sapiens
ctaaaacagatgaaaacaacttcaaaatgtttgccgtcttttgtgctttagccttacactgtgctaatctggtgcaggcctttacccatgctcctgcaac

SEQ ID NO: 635502 - DNA, 112 bp, Homo sapiens
ccctggagcctcagttggaagcagccgatccagcctgcggagcctgtggggcagagtaatcaagtcagaggattatatgacttttatctgcctagagaagaactatggatct

SEQ ID NO: 635503 - DNA, 75 bp, Homo sapiens
cggagggaaggggaagcggcgggccaccgcacaaatggaagagcgactagcagagtttatttcctccaacactcc

SEQ ID NO: 635504 - DNA, 75 bp, Homo sapiens
gaaagctttaggagttcacagtgttagctccattcagaaccaaatgcagtccaagggaggttatggaggtggaat

SEQ ID NO: 635505 - DNA, 83 bp, Homo sapiens
aaaacttcttgccaaccaaagtggaatgaatcttacttgttgaatatcttctggttactagttggattcatttgtgaaagaat

SEQ ID NO: 635506 - DNA, 100 bp, Homo sapiens
atttaattacccataaaaaattctactgcccaccaagtctccagatggatgacagaataattctgctacaaggctgatttcaaggacatgaattgttgac

SEQ ID NO: 635507 - DNA, 101 bp, Homo sapiens
tgctctaacttcctcggccgagccgggccgcgccgccgctgccgccgccgcgcgcgggataccgaagtgtataaagctacagtaaaagatgacctcaccaa

SEQ ID NO: 635508 - DNA, 119 bp, Homo sapiens
tgaggaggtcgctgagagctgggaagaggcggcagacagcgggaaatgcaccagtgccggagtgacgagtacaactgcagttccggcatgtgcatccgctcctcctgggtatgtgacgg

SEQ ID NO: 635509 - DNA, 83 bp, Homo sapiens
ggctgtaggggcagcagcgcagccacccaggctactttgggaaagttggtatgaagcattaccacttaaagaggaaccagagc

SEQ ID NO: 635510 - DNA, 100 bp, Homo sapiens
gcggctgctggaaacgcaagacggtgccgagaagcagctgcgagctgagatctgtatctgtggacctgaatgttgatccctcgcttcagattgacatacc

SEQ ID NO: 635511 - DNA, 96 bp, Homo sapiens
gagtttccgatttaaagctgagctgcgaggaaaatggcggcgggaggcctgccgaggaggaactgaagacgaagaacatggatgataacacctttg

SEQ ID NO: 635512 - DNA, 50 bp, Homo sapiens
caccggggccaccaggagggaggtttattcagtcaccatgaagctgctgc

SEQ ID NO: 635513 - DNA, 89 bp, Homo sapiens
gaccgggtcatgagcgtctgtctgcgggtagagctctatggctgcctctggagggaccctgagtctgagagtgaatcggacagtaagag

SEQ ID NO: 635514 - DNA, 100 bp, Homo sapiens
gaaagaaacaagttcttggcaagagaggcatcctccttgaagtatttggctgaggagttttcaatcccagagaccaaaatcaactgtgttcgtctggcta

SEQ ID NO: 635515 - DNA, 83 bp, Homo sapiens
ctggcagcagcactacctgcacaaggacaaggacagcacctgcctagagaacgcgtccgagctgggccacagcctgaacgaga

SEQ ID NO: 635516 - DNA, 98 bp, Homo sapiens
actgaacattggtctaaagtctttccaaaaggtcaaggttcacaagggacgtgtcctcggagtcggacaataacatcagacagatcaaccaggaggca

SEQ ID NO: 635517 - DNA, 125 bp, Homo sapiens
aagatctggcaaaagcaattcagatggcccaagaacaggctacagatactgaaattttggttcaaaccttgtactactcagctgatcacaagctgcttgatgggaacctactagatggacaggct

SEQ ID NO: 635518 - DNA, 100 bp, Homo sapiens
tatgcatgctgcttttgatgtctgacaacgtggatcgttgttttgaaactgcttttttaggaccaaaggatatatttccttactcagaaaataaggaaaa

SEQ ID NO: 635519 - DNA, 83 bp, Homo sapiens
cctcgggcctcatcatggccaggaagtaatagttatgcacgagtgcgagctgtggtgatgacccgagatgactcaagtggtgg

SEQ ID NO: 635520 - DNA, 103 bp, Homo sapiens
tatacctagaagtctactaatggacagttagtcacccacctacatgttgagaagctaaaccagccccagaaatatttgaaaatgaagtcatggccctgctgag

SEQ ID NO: 635521 - DNA, 51 bp, Homo sapiens
gtgcagggtaacatggcggatgcggaagatacagaaggtggtcatggcact

SEQ ID NO: 635522 - DNA, 100 bp, Homo sapiens
atcctcccggcctccgtctcccgaatagcggtcttactcattttctacgtgtgtgttgagtgcaccatttgagagcatcaactgtgaaatctgtgttaga

SEQ ID NO: 635523 - DNA, 75 bp, Homo sapiens
cgaggagaagcgcagcgacggcgtcgggagagcgcgcctagccggctcgcgagtcctaggcctacttacaagcct

SEQ ID NO: 635524 - DNA, 101 bp, Homo sapiens
gaaacgtttagcatcagtgactcacaaatcagcaacacagaatttctgcaagtaattggtctagaagtacttgtatgaatctgggtgctccagtgttgggt

SEQ ID NO: 635525 - DNA, 83 bp, Homo sapiens
tggacgttcggccaagggaccaaggtggaaatcaaacgtgacctggtactgcttgatgtatgtccccttacacttggtattga

SEQ ID NO: 635526 - DNA, 95 bp, Homo sapiens
cctcagtggtggttgaaaactgtaattgaacaggctggttatgatggtgagagtatcggaaattgcccgttttctcagcgtctctttatgattct

SEQ ID NO: 635527 - DNA, 82 bp, Homo sapiens
ccttagctgtgctcgcgctactctctctttctggcctggaggctatccagcatctggggacccttcacctgcctctactact

SEQ ID NO: 635528 - DNA, 82 bp, Homo sapiens
agcccgctcacccgctccctcggacaaggcaaaatctcagcaagttcggacctctagtacaataaggcgaacctcctctttg

SEQ ID NO: 635529 - DNA, 133 bp, Homo sapiens
attatgaagtattaattcttccactgatatctcaaaaggtgatctggacaaaggaacaggtatctcaggtgcaatggatgagcttcatagtctggatccaagaaggcaagagttattggaagctagatttact

SEQ ID NO: 635530 - DNA, 100 bp, Homo sapiens
tgctgctgatcatctgaggttgcctgcatggcagtgaagaacatggacctttgggactacaaagctgatgaagacccagcattattccagtcagtcaaga

SEQ ID NO: 635531 - DNA, 74 bp, Homo sapiens
agcgctacgggaacatcaccttgcccatgtctcacgcgggtggtgttcccactgatgaagagcaggcgactggg

SEQ ID NO: 635532 - DNA, 75 bp, Homo sapiens
attcgcccggaccaggaagcggatcgcgtggactggaagtcacactgcggcgcatggcgaggacaacatccttgc

SEQ ID NO: 635533 - DNA, 74 bp, Homo sapiens
tctttccgccctaatggaggtctccagtttcgaagctaaaccagccccagaaatatttgaaaatgaagtcatgg

SEQ ID NO: 635534 - DNA, 100 bp, Homo sapiens
gacatctgggggccacaaatgctccttctcctggagacgcaactcaagttgggagctgaaagtgccgacagcattggtgccgtgttaaatagcaaagatg

SEQ ID NO: 635535 - DNA, 73 bp, Homo sapiens
ccccttccccaccgaaccgcggtactttaattatcggactaccaggttcctggctgaggaggggttttataaa

SEQ ID NO: 635536 - DNA, 125 bp, Homo sapiens
gcgacccaagcgccgcggttaaccacgtctcgtccacgacctccctagatgatgatgtgcctgcagatatggttgcagaagaatcaggtcctggtgcacaaaatagtccataccaacttcgtaga

SEQ ID NO: 635537 - DNA, 100 bp, Homo sapiens
ccaacaccctccgccgcccagtggccccgaggagcctggggagaagcgccccaagtttaaactggcagacctttcacttcgtatccaacaaattgaaaca

SEQ ID NO: 635538 - DNA, 101 bp, Homo sapiens
tttgctctccctcgagaagctccagatggcgtcttccgtgggcaacgtggccgacagcacagttggagaccttccccagacgcctccaggggctgtcccag

SEQ ID NO: 635539 - DNA, 97 bp, Homo sapiens
cctcaccactgactggatttggtactggagtgatgagtttggttcttggcaggaatatggaagacaggttggtgatttggatatcagctatattaat

SEQ ID NO: 635540 - DNA, 91 bp, Homo sapiens
tggtggccctcttgatccccggcttgctgaagtcaaagttaatttggagtggcccctggagtcagtttcctacaccatccgaggccccacc

SEQ ID NO: 635541 - DNA, 100 bp, Homo sapiens
ctacggaccatgaactcactcaagcaattgtacacagtgactatggatcaccccttctgtgtcattctctgaggaaaacaagttcttctcaaggaggaaa

SEQ ID NO: 635542 - DNA, 75 bp, Homo sapiens
tcccgagtaggtgggactacagagcaagatgagacaggccttaggatttgccaaggaagccagagagagccctga

SEQ ID NO: 635543 - DNA, 75 bp, Homo sapiens
ctgacatggaggatgatttcatgtgcgatgatgaggaggactacgacctggaccctaaagtaaattggttgaaga

SEQ ID NO: 635544 - DNA, 49 bp, Homo sapiens
cgcgaccacagctatgcgaccgaaggactgggaggtgctggtcctaggg

SEQ ID NO: 635545 - DNA, 82 bp, Homo sapiens
cgacaagccgctggcagccgcggatctcaccgccgctcaggcctggtggagttgacagaagagatcctgaagctgctgatgg

SEQ ID NO: 635546 - DNA, 96 bp, Homo sapiens
agtcctgtggggctcactttgcaaacacggccaggaaggtcaaaatgcagatcttcgtgaaaacccttaccggcaagaccatcacccttgaggtgg

SEQ ID NO: 635547 - DNA, 83 bp, Homo sapiens
caacaagtatgggtctccgtacaccaaaaactcaggcttcgccacctgcgtgcaaaggggatatgagactttctactcggaat

SEQ ID NO: 635548 - DNA, 100 bp, Homo sapiens
gccactagcagccagttccggcccgaggacaccgactaccagcagctctgatccagtatatacggcctgtgttcgtgtcccggtcagaccaggattctcg

SEQ ID NO: 635549 - DNA, 80 bp, Homo sapiens
atccaaagcagccgtcccctctgcagcctctctgacaagtgcaagacagatcggcttgccaaaggatcagaatgttacca

SEQ ID NO: 635550 - DNA, 80 bp, Homo sapiens
tgcaccgcgaccagggccgcaggaagacgcagtcattaagaaggcaaatgataccttaaatggaatcagtagtagttctg

SEQ ID NO: 635551 - DNA, 75 bp, Homo sapiens
gcatcaacctgaatgacatcgagaaggtccttccagcctggcaggaaaacctcacagcacgggtagctctgaacg

SEQ ID NO: 635552 - DNA, 75 bp, Homo sapiens
gcgggatcttcaaccacctcgagcggctgctggacgaagttccttggacacagcatgaatttgagttggcccaat

SEQ ID NO: 635553 - DNA, 75 bp, Homo sapiens
aaagaatcccggccagacgtgcgaacagctccagctggcatcaacaaagagagcattgtggatgtagaaggtgtt

SEQ ID NO: 635554 - DNA, 98 bp, Homo sapiens
gtcctgagatcaaatggcacttcattggccacctacagaaacaaaatgtcaacaaattgatggtgaagcgctatgtccggaaaggggtcccgctggag

SEQ ID NO: 635555 - DNA, 82 bp, Homo sapiens
tctcgaccaagagctgaagctgatcgcgctggccgcgcgccgaacccgagtccggcggcaccgacgacgacctcaacagcgt

SEQ ID NO: 635556 - DNA, 100 bp, Homo sapiens
ctaaaatgtgtgttaacagttcatgcatcatacctgtccacggtcccggatgttacaggtcagagccctccagacccccaaggactgtactcactgccca

SEQ ID NO: 635557 - DNA, 90 bp, Homo sapiens
ctcgaggctactgttttgttaactttgaaactaagcaggaagaaggagagacgaccatcttgcaactagaaaaagatttgcgcacccaag

SEQ ID NO: 635558 - DNA, 76 bp, Homo sapiens
aaggaattagcagaagacattatgtcagccccactgtgttctccttgcctcaaaagaaaactcggcacctgttaaa

SEQ ID NO: 635559 - DNA, 82 bp, Homo sapiens
gccgtgttcgacatcctggccgtgctgcagattgcagccaaaattggaggcgatgctgccacgacagtgaataacagcactc

SEQ ID NO: 635560 - DNA, 83 bp, Homo sapiens
atcatgtatttacgacagatatacaagcagggatgactccgctgaggtggacgtgtacaacccgacgaggaacgaatgggaca

SEQ ID NO: 635561 - DNA, 90 bp, Homo sapiens
attgcgcagtcgggaccatcgccggagcctgaggacacttctctgtcgtcacagttaggtctgccatcatggatgttctcgcagaagcaa

SEQ ID NO: 635562 - DNA, 73 bp, Homo sapiens
ttttgtggaaagttccaaactgtctgatgctgggactctgcgagacagcctcagtggctgggacccggagacc

SEQ ID NO: 635563 - DNA, 75 bp, Homo sapiens
gtctggccaagaatcagaggaagtggagaccttttaatcaaagtgaagtttggggaaagcattgaggacttgcac

SEQ ID NO: 635564 - DNA, 100 bp, Homo sapiens
ccggaccccccggacctcccggaccccctggcctcggaggagatctcaaagatttcatgagacaagctggggaagtaacgtttgcggatgcacaccgacc

SEQ ID NO: 635565 - DNA, 100 bp, Homo sapiens
agtagctgatgtgcagtttggccccatgagatttcatcaagatcaacttcagctatccgtggtcctgaaccagttatgtgtgttgcatgagaaaacgcca

SEQ ID NO: 635566 - DNA, 89 bp, Homo sapiens
cacgtgatcaagtaccttgagacactcctttactcacagcagcaggtaaactgtcttgagccccaccctcacctgcctgtgctggcaac

SEQ ID NO: 635567 - DNA, 83 bp, Homo sapiens
caaggaggtcacccgcgtgctaatggtggaaacccacaacgccacccggcccaagttgaagaagatgaagagccagacgggac

SEQ ID NO: 635568 - DNA, 100 bp, Homo sapiens
tgaagaagaagattaacctggagttaaggaacagatccccggaggagtatctgaagaagctgcacacgcaggagcgggcggtggaggaggtgaagctggc

SEQ ID NO: 635569 - DNA, 75 bp, Homo sapiens
gtgacagctccgggaccggccgaaaggcgaggaaccgacccaacatgagtgaagtttcctgcaagaaacgggacg

SEQ ID NO: 635570 - DNA, 100 bp, Homo sapiens
tcccaatgccatccagagctgtgcctcccagcaccacagtccttctgcagtccctcgtccagccacccccagagctagagccggtgcaggccacgcagaa

SEQ ID NO: 635571 - DNA, 100 bp, Homo sapiens
gccggtccaaggcggtgcgctgggggccggggcgcgtcgcagccgagtgtttaagacggatatggagctggaggttctgcgctataccaataaaatctcc

SEQ ID NO: 635572 - DNA, 75 bp, Homo sapiens
ctttagaagcggaagaggccaagaggcggttgaaggagcagtctatctttactcagtgactatctcttcacgcta

SEQ ID NO: 635573 - DNA, 101 bp, Homo sapiens
cctgaccaagaagatctaaagagaacgtctctgaaatcaagtccggatgaagattcttctactcaaaacaaaagagccaacagaacagaagaaaatgtttc

SEQ ID NO: 635574 - DNA, 100 bp, Homo sapiens
caggcgtgagccaccacgcctggcctcactcaaacagtaaacgaggacttgcaattgtgaccaaatatattacaaagggctggaaagaagttcatgaatt

SEQ ID NO: 635575 - DNA, 96 bp, Homo sapiens
ccattcagcccaatacaactggcaaacaactttttgaccaggtgaccattgtgaggtagatattttgttctaattttccagatgaggaagctgaga

SEQ ID NO: 635576 - DNA, 80 bp, Homo sapiens
gaactcatagtggagaaaaaccttaccagtgtgaatactgtttacagcctaaatgcgatggccaggtattactgacacaa

SEQ ID NO: 635577 - DNA, 119 bp, Homo sapiens
ttggagttggaatttgtgcaatgtttagccaacccaaattaccttaattaaccgcatgcacgagtctctcatgctcttcgactccatctgtaacaacaagttcttcatcgatacctcca

SEQ ID NO: 635578 - DNA, 73 bp, Homo sapiens
acgagtttgaagagttccctgccgaagacctggaatcatttttctgataatgaggcagagcgggttaaaatga

SEQ ID NO: 635579 - DNA, 98 bp, Homo sapiens
caccagtctcttcagaagatcatgattgtgcttgagaacagtagtcgagaagacaagcatgaatgtccctttggccgcagtagtatagagctgaccaa

SEQ ID NO: 635580 - DNA, 106 bp, Homo sapiens
ccccatcaaaggtcaagctggttttcatcaggctaaatttggccgaagatggaccaaaatttcaaagctaattggaagccgcactgttttacaagtgaagagttat

SEQ ID NO: 635581 - DNA, 75 bp, Homo sapiens
tgaaaaacctaaaggataccttagaactgataaatttcaaacggaagagagtggcagcatttagaaagaatctaa

SEQ ID NO: 635582 - DNA, 100 bp, Homo sapiens
cacgtctgtgtcttctgccaaagacaacaagaaggtattccaagctgcacaatgaggcccaggagacgattcgtaccgccctggccatgggtgcagaccg

SEQ ID NO: 635583 - DNA, 100 bp, Homo sapiens
agggtgtctgagctaaacttcaccaaataatagctgtttgtattttggctgctgcaggagccattttagacatatgtagagtgtgtcggtcagaaggaac

SEQ ID NO: 635584 - DNA, 99 bp, Homo sapiens
ctaccatggaccatcctgctggtcagcactgcggctggttgctgaaaagccaggagtcaaaatgactgagcgctttgactgccaccattgcaacgaatc

SEQ ID NO: 635585 - DNA, 98 bp, Homo sapiens
gcgccgctgcatcccgcgtccagcacctacgtcccgctgccgtcgccgccgccaccatgcccaagagaaagggcgccctgcgtccggcagaggaggcg

SEQ ID NO: 635586 - DNA, 100 bp, Homo sapiens
gcacccctctgatgacccatttggattctctgatttcactgccaagattctcatttccagagtgtggattctttggcatgtatgacaaaattcttctctt

SEQ ID NO: 635587 - DNA, 133 bp, Homo sapiens
ttgaaaagaagagtagctgaggagctggcattggagcaagccaagaaagaatccgaagatcagaaacgggcagcttttggcaaggagtctgaagttcttattgggaacctgggtgataaattaatccctccac

SEQ ID NO: 635588 - DNA, 83 bp, Homo sapiens
gcccgcgcctgggctgccggcacttcgcggcagcatcacaggacatggccccctcagccacctagctggggcccatctaggag

SEQ ID NO: 635589 - DNA, 50 bp, Homo sapiens
gatcatcctggggacctggtacatggtacggggctgatgttgacgtcaac

SEQ ID NO: 635590 - DNA, 76 bp, Homo sapiens
cctctttctgggtgactatgtggacagaggctatttcagtatagagatccagacatttaatgtggatgcaccatgc

SEQ ID NO: 635591 - DNA, 82 bp, Homo sapiens
cctacagctactactatcccatgcaaaatgatgcttcaacacccaggccaggtctctgcctcggaagtgagtgcttctgcca

SEQ ID NO: 635592 - DNA, 82 bp, Homo sapiens
ccagccagccagcaacctggaccggagcatcagatccatgctgctgctgactcggagccccacagcttggcacaggctctct

SEQ ID NO: 635593 - DNA, 74 bp, Homo sapiens
cagaagacagagggttttcttttgaggcagttccggcgaggggggagcctcagcaggattgctgtgtgaaaacc

SEQ ID NO: 635594 - DNA, 100 bp, Homo sapiens
cgctccgagcggcgggccgcagaggtgaaaggaaagcaagccaggatggatatttacgacactcaaaccttgggggttgtggtctttggaggattcatgg

SEQ ID NO: 635595 - DNA, 88 bp, Homo sapiens
caggcaccaactgcagctggtacatccagggcgaccgtggtgacatgattaccatcagggcaaacttgaagataaatcttttgactcc

SEQ ID NO: 635596 - DNA, 80 bp, Homo sapiens
aggcgacccaagacacccagagagggacaggaacaagatcactcaaggtgaaggataatctactaataccagcactttga

SEQ ID NO: 635597 - DNA, 75 bp, Homo sapiens
caagaagatcatcattaaggacggaggcacgatggaagtttactgttctgattttcatgctgaaagagcagcgag

SEQ ID NO: 635598 - DNA, 100 bp, Homo sapiens
tctggagaaaaactggatgttggtagaaaaagcaagagtttgttatatagcagaactctaatgaatcattgattgaccagcactattttaccagttggaa

SEQ ID NO: 635599 - DNA, 83 bp, Homo sapiens
cggcgctggaggagcgaggcagctgtactaggactgggaacggctacgagttccagggagctctgtcctggtgaccgtgcccg

SEQ ID NO: 635600 - DNA, 100 bp, Homo sapiens
ttaccttagatgcaagtgatgatggaatcttggccaaaatcgtgctcttcagccgtctatgaaagggggaggcacactccctccatcattttcagaagac

SEQ ID NO: 635601 - DNA, 100 bp, Homo sapiens
gtgctgccaatactccaacagtagatatcagtagctgatcttccgggtttaatagaaggagcacatatgaacaaaggaatgggccacaaattcctcaagc

SEQ ID NO: 635602 - DNA, 90 bp, Homo sapiens
gtgaccggcagtggttgtatcagacatgtaccgagttcggcttctcccccaaatacatcaagatgtttgtactggatgaagctgacgaaa

SEQ ID NO: 635603 - DNA, 98 bp, Homo sapiens
aagaggatgcggagacgcgggccatgcctgatggagctctggacacagctgtctgcgctgacgaagtggggagcgaggaggacctgtatgatgacctg

SEQ ID NO: 635604 - DNA, 96 bp, Homo sapiens
aggaatatgggctttactaggcagaatcacagggcaggtctcgaatttatttggaagggaaaatagactatggtgaatacatggataaaaataatg

SEQ ID NO: 635605 - DNA, 100 bp, Homo sapiens
gccgggttgtatttggaaacgcggagtgagtttttccgtgctgtgtaggtgaacggctgtttcctcttattcaagccatgcaccctactcttgctggtaa

SEQ ID NO: 635606 - DNA, 83 bp, Homo sapiens
tcaatttcatagccatttattaccatgcttcaagagccattccttttggaacaatggtgccgtgagcgatgtggagatgcagg

SEQ ID NO: 635607 - DNA, 51 bp, Homo sapiens
tagacaagtttgtacatccaaaacgcaggaggagggagacgcactgatgac

SEQ ID NO: 635608 - DNA, 98 bp, Homo sapiens
taatatgggcagtaacacatagcgtcaaagagaaataaacggtgactggcaaagagctgatgcagtctggaataaaatccaagaagaaaatgttattc

SEQ ID NO: 635609 - DNA, 71 bp, Homo sapiens
agcccagtcgggactcgagcctagggaggcgaggttcccgcaccggatagcgcaagacgttcaaagaacac

SEQ ID NO: 635610 - DNA, 95 bp, Homo sapiens
gcgattccgcagtccccccgttccctggaggtcctgtggaatgcacagtgcctggcacattatcggcacttgatgactgttgtctaataactgag

SEQ ID NO: 635611 - DNA, 50 bp, Homo sapiens
aggacgaagagcgggacccgagccctggtggaagttaaacgagctgagcc

SEQ ID NO: 635612 - DNA, 98 bp, Homo sapiens
tcaagagctttctctccaaaatccccagtgtcgtcacaggtacgtgcattacttcagtggcctgctctccggctccatcaaaatgaacaacaagccct

SEQ ID NO: 635613 - DNA, 49 bp, Homo sapiens
acagtgttaacaatgcatccacagaggatcaaaatacttgctggatggt

SEQ ID NO: 635614 - DNA, 90 bp, Homo sapiens
gtggcacctcaaactttgtgcagtcctcatgatcttcctgttgctgttgggccagttcatggcctcccacgggaacgacgccgcgagagc

SEQ ID NO: 635615 - DNA, 75 bp, Homo sapiens
aacatcaccgtgaggcagggggacacagccatcctcagatgcagccgctctctgctccctgccccaatgaacatc

SEQ ID NO: 635616 - DNA, 52 bp, Homo sapiens
catccgaagtggaagctgagaacgaaggtgtcggtgtcagaggtcaaagcag

SEQ ID NO: 635617 - DNA, 75 bp, Homo sapiens
ccggtaccaggcagacatcaccgacttgttaaaagaaggccgagacgcatccagagctttcgtgaccggggactg

SEQ ID NO: 635618 - DNA, 100 bp, Homo sapiens
ccgagacccgccctaaccacactatttatatcaacaacctcaatgagaagatcaagaaggatgggttccaggcccggccggagctcctggaggtgttcag

SEQ ID NO: 635619 - DNA, 90 bp, Homo sapiens
cgaaagatcctactggacatgtcagtgtcctttcacacccatgtgaaagagatatctgtgtgaggctggattttctttgcctactccaac

SEQ ID NO: 635620 - DNA, 100 bp, Homo sapiens
gagaagagagaagaacattctcgaatacctagaatgggaaaatgtgccagaggaacttcaagaaccattttacacagatcagtatgaccaggaacacatc

SEQ ID NO: 635621 - DNA, 100 bp, Homo sapiens
gctcacacggctgcagccggcgccgctgccactcccgggagcatgaaggaccgaacccaggagctccgcacggagtcagagtcagaagcaaaggtagatg

SEQ ID NO: 635622 - DNA, 82 bp, Homo sapiens
agaagcgcacgctggagggcgagctgcatgatctgcggggccaggtggccaagacctgcctagagctggaacgttacctcca

SEQ ID NO: 635623 - DNA, 100 bp, Homo sapiens
tggagtaaggcccctggctcccagaggtgcaccaaacatgagcgtgaagccgtgcagaagaagaccttcaccaagtgggtcaattcccaccttgcccgtg

SEQ ID NO: 635624 - DNA, 90 bp, Homo sapiens
agaaagccgttgcctccagcaccacttctaatgtgctgctgggggtgaaatctttgaccagtgtgttgcagacagagaagaagcctttaa

SEQ ID NO: 635625 - DNA, 97 bp, Homo sapiens
tcggatcacggtgagggaaagatgagcgaggagacggcgacttctgacaacgatcacgtgaactggaaatttcagtttattggcgtgattggcggtc

SEQ ID NO: 635626 - DNA, 100 bp, Homo sapiens
cggcaggagagtccggccgcgacaggacgaatggactgctgaattatgaagtatttcagacccagtagtagaacatcactctgccactcactcctttatc

SEQ ID NO: 635627 - DNA, 74 bp, Homo sapiens
tgagctctatgagaaattcacggccaccccagcagacatgtttgccaaggcctttcgggtcaagtccaacacgg

SEQ ID NO: 635628 - DNA, 100 bp, Homo sapiens
attaaagttttacaagatttaacctgtcatcaagacctgggattttggtgtcctaccctggtccaagcctggaaagtgaagacttcaacattccaccaat

SEQ ID NO: 635629 - DNA, 76 bp, Homo sapiens
aaggctacattctcaactcggatcagacgacttgcagaaatattgatgatgttaagaagttcaaaccgggttacct

SEQ ID NO: 635630 - DNA, 75 bp, Homo sapiens
gcgaggcagatcctgccccgtggccgcggccgtctcgtaggtacaggtttgcagattccgccagcagcacagcaa

SEQ ID NO: 635631 - DNA, 100 bp, Homo sapiens
gcacggagggacttctgcagagagagtgcgcagaaggattccgggagcacagttccgccgagatagagggaggaatcagcagcttggaaattcaagcacg

SEQ ID NO: 635632 - DNA, 90 bp, Homo sapiens
tctcgcgctgcctggtcgctggtgaagcccgcggcgcgcgcctctcccggaccctgcagggtactaggttttgacaagcttgcatcatgc

SEQ ID NO: 635633 - DNA, 110 bp, Homo sapiens
cttacacccgaggtccctctttggggtggctctttgctaagtgctgctgttgcttcccgtgtagagctccagggcccacaacggcagtgtcctacatgtcggtgaaatgt

SEQ ID NO: 635634 - DNA, 75 bp, Homo sapiens
ccagcaccctcatcgccctggccgacaagcacgcaaatgggggctccggaggtggcgcccaggctctgagctacc

SEQ ID NO: 635635 - DNA, 83 bp, Homo sapiens
ctcccccctcctaggcgggagggggggtggtgcgcacgcccccgaggacgcaggtaactaggatttctacctcaaccgcgaga

SEQ ID NO: 635636 - DNA, 71 bp, Homo sapiens
ttttgacagcttccgccgggactgcctggccgacgtggacaccaagggacaagaatccttcaagaaacagg

SEQ ID NO: 635637 - DNA, 83 bp, Homo sapiens
tcaatgtccgcatcgcaaccaccgccctggccatctaccatgtgggcgtctctggccgagcctctttttgtggaaaacgacag

SEQ ID NO: 635638 - DNA, 101 bp, Homo sapiens
agtacgcgggtggctggacctacatgcttcctgctgtggctgtctcggaacccgtggtcctccgcttcatgacctgcaaatgcaactggttgatcctgaag

SEQ ID NO: 635639 - DNA, 90 bp, Homo sapiens
tttggctctgcgtgagtgtggtctacgagctgtttctcatctttatactcttccaggtctccacctctgggcaggagagttgccgaccac

SEQ ID NO: 635640 - DNA, 100 bp, Homo sapiens
cagttggtgctgaacgtctgggggaaggtggaggctgacatcccaggccatgggcaggaagtcctcatcagttacagaatgtctgaaggggacagtgtgg

SEQ ID NO: 635641 - DNA, 90 bp, Homo sapiens
atcaaatggcacttcattggccacctacagaaacaaaatgtcaacaaattgatggatctcaagatgagtttgttgtgtctgatgaaaacc

SEQ ID NO: 635642 - DNA, 89 bp, Homo sapiens
gaagagggttatgtccccacttcatatgtcgaagtctgtttggacaaaaatgccaaagacaatgcagatcttcgtgaagactctgactg

SEQ ID NO: 635643 - DNA, 96 bp, Homo sapiens
tgacccagacaactatgacaaggtggttgagtttgcctcttatggtgacttaaagaatgctattgaaaaactttctggaaaggaaataaatgggag

SEQ ID NO: 635644 - DNA, 100 bp, Homo sapiens
ctttctccttctggtgtggggcccgagggaaattaaagagggtgctttactgttgccctgaaattttcaccatgcgccagcaggacattaacgacactgt

SEQ ID NO: 635645 - DNA, 75 bp, Homo sapiens
acagagatgtgatgttggagaactacggcaatctggtttcaatggttggcccagcgcttcgggccggtgttcacg

SEQ ID NO: 635646 - DNA, 90 bp, Homo sapiens
gagaatgcctgaagacttggatgaaaatatggattacaggttgatgtgggaggattttctgccgtctcttggcaaaaatggcaaataatg

SEQ ID NO: 635647 - DNA, 100 bp, Homo sapiens
ggatgatttcatgtgcgatgatgaggaggactacgacctgatggaatcgccacttatatatgtttcagttttgcttttgaacatatttgaattttcatca

SEQ ID NO: 635648 - DNA, 100 bp, Homo sapiens
cgacgtcctgaggaaccccctctacctccagagtgtgaagctgcaggaaggtggtggagaaaaatgcagatccagagacaacccttttggcctacctgag

SEQ ID NO: 635649 - DNA, 82 bp, Homo sapiens
gctgtgcagccgcgaggaggcgcgggaggtgttcgagaacgaccccgagacgggtcggcactcttcaccctcccgagccctg

SEQ ID NO: 635650 - DNA, 75 bp, Homo sapiens
tgggttccaggaggacacgctgcagttggccttcatcgacttgagacaaagcagcccgacggccatggaggctga

SEQ ID NO: 635651 - DNA, 100 bp, Homo sapiens
aaagagccctggaatctgaagagacatgagatggtagacaaaaccccaggcattgaatgccccagaggagcccgaaacctcccaggcttggtgcaggaag

SEQ ID NO: 635652 - DNA, 101 bp, Homo sapiens
ctgtagctgcacagtcttgagtgttcctgtccatgaacatggtgaaaggtgtagcagtcactcggcctacacccacagcatcgaccttgtgaacccagcga

SEQ ID NO: 635653 - DNA, 75 bp, Homo sapiens
gaagttggagaagtatccaatagggatattgtagaaactgtctttaacctgaacccagcccttgctgacatctac

SEQ ID NO: 635654 - DNA, 105 bp, Homo sapiens
cgactcgctacgcgggtcttgcgagatatctggccgcctctgccgcagctggagatgaggacggggacttggttgccttttccagtgacgaggaattgacaatgg

SEQ ID NO: 635655 - DNA, 76 bp, Homo sapiens
ttccagtccagtctgcatggattctttccagctggactgggcagcctttggggtcatgacccttccctccatcggc

SEQ ID NO: 635656 - DNA, 51 bp, Homo sapiens
aatcaggaccccaacaataacttacagactgcttccccacaacaaagagaa

SEQ ID NO: 635657 - DNA, 100 bp, Homo sapiens
agacgtctggatacctcgttaggatcagctcgcacagaggttgtctgcaagcaggtaaaataccatgaagattttgaaaaaacaaaggggagaggcttta

SEQ ID NO: 635658 - DNA, 88 bp, Homo sapiens
actgtttatccacccccacaccaagtcttcacctggacccagatgtgtgacataaaagatgaccctgatgctcccataagacagaaaa

SEQ ID NO: 635659 - DNA, 75 bp, Homo sapiens
agcgaactacagtggatgggtgcagttcagggtgaaggagtacctcctggcaactatgggaactatggctatgct

SEQ ID NO: 635660 - DNA, 90 bp, Homo sapiens
acgacccctacgcggttgaagagcctagcgacgaggagccggctttgagcaggagtcatctgaaatcagagtcttcagatgaaagtgaca

SEQ ID NO: 635661 - DNA, 75 bp, Homo sapiens
cccgtgcagcctggggctccttatggcaaccctaagaacatggcctacacggagttggtggttccaggattttac

SEQ ID NO: 635662 - DNA, 98 bp, Homo sapiens
aaggctctggataaggaccagtacctgcccaggaaactggaatgcagtagagacagaccagagggtccgtgtggcccgttgctgtgaggatgtctgtg

SEQ ID NO: 635663 - DNA, 76 bp, Homo sapiens
tagctttgcttacctctgaagatcacattaatcgcaaatatgcttttaagaacctatcactgaaacagcttcacct

SEQ ID NO: 635664 - DNA, 75 bp, Homo sapiens
atatgaagcaacatgagatggtggatgaacccacaggttgttaaaaaagcagacatgatcaacaaaaatatgact

SEQ ID NO: 635665 - DNA, 78 bp, Homo sapiens
ttcgcagtggtcgcttcttctccttgctaaaaatgaagctgatcgtcaggcagaaaaacgagaaattaaacgtcggct

SEQ ID NO: 635666 - DNA, 100 bp, Homo sapiens
tcatgattgtttatcctaatcccaatgctgaagtaagattgtcttggaaatactaagttggatagcagactccttgaaagcagggtccttgtttagtgca

SEQ ID NO: 635667 - DNA, 101 bp, Homo sapiens
acgtctgctgatgatttcttccaaggaaccaaggcggccctggctgggggaaccactatgatcaagactgacttgcataccaaatgtgtggtggatgtgga

SEQ ID NO: 635668 - DNA, 83 bp, Homo sapiens
gttttgagaagaatgtggaaataacggagcaacttgctaatggcaggcattttacaagagaaactggtagtctgggtagattc

SEQ ID NO: 635669 - DNA, 100 bp, Homo sapiens
gggattaaaagtggatttacgttttggaacctcgtctttttattgacggtgtcttgtgtgaaaggcacctacattggatgcttcagtgacgatggccacg

SEQ ID NO: 635670 - DNA, 95 bp, Homo sapiens
cttggctgaggaactgctgttgtgaaccttttgccctggtgggattattttgtatcacggactgattcaccgagcccaaccgtactcaactcaca

SEQ ID NO: 635671 - DNA, 50 bp, Homo sapiens
gtgactgtcccagaagtgaatcgcagatgtcccaggagagaggagtacag

SEQ ID NO: 635672 - DNA, 88 bp, Homo sapiens
gcacccatgcctcttttctgctgggcccttttcgagcctggaagggagagacctggaggtgcttttgaagatgatgatatcacgcacg

SEQ ID NO: 635673 - DNA, 89 bp, Homo sapiens
cgcagccagccgcccgccgacgccgttccgtgcagctcacggagaagcgaatggacaaagagccgctcccgaggccccggcgcggcgcg

SEQ ID NO: 635674 - DNA, 101 bp, Homo sapiens
agaaagaggatttggccagagcgttttgttgtaatgaacaagtctggggtgaatcgtgtagtttggaaacgacctcgactcactcacaatggacctgttag

SEQ ID NO: 635675 - DNA, 77 bp, Homo sapiens
cagattcgcagtggtcgcttcttctccttggcttgaccactatgctatcatcaagtttccgctgaccactgagtctg

SEQ ID NO: 635676 - DNA, 78 bp, Homo sapiens
agaaaatacaaggagctggacatcgagcctgagggaggggaaaggcgcagggtccggcctctttggcctacccccgtt

SEQ ID NO: 635677 - DNA, 82 bp, Homo sapiens
cttattcttttaagaggtctgcctggttctgggaaaacaacattgtctcgttttgtaccaatggctagaagcagatcgtcat

SEQ ID NO: 635678 - DNA, 88 bp, Homo sapiens
ctgggcgaccacttcctgacagattgcccgtgaggcagaggctgccatctaccacttgcaattatttgaggaactccgccgcctggcg

SEQ ID NO: 635679 - DNA, 75 bp, Homo sapiens
ggaagctccattgaagccagccatgatcaggtttctaagcatgaattgaggaacagaagaagcagagcagatgat

SEQ ID NO: 635680 - DNA, 75 bp, Homo sapiens
tttttctcatggatgttcttcttcgagtatttgtagaagggtatgcatcttctattgatgatattttggaagatg

SEQ ID NO: 635681 - DNA, 60 bp, Homo sapiens
ctggcattttaggtgtcggttgggtagattcttcgttgtcaagccgccaaagtggagagt

SEQ ID NO: 635682 - DNA, 82 bp, Homo sapiens
ttggaattgctttcttcagggccttcaatgccattcatcaaagagggtaaaccagaagatttgaaggtggttaagaactgtg

SEQ ID NO: 635683 - DNA, 100 bp, Homo sapiens
tggaggccgtttttctggagaacctgaggcatgcagctggggttttggctcagccaggacgtctgaagaaagttcagggcattggctggtacctggatga

SEQ ID NO: 635684 - DNA, 82 bp, Homo sapiens
gccagggaaccctggtcaccgtctcctcaggtgaccctggcaaagatgagagtgcacatttcgtcctgcctgaaggtccagg

SEQ ID NO: 635685 - DNA, 75 bp, Homo sapiens
ggaagatttacagaagccgagacccacagctggcaaccccgtggaactgataacaaaagctcgtctttttctgct

SEQ ID NO: 635686 - DNA, 97 bp, Homo sapiens
taatgaccgaacagaaacccctcctcccctagcttcactcaatgttagtaaggcagccctgaagcagcttcctaggaacaaggtccccaacatggcg

SEQ ID NO: 635687 - DNA, 51 bp, Homo sapiens
cgaaggctatgaggatgagtatgtgagaggaatgcggttcagcatagatgt

SEQ ID NO: 635688 - DNA, 116 bp, Homo sapiens
tctgctgcaccgacctcgacgtcttgcctgtgtcccacttgttcgcggcctataggcaccgcatcagcctgctcaaccctttaaatttacaatttccgaatcctgtgatcggatta

SEQ ID NO: 635689 - DNA, 100 bp, Homo sapiens
ctgctatttagtcattgacaagtttggatcagacatcataaaactgtttaccgacaagactgtgaaactttcgggatggtggtgaaaatgctgattgaaa

SEQ ID NO: 635690 - DNA, 97 bp, Homo sapiens
aggaaccccagacgcacgggccttgtgctgtcgctgccgtggcaccccttctagaagtgttctaagaacggaagcatctgggctggatggaatttag

SEQ ID NO: 635691 - DNA, 88 bp, Homo sapiens
aagtgcagctgcctcagttcttagcgcagagctcttcagtatccccatcagccagtttccgaggtgctgagaagcacagaaactccgc

SEQ ID NO: 635692 - DNA, 117 bp, Homo sapiens
gccgagagctacacgttcacggtgccccggcgccacctggagagaggccgcgtcctgggcagaggttttattgctctgcaggtctccaccctggcaggaagctcttgccaccggcta

SEQ ID NO: 635693 - DNA, 100 bp, Homo sapiens
ttaccgaccaagaaagctcctcccccgtcctccgttagctaattaaaacatttttcagggacgtagccatccagaggttgaaatcacaaagattagacac

SEQ ID NO: 635694 - DNA, 90 bp, Homo sapiens
ggaggaaaatgttttgccacgtggatgtgaagatttcctctaaaagctgattgctgtgtttgaagaacaagaaccactccacaagattga

SEQ ID NO: 635695 - DNA, 75 bp, Homo sapiens
tgatgcagatgaaatcattgtcttggatcagaacattaaccaggtggtatttgttggaaatttcttgagaattaa

SEQ ID NO: 635696 - DNA, 75 bp, Homo sapiens
aaaaggcaacatcctgtcacaggccatgctctggcaaaaacgctactgcagcactggggtgtcagttgttggtcc

SEQ ID NO: 635697 - DNA, 100 bp, Homo sapiens
gttccgagcggggcccaacatggcggagagagaggtggagtccggcccccgaaagaggagttacactgttagaccttatgatagccaagataacgagtga

SEQ ID NO: 635698 - DNA, 90 bp, Homo sapiens
ctgcagtacctgcagaaggtctctggagacatcttcagcagcaaaccagtccagctacgggggcccagccagccagcagctgagtggggg

SEQ ID NO: 635699 - DNA, 101 bp, Homo sapiens
ggttgcagcaaccaaaagccaggagatatgtcagtattgaattctcccagacatcagagctgtataatgcatgttgatatggattgcttctttgtatcagt

SEQ ID NO: 635700 - DNA, 100 bp, Homo sapiens
attgaattagatctaaaagccacccaggccttggtcctagcacccactcgagaattggctcagcagatcgaggagctgaagaatgagaacgccctgcttc

SEQ ID NO: 635701 - DNA, 100 bp, Homo sapiens
gtggatcttctgccgcaccaggctcatcctgtccatcgtgtgcctgatgatcacgcagctggctggcttcagtggaccatacaagttgtgcaaagtgagg

SEQ ID NO: 635702 - DNA, 83 bp, Homo sapiens
ggccaaggcagaagaaatcttggagaagggtctaaaggtgttggagagcacaatggctgaacaagtccttcctcaggctttgt

SEQ ID NO: 635703 - DNA, 49 bp, Homo sapiens
gtagaactcaaatctctgctgggcaacaaaccagtccagctacgggggc

SEQ ID NO: 635704 - DNA, 90 bp, Homo sapiens
gtttttcggatcatgtctggtggctccgcggattataacagcaatatgttatgttgcatgacatggtggcaactcatagtaccgtaagag

SEQ ID NO: 635705 - DNA, 96 bp, Homo sapiens
ggccgagcgggcggcttcctggcctgggcgctccggtggcggcggaggcggctatgagaggttttcctccgagtacccagaattctgttctaaaac

SEQ ID NO: 635706 - DNA, 98 bp, Homo sapiens
tgggggtgtgcaaacccgagagaactggaccttcacggcatggtgcaactcccacctgcggaaggcaggcacacagatcgagaacattgatgaggact

SEQ ID NO: 635707 - DNA, 75 bp, Homo sapiens
aaaacagcagatttcccaagagcagcggaaaatgatccagtcacagaccaaactgcagctggaatacccagtaca

SEQ ID NO: 635708 - DNA, 100 bp, Homo sapiens
atcattggaagatttggaacctcactgaaaattggtattgttggattgccaaatgttgggttttgctgttactgctcagtgtagtcacaccttgaataag

SEQ ID NO: 635709 - DNA, 100 bp, Homo sapiens
caacctcaccgtgcaccttcgcaagaagcaccagttcaagtggccctcagggcatccccgttttcggcgtccaagaggagttatttccaccccagtgatt

SEQ ID NO: 635710 - DNA, 75 bp, Homo sapiens
aggaagagagaatattgatattggagagaaggatattcctggactgactgatactacagtgcctcgccgcctggg

SEQ ID NO: 635711 - DNA, 50 bp, Homo sapiens
ctccggaccttacggggacatgcgtgtgtgtgagcacagcaaagagaatc

SEQ ID NO: 635712 - DNA, 90 bp, Homo sapiens
ttccggctctgttggacagtgatgtgaagaggttcagctgtcctaatcctcactgccgaaagaaactgctggagcgaacccgtgccaggc

SEQ ID NO: 635713 - DNA, 95 bp, Homo sapiens
gctgactggggagtcggcaggcggcaggagaccagccactaactggggcgtacacagtgaccctggatggacgagggccctcaagggtcatctcc

SEQ ID NO: 635714 - DNA, 108 bp, Homo sapiens
ggatcgccgagcccgacctcgggcgccccgccggtcacctccgcgcggacaccaggtgagaagccctaccactgcaactgggacggctgcggctggaagtttgcgcgc

SEQ ID NO: 635715 - DNA, 100 bp, Homo sapiens
agaagccgaaagagcctcgattcaaattaaattattatctgctctgaaagaattccagccggtctttaaaatgaaggttcaagctattctcatgcctcag

SEQ ID NO: 635716 - DNA, 99 bp, Homo sapiens
tggatcttcacacagctgcttccattggccagtatgaagtggtgaaggagtgtgtgcagcggaaatcactcagaaaatcctagaagctgtggggaacat

SEQ ID NO: 635717 - DNA, 100 bp, Homo sapiens
agacgtgcctttgaccttctgccatgattgtgaggcctccccagccacgtgaaactattctgaaaaagagttccacgtcctcccttatcgagtctttgtt

SEQ ID NO: 635718 - DNA, 100 bp, Homo sapiens
ctctggctctggctgtgcgcgctggcgctgagcctgcagccggccctgccgtatgccaccacgggctgttccctgaccctgcaccatacggagaaaccag

SEQ ID NO: 635719 - DNA, 90 bp, Homo sapiens
atggagaagctgcggcgagtcctgagcggccaggacgacgaggagcagggcctgactgcgcagatatctccacaggaccttcttggttaa

SEQ ID NO: 635720 - DNA, 75 bp, Homo sapiens
gcgtcccgggtcccctagcagggctctagagaccacgtgaagtctcctcgatacttacggcaataaagcaaagaa

SEQ ID NO: 635721 - DNA, 97 bp, Homo sapiens
ccagcaggacccgaggccaggagccaggggcccagaagtgtacacaggcccctgcccctgcctcagaggatgaaaaggtcgttgttgaaccccctga

SEQ ID NO: 635722 - DNA, 98 bp, Homo sapiens
gccgccggccgcagccaggagcagcagccgcgcctgcagaccggcctcgcggagcccgcgcgccgagccccacgcagccgggattgcttaccacctgc

SEQ ID NO: 635723 - DNA, 100 bp, Homo sapiens
tgccggggcaggggcggaggcggaggcagaggtggaggcgctttgaaaggtttgccatctgcaaatctggccgcacctaacctcactgtggaggaaggaa

SEQ ID NO: 635724 - DNA, 82 bp, Homo sapiens
gaggacgttcccttcacggagaaagattttgacaaacggggattcagcgtccgatcctttggaacagggactcacgtgaagc

SEQ ID NO: 635725 - DNA, 75 bp, Homo sapiens
aagcacaagatcatgcacagagcacaagctccgggtggataaggcagctgctgcagcagcggcactacaagccaa

SEQ ID NO: 635726 - DNA, 98 bp, Homo sapiens
tgaacggatggatgtgatgcctgctagccaaaaggacctgatggccaaaagaaaggaagaaaatttttcctctcctaaaaatgccaaaaggccaagac

SEQ ID NO: 635727 - DNA, 100 bp, Homo sapiens
aggcgccggggcctagcgctatgcctgcggcggagactgcatcaggctctcggtggaagttaaacgagctgagcctcgggacagcaagagccaagcgccg

SEQ ID NO: 635728 - DNA, 100 bp, Homo sapiens
gaagtgatgctggaaaatctcaggaatctggtctcattggcatatgagatcgcaagtttccaggtggcagctcatctgaagtgccctatctggatgggag

SEQ ID NO: 635729 - DNA, 101 bp, Homo sapiens
tgtaaacgctctcggaattatggcggcggtggatatccgagttgctgattgttggaggttcttttggtcttcgtgagttttctcaaatccgatatgatgct

SEQ ID NO: 635730 - DNA, 101 bp, Homo sapiens
aattcttctttccacttaaactctgaaacaggcactttgggatttgtcttggctgttactatgacacgggaagcaattgatgaatttcggcgttttcagcg

SEQ ID NO: 635731 - DNA, 83 bp, Homo sapiens
ggccgccgcagcaccatggcgaccaccgtcagcactcagcgcgggccgaataccctctaccatctgctttggtcagggtgccg

SEQ ID NO: 635732 - DNA, 75 bp, Homo sapiens
gcgggcgcggttgcgcgcggcttggggcaagctgtgcgtgttacaaaacccaaaatcccagaagccataagaaga

SEQ ID NO: 635733 - DNA, 83 bp, Homo sapiens
atctgtcttcggtggactccttcggcagtccacccaccgccgccgcctcccagtgcctacaccaactaatgttacaattgaat

SEQ ID NO: 635734 - DNA, 101 bp, Homo sapiens
aaagatgggaacagcagaaaatcaaaacaagctctttatgagaatggcatctaagtttgcagtgttgatgtgggtatttacctatgttggtgccttgttta

SEQ ID NO: 635735 - DNA, 75 bp, Homo sapiens
tgacagtgcagaaccccggcgcggcccttgaactttacagactagcatggcaaagcttctctccgatcttagtgt

SEQ ID NO: 635736 - DNA, 90 bp, Homo sapiens
cggccaaagaagtgaagctgctgctactcggagctgttcacccgctcactggctgagagcgagctccgtagtgccccgtatgagttcccc

SEQ ID NO: 635737 - DNA, 100 bp, Homo sapiens
aagtgacgttttagaaacagtggtcctgatcaacccttctgatgaagcagtcagcaccgagctgcaagctttcttcctggtggcagatgacatcatggat

SEQ ID NO: 635738 - DNA, 109 bp, Homo sapiens
cttcatcacagcaatggagaagagaaagcacaaagcatggagaccctccctccagatattaataaggcagcggaaagaagaaatatgaatacggctccatcaagaccca

SEQ ID NO: 635739 - DNA, 51 bp, Homo sapiens
gcaagtgaagaccaatattcaacaggcagttctggggctgctggtatggac

SEQ ID NO: 635740 - DNA, 101 bp, Homo sapiens
ccttccccaagcgcggccagacctgcgtggtgcactacaccgcttagaccatgctcagcctccaagcagccttgtcatcgacaaagaatctgaagtttaca

SEQ ID NO: 635741 - DNA, 100 bp, Homo sapiens
catcgaatcatggaatcccttgcatggctctcagctggagagcagtggcatgatctcggctcactgcagcttctacttcctggcctcaagcagtctttcc

SEQ ID NO: 635742 - DNA, 101 bp, Homo sapiens
ctcaatgccgctgccctgcgcttctcccagctgcagggcatccagggcattgtggatgcctaccgccaagccctgccccaagttcgcctctatggccctac

SEQ ID NO: 635743 - DNA, 100 bp, Homo sapiens
ggctgcagagacaggcgttcgaggagatcatcctgcagtggcccctccgtgcagtggctccagcatcactgaaatcatcaaccccaactacatgggagtg

SEQ ID NO: 635744 - DNA, 122 bp, Homo sapiens
gctggagctggcacgcctcttctcccggctctacacctacaagcgcacgcacgccgcgtcaagtctggcaccatctttgacaacttcctcatcaccaacgatgaggcatacgctgaggagtt

SEQ ID NO: 635745 - DNA, 97 bp, Homo sapiens
ccgcgctcctggccccgcgcgggcggacggcggaggcgcctcccagggtttccaaggcaagaccggccctccaggcccccccggcgtggtcggccct

SEQ ID NO: 635746 - DNA, 75 bp, Homo sapiens
agaggaggtggaggtgggggcttcagaggaggaagaggtggtggtttcagaggaagaggaggtagaacgggaaat

SEQ ID NO: 635747 - DNA, 82 bp, Homo sapiens
cgtcactacattggaataatgactgtacaatttgttcaaggaatttttgtagaaaaatacgatcctacgatagaagattctt

SEQ ID NO: 635748 - DNA, 90 bp, Homo sapiens
attaaagacaagaaggtttccaatcagggttctccaaaaaatgtggaatcctttgcatctatgctgagacattctcctcttacacagatg

SEQ ID NO: 635749 - DNA, 75 bp, Homo sapiens
ctggagcctcagttggaagcagccgatccagcctgcggagcctgtggggcagggaccagttactctccacaagaa

SEQ ID NO: 635750 - DNA, 82 bp, Homo sapiens
agaccatggctgactacctgctgtacaccctcaacaaacaccagcgctttgggcgtccgagctgggccacagcctgaacgag

SEQ ID NO: 635751 - DNA, 100 bp, Homo sapiens
tacaggctttacttttgtggtagaccgtctaagagaaggtgtgagatcaaccatgagttccgttgcagttttgacccaagagagttttgctgaacaccga

SEQ ID NO: 635752 - DNA, 54 bp, Homo sapiens
cactttagaccctccacctaattgcaggtagcaattgtggtattaggaaacaaa

SEQ ID NO: 635753 - DNA, 101 bp, Homo sapiens
acaatgatttaacaacgttaccagcatccattgcaaaccttattaatctcagggaactggatgtcagcaagaatggccagcgttaatgactgccattgatg

SEQ ID NO: 635754 - DNA, 150 bp, Homo sapiens
gctttctaaaactgaaggagaagcccatgaagagatggtggattctcactgagttttgactagcggaagaaaagattttcttccagtaaaatgtgatgcatgtaaacaagatttctgtaaagatcattttccatacgctgcacataagtg

SEQ ID NO: 635755 - DNA, 82 bp, Homo sapiens
agactccttctccagcatgggctcgcctgtcaacgcgcagcatttaaatcaaacggtattgagatggattgggttatgaaac

SEQ ID NO: 635756 - DNA, 88 bp, Homo sapiens
cgcagatgcagaggttgaggtggctgcgggactggaagtcatcgggcagaggtctcacagcagccaccgacatcggcctggctgcctg

SEQ ID NO: 635757 - DNA, 90 bp, Homo sapiens
cctggactcgcgggcggcggcgagcgcctttacaatggccctgaccctgtttggcagatgatgttgagggcaaaattagacaaatcattc

SEQ ID NO: 635758 - DNA, 100 bp, Homo sapiens
tgacatcgctaccatggtctccggcagcagcggcctcgccgccgcccgtctcctgtcgcgcagcttcctccaggcaaaggcccattgaaaaatacatctg

SEQ ID NO: 635759 - DNA, 105 bp, Homo sapiens
cgatcctggacaggatgcaggcagatgacagtcattttgtttactcattcagccctgttgcaggtcccaataaactcttcataaggttgacagaagcaccctctg

SEQ ID NO: 635760 - DNA, 139 bp, Homo sapiens
ctgcaagcatggcaaagactggcaaaagcacaaggattctcgctgtgacagagacaacaccgagtatgagaaagatatagatcagctatcaggaagggacttctgccattcaaagaaaatgacaggaagtaacactgag

SEQ ID NO: 635761 - DNA, 51 bp, Homo sapiens
aatgcccagagttggagccaattaaaccagcgccatcatgaccgggtccta

SEQ ID NO: 635762 - DNA, 100 bp, Homo sapiens
agtggataattttgtggccttagctacaggagaggaccttgctaagcagtactctgacagactagaatgctgtgaaaatgaagtagaaaaggtaatagaa

SEQ ID NO: 635763 - DNA, 75 bp, Homo sapiens
gtgaagtacttcctggacaacttggaccggatcggccagctggccaccagcccctcgggttccaagatgcagcta

SEQ ID NO: 635764 - DNA, 100 bp, Homo sapiens
gatgtccgagcccaaggcaattgatcccaagttgtcgacgaccgacagggtggtgaaagagaacagcccatcttcaccacccgagcgcatgtcttccaga

SEQ ID NO: 635765 - DNA, 75 bp, Homo sapiens
aaaaagctcaatgcctcagaaattcattggagccaaaaacctgtatatcatctccgtgaaggggatcaagggacg

SEQ ID NO: 635766 - DNA, 83 bp, Homo sapiens
gcgcgcgaaggagcggaagaatggcagtgctcaaactcaccgaccaggtgacgccgcagccgccgggagccgcgagggacggg

SEQ ID NO: 635767 - DNA, 101 bp, Homo sapiens
aaacatgtgaacactcaagtgaagcaaaagccttccatgattacatacactgcctctaggactgggacagatagccactgagtacctgcttcaaatcaccc

SEQ ID NO: 635768 - DNA, 75 bp, Homo sapiens
cctaacacctggcagactctgctccatgagagttatgtgtctcggtaccacgtgaaagactcctcacgccacgtc

SEQ ID NO: 635769 - DNA, 74 bp, Homo sapiens
cccggcgcgaagaggctggactcggattcgttgcctgaggctactgcagcactggggtgtcagttgttggtccg

SEQ ID NO: 635770 - DNA, 100 bp, Homo sapiens
gaccacgacgaggccggggtcacaatttcgctaaggagtttgtgatcagtgatcggaaggagctggaggaagatttcatcaagagcgagctgaagaaggc

SEQ ID NO: 635771 - DNA, 74 bp, Homo sapiens
tctgacatggaggatgatttcatgtgcgatgatgaggaggactacgacctgtttgctggcctagacctgaactc

SEQ ID NO: 635772 - DNA, 75 bp, Homo sapiens
gcgaaggagcggccgggagcccgccgcgctggtagcggaagctgttttaggttatgtgaaagagatgtttcctca

SEQ ID NO: 635773 - DNA, 100 bp, Homo sapiens
gcaactggcccctaagccaaagcaaaagacctaaggacgacctttgaacaatacaaaggatggagaacatcatgggaatgctatgcagccatctgtcaag

SEQ ID NO: 635774 - DNA, 76 bp, Homo sapiens
gcgacttatgtctgttgcttatacgtatgataatctggctcctagggtctccctctgttgtccaaggctggagtgt

SEQ ID NO: 635775 - DNA, 100 bp, Homo sapiens
gcagacgccagggtgggcctgggaagacaggccctcttcaacagattccaacaatgtctcacccatcttggctgccacccaaaagcactggtgagcccct

SEQ ID NO: 635776 - DNA, 99 bp, Homo sapiens
gaaaagatctggtagttgggtttgttgcagcataagcttaaatcgtctcagaaggacaaggtccgccagtttatggcgtgcactcaggctggcgagaga

SEQ ID NO: 635777 - DNA, 75 bp, Homo sapiens
gcataaggaactctatcccaggaatacagctttgcattagagcagcccgacggccatggaggctgaagagacgat

SEQ ID NO: 635778 - DNA, 75 bp, Homo sapiens
gagcctttctggacagaccaacctgtcagtgctgcaacagcctcccgcgacgatgcccctcaacgttagcttcac

SEQ ID NO: 635779 - DNA, 83 bp, Homo sapiens
gtcgcgtgtctaggtgagtcgcggtgggtcctcgcttgcagttcagcgaccacggtcatcatcagatttgaaatatttaaagt

SEQ ID NO: 635780 - DNA, 89 bp, Homo sapiens
gtctctaaattgctggcttccatgatgtgcaaagctgatgtcctcaatggaaccataacgtttttgcctttggaagaagatgatgaggg

SEQ ID NO: 635781 - DNA, 50 bp, Homo sapiens
gggttttcaaggcttaatcgaagagatgaggtgaacaagaaggaggtggt

SEQ ID NO: 635782 - DNA, 98 bp, Homo sapiens
tttttaagacacgctgcaacaaagcaggataaagatggtgatagagcagttcaccatgcagcttttggagatgaaggcgctgttatagaagtactaca

SEQ ID NO: 635783 - DNA, 90 bp, Homo sapiens
caaaaccgtgaatggtgtctggaggagtgagagccggcagatagtccactgtgtgcagaggcatgggagttgtcatgttgggaacatgct

SEQ ID NO: 635784 - DNA, 80 bp, Homo sapiens
tgcagaggatcctggaggcctgggaagccaacgaccacacgcagtgctggagaatctggtaaaagcaccattgtgaagca

SEQ ID NO: 635785 - DNA, 100 bp, Homo sapiens
agaagatattggccgacaaggaagtgaagaaggcgcatcactcccagctgcgcaaagcttgcgaggtggcgttagcgatctataactacaatgcttctca

SEQ ID NO: 635786 - DNA, 92 bp, Homo sapiens
aactaccgctgctggaccacaaaccgctgccagaaaatttggtgccctggttgtcagatgttggaaagcagtaggacggaacatactcttcg

SEQ ID NO: 635787 - DNA, 76 bp, Homo sapiens
ggtctggtgattattacagcatggattatcctgtgccacagttcctcaaaaattttctcccaaactggttggcttg

SEQ ID NO: 635788 - DNA, 105 bp, Homo sapiens
gcgaaccaacaagttcatcaaggagctcattaaggacggctctctgctcattggggcgttgaggaactatgtcttcagcagtggtgcagttatatgcagcagatc

SEQ ID NO: 635789 - DNA, 51 bp, Homo sapiens
acttgaaatcaaggaatgtagaaatcaggattcaaccctatgaaaagataa

SEQ ID NO: 635790 - DNA, 76 bp, Homo sapiens
ggctctggccttacaggggtccctggagtttgatgatgctggaggtgaaggccacgcccagatttcttctaccgct

SEQ ID NO: 635791 - DNA, 74 bp, Homo sapiens
ttggaaggactgcctgcctccaacaggtgaccaagaatatggcccaggtgaccaaagccctggacaaggccctg

SEQ ID NO: 635792 - DNA, 89 bp, Homo sapiens
tggaacagggaatatggacgaagacctgttggatggagagcaatacatcatcatctttggagaatttagcgacggcgcctgtgaaccag

SEQ ID NO: 635793 - DNA, 80 bp, Homo sapiens
cagctggtagcccgaagtaacatcctgacactaatgtatcagtgcatgcagctgtcagttccccaaaacgtgtcactcct

SEQ ID NO: 635794 - DNA, 75 bp, Homo sapiens
gacagtggcggcggcgccatggcagggcttgcaggttaaacccatccagagtaatggctgcggccttacccagga

SEQ ID NO: 635795 - DNA, 75 bp, Homo sapiens
ctggtgtgggtttcccaagcaaggttccttggaagaagatgtctgcagaggtgttgaaaagtctcctctagagct

SEQ ID NO: 635796 - DNA, 100 bp, Homo sapiens
gctccaattttcagctggaggaaatttcccgggctcagcttgtggtcatggagaagtgtaaggatgcaggattggccaagtccatcggggtgtcaaactt

SEQ ID NO: 635797 - DNA, 76 bp, Homo sapiens
cccgctgacattatctcatccacagacaaacttggtcttaaaattttggtagcagaaagcaaatgtgcaaagagca

SEQ ID NO: 635798 - DNA, 109 bp, Homo sapiens
ctcctcccaagtgatcagaacactaccgttcaagaggatgctcacttcaaagctttcttccaggccaaatttgagtttcatcatggtgactatgaaaaacagtttctgc

SEQ ID NO: 635799 - DNA, 85 bp, Homo sapiens
acgggcagccatggccctccacagcccgcagtgaacgagataattgggagagacatgtcccagatttctgtttcccaaggagcag

SEQ ID NO: 635800 - DNA, 100 bp, Homo sapiens
caaatgaccaagagccatgtgggtggtggttggctaaagttcggatgatgaaaggagaagctgcagtactttgcacggggcctgcaagtttatatcagac

SEQ ID NO: 635801 - DNA, 82 bp, Homo sapiens
gctgggcatccgacacgtactgctggcgcagacggggaagcggagccaacatgccagtggcccggagctgggtttgtcgcaa

SEQ ID NO: 635802 - DNA, 101 bp, Homo sapiens
cttgtgccccagttgctgtgctccaaggacacacaggatcaattacatctttacaggttatcaatactctggctgaccatcatcatcgtgggactgacttt

SEQ ID NO: 635803 - DNA, 74 bp, Homo sapiens
ctggggcagctgcggcagtatgatgaggatggacatacctcggcaacatttcatacaccatttagtcacctagg

SEQ ID NO: 635804 - DNA, 117 bp, Homo sapiens
gactattcctgatccttatgaagactttatgtaccgtcacctccaatattatggctactttaaaggcaaatctaagtaggtctttgagagacacagcagtcaggctttctgagttgg

SEQ ID NO: 635805 - DNA, 82 bp, Homo sapiens
aggcgaacccgcggcgcaataacgtgacatgaagtccgagaggagacccccctcacctgacgtgattgtgctctccgacaac

SEQ ID NO: 635806 - DNA, 98 bp, Homo sapiens
cggaagtggatggcgtggagatatggcgcaactgcggcgcggacttgccatgaggtgttgaagccttgtttcactgagttggagagactggacctaaa

SEQ ID NO: 635807 - DNA, 112 bp, Homo sapiens
cggagctctgatcgccgggaacccttgccgctgctgtcctgcgaccccaagcagtgtggacgaatgtggaacctcgctctgtggctgtgttcccttggcactccttagtccc

SEQ ID NO: 635808 - DNA, 98 bp, Homo sapiens
gggacaagacccatctttatgcaaagccagcgttacagtaatgttccagttatcaggaactgttgccgttattacatcagatgggagaatgattgtgg

SEQ ID NO: 635809 - DNA, 82 bp, Homo sapiens
cctgaagtcggtgtctgctgcgttcacggcaggattcggttaggctaccggctctctgaccagttccacgacatcctcattc

SEQ ID NO: 635810 - DNA, 100 bp, Homo sapiens
tagggaagaaggcggaacatccggaggctgggaaatgaggcctttgaaattgttgttcgccatgccaagaactacaccaatgccatgttcaagaacaact

SEQ ID NO: 635811 - DNA, 95 bp, Homo sapiens
catagcggatgtcaagcggcaggccgcagaggatgctttcctcgtcatcaatgagcaagaggagtccacggaggctgaagccgacgtagcttctc

SEQ ID NO: 635812 - DNA, 76 bp, Homo sapiens
cagggattgggaaaatctcttcagggcccagacatgtccgtccttgtaagttaaaagcttccatgggagccttcct

SEQ ID NO: 635813 - DNA, 100 bp, Homo sapiens
ggcccgatcgctgcgcccgcggccagggccgaggcaggcctgacccggggccgggcagcccgcgcgactttcgtgccggtggtggtgtgcacattgagcc

SEQ ID NO: 635814 - DNA, 74 bp, Homo sapiens
agcccacggcagagaatgcctatgagtacttcaccaagattgccaccagtgttctaagaacggaagcatctggg

SEQ ID NO: 635815 - DNA, 100 bp, Homo sapiens
ggggcacctcagtatcccagtgcattcccatcctcgctcccacctgtcagccttctaccccatgagaaagaccaggtgacagggaagatgatgccatcag

SEQ ID NO: 635816 - DNA, 100 bp, Homo sapiens
tgatccattcacacctagataccggaggaggatcttctgcggattgttggaatctaccgtgtgggacgcctgctcagaggccctgataatgtttgataag

SEQ ID NO: 635817 - DNA, 75 bp, Homo sapiens
ctgatttgtcagcagttagagagatatatgggccacatgcagtttctctcagtggtgccagtgaagaagaggaca

SEQ ID NO: 635818 - DNA, 101 bp, Homo sapiens
caactttcccagaagttgttctaacgctgcctttgctttaaaacagtattacttgcgagggaggaagaaggagacttcagagaaagaggccgtgtgatgga

SEQ ID NO: 635819 - DNA, 75 bp, Homo sapiens
ttcaccctcaactacctcaggcggggtgcaggcagattcaagacctggagctctcgtctgtggaggtggatccct

SEQ ID NO: 635820 - DNA, 75 bp, Homo sapiens
ccacaacgaatgaatgaacagccacgtcagcaaaccctcctggggcttgcccatagatgctgttcagtgggatat

SEQ ID NO: 635821 - DNA, 100 bp, Homo sapiens
gctcagagctggaggatgaaggatcggttaaaggcattaggatttcctgaaggacttgtgatacaagcgtattttgcttgtgagaagaatgagaatttgg

SEQ ID NO: 635822 - DNA, 90 bp, Homo sapiens
cgcctatctgcgagaacagagaagggagctctatagtcggagtggagaactgcaagtgccctggttcccaagaaccattcaagagctgga

SEQ ID NO: 635823 - DNA, 51 bp, Homo sapiens
tcacatggacgtggcaaggacctggagcgccggaccatgggaaccccaaag

SEQ ID NO: 635824 - DNA, 100 bp, Homo sapiens
aggcgctctgaccactctccagcaccagcttccagttagtggatatagcacaccatccccagccaccaagacaatgcaaactccagtgaacattcccgtg

SEQ ID NO: 635825 - DNA, 100 bp, Homo sapiens
agcgtttctctcagatatcagttcaagtaaggagttgccaatagaagcaaaggtatccagtagaaaaagcactctccagtgttcatctgtggaactggat

SEQ ID NO: 635826 - DNA, 100 bp, Homo sapiens
ggagatgcctggaatacagtaaggatatgggccctcacattttccaaacctgtccatctgctaactattttgactgcagagccatgtccattggagcccg

SEQ ID NO: 635827 - DNA, 87 bp, Homo sapiens
gagaatgggaattctcttcactagaatatggagactgttcaatcaccagggtgagaagaaatttgtttgtccagaatgttcaaaacg

SEQ ID NO: 635828 - DNA, 100 bp, Homo sapiens
ttatggtcgcctttttgaatgaggatcaaccaatgggaggctgggagatgatcagaaaaattggagacacatcagtcagttataaatatacctcaagata

SEQ ID NO: 635829 - DNA, 100 bp, Homo sapiens
agcttcccacatctccaggtcatatgcacacccaggtaccaccttatccacagccacagcggaaggcttcctatctgtgtggtgatgaatcgcatttcct

SEQ ID NO: 635830 - DNA, 97 bp, Homo sapiens
aagggcagtcatcagatccaccatctgcttcaacggatgagttccacccgttcatcgaggccctgctgcctcacgtccgcgccttcgcctacacctg

SEQ ID NO: 635831 - DNA, 73 bp, Homo sapiens
cgcccggtgacggcggagaggcgccccccgcagcaggaagtgtttggattgtgagctatttcagaactgttct

SEQ ID NO: 635832 - DNA, 90 bp, Homo sapiens
cccagccaatgaagatgaagacataggagaactcgaaaattaatgctgaaaataaggcgaagatcaacatggcaggcgcaaagcgcgttc

SEQ ID NO: 635833 - DNA, 88 bp, Homo sapiens
actaaaagacaacctgcagctgcctctacagtttctgtccagagaatgtgttcagtgcagagccttcaataaaggagaaaagaaagac

SEQ ID NO: 635834 - DNA, 100 bp, Homo sapiens
tcgctccgctcgtcccgctcgtcatggcctacccgggatacggaggagggctttctatgggaggattctcgtaacagcagcacaccaactgaaaagccca

SEQ ID NO: 635835 - DNA, 96 bp, Homo sapiens
attctgggcttccacacaactccagtgctaactcaacaggtgcgcggcccccgccatcccgccccgccgccctgcgccatggaggagggccctctg

SEQ ID NO: 635836 - DNA, 83 bp, Homo sapiens
attcgatgaaaattatgcattcctgcaccgcacgctaaaggagattctcagggctgtcacatggtgactgaagaacttcattc

SEQ ID NO: 635837 - DNA, 100 bp, Homo sapiens
ccggggcgccctgcgcttcgccaagctcggctttgagatcttcctcagctccttccagaggaagaagaggtggataagatgatggaacagaagatgaagg

SEQ ID NO: 635838 - DNA, 50 bp, Homo sapiens
caggcagagcccggagaaaagccacatgccccagtggacaggaaagctaa

SEQ ID NO: 635839 - DNA, 100 bp, Homo sapiens
tatgttctgggataccttctcacttggaaattaatactaactttcttcaaagctgcatcatcacaggtgactctcctattccatctgtttcttcgggatc

SEQ ID NO: 635840 - DNA, 74 bp, Homo sapiens
ggaagaggcggtggcggcgggtcggggcgaggaagagagaagggcacagttacctaagtatcaacgtaatcttc

SEQ ID NO: 635841 - DNA, 85 bp, Homo sapiens
attaggttgcagtatgtggccagttatttgcctcagtaaaagacaagtaactggcagaagttttggtgataaagattttcggaca

SEQ ID NO: 635842 - DNA, 82 bp, Homo sapiens
ctctacctcctgcgaggcctcccgggctccgggaaaactacactggccagatcaacaggcggtccttcgggtcggagtggac

SEQ ID NO: 635843 - DNA, 82 bp, Homo sapiens
ggagataacgcggccttgggctctggccctgggaggagcggggacactgaggacctctctccaaattggcctctcaactcac

SEQ ID NO: 635844 - DNA, 98 bp, Homo sapiens
ctctttcattcctgcagagcccatgggcggacgaccatttggtttggtcatcaatctgaactacaaagatttgaacgcggagatggacatggtggcct

SEQ ID NO: 635845 - DNA, 100 bp, Homo sapiens
attcctgatgcctccatcctagcagctgccttggatctagtgttgacttcaaaatcaaaactgtagagctaagaggaaagaaaattagattacagatctg

SEQ ID NO: 635846 - DNA, 90 bp, Homo sapiens
ttcatctacccggagaagcaggagccctactcggcagttccggaaccccaaggcatccttgcgtgtgcggctctgtgacctcctgagcca

SEQ ID NO: 635847 - DNA, 100 bp, Homo sapiens
ggaaaaccgaagttggaagtgtctcttagcagcgcgcggagaagaacggggagccaggtgcacaaggagtacagcaagtgcctgcgtcactcctactgct

SEQ ID NO: 635848 - DNA, 100 bp, Homo sapiens
aaaagatggcggctgccgcacaatcccgggttgtccgggtcctgtcaatgtcacatcctgataacttaagtgactctctcttttccggtgatgaagaaaa

SEQ ID NO: 635849 - DNA, 100 bp, Homo sapiens
agccgcgggcattgcggcccctgtcgattccgcggcttcgaggccctgaaaaggagcctttaaaagtcaattctactccatttggcaaagagggaactga

SEQ ID NO: 635850 - DNA, 90 bp, Homo sapiens
agatttgaaaattcacccttgtagagtcattcctgcctttgagcggactcccttttaagcttttcgggaatcacgaagaagattcttaac

SEQ ID NO: 635851 - DNA, 100 bp, Homo sapiens
ctcgccatgtcctgctgcccgggaaaactgaggctgccatcaaaaacttcagtccctactacagtcgtcagtactctgtggctttctgcaatcacgtgcg

SEQ ID NO: 635852 - DNA, 96 bp, Homo sapiens
aaacgccagtatcagatttgtttggctatcgatgactcttctagtatggtagacaatcataccaagcagcctctcttgacaacactagtagaacag

SEQ ID NO: 635853 - DNA, 100 bp, Homo sapiens
aacagttggatcttgctcagtctctgtcagaggaagatcccttgtgctgattcctaaagaaaagcccccaatcacggttgtgggtgatgttggaggaagg

SEQ ID NO: 635854 - DNA, 97 bp, Homo sapiens
acatttagaacgatgtgaacatcgaatcatggaatcccttgcatggctctcagtaggtagccatccaagcttcctgaaggaggttcgagatcacatg

SEQ ID NO: 635855 - DNA, 88 bp, Homo sapiens
agacaccctctgggggtcctctctgagtcaaatccagtggcccccgacagctgctctcgggagccgcctcccgacacccgagccccgc

SEQ ID NO: 635856 - DNA, 82 bp, Homo sapiens
cgacgggcgcccccgagccgccgccgctgtccggagccccacaggtgtcgtgaaaactacccctaaaagccaaaatgggaaa

SEQ ID NO: 635857 - DNA, 100 bp, Homo sapiens
accacgagagcctcaagcttctccagagagcctcccgagcacaacaaggagaggtgatgaggttggcatgtcgtttggatcccaaaactagcttccagat

SEQ ID NO: 635858 - DNA, 76 bp, Homo sapiens
gtttctctcaggttctgagactctaggcaggctggcaggcaacaccttagggatttgcagatttacagaatggctg

SEQ ID NO: 635859 - DNA, 100 bp, Homo sapiens
aaagaaggagggtcctctcagtgattaagaccctcctgcatgaaatgatacatgcctatttatttgtcactaataacgacaaagaccgagaagggcatgg

SEQ ID NO: 635860 - DNA, 100 bp, Homo sapiens
ggtatcaccgccctacacatcaaactccgggccacaggaggaaatagattcagaattcctgggctccctgggtgcattctatcattccagttgaaagttt

SEQ ID NO: 635861 - DNA, 100 bp, Homo sapiens
ctgtccggagacagcctaagggccttcatggtgaaacacctcttggagtatacccaggcaacagagtctaacctgcagtacagcttgttgttagtgctgg

SEQ ID NO: 635862 - DNA, 99 bp, Homo sapiens
tcagtacaaagccgtgaagtcagaggcgaacgccactcagcttttgcggcacttggaggtaagactgtgccaaaatcccaaacttcagttgaaaaatag

SEQ ID NO: 635863 - DNA, 78 bp, Homo sapiens
gatgacatgccagcccagactttcatgtgacctgaaacatatcacgaagctgaaaccttggggcctttttgaggttct

SEQ ID NO: 635864 - DNA, 75 bp, Homo sapiens
ctgggctcctactgttcttagagatgtacctttctcagggtatcacattatcaaaccggatgttatcagcaagtt

SEQ ID NO: 635865 - DNA, 50 bp, Homo sapiens
gcagggatctatctaatgtggaggcacgtctcggcagacacctgagggtg

SEQ ID NO: 635866 - DNA, 101 bp, Homo sapiens
aaagactcttccaggattctcaacctatgcaaccagtccttcattcccgcatttttccaggcacacatgtggagtcacattcaagacactgttatttgttt

SEQ ID NO: 635867 - DNA, 97 bp, Homo sapiens
aacctagcctatcagctggggctggatgagtccctttctaaggcacaaaatgatgtgatggaaatgaagatgcagtcagagagactttcgaaagaat

SEQ ID NO: 635868 - DNA, 82 bp, Homo sapiens
aagaaatctgctgcaccactgggatcaaggtggtcggacattgtgtggtgtaatgaggattggcctggttgcaaaaggcttg

SEQ ID NO: 635869 - DNA, 101 bp, Homo sapiens
ctgcttgacctttccactgaggatgacgggacagtggccttcgcgctaacgaaggatgtcattttcaaaatgcgggatggtacctctgctttattaagccc

SEQ ID NO: 635870 - DNA, 83 bp, Homo sapiens
atcaaagacaatatcaatgacaaactgacggaaaaggagagagagattctaacattttcagagaaccttttggaaagaacaag

SEQ ID NO: 635871 - DNA, 101 bp, Homo sapiens
gtcgtggccggagcggcccgcgcctgggctgccggcacttcgcggcagctcaccatggatgatgatatcgccgcgctcgtcgtcgacaacggctccggcat

SEQ ID NO: 635872 - DNA, 52 bp, Homo sapiens
ttgtgaggcctccccagccatgtgaaactactatgaaaatgatgttagacaa

SEQ ID NO: 635873 - DNA, 101 bp, Homo sapiens
acttctgcgggatcttcaaccacctcgagcggctgctggacgaagtcttccgtgtgtgctaagatcgtgcagctcctggggcagaatgaggtggactatcg

SEQ ID NO: 635874 - DNA, 50 bp, Homo sapiens
caggcacagccgacgccgcgggtgtcaggggaagctgatggagaatcgag

SEQ ID NO: 635875 - DNA, 75 bp, Homo sapiens
ctgagggctgtgaaagggtcaaagtctttgaggaatgctcgtttgagagtaccgtacaggtgagcaagttgcaag

SEQ ID NO: 635876 - DNA, 101 bp, Homo sapiens
cgccattatcctctgtttctctgctgcaccgacctcgacgtcttgcctgtgtcccacttgttcgcggcctataggctggcgcccatgcggctctacacgct

SEQ ID NO: 635877 - DNA, 98 bp, Homo sapiens
gaaaccctgcattttgggaaactcgactttggagaaaccaccgtgctggaccgcttttacaatgcagtcgcagatatggccagtacactatgaaccag

SEQ ID NO: 635878 - DNA, 106 bp, Homo sapiens
tggcggagagagaggtggagtccggcccccgaaagagggagtatggatgtgtccaacagccaaaaactcaagaaagtaaattgaaaattggtggtgtgtcttcagt

SEQ ID NO: 635879 - DNA, 83 bp, Homo sapiens
cctggatttacctgttttctgggagcttcgaaggtgaatcagctcccggccgactttaggattcttctggattttaaattttt

SEQ ID NO: 635880 - DNA, 50 bp, Homo sapiens
ggctggaacagagagaaattcaggtcgggaactacaagcggactgtgaag

SEQ ID NO: 635881 - DNA, 76 bp, Homo sapiens
cgaaagcagtgacggaggagcttgtaccaccgcaagtctggaaaagtttgaaattccagtaaaaattcgtttgagt

SEQ ID NO: 635882 - DNA, 75 bp, Homo sapiens
tcacctttgggctgaacagaaacatgactgccggtctgaaggggcgtctcgattacctgagctctctgaaggtga

SEQ ID NO: 635883 - DNA, 83 bp, Homo sapiens
gggatcctttatcctggtcatcttctatttccaaaataacgaaggaggcccaacttcattcaataaggagcctgacggattta

SEQ ID NO: 635884 - DNA, 75 bp, Homo sapiens
tcagaaggagctggcggacatcactttagaccctccacctaattgcagttgctggatttgtgcgactcggtgaag

SEQ ID NO: 635885 - DNA, 50 bp, Homo sapiens
cacgcctgccccagggaaccgcacagctcgagcccagaaaactatcctct

SEQ ID NO: 635886 - DNA, 101 bp, Homo sapiens
agcggaatcatcgatgcaggggcctcaattaatgtatctgggagaaggaaggttcactatttattcccagacggcaaggaaatggctgaagaatatgacga

SEQ ID NO: 635887 - DNA, 49 bp, Homo sapiens
cttgagttggtcgggggcagcggcagatcgtcagtatttaaacagatca

SEQ ID NO: 635888 - DNA, 100 bp, Homo sapiens
gtgtgatgatagtattggcatttataatactgaactatggacctatgagaaggggaccatctggaccaagatttggacctagaaatgataaaattaagca

SEQ ID NO: 635889 - DNA, 75 bp, Homo sapiens
aatgacccagacccggacgacccccattgctgagccagcggagctgcttgggcattgacactgagaggcccattc

SEQ ID NO: 635890 - DNA, 88 bp, Homo sapiens
ccggtcaggctcgccgccgagctgccctgggcgctgcctatggcacagccaagagcggtaccggcattgcggccatgtctgtcatgcg

SEQ ID NO: 635891 - DNA, 74 bp, Homo sapiens
cgagcgagtcgccgctgcagccctagtgactgcggcctgcatcccgcttgcgcgatctctggcctcttcaactg

SEQ ID NO: 635892 - DNA, 96 bp, Homo sapiens
ggaaagctcagtaatgttgagagaactagaaacttggacactgcccatctctaagataagaacctggaaaggggactctgttggccattggaaatt

SEQ ID NO: 635893 - DNA, 82 bp, Homo sapiens
actgtgcgctcgatccagcaccatggggaagcgggacaatcgggtggaagcaggtcctggggaccaaggtggacgcggagcg

SEQ ID NO: 635894 - DNA, 75 bp, Homo sapiens
tctcattcaagaaaccgaagtgatttccagaggatttacactcttcttggacacttaatgattgttggcaagaaa

SEQ ID NO: 635895 - DNA, 100 bp, Homo sapiens
cggacaagcacagtcttcggaagactataatgtaactgcaaactccaagctggtcattatcacggctggggcacgtcagcaagagggagaaagccgtctt

SEQ ID NO: 635896 - DNA, 75 bp, Homo sapiens
accgcagtgggctaccataaacacatcaccttgatttttaatcccacgagacgtctcccacaacctgctccgggc

SEQ ID NO: 635897 - DNA, 51 bp, Homo sapiens
tacatcagcttgtaggagacagagctacaggtgaagcaagccagagtgaac

SEQ ID NO: 635898 - DNA, 90 bp, Homo sapiens
atggtgttctccaccgtcaagacctttgagccgcctgagcgactaactcctgcgcccctgaggtgttccattgagtggttccattttgcc

SEQ ID NO: 635899 - DNA, 80 bp, Homo sapiens
gcggcccgcgcctgggctgccggcacttcgcggcagtgcctccggagccagcgtggtggccatagacaacaagatcgaac

SEQ ID NO: 635900 - DNA, 100 bp, Homo sapiens
caaggatgaacattctgccgaagagaacaagacgtgtgaagactcaggggtgggacctggctgcacggatgagacgctgctgtcggccatcgccagcgcc

SEQ ID NO: 635901 - DNA, 75 bp, Homo sapiens
gacatcctggaagctgggaaatgctggcagccaggaggcaggagcagcgggcgacagtgcgggccctgtggttct

SEQ ID NO: 635902 - DNA, 100 bp, Homo sapiens
acaagccaatcccaggaggaaaaacggacccagatgatgtggtaccagttggccaaagaagagcctggtgttggtgcatgtgctttggactagcatttat

SEQ ID NO: 635903 - DNA, 83 bp, Homo sapiens
agccaagctcgtggcctgcctctgcgtgcaacatccagtcatggataaaaatgagctggttcagaaggccaaactggccgagc

SEQ ID NO: 635904 - DNA, 100 bp, Homo sapiens
gatgctgaaggttactttgctgcttgcacaacagatacaactatgaatagttctttgtcagccataatggcaggtgaagaaattaatgaagactatccag

SEQ ID NO: 635905 - DNA, 100 bp, Homo sapiens
ctggagcagagccgctgggcgccggagccgaggcgagcgccgcgcgcaccactgttttacagctcccagcacagtaggaaagagaaatttgagtcctagt

SEQ ID NO: 635906 - DNA, 95 bp, Homo sapiens
acgtacgctctccaactggccaatacaaatcccttgtatccatatcatggaaatcaggacagtggcagttggaattgtggcaatcaaaggggtgg

SEQ ID NO: 635907 - DNA, 100 bp, Homo sapiens
ttctggaagtcagggtactgggccagtcatttagccgggcgaaagtatcatatcaggagccagatgaccaggatgccccagatgagcatgagccctctcc

SEQ ID NO: 635908 - DNA, 100 bp, Homo sapiens
tgcattgaagtaggctcaaaccctcagggacctggtatagacgcagaatctgtttcacacaacaactgctatttgaagcttatgtccctgatgccaaaaa

SEQ ID NO: 635909 - DNA, 119 bp, Homo sapiens
agcatctgagattgaatacaagctgggaaaggtcaacgaccggtggcagcatctcctggacctcattgcagccagtattgctgacagacagaacgccttggaggctgagtggaggacgg

SEQ ID NO: 635910 - DNA, 99 bp, Homo sapiens
ttcctgcgaggcccagactggtccatccccatcttggactttgtggaacagaaatgtgaaggttacaagatgttcacctaagattgagacctagtgact

SEQ ID NO: 635911 - DNA, 87 bp, Homo sapiens
tgctgcccgcgtccgaggctcgcgggcggcgggcccgggggtgcccagaggatgcgacatcctcatcgtctacagcccggatgccga

SEQ ID NO: 635912 - DNA, 50 bp, Homo sapiens
ccgcggccggagctgtgggctgaaacaagctttcaccgacgtggccactg

SEQ ID NO: 635913 - DNA, 100 bp, Homo sapiens
cgttcttccattaaatgaggatagtccgttgatgtatcagccacaaaaaatggacttgactatgcactcagtgtccttcacggttcggttcacatttcac

SEQ ID NO: 635914 - DNA, 87 bp, Homo sapiens
cgaaccctcagcctcaagccgctgctcttcggatttttagactctgaggagcagttggagctaatccacattatggaaatggaaacc

SEQ ID NO: 635915 - DNA, 101 bp, Homo sapiens
tagcctctaggaagcgctagacacattttgtgaagaaatatgggaacctttttagcttggagcttggtgacatatctgcagttcttattactggcttgccc

SEQ ID NO: 635916 - DNA, 100 bp, Homo sapiens
ctggcaacattagatccacctcatacaggtcctcgatgggcttcctggaatattggtgtgtttatttgcatcagatgtgctggaattcatagaaatcttg

SEQ ID NO: 635917 - DNA, 73 bp, Homo sapiens
tttacaccactgggatgtaacagaggaatgatgagaagacagcagctgattacaagattttaggtggttcagt

SEQ ID NO: 635918 - DNA, 75 bp, Homo sapiens
tggctgtctggagcctggactggcagcaggccctgcaggttcatgtgtgcccagctgcccaaccccgtcctggac

SEQ ID NO: 635919 - DNA, 80 bp, Homo sapiens
catgagtgatgtggaggaaaacaacttcgagggcagagaggaatcattatagattctaaaaatatattttcccttctctg

SEQ ID NO: 635920 - DNA, 50 bp, Homo sapiens
cgttgagaagcttcgcttcacatacagtctcacagaaagttctccgctcc

SEQ ID NO: 635921 - DNA, 126 bp, Homo sapiens
cttaaacacctccaacggggatggctctgaaacagaaaccacctctgccatcctcgcctcagtcaaagaacaggtcgttgaggacttccacatggagattggcacaggaccagactcaagacacac

SEQ ID NO: 635922 - DNA, 75 bp, Homo sapiens
catggtgctcttcttcttcgagaattacaccggggtccagaaactgaggcttcttgaagagcttgaagacacttg

SEQ ID NO: 635923 - DNA, 50 bp, Homo sapiens
tatggcatagatcttgggaaaattgcggatgtgggctctcttgatgagaa

SEQ ID NO: 635924 - DNA, 75 bp, Homo sapiens
aaacatggagatgtaataactattattgatcgttccttcaggatttctctgcctcttccaaacttttcctccctg

SEQ ID NO: 635925 - DNA, 83 bp, Homo sapiens
gtggacagcgaagctgctgcggttcctgagccggaggtttgcgccgacaatgcagatcttcgtgaagactctgactggtaaga

SEQ ID NO: 635926 - DNA, 50 bp, Homo sapiens
atctgcgatcgagcctcggtcaaggagaggctgccatgggctccgtgggg

SEQ ID NO: 635927 - DNA, 50 bp, Homo sapiens
tatgaatctctgttccaaatgctttgctgagtctaaatggtgtttggctg

SEQ ID NO: 635928 - DNA, 86 bp, Homo sapiens
cggagctgggcgcggattcgccgaggcaccgaggcactcagaggagatctctgttgaggagctggcgcggaatctggtcatcaagg

SEQ ID NO: 635929 - DNA, 100 bp, Homo sapiens
cggcggggcccaggtgagaaaggcccacctgtgtcctggttgagggtctccagggttctttggggcccgagctgcagaaccttggcctgaaaatgctaca

SEQ ID NO: 635930 - DNA, 75 bp, Homo sapiens
gcagcgggactttattaccgctttaccaggctttctcctgtttctcagaggatttatcaattatgcaaaagttcg

SEQ ID NO: 635931 - DNA, 98 bp, Homo sapiens
tgcgaggagaactactccgtgacctggtacatcgccgagttcttgtttcctgaggttataggcgggtgtttgaggagtacatgcgggttattagccag

SEQ ID NO: 635932 - DNA, 101 bp, Homo sapiens
caggggagctgctccacatcaccgacatgaagggaacaggcatcatggactgtgcgcccaaggaaacttggatttaactggccagaagcaggtattcaaag

SEQ ID NO: 635933 - DNA, 97 bp, Homo sapiens
gaacagacacgggtgaatgctgctaaaaacaagactggggctgctcccatcattgatgtggtgcgatcggttatgtacgtgatctaaaaatccaaat

SEQ ID NO: 635934 - DNA, 80 bp, Homo sapiens
caagaacggcggtacccgggtggttaaacttcgcaaaatgagtggaatgttggctgtccgtgaaaaccgctacattgtcc

SEQ ID NO: 635935 - DNA, 90 bp, Homo sapiens
agaaaatctacaatttcttcgagacactcatataaagaggctggctatgtggctacccccatagctatggttcaggcagccatgactctt

SEQ ID NO: 635936 - DNA, 82 bp, Homo sapiens
ctgtcgctcctggtcggcgcgtggctcaagctaggtggtctgatgggtggagacctcacgtctggtgcaggcaccagtgcag

SEQ ID NO: 635937 - DNA, 85 bp, Homo sapiens
tttctcctcggcactgtattctttacctgcttcccaatcccactgatgaggatcagcccatggtatcaaggttacattggtgcag

SEQ ID NO: 635938 - DNA, 80 bp, Homo sapiens
gcggtgctctcagcccagctctaatgagcaacagtacactggcaactattcaaggacaatctctatgggaagcagaaggc

SEQ ID NO: 635939 - DNA, 100 bp, Homo sapiens
ggaggagccttctcaagaacagagtggtagtcgctcttctaaaacttttaaaccaaagaagaacattccagagggttctcaccagtatgagctcttaaaa

SEQ ID NO: 635940 - DNA, 100 bp, Homo sapiens
cttgtgcacccgttgcagtccttcagggccattcagcttctattacttccatacagcttggcatggtggaatggattgaacctcctaaacgagaacgcaa

SEQ ID NO: 635941 - DNA, 113 bp, Homo sapiens
gagggtctgaagttcacgactactagaaggggaggggagtggaaaggctctcagtgaaaaaggagctgttggacaaatatcttattcccaatgctacacaaccagaaagtaag

SEQ ID NO: 635942 - DNA, 100 bp, Homo sapiens
cggaggagtctcagagctgtcagaaaggaattgtagtcaacggtcagcttgttggtgccaagaagcccaacaatggaaaactaagcacctattttggaaa

SEQ ID NO: 635943 - DNA, 50 bp, Homo sapiens
gttcttcacccctacaccttggaaacggccggtttgtgggcgatgctgac

SEQ ID NO: 635944 - DNA, 75 bp, Homo sapiens
tttgatgagaacactgctctggatgatgcagaagaggagtcctttaggaagaacggaaagatgctgaaggatggg

SEQ ID NO: 635945 - DNA, 100 bp, Homo sapiens
ggatattgtaccacctttcagtgctttctctcctcaaggaatgccagagggttaccttcccgccaatgtagaccggagaccagccactctccagagaaaa

SEQ ID NO: 635946 - DNA, 101 bp, Homo sapiens
aagatcggccactacattctgggtgacacgctgggggtcggcaccttcggcaaagtgaaggagcatcctggccagaacaagccaaggagccaagacgagag

SEQ ID NO: 635947 - DNA, 50 bp, Homo sapiens
cctcaggacttgagtaacagcaacatgaataataataacctggatgcctg

SEQ ID NO: 635948 - DNA, 100 bp, Homo sapiens
gcctgctgctcctgctactaacccacctccccctggctctggggagtcccatacaatgcagatcttcgtgaagactctgactggtaagaccatcaccctc

SEQ ID NO: 635949 - DNA, 100 bp, Homo sapiens
agccgtgacatcctgggatattctttgttgagaggtggacacgctttgcctggaggatttgcatgcgtttattgcgcaggccttgtgcctccaaggaaaa

SEQ ID NO: 635950 - DNA, 140 bp, Homo sapiens
acagggggggcctgaggcactgcagaaagtgggcctgagcctcgaggatgacggtgctgcaggaacccgtccaggtcaaaatgcagatcttcgtgaaaacccttaccggcaagaccatcacccttgaggtggagcccagt

SEQ ID NO: 635951 - DNA, 83 bp, Homo sapiens
cagcaggagcctgttctcatcaccatggcaacagcctcccgcgacgatgcccctcaacgttagcttcaccaacaggaactatg

SEQ ID NO: 635952 - DNA, 75 bp, Homo sapiens
cccgccagacagcctgatgtgcagtggatgatgaacaacatgggtggtgatgaggatgtagatttaccagaagta

SEQ ID NO: 635953 - DNA, 74 bp, Homo sapiens
agacatttacgcggatgtcggcgaagagttcaaccaggtcttcatcctccaggtccacctttagcaagacctat

SEQ ID NO: 635954 - DNA, 95 bp, Homo sapiens
catcccggaagctgggaaatgatgtgttttcgcattataacaaggacctgttgacagagcactgcacagaagcttcattccaaaaagtgatatcg

SEQ ID NO: 635955 - DNA, 50 bp, Homo sapiens
ctggcacttatgtcctccctggattaataaagaactcttcagaattcctg

SEQ ID NO: 635956 - DNA, 116 bp, Homo sapiens
gccgagtcgaacggggagccgagctggagctgccgcggcgcagccagcaacgcacctcttgctttttcctccaaagtatgttatgttaagtttcgtgatccatcaagtgttggcgt

SEQ ID NO: 635957 - DNA, 75 bp, Homo sapiens
aacaacatttttttttggcttaacaaaacatcaaacggcatacaaatgcggcatggtggtggtggctgacaagac

SEQ ID NO: 635958 - DNA, 100 bp, Homo sapiens
tggagtggaaacgcttgtagggcttcaccagttctaatggcaagtctgtgtcatggtctgaaccaggtggaggacaggtgcccaagggacagcatatgtg

SEQ ID NO: 635959 - DNA, 90 bp, Homo sapiens
cggaccccgccgagtcctagcgcctggcctgcgcgccgctgcccgcgccacaggataaaagaatcagagtgtctcaacccttgacaagag

SEQ ID NO: 635960 - DNA, 100 bp, Homo sapiens
cacttcgtgcccgaaacgccgaatataatcccaagggaagacactgatcaaggtggcagaagctgaaaagcaactgggagccgcggagagggattttatc

SEQ ID NO: 635961 - DNA, 98 bp, Homo sapiens
atgaacttacgcagggttacatatattttcacaaggcatttggcagcactattgtaattaatcctgaaaaagataaaaccatggttcaagaattgctg

SEQ ID NO: 635962 - DNA, 100 bp, Homo sapiens
gttctcattttgtgtcctcccatcccattctcctcactaaccaaagcttcagggtaaatctgcagagaccagagaaagcacacagctgagccctgcagat

SEQ ID NO: 635963 - DNA, 101 bp, Homo sapiens
cggccgcagcgcaggcagcccagcaggatgccttccgcgccttccaccctgacctggaattcgtgggcaagttcttgaaacccctgctgattggtgaactg

SEQ ID NO: 635964 - DNA, 50 bp, Homo sapiens
ggtaaatgcacaattttctaaggtcaaaatgcagatcttcgtgaaaaccc

SEQ ID NO: 635965 - DNA, 75 bp, Homo sapiens
gatgtgcctcctggtgaagacaaggggggatatgtgatcaaagcatcagaagctcttttggtacaccagaaggcc

SEQ ID NO: 635966 - DNA, 82 bp, Homo sapiens
gcgggaggtgttcgagaacgaccccgagacgtaatctcaggggcgatataatcaatgaggtggtcctaaagttgctcaaggc

SEQ ID NO: 635967 - DNA, 100 bp, Homo sapiens
taatgttccaggacacctgccatcatggagggttatccagcacctggaggatacctgctacctgaccgcctctttttcgtcatggaatatgtaaatggtg

SEQ ID NO: 635968 - DNA, 82 bp, Homo sapiens
gtcggcggcgccctgcaccgcgcctcgcaaaaattcagaaggagctggcggacatcactttagaccctccacctaattgcag

SEQ ID NO: 635969 - DNA, 90 bp, Homo sapiens
caggccaagagggatccttcacccgtgtctgtgacaaccacgaacttgagtgtgtggtccttgcccaggatctcctcgttgcataaaatg

SEQ ID NO: 635970 - DNA, 100 bp, Homo sapiens
gtgaacccacgctgagccagcatactcatgcttactgcagagtgggtctgggcatctgctacgacatgcggtttgcagagcttgcacaaatctacgcaca

SEQ ID NO: 635971 - DNA, 100 bp, Homo sapiens
ctgggcggtgccggcgccggagacgatgccgttgttaatatggctccaaaagggccccctcctttcccaggagtccctctcatgagcacccccatgggag

SEQ ID NO: 635972 - DNA, 90 bp, Homo sapiens
cacactggtgacaactcaagagcaatcagtaccatctgttacatggacacagaacagtatgaagaagcagtacgagactatgaaaaagta

SEQ ID NO: 635973 - DNA, 88 bp, Homo sapiens
ggaaagtcagcatgattttcgaaccccggagtttgcttctggctgtgatgggtcggagattcctgatgaagtgaagctgattgggttt

SEQ ID NO: 635974 - DNA, 75 bp, Homo sapiens
atccccatctctccatatcacatgtcaactacttcctagaccagcacctggctgcagtggaagaaagaaagatca

SEQ ID NO: 635975 - DNA, 100 bp, Homo sapiens
cagagcctggagtctgcgaaggccgggacccggttccccggcccacagtgggggtgtgcaaacccgagagaactggctggagctctcaaacactgctgtc

SEQ ID NO: 635976 - DNA, 75 bp, Homo sapiens
accgtgtctccaatgacaaacgagatgtaaaagtgtcactgtcggagtttaagagagctgtgaaagtagcaacag

SEQ ID NO: 635977 - DNA, 78 bp, Homo sapiens
aagaaggcgctcttgttttgaatacgtagtctgtcctgttctttcaaaggtgtccatcgcgcttccttcactgccttg

SEQ ID NO: 635978 - DNA, 75 bp, Homo sapiens
gcgcgcatctggctgcagctctgcggggcgcaggaggcggtgcacagcgccaagaatttcgctaaggagtttgtg

SEQ ID NO: 635979 - DNA, 75 bp, Homo sapiens
cccagaagccacagctgctgcggcacatggaacagcatgtctccttcaaggtagctacagcaagctgggtagcag

SEQ ID NO: 635980 - DNA, 100 bp, Homo sapiens
atacaattacctgcacgacacatggaaattggactaaattaccagaatgcaggggagctttggttcggagacaggcaaaggagccatgtgtggagagcct

SEQ ID NO: 635981 - DNA, 87 bp, Homo sapiens
catccattatctcaagctcatcgacagggaaaacttcgtggacattgttgatgccaagatcagacactcctctaatttacaaagcag

SEQ ID NO: 635982 - DNA, 100 bp, Homo sapiens
ctcaaagaggccaagcacattgcggaagaggctgaccgcaaatacgaggaggttacccatgcagttgttactgtaccagcctattttaatgatgcccaac

SEQ ID NO: 635983 - DNA, 100 bp, Homo sapiens
ctttcccaaagtagccacaaatatcatgagggcgtggctgttccagcatctaacaggagagcttatggatggagaccaaacatccagatctggagtgccg

SEQ ID NO: 635984 - DNA, 95 bp, Homo sapiens
tttgttgtgaaggcgccggggcctagcgctatgcctgcggcggagactgcatcaggctctcggaggaagagcaagcaggccctgagggactataa

SEQ ID NO: 635985 - DNA, 100 bp, Homo sapiens
gtgaaaccaggcctgggctggagtgttacattcagttcctggactccgtggaggaacatatgcagcagaaaaaagaggaggaagaagttcttaaagaagt

SEQ ID NO: 635986 - DNA, 80 bp, Homo sapiens
ggaaccctggtcaccgtctcctcaggtggacgcggatctgtcaacatgggtaaaggagaccccaacaagccgcggggcaa

SEQ ID NO: 635987 - DNA, 100 bp, Homo sapiens
tggaagcccctgaataccttgatttggatgaaattgactttagtgatgacatatctgatggttcctacctggctgagttcctgctggagaaaggctatga

SEQ ID NO: 635988 - DNA, 96 bp, Homo sapiens
cagaggggagtcatcatgagcgatgttaccattgtgaaagaaggttgggttcagaagagggatgtggaagatgtcaagtttgtgatcaactatgac

SEQ ID NO: 635989 - DNA, 75 bp, Homo sapiens
ccacggcgtagcagaagccattccgacaatgatagcaggatcaggtgagctgtgtccagaaaaccaacgagaagg

SEQ ID NO: 635990 - DNA, 90 bp, Homo sapiens
gcctcggactccgcggccggcccggcgcggcccagcgccctcaggttatgatgtgattgctcaagcccaatctgggactgggaaaacggc

SEQ ID NO: 635991 - DNA, 98 bp, Homo sapiens
aggtcatgactttcatgaaggcgttagagctgatttcctttcctggatgaaaatgttgtctcctttctaaattctctgccgatttgggaaaaagcaaa

SEQ ID NO: 635992 - DNA, 75 bp, Homo sapiens
gttggacgctgccagtttgcacagcagcaggacactcatgaggaccatgatacttccactgagaatacagacgag

SEQ ID NO: 635993 - DNA, 100 bp, Homo sapiens
aaatagtcaatagtgctcagactggtagcttcaaacagctcacagttaagccgaaaactaaatgtgacccttacgtacttgagcatggagatgaagtcaa

SEQ ID NO: 635994 - DNA, 50 bp, Homo sapiens
ctcctatagcagtcatgggcgagggtgtggatgaatggaacatagctcgc

SEQ ID NO: 635995 - DNA, 50 bp, Homo sapiens
gctggtgtgcgctattatgtaagagaggagaatttgcgctttggcttgat

SEQ ID NO: 635996 - DNA, 75 bp, Homo sapiens
tgggagatgcttgtcttacttggctgttgcttctcctgctgctggggaaaaggtgttgacccgaatgatcagaaa

SEQ ID NO: 635997 - DNA, 90 bp, Homo sapiens
gatgacgtgtatggaaactcatcaggacggaagcacaggggccactcagagtcgcccgagaaggaaatcctcattgacgattcaatttgt

SEQ ID NO: 635998 - DNA, 100 bp, Homo sapiens
cgtcctcatggtggacaagaaactggtggtggttttcggaggcacagggactttgaacatgtcggggatcgccctcagcagactcgcccaggagaggaaa

SEQ ID NO: 635999 - DNA, 101 bp, Homo sapiens
ggcgggcgctgctgaaggagtctcgctgagctcgaggaggtggcgcgatggagggactggaagcttgtggagagactccagagcaaatacgagcaccaagt

SEQ ID NO: 636000 - DNA, 80 bp, Homo sapiens
caagagcatcacagccaaggaagccctcatctgcccaagtgggtgaattttctggagccaataaggaaaagcttgaagcc

SEQ ID NO: 636001 - DNA, 75 bp, Homo sapiens
tgaagaagtacctgagcaagaccggccgggaagcagcaaagtctctcgcgacaccctgtacgaggcggtgcggga

SEQ ID NO: 636002 - DNA, 115 bp, Homo sapiens
tcggagctggcatcatcttgggctactcctacaagaggccaaagaatgcgaagcaaccagagcgtgaagaaaagcgggttttgggtctggtgttgctgcgtggggagaacttggt

SEQ ID NO: 636003 - DNA, 97 bp, Homo sapiens
ctcagttaccgagccacgtcacgccaacaacaggggtaccaacaatgtcacttcacacgcctccatctccaagcagcaggcattaacgattttatac

SEQ ID NO: 636004 - DNA, 85 bp, Homo sapiens
gacatctgctttatatttctctcagaccattcccatcagtgagcattacagattagtgggatggtttggccatgaactcagcacc

SEQ ID NO: 636005 - DNA, 90 bp, Homo sapiens
actgactgggcaacatgttattcagcagaccatccgagagctgtttgatatgcccctggaggaaccttctagctcatccgtgccctctgc

SEQ ID NO: 636006 - DNA, 100 bp, Homo sapiens
atactctgcccaaccgcacggtcaccctaatcctagggaatcgggtggctgagctggaaaaaaaattaagaactctggaagtttctggtttgtggagtct

SEQ ID NO: 636007 - DNA, 97 bp, Homo sapiens
aggggattcaacttcaatttttctgcagtggctctgggtccagccccttacttaaagcttgtagagaactgtgtttgccttcttcggaacttatcat

SEQ ID NO: 636008 - DNA, 100 bp, Homo sapiens
caaaagttttgcattgaaaaagttggcaaagacacttggttaccaagaagccatacatggcagtatttggcagtcgtattcagagataaacccctggagc

SEQ ID NO: 636009 - DNA, 75 bp, Homo sapiens
gcttttccacaaccagtttataagtgctgttaaatatgtgacattaaaactaccactactatggaagtaccacta

SEQ ID NO: 636010 - DNA, 75 bp, Homo sapiens
atacacgcctcgacatgcgccagacgacagatgtgctggtgctgagctgtgatctgataacagacgttgccttac

SEQ ID NO: 636011 - DNA, 75 bp, Homo sapiens
gcattttggggcagaatacagagatatggaatcaggtgaccattgtgaggtagatattttgttctaattttccag

SEQ ID NO: 636012 - DNA, 82 bp, Homo sapiens
tggacacgcccatccttggacttcctgaaaatgacccaggtacctgccgtgggcagatctgagctttcttcttggacacccc

SEQ ID NO: 636013 - DNA, 97 bp, Homo sapiens
gtgtcccacttgttcgcggcctataggaaagaccacagcaagattctttcattcgtctcctcctagcctgggggaccaggctcgaactgaccctgga

SEQ ID NO: 636014 - DNA, 74 bp, Homo sapiens
tggctgccatccaccccagcctggagatccccaccactgaggcggctcccagctgcgttggcgacatggccgac

SEQ ID NO: 636015 - DNA, 75 bp, Homo sapiens
cgcaggttccctacacggtctcctgggtcaagacatcaactagtcaggcagtcttccgtctccagtctggcatct

SEQ ID NO: 636016 - DNA, 50 bp, Homo sapiens
ggctcttcaccatcccgttttccagcaagaagacttgcactatctgccag

SEQ ID NO: 636017 - DNA, 80 bp, Homo sapiens
gggaaccctggtcaccgtctcctcagatgtggacgagtgctcactagcagaaaaaacctgtgtgaggaaaaacgaaaact

SEQ ID NO: 636018 - DNA, 50 bp, Homo sapiens
cggccgtctccttaacaccgaacaccacattccacttcttccatctatta

SEQ ID NO: 636019 - DNA, 102 bp, Homo sapiens
aacttgatctgtgatgaatcagatgtcaaagacttagcttttaaattaaaaaggaagctattcaccattgaggaaatgggtcctgatgaatatgaagagatg

SEQ ID NO: 636020 - DNA, 73 bp, Homo sapiens
tgcgcttccccatggggctggcctgcggcgcctgggcgctctgaggccaggagacaagcttctcaagtcttta

SEQ ID NO: 636021 - DNA, 96 bp, Homo sapiens
ttaccctgacttcactaatcccacgatgagggcctggtgggctaacatgttcagctatgacaattatgagcttctagctccggacattcgacatga

SEQ ID NO: 636022 - DNA, 102 bp, Homo sapiens
aggagctaatccctgaatatctgagtttcaccaaaactcatgccaatgcagcagatcgcaaattgaaatatggatatttgtaccaggctgcgtgtttttcat

SEQ ID NO: 636023 - DNA, 74 bp, Homo sapiens
cgggaagaagattctcctgagatgtgccggaagtgccgcacaggggtgtccgcaatgttgccagtgtctgtctg

SEQ ID NO: 636024 - DNA, 100 bp, Homo sapiens
catcatccacagggacctcaagtaagactttgaccccgacgcaggcttcagtgattgccgcggatcagaagcctgagcactttggctcgagacaattaag

SEQ ID NO: 636025 - DNA, 74 bp, Homo sapiens
gaaaacatcgtggccctgtacgacttccagtgcccgaagtgacgaaaccaagtttaagccaaccaacggccgcc

SEQ ID NO: 636026 - DNA, 97 bp, Homo sapiens
ccatttggactccagtggtagctatggtataagaagagatttcataagtttgatgcagaccagaaaggctttattaccattgttgatgttcagcgtg

SEQ ID NO: 636027 - DNA, 98 bp, Homo sapiens
tttctttctgcggtctgaagacctcttcaatgaaatgaattggcagaagaaactgagaggttgggcccgaaggcatcctgcagaacggggctgtggac

SEQ ID NO: 636028 - DNA, 100 bp, Homo sapiens
cgcagatgatgccccctatgggagggccaccaatgggacaagaaacctatgagaatatcccaggccagtcaaagatcacattcctcttacaagccatcag

SEQ ID NO: 636029 - DNA, 83 bp, Homo sapiens
ccgggccctcacagaccccagagcggccatgagctggtgtgcagccgcccaggagggtaggagctgtggcgcggggccttcca

SEQ ID NO: 636030 - DNA, 117 bp, Homo sapiens
agacaaacagcccgcccgaccccgtcccgaccctggccgccccgagcggagcctggagtgtactaatggtcacttgatgtgcgctggctgttttatccacctactagcagatgcccg

SEQ ID NO: 636031 - DNA, 90 bp, Homo sapiens
cggggcggaagaccaagatcatcgagatggtgatgcaggttctgaatgctgatgccattgttgtgaagctgaactcaggcgattacaaga

SEQ ID NO: 636032 - DNA, 100 bp, Homo sapiens
cggaggtctcatctttgaactactgccggagcttctgccagctctttcgacgtgtagcagcagctttgccgggaatggaaagcacacaggacagaagcag

SEQ ID NO: 636033 - DNA, 100 bp, Homo sapiens
caaaacagcagatttcccaagagcagcggaaaatgatccagtcacaggtcgggtcacaaatcttcgaagagtgacatatgttgttttagatgaagcagac

SEQ ID NO: 636034 - DNA, 100 bp, Homo sapiens
ggcgggctgacctcatcctgccttgtgctcacagcttttgtcagaagtgtattgataaatgggaaactgaacagccaagactcctataacaattttacca

SEQ ID NO: 636035 - DNA, 101 bp, Homo sapiens
ctggagtacctgcagatcccaccggtcagccgcgcctacaccactgcctgcgtcctcaccaccgccgccgtgggcccaacatctgtaccacgcgaggtgtg

SEQ ID NO: 636036 - DNA, 51 bp, Homo sapiens
ccacacactgggaaacatcattaaatcgccattgaaactgctctggactgc

SEQ ID NO: 636037 - DNA, 90 bp, Homo sapiens
gtgaagtcctggcggtcatggacactctcgtctctgttgctgctcgagaggttggctatacagtgcgctttgatgatgtcacctcagaag

SEQ ID NO: 636038 - DNA, 100 bp, Homo sapiens
gagccacggacacggctgtgtttgatgtccggctgagtgggaagaccaagacagtgcctggataccttcgaatagggctgtaacagaagacaagtacgaa

SEQ ID NO: 636039 - DNA, 100 bp, Homo sapiens
gtcaagcaccatccacacttcctgacctttgcttgtgccatctgcccccatcgaccggtactggacaccctggccatgctgactgcccaccgtgcaggca

SEQ ID NO: 636040 - DNA, 74 bp, Homo sapiens
atttactacagcatgtgatttcaggtccatctgaactgtttactgtttgttcatcgattagcagaagagtccag

SEQ ID NO: 636041 - DNA, 93 bp, Homo sapiens
tgcagcgggagctggacggcgagcgcgagcggcgcgagaaagagtgcgccggtctcggggaaatgcccggttccttcgtgcccacggtcaccg

SEQ ID NO: 636042 - DNA, 100 bp, Homo sapiens
ccgccctgagtcactgcctgcgcagctccggccgcctggctccccatactagtcgccgctggagagatttaccagcatgagaattaagaaggagaaggaa

SEQ ID NO: 636043 - DNA, 82 bp, Homo sapiens
gggaagatcgcaccgcggacgcccgctgagcttggcgcacgggccgaccagggcgaagctgtgctcaggcccgggctggacg

SEQ ID NO: 636044 - DNA, 90 bp, Homo sapiens
gctagctggatcctctaggcaggagggagcaaaggagtttgctgctgctctcaccgctgagcggataaagaccccaccaaaacgtccagg

SEQ ID NO: 636045 - DNA, 83 bp, Homo sapiens
cgctgatcttccagctcccctcacccaacgtcgttaaaatgtttattggaggcttgagctgggatacaagcaaaaaagatctg

SEQ ID NO: 636046 - DNA, 51 bp, Homo sapiens
cactgtttctcatcatcaccaaacgatcaggatcctcatgaccagccaaag

SEQ ID NO: 636047 - DNA, 83 bp, Homo sapiens
actctgcctcggggacgaaagcaggcacctgaatggacagaagaggacctcagccaactgacaagaagtatggttaagttccc

SEQ ID NO: 636048 - DNA, 100 bp, Homo sapiens
aacggccaagaggcagacctaggaaatgggcagcggaggaggaaatggcaggtcctaatcaactctgcattcgccgctggactaccaagcatgtagctgt

SEQ ID NO: 636049 - DNA, 75 bp, Homo sapiens
tacagatagtagttcctcttctacagagtcctcccagagttcccaaggcctcaggagtgcaagtagctgatgaag

SEQ ID NO: 636050 - DNA, 100 bp, Homo sapiens
ccccggaggaggggaccgggggcttcgcctacgctcactccccaacccatcccaacattgacatgctatctgtggacaaatagcagttctcagaatctag

SEQ ID NO: 636051 - DNA, 82 bp, Homo sapiens
ttcttcaacatgctcttcgtctgcctgggaggggtggctgtatccctgtcccacatcagaaactgatcctcaggacttgaag

SEQ ID NO: 636052 - DNA, 90 bp, Homo sapiens
gatttttagaactccacatttgaggtggtgatctttgtgaagtctgtgcagcggtgcattgccttggcccagctactagtggagcagaac

SEQ ID NO: 636053 - DNA, 74 bp, Homo sapiens
ccacctccgaaacccctcggcggcgttcttctgtgtggcccgcctgcagccgtgctggtatagaggactctaag

SEQ ID NO: 636054 - DNA, 100 bp, Homo sapiens
gatgtgtcaccttgtcccgctgcagccgagatgccgggggagcggggccttccacaccccctccgtgggtgtgtgagccaaataactatcggaccatgca

SEQ ID NO: 636055 - DNA, 100 bp, Homo sapiens
gttcagactttccgcagagaccatgatcgtttctgggtcctagctgctcaccctaaccttaacctctttgcagcaggaacatgcttaccctgctgatgaa

SEQ ID NO: 636056 - DNA, 100 bp, Homo sapiens
cttccggcggccgaagacactgcgactccggagacagcccaaatatcctcggaagagcgctcccaggagaaacaagatatttgaaagaagatatggaagc

SEQ ID NO: 636057 - DNA, 90 bp, Homo sapiens
agcaaaggagtcagggatggctcttcctcagaaaaattctgtaggccgttggaaggaagctaccataccaggccacttaaactcctacac

SEQ ID NO: 636058 - DNA, 115 bp, Homo sapiens
cagaaaccagaaactttaaatcttgagaaaagaagattgtctatcatgaaggaggtgaaagaactcttttcttctttgggagtcgaatgtaatgtcttggaacttgatcaagttg

SEQ ID NO: 636059 - DNA, 75 bp, Homo sapiens
cctgcccctgatgctctgtatcccaacggggttcacccctacccagctcggtagcgcggcgggcaaggcaggcgc

SEQ ID NO: 636060 - DNA, 83 bp, Homo sapiens
caaactttacaaatccatgaagggtggcccagttgaaatccttcccttcctctaccttggaagtgcctaccatgcatccaagt

SEQ ID NO: 636061 - DNA, 119 bp, Homo sapiens
aggctgctaccgcccctccgcttccagacattctcagctgtcagctgactgtgatgccccactggcctctgccttgcctaggtcatccttcagcagctcctcagagctgtccagcagcc

SEQ ID NO: 636062 - DNA, 83 bp, Homo sapiens
gtcagagcagcgcacgcatgaagctgaattgggctgtggcagctggagccgaggatccaggatattatcaactcactggtaac

SEQ ID NO: 636063 - DNA, 75 bp, Homo sapiens
gtctaccacctgcagcccagtgggcggtttgtcatcggaggtccccaggtcccttctcataccgtcgtggcccga

SEQ ID NO: 636064 - DNA, 75 bp, Homo sapiens
gcctcctcctgctgctactgtgtccagcgcagcatttgaagacacttcgtcacccttgcttgctaagatttttat

SEQ ID NO: 636065 - DNA, 124 bp, Homo sapiens
acaggcaaactgtcagaaaagagtagcctgggctgtctggaaatctgaggtgtcatggagaaactccagctgggcccagagattctgcagcgggaaaatccaaggcttatttatgccaggctga

SEQ ID NO: 636066 - DNA, 74 bp, Homo sapiens
ctgctgcctctgtcactcctggtgaccagcattcaagctatctcacgtgagagggcagtggaactccttaggaa

SEQ ID NO: 636067 - DNA, 82 bp, Homo sapiens
aaactctttggatgattctgccaaaaaggtctcagatgatgataaagaaaagggagagggagctcttccaactgggaaatcc

SEQ ID NO: 636068 - DNA, 74 bp, Homo sapiens
gcagatctactactcggacaagtacttcgacgaacactacgagtaccgcccaggagttaaagtcactgtttgaa

SEQ ID NO: 636069 - DNA, 97 bp, Homo sapiens
acactgtaagaaggtcattccgcactttactgctactgctgatgccttcaaagatgaccgaaagtccaagctctagcttgtcagcaagactgttgca

SEQ ID NO: 636070 - DNA, 82 bp, Homo sapiens
ttcagcagacagcgccatcatgaatccagctagcaaagtaattgcactgaaaggttatggaggttttgatgactatggtggc

SEQ ID NO: 636071 - DNA, 98 bp, Homo sapiens
cgggagggggccctgagcctcctgcaacacctgcggcctcactgggacccccaggaggtgaccctgcagaactattgcacagccaaaacattgtatat

SEQ ID NO: 636072 - DNA, 92 bp, Homo sapiens
ggttcattattccaggatgcagtccctgaccttagatgtactgggaacatctgagctgctgtctgtggattctagccttgggggtctttcac

SEQ ID NO: 636073 - DNA, 90 bp, Homo sapiens
aacaggccagttcgttggatggctcttgaaagtctggttaataacgagttctctagcgctagtgatgtgatcattgagactgaaaatatg

SEQ ID NO: 636074 - DNA, 82 bp, Homo sapiens
tttctcccttgatccgggagtctttccactgggatagagggaggaatcagcagcttggaaattcaagcacgtgatctggcgg

SEQ ID NO: 636075 - DNA, 74 bp, Homo sapiens
atcctgcgggtgcctttgaaaatcaacgacaacttgagcacaggtgatttgatgaaggctgctgcaggagagtt

SEQ ID NO: 636076 - DNA, 100 bp, Homo sapiens
agcagtctgccagacaatagagcatatgggtgtgaaatctaagaatcccctgccaactcttgagggctcaatccagaatgttgaattgaagtactgcagc

SEQ ID NO: 636077 - DNA, 100 bp, Homo sapiens
attagagggtggagatgaagctgaagatcttacaaagaaacttcttgatgaacaaggattattgaacatggggaaggaagaggcctcacttgaggaagtg

SEQ ID NO: 636078 - DNA, 85 bp, Homo sapiens
atcaagaagatcttcgagttcaaagagaccctcggaacattaatcctaccatatgaaagatttattaaaggagaagaagataagc

SEQ ID NO: 636079 - DNA, 96 bp, Homo sapiens
agagtaaaagttgtttctggaattgatctcgccaaaaaggacatctttggagccagttgcctagacctggagcagtgttctcttaaggtactggag

SEQ ID NO: 636080 - DNA, 74 bp, Homo sapiens
ctcagacctgccaatttaccagagataattgataacaccctgtaacagctgactcaaactggaggattataagg

SEQ ID NO: 636081 - DNA, 50 bp, Homo sapiens
ctctaacactcatcttcaaaagactgacatgaagagtatttctggagaag

SEQ ID NO: 636082 - DNA, 83 bp, Homo sapiens
ccggtgccggcctagcgtcctggaattacttcaatcaaggaaattgcaaagaagattctttggcaagttatgaattgatatgc

SEQ ID NO: 636083 - DNA, 74 bp, Homo sapiens
attttatattcatgaagaagaagagagtgtgctctgtaaagaaataaagacggcaactctgtaccctggtgtgg

SEQ ID NO: 636084 - DNA, 95 bp, Homo sapiens
cccggttccccggcccacagtgggggtgtgcaaacccgagagaactggccaaatgatttctcagtatcactaaaagcacaagggaaaaacaagca

SEQ ID NO: 636085 - DNA, 75 bp, Homo sapiens
ttcagatcactgtcaatgggaccgttctcagctccagtggaaccagcttgcctacatgtagcctgtgttgtacag

SEQ ID NO: 636086 - DNA, 75 bp, Homo sapiens
gcctcgcgctgcgagctatgagatgatgaagaacgagagcttcaaatggatcctgcagactatggaaagcaacat

SEQ ID NO: 636087 - DNA, 100 bp, Homo sapiens
caagctaattacacctcctcctccaccaccctcaccagaaaggtctccatttctggaattatcccagtttgcaggttaccagttatatgacaatgaggag

SEQ ID NO: 636088 - DNA, 82 bp, Homo sapiens
gacgtgcaacaaagtgcgatggctttatcctgtggataaacgcagagtgaacgagtttggggagtcctacgaggagaaggcc

SEQ ID NO: 636089 - DNA, 51 bp, Homo sapiens
ttaggagaaagttgctgaaggcaggagggctatagaatgtgctgtccatac

SEQ ID NO: 636090 - DNA, 96 bp, Homo sapiens
catctgtagctgtcgtttggtttgatcttgttgactatgaggaagttctaggtcattcaatattaacagggttgcaactcaggctgtagaagatgt

SEQ ID NO: 636091 - DNA, 101 bp, Homo sapiens
gcaacaattagcaaagcgcttctgtcaatatgtggtaaaacaatcagaactaaagggcactttcatgtacttccctttgctgtaaacaatgtcaagaaaca

SEQ ID NO: 636092 - DNA, 50 bp, Homo sapiens
tgtggaatcctgggccttcattggtgtagaatgagccaaggagactcaaa

SEQ ID NO: 636093 - DNA, 88 bp, Homo sapiens
tcgcgtcgcatttggccgcctccctaccggacctgaaggagaagaaggagaaggtggaggagaaggcaagccggaaagagcgaaagaa

SEQ ID NO: 636094 - DNA, 83 bp, Homo sapiens
aagactgttccaaaaacagtggataattttgtggccttagctacaggagagtggccaatccgccatggtatagttgaagattg

SEQ ID NO: 636095 - DNA, 83 bp, Homo sapiens
aggaagaaactcttccagcattacatatagagcttgatgtatgacgccgtgcccatccagtccagcgtggtgttatgttcctg

SEQ ID NO: 636096 - DNA, 75 bp, Homo sapiens
ccccgtcctcctctgactccgagcccgaggccgagctggagagagaggctacgactggcaaagatgagggaggct

SEQ ID NO: 636097 - DNA, 95 bp, Homo sapiens
ccgggaggaaggaacgaggcaaggagctaaagcagcgtgcgttcagccctggggaaagatgaatgggagggctgattttcgagagccgaatgcag

SEQ ID NO: 636098 - DNA, 74 bp, Homo sapiens
cagctggcacccccaccctccaagctgcgaggccgccgtggctctcgaaggctggacatccgtggcaaacttta

SEQ ID NO: 636099 - DNA, 100 bp, Homo sapiens
tacagatattatgaatacaaccatgatctcttccaaagaatgccacagaatcaggggaggcatgcttcaggccggaaggtggtggtcgtacgctgtgaag

SEQ ID NO: 636100 - DNA, 74 bp, Homo sapiens
agcagtaagggactgagctgctgtgtttaactgctgaagagatcttttcccttcatggcttttcaaatgctacc

SEQ ID NO: 636101 - DNA, 75 bp, Homo sapiens
acgaaacttccctttggggagttaagttttccaggatgctgtcctcttccataatactatttattacaacctctt

SEQ ID NO: 636102 - DNA, 75 bp, Homo sapiens
cgcggtggcagtgcaaaaggctggcagtacagagaatttgtgaaaaacgcatgggctgatattgaacgcttcaaa

SEQ ID NO: 636103 - DNA, 75 bp, Homo sapiens
ctaccaatcgtgaaaactatattcacagaccccttgttgaaatgggacagttggcagcggctctgatgagcccga

SEQ ID NO: 636104 - DNA, 100 bp, Homo sapiens
ttacatgaactggttcatcattgcagaatttatagaccaggaagctgactaatcatttggaaggaacatccattcaactctcatttacagatgtggaacc

SEQ ID NO: 636105 - DNA, 118 bp, Homo sapiens
ggaggagaacgggatcttcgagctgctgcggacactgcgggagcaggatgatgagcttcgcaaaaatgtcacagatcctaatgtggctcttacttttctggaaaagactcgtgagaag

SEQ ID NO: 636106 - DNA, 100 bp, Homo sapiens
ccctggatgggagggcgaccactgcacaattgtctgccatgagtcctgtgcaggttgctggggcccaacggagaagcactgcttggcctgcagagatccc

SEQ ID NO: 636107 - DNA, 75 bp, Homo sapiens
caactacgctgtgcacgagggtctcggcctcgcggtgcagaataaatgggatgccggaagtgcaagacatgaaat

SEQ ID NO: 636108 - DNA, 100 bp, Homo sapiens
gcacaaggtcttccagtttctgaacctagaccttgtgccggagccgactactggagatgacagtgatgctgccacctttaagccaactctccccgatctg

SEQ ID NO: 636109 - DNA, 75 bp, Homo sapiens
ctgggccagaggcagaaaacggacggaagaaaaggtctggccggttgaaaggattgttgacaaaaggaaaaataa

SEQ ID NO: 636110 - DNA, 97 bp, Homo sapiens
ggaagtgtacaacttccccgcaggcggcgtgggcatgggcatgtacaacaccgacgaggtggacccaagtggagagattgtggaactggcgaaaggt

SEQ ID NO: 636111 - DNA, 100 bp, Homo sapiens
tgctctcccgcctgaaggcaccttggccaggtccccgtccattgatagcattcagaaagatcccaggtgttgacttcaaaatcaaaactgtagagctaag

SEQ ID NO: 636112 - DNA, 83 bp, Homo sapiens
ttttgaaatcgacacacaaagaatagagttgagcctgtgggacacttcggtatggtttgaagtggtgaacatggatttttctc

SEQ ID NO: 636113 - DNA, 98 bp, Homo sapiens
aggcggaaggcggcggaggcggcggtcgccccggggctccggcggcgggcaaacagaccttgctgactgaaggcaaagactcctccatcccacctgcc

SEQ ID NO: 636114 - DNA, 97 bp, Homo sapiens
gtagctgggatgttagggctcagaactgtagtgaaatgtagtattgccaagtcccaagccctctacagtgcccaaagagggctgaagacaaacaatg

SEQ ID NO: 636115 - DNA, 50 bp, Homo sapiens
gcagtgaccccgctttcctcacgcccagacaagagaacaatgccctggac

SEQ ID NO: 636116 - DNA, 75 bp, Homo sapiens
ctaccaatcgtgaaaactatattcacagcttcctggggttgaggcatgtgaaaattataccttccgatacggccg

SEQ ID NO: 636117 - DNA, 101 bp, Homo sapiens
gttgttccagaggatcgctgcaaatctccaacctctgtggtccactgtaggtgtgccaagtgtttctgttatcctacaaagcgaagaataaggaggaggcc

SEQ ID NO: 636118 - DNA, 147 bp, Homo sapiens
gtggaccgagtggtcttgctgtatgatgaacatggagaacggagagataaattctccaccaaaccagctgacatgaagttgctgatagtccaactccaccgccaccacctccaccagatgacattcccatgtttgatgactctccac

SEQ ID NO: 636119 - DNA, 100 bp, Homo sapiens
tgaagagaacaagacttggattggaagattttgagtccttaaaagtaataggcagaggagcatttggtgagggagacagacgatgctcacccagtcagta

SEQ ID NO: 636120 - DNA, 82 bp, Homo sapiens
cgaaacctagccccggacgagaagcgcagcaacgtgcggtgggaccacgagagcggcaagttaaagtcttcagagccctgta

SEQ ID NO: 636121 - DNA, 99 bp, Homo sapiens
tggaaaggccttcactgcacagaattccttgtgtggatatcagatccggatggaatctcgagcttgtgaatctaccaggttactctattgtacaacagg

SEQ ID NO: 636122 - DNA, 90 bp, Homo sapiens
cggctggggttccctcctccgtttctgtatccccacgaggtgtgggaggtgctgaaccttttctggccatgaaccattataaaatcccaa

SEQ ID NO: 636123 - DNA, 82 bp, Homo sapiens
cccaagaagtccgagacacgcggtgaggcggcgacgggctccgggtgcacattcaggttcccgagcacaaacatcaagataa

SEQ ID NO: 636124 - DNA, 90 bp, Homo sapiens
gacaaggaagatgagctgtcctttcaggaaggagccattatttatgtcatcaagaagaatgacgatgggtttgtgtttagtgaatcagag

SEQ ID NO: 636125 - DNA, 75 bp, Homo sapiens
cctagccagactcagggatcaaagagcaaacagattcagtggcctgcattggattgttaaaatgagtcttcggaa

SEQ ID NO: 636126 - DNA, 112 bp, Homo sapiens
tggtgaagaaaaatggaacttgctgtattgctgacctgggcctggctgttaaatttattaggtttgacagtgctctggaagacctacctaagagtggacctcaccctcctgc

SEQ ID NO: 636127 - DNA, 100 bp, Homo sapiens
cttcgctcacctggatgacaacgagaggaggtgttaagtgtgatgcttccataatacatttggatgctgtcagctaagttcacttctgaactaaggggtt

SEQ ID NO: 636128 - DNA, 74 bp, Homo sapiens
aattttagggtcctttatatagaagggagagtaggcttaggaaaggttgcggagctggatgtaacagtggtggc

SEQ ID NO: 636129 - DNA, 74 bp, Homo sapiens
tcatcaccaattttatgcgaacccgggaagaagccaacttctctttgcctgaaaaatgcgactatatggatgag

SEQ ID NO: 636130 - DNA, 82 bp, Homo sapiens
atggaaacctggtctcactgggagccactgggatcgaagaccggctgcaggaaggagttccagatacgattgccactctgcg

SEQ ID NO: 636131 - DNA, 99 bp, Homo sapiens
ggcccgggccggctgcatgccgcctcctatctgcccgccgctcgcgccgggcccgtggccggatgagacaccaattattgcggtgatggtggccctgtc

SEQ ID NO: 636132 - DNA, 73 bp, Homo sapiens
gtgactccccgccgctcccgggggccgtgacgactaaatgtgttaaatgggcttgccaacaatatggatgatt

SEQ ID NO: 636133 - DNA, 100 bp, Homo sapiens
tggacttcaagaaacattgaagaaactgcaaagaggacatagttaccatggtcctcaaattaaagcattcctctgaatattgatttgctgaatagcccag

SEQ ID NO: 636134 - DNA, 100 bp, Homo sapiens
ctatccttccctgctgttttgacctgtgtagggaatggtacctggagtggtgaagtaccgcagtgcttacgagaaacctcaattatttttccaatgctta

SEQ ID NO: 636135 - DNA, 100 bp, Homo sapiens
gctttccagagggcagtgtagagtttcttgcagaacataaattattaggaaacattaaaaatgtggccaagacagctaacaaggaccacttggttacagc

SEQ ID NO: 636136 - DNA, 75 bp, Homo sapiens
cccgggatttcgatctggacctggcctggcggatggcccactgcgtgaccttggttcagctgtccatttcctgtg

SEQ ID NO: 636137 - DNA, 82 bp, Homo sapiens
tctcgggagaagcagcgcctgttcccggggcagatccaggttcagagaggaggttcagatgagcccctgctgacttgagaga

SEQ ID NO: 636138 - DNA, 100 bp, Homo sapiens
cagcgacggagtctacgccatcgtggccacgcttctcatcctggacatctggtgcgtgctctggaggaggccaacgccgacctggaagtgaagatccgtg

SEQ ID NO: 636139 - DNA, 83 bp, Homo sapiens
ggcgcccggcctcccgcccgccgcgctccagatgaagtgtgagcactgcacgcgcaaggagcccagcagccggggccgcccta

SEQ ID NO: 636140 - DNA, 100 bp, Homo sapiens
tggagccccccaggccccagtagggtagaactgttaccattaagttgaagaatgtgaattttgaagtaaaaactcgtgcatctacagtttcatctgttgt

SEQ ID NO: 636141 - DNA, 99 bp, Homo sapiens
gacctggccagcgctgctggcgggcgttaggccatccgggtgacctgcataggttcctgcggggtctccaacaaggctaatgacacagcgtgggtagtg

SEQ ID NO: 636142 - DNA, 100 bp, Homo sapiens
aaagtggcagaagatggttccattattttggatgaagaaagaattggcagagggggtcgatttgggaggaaaggtgtggctataaactttgttactgaag

SEQ ID NO: 636143 - DNA, 75 bp, Homo sapiens
agaaagagacttttttctaaagaatattacaggaatgaagaactgttgcctaattggaaagtgccagcattccag

SEQ ID NO: 636144 - DNA, 51 bp, Homo sapiens
cagcctcccaggtagctgggattacagatggagtcctgctctgtcacccag

SEQ ID NO: 636145 - DNA, 75 bp, Homo sapiens
gacgacgcgctcaaccagatcgcgcgggagcaaaagctggcaggctgacagaggcggcctcaggacggaccttct

SEQ ID NO: 636146 - DNA, 82 bp, Homo sapiens
agggaaatcgggaagagaacacgggaactgagtatgattgccagtagaaagccaacagacggtgcttcctcatcaaattgtg

SEQ ID NO: 636147 - DNA, 75 bp, Homo sapiens
cttcttccagaattacaagtcattcacaatagtttaattggttggggtcagataagaagaggagtgacaatcaag

SEQ ID NO: 636148 - DNA, 98 bp, Homo sapiens
atggcattcctcagggaatactttgagaggttggagaaggtgacaaaatatctgaacagaagaggacttaggagagatctgaactccagctgccctac

SEQ ID NO: 636149 - DNA, 82 bp, Homo sapiens
gactgtggtgaggacagtaactctctccaccaaacaagaaactagaaaaactgcttttggaattatctctacagtgaagaaa

SEQ ID NO: 636150 - DNA, 83 bp, Homo sapiens
agagaccctctggttatagaacttggccaaaagcaggtgattccagcttactgcagagtgggtctgggcatctgctacgacat

SEQ ID NO: 636151 - DNA, 100 bp, Homo sapiens
agccttcaaaagcagtgcaactggctcagtattcacagggaaagctgtgaggtttgcagtcctgatgtggctcctgacctacgttggcgctctcttcaat

SEQ ID NO: 636152 - DNA, 100 bp, Homo sapiens
gttttgcatctggtgtgcaatgtgaagagtccttcaaaaatgccagaaatcaacgccaagaaggacagaataacgggctcccagattcacaagccccacc

SEQ ID NO: 636153 - DNA, 100 bp, Homo sapiens
cagcgatggtgcccggcgaggagaaccaactggtcccgaaagaggtgtgggccatgtttgaggattgccccagcattcagttctatgagtaataaatatc

SEQ ID NO: 636154 - DNA, 136 bp, Homo sapiens
tacagtgagattctgcctttcaggatattgagcatcatgacctagtgtccactgagatatggtgtcatggagaaactccagctgggcccagagattctgcagcgggaaaatccaaggcttatttatgccaggctga

SEQ ID NO: 636155 - DNA, 100 bp, Homo sapiens
agtgtctgctgatgaagacctcaaactttctgatcttttaaaatattacttaagagaatctcaagctgctaagcaaagaatggccgagtggattctgagg

SEQ ID NO: 636156 - DNA, 116 bp, Homo sapiens
gcttttcctaaaaggattgtacaccttagaagtgcttaaggaagagtgatgaagctccagccagagcagctggactgtggagctgctcacctgcagcacccgctgtccatcctgca

SEQ ID NO: 636157 - DNA, 75 bp, Homo sapiens
gaaaagcatcatcgatcagtatgagctcagagaggaggaactgtggctgcaccatctgtcttcatcttcccgcca

SEQ ID NO: 636158 - DNA, 100 bp, Homo sapiens
ggacacttttcttcagaagctggtcgccgccggcaggttgtttttcaccattcagaacattgcctgaagcaggtccaccatgccgttagtaacgaggaac

SEQ ID NO: 636159 - DNA, 80 bp, Homo sapiens
ccacactccaggaatgccagtgcatcttttgcacagctatgttctcaaatagtgatgaagctgtaatcaataaaaaactt

SEQ ID NO: 636160 - DNA, 51 bp, Homo sapiens
ggatctgcaagctgccaggaagactccagtcccctttacttggtaaatcac

SEQ ID NO: 636161 - DNA, 50 bp, Homo sapiens
ctggactcttttggttgtagtgggcattgtgaaatcccctcttgctggag

SEQ ID NO: 636162 - DNA, 100 bp, Homo sapiens
ctcgaggatctcaagttctgtgaaagtaacattgaaagtttgaatatggaactccagcaactaagaggtgaccagtatgcactgaagatgaggtttgtgg

SEQ ID NO: 636163 - DNA, 75 bp, Homo sapiens
cacggaggaggattttgggaacacatcaggccgtctctgtttgaacaagtccgaggaggcaaacaaagccttctc

SEQ ID NO: 636164 - DNA, 100 bp, Homo sapiens
gatgactccggatattctaggatcttccggagctgccgtgcatacctgtgtgaaagcaaccttccacctccagaacctgggtatcaacccagcaaacatt

SEQ ID NO: 636165 - DNA, 83 bp, Homo sapiens
cggctgtcaagctggcgcgccagagcggcatcgagatatggatcagaaactttcgaagttggtagaagagctcacaacttcag

SEQ ID NO: 636166 - DNA, 75 bp, Homo sapiens
tagagttgagcctgtgggacacttcggcacaggaagtcctggagaacctgaaggaccgctggtaccaggcggaca

SEQ ID NO: 636167 - DNA, 75 bp, Homo sapiens
gaagatttacaaaagaaaaaaaatgaccttcggtatattgaaatgcagatctccagtctatgtgctgaagaagca

SEQ ID NO: 636168 - DNA, 100 bp, Homo sapiens
gcttgctgtactgtattttaaacatggaattgatcgctactggagacgtgtagcacctcaattgggaaaatgaggtacgttagtgttcgcgattttaaag

SEQ ID NO: 636169 - DNA, 118 bp, Homo sapiens
ccgcagtatcatgctggccaagaagatcatcattaaggacggaggcacgtcgtgagatggagaataaagaaactctcaaagggttgcacaagatggatgatcgtccagaggaacgaat

SEQ ID NO: 636170 - DNA, 101 bp, Homo sapiens
gtatttgaagtctgtgtcaaacatccatatcataagtggaattttggagatattcaaaggtcagatgtaccaacagtaccagcaacaggccggctatggtg

SEQ ID NO: 636171 - DNA, 83 bp, Homo sapiens
gtgcagacgtgggccttggcatggtcagtgcacgcacagcgccaggtgaaaggtgtagcagtcactcggcctacacccacagc

SEQ ID NO: 636172 - DNA, 100 bp, Homo sapiens
tggctggggaaaagggaagtgaaaagagatctgttttcagatacaagtactggttgaacctgaccacttcaaggttgcagtgaatgatgctcacttgttg

SEQ ID NO: 636173 - DNA, 75 bp, Homo sapiens
gcactctctaaaggagcaacagtttacagcccttccagatacagctaccaggcatttgcaagtaaaatcactggc

SEQ ID NO: 636174 - DNA, 100 bp, Homo sapiens
atcatgcttcagcagcagaggaagaaacaagagagctacagtcgttagcggcatggaatgcaacttgcaaaaactggctggcagcagaggctgccctgga

SEQ ID NO: 636175 - DNA, 98 bp, Homo sapiens
atgcagcaccaaggaccagcaattcaagatcaactcactatcctgaaggtccattctcccaagaagaggggacagaaagacagatctatttgtaagaa

SEQ ID NO: 636176 - DNA, 75 bp, Homo sapiens
aaaaagaacgaagaaaagccaatcgtgcagaaaatccaggctcacgtgatggttctatgggactctgggaggtga

SEQ ID NO: 636177 - DNA, 101 bp, Homo sapiens
cggcgtacacggggcaggtgccttacaactacaaccagctggaaggcagattcaagcagctgcaaggaaactgactggacattctttccacatgggctata

SEQ ID NO: 636178 - DNA, 97 bp, Homo sapiens
tgcattggaatcgctgaaccgtgcagtgctcgctgccatggatgccaccaagctggttgctccttgagggcaggacagttcttatggctttatccgt

SEQ ID NO: 636179 - DNA, 100 bp, Homo sapiens
agaactgcagcattgcagccgccaagacggtacagaaactaatgcggaaaaagcaattagacgtagcagaatttagcatctattgggatgtcgattgcac

SEQ ID NO: 636180 - DNA, 83 bp, Homo sapiens
ccgaggaaaaggaatcgtatcgtatgtccgctatccagaacctccactctttcggatttttagactctgaggagcagttggag

SEQ ID NO: 636181 - DNA, 88 bp, Homo sapiens
ctaccgagaagctgccacaaaccaggccaagatccacgctgacgcagagcggaaggaggtgaaaggtgtagcagtcactcggcctaca

SEQ ID NO: 636182 - DNA, 80 bp, Homo sapiens
tgccgaggaagcgtgcgtccctggcgcttccttcttctcttccggcggagaggttgctactggagatatagccactgaac

SEQ ID NO: 636183 - DNA, 100 bp, Homo sapiens
agggaccagcagttactgggaaggaactttgctgccacaatacctcggcccttctcagttcgctacgacccatacacccaaaggattgaggtcttggaca

SEQ ID NO: 636184 - DNA, 100 bp, Homo sapiens
gtcctggatcttctggggttccctatgcaaatgccaaaggaattggttatccagttggtgatgtatattggccaagtggccaaggatgtcttgaagtggc

SEQ ID NO: 636185 - DNA, 75 bp, Homo sapiens
tgccaggctggtatcccagggctctgaggtcacggtctagatcacattctcgatccagaggaaggcgatactctc

SEQ ID NO: 636186 - DNA, 96 bp, Homo sapiens
tgccctgccacccaagagaatgctgggaggagccgaggaggtgctgctgctggcccggcggacggacctacggaggatctcgctggacacgccgga

SEQ ID NO: 636187 - DNA, 98 bp, Homo sapiens
catgggcatgtaaggtgcgcggagggactgcaccttctccatcaggtgcagaaggaagctgtggatcggaaaaggaccacttttattctgatgatgac

SEQ ID NO: 636188 - DNA, 100 bp, Homo sapiens
ttgaccttgtgaaccatttcaagtgctcttgcccaccaggcactcggggttcccagtctaagtgggtgactttccaagatagaggcagatcatttctccg

SEQ ID NO: 636189 - DNA, 98 bp, Homo sapiens
ctgagtggggcgctccgcttctacgacagatccgacatcgacgcagtctacatcggcttcaccaccgaccctcggatggcccgctcctccccctaccc

SEQ ID NO: 636190 - DNA, 82 bp, Homo sapiens
caacaccaccatgcatgttatgaaagatctccttccagaaaccacctaccgagtctccgggaccattatggcagtcaagtgg

SEQ ID NO: 636191 - DNA, 75 bp, Homo sapiens
ccggcccgcgggtctacttcctcaaagatagcctgggctggaagctcttctacgtcacaggctgcctgtttgtgg

SEQ ID NO: 636192 - DNA, 82 bp, Homo sapiens
acgccagccgcaccatgccgctcctaagcctgcacagccgcggcggcagcagcagtgagagctggattactgggccagttac

SEQ ID NO: 636193 - DNA, 50 bp, Homo sapiens
ccgactgggctacaaggccaagcaaggtatgtgcaagaggtgaaataatt

SEQ ID NO: 636194 - DNA, 98 bp, Homo sapiens
ggatcgccgtataccgccgggttttctcccaacgtcaggcccgatggctcggcttccccaggcgttggagaccagggccagccctggccacaccccag

SEQ ID NO: 636195 - DNA, 100 bp, Homo sapiens
aaaggcaattgaaaagattgatgatgttcttgagttgtacatgggaattcgagatattgatttagatgagagtccggagtgttgtcatgtgaagcctgcc

SEQ ID NO: 636196 - DNA, 98 bp, Homo sapiens
gtatatgttgaagtggcctatcccaggacaggtggcactctttcagtttaatggatcgagaagtggcgttgcttgctgaaatggacaaagtgaaagct

SEQ ID NO: 636197 - DNA, 82 bp, Homo sapiens
ctgcagccctggaggacggctgggacagcgagcccttcaccctggtggagcgagacgatgccatggacaatattaccaggca

SEQ ID NO: 636198 - DNA, 75 bp, Homo sapiens
gcccgcttcgatcgcctcgcgccggctgctctttccgggttgtggcagcactgcctgaaggtatgagaccagatt

SEQ ID NO: 636199 - DNA, 75 bp, Homo sapiens
aggaggggagaggcctggaggacaccaacatgattagtgatgatgaaccaggttatgaccttgatttattttgca

SEQ ID NO: 636200 - DNA, 89 bp, Homo sapiens
ggttcctacagagattcatatgagagttatgcccgacggccatggaggctgaagagacgatggaatgccttcaggagttccctgaacat

SEQ ID NO: 636201 - DNA, 100 bp, Homo sapiens
attctgttggttttatgcatctttatccaatcaagtgcccttggacaaagcctgaaaccagttttgagtatccgaggagcccaggaggaggaacccacag

SEQ ID NO: 636202 - DNA, 74 bp, Homo sapiens
ggcctccatgtcccacgtggacaagttcgtcaaacctgcctagagctggaacgttacctccagagcgagccctg

SEQ ID NO: 636203 - DNA, 74 bp, Homo sapiens
tgcctctgtgtacgctgaggggggagagttgctgtacctcaaccaggagcttctgtacaaacaaagggaattaa

SEQ ID NO: 636204 - DNA, 50 bp, Homo sapiens
gaaaacactgggaaactacactcacagatggagtcttgctctgttgccag

SEQ ID NO: 636205 - DNA, 100 bp, Homo sapiens
gtcaacgtcaccacctcacagggcgccacccttgacgcttgcagcttcggagtcacggcatttttcagttgaaggacagttggaattcagagcccttcta

SEQ ID NO: 636206 - DNA, 75 bp, Homo sapiens
tgggactttgccttctcagcccaaagtcagcgtaatctcagccaggaaaggagagtttgaaactggatttgaaaa

SEQ ID NO: 636207 - DNA, 100 bp, Homo sapiens
caggccctcaggctcctctgccttctgcttgggcttcagggctgcctggctgcagggcagcgggtggcatgagacgtgggaacatgggccacctcacacg

SEQ ID NO: 636208 - DNA, 80 bp, Homo sapiens
caaccaaggcgcccgagggcaacggagcggccgagcgccggaaccggagcagtctattatcctcccagtccacaacgctg

SEQ ID NO: 636209 - DNA, 130 bp, Homo sapiens
ggaccggagcagtatagaaaatttgtggggcttacagcctcgcccacctgcttcacttctgcagcccacagcatcttcctcatcgaccacgcctggacgtgccgtgtggagcacgcgcgccagcagctgc

SEQ ID NO: 636210 - DNA, 101 bp, Homo sapiens
gcatttcttcgctaccccacagcttctgctcatggttctgccggagacttccatttggcctcaatgtgaaattaaagtagaaaatcacatctacatgcatg

SEQ ID NO: 636211 - DNA, 75 bp, Homo sapiens
gcgctgcgccgacggctccacctacaagaagggagagaaggtacccaaagggaaaaagggaaaagctgatgctgg

SEQ ID NO: 636212 - DNA, 82 bp, Homo sapiens
tttcaaaacttctttttcaagaaactaagaggccagagcaaatcttacccaggcctcaaatctttattctggacaagtacaa

SEQ ID NO: 636213 - DNA, 118 bp, Homo sapiens
aagaaatacattgtagcctaccacgcagctgggaaaaaggctttggcaaatgtctgcatggtcttcgaagtacttggccaccatctcctcaagtggatcatcaaatccaactatcaag

SEQ ID NO: 636214 - DNA, 98 bp, Homo sapiens
gcgcggggagccagcgagcgcgccttcggcattggccgccgcgatgtcagctcagtgctgtgcgggccaggtcgttgaggacttccacatggagattg

SEQ ID NO: 636215 - DNA, 89 bp, Homo sapiens
tgacgtgctgcggcttcatcccgcagcattgtcgtggaagttctccgaatcctggttttgattggtcagattcttttttcactagcggc

SEQ ID NO: 636216 - DNA, 51 bp, Homo sapiens
cctggatctgtatgctttgagcaaggatgaactagctcgagttctggttac

SEQ ID NO: 636217 - DNA, 100 bp, Homo sapiens
cccagaagttatcaagacttttttgaagccatccgcagaaggggagacacattttatgttgtgtcatttcgaaggcagcaagatgaagagcgacgtcggc

SEQ ID NO: 636218 - DNA, 51 bp, Homo sapiens
gccgaggtgttgcggacgctggccggagggaggataggtgcatccagaaga

SEQ ID NO: 636219 - DNA, 90 bp, Homo sapiens
ccaaagccaaggagaagttctcccagctggcagaagcctatgaggtgtctgcattattgggccgaatcccttctgctgtgggctatcagc

SEQ ID NO: 636220 - DNA, 96 bp, Homo sapiens
agcctgtctggaagttacttgtggacatgaccagtgtgcttttcttggagaaagaagaaaagaagaaagaaggaagaagaagaagaaagaaaggag

SEQ ID NO: 636221 - DNA, 100 bp, Homo sapiens
gcagattcttcgatattcccccgagtgatagaaggcaaagttgaccagatccgagccagagtggagcgtaacgcagtgaaaactgaatatcctgatgttg

SEQ ID NO: 636222 - DNA, 95 bp, Homo sapiens
ttcataaggccctggagcagcggaaggagtacgaggagaagatccagaccgtgttcgagcagctggtgctggtggaccacccgaacatcgtgaag

SEQ ID NO: 636223 - DNA, 100 bp, Homo sapiens
tggggaaggaggcgtcttggcccgggcagcagtggcggcagcgcccgagagagacaatgcagatcttcgtgaagactctgactggtaagaccatcaccct

SEQ ID NO: 636224 - DNA, 103 bp, Homo sapiens
ccatttcgtggttcacccgctgccgggcaccgaggaccagctcaatgacagggagtgcatccgccccaacccttttccccctcgtctcctgtgagaattcccc

SEQ ID NO: 636225 - DNA, 125 bp, Homo sapiens
ggagaatgcaggctgcgtgctggtacgtgcttttcctcctgcagcccaccgtctacttggtgtgatgaatgcagactctgctaccattttggctgtttggatcctcctttgaaaaagtctcctaa

SEQ ID NO: 636226 - DNA, 50 bp, Homo sapiens
ctcagcgagaacctcaagagagtggtgctgtaccctgtgtgccatgtgcg

SEQ ID NO: 636227 - DNA, 100 bp, Homo sapiens
gatattcctgaagtcaactgggttttgcagtatgaccctcccagcaatgcaaggctaccacatactgttgattgtgatgaaatgccagttgaagcacctg

SEQ ID NO: 636228 - DNA, 101 bp, Homo sapiens
aagaagcacctggatgagacatttgctacagcatcccacattaagtcaacgaaggagctcaaaaagtgggatgagtttgaagatattttagaagagaggag

SEQ ID NO: 636229 - DNA, 100 bp, Homo sapiens
gtggaaagaggctgaagagcaaggatgccctgaaaagacaccaggaaaatgtccacactgtttgggacccactctggaacctgaggaagtggtaaacagg

SEQ ID NO: 636230 - DNA, 99 bp, Homo sapiens
atgtgatcgtcctggccaccctctgattgataagacatatcattttgaaaggatgaacatggtttcatctccagggagttccacaggaaataccggatc

SEQ ID NO: 636231 - DNA, 100 bp, Homo sapiens
taccccagacccctcagcgtctggcatctattgcccaaggactccagatactccaaataatgaccctcgttgttctactagcaacaatagattgaaggcc

SEQ ID NO: 636232 - DNA, 75 bp, Homo sapiens
ggagacactggcattggaacttcctgttctgatagcgtggaaggcttcaagcactttcctgaagcggggattcat

SEQ ID NO: 636233 - DNA, 74 bp, Homo sapiens
aatcaccagttgtatttttcagttattacaggaagcaggaaaatggctttgtaaagaagtttgaacctaaatct

SEQ ID NO: 636234 - DNA, 75 bp, Homo sapiens
cccccacaagccttgtttcatggtatttctgggaaaagccagcttctgtttgcactggtcttcacaactcgttac

SEQ ID NO: 636235 - DNA, 98 bp, Homo sapiens
gacagcctttccgcgcgggactccggggcgccacgggggccatgtaagcagttcgttcccacatgcagggcagcacaaggagaatgggcgtcatgact

SEQ ID NO: 636236 - DNA, 90 bp, Homo sapiens
tggttattatcaggttcacgccaacagtacctcattgctctttggcgactcttattgttgctctcaccagaagatttagtgaatgcgtgc

SEQ ID NO: 636237 - DNA, 100 bp, Homo sapiens
tggagtccgcgaagattcgagcgaaatatcccgacagggttccgactgtgccctgtccacggtgcctcctgcatgtcctgctgccctgagctgtcccgag

SEQ ID NO: 636238 - DNA, 83 bp, Homo sapiens
gtgacttcagagacactgccaagcagccttagccctagtgtagaggttgaaagtaacggaagcctacagaaactgatccgcat

SEQ ID NO: 636239 - DNA, 78 bp, Homo sapiens
actattctcgtggccggcggctgcaggagggagctcggaaggctaagtcctatcagccatggaaacaccattgctctc

SEQ ID NO: 636240 - DNA, 100 bp, Homo sapiens
ggcaactctgatcccaactctgctccaggcgaggacacacctaggatgcctgggaaaagtgaaggctccagtgacctagaaaatactccaggtcctgatg

SEQ ID NO: 636241 - DNA, 74 bp, Homo sapiens
aagcctaactcaagccattggcacacaggtgatttgaagatattaaagctagaaattggaactagaaaatcaaa

SEQ ID NO: 636242 - DNA, 76 bp, Homo sapiens
aaattaaaagaggagcagcatggcatttcagtcactggtttgcagagtccagtattctgaaaaggaggacaaatat

SEQ ID NO: 636243 - DNA, 80 bp, Homo sapiens
aaggatatcgacgtcgtgatccagaagtccagagctgaggactgcctgtttgcaggctcacagaacatttcctgcctgtt

SEQ ID NO: 636244 - DNA, 75 bp, Homo sapiens
gcactttgatgatttaagaaatcttggttgggcccatgagatgtgtgctctgtatattccggaggtacaatttgc

SEQ ID NO: 636245 - DNA, 83 bp, Homo sapiens
cagatgctgcctgaggcggattgggagagccagggccagtacagctgaaagataccatgtttgtgtggaagtgccccgtgttt

SEQ ID NO: 636246 - DNA, 100 bp, Homo sapiens
gccctcggtgtaagaccaccaaatatcggaacccctccttgaagctgatggtgaatgtgtgcggacacactctctgttcctcctcccactgacctgcgat

SEQ ID NO: 636247 - DNA, 83 bp, Homo sapiens
tgagacagagaaacatgagaagcagcagtggacgccttgctgagtctgggctctgtcatcgacatttcaggcctgcaacgtgc

SEQ ID NO: 636248 - DNA, 73 bp, Homo sapiens
tgaattttgcagctgcagaatgtgtagtaccttaaaaggctcgtttctggcgctggagacatcaaacttacta

SEQ ID NO: 636249 - DNA, 75 bp, Homo sapiens
aggagccttaacaagcgcacggagccctcaaggtatctttaggtggtgttgatcttacagtccgggtgctcacga

SEQ ID NO: 636250 - DNA, 100 bp, Homo sapiens
ccacctggatgtgccccgtgtgcgacaagccagccccctacgaccagctcatcatcgacgggttgtgggctgcacactgcagaaagatacagctgaaaaa

SEQ ID NO: 636251 - DNA, 82 bp, Homo sapiens
ttacagatgcaggatcggaaagaatcccggccagacgtgcgaacagctccagctggatcatctgttacgtactgcaagtcag

SEQ ID NO: 636252 - DNA, 87 bp, Homo sapiens
gacgccgtggcagcctgaacggagtgtgcgacggattgggagatgaagacagtcagtgttgccttagttttgtgcctgaatgttggt

SEQ ID NO: 636253 - DNA, 90 bp, Homo sapiens
ttatggccagagccagaacagagtctgcagtttctgggagcagtgaacggtgcccccgtccagtctctctacacccaatgccacggggat

SEQ ID NO: 636254 - DNA, 98 bp, Homo sapiens
cacctaccccagcggccagatcggcttcatgctgtgcagcaagaacccgatttggattcaagatgtgaaataatcagcgatgggaaaatgcagcttta

SEQ ID NO: 636255 - DNA, 74 bp, Homo sapiens
tcgcaatattgtcttcttcgctttagacaaaatcccagtgttccaatgcagaagttgcaggatatccagagagc

SEQ ID NO: 636256 - DNA, 76 bp, Homo sapiens
agatcagttccatccttagcagtttaacatcagtcatgaaaaatactgatgacagcatattaaagtgagtgaccct

SEQ ID NO: 636257 - DNA, 82 bp, Homo sapiens
gtcccgatcccgaccccaaaagagtattcttggatcttgcacaggaaggaattaaagattcagtaagctgtgaggtccgtaa

SEQ ID NO: 636258 - DNA, 82 bp, Homo sapiens
ccttctccactttcgccagcccgtgccgcgagcgcggcctgcaggagcccaagaggagagggtttgaccgcttcggaccaga

SEQ ID NO: 636259 - DNA, 74 bp, Homo sapiens
aggcacccgatatatgttctctaggccttttagaaaacatggtgttggggatgtcctttgcactgaccctgaac

SEQ ID NO: 636260 - DNA, 75 bp, Homo sapiens
ttccaagtcttcagaattcattaaatggatcttctgctggcaggatggcaccaagcattatgaaaagcctaatgg

SEQ ID NO: 636261 - DNA, 128 bp, Homo sapiens
tttgaaccctgcctagaacccatacttacttactaaactcaaatgtacttaacacgatgagaacatcggccttgaagcaatggccaatgtacatggtggactatgccggcctgaacgtgcagctcccg

SEQ ID NO: 636262 - DNA, 90 bp, Homo sapiens
tgcaagcgaaattaagggaaaatggatgtagaaaatgagcagatactgaatgtaaaccctgcagcctaccttatgttcagtattttggag

SEQ ID NO: 636263 - DNA, 98 bp, Homo sapiens
ggaaccccgaccagccccggctcagggtcccccttcctggtggctgtgaaggtgccccctttcaaaggtctcagcatcctcacgctacctcctgccgc

SEQ ID NO: 636264 - DNA, 100 bp, Homo sapiens
ctcctgctgtcaggctacatcagcaaagggctttttgacattcatactagtggcctattgggagaaatccacacgggccatcacagcaccatccagtact

SEQ ID NO: 636265 - DNA, 96 bp, Homo sapiens
attttttaccaaggaagaatggttaaagggaatgacttcattacatgggttgtcttctggcctcagagtatcccttatcagaaccttgggcccctg

SEQ ID NO: 636266 - DNA, 75 bp, Homo sapiens
ctgagctgttcctcccagctacgagctgccccaggctcaggaagaggccaaagaagcagaaatgagcagaaagga

SEQ ID NO: 636267 - DNA, 100 bp, Homo sapiens
cacaagaacatgtctgtacacctgtccccctgcttcaggggaggatactgaggcacacagaggggagtcaccagccagaggatgcatagcctggacacag

SEQ ID NO: 636268 - DNA, 75 bp, Homo sapiens
cgaaaaatcacctttccccacgagatcgggaggatctccattgagatgcatgggaccctggaggaccagctcagc

SEQ ID NO: 636269 - DNA, 152 bp, Homo sapiens
ttgactttctcctcattgaagctatgcagtatttctttggcatcactgcagctagtaatttgccttctggatttaatccagtccctcatagcactggtgaatgacccccagcctgagcacccgcttcgggctgacctagctgaagaatactc

SEQ ID NO: 636270 - DNA, 82 bp, Homo sapiens
gctgcttgtgctgccatgtccgcaccggcaccatcctgctcggcgtctggtatctgtgtcttgggacaaggtgcgcattcct

SEQ ID NO: 636271 - DNA, 100 bp, Homo sapiens
gagacaacctttaccggacaccaaacctaccagcaccatgaccttgaactttccagccttctgaactgaagacgtattttagcagatgaagcactcaagc

SEQ ID NO: 636272 - DNA, 82 bp, Homo sapiens
gccatcgacatatttcctgtcaccaacaaagatttcagatcccagctctcctgttggcttcgtgcttggggtagatcttctt

SEQ ID NO: 636273 - DNA, 90 bp, Homo sapiens
ggcctatgaccccgagggcatcctgggcaccatcaactccatcgtgatggcctttttaggagttcagcccccggtccctgagaagcggcc

SEQ ID NO: 636274 - DNA, 51 bp, Homo sapiens
tccactgccatttaatgaataatgctgagctttttataccaccaaagatca

SEQ ID NO: 636275 - DNA, 90 bp, Homo sapiens
tccagagggtccaggccatgaagagtcctgaccacaatggggaggacaacttcgcccgggacttcatggatttaagtgccctgtatgctc

SEQ ID NO: 636276 - DNA, 87 bp, Homo sapiens
ccctaccatcgccgagggcccatcccctaccagcgagggcgcctccgacaatctgcacatcgtgctgccacacgaggcttcattcgt

SEQ ID NO: 636277 - DNA, 75 bp, Homo sapiens
ttgacattctggtggctggtggaatgctgggtatctgatggtataattgccccaggatatgaagaagaagccttg

SEQ ID NO: 636278 - DNA, 75 bp, Homo sapiens
tcgcagggcccctgagtccagccaaggtctgggataaaagtgaaagtggtgattggcattgtactgctagctgga

SEQ ID NO: 636279 - DNA, 100 bp, Homo sapiens
agcgaggcctggcgcttccccaactccagcttgctgatcatgatgctatggactcctactacgactacatatgggatgttaccattttggaatacttgac

SEQ ID NO: 636280 - DNA, 80 bp, Homo sapiens
cctagaagtctactaatggacagttagtcacccacctacatgttgaggaccattgtagcactggtatacaatgtgctgaa

SEQ ID NO: 636281 - DNA, 52 bp, Homo sapiens
aaaagagcttctctccagagtagaaagatggagtctcactctgtcacccagg

SEQ ID NO: 636282 - DNA, 100 bp, Homo sapiens
cagaaaagacagtgttctgctttcatggagttcacagaagagtcgaggagcagcaaagtggggcaccaaggccctgtgctaagcactcataatcctctgg

SEQ ID NO: 636283 - DNA, 90 bp, Homo sapiens
ggatcatggcggatggccccaggtgtaagcgcagaaagcaggcgaacccgcggcgcaataacgactgtccaggacggccggcagtttcta

SEQ ID NO: 636284 - DNA, 100 bp, Homo sapiens
gcagaacttacgctgcgggaccccgggcactgttgctgctgcgggaggcagcgcccggttaccacatggccaagctgatcatcaagttggtcacctccat

SEQ ID NO: 636285 - DNA, 73 bp, Homo sapiens
gttttgctacaaatggaggaggaggaggacgacgacgatggggatatcgatctttgatggaaaacagattcca

SEQ ID NO: 636286 - DNA, 90 bp, Homo sapiens
cccacatcttccggccaacttccattgaacttcccagcactcgaaagggaccgaaatggagagcaaaggaggaagagcaagcaggccctg

SEQ ID NO: 636287 - DNA, 50 bp, Homo sapiens
agagggtgcttaacccattacttcaggtcatgacgccagtcagatcacac

SEQ ID NO: 636288 - DNA, 100 bp, Homo sapiens
agaaggggaggaatttcagccagaaggaagcaaatgtaccaagtgttcctgcactaatcatgtcaaccctgccatggacttcacgcagactccacctggg

SEQ ID NO: 636289 - DNA, 50 bp, Homo sapiens
ccggccaccagcaattgtccgcggctatgtgactacgtttgtgacctcct

SEQ ID NO: 636290 - DNA, 100 bp, Homo sapiens
ttacaacagaacaaccacctccaaggtcttggattatgttacaagaaccagataggacaaggccaactgatccaattctggtacagcagttgcgccggac

SEQ ID NO: 636291 - DNA, 100 bp, Homo sapiens
ggcgagttctcggtcaccatgtggtcctcaggtaagtaaggaggtctctgtaccatggctcgtacaaagcagactgcccgcaaatcgaccggtggtaaag

SEQ ID NO: 636292 - DNA, 83 bp, Homo sapiens
gcccgtccgtccgccgccaccacccactccggacacaggtgaccaggcattgatgcacccccaggaaggccacgggctcagga

SEQ ID NO: 636293 - DNA, 113 bp, Homo sapiens
aaagatcctaggattgctgcaggtcagcagtctccactggaaaaaaagatcttggagttggtggtgaccccgcccagttggcccagaggatctcttctaacatccagaagatc

SEQ ID NO: 636294 - DNA, 146 bp, Homo sapiens
cctggaccctgctcagagggacttgtacgtggatgtaatgttggagaactatagtaacttggtgtcactggggatttctggaagcttgaacttaagagtgataacttagggtacctggcaaaagaaatttctgagcagcaaagcat

SEQ ID NO: 636295 - DNA, 96 bp, Homo sapiens
gctcggcatggctctcctggtgctcggaacttccagcaccattacttgatgataaatgtaaaaaggaatttgatgaagatgtatacaatcataaaa

SEQ ID NO: 636296 - DNA, 74 bp, Homo sapiens
gaggagggcgccagctacttcatcgaggattaaagcctgtggtttccacagaagcaccacctatcatatttgcc

SEQ ID NO: 636297 - DNA, 115 bp, Homo sapiens
ggatgacaagaagacgtccaatctgagcgtgctgcggacggcgctgcggtacatccagacaatgcagatcttcgtgaagactctgactggtaagaccatcaccctcgaggttgag

SEQ ID NO: 636298 - DNA, 82 bp, Homo sapiens
cgcgccttgtcactggagtgcaagaagaaattcccacctgtcaaagagaatgtttactcagtgcctggctcccagtatcttt

SEQ ID NO: 636299 - DNA, 83 bp, Homo sapiens
aacaaattgaaagatatcatcaaacgacatcaggctatgtcttgcccagccacgtgactgaggagatgctatgggagtgcaag

SEQ ID NO: 636300 - DNA, 100 bp, Homo sapiens
atgatcagtagcaccagtgtttatggtgctatacttggtagatcagaaactcaggagtgtcttttctttaatgctaattgggaaaaagacagaaccaatc

SEQ ID NO: 636301 - DNA, 100 bp, Homo sapiens
gtacttcaccgcgcgaacctcgctagctcgcaggccgcgccgggaccaggaatcatatcgacaggtcatgaaaatgagaccaaaagatctctggaagcga

SEQ ID NO: 636302 - DNA, 100 bp, Homo sapiens
ctcacagaaaagaaaggctggggcttgagagctgccaaagaccttccttcgacctcccagtctctcattctcgtccttggattggccgcgagacatttat

SEQ ID NO: 636303 - DNA, 99 bp, Homo sapiens
tgaggccggcatcgtctttccgtcctctgaggcgacggccgcggctgcacagggtggcatgatcgctctgctgctgtccatcttgtgcctggtgatgat

SEQ ID NO: 636304 - DNA, 78 bp, Homo sapiens
cgggtgagaggccgcggcggcagggtctcagcttcttggaagtgaaagaccagctgctgctcatgtaccttatggatt

SEQ ID NO: 636305 - DNA, 74 bp, Homo sapiens
gaaaaaggccctcttcaagcctggttttttgcatgtctgacacccatgactccacctggaccttatggctccac

SEQ ID NO: 636306 - DNA, 96 bp, Homo sapiens
ggagtcggaggagccgcgggcggcgcggcccagctcgttccaggagcatcagatccatgctgctgctgactcggagccccacagcttggcacaggc

SEQ ID NO: 636307 - DNA, 100 bp, Homo sapiens
caaacattcccaacctatccctaaaggttgctgctaaatgggaaaaacttagcttagtactgatagatgactttattggaagtggaactgaacaagtact

SEQ ID NO: 636308 - DNA, 98 bp, Homo sapiens
cttctaccctgccaaagagcttgctaaagcccttttgtgctgcactacttaagacgaagagagattgcagagagagagcgtcgagagcgagaacgcat

SEQ ID NO: 636309 - DNA, 100 bp, Homo sapiens
agagcattcaggagatgtacgccgcgatcaaggctgaccctgatggtgacgctgtaatggtggctatcctgctgaagcttggaacttctggacaagaaaa

SEQ ID NO: 636310 - DNA, 50 bp, Homo sapiens
gctcactgcaaactctgcctcccagtagagacggggttttgccatgttgg

SEQ ID NO: 636311 - DNA, 101 bp, Homo sapiens
aaggcattcagatgataatggacagaatcatctagaaggacaaatgaacttcaatgcagattctagccaacataaagtgtaaacaggaacatcgataagta

SEQ ID NO: 636312 - DNA, 50 bp, Homo sapiens
ggacccgcggtccccgctcttgctggcggaattctccacgagttttgagc

SEQ ID NO: 636313 - DNA, 75 bp, Homo sapiens
tccgaccgcaacacgtgcgctggataaacgcttgttaactggctgagatctgtatctgtggacctgaatgttgat

SEQ ID NO: 636314 - DNA, 90 bp, Homo sapiens
caggactcggccacctgcccttcctgcaccgactggccagattgtttgctacatgaggagaacttctcggtgaggtgccctaagcacaag

SEQ ID NO: 636315 - DNA, 83 bp, Homo sapiens
gcaaggttggtggaagtcgcgttgtgcaggttcgtgcccggctggcgcggcgtggactcgctctccgtctccagcaatgacgc

SEQ ID NO: 636316 - DNA, 98 bp, Homo sapiens
cacagtgggggtgtgcaaacccgagagaactggaacaaactcacgatgttggacattgcatcaaatagaatcaaaaagattgaaaatatcagccatct

SEQ ID NO: 636317 - DNA, 100 bp, Homo sapiens
ggaatccatgtttctggacgcggatttttggcctcatactctgttatagataaacaagctccctccttgggcctgtggattcataatggatacaaattct

SEQ ID NO: 636318 - DNA, 100 bp, Homo sapiens
agaaggtgattggtgctgggaagttctttctgtcacaggtctgacagaaaccgttaatgaagtttccaagctgagcaacaagattgggatgaattgtgat

SEQ ID NO: 636319 - DNA, 102 bp, Homo sapiens
ctttggaaaaatgggaagttactatatcaaccgtacatttttctttgatgtgcacccgcccctgggaaaggtcagaagccaatgacctggccctgaggctgg

SEQ ID NO: 636320 - DNA, 100 bp, Homo sapiens
cagaagctccaggatattatgaagttataaggttccccatgggtgcttttcagtgggaagaattggaagaagatatcaggaagaagttgaaagattctgg

SEQ ID NO: 636321 - DNA, 90 bp, Homo sapiens
aagggccccagcgtcctcttgtcaccgacagggcgattgcagtgcgttccggcattgatgacggggagccttcctggctttgtcgacgtc

SEQ ID NO: 636322 - DNA, 100 bp, Homo sapiens
cttagtgctgctgctagacctggcctgggccaatacctttgtaatcagataaagagttctatctgtcttctacgcgggaaaatctatgatgctctagata

SEQ ID NO: 636323 - DNA, 74 bp, Homo sapiens
gggggcgttagccccgcgcagccgccggcgtcgccgccatggacctaggttatgatgtgattgctcaagcccaa

SEQ ID NO: 636324 - DNA, 100 bp, Homo sapiens
ctcaaggcaagcctattgagttaacacctctgccgctgctaaaaggtttcttccaaggtgaaatccagtcccacctggtattcagcatcttccttctctt

SEQ ID NO: 636325 - DNA, 111 bp, Homo sapiens
ggggcccggggctccggcgcgcccggtgacggcggagaggcgccccccgcagcagggtttccaggcctgaggtgcccgccctggccccaggagaatgaaccagccgcagag

SEQ ID NO: 636326 - DNA, 75 bp, Homo sapiens
gggatcccccagttccaaagtgtcttaaaggacatggatttgattgacatactttggaggcaagatatagatctt

SEQ ID NO: 636327 - DNA, 78 bp, Homo sapiens
gacggcgagaaggcggcgcgcgaggtcaagctgctgctgctcgggatgtgagctcatttcaactcctgatcaagacca

SEQ ID NO: 636328 - DNA, 80 bp, Homo sapiens
cctggtcctggccccggagctgttgctggacccctggcaggcaccgggtgctcagcagttctgcttcttgctttccactc

SEQ ID NO: 636329 - DNA, 75 bp, Homo sapiens
aaggctgcaaacctcaataatttggtagtggaagcctatcagaatttgccattttcagtggaaaacaagtggtcg

SEQ ID NO: 636330 - DNA, 82 bp, Homo sapiens
gcctttgccgatccgccgcccgtccacacccgccgccaggtgtttcccattaaacactaccaggacaaaatcaggccttaca

SEQ ID NO: 636331 - DNA, 80 bp, Homo sapiens
ctctctctttctggcctggaggctatccagcctgggattctgtccctgaccgtcttcacagtccaggtgatcttgactac

SEQ ID NO: 636332 - DNA, 75 bp, Homo sapiens
tcagagtcaagcaacttgaagataacattcagaggtgctggagaatctggtaaaagcaccattgtgaagcagatg

SEQ ID NO: 636333 - DNA, 88 bp, Homo sapiens
aacaccgtcacgctgctggaggaggtgaaaattagttctgctgtgcttaaagctgcggcccatcactatggagctcaatgtgataagc

SEQ ID NO: 636334 - DNA, 75 bp, Homo sapiens
aaagaatttcgggctactttggaatgtcatccacttactatgactgatcctatttgttcccgacaaggagttttc

SEQ ID NO: 636335 - DNA, 122 bp, Homo sapiens
cagcagaacaactaaaacagtatgaaataaacgccactcctaaaggctggtcctgccactgggacagggcaagcgacttggtaatgaaggtggatgctcttctgtcagcgcaaccaaaagga

SEQ ID NO: 636336 - DNA, 98 bp, Homo sapiens
aggagcggggccggaactggagccgaggcgcaggtggcgctggactcggtgaaatacctggagtgctcagctctcacccagagaggcctgaaaaccgt

SEQ ID NO: 636337 - DNA, 76 bp, Homo sapiens
gaactgaagaagcttgggctcacttccacaaatgtgtggatgaggtcaccattgtcaacattttgaccaaccgcag

SEQ ID NO: 636338 - DNA, 100 bp, Homo sapiens
gggatgctggaggacatctgggggccacaaatgctccttctcctggagacgcaactcaagatgatgattattccccaccttctaagagacaaagaccaac

SEQ ID NO: 636339 - DNA, 98 bp, Homo sapiens
gcggaacccggcgcggcggcggcacgatggtcatggcgtatttcgtcgagaatttttggggccaattcctgtccccccagcagcatggcatcgtgtgc

SEQ ID NO: 636340 - DNA, 74 bp, Homo sapiens
gcaaatgtaacaagaagttggagaagaggctgttaaagaagcatgagccaagggaagagatggtgttgagtgga

SEQ ID NO: 636341 - DNA, 90 bp, Homo sapiens
gctccaaactgcaagtgtatattgttcttggttcgggatgagtatcggcaggactacgatgctgggagaggaggctatggaaaactggca

SEQ ID NO: 636342 - DNA, 100 bp, Homo sapiens
gactcctttgacgacgttgaccgcacactggatgaatggaagcggcgacctcggggacgcggggccaaagccccccggctggcgtgcgagacagcgggcg

SEQ ID NO: 636343 - DNA, 74 bp, Homo sapiens
tctgtcttggaggacatcagaagttcatttctgtgtgacgtgaccatgaaatcagtggatggaaaggaatttcc

SEQ ID NO: 636344 - DNA, 90 bp, Homo sapiens
ctaaactgtgtggggcgcggatgggatccagctgttagtcggagaccgcatcccaggcactcagaggctgagccacatcctccactgctc

SEQ ID NO: 636345 - DNA, 100 bp, Homo sapiens
ccgagcaccgggccctctgcgacctggggccctgggtgaagtgctccgccgcccttgcctccagcgccgtgccgtccctgcagtgacaccgaggtgctcc

SEQ ID NO: 636346 - DNA, 97 bp, Homo sapiens
ggcggatggcccccggtgcaagaggcgcaaacaagccaatcccaggaggaaaaacgactgagaactatgagcagagaatacgtgaacaacaggaaca

SEQ ID NO: 636347 - DNA, 98 bp, Homo sapiens
ccaggagctaatgattcaaaagctatgattaaaagtttcatggatgtctaccagcttgcaagcactagaatcatgacattagagaaggaaatgacatc

SEQ ID NO: 636348 - DNA, 71 bp, Homo sapiens
ttccccaattcagcagagaatattttcaagggggaatctccggcctgtgaaactgtgaggggattcggcca

SEQ ID NO: 636349 - DNA, 100 bp, Homo sapiens
aaaagacatggcaacaggaaagtctaagggatatggctttgtctcctttttcaacaaatggcatttggagtattgctttgggaaattgctacctatggca

SEQ ID NO: 636350 - DNA, 100 bp, Homo sapiens
ccggctgtggctcagcatggtcagtgccgtttaacctttattgtggtggagtccaccccgctgtgctcatgatggagcagtccaagaagtcctccctcat

SEQ ID NO: 636351 - DNA, 75 bp, Homo sapiens
catactcacagagttagagagagggatggtgtgagacggtttaagcggaagcatcttactgccattgactgccag

SEQ ID NO: 636352 - DNA, 75 bp, Homo sapiens
gggcgcggcggcggcggcggtggaggagccggagcataatgacgcaaacatgcagatctttgtgaagaccctcac

SEQ ID NO: 636353 - DNA, 100 bp, Homo sapiens
gacttgttctctatcgaacaaaagtagagatcggacagctggcttttaaaggaatgaagagactcaatagaatccagtcaatagtgtttgagactgccta

SEQ ID NO: 636354 - DNA, 74 bp, Homo sapiens
ccgttcgggctggggctgtcggccgcggggcggaggcactcgcgcgggggacctgcgaccgcatcaagcagtcc

SEQ ID NO: 636355 - DNA, 74 bp, Homo sapiens
cctcccgagtagctgggaccacaggtatggacctgtctgccaatcaggacgaggagaccgaccaggagaccttc

SEQ ID NO: 636356 - DNA, 90 bp, Homo sapiens
gcttgttggaattggtgacaaaatcagaggcatactttataggtcatggattgacggcagtcaaggaaaaagcaggagccactctacgga

SEQ ID NO: 636357 - DNA, 51 bp, Homo sapiens
cagcacacagaagccgagacgtttccaacatggctagatccatcagaaact

SEQ ID NO: 636358 - DNA, 82 bp, Homo sapiens
aaaatacagccaagatcttggcaaagcttctccctcagtatttagaccaggtgaccctggcagcaaccccaacaaacgccag

SEQ ID NO: 636359 - DNA, 83 bp, Homo sapiens
caagctctgtgagaggatagagggttaacacagaaatctgcctcctgggccatgccgcttctaaggcctgtttcttctcatga

SEQ ID NO: 636360 - DNA, 122 bp, Homo sapiens
gcgatgaggaccttggcttgcctgctgctcctcggctgcggatacctcgcccatgttctggccgaggtgctggagaatctggtaaaagcaccattgtgaagcagatgaggatcctgcatgtt

SEQ ID NO: 636361 - DNA, 100 bp, Homo sapiens
ggcagagcaaagactccagtaacactcaagcaaagaagagttgagcacaatcagactggaacgtgagaaacgagcccgcatcaaagcacggaaggaaaat

SEQ ID NO: 636362 - DNA, 83 bp, Homo sapiens
gtgccgcgagcgcggcctgcaggagtcctgtgcctcctgattgctgagtgttcacctggaccttctgactaccttccctgtgc

SEQ ID NO: 636363 - DNA, 51 bp, Homo sapiens
ggagaatccaccgccatccgccaccatggcatctaataggattcaggaatc

SEQ ID NO: 636364 - DNA, 82 bp, Homo sapiens
gcgcggcccgggcgccatcgagccttggcggcggacgtgcagatttggtcgtattgggcgcctggtcaccagggctgctttt

SEQ ID NO: 636365 - DNA, 96 bp, Homo sapiens
cctttaaaaatgacatcagtttctggaagaagaagaagagcatgatcggcatgtccaccaaggcagcggatgtgatgctggtacaacccagagtag

SEQ ID NO: 636366 - DNA, 74 bp, Homo sapiens
ttacttggagaagatttgctatctggcaaaaaggaggaggaagccaagaatctggtgagcgaagccatcgcagc

SEQ ID NO: 636367 - DNA, 75 bp, Homo sapiens
gactcctctctcaagagaagctgcaagagcaacatctttcctcaccccaagactgaggctgatgtgaatccaaag

SEQ ID NO: 636368 - DNA, 75 bp, Homo sapiens
gcctcagcctcctgattagctgggactacagatagcagaggcagcaggccgtgccgggggggcatgttgctgtaa

SEQ ID NO: 636369 - DNA, 75 bp, Homo sapiens
aatgtcagcccaacaacttacaggctgagtcatcactagagagtgggaagggcagcagcagcagagaatccaaac

SEQ ID NO: 636370 - DNA, 100 bp, Homo sapiens
cagacaggctgctttcagtagccccattattgtagatgtaaatggcaatgttctacctcctggacaagaaggagatattggcattcaagttctacccaac

SEQ ID NO: 636371 - DNA, 99 bp, Homo sapiens
gttggaaaaaaaattggatgtggcaattttggagaattacgattagagccatttcctgcttttaagtcttggcaggaggactctgagtctggagaagct

SEQ ID NO: 636372 - DNA, 50 bp, Homo sapiens
gcacagatgcaccctggcatcggtaccagggccacgtgggtgcatcgctg

SEQ ID NO: 636373 - DNA, 101 bp, Homo sapiens
gcgctgaggatgaactggcgggtgtggacgccactacagttcatcaacatcaactacgtccctctgaagggagcgggaacgccgagagaaggagagagaag

SEQ ID NO: 636374 - DNA, 100 bp, Homo sapiens
gattttaggaaaagcggtccacattgttcagagagcatccacaggtcctgggatgccattaatcgactctcaaatactgatggccgcccatgccccatca

SEQ ID NO: 636375 - DNA, 50 bp, Homo sapiens
cgatcatcctggggacctggtacatggtgttggagagcacaatggctgaa

SEQ ID NO: 636376 - DNA, 98 bp, Homo sapiens
ccgcggcccccagcagagcccgcctgcccggctgtgaccatagccgatgactactcagatccctttgatgccaagaatgatctcaagagcaaagcagg

SEQ ID NO: 636377 - DNA, 100 bp, Homo sapiens
ctcaaggaccccagaaccccaagaaacagggaatcttccacattcatgaaggctacatccacgtgacgcagaccttcagcattatggctgttctgtgggc

SEQ ID NO: 636378 - DNA, 75 bp, Homo sapiens
tcacaagctcagcctggacagcaacaggcccagcagcaaagaaacctggataacatcgtcttgcaacaacccaga

SEQ ID NO: 636379 - DNA, 75 bp, Homo sapiens
tgggtttacctgctgttaagaaagatccttcttcgaaagttttgccaggccatggcccaaaaggaagatatggaa

SEQ ID NO: 636380 - DNA, 100 bp, Homo sapiens
ctgggccaatacctttgtaatcagattaaatctcttgatgaacagtgtgtggttggcaaaatttccaagcactggactggaattttgagagaggcattta

SEQ ID NO: 636381 - DNA, 50 bp, Homo sapiens
cctcagccaacagagctgtggttgctcttgggaccagaactgagtacaag

SEQ ID NO: 636382 - DNA, 100 bp, Homo sapiens
aaacacaaaccaccctttaaattttcaagggaaggacaggcccctagcagtcttcttgatgctttggaacaacatttagcttccttggaaggaaagaaaa

SEQ ID NO: 636383 - DNA, 80 bp, Homo sapiens
ttttggcatcaaggacaaacccaccttcatcaaagggatgcttgctctgtcaaggcacagcctattgtctcctttgctca

SEQ ID NO: 636384 - DNA, 110 bp, Homo sapiens
tccgagctgagatccatctgcaccacggtgctgatcttcgggggcctggtgtggatcctggtggcctcctccctggtgccctggcccctggtccagggctgggtgatgtt

SEQ ID NO: 636385 - DNA, 101 bp, Homo sapiens
cctgtcgctggagcacaaaagagtctccgcggtggaggtctgcgttgctcttgcttttcctcgctggggtgtacgatgtgttttcgcattataacaaggac

SEQ ID NO: 636386 - DNA, 75 bp, Homo sapiens
gcgcaaaggctgccctggatgggactcctgcatgctacaagtgaaaactgatgagaaactgaatgtgtctgatga

SEQ ID NO: 636387 - DNA, 75 bp, Homo sapiens
tgccgccgctctgaggagttaaagagtctcactgtgttgcccaggctgaagcagcctcaaactcctgggctcaag

SEQ ID NO: 636388 - DNA, 75 bp, Homo sapiens
cggccggagccgggccgggcagctagcagggcgcttcgggttggtgacagcgtcccaagctggtgacagacccac

SEQ ID NO: 636389 - DNA, 90 bp, Homo sapiens
atagtcaactgcgtggaagagaagaaactggaggaagcagcatctcgtgcagcagaagaggaaaagaaacgccttcagactcaagtggaa

SEQ ID NO: 636390 - DNA, 100 bp, Homo sapiens
gaaaacaagcaaatgctgccttccttgttggatgctacatgaccaggtgataggtttgatcgagacagaccgttgagaggacgtggaggcccgagagggg

SEQ ID NO: 636391 - DNA, 90 bp, Homo sapiens
ggcagggaggagaccggcacccagacaggtggcgacggcagaggagtggtcaagtaccccctgcacgccatcatggagatcaaggagtac

SEQ ID NO: 636392 - DNA, 90 bp, Homo sapiens
gcacctcctcgccagcagccgtccggagccagccaacgagcgcttcaagtggaaataaagagattatttcgcatattagtcaacatggag

SEQ ID NO: 636393 - DNA, 149 bp, Homo sapiens
ctcgttcggtggtttcttgtgaggacgcggcagcccgtggagtcggctgagggaaaagcgaggcaaggcaggcggtacttcgggatgacttcagacaaaacccttcggatgtcatggttgcagtaggagagcctgcagtaatggaatgc

SEQ ID NO: 636394 - DNA, 88 bp, Homo sapiens
tcagtatacagtgatagtgggatttgaacacctgaagctccccatcaagggaatgaacttcacaaaggtcagtgcaccagatattctg

SEQ ID NO: 636395 - DNA, 50 bp, Homo sapiens
ctcctgagtagctgggattgcagtcattgaagtcaacaagagagacatag

SEQ ID NO: 636396 - DNA, 101 bp, Homo sapiens
gcaccacctgaggatccagaaaccgccccagcgatggaagaggatcaggagctggagaggatggtgatgggaatctttgcaaattgtatcttctgtttgaa

SEQ ID NO: 636397 - DNA, 98 bp, Homo sapiens
tttcagtggccctcgtggaacggtaggaagctgagctggactctctgccacatcgttcggttcccacaacagcctggcgtggtgtccctcgtggccgt

SEQ ID NO: 636398 - DNA, 142 bp, Homo sapiens
cccagcccatttcaagtttggattggagtccagataaaaggggtctctgcgtctgtagttcatttgaccaaacgttcacagacattgggaccttcgagacagtgtggcaagtcaagttctacaattaccacaagcgggatca

SEQ ID NO: 636399 - DNA, 101 bp, Homo sapiens
cataaaggcagctttgaaacagtgattcgcaaggggtggctcaccatcagcaacattggcatcatgaaaggcggctcgaagggatactggttcgtccttac

SEQ ID NO: 636400 - DNA, 90 bp, Homo sapiens
ggcggcggcgctggggcccccagaagtgatcgctcagctggagaacgcggctaaagttctgatggtggatccataaagaacccagccaac

SEQ ID NO: 636401 - DNA, 75 bp, Homo sapiens
cggccgggagcccgccgcgctggtagcggtgtccctggccagtgtccttccacctgtccacaagcatggggaaca

SEQ ID NO: 636402 - DNA, 100 bp, Homo sapiens
gcagcctcttcgagcgccgcggacgcgtcatcgagtgtgacgtggtgaaaggtgaccctggcaaagatgagagtgcacatttcgtcctgcctgaaggtcc

SEQ ID NO: 636403 - DNA, 110 bp, Homo sapiens
agaccctggagcctcagttggaagcagccgatccagcctgcggagcctgtggggcagagacacctatggctgccgatgaaggctcagcagagaaacaggcaggagaggcc

SEQ ID NO: 636404 - DNA, 100 bp, Homo sapiens
tgaagagctccgcccccatcttcacggtgatcatgtctcggatgattctgggggagtacacagtgctactatatcggggccacagatgatgcagccacca

SEQ ID NO: 636405 - DNA, 95 bp, Homo sapiens
aagattataatcaggaagtggatgcctccatttttaagttgatattcactgatggactccaaagaatcattaactcctggtagagaagaaaaccc

SEQ ID NO: 636406 - DNA, 82 bp, Homo sapiens
cctcacctttgtctccccgatctacggggctgacatcagcggctctttgtatgatgacctatccccttttccagggcacagt

SEQ ID NO: 636407 - DNA, 90 bp, Homo sapiens
ttcgagctgcgcatcgtggatctgattaaagccaccaaaaccctcaacaggggcatctctgagttcatcgtgatggctgcagacgccgag

SEQ ID NO: 636408 - DNA, 100 bp, Homo sapiens
cgccgctgggcctgtccgctggcgtcatggctaagtcctatcagccatggaaacaccattgctctcttcttccggtcactgttgccaaactataccatgg

SEQ ID NO: 636409 - DNA, 75 bp, Homo sapiens
cacgcctgctgttaaatacaagtattcagctcttattgagaaatcttcccaaggctgcagacaccgacggatttg

SEQ ID NO: 636410 - DNA, 107 bp, Homo sapiens
caggcccgcgggctcagctctcgccgccagcgggccgcagggacagggtcttgctctgtcacctaggctggagtgcagtggcatgatcgaattcctgggctcaagcg

SEQ ID NO: 636411 - DNA, 90 bp, Homo sapiens
tggactgcgaagaactcctaaacaggtggatccaggactgtgaaggccttattgttcgctctgccaccaaggtgaccgctgatgtcatca

SEQ ID NO: 636412 - DNA, 90 bp, Homo sapiens
tcggactcagactccaggtgaagcagccagcagaggtcagagagagacagctcacgttccgggaaaaccagtagattcccagacatcgcg

SEQ ID NO: 636413 - DNA, 100 bp, Homo sapiens
ggagatttcagtgcattgcctcccctgggtgctcttcatcttgggatgctttgttcttcctgaaggatttcttcacaagtctttctgcagaagtagagct

SEQ ID NO: 636414 - DNA, 82 bp, Homo sapiens
agcagaagcgtctgctcaggttgcagcaggagagagcaagagtgagccatggagctacgtgtggggaacaagtaccgcctgg

SEQ ID NO: 636415 - DNA, 99 bp, Homo sapiens
aacaacatatctacacctctctaaaattgctgcctctggtggggaagtggaagatggtggatgcttccaaaagcatcgaagctgtccatgaggacatcc

SEQ ID NO: 636416 - DNA, 98 bp, Homo sapiens
gttttaatggttggacctaactttagagttggaaaaaaaattggatgtggcaattttggagaattacgattaggttgggataattcttcactattcca

SEQ ID NO: 636417 - DNA, 75 bp, Homo sapiens
ggatcactggattgctgacggcagccctctcagatatgaggccccaggattcctggcgaggtcctcctccccttt

SEQ ID NO: 636418 - DNA, 144 bp, Homo sapiens
cttacacagaactattgagcagaacataaacaacctcaatgtctccgaagcagatcggaagtgtgaggtggaaagccagatgacatcaccgtccttctttcaatagtggctgagtatacagactagctgaggtgtcaagtcctg

SEQ ID NO: 636419 - DNA, 100 bp, Homo sapiens
ggagcttgccacaaagaacaaaaaccgacttcggagaatactggggacaatgactcattcttcccaggacactggttcttgtggcattcaggaagatgga

SEQ ID NO: 636420 - DNA, 136 bp, Homo sapiens
ctggggccggcgggagcgcgaacgagcgacggcggaacccgtgggcctgtggactgcagcctcggcggtcagcagctgatgttctaatcatgtcagataaagatgatattgagactccactgctaactgaagcagc

SEQ ID NO: 636421 - DNA, 83 bp, Homo sapiens
gaagaggtcccaatcccccactctttccgccctaatggaggtctccagtttcgggaaagcaggcaggatgggagagtcgccga

SEQ ID NO: 636422 - DNA, 82 bp, Homo sapiens
actcgccctccgtctgggccgccgtccccgggaaaacgttcgtcaacatcacggtgagaagccctaccactgcaactgggac

SEQ ID NO: 636423 - DNA, 90 bp, Homo sapiens
cttgaagcagcaattgcccttaaaacatcatccctgccctggatcggcctggagccagtgcccaaacctaagtcagtgttagtctaccac

SEQ ID NO: 636424 - DNA, 110 bp, Homo sapiens
accgggatcgtgaccgagaccgtgaccgagagcgtgaccgagagcgcgaatatcgtcatcgttagaaggccggatcacctcaacagtcacgtcagacaagtgcactcaac

SEQ ID NO: 636425 - DNA, 90 bp, Homo sapiens
actcttttaaagtatatgtatgacttttaaaagagagagcttgtgaaactgagggaatagacactcttgcactcctgtaatgagcctggc

SEQ ID NO: 636426 - DNA, 76 bp, Homo sapiens
tgatccgagaccctcgctcccccatcaacgtggagagcttgctgggtgtgaaggagctgtgtctgctgctgcttaa

SEQ ID NO: 636427 - DNA, 130 bp, Homo sapiens
gccgaggcgtcgccgcatcccggacggtacttctgccactgctgctccgtggagatcgtcccgcgcctgccgacaatgcagatcttcgtgaagactctgactggtaagaccatcaccctcgaggttgagc

SEQ ID NO: 636428 - DNA, 75 bp, Homo sapiens
ctcggggcttagatctccctcaagtcacgtggattgttcaggtgttctcctgccggagcaatatgaacaagcacc

SEQ ID NO: 636429 - DNA, 103 bp, Homo sapiens
atgaagaaagacgtgcggatcctgctggtgggagaaccatgcttttcacttccactgcatctctcgctggctcaaaacacgacaggtgtgtccattggacaac

SEQ ID NO: 636430 - DNA, 98 bp, Homo sapiens
cggacaacggagaccagacctactgcagccacgcgggcgagcggctgtgtggatgtcggcgaagccgcgggcgaggccgccatggcatcagatgaagg

SEQ ID NO: 636431 - DNA, 103 bp, Homo sapiens
cccaactgcagatcctaattccatcccgctggtgctatgtgcagatcttaactcattgccagattcagaaaccagactgtgatgactgggagagcgggctgaa

SEQ ID NO: 636432 - DNA, 82 bp, Homo sapiens
atttatgccatttcagctacagtgttcacatgagaaagatcagtctaaagaaaaggagaagaaagtgaaaaaaacaattcct

SEQ ID NO: 636433 - DNA, 90 bp, Homo sapiens
cgaaattctgggccgaaatgatccgcctgcctcagcctccaaagtagctgagactacaggctttttagaccccgagaagaagcttttttc

SEQ ID NO: 636434 - DNA, 100 bp, Homo sapiens
atctcaatctcagctcgatgccgccaagagcgaagcccagaaacagagcgatgagcttgccctgatttgaggatgtttcctgaggtcctactgtgtgcca

SEQ ID NO: 636435 - DNA, 83 bp, Homo sapiens
aggaaatgtgccagtgatattttccagctcttggataagcacaagaatacagagagcatggtggagcttctggacttgtatca

SEQ ID NO: 636436 - DNA, 98 bp, Homo sapiens
ggccacgccgcacctgcgcaacctcgccgtggccatgtgcagccgctacggctccaaacgaatcctgcggtcccatgagattgtgctgccccccagtg

SEQ ID NO: 636437 - DNA, 90 bp, Homo sapiens
cgaacatgtcgcggcctgtcaggttcttgggtgtctctggggagtccctgggccagaccttcctccagactccagcccacctcttcggag

SEQ ID NO: 636438 - DNA, 99 bp, Homo sapiens
accagcatgccctggatgttgtcaacatggccatcaccgagcaccctgagaacttcaagacacaatgtaggaagtcttttccacatggcagatgatttg

SEQ ID NO: 636439 - DNA, 75 bp, Homo sapiens
aagagttcctggatgacctcttcgtctttatgcagaagagggatgtgatcctcaaggtggtggacaacagaaaga

SEQ ID NO: 636440 - DNA, 83 bp, Homo sapiens
gtgaaaaataccacgacaaaaccaccctatttggtgccctggttgtcagatgttggaaagcagtaggacggaacatactcttc

SEQ ID NO: 636441 - DNA, 100 bp, Homo sapiens
ccacatggcttgaacttctcacagcatgcctgctggattcgaagagatggcattcaagtgcttaaaaattactatactggcaattgctggagaagatttt

SEQ ID NO: 636442 - DNA, 100 bp, Homo sapiens
attacgagaaatgttagagaagaaagacagctttgtggaagagacctcgaagtagggggaaaactgcagtggaagatgaggacagcatggatgggctgga

SEQ ID NO: 636443 - DNA, 100 bp, Homo sapiens
ttttggattacataaaccagtcacccaagtgcattgcctttggaaacgagatattcttgtgactactccaaatcgactaatctatttattaaagcaagat

SEQ ID NO: 636444 - DNA, 96 bp, Homo sapiens
aagacaggagccctggaatgtgaagagacatgagaccatagccaaacccccagatccagatgcagaggtgtgccttcatgtactgaggcttgtcca

SEQ ID NO: 636445 - DNA, 100 bp, Homo sapiens
aaaatatctgttaacagactgcttttacacctacctgcaattctcattgcaagatcatcgcctccctggtttatagtagacagaccttttctgtttttca

SEQ ID NO: 636446 - DNA, 100 bp, Homo sapiens
ccgaagccttcctttatcgctttcagacttcacagagaatgcagttgtcttgacttcaggtctgtctgttctgttggcaagtaaatgcagtactgttctg

SEQ ID NO: 636447 - DNA, 123 bp, Homo sapiens
ctctatgtggaccctgcggaatccaccggcgcagtttcatctagcgactgtttgaacttcaatggatgctgatccattgtgaccccctgcggcccaggagagaaacttgccatgagctgccag

SEQ ID NO: 636448 - DNA, 50 bp, Homo sapiens
ccgggcccaacagcaacaggtctcaattgccacagcacagatggagggcc

SEQ ID NO: 636449 - DNA, 83 bp, Homo sapiens
atccggacagcggcacagaggagggaggtgtcgtgaaaactacccctaaaagccaaaatgggaaaggaaaagactcatatcaa

SEQ ID NO: 636450 - DNA, 100 bp, Homo sapiens
catcacgcccatcaccactaccaccacgggtggttcgtcatgattgcaactgggtgggtcaaagatatggatgcagagagggaagccctgcagagcactg

SEQ ID NO: 636451 - DNA, 90 bp, Homo sapiens
atcatggagaacggcaaggtggtgggcgtgaagtctgagggagaggcagtgacatcagtgtctggcccaggtgagcacctccgaaatgcc

SEQ ID NO: 636452 - DNA, 100 bp, Homo sapiens
cttgcagcctcccccagaaagcaatgataattcccaggacagtcagtctggtactaacaatgcagatgagtttgatgcctacatcattgtgtctttcgtg

SEQ ID NO: 636453 - DNA, 100 bp, Homo sapiens
tttgccatccctttgattgagaaacttcatggggaactgcaagacaggaagagaggccgtgcccctcagaacctcaagaaggcatgaagccagcccctgc

SEQ ID NO: 636454 - DNA, 83 bp, Homo sapiens
tatcaccacatttgtgagaggaaaaatacagttatttctcaaactctgaggctgcggagttcacacattgaaatctgtcatct

SEQ ID NO: 636455 - DNA, 82 bp, Homo sapiens
gtatttgtgtgacttgactcttcaaacacaaagctccctgtgctgtcaggaatctacaggacttggctcgtatttacattcg

SEQ ID NO: 636456 - DNA, 100 bp, Homo sapiens
ctgtgctcgcgctactctctctttctggcctggaggctatccagcgagtcatactccatgggtttatgtgataaatgatcttggcatagaagagaattta

SEQ ID NO: 636457 - DNA, 75 bp, Homo sapiens
gggagtgcaagcttagagcgtctggccaagaatcagaggaagtggttttctggatatgccgcagaaggatccgtg

SEQ ID NO: 636458 - DNA, 100 bp, Homo sapiens
acgccaccaatccgccctggatcttcacccaggaggccccggaggaggggaccgggggcttcggactgggaggtgctggtcctagggaagctcaagtggg

SEQ ID NO: 636459 - DNA, 80 bp, Homo sapiens
atttcaaccacagatggcactgccaacaggctgcaataggatctgtggctttggacacagcaaggtcacatggagagaaa

SEQ ID NO: 636460 - DNA, 83 bp, Homo sapiens
tcagaagtttgcagagataaatggagtatgagcattactggacagagttgagaggaactactcttttcttttataccgacaaa

SEQ ID NO: 636461 - DNA, 82 bp, Homo sapiens
tgggccccatctgccagctggccttcccgatgaggagcgggaaggcctcctgcaccctggagaccgtgtgggaagacaagca

SEQ ID NO: 636462 - DNA, 75 bp, Homo sapiens
gaaggcgtcggccggaggacaccccatcgtgcagagtttatgtggccgaggcagacaagtggaattaggccttgc

SEQ ID NO: 636463 - DNA, 75 bp, Homo sapiens
ctcccattcatgtgcctccaggttatatctcacaggccctggccaacgtcaacattgggagcctcatctgcaatg

SEQ ID NO: 636464 - DNA, 75 bp, Homo sapiens
agacacttcattgttccagcttctcgcttcaagctcctgaagctaaatgttgccagctacctacaaatgatttgc

SEQ ID NO: 636465 - DNA, 50 bp, Homo sapiens
tggacaaaggaacaggtatctcagatggagttttaacattgaatgcggag

SEQ ID NO: 636466 - DNA, 75 bp, Homo sapiens
cagtaccaaaggcaaatactcctgtaaatttgagtgtgataacaacgaacttgatgcaagtgataggtttgccaa

SEQ ID NO: 636467 - DNA, 82 bp, Homo sapiens
atcagacttttgtgttgcagttcgggcagcaatgaatgtggatcacgaggttaacctcttagtggaggaaattcatcgtttg

SEQ ID NO: 636468 - DNA, 100 bp, Homo sapiens
gcatcttctaagtttttggcaccatatactactttttccagaattcatacaaagagtagaggcgtttccatcaaccagttttgcaaggagttcaatgaga

SEQ ID NO: 636469 - DNA, 88 bp, Homo sapiens
aaacgctctttgttccagagcatggagatcagtgaaaggtgtagcagtcactcggcctacacccacagcatcgaccttgtgaacccag

SEQ ID NO: 636470 - DNA, 83 bp, Homo sapiens
ctggccgtgagacgtttcgggagccggagtctctccaccgcagacatgacgaaggtgaaatgacaatggatgctctgttggct

SEQ ID NO: 636471 - DNA, 51 bp, Homo sapiens
cagaaccacagtttatcatcccttccttgagaaagatcagtctaaagaaaa

SEQ ID NO: 636472 - DNA, 100 bp, Homo sapiens
aacgaaacctggcacggctcttgcttccgctatactgacttctgttgaaaccattcaaagctaaagacatggaccttcagcagtgtaagaagatattgta

SEQ ID NO: 636473 - DNA, 83 bp, Homo sapiens
ccgggcgctggtctgctcccagccggtgacttaagagattaaaattaatttggttgctgttggttctgaacaaataatgagtt

SEQ ID NO: 636474 - DNA, 90 bp, Homo sapiens
agaaaatattcatcaacctagagctgccaagaagcattcttcatctaaagataaggtgctcaggaacagcccatggaagaatcatatgaa

SEQ ID NO: 636475 - DNA, 76 bp, Homo sapiens
accaccaccgccgctgccccggctgcctcctccctgagatctgcgatttccttctggttggctgtcctgcgtgggt

SEQ ID NO: 636476 - DNA, 87 bp, Homo sapiens
cctggcaagcacctcgggatcccattccttcacagggaccctagccagatgcgtttagcccagcccctgctggtaaccaaggtcctc

SEQ ID NO: 636477 - DNA, 75 bp, Homo sapiens
acaacagaacttgtgaacaaggatctggatatttattataagactcttgaccagacactgcccatctctaagata

SEQ ID NO: 636478 - DNA, 75 bp, Homo sapiens
atcccatgtgtctaaagagtgtaaagactccttgaggagaatgaccagctgatccgctgtattgtggagtatcag

SEQ ID NO: 636479 - DNA, 74 bp, Homo sapiens
agacttcttagacttggaggaggtatgcctggactgggccaggaagcctggagccagaggacttttggtggctg

SEQ ID NO: 636480 - DNA, 100 bp, Homo sapiens
ttcatttccatttctaccttgtatgcctcaatttgctggatttaagcactgctgcactttatgagatggggcattctcttctcccaccctcgggacttta

SEQ ID NO: 636481 - DNA, 98 bp, Homo sapiens
tgccatcaagctggactcgggagtggtgaaacgcctgtacacgttggatgggaaacagaatccagattatcttcagtattctatcagtacagctctct

SEQ ID NO: 636482 - DNA, 74 bp, Homo sapiens
aaaagaggctcttcctcctcctcccgcgacggactatgatttaatctccaaagaaccaaagccttttgtatttg

SEQ ID NO: 636483 - DNA, 83 bp, Homo sapiens
gtgaaagagaagcacggctccgactactccaagtaatctcaggggcgatataatcaatgaggtggtcctaaagttgctcaagg

SEQ ID NO: 636484 - DNA, 82 bp, Homo sapiens
gttaaggattccaagtaactcttatttggtaagcagaattttgtacagtttctgtacagcattcaaacgttcttccagacaa

SEQ ID NO: 636485 - DNA, 88 bp, Homo sapiens
tgattcaggtggccagcagggagcagctcttgtacctgtatgccaggtacaaacagattctgtttctggcgtctgcatacgcaagtcc

SEQ ID NO: 636486 - DNA, 75 bp, Homo sapiens
cttcttttgaacaccatgtcccaagaggagaaggcggcttacctgagaatacctctgacagtgacagatatgcct

SEQ ID NO: 636487 - DNA, 97 bp, Homo sapiens
gcgataagagtcttcagtttgttgcagaaaaaaataaagaagcttgaaagtgtcattactgcagtggttataaagtcagcccgggttatgaagaagg

SEQ ID NO: 636488 - DNA, 82 bp, Homo sapiens
cccgagacaagctgcccagcacagggtggcccagttgaaatccttcccttcctctaccttggaagtgcctaccatgcatcca

SEQ ID NO: 636489 - DNA, 72 bp, Homo sapiens
tcgtcccacctgccggttcttcatgaaagctatgtcttctcattacactgaagaccttttgccagaacagtg

SEQ ID NO: 636490 - DNA, 118 bp, Homo sapiens
gcgcagcgccgagcgcggcccgggcgccatcgagccttggcggcggacgtgcaggtaatcattaccaaatgaggaggaaaggacgatgtcatcgaggctctgcagcgaggcatccttc

SEQ ID NO: 636491 - DNA, 75 bp, Homo sapiens
cgtggtcccagtgccttcagaacttaccccaccaacaactgaacgctttggtcaggctgctacaatggaaggaat

SEQ ID NO: 636492 - DNA, 100 bp, Homo sapiens
tgtagcgtccctccctctcaaccacaataacaggcggagggtcggcgtaggtggtggtgcctcccaaagagctcgttttagctggcaaggatgcagcagc

SEQ ID NO: 636493 - DNA, 100 bp, Homo sapiens
cgatgcacccatgtcccaggtgtatggagcgccacatctcctgagattatttgcacctgtggccttgccgaagaactggaaaaagagaagtcaagggaac

SEQ ID NO: 636494 - DNA, 97 bp, Homo sapiens
agagattcagcccagtgtgctgcaatagctgaacgtttgatgcatttgacctctgaagaactggtgataattcaggatgatggccctgaaaaattgg

SEQ ID NO: 636495 - DNA, 74 bp, Homo sapiens
caccagagtcggcgtaactatcgcctgacagggatctcgaggacctggaagaagcagaggagccagacatggag

SEQ ID NO: 636496 - DNA, 109 bp, Homo sapiens
ggatcgagcagctgaacgagtgcaagcagctgtccgagtcccaggtcaagagcctctgcgagaagctttatcttcaagccaggatgaagggagactgggcaagactctt

SEQ ID NO: 636497 - DNA, 90 bp, Homo sapiens
ggcctactcgcccgccaccctgcgctgccgccgctctgaggagttaaagatctggtgaggaaggatattatcctgaacttacagaatttt

SEQ ID NO: 636498 - DNA, 90 bp, Homo sapiens
ggcacatgtctggttggatgaatacaagggcgccctgcgtccggcagaggaggcgagcatcccgctcaggtgatgaggaacccctcgcgc

SEQ ID NO: 636499 - DNA, 83 bp, Homo sapiens
ggccggaagatccacagccaggaggaagccttgcgggatgaccgagtgggagacagcagcaccagcggtggcagagaccccag

SEQ ID NO: 636500 - DNA, 93 bp, Homo sapiens
ctgcggcagaagccgagttcaacatcctcctggccaccgactcctacaagttcaaggagcagggacaagttacaggaatgttctccaagcagc

SEQ ID NO: 636501 - DNA, 74 bp, Homo sapiens
tggtatttgctaacgtttagagagtgcttccccttgccgagcactggatatgtcttgtcgttcaagacttgcaa

SEQ ID NO: 636502 - DNA, 100 bp, Homo sapiens
atctgaaagacccccaagaggagcttgtttgggagtgggggcagacggcgttttgcgcccaactggcagtcatggatcaggtaatgcagtttgttgagcc

SEQ ID NO: 636503 - DNA, 75 bp, Homo sapiens
cgcattgcatcacatgattttgaccccacagactatcttgctaatcatggccggttaaatgagtctgaagccagg

SEQ ID NO: 636504 - DNA, 74 bp, Homo sapiens
tttgatgtctgacaacgtggatcgttgttttgaaacgtcatgcttcaccccttcctccatctgctgcacctacc

SEQ ID NO: 636505 - DNA, 75 bp, Homo sapiens
gttgcgagctgcagctgcgatctctgtggtaggcccagctatctcacgtgagagggcagtggaactccttaggaa

SEQ ID NO: 636506 - DNA, 98 bp, Homo sapiens
aaatgctcagtcttagacgactgcgtcgtgctatgaccggactttttcttgaaagagtttccaggatggcttctgcatcaacttctaaatataattca

SEQ ID NO: 636507 - DNA, 100 bp, Homo sapiens
ctgcgggctgagcggcgagtttccgatttaaagctgagctgcgaggaaaatggcggcgggaggttgtctgcattcaaaagagcattctattaaagctacc

SEQ ID NO: 636508 - DNA, 100 bp, Homo sapiens
agcagaataactaaaaatgtgcctaaacaaagctctcagcttgatgagcccgaacgagaactggaattgcagaaatcaaacggcagagaaagcttgcatc

SEQ ID NO: 636509 - DNA, 100 bp, Homo sapiens
gaagagttcattcttctgagtcaaggagaggtggaaaagctaatcaagtgcgacgaaattcagaatacagattctgttcatcttgctctgaaattaaata

SEQ ID NO: 636510 - DNA, 98 bp, Homo sapiens
gacccggtgtgtggcgcgcccagagccccgcgtttcagccctagggaagttccagggtctccctccactgctgtagtaacccgggtccggggcctcgg

SEQ ID NO: 636511 - DNA, 100 bp, Homo sapiens
tttcgtctttacaaggtagccgtttggcgtcgtgagcaggaacgaatgcaggaatttgggaactgagctgtgcaagtgctgaagaaggagatttgtttgg

SEQ ID NO: 636512 - DNA, 74 bp, Homo sapiens
caggtcacacactgttgcagcacaggttctgctccagacgagcccttaccacgttgactcactcctgcagctca

SEQ ID NO: 636513 - DNA, 83 bp, Homo sapiens
ggaaccgctccttggaaggtcgctgggaggtggcattcaaaggaactgtggctgcaccatctgtcttcatcttcccgccatct

SEQ ID NO: 636514 - DNA, 100 bp, Homo sapiens
ggcgaccggagaatccgcatctggggcacggagggcatctatcgagctgtgcctattcgagtcaatccaagagtgagtaatgtgaagtctgtctacaaaa

SEQ ID NO: 636515 - DNA, 83 bp, Homo sapiens
ggaaagcagcgtcaggagccatagtacctacagcagcactccaggaactgcaagcacatgttgaccagataactgaaatggca

SEQ ID NO: 636516 - DNA, 50 bp, Homo sapiens
ctcgaggacgctggagcccagcaagttcaaatctgaacatcaatgatgta

SEQ ID NO: 636517 - DNA, 100 bp, Homo sapiens
atgaaatcctccccacttatgtttgtaaatgtgagtggaagccatgaggccaaaggcagttgtattgcgctggataaaacaagccttagaagaagggatg

SEQ ID NO: 636518 - DNA, 96 bp, Homo sapiens
cacgtcacctggcccctcaccatcaccatcctcatctctcttgggccagtacagtggtagcagttggactgaccattgctgctgcaggatttgcag

SEQ ID NO: 636519 - DNA, 100 bp, Homo sapiens
atcggagaataatttctttctcgctgatcgcctaacttctactgacgaagcttggaagttgcagaaggttgcagagaacacatcttagaagatgaaaaac

SEQ ID NO: 636520 - DNA, 74 bp, Homo sapiens
ctcgtgtgtgtagctttgggaaatttggaaatcagagagatcaggcttcttgcacctgggtggcctccgcactg

SEQ ID NO: 636521 - DNA, 75 bp, Homo sapiens
cggcaggcagtacccctcttctctctacttcatgtacacgagatcttccttgattgtcactacaattgggaattg

SEQ ID NO: 636522 - DNA, 100 bp, Homo sapiens
taatattaggggtgttacgtataggctcactcaagggtggttctcttcccaaagtggaagccaaattcatcaattatgtgaagaattgcttccggatgac

SEQ ID NO: 636523 - DNA, 99 bp, Homo sapiens
ggcgaagacgcgaccgcggcgcgagtcaccatgggtgcttatttgagaaatgatatatttgaagacgctggaatactctgtcaaagagtgaacaaacaa

SEQ ID NO: 636524 - DNA, 75 bp, Homo sapiens
gctgccgttgaggaggagacggaggagaccgacgttgttagtcatccgtccttggctcaggatttggagagcttg

SEQ ID NO: 636525 - DNA, 50 bp, Homo sapiens
gccgtgcaggggggcggagcctactcactctccgaatcagagcagtgcct

SEQ ID NO: 636526 - DNA, 51 bp, Homo sapiens
ccagggcggacaacgagaagtcgtcagcagtctctggtcccagcccacccc

SEQ ID NO: 636527 - DNA, 100 bp, Homo sapiens
ggaataggtgtatcaagtaatggtgcaaagcctgaaggtatctgtgcagatcaagtgaaagttttcagctatcatcgctaccaaagagtagaaatgaatg

SEQ ID NO: 636528 - DNA, 83 bp, Homo sapiens
aaattaccccccatatctcccgtgtccacgtcaggggatgtctgcaggtgggtgtttctctatgagaagggctaccagacctc

SEQ ID NO: 636529 - DNA, 97 bp, Homo sapiens
gggagagtgagagaaaggctggaagacgaggaatactcccccagttgcaagaggcgcaggaccgtggaagacttcaacaaattctgcacctttgtct

SEQ ID NO: 636530 - DNA, 125 bp, Homo sapiens
ctaagagaagtcacaaaacagcagatttcccaagagcagcggaaaatgatccagtcacaggcagcaattccatttccgtgagggcgtttctagatgaagatgacatgagcttggaagaaataaaa

SEQ ID NO: 636531 - DNA, 89 bp, Homo sapiens
gctgctgatgaagatgatgacgatgatgatgaagaggatgatgatgaagagtctgctcaccaggtggccagataccgcccacgtgcccc

SEQ ID NO: 636532 - DNA, 74 bp, Homo sapiens
cactgaagacgtctgcgtgagaatagagaccaccgaggccctgggaggagcggggacactgaggacctctctcc

SEQ ID NO: 636533 - DNA, 100 bp, Homo sapiens
tgttattgactttcttgtattgcgtcaattttatgatgaagcaagacagaggaattggcagtcttctcctgcaaaatcttccttattctgaaaagatgac

SEQ ID NO: 636534 - DNA, 50 bp, Homo sapiens
ccagtcccagcttccagtcacagcatagaggaagaatacaagcgattgag

SEQ ID NO: 636535 - DNA, 82 bp, Homo sapiens
cgtggacgtcactggccctggtggggattgacagccacgggaagaagctccaccatgaggcgaggtggatggaggaagcgag

SEQ ID NO: 636536 - DNA, 51 bp, Homo sapiens
atgggccgccgccccgcccgttggtgaccctggcaaagatgagagtgcaca

SEQ ID NO: 636537 - DNA, 85 bp, Homo sapiens
ggagcatgttaaaaaaactacagcaccttacaaatatcccagaaagagccccaaaggcttcctggagagctacgaggagatgctg

SEQ ID NO: 636538 - DNA, 78 bp, Homo sapiens
tatgagaaagccattctggcaggggctcagtttcaggcaaatagttggaaaaatcttatcctcaaagtatgtcaaggg

SEQ ID NO: 636539 - DNA, 88 bp, Homo sapiens
atcaatgtatttcttaccaaaagacactttcagtgcaaaatggcaactcttaaggaaaaactcattgcaccagttgcggaagaagagg

SEQ ID NO: 636540 - DNA, 100 bp, Homo sapiens
gtcggtcttttgattacaactatagaagatcgtatagtcctagaaataaatacctgggcacaggacttcaaagcaaacacagattccccctcccccttaa

SEQ ID NO: 636541 - DNA, 95 bp, Homo sapiens
gcggggcaagtggctcggaacacagcttggattccttagcaccaccacagctcagccagaacagaaggcctcgaatctcattggcacataccgcc

SEQ ID NO: 636542 - DNA, 101 bp, Homo sapiens
gacagagccagggcactcaccaggctgcaagaacagtgctggggtcgaggcttgaagagtggagagaactttaagttgttatatgacttggcagatcaact

SEQ ID NO: 636543 - DNA, 75 bp, Homo sapiens
gccttgagggtccacaccgcgagggaagatgcgtgcgcccattggagcagctgcagatgacggccgattaaaacg

SEQ ID NO: 636544 - DNA, 51 bp, Homo sapiens
gaaaaagtaccatcatttgaaacaggtcagctacacaacctggatcttacc

SEQ ID NO: 636545 - DNA, 99 bp, Homo sapiens
cttgctcgggcaaaagttgtgcattggcccgatcaagcctgacttctagccaagctaagggagaacattgagcaattcttcaccaaatttgtagatgag

SEQ ID NO: 636546 - DNA, 100 bp, Homo sapiens
aaaggctaatgtgtgctgtgttaaattcagcccctcttccagataccatttggctttcggctgtgcagattacatgaagcagatgacatttgaagcccaa

SEQ ID NO: 636547 - DNA, 98 bp, Homo sapiens
agagggtcgggcggacgccgcctgggttgctctttgggattgctcagccccagctgcctccaaaatgcctgctttcagggcctacgagtgaagggcta

SEQ ID NO: 636548 - DNA, 73 bp, Homo sapiens
aattccctcatgaaaagctatgggttttttatcagcaattggacaccctttccccaaaatgatttttaatcat

SEQ ID NO: 636549 - DNA, 101 bp, Homo sapiens
atctggttatgatacaatcttgcgtgtcctgggctctaatgtcagagaatttctacaggctgaccagtgcaccggtcttcagggcttcttggttttccaca

SEQ ID NO: 636550 - DNA, 91 bp, Homo sapiens
gtctgcaagaccgcgaggcgagacctcttgtgagaagccctaccactgcaactgggacggctgcggctggaagtttgcgcgctcagacgag

SEQ ID NO: 636551 - DNA, 90 bp, Homo sapiens
cttctaggagcctggggttcggcgctatggaggagctcgatggcgagccaacagtcactgtgtatgtggaatttgatgatcttgaatggg

SEQ ID NO: 636552 - DNA, 98 bp, Homo sapiens
gcacaaccacagcaagagcacctggctgatcctgcaccacaaggtgtacgatttgaccaaatttctggaagagaacaactctgctcatggtgattaca

SEQ ID NO: 636553 - DNA, 100 bp, Homo sapiens
cagcatctgcgatgtgaggaaaggcacctccaccaggaggcaggtggaagtcatcataaagtttctgtttcacccgtcgtccatgttcgaggactctgtg

SEQ ID NO: 636554 - DNA, 75 bp, Homo sapiens
gaacctggtgttttagaggataccttggtcccagagtcatcatgaaggcacacaaaccaatggtctggactttca

SEQ ID NO: 636555 - DNA, 82 bp, Homo sapiens
actcatctgtcattcaaaggaaaaaagtagctgtcattggtggtggcttggtgggcagtgtcaaaccgggaaatgcttatag

SEQ ID NO: 636556 - DNA, 80 bp, Homo sapiens
cgatccagcctgcggagcctgtggggcagaatatatcactgatgtccattcgaatgacctgtctacaccacagatccttc

SEQ ID NO: 636557 - DNA, 100 bp, Homo sapiens
cttcatgtgtctcttctaagctgaataaagctgttttggaactgtcaggtacctcaaagcgtaacatttagaatgctttcatctagctgcagttttggtg

SEQ ID NO: 636558 - DNA, 100 bp, Homo sapiens
ttcagcagcctctgttattttactcccatcctgggagcagccattgctgactcgtggttgggaaaattcaaatagcagaccccacgttagctgaaatggg

SEQ ID NO: 636559 - DNA, 90 bp, Homo sapiens
ttgttgttaagtttgtggtgaaattctttccgcctgaccacacacaactccaagaagaactcacaaggtgtgaacccacatccctgcccc

SEQ ID NO: 636560 - DNA, 83 bp, Homo sapiens
tgagcttcaacaagaacctgaggtctagggagtgagaacgtgatttctcagccgaatgagtttgaacataccccacaggaaga

SEQ ID NO: 636561 - DNA, 101 bp, Homo sapiens
cgaccgcgacaagcataacgaacctaaccctcagaggtttatgaaggcgagcgtgccatgacaaaggataacaacctgcttggcaagtttgaactcacagg

SEQ ID NO: 636562 - DNA, 100 bp, Homo sapiens
cgggcctttcgtggaaggctctatcgtccgcatctcgatggagaacttcctgaaggatatggagtaatagtactaaatcccaatgaaaactatattgaag

SEQ ID NO: 636563 - DNA, 75 bp, Homo sapiens
tcttttgtgcaagatgagcctcaagtgcttctgcattacaagaatggatcttggagaatgtctgaaagtccatga

SEQ ID NO: 636564 - DNA, 50 bp, Homo sapiens
gccgcctcgcctactcactctggagccgacaatgtgttgaacatcattaa

SEQ ID NO: 636565 - DNA, 101 bp, Homo sapiens
taagactttatgatatcttggctttgttacctccaaaaacttatgaagggaaaagtggcattggtcatgaggcatcattaaaacggaaagcagaggaaaaa

SEQ ID NO: 636566 - DNA, 100 bp, Homo sapiens
cggcgccccgcgcctgccgctgccctacggcttctccgccatgcaaggctggcgcgtctccatggaggtgtggtcactcacctgtctaccactcccgtga

SEQ ID NO: 636567 - DNA, 98 bp, Homo sapiens
tgggatcccagaactccttgtaatgctgggaccttctctcagcctgaaaaggcatgttttccacaaatcctgcgtggatccctggcttagtgaacatt

SEQ ID NO: 636568 - DNA, 88 bp, Homo sapiens
gcaagaagacggaaatccaaaggcagacagtacgggctcccttcgccaaactcttcattttctctaccatggcaaaagttataaccac

SEQ ID NO: 636569 - DNA, 99 bp, Homo sapiens
acttcgagctgattcagcgcatcggcagcggcacctacggcgacgtctacaaggaagggaaaaggccgaggcatcagcgtgtgaagaccgcaaagacga

SEQ ID NO: 636570 - DNA, 100 bp, Homo sapiens
ctcgcaggtggactcggtccgtggcttcggaggcaagtttggtgtccagatggacagagttgatcagctggaaggcgacaccatcaccctgaaaccccgg

SEQ ID NO: 636571 - DNA, 75 bp, Homo sapiens
attgcctgcactatgcccgcaaggtgggctacagaatggagctaccacatggtcaggaggaagagactcacaaag

SEQ ID NO: 636572 - DNA, 75 bp, Homo sapiens
gctccctacccatccgccaggagccctcttccttcagataagatttgtgaccaaatcagtgatgctgtccttgat

SEQ ID NO: 636573 - DNA, 100 bp, Homo sapiens
tgtgactgtagtccacatggagctctcagcataccgtgcaacaggttggtcaaagaaaaagtgatgtatgaaaaagaggcaaaacaacaagaagaaaaga

SEQ ID NO: 636574 - DNA, 100 bp, Homo sapiens
aaattcttatgcgacaagacttctaaataatcatcaagttccacctcagtctgaacctgagagcaacagaaggggaaactgaggcccaaggaaattgagt

SEQ ID NO: 636575 - DNA, 100 bp, Homo sapiens
cattgatgaaattaaagatgcatgctgatggcgataagtcattaccacagaacatccatgatagcagtcttctgtaaatcgaacttttcaagaattctct

SEQ ID NO: 636576 - DNA, 100 bp, Homo sapiens
ctttcctgctggtggcaaccgcctacgagacactcaaggttgaaaggattgttgacaaaaggaaaaataaaaaagggaagacagagtatttggttcggtg

SEQ ID NO: 636577 - DNA, 74 bp, Homo sapiens
ggaatggcctcctcccttagctccctgttcttggaacctttgtaatcaagttgataaggaaagtactgtccaaa

SEQ ID NO: 636578 - DNA, 100 bp, Homo sapiens
caagagcacactccagcttccgcagcctgcaattctgtggtgttcttggtcacacatttatggagtttctgaagggcagtggagattactgccaggcaca

SEQ ID NO: 636579 - DNA, 100 bp, Homo sapiens
tttaccccctcccccctgagcccgaggtgctgacgtcgcaaaaaaattggataaatgattacggacctgaagccaaagaacaagatgcgctagtggacag

SEQ ID NO: 636580 - DNA, 80 bp, Homo sapiens
gtgaccggacttctcacccccaggatgtcatcgaggtacaaggcgagtggataattccaacacaagactggcagtccaaa

SEQ ID NO: 636581 - DNA, 100 bp, Homo sapiens
ttcgtctgtgtcctattgagttttttcatggctagagtattcatgagaatgaaactgccccatgaagactttgaatttatttcaggaacacgaatgcgca

SEQ ID NO: 636582 - DNA, 82 bp, Homo sapiens
agccgacgttcgagaggaagattcttacctctttgatctcgacaataaggtcaaaatgcagatcttcgtgaaaacccttacc

SEQ ID NO: 636583 - DNA, 51 bp, Homo sapiens
gaaaaaggatgttgaccggacagtgaccaaagacttgaccactcaaagtcc

SEQ ID NO: 636584 - DNA, 82 bp, Homo sapiens
aaacaggcgccgcgggctccgcgcccggccggacccgggcccgagagctcaggccccggggcctccagcggcaccagcggag

SEQ ID NO: 636585 - DNA, 75 bp, Homo sapiens
atttcctcctggacttgaggctgacagctgcagctgtgatcctcggctgtctgttggcattgacgggacctgatg

SEQ ID NO: 636586 - DNA, 74 bp, Homo sapiens
tctggtcaaatttcagccatcagcaacctggagtactcgggtactttgagttcagtggctcaccccagcctcct

SEQ ID NO: 636587 - DNA, 101 bp, Homo sapiens
tttgggaatgtcaagctggtggtccacgactgtcccgtctggttggatatgtcaagtgaccagatagctgccaatctgcaagcagttattaatgaagtttg

SEQ ID NO: 636588 - DNA, 90 bp, Homo sapiens
tgaaggacaagatggagggcagtgattttgaaagctccggagggcgagggttaaaaacttttgtctggccctctgagccccaatgagagt

SEQ ID NO: 636589 - DNA, 96 bp, Homo sapiens
gatctgctgacgagcctcctgcagcggaacatgaccccccaaggcctgcagatcatgattgaggcctgccttgctctgccaggaaccatgagtgag

SEQ ID NO: 636590 - DNA, 90 bp, Homo sapiens
agtcgggccaagagaagaggcggtggaggacacgacgcgcttaaaggccatgttcactgcccacttcccatgagatttctccagtgcccg

SEQ ID NO: 636591 - DNA, 75 bp, Homo sapiens
acgggcagctgggctgcagtgaccccgctttcctcacgcccaggctttacaggaagtatggtgctggcatctgct

SEQ ID NO: 636592 - DNA, 100 bp, Homo sapiens
ccaagccaaagctgaccatccatggggacctgtactatgagggagaaaagatccatgaggacatttttgacatcatagaccgggaggcagatggtagtga

SEQ ID NO: 636593 - DNA, 100 bp, Homo sapiens
catcagcaaattgaacttctggaagttccatggaaaatgggagaccacctgatcctgcagactgggccgtgatggatgtcgtcaattatttccgaaccgt

SEQ ID NO: 636594 - DNA, 50 bp, Homo sapiens
cgaatcatctccacttcttcgcgttcggctggccctgcataactcccgtt

SEQ ID NO: 636595 - DNA, 96 bp, Homo sapiens
ctcctgagtagctgggactacagtggctgtcgctgggcgcggactccaacgggagcggcgtctctgtgctgctggagctggcacgcctcttctccc

SEQ ID NO: 636596 - DNA, 100 bp, Homo sapiens
ggaaaaagtgcagattggatttgccagggcatgtagctctccaggcttgcaagcgattaccaggctgagaaggactctgccagcacggagccatactact

SEQ ID NO: 636597 - DNA, 101 bp, Homo sapiens
gttgagtgatattgaccatgatggaatgcttgacagagatgagtttgcagttatgggcgcagttcttcatccacccactaatgatcagagatgcaattgac

SEQ ID NO: 636598 - DNA, 98 bp, Homo sapiens
cagaatgacaactccctggtctactttgcctactaccatggccttctggggaacagctatgaggtgtcaggtcgcattgaggccattgagggctcaag

SEQ ID NO: 636599 - DNA, 100 bp, Homo sapiens
cctggggctggaaattgcgctggaccgtcgccttgctcctcgccgcggcggggactgcaggataaagtggccagtgtgtacgaagccccgggctttttcc

SEQ ID NO: 636600 - DNA, 90 bp, Homo sapiens
aatgatttataccatgaaatgattgaatctggtgttatcaacttaaaagatgccacctctaaggttctgactaataagaagacgaccttc

SEQ ID NO: 636601 - DNA, 50 bp, Homo sapiens
agaaggttgggttcagaagaggggtatcagtcagagccggatctctcatt

SEQ ID NO: 636602 - DNA, 98 bp, Homo sapiens
actggctactatggctaccagccctgggcagcgagctgcaaaaatccctgcatgtcactgagtccaccatgctttacagaagaagacagatttagtct

SEQ ID NO: 636603 - DNA, 75 bp, Homo sapiens
gataaactcaacatcgacagcattatccaacggctgctggaagggcgtgctggaggtactgtcagaggttgaatg

SEQ ID NO: 636604 - DNA, 98 bp, Homo sapiens
caggcatttccttcagtgcttcctacagagaacaatggagccagaggtatgagcagcagcgggacaatcttgcccaacagtcattcaacatggaacaa

SEQ ID NO: 636605 - DNA, 75 bp, Homo sapiens
gccgagccgggccgcgccgccgctgccgccgccgcgcgcggctgcaagctttcttcctggtggcagatgacatca

SEQ ID NO: 636606 - DNA, 100 bp, Homo sapiens
cccctctgctgcaccacttcatgaatggcattgtgcccatcgtggagcctgagatcctccctgatggggaccatgacttgaagcgctgccagtatgtgac

SEQ ID NO: 636607 - DNA, 96 bp, Homo sapiens
aggattgtatatgaatactggaactatttgtcctcttccagaattgatgagtgtgggtcagagagccaaactgactatatctccagattatgccta

SEQ ID NO: 636608 - DNA, 100 bp, Homo sapiens
ccggcgggcagcgtggcctgcggccctggcctccgctgcagcgctcgcctggcccggaggcaatgtttggtgcacctcgatttggaggaagtagggcagg

SEQ ID NO: 636609 - DNA, 100 bp, Homo sapiens
ccccagctgcccggtgcccgaggaggcagccaagctcatggcctgccactgcgtgctgcagggacttcacagcccacacgggctacgaggtgctgctgca

SEQ ID NO: 636610 - DNA, 88 bp, Homo sapiens
gctgcagttgctggccgagcctggcctgggccgcgtccatcacctggcactcaaggcatccccacgctcatcatgctggacccgcagg

SEQ ID NO: 636611 - DNA, 82 bp, Homo sapiens
gaaaggatgacatatttttggacctgaaacagaaattctggaacacctatatgatgtcttgaacaagtcagcaaagaaaaac

SEQ ID NO: 636612 - DNA, 100 bp, Homo sapiens
gaacggatagctccctcctggaaaaggttattcaagaagcccaagcgaaagacctgctgagaagaccatttgatttaatgttggttgtgtgtctcctcct

SEQ ID NO: 636613 - DNA, 82 bp, Homo sapiens
caaagaatagagttgagcctgtgggacacttcggtgtccccaactcctgcccagccagtccacgcggtgccggctcctccag

SEQ ID NO: 636614 - DNA, 82 bp, Homo sapiens
gttgtgactgctttggacgtgggagtcacctgaaagccaggaaatgcccctgtcaaagggaacaggaagcagtccacggagg

SEQ ID NO: 636615 - DNA, 101 bp, Homo sapiens
cggggaaccaaagctctcatggatgaggtggtgaaagccacttctaggggctgcatcaccatcatagtgaagtacctggctttcctccgcaagcggatgaa

SEQ ID NO: 636616 - DNA, 51 bp, Homo sapiens
gtcttcctgcccaacaaacagaggacagtgagctagcaacatggaccacag

SEQ ID NO: 636617 - DNA, 121 bp, Homo sapiens
gagatttggagcccattttagaggcatctgttctatcttcccatcataaaaaagtactaggttttgacaagcttgcatcatgcgtgagtataagctagtcgttcttggctcaggaggcgtt

SEQ ID NO: 636618 - DNA, 100 bp, Homo sapiens
ggacaggcgacagcgacctgcggcagatctggtggctggacccagagctgacctatggctgcgccaagcccttcgtcttcacccagggccactccgtgtg

SEQ ID NO: 636619 - DNA, 100 bp, Homo sapiens
tgttagataaacttgtggatggacttgctacctcttgggtgaactctagcaattacaaggtgtttcaggcctcacctgaagatcatgaaaaatacggtgg

SEQ ID NO: 636620 - DNA, 88 bp, Homo sapiens
gcctgttcccggggcagatccaggttcaggtgagactgtggagatgagaaggtggtggacactcgtgatggaatggaaatcgtcctac

SEQ ID NO: 636621 - DNA, 100 bp, Homo sapiens
gaatgtgaagaaatgttgaaactatttaaagaggttgctagcttacaggacagtcattttgtttactcattcagccctgttgcaggtcccaataaactct

SEQ ID NO: 636622 - DNA, 82 bp, Homo sapiens
atagaggcagaactgcaggacatctgcaatgatgttctggcgaccactttatcaagttcttcgctccgtggtgtggtcactg

SEQ ID NO: 636623 - DNA, 75 bp, Homo sapiens
tgaccaaaggcagcaagttctacggcccgggcttgtttctggtgcaggtgacatcaaactcaccaaagatggcaa

SEQ ID NO: 636624 - DNA, 90 bp, Homo sapiens
gacaccaacatcacccacccatttgagtttgacttctatctgtgcagccacgcaggcatccagatgtcttcagtaaatgtaaaggtgacc

SEQ ID NO: 636625 - DNA, 83 bp, Homo sapiens
gacacgcctgggcccaggtgtggcgtctctgtccccatctggttttagaacggatgctctgctcctgagactgtcgctggtgg

SEQ ID NO: 636626 - DNA, 96 bp, Homo sapiens
tatcctcggaaacggtttgtggctggagtaggagcaaacagcaattccaggaggcagcatttgccaatggaaagctctaggaaacaccagtcttga

SEQ ID NO: 636627 - DNA, 51 bp, Homo sapiens
gttttctgtaccccttagtaggaacggcagagtcacggtggcagcattgag

SEQ ID NO: 636628 - DNA, 75 bp, Homo sapiens
gaacatttccccagaggagctcaaaatggagttgccggagagacagcccagggcaaacttgaagataaatctttt

SEQ ID NO: 636629 - DNA, 100 bp, Homo sapiens
ggagcagcttctttatcccttcatctgtggataagcaggtgcaccctttgctcccgggctcatccaccatcatgatccatgacttgtgcctcgtcttccc

SEQ ID NO: 636630 - DNA, 100 bp, Homo sapiens
caggaaacgaggcagcagctcttttcctggcaaccaacggtgcccatgtcaaccacagaaacaagtgggattccagtggaatgacactggtgatgcttgc

SEQ ID NO: 636631 - DNA, 98 bp, Homo sapiens
agaaagagctgaacactctgtgcagcgagttacatgttgagccatttcaggtgtgggcccatcgctggatggatctgtcagaacacggctttgggctg

SEQ ID NO: 636632 - DNA, 75 bp, Homo sapiens
ggagaagagccatggacatcatttgcaggtcatacctgcttgggtgctggagaatctggtaaaagcaccattgtg

SEQ ID NO: 636633 - DNA, 75 bp, Homo sapiens
cagcgcgcccgtggccgctgccgcctccgccccagctgtggatcggtccgtttcatcaagtctgtcagatgcaag

SEQ ID NO: 636634 - DNA, 75 bp, Homo sapiens
gacttcctcatgaagagactccagaaaggggtagagtggaacccccagctattagaggtcccaccccaaactcag

SEQ ID NO: 636635 - DNA, 76 bp, Homo sapiens
aaagcgaaggattgtggtcccgcctcacctggggtatggagaggaaggaagagtggctgacaagattttgaaaaag

SEQ ID NO: 636636 - DNA, 51 bp, Homo sapiens
tcagtttcagtttcccagaaaggaggaatgctgaaatacttttaaagctga

SEQ ID NO: 636637 - DNA, 100 bp, Homo sapiens
ctggacgctggacagggggcaaaagcacctgctcggtcctagaccagaaggagcacaggctggatggccgtgtcattgaccctaaaaaggccatggctat

SEQ ID NO: 636638 - DNA, 50 bp, Homo sapiens
gtaatcgcctgctttgattcattgaaacttcctgcctgacacagctcact

SEQ ID NO: 636639 - DNA, 75 bp, Homo sapiens
atgaagaaaaatttcagaaccatcacaaactgccaggcgggcaccacggcaggggctgagctaccctcatggaag

SEQ ID NO: 636640 - DNA, 98 bp, Homo sapiens
acagatagcgtggtgatcttctctggagaaggatcagatgaacttacgcagggttacatatattttcacaaggttggatggcaagcatgtggtgtttg

SEQ ID NO: 636641 - DNA, 96 bp, Homo sapiens
tgccaccggcttccctttgtaaattgagctctgcacgctggggagtttgttgggattcagagtcagaggagacgttgcaggtaaaaaatgccaaaa

SEQ ID NO: 636642 - DNA, 75 bp, Homo sapiens
acagtggcaatgagaccagtggaagcagcaccatcggggagacaagcaaggtcatcacactgaaacggtgttcaa

SEQ ID NO: 636643 - DNA, 83 bp, Homo sapiens
acatttcagaaatacagaagttgaagcagcagcttatgcaggtatggtttaggaatgatttattacaagcaagaaaaattcag

SEQ ID NO: 636644 - DNA, 98 bp, Homo sapiens
aagaacagcattactgattcccaaatggatgatgttgaagttgtttatacaattggccacggcatatgcctccaaggacggggtcctcactgaggcca

SEQ ID NO: 636645 - DNA, 83 bp, Homo sapiens
ggatgctgtcaacaagaagagcagttcccaggatctgcataaagggctggaccaagcccaatgcctttcatgtgtgtatcaca

SEQ ID NO: 636646 - DNA, 73 bp, Homo sapiens
ttcaaacagctgcttatttcggctgtgaaggacctgtttggggagccgtttccctggggagatggtaaccata

SEQ ID NO: 636647 - DNA, 95 bp, Homo sapiens
gggcatgcacgtggaagtgaaggaccccgacggcaaggtggtggccaaaaaatatcgcaactttgatattccaaaagaaatgactggcatctgga

SEQ ID NO: 636648 - DNA, 107 bp, Homo sapiens
gagcacttgagccacgtgcatgaaccaaacccacttcgttcaagacaggtgtttaagcgaatagcgggttttgcagcaattgttgcatatggattatataaactgaa

SEQ ID NO: 636649 - DNA, 100 bp, Homo sapiens
gggggcagtcccgggagaacctgcggcggccggagcgggtggagagattcaaccagttagcgtgaaagttggagataaagttcttctcccagaatatgga

SEQ ID NO: 636650 - DNA, 85 bp, Homo sapiens
caatgacatctcccctgagattggggagaaggtgcggactcttgttcttgcactggtggaggaacatatgcagcagaaaaaagag

SEQ ID NO: 636651 - DNA, 80 bp, Homo sapiens
gccggagctgggcgcggattcgccgaggcaccgaggcactcagaggaggttgttgatcattatgaaaatcctagaaacgt

SEQ ID NO: 636652 - DNA, 90 bp, Homo sapiens
accttcagagcgtcacggcgtacgccctcatggggaaaatctccccggtgactttcaggtatcgtgccttggatccaccacagtcagctg

SEQ ID NO: 636653 - DNA, 105 bp, Homo sapiens
gaagtccccggagaactctaccctggaggagattctggggcagtatcaacggagtctccgggccaaaattgaccaagaggcagaggaaaattcactgacagagac

SEQ ID NO: 636654 - DNA, 75 bp, Homo sapiens
ctatgtacctgttaccactttcaaaaatccagatgcagaggtgtgccttcatgtactgaggcttgtccagtctgt

SEQ ID NO: 636655 - DNA, 90 bp, Homo sapiens
gaaaaagttcaaaataaagcagcatcacttattcaggacttgcaattgtgaccaaatatattacaaagggctggaaagaagttcatgaat

SEQ ID NO: 636656 - DNA, 87 bp, Homo sapiens
gctctgtgcgcgcctccatctgggccatggatggacgaagttatacggaagcgtctcctcattgatggagatggtgctggagatgat

SEQ ID NO: 636657 - DNA, 98 bp, Homo sapiens
cgactgtttgagcccggaagcgcagaagctgtggtctcacgtgtgaaacatggctacagattggctgggaagtattgtgtccatcaattgtggagata

SEQ ID NO: 636658 - DNA, 100 bp, Homo sapiens
acctcacacggtgtgggctgaatgaagagctgccagatcccacaggttaaccccaaagattggctttccttggagtgaaatcaggaacatctctttcaat

SEQ ID NO: 636659 - DNA, 50 bp, Homo sapiens
ctttttgtcagattatcaggatgaggctccttcgagaactcatagaacgg

SEQ ID NO: 636660 - DNA, 95 bp, Homo sapiens
ggaagaaggcctccgtggaggccagattgaagattttgggaaccagtaggacattgacatacatccgagaacattctgtggtggatccagtggaa

SEQ ID NO: 636661 - DNA, 100 bp, Homo sapiens
ccgagatgtctcgctccgtggccttagctgtgctcgcgctactctctctttctggcctggagggtgtccgcaatgttgccagtgtctgtctgcagattgg

SEQ ID NO: 636662 - DNA, 100 bp, Homo sapiens
agagacaaaaaacaaatcagagagccagtagacttacagaaaaagaagaagcggaaacaacgttctcccgcaaaaatgctgaagttccgaacagtccatg

SEQ ID NO: 636663 - DNA, 100 bp, Homo sapiens
acgagtggatggtgcgttgcgtgccctacttcaaggataagggcgacagcaacagctctgccggctggaaggttattggagtgatgagtaaagaatacat

SEQ ID NO: 636664 - DNA, 73 bp, Homo sapiens
ttttttaactgaagatagtgcctttcagccctaccagtctttctctaatacacagaattctaggaaggaggct

SEQ ID NO: 636665 - DNA, 82 bp, Homo sapiens
cagccaccctgcccccaagaaggaagtcatcatgggccggcctggaacaggggagtacatcaagacctggcggccacgctac

SEQ ID NO: 636666 - DNA, 82 bp, Homo sapiens
attcagcgcatcggcagcggcacctacggcgacgtctacaagatcctcgttcctagctgcctgccagcgtcctcggcccggc

SEQ ID NO: 636667 - DNA, 82 bp, Homo sapiens
cagtgctcctccggtagcagggaggcgacagaagaagatggctgtgccacccacgtatgccgatcttggcaaatctgccagg

SEQ ID NO: 636668 - DNA, 82 bp, Homo sapiens
gcggagctgtgcgagagcctcctcacttggcatgatgccttcttctgtagagtgggcgctttgcagaatacgtgttgaatga

SEQ ID NO: 636669 - DNA, 75 bp, Homo sapiens
cctgcgtagaccaatctgagcataccatggatcacccggaccttttgacaggggacctgactctcaatgacatca

SEQ ID NO: 636670 - DNA, 75 bp, Homo sapiens
tcttgaactggtgctgtctgggcttcatagcattcgcctactccgtgaaggatgaagccccacccgcccttcagg

SEQ ID NO: 636671 - DNA, 82 bp, Homo sapiens
ccgtgagcacaggccccgtactgcttccatcagaattcctccacgtactgggaaggcaaagcagatatggagactctccaga

SEQ ID NO: 636672 - DNA, 83 bp, Homo sapiens
tgtggacatcagcgccatccccgagcagcggtggaagctggagtgtggccatctggggccgtgtggtatttgccactcaggag

SEQ ID NO: 636673 - DNA, 95 bp, Homo sapiens
gcctccccagccacgtggaactagatcagggaagatgtgccttggagaggaagcatgtcttaaatctggaaatgatatgaagagggatgtcagca

SEQ ID NO: 636674 - DNA, 82 bp, Homo sapiens
cacctcctggtgaagaaagcaaacacaaagtgcctgcattcgtgaggatgattgctcccgagggctccttggtgtttcatga

SEQ ID NO: 636675 - DNA, 75 bp, Homo sapiens
ccgaccttcagaggagctggaggttattggagaaaatggcaagcccaggaagatcccagtgtctgagtgaactaa

SEQ ID NO: 636676 - DNA, 83 bp, Homo sapiens
ctgccgggattttggaggccggggccgcgctgagggcgcccagctggtatatgaatgacctaaaggtacaaataaagacggag

SEQ ID NO: 636677 - DNA, 100 bp, Homo sapiens
caagaagggccggggcaaggaggctgaagagcagcggcagaaggaggcctacctggagtttgagatcctccccggcgtgaaggtcatcatcgcacacacc

SEQ ID NO: 636678 - DNA, 83 bp, Homo sapiens
gaacacaaaaagctacagaaggtccaggctactgaaaagcatcaagaccaagctgttgctttaatccagtgtgaccagttgag

SEQ ID NO: 636679 - DNA, 75 bp, Homo sapiens
tcctgagtacctgggattacaggtggtatcacggaaaacttgacagaacgatagcagaagaacgcctcaggcagg

SEQ ID NO: 636680 - DNA, 78 bp, Homo sapiens
atggcatccgggctctggacaccactgacatggagagaaaactctctgcagaggaattagagcgaaaacggcaagaga

SEQ ID NO: 636681 - DNA, 101 bp, Homo sapiens
cagcccaagaaacagattgtgcccaaaacagtcgctcaagccctcagttagaccctttgagaaaaagcccaaccatggaacaagcagtgcagaccgcctca

SEQ ID NO: 636682 - DNA, 100 bp, Homo sapiens
catggaaaagcagttgctcgaagaactcgagcgacagagacaagctgagcttgccgcacaaaaagctagagaggcatgttatttgaaagcaattgagacg

SEQ ID NO: 636683 - DNA, 90 bp, Homo sapiens
gtccaggagtcagtgggtccactggtagcccccacccctctccgtccatggccccagatgacacttcagtccctctccaagatcctggat

SEQ ID NO: 636684 - DNA, 90 bp, Homo sapiens
gcagctcagccgcgacctggacaacaaccggccgctggaggcgctcatggaggtgtctgtgtctgcatccagcacgtgtatggtgcccag

SEQ ID NO: 636685 - DNA, 100 bp, Homo sapiens
ccaggactttgggaagatgaggcaggaggatcacttgagcccaggggttcaagaccagcctggacaacttgtcaccaggagactaaagtccatcaaaaac

SEQ ID NO: 636686 - DNA, 100 bp, Homo sapiens
cattcagcaggcctggaaaagtttccttatggagtttcactcttgtctcccaggctggagtacaatggcatgatctcagcttactgcaacctccgtctcc

SEQ ID NO: 636687 - DNA, 75 bp, Homo sapiens
gaaacgtaacgctacctctcttcagcatctactttcagtcttagagtttgaaagagtctatcttgataatctccc

SEQ ID NO: 636688 - DNA, 50 bp, Homo sapiens
gaggagctgcgggaggagatccacaaggacagagcgggatgccaccagct

SEQ ID NO: 636689 - DNA, 76 bp, Homo sapiens
ggaaatgacacctctgggcttgagaataagactgttgttgtcaccacaattttggcctttttgcaaatgtgtaact

SEQ ID NO: 636690 - DNA, 91 bp, Homo sapiens
gcagttcttgtttgtggatcgctgtgatcgtcacttgagacaagaggagcagcagcggcaccgcccctcaccctggagggtcctgtacaat

SEQ ID NO: 636691 - DNA, 73 bp, Homo sapiens
cctcctgctgaacgtcatatgatttcttcctgggaacaaatgttgttattcatgaggaccaatggattggcga

SEQ ID NO: 636692 - DNA, 100 bp, Homo sapiens
ctggggtccggctcctggagaacatggcccggcctcccgggggctctggtcccctcctcgcaacgaaggttttgggaacagtaaaatggttcaatgtaag

SEQ ID NO: 636693 - DNA, 97 bp, Homo sapiens
taacgttgtcaaggacccgccctccaagtacgtgggttaaagcacgaattgggagctctcagcgacatcaccagtcagcagccaaagacctaactca

SEQ ID NO: 636694 - DNA, 74 bp, Homo sapiens
tcaagcagtcctcctgcctcagtctcccaaagtgctggaattacagggtcgtgatgagaggagatggattgaaa

SEQ ID NO: 636695 - DNA, 98 bp, Homo sapiens
cctcggaaaagacaccaccagccctaaatggaggcaaacgaccattttaactttactggccttccccctgcacctgctgcctcaggactgaaaccctc

SEQ ID NO: 636696 - DNA, 100 bp, Homo sapiens
acaagtggaagatgcgaccccagtcataaactatgatctcttatatgccatctccaagctggggccagcaataggcgaatatgaagaccttagagcagag

SEQ ID NO: 636697 - DNA, 101 bp, Homo sapiens
cctatttgaagtatttgacgaaaatagactgaagaagacgtaaagcaggctaccagcaattttgagaacttgcaaaaacagcttgcaaggaaaatgaagct

SEQ ID NO: 636698 - DNA, 106 bp, Homo sapiens
ccagctctgtccgctgcccacagcctagcagtcgggaccgtactgagacaatgcagatcttcgtgaagactctgactggtaagaccatcaccctcgaggttgagcc

SEQ ID NO: 636699 - DNA, 74 bp, Homo sapiens
gcggtactacaagaacatcggtctgggcttcaagacacccaaggaggctcgagggaaagtgagtgagatcatca

SEQ ID NO: 636700 - DNA, 83 bp, Homo sapiens
gctgtgcagccgcgaggaggcgcgggaggtgttcgagaacgaccccgagacgttactgtggaatacacgatcctgcctgcgtg

SEQ ID NO: 636701 - DNA, 100 bp, Homo sapiens
tccaggaatgggacctcgagtcactgtggtacaccaggggttggaaaaaccacactaggcaaagaacttgcgtcaaaatcaggactgaaatacattaatg

SEQ ID NO: 636702 - DNA, 50 bp, Homo sapiens
agccgcggcggcagcagcagtgagaggaaggagtcaagactgagaacaac

SEQ ID NO: 636703 - DNA, 50 bp, Homo sapiens
actccaccgtagcccttgccaaagcctcttcgagcactactgctactccc

SEQ ID NO: 636704 - DNA, 82 bp, Homo sapiens
caccacctccgccagttaagaggaaaaaggtcattgattacaacggggaacgcacgctggatggttttaagaaattcctgga

SEQ ID NO: 636705 - DNA, 74 bp, Homo sapiens
ttgaagtggcctatcccaggacaggtggcactctttcagaggcaaggaactgctccaccgccaatgaaacttcc

SEQ ID NO: 636706 - DNA, 100 bp, Homo sapiens
gcatttcctcctttcgtctttacaaggtagccgtttggcgtcgtgagagagggagccggcatcagaaaacaacactgggagctggggactgacagtacag

SEQ ID NO: 636707 - DNA, 98 bp, Homo sapiens
gaaagacttcgcaagcgtcagacacattgactattccattgtctagactttgtgttccaagatcagagtctttacctggtgaaaggacacaggagata

SEQ ID NO: 636708 - DNA, 100 bp, Homo sapiens
aaaagaatcattcctgcagtagcttccacaaatgcagtcattgcagagcttcacacactgtggcagaatgaggaacgggcagctatttcctcggggaaac

SEQ ID NO: 636709 - DNA, 74 bp, Homo sapiens
catggctcccggggcgctgactgcgtgttaacatcaggtgcggagcgggccctggtggcgcggccctccctgga

SEQ ID NO: 636710 - DNA, 121 bp, Homo sapiens
cggaactcggcggccgccatggcgtccaacatggaccgggagatgatcctggcggattttcagcccgtgatgctgatgagcgagagaagtggatccatgccttagaagaaacaattcttcg

SEQ ID NO: 636711 - DNA, 76 bp, Homo sapiens
aaggcgcttcttgcatttcagagcgggacctggacttcaccatcgacctggacttcaagggccagctgtgcgagct

SEQ ID NO: 636712 - DNA, 75 bp, Homo sapiens
ttttgggttacaaaaatccagaccagctatgtgatgatgatgccatttaaacgacaggctctagtggaatttgaa

SEQ ID NO: 636713 - DNA, 75 bp, Homo sapiens
gtcagcttcatcctcggcggcggtggccgctagctccaaggaaggtggagattctggacgcaaagacaagggaga

SEQ ID NO: 636714 - DNA, 99 bp, Homo sapiens
caccttcagctgtttcctgagttgctgtttcttgggactgcgaagctatacaggctttggttgaatctggcgatgtggaacccatggatatggagggct

SEQ ID NO: 636715 - DNA, 100 bp, Homo sapiens
ataaatgatgccagtcgtggtactttaagcagctatagtcttgtattgatggttttgcactatttacaaagtgaccaagaatatggcccaggtgaccaaa

SEQ ID NO: 636716 - DNA, 100 bp, Homo sapiens
ggaagcagccgatccagcctgcggagcctgtggggcagcttacgaggaaatatttcagtaaaagcagttaaaaaagaagtagaaaagaaactccgatgtc

SEQ ID NO: 636717 - DNA, 100 bp, Homo sapiens
cggggcgctgcctggcccaggcgcacacggaagtgcattgatgttgatgggacaatgacagtggactggaatgaatggagagactacttcttatttaatc

SEQ ID NO: 636718 - DNA, 100 bp, Homo sapiens
gtcacatgtcattataccttcacccagcatttcatccctcgtcgaaaggattggattggcatctttagagtagactggcgtcgttccttcatcaccactg

SEQ ID NO: 636719 - DNA, 82 bp, Homo sapiens
ttacgtgtactttaccaacgagctgaagcagggacaggccttcagtatttggcatcacctttacatggagcacaaagatgat

SEQ ID NO: 636720 - DNA, 98 bp, Homo sapiens
agcctgtaaatctcttcaatatacctggatttactaacttttcatcatttgcaccagcttcatggaagctattgagtttgcccaaaagggagcttttg

SEQ ID NO: 636721 - DNA, 75 bp, Homo sapiens
ggagcctgttctcatcaccatggcaacagcggaagatggagaaccgtgattaccgggatgcacaggagtttgctg

SEQ ID NO: 636722 - DNA, 100 bp, Homo sapiens
acggggaccagcagctgtcgccgccgctctcaggatgaaattgattctgcagtaaagatgttggtgtcattaaaaatgagctacaaagctgccgcggggg

SEQ ID NO: 636723 - DNA, 51 bp, Homo sapiens
ggcggccatggtccaaccttgaagttatccattttgaacctggagaagacc

SEQ ID NO: 636724 - DNA, 80 bp, Homo sapiens
gcggagtcggggctcctgacggcgacctgggagacccagccagtaccgcccagacggacttcggagtggtgatggggtac

SEQ ID NO: 636725 - DNA, 100 bp, Homo sapiens
ctacatttggagcctggacacgcagtacagcaaggtcctggtgaacgccatcatcaacagtggtccccgggaggactccacacgcattgggcgcgccggg

SEQ ID NO: 636726 - DNA, 75 bp, Homo sapiens
aaggccacgtgaagatgctgcggctgttttcatggagtgataatgaaaggagcagcagccgcattaatatcccag

SEQ ID NO: 636727 - DNA, 90 bp, Homo sapiens
aggtccgctacgtaaatccctttgcggcggaaccttctgaggaaaggaggccatacagaaattgaacctcagcacttctgtcaagctttc

SEQ ID NO: 636728 - DNA, 80 bp, Homo sapiens
gctgttcctattgggccatcttggctccaccaccctggttcgagaacttgtcttggacaattgcaaatcaaatgatggaa

SEQ ID NO: 636729 - DNA, 96 bp, Homo sapiens
tgtggatctgattggagcagccaagagtctgcttgcctggttggacaggtgtgatgaatgcagactctgctaccattttggctgtttggatcctcc

SEQ ID NO: 636730 - DNA, 101 bp, Homo sapiens
cggcagagagggaatggtgcaggcaggcgctgagaaggacgcgcagtccatctctctcagatctttaatctcatgaagtacgacagctacagccgcttctt

SEQ ID NO: 636731 - DNA, 100 bp, Homo sapiens
ggtgtggtattactgcaccctgaccattcgggagagcattctcatcagcaacggctcaaggaggtcacaagccccaaagtggacgtgttcaatgctaaca

SEQ ID NO: 636732 - DNA, 80 bp, Homo sapiens
gaagatgaggaggtcgctgagagctgggaagaggcggcagacagcggggaaggtgggagtcaatcattttgacaagtctc

SEQ ID NO: 636733 - DNA, 75 bp, Homo sapiens
gatcttcaagaagaagacctgcacgacgttcatagttgactccacagatccgggacgacctagctgcccagccag

SEQ ID NO: 636734 - DNA, 75 bp, Homo sapiens
gcaggttcgccgggtgtgaggcttcacagcggtccggtgaccaagtcgagagaatccatcggtctgctgcaaggt

SEQ ID NO: 636735 - DNA, 96 bp, Homo sapiens
gaagtggcggcgccggcagcggacagctcggacagcgcccagggccggagcccgagcccttggaggctttcatagattctattcacaaagaataac

SEQ ID NO: 636736 - DNA, 100 bp, Homo sapiens
ccgagatgcccctgaggggggctttgatgcagtactccaggcagccgtctgcaagcgtctcgctcgaaccgggatcatagtgaccacgagtgaggctgtt

SEQ ID NO: 636737 - DNA, 75 bp, Homo sapiens
caatttacgcgccgtgtaactgtgaatctttcaaaggtgctggagaatctggtaaaagcaccattgtgaagcaga

SEQ ID NO: 636738 - DNA, 97 bp, Homo sapiens
tggtcggatggggcaggatggctgcgttgacacgtcttatttaatccacatcatagatctcacattcttgaaggtggcattgaagagcactaagatc

SEQ ID NO: 636739 - DNA, 75 bp, Homo sapiens
agaagaggtcccaatcccccactctttccgccctaatggaggtctccagtttcgatgcctgaggaaacccagacc

SEQ ID NO: 636740 - DNA, 75 bp, Homo sapiens
tgaaaccagcagacagaatttgtcagtactactataattccttgacccagcagtacctttactgggatggggaaa

SEQ ID NO: 636741 - DNA, 73 bp, Homo sapiens
atctttgctcttccatccgcctttgatcgtcttcctcttcagccatccagtaatctatgccagcaattatgac

SEQ ID NO: 636742 - DNA, 83 bp, Homo sapiens
attaaaactgaatgaactgataacggagaatggaactgtatgccagcagcttgttgtacagaagaggatcacctagcccgggt

SEQ ID NO: 636743 - DNA, 75 bp, Homo sapiens
cccagtatccaggtcgaggttctgcagaaggttgtgactttagtatacagctaaagtaaataatgccagcctgat

SEQ ID NO: 636744 - DNA, 100 bp, Homo sapiens
gtggaaatttataacttgtcagcaaactactttcaggagaaaggcagctgcaatgactctccgcacggtattattgtcattgcaagcactattggcagct

SEQ ID NO: 636745 - DNA, 78 bp, Homo sapiens
aaaatgcaagaagactgatggagcaggcttgcaatattaaagtgcagtggtcatcgcctttgtggtctgctggctgcc

SEQ ID NO: 636746 - DNA, 50 bp, Homo sapiens
aggacagcagcaactcggagggtgaatggagtgaatctgaggaatgcaac

SEQ ID NO: 636747 - DNA, 50 bp, Homo sapiens
ggagtttcgggctgatgctcggatatatgcttaaaggaggtaacgtcgat

SEQ ID NO: 636748 - DNA, 75 bp, Homo sapiens
ctatattattccaatagatgagaaactgtacactgtgcaccttaaacaaagaaatgaatactgcattgagggacg

SEQ ID NO: 636749 - DNA, 100 bp, Homo sapiens
tgcggttgagattgctatcgacaacacggcttttatggacgagttcttttctgaggacatgaaagatcagatgtcaacttcatctgtgcaggcattagct

SEQ ID NO: 636750 - DNA, 76 bp, Homo sapiens
ggttacagcaaattacatgatgacctaggagagtttccatatggagcctagtaataaacgggtcaaacccctttcc

SEQ ID NO: 636751 - DNA, 101 bp, Homo sapiens
agatcattttattgacattgctgaagtggagacagggccggtgcataaacttctcccgagttccatctcagtaaaagggaagcaggaagaccaagaaggta

SEQ ID NO: 636752 - DNA, 97 bp, Homo sapiens
ggagcctagatcctgtgctttactctgaagactcaagcctccccagctttctgaggatgatatctggctaaaaagcgagggagacaactatagtgcc

SEQ ID NO: 636753 - DNA, 76 bp, Homo sapiens
gtggcaggtcaatcagatggaagaaactgtggatattcataaggagaaagtggcacgaagagagattggtattttg

SEQ ID NO: 636754 - DNA, 98 bp, Homo sapiens
actttcaaagatggaatcacaaacggcgcacattggtatgatgtggaagggtacaggcatccttcacctgctattgttgcaagaacagtcagaatttt

SEQ ID NO: 636755 - DNA, 89 bp, Homo sapiens
ggagatcatttgggagatccaagagattcagtatcactcgctcccttgatgatcttgagaaaactttagaaactgttcctttggagagg

SEQ ID NO: 636756 - DNA, 100 bp, Homo sapiens
ctttacatgatagtcttcctatcacgggcactagtgtggctctcctgttccagcaattggacttaattcagtgcacaaatgagatgaatgtgaacatccc

SEQ ID NO: 636757 - DNA, 82 bp, Homo sapiens
ctgatttcctgcttctccttttcatgagtgttcctgtggtctctgcacctcctttctatgaggtggaaagtgagaaatggta

SEQ ID NO: 636758 - DNA, 100 bp, Homo sapiens
aaagatgaagtatactccaaatactacacaccagttccctgcgagtctgctactgctggacacctgttctgctgttgtgtcctgccattctcctgaagaa

SEQ ID NO: 636759 - DNA, 100 bp, Homo sapiens
aatcaaggcgttgagcctcaaggacagtcattttgtttactcattcagccctgttgcaggtcccaataaactcttcataaggttgacagaagcaccctct

SEQ ID NO: 636760 - DNA, 100 bp, Homo sapiens
gtagccacagcggcagctccagcccggcccggcagcgacatggaagtttcggagcaacatcccctgtcacctggttgatatctcttgcggattaccctgc

SEQ ID NO: 636761 - DNA, 98 bp, Homo sapiens
ccacggacacggctgtgtttgatgtccggctgagtgggaagaccaagacagtgcctggataccttcgaatagggtttcctgtggcataatgtgatggt

SEQ ID NO: 636762 - DNA, 75 bp, Homo sapiens
ggttctgcagaaggttgtgactttagtatacatgatgatgatgatgattttgatgatgaggaagctgaagaaaaa

SEQ ID NO: 636763 - DNA, 100 bp, Homo sapiens
catgacgataagcaaccaacgttcagagcactctatgaagcaatacgggatgtcaacggcagagacttatccagagcaactcatgaccaggctgtggaag

SEQ ID NO: 636764 - DNA, 100 bp, Homo sapiens
ggagtggtgcgtgatgtggctaagatgctgccgactctgggcggcgaggaaggcgtctcccggatttgcggcaggaactggccgtgcagcagaagcagga

SEQ ID NO: 636765 - DNA, 83 bp, Homo sapiens
aggcggccgccgcagcccaggcgcgggggcgacgacagggggatatgagactttctactcggaatatcctgagtgttgcgtgg

SEQ ID NO: 636766 - DNA, 100 bp, Homo sapiens
gcggctgaggaggggccccagcagcccccgaaggccctatcaggacatggagtatgaaagacggctatggaggctatgatgattacaatggctataatga

SEQ ID NO: 636767 - DNA, 101 bp, Homo sapiens
aaaactgtggtctccagatgaagaggtttcccctgaagtactagcaaaggacgctgccaaggtctgcagagaattcaccgagcgtgagcaaggagaagtcc

SEQ ID NO: 636768 - DNA, 83 bp, Homo sapiens
aagggaccacggtcaccgtctcctcagaaggacagaataacgggctcccagattcacaagccccaccaagaggatcaccccag

SEQ ID NO: 636769 - DNA, 100 bp, Homo sapiens
cagctggtgaaagaaatgcagcttcatcgagaagactttgaaataattaaagtaattggaagaggtgcttttggtgagggccatgctatgatagtggaag

SEQ ID NO: 636770 - DNA, 96 bp, Homo sapiens
catctactccctacatagagaagcaggtggagctggctctgtgggacacagcagggcaggaagactatgatcgactgcggcctctctcctacccgg

SEQ ID NO: 636771 - DNA, 88 bp, Homo sapiens
agtgtaacatcagttacagaagacaggagactctctccatcatgtgaagatacagcaaaacagcagctgtctgcaagccaggaaggga

SEQ ID NO: 636772 - DNA, 74 bp, Homo sapiens
cgccctcaccacccctatccagacggctgcccttcaagtaccagatacctacctggtttatattctaaatgaat

SEQ ID NO: 636773 - DNA, 100 bp, Homo sapiens
agcagtctcaggcctttagtgatgatggacgccaagagtgccgaggatgaggctccttccagacacttgggaaagcaccagccccgctcagcacaggtgg

SEQ ID NO: 636774 - DNA, 83 bp, Homo sapiens
gactacctgcggttcgccccgggcggcgtcggcgactcgggccccggagagcagcctcccgcgacgatgcccctcaacgttag

SEQ ID NO: 636775 - DNA, 75 bp, Homo sapiens
ccgagatgccgggggagcggggccttccacaccccctccgtgggtgtgtgggaggagagagcgatggcttttttc

SEQ ID NO: 636776 - DNA, 90 bp, Homo sapiens
ttctggccagtgcttgaggctccaggtgtctgtctgctgcaaggagaggagctaaggtgattcaaactaaatcaacccaatgtctctcct

SEQ ID NO: 636777 - DNA, 83 bp, Homo sapiens
ggacgagtcgagcctcctgcggcgccgcgggctccaggcattgaagttgatatcgatgtggagcacggagggaaaagaagccg

SEQ ID NO: 636778 - DNA, 90 bp, Homo sapiens
aaaggcagggcaaggaaactggccacaaaaaaagatgttgctggtccatttgacgaagaagtccagagcggcttgtgacttcagtctggc

SEQ ID NO: 636779 - DNA, 99 bp, Homo sapiens
caacatatctacacctctctaaaattgctgcctctggtggggaagtggaagctcatctttgggtgaaaaattgtcgggatcttctgcagtccagctaca

SEQ ID NO: 636780 - DNA, 82 bp, Homo sapiens
ggaggcctgactctgggagcacgcaacttcccaagtaagaagcggaagaggagccgctggaaccaagacacaatggaacaga

SEQ ID NO: 636781 - DNA, 98 bp, Homo sapiens
tgacctccaggccagccactcagagctccaggtgcccacccctggcagagccggcctactgaacacctctgttcgtgccctcgtgaggctggcatgca

SEQ ID NO: 636782 - DNA, 74 bp, Homo sapiens
ccagcgcccggcagttatgtattctccgctctgtctcacccagggttgtctcctcacagactatgagctccttg

SEQ ID NO: 636783 - DNA, 80 bp, Homo sapiens
ctttgaggatctggaggacggagaggacctgttcaccagcactgtctccaccctagagctttagccagggccctctgaag

SEQ ID NO: 636784 - DNA, 88 bp, Homo sapiens
tgagtttcagtctcacatgggtgatgaggattcctacaggaagcaagtagtaattgatggagaaacctgtctcttggatattctcgac

SEQ ID NO: 636785 - DNA, 50 bp, Homo sapiens
gggatggacctccagatttccttactggtacaccaggggttggaaaaacc

SEQ ID NO: 636786 - DNA, 100 bp, Homo sapiens
gcgtgagtgtggtctacgagctgtttctcatctttatactcttccaggcatgcggatcctggtcactctgctgctggatacgctgcccatgctcgggaac

SEQ ID NO: 636787 - DNA, 80 bp, Homo sapiens
tatagcgatccttccagttttgctgaagatgtgagtgtgtccgcttgaaaccaactgacatacagcccgacatcttcagc

SEQ ID NO: 636788 - DNA, 74 bp, Homo sapiens
gtgaaatatctgaatctacccccgtggaactctggtagctgaagaacatctcacagtggacgccagggtctatt

SEQ ID NO: 636789 - DNA, 100 bp, Homo sapiens
aattcttcagtgcatcttccagggtcggatcaaagaagggtgatgatgaacagtctacacagatggctgcaagttgggaagatgataaagttacagaagc

SEQ ID NO: 636790 - DNA, 90 bp, Homo sapiens
aatgatcttctaggagatttgtttggcgtgccaagcttctctgtgaaagagcacaggcagcctgcttctgcaaagtggtacgatcgaagg

SEQ ID NO: 636791 - DNA, 50 bp, Homo sapiens
gggcactgctccagcgagaggccagcaagaatgaggagaaacctgtgcaa

SEQ ID NO: 636792 - DNA, 101 bp, Homo sapiens
aaacgcttctgtgagacttgataatagatacggcctcaaggtggacatctgggcagcaggtgtaatcacttatatcctgctgtgtggtttccctccattcc

SEQ ID NO: 636793 - DNA, 100 bp, Homo sapiens
tttactcatccatgtgaccatgaggaaatgagagaaatgcttacacacagaaatgctgacattaaagagcatcttgctgcaaagagaaaaaggattgaaa

SEQ ID NO: 636794 - DNA, 100 bp, Homo sapiens
gcaccactgtgaaggatggcatcttggtccgcatcgacagtgctccaggacttggtgacttcctccagcttcacatacttgaacaggaattggagctatc

SEQ ID NO: 636795 - DNA, 98 bp, Homo sapiens
agagacatgagaagattcatactggcactgtggttggcgtggacgagagcactgctttctcatggcctgtgtgtgacatgtgtggcaacgggagattg

SEQ ID NO: 636796 - DNA, 83 bp, Homo sapiens
tcaccaaaactaacttgccttcagaatttaaaatggtccacagcagtcgaattttgtaaaatggaatggatatgaaagcatac

SEQ ID NO: 636797 - DNA, 100 bp, Homo sapiens
gctcgcggacccaggggcgcccacgccaggtgtggggtgcacactgaaaatgccacgctccttcctggtgaagagcaagaaggctcacacctaccaccag

SEQ ID NO: 636798 - DNA, 76 bp, Homo sapiens
cttggtttcgggatctcggtgctgcagacggcgagacctcctgcacaggtcctcagaatggttggaatgaccctcc

SEQ ID NO: 636799 - DNA, 99 bp, Homo sapiens
agaaattaaaacactggaagaagatgaagaggaactttttaaaatattattttcgaaataccagtatttcgactccagggggatgttcatttctatagt

SEQ ID NO: 636800 - DNA, 110 bp, Homo sapiens
gtccagaaactcgccagttaatagtattgtgatcttcctcagaagaataggcttgttgttttacagtgttagtgatccattccctttgacgatccctaggtggagatggg

SEQ ID NO: 636801 - DNA, 82 bp, Homo sapiens
tgtcttcccgtgtctccccgaacaccctatgggatgccatatcttggacaatgcagatcttcgtgaagactctgactggtaa

SEQ ID NO: 636802 - DNA, 101 bp, Homo sapiens
ggacctgtccttggtgcagagggaaagtctgaatcatcactaccatctgaactgtggctgccaagctattttcaaaatgatcactcccgaggacgtgaagc

SEQ ID NO: 636803 - DNA, 75 bp, Homo sapiens
ggtcccggaaccagattgtccgtgctgccctgtccctggaggagtctgtaggaaagcctctgtacctaatattta

SEQ ID NO: 636804 - DNA, 100 bp, Homo sapiens
cggcacaggctgtcggctggcccatctgcagggacgcgtacgagctgcaggaggttatcggaccagaggagcgagagcagcaagaaccacacccagcagc

SEQ ID NO: 636805 - DNA, 90 bp, Homo sapiens
gactttggtgccctcaacatctctcagagacgaaagcatgctcgaagacgaccttcagctcagtgacagtgaggacagtgacagtgaaca

SEQ ID NO: 636806 - DNA, 50 bp, Homo sapiens
ggcagtgtggtgcagcacagtgaggggggaccatatgatgtggtggttct

SEQ ID NO: 636807 - DNA, 90 bp, Homo sapiens
gctgttttggaactgtcaggtacctcaaagcagcgatcgcctcaccggcccatcctccaagccggactgccggcaaatgcctccacagtg

SEQ ID NO: 636808 - DNA, 98 bp, Homo sapiens
gccgagatgccgggggagcggggccttccacaccccctccgtgggtgtgtgtctgtaggtatattgttagagccatgcagtgaccgtggtgatagtga

SEQ ID NO: 636809 - DNA, 50 bp, Homo sapiens
tgaggactcacgccggaggagagccgaacaggaaatatagtggtcattat

SEQ ID NO: 636810 - DNA, 75 bp, Homo sapiens
cccaggaccctcagggagagcgggcagccttccaggtggacagcaaagcgagctgaattccttcttgtggaccat

SEQ ID NO: 636811 - DNA, 100 bp, Homo sapiens
ttttccttctgcccaagaaggtgggaaaatggtaccagccagctgaggtgggtgtcctggttggcaaagaccggtcaagtttttacgtgaatgggctgac

SEQ ID NO: 636812 - DNA, 50 bp, Homo sapiens
gcggaacaggacgccctctgatcctacagggagcccttcgagcagcacct

SEQ ID NO: 636813 - DNA, 82 bp, Homo sapiens
tgaaggaggaggacaaagagcccctcatcgagctcttcgtcaagcgggagatacagatgacccaccaagaattactcagaac

SEQ ID NO: 636814 - DNA, 74 bp, Homo sapiens
caaatgctagcagacacggtggctactctgcctcggggacgaaagcaggtgcaatggatgagcttcatagtctg

SEQ ID NO: 636815 - DNA, 90 bp, Homo sapiens
cgccaaggtgttcggtccttccgaggaagctaaggccgcgttggggtgagaccctcacttcatccgaagttcaccatgtctattctcaag

SEQ ID NO: 636816 - DNA, 83 bp, Homo sapiens
atatgaaatgcctgactccagaaaagcatgcactgatagtgaagaccaaccccgcactgctggggagatttggaatgggggca

SEQ ID NO: 636817 - DNA, 101 bp, Homo sapiens
gtacgcgaattggagaaaaagttcagtgggaagcatgtcgtctttatcgctcagaggaataacgaggacatttccatcatcccgcctctgtttacagtcag

SEQ ID NO: 636818 - DNA, 72 bp, Homo sapiens
gcagtatcatgctggccaagaagatcatcattaaggacggaggcacgatggagaaggatgaaactgtgagtg

SEQ ID NO: 636819 - DNA, 100 bp, Homo sapiens
cctcccaccagcttcagatgatggggctgctccagaggacgctgacagcccacaggctgtggatgtgatcccggtccttcttgtgggacttgaagaactg

SEQ ID NO: 636820 - DNA, 100 bp, Homo sapiens
caagaatgctatcaataatggtgttcgaatatctggaagagaattagacctttacgagaagcacagttttgtcttcagtttcctctccccccacccggaa

SEQ ID NO: 636821 - DNA, 99 bp, Homo sapiens
cagcagccttttccagagaggctgtggtccatagcctctgttcgttttcactgcaggaccaggcacgaaatacaaaattggacagctgtacatgatcag

SEQ ID NO: 636822 - DNA, 96 bp, Homo sapiens
gtgtaatagctgaagaggaagcatataagtcagaattattccagaaagccaagaatcaagaagtggtggactttgaaaagttggatgactacgcct

SEQ ID NO: 636823 - DNA, 80 bp, Homo sapiens
gggcagcgccacctccaactggaagaagacgcccctcagcacaggcgttcccgttgcccgctctctcccggaagcagagg

SEQ ID NO: 636824 - DNA, 90 bp, Homo sapiens
tgagaagcccggcgacggaggaacgcaggtctgctgccaggaagaacctctctatccagggcctccgctggtggctacagtggctgggca

SEQ ID NO: 636825 - DNA, 82 bp, Homo sapiens
catgctgagagttctgcgcttccaggtctccttccagcatccacacaagcaattctgtggtgttcttggtcacacatttatg

SEQ ID NO: 636826 - DNA, 80 bp, Homo sapiens
caccgcggtgcgcaagcgcaaccgtcggtgggtcggggatcggtcgcctgagagggcatgacgtccttgatgaaggccgc

SEQ ID NO: 636827 - DNA, 98 bp, Homo sapiens
acaaagagcttgctccctacgatgagaactggttctacacgcgagctggagagaagatgactgaggaggaggtggagaccgttctggcaggacacgag

SEQ ID NO: 636828 - DNA, 90 bp, Homo sapiens
cacattactctgcgtacaaaacgattgaacaccagattgcagttcaggattttttatcaagcagaaatgcatcgaacaacgagaatcaag

SEQ ID NO: 636829 - DNA, 75 bp, Homo sapiens
aagacacttttcagaaagacaggaaagtccatcagcttgataatggaggagaacaatgactccacggagaacccc

SEQ ID NO: 636830 - DNA, 90 bp, Homo sapiens
agatgaccttaacacagtagcagctggaaccatgacaggcatgttgtataaatgtacaggtcgagtctatgctgtcttgtcaaagagaga

SEQ ID NO: 636831 - DNA, 90 bp, Homo sapiens
aaaaaagcaaagcagattgaaaatatcgttgacaaaacttttttccatcaagccatttcataattctgaatcatgtctgataacggagaa

SEQ ID NO: 636832 - DNA, 135 bp, Homo sapiens
ggatatccaagcctctcagcttcggagaatggagtcttccatcaatcatatctcacaggattcaagccaaaactcgagaatttagggaacgacaagctcgagagcgtgactatgctgaaattcaagattttcatc

SEQ ID NO: 636833 - DNA, 101 bp, Homo sapiens
ggtgttctgcccaacatccaggctgtactgctccccaagaagactgagagtcaccacaaggccaagggttacccaggagatttcagatgaaacaagagttt

SEQ ID NO: 636834 - DNA, 82 bp, Homo sapiens
cctggcagtgcagaagtccagggaatggctggcccagcagctgagatcacaggatcagttccatgacaagaccccttatacg

SEQ ID NO: 636835 - DNA, 83 bp, Homo sapiens
gtctcccttaaaatgcaccctccttccacctggccaggaatcaggaccaggaagaaacaggctcctgccagcaccgacagcaa

SEQ ID NO: 636836 - DNA, 74 bp, Homo sapiens
acatttcctgctcggaaccttgtttactaattgacacattcagctaacgtattttagcaggtggagtgaggttg

SEQ ID NO: 636837 - DNA, 78 bp, Homo sapiens
ccaggtcatgaacatgtggagtgagcaggagaaggagaccttccgggagaagaggagatgttaaagtaacccatcttg

SEQ ID NO: 636838 - DNA, 51 bp, Homo sapiens
agaacattgttggtgaaaagaccaaggccgccagatcccacccttggaccc

SEQ ID NO: 636839 - DNA, 74 bp, Homo sapiens
gggattggcatcttcctggcattggatttccttggagcaggttgccgtccggttgtttgaccaggagagttgta

SEQ ID NO: 636840 - DNA, 98 bp, Homo sapiens
acaagcaaaagccttggagaggaggagaatgtatcaagtactcccctgccctcaacaagatgttttgccaactggccaagacctgccctgtgcagctg

SEQ ID NO: 636841 - DNA, 100 bp, Homo sapiens
atgtagttcgatatttctctgcgtgggcagaagatgatcatatgcttatacagaatgaatattgtaatgggacaggagagagtggcaagagtacgtttat

SEQ ID NO: 636842 - DNA, 100 bp, Homo sapiens
tgcctcagcctcccgagtggctgggactacagattgagtggggagcttgtgcacttgttctcacaggaaacacagtcatctttgcaactatactaggctt

SEQ ID NO: 636843 - DNA, 90 bp, Homo sapiens
ccgccaaacagcccagctcgcgcttcagcgtcccggcgccgtcgcgccactcctccgattaacccagtatccactccagttgcacttccc

SEQ ID NO: 636844 - DNA, 83 bp, Homo sapiens
gccgtggcctgcgcaccgacatcgatgcgacctgcacgccccgccgcgcactggagaagaagcaggcgctccctccattccag

SEQ ID NO: 636845 - DNA, 75 bp, Homo sapiens
ggataaggagatcatagcagagtacgatactcaggtcaaaggcttgcacagaaatctggaggcagtatcacctaa

SEQ ID NO: 636846 - DNA, 100 bp, Homo sapiens
tggactactgttatagagagaacatttcatgtagatactccagaggaaagccatttcacctgctgatgtcaattatggagaaaccctaagtactcttcgc

SEQ ID NO: 636847 - DNA, 101 bp, Homo sapiens
cgttattcctactaacgtcctgtgtcactgagggtgttttgaatgctgtatcaaatgcctggggggcattccctatgcctctctgattgccaccatcctgc

SEQ ID NO: 636848 - DNA, 83 bp, Homo sapiens
actagtggcctcggttcttcctgtgtcctgtgtttggagagagatcacaggagggtcaaaatgcagatcttcgtgaaaaccct

SEQ ID NO: 636849 - DNA, 83 bp, Homo sapiens
aaaaaccatgacgtcggacattttaaagctgcctgaagatgccggcctaagcctggagtccaggcatggacttccccacaatt

SEQ ID NO: 636850 - DNA, 101 bp, Homo sapiens
gcggctctccgccgtccccagccctgcctctccctgggctctggttttcgaaaggccttacactctgaccgtcctccttctgcatctcagcccagagggga

SEQ ID NO: 636851 - DNA, 83 bp, Homo sapiens
agcgcacgacctccgactactttctccttcaagagactcttgaagacaactctgaaaagtgggctgtgactcccgatgcaggg

SEQ ID NO: 636852 - DNA, 99 bp, Homo sapiens
ttcctgcaaagatcagagtgaaacaggataagtccctgatcatggtgttcgctcatctggtgcacactcagctagaacctctcttggagttcctgtgta

SEQ ID NO: 636853 - DNA, 75 bp, Homo sapiens
gtcagcagacagattgaggacactgtattatacggttactataggtgcacttgatctatctgatgtacattctcc

SEQ ID NO: 636854 - DNA, 97 bp, Homo sapiens
gccacctactattacccccagtatctgcaagccaaggggggacacagcgattgccacgcgccattggaatgtccctggccaaggagctcatattctc

SEQ ID NO: 636855 - DNA, 90 bp, Homo sapiens
ctttcatgcagtgacatgttgataaaaaatgatgacccaacatgagtgaagtttcctgcaagaaacgggacgactatttggaatggccag

SEQ ID NO: 636856 - DNA, 75 bp, Homo sapiens
ccgggccggagtggtgcgagccggcggggctgcggagggccagtggactcagggatgcttgaagatggaaagaaa

SEQ ID NO: 636857 - DNA, 75 bp, Homo sapiens
cctcctccccatttccgcgctcccgggaccatgtccgcgctggcggctggatcatcattgaactaaaacacaaag

SEQ ID NO: 636858 - DNA, 98 bp, Homo sapiens
cccaaatatcctcggaagagcgctcccaggagaaacaagatgtacagttacccagcacgtgtacctcctcctcctcctattgctcgggctgtagtgcc

SEQ ID NO: 636859 - DNA, 75 bp, Homo sapiens
gatggagattttgatgtggatgatgccaaagttttattaggagtccaatgtgctgattgctgctaacagtcaggg

SEQ ID NO: 636860 - DNA, 100 bp, Homo sapiens
agaaggccctggacacagcaatatctctgggctttcacagtgatgatggccaaagagaagccaccgataactgtagttggagatgttggaggccgcatcg

SEQ ID NO: 636861 - DNA, 80 bp, Homo sapiens
gggaggaccccagacaccggagactgggaaatgaaaaaagcttggccagaccacaagcgggaatgcaaatgccttaaaag

SEQ ID NO: 636862 - DNA, 98 bp, Homo sapiens
ggccttcgaggaggtcatgaaggacctgagcctgacgcgggccgcgcgggaactgtggaaggtgcatcagtgaagaaatggaccaatgtgtataatca

SEQ ID NO: 636863 - DNA, 75 bp, Homo sapiens
ggacagtcgcgaggttcgagtgttgcagagcctgcggggcaagatctgctgctgagaactagccctagacctctg

SEQ ID NO: 636864 - DNA, 82 bp, Homo sapiens
ctttggaaacgacgtcatgtgttaggtttttcgttggaatatacgttgcacatttatggcgattctgagtgtgagggcagac

SEQ ID NO: 636865 - DNA, 100 bp, Homo sapiens
tttcaggaagacttggccaggccgtgttccgtgtctctggattcaagtcccaggagtcctgaccagagagcagggtatttgaagtataccatacaactgt

SEQ ID NO: 636866 - DNA, 82 bp, Homo sapiens
aaaaacgcatctatctaacgtttaccctagcaaaccagctgtgggtcatcttattgctgcagtcctaaaggaaaatggtttt

SEQ ID NO: 636867 - DNA, 100 bp, Homo sapiens
agaaaagacaagagccctgtgagccaagacaatgcaaactccagtgaacattcccgtgcctgtgctccggctgccccggggccctgatggcttcagccgt

SEQ ID NO: 636868 - DNA, 82 bp, Homo sapiens
ggagatcccaggcggtgacagagtggagccatggctagagcaaacggggattcagcgtccgatcctttggaacagggactca

SEQ ID NO: 636869 - DNA, 82 bp, Homo sapiens
gtcacatctcttactactgctagtcgctgcaacactcctctacagtttgagaaaatgcttggacagaagagatgagtactat

SEQ ID NO: 636870 - DNA, 83 bp, Homo sapiens
ggtgtatgttgtcaactatccaaaagtgtttcctgaggttataggcgggtgtttgaggagtacatgcgggttattagccagcg

SEQ ID NO: 636871 - DNA, 74 bp, Homo sapiens
tgcttctacccccggagctcagctgatcttcccttccagactacgagggaggtggggaagacagggctccagct

SEQ ID NO: 636872 - DNA, 100 bp, Homo sapiens
gtggaattatgtgcttcaaacaggttgaaaggttcagattcagaacaagaaagtggacatctctaaggtctcctccaagtgtgggtctaaggctaacatc

SEQ ID NO: 636873 - DNA, 75 bp, Homo sapiens
gaaagatgttgacaagataagggaatttcttcaaaaggctttccttaaagtttcccatgtctcaatggactcctg

SEQ ID NO: 636874 - DNA, 104 bp, Homo sapiens
aaaaaagaacctgaggatagacaacaggcttccaaaagcccttacaatggatggcgtactgctctgttgcccaggttagagtgcagtggcttgatcatagctca

SEQ ID NO: 636875 - DNA, 90 bp, Homo sapiens
gatatactaaagcaggctaccaaggacagagtcagtgatttccataaattgaagcaaaggaaatcctcattgacgattcaatttgttgaa

SEQ ID NO: 636876 - DNA, 98 bp, Homo sapiens
ggcgagaggggctgtgacagtcggagtcccaagctgcggttcggctgctgccgaggccaggtcagagcagcccaccatgggatggggagggggtggag

SEQ ID NO: 636877 - DNA, 89 bp, Homo sapiens
attcgcagtggtcgcttcttctccttggcagaggtggaggagacactgaagcgactgcagagccagaagggagtgcagggaatcatcgt

SEQ ID NO: 636878 - DNA, 100 bp, Homo sapiens
gagcgatttgctggtgtagacatccgtgtccgtgtaaagggtggtggtcacgtggcccagatttatgtgacgaccgtagcccggaggtcttccgcacacg

SEQ ID NO: 636879 - DNA, 90 bp, Homo sapiens
tgccgcctcctatctgcccgccgctcgcgccgggcccgtggccgggctgtgaatttttcaaggaatataaagatcgggattacatggcag

SEQ ID NO: 636880 - DNA, 75 bp, Homo sapiens
taagaatggctgtagaggaacttcagtctataataaagagatgtattgtagaaggcatgaaacaaaaaatgtgga

SEQ ID NO: 636881 - DNA, 74 bp, Homo sapiens
tcctcctcacctatggccgctggcagattacaggtccaccaggttgtggaaaaactcagttttgtataatgatg

SEQ ID NO: 636882 - DNA, 100 bp, Homo sapiens
cacggacaacctcagaggacaacgaagtgttcgtccagttacaacacagggatcacaacaaacacaaccgccacagaagcactatggcattacttctcct

SEQ ID NO: 636883 - DNA, 83 bp, Homo sapiens
ctggacccgggtctggatcccgctgcctcggccaccgctgctgccgccgccaggcgatcagtgggtgaccgcggctgcgaggg

SEQ ID NO: 636884 - DNA, 89 bp, Homo sapiens
gtttgaacaaactcgaagaacagctgtggaaagaagttgcaaaacactgggcccaagaggatgctgagaaacttcggtccgttgtgatg

SEQ ID NO: 636885 - DNA, 80 bp, Homo sapiens
tttggtgtagtgtttcctcatgtttcttataaacaccgaccagaagctttgtatgcagctgtaaataagaaacctacctc

SEQ ID NO: 636886 - DNA, 90 bp, Homo sapiens
gcgcggagagcgcgggagcggagcagtagcccgatccggggccgcgggccgagctgccggagaggagaggcagcagcatggcgagtgtcc

SEQ ID NO: 636887 - DNA, 59 bp, Homo sapiens
gacaatccacaggagaagagacttgcagcagatgactttctagagcctgaggagtacat

SEQ ID NO: 636888 - DNA, 74 bp, Homo sapiens
ggatattcacaatgtatggaaacagagctttaccgatttgttacaactcaagcaagggccagcagaaattctct

SEQ ID NO: 636889 - DNA, 100 bp, Homo sapiens
cggtgatgctcctgaaaacgtctgcccggcgtagcgggaacccagcatgattttcaggatatacctgtgtttcccacaatcacagccactgtgacttttc

SEQ ID NO: 636890 - DNA, 75 bp, Homo sapiens
cgagaagcctgaaaagtcgcagcgagctggagccgccggagatcgtctggtagaatcaacttccttgagaaaagc

SEQ ID NO: 636891 - DNA, 51 bp, Homo sapiens
gtacggatggtgcagctggcaaagagagctcgtccgcatggtgctgaatgg

SEQ ID NO: 636892 - DNA, 75 bp, Homo sapiens
agagagagctgaaaccagctcgaatatatggattgggatctttaggggccctgtattacggcagcaaagtggttc

SEQ ID NO: 636893 - DNA, 100 bp, Homo sapiens
acctgctacacagtgtacaaaaacaagctgtaacccttcacgtgccttaccttcactcaatactggcagctcttcccccagaggggtggaggaacctgat

SEQ ID NO: 636894 - DNA, 96 bp, Homo sapiens
ctaacttccatggcatggatcttacccgtgacaaaatgtgttccatggtcaaaaaatggcagaaaaagcttgtggtgaaggggggcaaaaaaaaga

SEQ ID NO: 636895 - DNA, 50 bp, Homo sapiens
cctcaacagccaaggactgaggatggctactgatgcccgaagggcttttc

SEQ ID NO: 636896 - DNA, 75 bp, Homo sapiens
cttcattgcaagttcttatttgtaaggttggactccatgaaagaattgcacaaaacaaatcgacagcagcatgag

SEQ ID NO: 636897 - DNA, 82 bp, Homo sapiens
atcatggccgtggccccgctgttcgacaccaagatcttcaggacgctctggcgtgttaagataagactttgaccccgacgca

SEQ ID NO: 636898 - DNA, 74 bp, Homo sapiens
tgagagtagtatctgttctgattaagcagttttacagtcttttgaggcaccaaataatgtcatctgaaatgttg

SEQ ID NO: 636899 - DNA, 101 bp, Homo sapiens
ttccagtaccagtacattaggaaacatgctagaattacctggaacttcatcatcatctacttcacaggaattgccatttctatcagttgagggatttgcag

SEQ ID NO: 636900 - DNA, 95 bp, Homo sapiens
aaacgaggaggagataacgcggccttgggctctggtactgctataaccagaatttggtagaaaaaggatttacttgttggggccctcttgataaa

SEQ ID NO: 636901 - DNA, 95 bp, Homo sapiens
attattgcaaccataaacaagggatccattgtctggcaggaggtttttgatgataaagcaaagaaagtggggctgatccaacaattgaaactgac

SEQ ID NO: 636902 - DNA, 100 bp, Homo sapiens
ttcggaatagtctcaagatgctgcttactggtgggaaatcaagtcgtaaaaacaggtcaagtgctctgcttatgataatgtcaacaaagttcgagtagct

SEQ ID NO: 636903 - DNA, 113 bp, Homo sapiens
gaattttgtcttctgttgggcttggaacagggctgcacacctttctgctttatctggtgtgtggctctgtggctgctgtggaagagcggctccgaggtcgggagacgttgctc

SEQ ID NO: 636904 - DNA, 100 bp, Homo sapiens
tccaagaaacatgaggctccccgacccattcactcctaatctaaagaatggggaatgcatcagcaacccccacacccccctccagatcagccatggatgc

SEQ ID NO: 636905 - DNA, 101 bp, Homo sapiens
ggctgctgcagctccgcctcctccgccgcgcagcataaatgcagttccaactacaacgaagattttgtgctacagctagagaaggaattggtccaagcccg

SEQ ID NO: 636906 - DNA, 83 bp, Homo sapiens
gcccaggcacagccgacgccgcgggcctcccgcgacgatgcccctcaacgttagcttcaccaacaggaactatgacctcgact

SEQ ID NO: 636907 - DNA, 96 bp, Homo sapiens
gcgtcgggctgcaggagaagatggcggtctccacagtgcctttcttcctgacgtggagtgtggtgaactcagtgcattgggccaatggttcgacac

SEQ ID NO: 636908 - DNA, 83 bp, Homo sapiens
gtccccggagaactctaccctggaggagattctggggcagtatcaacggagtctccgggttttcggctttgtgagaaacctta

SEQ ID NO: 636909 - DNA, 76 bp, Homo sapiens
ccggcggcggcggcggcggcggcggcggcgcagcactgctcagcacgcaggcatgtgaggaagctgggcttaaagg

SEQ ID NO: 636910 - DNA, 100 bp, Homo sapiens
tcacaagctgcaccagcttctaaccgaaagtctggacagctgatcacctgaaagagaggagccaagaaaaccaatctaaacatttgtgggaagttgtatt

SEQ ID NO: 636911 - DNA, 50 bp, Homo sapiens
aatatattgactactgccacaattccggagaagatggtataaactggtcc

SEQ ID NO: 636912 - DNA, 101 bp, Homo sapiens
ctccgacttgccatggtcgtctttgtctgccgggtttcacatggctaagcctgatatgatccgcaagttggaacaaggagaagagctatggacacagagaa

SEQ ID NO: 636913 - DNA, 75 bp, Homo sapiens
cgagcgctgttctcgctccggagccgctgcacatttcgagtgatggctgttttagtacttcaggtggaattcgtc

SEQ ID NO: 636914 - DNA, 98 bp, Homo sapiens
tgatgggcacctcccgggacgctcagtgcacctgtgcaacaactccatccagaagcacctggagaactcatgccatcggcatccactgcttccgccag

SEQ ID NO: 636915 - DNA, 100 bp, Homo sapiens
acatgaagaagcgcctcttgatgcccagtagggaggcatttcatccttcatgaagccattcaggattttgaattgcatatgagtgcttggctcttccttc

SEQ ID NO: 636916 - DNA, 82 bp, Homo sapiens
cgaatatcgtcatcgttagaagactgaaatcgccaagagattgaatacgatttgtgcacaagtcatcccatttctgtctcag

SEQ ID NO: 636917 - DNA, 100 bp, Homo sapiens
cgggaggtgttcgagaacgaccccgagacgagacagggcagggcattgttcatgcactgaccgacctcagcagccccggcatgacctcagggaacggaaa

SEQ ID NO: 636918 - DNA, 90 bp, Homo sapiens
agtagatcttcattttattgcattagttcatgtagatgggcatctctatgaattaggtgtggagctgatgagtctgccctaccgcctggt

SEQ ID NO: 636919 - DNA, 83 bp, Homo sapiens
gtaccagaggtggaagtccaagtcaaacgcagaaggactgcctcactgagcaaccaagagaattacatgaatgacagtcttcg

SEQ ID NO: 636920 - DNA, 82 bp, Homo sapiens
acagacagcagtatgaagaaatggtggttcaggccaaaaagcgagcttttcaggctgcctttcgagctcaggggcccctggc

SEQ ID NO: 636921 - DNA, 100 bp, Homo sapiens
atcccttgctcccatccctgcagcatgaacaagggagatgttaatctctgtggccctaggccaggtgttatccctccttatttgtggaattggcttgact

SEQ ID NO: 636922 - DNA, 51 bp, Homo sapiens
tatgggtgaagatccaagatgttctacaggcattgaatgccccagaggagc

SEQ ID NO: 636923 - DNA, 90 bp, Homo sapiens
cggagctgttcctattcggccatcttggctcctccacaagaattgaatgatctggcacgggaccctccagcacagtgttcagcaggtcct

SEQ ID NO: 636924 - DNA, 75 bp, Homo sapiens
ccctgaggaaggccatgaaagggctcgttgatgaggaatctggattaaaggattcagaaccagagcgaaaacgca

SEQ ID NO: 636925 - DNA, 75 bp, Homo sapiens
actcgactcttggcgccaccgcctcatgcactgtgtagctatatgttctcctttcagccaagacctttcaccagt

SEQ ID NO: 636926 - DNA, 75 bp, Homo sapiens
cagccagaccagcaagcatgactactccctctccctgaggtgaggtctgccataaatcctatactcagttttcaa

SEQ ID NO: 636927 - DNA, 74 bp, Homo sapiens
cagaggagcgggcagcaagcggaaacgtctacagcagctctgagttcctggccgtccagcccactcctaccttc

SEQ ID NO: 636928 - DNA, 50 bp, Homo sapiens
gacaacctgtatcccaagcagcgctgataggaagatgtcttcaggaaatg

SEQ ID NO: 636929 - DNA, 75 bp, Homo sapiens
ctatgtacctgttaccactttcaaaagagttaagggagcatggagaaaagaagaaacgctcgcgagaggatgctg

SEQ ID NO: 636930 - DNA, 98 bp, Homo sapiens
agacctggcacccagagcacttcttctgctctcactgcggagaggtgtttggtgcagaaggtgttggggatgtcctttgcactgaccctgaactgcca

SEQ ID NO: 636931 - DNA, 100 bp, Homo sapiens
ctatgaggagacaaacaccccacggccagaccggctgcatcatggacgagtgcacgtggtcgagcaaaccaagagtttcactgttgacatccgcgccaag

SEQ ID NO: 636932 - DNA, 111 bp, Homo sapiens
tttcagttcgccgatgggaaacccggagaccaaatccttgactgtggatattcataaggagaaagtggcacgaagagagattggtattttgacaacaaataagaatacatc

SEQ ID NO: 636933 - DNA, 82 bp, Homo sapiens
caccaaagaaagtgacctctgagaaagtgagccagaaacatgctgagcctttgacagttttagaaagagcgttttcgctacg

SEQ ID NO: 636934 - DNA, 50 bp, Homo sapiens
tcatttagattggattctgaatatcaggttttagctaaagaagatactga

SEQ ID NO: 636935 - DNA, 80 bp, Homo sapiens
caaagctgttgtctcagggagcacagaaagttatggtgaatggttgcatggatttgaaaaaaaggcaaaagaatgtatgg

SEQ ID NO: 636936 - DNA, 75 bp, Homo sapiens
tacaaatatcagagccatggctcagccgggaagatttccagaggattccagaacttgccatcaacccactggggg

SEQ ID NO: 636937 - DNA, 100 bp, Homo sapiens
gtgaggacggcgagaaggcggcgcgcgaggtcaagctgctgctgctcgggaaactgaacagccaagactcctataacaattttaccaacaacaaccctgg

SEQ ID NO: 636938 - DNA, 76 bp, Homo sapiens
aagacctcgaccagggagtggaatggagatttatggttacaatttgagtcgctggaagcttgccatagtttcttta

SEQ ID NO: 636939 - DNA, 75 bp, Homo sapiens
gcacagtgctggtctgcctgacatgctatgtctgcaaatgtcccccacagttctctgggaagcactgtgaacaag

SEQ ID NO: 636940 - DNA, 97 bp, Homo sapiens
ttcaaaaggagctatataaggaagtgctactggaaaacctcaggaacctagaatttctggactttctgctgacccctctgtcacccactgccagtca

SEQ ID NO: 636941 - DNA, 75 bp, Homo sapiens
tgctaccccactcctgggccgtccctgaaggaccagttacagaagtggatccgcggtaatgtgagtgcatgtgcg

SEQ ID NO: 636942 - DNA, 101 bp, Homo sapiens
caagctgagcgagctgtcagagcccggggacggcgaggccctcatgtaccacacgggaaatcctcattgacgattcaatttgttgaaggccaatttgtgga

SEQ ID NO: 636943 - DNA, 100 bp, Homo sapiens
ctcgagcatataatctaaccaacttttccagcatgtttactgattcctgtgactgctctgagggctgcatagacatcaaaacaagctatcgatcagggaa

SEQ ID NO: 636944 - DNA, 83 bp, Homo sapiens
cgatccagcctgcggagcctgtggggcagcctcaagctgggcagcgccttccctcggggtgacctggcgcagatggagcagag

SEQ ID NO: 636945 - DNA, 90 bp, Homo sapiens
gtgatgttggagaactacagaaacctggtctccctagagtcttttatgacatcaagagaaatgatcccagaaagaaaaaatcaagaaaaa

SEQ ID NO: 636946 - DNA, 96 bp, Homo sapiens
ggaccagcgcggacggcggcgacggaggagagcagctcctcactgtcaagcacgagctgcggactggttctctacttttagagtcgaaaataaatc

SEQ ID NO: 636947 - DNA, 88 bp, Homo sapiens
gacagcgcgtgcccgcgaggagccgccgcgcgcccgcgccctccgcgcgacgccaggctggcgcccatgcggctctacacgctctcca

SEQ ID NO: 636948 - DNA, 147 bp, Homo sapiens
ggcacaatgctgctggcagcgagtaaagtcttggacagacttaaaccagttataggggtaaacactgatccagaacggtggaagccattacctactgttggaccgggtgtctcagattcttcaagagcatggtcataatgtgactat

SEQ ID NO: 636949 - DNA, 82 bp, Homo sapiens
gcacctcctcgaagtcatcccagtcaagctgtgtaatgttcttgatcgactaaatgtgattgcagaaagtgtggtgaagaaa

SEQ ID NO: 636950 - DNA, 101 bp, Homo sapiens
cgtataccaacccaccccacatggcccacgtacctcagaaggacagaataacgggctcccagattcacaagccccaccaagaggatcaccccaggaacgct

SEQ ID NO: 636951 - DNA, 75 bp, Homo sapiens
gcgcctgggggcaccgctgccgttccgagatatgtgcagcgggggctacagcgagtggggctagatccccagctg

SEQ ID NO: 636952 - DNA, 117 bp, Homo sapiens
ggaagtggggaggcctacgatatcattgctgaagacattcaaggaaccgtctttttcgctggtgaggccttggacaagattcgctatgagagcctgacagacccttcgaagttggac

SEQ ID NO: 636953 - DNA, 82 bp, Homo sapiens
cttggaacagaacaagaggacaggaggtgtcgttccaggaactgtggctgcaccatctgtcttcatcttcccgccatctgat

SEQ ID NO: 636954 - DNA, 74 bp, Homo sapiens
ccagtatccaggtcgaggttctgcagaaggttgtgactttagtatacagtgccattgagaaacagaaattggtg

SEQ ID NO: 636955 - DNA, 98 bp, Homo sapiens
tgtacaccccatcccagacgaagacagtccctggatcaccgacagcacagacagaatccctgctaccatgtatcctactcagtacatgtatctgaaga

SEQ ID NO: 636956 - DNA, 74 bp, Homo sapiens
gagtagaagtgtccagcgacagcttctgggaggttgggggccgtcccgctcctaaggcaggaagatggtggccg

SEQ ID NO: 636957 - DNA, 83 bp, Homo sapiens
gggccgctggattctgaggaccagcagatggccagtcacgagaacccagccttatgccagcctggaccatcttggaggcagtg

SEQ ID NO: 636958 - DNA, 74 bp, Homo sapiens
gcgtttccacttcagagatctgctgagatctgtatctgtggacctgaatgttgatccctcgcttcagattgaca

SEQ ID NO: 636959 - DNA, 98 bp, Homo sapiens
ggatgccgtgaaggacttcgactgctgttgtctctccctgcagccttgccacgatcctgttgtcacgacaggcgaccacatcgtcatggtgaacgggg

SEQ ID NO: 636960 - DNA, 102 bp, Homo sapiens
cggcggccgagttctccagcctgctgcgcaggataaaaggcaaactcttcacctggtacaaagaggatggtgaagctttgctaattttgctaccctcagaaa

SEQ ID NO: 636961 - DNA, 83 bp, Homo sapiens
cctgcactgaaaggaaatgacggattttgattctgaaaccttccttgtatccctcctgagacatctttgctgcaagatcgagg

SEQ ID NO: 636962 - DNA, 83 bp, Homo sapiens
cagatcatgtgtgagcgggcaacacaaaggatagctttcaagaagaagttgtatgcacatgtatgatctcgtgaaaccttgag

SEQ ID NO: 636963 - DNA, 87 bp, Homo sapiens
tgaagagcaagcccctaggaatctgcctgataatcgattgcattggcaatgagacaggaaggaggagaatcagaaggtcgccattga

SEQ ID NO: 636964 - DNA, 96 bp, Homo sapiens
gcacaatatcgggcagaaagataatcacggagatacaactcgtcaacgaatcaaattcagtgatgacagagtatgcaagagtcaccttctcaactg

SEQ ID NO: 636965 - DNA, 75 bp, Homo sapiens
tttagagctgcggaacaggacgccctctgatttatttctcaaactctgaggctgcggagttcacacattgaaatc

SEQ ID NO: 636966 - DNA, 100 bp, Homo sapiens
ccgcagtatcatgctggccaagaagatcatcattaaggacggaggcacggttgcccctctacctggcctccctcttcatcagccttgttttcctgttggt

SEQ ID NO: 636967 - DNA, 88 bp, Homo sapiens
tttacaggagagccgaccattttcagttgactttttcaggaaaatgattcagtttgaaaaggagcaaacggagtctccctctgtcgcc

SEQ ID NO: 636968 - DNA, 75 bp, Homo sapiens
ttccacctcagtctgaacctgagagcaacagtgttatagttttgccgctggactcttccctcccttcccccaccc

SEQ ID NO: 636969 - DNA, 100 bp, Homo sapiens
ggaggaagaaaggagaaaacagagatcctatcagatgaccttacagacaaagcagaggctcatctttgcaggcaagcagctggaagatggccgcactctt

SEQ ID NO: 636970 - DNA, 100 bp, Homo sapiens
ttatgtcttctaaaaatattgcacagacctttccaaagtgaaactgatgagatttgatgatccactgttggggcctcgacgagttcctgtcctgggaaag

SEQ ID NO: 636971 - DNA, 100 bp, Homo sapiens
gtctacatcctgcgggtgcctttgaaaatcaacgacaacttgagcacaggactctgtctactagtgacgatgtcgaagacagggaaaatgaaaagggtcg

SEQ ID NO: 636972 - DNA, 50 bp, Homo sapiens
gggccactcagagtcgcccgagaataattcgccaaaatgacgaacacaaa

SEQ ID NO: 636973 - DNA, 98 bp, Homo sapiens
cgcccgccctggagcagttaggaccgaaggtctccggagagtcgccggcggtgccagaagatgcttataagacccaggtcaggattgacaatgagcca

SEQ ID NO: 636974 - DNA, 75 bp, Homo sapiens
gggcacgtcaccgccgaatggcagcctccagaaagccaccgcgagtaaggaactctaatgaatcattgattgacc

SEQ ID NO: 636975 - DNA, 87 bp, Homo sapiens
ttgcttctcctgttgctgctagtggacatgagattcttattgccaagtcccctctggctcccttcacctcatttgtctacaccatca

SEQ ID NO: 636976 - DNA, 100 bp, Homo sapiens
ccgggtcttccagagcgtgaagatcaagatcgggggcccaggcagtgccacttctgatctggggatggcatgtgaccgtgccagggtcttcctgcactcg

SEQ ID NO: 636977 - DNA, 75 bp, Homo sapiens
cttcgattaagaactgtacacccaatattgttggtatattttggaacttcacatccaagatactatatctctgcc

SEQ ID NO: 636978 - DNA, 99 bp, Homo sapiens
tagatcatcactatacaacaaaacaggtcatcactaagaaatcaggtgtagttctgctgaatcctattcctaagcttcttaatgaagaggataactcag

SEQ ID NO: 636979 - DNA, 80 bp, Homo sapiens
aaggaactggtgatattattaagttacatggacacagaacagtatgaagaagcagtacgagactatgaaaaagtatacca

SEQ ID NO: 636980 - DNA, 108 bp, Homo sapiens
ggacaccatgggaccctcccagcatgtctatgcctactctcaagaaatggtaggtgacctcacagtgactcaagctaccacttactgttgattgtgacgaaatgccag

SEQ ID NO: 636981 - DNA, 93 bp, Homo sapiens
agattcgcagtggtcgcttcttctccttgcatgaagaggaaccacctcagaatatgaaaccacaatcaggaaacgataagccattatcaaaaa

SEQ ID NO: 636982 - DNA, 50 bp, Homo sapiens
ggacaacagaacaatattggaatggtggttcgagaaatggctgctactac

SEQ ID NO: 636983 - DNA, 97 bp, Homo sapiens
ccgctgccttgtggaggagttgagaaaaaccaatgctgtctgtgatcctggaaacatacgtgtgactgaagctcccaaacacccaatctctgaagaa

SEQ ID NO: 636984 - DNA, 73 bp, Homo sapiens
gctcctgcagctgcgatgcctgcccggttcttccaggttggaaagagaatatgctggagagctgtctcccacg

SEQ ID NO: 636985 - DNA, 83 bp, Homo sapiens
cttgggccgaccactcccccgatggcctcagccacggttcaaggtgtttgcagactatgaagcctacatgcagtgccaggcac

SEQ ID NO: 636986 - DNA, 51 bp, Homo sapiens
caaccgcctacgagacactcaaggttatcgaggacaccaaagagaaaagaa

SEQ ID NO: 636987 - DNA, 82 bp, Homo sapiens
cgaccgtccgccagtcgtcccgagagttgtctgctggttctcagcttgaagaagattctgcagtccttattgatcctttttc

SEQ ID NO: 636988 - DNA, 82 bp, Homo sapiens
ctaaagcagcgtgcgttcagccctggggctatggtgaactaaacggtaatgctggagaaagagaaatatctttaaagaacct

SEQ ID NO: 636989 - DNA, 75 bp, Homo sapiens
atgctggtcgcctgttgggagtaaattaccttcgttcagaaaaacctggtctatggcacaactaaaaaggtttgc

SEQ ID NO: 636990 - DNA, 100 bp, Homo sapiens
ttgatcatccgagctacttcagagtcagatggtacaccaggggttggaaaaaccacactaggcaaagaacttgcgtcaaaatcaggactgaaatacatta

SEQ ID NO: 636991 - DNA, 82 bp, Homo sapiens
ccgctcgcaggcgccgcacggagttgcgtcccggggacttggggccgcagggagcggaaggagagttttacatggaagtggc

SEQ ID NO: 636992 - DNA, 100 bp, Homo sapiens
gggcgaggatgaattacggttgccatgaatgtccttgtgaggcagttgggaagccttgccaccattggttcaggcaatcttcagcggtgatccagaggag

SEQ ID NO: 636993 - DNA, 100 bp, Homo sapiens
aggccaatgtgaccgtggggacttgctcgggcttttgttcccagaaatctgggttctgcccgcacacattcctcgccaccttcttggtgtctgagaacct

SEQ ID NO: 636994 - DNA, 80 bp, Homo sapiens
gggaggaaggaacgaggcaaggagctaaagcagcgtgcgttcagccctggggcaagccgattttttcagttgatattcac

SEQ ID NO: 636995 - DNA, 100 bp, Homo sapiens
cctcctagtgccttagaagccactgacagcccccagggcaggtgagccctgcatctggaataagctggaacctactgtgaatgcagccttggcctcagcc

SEQ ID NO: 636996 - DNA, 76 bp, Homo sapiens
gctgtgataatgaggaagatcttcaaatgggcattcacaagggagaagatgtcaaccggacactagaaggtggaag

SEQ ID NO: 636997 - DNA, 100 bp, Homo sapiens
aacctcgtcatgtcctacgcggctgcctgctgtttcccggggagatcatgaaacgaggtcgccttcccagcagcagtgaggattctgacgacaatggcag

SEQ ID NO: 636998 - DNA, 74 bp, Homo sapiens
agcagcaggagctggaggccgtgcggaaggcagctgagtatgtcccagagaaggtgaagaaagcggaaaagaaa

SEQ ID NO: 636999 - DNA, 100 bp, Homo sapiens
gtccgggctgtgagcaagaggaagctgcagcccacccgggcagccctcaccctggacactggggttgggaaatcaagcatcgtgtgtcgatttgtccagg

SEQ ID NO: 637000 - DNA, 100 bp, Homo sapiens
gggagctgaggaaccagatatcttgaaaagctgccagaaagacttcccaagtaagaagcggaagaggagccgctggaaccaagacacaatggaacagaag

SEQ ID NO: 637001 - DNA, 49 bp, Homo sapiens
gcctttgccgccaccatgcccaaaacggatgcccaggctgaggaagaga

SEQ ID NO: 637002 - DNA, 98 bp, Homo sapiens
acatatctcagaccaatcacagaggctccttcaaataaagccacagctgctgattcattgtttgaccgacagggaacatgtttgacaagctgaaccgt

SEQ ID NO: 637003 - DNA, 95 bp, Homo sapiens
attatggaaacctggtctcactggatccaggtccagagagcatcgcagacatcgatctcgctccatgtcacgtgaacgcaagaggagaactcgat

SEQ ID NO: 637004 - DNA, 98 bp, Homo sapiens
gagagacgtgaaacatgtgaacactcaagtgaagcaaaagccttccatgattacgagtccaatgtgctgattgctgctaacagtcagggtacaattaa

SEQ ID NO: 637005 - DNA, 100 bp, Homo sapiens
aagctgccacccagcagaatcagcagctacgggcccagttgagcctcatggctcaccctggggaagaggatggagatgaagatgaggaagctgagtcagc

SEQ ID NO: 637006 - DNA, 87 bp, Homo sapiens
cctaccaggtggacggcacggacgacagaagcgactttggtgagactctggttgcccccaagtttcctggcagtgtgtgatactgag

SEQ ID NO: 637007 - DNA, 100 bp, Homo sapiens
cttgctccgaagatgtggacttgccctgcaccgccccctgggatccgcaggttccctacacggtctcctgggtcaaggtcctggatgcctcatcccttag

SEQ ID NO: 637008 - DNA, 89 bp, Homo sapiens
ttcaatgcagacaagacggatgtgatgctgatttacaaccctgaagaatctccctatccctattttgtccccctgcagtaataaatccc

SEQ ID NO: 637009 - DNA, 100 bp, Homo sapiens
gtttcttcagatcatctttttctctttggaggatttaccactgataaacagccactaactgaatttcaatatgctgaaaccgtatttcgagataagtctg

SEQ ID NO: 637010 - DNA, 76 bp, Homo sapiens
tgaagattctacagataaatcaggccaagaagcttgagagaagaaaaatttcagaaaaattgtctcaatttgacta

SEQ ID NO: 637011 - DNA, 98 bp, Homo sapiens
gttgaaaatgttaaaggctgtgctgaagaagagccgagagggaggaaagggaggcaagaaggaagcagtcattgaaattatgagactatcattcaaat

SEQ ID NO: 637012 - DNA, 100 bp, Homo sapiens
gccaagctcctggccctggccctgatcatcctgctgggcttcgtccagatcgggaagggtcctctccacccggatcctggccatgaaggcctcgctctgc

SEQ ID NO: 637013 - DNA, 100 bp, Homo sapiens
cggggctccgtcatctgtctggagctggagatggagctgaagatgctgaagtctcagtccagctctgccgaacagagcttcctgttctccagggaggagg

SEQ ID NO: 637014 - DNA, 100 bp, Homo sapiens
gagttttaccggccgggaacagacgggttaaacccatccagagtaatggctgcggccttacccaggaccctgggggagttgcagctgtatagaatattac

SEQ ID NO: 637015 - DNA, 90 bp, Homo sapiens
agccatcatatatcagtatatggaagaggacgccaagagtgccgaggatgaggctccttccagacacttgggaaagcaccagccccgctc

SEQ ID NO: 637016 - DNA, 83 bp, Homo sapiens
cagaagctgtcaagccagatgactgtgctgcatttgatacagttcttgggataaatgttgcagtcaagaaactaagccgtcct

SEQ ID NO: 637017 - DNA, 100 bp, Homo sapiens
ggtgcaggtcctcaagaagacaggcaaggaggtggtgctggagggttggggtgactcagtgggaacgccatctgagcggggcatgacctatgacgcactc

SEQ ID NO: 637018 - DNA, 102 bp, Homo sapiens
tgacaagtatctgtgaaaaggttattgtgcctaacatggaatttagaggttcggctttccagtttggcagcagcactacaaatttcaacttcacaaacaaca

SEQ ID NO: 637019 - DNA, 100 bp, Homo sapiens
gctgccctccggctccaagaaggttatctcctcagccaacagagctgtggttggctcggacatcatcatgcagctggacgacgtggttagcagtactgtg

SEQ ID NO: 637020 - DNA, 83 bp, Homo sapiens
gtggtattcgccggcacgcgaagtggccgcatccgcaagggctgaaatctctttaatgatggagggaagcaggcagacgcgag

SEQ ID NO: 637021 - DNA, 100 bp, Homo sapiens
ttatggtggaggcgcaaaactcagccacaatgggattttcaccctttactcttacaggatggagagcaatacatcatcatctttggagaatttagcgacg

SEQ ID NO: 637022 - DNA, 100 bp, Homo sapiens
ggagaatcaagagaaggcgagtatcgcgggccacatgttcgacgtagtcgtgatcggaggtggcatttcaggggtcccttcagtgttgtacgacgatgta

SEQ ID NO: 637023 - DNA, 50 bp, Homo sapiens
tccacccagcccaagatgaccggcagacctgttatcctaaactaggtgag

SEQ ID NO: 637024 - DNA, 90 bp, Homo sapiens
gccttcgcgtcttctcttccctcgggtgacttgagagacacgccctgccaggcaggggaggaagagtggaccactgccccagttccccag

SEQ ID NO: 637025 - DNA, 100 bp, Homo sapiens
tgcccatgatggctcagaccaacaagttcaactatagtaaagtgttgagagaggagaaccagtgcattgctcctgtggtttccagccgcgtgagtccagg

SEQ ID NO: 637026 - DNA, 87 bp, Homo sapiens
cagcaaacatcaggacacttctggagaacaaggtctcatctgagtagcagcttcctgccctccttcttggagataagtcgggctttt

SEQ ID NO: 637027 - DNA, 100 bp, Homo sapiens
atctttttcagtgttcttggaggtgtggggtgtgagaacttgatcagtttgtgtcagccaccttgttctctaaaggttttacagaaggcgacacatgttg

SEQ ID NO: 637028 - DNA, 75 bp, Homo sapiens
ttcggccctgggaccaaagtggatatcaaacctgttaaacgtttaatgaaagaagcggcagaattgaaagatcca

SEQ ID NO: 637029 - DNA, 50 bp, Homo sapiens
gctgaagcgactgagtccgcgatggagtttgctggcctagacctgaactc

SEQ ID NO: 637030 - DNA, 98 bp, Homo sapiens
ttgaagcagttttctcagctgcctgctaacatagctgtttgcagttctaagtcccaaaagctgacctgcaagaagaggacgcagaaatagaagtagac

SEQ ID NO: 637031 - DNA, 50 bp, Homo sapiens
gctcctcgaccattcgtttgtcaagagctgcagaaactggagggcagcag

SEQ ID NO: 637032 - DNA, 90 bp, Homo sapiens
cccaggactccagaaaattcagcaaagaagaagcttttaagatgttctcagtgcagctgagtcttggtgagcagacatgggaatccgaag

SEQ ID NO: 637033 - DNA, 100 bp, Homo sapiens
tacaaagtaccctgtgctactgccatgaaactacttcgtgtcctggcctcagctgggaggaatattgctgcccggctgttattagaggaagtaacacaag

SEQ ID NO: 637034 - DNA, 83 bp, Homo sapiens
caaaatcccaaaaccagggccaaggaataaaattgaagggtgtttttcttagagaacatcatttgtcatatttatttgatcaa

SEQ ID NO: 637035 - DNA, 110 bp, Homo sapiens
ccagaccctggagcctcagttggaagcagccgatccagcctgcggagcctgtggggcagctcacaggcgcctgaagtacatatccctagctgtgctggtggtccagaatg

SEQ ID NO: 637036 - DNA, 75 bp, Homo sapiens
tcaggcttccatgcagcctgccttaccggcgcgggcggtgatgaactttgtggttcgctaccggccagacgagca

SEQ ID NO: 637037 - DNA, 97 bp, Homo sapiens
ggcaggctcctaagcctaggagagcccgaactggaggccagcgcaggacatctcattgccattgtcagccaggaactcgcagcctcacagccctact

SEQ ID NO: 637038 - DNA, 76 bp, Homo sapiens
tgccatgtgttcgagtcggaggatatgaagaagatgactttatgtgtaagaaggcggcctctaaatcaaaagagaa

SEQ ID NO: 637039 - DNA, 100 bp, Homo sapiens
cggtgcgagaagaagaccccggcttgagagtgaggagcagatgtctcaagtattagatgccatgtttgaaaaattggtcaaagatggggagcatgtaatt

SEQ ID NO: 637040 - DNA, 100 bp, Homo sapiens
gaaaatcatattatagatggagtaaaggtcctccacttcttccaccttggctacccctgagatagcaagaccaatccttcctcttcttcctccttctcag

SEQ ID NO: 637041 - DNA, 98 bp, Homo sapiens
gcctgggtgcagcttctctagctggccttgctgttgatatctccacaggaccttcttggttaaatcagggactacttctgaactctacccaatcagtt

SEQ ID NO: 637042 - DNA, 50 bp, Homo sapiens
tctggaggagccttctcaagaacagaggctgctgatactttggctgtgag

SEQ ID NO: 637043 - DNA, 50 bp, Homo sapiens
acagaaatccactggagcaccttgatagaggtacttggaaggctccatcg

SEQ ID NO: 637044 - DNA, 78 bp, Homo sapiens
gtggagaagggccccaccctgggcagtatagagacgtcggacttcacgctctcatgggaggttgaatggagcagctga

SEQ ID NO: 637045 - DNA, 82 bp, Homo sapiens
ggaccacggtcaccgtctcctcagcagttggaattgatcacaccttttcagttgtacttcaatcctgaattaatctttaaac

SEQ ID NO: 637046 - DNA, 100 bp, Homo sapiens
gcggctgttgccatgtccgcaccgggacgatcatcctggggacctggtacatgaccattcaatgtcccagcctattatggtacagagaagatctggacag

SEQ ID NO: 637047 - DNA, 75 bp, Homo sapiens
cgaggacctgtttagcagtttgaaagggtcagaagccaatgacctggccctgaggctggctcgccactacacggg

SEQ ID NO: 637048 - DNA, 100 bp, Homo sapiens
cagcaaatacaccaacctcctccagggctggcagaacaggtatctcgggggagctttgtgccttgatggatcaagttcatcatatgcagcactcaaaatg

SEQ ID NO: 637049 - DNA, 100 bp, Homo sapiens
agccctgaattcttttgacgacctaagtcctgactgcttgggacatgcaggacttgtatatgagtatacattggatctgcccaataacatgattcatcag

SEQ ID NO: 637050 - DNA, 50 bp, Homo sapiens
ggagaactatagcaatctggttttcttggcccgtgatgctgatgagcgag

SEQ ID NO: 637051 - DNA, 100 bp, Homo sapiens
ctgagacggtgtcccgccgaaaggctatggagttactagtagagaaagcaatcagcagtgcttctagccctcagagccctggggatgcactgagaagagt

SEQ ID NO: 637052 - DNA, 73 bp, Homo sapiens
gattaaaggcagtgaggctgacaggttacgggcaggacttgagtggcttcggacagggcttctcagaccccag

SEQ ID NO: 637053 - DNA, 83 bp, Homo sapiens
cgcctcccggccgagctgacgctgcggcatgaagctgaacctggactatctgctggagatgctttgggagtacttggccctga

SEQ ID NO: 637054 - DNA, 82 bp, Homo sapiens
cccagccagctcctgccccctgggccccagcactgctgtcccacctgtgccggctgaacataacttctttttttcaaagttc

SEQ ID NO: 637055 - DNA, 96 bp, Homo sapiens
gtgacggacagtgcagggaagcaactgcagaggtgtccaagtcacacagagccacggaatctcacaggagcctgagaactcctcctcctgggactc

SEQ ID NO: 637056 - DNA, 95 bp, Homo sapiens
cagatcctggtcctcgatccgcccacagacctcaaattcaaaggtgttgacttcaaaatcaaaactgtagagctaagaggaaagaaaattagatt

SEQ ID NO: 637057 - DNA, 100 bp, Homo sapiens
ccgccagtcaataggaagtacgagtctgaaacagaaccgcatgagggaaagaggaaagtggaatctctgtggcccatcttcaggatccaccaccagaaaa

SEQ ID NO: 637058 - DNA, 100 bp, Homo sapiens
tacagatgttaccacttctgtggctgctaccccactcctgggccgtccctgaagatataaagatgaagcgcagctgtataaagaagagcacctgaggaat

SEQ ID NO: 637059 - DNA, 75 bp, Homo sapiens
ttatggagtaattcttgaacctcccaactatggcattgtcacagcccgtggccacccaggagcccgatgtgcaag

SEQ ID NO: 637060 - DNA, 100 bp, Homo sapiens
caaaggcaatgcttatcatttaatgcataaaaactgcaatcatttttcttcagctttatcagagcggacaaggcaaaatctcagcaagttcggacctcta

SEQ ID NO: 637061 - DNA, 75 bp, Homo sapiens
tcagtccttctgggacagcttccctggagactgccagactcgggaggaggcagtggcgctcggcgtgggtctgtg

SEQ ID NO: 637062 - DNA, 90 bp, Homo sapiens
caagaaggagagatctctgctgcctgcattgagggagccctaaataagtcacacagcaccctgaaagtgattccctggtctacttgaatt

SEQ ID NO: 637063 - DNA, 100 bp, Homo sapiens
aggaagtaaaatggcggacctggcgaacgaagggcaactccaacaacattgccaccgtggacatctccgcaggcttcgtgggcttagacacctacgtgga

SEQ ID NO: 637064 - DNA, 75 bp, Homo sapiens
gccggtggtgcgagtcttcggagcgaccccggcaggtacaacaaataacactgtgactccaacctcacaacctgt

SEQ ID NO: 637065 - DNA, 83 bp, Homo sapiens
aagcagccagcaaggaggagctggaagtggtaaagaagaagctcattcacacagaagacccatttaatgatgaacatcaggag

SEQ ID NO: 637066 - DNA, 75 bp, Homo sapiens
gcccacttggccgcgaagtggcccgagaccccgctgctgctggaggcaaggtacatgtcccagagcaagcacacg

SEQ ID NO: 637067 - DNA, 82 bp, Homo sapiens
ggagagaacagttcattgaagctatcactgtcagtgctgattataagcgccatggctatggctagtgttaaattgcttgccg

SEQ ID NO: 637068 - DNA, 51 bp, Homo sapiens
aacgcggcatccatctcaggacatgttctgctgtggtgcacgtaccatgag

SEQ ID NO: 637069 - DNA, 101 bp, Homo sapiens
cagatgaaacgaaaataccgagtttgtaatgtgactagacggccagccagtcatcaaacctacaccaaaattgcattgagccaaacttgccaccaagagcc

SEQ ID NO: 637070 - DNA, 82 bp, Homo sapiens
aaatcaccagttactttaatgagtatgcaaccactcatgtattcggttcaggaagcattaaatgccagaccatggtggattc

SEQ ID NO: 637071 - DNA, 83 bp, Homo sapiens
ggagcgtgagctgtatgggcccaagaagaggggacccaaacccaaaactttcctcctgaagggcgaccattgacgaggtggag

SEQ ID NO: 637072 - DNA, 100 bp, Homo sapiens
gcccaaagaggagggcgtcatcagcgtctccgaggacaggtttggcagttctctaccagtggaccaatcttttcatccccgtgtacctcaccatcagagc

SEQ ID NO: 637073 - DNA, 50 bp, Homo sapiens
tcaagctcatattttgaagtgtttacgggcatcataggcgagtattagtg

SEQ ID NO: 637074 - DNA, 50 bp, Homo sapiens
gagagggtgctggctgccgcgcggccgagatttggaggccaatcactgcc

SEQ ID NO: 637075 - DNA, 100 bp, Homo sapiens
gatgctgatgattatcacccggaggaaaatcgaaggaagatgggaaaaggcataccgctcaatgaccagattgtaaaccatggctgtgtggatacaagct

SEQ ID NO: 637076 - DNA, 75 bp, Homo sapiens
cgacagccaggcccgggagaagtggagccatcgaagcccccacccacaggctgacagaggcaccgttcaccagag

SEQ ID NO: 637077 - DNA, 75 bp, Homo sapiens
cacggtcctaagagctgggcaccaggaagcgaaggctggcccaagaaacagatattttcaagaaaaagaagagga

SEQ ID NO: 637078 - DNA, 76 bp, Homo sapiens
tttcatggattctaatggaatcaggcagttttgtgtccatgtgaacaactattgcttgcacacatttagatgtgga

SEQ ID NO: 637079 - DNA, 116 bp, Homo sapiens
ttaagcaaagccccctaactgcctggcgtctagtaagtacacagccgagccgctgccgctcatggatttgtgccgtcgctcggtgcgcctggccctggggagggagcgcctggggg

SEQ ID NO: 637080 - DNA, 100 bp, Homo sapiens
cggcctcagggttcaggcaatgcaaataagtgtgtactgtaagcacggtcacctgtgtcccatcgacaccggcctcatcgagaagaatatcgaactcttc

SEQ ID NO: 637081 - DNA, 89 bp, Homo sapiens
ggatgaatctgatgcggaaatggagctcagagctaaggcacgtgtggttctcaaatataggcattctgatgggaacttgtgtgttaaag

SEQ ID NO: 637082 - DNA, 90 bp, Homo sapiens
aagaaagcctggtggtggaagaaatccaggaacaactgtgtcagcagctagcccttttcctcaaggccagaagcggactcctagaagagg

SEQ ID NO: 637083 - DNA, 82 bp, Homo sapiens
ctggagcctcagttggaagcagccgatccagcctgcggagcctgtggggcagaccttgtgccggagccgactactggagatg

SEQ ID NO: 637084 - DNA, 90 bp, Homo sapiens
gaagcagagacaccaggacagaaaagacagtgttctgctttcatggagttcacagaagagtcgaggaggagagggctgctcacaatttat

SEQ ID NO: 637085 - DNA, 75 bp, Homo sapiens
cagcagatgaatcacctttcgttgggcacaacaggaacgtcaagccaagccagaccccgcagccgaaggacaagt

SEQ ID NO: 637086 - DNA, 75 bp, Homo sapiens
aaaatggacggggcagcttcacaagtgacttctgacagctctctccatggaaggaggcggcggccgcgatgagcc

SEQ ID NO: 637087 - DNA, 50 bp, Homo sapiens
tgcctgtacctgttgaacgaaggatgaagcctgctgggagcgtgaatgac

SEQ ID NO: 637088 - DNA, 101 bp, Homo sapiens
agaggcccaccctggagtaaccctcactggagaatccagaggcagttcaattaacctccagaagatggctgaacctgcaggaataccagagcaagaaactg

SEQ ID NO: 637089 - DNA, 83 bp, Homo sapiens
cgaggcaaggagctaaagcagcgtgcgttcagccctggggtataccgctgggccgaccactcaagcacggtgctgcagcggct

SEQ ID NO: 637090 - DNA, 100 bp, Homo sapiens
tacaagaagagggcggagcggagacgggagtattatgaaaagatcaacaacctccctcctagcatgatgacccgcagaaacacctacgtttgcacagaac

SEQ ID NO: 637091 - DNA, 83 bp, Homo sapiens
tgccgcaaagaatcaagttgcaatgaaccccaccaacacagtttttgaggacggctaagcaaattttctcatgtatgaagctg

SEQ ID NO: 637092 - DNA, 75 bp, Homo sapiens
cggtgctgcagacggcgagacctcctgcacaggtggattcaccaatgaacttgaagcatcctcatgacctagtca

SEQ ID NO: 637093 - DNA, 101 bp, Homo sapiens
gatgaagatgatgatgaattgggtagagagaccaaagatcttgatgagatttcatctgctgcttgcggctatggattcacactgctgtcctctaagactgc

SEQ ID NO: 637094 - DNA, 98 bp, Homo sapiens
aagagatcagagaccagggctcctgtggctcctgctgggccggaaggtggtggtcgtacgctgtgaaggcatcaacatttctggcaatttctacagaa

SEQ ID NO: 637095 - DNA, 82 bp, Homo sapiens
aagctgcagcccacccgggcagccctcaccctgcaacaaatggtcattcagaatgcttacggctattaataggaaatgcaga

SEQ ID NO: 637096 - DNA, 100 bp, Homo sapiens
tcctgtttgtcttctgctttggcccaggtagttggcaaaaaaggagaaagccactaaggtacaaaagacactggacaaccatattgcaatcagatctaca

SEQ ID NO: 637097 - DNA, 50 bp, Homo sapiens
ggggcgccggctggggtgtgtgctcctgggtttaactccctcgtgggtgg

SEQ ID NO: 637098 - DNA, 75 bp, Homo sapiens
ggccaggacgtcgggaggacctggaactcgaatcatttatgacagaaagtttctgttggatcgtcgcaattctcc

SEQ ID NO: 637099 - DNA, 76 bp, Homo sapiens
gcgcccacttggcgggccctggctggggatgtgcgagggagaagaaatgggtgaccgttggtgacacatccctacg

SEQ ID NO: 637100 - DNA, 100 bp, Homo sapiens
ggtcaggtcacagagaagctgcagctgacttacatggaggagacgtgtcgtcactatgtggcccatgtgaagcaacagcaggtggctacccagcagttgg

SEQ ID NO: 637101 - DNA, 75 bp, Homo sapiens
tccccaaggaaggatgagaatagctactgaaaaacctgctcctccaaagccagagcccaagcctaaaaaggcccc

SEQ ID NO: 637102 - DNA, 100 bp, Homo sapiens
ctccagaggaaaaagataaactcttcactgccattggttatagtgagagtacccacaacctaactttacctaagcaggttttgatgatgatggttcagaa

SEQ ID NO: 637103 - DNA, 75 bp, Homo sapiens
gtaggaaaaagcctttggacgtcacggcctcctcggagtttgggctttgcaaaactgagaacaaagccaagtcgg

SEQ ID NO: 637104 - DNA, 100 bp, Homo sapiens
tgctgtgtgacccagaggcgccgctcaccctctctgagctggtggacatcataggttgaaatcacaaagattagacacctttttagataggtgttcttca

SEQ ID NO: 637105 - DNA, 75 bp, Homo sapiens
ctcggatcgcctggagaggcactcggacctggttggaaaagagactgttcaaaccactgaggatcagattttgaa

SEQ ID NO: 637106 - DNA, 75 bp, Homo sapiens
gcagggccagaccctcttcatcccctcaggcccgcgatgctcccagcccggtgagacctgcctgaatggcgggaa

SEQ ID NO: 637107 - DNA, 87 bp, Homo sapiens
gcaggttctccctaacctcggtaccttgactaccccagtggaaggtcttgatatacagttggagtttggtgaggattcatcaacctc

SEQ ID NO: 637108 - DNA, 83 bp, Homo sapiens
ccatgacccagcctccgcctgaaaaaacgccagccaagaagcatgtgcgactgcaggagaggctcaggggagagagaaagccc

SEQ ID NO: 637109 - DNA, 90 bp, Homo sapiens
gcagcatttgccaaggagacatccctcttaggtactgaacgacacctgggtctccttcccttcctggtctgaggactccacgttcgtcag

SEQ ID NO: 637110 - DNA, 101 bp, Homo sapiens
tcggagacacggtggaaacgcttatggcagaactggggctcccttgcatcttccagttacaaattcagtgccttctgcagtttccccagagctcctcaaga

SEQ ID NO: 637111 - DNA, 100 bp, Homo sapiens
agccggaggcctgcgtggaggaggcgccccgcgcagctggctggcggagcatgagcgccccagtgttttagagcactttgctgcaagggaccaccacctg

SEQ ID NO: 637112 - DNA, 100 bp, Homo sapiens
ggctgggtcttcgcccaggtggccggcgcttcaggtgacttgcttttggagggcttcaacaactacaccttcctctccaatggctttgtgcccatcccag

SEQ ID NO: 637113 - DNA, 75 bp, Homo sapiens
tacttaccacctgccgccggttgccggaggccatcgaggaagtgaagaaatgaggagcgggaaggcctcctgcac

SEQ ID NO: 637114 - DNA, 75 bp, Homo sapiens
cagccgcccagaccgcgcagcgcgggaggcaggttccgcacgtgctgaagctgctgaaagatggcagaagaagtg

SEQ ID NO: 637115 - DNA, 83 bp, Homo sapiens
gaccaccttcgtcaacgtgatcgcgatggtgatggaatttcctgataatgtgttaaatctcgatggacatcagaataatggtg

SEQ ID NO: 637116 - DNA, 98 bp, Homo sapiens
cgagagggcgggccagggccgcactccggagactcgcggttgctacgcgcaccatggctggagttattcattttggacctggagaaagttcttcagaa

SEQ ID NO: 637117 - DNA, 111 bp, Homo sapiens
cgtccagcagatggcggatgccctgcagtacctgcagaaggtctctggagacatcttcagcaggtttgtttgtaaaaacaatggtgtgttgtttgaaaaccagctgcttca

SEQ ID NO: 637118 - DNA, 80 bp, Homo sapiens
gccactcgccatggactcccagaaacaacggcagcctttaacagttgagcacatgtatgaagacatcagtcaggatcatg

SEQ ID NO: 637119 - DNA, 75 bp, Homo sapiens
cgagaacatcgtggccaactcgctgctgctgaaagcgcgtcaagtaaactgtttcacgttagacctgtaacccaa

SEQ ID NO: 637120 - DNA, 75 bp, Homo sapiens
agcggctcctcaacacccctcgaagaagagaagccagattgctccaaggcccgctgtgaagtccagttctctcca

SEQ ID NO: 637121 - DNA, 100 bp, Homo sapiens
tgccccgaagaggggctggcctgcgtcggagtgaggaagaggaagaagaggatgaagatgtggatctggcccagtttgagttcctgagatctagttggtg

SEQ ID NO: 637122 - DNA, 95 bp, Homo sapiens
ggaagcaacagcattgtcacaaacagaggacaagaattttgggcagatttgaatgccatgaacgtgtatgaaacaactgaatttgaccaactacg

SEQ ID NO: 637123 - DNA, 87 bp, Homo sapiens
aaaaccacccacctgctctttagcctgggagctgtgtgtctggacagggccatcactgtgcatgtccccatgccctcagcaggagtc

SEQ ID NO: 637124 - DNA, 92 bp, Homo sapiens
caattttctgtcttacttgttcacctcatcatgaagatttagtagccattgggtgaatatgaccatctcccagaacaggccttctatatggt

SEQ ID NO: 637125 - DNA, 107 bp, Homo sapiens
ctaggaatctatgatgctgatggtgatggagattttgatgtggatgatgccaaagttttattagggaagcagtttaagtgcacggtgtgtgactacacagcggccca

SEQ ID NO: 637126 - DNA, 100 bp, Homo sapiens
tctctgtcagctctttccccgtcagcatcccagccgtgctcacggtcaaaatgcagatcttcgtgaaaacccttaccggcaagaccatcacccttgaggt

SEQ ID NO: 637127 - DNA, 100 bp, Homo sapiens
tgtccgcaccgtagggcagccggccgggccagcctccctcacaggactaccgaggaaggtaggtgagctcgtgaaacaatatgaagaggagaaaatagcc

SEQ ID NO: 637128 - DNA, 82 bp, Homo sapiens
gatctccgccaccgtcttcaggccaggtgacttaagagattaaaattaatttggttgctgttggttctgaacaaataatgag

SEQ ID NO: 637129 - DNA, 90 bp, Homo sapiens
gccgagacccagcacatcgccgaccaggtgttcagctcccgacaggcactgaatggccatgcccgcatccacgggggcaccaaccaggtg

SEQ ID NO: 637130 - DNA, 115 bp, Homo sapiens
atgccagtgtcattgcacacgttacagcctgcaggaagtacaggcggccaacgaaggtggcaatgcagtggtggatggttgtggcaaggcccagaacagcacggagctcgctgca

SEQ ID NO: 637131 - DNA, 101 bp, Homo sapiens
gccaaaaaatatatagatcagaaatttgtattacagcctgtcagagttgttcagtataatatcaatacagaagaattatattcctacctaaaggaattcat

SEQ ID NO: 637132 - DNA, 88 bp, Homo sapiens
ggcctccaaaagtgctgggattacagccttcaaagaaaaacctcggtatccaccaagtcaggctcaagcagctcttcaagacagtccc

SEQ ID NO: 637133 - DNA, 111 bp, Homo sapiens
cgctggagctgggtcagtccgccgctcaccccgcggccgcaccttcccgccttctcagggagtgcatccgccccaacccttttccccctcgtctcctgtgagaattccccg

SEQ ID NO: 637134 - DNA, 51 bp, Homo sapiens
cctcccgagtatctgggattacaggttccaatattgaaaaatctgtaaaag

SEQ ID NO: 637135 - DNA, 75 bp, Homo sapiens
ccacatcaactcggcgccttgggaaccgctcgagcctaccagcctcacaggaagaaaaagccctttatagagaag

SEQ ID NO: 637136 - DNA, 90 bp, Homo sapiens
ccttacacatcccctgataaactaaagaggaacactgacgagaagaccttatgaaccaggaatattttgtactcgatgtggcagacgtga

SEQ ID NO: 637137 - DNA, 75 bp, Homo sapiens
gagacacactgagagggagatgattattagttgcgttgagtcatcaggcaaagacgagattgaggagctgcgggc

SEQ ID NO: 637138 - DNA, 100 bp, Homo sapiens
ttcgcagtggtcgcttcttctccttggttcagattcagaacaagaaagtggacatctctaaggtctcctccaagtgtgggtctaaggctaacatcaagca

SEQ ID NO: 637139 - DNA, 101 bp, Homo sapiens
gcccaggcagtcgcagcagcggcagagtatgctggtctgaaagtagcacgacggcaaatgcaggatgctgctgtttcttgcagaacataaattattaggaa

SEQ ID NO: 637140 - DNA, 95 bp, Homo sapiens
cgcatattagatgaactggtaaaaagcttgaattttgcacgtactatactggcaattgctggagaagattttgcaattgttgcttctgatactcg

SEQ ID NO: 637141 - DNA, 50 bp, Homo sapiens
ggcggacagattgaccttcagagcgaggcacattcaggaccccgcgagcc

SEQ ID NO: 637142 - DNA, 100 bp, Homo sapiens
agggtctgaagattggggacacggagctgcgggcgtctttggagacacagcgtgctcagagcagtcgactctgcgtggcactgaaacacgagcagacggc

SEQ ID NO: 637143 - DNA, 50 bp, Homo sapiens
ggcgagagggagccgcagctgatgtcagatacagatccacgggttttaga

SEQ ID NO: 637144 - DNA, 75 bp, Homo sapiens
attttagccaaaacatcagccaagctgccaaatggtgtcacttaccacactggaacatatcaagaccggttaaca

SEQ ID NO: 637145 - DNA, 82 bp, Homo sapiens
gtgaacctggaccaggaggaggttttcaggaccaaaattgtggaaaagtcactctgtgatgaacggcagcagccactcacca

SEQ ID NO: 637146 - DNA, 75 bp, Homo sapiens
gtgctcgctgccatggatgccaccaagctgcttatgttcctgaggaagaattgaaggcagcagaaatagatgaag

SEQ ID NO: 637147 - DNA, 90 bp, Homo sapiens
tggcccagattctgccaattcgttttcaggagcatctccagccattggaaaagaagtttgttcgagtttcaggagaagcaactattggac

SEQ ID NO: 637148 - DNA, 74 bp, Homo sapiens
cgggtggttaaacttcgcaaaatggtcagtttaggggctggtgcaaaggatgagttgcacattgttgaagcaga

SEQ ID NO: 637149 - DNA, 100 bp, Homo sapiens
accgccaggctcagcatcctaaccccgcggcaccacctgcagaggagctgctcctgcaatgctgacattatctctacggtagaattcaaccacacgggag

SEQ ID NO: 637150 - DNA, 100 bp, Homo sapiens
tgattaaacatccttgcgagaaaaatatagcactatatctagggctaccaagcagtttctcgaagagattaacaagtggacagttcagtacaatgtttcc

SEQ ID NO: 637151 - DNA, 78 bp, Homo sapiens
aatgactggtcacgcgggactgaacaccgcacaggcaggaggcatggccaagtgaccacaatatgaatgggaacagca

SEQ ID NO: 637152 - DNA, 101 bp, Homo sapiens
aaaggagaaggcagagaaaaagaaacgaggaccaaagccttcagttgcttagccagacaatgaaggatcatctagtaagagtagcaaatgaagctgaattt

SEQ ID NO: 637153 - DNA, 100 bp, Homo sapiens
ttccatcctcccgccctcctgacgcggccggagcgcagccctgaggcccaggatgagattgtggggaacctgggtgaaggcacctttggcaaggtggtgg

SEQ ID NO: 637154 - DNA, 100 bp, Homo sapiens
tggagcaggatggattggaaaatagacgtgtacagtggccccccgtgaaagacagaattgtggttttcctggtgtcacgccctcccagtgtgcaaataag

SEQ ID NO: 637155 - DNA, 100 bp, Homo sapiens
atattatgatgattatagagttcagttgtgtgcaaaaatgatgagaatgaggacccgggaagaaatgggtatttgaagtataccatacaactgttttgaa

SEQ ID NO: 637156 - DNA, 100 bp, Homo sapiens
gggagatggcggcgcgatggagcagcgaaaacgtggttgtagagttccgtgactcccagaggatttttctccaacaattatagaagatcaggctcgtgaa

SEQ ID NO: 637157 - DNA, 75 bp, Homo sapiens
tctggattcattccggcaccaccatcttcctgcctgacacagctcacttcaagaagtgcacaatgtcagaacgtg

SEQ ID NO: 637158 - DNA, 75 bp, Homo sapiens
ctgtgattagtgtaaaaacgtccgggtccaaagagagatctatccagaagttaaaggagagattgctcgtaaaga

SEQ ID NO: 637159 - DNA, 110 bp, Homo sapiens
ttttgcatgagacgcttctggacagatgctgttagagaaatttgttgaagaatgcaagttccctccagtgccagatgccatttgttgctatcagaagtgccatggatatt

SEQ ID NO: 637160 - DNA, 75 bp, Homo sapiens
gctttaaagcgcataagaatgtcctggcagcattcagccagtattttaggtttactcctggcttgggggcattag

SEQ ID NO: 637161 - DNA, 74 bp, Homo sapiens
aaacaaaagctgctacttatggaagatacaaagggtatacactgaatatcctcgaagaaattggtggtggccag

SEQ ID NO: 637162 - DNA, 100 bp, Homo sapiens
gcagcagataggatgatggaaggggacccaactctcctggatgagattgtgcttcaagaagaccatagggaagaacgcattttcatcttgctgcaaaagt

SEQ ID NO: 637163 - DNA, 100 bp, Homo sapiens
cagtgaggaaagggccgcctcgtctccgctcctgggggaccgcagggaagaaggagaaagggccaacccctgaagaagcaatacagaaactgaaggagac

SEQ ID NO: 637164 - DNA, 100 bp, Homo sapiens
aagtctttactgtggaagaaagtccttccttacctgaaaggcatctgctcagactggtattgctcgagttccacttgctggagctgccgggggcccaggg

SEQ ID NO: 637165 - DNA, 100 bp, Homo sapiens
gttttctgtcctccttgtttgcacggagcagcaaacgcagagacaaaagaaacgggccccgactggccacccttaagtacaatgttctcctacctaagaa

SEQ ID NO: 637166 - DNA, 115 bp, Homo sapiens
atgtggaagcacaatataaagtttcatcaacttccataccgggagatggagcatttgagacagttcttctcaccactaaatccaatacgagttcatattgatattggagctgatg

SEQ ID NO: 637167 - DNA, 75 bp, Homo sapiens
gaagaaatgatgatggaaatgaagtataataccaagaaagccccacttgtatgatcttagctttgataaatgact

SEQ ID NO: 637168 - DNA, 100 bp, Homo sapiens
aaataggaattgctgtgggaaataatgatgtaaaggcagtttttcaggaactccaggcagtgtaaagtcatcttctggaagttcagtgcagtctccccag

SEQ ID NO: 637169 - DNA, 83 bp, Homo sapiens
ccgctctccagcccgcttgaacggtggcccgggagagtggcccaccccacatgaagaactttgtgaccaaggtttcggttggg

SEQ ID NO: 637170 - DNA, 97 bp, Homo sapiens
tctcatgattataactggtccttcaattgcaagaatgtagtaactctgatcagctacaaggaaaggaggaaagagtaaatgaagaaagtcatctaac

SEQ ID NO: 637171 - DNA, 98 bp, Homo sapiens
cggagtggggtgtcggcgcctcattcgggtggagctgagccggagacagcgtccgtctccaagagagtatgaagagagtgcgtctgtagggcagggaa

SEQ ID NO: 637172 - DNA, 75 bp, Homo sapiens
gagaagatggcgcttgacggaccagagcagaacccacctggctttcaaccaacttgggtattttgacctgtatag

SEQ ID NO: 637173 - DNA, 75 bp, Homo sapiens
cgagggcctgctcactcgcttgggccgccggcaccgactagatttccttcagctgatgattgactcccagaattc

SEQ ID NO: 637174 - DNA, 99 bp, Homo sapiens
ggctcctcggccgtgggccagttcgtgtccctggacgacaatgcagatcttcgtgaagactctgactggtaagaccatcaccctcgaggttgagcccag

SEQ ID NO: 637175 - DNA, 100 bp, Homo sapiens
gggattccttgggcaatggtgaatttgaaaagtgctgggcctaaaggagataacatttatgaatggagatcaactatacttggtccaccgggttctgtat

SEQ ID NO: 637176 - DNA, 104 bp, Homo sapiens
ttgattcatggagatttcagactagataacatagttttccaccctaaagagaatggagaagctgatgccatgagcttggatggagggtttgtctacatagcggg

SEQ ID NO: 637177 - DNA, 75 bp, Homo sapiens
cggcagaggagaaattcagacggctcccgaggacatcaactagtcaggcagtcttccgtctccagtctggcatct

SEQ ID NO: 637178 - DNA, 120 bp, Homo sapiens
gtccgcagcaacaacatctgccacaagtgttcccttcgctgcaacagccacagccaaccaggacccagatgatgtggtaccagttggccaaagaagagcctggtgttggtgcatgtgctt

SEQ ID NO: 637179 - DNA, 100 bp, Homo sapiens
ggcgaagatggaagcctggcgctgtgtgaggaagggctacggccactgtgtggtgggaagaggccgtggacatttgggagcaataaaaataagaagaaag

SEQ ID NO: 637180 - DNA, 100 bp, Homo sapiens
gaagcttaacttcttatccatcccatctcttggacagatgatgccagttaattactttgaattcttactgttctgatccaaaccttgtgttagatttgaa

SEQ ID NO: 637181 - DNA, 75 bp, Homo sapiens
ccagaccacacccttgagcctgagcccgacattattcctgaggacccatgagcttcctggctggcctgggccttg

SEQ ID NO: 637182 - DNA, 82 bp, Homo sapiens
tcctgtatattctctgtactatgtcgattcgacaggatttggcacagactccaggtcaagcggaaaaccagccttaccaacc

SEQ ID NO: 637183 - DNA, 75 bp, Homo sapiens
gccagtgagacctgcttcagacttctgacctacagaacgagcatgaataatctttcatttagtgagctatgttgc

SEQ ID NO: 637184 - DNA, 75 bp, Homo sapiens
cagttggaagcccgggaccgtttaaaaaactgaaggatgccctgcagtggtctcgccatccagctacagtggagg

SEQ ID NO: 637185 - DNA, 107 bp, Homo sapiens
atgggctgcacgtgcgcttccgaggcgagcagcagctgcgccgggactacggcccgacaatgcagatcttcgtgaagactctgactggtaagaccatcaccctcgag

SEQ ID NO: 637186 - DNA, 98 bp, Homo sapiens
cagctgctcctggtgcagtggaagcagaggcacccacgctcctacaatgaagaagaggaaaggctatgaagatgatgattacgtctcaaagaaatcca

SEQ ID NO: 637187 - DNA, 50 bp, Homo sapiens
gaagtttctaggaaaggccggacaccagggtctgaatgctccaagtgagc

SEQ ID NO: 637188 - DNA, 100 bp, Homo sapiens
gtagtgagtgtgatggccgccgcgaggccgggaaggtgaagctgccgcagcgggaaccgcaagagcttggtggtaggaacgccctccccgaccctctccc

SEQ ID NO: 637189 - DNA, 74 bp, Homo sapiens
cgagacatggccaaagactacatggagaggatggcagcgcagcctagttgataccatgtttgtgtggaagtgcc

SEQ ID NO: 637190 - DNA, 90 bp, Homo sapiens
taatggttagaattgaaactttggagcagaaacttacctgtctggaactcatacagggagtcaaggtggacgcgagagaccacagtggag

SEQ ID NO: 637191 - DNA, 98 bp, Homo sapiens
aactcatattgatattaattccaaaatcagcaacgcacctcttgctttttcctccaaagtatgttatgttaagtttcgtgatccatcaagtgttggcg

SEQ ID NO: 637192 - DNA, 75 bp, Homo sapiens
atgtccaggcggaaacagagcaacccccggcagatcaagcgtactccaaagattcaggtttactcacgtcatcca

SEQ ID NO: 637193 - DNA, 75 bp, Homo sapiens
taaggagaaagtcctacaacagtttggcgtgcaacatggggcttgagaaaggtagagacggggtttcgccgtgtt

SEQ ID NO: 637194 - DNA, 101 bp, Homo sapiens
cgtggtggacggaaacttcctctacgtgtgggggggctacgtggtcctactgctctgttggctcatgaaataggttttggaagtaaagttacaacacaccc

SEQ ID NO: 637195 - DNA, 100 bp, Homo sapiens
tgagggaaatcgtgcacatccaggctggtcagtgtggcaaccagatcggtgccaagagatgctgcccccacccccttaggcccgagggatcaggagctat

SEQ ID NO: 637196 - DNA, 90 bp, Homo sapiens
tgtgaattggctgactccacttctatggtgagagagaggagtgcatcaaagattactcccagccctactgccaataaagggaaaataaga

SEQ ID NO: 637197 - DNA, 73 bp, Homo sapiens
gtcggagcacttactggagtccaagatgctaatggtcaaaatgcagatcttcgtgaaaacccttaccggcaag

SEQ ID NO: 637198 - DNA, 96 bp, Homo sapiens
cacaatagcgggattgatctccttaggacctgttcaagtgctggattgtgtcatgtgaccatcccaaaactcagagcaccctatggccgtctttgc

SEQ ID NO: 637199 - DNA, 82 bp, Homo sapiens
ttccgcagacagaagtggggagaagcggaggtaagccaagatgggtgcatacaagtacatccaggagctatggagaaagaag

SEQ ID NO: 637200 - DNA, 100 bp, Homo sapiens
gagctttcacgaaggcaccgacgtcatcatgctgaccaccaatcagatccgtaagatccgagtgaagcctgacaggaccggtgtggtcacggatggtgtg

SEQ ID NO: 637201 - DNA, 100 bp, Homo sapiens
cagagcggggaggaggcggtggccctgctggaggagctctggcttcgcctcaacagcatcaagaagctgtccaccatcgccttggcccttggggttgaaa

SEQ ID NO: 637202 - DNA, 76 bp, Homo sapiens
ggaggaagatgcaagcggtttgggaccttgaacaaggcaaatatggttttgctgttcaacctctctgagcggagac

SEQ ID NO: 637203 - DNA, 89 bp, Homo sapiens
ctaagccatcccctggcggaaccgcccccaggtcatcatcagatttgaaatatttaaagtggatacaaaactatttcagcaatgcagac

SEQ ID NO: 637204 - DNA, 95 bp, Homo sapiens
ggagtggatatgttcgtggagacactgtggaaagtctggaccgagctcttggatgttcttggacttgacgagatggggttttgccgtgttgccca

SEQ ID NO: 637205 - DNA, 100 bp, Homo sapiens
ggtgcaagctatatttaacggagatcctgatgaagttcgagcactaatatttaagaaagaagatgttaactttcaggtagttacttttggtgacgctgtc

SEQ ID NO: 637206 - DNA, 75 bp, Homo sapiens
aagaacgttggccagattatgtaagggaactgcgaagaaggttacccatgcagttgttactgtaccagcctattt

SEQ ID NO: 637207 - DNA, 100 bp, Homo sapiens
ggatgccctgctggtgggtgttccagctggaagtaaccccttccgggagcctagatcctgtgctttactctgaagactcatggaatcttgctctgttgcc

SEQ ID NO: 637208 - DNA, 90 bp, Homo sapiens
gacggtaggagcctccgtgcggagaccactgttcaaggccacagatgccatggacaatattaccaggcagaaccaattctacgataccca

SEQ ID NO: 637209 - DNA, 83 bp, Homo sapiens
ctgctattctccgagcttcgcaatgggagccttagctgaaaggcagcagctcatcccagaattggtgcgaaatggagatgagg

SEQ ID NO: 637210 - DNA, 80 bp, Homo sapiens
aggccatctccaagaacgtgctcttcgctcacctggatgacaacgagaggaggtattgttgcagcatctggcagtgagac

SEQ ID NO: 637211 - DNA, 74 bp, Homo sapiens
tattttactgataagaaaacacatctttacacactaagtccaccgggcatacttagtatctttggacaaatagg

SEQ ID NO: 637212 - DNA, 75 bp, Homo sapiens
gaaaacggctcaacccaccgctgccgaaatgaagtataagtttgcctgagaatacagatcaacccacagaacaaa

SEQ ID NO: 637213 - DNA, 100 bp, Homo sapiens
gcaagtttggtgtccagatggacagagttgatcagggttatgtggtccgaatcagtggtgggaacgacaaacaaggtttccccatgaagcagggtgtctt

SEQ ID NO: 637214 - DNA, 100 bp, Homo sapiens
tccagaagctgtcaagccagatgactgactcctgaggaagaagagattttaaacaaaaaacgatctaaaaaaattcagaagaaatatgatgaaaggaaaa

SEQ ID NO: 637215 - DNA, 82 bp, Homo sapiens
ggcttcactacccttatcccggagagctgacaatgatgaatctcagaaaagcccgatggctccccagtatttattgccttca

SEQ ID NO: 637216 - DNA, 100 bp, Homo sapiens
gaatctcgtgctcaccggtttctcccacatcgacctggaattgtcttagaagaaagaaggcaagccaccattttacccacgtaaatatatgaatatattt

SEQ ID NO: 637217 - DNA, 89 bp, Homo sapiens
tccacaccccctccgtgggtgtgtgcttgctcacttccgacagagaaaaacaaaaggtgacagttcgcattcggagaaaaagacggcga

SEQ ID NO: 637218 - DNA, 101 bp, Homo sapiens
aggaaaagactcaggacggacaagcacagtcttcggaaggttgcttcagagcctggagaggcaaagaagatggaagacaaggaaaaggataataagcttat

SEQ ID NO: 637219 - DNA, 74 bp, Homo sapiens
cacattgagagcaaaatctacaagatgatgcagggaggaggaatcaaccctgcctaccggactgaggatgccaa

SEQ ID NO: 637220 - DNA, 90 bp, Homo sapiens
ggccttcggcctggtctacgtgctgaaccacgctgaggggctgggagccgcgcacaccaccatcacagcgacgagctggggctgcagaag

SEQ ID NO: 637221 - DNA, 100 bp, Homo sapiens
atgctgtaattgctgaacttaaaaagcagtctaaacctgtgaccacccctgaagaaattgcacagaggaatatgtcacttgtcacacatgccgatcaccg

SEQ ID NO: 637222 - DNA, 96 bp, Homo sapiens
tacacgagcgggaccagctccagcgccaccttaactccgccctcccccaggacaactgccggctgttccccaacaaagaccagcagaactcagata

SEQ ID NO: 637223 - DNA, 82 bp, Homo sapiens
gacaagagccctgtgtgagcccctcccgccaagaccgaggataggtgtggccattggcgaccagatcctggacctcagcatc

SEQ ID NO: 637224 - DNA, 75 bp, Homo sapiens
ctggtcgcagatcctgagacccggacagtggcagtgaaacagttcgatatctcaatgcctatactggaatagtgc

SEQ ID NO: 637225 - DNA, 50 bp, Homo sapiens
cacctagactggatgcagagcatgaagctggcagggcggagatgctggac

SEQ ID NO: 637226 - DNA, 90 bp, Homo sapiens
acgctacagccacaggattggcccactttccccattcacaacaagttggatggcttgaggactggtactaaaaggaaacgtgactgggag

SEQ ID NO: 637227 - DNA, 131 bp, Homo sapiens
cggtgcgcggcggagagaagaggattccggcgggaactcgactcttggcgccaccgcctcatgcactgtgtaggtactccaaagattcaggtttactcacgtcatccagcagagaatggaaagtcaaattt

SEQ ID NO: 637228 - DNA, 100 bp, Homo sapiens
aaacaaaaaatttcaggagaaagattacacaggagctgcagtgctgtactctaagcattactctactgactggcagagacaggagaggtagatgtccacg

SEQ ID NO: 637229 - DNA, 100 bp, Homo sapiens
gaacttagaaaagctgcacacaggagtggaatgaagaatgccagagacaccctaaccctggaggtacactggctttctcaaaggactattgcaagtcttt

SEQ ID NO: 637230 - DNA, 51 bp, Homo sapiens
caactggacagttccatgtataccgaggcaagatccaaactgagatggaga

SEQ ID NO: 637231 - DNA, 101 bp, Homo sapiens
cctcgacgtcttgcctgtgtcccacttgttcgcggcctatagttgggccggtgcacaaacagcgtggtcaagtatgagctgatgcgcccctccaacaaggc

SEQ ID NO: 637232 - DNA, 101 bp, Homo sapiens
gcaatcttcacggggctggctgctctgtgtctcttccaaggttgggaatccacgtgttgaacttaccctctcagagctccaagatatggcagctaggcaac

SEQ ID NO: 637233 - DNA, 100 bp, Homo sapiens
ggcgccaacggcatgacagactcggcgacagctaacggggacgacagggaccccgagatcgagctctttgtgaagacgttggaacttgccaggaatccag

SEQ ID NO: 637234 - DNA, 100 bp, Homo sapiens
gctactttcaaaaagagatttcactggagctattaccctgttggagaccccaccaacaactgaacgctttggtcaggctgctacaatggaaggaattggg

SEQ ID NO: 637235 - DNA, 100 bp, Homo sapiens
gaaaaggaatcgtatcgtatgtccgctatccagaacctccactctttcgtggatgcctggactttggccttttctcctgattcccagtatctggccacag

SEQ ID NO: 637236 - DNA, 100 bp, Homo sapiens
cgtctctctgctgcggcgcggggaccgctgtgctctcgatgtctctctctgtgcccctcactcatctcactggatctgtctgccaaccctgagatcagct

SEQ ID NO: 637237 - DNA, 100 bp, Homo sapiens
gagatgggcagacggattcatttagagctgcggaacaggacgccctctgatatcgcccaggaccacaccgcagcgtaactgcaggcctctcagcgaaaaa

SEQ ID NO: 637238 - DNA, 100 bp, Homo sapiens
tgaatgggggctgaatgtgcgagtccatagctgaagaggagcgccagatggtggaggaatacacttatttatgaagtacaatgactcttcttgcttttca

SEQ ID NO: 637239 - DNA, 82 bp, Homo sapiens
cgagagcgcgaatatcgtcatcgttagaaggtattgttggtgaggctgatgaaaatggagaagattactatctttggaccta

SEQ ID NO: 637240 - DNA, 83 bp, Homo sapiens
gtaacatttaccttcactcagaagatatcaacttgtttatggaaatcctaaagtactgtacagactgtgatgaaatacaattt

SEQ ID NO: 637241 - DNA, 74 bp, Homo sapiens
ctatgagcacattcaccaggcggtccggctttacaatctgccaggtcagaatggcggcagtggagcatcgtcat

SEQ ID NO: 637242 - DNA, 73 bp, Homo sapiens
cgccatgtgacacactggcatcaagggtgtgctgatctgcaaaccctggacacaatgcagccaattgagagga

SEQ ID NO: 637243 - DNA, 111 bp, Homo sapiens
cttccccagctgcccggtgcccgaggaggcagccaagctcatggcctgccactgcgtgcacctgcctagagctggaacgttacctccagagcgagccctgctatgtttcag

SEQ ID NO: 637244 - DNA, 100 bp, Homo sapiens
gtttaggagaagcactgttgttttccacacagtccttcctatgactggatgagaagagtcacacagaggaaaaaagtatccaagaagggaaaagcctgtc

SEQ ID NO: 637245 - DNA, 100 bp, Homo sapiens
tcatgattctgctgagcagtggcgccctggtacgctccatggtgagtgactttgctgttttcctcactatcttcacaatggtgattattgattttttgat

SEQ ID NO: 637246 - DNA, 100 bp, Homo sapiens
gagggcatctacctgccccctcctggctaccagctcgtcccagacactcagtgggagcagctgcagacagagatcgccacatcacagaatcgtatctatc

SEQ ID NO: 637247 - DNA, 87 bp, Homo sapiens
agatgcatgccagagacttcacagtttctgctctgagatagaatctcactatgttgaccaggctggtcttgaactcttggcacccaa

SEQ ID NO: 637248 - DNA, 100 bp, Homo sapiens
ttacggtctctataagaagatgatccatgatgccttcttctgtagagtgggcgctttgcagaatacgtgttgaatgaaatcactgatctaggaaaagtaa

SEQ ID NO: 637249 - DNA, 75 bp, Homo sapiens
tccagacccagcaccccatacggaagggtctgcatcacaagtggtggacttgctttgtgaagagacagttcatga

SEQ ID NO: 637250 - DNA, 75 bp, Homo sapiens
gcatgggctccaacgtggtgtactgtggagctgttgggactgggcaggaagatgagaatgtgcctactgctcctg

SEQ ID NO: 637251 - DNA, 100 bp, Homo sapiens
tcttttcaatgtgtgtgtgaccagggttacagagcatctgggcttggagaccactgtgaagggaacagatatggagcccagcttgtatcgttgcagtaac

SEQ ID NO: 637252 - DNA, 97 bp, Homo sapiens
tggccaacaaagctgctgcaaccacagggatttcttctgttcagcccaccttgggacaccttgactccaagcccagcagtaagtccaacatgattcg

SEQ ID NO: 637253 - DNA, 82 bp, Homo sapiens
tccagcgcagcccgacgttccgctgctgggaccatggtgaatccgggcagcagctcgcagccgcccccggtgacggccggct

SEQ ID NO: 637254 - DNA, 100 bp, Homo sapiens
gaacgactgcggcgcgctgctggacgaagagctctcctccttcttcctcaactatctcgctgacacgcaggaactgtggctgcaccatctgtcttcatct

SEQ ID NO: 637255 - DNA, 107 bp, Homo sapiens
cgctcgaggtcgtatgaacgcacaggccgtcgctatgagcgggaccaccctgggcacagcaggcatcggagggaaagcaggcaggatgggagagtcgccgatagaac

SEQ ID NO: 637256 - DNA, 100 bp, Homo sapiens
caaaatttgctacttaaatcgtacttctctgaagaagatgcagaggccaggatgtgggcccagccctgtgccaggaggctggctggaataaaggtacaga

SEQ ID NO: 637257 - DNA, 90 bp, Homo sapiens
gcggagccggagctggacgccgccgccgccaccgccacctgcgcggcagtcatcaagacgcgcgcacgcccacgctggatcctgacacga

SEQ ID NO: 637258 - DNA, 75 bp, Homo sapiens
atactgggaaatccatagctaagatgccaggaccccctgaaagcctagacatgctggtggagctgtctaaggctc

SEQ ID NO: 637259 - DNA, 83 bp, Homo sapiens
gattcgcagtggtcgcttcttctccttggggtacacatctttctggaatgactgcatatcatcaggcctgcgagggggcatcc

SEQ ID NO: 637260 - DNA, 100 bp, Homo sapiens
ctggtggcagagcccgtccatggccttcggcgtgcagtaccccacctcggtcaacatcaccctccgcctagaaaaaaccgggaagatcctgacggagttc

SEQ ID NO: 637261 - DNA, 98 bp, Homo sapiens
ctgggatcctacgtgcatgaagatggacgaggtcctgtacagcatcgccgagaaggatgtagctgagctgattcgggccagagcctgccagagggtgg

SEQ ID NO: 637262 - DNA, 111 bp, Homo sapiens
ggctcacttgcatgtatttggaacaaaaaaaggagatgcctggcagccccgctctctgcatgcctccggagccagcgtggtggccatagacaacaagatcgaacaggccat

SEQ ID NO: 637263 - DNA, 100 bp, Homo sapiens
ctaatggatactacagacaacagagaaaacttgttgaagagattggctggtcctatacagcatcttctctttctgaagaattgaaacattttgcagacgg

SEQ ID NO: 637264 - DNA, 97 bp, Homo sapiens
tttggcattgggcacacattatggcaaggtttatttacttgatgtccaggggaacatcactcagaagtttgatgtacttacgaggaaatatttcagt

SEQ ID NO: 637265 - DNA, 100 bp, Homo sapiens
tctcagaagtgaagaggagaaacagcatagggttaagctgggtggccagcatcgaaatgttcagccttttagtgatgaagatgcatcaattgaaacaatg

SEQ ID NO: 637266 - DNA, 83 bp, Homo sapiens
accttgaggttggtgaaggtgaacaggtgaccataactctgccaaatatagaagagtatgttgcaagtgagggtgaagaagat

SEQ ID NO: 637267 - DNA, 100 bp, Homo sapiens
ggatgccctgcagtacctgcagaaggtctctggagacatcttcagcagccacctccccgtgcaagatcctcaagtgcaactctgagttctggagcgccac

SEQ ID NO: 637268 - DNA, 90 bp, Homo sapiens
cgctgaaagagtgggcagaaaggagctgacctggactctgtggcaacagcatccgggccactactagtcgaagttgccaaaactcctggt

SEQ ID NO: 637269 - DNA, 98 bp, Homo sapiens
atccctcaagactggtccacggagtgtatgaccacaaacagccatcaaggctaaactgtgaaaatgcagtcctcaaagagaatttgaaagtgaaaaca

SEQ ID NO: 637270 - DNA, 75 bp, Homo sapiens
ctctctctatgaatcggtttaccacagccttaataggtagcaatgaagtgatgaggatactgatctctagaagcc

SEQ ID NO: 637271 - DNA, 51 bp, Homo sapiens
ttcatcactcgtgacttcactcagccagttttactacccttggatgctgct

SEQ ID NO: 637272 - DNA, 82 bp, Homo sapiens
gctcggggcctgaggcctcgaagaccccagcccaagcccccaggttgaaaggattgttgacaaaaggaaaaataaaaaaggg

SEQ ID NO: 637273 - DNA, 100 bp, Homo sapiens
aggaaggctacactcagtgctcccaatttctttatgaaatatggctacacacacctttctgcaggagagctgcttcgtgatgaaaggaagaacccagatt

SEQ ID NO: 637274 - DNA, 100 bp, Homo sapiens
gtttgagctggaggacctgaacctgcggcctgacccagagccacttctcaccgagatgattcatgaaatccagacatttaatgtggatgcaccatgccag

SEQ ID NO: 637275 - DNA, 100 bp, Homo sapiens
ccgccatgcaaggggaggacgccagatacctcaaaaggttttgacaacaattcgttcagggcaccgagcaaacatatttagtgcaaagttcttaccttgt

SEQ ID NO: 637276 - DNA, 76 bp, Homo sapiens
gctgggtgcagatgcagtgtggctctggatagcaccttatggacagtaagactttgaccccgacgcaggcttcagt

SEQ ID NO: 637277 - DNA, 76 bp, Homo sapiens
taatacatcatgaactgcagggagtccaatgtgctgattgctgctaacagtcagggtacaattaaggtaagctatt

SEQ ID NO: 637278 - DNA, 74 bp, Homo sapiens
gattccacagagtttaggccaaatgccccagttcctctggaaagtctctgtacgtgaagaggttgcacgacaaa

SEQ ID NO: 637279 - DNA, 74 bp, Homo sapiens
tgctcataaggattgtcctctttctacaaaagcctcctgacaaggtgatccgggcgggccccgcaggaatttta

SEQ ID NO: 637280 - DNA, 50 bp, Homo sapiens
ctcgttgctgaacgtgcgcagggagtctcgtcctgcagcacccttcacat

SEQ ID NO: 637281 - DNA, 120 bp, Homo sapiens
agcacctgggccgagcaggcctgcagcttccctctgcgcgctcacaacactctaggaagctatgggaggttttcctttggaatatggataaatacaccatgatacggaaactagaaggac

SEQ ID NO: 637282 - DNA, 82 bp, Homo sapiens
cgcgaggagccggcgtggccctggaacatccagtcatggataaaaatgagctggttcagaaggccaaactggccgagcaggc

SEQ ID NO: 637283 - DNA, 100 bp, Homo sapiens
gggccgggctgcgcccgcttcttgcaggtctgtttatgatggtgaagaacatggacgtttcatggagaagcttgaaactcgtatccgtaatcacgaccga

SEQ ID NO: 637284 - DNA, 90 bp, Homo sapiens
cattattgtgaaaaatccaaagcagaattggagagaagatgtggtatagggattaggtattatgactctgtccccctttgatcaaatgaa

SEQ ID NO: 637285 - DNA, 50 bp, Homo sapiens
tgattccattaaaatatggaacagatacagaagatcattgagacactgac

SEQ ID NO: 637286 - DNA, 101 bp, Homo sapiens
gtccctgaaaagctaccccccaaagtcctggagctgtgatcctggctctgcagagagaacagcccagaaaagaaagttccccagccctccacattcttcca

SEQ ID NO: 637287 - DNA, 75 bp, Homo sapiens
ttctcaggccccacgtacacgctggtgtctgcactgcttggggaggaagatgaagaggcactgcattatttgacc

SEQ ID NO: 637288 - DNA, 75 bp, Homo sapiens
tcctctgcagcttcaagatcaatgactcggtcacactcagcaccgatgaagacgccattattagcgtccttgcct

SEQ ID NO: 637289 - DNA, 73 bp, Homo sapiens
tactgtctttttcttcaatgggcagcatatgaaagtggattatggcccttcctttgaagaaaggaaacagttg

SEQ ID NO: 637290 - DNA, 90 bp, Homo sapiens
catcttcccttttgcacctccgggagctgctgctgataggagtgtcaggcctctgagtccaagctaagccatcaaatcccctgtgacctg

SEQ ID NO: 637291 - DNA, 97 bp, Homo sapiens
aaagcaatagtgagccaaccacctgggccagtattatcaggcatggagatgctactgatgtcagggtatttaacatgaagtcgctccagattgtgtt

SEQ ID NO: 637292 - DNA, 101 bp, Homo sapiens
gcagcacataaggatggcaaacttcagattggagataaacttttagcaggaaatcctcattgacgattcaatttgttgaaggccaatttgtggactcctac

SEQ ID NO: 637293 - DNA, 75 bp, Homo sapiens
cgcggatcgtttaggaaagccggccagccgccgccatgatcctgctggaggtgaacaaccgcatcatcgaggaga

SEQ ID NO: 637294 - DNA, 98 bp, Homo sapiens
cattgacatttaattttagggtcctttatatagaagggagagtagcttggaactgcagttggctttttgctaccaccagttttagtacccaacacaca

SEQ ID NO: 637295 - DNA, 87 bp, Homo sapiens
ccaaatgaatttgcaaaacttactgtagtggaatattggtgaacgatactaagttagatggacctatattacagattctattcatga

SEQ ID NO: 637296 - DNA, 140 bp, Homo sapiens
gagggattcgtggtgaaggtccggggcttgccctggtcttgctcggccgatgaagtgcagaggtttttttctgtggtggacttgctttgtgaagagacagttcatgaacaagagtctttcaggacctggacagtgaaggg

SEQ ID NO: 637297 - DNA, 75 bp, Homo sapiens
cagctacagagggtaccgggatgcctgcaccattactgcacctgagacttttacctttacccagaaaggaataaa

SEQ ID NO: 637298 - DNA, 100 bp, Homo sapiens
gaagctctacgtgtacgacctgtccaaaggcctggcccggcggctcagccccatcatgctggtgatccgggccaaggtggtggggaagaagctggtaaag

SEQ ID NO: 637299 - DNA, 100 bp, Homo sapiens
gtcattaggctaataggacagcacttgaatggcttagggctcaagaggagatgttaaagtaacccatcttgcaggacgacattgaagattggtcttctgt

SEQ ID NO: 637300 - DNA, 90 bp, Homo sapiens
aaatggcggacctggcgaacgaaggtactggacacaggagagcagctgatggtccccgtggaagtcctggaagtggataacaaggaggcc

SEQ ID NO: 637301 - DNA, 75 bp, Homo sapiens
ccaaatcacctgtacttggtcatgcagctcctagaacattccatattctgcttcacacacggtgactcactcact

SEQ ID NO: 637302 - DNA, 75 bp, Homo sapiens
ttaaatactcatctactaggcaagcatggagttggcaccccaaaagaaagggagactcatgcatctgtatgccgt

SEQ ID NO: 637303 - DNA, 100 bp, Homo sapiens
gttgctgctatacctcatcggggcggtgattgccgggacgatgtatctcctaggctacattcctaaagacaacaggctttatctgggggataaagaattg

SEQ ID NO: 637304 - DNA, 100 bp, Homo sapiens
cggatgctcatccataaaactgaagatgtgaatactctgatatttagcttcctgtggtatactgatgagcagaactcttccactacatacctcaattttg

SEQ ID NO: 637305 - DNA, 50 bp, Homo sapiens
ggaggtatgcctggactgggccaggtaaagatgagcccagcagctacaca

SEQ ID NO: 637306 - DNA, 75 bp, Homo sapiens
ggagcccctggcctgcccggacgagttcgatgacttcgtcacctatgagttgatattcactgatggactccaaag

SEQ ID NO: 637307 - DNA, 100 bp, Homo sapiens
ttctcaactctgcctggacaggctgcagctggaggctattcataagggtctcctatggacagaagtgcgggcaaggagctttgttcctccccgatgtcac

SEQ ID NO: 637308 - DNA, 123 bp, Homo sapiens
gaggccgagccgggatctcaggtcctcgggggcggcggccacgccaaggacggtaacagatcaactcctagcaatcatgatcggatacagcgtctgaggcaagaatttcagcaagcaaagcaa

SEQ ID NO: 637309 - DNA, 101 bp, Homo sapiens
cagcggcagtcccctgcccaagaggccagtaatagtagccatgagtctcgtattggtctagctgaggggttggaatccgagaagaaggcagttatacccct

SEQ ID NO: 637310 - DNA, 101 bp, Homo sapiens
tcacaggacagcttcttcatacattatctgataccatacttgcagagctccttcagatacataaagaacacattgtaggataccatgaacatgattctctt

SEQ ID NO: 637311 - DNA, 75 bp, Homo sapiens
agtttaccagaatatcttgaaaatatggtaataaagctagccaaggaattaccgatattggctccaataattgtg

SEQ ID NO: 637312 - DNA, 74 bp, Homo sapiens
cggcgagtttccgatttaaagctgagctgcgaggaaaatggcggcgggagtgtccaacaagcacccatttgtgg

SEQ ID NO: 637313 - DNA, 50 bp, Homo sapiens
tccagaaccacagggcctcttacaaggtcgcaatggaagaagagatcgcc

SEQ ID NO: 637314 - DNA, 95 bp, Homo sapiens
aaattaccagtctgcattcactgaatgccttcttgctgccaattaaaactgtaggtgtgcagtgtcgagttatagcagtgctggattgggagctg

SEQ ID NO: 637315 - DNA, 100 bp, Homo sapiens
tgctgattgaacggatcctactgctggtcagaaatattctccatgtcccagctgaccttgatcaggagaagactccaattaagtggatggcccttgagag

SEQ ID NO: 637316 - DNA, 74 bp, Homo sapiens
cctttccaccccgaaattcgccccgattaaagactgtgttgcattatcagtgtccacaggatgaaatgtccgag

SEQ ID NO: 637317 - DNA, 100 bp, Homo sapiens
aaaggacctgcccccagagagaagctctggctggagtggctgcatgacgagatcagcatggcccaggatggcctggacagagagcacgtgtatgacctct

SEQ ID NO: 637318 - DNA, 100 bp, Homo sapiens
ccgcagtggatggctggaggtgcagggccaggaggaacatgagctgctgatgaagaagcatttgaagataattctgaggagtacataaggagagatttgg

SEQ ID NO: 637319 - DNA, 87 bp, Homo sapiens
tcacccccatggaggccctggcagagcagagtacaggggctcaggtccaggtggcaggggatatgctacccaactcaactgagcggg

SEQ ID NO: 637320 - DNA, 75 bp, Homo sapiens
gcttctccatatacaacttgaatggttcctggtacagttcagacaggacaaagtatgtgtgaagtttattcaggg

SEQ ID NO: 637321 - DNA, 100 bp, Homo sapiens
cctgcagtacctgcagaaggtctctggagacatcttcagcaggtctgctgagaacagacccagtccctgaggaaggagaagatgttgctgccacgatcag

SEQ ID NO: 637322 - DNA, 75 bp, Homo sapiens
tgttccagcgtcaaggatggaggagggggagaggagccccttactgtcccagagcccacccacctttgggttcct

SEQ ID NO: 637323 - DNA, 100 bp, Homo sapiens
gggaggggttcttgccattccaggcacttctgcgtctgccagcccatctgctccatgcccaggtggtcaaacctgtcctgacacccagaggtctgcatga

SEQ ID NO: 637324 - DNA, 83 bp, Homo sapiens
ttgacctcttcgatgtgcgagactttggaaaggaagttctactacatcaccctgctacgagaccccgtgtcccgctacctgag

SEQ ID NO: 637325 - DNA, 99 bp, Homo sapiens
acattccacgaagtccatctggaagacggtcctttccctgctgcccccaggagacagtgtttcacaaaatgattttccttctgaagctcccatctcctt

SEQ ID NO: 637326 - DNA, 98 bp, Homo sapiens
cgcggggcgctgggccgccagcctcggcaccgtcctttcctttctccctcgcgttaggttggatttggtctagggagtcccagaaagaagtagaaaaa

SEQ ID NO: 637327 - DNA, 82 bp, Homo sapiens
ggagaggtgctcggattctcgtagctgtgccgggaggccagcaagcgcatctccagccacatccctttgatcatccagttct

SEQ ID NO: 637328 - DNA, 82 bp, Homo sapiens
cggaggacctacgccggcctggctgatgttctaatcatgtcagataaagatgatattgagactccactgctaactgaagcag

SEQ ID NO: 637329 - DNA, 83 bp, Homo sapiens
acaagaattataaatctcctcctgcaaacagatgccagaaaaatccacactgcccctgcccgaaccatgttcctgctgcgtcc

SEQ ID NO: 637330 - DNA, 100 bp, Homo sapiens
tgggagtcaccacatcagatacatcctactcagatatggctgctggatcagaatctctgtggtaagaagtgctactttagagacaaaacctgaatcaaaa

SEQ ID NO: 637331 - DNA, 100 bp, Homo sapiens
ctggaggccaccctgtggttcagaccaaacctggaccacccaaaaagccgaagaccccttcaagaccatcagccttagcatattgctatcactgcgcgca

SEQ ID NO: 637332 - DNA, 89 bp, Homo sapiens
ggacagggcagctactcagcaccgacgctgacagggatggtgcctgttggaaaatggatataccttatttgattatgatgttggactga

SEQ ID NO: 637333 - DNA, 101 bp, Homo sapiens
tgatctgtaatgttcaggccatggaagaaatgatgatggaaatgaagtataataccaagaaagccccacttggtaatgtgaggctacaggagatgatggca

SEQ ID NO: 637334 - DNA, 50 bp, Homo sapiens
ggacccgcctggctgcgagatatatcaatgagctgagcaatgttcctgtt

SEQ ID NO: 637335 - DNA, 75 bp, Homo sapiens
gtttgcaaatgcagaggaagaatttttctatgagggccgttgctccagggagaactgcaaatatcttcatccacc

SEQ ID NO: 637336 - DNA, 75 bp, Homo sapiens
caccttcgagtgcatcgaggacctgtctgaagaacatgaaaggctcccggagcagcgctgactcctccaggaaac

SEQ ID NO: 637337 - DNA, 82 bp, Homo sapiens
cgcggagcccggctcccgcaccatggaggaggacgacagctacggtcagcccaaggccaaccccactgtcactctgttcccg

SEQ ID NO: 637338 - DNA, 75 bp, Homo sapiens
ctggtcattgtgatcagttactccaaaattttacagaacagccatttttctgacttcatggacaagcaaactggg

SEQ ID NO: 637339 - DNA, 50 bp, Homo sapiens
ctcattatccattttcgagacattcgttttgggatttgagattgacgcgg

SEQ ID NO: 637340 - DNA, 100 bp, Homo sapiens
cgaggaggcaagcaagcagcagccactgcagtcagaatggagatgcagcagcttcactgactgtggccgagcagtatgtcagcgcgttctccaaactggc

SEQ ID NO: 637341 - DNA, 82 bp, Homo sapiens
aaagctgctggacaacaccatggaaatatttgacattgagaaaattgtacaagctggagataaggaccttgatgggcagcta

SEQ ID NO: 637342 - DNA, 88 bp, Homo sapiens
tgactgagaagatgcatgccagagacttcacagtttctgctctgaaattgacattgaacgctgtgtgagagaatctatcaacctgttt

SEQ ID NO: 637343 - DNA, 75 bp, Homo sapiens
gatgccaacttataaaaccagatcgctgccatcactgctccgtctgtgataaaatatcgataacttgatgacccc

SEQ ID NO: 637344 - DNA, 93 bp, Homo sapiens
gaaaggggcccggcgtctgcctcgagactgaagaccgacaatgcagatcttcgtgaagactctgactggtaagaccatcaccctcgaggttga

SEQ ID NO: 637345 - DNA, 90 bp, Homo sapiens
tgggagtctccgcgtcccgctcgctgggagagagtgagacggtttaagcggaagcatcttactgccattgactgccagcatttggctcgg

SEQ ID NO: 637346 - DNA, 100 bp, Homo sapiens
accctcgaccgtgaggatgagcagtttgtgaggaacaacatctatgaagtcatggtcttggccatggacaatgagctggagtttcctggatgggtgcagt

SEQ ID NO: 637347 - DNA, 101 bp, Homo sapiens
gaattccaaaccctcacctgtagacagttcacagaaccccaaagtccaagctcttcttgggatttcctaccttctggaatcactcctgggattctagctgt

SEQ ID NO: 637348 - DNA, 100 bp, Homo sapiens
ataggctgcgctaccggaatgtcatccagcgagtgattaggtcacagaagatgtgaattcaagtatcaagacatttttttgtcccaatgatacctacaat

SEQ ID NO: 637349 - DNA, 98 bp, Homo sapiens
cccaccgccatccctgacccatggcgctgaagaggattcagaaaagtgaagatagtccaagtcctaagagacagcgcctctctcattcagtctttgat

SEQ ID NO: 637350 - DNA, 98 bp, Homo sapiens
actttgctaccaggacctacggcaccagtggcctggacaacagacctctgtttggggagacgtccgccaaggatagtaatgatgacactgaagatgtt

SEQ ID NO: 637351 - DNA, 75 bp, Homo sapiens
atccatttctcctattgaggagtcaacggatgagtgccacctctcgtaaacggaaagaagaattagctgaagcat

SEQ ID NO: 637352 - DNA, 100 bp, Homo sapiens
gttccccgaaattgacggacaagtcttcgactacgtgaccggcaacgcggtaaaaatattgcttcggtgggtgacgcggtacagctgcccaagggcgttc

SEQ ID NO: 637353 - DNA, 83 bp, Homo sapiens
cgggagcccgccgcgctggtagcgcagcctcccgcgacgatgcccctcaacgttagcttcaccaacaggaactatgacctcga

SEQ ID NO: 637354 - DNA, 82 bp, Homo sapiens
gaactagaagatccagctattatgagggcagtgcagaccaggccagttttacaaaaactaatctggattcactccctctggt

SEQ ID NO: 637355 - DNA, 95 bp, Homo sapiens
cttgggagtctggttctccataagccagttggtagctggcagtgttgtgatggcttttgaagaagtatgcccggacagaatagatctgattcata

SEQ ID NO: 637356 - DNA, 51 bp, Homo sapiens
aaggattccaagtaactcttatttgggatcttcattgccttgctgctgcgc

SEQ ID NO: 637357 - DNA, 50 bp, Homo sapiens
gccacacagtgtccagatacgagggcccctagcagtcttcttgatgcttt

SEQ ID NO: 637358 - DNA, 75 bp, Homo sapiens
caacgggctatacggtgaaaatcagtaattatgattttgctgctgcctcagggaaagtcagtcccacagcgtcca

SEQ ID NO: 637359 - DNA, 100 bp, Homo sapiens
agaaacagagccgtatcataattaccgagtcaaaatgcagatcttcgtgaaaacccttaccggcaagaccatcacccttgaggtggagcccagtgacacc

SEQ ID NO: 637360 - DNA, 88 bp, Homo sapiens
ggcgatgcctaccacctagaactggattgtgcgctaagtttggtgcgaacgccattctgggggtgtcccttgccgtctgcaaagctgg

SEQ ID NO: 637361 - DNA, 75 bp, Homo sapiens
tggaaaggaagtaccaggacttgcacagggtgtgaacggcatgtctgtggatgagaagcctgactcccccatgta

SEQ ID NO: 637362 - DNA, 87 bp, Homo sapiens
ctcctgggctcaagtgatcctcctgcctcagcctcccgagtacctgagattagcccagactctaaaatagagctcaagcttgagaag

SEQ ID NO: 637363 - DNA, 100 bp, Homo sapiens
gaggaggtgggtgcaaggacggcagatggcatccctgagaggtggtgactgagactagatgcgggtgcagtcagccataatggcaggtgaagaaattaat

SEQ ID NO: 637364 - DNA, 75 bp, Homo sapiens
gggctatgtgcacccggacctgctgaaaggaatgtatagaggccagctgtatctgcagtcatcagtcagaatttc

SEQ ID NO: 637365 - DNA, 80 bp, Homo sapiens
ttaattttagggtcctttatatagaagggagagtaggagaccagtatgatgtctgtgccatttgcctggatgaatatgag

SEQ ID NO: 637366 - DNA, 88 bp, Homo sapiens
cagggcgttagcgactcatgcaccggacccgttaacgcgttgattcgttccgtgctgctgcaggaaacaagccctgtctgaccgccaa

SEQ ID NO: 637367 - DNA, 100 bp, Homo sapiens
tggcgatctacttcctctggcagttaagtgggcagaccaacatccacctcagcaaaaacttcttcctgacgaatcgcgccagggagcgctcagacacctt

SEQ ID NO: 637368 - DNA, 100 bp, Homo sapiens
atgttaggatattgtggaacggtgaaaagaaatctgttgcttcttgcatgggatctttggaattagacactccttcacagccagtgaacaatcaccatgc

SEQ ID NO: 637369 - DNA, 82 bp, Homo sapiens
agaagctggagttcgaggacgaagatgatatcatcaagttgaatcgaaaggaagggaagaagcagaattttccaagactaaa

SEQ ID NO: 637370 - DNA, 75 bp, Homo sapiens
cgtcgctgctggcacttcaggctctggtgaatggctatgtggtgaaccttttctgggcatttgacacccacaagc

SEQ ID NO: 637371 - DNA, 100 bp, Homo sapiens
gagtcgccgccctgcccttggatttgagatcatttactactgaatgcccacagaaaggaagaaacttctctctccctttagacaaagtcgaattcttatc

SEQ ID NO: 637372 - DNA, 90 bp, Homo sapiens
ccaatcgtgaaaactatattcacagaaagtatgctgaggccttggattaccaccgtcaggcactggtgttgattcctcagaacgcatcca

SEQ ID NO: 637373 - DNA, 87 bp, Homo sapiens
acgagctgtttctcatctttatactcttccaggctttgtccagggatctgaaaccactttgcagtcgacatactcggataccagcgc

SEQ ID NO: 637374 - DNA, 100 bp, Homo sapiens
caactgggaggtggccatcttcggaccccccaacaccctctacgaaggcggctacttcaagtcctattttgtaacggattatgatccaaccattgaagat

SEQ ID NO: 637375 - DNA, 100 bp, Homo sapiens
gggcggcggacagattgaccttcagagcgagcactttcctgagcacctggaccactttacggagaacatggaggacttctccaatgacctgttcagcagc

SEQ ID NO: 637376 - DNA, 100 bp, Homo sapiens
ctctttggatgattctgccaaaaaggtggtgatctttgtgaagtctgtgcagcggtgcattgccttggcccagctactagtggagcagaacttcccagcc

SEQ ID NO: 637377 - DNA, 100 bp, Homo sapiens
aggaggagctggatgccgaagtcctggaggtgttccacccgacgcatgagtggcaggcccttcagccagctcttgaggctagtgcgcctctaggcaagat

SEQ ID NO: 637378 - DNA, 83 bp, Homo sapiens
cggcgagcgcgagcggcgcgagaaaattagcctgaggcctgctcagtcgttcctaatgaataaaaatcaagtgccaaagcttc

SEQ ID NO: 637379 - DNA, 74 bp, Homo sapiens
ctgacttttcttatgctgggatgtgccttagaggattatggccgttgccgagagatggatgagcagattagact

SEQ ID NO: 637380 - DNA, 75 bp, Homo sapiens
gcgtacacatcagacttgggggatgaaaatgagcgtgcaagtgagactgcagacagagtggcattgtgacaaagg

SEQ ID NO: 637381 - DNA, 75 bp, Homo sapiens
catcaggtgctgtttcaggcctggcacgtagtagagtatgatccatttgctgagcacagacctccaaagattgca

SEQ ID NO: 637382 - DNA, 111 bp, Homo sapiens
cgcgggctgcgcaccaagtgcgctgtgtccaacgacctcacccagcaggagatacggaccctggaggttgcctttttcctctacaatggggtgtcactaggtcaatttgta

SEQ ID NO: 637383 - DNA, 100 bp, Homo sapiens
ccgcgccgaccgcgttcctatggacagacgcacagacacctgcaggtgcaccgggtataatttcttcaccatatgcaggggctgctggatttgccccagc

SEQ ID NO: 637384 - DNA, 98 bp, Homo sapiens
aatcctaaagtttttatgtattttcttagaaaaaatgggccagaagatcgcaccttactctgttgaaattaagatgatgattctgataccgagacgtc

SEQ ID NO: 637385 - DNA, 100 bp, Homo sapiens
ctgtccagccagctgtaaagccttgggctcccttgcaggattcagaagtgtatttagcatctctagtgtcagagagtgagagtacaaaaggaagtgctga

SEQ ID NO: 637386 - DNA, 100 bp, Homo sapiens
cccgaagccgggcggaggagagctcaagctaaggaaagaagattctatatgatatacttgcctttgccaaagaaagtgtgaattctcatgttaccacgct

SEQ ID NO: 637387 - DNA, 100 bp, Homo sapiens
tgccggtgctcttcatcaccttcgtggtcgtctggtcctactacgcgtacgtggtggagctctgcgtgtgttccttgcattgactccatggagagtatat

SEQ ID NO: 637388 - DNA, 100 bp, Homo sapiens
ctgggcacactgcagctactgtcacagaggggctaccgggccgtggcccttgaccttccagtttgcagacctgacagacgctgctgcccgcaacgcggag

SEQ ID NO: 637389 - DNA, 90 bp, Homo sapiens
cccccaagccctccttcgtgtcgtacgtacgccctgaggtaatctgtaagtcagatgctccaacaggggatgttcttcttgatgaagctc

SEQ ID NO: 637390 - DNA, 100 bp, Homo sapiens
ttccagtcgctgctcctgcttctcgggctgctggtgctgtgcgcgaggctcctcactgcagcgaaggcaaagagcaaatcgcctgtaaaatctacggagc

SEQ ID NO: 637391 - DNA, 83 bp, Homo sapiens
ctaggtcgatggtcggcggcgcccggatgggcagctgagatatgtaactggttcatcaatgcccggcggcggcttctcccaga

SEQ ID NO: 637392 - DNA, 100 bp, Homo sapiens
gatctggacgccgatgccgatgatggctgggcagtgggaatttcagattggaccttgtgaaggaatcagcatgggagatcatctctgggtggcccgtttc

SEQ ID NO: 637393 - DNA, 100 bp, Homo sapiens
gcaccgcgttcccgtcctcttccgcttggccccagaaagtttcggttctgcccggcggtggacccacgagcgcggggcagtgcccaaaggaaatgccact

SEQ ID NO: 637394 - DNA, 75 bp, Homo sapiens
aactctaccctggaggagattctggggcagtatcaacggagtctccgggtttccaggaatatggatctactggaa

SEQ ID NO: 637395 - DNA, 74 bp, Homo sapiens
gacttatttctgtgggcagacattaacattcaggcgtgacgcctgcttcacatctctaatgaacaccctcatga

SEQ ID NO: 637396 - DNA, 75 bp, Homo sapiens
taaatttttgaaaattgttgaagctgagtaatgggttcaacagagtttggaaaagatttctaaactggagcagga

SEQ ID NO: 637397 - DNA, 99 bp, Homo sapiens
tagaggacttccctttggatgtagcaaggaagaaattgttcagttcttctcaggtggacaagagcaaggaccaagtgtggaaggtcttaatgtaccaac

SEQ ID NO: 637398 - DNA, 75 bp, Homo sapiens
tcaggcagccttcaggactttgggcagtgttgtactgctacttctataaacggacagccgtaagactaggcgatc

SEQ ID NO: 637399 - DNA, 100 bp, Homo sapiens
gaagcaaagagggaagaaattgcaaacgcttgcaatgcagttatacagaagccagtgagaaagatcagtctaaagaaaaggagaagaaagtgaaaaaaac

SEQ ID NO: 637400 - DNA, 98 bp, Homo sapiens
ggcagggcacgaggcctctgagcctagagagtgaagattgtaaaccatggctgtgtggatacaagctcagcagctccaaggagaagcccttcatcaga

SEQ ID NO: 637401 - DNA, 75 bp, Homo sapiens
tcctggctccttcaggggccaccgcagctggacgccaacaaggagagcagcaagacctccaagccacacaaggtg

SEQ ID NO: 637402 - DNA, 82 bp, Homo sapiens
cgggagcacgtcatctccatcgaggtatggtttgaagtggtgaacatggatttttctcggcttcacatgtacagtcctcccc

SEQ ID NO: 637403 - DNA, 75 bp, Homo sapiens
atgcagaaaatgaatccatacaagattgatataggcgcagtatattctcacagacaacaggaacaggaccccaca

SEQ ID NO: 637404 - DNA, 97 bp, Homo sapiens
cgactgcaggcagaagctgagacggctaaggtggtcttcaagctgacagagaagctgacggaacagaaggagtggatgaagatataattgtgaccca

SEQ ID NO: 637405 - DNA, 90 bp, Homo sapiens
ctggtgaagacaaggggggatatgtgatcaaagcatcagaagagtgcttgtgatttcacgtatttttgctgaactcgtaaaagagacact

SEQ ID NO: 637406 - DNA, 100 bp, Homo sapiens
aaaacagcaggcacccaagcgggcggcagctacagcctccgcttggcgtcccgatgctctccaccagcggccccgtacatcaccaggcagtataggaagg

SEQ ID NO: 637407 - DNA, 74 bp, Homo sapiens
tttccggatcaatccagatggcagccagtcagtggtggaggtcgcagaacttgaaaagcgcctgacagagctgg

SEQ ID NO: 637408 - DNA, 124 bp, Homo sapiens
ccagatggcctccaggctgaccctgctgaccctcctgctgctgctgctggctggggtggctgcggtgactagtcgtggaataggaaactggagcgattctaaatccattaccaccataaaagga

SEQ ID NO: 637409 - DNA, 88 bp, Homo sapiens
agcttggccaaccttggggagctgtgccagaggctggactttctgctgggctccgtggtccatgagggcttggattttgaggccaagc

SEQ ID NO: 637410 - DNA, 100 bp, Homo sapiens
cctcggccccgcgcccgcccaggggtcgctgtcgcctgctgctggctcctcactgggtttgctgaactaactccaagctggtgtgcctagcgtccgcgcg

SEQ ID NO: 637411 - DNA, 100 bp, Homo sapiens
ggacgaggcaccttttgctccttcgatactcccgatgattccatacggaataagctcattttaattgccagaaacaaagtggatatcaaagtattgcaga

SEQ ID NO: 637412 - DNA, 99 bp, Homo sapiens
acaatgtacttctggagctattgcggtcaagtctcattctgcttcaggggagctggttctttcagggacctgaaagcagaaaggagagaaatgaaagag

SEQ ID NO: 637413 - DNA, 147 bp, Homo sapiens
aatgcctcttgggaacaaaatacaaatcatggagccgctggggtcccttttgcctcagatactattttgaagtgtaaacaggaacatcgataagtagtgtaaaaacttgcacaatgaaatccgaagccaaggatggagaggaggaga

SEQ ID NO: 637414 - DNA, 100 bp, Homo sapiens
cgagtcagtgactgaagcgcccgtccattccaaggttatgaagacagtatggagtttccagaccatagtagacatttgctacagtgtctgagcgagcaga

SEQ ID NO: 637415 - DNA, 75 bp, Homo sapiens
ttctcttaaatgacaatgaccttgctgttacctacttctttcatcagaccctggtgggcagcagtgggaccattc

SEQ ID NO: 637416 - DNA, 82 bp, Homo sapiens
cgtcgcccctgccgccgctgccaccgaaggaagcatcccagacaccgggaagaaggacagaataacgggctcccagattcac

SEQ ID NO: 637417 - DNA, 100 bp, Homo sapiens
cgaccagaaatattggttcagcccctgaaagtttccaacaggaaatcatgcccctgagatgctcatgcccttggattaaacccctgcagtgctggaagaa

SEQ ID NO: 637418 - DNA, 100 bp, Homo sapiens
tggagatggcggctcagaagataaacgaggggctggaacacctcgccaaagcagagaaatagagctagacgtcagcttggagcggcgccggaccgtggat

SEQ ID NO: 637419 - DNA, 100 bp, Homo sapiens
ttcttccagtcccctgaggtgatggcagctattgtacagggggatacgctggaagacatttacaaccaagtgaaacagatcatagaagaacaatctggtt

SEQ ID NO: 637420 - DNA, 100 bp, Homo sapiens
ggaattaaatgcacatattgttgtatcagatccagaagatattacaggtgaccgggttattgatgtgggatctgaatggcgaactttcagcaatgacaaa

SEQ ID NO: 637421 - DNA, 98 bp, Homo sapiens
agctcccttgttgttgcatgggatggcaatgtccacgtatcacagaggagaatctgtgttacacagagcaatggcaaacgaatgcacgtgcagttgtc

SEQ ID NO: 637422 - DNA, 98 bp, Homo sapiens
aaaaagccctcagtaccagagacagaagcagatggattcgtccttttagtcttgtctcaagaagaaaacgaactgggaaaatttcttcgatcccaagg

SEQ ID NO: 637423 - DNA, 82 bp, Homo sapiens
cttggcgggccctggctggggatgtgcgagcatcatcggctggttcgtgcgaagcttcaagtacttttacgggctccgcttc

SEQ ID NO: 637424 - DNA, 74 bp, Homo sapiens
cacggccagatctgccctccaactgggctggcttagatgaagatgaagatgcacatgtctgggaggataattgg

SEQ ID NO: 637425 - DNA, 98 bp, Homo sapiens
ccacagaaaagtgtcgtgtcagttttaatccaggtgctggtttgccaactgacaaaaagaaaggtgggccatctccaggggatgtagaagcaatcaag

SEQ ID NO: 637426 - DNA, 50 bp, Homo sapiens
ctcccgagcagctgggactacaggatggtggaacactgtctacacatgtt

SEQ ID NO: 637427 - DNA, 100 bp, Homo sapiens
aacttgtgcctctcattcctgccagaggtggcatctgtgaactgatggagacattccctgcagtggctgagaaggtcctcaaggagttccaggtgttact

SEQ ID NO: 637428 - DNA, 100 bp, Homo sapiens
ggataactaaggatgtggtgctccaatggggagaaatgcccacgtctgtggaaaatgtgctctcactggccagagtaagtcctgtaaacacagaattaaa

SEQ ID NO: 637429 - DNA, 75 bp, Homo sapiens
ccacctccacaagggcttcctggccctctaccaaaccgtgggtgaatgtgatgttcatgcttgccattcttctga

SEQ ID NO: 637430 - DNA, 98 bp, Homo sapiens
tcggtgaggctttcccggctgtggtttggctgcgggcggcttgggcagcccgcgggcgcctcaggtttctagaccaactggggagattcccgttaaaa

SEQ ID NO: 637431 - DNA, 90 bp, Homo sapiens
agttgctgttggggactcggaaggccgtatttgggtctatgacgttggagagggcaactgtactcctgatgatattggtctgtgaaaccc

SEQ ID NO: 637432 - DNA, 100 bp, Homo sapiens
ttccttcttctttgctggcactgttattacaaccataggtgttacacataatattgcattacttcgagaggtgataatcaactcacgctttgtaaaagga

SEQ ID NO: 637433 - DNA, 76 bp, Homo sapiens
atctcatgggggcccccaggactctgaccggatgtgtcgaccctgcagaatgactcagcctacgacagcaacgacc

SEQ ID NO: 637434 - DNA, 75 bp, Homo sapiens
gccagacgacaagcacacactatggcgctgaaacggattaataagagagcatcagtgatgtcacgtttggagcag

SEQ ID NO: 637435 - DNA, 75 bp, Homo sapiens
ctgtcaactcagtctctgattgaactttttgaatctttcaagagttttgaagggttggaaatcgtgccaaatggg

SEQ ID NO: 637436 - DNA, 82 bp, Homo sapiens
atgctcagaccttcattgctctgtgtgccaccgaccatggtgaatccgggcagcagctcgcagccgcccccggtgacggccg

SEQ ID NO: 637437 - DNA, 76 bp, Homo sapiens
cctgtacagcctgcagaactttacagaatgtctgaaggggacagtgtgggagaatccgtccatgggaaaccttcgg

SEQ ID NO: 637438 - DNA, 100 bp, Homo sapiens
tgtagtgggctacagtgaatcaactagcatctgtactatactggcaattgctggagaagattttgcaattgttgcttctgatactcgattgagtgaaggg

SEQ ID NO: 637439 - DNA, 90 bp, Homo sapiens
cttcgccgtccaccaggtccctctctctgtccccggccgccatggagcagccgccggcgcctaagagacgtgccaccttgcttagcgccc

SEQ ID NO: 637440 - DNA, 112 bp, Homo sapiens
atgggagtttccttgtacaccactttctctccttctatctcaaaggaagatgaagatcctgccaaaggtgatcagagtcgatcagttgaccttggggaagataatgtgacag

SEQ ID NO: 637441 - DNA, 82 bp, Homo sapiens
gaggaggaggggagaggcctggaggacaccaacatggatttttagactctgaggagcagttggagctaatccacattatgga

SEQ ID NO: 637442 - DNA, 117 bp, Homo sapiens
atcacattggagtcacaatcaaagaactggatctttatctggcttactttgtccacactccggggcggacggacgccggtggtctctggcctcgctcccttcatctggctatggcac

SEQ ID NO: 637443 - DNA, 90 bp, Homo sapiens
tgacagcagccatcgaggcgagccagagcctgcagtcccacacgcctggctctggtgtttctgctgaaacttggagagaccacctctggc

SEQ ID NO: 637444 - DNA, 83 bp, Homo sapiens
tccatggatttgtttctcattctcatatttcaccaataaagatatctaactgattttgagccaattcaatgcctgggacgtgg

SEQ ID NO: 637445 - DNA, 90 bp, Homo sapiens
cattaacctgccgccgcccctcaccagacagatcgctgtcaaaaccctagtaagactttgaccccgacgcaggcttcagtgattgccgcg

SEQ ID NO: 637446 - DNA, 100 bp, Homo sapiens
ctcttgcgtcccaaccagagcgctggccacctcgccgcccagctcacgccgcgcccgcgctcccaggctccggaaatctagttcatatgattgaacacgc

SEQ ID NO: 637447 - DNA, 82 bp, Homo sapiens
cggagagtgacggagtcggcgagcccccgcggcgacagccaaatttgtatcctactgtggggcttcaaacaccaggagaagt

SEQ ID NO: 637448 - DNA, 100 bp, Homo sapiens
ggagacggagttctacgtgtcccccgaggatctggaggcacagctgcagtctgacgagagggtcggcctggagattctacgccaccaacctctcgcgcac

SEQ ID NO: 637449 - DNA, 75 bp, Homo sapiens
tttatcccttcatctgtggataagcaggaggcaagatccaaatggagatggagactgtttcagaatcaggaacac

SEQ ID NO: 637450 - DNA, 83 bp, Homo sapiens
ttcagcggggcgctccaggaggcactcacaggcagaggtggaggagacactgaagcgactgcagagccagaagggagtgcagg

SEQ ID NO: 637451 - DNA, 100 bp, Homo sapiens
atcccaaagccaaggagaagttctcccagctggcagaagcctatgagtaggagagaagtttgctgaggaatgccttcaagcacaaagtgatgaatgactg

SEQ ID NO: 637452 - DNA, 100 bp, Homo sapiens
gagccccagaaacgaaatacagaggagtcatcctcacctgttaggaaagctgtatgtgatggcttctgtgtttgtctgtctactcctttctggattggct

SEQ ID NO: 637453 - DNA, 75 bp, Homo sapiens
gcctcagcctcccgagtggctgggattacaggctttcgggtcacctccagcagctcccagttcagctcacgtgat

SEQ ID NO: 637454 - DNA, 101 bp, Homo sapiens
aaaacatatccgagggtgtcctgttacttccaagtcatcaccagaaagggcggcgactggcggcgcgatggacctgaccgggctcctgctggacgaagaag

SEQ ID NO: 637455 - DNA, 100 bp, Homo sapiens
catctgtgggtttaatccaacagaagaaggtggaagtttagctgatgctataagtgaaaactacagaatcatgagttactttaaagaagcagagttgaag

SEQ ID NO: 637456 - DNA, 83 bp, Homo sapiens
acaagagcgacctggtgcgctctcgtgaggtctcggtggatggctctggcatcctgctgtttatcttccatgcaaactttttg

SEQ ID NO: 637457 - DNA, 100 bp, Homo sapiens
cgatcctctcatctcagcctccaaaagtgctggcattacagaggagaattctgcctaagccaactcgaaaaagccgtacaaaaaataagcaaaagcgtcc

SEQ ID NO: 637458 - DNA, 90 bp, Homo sapiens
ctgatattaagccatcaaatgtggaacctatggaaaaggagagaagatgactgaggaggaggtggagaccgttctggcaggacacgagga

SEQ ID NO: 637459 - DNA, 98 bp, Homo sapiens
cgacggcgtcgggagagcgcgcctagccggctcgcgataagactttgaccccgacgcaggcttcagtgattgccgcggatcagaagcctgagcacttt

SEQ ID NO: 637460 - DNA, 97 bp, Homo sapiens
catcgacatcgccagcatcgacatggtttccgaagtcaacatggtttgcaatggtctggagcagccaaggaagcagcagcgctctgatctcaatgga

SEQ ID NO: 637461 - DNA, 98 bp, Homo sapiens
gtgagctgagcctgccgccaagatgccggcctattttcagaggccggaaaatgccctcaaacgcgccaacgaaaaggtcacggatcgcctacagtgac

SEQ ID NO: 637462 - DNA, 75 bp, Homo sapiens
ggaaagaagttgcaaaacactgggccaggccccactctcagggcccccaggggccaccatgccagctgggggccg

SEQ ID NO: 637463 - DNA, 100 bp, Homo sapiens
ggctattggaaggaggagattctgaagataaggaggtgccagtcacgaattgcccgaacattacctgctgatcagaagccagaatgtcggccatactggg

SEQ ID NO: 637464 - DNA, 83 bp, Homo sapiens
cctggaatggcaagcgcagcaacaacagagagcacgtggctatgactttgcagccgtcctggagtggttcgcggagcgtgtgg

SEQ ID NO: 637465 - DNA, 98 bp, Homo sapiens
ttctttgatgcgacctcaggaaggagatgagattgctcgctgtaagcagctcatctgtgaccccagctacgtaaaagatcgggtagaaaaagtgggcc

SEQ ID NO: 637466 - DNA, 101 bp, Homo sapiens
ctgtggtctctgcacctcctttctattggttttcacagaattccatggactttaactgctgaaccaatgatgcactgattttgtcacttgtaccagctaac

SEQ ID NO: 637467 - DNA, 89 bp, Homo sapiens
ggagcggatgaactttctttacagatcggagacactgtgcacatcttagaaacatatgaagtgttgaacagtcatcggatctacaggac

SEQ ID NO: 637468 - DNA, 83 bp, Homo sapiens
aagatggcgggacggctgccggcctgtgtggtggactgtggcacggggttcgagaacttgtcttggacaattgcaaatcaaat

SEQ ID NO: 637469 - DNA, 75 bp, Homo sapiens
caacccccaaattggctgggacagcccagtgtgccatcataatgtttgatgtaacatcgagagttacttacaaga

SEQ ID NO: 637470 - DNA, 50 bp, Homo sapiens
ctgcaccatctgcaggagcccagcaaggctcgggttatgtatgattttgc

SEQ ID NO: 637471 - DNA, 51 bp, Homo sapiens
ctggagaaccctgctgtgactgggtgccatacacagaggctgcctctttgt

SEQ ID NO: 637472 - DNA, 75 bp, Homo sapiens
actggaaactggatgcagcaaggaaataggatttaaccgctctctgcctcccagcaatcccacagagtattgatg

SEQ ID NO: 637473 - DNA, 82 bp, Homo sapiens
caaaggcctcagcaatgagccagggcaaaacagctgcttcctcaacagtgccctgcaggctgctttgctggctctgcaagaa

SEQ ID NO: 637474 - DNA, 88 bp, Homo sapiens
cactctggcgggcataccagcgggccctggccgctcacccgtggaaagtacaggtcctgacagctgagtcttgctctgtcgcccaggc

SEQ ID NO: 637475 - DNA, 51 bp, Homo sapiens
cgactgcttcggaccatggcttttcatggaacttctagcaatagtaaaaca

SEQ ID NO: 637476 - DNA, 50 bp, Homo sapiens
ggtctgggaccttaacagggagccatgaacaccttccaccatgaccacct

SEQ ID NO: 637477 - DNA, 98 bp, Homo sapiens
caccgtttccccctgttgcagggttttgtttatataactcaagttgtttggctaaattcttcaggaagtggagccgtcagttcctgctttcattctgg

SEQ ID NO: 637478 - DNA, 100 bp, Homo sapiens
ctatgaatatgggtcgaccattccaaaaaaatcgtgtgtactgtaagcacggtcacctgtgtcccatcgacaccggcctcatcgagaagaatatcgaact

SEQ ID NO: 637479 - DNA, 75 bp, Homo sapiens
cagtctcagcttcaggtgaagaaggcagctctcactcaggcaaaggttggaagcgaagtggaagcactgaacctc

SEQ ID NO: 637480 - DNA, 83 bp, Homo sapiens
ctcgcgccggctatggccgtgccctggggctgagccctcagttgatattcactgatggactccaaagaatcattaactcctgg

SEQ ID NO: 637481 - DNA, 89 bp, Homo sapiens
atagcatatgatgtgcagtgtccaaagagaggtagtgggcagcagtcagtgacaggtgtaacctctgtggatgacagcaacagttactg

SEQ ID NO: 637482 - DNA, 100 bp, Homo sapiens
ttgaacaccaaggggcaactgggccatgagagggaaggaaacaagccaggaagaagctctacttctgatgtactagacatacaaaagcctccactctctc

SEQ ID NO: 637483 - DNA, 82 bp, Homo sapiens
atatttatgaaaggagtcatggatgaatgtactcatgtagcaaatttctcaggatgcttgaagcccacatgcagagctacaa

SEQ ID NO: 637484 - DNA, 101 bp, Homo sapiens
gtttggtgttcttgctaagattgtgaattacatgaagtttggaaattttagcattcaggtgccaggaatgcagatgggacagccagtgccagaaacaggcc

SEQ ID NO: 637485 - DNA, 75 bp, Homo sapiens
aaaaatagttctacgaggagtgaccaatgatcaggttgacccttcagccatcgaagacggcaatttggaggaaat

SEQ ID NO: 637486 - DNA, 51 bp, Homo sapiens
cctgggtccccgacgagagccagctgagcttcagtcattgtctattcctgg

SEQ ID NO: 637487 - DNA, 101 bp, Homo sapiens
tgggacccacactggcttttaaggaggacacccggacacctggaagctgggaaatgatctttctcctggcctgccctccatgtcggggagctatcgtcgtc

SEQ ID NO: 637488 - DNA, 105 bp, Homo sapiens
tggcggatggccccaggtgtaagcgcagaaagcaggcgaacccgcggcgcaataacggggacggcaaaacagaacagaaaggcggagataaaaagaggggtgtta

SEQ ID NO: 637489 - DNA, 100 bp, Homo sapiens
ttcaactgctccctgcagatcctggacctccggaacaaccacgtgctagactcgggggcccggacaccctaggcgatgggatgagggagagaagggagac

SEQ ID NO: 637490 - DNA, 78 bp, Homo sapiens
gataaagcagcagatgccaaaaaaattcaggatctggagcgacaagtatctactgtgcgtttcagtcaacaatacagc

SEQ ID NO: 637491 - DNA, 51 bp, Homo sapiens
ccccgaggatcaggaaaaactatgggaagtaagcaatggcatagaaaaaaa

SEQ ID NO: 637492 - DNA, 52 bp, Homo sapiens
actcctgctcagtgtagcattaagaccttagctggatctccaaaatacaagt

SEQ ID NO: 637493 - DNA, 100 bp, Homo sapiens
gattgaagctctctttccacaaaaatttggaagatggaccgactatgcaaaaagatactgtaatgcacacatcagttatatccagaactcacagcccaac

SEQ ID NO: 637494 - DNA, 82 bp, Homo sapiens
tgaaggcggcaaaatggcggaccgcttctcccgcttcaacgaagaccgagactttcagccttatgccagcctggaccatctt

SEQ ID NO: 637495 - DNA, 75 bp, Homo sapiens
cgggccacctccaggagggaagagcttgatgcattagatgccaatgatgagttgactcctttgggacgaatcctg

SEQ ID NO: 637496 - DNA, 95 bp, Homo sapiens
ctagaatgaagctgcagaccctcgcagtgagtgttacagctcttaagcgccgtgccgtccctgcagtgacaccgaggtgctcctagccgtctgca

SEQ ID NO: 637497 - DNA, 88 bp, Homo sapiens
ctctcaaagtgcatcttggaatagcagaaattgcaggtgctgcagtgtctgaaatttccgggcctttctcaacagaggatgtagccag

SEQ ID NO: 637498 - DNA, 75 bp, Homo sapiens
ccgcctgaaggaggagaatgagaaactgcgctcgctgactttcagcctggatctcgaggacctggaagaagcaga

SEQ ID NO: 637499 - DNA, 90 bp, Homo sapiens
ggacctccagatttccttactgtgttcggtgaccagtgacttggattttccaacacaagtcatcccattaaagactctgaatgcagttgc

SEQ ID NO: 637500 - DNA, 74 bp, Homo sapiens
cgccatcgttgctgccttcttcgtcaagggcccgatgatgcacaacaaaaaatagaacctcatcacacagcagt

SEQ ID NO: 637501 - DNA, 98 bp, Homo sapiens
gctgcgggaaatcgggctgaagcgactgagtccgcgatggagaaggacagaataacgggctcccagattcacaagccccaccaagaggatcaccccag

SEQ ID NO: 637502 - DNA, 101 bp, Homo sapiens
atatttggagttcttacaacatggcagacattgacaacaataagagctaactgccatcaagagccatcagtatgtcttcaagctgcatgcccagaaagctg

SEQ ID NO: 637503 - DNA, 83 bp, Homo sapiens
gccacgtctatgaccgggcggcgcgggtctgcggctccagcgtgcagaagataacgaaggaggcccaacttcattcaataagg

SEQ ID NO: 637504 - DNA, 83 bp, Homo sapiens
gggggacggggaccagcagctgtcgccgccgctctcaggttgttgatcattatgaaaatcctagaaacgtggggtcccttgac

SEQ ID NO: 637505 - DNA, 50 bp, Homo sapiens
agcaacttgaagataacattcagagctccctgtggacagaatgagacccg

SEQ ID NO: 637506 - DNA, 75 bp, Homo sapiens
attaccatccagaagtgtctcccactgaaggcatccgtggttgtttttaaggagagcttgtttcatatccatatc

SEQ ID NO: 637507 - DNA, 100 bp, Homo sapiens
gcagccagcagggcctggcctatgccacagaggctgtctatgaaagcgcagaggccccgggccactatcccgcagatggcaagaagaagggtgatggagg

SEQ ID NO: 637508 - DNA, 97 bp, Homo sapiens
agatgaaatggatttgcatcttgtaatgtgtttaacaaagccacgaataacctataatgagaccatgaaccaggcatctcctgctagaaagctggaa

SEQ ID NO: 637509 - DNA, 75 bp, Homo sapiens
gcccctggaggaagaagaggatggagaggagctcattggagatggcatggaaagattttaccaaatgttgcaaga

SEQ ID NO: 637510 - DNA, 98 bp, Homo sapiens
cagtccttcgcgccctcctcgccctccccaccgacatcatgctccagttcctgtttcctgaggccctcaccagaagctcatcagaagcagatgctggc

SEQ ID NO: 637511 - DNA, 75 bp, Homo sapiens
ccgcggtcatcgcctcctgcctgccgccgaggcccacgcacgcctcaaggataatcgtgctggatcagagtgact

SEQ ID NO: 637512 - DNA, 100 bp, Homo sapiens
cacagcgccaacagcaacgcggaccacggaaatgcaataccttatttccagatgactcctatcagcacttctctctgctggaatgatctctcctggtttc

SEQ ID NO: 637513 - DNA, 98 bp, Homo sapiens
cgccgggctggggcgggcggcccgggacaccgacagggcaagtgtccagagaatggctgggatgaaagtacacttgaactctttttacatgaacttgc

SEQ ID NO: 637514 - DNA, 88 bp, Homo sapiens
acctgggagagtgggcaggtcctgggggaccagacggtctcagacaatgagctccaggttaattcatctgcctacactatttacatgg

SEQ ID NO: 637515 - DNA, 83 bp, Homo sapiens
tgacaactttcgtttccctctgagggaattgggaggtcggcggccccaaaagtgacttaagagattaaaattaatttggttgc

SEQ ID NO: 637516 - DNA, 75 bp, Homo sapiens
tggtaccgtacattttctcagttggcatttgatggagaaaaactcagggtcttactacatattgcaacagaagat

SEQ ID NO: 637517 - DNA, 100 bp, Homo sapiens
acgggaagaacttcttcagaattagaaaggagctgcttcccaataaggaaacaagcacatcaagaagaggggtgaagtgacaaaagggagtttattgtga

SEQ ID NO: 637518 - DNA, 99 bp, Homo sapiens
ggagttcctggagaagaaaatcgagcaggagctgacggccgccaagaagcacggcaccaaaaacaagcgcggtggagccgccaccaaaatgcagatttt

SEQ ID NO: 637519 - DNA, 75 bp, Homo sapiens
tccagagctgaggactgcctgtttgcaggtagtgaagctgattttagctcctcgagcagcacaggcagcatttcc

SEQ ID NO: 637520 - DNA, 74 bp, Homo sapiens
atatgaacaatccgtctggatcacggatgtaggaagtgctgtgagtaccagagtgcccactggttccaacagtt

SEQ ID NO: 637521 - DNA, 100 bp, Homo sapiens
cttggtggaagctctattccatgtgggattggaacaaatatttcatggagaaaacacgagatttttctcctatttcagcagttggccacaacttcattgc

SEQ ID NO: 637522 - DNA, 83 bp, Homo sapiens
caagcaatgtggcaaaacgaaaaagctcaatgcctcagaaattcattggaagaagaagtctctccacagttgtttactttcca

SEQ ID NO: 637523 - DNA, 51 bp, Homo sapiens
atcacgccctttctcttgctcaagcctgatctagttgaatctgaagatgtg

SEQ ID NO: 637524 - DNA, 75 bp, Homo sapiens
agaaccatgctcaccgaccctggtttggaaatcccttgtctccaggttgctgggattgacttcttgctcaattga

SEQ ID NO: 637525 - DNA, 100 bp, Homo sapiens
taacaatgattgatctttacccaagagacttgtggaattttgtctttggacaggcctctttgacagatggtttttctattgggaaagctactgatcggat

SEQ ID NO: 637526 - DNA, 82 bp, Homo sapiens
tgtgcgcgcctccatctgggccatggatggtcagagcaccataacatggtgtgggaagtgaagacaaatcagatgcctaatg

SEQ ID NO: 637527 - DNA, 100 bp, Homo sapiens
gaatggtgcaggcaggcgctgagaaggacgcgcagtccatctctctcaggcctgttacatgaacagaatatggcaaaaatgagactacttacttttatgg

SEQ ID NO: 637528 - DNA, 95 bp, Homo sapiens
tggcgcgtacgagatctccgaccagtctgggggcgctggcggcctgcgcagccacctcaagacacttaaagaatcctgtaatagcacagaagatc

SEQ ID NO: 637529 - DNA, 82 bp, Homo sapiens
tggtgggccgcgtcgaagacatggaccagggctacggagccttcatcccgcgtggagtctacccccaagcccttctcctctt

SEQ ID NO: 637530 - DNA, 74 bp, Homo sapiens
ggcttggacgaagatggggagaaggaagcgagactcatacgcaacctcaatgccctgggccctgtggaacttgc

SEQ ID NO: 637531 - DNA, 90 bp, Homo sapiens
ggattttaaaaaggctatctaaatatttggagtctaccatggctcaagaatctcccaaaaattcagcagcagaaattccagtgactagta

SEQ ID NO: 637532 - DNA, 100 bp, Homo sapiens
tgctgaatcatgccagagtctctgaattcacagccgtttgtctcttcccacagttggcaaccctcacttttgcaaggatctgccactgtgaaggagatga

SEQ ID NO: 637533 - DNA, 101 bp, Homo sapiens
gcggcggccgctcacaacatgcacagcctggcgacggctgcggtatttaccttgctgtggattgctgactggatggtccatcacttctggaggaaaggaaa

SEQ ID NO: 637534 - DNA, 85 bp, Homo sapiens
aaaagatccagaaaagaggcaaagcaagcgagaagtcgcgggcccagcccacagcagggtgagaagccctaccactgcaactggg

SEQ ID NO: 637535 - DNA, 80 bp, Homo sapiens
gcaagatggtgttggaaagcactatggtgtgctacaagcctatcgtggaattcatcgatgcacaattcgaggcctacctg

SEQ ID NO: 637536 - DNA, 75 bp, Homo sapiens
aagaagatcatcattaaggacggaggcacggaactgtggaaggtgcatcagtgaagaaatggaccaatgtgtata

SEQ ID NO: 637537 - DNA, 82 bp, Homo sapiens
ctcgatcttgggacccaccgctgccctcagctccgagtccagggcgaggatgatcggctgaatgtaacagaggaactaacgt

SEQ ID NO: 637538 - DNA, 82 bp, Homo sapiens
atccggcgcgcgtcttccaccacaatgcctgcaaatggcggatgacgccggtgcagcgggggggcccgggggccctggtggc

SEQ ID NO: 637539 - DNA, 83 bp, Homo sapiens
aggaggcgcgggaggtgttcgagaacgaccccgagacgccttatgccagcctggaccatcttggaggcagtgtaggatcatgg

SEQ ID NO: 637540 - DNA, 98 bp, Homo sapiens
ctcccaaagtgatgggattacaggaaactggagaggcgtggctggaccaagacctccccccatgtgagcaggcttcctcctcccccaacaaccgttgc

SEQ ID NO: 637541 - DNA, 89 bp, Homo sapiens
ttcaacatcctcctggccaccgactcctacaagggcgtgatggtgggcatgggtcagaaggattcctatgtgggcgacgaggcccagag

SEQ ID NO: 637542 - DNA, 75 bp, Homo sapiens
catagacatttacgcggatgtcggcgaagagttcaaccagtcaccttcaggccattcagaggaggaaagagaggg

SEQ ID NO: 637543 - DNA, 83 bp, Homo sapiens
catcaaccgggccgtgccccagatgcccaccgggatggagaaggaggaggaatcggtactggttttggattaggaattgtttt

SEQ ID NO: 637544 - DNA, 82 bp, Homo sapiens
ggttattcgagtgaccgagaccgcggccgggaccgagggccctgggcagtgacggggttcgggtgaccatggagagtgcgct

SEQ ID NO: 637545 - DNA, 100 bp, Homo sapiens
ggacgatactctgaccgttttagtagtcgcagacctcgaaatgatagacgtgtaatgtctgtggctaaggatgaagaaccagagagtatggatttccctg

SEQ ID NO: 637546 - DNA, 83 bp, Homo sapiens
gaagttcttcgatgtatctaaacttggcaccaagtatgcaaaagcgaaagcttcggatctacatttccaatacgttcagtccc

SEQ ID NO: 637547 - DNA, 100 bp, Homo sapiens
tgcctggccgcgaccccgtctgggaggtgcccgaaatcaggtggtgataagagcagagccccaactctgtgccttgtgtgcggatctctgctgtgctccc

SEQ ID NO: 637548 - DNA, 90 bp, Homo sapiens
ggttgtcagcgatgccggctctatgtatgtccctgggaagctgcatgatgtggaacacgtgctcatcgatgtgggaactgggtactatgt

SEQ ID NO: 637549 - DNA, 107 bp, Homo sapiens
gagctgaagaggaaaaaatggaagccgaccctgatggtcagcagcctgaaaaggttcggagcgaccttggccgttggcctgaccatctttgtgctgtctgtcgtcac

SEQ ID NO: 637550 - DNA, 100 bp, Homo sapiens
acaaggtgacgcagaagcgggcctcccgcctccagcaggacaatattcgcacccggctgaagaattggcagagggggtcgatttgggaggaaaggtgtgg

SEQ ID NO: 637551 - DNA, 90 bp, Homo sapiens
gctgaagatggctactctggagttgaggaacggggaggtaacaactccttcacccatgaggcactcacactcaagtataaactggacaac

SEQ ID NO: 637552 - DNA, 87 bp, Homo sapiens
aagttcgaaaagttcctccaggtttgccatcttcagaaacaggaagagcgagtacagcaagtacgcaagaaattggaagaagcactg

SEQ ID NO: 637553 - DNA, 96 bp, Homo sapiens
cgccgcccgaggccgtcggccgccgtcagcgagggcgccgagcaacttcggtattgttctctccaagccagaactgatcacctgtctggagcaagg

SEQ ID NO: 637554 - DNA, 75 bp, Homo sapiens
catgtggcagtggaaaatgcgctcgggctggaccagcagtgctgagcttgcaagacctctgctgccgggcggtcg

SEQ ID NO: 637555 - DNA, 89 bp, Homo sapiens
cttcaatgttgggaattcaaagtgcgatggaatgaatgaagctgccagtaactcagattctagccatgaaggtcaagaggaatcttcaa

SEQ ID NO: 637556 - DNA, 90 bp, Homo sapiens
agagaccccgcggctgggcgttcatctaccacgctttcgttactatactggcaattgctggagaagattttgcaattgttgcttctgata

SEQ ID NO: 637557 - DNA, 82 bp, Homo sapiens
ttggactgagtcctgcaggacacagattcactttataggaacagcttcagcttcagtgatgaaaaactgaattctccaacag

SEQ ID NO: 637558 - DNA, 75 bp, Homo sapiens
tattaccagaccaactacctggtggtggctgccatgatgatttccattgtgggtgtcttctacaaatgcttctgg

SEQ ID NO: 637559 - DNA, 75 bp, Homo sapiens
tggtagcttcaaacagctcacagttaaggtatgagaaagtgccagtcatcttggttgggaacaaagtggacctgg

SEQ ID NO: 637560 - DNA, 100 bp, Homo sapiens
cgactccagcatcatgattacctcccagcgccatcatgaccgggtcctataacaacttcttcaggatgtttgatagagacacgcggagggatgtgaccct

SEQ ID NO: 637561 - DNA, 73 bp, Homo sapiens
atctctcgggagccgcaaggcgagagctgcaaagaaatgcactcggtgatggaaagagagccactattctgaa

SEQ ID NO: 637562 - DNA, 82 bp, Homo sapiens
catatacaaaggcatggaagtatgaaaatggtggacaagagcaaggaccaagtgtggaaggtcttaatgtaccaacaaaggc

SEQ ID NO: 637563 - DNA, 98 bp, Homo sapiens
tgggacagtgaggaagtccggcagacttgtggctacacttctggccagtttgacctggaagcctaaagaaactgttccaactcttgctccaaaaactc

SEQ ID NO: 637564 - DNA, 73 bp, Homo sapiens
atggatccatttctcctattgaggagtcaacgtttttggattcaaagcataaaaaccattacaagatatacaa

SEQ ID NO: 637565 - DNA, 75 bp, Homo sapiens
gccatcgttgctgccttcttcgtcaagggttttggccaaattgggcgagggcacaaaataaccacttaccccttc

SEQ ID NO: 637566 - DNA, 115 bp, Homo sapiens
ggatagcttcagaaatcagaaaaacatttgggaggtgtctagcccagtggaccttctgaagattgggctaatggatactacagacaacagagaaaacttgttgaagagattggct

SEQ ID NO: 637567 - DNA, 74 bp, Homo sapiens
ggatggcgactgcagccagcccgatgcctgtgaggagccaccaacatttgaagctatggagctcattggtaaac

SEQ ID NO: 637568 - DNA, 51 bp, Homo sapiens
gtttgcaaagcacctgaactggactcagaattcatgattgaagaaatgcag

SEQ ID NO: 637569 - DNA, 56 bp, Homo sapiens
ctaacctccaagagactgaagctggtaattcaaagaacagtctgaacttgatcaag

SEQ ID NO: 637570 - DNA, 98 bp, Homo sapiens
tattctcagcaatcagactgtcgacattccagaaaatgggctgcacaaagatgttcagggataactcggccatgagaaaacatctgcacacccacggt

SEQ ID NO: 637571 - DNA, 90 bp, Homo sapiens
caagccaatcccaggaggaaaaacgagagacaagagagacacctccaacttcgacaaagagttcaccagacagcctgtggaactgacccc

SEQ ID NO: 637572 - DNA, 51 bp, Homo sapiens
cccatggtactgcccatctgcagactccttaccaagtccacacgactgacg

SEQ ID NO: 637573 - DNA, 101 bp, Homo sapiens
actagccactttgcattgactggaaacaatggcatttacagaaagagtcaacagcagtggcaacagcatgaacaggctgaacactttgccacgaggcttcg

SEQ ID NO: 637574 - DNA, 80 bp, Homo sapiens
gatcaagaccggcgtggtgaagcggaccgggactttgtagccaagcagaaggaggacctggagctggccatgaagaggct

SEQ ID NO: 637575 - DNA, 75 bp, Homo sapiens
aactggcactgattcaaattcaacagaatcctctgaaacttccacaggatgccaaagaagagtgaatggcccaca

SEQ ID NO: 637576 - DNA, 90 bp, Homo sapiens
ccacgatggcctagcacgtggaattcgcgaagctgccaaagccttagacaagattccagacagcattggaaaagacatagaaaaggcttg

SEQ ID NO: 637577 - DNA, 82 bp, Homo sapiens
catacattactgcagtaacactccaccatatagacccggctttaccttatatcagggtattgcaggcaacaaggacctttca

SEQ ID NO: 637578 - DNA, 95 bp, Homo sapiens
tcatatcacagtatcagttaaggagcttgatttgtttttggcatactacgtgcaggagcaaggctcatgcacaattagttcgagaagttgatgtg

SEQ ID NO: 637579 - DNA, 96 bp, Homo sapiens
aaggaaagagtgggaaagtgagggtaagaattgtgacaaaggccagtcttttttcattgacgccccagattccccagccacgttagcctacagaag

SEQ ID NO: 637580 - DNA, 117 bp, Homo sapiens
cgcgaagctggccaaagcctgcccagacggctcacctgtgcgggatggaacaaaagatgaggtttatataactttccaagacaaggaagttgtgcaaagcctcacagctactaagag

SEQ ID NO: 637581 - DNA, 74 bp, Homo sapiens
cacagacttttctcctgatgttggagtccttaaatgcactggaagaccaagatttagatgctctcatggcagat

SEQ ID NO: 637582 - DNA, 98 bp, Homo sapiens
gaatttgataggcatagtggaagtgatagatcgagagaagtggatgggccctatacctccagccgtgaatgccagactttaagattgcccggaggaag

SEQ ID NO: 637583 - DNA, 100 bp, Homo sapiens
gctgtactccagacacaacccggccatcgaggccctgctgcacgacctcagctcccagaggatcaccagcgtgggccctgggaggagcggggacactgag

SEQ ID NO: 637584 - DNA, 100 bp, Homo sapiens
ccgccccggtgcagatgaacctgtacgccacctgggaggtggaccggagctcgtccagctgcgtgcctagtgaaaaatgtgaggttttacaatattctgc

SEQ ID NO: 637585 - DNA, 83 bp, Homo sapiens
ctggtgctgctcgcctacttcctgccggcgcaggaccatggtgaatccgggcagcagctcgcagccgcccccggtgacggccg

SEQ ID NO: 637586 - DNA, 75 bp, Homo sapiens
ctcccaagaagctgggattacaggtttttcaagtacgaaaagtaacaggagcaaatactgggaaaatatttgcca

SEQ ID NO: 637587 - DNA, 100 bp, Homo sapiens
cctcgctcgacgtgttgcagcacatcctcatccgagcctttgatttgagtgggacagaagttgttatttatgttgttgagcgttcgccaaatggtacttc

SEQ ID NO: 637588 - DNA, 82 bp, Homo sapiens
gtgcagccgagtcactactgcctgcctgcctgcctgctacgactcggagccgtgggtcccgactgaacatcatcatcatcgc

SEQ ID NO: 637589 - DNA, 88 bp, Homo sapiens
aagcgtggcggcaagatcatcgtgggcgacgccacagagaaagggattggggtgaccctgttcattgccctgtatgactatgaggctc

SEQ ID NO: 637590 - DNA, 73 bp, Homo sapiens
agtccttcaactacgctgtgcacgagggtctcggcctcgcggtgcaggtggcagaactggtgaagccattgta

SEQ ID NO: 637591 - DNA, 104 bp, Homo sapiens
cttagagaccgagtcccggcggcgacggcggggcagcgcaccggcaggcgggaaaaacatccaggcaagtggacagcatttgcaacagcccagcaataagaagg

SEQ ID NO: 637592 - DNA, 75 bp, Homo sapiens
gaccgctgtgtggaggtagccgcagcgccagcaccaggtcagaagaggccaagtgatggaaatagtggattaatg

SEQ ID NO: 637593 - DNA, 90 bp, Homo sapiens
aaaagatgctgtaaatgatgatgattttgagccatacttaagtagccagacaaatcagtttgacggtgagaacatgtatatgagcatgac

SEQ ID NO: 637594 - DNA, 74 bp, Homo sapiens
gaaacctgttttttttctggagctgatcttagaaacctctgcacagaagttcgagactataagaggcttacccc

SEQ ID NO: 637595 - DNA, 118 bp, Homo sapiens
gaagaccccgaaggaaaaggaggaattcgccgtgcccgagaatagctccgtccagcagacaatgcagatcttcgtgaagactctgactggtaagaccatcaccctcgaggttgagccc

SEQ ID NO: 637596 - DNA, 75 bp, Homo sapiens
cggcgttggaggccaccgtttccagatctgactgcagccatgagcagcaatgagtgcttcaagtgtggacgatct

SEQ ID NO: 637597 - DNA, 75 bp, Homo sapiens
tgtcactcacttacacagtattgggaaatctgtgaaagaaattgcaggtgctgcagtgtctgaaatttccgggcc

SEQ ID NO: 637598 - DNA, 101 bp, Homo sapiens
tgcgtcaccgccgcccccccagacaagatggacaccgcggaggaagttggggaatggcggtcaatgtgtattctacctcgataacccaagagactatgagc

SEQ ID NO: 637599 - DNA, 83 bp, Homo sapiens
gtgaccgagaccgtgaccgagagcgtgaccgagagcgcgaatatcgtcatcgttagaaggacagagcgggatgccaccagctt

SEQ ID NO: 637600 - DNA, 100 bp, Homo sapiens
agcctagaatgcatcagtgcccttgtggcgaatggggctcacgtcgagggcggagaggcctcggctctgtgtttgtttgggcatctggaaatggtggaag

SEQ ID NO: 637601 - DNA, 96 bp, Homo sapiens
gagcctcagtgactgccaccctggaggacagggcacaacaaccgtttctgcagcctcgtcttacagcgtgactgcaaagaaaaagacttttgtttt

SEQ ID NO: 637602 - DNA, 96 bp, Homo sapiens
agatttctatgcaggaccccaaaatgcagtttacagacaaggatcagcagccctctggaagtgagggagaggatgatgatgcggaggctgccttga

SEQ ID NO: 637603 - DNA, 96 bp, Homo sapiens
tctcctcgcgctgcaaggatgctcctgggatttcggagaggccgcaggagtcatttcgtctacaggtccaactgctgccactggcagtaatcgaag

SEQ ID NO: 637604 - DNA, 80 bp, Homo sapiens
attagaaaggagctgcttcccaataaggaaacagctagcttgtcactttctgcaaaggtttccctcagggagcctcctgc

SEQ ID NO: 637605 - DNA, 135 bp, Homo sapiens
cccacactggcggccacggagcagagtccctcacccccaccagctgtagctgaacgtctggatggtggagaagagcagcaaaagtactttgactcaggagactacaacatggccaaagccaagatgaagaataag

SEQ ID NO: 637606 - DNA, 50 bp, Homo sapiens
tatacaaaacatccttctaaaccaggagttattcctgatgaagctaaagc

SEQ ID NO: 637607 - DNA, 52 bp, Homo sapiens
gggggtgtgcaaacccgagagaactgggtcatgactgtccaaagtatgataa

SEQ ID NO: 637608 - DNA, 90 bp, Homo sapiens
caaccagagcttgtgtagcgtcagatccttgagtgataaaggagtagaggttcatgcatgggagatctcagaccagttgttacagatccg

SEQ ID NO: 637609 - DNA, 82 bp, Homo sapiens
ctcaacgtgcgggagactcattcgcttttcttccggagcctgaagggaactgtggctgcaccatctgtcttcatcttcccgc

SEQ ID NO: 637610 - DNA, 75 bp, Homo sapiens
caggaacagggcagacgttagcgtgagtgatcactctcaatcccggcattgtcccagatatagccgttggtacaa

SEQ ID NO: 637611 - DNA, 100 bp, Homo sapiens
gcgaggcgggcagccggggcgtccaggctggcagtgatggtgaaagcataggaaactgccccttttcccagaggctcttcatgattctttggctcaaagg

SEQ ID NO: 637612 - DNA, 100 bp, Homo sapiens
ggacgagagcttccactgccagcacccgccgtgccgcatgagcatcgcggagcttgacccgtccatcgctgtgccgaggcctgcctggagccccagatca

SEQ ID NO: 637613 - DNA, 75 bp, Homo sapiens
aagcaggcgaacccgcggcgcaataacggtcacaccgacaaatctgaagcgggtttgccaggggagtgtacccgt

SEQ ID NO: 637614 - DNA, 100 bp, Homo sapiens
taagggatggcacgctgtgcttgagaccaacctgacgggtaccttctacatgtgcaaagcagaatcctacaagggacactttggtcctattcactgtgtg

SEQ ID NO: 637615 - DNA, 75 bp, Homo sapiens
ttgtacctgatactgttgacatgactaaggccttgtacctaatagcaactaatggaaccccagaacttcagaatc

SEQ ID NO: 637616 - DNA, 96 bp, Homo sapiens
gcggcgttggaggccaccgtttccagtgaccaaagacttgaccactcaaagtccagctccccagaacactgctcgacatggacaccggtgtgattg

SEQ ID NO: 637617 - DNA, 99 bp, Homo sapiens
cgcgaggagccatgaggcgccagcctgcgaaggtggcggcgctgctgctcgggctgctcttggaggtggattcaccaatgaacttgaagcatcctcatg

SEQ ID NO: 637618 - DNA, 75 bp, Homo sapiens
cactgtccggatcttccctccctgtacccggcagtgtcacctgctcctggatgtcttcaactccaccgagcatga

SEQ ID NO: 637619 - DNA, 95 bp, Homo sapiens
gggcgggaagagccggggccgtggctgacatggagcaggggttcggtccgagcccggtgggaggctcccggagcgcagcctgggcccagcccacc

SEQ ID NO: 637620 - DNA, 83 bp, Homo sapiens
aagcgcatgatccgcatggccaagccctcccaggcccaatacttcaaagcatcctacctctgctcaatatatattacttggag

SEQ ID NO: 637621 - DNA, 82 bp, Homo sapiens
ggaaatgccctttaaaataaaccagataaatggcagagatctgaccttctggcaagagcttgtatccaaatgtttaactgaa

SEQ ID NO: 637622 - DNA, 98 bp, Homo sapiens
gcaatatggcggaggcggaaggggaaagcctggagtcctggctcagcctgtaggagctgtccaggccatctccaaccatgggagtgaggcacccgccc

SEQ ID NO: 637623 - DNA, 73 bp, Homo sapiens
aaatatagttctgcaccaaatgcagttgccttcacaagaagattcaatcataacattcagaagattctcggcc

SEQ ID NO: 637624 - DNA, 75 bp, Homo sapiens
gtttttaccctcaacagcaaaccggggtctccctcccaggacacaggagtcaagtagagacggagtttcaccgtg

SEQ ID NO: 637625 - DNA, 100 bp, Homo sapiens
ctgatggagacagagactgtgtcctgcagaagtccagggacctcaaattcctcacaggctttgaaaccaaggtacactgaggaggggacggctccgtctt

SEQ ID NO: 637626 - DNA, 121 bp, Homo sapiens
gcagacacaagagcaagcccgcacgtgtgaaggcatccactggttcaaaccttgtactactcagctgatcacaagctgcttgatgggaacctactagatggacaggctgaggtgtttggca

SEQ ID NO: 637627 - DNA, 100 bp, Homo sapiens
agtgagccggacgaagtggacaagttcaaggccaagttcctgacagcctggaacaacgtcaagtacggttaatttggagtggcccctggagtcagtttcc

SEQ ID NO: 637628 - DNA, 100 bp, Homo sapiens
cccggcccgagcagtctggctgcggcggcagagctgaagtgagcggagccaccaggatgcagcaccgaggcttcctcctcctcaccctcctcgccctgct

SEQ ID NO: 637629 - DNA, 75 bp, Homo sapiens
aaaaactcaggcttcgccacctgcgtgcaaagtttacccaaggtccagcctagcccctaggcaccatgtcggaca

SEQ ID NO: 637630 - DNA, 74 bp, Homo sapiens
acaattgcatgcacttacagagatcaatgtccgagttaccaccatggatgcagagctggagtttgcaatccagc

SEQ ID NO: 637631 - DNA, 75 bp, Homo sapiens
tatatactttggttacctatgtacctgttaccactttcaaaagtactatggatatagaggagagaaatcgccaaa

SEQ ID NO: 637632 - DNA, 100 bp, Homo sapiens
ctcctgggcacgcccccgcccgggctgccctcgggaccgccagcggccaccgcgcagatcccgactgggcctcctacactctgggcgtcttcatctgcct

SEQ ID NO: 637633 - DNA, 75 bp, Homo sapiens
caagaatgttactaacaatctgaaatctctggaggctgcatctgaaaaggatttcaaatatgcgtgcattagaga

SEQ ID NO: 637634 - DNA, 51 bp, Homo sapiens
gctgaacagctttccaaagagcaaaaaggttatttgttatcaaagcgtgaa

SEQ ID NO: 637635 - DNA, 74 bp, Homo sapiens
tctagacgacaaaatgcaaaaaaggaggccaaagactttgtggagtccaacttgcctggaccagcttaatggtt

SEQ ID NO: 637636 - DNA, 90 bp, Homo sapiens
tcatcctcagctagccactgctcagtagaataaacatcatcctgaccttcatctctgggcttgttccgggaagcgaaaagaccaagatca

SEQ ID NO: 637637 - DNA, 90 bp, Homo sapiens
gaaggagactggatgatagaattgtagctgcaatcaacccaaatcaccctcttgctcagatgcctttgcctccgtcgatgaaaaactgca

SEQ ID NO: 637638 - DNA, 82 bp, Homo sapiens
ctcgacgccagaggatggattacccagtgcaccacactgtaactcgaggcatcaccaaaggcgtgaaggaggactttcgcct

SEQ ID NO: 637639 - DNA, 96 bp, Homo sapiens
tgagagcattcgaagtgacctcagcagggcatccaggggctgcaggaagaggggctggacttgggggcacagatggaggctgcaaggcctctggtc

SEQ ID NO: 637640 - DNA, 88 bp, Homo sapiens
cttggggatggagtgcctccaaaggttgctgaggtgccaggaccattgacaccagaaatggaggcacggcaggctacacggaaaaggg

SEQ ID NO: 637641 - DNA, 101 bp, Homo sapiens
ttatagatcttctgcactgtttacaggcacaggttctgtatgttcctgatcctgaatatgtctccagtgttgagagctctccatctctaagccccgtaagt

SEQ ID NO: 637642 - DNA, 78 bp, Homo sapiens
gagtatgcttcgtttttcgccgtcatgggcgcctcggccgccatggtcttcagcggtacgaggaacagcaaattcagg

SEQ ID NO: 637643 - DNA, 101 bp, Homo sapiens
gatgtctgatctccgaataactgaggcgtttctgtacatggattatctgtttgcctgagaatacagatcaacccacagaacaaagcggatttccaaggcat

SEQ ID NO: 637644 - DNA, 100 bp, Homo sapiens
ggacgtaccaggaggatggtgcccagagttcaaggaggccttctccctctttgacaaggatggagatggcactatcaccaccaaggagttggggacagtg

SEQ ID NO: 637645 - DNA, 73 bp, Homo sapiens
gtaggagaggatccggcgccgaatcactgactggcacaggtgttggggtttgatgaacttgtgaaaaaattca

SEQ ID NO: 637646 - DNA, 100 bp, Homo sapiens
cttggggcccgcacggaccctctacttcaacaatacaatggtgggtgaagagaagatgtctctaagaaaccggctgtcaaagtccagggaaaatcctgag

SEQ ID NO: 637647 - DNA, 100 bp, Homo sapiens
gtgagtgggacggatgttaggattcgaaatggtctcctgaactgtaatgattgctacatgcgatccagaaatattgatgatgttaagaagttcaaaccgg

SEQ ID NO: 637648 - DNA, 80 bp, Homo sapiens
cttgaagaaaagggtgaaggaggcgaattttcagttgataggattaaactgcaaatatctcatgaagctgctgcctgtat

SEQ ID NO: 637649 - DNA, 101 bp, Homo sapiens
ggcctggatgactatggagcgcggtccatgagcagaccaagatcactccatggatgaaatgacagctgtggtgaaaattgaaaaaggagttggtggcaata

SEQ ID NO: 637650 - DNA, 75 bp, Homo sapiens
aaccgcttcgtgcaactctccgggcggccgcacctgccagttatgcagaaggggttaaaagataactttgctgat

SEQ ID NO: 637651 - DNA, 97 bp, Homo sapiens
gaaggaggccgagccgggatctcaggtcctcgggggcggcggccacgccaaggacgggtatggcagcagccaaacttctgcatgactctggactgaa

SEQ ID NO: 637652 - DNA, 50 bp, Homo sapiens
tgcagcttctctagctggccttgctgttgtgtgatgccattagtgtattg

SEQ ID NO: 637653 - DNA, 96 bp, Homo sapiens
cctgactctgtgtgtttttaccaaccatacagagttttccgtctgatgaaggttggccatttgcaaagtatcttggagcttgtggaagaatggtgg

SEQ ID NO: 637654 - DNA, 90 bp, Homo sapiens
gtttgggtcaactctccaatgtccacaggacagaagccattgagagagcaagagaaaatgtgatggaggatatttgtagtaaactgcaag

SEQ ID NO: 637655 - DNA, 101 bp, Homo sapiens
ggtgacttcacttttgagtgcaactgccttccaggcattgacatgtagagaagaactcctgactcttcttctgtctctccttccactggtatggaagatac

SEQ ID NO: 637656 - DNA, 98 bp, Homo sapiens
ttccgccgggactgcctggccgacgtggacaccaaggaggatggcagactgtcagtatcatacataacagaggaatgcctgaagaagctggacacaaa

SEQ ID NO: 637657 - DNA, 96 bp, Homo sapiens
gccatagttcacaatgttgattctgatgacctcattagcatgggatccaacgacacttcagaggatgattccgaagaagacggagaccataacagg

SEQ ID NO: 637658 - DNA, 98 bp, Homo sapiens
ctccccacactgcaccatgagctcagttggctgcaggagcagctagcacaggatccatgttctcacaagctatgaagaaatgggtgcaaggaaatact

SEQ ID NO: 637659 - DNA, 75 bp, Homo sapiens
gaggagccagaaacagatctcagccccgggctcccagctgcccacctcataggtcatcatcagatttgaaatatt

SEQ ID NO: 637660 - DNA, 101 bp, Homo sapiens
tcgggatttacgtggagatcaagcgcagcgatgactgtgccctgtccacggtgcctcctgcatgtcctgctgccctgagctgtcccgagctaggtgacagc

SEQ ID NO: 637661 - DNA, 82 bp, Homo sapiens
cagaggaagcgggagctggcagatgtcctggatgcccaggccctggccaacgtcaacattgggagcctcatctgcaatgtag

SEQ ID NO: 637662 - DNA, 50 bp, Homo sapiens
gaggcaagctactcctttgaaaaaggtccatccagaaccacccactgcat

SEQ ID NO: 637663 - DNA, 83 bp, Homo sapiens
ggtgcccgtggaccacaggccctcgttgcccagatatgtcatgtggcctgtgttttggaccgtggttcgtacctatgctcctt

SEQ ID NO: 637664 - DNA, 90 bp, Homo sapiens
cctctcgctgcttcaggaggacctgcaggaggacgcagacggatggaagacatgtaaggaatttgcataagacagttatgcaaaatggag

SEQ ID NO: 637665 - DNA, 50 bp, Homo sapiens
ccatttggcctgaagcctcgatcagaattcaattcgtcataatctgtccc

SEQ ID NO: 637666 - DNA, 118 bp, Homo sapiens
taatctcagcctctccgtatgcaggagctggtttccctcccacctttgccattcctcaagctgcaggctccagcccccttttggacatcgttggcggccggaaggcgaggccccgcca

SEQ ID NO: 637667 - DNA, 100 bp, Homo sapiens
tgggcggggaggaggacgcggtggaatgggggaagagcctaggttccaggtgccttttcagttgctgacttctcttatggacatagattcactgatgacc

SEQ ID NO: 637668 - DNA, 100 bp, Homo sapiens
tcagaccagctcctctatcagcatttttggtgtctcccagtgatcaaaaagagagtggttgtgattggcaaacgcactgcctacttacagcatagagacc

SEQ ID NO: 637669 - DNA, 100 bp, Homo sapiens
ctgaagttccctcacattagccagtgtgaagacctccgaaggaccatagatgagggttactaccagggtggaaaatttcagtttgaaactgaagttcccg

SEQ ID NO: 637670 - DNA, 90 bp, Homo sapiens
cgttcccctgtcttccccaacgccccggagccgccggccgctagcgtcagcgccagccagcgtcagcctcgagtttgaccagcagcaggg

SEQ ID NO: 637671 - DNA, 100 bp, Homo sapiens
gccgtcatctgcctcttcctcaacactttcgtgccgggactggatgccacttcaaatgaacaacaagagcttttctgtcagaagttgcagcagtgttgta

SEQ ID NO: 637672 - DNA, 83 bp, Homo sapiens
tgatattgaagaggaagaactgaccagagctgatcccgagcagcgtcatgtacccctacaatgcagatcttcgtgaagactct

SEQ ID NO: 637673 - DNA, 83 bp, Homo sapiens
acaggccccaccgaaaaaccttaaagggctgagagcttgagggcagcttcctgcctgacacagctcacttcaagaagtgcaca

SEQ ID NO: 637674 - DNA, 50 bp, Homo sapiens
atcttggcaacctggtagcaaatcatgtcaaccctgccatggacttcacg

SEQ ID NO: 637675 - DNA, 98 bp, Homo sapiens
aggtttaaaattttacataagaagttacctttttcagatcaaaggatcatggacagggaagaatcgcgtccagaatccctacagccatggcaatattg

SEQ ID NO: 637676 - DNA, 80 bp, Homo sapiens
cttatgcttataagagtggaacaggatcatccagcagctcgtcaacggcatcatcacgcccgccaccatccccagcctgg

SEQ ID NO: 637677 - DNA, 80 bp, Homo sapiens
gagcggtgtcctcttaagaaaatgcacttttctgtagaaggtcagttggaattcagggcattgctatttattcctcgtcg

SEQ ID NO: 637678 - DNA, 100 bp, Homo sapiens
atattgcttactatgagtctatatatcctggggaatttaagatgccaaagcagctcattcacatacagcgtcaagtaacctggtttggttatgaaagtcc

SEQ ID NO: 637679 - DNA, 75 bp, Homo sapiens
caccagtgaagccgtgacatcctgggatattctttgttgagagtggatcaatcttcctgtcctacaactgacaaa

SEQ ID NO: 637680 - DNA, 73 bp, Homo sapiens
aatgttcccagaacattgcacgatgcctcctgggacagcaatcagacctattgctttgagagctgtgacctcc

SEQ ID NO: 637681 - DNA, 75 bp, Homo sapiens
gtcctgaatgtggcttggttgtagaccgatttgggatgttgcccctggatgagcctgctattcttgttagtgaat

SEQ ID NO: 637682 - DNA, 75 bp, Homo sapiens
agagaatattgttcagttgattatgccagccagatgcaggtacaagaatattccacagatgtcctttgatgatac

SEQ ID NO: 637683 - DNA, 75 bp, Homo sapiens
ctcctctgtgagcagcaggcccagtcggacaggactagtggtccagctgctcacctgtgacctgctactgtcgct

SEQ ID NO: 637684 - DNA, 100 bp, Homo sapiens
atttaaccgctctctgcctcccagaacattctagtatgccagtagaaaaaaatatcactttagaaaggccttctaatgtaaatctcacatgccagttcac

SEQ ID NO: 637685 - DNA, 90 bp, Homo sapiens
ccccaccatcaacatggagaacaagaccacgtggttaagtgggcagaccaacatccacctcagcaaaaacttcttcctgacgaatcgcgc

SEQ ID NO: 637686 - DNA, 115 bp, Homo sapiens
gctacgtcttccagatggagatgattgttcgggcaagacagttgaattatactattggcgagaaactatgttccaacttcctgtcaacaatcttggcagtttaagaaaagcccgg

SEQ ID NO: 637687 - DNA, 90 bp, Homo sapiens
atttccggagtcagtcattttactgtcaagacatttcttcggcattctgcaacaggtccagcccagaatcaaatgcaggttccatctgga

SEQ ID NO: 637688 - DNA, 83 bp, Homo sapiens
ataaaagcagcaaatctacttttgggttacaaaaatccagaccagattcatgatgttgctatcaaaagttgagaaattgtcag

SEQ ID NO: 637689 - DNA, 55 bp, Homo sapiens
aaccctaaagtggagaatgaggatgagcctcaacccggagggcagcgagggccta

SEQ ID NO: 637690 - DNA, 99 bp, Homo sapiens
gacaccaagtctgtgtcagaaggccacctcaagaggaacatcgtggtgaagaccgtggagatgcgggatggagaggcgcgggcctggcccagaggcgac

SEQ ID NO: 637691 - DNA, 75 bp, Homo sapiens
tgcaccgggacaagacacccctgcaccagaaacatgctgcggactggttcttgaagggaaacctcctcatcatca

SEQ ID NO: 637692 - DNA, 100 bp, Homo sapiens
aaagaagaaaagaaagatgcagaggaagaggaaagcgaactgtataaatcaaagccattctgtgaaaaactgctttcctgggtgaaaagcagtggctgtg

SEQ ID NO: 637693 - DNA, 100 bp, Homo sapiens
gaaaaaaccaacaccttcctgtgcagtcctgttggaatttgacccggtcagcccaaggagcaggggtccagcagctctgcggaggcatctggaacagagg

SEQ ID NO: 637694 - DNA, 83 bp, Homo sapiens
ctggatttttttcgggtagtggaaaaccagtgcagagcagagcgggcggaggaccccgggcgcgggcgcggacggcacgcggg

SEQ ID NO: 637695 - DNA, 74 bp, Homo sapiens
acgtcgtgatccagaagtccagagctgaggactgcctgtttgcagggtgataaaagaaaatgtggctgaagtta

SEQ ID NO: 637696 - DNA, 75 bp, Homo sapiens
ctcctacgtttacctgtccatgtggagcccacagtgaccatctccccatccaggacagaggccctcaaccaccac

SEQ ID NO: 637697 - DNA, 74 bp, Homo sapiens
ggaggagcggccaaagcagtacagctgggatcagcgcgagaagatggtgttatctgaaaaggttagtcagctga

SEQ ID NO: 637698 - DNA, 75 bp, Homo sapiens
tggctcaaagaaagatgattataaagtggatctcttcagcctgggaattatcttctttgagatgtcctatcaccc

SEQ ID NO: 637699 - DNA, 90 bp, Homo sapiens
gaagaagtcagaaatctacagttactcacacaagtccaatatcagatggaaatgatgcggagccttcgccatgtaaacattgatcatctt

SEQ ID NO: 637700 - DNA, 74 bp, Homo sapiens
cagcgcagccgggagacagatgcgaggcggcggtcagcacccaccaaggctccggatgtgttccccatcatatc

SEQ ID NO: 637701 - DNA, 100 bp, Homo sapiens
cgacacggtgccgctgacagcagccatcgaggcgagccagagcctgcagtcccacacggttgtcttttggaaatgcaggtttaaggacaaattatctgct

SEQ ID NO: 637702 - DNA, 97 bp, Homo sapiens
agcagcatggccgcgatctatgggggtgtagaggggtggcacctctgagcatgagaagctgtgccgggcccgggaccagtgccgggagattctcaag

SEQ ID NO: 637703 - DNA, 100 bp, Homo sapiens
gcgacgtgcggctcgcagaacggcgagtagcggagcgggacccgctatggggcattctcttctcccaccctcgggactttaccccagtgtgcaccacaga

SEQ ID NO: 637704 - DNA, 90 bp, Homo sapiens
cgaagatgggggatttctacgacccggagcacccgacccctgagaatactcccccagttgcaagaggcgcaggaccgtggaagacttcaa

SEQ ID NO: 637705 - DNA, 101 bp, Homo sapiens
ggaaacttcttggaggttttcaggaaacttgcagcaaagccattcgggttggagtaattgattccatcacccagcacaaggtctgtgcccctgaaaactac

SEQ ID NO: 637706 - DNA, 50 bp, Homo sapiens
acctgagggactggctcctggggtttggtgcacctcgatttggaggaagt

SEQ ID NO: 637707 - DNA, 83 bp, Homo sapiens
gtcggcggctcagttgtccatgaccctgaaggtccaggagtacccgaccctcaagaaaaagatggaggagctcttattactgg

SEQ ID NO: 637708 - DNA, 101 bp, Homo sapiens
tccattggaacagcaccctgactatgcggaatacatcttccatccaatggacctttgtacattggaaaaggcctgatcttttggccagaaggagattaaaa

SEQ ID NO: 637709 - DNA, 100 bp, Homo sapiens
cagagcaaatagcatccaaggttcaattgggttgacagactaatggagttgcattttaaatatctgggtgcaatgcaggtggcggacaagaagattgaag

SEQ ID NO: 637710 - DNA, 50 bp, Homo sapiens
ccagaacgtgccatggagacgcttaacggggcgacctatctactgctctt

SEQ ID NO: 637711 - DNA, 100 bp, Homo sapiens
gaagaagcagctgaagacggaggcagctccacactgtgaactaaagcagcccgacggccatggaggctgaagagacgatggaatgccttcaggagttccc

SEQ ID NO: 637712 - DNA, 87 bp, Homo sapiens
gcctcctgagtagctgagactacagaattatatccagatcgagagacagaagattctgaaagggttcaatgaaatgagagtcatctt

SEQ ID NO: 637713 - DNA, 100 bp, Homo sapiens
aaatggtagaatatatcacccataatcggaatgtgatcacagagcctatttacccagaagtagtccatatggttgggaatccacgtgttgaacttaccct

SEQ ID NO: 637714 - DNA, 129 bp, Homo sapiens
tcccgatcccgctgtgtgtctcgggcgttcagccgctcgctctccgccttccagaaggacctgggatccagttggaggacggcggtgatggcagggaggatgccccgttgagaatggagtggtaccgag

SEQ ID NO: 637715 - DNA, 90 bp, Homo sapiens
gaatcacgaccgtgcctctgcccactgcgcccaacatacccattatcgattatgaggcagccacctctcaacaacccatgaagtgtctgg

SEQ ID NO: 637716 - DNA, 82 bp, Homo sapiens
tgtcaccggccttacatgcattgctgttgtggggattgaagatcctgtgagacctgaggagaccttaatggacagaatcaag

SEQ ID NO: 637717 - DNA, 98 bp, Homo sapiens
cgagcgcgccccaagcccgggcgccaccgctgccacctccgcgagaaacgggcctgaatttgaagctaggatccgacagaacgagatcaacaacccca

SEQ ID NO: 637718 - DNA, 83 bp, Homo sapiens
ggcgcggggcgccgccgctgcagctgccgcgcgtgctgccggtgtgacattggcggtgcactgggccagagctgtgaaccgag

SEQ ID NO: 637719 - DNA, 89 bp, Homo sapiens
caaagccatcaaccagggcaactatgggaaactggaggcgaccagtgcccagaatatcgagttcctacaggtgattgccaagagggagg

SEQ ID NO: 637720 - DNA, 74 bp, Homo sapiens
acaaggagaagcactggatccaaagcatgtctgcaacccagccattttcaggggaaagtgcagtgttgcccttc

SEQ ID NO: 637721 - DNA, 82 bp, Homo sapiens
taatgtttcatatgcagcgacaaagaaaacttcctgaagaacatgccaggtcagataccaggcccaggttccatgatgcccg

SEQ ID NO: 637722 - DNA, 75 bp, Homo sapiens
gcgcgtgaaggcctccaccccacctgatgccgggcccattgtcatccactgcagctatcagttgagggatttgca

SEQ ID NO: 637723 - DNA, 83 bp, Homo sapiens
gagcccaaagacccctggagacatgttccagggtctccctccactgctgtagtaacccgggtccggggcctcggtggtgctcc

SEQ ID NO: 637724 - DNA, 88 bp, Homo sapiens
agaaacaagttcttggcaagagaggcatcctccttgaagtatttggctgaggagttttcaatcccagaaccccaactgaggagacgtg

SEQ ID NO: 637725 - DNA, 75 bp, Homo sapiens
cgccctccatcagcaaaccgctagcaaagggagaagtctcgggtttgacaaagagctggagataagatgggtaga

SEQ ID NO: 637726 - DNA, 96 bp, Homo sapiens
gtgatccagctcaccaccaagacgcaggacctgaaggagaagaaggagaaggtggaggagaaggcaagccggaaagagcgaaagaaagaagtggtg

SEQ ID NO: 637727 - DNA, 90 bp, Homo sapiens
cttcgctccccaagccgcggagggccagcctcttcttcggcgccctccaggcctgttggaggtgcgcggcccccgccatcccgccccgcc

SEQ ID NO: 637728 - DNA, 82 bp, Homo sapiens
aggcgttatgctgttgcccggttgcgacaggccgatgatgagagtgaaatggtaaaggagctggatggtcatgtgctcaaat

SEQ ID NO: 637729 - DNA, 95 bp, Homo sapiens
ccgatgctacgtgcgggacaaggaagtcaactcccaggtctacagccggctcacagcacgaggtgctccagtgaaccacccagggaatgacgagg

SEQ ID NO: 637730 - DNA, 116 bp, Homo sapiens
tcagcgtcaacgagttcaaagagctggttacccagcagttgccccatctgctcaagcttgatatgcaacgaggtgttcatggacgattgatggataattcgactagtgtccgagaa

SEQ ID NO: 637731 - DNA, 100 bp, Homo sapiens
tggtgatggggcattcttgctaacaacaataactgaagtgaagtgatggactccgatttggagagtagtaagacgtgaaaggaatacacttgtgtttaag

SEQ ID NO: 637732 - DNA, 126 bp, Homo sapiens
caagcagcagctgccggagcccgagtggatcggggacggagagaacacgagcccatcagtcattgaaattatgagactatcattcaaatggaagcattatagttcttcggaaccattatgatctca

SEQ ID NO: 637733 - DNA, 76 bp, Homo sapiens
aaaggtgtacttgcaagaaacctcaggacttgagtaacagcaacatggtaagaagagttcctgggtcaagtggtca

SEQ ID NO: 637734 - DNA, 101 bp, Homo sapiens
cacacatcttcagacatgcggccaaggagctgttcaacgaggatgtggaggaggtcacttaccgagccctgagatgtcgaactctctcaggttcacccaga

SEQ ID NO: 637735 - DNA, 80 bp, Homo sapiens
tggaacaatcttttgttggattgaaacagctaatctttggaaattttagcattcaggtgccaggaatgcagatgggacag

SEQ ID NO: 637736 - DNA, 144 bp, Homo sapiens
atctgtccctccagctggccctgaggcatctgagtcaacaacggatgaaaatgaagacgacattcagtttgtcagtggttgaagctttgagagaagcagcaactgctgttgagcaagagaaagaaatccttctggaaatgatcc

SEQ ID NO: 637737 - DNA, 96 bp, Homo sapiens
tctcaggtcctcgggggcggcggccacgccaaggacggactggatttttccaactaccacatggagactttttcattgaacccgtgaagaagcatc

SEQ ID NO: 637738 - DNA, 98 bp, Homo sapiens
tgaaattcagatagctttagtgattgtctttgtgttgtctgcatttggaggagcaacaatgtgggactatacgcttaatcttctccatacagagctgg

SEQ ID NO: 637739 - DNA, 113 bp, Homo sapiens
acaaacagcccgcccgaccccgtcccgaccctggccgccccgagcggagcctggagggagtgcatccgccccaacccttttccccctcgtctcctgtgagaattccccgtcgg

SEQ ID NO: 637740 - DNA, 80 bp, Homo sapiens
ctttgtcttcactggaatccattctggcacctcaacggctgatgatttctggtcagtttacgttgcgagacatgtatgag

SEQ ID NO: 637741 - DNA, 76 bp, Homo sapiens
cggcaggcacacgttactcagcccctgcgaacctgtatgtgcgagcgattattggagccggaattggtggcacttc

SEQ ID NO: 637742 - DNA, 74 bp, Homo sapiens
gtggatcgctgtgatcgtcacttgtctttggtagatgagtggctggatagctacaagcaagaccaggatgcagg

SEQ ID NO: 637743 - DNA, 131 bp, Homo sapiens
caagtggccacctactccaaattccaacctcagagccctgacttcctggacatcaccaaccccaaagccgtagctgttgaaggatttattcgagacaaatatgagaagaagaaatacatggaccgaagtct

SEQ ID NO: 637744 - DNA, 99 bp, Homo sapiens
acagattaaggtgctggaggtgacggaggctacaaggatggcatagtggtgataattgacatcagtaagaaaggagaagttattcataggcttcgaggc

SEQ ID NO: 637745 - DNA, 100 bp, Homo sapiens
ctgagcacagcatcatcaaggacttcaccaagcagactggaatcagccattttaccaagaaagttgggtttcttttactggcaaatagtacttcaagagc

SEQ ID NO: 637746 - DNA, 75 bp, Homo sapiens
aacgggttgcttcccccgctgcgagtactatactggcaattgctggagaagattttgcaattgttgcttctgata

SEQ ID NO: 637747 - DNA, 82 bp, Homo sapiens
tgaacttagctcgacggggctgaccgctctggcccagggtggtgaggctccaggttgggctctatgctgtgtaccttctgga

SEQ ID NO: 637748 - DNA, 89 bp, Homo sapiens
ggttgagcggcggcgaacatgcgcttttgacacattggaggtcagtaacagatccaagagatggaaagagagtagcgctcaaaaagatg

SEQ ID NO: 637749 - DNA, 100 bp, Homo sapiens
ctcagaccgaccagcccaagaaacatctcaccaatttcaaatctgggagactgcattgcttattgatccaaaaaattcctgttcttcatcccgccagtgg

SEQ ID NO: 637750 - DNA, 75 bp, Homo sapiens
gacgcacttgtcttagcagttctcgctgaccgcgctagctgacatttgctgaccagacgtttggcatgttcagct

SEQ ID NO: 637751 - DNA, 121 bp, Homo sapiens
ttctaaagagtcttgttatttcttctttgagaaaaacctgaaagatgtctcattggtagctggcagtgttgtgatggcttttgaagaagtatgcccggacagaatagatctgattcataaa

SEQ ID NO: 637752 - DNA, 113 bp, Homo sapiens
tggcaaaggaggaaaaaccaaattcaccatagagaatgtgacacggacaaggatagttttggctgatgtgaagaatccccagcacaagatagaatatagacataatacgcttc

SEQ ID NO: 637753 - DNA, 98 bp, Homo sapiens
gacgacgacgaggaagaggaggtttctgagtggatggatgaaaaggcaagaggaaaaacaaagcagccgaaacacacccagacgcacacttctgccaa

SEQ ID NO: 637754 - DNA, 100 bp, Homo sapiens
aggccttccagctgtttgaccgaacagggcatgaccattcggcccctggtagacctgttggctgtgaagaaaaagcaagagacgaagcgctccatcaacg

SEQ ID NO: 637755 - DNA, 75 bp, Homo sapiens
aggttacttcatggcagctatcccacagacttctgcgctgacccaggggctggagcgaatcccagaccagctcgg

SEQ ID NO: 637756 - DNA, 100 bp, Homo sapiens
actaccgctgctggaccacaaaccgctgccagaaaaattttgtggaagtataatactttgtcattatgagatgtcgtctctcggtgcctcctttgtgcaa

SEQ ID NO: 637757 - DNA, 100 bp, Homo sapiens
gagagatcaccacactggccaacaaccagtgcatggctacagagagcgtggaccatgaagtttacccaaggtccagcctagcccctaggcaccatgtcgg

SEQ ID NO: 637758 - DNA, 74 bp, Homo sapiens
ttttgcctcccaccgtgattctgaggcctccccaaccatgtgcaattttgctgcagcaaacgagattgctaagg

SEQ ID NO: 637759 - DNA, 95 bp, Homo sapiens
acacgcgggtcggacggtccacatcagccggcagcccgggcgggtcccggggtgcgagcagcgcacttccgctggccaaatttcgcagtctcctg

SEQ ID NO: 637760 - DNA, 75 bp, Homo sapiens
gaagagcagagcggagggagccccagacacggcgtccgagctgggccacagcctgaacgagaacgtcctcaagcc

SEQ ID NO: 637761 - DNA, 100 bp, Homo sapiens
tccataaccgagtccgaaagggcagaatctatgggggtacctgaaagaattccgcacagagcagtgcccactctttgtgcaacacaaatgcacgcagcat

SEQ ID NO: 637762 - DNA, 90 bp, Homo sapiens
agaatattaaaaaatctggagggactccaacttcaatgtgcccttgctaccagttccgagccagccgagacctgccgtgggaccccagag

SEQ ID NO: 637763 - DNA, 113 bp, Homo sapiens
taatgacattgtggacagtgacagcgatgctgaggatcgaggaacgttgtctgattcttcgctgctgctgccttaccgccgagaaccaccacccgccaggcgtcttgcggcca

SEQ ID NO: 637764 - DNA, 100 bp, Homo sapiens
cacaaaacagattggcagaaaatgatgaaatttggaagaaagaaaagagaccgagtggatcatatcctggactggggttttaaggggtgtggcaggaggt

SEQ ID NO: 637765 - DNA, 74 bp, Homo sapiens
tccaaaatgagtcgcatcttcaacccccatctgggagacaggtgtggacatgagtggctgggatgcagtgccgt

SEQ ID NO: 637766 - DNA, 97 bp, Homo sapiens
cggacttggaaagtcacccaaagccgccccaagtgcagttacagaatgtctgaaggggacagtgtgggagaatccgtccatgggaaaccttcggtgg

SEQ ID NO: 637767 - DNA, 75 bp, Homo sapiens
caactgtgaagccagatgataagacaggggcaagtgtccgagtggtgaatcagctacttacagagatggatggtc

SEQ ID NO: 637768 - DNA, 50 bp, Homo sapiens
tgaagatagtgcctttcagccctaccaggcgcggtggctcatgcctgtaa

SEQ ID NO: 637769 - DNA, 100 bp, Homo sapiens
tgcgcagtacagcaacagtggatgttcaagattaagattagagtcaagttgtgtgattaagacaggaaggcgaccggcagcctcgggcaggggagacagg

SEQ ID NO: 637770 - DNA, 74 bp, Homo sapiens
atgaacaactcgggcgccgacgagatcggggccatgaagcccccaggaggagaatcgagcaatctttttggaag

SEQ ID NO: 637771 - DNA, 90 bp, Homo sapiens
agcagttctcgctgaccgcgctagctggaactggcatttgatccatatgaatcgtatgctcgagatattttgcgacctggttttcatgat

SEQ ID NO: 637772 - DNA, 78 bp, Homo sapiens
ctgaatcctgcccgcgtgaaccacatgcccagcacgggtgtggaccactacaacgaggtgaagagcgtcaccatctgc

SEQ ID NO: 637773 - DNA, 100 bp, Homo sapiens
ggacatccagcgctttttcagtggctatggccgcctcctcgaagtagacctcaaaaatgggatcgggagaaccccctggagctgcgtctgtcgggctctg

SEQ ID NO: 637774 - DNA, 100 bp, Homo sapiens
ttcatttagagctgcggaacaggacgccctctgatgagctgacatggacccaaatcctcgggccgccctggagcgccagcagctccgccttcgggagcgg

SEQ ID NO: 637775 - DNA, 108 bp, Homo sapiens
ggaaggaacgaggcaaggagctaaagcagcgtgcgttcagccctggggggaacgcccttttgcttgtgactggcagggctgcgacaagaagttcgcccgctccgacga

SEQ ID NO: 637776 - DNA, 80 bp, Homo sapiens
cctctcaggacaacccagatgtgcaacaaagtgcgatggtgctcgcggtgaggatcgatgacctggaccacctcccggag

SEQ ID NO: 637777 - DNA, 98 bp, Homo sapiens
gctgcgctaccaggccaacaactgccccatctgccggctgcggggggccctcagcctcttggccttgaacgggctgttcatcttgattcacaaacaca

SEQ ID NO: 637778 - DNA, 75 bp, Homo sapiens
gccatccagcagcgagccattctaccttgtatcaagggtcctcttcctgatggatgggaacaagccatgactcag

SEQ ID NO: 637779 - DNA, 51 bp, Homo sapiens
cctcccaagtagctggtattacagcaagtttcctccaagcctttatgctac

SEQ ID NO: 637780 - DNA, 100 bp, Homo sapiens
atgtctttttccggcagattttggctctgactggatggggttaccgggttatcgctgtggtgtgcagatcctgccttactaaactgtttgaagcaaaaaa

SEQ ID NO: 637781 - DNA, 73 bp, Homo sapiens
caagactggcacccagcacagcaggtgctggagaatctggtaaaagcaccattgtgaagcagatgaggatcct

SEQ ID NO: 637782 - DNA, 96 bp, Homo sapiens
ccagatattcaatcaaaattagatgagatgcagatcccccagattagttatgcatcaacggcacccgagctaagtgatgaccggcgctatgacttc

SEQ ID NO: 637783 - DNA, 96 bp, Homo sapiens
cattattcaacgcatttggaagtgatcaccagcagcttgcaaaacttatccaggagtcgccaaccgttgaactgaaagacaagttggagtgtgaat

SEQ ID NO: 637784 - DNA, 82 bp, Homo sapiens
aggagcccggcaccccccgccgacaaggaggtgtggacgaatgtggaacctcgctctgtggctgtgttcccttggcactcct

SEQ ID NO: 637785 - DNA, 100 bp, Homo sapiens
cttgactggccccaactctctggtgctacaggatttctggactccactgttgggatgtgggggctcaaggttctgctgctacctgtggtgagctttgctc

SEQ ID NO: 637786 - DNA, 98 bp, Homo sapiens
tatgcctgtaaggggctagacaggattgaggagagactgcctattctgaatcagccatcaactcaggtattgaagcccctgggtgataatttgatgga

SEQ ID NO: 637787 - DNA, 83 bp, Homo sapiens
cccagcttttcagaactgcagggaaacagccatcatgagagaccatcatgcagacatcagagactgggtcggacacaggctcg

SEQ ID NO: 637788 - DNA, 105 bp, Homo sapiens
gttcaagaccagcctgggcaacacagactttggacttgggccggaactacacatcagctctcctgggcctctagcttgccaactacggacactgtgacttttcag

SEQ ID NO: 637789 - DNA, 75 bp, Homo sapiens
gaggtttgcaggggtgcagtgtgtctggtcttatgagtactgtaagattgatgttaaaggcatggtgttcacccc

SEQ ID NO: 637790 - DNA, 75 bp, Homo sapiens
ggatccacaggtcttggataaaacgctttggataaacaagaagaattgacacctcttggagtccacttggcacga

SEQ ID NO: 637791 - DNA, 100 bp, Homo sapiens
ctctgctgcaccgacctcgacgtcttgcctgtgtcccacttgttcgcggcctatagaaatcatcctcatcctttgataactgtgcttgaacacagacctg

SEQ ID NO: 637792 - DNA, 74 bp, Homo sapiens
tacgagagtggccctgacggaggggaggaaacctgcctagagctggaacgttacctccagagcgagccctgcta

SEQ ID NO: 637793 - DNA, 100 bp, Homo sapiens
acgacctccgactactttctccttcaaggacccttgattcctgaagagaacaaggagagggtacaagaactccctgattctggagccctcatgctagtcc

SEQ ID NO: 637794 - DNA, 100 bp, Homo sapiens
atgcaaaacagaaccttccaaatttccttttccaactaagtgtggcttcctgttgtggtgcatggccccgagcccttctaatggggctgaactgctctac

SEQ ID NO: 637795 - DNA, 82 bp, Homo sapiens
gcggaagatgcaccgggcgttccaccccagcgagccccgcaccccagcccgcagctcgggggatatgagactttctactcgg

SEQ ID NO: 637796 - DNA, 75 bp, Homo sapiens
cttggggcaaaatgtggacaaggaaggaatttccacttcatccctagaagttgtgccagagaacttgaacggttc

SEQ ID NO: 637797 - DNA, 98 bp, Homo sapiens
gtaaacacatttcgcctcttcggccgagctctctgatgtaaaggatggagtaaatcaagcagcacctgcatttggatttggcagcagtcaagcagcaa

SEQ ID NO: 637798 - DNA, 100 bp, Homo sapiens
ttcacaccggtggtctaccataacaagcaggcgggagtcatggatgtagatgctgaaagagagaagataacacaggagatcaaggagctggaaaggattt

SEQ ID NO: 637799 - DNA, 50 bp, Homo sapiens
agaacctagccatcacggccaaccgggaggccgcgcttagaagccgccca

SEQ ID NO: 637800 - DNA, 100 bp, Homo sapiens
tggctcagaaggggtaataggctggactcaagcaacggactcgatcctggtgttcgaggtggaggttaggcggaggaagaatacaagcgattgagtgaag

SEQ ID NO: 637801 - DNA, 103 bp, Homo sapiens
gaccctggagcctcagttggaagcagccgatccagcctgcggagcctgtggggcagcatgcagccagtaaagatcccagagaagttcgagaagctagagatca

SEQ ID NO: 637802 - DNA, 75 bp, Homo sapiens
tgtttggccaaggtcacccagcgagagcctgtggtgctgaccgacacaaatcttgtgtatcctgccctgaaatgg

SEQ ID NO: 637803 - DNA, 100 bp, Homo sapiens
aagaccttcaagtagaagcggattttcctgtctattttgaggaattacgaaaggtgctagttaaggtggtctgatgggtggagacctcacgtctggtgca

SEQ ID NO: 637804 - DNA, 100 bp, Homo sapiens
tctccatcaagggtcctgagctgctcaccatgtggtttggggagtctgaggccaatgtcagagaaatctttgacaagaccgaccaagaccatcactatga

SEQ ID NO: 637805 - DNA, 100 bp, Homo sapiens
gctacggcaccatgtacatgaagacacggcttttccagaaagatcaactgaaatcggcaaacttctgagttcctacttgcaaaagaaaagtgacgtggag

SEQ ID NO: 637806 - DNA, 88 bp, Homo sapiens
gacagtaataggttcaaaattaaacctcagtttgagggcagagctggacagaagctccagtgatccacaagctcagaaatacatcgcg

SEQ ID NO: 637807 - DNA, 100 bp, Homo sapiens
atcacagactcctatttgaagtatttgacgaaaatagactggtcttcaatgaaatttatccagtatggacttactcttacctggtgctactgtttcctgt

SEQ ID NO: 637808 - DNA, 71 bp, Homo sapiens
aagaacgtgagcaagcccaggcacagccgacgccgcgggtgcacgtgccggaaggacatggtcaagatctc

SEQ ID NO: 637809 - DNA, 74 bp, Homo sapiens
ctgggcttatacagtatgcattggaccagggcgtgaacgtcacccaggactcagaattcatgattgaagaaatg

SEQ ID NO: 637810 - DNA, 100 bp, Homo sapiens
cgcggctgaccctgatggaggaagtgctcctgctgggcctcaaggaccgcgaggtttattcttcagtccaaggaagcaattcacagtcagctgttagaga

SEQ ID NO: 637811 - DNA, 75 bp, Homo sapiens
gcctcggcctccccttggattcagacgccgattcgcccaggatcttctaagggtgtgaggatacaggcgtcaaag

SEQ ID NO: 637812 - DNA, 75 bp, Homo sapiens
acttgaaaaaaactttgctgccaatactctggaattttgattcagctaaagttccatcagatgagtattgccctg

SEQ ID NO: 637813 - DNA, 90 bp, Homo sapiens
tctccgccaccgtcttcaggccagacacagggctgggtgactccgtatgctccagccccagtatctccagcaccaccagccccaagctcg

SEQ ID NO: 637814 - DNA, 98 bp, Homo sapiens
gcggaacagcaggcccgagcccaccgcgccgggccccggacgccgcgcggaaaagatttcaacactacacttgcacaatgtctttgaaaccaagagta

SEQ ID NO: 637815 - DNA, 83 bp, Homo sapiens
ggaatgaccaccatggcagatggcaacagaggatgtcaacaattttttggaggatgatccgttggtgctgaatgagatcagag

SEQ ID NO: 637816 - DNA, 100 bp, Homo sapiens
aagatatttgctgaagggactaagctcatagtaacttcacctgggtgagcagggcagcatttccttctcccactgctgctgagatggcagaaattagtcg

SEQ ID NO: 637817 - DNA, 98 bp, Homo sapiens
ccaaatggatgagcaagacctaaatgagcctcttgccaaagtgtcccttttaaaagatcctgataacttaagtgactctctcttttccggtgatgaag

SEQ ID NO: 637818 - DNA, 87 bp, Homo sapiens
gcgctgctctgtggggctctggccgcgcctggcctggccgggaccatggaatcttgtcgattggcctggctgctgcctactacagcg

SEQ ID NO: 637819 - DNA, 98 bp, Homo sapiens
gagcgtgggcgtttcgcagactcctaaggtgaaagaagaacgtccagaaaaaataccagatttaaaattattggtagagaagaaatttttggctttac

SEQ ID NO: 637820 - DNA, 74 bp, Homo sapiens
cggcggctgcggtcgaagaaggggacgccgacaagaaataagaatgtctaagcccctggaggccgagaagcaag

SEQ ID NO: 637821 - DNA, 75 bp, Homo sapiens
ttttaaataactggcatattttcctacagaactgtttgtcacatttaaaggttaatttggagtggcccctggagt

SEQ ID NO: 637822 - DNA, 100 bp, Homo sapiens
atatgcctcctgtacctcatggaatgatgccgcagatgatgccccctatgggagggccaccaatgggacaagctctcactgacctatgaacgactctttg

SEQ ID NO: 637823 - DNA, 76 bp, Homo sapiens
ctgatattgatattattacagcttcatatgcaccagaaggagatgaaggagacatggtctcaaagtaccgagaacc

SEQ ID NO: 637824 - DNA, 82 bp, Homo sapiens
gctgcctgctgttgccacactcctcatggatgtcatgtcctacttcaatgggaaagccatcaccaagtcgggcctccagcac

SEQ ID NO: 637825 - DNA, 105 bp, Homo sapiens
ggcgaccggctccgcagcaagatggcggacgagaaggacagggaagcaaaatgatgcttcaacacccaggccaggtctctgcctcggaagtgagtgcttctgcca

SEQ ID NO: 637826 - DNA, 94 bp, Homo sapiens
cttaattctatgctttgtcctgcacctatcctgaataaagctggagagacacagcattgttggttttgccatgtactattttacctatgacccg

SEQ ID NO: 637827 - DNA, 82 bp, Homo sapiens
ggaggatccctggatctggtggactttgtgaggcaacatcggataccactggatcagcttgaacgggtctttttacgacttg

SEQ ID NO: 637828 - DNA, 90 bp, Homo sapiens
gagaaatagacatagagtggtcacttcatttaccaaccctggaaccgcagacctctgggcttcctggaatggaatttgaaggtgctatca

SEQ ID NO: 637829 - DNA, 80 bp, Homo sapiens
ccgcggccaggcagggaggagaccggcacccagacaggtggcgaaggcagaggactgatgtagcccagcagttccagtat

SEQ ID NO: 637830 - DNA, 75 bp, Homo sapiens
aggagaggcgcttcttccagctacagatgtgcgaggataaacgtcttgtacccggaggtggagcaacagaaattg

SEQ ID NO: 637831 - DNA, 75 bp, Homo sapiens
ggctccgggtcttccagagcgtgaagatcaagatcggcgtctacggtgacgtgcagcgcgtgaagatcctgttca

SEQ ID NO: 637832 - DNA, 100 bp, Homo sapiens
ctcccttggctgtcttctgcttgcttagactacttgcagagttttaagatgctgcagttggagaagaaacttgaacgtgaacttgaggatgatgcacgag

SEQ ID NO: 637833 - DNA, 97 bp, Homo sapiens
tgctcataagaacccacacaatggacaagtgtaacaaatgtggcaattattttggatctatcacctgtcatcataactggcttctgcttgtcatcca

SEQ ID NO: 637834 - DNA, 85 bp, Homo sapiens
ggctgggccgagaacccgctggtttattgcgacgggcacggctgcagcgtcgcggtgcatcaagcaatatggcttttgtaaggca

SEQ ID NO: 637835 - DNA, 97 bp, Homo sapiens
tcggaacccgccagggtccagggtccaggttccagcgcccggcggcccaggtaccagcagatcctgcaccggaacctggtatacctggccacgatcg

SEQ ID NO: 637836 - DNA, 75 bp, Homo sapiens
cacagctgatcacccagcgggcccagatgtaccggctgaccctgcgcaccagcaaggagcccgtctcccgtcacc

SEQ ID NO: 637837 - DNA, 83 bp, Homo sapiens
cttagctgtgctcgcgctactctctctttctggcctggaggctatccagcaaaggacccaggagcgataacagtaaatcaaat

SEQ ID NO: 637838 - DNA, 75 bp, Homo sapiens
caacatggcagacattgacaacaaaaccgctgagttcttgagcaaactgaacacagaatcgccagacagaagtgc

SEQ ID NO: 637839 - DNA, 75 bp, Homo sapiens
gacgtggttggtgattggcaggatcctggtatccgctaacaggcgccatgtcagaaccggctggggatgtccgtc

SEQ ID NO: 637840 - DNA, 89 bp, Homo sapiens
tcgctgggatttttgggtggtgcaaaggagtccttcaataatgttaaacagtggctgcaggaaatagatcgttatgccagtgaaaatgt

SEQ ID NO: 637841 - DNA, 82 bp, Homo sapiens
ttgcgatggcgcagaaaccccgttgacaaggcactgctttttcatgacggaagcgagcagctgcaaagcatctaatagaacg

SEQ ID NO: 637842 - DNA, 82 bp, Homo sapiens
cagagcccaggaggcaacatctgtcagcccaaggccaaccccactgtcactctgttcccgccctcctctgaggagctccaag

SEQ ID NO: 637843 - DNA, 82 bp, Homo sapiens
ttcccagcccaccggaaccccggcagaggcccaccttggcccccgtccagctgaccaacttcttcgggacacttgactccgt

SEQ ID NO: 637844 - DNA, 75 bp, Homo sapiens
gatccatcacgtggggcaggacggtcaggttcgtgctggccgtgggcagcgccgtctttgatgccatgttcaacg

SEQ ID NO: 637845 - DNA, 100 bp, Homo sapiens
caagcagtgtcaatattgcagctactgcttctgagaaccttcagggtttataaatctgacctcattttctcttcatgtcttgagcaaaataaacatcttc

SEQ ID NO: 637846 - DNA, 50 bp, Homo sapiens
gtgagtgatcactctcaatcccgggtgaagctttgttctaagaatatttg

SEQ ID NO: 637847 - DNA, 100 bp, Homo sapiens
gattatttatgtgagcatatttccgcaaaaacagaaacgcctacagttgcggccccctgtagtgcaatttgtgtcagtctagggagagtggatttggagc

SEQ ID NO: 637848 - DNA, 100 bp, Homo sapiens
cctgccagcccttgtgcccgggctgccagggacagaggccagcgcgctgcaacacaagatcaagaactccatctggttacctacctgggcaaagtctcca

SEQ ID NO: 637849 - DNA, 83 bp, Homo sapiens
aggaggcggcggagcagcgggcggaggtggaccggatgctcagcttccccgggcgctgcctggacaggcctgcctgcgtgctg

SEQ ID NO: 637850 - DNA, 100 bp, Homo sapiens
tcaggaaggagcccaggagcagaggttcctgatgctataaaatctcagtaccagtttccaccccctctcattgcacccgcggccattcgggacggggagc

SEQ ID NO: 637851 - DNA, 100 bp, Homo sapiens
gagacaagacttactgaatgtcctggcccggatgatgaggccagtgagtgatcaagtgtctttcccagggaactccgatgaagtgttccaacaaaatgag

SEQ ID NO: 637852 - DNA, 100 bp, Homo sapiens
ttctctttaaatatttgatgaaattcaccagtgaagccgtgacatcctgggatattctttgttgagagaatgacatccttaactccaggctgcaggtact

SEQ ID NO: 637853 - DNA, 100 bp, Homo sapiens
cgacaagttcaagcagctgcttgccggccccaacacggaccttggttcacctttccttgccagtgaagatggcgtgcttggcggagtgattgtcctccgt

SEQ ID NO: 637854 - DNA, 102 bp, Homo sapiens
tttctactggacttcatgcttagatacatgtataacaagtaaatatttactgagctcctccgcgtgccagatagaatttccagtaatgctttgcaaagacca

SEQ ID NO: 637855 - DNA, 50 bp, Homo sapiens
agggatccttcacccgtgtctggaatggtcctcgtccgaagtgagaatgg

SEQ ID NO: 637856 - DNA, 82 bp, Homo sapiens
ccagaaactgctaaagaaactcatgtcaggctaatctagacgaaatccagatgagttcacctacattccttagagctttaat

SEQ ID NO: 637857 - DNA, 75 bp, Homo sapiens
cgccggccggctgcgaagacgcggtgggccgcccctccgggcatgaagtacttacaccacagagagtttgttcat

SEQ ID NO: 637858 - DNA, 51 bp, Homo sapiens
tcatccacttcgcccaacctccaggtattccaataactgtaccacctccag

SEQ ID NO: 637859 - DNA, 95 bp, Homo sapiens
gatggaacaacggttacagtcagggttaaaaagaacagtactacagaccaagtatatcagatttcctggcacatcatggaaccgactgctggact

SEQ ID NO: 637860 - DNA, 83 bp, Homo sapiens
atctgtcttcggtggactccttcggcagtccacccaccgccgccgcctcccagggaacttaggctgcggaactatgtcccgga

SEQ ID NO: 637861 - DNA, 98 bp, Homo sapiens
cggcggagcgggagcggccggaggagccatggactgcagcctcgtgcggacgctcgtgcacagatacatatgaatgccacaatacgaaggattgacca

SEQ ID NO: 637862 - DNA, 83 bp, Homo sapiens
ggcagctgtagtgggagtgttccaggattcgccttgacaatgcagatcttcgtgaagactctgactggtaagaccatcaccct

SEQ ID NO: 637863 - DNA, 49 bp, Homo sapiens
aggcctatagacagctggcagtgatgctacgactaatagactggggttt

SEQ ID NO: 637864 - DNA, 51 bp, Homo sapiens
gcttggtgaagagttactagctcaagacaggaacacagaggacgatcgccc

SEQ ID NO: 637865 - DNA, 107 bp, Homo sapiens
tgatccagcaaggtcggcagagcaaggggcttacgcagaaggacctggccacgcaagagtgagccatggagctacgtgtggggaacaagtaccgcctgggacggaag

SEQ ID NO: 637866 - DNA, 82 bp, Homo sapiens
ggaggggtctgcgcagtgcaggcagataccgtttgacaccaccagtcatcatcagatttgaaatatttaaagtggatacaaa

SEQ ID NO: 637867 - DNA, 74 bp, Homo sapiens
cacatctccattgctgagatctatgagacagagttggtggacatcgagaagctgcgactttaggtggggtatat

SEQ ID NO: 637868 - DNA, 100 bp, Homo sapiens
aggggatgaggggagcatgggtgccaaggagtcacggatcggattcctcagctacgaggaggcgctgaggagagctttaccaacagggacgcttatgtca

SEQ ID NO: 637869 - DNA, 98 bp, Homo sapiens
atatctggttttgtctctgctgggcctgtgtgcctggaaaggaattgttttggcctaggatcatccaggtagaaaaactggcacggacacttttcttg

SEQ ID NO: 637870 - DNA, 83 bp, Homo sapiens
gtcgcagttcttgtttgtggatcgctgtgatcgtcacttggccatgacgctgatggagtacctcatcaagaccggctcggagc

SEQ ID NO: 637871 - DNA, 75 bp, Homo sapiens
gacccaggagagcaaggcccagaaagagggccaatgcaggaaaccatctatgacttctggaggatggtgtggcac

SEQ ID NO: 637872 - DNA, 83 bp, Homo sapiens
atgagttcctttatgttctcatcgtgctcatgaagcacctgagaaacaagtggaagccggtgtctgtgttaccatggagatgg

SEQ ID NO: 637873 - DNA, 87 bp, Homo sapiens
gtaatgccatgtgtgacttcctgatgcaacacatctgtgggtaccagatggaggagatgtataagaaagctcatgctgctatacgag

SEQ ID NO: 637874 - DNA, 100 bp, Homo sapiens
cttgggaacaaaatacaaatcatggagccgctggggtcccttttgcctcagatactattttgaagctacaagtggaccttctagtgcagttgttcctaat

SEQ ID NO: 637875 - DNA, 50 bp, Homo sapiens
aagactgcatctgttcatatgagaattcagaaggagctggcggacatcac

SEQ ID NO: 637876 - DNA, 100 bp, Homo sapiens
ctctttcgctctttggactaatgggagttgcttttggaatgaatttggaatcttcccttgaagagggggcagtacccaaaggaaacgctacgaaagaata

SEQ ID NO: 637877 - DNA, 108 bp, Homo sapiens
ggatcgtctgcctggtcctaagtgtggtgggcacagcatggggtttcttcagtgcccgtggtcatcgaccccttgacaagaagagagaagaggctcccagcctgaggc

SEQ ID NO: 637878 - DNA, 75 bp, Homo sapiens
gccaaactgcaggaaagccagccaggaaacgcagccaacaccaacacggacctgaggctggcagctgccaatgga

SEQ ID NO: 637879 - DNA, 50 bp, Homo sapiens
gagatacaaatctaagggatcgagagcaatacgtttggtttaatattggc

SEQ ID NO: 637880 - DNA, 98 bp, Homo sapiens
atttctgaggagccgttcgaactgtctcaccacttccctgcagctcccgcctgtatccggtgtccgaggcgaactcagtaagatgatgttaagaggaa

SEQ ID NO: 637881 - DNA, 100 bp, Homo sapiens
attattcattattacatgaagtatcatgtttctcatggtggggagttatatttcagtgacgtctatacgagccttgaactgccagaagaaatcaggacac

SEQ ID NO: 637882 - DNA, 101 bp, Homo sapiens
tgatgatccaccgaatcctcaaccacagaggagaggagacgccgtgagcgggacgaccagatgtaccgagagcggctgcgcaccttgctggtcatcgcggt

SEQ ID NO: 637883 - DNA, 74 bp, Homo sapiens
cctatggagttgtacttaaatgcagacacaaggtgctggagaatctggtaaaagcaccattgtgaagcagatga

SEQ ID NO: 637884 - DNA, 75 bp, Homo sapiens
agctattcttcttatggccagagccagaacatttgcctgagaatacagatcaacccacagaacaaagcggatttc

SEQ ID NO: 637885 - DNA, 75 bp, Homo sapiens
aaccggatttcagcctgggcctcggacacctcggcctgggaattgaatgatctggcacgggaccctccagcacag

SEQ ID NO: 637886 - DNA, 90 bp, Homo sapiens
gtcgcccggatcccctgagctgcccgccatcccacgtgaccgcgccgccccccagctccaccgctgatcatgatgctatggactcctact

SEQ ID NO: 637887 - DNA, 100 bp, Homo sapiens
agcggccccgacatggaggatgacgacagcgtcctcagcacccccaagccgaagctgcgatgtgaagttcatttccaatccgccctccatggtggcagcg

SEQ ID NO: 637888 - DNA, 74 bp, Homo sapiens
ctcggcgtcctcggcccccgccccattccgttcgcgattcgggaactggagcctctcctctgtcacagtgacaa

SEQ ID NO: 637889 - DNA, 101 bp, Homo sapiens
gtaaatactgctgtaatactgtcatgcaaagtgtatcctttcttgtcacattgtggatatcaagcctgccaatatggaagagctaacagaggtgattacag

SEQ ID NO: 637890 - DNA, 100 bp, Homo sapiens
ggcccggaagcagaagggtgccgagacagaactcgtcagattcttgcctgcaggcatctgcaggaaccacaccacactttggaggccatgctgcggccca

SEQ ID NO: 637891 - DNA, 75 bp, Homo sapiens
tttatgaaagcccaaatcacctgtacttggtcatgcagctcttattgcaggagtgaccaggacactacctcctag

SEQ ID NO: 637892 - DNA, 80 bp, Homo sapiens
aggatatgaagaaattgagggttcttgccatggtcagagatgtcatcatcgctgcaagcgttgcaggaatgggcttggca

SEQ ID NO: 637893 - DNA, 87 bp, Homo sapiens
ccagcctgcggagcctgtggggcagtccggttccagttgttggcaaaggagaggaagaggaagaggaagatggcatgcggctttgtc

SEQ ID NO: 637894 - DNA, 100 bp, Homo sapiens
gaaatcggtgtcctccgatctacagccttatctccaaactctgccagctgcattccagtccatgatgacaggaggtaacattggaaagcagatagtttgc

SEQ ID NO: 637895 - DNA, 100 bp, Homo sapiens
ctacaaactctgtgcctcaacaaccatttctaagtggtttgaacttgttctggaagctgtgcgtcaccgtaatgaggcttgtaattcttgataactatga

SEQ ID NO: 637896 - DNA, 75 bp, Homo sapiens
tgagaaaccaagatagattcatctcgacactgaaattacaggtcaaagattctaaactgcctgcatataaggatc

SEQ ID NO: 637897 - DNA, 76 bp, Homo sapiens
cggatggatatgtcaggaatgtgattcttcatcttccaagtccaccaatcgattactttgatgtatttaaagaatc

SEQ ID NO: 637898 - DNA, 101 bp, Homo sapiens
tgccaatctctgcttgaaaggagaagacttggattctcaggccaggtgtggtgtcttacacctgtaatcccagcactgtgggaagccagggcaggtggatt

SEQ ID NO: 637899 - DNA, 100 bp, Homo sapiens
cgcgtggctggaagacatggccactccagtcggtgttgagcacggcgagcagtctcaggcctttagtgatgatgagacagggtcttgctatgttgcccag

SEQ ID NO: 637900 - DNA, 95 bp, Homo sapiens
gtctcaggcctggtaaccagccgcagcttccgtactgccagtgtcagcatcaaccagacaggtgatcatggagctcagcttggtctccatggggc

SEQ ID NO: 637901 - DNA, 83 bp, Homo sapiens
atcagctcctggttcaacgaggccattgacttcatagtgtactaatggtcacttgatgtgcgctggctgttttatccacctac

SEQ ID NO: 637902 - DNA, 90 bp, Homo sapiens
ttagaaggtgacgaggagggagaagacgaggatgatgcggaaattaaccccaaggagtcagtggatcggtggggaaaatgctgcttaccc

SEQ ID NO: 637903 - DNA, 82 bp, Homo sapiens
aggaaaagctcgcaccaggcaagaataccctccaataccctcggtttgcagaaaaaacttcagcatgtgccaggaacacaac

SEQ ID NO: 637904 - DNA, 83 bp, Homo sapiens
gtcaagatctcgttccagttccagagaacgttcgagatctcgtgggtcgaaatcaaggtatatgacgatcagtgacgagtggg

SEQ ID NO: 637905 - DNA, 100 bp, Homo sapiens
gtcgcgtctcggaaaccggtagcgcttgcagcatgcctccgggaggagttcctgggacacagccattgctgcccaattctatggatcccacacgacaaca

SEQ ID NO: 637906 - DNA, 83 bp, Homo sapiens
ctgaaatgcgggaggctccttaactcttgtataaacagacaatgcagatcttcgtgaagactctgactggtaagaccatcacc

SEQ ID NO: 637907 - DNA, 83 bp, Homo sapiens
aacttcctgcaggactccaaggtcattttcgtggagaaagccccagaggccacaagaggaagctgaatgaagaggacgccgcc

SEQ ID NO: 637908 - DNA, 87 bp, Homo sapiens
ctcttggaagacttgggtccttgggtcgcagtgatgttacagcctttcgattatgatcccaatgagaaaagtaaacacaagtttatg

SEQ ID NO: 637909 - DNA, 135 bp, Homo sapiens
ttcgtgaatttaaactcagcaaagtctggcgtgatcaacattttgttaagattcaggtcaaagacagagccagtaaaactcatcgttaccaaatatggacaacagtagtagactggatacaccccgaccttaaac

SEQ ID NO: 637910 - DNA, 83 bp, Homo sapiens
gggctccaggcatccggtcctggtccctgctggttggttcgatacaagaggctgttttcctagcgtggcttgctgcctttggt

SEQ ID NO: 637911 - DNA, 73 bp, Homo sapiens
gcaggttcgggaccatgagctgtagaacttcatggaggaacacggagtgacccaaaccgaacatatggctacc

SEQ ID NO: 637912 - DNA, 100 bp, Homo sapiens
cctgcctggagggagccctcctggctgggggcaaggtacacggctgccccacaccccctgctatctcttgatccccacttcagccacgatgggacgtcca

SEQ ID NO: 637913 - DNA, 75 bp, Homo sapiens
gttcggccgtgccctccgacagccaggcccgcgagaaggagtgcatccgccccaacccttttccccctcgtctcc

SEQ ID NO: 637914 - DNA, 83 bp, Homo sapiens
gatttttcctcataaagagtaacaaccatgagaatgtgtctcttgccaaagcgaaggaggaagaacgtgcaaaacgtgaggag

SEQ ID NO: 637915 - DNA, 96 bp, Homo sapiens
tcgcgaccgcgggtgcatccagtttctgcgcccaggtgctggagaatctggtaaaagcaccattgtgaagcagatgaggatcctgcatgttaatgg

SEQ ID NO: 637916 - DNA, 100 bp, Homo sapiens
agacaattcctggttcagaatttaaacatctttctagggtggctgttgcaccacgccctccctcctgcccctgaggcccggaagccaggcgaggagccca

SEQ ID NO: 637917 - DNA, 119 bp, Homo sapiens
cgaagcctgtgttccagcccttttcaggacagggtcacagactaggaaggtccatgctgccagacgtggtggatgactttcagctgcagcaccgtcacgggccaggcctggagaccatc

SEQ ID NO: 637918 - DNA, 90 bp, Homo sapiens
ccccactctgaactcaagtcaccgtggagctccgccgccccgaaactttcaccgcgagcgggtggatttgccgctgcagtcaccacccct

SEQ ID NO: 637919 - DNA, 100 bp, Homo sapiens
ctaagagtctatctctaccatgggccaaaccgggattcacgtgccagagtggtgaaggttgccgaactgtccccctggctggacatgtggggtttgacag

SEQ ID NO: 637920 - DNA, 74 bp, Homo sapiens
caatttgtcccaaagctcccaaattagaggaaagcttgcaggagggttcctacttgttatctcatgcagcagaa

SEQ ID NO: 637921 - DNA, 101 bp, Homo sapiens
cctggtgctccaggacctcctggacatccgtcccacccaggacccgatggcttgagcagggtgctgcactatctggcaatccagaaacctgcagaccttgc

SEQ ID NO: 637922 - DNA, 75 bp, Homo sapiens
tgctggcctctgacatctgtgaacagtttaacatcaacaagaggatgtccggtagagacgggggttcaccatgtt

SEQ ID NO: 637923 - DNA, 96 bp, Homo sapiens
acgacagcaccgtgtctgttgctgatgcctcaaaaagtgtgcaatgctgcaatttcacagcagttccttccttcgcgcctgtaaaacagtggcaac

SEQ ID NO: 637924 - DNA, 96 bp, Homo sapiens
tgaggccctggggaacctggttgagggcctggacttccatcgattctattttgaaaaccgccaagattgacagacacctaatattcatgacttgag

SEQ ID NO: 637925 - DNA, 90 bp, Homo sapiens
gcggcggagacggcgcgcggcgcttcgggagccagcgggtgctggtggagccggacgcgggcgcagctccaactaccgtgaatgtaacac

SEQ ID NO: 637926 - DNA, 98 bp, Homo sapiens
gcagatgaaggagatcatccgaatgtgttcccaccaccgccagaccatgctcttctcggccaccatgacagacgaggcccagagcaagagaggcatcc

SEQ ID NO: 637927 - DNA, 90 bp, Homo sapiens
cctcaatctccttttccttggctacccttgctgaacctgtttgcatgagttgctcctgacggccctttaggatacttccatgtctgtagg

SEQ ID NO: 637928 - DNA, 80 bp, Homo sapiens
tcctgccgtccatgcggaagatcgtcgccacctggatgctggaggtcctgaacgaggctgtgggggccctgatgtaccac

SEQ ID NO: 637929 - DNA, 75 bp, Homo sapiens
cgggaaggaagatccggcgcggggcacaggatccggagctggagcccccagatctgccgacaccccaggccatcg

SEQ ID NO: 637930 - DNA, 51 bp, Homo sapiens
cgctgccgcccaggactgggcccttaggactttgaccagctgctggaggcc

SEQ ID NO: 637931 - DNA, 82 bp, Homo sapiens
tatacgagaaaatcatagattcctatggaatgaggaggacgaaatggacatgacttggagcttgcggtcccctcaggagcag

SEQ ID NO: 637932 - DNA, 90 bp, Homo sapiens
gaccgcggcggaggacgcgcccggcgcccctgagccggccgagcggcgacggaccgcgaggtttcaagtgccccatttgctccaagtctg

SEQ ID NO: 637933 - DNA, 50 bp, Homo sapiens
gcaaagtgtatcctttcttgtccacggatgataccatcggggaccttaag

SEQ ID NO: 637934 - DNA, 90 bp, Homo sapiens
cactcaagatgaaaactacttcaactaaaagccaaccacttgaacaaggacacagcattgttggttttgccatgtactattttacctatg

SEQ ID NO: 637935 - DNA, 110 bp, Homo sapiens
ccctctgcccccccttccccacgcaaccccagatccatttacactttacagttgacatcatggacatatgtgagtccatcctggagaggaagcggcatgacagcgaaagg

SEQ ID NO: 637936 - DNA, 100 bp, Homo sapiens
aattcctactgcatcgtgggcatagcgtacaatgccaaaataggagatgatggacctagccaaagtgagtctgctactgagactgccatgacactaccaa

SEQ ID NO: 637937 - DNA, 51 bp, Homo sapiens
aactttcctgctgggtatataaagacagaacatccatgatagcagtcttct

SEQ ID NO: 637938 - DNA, 83 bp, Homo sapiens
ggaagcctagcggagctcagtgtggcagctgctggcctctgggccgaatcctacaagggacactttggtcctattcactgtgt

SEQ ID NO: 637939 - DNA, 83 bp, Homo sapiens
ctctcgcatcaggtggccgggcacatgtacgggaaggacaaagtgggaaatccaaggagaatcctcggaacttctcggataac

SEQ ID NO: 637940 - DNA, 100 bp, Homo sapiens
aaaccccggaagggcggacacctccacatcgccttttgccacctttccctttatttccggaggccaaagatgaagaggaagcctttctggattggagtga

SEQ ID NO: 637941 - DNA, 80 bp, Homo sapiens
gacattcaggaattctcctgccaccgcgtggtgcttgccgcagccagcaactatttcagatctttgaccatcagtctgtg

SEQ ID NO: 637942 - DNA, 100 bp, Homo sapiens
catgccgaaaaaaggagattgtgacatatcactgcattcaatacctagatgatcaccactgccggaactgtggccacatcttctgcaacacctgctccag

SEQ ID NO: 637943 - DNA, 51 bp, Homo sapiens
ggttgcttgtcagtagcgggcaaggtgatttgatgaaggctgctgcaggag

SEQ ID NO: 637944 - DNA, 82 bp, Homo sapiens
cgtagcaggttccagctgaatcttgacaagaccatagagagttgcaaagcacaattaggagacagtgttggacatgctccgg

SEQ ID NO: 637945 - DNA, 100 bp, Homo sapiens
tcgcggagctggaatgactggcaacccaggagcccagcagccggggccgccctattacaccgacccaggaggaccggggatgaaccctgtcgggaattcc

SEQ ID NO: 637946 - DNA, 100 bp, Homo sapiens
ggcgtcttctacctgacgctcgtcctcatcctggtcactagcggactcttcttcgccttcgaatgaaggtcaccgtgtccaaagggggcgaccgggacag

SEQ ID NO: 637947 - DNA, 100 bp, Homo sapiens
ccgcggtgctgctggtcacggccaacgtgggctcgctcttcgacgacttattacatggtacaaagataatcgtctactctcaggttccaccagcatgact

SEQ ID NO: 637948 - DNA, 75 bp, Homo sapiens
gcagcaactcacccagcacacaaaatggatctcttacggtacgcaataactgtttggtattttgatgcagatgag

SEQ ID NO: 637949 - DNA, 82 bp, Homo sapiens
ggaaagtttcattgtgtatgtagaagaccagaagtggatggagagtttctgtcacaacaagattactgatttcccatttaag

SEQ ID NO: 637950 - DNA, 100 bp, Homo sapiens
ggcagggcaagcacgggaagaagcagctggacccgctcaccatctacggcatccggtgtgctggagaatctggtaaaagcaccattgtgaagcagatgag

SEQ ID NO: 637951 - DNA, 98 bp, Homo sapiens
tccggctggacatggagatcgatgggcagaagctgcgagacgccttcacctggaacatgaatggaaaaaacgaggagtcattggagagtacagaaggc

SEQ ID NO: 637952 - DNA, 100 bp, Homo sapiens
ataaaaaacaacaggaacagttgcagcttcaacttttacaacaacaacatgctggaaaacagcctaaagaggttgtggcagcactgcctgaaggtatgag

SEQ ID NO: 637953 - DNA, 75 bp, Homo sapiens
aatcacacgcataatggatgaaaggaaccgacagctcatttagaggcgagttttgaggaggtagagaacaacctg

SEQ ID NO: 637954 - DNA, 89 bp, Homo sapiens
aagatggccgcagtcggcaaggagagacgtcgctgaggggcttgcctgaagcgaggggtaagaatgattgatgttggctgatattggag

SEQ ID NO: 637955 - DNA, 88 bp, Homo sapiens
ctcgcaggagcaacacgtgatgtgtctacttatcaggggatctgaaacttgcccacccttcgggatattgcaggacgctgcatcatga

SEQ ID NO: 637956 - DNA, 100 bp, Homo sapiens
gtttaggcctgtctccagatctggagcattgggctcaggatctgaacaaagtccgtgagcggatgacaaagttcattgatgacaccatgcgtgaaactgc

SEQ ID NO: 637957 - DNA, 82 bp, Homo sapiens
cgccaatggggagcagaaggactcggacacagtgctgagcttgcaagacctctgctgccgggcggtcgtgtcctgcacgccg

SEQ ID NO: 637958 - DNA, 100 bp, Homo sapiens
cagaacggctgcctaatttacagcaaccatgagacggcggagactggctgagtggaaagcaactaaactgaagaataaattcggagaagttttggagatc

SEQ ID NO: 637959 - DNA, 75 bp, Homo sapiens
gggcgggagcccagggtggcggcgcctgcggccgagcgccgggagcagggagtgagttttccgggagtccctaca

SEQ ID NO: 637960 - DNA, 100 bp, Homo sapiens
gtcgagcacataacggggttcgggtgtctcgtgtgtgaacatcacaggaatctccgtatgttatgatgaagaaaaatcatgaaatgcttgaaggcaatga

SEQ ID NO: 637961 - DNA, 100 bp, Homo sapiens
ggagaagggcaggagcgagctccgggggcccctgccttccccttggccatcaagatgatgtggaacatctcgtttctgccactgccttctacaaagcaca

SEQ ID NO: 637962 - DNA, 100 bp, Homo sapiens
gtgcaatgcagattcaccaaaggacccagtcctcccaatgaaattttttacacaacctgaaaaggccttggacaagattcgctatgagagcctgacagac

SEQ ID NO: 637963 - DNA, 100 bp, Homo sapiens
ggccgctctgcgcgttttccgatttcttgctggttgaatacctccctctccactcccatcttcagggctggttgtggtgactcatgcccataatcccaac

SEQ ID NO: 637964 - DNA, 101 bp, Homo sapiens
ccggaacccagagactgcatcagagccactgtctgaggcttcctttctgtctgaccagcctgagccttacctgccatttctttcacgcttcattgaaacac

SEQ ID NO: 637965 - DNA, 126 bp, Homo sapiens
gaacaggaaaaccatcttactttggttccaggatatactggtaatatagctaaggtgatgtgccttcaggacttttttggtgatgatgacatttttattgcatgtggaccggagaagttccgttac

SEQ ID NO: 637966 - DNA, 75 bp, Homo sapiens
ttcaagaaagccgacccccaaggtgtccctggccagtgtccttccacctgtccacaagcatggggaacatcttcg

SEQ ID NO: 637967 - DNA, 83 bp, Homo sapiens
ctaagatgtcaggacatcctggaagctgggaaaggacaatgcagatcttcgtgaagactctgactggtaagaccatcaccctc

SEQ ID NO: 637968 - DNA, 100 bp, Homo sapiens
tgtgataatgaggaagatcttcaaatgggcattcacaaggtgctgggactctggtgcccccaaccctgggcatcctcaggctttgaggagaatacacagg

SEQ ID NO: 637969 - DNA, 90 bp, Homo sapiens
aacaaaaactgatgaccaagagaatgtgtcagccgatgcaccgagtccagcccaggaaaatggagagtccagaacacatattacataatg

SEQ ID NO: 637970 - DNA, 101 bp, Homo sapiens
cgggacccagggagaaacaggggggcgagaagagaaacagcaagttaaggtgaactgcacagctgaagtactttacccttcaacgggacaagaaactgcac

SEQ ID NO: 637971 - DNA, 75 bp, Homo sapiens
atgagttgagtggagatgcttctgtggaagatgatgcttttatcaagaaatttctgaataaattggcagaagaac

SEQ ID NO: 637972 - DNA, 102 bp, Homo sapiens
tgatacttgaaggaggccagaaagttgttttcaaacctaagcgggtctccctccactgctgtagtaacccgggtccggggcctcggtggtgctcctgatgcc

SEQ ID NO: 637973 - DNA, 75 bp, Homo sapiens
gcccagaggatcggaatgacagatgaagtcctggctgagcaaggttggaagccctagttctcgcattgaccgcac

SEQ ID NO: 637974 - DNA, 103 bp, Homo sapiens
gtgggctgaggagtggcgtgtgggtctccggaagctcgtcgcaggccatctgtgtgactccggtgcgagtggaggcacctctaagatactgatggctctgcag

SEQ ID NO: 637975 - DNA, 75 bp, Homo sapiens
tctgtcttcggtggactccttcggcagtccacccaccgccgccgcctcccagcgctggcgagaacctggggttgg

SEQ ID NO: 637976 - DNA, 99 bp, Homo sapiens
gcctcatgtaggctataggtgggcacaaccagatcccatggctcaagctggattttatcatcagtgggaaaggggaacctgtgactgaactcagctggc

SEQ ID NO: 637977 - DNA, 74 bp, Homo sapiens
gctcaccgaggacggggactcgaacttgtaatagctggcatcgttgagaatgaatggaaaagaacgtgctccag

SEQ ID NO: 637978 - DNA, 90 bp, Homo sapiens
tactgctgctagaatgtttgagtcttcagccaatgacttgcttgcatcagacatctttgctcctcccgtctcagaaccttcaggccaggc

SEQ ID NO: 637979 - DNA, 90 bp, Homo sapiens
tgttggtctcctccttgctgcccttgttgctggtgtcgtctactggctgtacatgaagaagtcaaaatggttcacaggcaccagccagac

SEQ ID NO: 637980 - DNA, 101 bp, Homo sapiens
tccgagccagccgctgttttgccggaggagcccctcaggccatgtccagctcgccgctgtccaagaaacgtcgcgtgtccgggcctgatccaaagccgggt

SEQ ID NO: 637981 - DNA, 75 bp, Homo sapiens
ggctcagccagcggcagacagaacgggacctgtgtcaggctcctcctgctggaccctccagccccgggcctcagg

SEQ ID NO: 637982 - DNA, 100 bp, Homo sapiens
cggacaggcgacagcgacctgcggcagtcaatgcagaccctgcaggacttgctcactgatcttcatgcactccaggtcaccatcacagccctcagaaaag

SEQ ID NO: 637983 - DNA, 83 bp, Homo sapiens
tcaagaagatcttggacagcgtgggtatcgaggcggacgacgaccggctcaacaaggttatctcctcagccaacagagctgtg

SEQ ID NO: 637984 - DNA, 75 bp, Homo sapiens
cattgaggactttccttacctgtttttccagctcacccactgccagcagaggcgcatattaaatttcctattgac

SEQ ID NO: 637985 - DNA, 97 bp, Homo sapiens
cgggagtgttggttaccatggtgaagctggcagccaaatgcatcctggcagggtatacctcagttaccatgtgccaaagcattatacaactatgaag

SEQ ID NO: 637986 - DNA, 74 bp, Homo sapiens
gagagggcctgggagcttgctgcagcttcagctgctggagccagttctgcttctcggcaaggagcgatttgctg

SEQ ID NO: 637987 - DNA, 80 bp, Homo sapiens
agtcctcatcctggatgaagccaccagcgctttggatgccgagagcgagtatctggtcagaagagatcaattctacagaa

SEQ ID NO: 637988 - DNA, 50 bp, Homo sapiens
cctgaaatgcagatgcccaacacggtcaaatgaagcgcaacagaggggaa

SEQ ID NO: 637989 - DNA, 100 bp, Homo sapiens
cttttggcagagctcccactagagagcacagaatggggattcaacacctcggcaatgcccttttagtgtgcgagcaaccacgggaacttctgaaagtttt

SEQ ID NO: 637990 - DNA, 82 bp, Homo sapiens
tggtttcgggatctcggtgctgcagacggcgagacctcctgcacagaaccccgagatgcccctgtccttcacaataagccga

SEQ ID NO: 637991 - DNA, 101 bp, Homo sapiens
gccctgccccggatttcattccgcggcgggggctccgcgagcggaattccggcggctgccgtgactccagtgcaaggaccagttactctccacaagaaaat

SEQ ID NO: 637992 - DNA, 125 bp, Homo sapiens
tttgctttaccctcttcttcttctgcaacacggccactgtgtacaagatatgtgcctggatgcagctcacctccgagtgtgaacatggctacgcctcttcattcccgtccatgccgagcccccga

SEQ ID NO: 637993 - DNA, 75 bp, Homo sapiens
tggggtgaagaccatggccacaaagtgagattacgtactataggtgaacttttagctcctgcagctccttttgac

SEQ ID NO: 637994 - DNA, 75 bp, Homo sapiens
tgggggtcggcaccttcggcaaagtgaagggtgaaaaaccttttgaatgtccaaattgtcatgaacgatttgcta

SEQ ID NO: 637995 - DNA, 90 bp, Homo sapiens
aaagacgaaagaagaagaagagcaaagggccttctgcagccgtgctatcaagactaatcaggaccttctcccagaaactccatggacgca

SEQ ID NO: 637996 - DNA, 95 bp, Homo sapiens
acggccagatctgccctccatttcagtaacataatatcagatatgaaagttgccagatctgctacagctagagttcgttcaagaccagagcttcg

SEQ ID NO: 637997 - DNA, 83 bp, Homo sapiens
tacctatgacctcccaaccccacccggggaaaagaaagggtgtggccactgtaagaaaatgaagccggagtttgagaaggcag

SEQ ID NO: 637998 - DNA, 88 bp, Homo sapiens
atcatccttttgggcttgatcatcgcctaccacacacgtgaagtccaggggtattccctcagcggatactacacccatccatttcaag

SEQ ID NO: 637999 - DNA, 82 bp, Homo sapiens
ccaaaagggacccccccgtgttcatcccttgtaaggcagcctggcatcctcgctacaacctcattgttgtgggccgataccc

SEQ ID NO: 638000 - DNA, 100 bp, Homo sapiens
ttacagctatatcagagaatgagttaatctcctcagaaatcactaaatactactctgaggggcttagaaattaacaggtgtcgtgtgggagccaatggga

SEQ ID NO: 638001 - DNA, 88 bp, Homo sapiens
aaattttggaaaatgtgataaaaacaaggtggaagattcttccaaggaaccagtgcgaagctgtggatttctttaaccagatcaacat

SEQ ID NO: 638002 - DNA, 87 bp, Homo sapiens
cgcagccgcctccgaagatgggggatttctacgacccggagcacccgacccctgatatgttcatgcggatgctcctaccaataaaac

SEQ ID NO: 638003 - DNA, 80 bp, Homo sapiens
cacagataaagtcaaacaaggcttttgggaagaatttgagtgtgctggaattgatgttcgtctgtgtgatgttggtgagg

SEQ ID NO: 638004 - DNA, 51 bp, Homo sapiens
ctcagttctcctttcttgtaaagttatcaatactctggctgaccatcatca

SEQ ID NO: 638005 - DNA, 85 bp, Homo sapiens
ggagtttgatgttgttgaaggagaaaaggtatctgatggtataattgccccaggatatgaagaagaagccttgacaatactttcc

SEQ ID NO: 638006 - DNA, 80 bp, Homo sapiens
ctcatggggaaaatctccccggtgactttcaggccaccccagcagacatgtttgccaaggcctttcgggtcaagtccaac

SEQ ID NO: 638007 - DNA, 100 bp, Homo sapiens
agagaagaattcagaagaaacaaaagtgccaccgaagaggatcaacattttagggatggatcccctaagcacaccttttgacaatgagttctacaatgga

SEQ ID NO: 638008 - DNA, 138 bp, Homo sapiens
tccaggtgtggatcaaagaagccaagaacttgacggctgccaaagcaggagggacttcagacagctttgtcaagggggcaccaggggccagggaggcccaatctcagagcgctgcgggctctgctggtgatagaaaca

SEQ ID NO: 638009 - DNA, 90 bp, Homo sapiens
aaaatagacattttaactgaactgcggggcaggagtgcagatgtgatctcggcacaccgcaacctctgcctcttggattcaagcaattct

SEQ ID NO: 638010 - DNA, 100 bp, Homo sapiens
cgacgacgacctgtttgtggacttggggagcgacaaagccacagacccaagcatgtcggaacaggattggtcagctatccagaatttctgtgagcaggtg

SEQ ID NO: 638011 - DNA, 73 bp, Homo sapiens
agtgaagatgagttgacaccttttgacatgagcatccaggccatcatgcagaagggggatacaaacataaagc

SEQ ID NO: 638012 - DNA, 98 bp, Homo sapiens
ggctgagctgggcatccgacacgtactgctgttattttggacacctggaaggctgtggtgctgatctacacaaagaaattcgagacacttactatcaa

SEQ ID NO: 638013 - DNA, 88 bp, Homo sapiens
gaggagcctggctaagcaaaaccctgcagaacggctgcctaatttacagcaaccatgagggcatggtgctgatgtgaaatgtgtagac

SEQ ID NO: 638014 - DNA, 82 bp, Homo sapiens
tcagcggcccgcgcctgtcgggctgaactgaggtctggccagcatgacccagaacttagagccacttctgaagaagcagggc

SEQ ID NO: 638015 - DNA, 96 bp, Homo sapiens
aagaagcttgaggaaatgactcggactgaacaagagggtctcttgtggctcagagcataatttggcaataattggtaagtaatttttatactgata

SEQ ID NO: 638016 - DNA, 100 bp, Homo sapiens
cgtgtctctggattcaagtcccaggagtcctgaccagagagcagcctcttccttggttgtgccactactgagttctccagttctctttcagcgattgttc

SEQ ID NO: 638017 - DNA, 100 bp, Homo sapiens
aatctccctgggccggaggccactgtcttctcttcctcctccaccgagtcgtgctctcgccccaacccgcgcgccaggcagttgtgaaaaacttcaggac

SEQ ID NO: 638018 - DNA, 100 bp, Homo sapiens
caaggattctgcctggccctgggaagagaagcctagatatctgttagagatgtttatgattacttccgagctgtcctgcagcgtgatgaaagaagtgaac

SEQ ID NO: 638019 - DNA, 82 bp, Homo sapiens
tgatgaagcagatcgaatgtttgacatgggatttggtgtcagttgtacccgaggcgttctcagcagcagcaagtacctgtgg

SEQ ID NO: 638020 - DNA, 100 bp, Homo sapiens
aggaactcaaggccctgcgtgcacagcagtttgaccttgtctgtgtcaatgcgtggatgctggacctcacccaagccatcctgaacctcggcttcctgac

SEQ ID NO: 638021 - DNA, 75 bp, Homo sapiens
tagaatctactactgtctggccactggctgctgagcctggtgggtcatgataactgggtacgtggagttctgttc

SEQ ID NO: 638022 - DNA, 75 bp, Homo sapiens
ctgacagattttggtctgagtaaggagtttgtggctgatgaaggacctggtggccttagtctttcaggtggaacg

SEQ ID NO: 638023 - DNA, 96 bp, Homo sapiens
cccatgtcccaggtgtatggagcgccacatctcctgagattatttggagatatgtcagtattgaattctcccagacatcagagctgtataatgcat

SEQ ID NO: 638024 - DNA, 98 bp, Homo sapiens
gtggatgttcttgctttcgtggtccacgtggtggtgctcaccaacacccccctggaggaccagctgcgagtgggtgagttctgtcacaaccgtggcat

SEQ ID NO: 638025 - DNA, 100 bp, Homo sapiens
ctacctattgtccaaagcagtcgtaagaagaggtcccaatcccccactctttccgccctaatggaggtctccagtttcgatggtgttatctgaaaaggtt

SEQ ID NO: 638026 - DNA, 48 bp, Homo sapiens
tctcccagatatccggcacccaaaggactatgttcggagtgaactgga

SEQ ID NO: 638027 - DNA, 100 bp, Homo sapiens
tcatctctctataaagttatccaggagccacaaagtgagacagtcagtcggatgcggagactgcagccgccgcgggcgaagtgctagacctcacctcacg

SEQ ID NO: 638028 - DNA, 75 bp, Homo sapiens
gaacatcccagaggccagcatcaacatggtggacggcacgtggattatgtggtagatcaagttgttggtaaactg

SEQ ID NO: 638029 - DNA, 100 bp, Homo sapiens
ggagggggaccaccgtggagagcgcggtcccagcccggccactgcggatccctgaaaccaaggaggacatgtatgcccaggactctatagagctactaac

SEQ ID NO: 638030 - DNA, 88 bp, Homo sapiens
tcggaatggtggagaacttcaaccaggcactcaaggccatgggtgtgtacctctacggggagctgatggtgagtgaggacgccagaca

SEQ ID NO: 638031 - DNA, 50 bp, Homo sapiens
aatgcactcggatgccgccgctgtcagccgccatggcatcagatgaaggc

SEQ ID NO: 638032 - DNA, 83 bp, Homo sapiens
aggctccctgcctactcccccaccggggatttcagaaaccaaggtgtatgttggtaacctgggaactggcgctggcaaaggag

SEQ ID NO: 638033 - DNA, 75 bp, Homo sapiens
ccgagcttggcgtgtgctaataaatgtgtcttctgttggcgatatacctgtgtttcccacaatcacagccactgt

SEQ ID NO: 638034 - DNA, 51 bp, Homo sapiens
gagctgagcgctcggaagaaccaaggtgcttaatttacccatttctgatgc

SEQ ID NO: 638035 - DNA, 97 bp, Homo sapiens
cgctggtgcagcttcacctggccgggctgcgtcgcttcgatgccgcgcagggtggtgaagactcccggctctcagctgccccctgcatcagacccag

SEQ ID NO: 638036 - DNA, 100 bp, Homo sapiens
caccgggatcgtgaccgagaccgtgaccgagagcgtgaccgagagcgcgaatatcgtcatcgttagaagtgctctggctattgctgaaaacaccttctag

SEQ ID NO: 638037 - DNA, 82 bp, Homo sapiens
gccgcgcctggcctggccgggaccatggggcagaaccccttcgagctggccttctccctagaccagcccgaccacggagact

SEQ ID NO: 638038 - DNA, 100 bp, Homo sapiens
ggaatcaggcagttttgtgtccatgtgaacaactgtgagggcttccacaactaccaccactcctttccctatgactactctgccagtgagtaccgctggc

SEQ ID NO: 638039 - DNA, 95 bp, Homo sapiens
aggcgagggagcccgcgtcggctgagagcccacaggcccccacaggtgtgtgcagtggcctcagggatccggaaagtctaggactgaacttctcc

SEQ ID NO: 638040 - DNA, 100 bp, Homo sapiens
cgcttccggcccctgcacgtccgcaaccttctcagcgcctatggcgaggtcggacgcgtcttctttcaggctgagggtgccacacctccctggatgatcc

SEQ ID NO: 638041 - DNA, 83 bp, Homo sapiens
atggttgccggctcccctctcaggacaacccagatgtgcaacaaagtgcgatggttctgcggggagtgtctccagccctgcct

SEQ ID NO: 638042 - DNA, 100 bp, Homo sapiens
taacaaccatgtggtgaggaattcaagagctgaaggacaaacactggttcagggctatggcctctttgggcattgcattgtcctgttcatcacctataat

SEQ ID NO: 638043 - DNA, 83 bp, Homo sapiens
tccaggtccgacccgcgaacccctctgggatccccgccgctctgtctacaacccgaggaacaagatcactcaaggtgaaggat

SEQ ID NO: 638044 - DNA, 90 bp, Homo sapiens
gacaagctggtgcagaacattgcgcggcaggattccaatgagagagccatccccctcctcagatctgacatcgtgcgcattctctcagcc

SEQ ID NO: 638045 - DNA, 82 bp, Homo sapiens
acggtctgggccgccgaatctccggccgaagagcggcggcggcagcggcggaaatctggcattttttaaagtttgcgcccca

SEQ ID NO: 638046 - DNA, 101 bp, Homo sapiens
tgccacccgcgctccctccgccgccgccgccttgctgctgctcaaagctgctgccgccccttgggctaaaaggggatatcattttcaatgcccaataccca

SEQ ID NO: 638047 - DNA, 75 bp, Homo sapiens
gttcgaagctgagtatgtgacaggggcggagaaactcatcatccacctgcggaaacatggcatcccctttgcact

SEQ ID NO: 638048 - DNA, 82 bp, Homo sapiens
tgtaaagcacgaacaggaatacatggaagtccgggagagaatacacagagccactctggaggctgccatcgagaacctcaat

SEQ ID NO: 638049 - DNA, 50 bp, Homo sapiens
cagagcctccaagggaaaacgatgctgcagttggagaagaaacttgaacg

SEQ ID NO: 638050 - DNA, 74 bp, Homo sapiens
gcgaggaagaagaggacgacgacgacgaggaagaggaggtttctgagatccaagaaaacattcttggccaaaat

SEQ ID NO: 638051 - DNA, 83 bp, Homo sapiens
ctgccggagcccgagtggatcggggacggagagaacacgagcccatcaggtgcccgtggttgacacgagctgtgtccccagct

SEQ ID NO: 638052 - DNA, 100 bp, Homo sapiens
atgttccgggctacgctgcggggatggagaaccggtgtccagcggggctgcgggctacggctgttggtggggctcctgtacgaagagggtgttcgcaagg

SEQ ID NO: 638053 - DNA, 74 bp, Homo sapiens
aagaaacaaaagttcacctctgcgaagacatatctgaagagatggattaagaatgctttggattaaggattgtg

SEQ ID NO: 638054 - DNA, 90 bp, Homo sapiens
ttttgagaacctcctctcccacttcttgccccagaaagccccagacggaaagagctacttgctgactctggattaatcgaattacagctg

SEQ ID NO: 638055 - DNA, 98 bp, Homo sapiens
tttcttcggcattctgcaacaggttatgagaagacagatgatgtttcagagaagacctcactggctgaccaggaggaagtaaggactattttcatcaa

SEQ ID NO: 638056 - DNA, 97 bp, Homo sapiens
atccatcctgatgctggtcaccggaggacggctcagcggtctgatgcctggagcaccactgcagccagaaagcgagtccgctgcctggcccggaagc

SEQ ID NO: 638057 - DNA, 100 bp, Homo sapiens
gccgagggccaccccctggtcctctgccctcgcgccccgctagggccaggtgccttagctggaccaattattgtggagccacatgtcacagcagtatggg

SEQ ID NO: 638058 - DNA, 82 bp, Homo sapiens
ccgaagaagactcccccacatctgggcctccaccatggacagaggccaggccctgcccctcccaggcagcctggctccttct

SEQ ID NO: 638059 - DNA, 83 bp, Homo sapiens
caggtccccatggtggccggctcccctctcggggcaacccagacgtgcaacaaagtgcgatgcaattctgtggtgttcttggt

SEQ ID NO: 638060 - DNA, 100 bp, Homo sapiens
cgcctctgtgccactttgcatcccacgccggaggaggcattaacgagaccgggtaagcataagcagtactataatggatgtagacagcacaatttccagt

SEQ ID NO: 638061 - DNA, 82 bp, Homo sapiens
ggagtatctggtgaaatggagaggctggtcgcccaagtcctgaacgaggctgtgggggccctgatgtaccacaccatcactc

SEQ ID NO: 638062 - DNA, 138 bp, Homo sapiens
tggtcgcactgagggtgaagtggcaggaggaggaggaggggctccggctggtctgtggtgaggccctgtctctgcccctggtggtcatcgtccatggcaaccaagacaacaatgccaaagccactatcctgtgggaca

SEQ ID NO: 638063 - DNA, 74 bp, Homo sapiens
acgaccaagagggtgttcgactgctagagccgagcgaagcgaaactactttgcttcgcactttttcatgggagg

SEQ ID NO: 638064 - DNA, 82 bp, Homo sapiens
atccgaaaatataattacgttgctatgctggtaatgccgctgtcatcaaatatgaggagaaacctccaaaaccagcatttca

SEQ ID NO: 638065 - DNA, 101 bp, Homo sapiens
tcagcgaggaagctacacttttcaccaaggaactggtgctgcagcgagaggaatactcccccagttgcaagaggcgcaggaccgtggaagacttcaacaaa

SEQ ID NO: 638066 - DNA, 74 bp, Homo sapiens
cccgtgtccttcattgccacgtacagcctagaatatattgatctgatggaaacaacccagtacatgaatgaggg

SEQ ID NO: 638067 - DNA, 75 bp, Homo sapiens
aagcagcaacagctggcagcatcacccccggacagcaaggcgctcccactgccctcctagaccctcggagctacc

SEQ ID NO: 638068 - DNA, 102 bp, Homo sapiens
ggcctccccagccatgctgaactgcctgtcccctcagttcccaggtgccatgaggaagcctcgtcggaagtcccggcagaatgccgagggccggcgttcccc

SEQ ID NO: 638069 - DNA, 50 bp, Homo sapiens
ccctgagacggtgtcccgccgaaagataagagtgcccaggagtggaatct

SEQ ID NO: 638070 - DNA, 100 bp, Homo sapiens
gcgggatgctgggcttccccagcgaaaagagggtcaacgcggccttctacaggaaatgcttccagactgcacacttttacttagaggacagtacatcccc

SEQ ID NO: 638071 - DNA, 100 bp, Homo sapiens
ctggtggctccgcggattataacaggtccctggatggccggttgcaggtgtcccatcggaaggggctccctcatgtcatctactgccgcctgtggcgatg

SEQ ID NO: 638072 - DNA, 100 bp, Homo sapiens
ccccgccggttcgcgtctctctgctgcggcgcggggaccgctgtgctctcgaactcttaaaacgcctagatgacgtgtccaacgatgtgaggatggcagc

SEQ ID NO: 638073 - DNA, 49 bp, Homo sapiens
agtgaagctacagaccttcgcggcagcagtgaggatgccagagttcatg

SEQ ID NO: 638074 - DNA, 74 bp, Homo sapiens
ggcgatgtccatctgccaccgtggcactggtattgctttgagtgcagggcacctcaacacctttgcttcgaata

SEQ ID NO: 638075 - DNA, 88 bp, Homo sapiens
ggaatttaagaaacatccacagcagcgactggcccaagttctttgaaaaggcctgcgcgatgcaagacgggagaaaaggaggggcgta

SEQ ID NO: 638076 - DNA, 55 bp, Homo sapiens
cggaggagtctcagagctgtcagaaagaatttacatagtacatgacgaagttaag

SEQ ID NO: 638077 - DNA, 90 bp, Homo sapiens
gaagcctgttcagcagcattggtgaagttgaatctgcaaaacttattcgggataaagtagcaggaaagaccacagcaagattctttcatt

SEQ ID NO: 638078 - DNA, 82 bp, Homo sapiens
tcgtgtccaggttcctcatgggcagtgctcggggtgacaaagaaggaatactcccccagttgcaagaggcgcaggaccgtgg

SEQ ID NO: 638079 - DNA, 95 bp, Homo sapiens
gaattgcactctaatgaagcaatacattgagtttgtggcagacagacttatgctggaactgggttttagcaagtattattttggcgacttcaatt

SEQ ID NO: 638080 - DNA, 83 bp, Homo sapiens
acaagccagtctcgatgagaaacagttggccaagctccacacgaaggtttaagtggaaaccctgcagatttagaaagaagaga

SEQ ID NO: 638081 - DNA, 76 bp, Homo sapiens
tcatggaatcccttgcatggctctcaggaggaatgatcaattggaatcgtctttttcctcctttacgtcagcgaca

SEQ ID NO: 638082 - DNA, 83 bp, Homo sapiens
gtaggaaggaacttggttccccctccctcagcttccgccccaaaaggtgcaatggatgagcttcatagtctggatccaagaag

SEQ ID NO: 638083 - DNA, 50 bp, Homo sapiens
attccacctgccttgacatgtgattcccaaatgctggaaaatcctctttg

SEQ ID NO: 638084 - DNA, 75 bp, Homo sapiens
cggcctcgcggagcccgcgcgccgagccccactacctgtttgaaaatggtagaatagataacatttttactgagc

SEQ ID NO: 638085 - DNA, 100 bp, Homo sapiens
caccattgtgatcacatggacgcctgctccaagaattggttttaagaccccccagttcccttcaggatgatggaggatgcggaggccccgggagagcagc

SEQ ID NO: 638086 - DNA, 50 bp, Homo sapiens
tgaggagaatatccattattatgaacagacggaatcttgctctgtcgccc

SEQ ID NO: 638087 - DNA, 75 bp, Homo sapiens
ggtacttcaggatcctaatacttggccatctccacacaaaaactgcttggaaactccctgctgaaactggaaggt

SEQ ID NO: 638088 - DNA, 100 bp, Homo sapiens
gccagcgccagctgcagccctggccgcgcactcgcctcagctgagcctggttgcaggaattgtgccttggatccatccatccagtcagctgaaaccagca

SEQ ID NO: 638089 - DNA, 100 bp, Homo sapiens
agcctagcttggagtcctggcctggaaagcttgaatatgaaaagtcagatgttgaaagtgtgatgaacagtgtggtatccctactcttgatcctggaacc

SEQ ID NO: 638090 - DNA, 100 bp, Homo sapiens
cccgacttatcgacatgagcaggcaccaagtttggtaactctcattcgacatccatctgaactaatgaatgttcctcttcagcaacaaaacaaatgtaca

SEQ ID NO: 638091 - DNA, 83 bp, Homo sapiens
tctgcctcttgatctccgccaccgtcttcaggccagcatcaaggcatgccatgggttgcctctcataaatggccaaagctgtg

SEQ ID NO: 638092 - DNA, 98 bp, Homo sapiens
aaattcctgggcacctggaaacttgtctctagtgagaactttgacgattacatgaaagctctgggcagattttttgaaaggactgcctgtctacaaca

SEQ ID NO: 638093 - DNA, 75 bp, Homo sapiens
ctgtcgtgtcgtcgctgctggcacttcaggctctgctcttcacagatggaatcacaaataaacttattggctgtt

SEQ ID NO: 638094 - DNA, 90 bp, Homo sapiens
tctctgtttatttagaagacacagactaacaattttagatggggctttgttatgcacctaaagccatattggaagctccagaagaaagag

SEQ ID NO: 638095 - DNA, 89 bp, Homo sapiens
cgctaccggactacatgtcggaggagaagctgcaggagaaagctatccgtggtcctgaaccagttatgtgtgttgcatgagaaaacgcc

SEQ ID NO: 638096 - DNA, 75 bp, Homo sapiens
ggcctccttcaccctgctggttggcatctacttcccttccgtgaccggaggcatacacggaatacctgaggagca

SEQ ID NO: 638097 - DNA, 100 bp, Homo sapiens
tgaggagttggcggcggcgcgacccggggaaccggcattgatattgatgatgttaagaagttcaaaccgggttacctggaagctactcttaattggttta

SEQ ID NO: 638098 - DNA, 75 bp, Homo sapiens
cctatgactacgtctttgactggaacatgctgaaattcaaaactgtcgctgaaaagcaggagaagagaaatcagg

SEQ ID NO: 638099 - DNA, 96 bp, Homo sapiens
gtcaaggagccctaaacagccaggaggaagaagaagtcattgtcacagaggagggtgtttgtgagatatggttgaccagtgaagacacgggggctt

SEQ ID NO: 638100 - DNA, 80 bp, Homo sapiens
gaagagggctcaacttagccaatattttgatgctgtcaagaagaaaaagtcagcactttttgaagtgtctgaggttatac

SEQ ID NO: 638101 - DNA, 90 bp, Homo sapiens
ctcaggcctttagtgatgatggttggtcaaagaaaaagtgatgtatgaaaaagaggcaaaacaacaagaagaaaagattgaaaaaatgag

SEQ ID NO: 638102 - DNA, 89 bp, Homo sapiens
ccacctgagaaccatgctcaccgaccctgactcacagaaaacactggacttccccggaagctacttgaaaaacatgacccctggccggc

SEQ ID NO: 638103 - DNA, 88 bp, Homo sapiens
gctgtgttgacatcaaggatctaccagcggatgtgatgctggtacaacccagagtagaatttattctgtctttcattgaccacattgc

SEQ ID NO: 638104 - DNA, 100 bp, Homo sapiens
gacaagaaaaacaatcgcttcaatgatgggaaggtggatcccgccgggaggtactttgctgagagagtctacaaggagattgaacaggtggttggcccac

SEQ ID NO: 638105 - DNA, 90 bp, Homo sapiens
catcaaaaatagtgatagctttgataatttggcaatgaggagcagcagctggcgtgggccaagcgggagagcgagaaggcggaacaggag

SEQ ID NO: 638106 - DNA, 50 bp, Homo sapiens
cagtccctcgtccagccacccccagaatgatctctgcctttcacaaagac

SEQ ID NO: 638107 - DNA, 100 bp, Homo sapiens
caaggccaaagttctcagccaagaaaagtggtgtcacaattcaggcacttcagacaccacctccaacaacacagcaaccgtgatttccacagcgcctcca

SEQ ID NO: 638108 - DNA, 83 bp, Homo sapiens
gtagagcggagcctggcgggcgtgggaacccaggccccgccgaggcggccagaaatgagccgtcagactgctacagcattacc

SEQ ID NO: 638109 - DNA, 126 bp, Homo sapiens
tttcttccaaagcacaggaatctcactctgttaaagctggtctgttctaactgaggaagttggtgaaccatctaaagaagagaaggctgtggccaagtatcttcgattcaactgtccaacaaagtc

SEQ ID NO: 638110 - DNA, 100 bp, Homo sapiens
gtgtatgaccacaaacagccatcaaggtgatgatgaacagtctacacagatggctgcaagttgggaagatgataaagttacagaagcatcttcaaacagt

SEQ ID NO: 638111 - DNA, 50 bp, Homo sapiens
caaagatgaagatgaaaccaagcccttgatacactgaagagatggtgcct

SEQ ID NO: 638112 - DNA, 83 bp, Homo sapiens
cgacaagccgctggcagccgcggatctcaccgccgctcaggaatgtatgacaacatgtccacaatggtgtacataaaggaaga

SEQ ID NO: 638113 - DNA, 100 bp, Homo sapiens
ccttggaacgccgacctgaaaccatctctgagcccaagacctagtagatgaactctatgaagcttattgtatccagcgacgcctccaggatggtgccagc

SEQ ID NO: 638114 - DNA, 51 bp, Homo sapiens
cacaggggccactcagagtcgcccgagaaagccgatgatgagcaccccacc

SEQ ID NO: 638115 - DNA, 80 bp, Homo sapiens
cactgtccgggatcagttattctaaagtagggggaaccaagcctgctggtggtgattttggagaagtcttgaattcggct

SEQ ID NO: 638116 - DNA, 74 bp, Homo sapiens
gagcccagaggtcctttgaatcatctctacagagaactgaaatttcttcttgtagctcagattgtcaagaatga

SEQ ID NO: 638117 - DNA, 89 bp, Homo sapiens
tctcatctcgctcggctgcgggaaatcgggctgaagcgactgagtccgcgatggagggcggaccccggaggcctgagcggcacctgccc

SEQ ID NO: 638118 - DNA, 116 bp, Homo sapiens
cacccgcccgcccaaggtctctcgcgggcgggagaacggaaaactcccaacttcctgggtcccgggattcttgagctgtgcccagctgacgagcttttgaagatggcacaataacc

SEQ ID NO: 638119 - DNA, 82 bp, Homo sapiens
gaaattggtcattctcgctaacaactgcccagctttgagggagaagtttctgcctggattgaaacaaaaaaacacaggcgtc

SEQ ID NO: 638120 - DNA, 75 bp, Homo sapiens
cagtccaatcccaaattcctttgtgctgactatgccgagcaagatgagaccgaatccgggataccttgatccatg

SEQ ID NO: 638121 - DNA, 100 bp, Homo sapiens
ttgcttttcaagccaaggatgtggaaggatctacttctcctcaaataggagataagaattacctctctgaacaggactttgtgtctgtgtttggcatcac

SEQ ID NO: 638122 - DNA, 80 bp, Homo sapiens
ttcatttcaggctccttctaaatggccaagctcagaccatgaccgacttcataccttggtaactgaacactgttttccag

SEQ ID NO: 638123 - DNA, 97 bp, Homo sapiens
ttagtgaggctcagagatgcctgtaccgtgatgtgacgctggagaacctggcacttatgtcctccctggtgagttattctccccacctcagaagtac

SEQ ID NO: 638124 - DNA, 127 bp, Homo sapiens
aactaagtcttgggcgccgcgacgcctttcctacggaataggtcctggaaggaagaccatttaagtggatcgcagctccaagaggaggcaggtgaagcctttggcagcttctctgctggaagctctt

SEQ ID NO: 638125 - DNA, 98 bp, Homo sapiens
aaatggctgcgagaccctagaggcctgcggcctgcggagcatcagatccatgctgctgctgactcggagccccacagcttggcacaggctctctcagc

SEQ ID NO: 638126 - DNA, 82 bp, Homo sapiens
cagaaacgtccacatgtgggtactgcattcctaccggtgtgacagagatcctgaaggagctagacgagtgctacgagcgctt

SEQ ID NO: 638127 - DNA, 101 bp, Homo sapiens
tcactgggccagcgaaattgagcatgggcagaggaatgcccagaagtgtccaaagtgcaaggatggacctggcttctatactaccaggtgtcttgcgccca

SEQ ID NO: 638128 - DNA, 98 bp, Homo sapiens
tatgtcgcctgccaccgagccgggcccacctccccaccaaggaaggccctggccaacgtcaacattgggagcctcatctgcaatgtaggggccggtgg

SEQ ID NO: 638129 - DNA, 75 bp, Homo sapiens
ctccggcaggcagtcacaagcagcagaacttcgggttgttgtgggctgcacactgcagaaagatacagctgaaaa

SEQ ID NO: 638130 - DNA, 85 bp, Homo sapiens
gagccgccggccgctagcgtcagcgccagccaggaatttgaagcctacattaatgcttctggagaacatggaattgtggttttct

SEQ ID NO: 638131 - DNA, 100 bp, Homo sapiens
ctcacatccgatgcaccctttttgtcagattatcaggatgaggatacctctaacctatttggaaacagtggggccaagacatttggtggatttgccagct

SEQ ID NO: 638132 - DNA, 75 bp, Homo sapiens
tggatttaagcactgctgcactttatgagggcaccatgccggtggaaaggatgcgcatgcgcccgtggctggagg

SEQ ID NO: 638133 - DNA, 100 bp, Homo sapiens
tctccatttggagtatttggatttgaagaaaagactgtccttgaatgggcaagagggcacatgaagtacggcgtcctccacattcacggcctctacacgg

SEQ ID NO: 638134 - DNA, 96 bp, Homo sapiens
ccatttcctgcctatcatttgaagacgttccttgaggaggtttgaaaaagacaggaaaggccatgtgaggacatagggagaaagcagccaccattg

SEQ ID NO: 638135 - DNA, 100 bp, Homo sapiens
attcttccactgatatctcaaaaggtgatctggacaaaggaacaggtatctcaggtgtctgtgacctttgaggatgtggctgtgacattcacccaggagg

SEQ ID NO: 638136 - DNA, 82 bp, Homo sapiens
ttcagatcttcacagcacagttcctgggaaggtggagccaccagcctctccttggttgcctgttcactctgatcgtagtatt

SEQ ID NO: 638137 - DNA, 98 bp, Homo sapiens
ctgaagcacggcggctcgggccgtgggaccgatcattgaggaggcgaaacgatcccttcacgatgctttgtgtgtcatccggaacctcatccgcgata

SEQ ID NO: 638138 - DNA, 100 bp, Homo sapiens
ttcaccgccgcagaccccttcaagttctagtcatggtccaggagccggctgtgcacatcccaggacaggagcccctgaccgcgtccatgctggctgcggc

SEQ ID NO: 638139 - DNA, 99 bp, Homo sapiens
gaagtggctgtgggtattgctgcggctggtgcgtcgtcgctctaggctcagtttatgaacctcttaaaagcattaatcttccaagacctgataatgaaa

SEQ ID NO: 638140 - DNA, 75 bp, Homo sapiens
cgcggggaccgctgtgctctcgctttagcgtcacctccctcactgggcagcatgggggagaagtcagagaactgt

SEQ ID NO: 638141 - DNA, 50 bp, Homo sapiens
gcctctctaaaggaaaatatcaatcagccatgactgcctttgcactgtcc

SEQ ID NO: 638142 - DNA, 101 bp, Homo sapiens
cttttcttcttgaaattaggcagactcttcaaaacgcactcattcagtttgctactagatacccttcatgagacccaactctgccacagctcatcctcgga

SEQ ID NO: 638143 - DNA, 75 bp, Homo sapiens
tttgtagaagaggagcatctgctccagtacgaattggagcaatgttggcttatacacctctggatgagaagagcc

SEQ ID NO: 638144 - DNA, 51 bp, Homo sapiens
tcagcctcctgagtagctgtgattacaggacagacaatgctgtgaagaatc

SEQ ID NO: 638145 - DNA, 50 bp, Homo sapiens
ccgcagcgatggctgccccaccagaccatggtgaatccgggcagcagctc

SEQ ID NO: 638146 - DNA, 80 bp, Homo sapiens
acttctcctgattcccagtcagcaaggccagctaaccgcacagttccagtgtctcgccccatcctcaccctcagggttcc

SEQ ID NO: 638147 - DNA, 100 bp, Homo sapiens
tggaacagtttgaggacctcctggtgcgcatcctgctgctggctgcccttgtctcctttcttgtctttaaccgaactgtcacactgaaggaagacccagg

SEQ ID NO: 638148 - DNA, 82 bp, Homo sapiens
ctacgtgggcttcaccatggacaagctggtgcagaacattgcgcggcaggcctggtactgtggcgctccgtgaaattagacg

SEQ ID NO: 638149 - DNA, 74 bp, Homo sapiens
acctaactagctccaggttaggccgagctttgcgggaaagcagcgatgatcatgacgcagtcctgaggtttaat

SEQ ID NO: 638150 - DNA, 90 bp, Homo sapiens
cccgcgggcgtaagcggactgcagccgcgagctcctggaggcggcgggatggaggcggcggccggactggcattgcggactgacctccag

SEQ ID NO: 638151 - DNA, 75 bp, Homo sapiens
tccccgtccctgctgctctccaccttcgtggggctcctgctcaacaaagccaagacttttttgtataacgagctc

SEQ ID NO: 638152 - DNA, 98 bp, Homo sapiens
gaaaacattttgactttggctggggaatgtatcctgtcaggtataatgtcagtgaatggcaagaaagttcttcatatggatcgaaacccttactacgg

SEQ ID NO: 638153 - DNA, 75 bp, Homo sapiens
aggagctgtacggcacctgggagatgctgtgtgggaacgaggtgcagctgccactgcagagccccgccatggaag

SEQ ID NO: 638154 - DNA, 100 bp, Homo sapiens
caaacagtgccctgatctccgttggctgcttggccatatttgtcactgtgatctccctcttggtgtacaagtgtgatgaatgcagactctgctaccattt

SEQ ID NO: 638155 - DNA, 95 bp, Homo sapiens
gattcttttgagtacactggccatgtatttagcatttacgtgtggcttaatcagaggtggcttatcaaacttgggaataaaaagtattgtaacag

SEQ ID NO: 638156 - DNA, 100 bp, Homo sapiens
atgatgtattttgtgatcgcagcgatgaaagcaaattgtggctactaatttgccccctgaagatcaagatggctctggggatgactctgacaacttctcc

SEQ ID NO: 638157 - DNA, 100 bp, Homo sapiens
ctgtttttcctgagcaaccagagaaaccacttgaccttgcacatatagtgtctgtttatgatggtgaagaacatggacgtttcatggagaagcttgaaac

SEQ ID NO: 638158 - DNA, 82 bp, Homo sapiens
attgtgtaatggctgaaattgagaaattggggcagaagtatcgagtggctctaagtaacatccaggagatgagggctcggca

SEQ ID NO: 638159 - DNA, 83 bp, Homo sapiens
cggcggcccggcccggctcgacgccaatgggtttggtgcacctcgatttggaggaagtagggcagggcccttatctggaaaga

SEQ ID NO: 638160 - DNA, 98 bp, Homo sapiens
gttggagattctccggggacccttccgtatctgcctaggcattttgctgtctcctcctaatacgcacgaaagcaagagattatcaaagtcactgaaca

SEQ ID NO: 638161 - DNA, 90 bp, Homo sapiens
caggaagtgctgcttcaaacgggcagggctctaggaaacatatgttacgatagcctggtgccaccgaacatcgcagaactgaagaatttg

SEQ ID NO: 638162 - DNA, 96 bp, Homo sapiens
accgcctccagctgctgctctcctcgacatggaccctgagacctgcccctgcccttctggtaccgagcccctgaactgctgttgggaaccaccacg

SEQ ID NO: 638163 - DNA, 82 bp, Homo sapiens
tgctgcatagtttcggtcatctaaaggaggttttaaacagtataacaggagggccgcaagaacgagatgctgctgtccaagg

SEQ ID NO: 638164 - DNA, 83 bp, Homo sapiens
gctcacggacatcaacgaggcctacgtggagacgctgaagcttcctggagatgatggaggctcgcagccgtggccatgcgtcc

SEQ ID NO: 638165 - DNA, 80 bp, Homo sapiens
tcaggcagcaacatggcaagacggtggtgggccaaatcactgtggacatggttgggttcaaccaaagggaaggagccaag

SEQ ID NO: 638166 - DNA, 100 bp, Homo sapiens
ctcctggcagttgtcatatgtactgtgtcagccatcatgtgtgtcagcatgagaggagatacaactcgtcaacgaatcaaattcagtgatgacagagtat

SEQ ID NO: 638167 - DNA, 97 bp, Homo sapiens
cgggactggagcaagtcgctcacctgaaatgaaaaccccgagactcttcagttgaagttcgtagtgattgggaagtgaaagaggaaatggattttcc

SEQ ID NO: 638168 - DNA, 74 bp, Homo sapiens
cagaagtagctgaatgtgttactccattgctgaggagtgggctgaaatctctttaatgatggagggaagcaggc

SEQ ID NO: 638169 - DNA, 109 bp, Homo sapiens
cccggtggcccaggcctcggactccgcggccggcccggcgcggcccagcgccctcagagttgctggagaatgtaaccctaatccataaaccagtgtcgttgcaaccccg

SEQ ID NO: 638170 - DNA, 74 bp, Homo sapiens
gaagctgaagcattgcttcaaagcatggggctaactccagaatcccccattgacatgccaccactgctctttga

SEQ ID NO: 638171 - DNA, 82 bp, Homo sapiens
ctccgccgcagagtcccaccgccacagtaagactttgaccccgacgcaggcttcagtgattgccgcggatcagaagcctgag

SEQ ID NO: 638172 - DNA, 96 bp, Homo sapiens
gaggcgagggtgcgatggcgcggagcccgggacgcgcgtacgccctgctgcttctcctgggatccaggtccggcacgatcaagacccaggctacat

SEQ ID NO: 638173 - DNA, 89 bp, Homo sapiens
gaagagtcctgaccacaatggggaggacaacttcgcccgggacttcatgattcacagtctgagaatgaggcttcaccagtaaaacggcc

SEQ ID NO: 638174 - DNA, 95 bp, Homo sapiens
ttcaagagactgatcaaattgtgagaggaaaacagcctacccggttctgctgtgaatgggaacatagaattggagctcctggagttgaggaaata

SEQ ID NO: 638175 - DNA, 75 bp, Homo sapiens
aataatacccgagaggaaataggcccggcaggtgccaagtcctgccctgccaacttcttggcagctgccgacgac

SEQ ID NO: 638176 - DNA, 90 bp, Homo sapiens
gaagaccaccatcaacaatgagtacaactaccgctgctggaccacaaaccgctgccagaaaaggaaatcctcattgacgattcaatttgt

SEQ ID NO: 638177 - DNA, 100 bp, Homo sapiens
gctgggagaaactggcaaggagaagctcccgcggtactacaagaacatcggtctgggcttcaagacacccaaggaggctgaccagtgcaccggtcttcag

SEQ ID NO: 638178 - DNA, 90 bp, Homo sapiens
gacctactcacagataggaattgaagccgagtcgtccggaaatccattgcccgtgttctcacagttattaaccagactcagaaagaaaac

SEQ ID NO: 638179 - DNA, 51 bp, Homo sapiens
cccaccataccatggagtcctaacaggaaggaagacttcaagaagtcattg

SEQ ID NO: 638180 - DNA, 83 bp, Homo sapiens
cactgattagcaatttaaagatcctctccaaggtactttgaactcaagtaaacaaaagggaagattttctcgttgatactgga

SEQ ID NO: 638181 - DNA, 75 bp, Homo sapiens
ctgtctctgctcacagtgccaaggtgagaagccctaccactgcaactgggacggctgcggctggaagtttgcgcg

SEQ ID NO: 638182 - DNA, 97 bp, Homo sapiens
cagtggcagcgcgacctggccagctgccgcgactgggaggagcgccggaacgccgaggcccagctgaaaatgtgtgtctgacatgcaagctcagtgg

SEQ ID NO: 638183 - DNA, 96 bp, Homo sapiens
ggaagctgggcaggcacctgccctccagagctgagctcaatgtgcagcaatggatgacgacagcctggatgagcttgtggcccggagcccagggcc

SEQ ID NO: 638184 - DNA, 80 bp, Homo sapiens
agccgcctccttgacagtcttcggcaggaaggtgtcgtgaaaactacccctaaaagccaaaatgggaaaggaaaagactc

SEQ ID NO: 638185 - DNA, 100 bp, Homo sapiens
gaaatgatcagtagcaccagtgtttatggtatgggctacgtgagttcgtggtgattgcccctgctgcacacagtgacgctgttctcagcgaatctaagtg

SEQ ID NO: 638186 - DNA, 83 bp, Homo sapiens
cggaacatggactctgactcttgcgccgccgccttccacccggaggtctggccgtgggcctgggcttcggggcactggcagag

SEQ ID NO: 638187 - DNA, 74 bp, Homo sapiens
cgtgcttttcgcaagaacaagactctcggctatggagtccccatgttggtctctaattaacagaagatggcaaa

SEQ ID NO: 638188 - DNA, 82 bp, Homo sapiens
tggtgcatgagcaagctgctggatggcattcagatcgcaccccctccctccctggcggagcccctgaaggagctgttcaggc

SEQ ID NO: 638189 - DNA, 50 bp, Homo sapiens
gaggagcgggctgagctctcagaagggccgttaattaaggaaaagttgag

SEQ ID NO: 638190 - DNA, 74 bp, Homo sapiens
acgactagaaggacgactgcctggcgcgatacaaaaatgacctctacctggagcgcctgctgctgtgtgtgcag

SEQ ID NO: 638191 - DNA, 75 bp, Homo sapiens
gaagcgaagtggagagcgccagagtaatgggtctcttggtcttgctgtggcaccacgcgtaagatttcttcagaa

SEQ ID NO: 638192 - DNA, 50 bp, Homo sapiens
gttcaagacaggtgtttaagcagacaaggtctcaccatgttgcccagaat

SEQ ID NO: 638193 - DNA, 75 bp, Homo sapiens
gaacgggcggcccctggagatgattgagccgcgcacgctacagtacaaggaaacccagcgtttgctggcagaacc

SEQ ID NO: 638194 - DNA, 100 bp, Homo sapiens
catccctgtgtatgtaggagtgaatataaaaggacttcatctcctcaacatggaaactaaggaagaagaatttggtgttgatgattcttattctgaacaa

SEQ ID NO: 638195 - DNA, 100 bp, Homo sapiens
tgcctgtcttcagatcttcacagcacagttcctgggaaggtggagccaccagcctctccttgttgttgacctcctgtactggagagacattaagaagact

SEQ ID NO: 638196 - DNA, 80 bp, Homo sapiens
ctgaaaccacagacatgactgagtcctccatgaagagttccgaggattctgaagacgacggggagacattgctggaggta

SEQ ID NO: 638197 - DNA, 74 bp, Homo sapiens
aaactcacatgagacaaatgcgctcagcttcaattgggaggtggggaagacagggctccagctaccacaggacg

SEQ ID NO: 638198 - DNA, 100 bp, Homo sapiens
gtgctcaaaaatgtgataactttgctgaaaaaagacccctccttggtgtttgtaagagcattggatcttctggtaggatatatctgcatcttgaaaggaa

SEQ ID NO: 638199 - DNA, 76 bp, Homo sapiens
tttgaattgtgaaatacttccacctcttttagatactatactggcaattgctggagaagattttgcaattgttgct

SEQ ID NO: 638200 - DNA, 50 bp, Homo sapiens
gttcagcagcgcggcagagtcatgggggaagaggacacccaccctggtac

SEQ ID NO: 638201 - DNA, 76 bp, Homo sapiens
cgaccagttgcctgacgagagtgatctgcaactctttcaccatctgtaatgcggagatgcaggaagttggtgttgg

SEQ ID NO: 638202 - DNA, 126 bp, Homo sapiens
aatgagggacaacctgtttgaaataataacaagctccaggaccttctacgtacagacacgaatgcagagtttgagtccagatcccaaagcccagtacacaagtatctacggagccctcaagaaaat

SEQ ID NO: 638203 - DNA, 96 bp, Homo sapiens
aattatgaaacaacctggcccatgagatgatagctgtggaagcgggacgaccctgggacagtctccactggggcagatccagctgaccatccggca

SEQ ID NO: 638204 - DNA, 100 bp, Homo sapiens
catcttaactaaaagcactcccacgtctacaatggagtcgagtctagaattcacacagagccacctaggcatctatcgagctgtgcctattcgagtcaat

SEQ ID NO: 638205 - DNA, 96 bp, Homo sapiens
caaatttgttaaagagaggatagaaattgaacagaactatgcgaaacaattgaggggtttgttaaagttgttaagaataaggcctactttaagaga

SEQ ID NO: 638206 - DNA, 97 bp, Homo sapiens
tgcagccccattttacatctcaggttgtcctggtgacagacggctgtcttggcattggtagagggtcactgcgacattccctagccactcaaaatca

SEQ ID NO: 638207 - DNA, 75 bp, Homo sapiens
aaatgctattggggtaaagaatctcctgatatgactaaaaacttccaacaggcatttgcaagtaaaatcactggc

SEQ ID NO: 638208 - DNA, 75 bp, Homo sapiens
agccgaggccgccgccgcctctccttgctgcagccatggacattttgaaagcgaagcagaagccgtagaatcagc

SEQ ID NO: 638209 - DNA, 74 bp, Homo sapiens
ctggatccaaggaacactcttctggtggcactaacttagacagatcaaacagatgatggaggcagcaacacgac

SEQ ID NO: 638210 - DNA, 83 bp, Homo sapiens
cgccagccgcagtcttggaccataatcatggtggacatgatggacttgcccagttgcattaaaatcctcccctactgaaagaa

SEQ ID NO: 638211 - DNA, 90 bp, Homo sapiens
ctggctcaggctctggtggaatgagcttatttttatccaaagcagcgggtccatatggaatatttgctggtagggatgcctccagaggac

SEQ ID NO: 638212 - DNA, 111 bp, Homo sapiens
tgccaggcatcaagtggcttagcttgcctgagattgtggaggaatttgagaagctgatggtccaacaggcacctacaaaggcagcacctaagcaaaagattgtgaagcctg

SEQ ID NO: 638213 - DNA, 74 bp, Homo sapiens
cacaacaagggccggattctcacccaggctaccggctctctgaccagttccacgacatcctcattcgaaagttt

SEQ ID NO: 638214 - DNA, 90 bp, Homo sapiens
cagcttgggaactgccaccatcatcagtgagaacttgaacaatgaggtcatgatgaagaccgagaaggacatcctgctgcgacctgagct

SEQ ID NO: 638215 - DNA, 149 bp, Homo sapiens
ttgaagctcaagtattcaaagatccaaatgaattcaatgatatgtgaataactaaatgtctatattgtctcaattttctgagtttaaccagtaatgccattcagttgccaatctcaagcaaagcaaacataagccagttttaatctact

SEQ ID NO: 638216 - DNA, 90 bp, Homo sapiens
ggatttaagcactgctgcactttatgaggttaaacccatccagagtaatggctgcggccttacccaggaccctgggggagttgcagctgt

SEQ ID NO: 638217 - DNA, 96 bp, Homo sapiens
ctgaatccaggaagagagactgactgagcaacatgttattcagggtggattacaggaggtggcagaacagttagagctggaacggataggaccaca

SEQ ID NO: 638218 - DNA, 90 bp, Homo sapiens
agaagggcttcgtgcccaacatgcagcaagtctggaaaagtttgaaattccagtaaaaattcgtttgagtcctgaaccgtggacccctga

SEQ ID NO: 638219 - DNA, 82 bp, Homo sapiens
caagagaatgtgccgtcatatgaaaaagttctttggggtgactttcaagatggactctactctaacagcaagtgaaatccgg

SEQ ID NO: 638220 - DNA, 83 bp, Homo sapiens
cgtcatccgcggctacgtgggcaaccgggcggccacgttcccgctgcaggtcaaaatgcagatcttcgtgaaaacccttaccg

SEQ ID NO: 638221 - DNA, 83 bp, Homo sapiens
ctggtataccatcgtcaccatgacaacactaggatatctcccggggccaattcagcatctctacctggccatcctaacaaggt

SEQ ID NO: 638222 - DNA, 90 bp, Homo sapiens
cccctaccgggccggatcccgagactgccatccagggccatgcagcaaacaagcaacagggaaatatcccactatgcaatcctattttga

SEQ ID NO: 638223 - DNA, 100 bp, Homo sapiens
ctcaaactcctggactgaaacgatcctctcatctcagcctccaaaagtgctggcattacagtcccgcacggtgacctgccccatgtcagggaagcccctg

SEQ ID NO: 638224 - DNA, 76 bp, Homo sapiens
gaactccaagccaaaatcacagctttgagtgagaaacagctttggcagcatgtaagcagctgtttgccaagaaccc

SEQ ID NO: 638225 - DNA, 98 bp, Homo sapiens
taagggttcagcctttcaatgtgacacaaggaaagtattctacaggtcttgagtcaccacgtccgaatataattcttgggttagtaatctgccaaaaa

SEQ ID NO: 638226 - DNA, 100 bp, Homo sapiens
agaagagataagaggcccattgccaggttatacattggctcttcaaagacgttcacctcatcagagaaatccctgactcctttgcagtggtgtagacatg

SEQ ID NO: 638227 - DNA, 82 bp, Homo sapiens
gctcgcggggttgctgcgggagtccgtccccagggaaaagcctttcgctctaaagtggagttgattgcgtacttcgaaaagg

SEQ ID NO: 638228 - DNA, 80 bp, Homo sapiens
cactgaggccgttctcgcgatgctgtcttacggagccttcacgtaaatgggtccagtcatgcctcccagtaagaagccag

SEQ ID NO: 638229 - DNA, 98 bp, Homo sapiens
gagcgagagcgagtgcctgagcaacatccgcgagttcctgcgcggctgcggggcttccctgcggctggagatgtccggtctgtgctacgacagcaaaa

SEQ ID NO: 638230 - DNA, 87 bp, Homo sapiens
cggcttcatgctgtgcagcaagaacccgattgcgcagtctctttgtggagaggacttgatcattaaaggaatcagcgttcatatatc

SEQ ID NO: 638231 - DNA, 51 bp, Homo sapiens
tttcactagagatcaatgggaaggaaactgctgcacgagtaaatcaatcag

SEQ ID NO: 638232 - DNA, 82 bp, Homo sapiens
aaggaaaaatcgagcagaaagaatgtctttcaggtggttctgctgggcatggacatcctgtccgccctggtgacccggctgc

SEQ ID NO: 638233 - DNA, 156 bp, Homo sapiens
aaacccttaagaaaaagcgaaggaatttcgcagagctgaagatcaagcgcctgagaaagaagtttgcccaaaagatggttgcaagaaagctcaagtagcctatggagaggatgcaaggcttccagctgatgccctcagccaggctcagtagcagcc

SEQ ID NO: 638234 - DNA, 90 bp, Homo sapiens
cggcgtacgccctcatggggaaaatctccccggtgactttcaggtttctaccatgaatgaaatgaagagttattctcaagctgtcacagg

SEQ ID NO: 638235 - DNA, 100 bp, Homo sapiens
agaacagcccaatctcctttctgggcaaacgttccaagctaaaccaggtggacaggtgaaatgtcagtatatctctgctgtggataaagttatatttgtg

SEQ ID NO: 638236 - DNA, 83 bp, Homo sapiens
ggaaaacagagcgaagggggagtgtccggttgatcccagtttgtcaggcaggccactacaatgcagatcttcgtgaagactct

SEQ ID NO: 638237 - DNA, 75 bp, Homo sapiens
caggaccagctgcagctgctgacgtagacaagtttggcaacgagatcacccagctggcccggcccctgcctgtgg

SEQ ID NO: 638238 - DNA, 83 bp, Homo sapiens
gaccagacaggcggcgccatcttcgaacttagacttccggaaggactttggcgagggccctgggaggagcggggacactgagg

SEQ ID NO: 638239 - DNA, 75 bp, Homo sapiens
gtgatgcctgcagagctgtggcttaccagggtgcgcctggctgggatgaagatctctcggccccccacatctgta

SEQ ID NO: 638240 - DNA, 97 bp, Homo sapiens
aggattccaagtaactcttatttggtgtcatggagaaactccagctgggcccagagattctgcagcgggaaaatccaaggcttatttatgccaggct

SEQ ID NO: 638241 - DNA, 100 bp, Homo sapiens
gagccagcagttctccctgccctccttcaagattgacttctcggaatggaaggatgacgagactctccaggctcaaatcaaaagactggaaatgaacaag

SEQ ID NO: 638242 - DNA, 83 bp, Homo sapiens
ctccaacaatgagcaactgcccatgctgggccggcgccctggggccccggagaggtgagccggcctcatcctagtgactaccc

SEQ ID NO: 638243 - DNA, 100 bp, Homo sapiens
atgccttcacctgaatgacatctacctccatcaggaccccagatgtctgacagccctgtgtgacaccaagataagtaacatcaataagatggagtggtgg

SEQ ID NO: 638244 - DNA, 75 bp, Homo sapiens
gtccccacttcatatgtcgaagtctgtttggacaaaaatgccaaaggagtcgcaatcccagcagcaatagcccag

SEQ ID NO: 638245 - DNA, 75 bp, Homo sapiens
actggatccacccagtgaccggacttctcacccccaggatgtcatcgaggatgatgaagaacgagagcttcaaat

SEQ ID NO: 638246 - DNA, 74 bp, Homo sapiens
cggatgtcggcgaagagttcaaccaggaagcattgatggcagctgaaattagccaaaaaaatattaaaagacat

SEQ ID NO: 638247 - DNA, 76 bp, Homo sapiens
gcaaagcccaacaccttcccccactggtttttcatttctaacaaccagatggccccacctggacctgccaaccagt

SEQ ID NO: 638248 - DNA, 50 bp, Homo sapiens
agttttgcctcagcccttcgtactgaaactgttgaggagcccatggagga

SEQ ID NO: 638249 - DNA, 99 bp, Homo sapiens
aaggacttttttcaggcagaaaacaagtctcgtctggacgaatcatattctaagaactcagccactcaggtatccaccatggtgctgggtcctgaacag

SEQ ID NO: 638250 - DNA, 100 bp, Homo sapiens
gtcggcagtgaagctcaagttgctactcgggacgctgcacctcccgcgccgcacggtggacgagtccctgaagaggaaggagaaggaatatgagcatgaa

SEQ ID NO: 638251 - DNA, 76 bp, Homo sapiens
gaaagtttcaagaggcataagatacagattctcttcctggacattctgttgccctctgtttagctgttgcctttaa

SEQ ID NO: 638252 - DNA, 104 bp, Homo sapiens
gggagactgtgccgtggagggcctcgccatgtcctgctgcccgacaatgcagatcttcgtgaagactctgactggtaagaccatcaccctcgaggttgagccca

SEQ ID NO: 638253 - DNA, 82 bp, Homo sapiens
tttgccaagttcagcaaatttggagatgcaaatcagccggcaccaggagcagttcatccagatgctgaacgagccccctggg

SEQ ID NO: 638254 - DNA, 100 bp, Homo sapiens
tgcactggccatccagcaactggctgagggactcacagctgatgacctgctgctcgtgctgatctcagttgtcgagatgtccacagaaggaggatttggt

SEQ ID NO: 638255 - DNA, 100 bp, Homo sapiens
tttgctgggagactcagctggggctcattttcacatctctcctgaatggatcacagcgtcgcagatgtctttggaagaagctgtttgttttgattctgag

SEQ ID NO: 638256 - DNA, 100 bp, Homo sapiens
tagcgttagaagcgagctggaatgcgtgaccaacatcaccctggcaaatgtcatccgacagctgggcagcctgactcctgggcaacgtgctggtctgtgt

SEQ ID NO: 638257 - DNA, 87 bp, Homo sapiens
aggatgtggtggtctactctgatgtcaatcttgagggctaggcgaagagaaaggcatgcaaagacaatagatatagctcaagaagaa

SEQ ID NO: 638258 - DNA, 82 bp, Homo sapiens
caagaggaagtacctagtgccctctgaccttactgccatggacctggctcaggcaggcagcacagtggaatctaagatctac

SEQ ID NO: 638259 - DNA, 75 bp, Homo sapiens
cgccagcccgtgccgcgagcgcggcctgcaggagccttgccaacattccactaacccccgagactcagcgggacc

SEQ ID NO: 638260 - DNA, 98 bp, Homo sapiens
tccaggggcagataagggagtccaagaggaattcccgcttgctaaagcagcagcacacccttctgtacaaggtgaatggaatcctcacgctggccacc

SEQ ID NO: 638261 - DNA, 93 bp, Homo sapiens
cagaccctggagcctcagttggaagcagccgatccagcctgcggagcctgtggggcaggacctcagcagccatgtcgaagccccatagtgaag

SEQ ID NO: 638262 - DNA, 82 bp, Homo sapiens
cggagccgagagccacactttcaagtaaaccagaggctgtggccaggccagctgggctcggggagcgccagcctgagaggag

SEQ ID NO: 638263 - DNA, 100 bp, Homo sapiens
gcggcgctccaggtgctgacagcgcgagagagcgcggccctcaggagcaaggcgacaaagatcattccactcagcctgggacgatggggaggaaaaaaat

SEQ ID NO: 638264 - DNA, 90 bp, Homo sapiens
aagacggaagcagtttgctgacattgcctacaactaccgccatgaaattggagcgatttgaaattccaatcaaggttcgattaagcccag

SEQ ID NO: 638265 - DNA, 75 bp, Homo sapiens
gcctgaatacatgatttaaacaagagatttccacagaagtttacaagtccttccactttctctctgaggcagaaa

SEQ ID NO: 638266 - DNA, 100 bp, Homo sapiens
tccagggcctgccccggcacgcagccttgcgcaagctcaacgacctggtgaagagggcccggctggtgcgaggctgacaaagaagagaaccaaagtccag

SEQ ID NO: 638267 - DNA, 74 bp, Homo sapiens
aaaatattctagaaggggaaaagctacttcaagtctcagagaaagatgtcacatctgctaaagcactgtatgaa

SEQ ID NO: 638268 - DNA, 100 bp, Homo sapiens
caaggaataaacatgcaatgaacccaaaagggtcgctgaaaattttgttccccctctgttggatgcagttctcattgattatcagagaaatgtcccagct

SEQ ID NO: 638269 - DNA, 75 bp, Homo sapiens
ggctacgaatacgtgagcccggagcagctggctggctttgataagtacaagtggtaagcatccgtggcattcaag

SEQ ID NO: 638270 - DNA, 100 bp, Homo sapiens
ggggactgcacgtagcccggcgctcggcatggctctcctggtgctcgcatgttagccgcttgcaagacccttcaagaagtaacacagctatcacaagaag

SEQ ID NO: 638271 - DNA, 80 bp, Homo sapiens
gcatcctatggctcaaagaaagatgattatgactatgctgagaaggaaaataccatagcaaaagctctggaagatctgaa

SEQ ID NO: 638272 - DNA, 100 bp, Homo sapiens
gctggtgcagctcaacgagctgctggaggacgagggccagctgacggagatggtgcagaagatggaggagatatctattgaaatcgaggctcctacccag

SEQ ID NO: 638273 - DNA, 83 bp, Homo sapiens
tgaaggtgctgcgggatgccgttccttcgcgcgtgaggctgcggctctgacgacccctttgctgatgcaagtaagggtgatga

SEQ ID NO: 638274 - DNA, 102 bp, Homo sapiens
agcagactctgaagatgatcagacaaggcaaagcgaaattggtcattctcgctaacaactgcccagctttgaggatggggctggtaagtagcaaaaagccgg

SEQ ID NO: 638275 - DNA, 100 bp, Homo sapiens
gtctgcgaaggccgggacccggttccccggcccacagtgggggtgtgcaaacccgagagaactgggaaccttggcaaagtgtatacagactgaggatgga

SEQ ID NO: 638276 - DNA, 88 bp, Homo sapiens
aatggggaaagtcaagaaaatagatgcttctaaatctgttgatgaagtaaagagaaatgtgtatgaccttacaagtatccccgttcgc

SEQ ID NO: 638277 - DNA, 100 bp, Homo sapiens
ggcggatctcagaaggccagttcaaagggaccatggctaaacctcctggatcattagccagaagcagcagcctgtgccgttcacgccgcagcattgtgcc

SEQ ID NO: 638278 - DNA, 50 bp, Homo sapiens
ctccgcaccgcaccctccacctcaggggccagcagcctcccccgatgggt

SEQ ID NO: 638279 - DNA, 90 bp, Homo sapiens
ctgacgaaattgaaattacctccgagggaaacaagaaaacatcaaagaggtctagcaaagtgatgcggacccaggggagcctgcgactga

SEQ ID NO: 638280 - DNA, 75 bp, Homo sapiens
gaccgtgaccgagagcgtgaccgagagcgcgaatatcgtcatcgttagaagatattgatactagacgcagggctg

SEQ ID NO: 638281 - DNA, 100 bp, Homo sapiens
ccataaagaaatgggctagatatttccagaggctgcaatctggaggcgtttggaggtgctgttcgctgctatgaatctctaatcttaaaagctgaaggaa

SEQ ID NO: 638282 - DNA, 83 bp, Homo sapiens
ccgcctcctccgccgcccgaaaacccggagtgccccgcacaggtaaagaagaacccagttcaggataaaagtttgctgccagg

SEQ ID NO: 638283 - DNA, 50 bp, Homo sapiens
agtgcacaggagaagggcaggaagggcgagcttggattgcccggtgcccc

SEQ ID NO: 638284 - DNA, 98 bp, Homo sapiens
aatacagccaagatcttggcaaagcttctccctcagtatttagaccagcaatggtacaacagctccatgaacgtgatctgcacctggttgacggaccg

SEQ ID NO: 638285 - DNA, 102 bp, Homo sapiens
catgtcaagcaggagccccgggagcgggagaacagcgagtccaaagaggagagtgttttctgcctacattaaagaagtggatgaaaagccagccagcacgcc

SEQ ID NO: 638286 - DNA, 75 bp, Homo sapiens
acattccctcaagtgtccagaatttccaattacagacgacaaagtagcactgcaatggctgccatccggaagaaa

SEQ ID NO: 638287 - DNA, 87 bp, Homo sapiens
ggggaccggcggcgctggaggagcgaggcagctgtactaggactgggaacggtaactctcaggagccttctccgcagttggcttcct

SEQ ID NO: 638288 - DNA, 74 bp, Homo sapiens
aattatacagatagtagttcctcttctacagagtcctcccagagttcccaagatccgaaatgtgggcacagggc

SEQ ID NO: 638289 - DNA, 100 bp, Homo sapiens
ttctatggtgaaatggcagaaggttgttgatgagcgtgaattttttgagatcatgcccaattatgccaagaacatcattgttggttttgcaagaatgaat

SEQ ID NO: 638290 - DNA, 75 bp, Homo sapiens
cttcgtcatgttcttcgcgccctgctgtccccgccctactccggaccgccccaaagactccatgggatggacctg

SEQ ID NO: 638291 - DNA, 100 bp, Homo sapiens
gcaaacatcgatggcctactggggataacattcatgcagaacatcaggattatatgcgtcaggcaggagaagtgacttatgcagatgctcacaagggacg

SEQ ID NO: 638292 - DNA, 75 bp, Homo sapiens
ggcctgtccagccggggcaagaagagaaagctgatggtttgtgttttaacttaactgtgattgcatcgagttgta

SEQ ID NO: 638293 - DNA, 100 bp, Homo sapiens
agaggagtcttcatgaaggtggtgaagcccaaggcatgaccccttgttaattcctggcaatgatcagattgacaacatggactccaatgtgaagaagtac

SEQ ID NO: 638294 - DNA, 75 bp, Homo sapiens
cccggccaccagcaattgtccggtgcaatggatgagcttcatagtctggatccaagaaggcaagagttattggaa

SEQ ID NO: 638295 - DNA, 75 bp, Homo sapiens
gcctgaggaacatggaggccacgctaatggttcagagaagattcttcatgggaaatcaagttctaaaggtctttg

SEQ ID NO: 638296 - DNA, 114 bp, Homo sapiens
ccaagggctgggaagtggattccacccaggaaggagctgtgtatttcatcaacctggcccagtcactatgggccctgttcacctcctctctggccatctccctggtgtttgccg

SEQ ID NO: 638297 - DNA, 75 bp, Homo sapiens
cgcggccgtgggcccgaccgcggggacccatggtccccatccctgctggagtatttacaatgggcacagatgatc

SEQ ID NO: 638298 - DNA, 100 bp, Homo sapiens
acggtggccctgtcagtggctctcttggccctcctgaaatggttactataacaacagtaccaaggtggctgtgaaaaccctgaagccaggaactatgtct

SEQ ID NO: 638299 - DNA, 75 bp, Homo sapiens
gcggcggcgacgcggacctgcggactagcgaacccggagaacatgaaaggctcccggagcagcgctgactcctcc

SEQ ID NO: 638300 - DNA, 75 bp, Homo sapiens
cggagccactgaaggaagataagcctgtcactggtcctaggaacaagactggggtctctctttttggcatgtcgg

SEQ ID NO: 638301 - DNA, 75 bp, Homo sapiens
atcttgggagtgatttgcgccatcatcctcatcatcatcatagattgacttacgcaggattctcagcccttgcct

SEQ ID NO: 638302 - DNA, 98 bp, Homo sapiens
tggcggcgtgggagcacctctggggctatggaggcccctgagccggctaaggcaggaacggatccaaattcagcagcttgggctgcttattacgctca

SEQ ID NO: 638303 - DNA, 100 bp, Homo sapiens
ttggcagaagcctggaactctacagggagctggacctcaacaggtaccttaacatggggaatcttcttaaagttttgacatgcacagaccttgagcaggg

SEQ ID NO: 638304 - DNA, 83 bp, Homo sapiens
catcgacgccgcctggcaggccctgcgcaccaggttcgtgctggccgtgggcagcgccgtctttgatgccatgttcaacgggg

SEQ ID NO: 638305 - DNA, 82 bp, Homo sapiens
gggagcgcctcgtcgacatgagtgatgtggaggaaaacaacttcgagggcagagtgacttaagagattaaaattaatttggt

SEQ ID NO: 638306 - DNA, 100 bp, Homo sapiens
gaaacttccacgccttctaccaaaaatcaacgaccgggagcagaagttgcatgcccttaaggaggtattaaagaaatttccaaaggaaaaccacgaagtc

SEQ ID NO: 638307 - DNA, 98 bp, Homo sapiens
gccaaagtttgtatcatccatatgtgtcaaggcttgaagacggctgagcagacagccagcagatatgagggcatgtatatcttcctgcacacggtgaa

SEQ ID NO: 638308 - DNA, 100 bp, Homo sapiens
gttttattgcatgtggatgcaggacaagccactcctccaggttcaagaattccaccagttggaatccaatctgcaagtatgtcagtttcttgccgatact

SEQ ID NO: 638309 - DNA, 101 bp, Homo sapiens
ggagtatcgttctatttctctagctattgccttattttttctcatggatgttcttcttcgagtatttgtagaaggcatgcagcagattggaataaatatga

SEQ ID NO: 638310 - DNA, 100 bp, Homo sapiens
ctagcttcggagtctcccgcgcgcacctcagccgcctcctagcggcgcggcgctcgctcctacgatgctggcatcaccatctacatcaggtcagctgtct

SEQ ID NO: 638311 - DNA, 97 bp, Homo sapiens
ctgctgcatgtctaccaggagaggagggaactgcggagcgggtgaaagaactcttttcttctttgggagtcgaatgtaatgtcttggaacttgatca

SEQ ID NO: 638312 - DNA, 111 bp, Homo sapiens
cctggatttccatctggatgttgctgtgatcagtctgaaatacagcctgttacatgaacagaatatggcaaaaatgagactacttacttttatgggaatggcagtagaaaa

SEQ ID NO: 638313 - DNA, 82 bp, Homo sapiens
ccgcggacgcccgctgagcttggcgcacgggccgaccaggtgaacttcacggtagaccagatccgcgccatcatggacaaga

SEQ ID NO: 638314 - DNA, 90 bp, Homo sapiens
cccccgctgagcagcccagccagtcagcacaaaggaggacgtgatgtagaagatctttatgaaccggtgtcagtacccttctcatacccc

SEQ ID NO: 638315 - DNA, 95 bp, Homo sapiens
cgtggtccttctccatattcgagtccaagtggtaagaagttcagaagcaagcctcagttggcaaggtacctgggaaatactgttgatctcagcag

SEQ ID NO: 638316 - DNA, 100 bp, Homo sapiens
gaaacttacatggttacattatctgtgtacagatttattgctaaacatgggtgcatttttggataaacccaaaactgaaaaacataatgctcatggtgct

SEQ ID NO: 638317 - DNA, 98 bp, Homo sapiens
ccagagctgaggactgcctgtttgcaggctgcaagatcaaggccctgcgggccaagacaaacacctacatcaagaccccagtgcggggcgaggagccg

SEQ ID NO: 638318 - DNA, 75 bp, Homo sapiens
ggttgcaacggagataaattcccggaaccgcgattcggcgtgtcagacagatttgaccagttttgggccatcaat

SEQ ID NO: 638319 - DNA, 82 bp, Homo sapiens
tctaattttcattccttcaaagggaattggctcgggaaaaggtaatgcgagaagttaaagccttagccaagcttgaacaccc

SEQ ID NO: 638320 - DNA, 100 bp, Homo sapiens
acagctggtcctaccagaccccaccctcatcacccagcagctccagctcccggaagtccagcatgtgcaggagatctataaggacaggcagaaattctca

SEQ ID NO: 638321 - DNA, 90 bp, Homo sapiens
ttggcattgacatttaattttagggtcctttatatagaagggagagtaggccgagacgcatccagagctttcgtgaccggggactgttct

SEQ ID NO: 638322 - DNA, 88 bp, Homo sapiens
tctcttggcagccttcctgatttctgcagctctgtgtgaaggtgttccagtgcctcttaattgagggtgagaattgtggagaagatgc

SEQ ID NO: 638323 - DNA, 51 bp, Homo sapiens
gacaagtggccacactccctcagcaaagagagcaggatgaatggacagtac

SEQ ID NO: 638324 - DNA, 82 bp, Homo sapiens
gcctcagttggaagcagccgatccagcctgcggagcctgtggggcaggccaagaagcttgagagaagaaaaatttcagaaaa

SEQ ID NO: 638325 - DNA, 100 bp, Homo sapiens
aaaggtgtcaagaagctcagaatggtgaggctgctgtcagaaaggaacttttacacagtttgccttcagagacagtctatcggcatgttgtagagtttta

SEQ ID NO: 638326 - DNA, 97 bp, Homo sapiens
ctcgggattattgccgattgccagggtgctgaccgtgggagccgaccgaggaagatcagcccatctacttggcagtgaagggagtggtgtttgatgt

SEQ ID NO: 638327 - DNA, 75 bp, Homo sapiens
ggtgtgcgagctacagaagcttcaggaaatgtttcaacgtgcgcaagcgttgcggcggcgggcagaggactacta

SEQ ID NO: 638328 - DNA, 58 bp, Homo sapiens
ctgcagagtaccccaccagcgcaaaaagcttgtggtgaaggggggcaaaaaaaagaag

SEQ ID NO: 638329 - DNA, 75 bp, Homo sapiens
catgctgcggggacaggaccccgagagagggctcagtgctgtcagagagggactacgagagcctcgtcatgatgc

SEQ ID NO: 638330 - DNA, 83 bp, Homo sapiens
gaggcagagggaggaacctggacgccggaagccgggaaatgatctggtggctggacccagagctgacctatggctgcgccaag

SEQ ID NO: 638331 - DNA, 80 bp, Homo sapiens
gtctttccaaaaggtcaaggttcacaagatgctgcagttggagaagaaacttgaacgtgaacttgaggatgatgcacgag

SEQ ID NO: 638332 - DNA, 101 bp, Homo sapiens
aagctggcagaacgcttcctggccaagacatgcagcaccaaggaccagcaattcaagttatgatgtgattgctcaagcccaatctgggactgggaaaacgg

SEQ ID NO: 638333 - DNA, 110 bp, Homo sapiens
ctcaatatctgtcttcggtggactccttcggcagtccacccaccgccgccgcctcccagcttcgagagctgtgcccaggagtgaacaaccagccctacctctgtgagagt

SEQ ID NO: 638334 - DNA, 100 bp, Homo sapiens
gatcctgcgggaagagcttttccagggcgatgccttccatcagtcggatacacacatattcatcatcatgggtgcatcgagacggagtttcgccatgttg

SEQ ID NO: 638335 - DNA, 100 bp, Homo sapiens
tatcaagccagaaacctcttggctttagataaggatagcttttcaggtgttggagcgggccggagagaagtagagtgggctgcgaggagaaggaaacagg

SEQ ID NO: 638336 - DNA, 100 bp, Homo sapiens
cggcgcgggcggaggcagcagcaggcggcctgacctctcgggacacacccagccctgtggacccagacaccgtggaggtgttgatgacctttgaacccga

SEQ ID NO: 638337 - DNA, 102 bp, Homo sapiens
ctctgcagaatttctgaaagttttccttccatctctgctgctctctcatttgctggccatcggattgggcttagaccatgctcagcctccaagcagccttgt

SEQ ID NO: 638338 - DNA, 75 bp, Homo sapiens
ccatctccatcacccaccaacaacaccacaataatccacagccaagcttatgtccctgatgccaaaaatgcacct

SEQ ID NO: 638339 - DNA, 100 bp, Homo sapiens
ggatcaatccagatggcagccagtcagtggtggaggttacagattatgccattgccaggcgcatagtagatttgcattcaagaattgaggaatcaattga

SEQ ID NO: 638340 - DNA, 51 bp, Homo sapiens
gggcccggcggctctcactatccaggttatgaagacagtatggagtttcca

SEQ ID NO: 638341 - DNA, 100 bp, Homo sapiens
catgctttttattacaagactacggagcataggaggaaaattcatcatctgggctccttcacctaccaaacgcaaagaccgctcagatgagaagtccaag

SEQ ID NO: 638342 - DNA, 74 bp, Homo sapiens
gccaatgcagctgtgaacgatcagaggaggaggagggggccagtgggggagcagtccattcagacattgggagc

SEQ ID NO: 638343 - DNA, 75 bp, Homo sapiens
attttaaactatggacgactccgaggaacattgaggtgtggcatgcagcattttggaaggaaaattgaagacgtg

SEQ ID NO: 638344 - DNA, 100 bp, Homo sapiens
ggaggcttaccgagagtttgaaagtgcgattgtggaagctgctcggaattcaaggaagccttctccctatttgataaagatggcgatggcaccatcacaa

SEQ ID NO: 638345 - DNA, 100 bp, Homo sapiens
tgaagcatttcgcctgaccattacacgcaaagatattcaaactctaaaccatctgaattggctcaatgatgaggatcaaaatacttgctggatggtggac

SEQ ID NO: 638346 - DNA, 100 bp, Homo sapiens
agggcaaggaaactggccacaagcaggtgacagcagggacatgtctcgggagatgcaggatgtagacctcgctgaggtgaagcctttggtggagaaaggg

SEQ ID NO: 638347 - DNA, 73 bp, Homo sapiens
cggaagatccacagccaggaggaagccttgcgggtgatggcacaatgctgctggcagcgagtaaagtcttgga

SEQ ID NO: 638348 - DNA, 100 bp, Homo sapiens
cgccccagagggcggaggcgcgcgctcgattccccccacgcggcggcgccgcctgtttacgctcatgatggagcagtccaagaagtcctccctcatggtg

SEQ ID NO: 638349 - DNA, 76 bp, Homo sapiens
gccgatgcaccgagtccagcccaggaaaatggagaggaaaatggctttgtaaagaagtttgaacctaaatctggct

SEQ ID NO: 638350 - DNA, 88 bp, Homo sapiens
tcctacgtttacctgtccatgactttgagcaaagcatggtcctggttgcctgtggaccatacaccacatctgacagcatcacgtatga

SEQ ID NO: 638351 - DNA, 101 bp, Homo sapiens
cttcgcgacacccttgaagctgagaaatgtggttcagcactgagtcatgcttgcttctgctacgcactgatttgttctattccagttttcacgtacatcgt

SEQ ID NO: 638352 - DNA, 82 bp, Homo sapiens
agggaaccctggtcaccgtctcctcagattcctggtcgggtggcttccagtggtcttcagtctgtcgtgcaccgatgagaac

SEQ ID NO: 638353 - DNA, 98 bp, Homo sapiens
gtttatcgatgtctacatatatattctgtcctgggattaaagcctgtggtttccacagaagcaccacctatcatatttgccacaccaactaaactgac

SEQ ID NO: 638354 - DNA, 100 bp, Homo sapiens
gcacttcttaatgctgaagatgaaaaaagagaagaggagaaggaaaaacaagctgaagaaatggcatcagatccctttcagctccctgcaaaaacagaac

SEQ ID NO: 638355 - DNA, 50 bp, Homo sapiens
gggaactcaaacagcagatgcagggtgtcgaagtgcagacagactacgtg

SEQ ID NO: 638356 - DNA, 80 bp, Homo sapiens
aactggaggagtcccgctcgaagctaggaatactcccccagttgcaagaggcgcaggaccgtggaagacttcaacaaatt

SEQ ID NO: 638357 - DNA, 75 bp, Homo sapiens
ggtctgtcagtgagatggcttctaacaaggcgaccactttatcaagttcttcgctccgtggtgtggtcactgcaa

SEQ ID NO: 638358 - DNA, 82 bp, Homo sapiens
gttgcgggccccgggacctgggctgggaacccgcggtggagcgggacacgaacgtggggataaaaacattcagatggcagat

SEQ ID NO: 638359 - DNA, 74 bp, Homo sapiens
tttcttcctgttctttcacggaggatactggcagagcggaagggtgaggacgcttgagcggaagttagaagcaa

SEQ ID NO: 638360 - DNA, 96 bp, Homo sapiens
aaaaaattcatctgggcggtatctggaacttggctactgtggagccgatatcaaggccctgtgcactgaagccgccctgattgcactgcggaggcg

SEQ ID NO: 638361 - DNA, 89 bp, Homo sapiens
ggaagatggcggctgggttcaagtgcgtgagcatctgctccctggccttcagcatggacggcatgttcctctccgcctccagcaacact

SEQ ID NO: 638362 - DNA, 82 bp, Homo sapiens
gagaggatgcggagcccgcagaacctccacagtcaagaggacgtgtactaatggtcacttgatgtgcgctggctgttttatc

SEQ ID NO: 638363 - DNA, 100 bp, Homo sapiens
cagcccctcaggagccctggaggagtgctatgtcacagaaattgaccaaggtcctctggccatacctgctccagttcctcacccctgtgcgcttcactgg

SEQ ID NO: 638364 - DNA, 98 bp, Homo sapiens
gggaaattgcacaagccaggaaaggacgcgtcgaagcgcgggcggcagaggctgacccgcggctgattgagtccctctcccagatgctgtccatgggc

SEQ ID NO: 638365 - DNA, 97 bp, Homo sapiens
gtgacctgccggtattggatgattcgtatctaagactctgggacactcctgaagtcgggaaatgtaatctatgccagcaattatgacaatgttagca

SEQ ID NO: 638366 - DNA, 83 bp, Homo sapiens
gctggaggtcgccatggggcgaggcagcggcaccttcgagcgtctcctaggtgtcgtgaaaactacccctaaaagccaaaatg

SEQ ID NO: 638367 - DNA, 82 bp, Homo sapiens
tggggaggccttcgactggctgcttggggagattgagtccaagttcaaccaagccattaccccttcttcaggagcgcccagc

SEQ ID NO: 638368 - DNA, 95 bp, Homo sapiens
gccttctaccaactgcagttttagatacgttttgaaaatttcatcacctgagttggcccgccacaataaactgttgcagcagatgctcaaaccag

SEQ ID NO: 638369 - DNA, 75 bp, Homo sapiens
cccctccagctgccccctgtgtggcaaacctttcttgagctcagctgtgagccgtgagctttgaggcggtgggat

SEQ ID NO: 638370 - DNA, 100 bp, Homo sapiens
gattggtctgggtacctggaagagtgagcctggtcaggtgtattgtacgagcattgaaagatccaaatgcatttctttttgaccaccttcttactttaaa

SEQ ID NO: 638371 - DNA, 75 bp, Homo sapiens
ggacagcgcagccggcccagagctcgggtctccggggaccgagctggagttaaccgaatttcatactggcctgct

SEQ ID NO: 638372 - DNA, 98 bp, Homo sapiens
ggcgacggcgtcctcaggagctgtggggtcccctgctagaagtgggggactcggcgggctgatggtgagaccattctaaaaggcctccagtccatttt

SEQ ID NO: 638373 - DNA, 82 bp, Homo sapiens
tacggctggcagggtggacctcaggagcctcctaaaaccacaggtcagcccaaggctgccccctcggtcactctgttcccgc

SEQ ID NO: 638374 - DNA, 51 bp, Homo sapiens
acaatctcacccaattactctgctcaggtactgatagtggtgccattccgg

SEQ ID NO: 638375 - DNA, 90 bp, Homo sapiens
atgtgagatacaaggctacacagagacagatcaaagcagctcgtgatctgtgaaaatggttcgctattcacttgacccggagaaccccac

SEQ ID NO: 638376 - DNA, 80 bp, Homo sapiens
ggaggagccaggtccctgtctgagccagagtattgacatttcagctactatccccaagtttacaaacacgcagattacgg

SEQ ID NO: 638377 - DNA, 76 bp, Homo sapiens
atggaaaccatacaggctgaaatcctccatggtggacaagcttattgcaggagtgaccaggacactacctcctaga

SEQ ID NO: 638378 - DNA, 100 bp, Homo sapiens
ccctgtatggccatacctatgcagagaaggtcacagaaaagccaccgagggctacagcctcgggaaaaggagcattgggctcaggatctgaacaaagtcc

SEQ ID NO: 638379 - DNA, 101 bp, Homo sapiens
agccctttgcaggatgcagaagaagccaaaaacattctgggcccagtgacgagcaccatccggaagtgaaggctgatgggtacgtggacaacctcgcagag

SEQ ID NO: 638380 - DNA, 82 bp, Homo sapiens
ttcgagctctcctctgatggcaggacctgccaaggagcatcagatccatgctgctgctgactcggagccccacagcttggca

SEQ ID NO: 638381 - DNA, 98 bp, Homo sapiens
gggtgaggggccctgttagtctgactttgaagaagaccagccttccagactcgcttggtgccctgacaggaattacatgaacgacagccttcgcaccg

SEQ ID NO: 638382 - DNA, 99 bp, Homo sapiens
agacagtggacagattgctcaaaggatatgacattcgcttgcggccggacttcggaggaactgatgatgttgtaggccctgaaggcatggagaaatttt

SEQ ID NO: 638383 - DNA, 97 bp, Homo sapiens
tggaaaggaatgaggagttacagagggccgagaaggacaggatcagcaattaccagctctggctgggtcgccacaacttgtttgacgacgaaaacac

SEQ ID NO: 638384 - DNA, 100 bp, Homo sapiens
gcctcatgctatcttcattggatcttctttggaaagattacactagatgtgttggctgatatgggtcatgaagagttgaaagaaataggcatcaatgcat

SEQ ID NO: 638385 - DNA, 100 bp, Homo sapiens
acagactgaaggacagcggcaccgccagacggccagaaagttccgccatgagctggggcacggagctgtggatatttggagttcttacaacatggcagac

SEQ ID NO: 638386 - DNA, 101 bp, Homo sapiens
acgccgcgtgtacccggttgtcctcaggcgctgtcaggcgttactacaaggagacctctggcctgatgctggacgttggtccctacatgaaggcgcttgag

SEQ ID NO: 638387 - DNA, 75 bp, Homo sapiens
tactactacatggacgtctggggcaaagggaccacggtcaccgtctcctcagttttctggatatgccgcagaagg

SEQ ID NO: 638388 - DNA, 101 bp, Homo sapiens
tcagaatgttgttattgctatgtctggtatttccaaggttttcgtcggggaggtggtagaagaagatcagtgtactgttacccggacatacctattccttc

SEQ ID NO: 638389 - DNA, 100 bp, Homo sapiens
caagggcagtcatcagatccaccatctgcttcaacgggagaaaactggttgtcctggatgtttgaaaagttggtcgttgtcatggtgtgttacttcatcc

SEQ ID NO: 638390 - DNA, 100 bp, Homo sapiens
cttttaacctatgtcttacaaaggcccaagttggtcttcctgcaaaatctggagttgctgggggcattcttttagttgtccccaatgttatgggtatgat

SEQ ID NO: 638391 - DNA, 98 bp, Homo sapiens
cgactgtcagcgtgaagcgtgatctgctcttccaagccctgggccgcacctacaatatgaatgccacaatacgaaggattgaccagttaaccaacatc

SEQ ID NO: 638392 - DNA, 75 bp, Homo sapiens
tgggacctggaagctgccaaaaggaatctcgtgacatttggccacagcctgagcaagacctgttccccggcctgc

SEQ ID NO: 638393 - DNA, 96 bp, Homo sapiens
ccggaaaatggccgccgccgccgccgccgcgccgagcggaggaggaggaggaggcgaggaggagagactgtgaggggaagtggcttcgaaacattg

SEQ ID NO: 638394 - DNA, 100 bp, Homo sapiens
ggccggggaagtgtctgtagcgtccctccctctcaaccacaataacaggcggagggtcggcgtagtttcctgcaaatgcatcagaaatatgttgtattat

SEQ ID NO: 638395 - DNA, 100 bp, Homo sapiens
cccctgcccccatggcatgcatgatccattagggaggaccgtctgcacaaagtgggagagcccatcaactgtgaggcctgggagtggcttcacagggtgg

SEQ ID NO: 638396 - DNA, 97 bp, Homo sapiens
cctgaactcacctaacaccgcagcagcaaccgggcccggccaggttcggcgttccgtgagtgaacggggaacgcccttttgcttgtgactggcaggg

SEQ ID NO: 638397 - DNA, 82 bp, Homo sapiens
gcccgggaaatctccaagtcagaaaggtagatgacaaggtgaatttccattttattctgtttaacaacgtggatggccacct

SEQ ID NO: 638398 - DNA, 75 bp, Homo sapiens
acatggcactgttgcctatcagaagtcaattcaaaggacctgcccccagagagatgctgggctttgacaaacttc

SEQ ID NO: 638399 - DNA, 100 bp, Homo sapiens
gcctgtatcaccagaggagattagacgtagcagattagggtcatcacactgaaacggtgttcaaccgggttttgccagggcctattgcaccagagagcag

SEQ ID NO: 638400 - DNA, 75 bp, Homo sapiens
cttacggcagtgggggctgacaggttggtcaaagaaaaagtgatgtatgaaaaagaggcaaaacaacaagaagaa

SEQ ID NO: 638401 - DNA, 75 bp, Homo sapiens
gaaagctttcctaggccaaaaagagtgttctagaacagatcagacattttgtaatgatgcctgaaataaacacta

SEQ ID NO: 638402 - DNA, 89 bp, Homo sapiens
ttattcccttcagttattatatacacagaagtgtgattgctgcgttgcagggtagtgggcagcagtcagtgacaggtgtaacctctgtg

SEQ ID NO: 638403 - DNA, 88 bp, Homo sapiens
cactttagatgatatcagaaaagttcaaaccttgtactactcagctgatcacaagctgcttgatgggaacctactagatggacaggct

SEQ ID NO: 638404 - DNA, 74 bp, Homo sapiens
tctgcataccctgatgttcggtgcccagcttagagaaggagaaggcgtggagatacaaaactccccacagggtg

SEQ ID NO: 638405 - DNA, 75 bp, Homo sapiens
attagcaaaggtgctaatccagtggaaatcaggagagcgagtaaccagctcataaatcacatcgaacagtttttg

SEQ ID NO: 638406 - DNA, 98 bp, Homo sapiens
atggcggcccatcaccggcagaacacagcagggcggaggaaagtgcagtaagactttgaccccgacgcaggcttcagtgattgccgcggatcagaagc

SEQ ID NO: 638407 - DNA, 100 bp, Homo sapiens
cacgcggttcctttttgcgagctttccgagtgccaggcgccggccggctgcgaagacgcggtgggccgcccctccgcagcagtggacgtcagctcagcga

SEQ ID NO: 638408 - DNA, 75 bp, Homo sapiens
ctggaccgcatccctcgtgaccacccctacatccagtacaaactgataaatttcaaacggaagagagtggcagca

SEQ ID NO: 638409 - DNA, 100 bp, Homo sapiens
caggctcagtctgtccatcatcaaagaccaggttcaagggtctctccagaaaatcttgtggacaaatccaggggaaggatcaggagactagtagatggta

SEQ ID NO: 638410 - DNA, 82 bp, Homo sapiens
aggtctacagagcggcctgcgccagcgagtgaagtggaggttctggatccgaacgaccctttaggaccccttgatgggcagg

SEQ ID NO: 638411 - DNA, 75 bp, Homo sapiens
cctgatcatgagaagcaaagaaggaaagatgaaacctacccaattaatcaggtgccactctttgtgcaaattcac

SEQ ID NO: 638412 - DNA, 75 bp, Homo sapiens
cggcttgcccagaaagagaagacagccatggaaggtgatgctgcattaccgctcagacctgctccagatgctgga

SEQ ID NO: 638413 - DNA, 75 bp, Homo sapiens
tcgtctcttacgtctgcggaagtgcagctgcctcagttcttagcgcaggacatggatttgattgacatactttgg

SEQ ID NO: 638414 - DNA, 100 bp, Homo sapiens
ccatcacacaaaagcacacaaagacctcctcctccacaggggagacagagtaccaaaagaattggtggagctccatttgaagctgatgaggaaaattggc

SEQ ID NO: 638415 - DNA, 100 bp, Homo sapiens
ccgaggctgaaggaagatggcggacggcgtggaccacatagacatttacgcggatgtcggcgaagagttcaaccagagcaaactattcatggaaggattt

SEQ ID NO: 638416 - DNA, 75 bp, Homo sapiens
ctgtacttgcgtccgctacagtatgtcaatcgcttgccccagcacagctgggagtgtccactcgccttccaccag

SEQ ID NO: 638417 - DNA, 89 bp, Homo sapiens
ccgctccactgtcggtagcaacaaggaaatgttggcagtagatgctccaaggagacataaggtatccgtccatgttcttgccagggaaa

SEQ ID NO: 638418 - DNA, 82 bp, Homo sapiens
cagtgtccaaccagggctacatgccttatttaaacaggttcattttggaaaagactgaaactgttgaggagcccatggagga

SEQ ID NO: 638419 - DNA, 75 bp, Homo sapiens
cactgtcagttgcaatattcctgtggtgtctggcaaaggtggcacttactcaaaagcatctactcctaatggtta

SEQ ID NO: 638420 - DNA, 124 bp, Homo sapiens
cggaagaccgcgcgcagggcctgcagcgggagctggacggcgagcgcgagcggcgcgagaaattcccagtgacctgacagcagaggagcgtcaagaactggagaacatccgacggagaaaacag

SEQ ID NO: 638421 - DNA, 100 bp, Homo sapiens
tgataggcaggttaccatcactggatctgctgccagcattagcctggctcaatatctaatcaatgtcaggtctgtagcatctctgtctgttggagaaggc

SEQ ID NO: 638422 - DNA, 100 bp, Homo sapiens
cacacctgtgtggccttcgcctggctgagatctgtatctgtggacctgaatgttgatccctcgcttcagattgacatacctgatgcgctcagtgagagag

SEQ ID NO: 638423 - DNA, 74 bp, Homo sapiens
gagaaaactttacctttcagatatataaggctgatctttgctggaaaacagctggaagatgggcgcaccctgtc

SEQ ID NO: 638424 - DNA, 96 bp, Homo sapiens
acgtgtacctggacatcaccggtgcactacatcctccaggaggtggtgatgggtgggatggtgttggaaacaaacatgaatgaaatcgtggctcag

SEQ ID NO: 638425 - DNA, 116 bp, Homo sapiens
ccgaacccagcattttcggcaaccgctgctggcagttttgccaggtgtttgttaccttgttactgtaaaatggggaaaggagaaatttgaaggtgtagaattgaatacagatgaac

SEQ ID NO: 638426 - DNA, 75 bp, Homo sapiens
gcactgtagaacagctttatgaaacagcttgcttcctacaggtctgagaaagaaccccagtttaagtttatctac

SEQ ID NO: 638427 - DNA, 82 bp, Homo sapiens
gcagcctcttcgagcgccgcggacgcgtcatcgagtgtgacgtggtgaaagtgcctccggagccagcgtggtggccatagac

SEQ ID NO: 638428 - DNA, 100 bp, Homo sapiens
agacagctggaggaggaacttcgaaccatggaccaggccctcaagtccctgatggcctcagaggaggagggttccgagtctgaggaagacataaccttgt

SEQ ID NO: 638429 - DNA, 90 bp, Homo sapiens
cgccgccgaagaagcatcgttaaagtctctcttcaccctgccgtcatgtctaagtcagagctggctcatcgccatcctggcgcagctgaa

SEQ ID NO: 638430 - DNA, 100 bp, Homo sapiens
ggcgcggccacggagaagggcgcgctgctggagtacttagggaagggcaaaagcatcgtggatgtggggctggcccaggcccggcacccactcagcaccc

SEQ ID NO: 638431 - DNA, 75 bp, Homo sapiens
gcactccgcacctcggggacattattgcgcgtggaacggctgcttttggaaggtagagcgggaaaaggccattct

SEQ ID NO: 638432 - DNA, 90 bp, Homo sapiens
gcgtcccagaagtgcctgcagttcagacccttctctcccctccactttctcccgggtacatgtcccagagcaagcacacggaggcccggg

SEQ ID NO: 638433 - DNA, 75 bp, Homo sapiens
tgaaaggaaatcaagaaggcattttcaggttgccaaggaaagtgtactgcagttttacccgaaagctaatatcgt

SEQ ID NO: 638434 - DNA, 51 bp, Homo sapiens
cgccggcgccggctggctgcaccggctgatggagtctcgctctgtcaccca

SEQ ID NO: 638435 - DNA, 82 bp, Homo sapiens
gtcatcgttacagccggcgaagaagaagcagcaagggcatcatagagcctccagaggggacaaaaatttacaaggattcctg

SEQ ID NO: 638436 - DNA, 80 bp, Homo sapiens
ggcgagaggtgccaagggagcttctgtcccgaggaccaggggatgcgaagggtgatttgatgaaggctgctgcaggagag

SEQ ID NO: 638437 - DNA, 90 bp, Homo sapiens
ccgatgcctaataaagttctctagcccacatcttctggaagcattgaaatccttagcaccagcgggtggcacatttagaacgaacagggc

SEQ ID NO: 638438 - DNA, 75 bp, Homo sapiens
tgagtcgggcaatgtggttcccagtgacaccaacattctggacacgtgggcgtactccacccacctgcaccttgc

SEQ ID NO: 638439 - DNA, 82 bp, Homo sapiens
tcctttataagtgtcagctgtgaggaaattcgaaatgagtcccatgactatcctcatagagtggccaagtttccagaaaaca

SEQ ID NO: 638440 - DNA, 100 bp, Homo sapiens
ggctctgctggctccttcacagaagaaactctacagagatgtgatgcaggaaacattcaagaacctggcatctatagggtgcgctggctctggccctgcc

SEQ ID NO: 638441 - DNA, 75 bp, Homo sapiens
accaggcgaagctggccgagcaggctgagcgatacgacgctgtgagaaacgaccgaaacaagaagaagaaggagg

SEQ ID NO: 638442 - DNA, 100 bp, Homo sapiens
tggacatacattgccccccagttggggtactgggtggccgccatgtcccctcccatcccaggtggatggagagagaaagaaaaagccagagaggagagct

SEQ ID NO: 638443 - DNA, 100 bp, Homo sapiens
cagaatttgtatagagatgtgatgttggagaactacagaaacctggtctccctagaggtttgtgaagaaaattcaacctcagcaacttcagaaactgccc

SEQ ID NO: 638444 - DNA, 74 bp, Homo sapiens
gaagagctgcagtctttgtgggacaaggtacaatgccagggagtactacgaccacctgcccgagctgaagcagg

SEQ ID NO: 638445 - DNA, 75 bp, Homo sapiens
gtttaggagaagaaaccaatgaggaggatgaggaggaaagtgacaaccaggcagcctggcatcctcgctacaacc

SEQ ID NO: 638446 - DNA, 101 bp, Homo sapiens
aagacctgcgtcctttttcgtttttcggatgatgccttcaatactacctttatttccaccatagctctggacttattggacaaaatgttgacattcaaccc

SEQ ID NO: 638447 - DNA, 50 bp, Homo sapiens
gtcagaaggtgcattttaccttttgatatgttgcagtattacttgaatct

SEQ ID NO: 638448 - DNA, 98 bp, Homo sapiens
gccgggtgaggggcgggcagcaggcgctgctgcagcactggagcgagtacatcaagatcaatgagctgagcaatgttcctgttcctgtcatgctaatg

SEQ ID NO: 638449 - DNA, 76 bp, Homo sapiens
attggttgctcaatgtctatgacacgttgatgacaacaagaaactaggagaatgggtaggcctttgtaaaattgac

SEQ ID NO: 638450 - DNA, 100 bp, Homo sapiens
gattgttatgttcactgctcttcagcctcagcggcagtgttctgtgtgcagagtacatccaagccattatgatgatggaggaatctgttcaacatgttgt

SEQ ID NO: 638451 - DNA, 74 bp, Homo sapiens
cctggctccccatactagtcgccgtcaggccttgaaaagaggatagaccaggctgtggaggagtggaatattga

SEQ ID NO: 638452 - DNA, 88 bp, Homo sapiens
ctgctacccatttaccagaccgtgatgaatcaccaacaccagcagcagatggcccccagtaccctgagccagcagaaccaccccactc

SEQ ID NO: 638453 - DNA, 75 bp, Homo sapiens
cgggagccagcgagccacgggagcgagccaggtgctcttacagcctgttccaagtgtggcttaatccgtctccac

SEQ ID NO: 638454 - DNA, 83 bp, Homo sapiens
gcttgtccttgctggtgcatgcgtcgtcggcctctgggcagcaggctcagcttgtcaatcggaaacagaaattagagtctgtg

SEQ ID NO: 638455 - DNA, 98 bp, Homo sapiens
gtgtatcaagtaatggtgcaaagcctgaagtcatcatggtcacaggagaccatccaatcacagctaaagctattgccaaaggtgtgggcatcatctca

SEQ ID NO: 638456 - DNA, 96 bp, Homo sapiens
tattaactgcctttcttctgtgggctgtgattttcagaggggaatgctaagagatcttggcatatacagaagggctgcatggaaaatggctgttca

SEQ ID NO: 638457 - DNA, 83 bp, Homo sapiens
ggcggcccgcttcctggaatggcaagcgcagcaacaacagagagcacgtggcttactcaattccagatatggccgaggatggg

SEQ ID NO: 638458 - DNA, 96 bp, Homo sapiens
atcgtgctcctgaaggccctagccttcgtgtactgaatgagcacacctggctcctctccacagcaccgcccagctggcgtcagccccctgtccctg

SEQ ID NO: 638459 - DNA, 90 bp, Homo sapiens
gggaacgaggggtgaagcggcccaggtgagggtgctggagagtcatgcctgtgagccctgggcacctcctgatgtcctgcgaggtcacgg

SEQ ID NO: 638460 - DNA, 100 bp, Homo sapiens
agaagatgacagaggaagaagtagagatgctggtggcagggcatgaggacagcaatggttgtatcaactatgaaggccgggtgtggtggcccatacctat

SEQ ID NO: 638461 - DNA, 83 bp, Homo sapiens
agacgctttacccgactctttgggccgttatctcacgagtctgctacaccatttttgatttgggcttccgctttgatgtggca

SEQ ID NO: 638462 - DNA, 76 bp, Homo sapiens
gcggatcgggtggagtgtaggtcatatcgccgcgaagaagaagaggacagtgctccagtgaaagtggaagaacaaa

SEQ ID NO: 638463 - DNA, 74 bp, Homo sapiens
ttaggcctgtgtgttgcttagccgaaagaggcatcgttttctctttagatggtgttatctgaaaaggttagtca

SEQ ID NO: 638464 - DNA, 100 bp, Homo sapiens
ctggcggacatcccctaccaggagatcgcagtacttcctcctgtgctggttccaagacacagcgaatataatcctcagcacagcctcttagctcagttcc

SEQ ID NO: 638465 - DNA, 74 bp, Homo sapiens
cagacaacaggatcgtctcgtccaagagatgccctgtatccaagcccaatatgggacaccagcaccgagtccgg

SEQ ID NO: 638466 - DNA, 75 bp, Homo sapiens
aaatttcgatattgaagtgtcaaaatccatagatggaaaagatggaaagaccacagcaagattctttcattcgtc

SEQ ID NO: 638467 - DNA, 74 bp, Homo sapiens
gatgatgatcatcttttccatcgccttcatcactgtccttatcttcaagatccggccccacatcgcaactcttc

SEQ ID NO: 638468 - DNA, 100 bp, Homo sapiens
cgccgggcctgccgaaaacccgactttccctcatggctggtcgtctccagactccacactcctagcaaagaatgtccaagcacacagatgcagcagaaga

SEQ ID NO: 638469 - DNA, 50 bp, Homo sapiens
ctgcccttcctgcaccgactggccaggtgtgatgaatgcagactctgcta

SEQ ID NO: 638470 - DNA, 75 bp, Homo sapiens
gtgggaagcaccgcggcagcctagcctcaggcctgcccagacggtgttcagagtgcagtgaatagaagacacttc

SEQ ID NO: 638471 - DNA, 100 bp, Homo sapiens
caagtggaagagattttaagtgtggcatacaagaaagaagacttaactgatggttcatatgatgatgttctaaatgctgaacaacttcagaaactccttt

SEQ ID NO: 638472 - DNA, 96 bp, Homo sapiens
gccagaagcgggcggcgcgggggagatgaccagagtgaactccgagcaggaacacttcctcattgtcccttttgggcttctttacagtgaagtgac

SEQ ID NO: 638473 - DNA, 75 bp, Homo sapiens
caaaaatattatggtctttgtgcacatttacatcaaggtctatccagatggcattcggcacatacgagcagacaa

SEQ ID NO: 638474 - DNA, 101 bp, Homo sapiens
aaaattgaaggttatgaagatcagtgtttcctgaggttataggcgggtgtttgaggagtacatgcgggttattagccagcggtacccagacatccgcattg

SEQ ID NO: 638475 - DNA, 90 bp, Homo sapiens
gtctcggccacctcaaggataatcactaaattctgccgaaaggactgaggaacggtgcctggaaaaggtccacaaggcgattacaatttc

SEQ ID NO: 638476 - DNA, 100 bp, Homo sapiens
ggacgaccgttgctgagctggtgtggaacgtctgtgatcagctgacaacagcgatgggtccagttctgaagacaacagggaagaccaagatgtgaaaacc

SEQ ID NO: 638477 - DNA, 100 bp, Homo sapiens
tgcccgccggcccgtctgtctacccccagcatgagcggcctgcgcgtctacagcacgtcggtcaccggctcccgcgaaaacactcgtgaaactgctcagg

SEQ ID NO: 638478 - DNA, 75 bp, Homo sapiens
acttaatccacttacgttcagggttatcattcatagatttccttgatagctgccgtgccagtactctattggctg

SEQ ID NO: 638479 - DNA, 83 bp, Homo sapiens
aggacgttcccttcacggagaaagattttgagaacagattatcagtctggtcaatcagatctgcggcaaagtgtctggtaaaa

SEQ ID NO: 638480 - DNA, 74 bp, Homo sapiens
acgacttcaactgcaacgtctgggatgcactcaaagccgaccgggcaggactccctggcactggggaaaacaga

SEQ ID NO: 638481 - DNA, 97 bp, Homo sapiens
gaagagcgaccagctcactaagaacatgggcttcgtgctgtgtcactccatcgctgggggtacgggttctggcctgggctcctacctcctggagcga

SEQ ID NO: 638482 - DNA, 82 bp, Homo sapiens
agacctgctgcacatcgtcattgacatccctatcaatgtctacaagagttgcaggatacacttgctctctggaagtgtgtcc

SEQ ID NO: 638483 - DNA, 74 bp, Homo sapiens
aaccatgagtggttccatgatgggaagtgacatggaatacggggtgctttgcattcaggaatacagaaaaaaca

SEQ ID NO: 638484 - DNA, 75 bp, Homo sapiens
ccgccttcgcatggagctggaaaccatcaaggacttggtgaaatgtgaaaataagaagaatgctacacccagaac

SEQ ID NO: 638485 - DNA, 100 bp, Homo sapiens
gtggcactgaggctctggaacttctgcccagctctccttgatatgaattgagaattcgttatttgccaaaaggatttctaaaccagtttactgaagataa

SEQ ID NO: 638486 - DNA, 76 bp, Homo sapiens
cgtaatgcgactcaaagctgcacggcagtctgtttatgagggttatgagagaatttacaatgaaattccggacatt

SEQ ID NO: 638487 - DNA, 90 bp, Homo sapiens
gctcctctaagtgaacccacgctgagccagcatactcatgatcaagcgacgtgcctcagaggctttgcccgaattgcttcgtcctgtcac

SEQ ID NO: 638488 - DNA, 102 bp, Homo sapiens
cgccgagctggacccggaccggttttggctccgggaagcagtttgttcgctatataaacatgttgataaacgacacgacgtttttgctcgatgaaagtctgg

SEQ ID NO: 638489 - DNA, 101 bp, Homo sapiens
cccgcagagagcagccgggctgccagcggtgtggtttcagaaccgaagagccaagttccgcaggaatgagagagccatgctagccaataaaaacgcttccc

SEQ ID NO: 638490 - DNA, 74 bp, Homo sapiens
ggtgctgtctgggcttcatagcattcgcctactccgtgaagcctggtccgacccccagtggcactaacgtggga

SEQ ID NO: 638491 - DNA, 96 bp, Homo sapiens
gtgaaatcatgcctctgcaaaggtgatattatacccaacttctaatagctccaaatcagctgaattacaccgaatggtagttccaaaaaatagcca

SEQ ID NO: 638492 - DNA, 80 bp, Homo sapiens
ggaccacgcatccatccagatgaacgtggccgaggtgctgggcgtcctcttctttgccatagcctgcttcttatacaagc

SEQ ID NO: 638493 - DNA, 83 bp, Homo sapiens
caatcttcacccttgcccggagaccaagcgggaaccctactctggaaactgtcagtcccagggcactggggagggctgaggcc

SEQ ID NO: 638494 - DNA, 100 bp, Homo sapiens
agaaattacgaaaacagcaaaatccagtagttcttctaatccaaaatgggatgaacagctaactgtgtgccatgtttcagaacagagtaagacccctggt

SEQ ID NO: 638495 - DNA, 101 bp, Homo sapiens
gagatcaggatgttccgcttcatgagggacgtggagcctgaggatcccatgttcctgatgtattgaaaaccttccctttgaattacagagaaactttcagc

SEQ ID NO: 638496 - DNA, 95 bp, Homo sapiens
gtattggcattcccattgctgtgcctacaccttcgccacccactattggaccaggaatgtctgatcacagatacggggatggtggctctactttc

SEQ ID NO: 638497 - DNA, 84 bp, Homo sapiens
gtttaaacagccaaaacagttcattcatattcagcagacggtaaagaacaggtccaagaaaagctcaaagaaagcaaataccag

SEQ ID NO: 638498 - DNA, 82 bp, Homo sapiens
cccccgcgctggtgcagccaccctcgctccctctgctcttcctcccttcgctcgcaccatgcagcctcccgcgacgatgccc

SEQ ID NO: 638499 - DNA, 50 bp, Homo sapiens
tcgggctcttgggcgctgctctgagggaccagtccaacgtcaggcggatg

SEQ ID NO: 638500 - DNA, 125 bp, Homo sapiens
ccgggaactcgatcctgctggctgctgtctctattctctcggcctgtcagcaaagattcgataccagcatcttgccaatttgcaaggactcacttggctggatgtttaacagacttgatacaaac

SEQ ID NO: 638501 - DNA, 75 bp, Homo sapiens
gaacagtcaccatgtgttctttcaagatctctgttacaagctggtgggcttaaactggatggccggcagctcaag

SEQ ID NO: 638502 - DNA, 74 bp, Homo sapiens
cctggagtcaggagcgcgcttgtgcgtacagttcggttcagctcccattgctatcacatgttttaccagaggct

SEQ ID NO: 638503 - DNA, 100 bp, Homo sapiens
cctctgagcctagagagtgaagacagccaccgcactgtgttcctgacacgtacagcaacgccacgctctggtacaagatcttcacaactgccagagatgc

SEQ ID NO: 638504 - DNA, 75 bp, Homo sapiens
ggcggatctggaggagcagttgtctgatgaagagaaggtgttagtaaaatggcctttcgccatttaattgagttc

SEQ ID NO: 638505 - DNA, 98 bp, Homo sapiens
tcttcttcaaaagagccgctgaagacacggcatcagcgaggagatacgcatcctctaaccttagatgaaattttggatgaaacacaacatttagatat

SEQ ID NO: 638506 - DNA, 83 bp, Homo sapiens
tggaatatgccaaggaaaaactggagagcttcatcaaaaatagtgatagctttgataactctgcccggatggccctagtcttc

SEQ ID NO: 638507 - DNA, 83 bp, Homo sapiens
gaggaagagctgagtgggacaaagataagccatcaccaaactcagaaaatgaacaaaattctgttaccctggaagtcctgctt

SEQ ID NO: 638508 - DNA, 73 bp, Homo sapiens
aacaccatggctgcggcggcccagctctctctgacacagggcacttcatgtatctggaagctactgcagtggg

SEQ ID NO: 638509 - DNA, 101 bp, Homo sapiens
aggcctacttcaagaagcagcaagctgactccaactgtgggttcgcagaggaatacgaagcactgcctccttacctgtgaggaatgcaaaataaagcatgg

SEQ ID NO: 638510 - DNA, 100 bp, Homo sapiens
caacgggctgtccgtggagcggagtaacacacagctgggtgggggcacaggggcaaatcgaagtagagagcgaaaccatcttcaagttagcagcgtttat

SEQ ID NO: 638511 - DNA, 93 bp, Homo sapiens
gctcgagcaaccagaaccggagcatggaggcgcacaacatcctcagcctcctgctcttcatggatgaagcagacgccttccttcggaagcgag

SEQ ID NO: 638512 - DNA, 96 bp, Homo sapiens
atttaagcctgatctaacccctagaaacaggtatgagcagcagcgggacaatcttgcccaacagtcattcaacatggaacaagccaattataccat

SEQ ID NO: 638513 - DNA, 75 bp, Homo sapiens
ggggcctccggtatgttgccgctgcgttgaggttctggctccttggcagcaatggctgtatttgaagataagttt

SEQ ID NO: 638514 - DNA, 105 bp, Homo sapiens
cgactcgagggtgacgctcgctccgctcgtcccgctcgtcatggcctacccgggatacggaggaggggacatggatttgattgacatactttggaggcaagatat

SEQ ID NO: 638515 - DNA, 101 bp, Homo sapiens
actgtggttggggctgtgggacttcgaaggagggctctcctgtctgccaccatcctgggttgacaattctacacaaggagtttgcagctcaccttgtgaag

SEQ ID NO: 638516 - DNA, 72 bp, Homo sapiens
gctacagcaatggcccaggcccattctacaataaagattctggcacacagcctggtggtgttccgagtgctc

SEQ ID NO: 638517 - DNA, 74 bp, Homo sapiens
ctttcctttccgtctggcggcagccatcaggagctgaagaagaagctgttcaaacgccggcgggtgttgaatcg

SEQ ID NO: 638518 - DNA, 74 bp, Homo sapiens
gcgacttcatctggggcgtcgtgcgcaaaggcctgcagtgcgcgcgttcagattcagaacaagaaagtggacat

SEQ ID NO: 638519 - DNA, 87 bp, Homo sapiens
gggcaacgctgtgaccctgggagattactaccagggccggaggattaccatcaccggaactcaaaagccaaaagtctctgagaacga

SEQ ID NO: 638520 - DNA, 100 bp, Homo sapiens
caagaagacggaaatccaaaggcagacagtacgggctcccttcgccaaactcttcattttctctaaaacctcggatcaattctcagctggtggcacaaca

SEQ ID NO: 638521 - DNA, 80 bp, Homo sapiens
atcactttcattgtctcggacgtgcggggcctgggcctcccggtccgcaagcagacaatgcagatcttcgtgaagactct

SEQ ID NO: 638522 - DNA, 75 bp, Homo sapiens
cacgccctgtgcacgcttggaatgctggatcgatgatcaagcggtgctgattcacgagagtggaagcctccagag

SEQ ID NO: 638523 - DNA, 88 bp, Homo sapiens
tgaaaagcgtcaagaagaggaggaagccatgcgtagggcttgcattgatgacaatgttgatatggtgaagtttctggtagaaaatgga

SEQ ID NO: 638524 - DNA, 95 bp, Homo sapiens
ctggagggcaaggcgggaacaccaaagaagtttgtcatcctgatattggtggcaagatcataatgtgtcctcagtgtgataggctttgtccattc

SEQ ID NO: 638525 - DNA, 74 bp, Homo sapiens
tgatggcctcggagcgcccggagccggagctcatgatggagcagtccaagaagtcctccctcatggtggcccgc

SEQ ID NO: 638526 - DNA, 74 bp, Homo sapiens
gatcccgctggtgaccctgccgctggcgagcgccaccgcatgggcctacaagaggaagacagaagcagcaaaga

SEQ ID NO: 638527 - DNA, 102 bp, Homo sapiens
cagtttcctacaagcgaacaggattctttggaaagtagcctttccagtaaatatatgactcagggaaaagcctcagcgaagaggacccagcaggaatcatga

SEQ ID NO: 638528 - DNA, 75 bp, Homo sapiens
cgcggagtgtcctggagcttgacgcgctggagcttgagagtataaatcaaagccattctgtgaaaaactgctttc

SEQ ID NO: 638529 - DNA, 100 bp, Homo sapiens
ggccgctgccgcccgagcccgggtcgcgtacttgctgaggcaactgcaacgcgcagcactgttgggcgggagctgctgctccatctgattgactatctcg

SEQ ID NO: 638530 - DNA, 104 bp, Homo sapiens
ccccagtgggtgctcacagctgcccattgcctaaagaagagatcaaagacgctggccttcagacctgatcagactcccaggggcagccaccacatgtatgacag

SEQ ID NO: 638531 - DNA, 75 bp, Homo sapiens
ccacttggtgaatggagatgcagctcagcagatatcattgaaatggattccaagcgtgtgcctcgagacaagctg

SEQ ID NO: 638532 - DNA, 82 bp, Homo sapiens
gtatcttctacagggcagggagttattgataaagactccttaggaccgcttttacttcaggaggcattgaaacttcagcagg

SEQ ID NO: 638533 - DNA, 75 bp, Homo sapiens
attagatgagattactgatgcccaggttgctcctgcaactgaagaggtcaaaatgcagatcttcgtgaaaaccct

SEQ ID NO: 638534 - DNA, 100 bp, Homo sapiens
ctgacatggcagtcccgaacacaggatgaacatccgaagacaatgttctccaaagataagttgtggtcagaaatgagaagacatgaaatgttgagggagg

SEQ ID NO: 638535 - DNA, 98 bp, Homo sapiens
gacggccttgagcgaggaggagctggacaatgaagactattactcgttgctgaacgtgcgcagggagggccgcaagcttcttatcattgggaccacta

SEQ ID NO: 638536 - DNA, 100 bp, Homo sapiens
tttttgagaaaggaaggaatatatcctgactgatttgacaacactgcagctgaaggaggagttgctggatggagaggattataatttccttcaaggagcg

SEQ ID NO: 638537 - DNA, 100 bp, Homo sapiens
gttcaagttcgtcttcaattcttgacttgtgtattttcaactctgggatcacctgatcatttcaatactagtagtagtcaaccaaagcctttcagacgag

SEQ ID NO: 638538 - DNA, 74 bp, Homo sapiens
aagaaagtcacctttgggctgaacagaaacatgactgccggaatacaaacagaagcttgcacgagtaacccagg

SEQ ID NO: 638539 - DNA, 100 bp, Homo sapiens
ctggagatgcttccgaactgtgggcaaaaatggcgatgtgcagcacattaagaggagagacatcgtgctgaagcgagaactgggtgagggagcctttgga

SEQ ID NO: 638540 - DNA, 90 bp, Homo sapiens
agtgctagctgaaggatgagcagcagctagccaggcaaagttgtcggacaagtaaccgcaagagcttgattgtgacctctagcacatcac

SEQ ID NO: 638541 - DNA, 100 bp, Homo sapiens
gatttcaacatgcctctgacaatctctagtgacatggatttgattgacatactttggaggcaagatatagatcttggagtaagtcgagaagtatttgact

SEQ ID NO: 638542 - DNA, 83 bp, Homo sapiens
tatctgtcttcggtggactccttcggcagtccacccaccgccgccgcctcccaggacctcagcagccatgtcgaagccccata

SEQ ID NO: 638543 - DNA, 100 bp, Homo sapiens
gcgtgtataatggaagctggggaggccggggagagattgatgctttgacagaagtggtggctgctgtaaaggggaaaattgaagtctacctggatggcgg

SEQ ID NO: 638544 - DNA, 100 bp, Homo sapiens
ttcctccaagagcacattgcctggtaagatggcatttataagacgctgtttggcatatcgaaaagaagatcgatttgatgtgcaccagctggcaaatgac

SEQ ID NO: 638545 - DNA, 100 bp, Homo sapiens
cactggcagcgggaggcagagggaggaccctggaacatcccggaagccgggaaatggacggaagctcctgttttcttgtcagccgccagctgagggccat

SEQ ID NO: 638546 - DNA, 100 bp, Homo sapiens
caaatatacaaatcactttagaatcttggctctaagtgccacaccaggtagtgatataaaggtctctaattaacagaagatggcaaagcccagccacagc

SEQ ID NO: 638547 - DNA, 100 bp, Homo sapiens
ccactccagtgcctagacagtgccttgtgtcgcaatggaagaagagatcgccgcgctggtcattgacaatggctccggcatgtgcaaagctggttttgct

SEQ ID NO: 638548 - DNA, 83 bp, Homo sapiens
ccttccccacgcaaccccagatccatttacactttacagggacggcaaaacagaacagaaaggcggagataaaaagaggggtg

SEQ ID NO: 638549 - DNA, 75 bp, Homo sapiens
agtggacatcagccccaaacaggacgaaggcgtgctgaagctgtgtcagcgtgttatgatgccgtcccgtaccaa

SEQ ID NO: 638550 - DNA, 74 bp, Homo sapiens
tacgaaagtgctcccccatccccacagtataaaaaggatgatgatgctgaagctatccttgctgcagacttcga

SEQ ID NO: 638551 - DNA, 85 bp, Homo sapiens
ctgcggcccgcgggcaggcgtcggggggagtcctgcactcaaaccctatggactacgcctggggggccaacggcctggatgccat

SEQ ID NO: 638552 - DNA, 89 bp, Homo sapiens
cacgccggccgcaggagcacggatgccccccggagccgcgggctggcaggaattgtggtgcttggaataaacagagcttatggcaaaaa

SEQ ID NO: 638553 - DNA, 100 bp, Homo sapiens
cctttgggactctgggagtacacaaggtctgaatttcctgctgctgttcacaaagatgctttttatctttaactttttgttttccccacttccgaccccg

SEQ ID NO: 638554 - DNA, 99 bp, Homo sapiens
caactttcgtttccctctgagggaattgggaggtcggcggccccaaaactccagggtttgagccacaatgtgatcttcaccttggattctttgttaaaa

SEQ ID NO: 638555 - DNA, 82 bp, Homo sapiens
gggacagccaagctagaagcctgaggagccggagagggtgctggctgccgcgcggccgagacaatgcagatcttcgtgaaga

SEQ ID NO: 638556 - DNA, 100 bp, Homo sapiens
tggcgtcccccgggggcccgtactgcacatcgtggtggtcggatttcaccacaagaagggctgccagcaacccagactactacggactcatctaacaaaa

SEQ ID NO: 638557 - DNA, 50 bp, Homo sapiens
gtgacatcttctgggatttagtctggttatgcacattcggaaactacttc

SEQ ID NO: 638558 - DNA, 100 bp, Homo sapiens
gatatcagcccccagcggcccaggcccacctcctgacaaggtgatccgggcgggccccgcaggaattttatcccctcaccggcctcacactagtatcgca

SEQ ID NO: 638559 - DNA, 97 bp, Homo sapiens
tctggttgtcatgtttactgaatgactcacagatgaatgcttctcacccggaaacaaacttgccagttgggtatcctcctcagtatccaccgacagc

SEQ ID NO: 638560 - DNA, 75 bp, Homo sapiens
aataaaagcattcggcagcgtcgtcgcttcactgtggctcatacatggatattggtgctggaaaaggcaaatact

SEQ ID NO: 638561 - DNA, 100 bp, Homo sapiens
cggcagacgggcgtcttctacctgacgctcgtcctcatcctggtcactagcggactcttcttcgccttcgagtgatgcagtttggacggattgatggcag

SEQ ID NO: 638562 - DNA, 100 bp, Homo sapiens
attgctgcatcaagaaacccaagctgctgagaattatatccagatcgagagacagaagattctgaaagggttcaatgaaatgagagtcatcttggacaat

SEQ ID NO: 638563 - DNA, 97 bp, Homo sapiens
ccgagagcgtgaccgagagcgcgaatatcgtcatcgttagaaggtcactacaggaaaagatatcttcattaaagtgcaacagcacactgagagcaac

SEQ ID NO: 638564 - DNA, 92 bp, Homo sapiens
cgcgggcagagcgcggcggcgcgggttgcacagagcattgaggatcaccatcaggaagtgattggtttctgcagagagaatggtttccatgg

SEQ ID NO: 638565 - DNA, 100 bp, Homo sapiens
agttttgagaagaatgtggaaataacggagcaacttgctaatggcaggcattttacaagccccagcatgagaccagatgtaagctctcctccatccagct

SEQ ID NO: 638566 - DNA, 82 bp, Homo sapiens
gtccccgccagcgccccatcctgagccgaggaggtggccaagttggagaagcacttgatgcttctgcggcaggagtatgtca

SEQ ID NO: 638567 - DNA, 95 bp, Homo sapiens
actggctcttcagtcccttcaagtttgctcaccttataaatgtggaattttttgatgatctgttagtagttcttcatactctcattgagtctggt

SEQ ID NO: 638568 - DNA, 110 bp, Homo sapiens
gcccagccgggccctgtcctttcacaaccagctgggattccacaggcagttcaagtcaagcaactagccctgaaagccattatcgccatggatacagcaggaatgatcct

SEQ ID NO: 638569 - DNA, 100 bp, Homo sapiens
agtgcagctgcctcagttcttagcgcagcttctgggctggctggctgagaaactacctactcttcgttccacccctacagaccttatcctttgtgttcct

SEQ ID NO: 638570 - DNA, 90 bp, Homo sapiens
gcggtggggactgcacgtagcccggcgctcggcatggctctcctggtgctcggtagtaaacctattgatggcaattttgctgactgtgga

SEQ ID NO: 638571 - DNA, 74 bp, Homo sapiens
caggcgaacccgcggcgcaataacggtcgcaatggaagaagagatcgccgcgctggtcattgacaatggctccg

SEQ ID NO: 638572 - DNA, 100 bp, Homo sapiens
taactctgagaagtcgtcctcttcagaaagactatcttgctaatcatggccggttaaatgagtctgaagccaggcgaaaattctggcaaatcctgtctgc

SEQ ID NO: 638573 - DNA, 101 bp, Homo sapiens
gtgcttccccttgccgagcactgggtggctgggagcccgagccccacacctgccgggcagcaggtgctggacgtcgacagctgcctggactcatccgtgct

SEQ ID NO: 638574 - DNA, 100 bp, Homo sapiens
ggacgaggaagagctgagtgggacaaaggtttctataatccaggaacttgttactaattatgaagcctctcttaaaacgtgtgacttttttagcccatat

SEQ ID NO: 638575 - DNA, 100 bp, Homo sapiens
ctgcggcctagaggtccgggcttggagttcgcctcagacgcggtggagccgccggagtctgagaaggtaccattgttggatactggtgacatcatcattg

SEQ ID NO: 638576 - DNA, 100 bp, Homo sapiens
agctgaggaaccagatatcttgaaaagctgccagaaagacttcattagaggggtggtagactcggaggatctccctctaaacatatcccgtgagatgttg

SEQ ID NO: 638577 - DNA, 98 bp, Homo sapiens
agaaaccacagagtacttaaaaacatcatggatcaatctcaaacaaaggtgaagctttgttctaagaatatttgtttcatctagtttatgagtccaaa

SEQ ID NO: 638578 - DNA, 100 bp, Homo sapiens
aacaacgggctaagtttcagagcttcgtggtcacctacgtggccatgctggccaagcagtctaccagagtcaagggtccagagaaggaggagaagttgag

SEQ ID NO: 638579 - DNA, 101 bp, Homo sapiens
cctcccaagtagctgagattacaggcaggtccaaaatgtggctgcttttaacaatggcaagtttgatatctgtactggggactacacatggtttgtttgga

SEQ ID NO: 638580 - DNA, 100 bp, Homo sapiens
tgcccggccgccccgtctgagaagtgaggagaccctctgcctggcaaccaccccgtctgagaagctacgcccaggaggaacagctgaaagaagaggagga

SEQ ID NO: 638581 - DNA, 100 bp, Homo sapiens
ctggctgactacttcatcgtggtaggctatgaccacgagaagccaggttctctacttttagagtcgaaaataaatcctaacactgcataccagaaacaac

SEQ ID NO: 638582 - DNA, 100 bp, Homo sapiens
gagaagactctagatgtttttaacataattttagcaaggcaacaagcacaagttgagaacggaaagatgctgaaggatgggagaccgttcagagaggaag

SEQ ID NO: 638583 - DNA, 88 bp, Homo sapiens
acagccatgcaaaggcaggggaggaagccacctcgagagctcttcagaaaccaggctgctttcaggaacattgctgtggattcccagg

SEQ ID NO: 638584 - DNA, 83 bp, Homo sapiens
cgacagcgacccagccacccccggagcgcagtccccgaagacaatgcagatcttcgtgaagactctgactggtaagaccatca

SEQ ID NO: 638585 - DNA, 89 bp, Homo sapiens
gctggataattttatcccagggtggctgaatcacggaatgcaacttgtagagacagtttcatgtggaggaaatcttttgatgaatattg

SEQ ID NO: 638586 - DNA, 100 bp, Homo sapiens
tgaagaacaagctgtccagcgaagcctggaggaaatcttgccagcctgtgaccctctcaggatcggggacgcagattctggattttggactggctcggca

SEQ ID NO: 638587 - DNA, 51 bp, Homo sapiens
tggggttggcatcccccacatacggtcggttagaccccgtttaaccatcta

SEQ ID NO: 638588 - DNA, 90 bp, Homo sapiens
ctttgctgggggaatggacacagtgtctcgactgcattgtgagagtgaatctttcaagatggatctaatcttagatgtaaacattcaaat

SEQ ID NO: 638589 - DNA, 100 bp, Homo sapiens
ccgagacgcactgggggccggatggtcaaaatgcagatcttcgtgaaaacccttaccggcaagaccatcacccttgaggtggagcccagtgacaccatcg

SEQ ID NO: 638590 - DNA, 100 bp, Homo sapiens
caccattcctaccaagcagacacagaccttcactacctattctgacaaccagcctggtgtgcttattcagagccggagcatggccccaacacagacctgc

SEQ ID NO: 638591 - DNA, 83 bp, Homo sapiens
tctgccaccatcttcgacttgagcgaagttttatgcaaggacctgaaggagaagaaggagaaggtggaggagaaggcaagccg

SEQ ID NO: 638592 - DNA, 98 bp, Homo sapiens
aagcgggggaaacttggcggcggaacccttaggagaaatcttgagagtggacagcaattgtgaagatcgccagagagttctgtgtttcatcaccgccg

SEQ ID NO: 638593 - DNA, 100 bp, Homo sapiens
acgaggacgaggacgagatggacctggagcccaacgtgcaccgtccaggtgaggttagagctggggcatcgcgcccaactgcgcaagaagcccaccacgg

SEQ ID NO: 638594 - DNA, 100 bp, Homo sapiens
agcgcagcaacaacagagagcacgtgtgcagggctcgcggcctggcaagaatgtacagctgacagagaacgagatccgcggtctgtgcctgaaatcccgg

SEQ ID NO: 638595 - DNA, 88 bp, Homo sapiens
ggcttttcccggcagtcacaccccctgacccagggcctgccagcttggagacattccataagtggaccaatctcaacatccaaacccc

SEQ ID NO: 638596 - DNA, 101 bp, Homo sapiens
gacaacgtctgcatggcctttgcaggcctccggtgtggctgtctctgatggtgtcatcaaggtgttcaacgacatgaaggtgcgtaagtcttcaacgccag

SEQ ID NO: 638597 - DNA, 100 bp, Homo sapiens
accctccttcgcctcggagtgggatgagtacctggagtagaacagaaaaattattatgtctgtgttcccttgggactcattggaaattgtacagtgacat

SEQ ID NO: 638598 - DNA, 83 bp, Homo sapiens
cgggcatcagcgggaacaaggtgttttctgttatctccagaagaagaagagaaaaggagaatccgaagggaaaggaataagat

SEQ ID NO: 638599 - DNA, 75 bp, Homo sapiens
gtcagtcattaatgaccctataaaccatatcattctacaggaaaatgcacagcatgccacccggtttatagctct

SEQ ID NO: 638600 - DNA, 100 bp, Homo sapiens
agagacaggcgttcgaggagatcatcctgcagttatgaaaacccatggacaatcccgaatatgttgtcaatgacgagaattggcttggccccagttctgg

SEQ ID NO: 638601 - DNA, 100 bp, Homo sapiens
ggcacctgagcggctggagagcctgttggagaaacacaaagagaggaatgttacggcatccggagtcatccctcagatttctctgatcatgggcccatgt

SEQ ID NO: 638602 - DNA, 101 bp, Homo sapiens
tgggcagagccctgtgcttcgaataattattgaaaacctcttttaccctgttaccctggaagttcttcatcaggacaccgagtttccaggtgtggttgcaa

SEQ ID NO: 638603 - DNA, 110 bp, Homo sapiens
tggccctggccctgatcatcctgctgggcttcgtccagatcgggaagggttccctcggagacatggaggccagagaggaggtgcagttggtgggtgccagccacatggag

SEQ ID NO: 638604 - DNA, 99 bp, Homo sapiens
caagggagctgataaagaacttcttcccaaaatgggtccttgaatgggcaagagggcacatgaagtacggcgtcctccacattcacggcctctacacgg

SEQ ID NO: 638605 - DNA, 100 bp, Homo sapiens
tagatcgtgtggtagaagttgtggaggagacaattaaagtatttgattttcatcaagcagctgatggtatccaggaacaacagagacaagaacaagcagg

SEQ ID NO: 638606 - DNA, 75 bp, Homo sapiens
tgtgaaaagttgcccaaggccaatcacaacaacatccgctgtaaaactaccatagaagctatccatggattgatg

SEQ ID NO: 638607 - DNA, 50 bp, Homo sapiens
agggcacaccaaactccatctggaaatctggcattttttaaagtttgcgc

SEQ ID NO: 638608 - DNA, 101 bp, Homo sapiens
acccggagaagcaggagccctactcggcagggtgaggtggctttgaccccgggttgcccggccagcacgaccgaggaggtggctggacagctggaggatga

SEQ ID NO: 638609 - DNA, 82 bp, Homo sapiens
tgaaaactctcctagcgcggtgcccgcgccgtgactccgcaggttcgagaacttgtcttggacaattgcaaatcaaatgatg

SEQ ID NO: 638610 - DNA, 75 bp, Homo sapiens
tgccaagttgaaaatggacgagtaatcgcctgctttgattcattgaaagatcagtttgacaacttagaaaaacac

SEQ ID NO: 638611 - DNA, 100 bp, Homo sapiens
ttaaaagttaggcaagatctggtcaaaggagtgaaacctcggtccggctgggctattgatccctttggacactcaccaacaatggcttatcttctaaacc

SEQ ID NO: 638612 - DNA, 100 bp, Homo sapiens
gcaaccgctccggcaacgccaaccgctccgctgcgcgcaggctgggctgcaggctctcggctgcagcgctggaaaagcagcatctgttatagcaaaatac

SEQ ID NO: 638613 - DNA, 78 bp, Homo sapiens
agaatagtagtaatggtagaataagcccacctggattatattccatcacaacaagatattctgcttgccagaagaccc

SEQ ID NO: 638614 - DNA, 100 bp, Homo sapiens
ctcaagaaagcctcagtgatcttggtgccatagagagtctccgggtccctggaaagggacaagaatccttcaagaaacaggaaaaaactcctaaaacacc

SEQ ID NO: 638615 - DNA, 75 bp, Homo sapiens
tgcattcccaatctgcactattggaagaaaagccaatgtttgggcatgttggagacttgggcaatgtgactgctg

SEQ ID NO: 638616 - DNA, 90 bp, Homo sapiens
cataaagccaacattcgcaccgtcatggtcacaggtatattcagcatgcagctttactttttcaaagattccttcaccatacaccttatc

SEQ ID NO: 638617 - DNA, 139 bp, Homo sapiens
cagcaggcaagggccatggtggacatagtgaagaggtacaactggacctatgtatcagccgtgcacacagaagtacttctagtctagttggagaaacaacctagaaaatgcaccaacaaatggggcacaataactactc

SEQ ID NO: 638618 - DNA, 74 bp, Homo sapiens
ccttagctgtgctcgcgctactctctctttctggcctggaggctatccagcagcccactgcggaagagggcagc

SEQ ID NO: 638619 - DNA, 101 bp, Homo sapiens
gctagcagcctcctgaataaaagaggtctcttcataattgaccccaatggagtcatcaagcatttgagcgtcaacgatctcccagtgggccgaagcgtgga

SEQ ID NO: 638620 - DNA, 51 bp, Homo sapiens
atatactactaactttgaaatggaataaggaaactatggtccaggaggcag

SEQ ID NO: 638621 - DNA, 78 bp, Homo sapiens
ggaccccagcgcgggcggcggcggctgggcgggagccccagagttggaatcgaagcctcttaaaatggcagatgactt

SEQ ID NO: 638622 - DNA, 87 bp, Homo sapiens
cgaacctcgagaccaacgtggaggagctgtgggtggaaggtccgggcccaccagctggtcttgccaccttgcgacgtagtgatcaaa

SEQ ID NO: 638623 - DNA, 100 bp, Homo sapiens
ggatctggaggagcagttgtctgatgaagagaaggtacatgtcccagagcaagcacacggaggcccgggagctcatgtactcgggagccctgctcttctt

SEQ ID NO: 638624 - DNA, 100 bp, Homo sapiens
gaattatgagaccatgggaagagcactcaggtgttggagcaggcgatggatatgatctaaaagtcaaaatagtgatggagaaaaaggttgtcttttcctg

SEQ ID NO: 638625 - DNA, 97 bp, Homo sapiens
gtgcccgcggcgaggatggggacaagtatggtcagtttaggggctggtgcaaaggatgagttgcacattgttgaagcagaggcaatgaattacgaag

SEQ ID NO: 638626 - DNA, 50 bp, Homo sapiens
cggagctcccccaagagccggaaagttccaggatacacgtgccagatctg

SEQ ID NO: 638627 - DNA, 75 bp, Homo sapiens
aagagtggaaaatttatgaaccccacagaccaagcccattattgctatggcagctttggtccatcacagttttgc

SEQ ID NO: 638628 - DNA, 75 bp, Homo sapiens
tctccgtactgatcactacatcatgtggacatttgggagcaataaaaataagaagaaaggaaaagccagaaaaat

SEQ ID NO: 638629 - DNA, 75 bp, Homo sapiens
cctatgcaacgctgggcatgaggagcggagcggagaatgccaagacaggtgatttggcttctgcacagttaggag

SEQ ID NO: 638630 - DNA, 100 bp, Homo sapiens
aaagtgactgagctggaagacaagtttgatttactagttgatgccaatgatgtaattctggagagagtggaaactctgatgaggaagaaagtgcttcaga

SEQ ID NO: 638631 - DNA, 82 bp, Homo sapiens
acagctcagaacagttggatcttgctcagtctctgtcagaggaagatcccttggctgctcccggcagatcggcttctccttt

SEQ ID NO: 638632 - DNA, 97 bp, Homo sapiens
ccgcgtccgccgattcctcctccttggtcgccgcgtccttggctggcgtatgccatggacaatattaccaggcagaaccaattctacgatacccaag

SEQ ID NO: 638633 - DNA, 78 bp, Homo sapiens
ctcctccgacgccgatccggacagcggcacagaggagggagggcctgctttcttccccgggcgatgtgcagagatctt

SEQ ID NO: 638634 - DNA, 83 bp, Homo sapiens
ccctgttggcatcatgtgagagtgaagacagtatttgccagctcattgttaagtatgagagagaagctagtaaatactgggac

SEQ ID NO: 638635 - DNA, 97 bp, Homo sapiens
tccagcccggccggggcctgcgggcgcccagagccgcgccgtccgcgccgcccgttctggtctcggcgcggaagatggccggcggcgtggacggccc

SEQ ID NO: 638636 - DNA, 75 bp, Homo sapiens
gcccttgtggcgaatggggctcacgtcgaggcgtgatggtgggcatgggtcagaaggattcctatgtgggcgacg

SEQ ID NO: 638637 - DNA, 100 bp, Homo sapiens
gcctcccaagtagctgggattacaggagctgtcctgggttctgaaatgttcgtcatcctcatgctctacctctggttcgccatcggcctggcctgcgccg

SEQ ID NO: 638638 - DNA, 100 bp, Homo sapiens
cttgtgtattctgttacatcaatcaaaaggctcatcttcaggtggaactaatctggttaagattcctacagaaaaaagaactcggagaaaactaatgcca

SEQ ID NO: 638639 - DNA, 101 bp, Homo sapiens
tctgccgtcaaccgcaggaggatgaagctgctgctgggcatcgccttgctggcctacgtcgcctatctatccatactaatggaaatgtaactggaactgac

SEQ ID NO: 638640 - DNA, 100 bp, Homo sapiens
aggcctccccaaccatgtgcaattatctctgttgaggagctggcgcggaatctggtcatcaaggtcaacagggatgctgtcatgaaaatcgcggtggccg

SEQ ID NO: 638641 - DNA, 75 bp, Homo sapiens
caggagcaggcgcctacatcctaactcgatttgctgagtcagtggatcggtggggaaaatgctgcttaccctggg

SEQ ID NO: 638642 - DNA, 87 bp, Homo sapiens
gttcgtctcttacgtctgcggaagtgcagctgcctcagttcttagcgcaggcaattaagttggaatatgcaaggttggttaagttgg

SEQ ID NO: 638643 - DNA, 100 bp, Homo sapiens
aaaggactcgccctctgggaggcttaccgagagtttgaaagtgcgattgtggaagctgctcgggtataaagatggctgtgaccacatcggggagcaccga

SEQ ID NO: 638644 - DNA, 100 bp, Homo sapiens
aaacaagaatgctatcaataatggtgttcgaatatctggaagagaaacagattgtctcagtttacctagctttgaaaatgccatacccatgggagagaag

SEQ ID NO: 638645 - DNA, 100 bp, Homo sapiens
tgggggtcgagcacataacggggttcgggtgtctcgtgtgtgaacatcacagtatatgactctcaacccttctactaagaggaagaatactggatcccca

SEQ ID NO: 638646 - DNA, 87 bp, Homo sapiens
caccctgtcctatgtggacgttggcactgggaagctcagtaaacgctctgccactgacctgtgtggcaggaatgatggaaaccttaa

SEQ ID NO: 638647 - DNA, 75 bp, Homo sapiens
ctcccttcgccttcgccctttccacctcgcggcagttcggcccattgctagaagactgggacataatcagcccca

SEQ ID NO: 638648 - DNA, 74 bp, Homo sapiens
cattgtcttctcctcttctcagacagggcagaccgaggagtttggaccgaggcgcatattaaatttcctattga

SEQ ID NO: 638649 - DNA, 100 bp, Homo sapiens
gtcttcggctagcaagttcaccagcatccctgcagccttctggtataccatcgtcaccatgacaacactagggtactggctcctgtatcacccagctctg

SEQ ID NO: 638650 - DNA, 83 bp, Homo sapiens
tcagccgcgcctacaccactgcctgcgtcctcaccaccgccgccgtgggagcatttcctgaagacgtagtcatgcagcacgtc

SEQ ID NO: 638651 - DNA, 96 bp, Homo sapiens
agtttccttaaagcctgaggaagagcatcagactgatgagaaacagataatagaatctgtccctccagctggccctgaggcatctgagtcaacaac

SEQ ID NO: 638652 - DNA, 83 bp, Homo sapiens
gcttaccgcatctggctggagccctgcattcgcggcgtgtgcagatcaatgtccgagttaccaccatggatgcagagctggag

SEQ ID NO: 638653 - DNA, 90 bp, Homo sapiens
atcatctgatatttatactgaatgagttactgcggtgggtgcgctggacctgctgctggccctgctgcacggttccctggtgcaggagtc

SEQ ID NO: 638654 - DNA, 96 bp, Homo sapiens
gagagagtgaacagggagcggggcttttgtctattccgaagaggctcaatctgtaaatccttctagtgttgatgaaaatattgactctgaaacaga

SEQ ID NO: 638655 - DNA, 74 bp, Homo sapiens
gaacaagaagtaggcattgaccccttgtccagttactctaacaagtctggaggcctgtgattggaattgaaaca

SEQ ID NO: 638656 - DNA, 98 bp, Homo sapiens
ccaacaaggagattttccttcgggagttgatctctaatgcttctgatgcagcctggcatcctcgctacaacctcattgttgtgggccgatacccagat

SEQ ID NO: 638657 - DNA, 100 bp, Homo sapiens
ctcgcgtcgcgcccgggaggaaggaacgaggcaaggagctaaagcagcgtgcgttcagccctgggctccagcggcgccatgagcaaatgaaaaagaattt

SEQ ID NO: 638658 - DNA, 88 bp, Homo sapiens
tgctgggtacctgccccgctggtcccagctacctgaccgacgttgaccgcatcgccaccttgggctacctgcccacccagcaggacgt

SEQ ID NO: 638659 - DNA, 50 bp, Homo sapiens
cggtacatctgaaagccgggaaatggtgggaaagcagtgccactctccgc

SEQ ID NO: 638660 - DNA, 74 bp, Homo sapiens
cgatctaaactattggataaacttcagagatttaataagaaggcagtaactgacacacatgaaaatggagacct

SEQ ID NO: 638661 - DNA, 75 bp, Homo sapiens
gtgcgagaactgcgcagacctggtggaggtgttaaatgaaatcatcagcagtgaggactctgaaggatccactga

SEQ ID NO: 638662 - DNA, 90 bp, Homo sapiens
caagaaaagttagcaatgatggaaagtggggtgagagactatagcaagcaggtattaggggaatattcctacctcttagataaggaaacg

SEQ ID NO: 638663 - DNA, 100 bp, Homo sapiens
cgggaggaacatgacatcgcggagcttcacgtggagtgacgcacgcctgcaccgaggcctggtgaccctgctgactggtgaaattgttgacgccttcagc

SEQ ID NO: 638664 - DNA, 100 bp, Homo sapiens
gccggagcgagagcgcgcgggcgcggccgacaggtgctgctgctgcctccactgtactcagacccaggtagcacaggattgtccatcctccagcagctca

SEQ ID NO: 638665 - DNA, 82 bp, Homo sapiens
ggtattttttggagcttccatcctggttcttccaaagtgcccggacccaaaacaggaaaaaatgtttcgatgaaagatcctc

SEQ ID NO: 638666 - DNA, 82 bp, Homo sapiens
caaggattctcgctgtgacagagacaacaccgagtatgagaagttaattggactcctgagattaacaaagaacacttgctac

SEQ ID NO: 638667 - DNA, 94 bp, Homo sapiens
acggatcatggccgcagccgctctggggcagatcaggatcctcatgaccagccaaagagaagaagaattaggaagcataaatcaaagaaaaaat

SEQ ID NO: 638668 - DNA, 75 bp, Homo sapiens
caccgttggcgctggacgcttcctccttggaagcgcctctccctcagttaagtgggcagaccaacatccacctca

SEQ ID NO: 638669 - DNA, 82 bp, Homo sapiens
aaacggcaagatgtccagtaatgtcccggcggatatgccatccagtccaatggatcagatgggcaagatgagacctcagcca

SEQ ID NO: 638670 - DNA, 82 bp, Homo sapiens
gaagctgtgcatctacaccgacaactccatccggcccgaggagctgctggcttcttccccgggagctcgcagggctgcgacg

SEQ ID NO: 638671 - DNA, 101 bp, Homo sapiens
tctgtcatcagaagaaattcaacagagagctcaccagattactgatgagtcactcaagactgcttgcaactgattgcagacagtgaaacaccaactataca

SEQ ID NO: 638672 - DNA, 98 bp, Homo sapiens
cagtactgctttgaatgtgactgtttccgttgccaaacccaggacaaggttggtacaggtcttgggcctacactggagttttatgcgcttgtatctca

SEQ ID NO: 638673 - DNA, 98 bp, Homo sapiens
ccacagcctgctcagcatcctggacatcatcaccgtttgctggttggctcccgagcagacagcaggaaagaagaagcccttcgtgtacacccagggcc

SEQ ID NO: 638674 - DNA, 50 bp, Homo sapiens
caaggagcccctcatccccatccagttgatacaccaaaatcggcaagcta

SEQ ID NO: 638675 - DNA, 75 bp, Homo sapiens
cgggccggcgcgggagggctgtgtgatggcctcggagcgcccggagccggagaagctagatgtggaagagccaga

SEQ ID NO: 638676 - DNA, 100 bp, Homo sapiens
aaggcactgaagccctacgagattcacaccgtcttcggtctcctggggtcggcgccgagtgggaggatggcggaacaagagtgagccatggagctacgtg

SEQ ID NO: 638677 - DNA, 83 bp, Homo sapiens
acattaagtcaaatataagagtctgactacttgacacactggctcgggcgaactttctgaccaagtatacaactacccagagg

SEQ ID NO: 638678 - DNA, 100 bp, Homo sapiens
atggcacattacaacttcaagaaaattacggtggtgccgtccgccaagtgttctagaacagatcagacattttgtaatgatgcctgaaataaacactaac

SEQ ID NO: 638679 - DNA, 80 bp, Homo sapiens
tgtcccggctttgtgcttctcccgaatcagcttcgtttggttccttgatcttagcaaagcaatgtctcaagatggtgctt

SEQ ID NO: 638680 - DNA, 100 bp, Homo sapiens
agctattcttcttatggccagagccagaacagcggtgcgtctttctacgtgaataggattttgtggctggccagatacactgcatcatctttttcatcat

SEQ ID NO: 638681 - DNA, 101 bp, Homo sapiens
tagacccacagctgttaaagcaacagccgcggcccatggagcccgccggcccggcccccggccgcctcgggccgctgctctgcctgctgctcgccgcgtcc

SEQ ID NO: 638682 - DNA, 75 bp, Homo sapiens
agcgggacagcgcggcggggagcgacgagtgctccatacttgcttgcagtgcctacgtggctctggctttgggtg

SEQ ID NO: 638683 - DNA, 75 bp, Homo sapiens
aaagaaatggaggaagcaaagaaaatgatatcaggactacagggaactctaatgatccaggacaaagaagttacc

SEQ ID NO: 638684 - DNA, 50 bp, Homo sapiens
cgcgcaggagcctcccggagctgggccgcgatgggcctcttggaacattg

SEQ ID NO: 638685 - DNA, 95 bp, Homo sapiens
ctgccttgagaggtcacttctgcctttccagtgacaaaatggtgtgcttcctgcctgacacagctcacttcaagaagtgcacaatgtcagaacgt

SEQ ID NO: 638686 - DNA, 90 bp, Homo sapiens
ctgcgcatacacaatcccgggcatgggcggcaactctttgatgtactactataatgggaaagcggtcttgagagctgatgacaataacat

SEQ ID NO: 638687 - DNA, 96 bp, Homo sapiens
ggcctgacagctctgcggctcgggccctgagctttctaaaaccaatttttccaacaacaacgatttccgtgctcttctgcagtctttgtatgctac

SEQ ID NO: 638688 - DNA, 75 bp, Homo sapiens
aggaggaggcggaggtccaagcggaaaggtggattctccacagttttcctcgtgcgtactcacggtggaatccga

SEQ ID NO: 638689 - DNA, 75 bp, Homo sapiens
accgctgacaagatcgagggcttctctccaaagacaacaggccctccctctgccctcccgtctgtgagctccctg

SEQ ID NO: 638690 - DNA, 100 bp, Homo sapiens
cgtggcgccacaagctcattcactgtgtaggtgaccagaagtcagcagcttcccagaagccccgaagccggggcatcctccactcactcttctgctgtgt

SEQ ID NO: 638691 - DNA, 100 bp, Homo sapiens
gaggagcggctgaagcgcgtgcgcatggcctgaggtcctttcgagactgctggggaacctggtggtgaagaacaagaaggcccagtttgtgatgacccag

SEQ ID NO: 638692 - DNA, 50 bp, Homo sapiens
ttctactccttctacaggtgtgtatggtgctggagaatctggtaaaagca

SEQ ID NO: 638693 - DNA, 110 bp, Homo sapiens
agcagatcctgcacagtttgagttgctcaaggttcttggtcaggggtcatttggaaaggaagatattgatgcagaatcttcgttttcattaaatatgaactttagcagta

SEQ ID NO: 638694 - DNA, 75 bp, Homo sapiens
tggccgggctggctgcggccgccctgggccgggccccaccggacggaagctcttcgtgggcggtcttgactggag

SEQ ID NO: 638695 - DNA, 83 bp, Homo sapiens
cttcaggagtactggcggaggggctggacgttccacgccaaagtttggtgccctggttgtcagatgttggaaagcagtaggac

SEQ ID NO: 638696 - DNA, 75 bp, Homo sapiens
agtgttcgtcaaagtcaaccgcaggacgcaggtaactaggatttctacctcaaccgcgagacctatgcaaggacg

SEQ ID NO: 638697 - DNA, 99 bp, Homo sapiens
cggagacccgggagcaggagctgggcctaggtctgcgccctgagtacaaggccagctatgtccgcagtcgctccatccgctcagtggccatcgaggtgg

SEQ ID NO: 638698 - DNA, 97 bp, Homo sapiens
tgcatctctgcaaactcaacttgctgggccggtgcaactattcgcagtccgagcgggtgttctaaggatacattttattgaagctcaggatcttcag

SEQ ID NO: 638699 - DNA, 75 bp, Homo sapiens
cttcatcatcatctacttcacaggaattgccattttcttgaatccagataatagttttgaaatactggttgacca

SEQ ID NO: 638700 - DNA, 100 bp, Homo sapiens
catccgcttcggccacgactgggatcctacgtgcatgaagatggacgaggtcctgtacagcatcgccgagaagacagcccacctgaggatattgaccata

SEQ ID NO: 638701 - DNA, 101 bp, Homo sapiens
acgggaagcaggcctcgccacagttcttctcaccactaaatccaatacgagttcatattgatattggagctgatggcagagccacaggagaagcagatgta

SEQ ID NO: 638702 - DNA, 100 bp, Homo sapiens
atcaatctgaaatactttaccaggcaatggatattataaggtttcagtgtagctcagaagccatttggagccacgtatgtatggagcagcatcataaaca

SEQ ID NO: 638703 - DNA, 88 bp, Homo sapiens
gcttgagaaaagggactttggaaaaaggctgtctctagacagcagtcttgtgcaggcttatggctatgggccatacggtggtgcgtac

SEQ ID NO: 638704 - DNA, 100 bp, Homo sapiens
gttcaaggcaagaccgaattcagaaggatatcgacgtcgtgatccagaagtccagagctgaggactgcctgtttgcagcattttgcagctttctcctgtc

SEQ ID NO: 638705 - DNA, 100 bp, Homo sapiens
cgagactcacaagaggggaagctgacagagatacctacagacggagtgctgtgccacatctttgtgtcaaaatactgagagaagataaaaattgcccagg

SEQ ID NO: 638706 - DNA, 83 bp, Homo sapiens
ccatcctcaagctgctggacacggagcggccggtgaatcggtgctggagaatctggtaaaagcaccattgtgaagcagatgag

SEQ ID NO: 638707 - DNA, 101 bp, Homo sapiens
cttacatacacagactggtgtgagcacatggcatgatccaagagtgcccagacgaaatctcacaaaactgtcccttatcttcagtcacatgctggcagaaa

SEQ ID NO: 638708 - DNA, 80 bp, Homo sapiens
gctgaggacacacccaggaaaagactcaggacggacaagcacagtcttcggaagggtgtgtccgcagccggccaggtggt

SEQ ID NO: 638709 - DNA, 100 bp, Homo sapiens
gagtttttagccttttaacattcaaggattagacattggtgaagactgaggaagaaacagcccaggccgttgctgcagagaagtggtcacatctgagtct

SEQ ID NO: 638710 - DNA, 75 bp, Homo sapiens
catcattcagcaaggtggctggggtttgtaccagttgctggagccccgaatgattgttcgttgcaggaaacaaga

SEQ ID NO: 638711 - DNA, 90 bp, Homo sapiens
aaggacctgaagcatctcatctattatcgtttcaacacggcaaagaaatgccagcagggaccaggtggtctatggctctggaactaagac

SEQ ID NO: 638712 - DNA, 51 bp, Homo sapiens
ggaagatggcgcctgttgtgacagggagatacaactcgtcaacgaatcaaa

SEQ ID NO: 638713 - DNA, 74 bp, Homo sapiens
catcatcgacagtgccttcggccagagcggcaagttcaagatccacatcccagagtcttgctctttcacccagg

SEQ ID NO: 638714 - DNA, 101 bp, Homo sapiens
ttcacccgcttccgcagcccgctcgtgcccggcttctggtcctgctggcaaacttccccagactctgcgaggaaacggaaaggattgttgctaaccacatt

SEQ ID NO: 638715 - DNA, 50 bp, Homo sapiens
atttcttctccgggcttccttcaggtattgactgggctcccaagagcgac

SEQ ID NO: 638716 - DNA, 75 bp, Homo sapiens
tgattatagccaaaaatggcccagacacagaaagatttattgctaaacatgggtgcatttttggataaacccaaa

SEQ ID NO: 638717 - DNA, 82 bp, Homo sapiens
tgggagtctccgcgtcccgctcgctgggagagagcctcctgcccgaaggccacctgaacctaacggctccctgcaacgctgc

SEQ ID NO: 638718 - DNA, 75 bp, Homo sapiens
gagaagcggccgagccagcagcaggtggcaagtgggagaaaccatcagaaattttggaaatcaaaggacagaact

SEQ ID NO: 638719 - DNA, 75 bp, Homo sapiens
cctggaagatctccgcactctggagcataatgtgaccccgagaagggaccagtccccactttccagccgttccag

SEQ ID NO: 638720 - DNA, 100 bp, Homo sapiens
tgtgaattgacgccgctgaaatacaatacagagcgcattcatgttcttagtggggtctagcgctctcgcccaggctggaatgcagtggcgtgatcacggc

SEQ ID NO: 638721 - DNA, 78 bp, Homo sapiens
aaggcatcgtgtggcaggaaacagaagatggtgctgctgtttctttaagaggaaaaggaagaagactgctcagcgcca

SEQ ID NO: 638722 - DNA, 75 bp, Homo sapiens
cgtcagccagggcttctgcttcaacatcctgtgcgtgggttagctgctgaatcaaagcttcaaacagaagttaaa

SEQ ID NO: 638723 - DNA, 100 bp, Homo sapiens
tgagggtggaggccggattgtactgtatggggactccaattgcttggatgacagtcaccgacagaaggtgtcacgaagctgccgtctccatctactgcag

SEQ ID NO: 638724 - DNA, 82 bp, Homo sapiens
gccgtgccctggggctgagccctcagctggtaggtgagtgctgtcctcggctcactttcctcaagctctccggctgccacgg

SEQ ID NO: 638725 - DNA, 101 bp, Homo sapiens
cagcggtccagggaaggaagcaaagcaaatggagaatggcatgctggtgacggacagtgcagggaagcaactgcagagagtagcacagaagagggaggatg

SEQ ID NO: 638726 - DNA, 100 bp, Homo sapiens
tgctgtgggaagtggagcacgactcatttctgtttgttactttgagtctgaaaatgactggtgggtgaattttctggagccaataaggaaaagcttgaag

SEQ ID NO: 638727 - DNA, 112 bp, Homo sapiens
acttcagcgaattgctctgctgcccaaaatagttggttgccactttaggtctattccagtgaatgaaaaagacaccttaacatatttcatctactcagtgaagaatgacaag

SEQ ID NO: 638728 - DNA, 97 bp, Homo sapiens
gaaggagacctcctctttactgtggccaaggaccctgacctagatgtgaaggctggtggaggctgtgtaatgaccattggagaaatgctacgatctt

SEQ ID NO: 638729 - DNA, 100 bp, Homo sapiens
atctctttaattggttgcagttgagctaatggtggagccaaaatgctattgccctgtcttcatcaacatttaatcacattcctctgaatattgatttgct

SEQ ID NO: 638730 - DNA, 74 bp, Homo sapiens
gaggaagcggaactagagatgcccatctggagtgagtgcaggaccaggtgagaagccctaccactgcaactggg

SEQ ID NO: 638731 - DNA, 101 bp, Homo sapiens
ccttgtctgtgaagctaaactcaatgctgctgtgtgggaagaagatttgtaaagaaaactcttaggttgcaaaagcttctcatttcagagagatgccagga

SEQ ID NO: 638732 - DNA, 100 bp, Homo sapiens
gctgtcgccaacaggcaacatcagcagcgcccccaaggacttcgccgtctatgtggaggagaaccgccagtaccgcatgcacagcctgcagcacaaggcc

SEQ ID NO: 638733 - DNA, 82 bp, Homo sapiens
actctacttccctctgctccttcccagtttggtgccctggttgtcagatgttggaaagcagtaggacggaacatactcttcg

SEQ ID NO: 638734 - DNA, 85 bp, Homo sapiens
caaggacgggaagtcactcataagcgcgctcaagacacccacaacacaagatcagaccccaagttctgctgtttcagttgccacg

SEQ ID NO: 638735 - DNA, 82 bp, Homo sapiens
cctgcactgaaaggaaatgacggattttgtggccagcatcgaaatgttcagccttttagtgatgaagatgcatcaattgaaa

SEQ ID NO: 638736 - DNA, 50 bp, Homo sapiens
cggctctccgcgctctctctgacaggtttccaatacttatctacaggaat

SEQ ID NO: 638737 - DNA, 100 bp, Homo sapiens
cactgactgcattcaataagcgttcatttcatcacccttcaccatggcgaggattaaatccaccacacagggtgaaatctatctccatgacaacattcac

SEQ ID NO: 638738 - DNA, 83 bp, Homo sapiens
ctggagagggggcgctgagctgttggggaatcagtgacattcgaagacgttgccgtggttttcacagatgaagagtggagtcg

SEQ ID NO: 638739 - DNA, 96 bp, Homo sapiens
gcgcaggcccagatgcgcgcgatgctggaccagttgatgggcacctcccgggacgataaacctctcataatgaaggcccccgctgtgcttgcacct

SEQ ID NO: 638740 - DNA, 83 bp, Homo sapiens
gtgcacgtgcagatcgcctggcagatctaccgtcaccagcagaagataaaggtgtccttaagtttgctcgcttggtcaagtcc

SEQ ID NO: 638741 - DNA, 135 bp, Homo sapiens
aagggcaggacgaggtgtcggcgcgggagcagcacttccacagccaagtgcgggagtccacggtactccaaagattcaggtttactcacgtcatccagcagagaatggaaagtcaaatttcctgaattgctatgt

SEQ ID NO: 638742 - DNA, 50 bp, Homo sapiens
tgatttctgcatttccaactgagctctaggagtccagagtatcaactggc

SEQ ID NO: 638743 - DNA, 100 bp, Homo sapiens
cctcggcccctctgctgagccgctgcgtctccatgccaggggacatctcagcagcaagaaggctgggaccccagccaagggcaaagtcggcgggcgctgg

SEQ ID NO: 638744 - DNA, 98 bp, Homo sapiens
ctgtcgtgactccagagaagccgatccccatttttattgaaagatgtattgagtacattgaagccacagagagaactcgatgccaccgcaacggtatt

SEQ ID NO: 638745 - DNA, 75 bp, Homo sapiens
ctgaagtgttaaagttagaagacatttgctaagtcaaatcacttcaggattcaagttcgaaatatggcaactttg

SEQ ID NO: 638746 - DNA, 100 bp, Homo sapiens
cctgaagctcaagggactgtgtccaccctcaggtgtcatggagaaactccagctgggcccagagattctgcagcgggaaaatccaaggcttatttatgcc

SEQ ID NO: 638747 - DNA, 102 bp, Homo sapiens
gtcagggggactgcaaaggccaatgttggtgctggcaaaaaggagtcagtggatcggtggggaaaatgctgcttaccctgggccctgggctgtagaaagaag

SEQ ID NO: 638748 - DNA, 75 bp, Homo sapiens
tgaccctctccccaagaagatgaaagattcagtggccccgcagggtggagcccgtctgctcagggttgcaggccc

SEQ ID NO: 638749 - DNA, 80 bp, Homo sapiens
cgaccttcctgcccttcacgctccaggagctaggattttttatcaagcagaaatgcatcgaacaacgagaatcaagatca

SEQ ID NO: 638750 - DNA, 83 bp, Homo sapiens
gttttccggggccctctcagcaagaacgggaacaaaactctgagttcttcgtaagtacatcttaaagctgtcaagatggttct

SEQ ID NO: 638751 - DNA, 98 bp, Homo sapiens
ttgtggtgcggcctcaccatacaggaacagggcagacgttagcgtgagtgatcactctcaatcccgggcttgctgggtacttcactatttttgtgaag

SEQ ID NO: 638752 - DNA, 75 bp, Homo sapiens
gggaaactaaaaacgcatctatctaacgtttaccctagcaaaccattgaagattcctgtctctggatccaaatca

SEQ ID NO: 638753 - DNA, 98 bp, Homo sapiens
aaaatcataacaagcggttctctaccctgtaaagatatgtcacagatctaagcagcagggatttaattactgtacatcagccatttcctctccattga

SEQ ID NO: 638754 - DNA, 100 bp, Homo sapiens
gaaatgaattgggacatggtacagaatatgcaaaaagcccttgaattgaaagcaaaatatgaatccgacatggttactggtggctatgcagctttaataa

SEQ ID NO: 638755 - DNA, 75 bp, Homo sapiens
gggggcacacgcctcagcctgggcaccgcaggtgaaccaggatgtgagccggcagctgcttcaggatgggtatca

SEQ ID NO: 638756 - DNA, 115 bp, Homo sapiens
gccaacagtaccgcaaggaccccaaagagtgctgcaagttcatgtgtctggacccagggtgctttcttctgcgacctggtactcatctacctcatcaaaaagagagagttttacc

SEQ ID NO: 638757 - DNA, 75 bp, Homo sapiens
caagaacctggacaccgtgaaggagcatcagatccatgctgctgctgactcggagccccacagcttggcacaggc

SEQ ID NO: 638758 - DNA, 75 bp, Homo sapiens
gcgagtcgcatctgctcaacgacgaggacctgacgcagggaactctaatgatccaggacaaagaagttaccctgg

SEQ ID NO: 638759 - DNA, 75 bp, Homo sapiens
ccgattcctcctccttggtcgccgcgtccttggctggcgtgtccgcgggagagctgtggggcttggtgagtgttt

SEQ ID NO: 638760 - DNA, 100 bp, Homo sapiens
gggaaattgtggggtcagcataatgagaagcggcaagctgatgaagaattccagatcctggcaaactcctggcgatactccagtgcattcaccaacagga

SEQ ID NO: 638761 - DNA, 96 bp, Homo sapiens
gcagaggaatctatacaaagaagtgatgctggagaattacaggaatcttctctcattgggacagtcattttgtttactcattcagccctgttgcag

SEQ ID NO: 638762 - DNA, 97 bp, Homo sapiens
gctccggcaacgccaaccgctccgctgcgcgcaggctgggctgcaggctctcggctgcagcgctggggtcctggcggcagagaccacgtcccagcag

SEQ ID NO: 638763 - DNA, 100 bp, Homo sapiens
tgatgatggtatagcttccgttcctactaaacagatgaagtttgcagcctcaggcggctttctccaccacatggaacccttctctgaagcaacagctctt

SEQ ID NO: 638764 - DNA, 100 bp, Homo sapiens
tccctttccattttgacctaatgggattgctgccacagtgccagcagctccagatgttcttcctcttgcttgccagagatccctttgcccaatcgtcccc

SEQ ID NO: 638765 - DNA, 105 bp, Homo sapiens
agctgggtcagtccgccgctcaccccgcggccgcaccttcccgccttctcagaagccaaagatgttgaccaggaagatcaagctgtgggacatcaacgcccacat

SEQ ID NO: 638766 - DNA, 98 bp, Homo sapiens
gatgaccatgtcacaatcaggaagaaacatctccaaagacccatctttagaatttctacagacagttcaaggaaattgctgcagttattgaaacggtg

SEQ ID NO: 638767 - DNA, 90 bp, Homo sapiens
agcgttgggtgtggaacatcattctcaccaccagtctcttctctggaatggaagttggatacactttgtgacttgtacgagacactgacc

SEQ ID NO: 638768 - DNA, 100 bp, Homo sapiens
gactaagccaagggattcaggtgtggtgccggtgggaactgaggaagcgcccaagctggagaatgctggaggagaccttaaggatggccaccaccactat

SEQ ID NO: 638769 - DNA, 100 bp, Homo sapiens
ggttaatctgttggattctaatgcagttcatcacatcattcatgattttcagctataaagcgttaacagccagtgagatagaagatcttaagctggagaa

SEQ ID NO: 638770 - DNA, 100 bp, Homo sapiens
gcgggagccctgggtagagcaagacaagtttgggaaggtgaagtttgctgtgctgcagacgattcaggcttcttcaggagaaagcaagtacactggtacc

SEQ ID NO: 638771 - DNA, 100 bp, Homo sapiens
ccgctgccgaagcatgaagaaggggtaaggcgtgagcccccaagatttcacggtatattcgaattgttgggactcacaacacagtgaacaagatttttca

SEQ ID NO: 638772 - DNA, 50 bp, Homo sapiens
agagcacacatgcccacagcctcgactgctttctacaagttctgattaaa

SEQ ID NO: 638773 - DNA, 75 bp, Homo sapiens
cctcccaaggagtctgcaagttggtcttagaaaaataccccaatacacccatgagtcataaagaaattcttcaag

SEQ ID NO: 638774 - DNA, 75 bp, Homo sapiens
gtggagttcagcccactactctgaaccagatcgtctggtagaatcaacttccttgagaaaagccatagaaacagt

SEQ ID NO: 638775 - DNA, 100 bp, Homo sapiens
gggagatccatagggaagaaggcggaacatccggaggctgggaaatggtcctgagggagtctaacaagttagcagaaatggaagaaccacccttgcttcc

SEQ ID NO: 638776 - DNA, 115 bp, Homo sapiens
ccaccacctgcctgcccactggtcagccttcagggaccctgagcaccgcctggtctctttcctgtggccagcccaggaagctcttcgtgggcggtcttgactggagcacgaccca

SEQ ID NO: 638777 - DNA, 82 bp, Homo sapiens
ttccaaagcacaggaatctcactctgttaaagctggtctgttctaactgagatggcccactgcgtgaccttggttcagctgt

SEQ ID NO: 638778 - DNA, 101 bp, Homo sapiens
ctgggttctggactttgggcgtcccattgccatgtgacctgaaaaaaatgtctggatttctagagggcttgagatgctcagaatgcattgactggggggaa

SEQ ID NO: 638779 - DNA, 100 bp, Homo sapiens
ggcagcagtgtcctgtgctgatggtgttggcagatatcattaacggagctcaagaaaaatgtgtattgcctcctatggacggctaccctcactgtgaggg

SEQ ID NO: 638780 - DNA, 100 bp, Homo sapiens
cgcccggatcgtccaccgctcccggcccgctccgcccagagtccgatggcggcggcactgagggccccgacccagatgggaatttcttagccataggctc

SEQ ID NO: 638781 - DNA, 98 bp, Homo sapiens
ccctttcctatgatctgcactgctgtggggccaaacgcatcatgaaaaatgagccgtcagactgctacagcattacctaccggtacctcgaagtgtcc

SEQ ID NO: 638782 - DNA, 98 bp, Homo sapiens
gcgcttcccctttccagagagccagaaagaagtgtgggttgctgaccgaggaaataaaagaatccaagtatttgataaagacactggggagtggttag

SEQ ID NO: 638783 - DNA, 75 bp, Homo sapiens
ctacctccagtcaagacaattctgtgaaggtggtgaagcagtattttccaatttgaagattcatttgaaggtggc

SEQ ID NO: 638784 - DNA, 100 bp, Homo sapiens
gggactgctggcagacgtgcttcaaatgaattcttggtgtgtggaggattatcaacgcctgatgactgtggcagaaggcatcaccacacttttgttccca

SEQ ID NO: 638785 - DNA, 82 bp, Homo sapiens
gaagaagaagaagaaggagacaaaataatggcagaactccagatgccaattctcggaagcaagaagcagagtggaaagaaaa

SEQ ID NO: 638786 - DNA, 100 bp, Homo sapiens
gaacaagggtggctgggaccatggagacacccagagtatccagctctggattaatcgaattacagctgctagccaggaacatggactgaagtatccagcg

SEQ ID NO: 638787 - DNA, 51 bp, Homo sapiens
cgaggatgaaagagcccaggagagtcaggaggagatgttaaagtaacccat

SEQ ID NO: 638788 - DNA, 99 bp, Homo sapiens
ggatatcgacgtcgtgatccagaagtccagagctgaggactgcctgtttgcaggttatcaatactctggctgaccatcatcatcgtgggactgactttg

SEQ ID NO: 638789 - DNA, 100 bp, Homo sapiens
ctcagaacatgggtccgtggtcgtttgtttctccaaggtttgaaaagcagctggcctgcaaggctggagcattggatttgctaaaggagcttaagaatat

SEQ ID NO: 638790 - DNA, 98 bp, Homo sapiens
gggaaggaactttgggtcctgaatcttctgggagctgaggaaccagatatcttgaaaagctgccagaaagaacaggttctcagactatgagaagagga

SEQ ID NO: 638791 - DNA, 99 bp, Homo sapiens
aggcccccatgtcatcatactttgaaagattaagcaaatttcaagatggaggaagctgaatatggtgggcatgatcagatagatttgtatgacgatgtc

SEQ ID NO: 638792 - DNA, 90 bp, Homo sapiens
ggcccaaagggaccataaagatggctggtgaattaccagatctctgtcaagggcagtaacctgttcaagttggaagtgcgtcttttggat

SEQ ID NO: 638793 - DNA, 100 bp, Homo sapiens
gccagcttagactattcatacgctcgatttagctttggagtcaaacccttctgaccatccaagggcaagcacaattttcctgagcaaatctcaaacggat

SEQ ID NO: 638794 - DNA, 75 bp, Homo sapiens
gtggactattcctttgaatgtattggtaatgtgaaggtcatgaatttagcttgggttaaatcatataacatctgc

SEQ ID NO: 638795 - DNA, 95 bp, Homo sapiens
catgtggttccccagaaggtatctaccaaagatctttcggaatgaccggaacatgtttgacaagctgaaccgtgatgcctttcatataatttctt

SEQ ID NO: 638796 - DNA, 83 bp, Homo sapiens
ctccgtcccccgcgggtctgctctgtgtgccatggacgggacgagcctgtggagtgggagacacctgacctttctcaagctga

SEQ ID NO: 638797 - DNA, 75 bp, Homo sapiens
agagggatccttcacccgtgtctggttctgcggggagtgtctccagccctgcctgcaggtgccatccccgctgtg

SEQ ID NO: 638798 - DNA, 82 bp, Homo sapiens
cccatgaggccctgatggaaaacacaaaggatctggatgaccagtgtcccagtgaaggaacgagtgaaggtgtctcagaact

SEQ ID NO: 638799 - DNA, 82 bp, Homo sapiens
acggcccgagacacaccaggccggcaggctgagaaaagcgagaccgcgtgcgaggaccgtaagactttgaccccgacgcagg

SEQ ID NO: 638800 - DNA, 74 bp, Homo sapiens
ggtaaatgtgtacctaatgaaaagcaatgttcacagcatctttaccgggagcagattccatctcaagaaaccac

SEQ ID NO: 638801 - DNA, 75 bp, Homo sapiens
gctgccgccccttgggctaaaagacctgcctagagctggaacgttacctccagagcgagccctgctatgtttcag

SEQ ID NO: 638802 - DNA, 75 bp, Homo sapiens
taagaaaggtgatattgtagacatcaaggagcttctggaagaggtgaagaaggaattgcagaaagtgaaagagga

SEQ ID NO: 638803 - DNA, 83 bp, Homo sapiens
ccagaagagcggcggctggaccacttctctgtcgacggctatgacagttctgagatcctgaaggagctagacgagtgctacga

SEQ ID NO: 638804 - DNA, 119 bp, Homo sapiens
ccgcggccctgcctgggaggaacttaccgtctaccgggaaaggtggccagcagatgtgtcgggcctggtgagagggcttggtggagccagtgaacgtggtggacaatggagatggcaca

SEQ ID NO: 638805 - DNA, 73 bp, Homo sapiens
cagtggtcgcttcttctccttggcacaacgactctgtaaacgctgtggtcaagcatggagagctgcaacactt

SEQ ID NO: 638806 - DNA, 82 bp, Homo sapiens
ggcacagtggcctcagtctgaggatgaggggcccttgaacctcaggctggatcttcaacgtggttccttggttggtggcgat

SEQ ID NO: 638807 - DNA, 96 bp, Homo sapiens
ggcagcattttttccagaacacaaaaggtgctgagggtgtaaatggaggagaggagtctgtaaacctgaatgatgcagatgaaggattttcatcag

SEQ ID NO: 638808 - DNA, 82 bp, Homo sapiens
aatgagccagggcaaaacagctgcttcctcaacagtgccctgcaggttgaaatcacaaagattagacacctttttagatagg

SEQ ID NO: 638809 - DNA, 102 bp, Homo sapiens
aaaactggagagcttcatcaaaaatagtgatagctttgataagaatttgctgattcccttggaattccgtttttggaaaccagtgctaagaatgcaacgaat

SEQ ID NO: 638810 - DNA, 101 bp, Homo sapiens
gccgctgccaccggcgcgcccgacacccttacccttctgaagaacagaaaaagcagttggcacaagacacgggactcaccatccttcaagtgaacaattgg

SEQ ID NO: 638811 - DNA, 75 bp, Homo sapiens
cagcctgcggagcctgtggggcagatgccaacgtccggcggtacctccagctgacacagtcagaactcagcagct

SEQ ID NO: 638812 - DNA, 83 bp, Homo sapiens
tgcggtgtgcctcgggtcggtgcaccgtccgggattttatccaccggcactgccaagatcagacgatcgtcaccggattgagg

SEQ ID NO: 638813 - DNA, 80 bp, Homo sapiens
ctataaacaatctgaagagaaagtagctacagatcaatgaactgagccatgttcaaatccctgttatgttgatgccagat

SEQ ID NO: 638814 - DNA, 75 bp, Homo sapiens
cctggacgattgcttagaggagtatttcctgaactgtgtgggtgctggagaatctggtaaaagcaccattgtgaa

SEQ ID NO: 638815 - DNA, 82 bp, Homo sapiens
caacggggaggtgcggagtcggagagacagcatctgcagcagacaatgcagatcttcgtgaagactctgactggtaagacca

SEQ ID NO: 638816 - DNA, 96 bp, Homo sapiens
aagaaacccctgcagtacttgaagatttgcataaagccaacattcgcaccgtcatggtcacagaagctccaccatgaggcgaggtggatggaggaa

SEQ ID NO: 638817 - DNA, 100 bp, Homo sapiens
tgggcagtggcactgggtatctcagctccatggtgggcctcattctagggccatgtttatgagtggactaagtgaaagcaaacaaacccatgtacacctg

SEQ ID NO: 638818 - DNA, 90 bp, Homo sapiens
gtcacggccgcaggtgaccccttagcccagctccagtgggcgggtggcagggagctgcagtccatggctgaccaggagcaggtgtcacca

SEQ ID NO: 638819 - DNA, 83 bp, Homo sapiens
tcttgtgtgggcactgaagggggactacaggttcgagagctttactgcagatggtgcgtgacgagagccaccagatcctggcg

SEQ ID NO: 638820 - DNA, 82 bp, Homo sapiens
ttcaaccagcctttggtcatcaccagggaaccacgtgaatgttgagggggcgacacacaagcaggtggtggacctgattcga

SEQ ID NO: 638821 - DNA, 50 bp, Homo sapiens
aagagctgcagtctttgtgggacaagggtggcgctccaaccccctttgac

SEQ ID NO: 638822 - DNA, 80 bp, Homo sapiens
tgcccggctgccttccacctccagtgctggttttaaaatcaaagatgggaaaatcggagaaaattgcccttccccatggc

SEQ ID NO: 638823 - DNA, 75 bp, Homo sapiens
cccaggagtaagagcccatagcagtctgccagacaatagagcatatgggcaacaatttgggatgaatcccaaaga

SEQ ID NO: 638824 - DNA, 49 bp, Homo sapiens
agcggtccggccaaggacgctgaggagttcatgatcaagtgttgcccac

SEQ ID NO: 638825 - DNA, 74 bp, Homo sapiens
ggaggatgagcctgcagagcgcgcagtacctccgatgagtataggatcaaaccagtggaagaggtcaaatacat

SEQ ID NO: 638826 - DNA, 100 bp, Homo sapiens
gatgcttcaaaagctgttgaaattgttacttcaacttctgctggaagcgagcagcagaggaagagccctcaaccagtgccactgtccccatgtccaagaa

SEQ ID NO: 638827 - DNA, 82 bp, Homo sapiens
tgagaagcccttcgcctgcacctggccaggctgcggctggagggcaacaggtttgtctatgctggctctaactcgggcgtgg

SEQ ID NO: 638828 - DNA, 51 bp, Homo sapiens
gttcttgggacaaacttcatttgttctaatacccgatttacaattacattg

SEQ ID NO: 638829 - DNA, 50 bp, Homo sapiens
ctttgatagtcgtaccatatgcagaagggagaaagaggccaagaaggaag

SEQ ID NO: 638830 - DNA, 75 bp, Homo sapiens
aagattctgccgctgattgctatcacttctgcagaatccagtggcactgcctcctaaaccaccaaaacctactac

SEQ ID NO: 638831 - DNA, 83 bp, Homo sapiens
cttgtttgtggatcgctgtgatcgtcacttggcccactgctcagtggagcgtggaggacgaggaggaggccgtccacgagcaa

SEQ ID NO: 638832 - DNA, 100 bp, Homo sapiens
agaaggtctggtgtggcgtgatggagaacctgtccaggggaacgcccttttgcttgtgactggcagggctgcgacaagaagttcgcccgctccgacgagc

SEQ ID NO: 638833 - DNA, 98 bp, Homo sapiens
tattatgtcaaacggaatctcaattccagatacaacctgaacagaatagccaggtctggctgggtcggcacaacctgtttgagcctgaagacacaggc

SEQ ID NO: 638834 - DNA, 75 bp, Homo sapiens
acgatggacgtgttcgacatggaacagggtggccatcaagtcaatccggaaggacaaaatcaaagatgagcaaga

SEQ ID NO: 638835 - DNA, 75 bp, Homo sapiens
gcgaactggaacccactcggggactctgccttttaccgaaccactcacgaattcttgtttggtgcccttgctgaa

SEQ ID NO: 638836 - DNA, 78 bp, Homo sapiens
gggtgatgtttctctctgggaaccttctggaaagaaagtgcttgatcagttactggcagtcgcagactttggaccccg

SEQ ID NO: 638837 - DNA, 51 bp, Homo sapiens
ggccatgttcctcgtccactacgggcatcgcactattcctgatcagagaac

SEQ ID NO: 638838 - DNA, 89 bp, Homo sapiens
tcataataaattacgaagtcaggtgtatccaacagcctctaatatggagtatatggcaaaaactgattattccaagtggaagttgccct

SEQ ID NO: 638839 - DNA, 83 bp, Homo sapiens
ggaccacggcgcagacgcgggcgagctgcggctcggacgccagcggacacgcgggcgagatccacctccgacccttaagccag

SEQ ID NO: 638840 - DNA, 100 bp, Homo sapiens
gcttcagaaaaacatggcagctggggaagtggtttggacatgcacaccaaaccctgggttagagcaagctggccactgccccaacccaggcatttcactg

SEQ ID NO: 638841 - DNA, 75 bp, Homo sapiens
tgctgcagctccgcctcctccgccgcgcaggtttggtgcacctcgatttggaggaagtagggcagggcccttatc

SEQ ID NO: 638842 - DNA, 117 bp, Homo sapiens
cgactacatggcccaggaggacgactgggaccgggacctgctgctggacccggcctgggagaagcagcagcgcaaggacatgtgcaaagctgccactgagtcagtaccctgcagccc

SEQ ID NO: 638843 - DNA, 75 bp, Homo sapiens
cgggtaccgggcgcgggcagagcgcggcggcgcgggtgatgcaggttctgaatgctgatgccattgttgtgaagc

SEQ ID NO: 638844 - DNA, 90 bp, Homo sapiens
ctgccatattgtgtcttccccggccggtccctcgcctcccggccgagctgacgggatgtttcagcagcccctgagaaggaagaggaggaa

SEQ ID NO: 638845 - DNA, 100 bp, Homo sapiens
tgatgtccaggagtcagtgggtccactggtagcccccacccctctccgtccatggccccagatgacacttcagattcaagatggaaaaggtgatgtaacc

SEQ ID NO: 638846 - DNA, 75 bp, Homo sapiens
gaaagagtcaacagcagtggcaacagcaaacagcactgctcagcattttgaacttctgttcagagcttcagcacc

SEQ ID NO: 638847 - DNA, 76 bp, Homo sapiens
caccaactgctaacaaccagctggaggaatcatccagaagtgctgaatattcgactacaacgggaaagcaaagaac

SEQ ID NO: 638848 - DNA, 100 bp, Homo sapiens
gatcgtggggcccgcgaggcgggcagccggggcgtccaggctgacctctgtgtccctagactgaatgaaggggaccaagttgtactgatcaatggtcggg

SEQ ID NO: 638849 - DNA, 80 bp, Homo sapiens
actttaaatcttccccaagatgtatgcactgccagtgaaagatgtagaagataaacctgaacaacaaaccagaacaagag

SEQ ID NO: 638850 - DNA, 75 bp, Homo sapiens
agcccggagaaaagccacatgatcgcccaggaccacaccgcagcgtaactgcaggcctctcagcgaaaaaggggg

SEQ ID NO: 638851 - DNA, 95 bp, Homo sapiens
atcctcctggccgtcctcctcacggtcctcctggctgtgctcatatacacctggtgtgggtcctgtggtagctggagtgttggtggccatcttgg

SEQ ID NO: 638852 - DNA, 83 bp, Homo sapiens
tgccacgtggatgtgaagatttcctctaaaaggatgaccatgaaagctgtggttctaattctaccaaccgtagtactgctgag

SEQ ID NO: 638853 - DNA, 82 bp, Homo sapiens
cgccaaggaggtcacccgcgtgctaatggtggaaacccacaacggtacactgaggaggggacggctccgtcttcacattgtg

SEQ ID NO: 638854 - DNA, 76 bp, Homo sapiens
gaagaaggacgtgctgacccgcctgaagcacctgcgggcgctgctggatgtggtgctggaaaaagccatgcacaag

SEQ ID NO: 638855 - DNA, 75 bp, Homo sapiens
tgccttcgttccccccgagttcgacgtgaccgggaacacctttgagccctaccacttatgtcttggatgaagatg

SEQ ID NO: 638856 - DNA, 74 bp, Homo sapiens
attttagggtcctttatatagaagggagagtagcccccattcactggggagaatagaaagaaaacaattgacaa

SEQ ID NO: 638857 - DNA, 100 bp, Homo sapiens
atggtcaaaagcatgtggtcacattacttcaggtggggaccaaggcatactgaacacattttttagcagctgggcaacaacagatatcagaaaacacctg

SEQ ID NO: 638858 - DNA, 100 bp, Homo sapiens
ctgggatgatacaccttttccacagggaattgagttgcatcagacaacagtcagcgctttcgagaaacctgttttgcatttgccttgacaccacaacaag

SEQ ID NO: 638859 - DNA, 102 bp, Homo sapiens
tgttgtccacccaagatggagttcctcctggggaacccgttcagcacaccagtggggcagtgcctcggtgctggagaatctggtaaaagcaccattgtgaag

SEQ ID NO: 638860 - DNA, 96 bp, Homo sapiens
gagtttttagccttttaacattcaaggattagaatccggacaatcagatagttcaaaccagcaaggagatgcggacatcaaaccactgcccaacgg

SEQ ID NO: 638861 - DNA, 50 bp, Homo sapiens
cccacttccgaaaccacaagtttgccgattctgtaagtacactgttcacg

SEQ ID NO: 638862 - DNA, 76 bp, Homo sapiens
cgaggtggagtcggagctgggacggaaaaccagtagattcccagacatcgcgaagtgaatctgaaattgtgccaaa

SEQ ID NO: 638863 - DNA, 100 bp, Homo sapiens
cagaatcctgaccttgctgcacagttggctggatctattattggcaaaggtggtcagcggattaaacaaatccgtcatgagtcgggagcttcgatcaaaa

SEQ ID NO: 638864 - DNA, 100 bp, Homo sapiens
gtggatgaatttgcttttctggaaggatatgtcgttattgatccagctcaactttatgtatatgagaaacttggacagtctggacaatagaataaatgaa

SEQ ID NO: 638865 - DNA, 80 bp, Homo sapiens
cctggagcctcagttggaagcagccgatccagcctgcggagcctgtggggcagggcatggtgctgatgtgaaatgtgtag

SEQ ID NO: 638866 - DNA, 82 bp, Homo sapiens
tctttgacgggtcctccctgcctgccgatgtgcatcggtacatgaagatgactgcctccgggcctgccaggagcagatcgaa

SEQ ID NO: 638867 - DNA, 90 bp, Homo sapiens
cccaaaagagccaaactcagctcgcccggtttctcggcgaatgacagcacaggcgggcgctaatattgacacctgctcagaagaccagag

SEQ ID NO: 638868 - DNA, 73 bp, Homo sapiens
ggaagcatttatgaccttctacagtgaggagccgtgtaaagccagtggaatatagtcagatgtacagttatag

SEQ ID NO: 638869 - DNA, 100 bp, Homo sapiens
aaagacagaccatcccagttgaatgctgtcttccaagaacagaagaaaatgatccaggcccagagacctgtcggccatggagcctaatgatagtaccagt

SEQ ID NO: 638870 - DNA, 80 bp, Homo sapiens
ccagctgcggcggatggcggacgacctcaacgcacagtacgagcggcggaaagcataacccctactgtagaactaaatgc

SEQ ID NO: 638871 - DNA, 100 bp, Homo sapiens
gccaatttggagatgtacatcaaggcatttatatgagtccagctgaccggttccctgatgtgttacctgcttctgctactgatccaaactgcagaacttc

SEQ ID NO: 638872 - DNA, 75 bp, Homo sapiens
caagtatggacatttaagagtgaatcagaccttcaactggaatacaagtgcaccgggtataatttcttcaccata

SEQ ID NO: 638873 - DNA, 75 bp, Homo sapiens
agattgtttaaatcctcccagtgaaatcaggatcctcatgaccagccaaagagaagaagaattaggaagcataaa

SEQ ID NO: 638874 - DNA, 100 bp, Homo sapiens
tccatagtcaccacttcacttcacctctttctggaaaccaggtctattacaatggctaccatggagacacctctgaaacatttttggtgggcaatgtgga

SEQ ID NO: 638875 - DNA, 100 bp, Homo sapiens
ctaaagcttgacggcttggacgaagatggggagaaggaagcgagactcatacgcaacctcaatgatggtagtgaaaacctttatggatatggatcaggac

SEQ ID NO: 638876 - DNA, 83 bp, Homo sapiens
aaagaagtgataggagggctctgtagcaggttacgggcaggacttgagtggcttcggacagggcttctcagaccccagccagc

SEQ ID NO: 638877 - DNA, 89 bp, Homo sapiens
tttcctccgcggtggggcgttgccatggagacgcgggcggcagtgccgtggaggtcccagcccccgctgcggttctcggaggtccggag

SEQ ID NO: 638878 - DNA, 83 bp, Homo sapiens
gagcgggcggcttcctggcctgggcgctccggtggcggcggagggtccctcaggctccctatcagcccctccagctgcctcag

SEQ ID NO: 638879 - DNA, 82 bp, Homo sapiens
cgcgtgctaatggtggaaacccacaacgaatgacagggtccagaaactggcgagccacgagggacatgtgtaggtatcggca

SEQ ID NO: 638880 - DNA, 100 bp, Homo sapiens
gggaaccctggtcaccgtctcctcagatcctgagagtgagaagcctgactgaccccgcctagacgccaggcccacttcacgccgtctaagtggagaagtg

SEQ ID NO: 638881 - DNA, 133 bp, Homo sapiens
tgaggactggggcctcattttggatatctgtgataaagttggtcagtctcgcactgggttggttcttacttgaaatctccaaaattccctatttggattgttggcagtgagactcacctcaccgtattttttg

SEQ ID NO: 638882 - DNA, 85 bp, Homo sapiens
tctcagcgggtaattggctgctcctaggtttgtgtaacaagaggcaaaactgactctgcggtggagctgtggaagccaggcgcac

SEQ ID NO: 638883 - DNA, 127 bp, Homo sapiens
gagctgccacacggcctgcactctgcgctttgagctactgggctgtgagctgaacgcgattgtaactgcctatgagaatagctctcagcatgatcccagttcaaataacgctatgcttggggttcat

SEQ ID NO: 638884 - DNA, 100 bp, Homo sapiens
ggcgatgcttctgtgtgcccggggcaattgaaggaacagactaaaaatcgtgtcctggaaggaaactacaggtactaccagggattttcagtctgaagaa

SEQ ID NO: 638885 - DNA, 155 bp, Homo sapiens
cgagggtcctgacgcaggcttccaaccccgtcgtctgcacgcagcccaaatccccatccgggacagtgtgcacctcaagaagccttatcagttgtgagtgaggaccagtcgttgtttgagtgtgcctacggaacgccacacctggctaagacaga

SEQ ID NO: 638886 - DNA, 75 bp, Homo sapiens
tgacagaggaccatgtgatgcacctgctccaggtggctggtcattgaccgcaaggtttacaacatcaccaaatgg

SEQ ID NO: 638887 - DNA, 98 bp, Homo sapiens
cgaggccaaaaagagcgtttgtcgccgtctagattacatcacgcagagcctccagcagcagggcgtgcagtctccagagaatacagagggcaaagatg

SEQ ID NO: 638888 - DNA, 82 bp, Homo sapiens
aagaggcaaagcaagcgagaagtcgcgggcccagcccacagcaggttttctggatatgccgcagaaggatccgtgccagaag

SEQ ID NO: 638889 - DNA, 108 bp, Homo sapiens
ccagtcacaccacttgggaccacaccgccttcctctgatgcgctgctgggacatcgccttgggtcccctcaaacagattcccatgaatctcttcatcatgtacatggc

SEQ ID NO: 638890 - DNA, 100 bp, Homo sapiens
acatgggctcttcctctagcagccagtatactttctgtcagccagaaactgtatggaagctccaaaaggaaagataccagattgatcttgatcacctctg

SEQ ID NO: 638891 - DNA, 101 bp, Homo sapiens
caaacgcagaaggactgcctcactgagcaaccaagagtcgtaaaggtatcttcactggaagctcggggctgcagattgtgtacctcagtgggacagaatcc

SEQ ID NO: 638892 - DNA, 96 bp, Homo sapiens
cacagactgctgcttgtgtgttgccggccaggaattccaggctcacaaggctatcttagcaggtttaccgacaagactgtgaaactttcgggatgg

SEQ ID NO: 638893 - DNA, 74 bp, Homo sapiens
tcaggatagtatcttggccagggaactcaaacagcagatgcagatgctgatggaaagttaagcgtgaaatttgg

SEQ ID NO: 638894 - DNA, 75 bp, Homo sapiens
cacagagccatcaaaatcacagtggatgggccccgagaacctcgaactgaagtgagtagtgaatatagtatggac

SEQ ID NO: 638895 - DNA, 97 bp, Homo sapiens
gtcttcacgtggtctttaccgtttgttggagaaaaaggtcacatttctctgcagcaatatcattcattttgaaagtttacgaacaagaactgcagaa

SEQ ID NO: 638896 - DNA, 75 bp, Homo sapiens
gatcgtaagagctctctcctcacagagttgtgcacagggacctgaagcccagcaacatcctgtatgtggacgagt

SEQ ID NO: 638897 - DNA, 96 bp, Homo sapiens
ctggggctttgaactccgagaggaggtggaccagaacttttggaactagtgccggcggctctccaccccccagtgctgaggtagggaccatctttg

SEQ ID NO: 638898 - DNA, 143 bp, Homo sapiens
ggacgtggacttggtgtgcattaacctgccgccgcccctcaccagacagatcgctgtcaaaaccctaggtactccaaagattcaggtttactcacgtcatccagcagagaatggaaagtcaaatttcctgaattgctatgtgt

SEQ ID NO: 638899 - DNA, 75 bp, Homo sapiens
tgtccctgctggaggagcgcttccgggaagttgaagaccatgtggcgtttctaataacagttccaactgccctgg

SEQ ID NO: 638900 - DNA, 100 bp, Homo sapiens
cagaacctgagtatctgcaaaagttgcacaaatacctaataaccagaacagaaagaaatgttgcagtatatggaaagaccacagcaagattctttcattc

SEQ ID NO: 638901 - DNA, 114 bp, Homo sapiens
tttgacttggaagcaatgtttgaacaaactcgaagaacagctgtggaaagaagttgcaaaacactgggtttatcttcgagaagcaccatggccatctgcacaatcagaaatcag

SEQ ID NO: 638902 - DNA, 99 bp, Homo sapiens
ggcaattaattggctccattaaaaattagatggagttttaacattgaatgcggagaacactaattatgcctatcaagttccaaacttccataaatgtga

SEQ ID NO: 638903 - DNA, 100 bp, Homo sapiens
aagataccagatcatgtcagagagagagcttggttaacttgggagaaagtttcatctgtggatggagtattggttctgggaagttctggattgtttaata

SEQ ID NO: 638904 - DNA, 90 bp, Homo sapiens
aaaggccaaggtccggaaagcgttgagaagctgatgtctcctcgacttccaactggaaccttgaacccccacatttctggaccttgagca

SEQ ID NO: 638905 - DNA, 89 bp, Homo sapiens
gtcgcctctgtgctcgtgagtgcatggggtataagggtgcaaatagctatgggcaacttggcctcggccataaggaagatgtgctgttg

SEQ ID NO: 638906 - DNA, 83 bp, Homo sapiens
ctgctttccactcggctcctgtcgtccgttctctcaggctcccgttcaggtttggtgcaagtgccaaagttgtgcatttcctg

SEQ ID NO: 638907 - DNA, 100 bp, Homo sapiens
ctgcctcgggctatcctgtcaaggtgccgctcgaagtccaggaggcagatgaagccaagccgtggggccaattttttaactcagatcttgctgagaccag

SEQ ID NO: 638908 - DNA, 100 bp, Homo sapiens
agacataagaaatgattatatcaactgggtccaacagcaggcctatggaatgaaatcgaaacgagttggctgagactcttgcactcctgaaagcacaaat

SEQ ID NO: 638909 - DNA, 80 bp, Homo sapiens
gacctcaacctggatatcagcccccagcggcccaggcccagtgagaagccctaccactgcaactgggacggctgcggctg

SEQ ID NO: 638910 - DNA, 100 bp, Homo sapiens
gctggaaaaactgaaggaggccaaggttaagaaggcggcttacagggagaacacagttggcctccaccgtttctgccccacagaaaacgtagcaaagatc

SEQ ID NO: 638911 - DNA, 100 bp, Homo sapiens
caaggatgcggagtaggcttcccccagcgcttgccgccctgggcgcggccctgctcctgtcttccattgaggcagaagcggtgcagaggggcaggatgcc

SEQ ID NO: 638912 - DNA, 80 bp, Homo sapiens
aaggtgcgcgagctggtggacaaagcgtgccactgattaatgaacttgaatcagcaatacatcagctgtacaaacagcga

SEQ ID NO: 638913 - DNA, 75 bp, Homo sapiens
gtggggcaatccgggcttgcagacgaggttatgaagacagtatggagtttccagaccatagtagacatttgctac

SEQ ID NO: 638914 - DNA, 74 bp, Homo sapiens
ccgagagcgtgaccgagagcgcgaatatcgtcatcgttagaagttgacatgaagacaatggagactgcagagaa

SEQ ID NO: 638915 - DNA, 100 bp, Homo sapiens
tagaagaggaagtttttgattgtgacaacttgtaccactgtggaacttgtgacaggctggttaaagcagcaaagcctgccgctgcgcttctgggtgaatg

SEQ ID NO: 638916 - DNA, 100 bp, Homo sapiens
ctgcagggagacgcacagccaggacatcctggaacctgggaaaggatgcttgtggttggtggcatcgaccgggtttatgaaattggacgccagttccgga

SEQ ID NO: 638917 - DNA, 87 bp, Homo sapiens
tacggtttactccactgtggaaataccgaaaaagagcgatcgtcttctgatcaaaggaggtaaaattgttaatgatgaccagtcgtt

SEQ ID NO: 638918 - DNA, 83 bp, Homo sapiens
cgcccccgggagcgggcgcccagagggggatatgagactttctactcggaatatcctgagtgttgcgtggatgtaaaacccat

SEQ ID NO: 638919 - DNA, 100 bp, Homo sapiens
caggggttgaactgtggagtgtgtggttccctgtattgaacactgatatacaaggaatgaatagaagtcaagaaaaacagacctggtgggaaaaagcctt

SEQ ID NO: 638920 - DNA, 76 bp, Homo sapiens
ttgtagcagacactgcaaatgaagctctcgaggctgctaagagactaagtacttcgtactggatttcgaggctggc

SEQ ID NO: 638921 - DNA, 100 bp, Homo sapiens
cggggagccagcgagcgcgccttcggcattggccgccgcgatgtcagctcagtgctgtgcgggccaggggctaagtgatggatcttgtactccgtgttgc

SEQ ID NO: 638922 - DNA, 74 bp, Homo sapiens
gatcctccgcttccagaaggagctgaaggagatccagtgtccagagcaggtggtcggtggcatctacggggttt

SEQ ID NO: 638923 - DNA, 100 bp, Homo sapiens
ccgtatcggggcctttatttctcgtcggcggcgccctgcaccgcgcctcgcaaaccaaaactggacaagccaaggcatctgtagccaaagtaaacaaatc

SEQ ID NO: 638924 - DNA, 96 bp, Homo sapiens
acggctgggcgacttgcgaggatgagagcgacgaagccaactgtccaggcaacagcattattgagaaaagcccttacagaagagtgtggccgtagg

SEQ ID NO: 638925 - DNA, 108 bp, Homo sapiens
aggagctgtgcagccgcgaggaggcgcgggaggtgttcgagaacgaccccgagacgtttggtgccctggttgtcagatgttggaaagcagtaggacggaacatactct

SEQ ID NO: 638926 - DNA, 73 bp, Homo sapiens
tgttagcttggcctctgtccctgaaggcacagccaaaattggtcagaaaggggagtaaagtgggacacgagct

SEQ ID NO: 638927 - DNA, 100 bp, Homo sapiens
ttcgagtgaccgagaccgcggccgggaccgaggcaacatgaaccgtgaagaccggaatgtgctgcgtatgaaagaacgggaaaggcggaatcaggaaatt

SEQ ID NO: 638928 - DNA, 100 bp, Homo sapiens
cgcccctcaccccccgagagccggaaatgcttccagactgcacacttttacttagaggacagtacatcccctagagttatatccacacctccaacaccta

SEQ ID NO: 638929 - DNA, 83 bp, Homo sapiens
cctggttcctgcgtgctacggccctgtgggcctgggagctgcctctgaggaacacgccgcagctgcctgtggaggaaccgatt

SEQ ID NO: 638930 - DNA, 50 bp, Homo sapiens
ctggaaggggaggaatcagaacctcaggataaaagaatcagagtgtctca

SEQ ID NO: 638931 - DNA, 51 bp, Homo sapiens
tgctcttctccaggctctgtggtctctaattaacagaagatggcaaagccc

SEQ ID NO: 638932 - DNA, 87 bp, Homo sapiens
ccaaacgagattggggccatgccaaggactatgtggagttattcaagcggagaaatgttgctacagcagaagaagaaacagaagaag

SEQ ID NO: 638933 - DNA, 75 bp, Homo sapiens
tgaccacttatacagtgcaaagatttccatggtgtcagtgattcatattcctgataggacttataaactatcctg

SEQ ID NO: 638934 - DNA, 100 bp, Homo sapiens
gtggagcaggcagcctacacccgtgatgccctggccaaggggctctatgcccgcctcttcgacttcctcgtggagcttccaatcagaagactatacaacc

SEQ ID NO: 638935 - DNA, 49 bp, Homo sapiens
ctttttctcgcggcacagatgttctggacatggcaagacatgtgccact

SEQ ID NO: 638936 - DNA, 100 bp, Homo sapiens
cggcggtcccccagaggacagtgggagaggctgccgggtggcagagacacaaccaccaaggtctgcacctgttcagcatttggcaggatggcaagcggag

SEQ ID NO: 638937 - DNA, 50 bp, Homo sapiens
cagtcacctctcaactgtgtgccaaaggtgaaaggtgtagcagtcactcg

SEQ ID NO: 638938 - DNA, 90 bp, Homo sapiens
ttctgtccttgccacacaacatcattgaactcgatgttagagcctacgttcctgcactgcaggtccagatggctgtggaggccaagtttg

SEQ ID NO: 638939 - DNA, 74 bp, Homo sapiens
ctggaagatgggaagaaagaagcagctgccagacctgtggatgaagagccagagtcctctgaggtcgatgctgc

SEQ ID NO: 638940 - DNA, 90 bp, Homo sapiens
tcagcaccatggtgcgccaggtcccgacggctccgcgccagatcccgcccactacagctatggcctgctgtgcagttagccaacttctac

SEQ ID NO: 638941 - DNA, 100 bp, Homo sapiens
gcagcagcaggcgaggaggaagatggcgggacggctgccggcctgtgtggtggactgtggcacggggtagctacagcaagctgggtagcaggcagatcca

SEQ ID NO: 638942 - DNA, 90 bp, Homo sapiens
ctgcgatggccgtggccgtggggagaccgtctgatgccacaatttggaagcccgattcatgccagagctgccgttgccatggtgatattg

SEQ ID NO: 638943 - DNA, 98 bp, Homo sapiens
cagtggtgaggagggcgcccctgaacctgcaccaggtacccactgatggtaatgctggcctgctggctgaaccccagattgccatgttctgtggcaga

SEQ ID NO: 638944 - DNA, 71 bp, Homo sapiens
tttagagacgacgtgaggaatcgggagcggtggtgccccccccgggcacggggccatgtacaacgggatcg

SEQ ID NO: 638945 - DNA, 75 bp, Homo sapiens
atctccagagctgctgcagaaaagctgtttgggataaaatggaccagttgctacagatgctgcaaagtacagacc

SEQ ID NO: 638946 - DNA, 99 bp, Homo sapiens
ctgcccttcgccaaggagatcgtctctctcatcgaggcccaaaccgccaagaataatccagaatggctactctgatctatgttgataaggaaaatggag

SEQ ID NO: 638947 - DNA, 98 bp, Homo sapiens
ggaggctccgttgcctgctcccggagggagacgcgctgccgaggagaacccagcgggtacatgtcccagagcaagcacacggaggcccgggagctcat

SEQ ID NO: 638948 - DNA, 96 bp, Homo sapiens
cccggcgcccagcggtagccctccttgcgcctccgattcccagctgagacgttacaacaaagattagaagacctggaacaagagaaaatcagcctg

SEQ ID NO: 638949 - DNA, 82 bp, Homo sapiens
ccggcccccatcctccccgccccatcggttgttgtctgggcggggccgcccaataactccagtatacacggtggctccaaac

SEQ ID NO: 638950 - DNA, 100 bp, Homo sapiens
ttacactgctgagtcacacacaacgcttgttatgttttcatcacttctctccagaaggacaacataacgatgcacggatgaaccttgccattgctctgac

SEQ ID NO: 638951 - DNA, 100 bp, Homo sapiens
caagaggatggcctgaagtttgggctggaagtattactgaagatttcattgctacatatcaggccaattatggcttctctaacgatggcgcatctagttc

SEQ ID NO: 638952 - DNA, 98 bp, Homo sapiens
ctacaatcacctaatgcccacaaggaagctgtgctgaatggtttggtggccactgaggtgttgatgtggttttatgtcggagagattataggcaagcg

SEQ ID NO: 638953 - DNA, 75 bp, Homo sapiens
cgggccgggcggcgcgctgcccacttgcccagcctgccacaaggagtttcggacgtggctgagggaggaatgggg

SEQ ID NO: 638954 - DNA, 100 bp, Homo sapiens
agtctagttcagaggagagtagatccgagatatatgatttacgagtatcggaatggccaccaggaggtggagagcccctttcaggggcgcctgcagtgga

SEQ ID NO: 638955 - DNA, 90 bp, Homo sapiens
cctagctcctccccaggcacgtcagtaaaaaagccggacccaaacatcaaaatacaaaatggttcgttacatcagaaggatacagttcat

SEQ ID NO: 638956 - DNA, 100 bp, Homo sapiens
agcctggacttcgcgcagtgcctggggtactacggctacagcaaggttgcagagcctgaggcctgtgatcagatgtacgagagcttagcgcgactccatt

SEQ ID NO: 638957 - DNA, 100 bp, Homo sapiens
attatgctgcagcatattgtactggcctgctgctggcccgcagggatgatgatgctgaagctatccttgctgcagacttcgaaattggtcactttttacg

SEQ ID NO: 638958 - DNA, 75 bp, Homo sapiens
ttcggaagcaacagcggcagtcccctgcccaaggataaaatggaccagttgctacagatgctgcaaagtacagac

SEQ ID NO: 638959 - DNA, 80 bp, Homo sapiens
aggatccagtgttcaccatcctggccccggaaggatgggagtcccagcttctggagacggggttcctggggatcttcctg

SEQ ID NO: 638960 - DNA, 100 bp, Homo sapiens
ctgcccggccaagaggcaaaggggaggttacgcagcaaaccatccagaaggtcatcgacatcctgagggggaaggccacccggcctgcttccacctccca

SEQ ID NO: 638961 - DNA, 75 bp, Homo sapiens
gccggatggagtccgtgagatgggttttagctgccgccggagtcgagggggacttgatctcatcttcatgccagg

SEQ ID NO: 638962 - DNA, 75 bp, Homo sapiens
ctttatgaaccagtgtatcccaacttcagctttagctgcagctgcctctgttcagccacttgcaacacaatgttt

SEQ ID NO: 638963 - DNA, 51 bp, Homo sapiens
cgcactttataccacctgcgattactcaagtctggaaaagtttgaaattcc

SEQ ID NO: 638964 - DNA, 97 bp, Homo sapiens
ctcccgatggtatcatctctcctgtggggaacatttctgtaatgaatgctttgaccattactacagaagcggagtttaagagagctgtgaaagtagc

SEQ ID NO: 638965 - DNA, 74 bp, Homo sapiens
cccaaatgccccaaggatgaagaacggagacgacaaatgaatggcctttggaaagcttttgtgaagaactttgc

SEQ ID NO: 638966 - DNA, 100 bp, Homo sapiens
acaaactggccaagaagggccttactccttcacagatcggttgcacataggcaaaggtgtgcagttggaatgtaaaggtgaaggtgatgtttgggtcagg

SEQ ID NO: 638967 - DNA, 102 bp, Homo sapiens
ggaagctgtggacttgaggatttacacttaaggaaggatggggaaaatgtggcatcatggcagaacaggatgtggaaaacgatcttttggattacgatgaag

SEQ ID NO: 638968 - DNA, 82 bp, Homo sapiens
acgggcagtttgtcgaacgatgttggactcatagtcactgccagaaagtggttagcaggaagaagatgagccttaagtctga

SEQ ID NO: 638969 - DNA, 75 bp, Homo sapiens
gtccaggagaagctttgaaggctgtgaagtatattgagtatggacagcagtctagagatcctcctgtgaaaatgc

SEQ ID NO: 638970 - DNA, 97 bp, Homo sapiens
gcccctgagccagagctccagcagccttgttagggcgtggcctgaggcttggataagtgggtgctggagcagctgctcccagagctcaccgggctgc

SEQ ID NO: 638971 - DNA, 80 bp, Homo sapiens
cagattcgcagtggtcgcttcttctccttgcattccttcctagtagcttctgtatgtacactacgttgatagccatgact

SEQ ID NO: 638972 - DNA, 83 bp, Homo sapiens
cttaacttcttatccatcccatctcttggacagatgatgccagttaattactttgaataacgctgtaaatgtaagcctattag

SEQ ID NO: 638973 - DNA, 99 bp, Homo sapiens
taccagtgaaaagagctgctgtccagtttttgaataatgcttgggcctgagaaatgccagtggcctgacagcagcagacattgcacaaacccagggttt

SEQ ID NO: 638974 - DNA, 75 bp, Homo sapiens
agaattctgaatttgaaggtggaaaatcaacagtgaattgtaggtgacttgatggagggtgagctctattctgct

SEQ ID NO: 638975 - DNA, 98 bp, Homo sapiens
tgctgcaacctcacgaattgctgaacttgaaagcaaaaccaatacactccgtttatcacagatcatggaagggaagtggttgctgtgtatgttactgg

SEQ ID NO: 638976 - DNA, 90 bp, Homo sapiens
cggcagtcgggccagacccaggactctgcgactttacgtcaagggcagcccaggtgcccaatttctctctctcttcacaaggcaccacca

SEQ ID NO: 638977 - DNA, 98 bp, Homo sapiens
cattaaattgtcacagacaagtaatgtcgataaagaggaggaagctcccgaagatccctgttttgcatctcaaaaccgtgtgtacaatgacattggca

SEQ ID NO: 638978 - DNA, 50 bp, Homo sapiens
aactttcggggcatgtacaatcagagcttgatccaaggattattcgacca

SEQ ID NO: 638979 - DNA, 125 bp, Homo sapiens
ttgtgtcctcctcccagactatgcactgataatggcattatgattgcatgagcagtggaatagtgaccattctttattctgcctttgtcctggtgagcacatctgatatggcagaggaaactgag

SEQ ID NO: 638980 - DNA, 50 bp, Homo sapiens
ctggaatcagaaagcactacgctaacccatgatgatgccatttggtcagt

SEQ ID NO: 638981 - DNA, 50 bp, Homo sapiens
agcagctgtcgccgccgctctcagaaaaccagtctatccaagaccaggca

SEQ ID NO: 638982 - DNA, 100 bp, Homo sapiens
aacaaaaaagtaattgaagaaaaggctaggatgatatatgaagattacatttctatactatcaccaaaagagacctctcaagctggatccaaggataaaa

SEQ ID NO: 638983 - DNA, 100 bp, Homo sapiens
ccttggaaaaaatctgaaagtgataaaataatatgggaaaaacatcaaattcttgaccaatctagggcctgccagctgcccctgttttcttacatcgtgg

SEQ ID NO: 638984 - DNA, 97 bp, Homo sapiens
tctgagggagggtccgagccagccgctgttttgccggaggagcccctcaggccctgacagtgaagatagtactgtgtccatccagataaaattagaa

SEQ ID NO: 638985 - DNA, 88 bp, Homo sapiens
accagggctgcgacggccatgctggggcaggtggagcagctcctgtacgaaagccctgagcggtactcccgctcagtgcttctcatca

SEQ ID NO: 638986 - DNA, 75 bp, Homo sapiens
caaagccctgggtcgcttggaagaagccaagatcatgaatcggttcagtggtgttatgacaacttcattaactac

SEQ ID NO: 638987 - DNA, 75 bp, Homo sapiens
ggacattacattaagaaggggtcaaagtttagctgctcgagatcgaggaggccttcacctaccaccatatccagg

SEQ ID NO: 638988 - DNA, 110 bp, Homo sapiens
ccagccagctgctggagacattgaatcaattgagcacacacacgcacgtagtagacatcactcgcaccagccctggtgggagtgtaagataaccttccagataaagagtt

SEQ ID NO: 638989 - DNA, 76 bp, Homo sapiens
cagaaatgttacacacggagtatcaaactctgctgccaaggtttcccaacctctttcccccactgaagccggagac

SEQ ID NO: 638990 - DNA, 75 bp, Homo sapiens
ggacggtttcgccggcagtctcggtgtcgtgaaaactacccctaaaagccaaaatgggaaaggaaaagactcata

SEQ ID NO: 638991 - DNA, 98 bp, Homo sapiens
ttaatggctacacttcgatggacctgttgaaaaaaatctgggaggttgaacttattaatgtaactataactacccaatattgcagccatggagtccat

SEQ ID NO: 638992 - DNA, 75 bp, Homo sapiens
tgtggttgcaacggagataaattcccggaaccgcgattcggcgtgtcaggtttgatatcgacagctgcacttact

SEQ ID NO: 638993 - DNA, 76 bp, Homo sapiens
atcattccttggggcaaaatgtggacaagggaaacagagcaaatgcagcgttacaatcaaagacttattgaggaat

SEQ ID NO: 638994 - DNA, 100 bp, Homo sapiens
ctatttcattagcctcagaacgatatgataaagacgatgaagccccctctgatggtagtatcttccccagcagatgttgctgaaaaagctgacagaatta

SEQ ID NO: 638995 - DNA, 75 bp, Homo sapiens
gttcgagtgttgcagagcctgcggggcaagatctatccagtttgctgaccagaagcaagaattcaacaaacgtcc

SEQ ID NO: 638996 - DNA, 100 bp, Homo sapiens
gttctggagaaaaagttccatactgtcagtggaagcaagcaaaccagtccagctacgggggcccagccagccagcagctgagtgggggttacggaggcgg

SEQ ID NO: 638997 - DNA, 100 bp, Homo sapiens
tacacctcccacctgtcctcaggcatatcaaaggagtataatgtctcaggaaggcgattatgggaggtggaccatatctagtagtgatgaaagtgaggaa

SEQ ID NO: 638998 - DNA, 95 bp, Homo sapiens
cggagtttgacgaagaggtggtttttgaggtctcccacacaggtgaataattcgataaaacccctaagagaacgcatctgtgtgtcaatgcaaga

SEQ ID NO: 638999 - DNA, 113 bp, Homo sapiens
gttcatatcacggcaagtggtgaaccagttcccatttctgaagaatctgaagagctggatcagaagacattcagcattaattatatccagatcgagagacagaagattctgaa

SEQ ID NO: 639000 - DNA, 74 bp, Homo sapiens
ctttcgccagcccgtgccgcgagcgcggcctgcaggagttcctgtgccttaagaacattagaaccttcctgtcc

SEQ ID NO: 639001 - DNA, 98 bp, Homo sapiens
ggccgatgaatcacccaacatgctggtgtacagaaagcccttgcctggactccccttccagaccacaacttccccggtgatatgggaccctggaggag

SEQ ID NO: 639002 - DNA, 100 bp, Homo sapiens
aagatgatgatatccttctcaaccttgtgggatgtgaaaactctgttactgaaggattttttatcaagcagaaatgcatcgaacaacgagaatcaagatc

SEQ ID NO: 639003 - DNA, 80 bp, Homo sapiens
ggagtcatgagcgacagcggcgagcagaactacggcgagcgggtttggttttcctaaacaaatcctttcacagggaccga

SEQ ID NO: 639004 - DNA, 56 bp, Homo sapiens
gctgggcggatggggagcgtctatggtcagtcaggatctggtgattttgaagagaa

SEQ ID NO: 639005 - DNA, 100 bp, Homo sapiens
agtttggaaaagaggcaacaatcaaaacagtctgaccgtcctccttctaatatttggaagaaaatagatcaatccagggactataaaaatggcaatcaac

SEQ ID NO: 639006 - DNA, 100 bp, Homo sapiens
ctgctagagtgtctagtgaatatcagctcctgggtcatttttctccctgaggacaacctgagttgttcccatgactttgccgactaaagttctaagtgcc

SEQ ID NO: 639007 - DNA, 100 bp, Homo sapiens
atacacgtttcaggccctacaatcctgaggaaagaccaacaactgctgcaggcacaagcttggaccggctgggatgccagatgatatgaacttcagtgat

SEQ ID NO: 639008 - DNA, 96 bp, Homo sapiens
tcgacatcagtggagaacctcagagctcaaatgatacttttcccacagcaatgcacattgctgctgcaatagaagttcatgaagtactgttaccag

SEQ ID NO: 639009 - DNA, 76 bp, Homo sapiens
gtgacgctggagaacctggcacttatatcctccctgggttatgaagacagtatggagtttccagaccatagtagac

SEQ ID NO: 639010 - DNA, 98 bp, Homo sapiens
tgcagaagtcagcaagagtgacataggagaagtgattcttgtgggtggcatgactaggatgcccaagattgggaaaatgaggtacgttagtgttcgcg

SEQ ID NO: 639011 - DNA, 88 bp, Homo sapiens
tggagaacacccccccatggaggcgagggaaattgcaaagaagattctttggcaagttatgaattgatatgcagtttacagtccttaa

SEQ ID NO: 639012 - DNA, 50 bp, Homo sapiens
aaggtggagccaccagcctctccttgttgatgcggatgaaattaaaaggc

SEQ ID NO: 639013 - DNA, 100 bp, Homo sapiens
cgtgtgccgcgctctgggcacagccttggaaagtcaggaccgcgacggcagcagagcagacttggatgttgtgggtgatggtatgcagtgtcctccttca

SEQ ID NO: 639014 - DNA, 101 bp, Homo sapiens
cgaggtctccgcggcccgaggtctccgcccgcaccatgcggctgggcagacctgcctagagctggaacgttacctccagagcgagccctgctatgtttcag

SEQ ID NO: 639015 - DNA, 82 bp, Homo sapiens
aatgatgcagacatggcgcgtcttctggagcaatgggagtcattgcacgtgcagaagagcgacgtggacctgatgagaacga

SEQ ID NO: 639016 - DNA, 100 bp, Homo sapiens
gaaatggcacctatggacaagtctataagcactcactgaaaatgaccgagacagccagtcgccgttgaggaatcctctgttgtcaacatcgagacccctg

SEQ ID NO: 639017 - DNA, 101 bp, Homo sapiens
aggtgggcaaggtgatccagcaaggtcggcagagcaaggggcttacgcagaaggacctggccacggttggacagatgacccaggcaggtctcctggagcac

SEQ ID NO: 639018 - DNA, 50 bp, Homo sapiens
attatttctcctctgtttgcagagggctggtgaattaccatatctccgtc

SEQ ID NO: 639019 - DNA, 76 bp, Homo sapiens
attacagaatcaattggataaatgtcgtaatgaaatgatgaccatgactgagtcatctggggacctggagaatgat

SEQ ID NO: 639020 - DNA, 88 bp, Homo sapiens
gattggaggagacacccactttgactccgatgagccatggacgctaggaaatgccaaccatgacggtgcagtagacattgttgcaatc

SEQ ID NO: 639021 - DNA, 101 bp, Homo sapiens
ttcaagagactctatggaaagtctctgtactcgttcatcaaggttatcaagttatacccaaccagcagcaaaactaccaaggaatagttggagttcagcaa

SEQ ID NO: 639022 - DNA, 100 bp, Homo sapiens
catcgctgccgggagggggccctgagcctcctgcaacacctgcggcctcactgggacccccaggaggtgaccctgcagggcagcgaggtcacaggcccca

SEQ ID NO: 639023 - DNA, 51 bp, Homo sapiens
tcctgaatgtggcttggttgtagagcactgcagtttcctcctgaaggctgg

SEQ ID NO: 639024 - DNA, 82 bp, Homo sapiens
agcactagtgatccagccgaagtactcgtcaaaaatagccaggggaaatgccgggagtacagacgacgtcaccgtatatctt

SEQ ID NO: 639025 - DNA, 51 bp, Homo sapiens
cctcgacacagattccaccaaaagctcagtttccatttggatcactgtgga

SEQ ID NO: 639026 - DNA, 102 bp, Homo sapiens
ggccgagatgtctcgctccgtggccttagctgtgctcgcgctactctctctttctggcctggaggctatccagcgcgatcagtgggtgaccgcggctgcgag

SEQ ID NO: 639027 - DNA, 101 bp, Homo sapiens
ttccacctcagacagttgcgctggctcagcggggccggaacatggctgcgtccggtctgatacatcgagatatttccaagcagaaggaatgaagttcgaac

SEQ ID NO: 639028 - DNA, 76 bp, Homo sapiens
aaaccagccgaacttcagggtttccaccgttcgttcaaggaaagtatcgcgagttccaccgtatgtacggggagaa

SEQ ID NO: 639029 - DNA, 88 bp, Homo sapiens
tggccgacttcgatgatcgtgtgtcggatgaggagaagctgtatgcaggagctattcttgaagtttgtggatgaaaattgggaaggtt

SEQ ID NO: 639030 - DNA, 100 bp, Homo sapiens
ggttggtcttgctgtaagagaagaacaactgatttttctgatttcttaagcattgtagttatgggtgctacatgtgtgctttcagagcagtagtgtgagg

SEQ ID NO: 639031 - DNA, 100 bp, Homo sapiens
ttcctctcattgcaggctgaaggtggtttcagacaccctcacaggttttctaccatgcagcaactgaacatggaggaaaagatgtatatccagggcagtg

SEQ ID NO: 639032 - DNA, 75 bp, Homo sapiens
tttcggggcatgtacaatcagagtgctgctgcagcacggagctgacccaaacattcggaacactgatgggaaatc

SEQ ID NO: 639033 - DNA, 100 bp, Homo sapiens
ctggattacattcaatacaggctggaatatgaaatcaagactaatcatcctgattcagcaagtgaggtaacatcccacaacaaggaacggcgttccaagc

SEQ ID NO: 639034 - DNA, 75 bp, Homo sapiens
acagcacctcttcctgtacgcctcctgccaacgggacagacagtataatggcttcttggacacttaatgattgtt

SEQ ID NO: 639035 - DNA, 75 bp, Homo sapiens
atcttctactggcacaagttcgtgagtcccgtgggaaagctaacctcaccaacaaaactcatcagatttatctgc

SEQ ID NO: 639036 - DNA, 49 bp, Homo sapiens
gttctcaaggagaaggcagacctgggtcaccagtgaaaagttgtgcaga

SEQ ID NO: 639037 - DNA, 100 bp, Homo sapiens
aagaggccgcggaggagaagccggaggaggacaacgactaccaccgcagcgacgagcaggacccttgaacatctgtgaagaaatgactattctgcatgga

SEQ ID NO: 639038 - DNA, 100 bp, Homo sapiens
ggaggaggaggaggaggcttgggcttgcgccgttgaagaggcctttgaaattgttgttcgccatgccaagaactacaccaatgccatgttcaagaacaac

SEQ ID NO: 639039 - DNA, 51 bp, Homo sapiens
cggccagccagtcatcaaacgtacaagaatattccacagatgtcctttgat

SEQ ID NO: 639040 - DNA, 96 bp, Homo sapiens
gttcagcgtagagtcgctggagcgggcggagctgtgcgagagcctcctcacttgggatcagttcgacagcttagacaagcatacacaatggggaat

SEQ ID NO: 639041 - DNA, 74 bp, Homo sapiens
atctcaggtcctcgggggcggcggccacgccaaggacggctggtagccggtctgggtctccaggaagagttctg

SEQ ID NO: 639042 - DNA, 100 bp, Homo sapiens
cctttttcgtttttcggatgatgccttcaatactacctttatttccaccatagattctggacaatcaggaagtccaagccacaatgatcctgccaagaat

SEQ ID NO: 639043 - DNA, 100 bp, Homo sapiens
ggatgccctgcagtacctgcagaaggtctctggagacatcttcagcagggaggaagagatagtcgctctggatcacccatggctagacgctgaaaaccca

SEQ ID NO: 639044 - DNA, 113 bp, Homo sapiens
gacactttgttattggagaaacatgcagattatatcgcatcctatggctcaaagaaagatgattatgtttatgatgataaagactacaggagaattcggtttgtaggtcgtca

SEQ ID NO: 639045 - DNA, 75 bp, Homo sapiens
ctgtgggcgctgctggcgctctggctgtgctgcgcgacccccgcgcatgcccgtgatgctgatgagcgagagaag

SEQ ID NO: 639046 - DNA, 100 bp, Homo sapiens
cacaggagctgtagagaggaccccggtacatctgaaagccgggaaatgattttcagacgatgctggttggttttcaagaaggcttctagcaaaggaccca

SEQ ID NO: 639047 - DNA, 100 bp, Homo sapiens
ggaaataattttcacaaccttcaagaaattcgggtgtggaatatcaaacaaatgattaagttgacacaggaacatatagaggccctattggacaaatttg

SEQ ID NO: 639048 - DNA, 128 bp, Homo sapiens
gagatgtctcgctccgtggccttagctgtgctcgcgctactctctctttctggcctggaggctatccagcacatatgtagagtgtgtcggtcagaaggaacacctgagaaaccgctttatcatccttg

SEQ ID NO: 639049 - DNA, 83 bp, Homo sapiens
ccggcctttgtctgcgggcacgcgccgctgcgggaagcccgtcagcctgagctacagatgcccatgccgattcttcgaaagcc

SEQ ID NO: 639050 - DNA, 74 bp, Homo sapiens
gctgcggagcgggaggaggaccgaaaggacatggatttgattgacatactttggaggcaagatatagatcttgg

SEQ ID NO: 639051 - DNA, 100 bp, Homo sapiens
ccgcgggccgcaggggctcatgcagccgccaagtgtttctgaaagatctatccagcactccgatggccagcaacaacaccgccagcatagcacaagccag

SEQ ID NO: 639052 - DNA, 97 bp, Homo sapiens
aaaaactggagagcttcatcaaaaatagtgatagctttgataagctatttagcagacatgacccacaagcagaagaagcattagcaaagaggagggg

SEQ ID NO: 639053 - DNA, 100 bp, Homo sapiens
agccccactctgaagacgcagcctttctccaggttctgtctctcccattctgattcttgacaccagatgcagagtaactgtggccaaaaaataaaaattc

SEQ ID NO: 639054 - DNA, 78 bp, Homo sapiens
tggcctccatcttcggcaccgagaaagacaacgccgtgccgtccctgcagtgacaccgaggtgctcctagccgtctgc

SEQ ID NO: 639055 - DNA, 124 bp, Homo sapiens
gtgttaaaggaacctctacaacgaaggtgaagccacggaagataaggagttgcgggagcttcaggacgagaaggcagagctgcagaagatctgcgaggagcaggaacaagccctccaggaaatg

SEQ ID NO: 639056 - DNA, 100 bp, Homo sapiens
ctgaaatatttatggatgaaattgtcagatgcctagcatttgctccatgataatctgagatcctacatggctttccaccaacctgggcatcctgacctgc

SEQ ID NO: 639057 - DNA, 100 bp, Homo sapiens
ggacagcagcattgatcaatcttacagctaacatgttgtacctggaaaacaatgcccagactcaatttagtgaggctgaagaaatgtcaacaattgggag

SEQ ID NO: 639058 - DNA, 101 bp, Homo sapiens
aattcaagaagttgaaaaacgcttttcacgtcacctggagagatgcacagatgtctttggtggacttgggaaagaggttgctagaagcagcaagaaaaggc

SEQ ID NO: 639059 - DNA, 125 bp, Homo sapiens
gaatcacgccctggagttgctggtgatccgcaattacggccccgaggtgtgggaagacatcaagaggcaagtgaggcctatctggttggcctttttgaagacaccaacctgtgtgctatccatgc

SEQ ID NO: 639060 - DNA, 101 bp, Homo sapiens
ccgttcctccttccagaccatgcagggggtcatcaccatggatgggacgctgcaggccctgcgccgtgccgtccctgcagtgacaccgaggtgctcctagc

SEQ ID NO: 639061 - DNA, 51 bp, Homo sapiens
agcaaggccaaagacagggagaagttacatcatgctgatgacagcttcctg

SEQ ID NO: 639062 - DNA, 82 bp, Homo sapiens
ccagcccgtgccgcgagcgcggcctgcaggaggggcgcagcccagtggtttggagtcagcggcgactgggaggggcagcggc

SEQ ID NO: 639063 - DNA, 50 bp, Homo sapiens
agccttttaacattcaaggattaggctggtgtgcaatggcgtgatctcag

SEQ ID NO: 639064 - DNA, 50 bp, Homo sapiens
gagtgtgactgtggagaagaagagcgattgaacaggagaagcaagcaggc

SEQ ID NO: 639065 - DNA, 48 bp, Homo sapiens
cagttggatgtgacacataaggagccttcatctcgaaattctgcctca

SEQ ID NO: 639066 - DNA, 80 bp, Homo sapiens
cggaagagtggattatttggtcactgaggaagagatcaatcttaccagagggccctcagatgaggaaactgaggcttggt

SEQ ID NO: 639067 - DNA, 74 bp, Homo sapiens
gaaagaagttgcaaaacactgggcctcatgcattgtgcgtcagcagcaatgtttatggtgaaaaatggcaacgg

SEQ ID NO: 639068 - DNA, 90 bp, Homo sapiens
gacagagctgagggagcaagaggtgtcggaggtctcatctttgaactactgccggagcttctgccagggacccagacatggagctgcggg

SEQ ID NO: 639069 - DNA, 98 bp, Homo sapiens
attaagtctgatgtgtggtcctttggaatcctcctatacgaaattgtcacctatgggaaaattccctacccaggatattatcaactcactggtaacaa

SEQ ID NO: 639070 - DNA, 75 bp, Homo sapiens
caacgcctggctcggagcagcagcctctgaggtgtgggcaagagcagtttactgttgcgttttgcagacaacact

SEQ ID NO: 639071 - DNA, 99 bp, Homo sapiens
ctggccagctgactgcacttcttttttgagaaaggaaggaatatatcctgactgattgtgtctgatgatttgtgagcctcaagtgactactctgtggaa

SEQ ID NO: 639072 - DNA, 100 bp, Homo sapiens
aacttggtgtctttagtgcttggattggtgggatgtttcggaatgggcattgtcgccaattttcaggccccagaggtgatccgaatgcaggataacaacc

SEQ ID NO: 639073 - DNA, 83 bp, Homo sapiens
gcaactaccccagtgccggggagggttctgctgcttcgaaagctgtgtcgcggccaagtagcttagagagcagtagaaacaca

SEQ ID NO: 639074 - DNA, 83 bp, Homo sapiens
atcccctctgacgtctcccacttccgcttccatattcgacacctcttagaggctgcaatcccagagagagttgaagagatccc

SEQ ID NO: 639075 - DNA, 76 bp, Homo sapiens
aaggactacccctttgccaggttcaataaggttcacgcttacatcatcagctacctgaagaaggagatgccctctg

SEQ ID NO: 639076 - DNA, 80 bp, Homo sapiens
agaaccttctggactaatgatgatccaggagcagtgaggagaatgaataccttccaagaccagagtggcagctccagtaa

SEQ ID NO: 639077 - DNA, 74 bp, Homo sapiens
ttttgttatcttctggataaatctaagcaactgttcaatgggttaagcggctatgtgactacgtttgtgacctc

SEQ ID NO: 639078 - DNA, 75 bp, Homo sapiens
gcagaggtagcagcctttcacttggacagacatatctgaagagatggattaagaatgctttggattaaggattgt

SEQ ID NO: 639079 - DNA, 100 bp, Homo sapiens
caagtccatgtacacgcgagattataagaagcttgggttcattgtaattattcgaggtggaggacatattttaccctatgaccagcctctgagagctttt

SEQ ID NO: 639080 - DNA, 124 bp, Homo sapiens
gcagcgggggaaatgtcccttaaaagtgcgacgaagtggggaagaagagactctgacctgtttttgttggacacccgtgtagtatgggcctcagaagaaggctggctggaatttgacatcacgg

SEQ ID NO: 639081 - DNA, 100 bp, Homo sapiens
gcactctggcgggcataccagcgggccctggccgctcacccgtggaaagtacaggtcctgacagctgggtatcactgggatacatcagattggatgccaa

SEQ ID NO: 639082 - DNA, 112 bp, Homo sapiens
ttgcactggaccaatttttaaacttatgaacatccaacagcaactaatggtgagaattatgaagatgatgacctagtaaattctgatgaggttatgaagaaaccatgtccag

SEQ ID NO: 639083 - DNA, 92 bp, Homo sapiens
tcggggacccacagacacagccggggtcgggagccgcccggggcagggctcgggagagcggacaatgcagatcttcgtgaagactctgactg

SEQ ID NO: 639084 - DNA, 86 bp, Homo sapiens
cttcgacttggagtctttgtccaggacgagtttcttggaccttgtggttgagttggagaaactaaatctggttgccccagatcaac

SEQ ID NO: 639085 - DNA, 97 bp, Homo sapiens
cggttccccggcccacagtgggggtgtgcaaacccgagagaactggagcttacaattgagactgctaacccctacctttgaagggatcaacggattg

SEQ ID NO: 639086 - DNA, 50 bp, Homo sapiens
cccccaggccgggcgctgggggcgcacagatccctggttaattagaaaag

SEQ ID NO: 639087 - DNA, 98 bp, Homo sapiens
gagcactggaggaagcacaccctgtcctatgtggacgttggcactgggaagactacatgaggaaataattgacttttataacttcatgtccccttgtc

SEQ ID NO: 639088 - DNA, 106 bp, Homo sapiens
aaacgcccgtgcggaccacggcctgtcagcacgtgtattgttgcagcatctggcagtgagactgaggatgaggacagcatggacattcccttggacctttcttcat

SEQ ID NO: 639089 - DNA, 100 bp, Homo sapiens
ggcccggttcagtcgcttgcagcagcccggggaacagcccgtgtcccagcccacccaggtaactctgatcacggcacctagtggggtggaggcccagcct

SEQ ID NO: 639090 - DNA, 87 bp, Homo sapiens
ctgaatgaagaagagggaaggacggttagtcaggtacgttcttcagatgtgtcatggtctgatactcgtaggaccctccgaaaagat

SEQ ID NO: 639091 - DNA, 75 bp, Homo sapiens
acggaggtggcagccatctccttctcgctggacatcgtggagttcatcccctctctcctctactttggctacacg

SEQ ID NO: 639092 - DNA, 75 bp, Homo sapiens
gccggttcgcgtctctctgctgcggcgcggggaccgctgtgctctcgggagtgtttcaagagccagtgacaagga

SEQ ID NO: 639093 - DNA, 75 bp, Homo sapiens
gctgacacaattaaacactgcagtgttctaatacccgatttacaattacattgaactacaaggatcccctcactg

SEQ ID NO: 639094 - DNA, 100 bp, Homo sapiens
aaaaaatgcagtcaaagaagatggatccacctgatgagggtggagagattcaaccagttagcgtgaaagttggagataaagttcttctcccagaatatgg

SEQ ID NO: 639095 - DNA, 75 bp, Homo sapiens
aaaacataccaatattgttgcacagactaagacgagttgtactgctgtcacaggaaatggacgctggattacaag

SEQ ID NO: 639096 - DNA, 90 bp, Homo sapiens
gcggctccaccccttccacgtcatccgcatcaacaagatgttgtcctgtgctggggctgacaggcattcctgggccctgagaaccctgaa

SEQ ID NO: 639097 - DNA, 76 bp, Homo sapiens
gggtgctgccgttcgtgcgtggcgtggacctcagcggcaacgacttcaaggaggtcccaggtgattgaaaagtttg

SEQ ID NO: 639098 - DNA, 100 bp, Homo sapiens
ctttccctctcccaacatggcggcctcagaatgtcgagtggtaaagtccacttcttacaccaaaatagcttcatcatcccgcaggagcaccaccaagagc

SEQ ID NO: 639099 - DNA, 75 bp, Homo sapiens
tttgagaagcgcttcgtacccagccagcactatgtggtcgtgggcccaaatatcacgctgcctgagggctcggtg

SEQ ID NO: 639100 - DNA, 74 bp, Homo sapiens
actgggtgtacctgctttgcttctctgcaggtattaaaactgccttcaccagaaaatgtggggagacagctttc

SEQ ID NO: 639101 - DNA, 96 bp, Homo sapiens
tctggcttgctgggctgcttggagctggtgggactgtgagcgtcgtctatatctttgttcgaagcattcagcaaacaatggcaaggcagagccacc

SEQ ID NO: 639102 - DNA, 82 bp, Homo sapiens
tcaatctgacagccctagtttggcgcggtgtaaaacgaccgcagggcgccatgttttggaagtttgacctgcacacaagctc

SEQ ID NO: 639103 - DNA, 100 bp, Homo sapiens
taccgcctgcacaagcgtttccccgcggccttcgcgccccaggcttcgcggggctacatgacatcaggttatgtgggtatgcaatttatgtcgaaagcaa

SEQ ID NO: 639104 - DNA, 50 bp, Homo sapiens
atttggagtgtgcgtgcgcgccgagcggagtacgagagggcctccaaagt

SEQ ID NO: 639105 - DNA, 90 bp, Homo sapiens
cagcaagaagaagagcccagctagcaccttcgccctctccagccaggtacctgacctgaaggagaagaaggagaaggtggaggagaaggc

SEQ ID NO: 639106 - DNA, 76 bp, Homo sapiens
accaccttgcaagagccacatgacaaggatgtgtttcacatggtagttgaagtaccacgctggtctaatgcaaaaa

SEQ ID NO: 639107 - DNA, 98 bp, Homo sapiens
cagaagtcagaaaacaaggtgtctgcaggaccaacctctcctctggatgctctagcccctaagatttctgctggtaccagttgtataaaatgggagga

SEQ ID NO: 639108 - DNA, 80 bp, Homo sapiens
ccatttccaatcagtcatgggaccagaagtttacactggaactggacaggtgttaaaagatcactgaagttggatggtct

SEQ ID NO: 639109 - DNA, 114 bp, Homo sapiens
cgagatggagcgggcgcactgggaggtggaacgggccgaactgcaggcaagaaaattggatgtatattttgaatatgaagaaaaaataatgagcaaaactactctggataaatc

SEQ ID NO: 639110 - DNA, 100 bp, Homo sapiens
cttaataatgacaatctcctcagggaaggggcagcacagtgatcctagaccttgaggaagaaaggcagcggcatgcacaggatacggctgaaggagatga

SEQ ID NO: 639111 - DNA, 100 bp, Homo sapiens
gccgtgctggatgctgtgatcgccagcgccggcctcctccgtgcggagaagaagctgcggccgcacctggccaaggttaattatagaaaatgccaagtag

SEQ ID NO: 639112 - DNA, 100 bp, Homo sapiens
gttagagcaaggagaagacccctggatggtggagagtggagttccccaaggcgcacatctcggttgtctgcattcaaaagagcattctattaaagctacc

SEQ ID NO: 639113 - DNA, 154 bp, Homo sapiens
gtggtgggaaattacccaattttggttttgttgtgtttgatgattctgagcctgttcagaaagtccttagcaacagggttgtaccagtcagttaagctgctgtactccatcgggatctttttcacctacgcactccagttctacgtcccggctg

SEQ ID NO: 639114 - DNA, 83 bp, Homo sapiens
ctgccacccccagacctcctcagctccagattcatgatgttgctatcaaaagttgagaaattgtcagaagaaatcatggagat

SEQ ID NO: 639115 - DNA, 100 bp, Homo sapiens
ggagcctttataagtcagtttttgagcagtcacttagtcaacaagagcgtcatgaacaggatgcacgtggtcagcgtcccctacgcgctgatgaaggcga

SEQ ID NO: 639116 - DNA, 50 bp, Homo sapiens
gagagtagatccgagatatatgctgaacccttgcccccggagcccccagc

SEQ ID NO: 639117 - DNA, 100 bp, Homo sapiens
gaaagcaaccattgtactcagtagaggagtatcagttcagtatcgctacttcaaagggtactttttagaaccaaaggacccagatgatgtggtaccagtt

SEQ ID NO: 639118 - DNA, 100 bp, Homo sapiens
aaaagctgcactttcagccctggaatcctttctgaaacagcgtttgctgccaattgatggggcaaatgatctcttttttcagccacctccactgactcct

SEQ ID NO: 639119 - DNA, 90 bp, Homo sapiens
gctgagggagcaagaggtgtcggaggtctcatctttgaactactgccggagcttctgccagaaaggcctaaagaatgtatttgacgaagc

SEQ ID NO: 639120 - DNA, 100 bp, Homo sapiens
tgtgcatggaaaatggctggggtgaagaggagactaggacgcaaaatcgaatgaagctaatggccgacaactacgaggatgaccacttcaaatcctccca

SEQ ID NO: 639121 - DNA, 95 bp, Homo sapiens
ctgtagcattcaagacttcaaactgattttgtggaagtataatactttgtcattatgagatgtcgtctctcggtgcctcctttgtgcaaattaaa

SEQ ID NO: 639122 - DNA, 75 bp, Homo sapiens
tgatcatcttgggagtgatttgcgccatcatcctcatcatcatcataggggagctgttccggtggaatgtttcgg

SEQ ID NO: 639123 - DNA, 50 bp, Homo sapiens
agatcggggtccaaaatcatgataaggagttccttaacctccaggatgaa

SEQ ID NO: 639124 - DNA, 50 bp, Homo sapiens
gctcacctctcgccgcacatgtttggaggggataaaaacattcagatggc

SEQ ID NO: 639125 - DNA, 75 bp, Homo sapiens
ctcctcgctcccgccaccgccggacttcaatgcccagtccccagctcgccagcgctgcttctgatgcttggaaga

SEQ ID NO: 639126 - DNA, 90 bp, Homo sapiens
gcctggcaacggcggtggcgcccggagcccgagaataccctctaccatctgctttggtcagggtgccgctcgaggatttaaaagcaacaa

SEQ ID NO: 639127 - DNA, 90 bp, Homo sapiens
agcgtgaccgagagcgcgaatatcgtcatcgttagaagccacccacacagaatatgcctatgggtcctggagggatgaatcagagcggcc

SEQ ID NO: 639128 - DNA, 100 bp, Homo sapiens
tcaggcaggtgaaggacagctctgtgaagaggggctacttccagaaggcccagatgggggaaccccgggctggggccgccctggacgatggcagcggctg

SEQ ID NO: 639129 - DNA, 74 bp, Homo sapiens
cgtggctgctcaacaaggagctgggctgcatcaactcgggactaaataggaatagtttgccaactccacagctg

SEQ ID NO: 639130 - DNA, 90 bp, Homo sapiens
gacaaaccctttctatgtactgcgcctggatgtggccagggccgttgctccagggagaactgcaaatatcttcatccacccccacattta

SEQ ID NO: 639131 - DNA, 75 bp, Homo sapiens
cgggagcggcggcagcggcggcgcggaggcggctgaggtgcgagccggtacagcagggaagaactggaaactcag

SEQ ID NO: 639132 - DNA, 98 bp, Homo sapiens
agagatcatgactttggtagatgagactaacatgtatgaaggtgtaggaagaatgtgctggagaatctggtaaaagcaccattgtgaagcagatgagg

SEQ ID NO: 639133 - DNA, 100 bp, Homo sapiens
aacatcatgagaccccggacaaacacccccaagcaacttagaatgcagcttcagcagaggctgcagggccagcaggtagatgacattaatgctgataaga

SEQ ID NO: 639134 - DNA, 100 bp, Homo sapiens
gtacgcgccgcccggcgcgcacaggctgtagcaggttccggcggacggcgttgcgaagctatatgttctcctttcagccaagacctttcaccagtgcagg

SEQ ID NO: 639135 - DNA, 100 bp, Homo sapiens
gagccccgaaagggcgaggagttggaggaggagtggacgcctacggagaaagtcagctgtgaggatatcattgctgagagcatctcattagataccttaa

SEQ ID NO: 639136 - DNA, 100 bp, Homo sapiens
tatcccttcatctgtggatgggcaggcaagaaataccgcccacgaatggatcaggaagtctctgaccaagccattagcagagaatgaagaaggagaaaaa

SEQ ID NO: 639137 - DNA, 75 bp, Homo sapiens
gcttgttgcagatcctgattgtaggtggtgtccagctccagactgtgggtggttgtgagacaacttcaacaagaa

SEQ ID NO: 639138 - DNA, 90 bp, Homo sapiens
ctcagtcacacatgccagagattgctcaggaagcaatggaggtggtttgtgatgaaaatggttccaagggctatggatttgtacactttg

SEQ ID NO: 639139 - DNA, 82 bp, Homo sapiens
tgcagtcggcactgctactgcgaagacagctggcagccctgggcgctgcctatggcacagccaagagcggtaccggcattgc

SEQ ID NO: 639140 - DNA, 78 bp, Homo sapiens
acgcctctttggaagaaatggcttctctagaggaggaagcctgcagccttaaggtggccaacgcacccgcaaaaagcg

SEQ ID NO: 639141 - DNA, 126 bp, Homo sapiens
cagctgaaaagttgtatcgtacagcatggattgcgaagcaacagagaatcaatttggatcggcttatcataaccaggacccagatgatgtggtaccagttggccaaagaagagcctggtgttggtg

SEQ ID NO: 639142 - DNA, 100 bp, Homo sapiens
attttccttgatggtcaaaagattaaggcccgccatgttcatagaggataaagcagtagacaccctggcttacctcagtgacggtgacgcccgagctggg

SEQ ID NO: 639143 - DNA, 100 bp, Homo sapiens
gtcgcgcggaggcggaggcttgggatctaatgaggcgtcaagaagaactcagacgcttggaagaactcagaaaccaagagttgcaaaaacggaagcaaat

SEQ ID NO: 639144 - DNA, 83 bp, Homo sapiens
acgcagaacccgggagtaggagactcagaatcgaatctcttctccctccccttcttggctttggcagctcaagtacatctggg

SEQ ID NO: 639145 - DNA, 82 bp, Homo sapiens
ccgcgtccgaggctcgcgggcggcgggcccggaacactctgctccagccaaggtggtgagggcagctgttcctaaacagcgc

SEQ ID NO: 639146 - DNA, 100 bp, Homo sapiens
tgctggggaccatgcagagctacatggatgcctcccttatctccctcattgaggattttgggagccttggagaggagccagcaccgctctttgaccttgc

SEQ ID NO: 639147 - DNA, 83 bp, Homo sapiens
caccgattataagaagagaaactcagcgctggggaagaaggtctacaaggaagtcttcacgaggagcagtgagaactcagcgt

SEQ ID NO: 639148 - DNA, 101 bp, Homo sapiens
agttgtcatatcatgtaattaaaggaaatctaaagcatgaacaggcatctaatgttcttagtgacattagtgttttagtattaaagcagtgccattccaga

SEQ ID NO: 639149 - DNA, 100 bp, Homo sapiens
atgagaccagtgcccatgaaggtcagactgagaatttctacagacagttcaaggaaattgctgcagttattgaaacggtgtgaagacggattctttggtt

SEQ ID NO: 639150 - DNA, 75 bp, Homo sapiens
cctcaacacccccgacaagatggattttttatcaagcagaaatgcatcgaacaacgagaatcaagatcactgagc

SEQ ID NO: 639151 - DNA, 73 bp, Homo sapiens
tggaggctgaggcgggcagatcacttgagatcaggagttcgagaccagcctgatataaaccacagtacttcag

SEQ ID NO: 639152 - DNA, 75 bp, Homo sapiens
ctgcaagaggcctacgtgcgggtggtcaccgagaagtccccgaccgactggccttggaaaaccattgcagagtga

SEQ ID NO: 639153 - DNA, 131 bp, Homo sapiens
ggacttcctcgcagaggtggacaagctggtgcagctgattgagtgccccatcttcacatgtgtggtggctcacgtctgtaatcccagcactttgacaggctgagcgagggagtggatcttgaggtcagcag

SEQ ID NO: 639154 - DNA, 82 bp, Homo sapiens
tggagccggagctgggcgcggattcgccgaggcaccgaggcactcagaggaggattgtcagtggcttcgccccgaggagagc

SEQ ID NO: 639155 - DNA, 100 bp, Homo sapiens
tcacgaccctgacctcagagcagatccagaagctcttagccagcactcgctatccacctccagggttgtggtctcctgaacagaagtctgtctccaaaca

SEQ ID NO: 639156 - DNA, 99 bp, Homo sapiens
ggccgagcaacagtgtagtggcgtattccacatagcaaacagcctgtggacatctctacagcaatgagtgaacgggcacttgctcagaaaagactcagt

SEQ ID NO: 639157 - DNA, 100 bp, Homo sapiens
taaaacaaatgctgctgctatgaatatgggtcgaccattccaaaaaaatcgggtatatttcagaaatcgctgggtaaagactgtccacccagttgtgcat

SEQ ID NO: 639158 - DNA, 112 bp, Homo sapiens
cacaaaataaccacttaccccttctcaccgaggaagagcgggagaaaggtgccggtggtggtgtgcacattgagccccggtatagacagttcccccagctgaccagatccca

SEQ ID NO: 639159 - DNA, 98 bp, Homo sapiens
ccagctcagacctcccggctcgacaggcggcgcgggcggcggtctacatccggataaaagacgatgaatggaatatttatcgccggtatacagagttc

SEQ ID NO: 639160 - DNA, 75 bp, Homo sapiens
tcaaacatccatatcataagtggaattttggagatattcaaaggaaactcaacagtgtaaatttgatggccagga

SEQ ID NO: 639161 - DNA, 75 bp, Homo sapiens
agagaagcaacatctccgaaagccaacaaggaaatcctcgatcaaagagcaaatcgcctgtaaaatctacggagc

SEQ ID NO: 639162 - DNA, 74 bp, Homo sapiens
aaggagaaaccatttaaaacaggtctaaagacttcagtgccctgaacggttagagaaattaatgaaggagctcc

SEQ ID NO: 639163 - DNA, 74 bp, Homo sapiens
ccacagccaccaggcacctccaacaaccaggtgcctctaacccgtatttgcccacaagaggaggtaccaccatg

SEQ ID NO: 639164 - DNA, 75 bp, Homo sapiens
ttcaatttgaaaacaagtggaatagtgctgtcttccttggctgttcggctcttgaatcccagcgatgaaaccagg

SEQ ID NO: 639165 - DNA, 100 bp, Homo sapiens
tctacttctgtttgcagccccatttggcctgctgggggagaagacccgccaggggcctttacaacaactaaacggacaggcattccagccccacgggaat

SEQ ID NO: 639166 - DNA, 90 bp, Homo sapiens
gtgaagtggtgagcctttttgtcactgaaggacacgggtttctctatgaaacatttgggatccggccacagttctcctggcacgttgacc

SEQ ID NO: 639167 - DNA, 82 bp, Homo sapiens
actggatgccaactctgcccttatggaattggacaaagtggctacagcaaaccaaacagcccagcagcccagcagcccagcc

SEQ ID NO: 639168 - DNA, 80 bp, Homo sapiens
gccctcttttattaaggagcctcaaacaaagccttccagagttttgcggcctccaggtggtggatccaatttttcattag

SEQ ID NO: 639169 - DNA, 82 bp, Homo sapiens
cgcaccgcaccctccacctcaggaatacggggtgctttgcattcaggaatacagaaaaaacagcaaagtggagtcaagtaca

SEQ ID NO: 639170 - DNA, 75 bp, Homo sapiens
cctgcggcagaagccgagttcaacatcctcctggccaccgactcctacaaggcaccgcatcagcctgctcaaccc

SEQ ID NO: 639171 - DNA, 74 bp, Homo sapiens
gacctacctgcggcgtcggcagctgctgctccgaggtgtcgtgaaaactacccctaaaagccaaaatgggaaag

SEQ ID NO: 639172 - DNA, 100 bp, Homo sapiens
gtggagatcaagcgcagcgatgaggaagaagcccctccagatggtgctgttgccgaatacagaagagaaaagcaaaagtatgaagctttgaggaagcaac

SEQ ID NO: 639173 - DNA, 60 bp, Homo sapiens
gtggcggaagccttcgtctcccagattgcagaatttgccattttcagtggaaaacaagtg

SEQ ID NO: 639174 - DNA, 75 bp, Homo sapiens
tcacctgtgcgggatggaacaaaagttgcaggaaatcacgtttaagaattactacacagcttttttgagcatccg

SEQ ID NO: 639175 - DNA, 145 bp, Homo sapiens
gcgtattcaagactttactcccaagcttctgttagtcagaaagcggttacttggtttggaacctgaaggccctataataatcatgggccagactgggaagaaatctgagaagggaccagtttgttggcggaagcgtgtaaaatca

SEQ ID NO: 639176 - DNA, 90 bp, Homo sapiens
gtcggacaaagccctcgcgtcggacccttgccagaactgtgtaccttgaaagacttttaacatacgcagagatagatatctgtccggcca

SEQ ID NO: 639177 - DNA, 74 bp, Homo sapiens
tgccctgcagtacctgcagaaggtctctggagacatcttcagcaggccatctccccggttgttgtgcacagcca

SEQ ID NO: 639178 - DNA, 82 bp, Homo sapiens
caggtgcacagcgcgggagccgtcacggtgctcaagatgccatggacaatattaccaggcagaaccaattctacgataccca

SEQ ID NO: 639179 - DNA, 97 bp, Homo sapiens
tgtgaccctcagttgaaaccagaagagagagaatcttgtaaccctcaggactgtgtccctgaagttgttaattttcctgagagaccaagacctggtc

SEQ ID NO: 639180 - DNA, 100 bp, Homo sapiens
cgaagagctctttcaaggaatcaccctggactttgtctcacaagatgaaatgttgacgcccctggggagattggacaagtatgctgcaagtgagaacata

SEQ ID NO: 639181 - DNA, 74 bp, Homo sapiens
ttctgctcctttcctggcagcaggggtttcaatgggagggtatacatccccagatttcctctatattcgttctt

SEQ ID NO: 639182 - DNA, 100 bp, Homo sapiens
gaagatgaacgggacgcggaactggtgtaccctggtggacgtgcacccagaggaccaggcggcgccttttccctggaaggctcaggaatcagtttcgcag

SEQ ID NO: 639183 - DNA, 97 bp, Homo sapiens
aaccaagaaaaggtggtgattgtgaaaatgcccggcgaagccacagaaaccgtccctgctacagagcaggagttgccgcagccccaggctgagacag

SEQ ID NO: 639184 - DNA, 96 bp, Homo sapiens
gacctgtaccaaggcaccgggtccctcgcccaggtccccttggacaaatgggtctcaagattctgccctccaagaaagtcttgccatgattggata

SEQ ID NO: 639185 - DNA, 98 bp, Homo sapiens
gcatcctctctctcagttgtcgtttctctcctgctaattcctgaagtataaatcaaagccattctgtgaaaaactgctttcctgggtgaaaagcagtg

SEQ ID NO: 639186 - DNA, 98 bp, Homo sapiens
agttggcaagaaaaccccgaggagccctgttccaaagcctcctggaccgtccaagaagcaggtcttgacgagccctgcccgggccgacgcatgcggag

SEQ ID NO: 639187 - DNA, 98 bp, Homo sapiens
cggacacggccaccgcctcagcgggagaggagtctccaccaggactgaccgctgccgcccagcacgtccagaggaggtgtctgcaaggatagttcaag

SEQ ID NO: 639188 - DNA, 101 bp, Homo sapiens
tgatttgcttaacaacagcttacagttttcagtgtggacagcagatgaaggaattgagagcacagcatgaagaaaatattaaaaagttagcagaccagttt

SEQ ID NO: 639189 - DNA, 90 bp, Homo sapiens
ggaggaggccgtggtgtctctacctgttcaactcgcccctcacaatctcctcaactgtttcatgatgacacccattcaagaatagaacaa

SEQ ID NO: 639190 - DNA, 100 bp, Homo sapiens
gaatgtgaagcactttgtgctggacgagtgtgacaagatgctggagcagctgggccaacgagacttttgcttttgtgggcaacgtgactcactatgccca

SEQ ID NO: 639191 - DNA, 83 bp, Homo sapiens
cggagaagtggcctaaaacttcggcgttgggcttctcacggcattcagcagcagcgttgctgtaaccgacaaagacaccttcg

SEQ ID NO: 639192 - DNA, 100 bp, Homo sapiens
cctagagtctcaggatgggggctgaggaccgaggcgtgggagtgcgatttgacaatggagtgatgaaggatattaccttccaaatgatgatggagaattt

SEQ ID NO: 639193 - DNA, 75 bp, Homo sapiens
acatgcaatgaacccaaaaggcaacagccaactcagtttataaatccagaaacacctggctatgttggatttgca

SEQ ID NO: 639194 - DNA, 82 bp, Homo sapiens
ctcagaagccatgcccctcaggctggaacttgccctgtctcctcgcagatgaggtgctacagaatattttagaaacagaaaa

SEQ ID NO: 639195 - DNA, 49 bp, Homo sapiens
tgcaggcacagttgccgattacagagtgatcagcagctggactgtgcct

SEQ ID NO: 639196 - DNA, 89 bp, Homo sapiens
ggcagaaggagacccggaagctcaaaggagagtatccaaaaattccaagtataatgcagaaagagttcaaagaaggacgcagagccagc

SEQ ID NO: 639197 - DNA, 82 bp, Homo sapiens
ggaaactgttctgagcaggaagggcagcagacaggtgatttggcttctgcacagttaggaggagcaccaaaccgatgggagg

SEQ ID NO: 639198 - DNA, 98 bp, Homo sapiens
ctctgcccggcgagtcgggctctggaggaaaagaaagggggggccctcagcctcttggccttgaacgggctgttcatcttgattcacaaacacaacct

SEQ ID NO: 639199 - DNA, 75 bp, Homo sapiens
tcataacttgaaaggggtttctctggatctcagcaactgtgagaatgtgacagtgatgataacatgggtgccaaa

SEQ ID NO: 639200 - DNA, 75 bp, Homo sapiens
tcgtcgccctcgagatgattatcgtaggaggagtcctccacctcgtcgcaggagccggtgaaacctgaagaaggc

SEQ ID NO: 639201 - DNA, 96 bp, Homo sapiens
gttataactgcctggaaggttagcgtcaaagaagttgagctgaataccaagagatatctcctgatatctgcacctctgtggataaaacacatctct

SEQ ID NO: 639202 - DNA, 101 bp, Homo sapiens
tgttggaccttccggagcttctcagaagacagagggttttcttttgaggaaacctcgacctgtctcccagttggttgcacagcaggttactcagcagtttg

SEQ ID NO: 639203 - DNA, 82 bp, Homo sapiens
ctgatgggagaatcacacctgagccagcagtcagtaatacagaagggcatacataatcttgctgctatgcttcgaagctgta

SEQ ID NO: 639204 - DNA, 100 bp, Homo sapiens
ccgtccgtgcccgcgggacctgacagccgggtcagaggctccttcgagagcagtggatccgggccaagtacgagcgacaggagttcatctacccggagaa

SEQ ID NO: 639205 - DNA, 83 bp, Homo sapiens
ctgcaggacggcgcggcagagtccccgtacgcctacagtaacgaaatggtggagtcaatgaagaaagtagcagggatggatgt

SEQ ID NO: 639206 - DNA, 100 bp, Homo sapiens
agccaacatggcagcggggttcgggcgatgctgcaggaattagacctttacgagaagcacagttttgtcttcagtttcctctccccccacccggaatggc

SEQ ID NO: 639207 - DNA, 74 bp, Homo sapiens
tcccagctactcaggagcctgagaatttcctgttgagatataaaggcccatctgatcactggattgggctgagc

SEQ ID NO: 639208 - DNA, 100 bp, Homo sapiens
gactccctagcagcagccgccgccagagaggcccgcccaccagttcgcccgtccccctgccccgttcacaatgcataatcaccagcaacacccgggacaa

SEQ ID NO: 639209 - DNA, 73 bp, Homo sapiens
gagtgcatcaaagattactcccagccagcagaaaactgagcttccggtcacagagaacgtgcagacgattccc

SEQ ID NO: 639210 - DNA, 101 bp, Homo sapiens
tgagaacccccagtacttccgtcagggacacaactgccacaagccggacacgtggatggatgaatgagatttacaactatgatccagaaacctaccatgcg

SEQ ID NO: 639211 - DNA, 99 bp, Homo sapiens
gaaaataaatagggaagatggagacaccctctgggggtcctctctgagtcaaatccagtgaatgccagctgatgaagaccgagaggccgcgacccaaca

SEQ ID NO: 639212 - DNA, 73 bp, Homo sapiens
tgacgctctgggtgaagaatggaaggtagaggtgcggcccatgatgtacgtggcactgacctatgatcaccgg

SEQ ID NO: 639213 - DNA, 100 bp, Homo sapiens
ggcgccggctggggtgtgtgctcctggcatcacccagccaatgcctgtctgattcccatctgttctctgtatggtgctgccgtcaccacagtagaaggca

SEQ ID NO: 639214 - DNA, 74 bp, Homo sapiens
gcgatcaaacctaatccgcgagacttgctaaatgaaggatttgggggcagagcacttggcaggtcatgaagggg

SEQ ID NO: 639215 - DNA, 82 bp, Homo sapiens
ggcatgtcgatttgtccttcactacagttccgatgaagttaaattccgtcaagatttaatgaatattgcgggcacaacatta

SEQ ID NO: 639216 - DNA, 75 bp, Homo sapiens
ctcagtgtgtttttatttctcgaaattttcatactgggagattccaattacaggaacaagttccagttccagtct

SEQ ID NO: 639217 - DNA, 51 bp, Homo sapiens
atagttgatctggataatgtggtcaaaaagcgctgctgggacatcgccttg

SEQ ID NO: 639218 - DNA, 74 bp, Homo sapiens
gatagaccacctggttaccatgaagatcagccactgggatgggtggcaccaagctcctggccctgtccgccaaa

SEQ ID NO: 639219 - DNA, 83 bp, Homo sapiens
cgccgtgcaggcggccgtcagcaacctcgtccggacctgcctagagctggaacgttacctccagagcgagccctgctatgttt

SEQ ID NO: 639220 - DNA, 100 bp, Homo sapiens
gagggatggaggcgaaaggctggatccttaatccaggccggagacaaagtatatgactctcaacccttctactaagaggaagaatactggatccccagac

SEQ ID NO: 639221 - DNA, 82 bp, Homo sapiens
tctgctgcttctggcctctgggcatcgcagccttctacttgtcccatgagatcaatattgacttccgcactcgagaatctac

SEQ ID NO: 639222 - DNA, 101 bp, Homo sapiens
gtctaacggcacaaggttctctgccagtgttgcattgatgaatcatagctgttgccccaatgtcattgtgacctacaaagggaccctggcagaagtcagag

SEQ ID NO: 639223 - DNA, 98 bp, Homo sapiens
cggaatatgtgagtgcactgaaattactccgcaaacgttcacaagtctggaaaccaaaggatgtcattgacaaacagttctgcctgtcatcttctctg

SEQ ID NO: 639224 - DNA, 90 bp, Homo sapiens
gtggagtaggaggcaggtctccgcggccctggtatgcgtccaccactaggcttaagagaatttgcaccaggcgttccaccaggaagacgg

SEQ ID NO: 639225 - DNA, 100 bp, Homo sapiens
aagaaacagtcctggacggcaacctcattatccgctatgatgtggaccgggccatctccgggggctccattcaggtggccaatggcatcgaggtctacag

SEQ ID NO: 639226 - DNA, 100 bp, Homo sapiens
tggcggcagtcgcgctgagggactcggctcagatgctctctgtgtgggtatgtgtgtagccatcctccttctttgaagtctcatatgtggaaacatgcaa

SEQ ID NO: 639227 - DNA, 51 bp, Homo sapiens
tactaggcatgttttatgacacagatggctttcatgagaaggacaagaagc

SEQ ID NO: 639228 - DNA, 98 bp, Homo sapiens
tgaggacacttgtggagagctcgaattccagaatgatgaaattgtaaaagaacgccctatatcattaggaattttcccattacctgctggagatggat

SEQ ID NO: 639229 - DNA, 100 bp, Homo sapiens
ttcaaaagttaatggcagctgtgagggatattcttgaaggaattcaaagcatgatgccttcttctgtagagtgggcgctttgcagaatacgtgttgaatg

SEQ ID NO: 639230 - DNA, 75 bp, Homo sapiens
acactacgacagtgagaaaggaggtggtgaaaacaggaatgagaacgaggagtcaacctcaaaggctgaaacctc

SEQ ID NO: 639231 - DNA, 100 bp, Homo sapiens
ggaaggggcgacgcctgtgagcttggccttggagcgaggctatcacaagctgcaccagcttctaaccgacggaatggccaaagactatgacgggtcttcc

SEQ ID NO: 639232 - DNA, 100 bp, Homo sapiens
caggaggcaggatggtctggaggctggtcctgctggctctgtgggtgtggcccagcacgcaaggtctccagaaatgctttgggttcatctttcattgctg

SEQ ID NO: 639233 - DNA, 100 bp, Homo sapiens
ctgtgatgtgcctgcaacaacaggaaaggcaatgttatattaagatgtacggagcgcaagaggacggcagcgtcggcgaaggtgacctgtcctgcatcct

SEQ ID NO: 639234 - DNA, 75 bp, Homo sapiens
agaaactcaccaaaaaagctcttattaaggaaatgttggcagtagatgctccaaggagacataaggtatccgtcc

SEQ ID NO: 639235 - DNA, 75 bp, Homo sapiens
gtggaagatggcgcctgttgtgacaggaaatcatagcccactaatgagttttggagccagctttgtcagtttttt

SEQ ID NO: 639236 - DNA, 97 bp, Homo sapiens
gcatcaaggctaaaattgcaaatgcatatatcatcaaggagcattttgaggaaacttttgagaagaactttgaaagagaaacccataaaataagtga

SEQ ID NO: 639237 - DNA, 95 bp, Homo sapiens
caggaagtgggaccggtgtctggcggatgcggtcgtgaagataggtgcgttccatggatgaactgaatcatgattttcaagcacttgctctggag

SEQ ID NO: 639238 - DNA, 50 bp, Homo sapiens
cggagcagaggaaccacacgctgatcatgatggaatttcactcttgttgc

SEQ ID NO: 639239 - DNA, 51 bp, Homo sapiens
cgtggatagcctgaaggcagccattcagctggatacacagtatcgtcgctc

SEQ ID NO: 639240 - DNA, 90 bp, Homo sapiens
cagcttcagcatcgagctgctgttatcccaccaatgaagcagctgacacaggatgatgatactgatgcggttgagattgctatcgacaac

SEQ ID NO: 639241 - DNA, 75 bp, Homo sapiens
cgggcggcacgcacgcggtgcagggtaacatggcggatgcggaagtctatccttcactggagtctgatgatgatg

SEQ ID NO: 639242 - DNA, 102 bp, Homo sapiens
atcagatccgccgacgactgcaagcagtttcgggaggagttcaacggtttcatcaccttaaatggttttgaaccaatgaaggtgtattcccttaaaaagacg

SEQ ID NO: 639243 - DNA, 85 bp, Homo sapiens
gggcgcggagaagctgcatcccagaggagcgcgtccaggagcggacccgattcctggtcgggtggcttccagtggtcttcagtct

SEQ ID NO: 639244 - DNA, 75 bp, Homo sapiens
aggaggcagtagccaaacacccagccgtttccctggggagatggtaaccatactctattccataaccctcatgtg

SEQ ID NO: 639245 - DNA, 131 bp, Homo sapiens
tcaccctctgccgagtctcaatatctgtcttcggtggactccttcggcagtccacccaccgccgccgcctcccagcaaaatgatgcttcaacacccaggccaggtctctgcctcggaagtgagtgcttctg

SEQ ID NO: 639246 - DNA, 75 bp, Homo sapiens
ggatgatgctgactttgatgaaggtatctctggagacaaagtagagatagaccctgttacgaatcagaaagccag

SEQ ID NO: 639247 - DNA, 83 bp, Homo sapiens
cctctttttggcttggggagctgcagcgttcgtgtctgaagagagtccctctgccagtgagtctggagtcctcctgtcccaag

SEQ ID NO: 639248 - DNA, 76 bp, Homo sapiens
ggaagacatgacttcagtggatgcagctatacttataacaagaatctgtgcggagaccctgggagaagaacagcac

SEQ ID NO: 639249 - DNA, 98 bp, Homo sapiens
tggcattacttctatagaaatggctgaaggaaaacctccttatgctgatatacatccaatgaggaactcatgagagacaagcagtaagaaacttcttt

SEQ ID NO: 639250 - DNA, 75 bp, Homo sapiens
gcggagaccgcctctgctcccgcctggggtcctgaacgaggctgtgggggccctgatgtaccacaccatcactct

SEQ ID NO: 639251 - DNA, 100 bp, Homo sapiens
gcttcttccagagccaaggaggaagggttgtccggtgtctcctttcctcttgggccgggcactttgggctgccagtcggttcactgttgctatgtcccct

SEQ ID NO: 639252 - DNA, 82 bp, Homo sapiens
cggcacgcgactccccccgggcccaaagtgtccctggccagtgtccttccacctgtccacaagcatggggaacatcttcgcc

SEQ ID NO: 639253 - DNA, 90 bp, Homo sapiens
ctagaatatacaaagacaaaaggagattctgatgaagaagttattcaagatggcaacatgtcggaaggaaacgccgccggcgagcccagc

SEQ ID NO: 639254 - DNA, 95 bp, Homo sapiens
ctagccaatggagcattcatgcccaaaaaggaagctgttgaagttattgaagtacctgttgctatattctaagaaattaaaatgtccagaaatct

SEQ ID NO: 639255 - DNA, 90 bp, Homo sapiens
ggcggtgaagcgtgaggccggcatcgtctttccgtcctctgaggcgacggccgcggctgcacaggaacagatggagtcggataactgttc

SEQ ID NO: 639256 - DNA, 97 bp, Homo sapiens
aaggcaaagtcatttgcaagtacttcgtggaagggcgctgcacctgggaagaaggtagataatgactataatgcccttcgagaaagactcagcacct

SEQ ID NO: 639257 - DNA, 100 bp, Homo sapiens
gcggggccgacgagtccggaggggctgccgcgggagggcgtctctggccgagcctctttttgtggaaaacgacagcagcagcagtggcctggaagacgcc

SEQ ID NO: 639258 - DNA, 83 bp, Homo sapiens
atgtgaaatgcagaccgaagaattagctggaaattctgagacactaaaagaacctgaggagaatttgcgctttggcttgatgg

SEQ ID NO: 639259 - DNA, 100 bp, Homo sapiens
caaaatgtcaacaaattgatggatgaagtggctgtaattgatgaaattcaaatgattagagatccagccagaggatgggcctggaccagagcacttctag

SEQ ID NO: 639260 - DNA, 83 bp, Homo sapiens
gacacggcttcccccaaggaatatacaggggaggatactgaggcacacagaggggagtcaccagccagaggatgcatagcctg

SEQ ID NO: 639261 - DNA, 100 bp, Homo sapiens
cctgggaaaggcgcatgcgctctcattgcagcctcggcgtttgtagaagaggagcatctgctccaggtacgacagtgccagcccacagggccatcctggt

SEQ ID NO: 639262 - DNA, 82 bp, Homo sapiens
atcagaagcgtctatgattccttcagataccagggactgtttttgaatcagagccgacaggcacttgaattgaaaatggaaa

SEQ ID NO: 639263 - DNA, 90 bp, Homo sapiens
cattgaaaaccctgctgatgtcagtgttatatcctccaggaatactggccaggtcttggcagcacctgtctcctttcaccccagggcctg

SEQ ID NO: 639264 - DNA, 53 bp, Homo sapiens
ggacatcctggaagctgggaaatgaggagaaggcagagcccccccaggctatg

SEQ ID NO: 639265 - DNA, 74 bp, Homo sapiens
gtcagattggaccctgtaaaagctgtaaaatgataacagagcggggatctgatgagcttctttcttctggcatc

SEQ ID NO: 639266 - DNA, 78 bp, Homo sapiens
cccgacagcgccatggcccagattctgccaattcgttttcaggagcatctccagtgggtgaatttgtaagtgatgtcc

SEQ ID NO: 639267 - DNA, 124 bp, Homo sapiens
ctgtcctccacaacacgcgctacggatctcaagaaccttttcagcaagtatgggaaggtcgcagcagttgtggtagaaatttctgggttagtggactctcttctacaaccagagctacagattt

SEQ ID NO: 639268 - DNA, 98 bp, Homo sapiens
tacaacccgcgcttctggccgcgggaaggagaggataagccgcctcttcaatggcactgaacccatcgtcctggacagtttgaagcaacattatttca

SEQ ID NO: 639269 - DNA, 75 bp, Homo sapiens
gcaacctgatccccaagctttttcgacctgcagacagccctgcacctggcagccatcctgggggagacatccacg

SEQ ID NO: 639270 - DNA, 82 bp, Homo sapiens
ctggcctgggcgctccggtggcggcggagacaccctgacgtggaataagcccagtctcagcggggtggcgcctcttcctcgc

SEQ ID NO: 639271 - DNA, 85 bp, Homo sapiens
ggcttggcagacattcatcattgacttactattgcactgtcacagcaagatgggtcatcagttaaggaagttgaaacctaccacc

SEQ ID NO: 639272 - DNA, 80 bp, Homo sapiens
cagcagatggagaatagaccctctgtccaggcagcattaaaacttaagcaggggctttgttatgcacctaaagccatatt

SEQ ID NO: 639273 - DNA, 132 bp, Homo sapiens
tcctcgccctcctggcaggcacagcacgagagccgcacctttgccgtgtacctcaatagcactggctaccggacagggaaatcctcattgacgattcaatttgttgaaggccaatttgtggactcctacgat

SEQ ID NO: 639274 - DNA, 88 bp, Homo sapiens
ctgtccctccactacagaaacctcacagaacacagcaaagaccatgctcgacagctgaccaaggccatgatgcgaaaggccacggcca

SEQ ID NO: 639275 - DNA, 98 bp, Homo sapiens
gccgtgatcaaacactgcaaggaccccctccggctcaagtgtgtcaagcaagttcctgttaaaggtcaagacactgtcaaaggccgtgttccattcaa

SEQ ID NO: 639276 - DNA, 74 bp, Homo sapiens
gaagacgctgggcaaggggcagacagccactgaggcggctcccagctgcgttggcgacatggccgacaccccca

SEQ ID NO: 639277 - DNA, 100 bp, Homo sapiens
gaccccttctgcccggcgcttcggcccgggccgctcaggtgcagctcaccatggatgatgatatcgccgcgctcgtcgtcgacaacggctccggcatgtg

SEQ ID NO: 639278 - DNA, 75 bp, Homo sapiens
tgactgggtaacagatccccgttttctaataggtgctggaaacgtgcgtagcaacagtaggccgagtatccaacg

SEQ ID NO: 639279 - DNA, 96 bp, Homo sapiens
ggagatggcagcgtccagcaactccagcctgtccggctcgtcggtgtcctccggatattaccttccaaatgatgatggagaattttatcagttctg

SEQ ID NO: 639280 - DNA, 100 bp, Homo sapiens
gaacgctatggcgagcccagcgaagtcttcatcaaccgggaccgtggcttcggcttcatccgcttggtgcagtcagcctcagtttccaaagccggaaaag

SEQ ID NO: 639281 - DNA, 75 bp, Homo sapiens
ttccgggcctccaaggaacttaagcaaagaaatgcactcggtgatggaaagagagccactattctgaagaacact

SEQ ID NO: 639282 - DNA, 100 bp, Homo sapiens
gccactgctgggccctgaggctgcaccaagtggcgaaggagccggctccaaggtcagcccaaggccaaccccactgtcactctgttcccgccctcctctg

SEQ ID NO: 639283 - DNA, 75 bp, Homo sapiens
ttagaaggaggttcaggctacggtgagccgaagatgcaagtgctgctggaccaggcgggctgctgtatcgtgggt

SEQ ID NO: 639284 - DNA, 122 bp, Homo sapiens
ctagattgaagagtacttgtatttatggaggtgctcctaaaggtccccagattcgagacttggaaagagctgcttgtgaattttctgagacggatgtaacaaatactgaacatcatcaaccc

SEQ ID NO: 639285 - DNA, 75 bp, Homo sapiens
gggaaattctctgctgagagaaaacaggtattacaggaataacggaagccgttaaagagatcacactggaaaata

SEQ ID NO: 639286 - DNA, 74 bp, Homo sapiens
agaaggataagtcgaaggggaaggcgcctgaagaggacgaagtttgcctatctggggcgcctggctcacgaggt

SEQ ID NO: 639287 - DNA, 100 bp, Homo sapiens
ctatcagcaggctccgggctgaagattgcttctcttctctcctccaagagagcctgttacctatccataaacccccaaaaggatgagacgctagagacag

SEQ ID NO: 639288 - DNA, 82 bp, Homo sapiens
caacaatcaaaaagaaagctgctgttatcatcatggctgtagaggaatcctgaagtgggtaaaactgattgacaactttgaa

SEQ ID NO: 639289 - DNA, 82 bp, Homo sapiens
cccaaatccaaatggatgaatgtagaccatcccattcatctaggaggtcaccatcagaaaagctaagtttgctgtatagtga

SEQ ID NO: 639290 - DNA, 75 bp, Homo sapiens
gcctagaatgcatcagtgcccttgtggcgaatggggctcacgtcgaccctggtacctgacagtgtaaagaaggag

SEQ ID NO: 639291 - DNA, 51 bp, Homo sapiens
cttatgagctgctattgaacacggcaggattcaagccaaaactcgagaatt

SEQ ID NO: 639292 - DNA, 75 bp, Homo sapiens
ggatgtagaaaatgagcagatactgaatgtaaaccctgcagcatggaggagcaggacttggagcgaaggttcgag

SEQ ID NO: 639293 - DNA, 100 bp, Homo sapiens
acaaggatggaagaggtcctatgacaggatcaaggcatttccggagagttcttttgaagtcacttcagaaggatctacatgaggaaatgaactacatcac

SEQ ID NO: 639294 - DNA, 74 bp, Homo sapiens
gctgtttggaaagacccaggagaagccgcccaaagaactgccatccagtccaatggatcagatgggcaagatga

SEQ ID NO: 639295 - DNA, 50 bp, Homo sapiens
cgccgccaccacccactccggacacaggaaacaagctcacatcttcctgt

SEQ ID NO: 639296 - DNA, 100 bp, Homo sapiens
agatgactgtcaagttttagaagagattgttgatccatttcagatacttgtggcagcaaacaaagcagttcacctctacaaactgggaaaaatgaagaca

SEQ ID NO: 639297 - DNA, 83 bp, Homo sapiens
cggtgcaccgtccgggattttatccaccggcactgccaagatcagatgcacttttgtcttcctggccagtgttttactacaat

SEQ ID NO: 639298 - DNA, 100 bp, Homo sapiens
tgagtttgcggagaggtcagtaactaaattggagaaaagcattgatgacttagaagagaaatctgacagaatattttgtggctgtggatgttaacaacat

SEQ ID NO: 639299 - DNA, 100 bp, Homo sapiens
tccctcttcttaaaattggatgccctctcaaacttccactttatccctaaaccggacctgaaggagaagaaggagaaggtggaggagaaggcaagccgga

SEQ ID NO: 639300 - DNA, 104 bp, Homo sapiens
cttgccctggtcttgctcggccgatgaagtgcagaggtttttttctggccgcattgacaggaagattgagttccccctgcctgatgaaaagacgaagaagcgca

SEQ ID NO: 639301 - DNA, 100 bp, Homo sapiens
cagctggcctccgagctgctatgggacctggaatttctcgtatgaatgacttgaccatcatccagactacacaggagtgctacctggagggtgaccagac

SEQ ID NO: 639302 - DNA, 58 bp, Homo sapiens
gtgaagatctcgaaggatttcataggaatcccagtcagaagttccagcctgccactgt

SEQ ID NO: 639303 - DNA, 80 bp, Homo sapiens
cggagcgcgacacggagactaggtggcagaccatggtgaatccgggcagcagctcgcagccgcccccggtgacggccggc

SEQ ID NO: 639304 - DNA, 100 bp, Homo sapiens
tgtgaggaactttcttccaagataatgtccagtttggaagatgaaggcttttctatactgaaacaagaatggcccaaacattggccaacttttatcagtg

SEQ ID NO: 639305 - DNA, 100 bp, Homo sapiens
gggcttgccctggtcttgctcggccgatgaagtgcagaggtttttttctggtaatttctgagcttcgggagaagttggatctgcagcattgtgttttgcc

SEQ ID NO: 639306 - DNA, 96 bp, Homo sapiens
caatgtggcctgcatcctgaccttgcccccctaccaacgccgcggctacgggaagttcctcatcgctttcagccgctacctgtctgaggaacccga

SEQ ID NO: 639307 - DNA, 98 bp, Homo sapiens
gaagagaagagggtggctaatgattaaggggagctctttgctcaggccccggtggatcagtttcctggcacagctgtggagagtgtgacggattccag

SEQ ID NO: 639308 - DNA, 90 bp, Homo sapiens
gcatctcctagtattgcatcctacagatgtgctgtaaacatcaaaagaagacggtgggatcaggagatgtccctggatggctttgtattt

SEQ ID NO: 639309 - DNA, 96 bp, Homo sapiens
cgagacatcactggctacacatttccagcaggctgcagatacgagtggacaagaaccttccctgtatactgtcaaagccatcctgattctggacaa

SEQ ID NO: 639310 - DNA, 100 bp, Homo sapiens
aaactcctggactgaaacgatcctctcatctcagcctccaaaagtgctggcattacagcttaccctcttctccacctgctccccggctgcccgcaccttc

SEQ ID NO: 639311 - DNA, 101 bp, Homo sapiens
gggtgagctcaccgcccagcccaaaccaggagattgcgagggagcgatgcggtgcagcgcgagtgatcagcagctggactgtgccttggacctaatgaggc

SEQ ID NO: 639312 - DNA, 95 bp, Homo sapiens
agaagtgccttttgcctcccaccgtgattctgaggcctccccaaccatgtgcaattccctccagaatacccatcatatagcccctgaggtggcat

SEQ ID NO: 639313 - DNA, 101 bp, Homo sapiens
ctcttcactcagtctaactcaagagtttttgaatcacacagttttaacagcattctcaatcagccaacacgttatcagaaaatatttacaccagcagctcc

SEQ ID NO: 639314 - DNA, 76 bp, Homo sapiens
atttgtttcccttagccagcccgagcaagtaaagattggtatgagggtgctggttgatgctcgagagaagcttcat

SEQ ID NO: 639315 - DNA, 100 bp, Homo sapiens
gtgaaacgtgtttcaagaccaaaaaacacaataccaggcatacatttggcagaataaatgaaccaggtggggacgcacatccgcgccaagaggaagcggg

SEQ ID NO: 639316 - DNA, 75 bp, Homo sapiens
tcacagcagtcctatgattatggaggaagtggaggaccctatagcaagtgaaaggtgtagcagtcactcggccta

SEQ ID NO: 639317 - DNA, 50 bp, Homo sapiens
ctctgtttggggagacgtccgccaaggcgtggagctatttcctatgacag

SEQ ID NO: 639318 - DNA, 51 bp, Homo sapiens
tgaagttcctactttccaactggagtctcccatcaaaggacgtgcacagcc

SEQ ID NO: 639319 - DNA, 100 bp, Homo sapiens
gaagggtgtttggggtgtgttttacaaaggtcctcatgctgataccgccagtggatgccagaatttgcagtgtggttttcgagcctgctgccgctctggc

SEQ ID NO: 639320 - DNA, 80 bp, Homo sapiens
aagccgaggcggagaagccgcgcgcgcctcagaagctcccggacgcccaggtgctgttgtcaagaccaatgccaatgcag

SEQ ID NO: 639321 - DNA, 50 bp, Homo sapiens
gttaaagtcctggagcagcagctagaagatggcgaattagaagatggtga

SEQ ID NO: 639322 - DNA, 75 bp, Homo sapiens
gcgtgaaaaccacaagcaggtccaaagagagaatcactttgggaagcagtgacatccaacctgtatcaagtcttc

SEQ ID NO: 639323 - DNA, 100 bp, Homo sapiens
cttgacgaggctgcggtgtctgctgctattctccgagcttcgcaatggtgtcctgatggcaaatttcaagggccacgcgcttccagggagtttcttcctg

SEQ ID NO: 639324 - DNA, 82 bp, Homo sapiens
ctgcggcagaagggctacgaagaagtgcttcagcgggccaggaagcgcatccaggagggtgttcctgaaaagccccatagtg

SEQ ID NO: 639325 - DNA, 99 bp, Homo sapiens
ctcaccctctgggtcatcgaccaaggtaaatatggacagctgggccacgaggacaccaccagcttggatcggcctcgccgtgtggaatactttgtagat

SEQ ID NO: 639326 - DNA, 90 bp, Homo sapiens
ttcatgcttgcgaaggctgtaagtccaatggatgggaccccaatgaaatgttcaagttcaatgaggagaactacggtgtgaagactacct

SEQ ID NO: 639327 - DNA, 96 bp, Homo sapiens
tcaccattgacagcagctatgacattgccaagatatcccagagagaagatgactgaggaggaggtggagaccgttctggcaggacacgaggacagc

SEQ ID NO: 639328 - DNA, 49 bp, Homo sapiens
tggaaagctttaggagttcacagtgtccacgtgaacttgctgctcctgg

SEQ ID NO: 639329 - DNA, 95 bp, Homo sapiens
ctacttttgggttacaaaaatccagaccagcggatctgaaaagaacaattgctgtccttctggatgacattttgcaacgattggtgaagctggag

SEQ ID NO: 639330 - DNA, 100 bp, Homo sapiens
cgcgcctagccggctcgcgagatttgcagatttacagaatggctgcacattaatggaaagagaagcataaacctatcttctttcattatggagggaggtt

SEQ ID NO: 639331 - DNA, 100 bp, Homo sapiens
gttgacaaggcactgctttttcatgacggtggatccataaagaacccagccaacccgcagagggaggggaggggctgagctgtgaggagagcggggccca

SEQ ID NO: 639332 - DNA, 100 bp, Homo sapiens
gggaggactggggaagactgtgaggcaggttgcacctgtctaactatgacagggatcatagcaggttgcttaatgatacagcaggatcctggcttccaga

SEQ ID NO: 639333 - DNA, 75 bp, Homo sapiens
cgggacaccccggaagctgggaaatgaatagcctaacatggcagaccagagacagcgctcactgtctacctctgg

SEQ ID NO: 639334 - DNA, 75 bp, Homo sapiens
tgggggaacccatcacactttttggagagggtcctgctgaaagaagagaaagaattatatccagatcgagagaca

SEQ ID NO: 639335 - DNA, 100 bp, Homo sapiens
agagaggcaccgggatcgtgaccgagaccgtgaccgagagcgtgaccgagagcgcgaatatcgtcatcgttagaaggtgtcacctggggcccagtgacag

SEQ ID NO: 639336 - DNA, 74 bp, Homo sapiens
aaaaaagtaaactacttgaaaaatttagccttgttcaaaaagagatcgttaactgaagacaatatgcaaaattc

SEQ ID NO: 639337 - DNA, 75 bp, Homo sapiens
ccggcactggctcttcagtcccttcaagaatcagagatcattgatttcttcctgggggcctctctcaaggatgag

SEQ ID NO: 639338 - DNA, 76 bp, Homo sapiens
ctcagagctaggaaaaaagctgaaggcaactatggatgctgggaaactggatagtaatgatgacactgaagatgtt

SEQ ID NO: 639339 - DNA, 100 bp, Homo sapiens
gtccgacacctgccgcagaacagggagctctttctgacagctggaggcgccggcggccttcacctctggaagtaacatatctgaagagatggattaagaa

SEQ ID NO: 639340 - DNA, 98 bp, Homo sapiens
ggccgtgtcagtttggggcatctccgcggtccggcccggggccccgggatctcggctgtccttcctcccgtctaaggttgtgggtgacagagagaacg

SEQ ID NO: 639341 - DNA, 75 bp, Homo sapiens
tgaaaaggcaccaggaaaagagagagggagagaagagttcacagcagtgagatgaacccggtacctcagatggaa

SEQ ID NO: 639342 - DNA, 83 bp, Homo sapiens
cacagcctagcagtcgggaccgtactgagggggatatgagactttctactcggaatatcctgagtgttgcgtggatgtaaaac

SEQ ID NO: 639343 - DNA, 100 bp, Homo sapiens
ctgaggcggccaccgcgactccggctctgcgctcggctgcctgacttcttcctgctgctgcttttcaggggtgtgggccatgtttgaggattgccccagc

SEQ ID NO: 639344 - DNA, 100 bp, Homo sapiens
caggaaggacgaccgcacgggcaccggcaccctgtcggtattcggcatgcaggcgcgctacagcctgagagatgttccaggtcatccagccagagcgtgc

SEQ ID NO: 639345 - DNA, 98 bp, Homo sapiens
ccgattgatacctgtgtctcctacccaaggacagggggacagggctctgtctcgcacttcccagttgactatattgtggagtatgactatgatgctgt

SEQ ID NO: 639346 - DNA, 100 bp, Homo sapiens
agggaggaaggatctcaagagcaggacgaattgcatcacagagacaccaaggtgcccctgggcgctgggattgctctagcctgtaagtataatggaaaag

SEQ ID NO: 639347 - DNA, 95 bp, Homo sapiens
gtacccaccaggccgattatgtccattgttctcttggagcagctggtcatcatgacgtgaagccctccaatatgctagtaaacacaagaggacag

SEQ ID NO: 639348 - DNA, 50 bp, Homo sapiens
cgagaattccgcagcccacacgaatgttgtaccatctttgggtaggcaga

SEQ ID NO: 639349 - DNA, 100 bp, Homo sapiens
ttccatcgtctcgtagtccgacgcctggggcgatggatccgtttacggaggagcatctttccttgaagaagtacattattgacattgtggttgaaagtac

SEQ ID NO: 639350 - DNA, 100 bp, Homo sapiens
tccggctgcaggagaagcggcagaaggagctctggaatctcctgaagattgcttgtgaccttcgtggggatccaggcctctgaggcctccaggatggagg

SEQ ID NO: 639351 - DNA, 74 bp, Homo sapiens
acaaagatggacttctctgtacagatatggaatgtgcagatgtcccactattaactccaagcagcaaagaaatg

SEQ ID NO: 639352 - DNA, 95 bp, Homo sapiens
ccagatcttgttaagacgaactacaaccatcaccattgaatctgaaggaaaaggttccacctttgctaagagggagcactatgtctgcggaagtc

SEQ ID NO: 639353 - DNA, 75 bp, Homo sapiens
ttcgtgctgctgagctgcccaggcttcacggagcgatcaatgtccgagttaccaccatggatgcagagctggagt

SEQ ID NO: 639354 - DNA, 97 bp, Homo sapiens
gagaatgaagatttggaaatgagctttgaagattatgaaacagatgaacctgcctctccctctgaatttggaaacaaaagcaataaaatattaagtg

SEQ ID NO: 639355 - DNA, 75 bp, Homo sapiens
cactcgcactatccttgatgctagacagagattgcgaagagactgaacacaattttagcacagatcatgcctttc

SEQ ID NO: 639356 - DNA, 90 bp, Homo sapiens
ctcggagaagttggtgttccgaggccacgagtgggcaggagcttgcaggtcccctgcctgtgcccttcaccaatggggagatacagaagg

SEQ ID NO: 639357 - DNA, 128 bp, Homo sapiens
ctgtcctgccggagccgctgtgtgcaaagttcctattgatggtccccccatagaagctgtgctgaatggtttggtggccactgaggtgttgatgtggttttatgtcggagagattataggcaagcggg

SEQ ID NO: 639358 - DNA, 84 bp, Homo sapiens
ggagaacctcagtctgacgacattgaagctagccgaatgtactccaaagattcaggtttactcacgtcatccagcagagaatgg

SEQ ID NO: 639359 - DNA, 87 bp, Homo sapiens
cgagagagcgggagcctcgctggtccccatttcagcctgaactctttgcttccggaatccgggattgttgctgacatagaattagaa

SEQ ID NO: 639360 - DNA, 82 bp, Homo sapiens
cggcggtctgataggctacatcgcggcatgagatgaagctgtgacagtctagtatagagatggattaacagtaggaagagtt

SEQ ID NO: 639361 - DNA, 100 bp, Homo sapiens
atcagccccaaacaggacgaaggcgtgctgaaggtcaacattggcatcctcatcgctgtgaccagagtcatctcacagatcagcgccgacaactacaaga

SEQ ID NO: 639362 - DNA, 76 bp, Homo sapiens
accttgcaacttacatggaaagcatgagactatatgctagagatggactcaccctgtcacccaggttggactgcac

SEQ ID NO: 639363 - DNA, 75 bp, Homo sapiens
ggggccccagcagcccccgaaggccctatcaggacatggagtatgaaagacgcctccgatggaaccccacagggg

SEQ ID NO: 639364 - DNA, 83 bp, Homo sapiens
ccgcccgcgccggaagagccacgccggtcagaagagatcaattctacagaaatttccagtggttctgttgaggctttatggaa

SEQ ID NO: 639365 - DNA, 100 bp, Homo sapiens
gaaaagccatcgtaagagaagatctattaagtgcaaaagtttgtgacttgaagtggatacatatctgaagatgatgagaaactgaaaaagaggaaggagc

SEQ ID NO: 639366 - DNA, 60 bp, Homo sapiens
caaaatcggagacagagtattggcccaggatgttttggtgcaggagatggaagtggttaa

SEQ ID NO: 639367 - DNA, 75 bp, Homo sapiens
aaggattccaagtaactcttatttgatcccacccatgtgatgggcctgtaccctgacctgctgcccacagactac

SEQ ID NO: 639368 - DNA, 100 bp, Homo sapiens
aacaaccgaacaggacctgaaagagtattttagtacctttggagaagttcttatggtgcagatctttgaaaacaaaggtgccatgatgggctgttctaac

SEQ ID NO: 639369 - DNA, 51 bp, Homo sapiens
agcagtgaagacagcagtgatgagtctgacttaaataagctggatggattt

SEQ ID NO: 639370 - DNA, 82 bp, Homo sapiens
ggccttccagagacgcggcgcgcccgccctgcagctgcccaagcaacctgcctagagctggaacgttacctccagagcgagc

SEQ ID NO: 639371 - DNA, 97 bp, Homo sapiens
ctgcgctggcgcggcttttggcggcctttctgctcctcgcggcccaggttggcatggattacagaagctgcatcctgagacccggcggttccgagga

SEQ ID NO: 639372 - DNA, 98 bp, Homo sapiens
gctaaatgggggcctctccagggagtgctctgttcacggctccatcgctgttagcagaagctcctcctggggtagagacagatcttattgatgttgga

SEQ ID NO: 639373 - DNA, 75 bp, Homo sapiens
ggaagaggtcctatgacaggatcaagtttcttatctcagtcatcactatggtgcttctgacgttgatgactgtca

SEQ ID NO: 639374 - DNA, 75 bp, Homo sapiens
ccactgaggagccggcggccgccgaggcagctggggcgccagaccgcgaccgagaaggacatcctgctgcgacct

SEQ ID NO: 639375 - DNA, 100 bp, Homo sapiens
gacgtcttgcctgtgtcccacttgttcgcggcctataggtacgtcagcctgtcatatgcatcaacaaccatgtattttgttcgatttgtattgatttgtg

SEQ ID NO: 639376 - DNA, 96 bp, Homo sapiens
cagaatctcagaatcgggcgttgggctttgccgggtgcttcagatcaatggaattgaatgatctggcacgggaccctccagcacagtgttcagcag

SEQ ID NO: 639377 - DNA, 82 bp, Homo sapiens
taaatactactctgaggggcttagaaattaacaggggcttatttcaaaacctttgtccctcagttccaggaggcagcatttg

SEQ ID NO: 639378 - DNA, 100 bp, Homo sapiens
attttacataagaagttacctttttcagtcttgactcgtctgctgaacaaatcctctgacctcaggccggctgtgaacgtagttcctgagagatagcaaa

SEQ ID NO: 639379 - DNA, 99 bp, Homo sapiens
atcactgccctccagaacatgctacaaaactgctccaggacacaattggagaaaccggttattttaccaaagctttggaatggtgtactttcccttaag

SEQ ID NO: 639380 - DNA, 100 bp, Homo sapiens
atttttacggacccaatcatgagcactgctttaataggctgagatctgtatctgtggacctgaatgttgatccctcgcttcagattgacatacctgatgc

SEQ ID NO: 639381 - DNA, 100 bp, Homo sapiens
ggggagctgcgacgcgcaagggctgcggagccgcgggccggcgagcgcgtcgccaccatgagctcccctgaacagcagctgcagcagccatggccccgcc

SEQ ID NO: 639382 - DNA, 95 bp, Homo sapiens
agatcctgccctacacactggcctccctctaccaccgggagaagcaggacccttgaacatctgtgaagaaatgactattctgcatggaggcttct

SEQ ID NO: 639383 - DNA, 90 bp, Homo sapiens
ttagtaaaagacatacttggctaccatgtaattcagagagtccacacaccctttgaaaggcctactgaacttgacgcactggtatttggc

SEQ ID NO: 639384 - DNA, 75 bp, Homo sapiens
ccgggagatcccaggcggtgacagagtggagccatggctagagccgcggcgagtcctttgcacatgttggcaaca

SEQ ID NO: 639385 - DNA, 75 bp, Homo sapiens
ccagcgtcccagggcccaggccgagcagtgacatgaagtccgagaggagacccccctcacctgacgtgattgtgc

SEQ ID NO: 639386 - DNA, 73 bp, Homo sapiens
atttgttaaggattccaagtaactcttatttggtattgataacagaacatggcgacttgggaaatggaaagtt

SEQ ID NO: 639387 - DNA, 100 bp, Homo sapiens
agaaatttggagtgtgcgtgcgcgccgagcgggggctgttgtggttccgactataaacagtacgtgtttggcggctgggcctgggcctggtggtgtatct

SEQ ID NO: 639388 - DNA, 75 bp, Homo sapiens
ctgtcaacaaaatggtccacaaaccaagtgggcaaataatggcagttaaagtggaaaggagactatggaaccagg

SEQ ID NO: 639389 - DNA, 100 bp, Homo sapiens
cgaaagggttgtagacatggcggccatcaggtttggagactgccagggaccatgttttgcccattgactattactttccaccccagaagacctgcctgat

SEQ ID NO: 639390 - DNA, 75 bp, Homo sapiens
attgaggaggaagatcggaagcatacctggatggaggatgctgacagtgtgctgcctgtgagtaaaaacagccaa

SEQ ID NO: 639391 - DNA, 99 bp, Homo sapiens
cagccaggacccgggctccaaggccgtcgccgaccgctacgctgtctactggaacagcagcaaccccagcacctgtggaatcctctcaagaggaacagt

SEQ ID NO: 639392 - DNA, 100 bp, Homo sapiens
aaatcatttccatctttttctggatgaacctgggcggatgtcagaccagagaagagcacagaatgtaccagagagccatgtgtccttgaccggggagagc

SEQ ID NO: 639393 - DNA, 100 bp, Homo sapiens
tctatatcctttggcagctcacagagccctaatttgtttagaactgtaatatgcacagttaaaacaacttgtcctctcaggaccttttgcagttagggtt

SEQ ID NO: 639394 - DNA, 105 bp, Homo sapiens
gaaagacacacctaccaagaagccagtcaagcggccagacatggaagagaaggtgagaagttgtgaaacgctgaggctccagccctaagccagccctgctctgcc

SEQ ID NO: 639395 - DNA, 75 bp, Homo sapiens
cctggccctgggaagagaagcctagatatctgctccatttatcttaaagaaattggacagcatatgaagacagga

SEQ ID NO: 639396 - DNA, 100 bp, Homo sapiens
cacgacctcggtcgagcatgttcaccagggcccaggtcaaaatgcagatcttcgtgaaaacccttaccggcaagaccatcacccttgaggtggagcccag

SEQ ID NO: 639397 - DNA, 88 bp, Homo sapiens
ctagacccacagctgttaaagcaacaggtatctcgggggagctttgtgccttgatggatcaagttcatcatatgcagcactcaaaatg

SEQ ID NO: 639398 - DNA, 75 bp, Homo sapiens
gatcctttcatctcagcctcctcagtagctgagactacagggtcagtttgaaaaggaggatcgagctcactgtgg

SEQ ID NO: 639399 - DNA, 97 bp, Homo sapiens
aggaggccttccagctgtttgaccgaacaggcatttgatgaagcaattgctgaattggatacgctgaatgaagagtcttataaagacagcactctga

SEQ ID NO: 639400 - DNA, 96 bp, Homo sapiens
ctggacaaaatgtttggagcctggcttggagaactagacaaactcactcagctggacagtgccacatcgcttatccaggcagctaaaaacctgatg

SEQ ID NO: 639401 - DNA, 101 bp, Homo sapiens
cggaaagtggctggattggacaagcaggcaaagctgagatggcgtctcactcttgttgcccaggctggagtgcaatggtgcgatttggctcactgtggcct

SEQ ID NO: 639402 - DNA, 51 bp, Homo sapiens
tgttaagatgtgtctagagagcttacaggattcttctcatcgcagtgctcc

SEQ ID NO: 639403 - DNA, 100 bp, Homo sapiens
ggggccccagcagcccccgaaggccctatcaggacatggagtatgaaagacggtggagtcttgctctgtcgcccaggctggagtgcagtgatgcaatttc

SEQ ID NO: 639404 - DNA, 78 bp, Homo sapiens
gtcagaggctcctgtggatttggcctcgaagctgcaggaatgatgagaagacagcagctgattacaagattttaggtg

SEQ ID NO: 639405 - DNA, 100 bp, Homo sapiens
ctggcctagacctgaactcttcagataatcagagtggaggaagtacagccagcaggcatttgcacgccaaaggcaaagaagaaaaaatgtccaaatcatt

SEQ ID NO: 639406 - DNA, 83 bp, Homo sapiens
ggcctgcagcgggagctggacggcgagcgcgagcggcgcgagaaattggaggacgagtaagtcgtgaattaaattatactcgc

SEQ ID NO: 639407 - DNA, 100 bp, Homo sapiens
aaggacctctggccacccggattgttcctactgacatgaatgaccagaatctagaagagccatccagatatattgcgagcaccttatccgaaggatgttg

SEQ ID NO: 639408 - DNA, 76 bp, Homo sapiens
caccttcaaaatggagatgttgttgggcagcattcatttcctggcagtgttctcctaagtgctgtaagtggtgaag

SEQ ID NO: 639409 - DNA, 83 bp, Homo sapiens
cagccgcccgcgggccagcgcaccggtcccccagcggcagccgagcccgcccgcgcgccgcagcccctgtcaaagggaacagg

SEQ ID NO: 639410 - DNA, 83 bp, Homo sapiens
tccgttagctaattaaaacatttttcagggacgtagccatccagagggcgtctctggccgagcctctttttgtggaaaacgac

SEQ ID NO: 639411 - DNA, 82 bp, Homo sapiens
tggcagcaccttccagaccaaattgttggttatggaaacaaaggacatgctttacatcgtcactgaatttgctaaaaatgga

SEQ ID NO: 639412 - DNA, 101 bp, Homo sapiens
gcggccccgcgcagcccccggccgcagcgcaggcagcccagcagaaggacagaataacgggctcccagattcacaagccccaccaagaggatcaccccagg

SEQ ID NO: 639413 - DNA, 96 bp, Homo sapiens
aggtaaaggagtggggctgctgcagccattcagacctcaggagctggtatgactacgtggaagtcttcgatggagaaaatgaaaatggacatttta

SEQ ID NO: 639414 - DNA, 83 bp, Homo sapiens
gcacacacgggactccgaagcccagcggctccccgactccttcaaggcttgatggaccagacaaataggatgatggctgcccc

SEQ ID NO: 639415 - DNA, 90 bp, Homo sapiens
ggcgtcggccacgagagagcgggagcctcgctggtccccatttcagggcgggcaggtccggacgcgctgggccctggtcccttcggccgc

SEQ ID NO: 639416 - DNA, 96 bp, Homo sapiens
ggaacctctcctaaaattctcatggcctgatatgaaggagtcacgcctcccgcctcccggagctgcccagtggctgccttgtccttcaagtgcagg

SEQ ID NO: 639417 - DNA, 83 bp, Homo sapiens
ctgcttacaagcataatactcaccctactattgagtgggacacagcaggccaggaaagatttcgaacaatcacctccagttat

SEQ ID NO: 639418 - DNA, 82 bp, Homo sapiens
ctgagcccgccgtctacccgtggccgctgccggtctacgtgtcgtgaaaactacccctaaaagccaaaatgggaaaggaaaa

SEQ ID NO: 639419 - DNA, 90 bp, Homo sapiens
gattcgcagtggtcgcttcttctccttggttttttgcatgtctgacacccatgactccacctggaccttatggctccacccagaagcaat

SEQ ID NO: 639420 - DNA, 75 bp, Homo sapiens
tctccttcaagtacttggcagatcactctcttagcaggttatcaatactctggctgaccatcatcatcgtgggac

SEQ ID NO: 639421 - DNA, 74 bp, Homo sapiens
gaggatcggcacgggagcatggcagccaacgtctcggccgaatttgccacatacctgaatttctgccgttcctt

SEQ ID NO: 639422 - DNA, 75 bp, Homo sapiens
cgtggattccaaatacaggagaaatggcattggcactaaggtaaagtcaataagaacacagactgacttctatgc

SEQ ID NO: 639423 - DNA, 74 bp, Homo sapiens
aggaacgagctgagctggcagagtcgataaaattgtccatggaccacgtgtgccttggtcactactgaagagct

SEQ ID NO: 639424 - DNA, 75 bp, Homo sapiens
cttaaaagatgccacctctaaggcaaatgaagatgtgacacagattgtggagattctccattctggacctagtaa

SEQ ID NO: 639425 - DNA, 100 bp, Homo sapiens
gagaggcacccctgggttgcagagaacacagacgtctcgaagggacagagaaggacgcaccattatgactcttctacaaaagtggacattaaggagacct

SEQ ID NO: 639426 - DNA, 100 bp, Homo sapiens
gtctggttgccttagtgagggcctccataactgatccaggaagactccctgagaaccccaagatcccacatggagattctggacaatcaggaagtccaag

SEQ ID NO: 639427 - DNA, 80 bp, Homo sapiens
gcctcccgggcggattccagccccgagcgggacagcgcggcggggagcgacgagccaagtcatcaaggcatgggacattg

SEQ ID NO: 639428 - DNA, 100 bp, Homo sapiens
aacctctcccagcagctgggactaccgggctgtcaaatttacattaactatgagaattaagcagagacagaagagatgggtgatgaagaagttttctcct

SEQ ID NO: 639429 - DNA, 100 bp, Homo sapiens
agaccgaaaagaagatgatacaaatgaatttgttagtgctgtgtgctggagggcactaccagatgggaccttttcacagatgctgctgagactgaaaaaa

SEQ ID NO: 639430 - DNA, 90 bp, Homo sapiens
atctggaagcgattcaagccaagctgaccaagaagccaaagaactggctaggcaaataagctttaagtcttcccaagggattgttgaaga

SEQ ID NO: 639431 - DNA, 74 bp, Homo sapiens
ggcgatgtcgcaagcagcttcattgacttcctgcccctaaaatgggaagagacctgggaaattaagtttcttgc

SEQ ID NO: 639432 - DNA, 101 bp, Homo sapiens
ggggtgtgcaaacccgagagaactgggcattaattcatggactaaacagacattattactccattactattaactatcggaaaaatgaactggaacagaag

SEQ ID NO: 639433 - DNA, 100 bp, Homo sapiens
gcattaatccttaagaataaactgaaagtgcgaactgcctatccgtcattgagacttattcatgctgtcagagggtttccacttgagcggcacagtgaca

SEQ ID NO: 639434 - DNA, 100 bp, Homo sapiens
cctggatctgtatgctttgagcaagtgctcaagtaaagctctttgtgacagggcttttcagcttaaatcaagatattcctgctttcaaggaacatttaag

SEQ ID NO: 639435 - DNA, 87 bp, Homo sapiens
ttttacctcagccaccgagaaggctacggcaccatgtacatgaagacacggcttttccaggcagccggtgaaggttgtgtactcctc

SEQ ID NO: 639436 - DNA, 98 bp, Homo sapiens
ccagcgagccacgggagcgagccaggaggagatgaccgccgggttctgctatggcacatggaacaagccatccactccagggtcaagcccatacagct

SEQ ID NO: 639437 - DNA, 100 bp, Homo sapiens
gagcaaagaatgacagcaagaggcaaaacttcggacatagaggccaaccaacctttggaggctaacatttccaatgatcactggccatctttggttcaag

SEQ ID NO: 639438 - DNA, 100 bp, Homo sapiens
gcagaggatgatgagggcttcagtgcagacgcagtggtggccctggagcagtatgccagcaagaccacacctgtgacaatgcaggttggagaaggtcagc

SEQ ID NO: 639439 - DNA, 90 bp, Homo sapiens
gccccgggcccgcccgcccgcatccaggtgtctcccagtctgctaaagccctaaggccatcaccatggacttccagcatcgccccggggg

SEQ ID NO: 639440 - DNA, 101 bp, Homo sapiens
gagtttccgatttaaagctgagctgcgaggaaaatggcggcgggagatcttatgccttcattcatccggcatggtccaacaattccaagacgaactgatat

SEQ ID NO: 639441 - DNA, 83 bp, Homo sapiens
ctttcgcagattttctccgatgagaacaaccacctcagcagcagagagattcttttccagatcctctggaccttctccatcta

SEQ ID NO: 639442 - DNA, 100 bp, Homo sapiens
gaggccaatgatgggagaccaccgggatgggcagcacagtagacgacaaccccgacttcgacaacctcgacatcgtggcacgggatgaggaggagaggta

SEQ ID NO: 639443 - DNA, 100 bp, Homo sapiens
gcaatacttactgcactgctaaaaggcctgttgattgcatactgtagaagatttgatgttcagactggttcttcttacatatactatgtttcgtctacag

SEQ ID NO: 639444 - DNA, 90 bp, Homo sapiens
gcgcctcgtcgacatgagtgatgtggaggaaaacaacttcgagggcagaatggcagaaacggtggacacaagcgaaatggtcaacggcgc

SEQ ID NO: 639445 - DNA, 90 bp, Homo sapiens
aataaagccaagctcatctctgagacccggaggaggttcgaagctgagtatgtgacagttggtagctggcagtgttgtgatggcttttga

SEQ ID NO: 639446 - DNA, 77 bp, Homo sapiens
aaccagcccaagctacaaaagtggtgagtgctccaagctcccgaagccgaagtctcactttgctcccacatggaaca

SEQ ID NO: 639447 - DNA, 75 bp, Homo sapiens
cggacggaagaaaaggtctggccgagagtgtgcaccccagattccttgtagtactcctattgctactgaaaggac

SEQ ID NO: 639448 - DNA, 83 bp, Homo sapiens
gttgaactctcagtggtcctacctggggatattatcaaatctactactgttcatggcagtcactgtgtgcccagtattctgca

SEQ ID NO: 639449 - DNA, 50 bp, Homo sapiens
gtctctgttggtgtagaagccaaaatcagattgactttgaagatgtgatt

SEQ ID NO: 639450 - DNA, 88 bp, Homo sapiens
acaggctataattggagcacgatgtccatgaggagccccatctctgcccagctggccctggatggcgttggcaccatggtgaactgca

SEQ ID NO: 639451 - DNA, 90 bp, Homo sapiens
cataccagagaattatgatcaacttcaaccctcacttcgatttggaggacagagactgcaagaagtactgtgagagtcttgcctgttgcc

SEQ ID NO: 639452 - DNA, 50 bp, Homo sapiens
ctgaccgctgccgcccagcacgtccagtactatactggcaattgctggag

SEQ ID NO: 639453 - DNA, 90 bp, Homo sapiens
cgcgaggcttcggccaagctaaccacgctggtggatgccgacgccgaggccttcaccgcctacctgacctgcctagagctggaacgttac

SEQ ID NO: 639454 - DNA, 82 bp, Homo sapiens
cagcaccgcagccttgggcctcgcgccggctatggccgtgccctggggctgagccctcagatacactggcagtgatgtctgt

SEQ ID NO: 639455 - DNA, 90 bp, Homo sapiens
gaagatggcgcctgttgtgacagggtacagcagggaagaactggaaactcagagaaagaaactgcccttccatctacaaaagctgagttt

SEQ ID NO: 639456 - DNA, 75 bp, Homo sapiens
ggtggttaaacttcgcaaaatggaacacgatgaacctattctgaagcacttgaaagatattaaagtgaagttctc

SEQ ID NO: 639457 - DNA, 100 bp, Homo sapiens
caggctgttcaaggtgaaggattcatgagtctatataaaggctttttaccatcttggctgagaatggatttcaaatatgcgtgcattagagaatgatttt

SEQ ID NO: 639458 - DNA, 74 bp, Homo sapiens
ctgtgtgacaccaagataagtaacgttattgttgtgggtaatccagccaataccaactgcctgactgcttccaa

SEQ ID NO: 639459 - DNA, 98 bp, Homo sapiens
ccgactgggagcagaggaagccttgaggacctactcacagataggaattgaagatgacatcatggattcatcccttacccgccggggacagatctgct

SEQ ID NO: 639460 - DNA, 97 bp, Homo sapiens
taaagaacggcagtttgaatcggtgctgaacagagccctatgagtttgtctctctggaatggctgcaaaagtggttggatgaatcaacacctaccaa

SEQ ID NO: 639461 - DNA, 75 bp, Homo sapiens
aaggagagaaaatggcgtccacggaaaagaatttctgcttggacactgcatagctgctgggaaaatgaacatcag

SEQ ID NO: 639462 - DNA, 82 bp, Homo sapiens
cgccaaacgaagtcgtggaggtggcgaaacgaggaggagataacgcggccttgggctctgatcagcattgtggagctagaga

SEQ ID NO: 639463 - DNA, 75 bp, Homo sapiens
gccagggtccctgaagagggaagacacgcggaaacaggttgcccccaagtttcctggcagtgtgtgatactgagg

SEQ ID NO: 639464 - DNA, 75 bp, Homo sapiens
cggagcgccccttcgcgtcccctgcaccatgagctggggcaccgagctctgggccctgctgctcctgggggccgc

SEQ ID NO: 639465 - DNA, 83 bp, Homo sapiens
tatcaagtaatggtgcaaagcctgaacacctgctgaagtgcagctttgacgtggtcaagcgctgggtgaatgaggctcaggag

SEQ ID NO: 639466 - DNA, 85 bp, Homo sapiens
ggccactccagtcggtgttgagcacggcgagcagtctcaggcctttagtgatgatgtgatgatggccaaagagaagccaccgata

SEQ ID NO: 639467 - DNA, 106 bp, Homo sapiens
cccgccggtggacgacccccagagcggggagctgccctcagagaggtggaaccccacgcagaacgtcagggtttccaggcctgaggtgcccgccctggccccagga

SEQ ID NO: 639468 - DNA, 76 bp, Homo sapiens
attggccagaggaatagagagtagaatggatcttggagaatgtctgaaagtccatgacctggctttaagagcggat

SEQ ID NO: 639469 - DNA, 83 bp, Homo sapiens
tgacagacttggacaacatgtcccaacattacatcccacttggatttacactgggcaacgtggttggaatgtatctggctcag

SEQ ID NO: 639470 - DNA, 85 bp, Homo sapiens
gaaggctgctgccgccggacgcctccattgtttgaccacaacaagggccggattctcacccagatgccatggacaatattaccag

SEQ ID NO: 639471 - DNA, 75 bp, Homo sapiens
cgtttgtatagggatgtgatgttagagaactatggaaacctggtctccttggtggacattcttacgtatgttacc

SEQ ID NO: 639472 - DNA, 101 bp, Homo sapiens
gtactccagttgctggatatccaagcctctcagcttcggagaatggagtcttccatcaatcatatctcacagaaacttacagcctatttagatcttaacct

SEQ ID NO: 639473 - DNA, 100 bp, Homo sapiens
cgctacagtgagggtttggagaagctgaaggacatgaaagtgctgtacaccaaccgagcccaggctaacagagaccctgatgctggaattgatgaagctc

SEQ ID NO: 639474 - DNA, 100 bp, Homo sapiens
acgcggcggcgcggctgccggctggatgggaagttaatgtttacggcgaagtctactcaacgtttccaaggcttgggcactgtttaaaggaaagttccga

SEQ ID NO: 639475 - DNA, 78 bp, Homo sapiens
gaagcctggatgaaatagatctctcggctctgaggacgcaggaggagggagacgcactgatgacatcgggccgctcct

SEQ ID NO: 639476 - DNA, 82 bp, Homo sapiens
gcagccaccaacgcgcacgggcgccacgcgcggcgcatcacggtgcgcgtggccggtgagaagccctaccactgcaactggg

SEQ ID NO: 639477 - DNA, 76 bp, Homo sapiens
gacgctgctcttcaaagcgatccacaatctgttagaaagaatgaaatgaatgatgtgcctttctttgatatccaac

SEQ ID NO: 639478 - DNA, 83 bp, Homo sapiens
gaggaggggctctttgtcatccatctgcgcagcaacgcaagagtgagccatggagctacgtgtggggaacaagtaccgcctgg

SEQ ID NO: 639479 - DNA, 100 bp, Homo sapiens
cgtggttgcggcgcgggaagtttggatcctggttccgtccgctaggagtctgcgtgcgaggaatcctgttcacgatgctggtatttggaccagcctgcgg

SEQ ID NO: 639480 - DNA, 76 bp, Homo sapiens
tgcccagactacgacttgtgtagcgtctgcgagggaaagggcttgcaccgggggtaagcggaagggtacagccaat

SEQ ID NO: 639481 - DNA, 100 bp, Homo sapiens
aactcagttgtgcgttgcggccagtcgccactgctatcgggagcggtgccgagaaaaatttccttactagatgacatttcatcgcaatgtccgatcgttt

SEQ ID NO: 639482 - DNA, 82 bp, Homo sapiens
tttcatcctcaaaggaatcatcaaaagaaaattcactgagtaatctttttaccagtgcacatgaacttgaacagatgcagct

SEQ ID NO: 639483 - DNA, 100 bp, Homo sapiens
tagagctggaattaggcaaatatggacaggtggtggaagatggatatgaattttttgctaaacgacagttggtaaccttattttcagccccaaattactg

SEQ ID NO: 639484 - DNA, 100 bp, Homo sapiens
ggcagccattgaacgggagtatgggcagccacccgctgccccgacgagtcggaactataccgagatccgggagaagctccgctcgaggctgaccaggcgg

SEQ ID NO: 639485 - DNA, 49 bp, Homo sapiens
ctgccaacctggattctgaggccaagcgacatatgcagctgctgttttg

SEQ ID NO: 639486 - DNA, 83 bp, Homo sapiens
catgtttgaagtgtgttttgagagcaagggaactgtggctgcaccatctgtcttcatcttcccgccatctgatgagcagttga

SEQ ID NO: 639487 - DNA, 75 bp, Homo sapiens
cagcctccgcggaggagcagaagcttcctgcctgacacagctcacttcaagaagtgcacaatgtcagaacgtgga

SEQ ID NO: 639488 - DNA, 90 bp, Homo sapiens
cttggccagcgacagatcctttgctgctctgtctgccggttcttgagtatctccagatgaaatggccactgcttgatgtccaggcaggga

SEQ ID NO: 639489 - DNA, 83 bp, Homo sapiens
tgggactcggccagctggacacaggctgtttgatgaagacaatccagtacacaagtctggaaccagatacatgttcacaacag

SEQ ID NO: 639490 - DNA, 98 bp, Homo sapiens
cccggatgatgaggccagtgagtgatcaagtgatacagaaggtggtcatggcactaggagactacatgggcgcctcctgtcacgcctgtatcgggggc

SEQ ID NO: 639491 - DNA, 100 bp, Homo sapiens
caaaccagtagagaccccacctgaacagaatggcaccctcacctcccagcccaacaacaggccagtgacatatcaggcatttcgggaatgtacactggag

SEQ ID NO: 639492 - DNA, 101 bp, Homo sapiens
gggttttctcccaacgtcaggcccgatggctcggcttccccaggtgcaatggatgagcttcatagtctggatccaagaaggcaagagttattggaagctag

SEQ ID NO: 639493 - DNA, 83 bp, Homo sapiens
tctctcctctggcaggatgaggcgtgcaggcctgggatgaatttcatcctttcatcgaagcacttctgccccacgtccgagcc

SEQ ID NO: 639494 - DNA, 82 bp, Homo sapiens
ggccgggcgacctgggcaccagcaggacccgaggccaggagccaggggcccagaagtacctggagtagaacagaaaaattat

SEQ ID NO: 639495 - DNA, 96 bp, Homo sapiens
gggaagcacagatgtggaaagtgaatgtgcggaaaatgccttcaaatcagaaagctaccctggttgaccatgggatccggcgccttactttcctgg

SEQ ID NO: 639496 - DNA, 100 bp, Homo sapiens
gttctacccaagcaaatttgtccttatcaccgacatacttgatacatttggttgatggacggatggctacatggatgtgatggagatggtttactatcgg

SEQ ID NO: 639497 - DNA, 75 bp, Homo sapiens
gagacaggaggcagtagccaaacacccagcctctgaagagccaatccattcaggatgggaaaccacgcaggcaaa

SEQ ID NO: 639498 - DNA, 100 bp, Homo sapiens
ttccagtacccccttgccatggcagcaaatacctggagtagaacagaaaaattattatgtctgtgttcccttgggactcattggaaattgtacagtgaca

SEQ ID NO: 639499 - DNA, 120 bp, Homo sapiens
cagaggaatagaaactttggaatctgtacccattattggtggtttttgggagactatctttggcaacaggatgcctggtgtgcaggagtatatacaacagcctattctcaatggtctgcg

SEQ ID NO: 639500 - DNA, 96 bp, Homo sapiens
gcaggggccggagggcccacaacccgcagagacttctactggctgcgctcctttctggccggagatgagccccgctagggccgccccgcgctgaga

SEQ ID NO: 639501 - DNA, 98 bp, Homo sapiens
gccccctcccggggctgaccgcgtcgtcaaagctactctcctctgcaaggcctaccgtgggggccacttaaccatccgccttgccctgggtggctgca

SEQ ID NO: 639502 - DNA, 50 bp, Homo sapiens
gattgtcagcaaaggaagagatggacagtcttgcactgtttcctaggctg

SEQ ID NO: 639503 - DNA, 135 bp, Homo sapiens
ccgaactggccagactcctggagatcgacccgtacttgaagccctacgccgtggacttccagcgcaggaagtgtttggattgtgagctatttcagaactgttctcaggactcattattttaacatttgggagaaa

SEQ ID NO: 639504 - DNA, 95 bp, Homo sapiens
gaaggctccaaatccttagctcagagctggaggatgaaggatcgggaagcaatagaggcttttaatgctcctaatagtagcaaattcatctttat

SEQ ID NO: 639505 - DNA, 100 bp, Homo sapiens
gtctgaagttcacgactactagaaggggaggggagtggaaaggctctcagtgaaaaaggagccaagccgccatggcctaccacagcttcctggtggagcc

SEQ ID NO: 639506 - DNA, 82 bp, Homo sapiens
gaattaaatgcccacataaaactttctaatttgtacaagaaccatatttatttagagtcagaatggagcgatttgtagtaac

SEQ ID NO: 639507 - DNA, 83 bp, Homo sapiens
gccgaccgcggccatcgcagttggaggctattttttgggggggacaatgcagatcttcgtgaagactctgactggtaagacca

SEQ ID NO: 639508 - DNA, 76 bp, Homo sapiens
caggcctgctgaactgggtgctttatatagggtgggtgttgggaagaataaatgtctgtatgccctggaagagggg

SEQ ID NO: 639509 - DNA, 100 bp, Homo sapiens
tgcgcgcgaaggagcggaagaatggcagtgctcaaactcaccgaccaggttgggggccgtcccgctcctaaggcaggaagatggtggccgcaaagaagac

SEQ ID NO: 639510 - DNA, 97 bp, Homo sapiens
gtcgggactcggaggaggggccaaggtgtggctcctctgaagacctgcacgagtctcggcgcggaagatggccggcggcgtggacggccccatcggg

SEQ ID NO: 639511 - DNA, 95 bp, Homo sapiens
ggcggcgaagagcccgccctgtcccagtaccaggaatctgtcttgaactatcgtttcgatcctctcggcattgttgatggttttactgccgaggt

SEQ ID NO: 639512 - DNA, 98 bp, Homo sapiens
cagcgccagcggcactggctccgccgcccaagatgagggcagaagtgcagttgaccaagcaggtggtgcacagattgtaattgaccatttaaggtcac

SEQ ID NO: 639513 - DNA, 90 bp, Homo sapiens
aacacctgcagtgtactggaaaggaattttcaacgtccggttcatctaatacagacactggtaaagttactgggaccttggagaccaaat

SEQ ID NO: 639514 - DNA, 98 bp, Homo sapiens
ccaaggcagacagcggcgccttcctgctgctcttcctgctcgtgctcactgtcaccgagccgctgcggccagtgaatggtagtgtctagaaagggtat

SEQ ID NO: 639515 - DNA, 108 bp, Homo sapiens
cagcttctagtgttgctttggatcttgtggaaagtcagagtgctggagaatctggtaaaagcaccattgtgaagcagatgaggatcctgcatgttaatgggtttaatg

SEQ ID NO: 639516 - DNA, 89 bp, Homo sapiens
cgctcgatccagcaccatggggaagcgggacaatcgggtggttgcacagagcattgaggatcaccatcaggaagtgattggtttctgca

SEQ ID NO: 639517 - DNA, 75 bp, Homo sapiens
gaacagataagaaaagagttgagcattaagccccatggctgggggttatggagtgatgggtgacgatggttctat

SEQ ID NO: 639518 - DNA, 75 bp, Homo sapiens
caccagctgcctgacaacgaaccatacatttttaaaggtgctggagaatctggtaaaagcaccattgtgaagcag

SEQ ID NO: 639519 - DNA, 99 bp, Homo sapiens
gcagaacgtcaacaccaagtgcatcaccatccccaggaaacccagcgtttgctggcagaaccagttcctggcatcaaagccgaaccagatgagagcaac

SEQ ID NO: 639520 - DNA, 48 bp, Homo sapiens
gcaaccacagaaacaagtggtacaggccaaacgtaccaagaaagtcgg

SEQ ID NO: 639521 - DNA, 158 bp, Homo sapiens
cgcgggagtcagtgcccctggacgaccaggagaagctgcccttcaccgttgtgcatgaaagagagattcctctgaaatcctatctcctgagctgccactttccccgtcgtccagcttatggagatgtgactgtcaccagcctccacccagggggtagt

SEQ ID NO: 639522 - DNA, 95 bp, Homo sapiens
ttatagccatgtgactgatcttcgtccaagaatatgtaaagaaaaagtgttgagttggcttttagagtcttggtgtgaggagtgtgggaatatga

SEQ ID NO: 639523 - DNA, 96 bp, Homo sapiens
aaaaccttgagaccctgagactttcagaaacttattcacagttaccaaagctgattcctctctttggtgctgacactattggccagagaagtcctg

SEQ ID NO: 639524 - DNA, 100 bp, Homo sapiens
ccgctgggcacactggcttcacgccggctccgcctcaccagcaagcgcattcccagctgtcccccagcgagcagatcacagggtagtgggcaccatcgac

SEQ ID NO: 639525 - DNA, 90 bp, Homo sapiens
attgtaacaagacgacctcttgtgctgcagcttgttacttctaaagcaggcctaagatctggcaaacttggtgaacagtgtgaagcagtt

SEQ ID NO: 639526 - DNA, 98 bp, Homo sapiens
cgagatgacgggctttctgctgccgcccgcaagcagagcctcgagcaatcactgacctgggatcacggacagatttcaagcatcaggaagaaggtggg

SEQ ID NO: 639527 - DNA, 88 bp, Homo sapiens
actccaatgggcctttccagcccgtggtccttctccatattcgaggacgtagacaagtttggcaacgagatcacccagctggcccggc

SEQ ID NO: 639528 - DNA, 100 bp, Homo sapiens
tgagcagctgcaaacccccgaaaaagttcacccatctcaggagcctggctggttggaggggactctgaacggaaagactggcctcatccctgagaattac

SEQ ID NO: 639529 - DNA, 90 bp, Homo sapiens
gacagaaaagaaagctgacttttgggattaccattttaggagatcctcaagtctatgttaacaatgaatgggcaaccagtgttggggaag

SEQ ID NO: 639530 - DNA, 100 bp, Homo sapiens
cacggctgccagcgcgtcaagtatggccagtgctgggtcttcgccgccgtggcctgcacagaggcggggtttcaccatgttgcccagactggtcttgaac

SEQ ID NO: 639531 - DNA, 100 bp, Homo sapiens
cgagcaggtggtggagcggctgctggaaacgcaagacggtgccgagaagcagctgcgagttttccacctatttccctggatattttgatggtcagtactg

SEQ ID NO: 639532 - DNA, 106 bp, Homo sapiens
gcaagaacctgctatcagactgctctgtcgtctctacctccctagaggacaagcagcaggaacaagagttgaatgctcgagcccgggccctccaagctgcatctgc

SEQ ID NO: 639533 - DNA, 96 bp, Homo sapiens
ggacttctcacccccaggatgtcatcgaggtgtcctgctctgtcatccaggttgaagtgcagtgggcgatcatggctcacggcagcctcgacctcc

SEQ ID NO: 639534 - DNA, 101 bp, Homo sapiens
gagaagtgtatatcaagccacaatttccatcaaaaagtgattaagcagagaatggagaagaaggttgattccagggagaagatgtcaaccggacactagaa

SEQ ID NO: 639535 - DNA, 100 bp, Homo sapiens
acgtgttcaatacacctcccacctgtcctcaggcatatcaaagtaataaaagactagtggccttagtgcccatgcccagtgaccctccattcaatacccg

SEQ ID NO: 639536 - DNA, 75 bp, Homo sapiens
cggatgagtacgataccgaagcgggctgtgtgccccttctccacccagagtgactaggtctcattgtgttgtcca

SEQ ID NO: 639537 - DNA, 97 bp, Homo sapiens
gagcttccagccagagggggccgacactactgtgtcggatgaactggacctcacagacaaacacagagaagccatgtttgcacttccagctgagaaa

SEQ ID NO: 639538 - DNA, 100 bp, Homo sapiens
gaacaaaattgtatctgtttttctcagaagagaattccacaaggatttaggtcctgaatatgaaggtatatttaacacttcattgcagtggatcttagaa

SEQ ID NO: 639539 - DNA, 75 bp, Homo sapiens
agatacatgcagaaggtgaaaaacccacctgatgagacctgtcgcgaaatcgcctttcagaaattcctatagaag

SEQ ID NO: 639540 - DNA, 97 bp, Homo sapiens
gagcctcagcatcctgctggccggatcgtgtgccctgaggaaccgcactgcggatcaaaaggtgcctggcccatgttgcagggggccgtggagccca

SEQ ID NO: 639541 - DNA, 100 bp, Homo sapiens
gcaggtcatgaccgactttgccatccagttcaaccgcaacagcaggttcaggagaagtggcacctggtggaggacctgtcgcgactgctgccggagccag

SEQ ID NO: 639542 - DNA, 83 bp, Homo sapiens
ggagccaccagcctctccttgattatgtctactttgagaattcctccagcaacccatacctaataagaaggatagaagaactc

SEQ ID NO: 639543 - DNA, 87 bp, Homo sapiens
cggtcctgtttcgacagcgaacatgtcgcggcctgtcaggtgatgatgaacagtctacacagatggctgcaagttgggaagatgata

SEQ ID NO: 639544 - DNA, 50 bp, Homo sapiens
gacaagtttggatcctgtgttccccactccgccgtggtcatggaggaggg

SEQ ID NO: 639545 - DNA, 95 bp, Homo sapiens
aaaaatggtgaagaaaacaaagatgatgataatgttttcagcagcaatttgccctcagaggaagcccttagtgtatacaaggaagcaattcagaa

SEQ ID NO: 639546 - DNA, 103 bp, Homo sapiens
gacatacttgaccggggtcatcctagggaaaacactatcctctgagatcccagatcatgaggacctgagagtcagtatactaagactgcccaggagattgtga

SEQ ID NO: 639547 - DNA, 101 bp, Homo sapiens
gccaaacttcaggattatcgacaagcagaggtggataagattgtggaccagctgcagcagttaatgcaggtgtatgacttggctgcccttcgggattattg

SEQ ID NO: 639548 - DNA, 90 bp, Homo sapiens
gcagcggcgccgaggacagtgcagccgagttgcgtctccctcgcgcgagatccacattgtttgaagttattgtgagtgcctcgaggacca

SEQ ID NO: 639549 - DNA, 120 bp, Homo sapiens
aatactttgcacttttgattgtgtattatggataccaaggaagagaagaaggaacggaaacaaagttattttgctcggaaagttatatcacagatgatattggaatatcgacttggaagg

SEQ ID NO: 639550 - DNA, 90 bp, Homo sapiens
gctctgagctttggctttggaatgtacaagcacgtgtggttctcaaatataggcattctgatgggaacttgtgtgttaaagtaacagatg

SEQ ID NO: 639551 - DNA, 80 bp, Homo sapiens
cgagtccccactccggagtcgccgctgccgcggggacatggtcctctgcgttcagggaaccgggctgtgggtcggcccaa

SEQ ID NO: 639552 - DNA, 51 bp, Homo sapiens
tcgcagtggtcgcttcttctccttggtggttaccctaacagctaatgataa

SEQ ID NO: 639553 - DNA, 96 bp, Homo sapiens
agtgaagctcttcatctgtgagctggtcatggccctggactacctgcagaaccagcgcatcattcacagtgtatcctactcagtacatgtatctga

SEQ ID NO: 639554 - DNA, 80 bp, Homo sapiens
cttcgccttcgtgcgcttcgaggacccccgggcgtgatggtgggcatgggtcagaaggattcctatgtgggcgacgaggc

SEQ ID NO: 639555 - DNA, 137 bp, Homo sapiens
cagccatcaggtaggctgcgttgaggatctttgctcttccatccgcctttgatcgtcttcctcttcagccatccaggcagtgtcatcattaggctgtctttgtgccttaacagtattgatcaggtattgtaatagag

SEQ ID NO: 639556 - DNA, 74 bp, Homo sapiens
ccaacctcatagggcaccaagcaaggaagaagggcttttttccagacttcaagctcccattccaacagtaagag

SEQ ID NO: 639557 - DNA, 100 bp, Homo sapiens
cataatgatgccaaatatgaataacgacccatacatgtcaaatggatctctttctccacccatcccgagaacagatttgtacacacagatatgacgaaag

SEQ ID NO: 639558 - DNA, 100 bp, Homo sapiens
tcaccttcgtggtcgtctggtcctactacgcgtacgtggtggagctctgcgtgtgtggtattcacagccaacgactccggcccccgccgctacaccattg

SEQ ID NO: 639559 - DNA, 75 bp, Homo sapiens
ttcgctgcgatgcctgtataacccagggactggcgcactcacagctttccagcttcagtatcagacacagcacag

SEQ ID NO: 639560 - DNA, 50 bp, Homo sapiens
caggatattcctcatgacattgctgtctgaagcggagggtgctgctcaac

SEQ ID NO: 639561 - DNA, 140 bp, Homo sapiens
aggtgcgcccgccaggtgagcgcgctccctggcaccgttggcccccggagggtcgggcccagttgcggcgagcgggtcaaaatgcagatcttcgtgaaaacccttaccggcaagaccatcacccttgaggtggagcccag

SEQ ID NO: 639562 - DNA, 82 bp, Homo sapiens
tctgtgacagtaacagtacttgggatcccccagttccaaagtgtcttaaaggttctctacttaaaagacaatgactactgat

SEQ ID NO: 639563 - DNA, 90 bp, Homo sapiens
gttaaacaattggataatatcttggctgctgtacatgacgtgcttaatgaaaggatccctacaataatattgtccgtactgcaatagaag

SEQ ID NO: 639564 - DNA, 73 bp, Homo sapiens
gggatgtcgtctcagcagtgctcgggcgcagatcccaaggtccccttcagttggtcacaagaggaaatttctg

SEQ ID NO: 639565 - DNA, 100 bp, Homo sapiens
gccagagtttccgcacccgggagggagatgcggccggggctcaggctccttgcagagcatcctggccagaacaagccaaggagccaagacgagagggaca

SEQ ID NO: 639566 - DNA, 100 bp, Homo sapiens
ctgcttactacacagttggactctcttgaaagacttataaaaggaaattcggcgccttcatcagtatgtgaaatttgctgtccaagatgtgaatgatgtt

SEQ ID NO: 639567 - DNA, 87 bp, Homo sapiens
cctggctcccttctgccccagctccgtctcggcggcggcggggcttcataaacttcacttaccaaatacttcaagggattcagaaac

SEQ ID NO: 639568 - DNA, 75 bp, Homo sapiens
ggcgagggcatggacgagatggagttcaccgaggtatgctgccccacaaaaccaagcgaggccaggccgctctgg

SEQ ID NO: 639569 - DNA, 51 bp, Homo sapiens
ccacgactttctgggagactcaggctgacccgcggctgattgagtccctct

SEQ ID NO: 639570 - DNA, 83 bp, Homo sapiens
ttctggcaaacagtgtttgcctctggttcagctcatacaacagcttcttaggatgaccatgaaagctgtggttctaattctac

SEQ ID NO: 639571 - DNA, 74 bp, Homo sapiens
gggtcccagtggagaggcctcaccatgtagttatgaagttcatggaatggaaaaaataccagaagatggaccag

SEQ ID NO: 639572 - DNA, 90 bp, Homo sapiens
aacatcaccaggatggggctaacaaacttcaccctcaactacctcagggtctcctctgagcctccggcctccataagacccaaaacagat

SEQ ID NO: 639573 - DNA, 75 bp, Homo sapiens
ctgccctgagacggtgtcccgccgaaagggacaagaatccttcaagaaacaggaaaaaactcctaaaacaccaaa

SEQ ID NO: 639574 - DNA, 100 bp, Homo sapiens
ggcccacgactctgaccagcacccacactcaggctctggccgcagtgtcctgtcattcgagtcaggttctggggctgctggtatggacgcttattgctgg

SEQ ID NO: 639575 - DNA, 74 bp, Homo sapiens
gtctcacttcgctcctgggcagctgcgcggagaactggggaacaagcacatcatgattgacttggggactggca

SEQ ID NO: 639576 - DNA, 96 bp, Homo sapiens
accacttgtgctaccatctgtcaaaactttggatggccctactttcagagacacctctgactctgtcacagctctgcagggtgaacttgaggaagg

SEQ ID NO: 639577 - DNA, 80 bp, Homo sapiens
agaaaagaaagacagaaaaatagagcctctattaatggacacttctataaccatgaacgtttttgccggttgtcaaatcc

SEQ ID NO: 639578 - DNA, 100 bp, Homo sapiens
ccaacttccaacaagatgtgggcacaaaaactaccattcgcctgatgaactctcaggcatttatgtttgaatcatctttaagtctggcggtcacaaagtg

SEQ ID NO: 639579 - DNA, 75 bp, Homo sapiens
gacgcggtgggccgcccctccggttagcatggcctcattgaaagaactagatcaaagactctttgaaaattacat

SEQ ID NO: 639580 - DNA, 75 bp, Homo sapiens
ctgcaggacggcgcggcagagtccccgtacgcctacagtaacgactgtgccctgtccacggtgcctcctgcatgt

SEQ ID NO: 639581 - DNA, 74 bp, Homo sapiens
gaggcaacagggacatggccacctgggacgaaaagagtctcactctactgctgcccaggctggagtgcagaggc

SEQ ID NO: 639582 - DNA, 75 bp, Homo sapiens
tctaatgaattcaaagaaagtgctctaacacttgcttgctacaaaggtgctggagaatgccgaaggtgccagaac

SEQ ID NO: 639583 - DNA, 100 bp, Homo sapiens
tgacagtcgtagatacaaatttttggatgatgatggatccatttctcctattgaggagtcaacgagagaagacgatctgcacttcgcattttggcattga

SEQ ID NO: 639584 - DNA, 97 bp, Homo sapiens
agctgccgaagtcagttccttgtggagccggagctgggcgcggattcgccgaggcaccgaggcactcagaggaggaaagaccacagcaagattcttt

SEQ ID NO: 639585 - DNA, 82 bp, Homo sapiens
cccggcgccaagccgccgtcatcttcttcctgtgccaggtgtcgtgaaaactacccctaaaagccaaaatgggaaaggaaaa

SEQ ID NO: 639586 - DNA, 88 bp, Homo sapiens
ggaggaggaggaggaggagggactcggcgggaggatgaatgtactcaagactgatcttctaagttcactggaaatgattttatcccca

SEQ ID NO: 639587 - DNA, 100 bp, Homo sapiens
ctcgcgttggaggccgccttttcagaagcggctgcgcacggactgctggagatggtggagtccgtcagaaggttgtgcaggaccagcgttccctgtgcag

SEQ ID NO: 639588 - DNA, 100 bp, Homo sapiens
caaaatattctagaaggggaaaagctacttcaaggaccccagccaggccacggggacaacaggcagcagcgtcagctgcacagaggagaaaaagcaaagc

SEQ ID NO: 639589 - DNA, 100 bp, Homo sapiens
caaagctcaagatggcggacaaaacgccaggcggatctcagaaggccagttcaaaggaggttccccaatacaactcatgagggtttcaatgtcaccctcc

SEQ ID NO: 639590 - DNA, 82 bp, Homo sapiens
gccccgcgcagcccccggccgcagcgcaggcagcccagcaggtcaacaacggttccagcctcagggatgagtgcatcacaaa

SEQ ID NO: 639591 - DNA, 100 bp, Homo sapiens
aagttccaatgtgttgggcatgaagtcatcattagacagccatcgaagacggcaatttggaggaaatggaagaggaagtacggcttaagaagcgaaaaag

SEQ ID NO: 639592 - DNA, 75 bp, Homo sapiens
gtgccatggcggccgccctgggagcgagcggaggagcaggcgccggaggaatcactagatttgatctacttggcg

SEQ ID NO: 639593 - DNA, 76 bp, Homo sapiens
cttctgtatcttcatggtgcggctcatcttcgagaggcagcagcccagacgcggcacagagagggcctgggagctt

SEQ ID NO: 639594 - DNA, 50 bp, Homo sapiens
gaaagctgtgaaagttctcaaggtcgggtcacaaatcttcgaagagtgac

SEQ ID NO: 639595 - DNA, 150 bp, Homo sapiens
ccgccggggagaaggatgaaggacaaacagaagaagaagaaggagcgcacgtgggccgaggccgcgcgcctggcatcttattatagaaaactttatccctctggaagaaaaaagtaaaattatgaatagagccttctttgatgaagagga

SEQ ID NO: 639596 - DNA, 90 bp, Homo sapiens
gcgcgccttcggcattggccgccgcgatgtcagctcagtgctgtgcgggccagtcaaaccggcacgatgtccaggcaccagaaccagaac

SEQ ID NO: 639597 - DNA, 74 bp, Homo sapiens
ccattattattgtctaacctgggatatcttcgagctagatcaccttcaggccattcagaggaggaaagagaggg

SEQ ID NO: 639598 - DNA, 100 bp, Homo sapiens
cttctgaaaacatttttgaaaagacaagccatcaaaactgccttcagaagcaaaaggaagctgccaggcagaactatgtggatttggtgtccagtttgag

SEQ ID NO: 639599 - DNA, 98 bp, Homo sapiens
cggtctacagctcccagcgtgagcgacgcagaagacgggtgatttctgcatttccatctgagcaccaagaggatggtggcccttggcctcctggtgca

SEQ ID NO: 639600 - DNA, 99 bp, Homo sapiens
ctttcagcccaggggccggcgcacgatgacctcattccacctatggacttgcttgaaatgattgtcacctggatttttgaggacccaaggttgattctc

SEQ ID NO: 639601 - DNA, 74 bp, Homo sapiens
cagatctctgcagttacaggaacatcgtctgcttcatgatggagtctcgctctgttgcccaggctggagtgcag

SEQ ID NO: 639602 - DNA, 90 bp, Homo sapiens
gcatggacccttaggagataatgaagagaggaccagagtatctactgacaaaagacaggaatggaagttggatacactttgtgacttgta

SEQ ID NO: 639603 - DNA, 98 bp, Homo sapiens
accactgtaatcacagggactaccagaatatttcaagaaatgagcttgtcaggaagatcggaggtgccaagtagcagagaaagcatcccccagctctg

SEQ ID NO: 639604 - DNA, 82 bp, Homo sapiens
accgacctcgacgtcttgcctgtgtcccacttgttcgcggcctatagtctctgctttctatccgtcaagatgataaagtcgt

SEQ ID NO: 639605 - DNA, 73 bp, Homo sapiens
cttcacagcaggattcatcacaggtgattatcctgaaccatccaggccaaataagcgccggctatgcccctgt

SEQ ID NO: 639606 - DNA, 51 bp, Homo sapiens
cttgtcctggtataaagatgatgagcttggaactgcagttggctttttgct

SEQ ID NO: 639607 - DNA, 100 bp, Homo sapiens
tgaatatggctgggtaggagtggtgaagctggaacagccagaattggacccgaaaccatgcctcactgtcctaggcaagtgtgtgactccctcctgtctg

SEQ ID NO: 639608 - DNA, 96 bp, Homo sapiens
gcgatacctttcatagggtttggctttttggataatgcaattatgattgttgctcttccctctgtgtgttgcagtcctgtggcattatgcatgccc

SEQ ID NO: 639609 - DNA, 105 bp, Homo sapiens
gacgccgccgccgccgcctccagggtgggcgcctttcgccgtggacgccgaccgtccgggacgagttacagatgtagagctaaaacgactgaaggatgctttcaa

SEQ ID NO: 639610 - DNA, 100 bp, Homo sapiens
tccagatgctggacacactgtctctctaccagggcctgctctccaacttccctgacatcatccatctacaaaaagttatctagctggtgtgaagcccctg

SEQ ID NO: 639611 - DNA, 74 bp, Homo sapiens
cagaacctcaagcttttcaggcatcctcatataattaaacttactttggaagtgttgctgaaatcatcaggaat

SEQ ID NO: 639612 - DNA, 126 bp, Homo sapiens
ctgcagatctacggggtcctggagcaccctgaagactcaagaccaaaagactgtcaggaaggcagagtgcagaggcaacgcggtaaaaatattgcttcggtgggtgacgcggtacagctgcccaag

SEQ ID NO: 639613 - DNA, 82 bp, Homo sapiens
ctctgaggagaagaagcctggtgagctcaaggctaacagagaccctgatgctggaattgatgaagctcaagttgaacaagat

SEQ ID NO: 639614 - DNA, 100 bp, Homo sapiens
aacattcaggacacctctgacttggatgccatagctaaagatgttttccagcattcacagggtgtccgcaatgttgccagtgtctgtctgcagattggct

SEQ ID NO: 639615 - DNA, 96 bp, Homo sapiens
tcacaaaagagttgattgaaattatctctggtgctgcagctctgtgctaaaatgatgtattttctggacaagtcaaggcaggagaaagcaattgct

SEQ ID NO: 639616 - DNA, 98 bp, Homo sapiens
tgatattgaagaggaagaactgaccagagctgatcccgagcagcgtcatgtaccccttgaggatgaggatgatgaccttcagtatgccgatcatgatt

SEQ ID NO: 639617 - DNA, 125 bp, Homo sapiens
gctcaatggagagaaggaaagtcaatcgtaggaagaacacagtacaggcaaggaaagcatcttttgggaccatcaaatgcatcctgttcctgaaggagcagaaacagtgaaagcggacacttgtc

SEQ ID NO: 639618 - DNA, 101 bp, Homo sapiens
gctaaactcaatgctgctgtgtgggaagaagatttgtaaagaaaactcttagttcgtgtttagtaggagcacagtagctgtttggggaacgaccttaagtg

SEQ ID NO: 639619 - DNA, 100 bp, Homo sapiens
taaatatggccctgatcgacgtttagatcccataatcacagaagaaatgccactgttggagcgttcaagatgtcaaagcgaggacgtggtaggtcctctg

SEQ ID NO: 639620 - DNA, 83 bp, Homo sapiens
ccctgcctgtggagtatctcatcatagacagggcaacctgcacaaccccgccctgttcgagggccggagccctgccgtgtggg

SEQ ID NO: 639621 - DNA, 100 bp, Homo sapiens
ttggagttccaggactgctcatggtaattgcacttgtgagatggaagattttcgaggtatagcagaagaatcatttccaagctttctcaccaattcatta

SEQ ID NO: 639622 - DNA, 100 bp, Homo sapiens
tcagattattcacgaagctctagaaagcctgccacagtgactcaggtcactcaaggaactatccgaccagctgccaacttcgatgctataagagatgcag

SEQ ID NO: 639623 - DNA, 100 bp, Homo sapiens
gcggagccggcgctgagaggggctgcggccggagcgggcggctgagacaaaggcgacggacttgtttacactgggcatgtaaacgaaaccatggtcaggt

SEQ ID NO: 639624 - DNA, 100 bp, Homo sapiens
cagtaactgaacattggtctaaagtctttccaaaaggtcaaggttcacaagaaacatgccaagggacaagtgttatttgacaaagtgtgtgaacacctca

SEQ ID NO: 639625 - DNA, 89 bp, Homo sapiens
tgtggcagcaagtcttagcagtggacgcgagaactattactttggcttatgtaaatattggcctcatacatctgctacacctggataac

SEQ ID NO: 639626 - DNA, 95 bp, Homo sapiens
gtgtccactgctgcctttacttcatctctcccacaggacactcttattgtctatggagccccacctgcaggatatggagccccacctcccggata

SEQ ID NO: 639627 - DNA, 76 bp, Homo sapiens
ctcctttttacctttggttcacaacatcatcaaatgtactaaggctcgtacgtctgcatcgattatcttacgtggg

SEQ ID NO: 639628 - DNA, 100 bp, Homo sapiens
ctgcaatctcggcactttgggaggccaaggcagccgcccaggagctgaaagccgagtatcgtgtgagtgtcccacagtgcaagcccctgtcccctggaga

SEQ ID NO: 639629 - DNA, 83 bp, Homo sapiens
gaatggagaatttgcaactcatcatagtcctggagattagcagaggcatttcatatcagtgaggattctgatcctttcaatat

SEQ ID NO: 639630 - DNA, 100 bp, Homo sapiens
gggcactcctccccgccagtgctggcgtaaagacactgctcccagtaccaagttttgaagatgaggaaacagcaacccagagaggagaactaacccacac

SEQ ID NO: 639631 - DNA, 50 bp, Homo sapiens
gccaagcacaagaactgcatggagggcttccgagtggacctgccaatcaa

SEQ ID NO: 639632 - DNA, 100 bp, Homo sapiens
aaagaaacaagttcttggcaagagaggcatcctccttgaagtatttggctgaggagttttcaatcccatacgctggggaggaggaggaggaagggagcgg

SEQ ID NO: 639633 - DNA, 96 bp, Homo sapiens
atgatgtgtgatgacatcctcattgatgttaatgaatggtgctatacttgaattttctaaggtgtcattaggcttcagcaaccaggagggattgac

SEQ ID NO: 639634 - DNA, 90 bp, Homo sapiens
attcatctacatgacaagatggcgactaagaggcgaaaacgcctcaggggagcaatggcatttgcgttggccatccgtgacacggcatcc

SEQ ID NO: 639635 - DNA, 46 bp, Homo sapiens
acctcgccaaagcagagaaatattacagaatgtctgaaggggacag

SEQ ID NO: 639636 - DNA, 100 bp, Homo sapiens
gaaaaatgctaacaacagcttcacgagtgaattactggaactgaaacggcagcagcaagagcaagaaagagccaaaatccaccagactgaacacaggagg

SEQ ID NO: 639637 - DNA, 97 bp, Homo sapiens
ttgccaaattgaggcggagaaaattgaaaaaagaagaaaaactgaattggaaatttttattcggattattgtggatgatgatgacagtaagatatgg

SEQ ID NO: 639638 - DNA, 100 bp, Homo sapiens
ctggggatcgctacggaccttaaaatacccgcaacagccccttcgtcccaaggccttcatcctagaataatcactgaaggatttgaagctgcaaaggaaa

SEQ ID NO: 639639 - DNA, 82 bp, Homo sapiens
gagttaacttcctgacccaggaagtggcagcaacagaggggactagcagcgaatatggaaatcctcattgacgattcaattt

SEQ ID NO: 639640 - DNA, 74 bp, Homo sapiens
aggacatcgacatccaggcgaactcggcctatcgctaccctccgaagtccggacaagcagctgcggatctttga

SEQ ID NO: 639641 - DNA, 100 bp, Homo sapiens
catgggcaactgcgtggggagacagcgccgggagaggccggcagccccgggacacccccgcaagcgagcagaacccttaggagaaatcttgagagtggac

SEQ ID NO: 639642 - DNA, 75 bp, Homo sapiens
cttcaaagagaaaaggcaacatcctgtcacaggccatgctctggcaaaaaccattaaagggcagtatttaaagtc

SEQ ID NO: 639643 - DNA, 75 bp, Homo sapiens
gttcgcgtctctctgctgcggcgcggggaccgctgtgctctcgaggtctgcggggtttccgagaggctcgccggg

SEQ ID NO: 639644 - DNA, 100 bp, Homo sapiens
tcagcgatctgtgtctgaggaatcggcaaactccctggtctctgttggtgtagaagccaaaatcaggtataccaagcttggctacgcaggcaacactgag

SEQ ID NO: 639645 - DNA, 117 bp, Homo sapiens
gacaagccgctggcagccgcggatctcaccgccgctcaggaagtccattggaatattaagcccaggagttgctttggggatggctggaagtgcaatgtcttccaagttcttcctagt

SEQ ID NO: 639646 - DNA, 90 bp, Homo sapiens
gttccttccaaagtgcagcgctgtgcagtggtagagttggctttgtgggacacagctgggcaggaagattatgatcgcctgaggcccctc

SEQ ID NO: 639647 - DNA, 100 bp, Homo sapiens
cccatatgggggttctggagagcggggtgtgggagataattgacgaccttgccaacctagtggagaacacagatgaaaaacttcgcaatgaaaccaggcg

SEQ ID NO: 639648 - DNA, 100 bp, Homo sapiens
tgggtccctctgagccccggggcatctatgccagtgagaggcccaagtccctagtccagggaccttgacccagcccctctcagcagacgcttcatgatag

SEQ ID NO: 639649 - DNA, 100 bp, Homo sapiens
tcgtgcacggcagtggaagccaggcttcagcaaccaggagggattgactgagatcttaacaacagcagcaacgatacatcagcaaatccttattatccag

SEQ ID NO: 639650 - DNA, 75 bp, Homo sapiens
cttcgccttcgtgcgcttcgaggacccccggtggctacagtttcagaaaagtcacgtataatggaactggagaaa

SEQ ID NO: 639651 - DNA, 48 bp, Homo sapiens
ctgctggaaggcgaggagagcaggctggagtctgggatgcagaacatg

SEQ ID NO: 639652 - DNA, 91 bp, Homo sapiens
ccgagagcgcgaatatcgtcatcgttagaagggttcataaattcatggaacgtgaaggtcgcagacctcgtcttcttgtagcaaaaatggg

SEQ ID NO: 639653 - DNA, 100 bp, Homo sapiens
caacccgttcttgcctcaggccagtcgcctccaggccaagagggatccttcacccgtgtctggccgccatggcatcagatgaaggcaaactttttgttgg

SEQ ID NO: 639654 - DNA, 100 bp, Homo sapiens
ccgagaccgtgaccgagagcgtgaccgagagcgcgaatatcgtcatcgttagaaggaagtctgtttactgttaaaagaaaccattgattcaagagttcag

SEQ ID NO: 639655 - DNA, 75 bp, Homo sapiens
acttcattggccacctacagaaacaaaatgtcaacaaattgatgggggatcatcgtcttgctcttcttttatctc

SEQ ID NO: 639656 - DNA, 97 bp, Homo sapiens
aatgaggagttacagagggccgagaaggacaggatcaggtcagttcaccgggacctggaggcccagattgcgatcgtgacggagaaccaggccctgc

SEQ ID NO: 639657 - DNA, 96 bp, Homo sapiens
gagcttggtttcgggatctcggtgctgcagacggcgagacctcctgcacagatgtctttggtggacttgggaaagaggttgctagaagcagcaaga

SEQ ID NO: 639658 - DNA, 100 bp, Homo sapiens
gaacaaggagctgtgagcgccagcaggtggagcttgacgtgacgtcttaacaaaaggctcccagccccattgccaataccttcctccactatcgaaccag

SEQ ID NO: 639659 - DNA, 98 bp, Homo sapiens
gagagttcaaccccagcagctctgggcgctcagcgaggaccgttagcagcaacagcttctgctcaggtgaatcttggaagcaaccagtaccttttctc

SEQ ID NO: 639660 - DNA, 110 bp, Homo sapiens
tgaaggtccggggcttgccctggtcttgctcggccgatgaagtgcagaggtttttttctggagggaaaacccctgatcctaaaatgaatgctaggacttacatggatgta

SEQ ID NO: 639661 - DNA, 83 bp, Homo sapiens
tcaaggaatccatgtttcttccaagaagcaggattttttatcaagcagaaatgcatcgaacaacgagaatcaagatcactgag

SEQ ID NO: 639662 - DNA, 75 bp, Homo sapiens
atgaaggtggcattttttggcagtattggtaaaggttttcaaggtgtcatgaaaagatggggatttaaaggccag

SEQ ID NO: 639663 - DNA, 75 bp, Homo sapiens
agaaagtagatgaagatgagattcagaagatgcaggttaccttggctttcattgggatcagtttgctggttatag

SEQ ID NO: 639664 - DNA, 100 bp, Homo sapiens
cgggaggtgaatttccatgtcaacatagtcctggctctgaacaagaaggaacacagagggtgcgacagcccagaccctgatacttcatatgtgctaactc

SEQ ID NO: 639665 - DNA, 75 bp, Homo sapiens
gcccgcacccgcgccgcgcgccgaggacctcagcctgggagtgttggttgaatctggcgatgtggaacccatgga

SEQ ID NO: 639666 - DNA, 100 bp, Homo sapiens
acggactgctggagatggtggagtccgtcagcgagaaccactgtctctgatcaacgtgcggaagaggaacgtggaatctggggaagaagagctggcgtcc

SEQ ID NO: 639667 - DNA, 100 bp, Homo sapiens
ccatggacagcgtgcggtctgggccttttgggcagcttttccggcctgacaacttcatctttgtatgacttctctttggaaaagaaaaccattgagtggg

SEQ ID NO: 639668 - DNA, 90 bp, Homo sapiens
tttcccggaaggttaacagcccccttctcagttttcctgtaccccaaggagataactctggaggcatttgcagttattgtcacccagatg

SEQ ID NO: 639669 - DNA, 96 bp, Homo sapiens
agcctttccaactggacagcaccatgtccaccaaagcggagcagtgttggcgtgcagtggtgtgatctcagctcattgcaacctctgcctcccgga

SEQ ID NO: 639670 - DNA, 82 bp, Homo sapiens
tctgcgacctggggccctgggtgaagtgctccgtcgcccttgcctccagtactatactggcaattgctggagaagattttgc

SEQ ID NO: 639671 - DNA, 100 bp, Homo sapiens
tggctctgctacggcggcgcagaaatgaggcagaagcggaaaggagcagcatttctttctattactactatctatgctgagactggttcaggttttgtag

SEQ ID NO: 639672 - DNA, 90 bp, Homo sapiens
atttccttcgggatgtattcggctgaagagctcaagtcccagcatgccttctgagaccccccaggcagaagtggggcccacaggctgccc

SEQ ID NO: 639673 - DNA, 75 bp, Homo sapiens
ggagggagaatttcaagaactgcagtatccagaaggctacctggaagccctggccaaccgagagcgagagaagga

SEQ ID NO: 639674 - DNA, 75 bp, Homo sapiens
gaaaatcctaagaaatggatctgtgacaagagaatccattgttatcaatctagtgaagaattcaaggaagacaca

SEQ ID NO: 639675 - DNA, 80 bp, Homo sapiens
tgatcctgccatgcaggcaggccctgagcacgctgctgtgtgagcagcaggctccctggggaagggaatgcagggttgct

SEQ ID NO: 639676 - DNA, 90 bp, Homo sapiens
caggatggcatccaggagagcccatggcaggaccggcacggcgaaaccttcaccttcaggttttaaaatcaaagatgggaaaatcggaga

SEQ ID NO: 639677 - DNA, 100 bp, Homo sapiens
tgtggttagtgtctatgctcagaatccaagcggagagagtcagcctctggttcagactgcagtaaccataatgctacagccctttgactatgatccgaat

SEQ ID NO: 639678 - DNA, 90 bp, Homo sapiens
ctcggaacccgtggtcctccgcttcattttgcagctcaccttgtgaagatgaaatatccaagaatctgtattctagatggtggcattaat

SEQ ID NO: 639679 - DNA, 75 bp, Homo sapiens
ggattcgccgaggcaccgaggcactcagaggaggaatcttgtcgattggcctggctgctgcctactacagcggag

SEQ ID NO: 639680 - DNA, 90 bp, Homo sapiens
cgctttttgcatacaagcaggaaaatgagatgttatccaggggcaagctctgtgtgattgattggaagacatcagagaaaccaaagcctt

SEQ ID NO: 639681 - DNA, 75 bp, Homo sapiens
atctcaaaaacaaaattctgaactcaggacttggcaagtatttgtaggcaaaataccaagggatttatatgagga

SEQ ID NO: 639682 - DNA, 82 bp, Homo sapiens
caggagattatagctctgtatgagaaggacaacacctacttaggccacacgtgtctacacttagcctctatccatggctacc

SEQ ID NO: 639683 - DNA, 100 bp, Homo sapiens
atgtggaggagatgtactgtgcttggctggaaaaccccaaaagtgtacataagttaggaaacctgctgccctacagtgatcccagcgtggtgtttgtctt

SEQ ID NO: 639684 - DNA, 78 bp, Homo sapiens
tgacgccatgtcgggttattcgagtgaccgagaccgcggccgggaccgaggggtcagttaaatgaaagcatggaccat

SEQ ID NO: 639685 - DNA, 75 bp, Homo sapiens
ccacatcggtcagaaaaagataaatatggctacacacacctttctgcaggagagctgcttcgtgatgaaaggaag

SEQ ID NO: 639686 - DNA, 101 bp, Homo sapiens
gcatgggccttacttctataacaggttgctgcagcaactggtcacacagtagtgttggtagaccagacagaggacatcctggcaaaatccaaaaagggaat

SEQ ID NO: 639687 - DNA, 100 bp, Homo sapiens
gggagccaacacctttgcctcccacctcctctttgcaggtatgacctcacggaagatgggacgaggcctcaggcgatgacatagccgcagcaggcaggag

SEQ ID NO: 639688 - DNA, 100 bp, Homo sapiens
aatatgttcaagatggctaaaaattggagtgaggaagaatacaagcgattgagtgaagcactagcagaggatgggagctacaatgccgtggggttcactt

SEQ ID NO: 639689 - DNA, 89 bp, Homo sapiens
atcgtggacagcagagttgctccaacagcaaatattttttcccagacctaatctgggagcctgcaagtgacaacagcctttgcggtcct

SEQ ID NO: 639690 - DNA, 75 bp, Homo sapiens
aggactcgggtggctctgaggtcgcctggggaccccagaagatccagctccaggtcccacaggggctcttcttcc

SEQ ID NO: 639691 - DNA, 90 bp, Homo sapiens
ggactacttgcaggtcagcttgtctcacataacagatccctactctgttaaaagaaatgtggcaagaaccctaaatagtcaacctgtgtt

SEQ ID NO: 639692 - DNA, 100 bp, Homo sapiens
gaggacaccgtgacttcccggacgctgggaaatgttcagaatgaccgaagaagcatgccgaacacggagtcagaaacgagcgcttgaacgggacccaaca

SEQ ID NO: 639693 - DNA, 100 bp, Homo sapiens
gaattcagcacggatggaaagatggagatgaacctctaacacagtggaaaggaaccgttctggatcaggttatcaatactctggctgaccatcatcatcg

SEQ ID NO: 639694 - DNA, 99 bp, Homo sapiens
aacatcttaactaaaagcactcccacgtctacaatggagtcgagtctagaattcacacagagccacctagtacttacagatcatcagtatttggagagg

SEQ ID NO: 639695 - DNA, 100 bp, Homo sapiens
tttcgggctgccgagggtgttcttgacgattaatcaacagggagaggtgatatccagcctcagttggacagtgctctccaagatgtcaatgataagtatc

SEQ ID NO: 639696 - DNA, 96 bp, Homo sapiens
gcagtctacaccttcaccatgttcttctccacgatctatacaatatcagtgatggccgagggaaagttgggacgtttggcatcttcaaatctgtgt

SEQ ID NO: 639697 - DNA, 74 bp, Homo sapiens
tcacaggagtgatgctgtgttcttcactgcatgatttcaaaagaatcacggtcactttcaacattaacaacagc

SEQ ID NO: 639698 - DNA, 75 bp, Homo sapiens
atcgccacccgttttgacggaacacggacactccggacgcaggcccggccaggagagttcgtctgcatcgagtgc

SEQ ID NO: 639699 - DNA, 100 bp, Homo sapiens
gccggccaccgccgagacccagcacatcgccgaccagctccagcagtacccgcggctacgggaggagatggagcgcatcgtgaccacccacatccgggag

SEQ ID NO: 639700 - DNA, 101 bp, Homo sapiens
tttaggaagaaacaacataaagaacttaaatggactgatacagtttatgtaacttgatggaagaaaatggaattactccaaaaagacaagtgctcaagcag

SEQ ID NO: 639701 - DNA, 75 bp, Homo sapiens
gattcgcattgaagatgacgggagctacttccaaattaaccaaatatatgtaatcgacagtgcagacagaaaaag

SEQ ID NO: 639702 - DNA, 75 bp, Homo sapiens
cttgcagaagacgccgtacgaggtgatgtgctctatgaactccttcagcatattctgaagcagaggaaacctcgg

SEQ ID NO: 639703 - DNA, 75 bp, Homo sapiens
caagatgcggctgctggacggcggcagcttcaccgccgagtcctccagcattgcagtgtcgagatggctatgaac

SEQ ID NO: 639704 - DNA, 100 bp, Homo sapiens
cagtggagcaggatggaaaagtcaaaaccctcatggaattcattacctcaaggctgtattcatcaccaaagaaaaaacttacaccaatgcagaaatcggt

SEQ ID NO: 639705 - DNA, 98 bp, Homo sapiens
cctgagtccggagctaccaaaaccatcctcctgatgcaggccctgacttcctgtgagtgcaccatctgtcctgactgcttccgccagcacttcaccat

SEQ ID NO: 639706 - DNA, 90 bp, Homo sapiens
cctgttggaaatggattatcattggctgggacgattggccggctgcctaccctccagactgtccgctatggctccaaggctgttacccgc

SEQ ID NO: 639707 - DNA, 75 bp, Homo sapiens
acggacaagcacagtcttcggaagccttcaggctctacacacagatgatcctctcacttgggattatgtggcaag

SEQ ID NO: 639708 - DNA, 92 bp, Homo sapiens
tagtggaagatgtaaagcaatatttcgagcagtttggcaagacaatgcagatcttcgtgaagactctgactggtaagaccatcaccctcgag

SEQ ID NO: 639709 - DNA, 101 bp, Homo sapiens
cttccacgacagaaaaacatacaagactccttcagccaacatgatggtactgaaagtagaggaactgtgagatggaagattttcgaggtatagcagaagaa

SEQ ID NO: 639710 - DNA, 95 bp, Homo sapiens
atgataactatggcaatagcagcggcaatacgtggaacaacactggccactttgaaccagatgatgggacgatttaattggttggggtcagataa

SEQ ID NO: 639711 - DNA, 98 bp, Homo sapiens
ttcatttttcttcggcgatattttttggaaacgtcaagagatgtgaagcgcctggaatctacaagtgaacacacaggatttcagaggattagtgcggg

SEQ ID NO: 639712 - DNA, 95 bp, Homo sapiens
gtgctctcaagaattactttggtcccgtgcacagcatggaggagctcccagtgaagtacctggggctgctggcaatgtccaagatcctgaagacc

SEQ ID NO: 639713 - DNA, 100 bp, Homo sapiens
ggcgaataagtgcaagcgaagctctcaagcacccctggttgtcagaccacaagctccactccagactcaatgcccagaagtaaattttcgcagaaggact

SEQ ID NO: 639714 - DNA, 96 bp, Homo sapiens
ctccatgttgctcgcccagcgcctggcctgcagcttccagcacagctaccgcctgctggtgcctgatgctgtctttgcatttcaactacgcaaccc

SEQ ID NO: 639715 - DNA, 100 bp, Homo sapiens
cccaactaccaccaagtcctctccatctgatcccatgaccacctccagagctaatcagtgagggtgcggggtcaggcgcccggccgcacctgctgagtgt

SEQ ID NO: 639716 - DNA, 100 bp, Homo sapiens
ccgaggctcgcgggcggcgggcccggtcttgaaagcgccacaagcagcagctgctgagccatggctgaaggggaaatcaccaccttcacagccctgaccg

SEQ ID NO: 639717 - DNA, 100 bp, Homo sapiens
aacatggcggcggaacgcggcgcggggcagcaacagtcgcaggagatgatggaggctagctgacgtggtggacagtgaggcgctgcaggtatacatgaaa

SEQ ID NO: 639718 - DNA, 88 bp, Homo sapiens
gctgtccctgcggcttctggggctccttcgagaactcatagaacggaagaccagctccttggatcccaacgatcaggtggccatggga

SEQ ID NO: 639719 - DNA, 75 bp, Homo sapiens
cctcccagcaccacagtccttctgcagtccctcgtccagccacccccagctaacaacctgagagaagattacaaa

SEQ ID NO: 639720 - DNA, 80 bp, Homo sapiens
tggtagctaagactcccgaatacttcagaagtggggaaatgccttatgccagcctggaccatcttggaggcagtgtagga

SEQ ID NO: 639721 - DNA, 74 bp, Homo sapiens
gaggcagctgcggcggggccgcctatttgatggctttgcagatggactaggagttgctgaagctatttcatatg

SEQ ID NO: 639722 - DNA, 88 bp, Homo sapiens
gttaaagagacagcaatgattgctataaaggtgcacatgtaaagccaggatttgctgaacatttctacagtaaccctgcaagatataa

SEQ ID NO: 639723 - DNA, 75 bp, Homo sapiens
agtgtgaggcaaacttgagagtgtccttctctcctgcaagaggcgggatgtggtaacagagaccaagactgtgga

SEQ ID NO: 639724 - DNA, 100 bp, Homo sapiens
cactgaggagtccaacatcaccatgcaggctgccgcgggcggacacgccagaggaggaggccggggaatggccgcggtgtggcagcaagtcttagcagtg

SEQ ID NO: 639725 - DNA, 75 bp, Homo sapiens
ttcataccccaaatattttcagaaggacatagctgaacctcatataccggctgcaaggtgttgaccaaaagcccg

SEQ ID NO: 639726 - DNA, 100 bp, Homo sapiens
gagttgcatgctgagaatttgaaaaatgaagatgatgtagacactggactattagttggccagtcagtgctgaaagatgtaagcaaagtgaagaagctga

SEQ ID NO: 639727 - DNA, 99 bp, Homo sapiens
ggccttccagctgtttgaccgaacaggtctccataacccctcggacaaacgccgccctgggctttgctcagatgctccccagagaccagcacctcttca

SEQ ID NO: 639728 - DNA, 75 bp, Homo sapiens
cggagtattaaatccagctagagaatggcatgtgcaaagatacagaggagtcgtaagaaagcagtgggagttgaa

SEQ ID NO: 639729 - DNA, 75 bp, Homo sapiens
ggcgggaggagcctgttcccctgaggttgctgctgactcagccattctagaagttcttcagtccaacattcagca

SEQ ID NO: 639730 - DNA, 100 bp, Homo sapiens
gaagcattgcttcaaagcatggggctaactccagaatcccccattgtgaaactgcttttggttacaagggtctaaagatcctgttatactatattgctgg

SEQ ID NO: 639731 - DNA, 82 bp, Homo sapiens
ctgggcccgtgacgtcaccccgctgtgacgcgcacgctgtaggaaaactagggaagtgtaacatctcccatttttctgacat

SEQ ID NO: 639732 - DNA, 89 bp, Homo sapiens
accaccccttccgccgtctggccatctaggcgagcaccgtcaggagcgcagagatcggccctactagatgcagagaccccgcagagctg

SEQ ID NO: 639733 - DNA, 89 bp, Homo sapiens
gagtgccaataaaataaattcttttgaactagatcgagctgatagagaccctagtaacatgggaggcttctacagagcacaactgcatg

SEQ ID NO: 639734 - DNA, 102 bp, Homo sapiens
ctccactccgtcccccgcgggtctgctctgtgtgccatggacggctgtgccacgaccgtggctatctggtgacccaggacgagcttgaccagaccctggagg

SEQ ID NO: 639735 - DNA, 100 bp, Homo sapiens
agccgatcatggcggatggcccccggtgcaagaggcgcaaacaagccaatcccaggaggaaaaacgtaatcctaaattggagagtcagagagtaaataaa

SEQ ID NO: 639736 - DNA, 83 bp, Homo sapiens
cgggctccgcgcccggccggacccgggcccgagcgccgtgccgtccctgcagtgacaccgaggtgctcctagccgtctgcacc

SEQ ID NO: 639737 - DNA, 76 bp, Homo sapiens
gggacaacatgctgcggggcacagatcgaggagactggcagagggaaagaaagttcaactatggtggtggcaacaa

SEQ ID NO: 639738 - DNA, 82 bp, Homo sapiens
ttctggagagcggggtgtgggcagaaaaatatggctcaggagactaaccagaccccggggcccatgctgtgtagcacaggat

SEQ ID NO: 639739 - DNA, 100 bp, Homo sapiens
ccattagatccaaagccattcccaaattatagagctaattacaactttcggggcatgtacaatcagagaggtcctgctgtactagccaccaaagcagctg

SEQ ID NO: 639740 - DNA, 100 bp, Homo sapiens
atattttccagcccgtgtctgcagccactatcgaaaacgatcggcatcccggggtcgctctggaagtcggtctagaagtcgctcaccctcagacaaaaga

SEQ ID NO: 639741 - DNA, 96 bp, Homo sapiens
gaagcaccacgatgcagagcaccacagagccttgcagtctcatcctactcaagtgtggctctgtatccaacaacagtcttggagatctcatgaaga

SEQ ID NO: 639742 - DNA, 76 bp, Homo sapiens
gcctccccagccatgctgaactgttctcagaggcactgtgactgacttccctggatttgatgagcgggctgatgca

SEQ ID NO: 639743 - DNA, 88 bp, Homo sapiens
gcgaaggatgcacccggcaggcttggcggcggcggctgcggggacgccccggctgcgtaagtggcgctatgggtacacaacgccactg

SEQ ID NO: 639744 - DNA, 50 bp, Homo sapiens
aaattcgcctccatctgtaccatgtgtgccccctaccaccggagccagag

SEQ ID NO: 639745 - DNA, 102 bp, Homo sapiens
ataccagacagttgaaaaattacagcaatattatatttttattccctctaaattcaagattggcacttctctgtttgatgaagagggagccaagattgtcaa

SEQ ID NO: 639746 - DNA, 82 bp, Homo sapiens
gtgtcagccctgaccaaccatgaccgagagccggacaatggcaaggaggagcaggaacggccctgtttgtgctcttcgtcct

SEQ ID NO: 639747 - DNA, 88 bp, Homo sapiens
aacctccgcctcccgtgttcaagcgatgctcctgcctcggcctcccaagtagctggaactacagtcgaggctttgggcaatccaactc

SEQ ID NO: 639748 - DNA, 83 bp, Homo sapiens
ggattccaagtaactcttatttggtcttcatggaagttcggggaaattaactggatctacttctagtctaaataagctcagtg

SEQ ID NO: 639749 - DNA, 74 bp, Homo sapiens
gggcctactcgcccgccaccctgcgctgccgccgctctgaggagttaaagacttgtgtatgcggatacctgctt

SEQ ID NO: 639750 - DNA, 136 bp, Homo sapiens
gccaaatgggtgcagtgatgacgtgttgccttggagaaggacagcagagaataagctggacaccaaatacccgtacggaagacagagatgtcaatgaccccatgcccaaccgaggcggcaatggactagctcctgg

SEQ ID NO: 639751 - DNA, 88 bp, Homo sapiens
gccggcggctcggcttctcgaagcattatgccagtacatacaggcttctaaagccagggatggtgccagccctttcatttcaagtacg

SEQ ID NO: 639752 - DNA, 100 bp, Homo sapiens
tggactgcccggacgagagctgggccctcaaggccatcgaggcgctttcagtgtactaatggtcacttgatgtgcgctggctgttttatccacctactag

SEQ ID NO: 639753 - DNA, 82 bp, Homo sapiens
gagatggaaaaggagttcgagcagatcgacaagtccgggagctgggcggccatttaccagtgggtgaatttgtaagtgatgt

SEQ ID NO: 639754 - DNA, 98 bp, Homo sapiens
cgaactgcaagttgcttattgtttcaaatccaggagacggtggctcagggagtaaaggaaggccagttgagcaaacagaagtgttcctctgcatttca

SEQ ID NO: 639755 - DNA, 123 bp, Homo sapiens
gctggttggagattctccggggacccttccgtatctgcctaggcattttgctgtctcctcctaatacggaaaagaccagtgccctcagtctgagcaacgttgctggagtattctacatccttg

SEQ ID NO: 639756 - DNA, 130 bp, Homo sapiens
cttttatatgccagagaaccctgagtgtgcccctgacatgacaaggagccgtcgtcgttaggtgtcatggagaaactccagctgggcccagagattctgcagcgggaaaatccaaggcttatttatgcca

SEQ ID NO: 639757 - DNA, 75 bp, Homo sapiens
ctcggagcgcggtccctgtattggtctcctgctcctagagatacttgccagaactaatacagctgatgaaatacc

SEQ ID NO: 639758 - DNA, 75 bp, Homo sapiens
cagccaccaccaccaccagatgatgcctgaaaacttcatgcctcctgttcccatcacatcaccaatcatgaaccc

SEQ ID NO: 639759 - DNA, 101 bp, Homo sapiens
gtccaccactgtcacccctgacggcgagacgcgagtctggggagcagggaggagccctgtgccctgtcccaggatccatgggtaggaacaccatggacagg

SEQ ID NO: 639760 - DNA, 93 bp, Homo sapiens
cctgcctcccctgcgtcccgccaccggccgcttctgtcctcgtgcagtcattggagaaatcgatgaagaaacagattctgcgcttgatttggg

SEQ ID NO: 639761 - DNA, 75 bp, Homo sapiens
ctcaagaactggttatacttgaaaccataatgctacaaactctaggtaatagcctgcagctggtgttttgagaag

SEQ ID NO: 639762 - DNA, 75 bp, Homo sapiens
tcggatttcaccacaagaagggctgccaggggtgataatgagaagcaatggactagaggattcaagtggaagagt

SEQ ID NO: 639763 - DNA, 58 bp, Homo sapiens
atgatcatgcgcaccttggccatgcttggtagacgttacatccaagaggaaataatcc

SEQ ID NO: 639764 - DNA, 92 bp, Homo sapiens
tgaagcctcctgcgccggccttgcctcggggacacagcaggtcaggagagattcaacagcattacctcagcttattacagaagtgccaaggg

SEQ ID NO: 639765 - DNA, 75 bp, Homo sapiens
aacgactgcatctttgacaagtttgagtgttgctggaacggttcggatagttactcccctgctggtgcctccctc

SEQ ID NO: 639766 - DNA, 98 bp, Homo sapiens
agggattctggcatcagggaggctttcagccggagaagcgagtttcagctgggccagttcaactttgtccacgtgatcgtcaccccgctggactacga

SEQ ID NO: 639767 - DNA, 100 bp, Homo sapiens
gccagcgcgctgcaacacaagatcaagaactccatctggaaggcgtggaagtgcgagtggccagaatcttcaacacctttgggccacgcatgcacatgaa

SEQ ID NO: 639768 - DNA, 100 bp, Homo sapiens
atggccaagtcgggtggctgcggcgcgggagccggcgtgggcggcggcaacggggcactgacctgggtggtggtcctgccatcatggctgtcctctgcaa

SEQ ID NO: 639769 - DNA, 100 bp, Homo sapiens
aagctatatttgatcgactgtgtaaacaactagagaagattggacagcaggtcgacagttatggaggttttgatgactatggtggctataataattacgg

SEQ ID NO: 639770 - DNA, 75 bp, Homo sapiens
cagcatttgtttcccttagccagcccgagcaagtaaagattgtcgggaacatgccctgtgtgccgccgtcatttc

SEQ ID NO: 639771 - DNA, 74 bp, Homo sapiens
aagaatctcagagttcctcaaagttgcagagctaataagcacaagtgggtaccactccacttagatgttgtaag

SEQ ID NO: 639772 - DNA, 80 bp, Homo sapiens
aattgttggatctggcagtctaggaatgacaatgcagatcttcgtgaagactctgactggtaagaccatcaccctcgagg

SEQ ID NO: 639773 - DNA, 83 bp, Homo sapiens
ggcggagccgagagccacactttcaagtaaaccagcagcccctgtcaaagggaacaggaagcagtccacggagggtgacgccc

SEQ ID NO: 639774 - DNA, 98 bp, Homo sapiens
cctgagccttggaagaaagcaaactggaggaagcagcatctcgtgcagcagaagaggaaaagaaacgccttcagactcaagtggaacttcaggccagg

SEQ ID NO: 639775 - DNA, 87 bp, Homo sapiens
ctccgaaccccttcatgcccaaatcccggaaactccagcgtgtctccagccgtggtgacagcagggacatgtctcgggagatgcagg

SEQ ID NO: 639776 - DNA, 75 bp, Homo sapiens
taactggactcttttacactcaactaattggcatcatcacaccagagactgctgctactttgaaacgtacgatag

SEQ ID NO: 639777 - DNA, 100 bp, Homo sapiens
aaagttgttaagaataaggcctactttaagagataccaagtgaaatttagaagacgacgagacaaatgcaagattattatctgatcattccaaaccaact

SEQ ID NO: 639778 - DNA, 100 bp, Homo sapiens
aagaacattgtccactgtgacttgaaaccagaaaacgtgttgctggcatcagcagacccatttcctcaggtatgtgttcaagacctcatctcccccatca

SEQ ID NO: 639779 - DNA, 100 bp, Homo sapiens
gccggggcctggggctgcctgccgggcggccgggcgcggcgagcccagtatcctagaaggaaaacatcaccatggctacagaaattggttctcctcctcg

SEQ ID NO: 639780 - DNA, 74 bp, Homo sapiens
ctggctcaggaagccaagaaactggatgccaagggctcctcgaactcctatgccattaagaagaaggacgagct

SEQ ID NO: 639781 - DNA, 75 bp, Homo sapiens
ctcagcctgcggatgtgaggctgatgaagaggaaaacagtcaccttcaggccattcagaggaggaaagagagggg

SEQ ID NO: 639782 - DNA, 97 bp, Homo sapiens
gtaataaaaggcctgacatatctgagggagaagcacaagatcatgcacagagatcgaagcaaagctgagatggatttgaaggagctgagcgagtcgg

SEQ ID NO: 639783 - DNA, 83 bp, Homo sapiens
caccaacgaagcaactgctgagcaggtttttcacgactgaaaacaacatagcaaaataagccaagatgtctgtggatccaatg

SEQ ID NO: 639784 - DNA, 74 bp, Homo sapiens
gaactggaaatataggacatgcgtttgagatctactgtgaacccctttgctgatgcaagtaagggtgatgacct

SEQ ID NO: 639785 - DNA, 74 bp, Homo sapiens
tcaacattgacaaattgaaaatagaaactgctcagctctcaaaggtctatggccctgtgttcactctgtatttt

SEQ ID NO: 639786 - DNA, 100 bp, Homo sapiens
aaatttcctcttccaatggaagtgtttaagggtcagcagcctctggacccgtgaaagagctggtcggttccgttggtggggccgtgactttccccctgaa

SEQ ID NO: 639787 - DNA, 75 bp, Homo sapiens
cggttttcttatgcttataagagtggaacaggccgttaattaaggaaaagttgagccagggcgtgaccctcgtcg

SEQ ID NO: 639788 - DNA, 100 bp, Homo sapiens
gcttactgcaacctagccaatgctctcaaagagaagggcagttctattatcctcccagtccacaacgctgaaccgtggctggacgaatgtttgaggtctg

SEQ ID NO: 639789 - DNA, 101 bp, Homo sapiens
aggaaacacatgaaattgtggcgatcaagaaattcaaggacagtgaagggttactttagtgatccctggaatgtttttgacttcctcatcgtaattggcag

SEQ ID NO: 639790 - DNA, 75 bp, Homo sapiens
aagtgaccaagaacgtgagcaagcccaggcacagccgacgccgcgggatcttcgtgaagactctgactggtaaga

SEQ ID NO: 639791 - DNA, 75 bp, Homo sapiens
gtaagattgtcttggaaatactaagttggctgccactgcagagccccgccatggaagacacgccgttggtgatat

SEQ ID NO: 639792 - DNA, 82 bp, Homo sapiens
cagtgggattaaaaagaccactgaggagcaggtgcaggtgcatctgcagacgcagcaggaggtgaagctgcgcatgacgggc

SEQ ID NO: 639793 - DNA, 74 bp, Homo sapiens
gccgacggcgacgtcggggccgagctaacccggcctctggacaagagtgctggagaatctggtaaaagcaccat

SEQ ID NO: 639794 - DNA, 100 bp, Homo sapiens
gaaatactataaagtggaacctcttgattttggcggtcacagtcgaactgttattggaattgaagagaaaaaaaaccgaacattatgcttactaatactt

SEQ ID NO: 639795 - DNA, 76 bp, Homo sapiens
cgggtggtcaccgagaagtccccgaccgactgggacaagaatccttcaagaaacaggaaaaaactcctaaaacacc

SEQ ID NO: 639796 - DNA, 98 bp, Homo sapiens
cagccgccgccgcagcgcgaacatggacgccgtcaacgccttcaaccaggagaccatgctcgacagctgaccaaggccatgatgcgaaaggccacggc

SEQ ID NO: 639797 - DNA, 103 bp, Homo sapiens
gcgagatccgggccgtgaacgaaagcagtgacggaggagcttgtaccaccgtgtgtgcaggaacggagaataaactgagctctctctctgacctggaacagca

SEQ ID NO: 639798 - DNA, 75 bp, Homo sapiens
caggaatctggaattttattaaacatgaaacactttgtgctactctgtggggctttggaaaagcatgttaaatgt

SEQ ID NO: 639799 - DNA, 100 bp, Homo sapiens
gtggtgctcagcttccctgagctcgagtgcaagaagaaacacacgctgctgtgccccgactttgcccgcaggggggcgtgtccccgcggcgcccagtgcc

SEQ ID NO: 639800 - DNA, 102 bp, Homo sapiens
ggtgtacacactggcagagcaccgacggacggtggcaggacatgaatggcaagatgaattttctcatattatggcaatgacagatccagcctttgggtcttc

SEQ ID NO: 639801 - DNA, 51 bp, Homo sapiens
gcaaccaacctaaggtggcctcaggctatttagcagacatgacccacaagc

SEQ ID NO: 639802 - DNA, 74 bp, Homo sapiens
catattttgaagtgtttacgggtacatccagacactgaaggaccacaggccccggatggtgtgggacagccagg

SEQ ID NO: 639803 - DNA, 98 bp, Homo sapiens
tccgggatgatcgataagaacgagctgaagcaggccctctcaggtttcggtctcctctgagcctccggcctccataagacccaaaacagatgacacct

SEQ ID NO: 639804 - DNA, 71 bp, Homo sapiens
tcccttcgagctgcgcatcgtggatctgattaaaggcactaactgtgacatctatgaccttttttatcatc

SEQ ID NO: 639805 - DNA, 98 bp, Homo sapiens
aaagaagacatctgagtcacaaaagcaataagcagtcaactcaacctttaaagatatcagttttagagaatgtggcgtggagaaattctcaaggaaag

SEQ ID NO: 639806 - DNA, 97 bp, Homo sapiens
agaagttgcgaaggatccccaacggggaggccaacgtgaagaagctgaaggtgatgtggccgccctcaaccgacgcatccagctcgttgaggaggag

SEQ ID NO: 639807 - DNA, 74 bp, Homo sapiens
gagcaagaccatcatgctgcgcggccttcccatcaccatcacagagagcgatgcctgtagtggtggagacacgc

SEQ ID NO: 639808 - DNA, 100 bp, Homo sapiens
ggcccaggggaataattatgggcagaccagcaacggggtggccgatgaatcacccaacatgctggtgtacagaaagactcaagaatgaacaatccgtcag

SEQ ID NO: 639809 - DNA, 101 bp, Homo sapiens
acgtctgccgctgccaccggcgcgcccgaacaatgcagatcttcgtgaagactctgactggtaagaccatcaccctcgaggttgagcccagtgacaccatc

SEQ ID NO: 639810 - DNA, 74 bp, Homo sapiens
ggtcgcagttcttgtttgtggatcgctgtgatcgtcacttgggtttgccttcccggattgggcctacaagccag

SEQ ID NO: 639811 - DNA, 112 bp, Homo sapiens
tttgtcactggcagactcgagactgtaggcactgccatggcccctgtgctcagtaaggactcggcggacatcgagacaatgcagatcttcgtgaagactctgactggtaaga

SEQ ID NO: 639812 - DNA, 75 bp, Homo sapiens
cagttcttcctcccagagctgcagcggcgcctggacgactgcatccgcacttccactaatagccaagtagacaag

SEQ ID NO: 639813 - DNA, 74 bp, Homo sapiens
gggccagggaaccctggtcaccgtctcctcaggcagcgtctatcccagactaccggggccctaatggagtgtgg

SEQ ID NO: 639814 - DNA, 98 bp, Homo sapiens
tcagcagaagaaacacttcctataaatctcgcccaaacaggaaaggtggttttggaatgtatgcttaaaaaagacctcatttataataaggtcactcc

SEQ ID NO: 639815 - DNA, 74 bp, Homo sapiens
ggacggtcactcagcctatggaggttgaccagtatctctaccacatgcgcctctctgatgagaccctcttggag

SEQ ID NO: 639816 - DNA, 75 bp, Homo sapiens
gcaaaggccaatgttggtgctggcaaaaaggcggagatggtccacacaggtttgaagttggagcgagctctgttg

SEQ ID NO: 639817 - DNA, 98 bp, Homo sapiens
ctggggaccattagtggagctggaatggtgagaccaacatccgtgacacctggactctttcaggttctgaacttagcagtgtctgcaaaaacgaatct

SEQ ID NO: 639818 - DNA, 100 bp, Homo sapiens
ggatctcgggctcggaacgagactgcacgcttctcaataggtttggcatggacaagatctatgaaggccaagtggaggtgactggtgatgaatacaatgt

SEQ ID NO: 639819 - DNA, 82 bp, Homo sapiens
cggaaactgtagaggggcaagcagtggtgagccagccatgagagggtatcttgtggccatattcctgagtgctgtcttcctc

SEQ ID NO: 639820 - DNA, 83 bp, Homo sapiens
agccggcagcatgctgaggacttcctgggagagaactcccccactggaaaggattctgaaagaaatgaagtcagccctcagaa

SEQ ID NO: 639821 - DNA, 50 bp, Homo sapiens
cggaagcggagagcaacagcgcgccgaagccaagtacaagaagctggaga

SEQ ID NO: 639822 - DNA, 100 bp, Homo sapiens
gcactcggagggcgcccctctgggacgggaccgacgcctcggaccgggctgcgccgcgggagttcgaggttcctctggctcacaatatttttggtctcat

SEQ ID NO: 639823 - DNA, 80 bp, Homo sapiens
cctgatttaggggcaatcgatgtgattgaaatctctgaatatcgaacccagctctatgaatatctacaaaatcgaatgat

SEQ ID NO: 639824 - DNA, 87 bp, Homo sapiens
agtgacctggggaacctgctcaaagccctgggtcgcttggaagaagccaagactatcaagaaatccaagtggtaatgggcgaagttt

SEQ ID NO: 639825 - DNA, 100 bp, Homo sapiens
tgcactgcacaatattaaaactttacctggggtgggaaatgaagaaggatgaaacactagaagaggaagaaaaagcaatactggagcacttaaaacaaat

SEQ ID NO: 639826 - DNA, 80 bp, Homo sapiens
aactaagccgattttccggaaaaagattgccaccaaggagccaatgaatcccattaaacaatatgtaaaggatggaaagc

SEQ ID NO: 639827 - DNA, 101 bp, Homo sapiens
cccgacccggattggcgctgaggtggcccgtggggcagccagagagatgacacgggggaaattcctcaatattctagagaagcccaagaagtagcagctgc

SEQ ID NO: 639828 - DNA, 83 bp, Homo sapiens
tcaccatgctcttcatcatcagcctgagcctactgatcggcgtagtcaaggtcagagtggtgctgggaacaactgggccaagg

SEQ ID NO: 639829 - DNA, 75 bp, Homo sapiens
cccaatcccgtggtccagatcatttatagtgacaaatgctaaagtaaataatgccagcctgattggactgggtta

SEQ ID NO: 639830 - DNA, 75 bp, Homo sapiens
ctggtgcctgtgcaagttgttgagccaaatgatttctcagtatcactaaaagcacaagggaaaaacaagcatttt

SEQ ID NO: 639831 - DNA, 98 bp, Homo sapiens
agtaggaacattatctgcaaattctagcaatgtaattcagttgatcattgatgcatacaattatgccaagtacatggaaaaccatagcattgaaggag

SEQ ID NO: 639832 - DNA, 73 bp, Homo sapiens
aatggggtgaggaagattttgaagacaatcgtcacttatacagtactatactggcaattgctggagaagattt

SEQ ID NO: 639833 - DNA, 100 bp, Homo sapiens
ttcctagtgagtcggcggctgatttagaaggaggttcaggctacggtgagccgaagtaacagtgtatcatgtatgccactgattccaggggacactcccc

SEQ ID NO: 639834 - DNA, 75 bp, Homo sapiens
caggcatggatgaccaactttggactgtctcgaggatgcctacggagctggctgcacttcagaatgtcagtgtgt

SEQ ID NO: 639835 - DNA, 76 bp, Homo sapiens
actaggtgactgtctcctggaaatgttatgcagctcagcaaggtgaagatgattctttgggattgggacttaaaac

SEQ ID NO: 639836 - DNA, 50 bp, Homo sapiens
aagacctgctagagccattattgccccggattaaagcctgtggtttccac

SEQ ID NO: 639837 - DNA, 83 bp, Homo sapiens
ctcggttttcttatgcttataagagtggaacagttggaatcgaagcctcttaaaatggcagatgacttggacttcgagacagg

SEQ ID NO: 639838 - DNA, 75 bp, Homo sapiens
gatgtccctctgaaaactgaggaatttgaagtgaccaaaacagcagattctgaaaaagagttccacgtcctccct

SEQ ID NO: 639839 - DNA, 100 bp, Homo sapiens
ggagcatcagttggagcccggagacaccctggctggactagcactcaaatatggggtgacggtcagaggtttcctatccccctcaagcccccacaggagt

SEQ ID NO: 639840 - DNA, 75 bp, Homo sapiens
ggctccagactcgccgtggtcaagttcaccatgagagggctcagtttatgaacctcttaaaagcattaatcttcc

SEQ ID NO: 639841 - DNA, 100 bp, Homo sapiens
ctcggagtgtactccgcctgcaagcttaatgcagataccgaaagagaagaaggcgaagagtttgaagataacatggatgttttcgatgacagcagttcca

SEQ ID NO: 639842 - DNA, 74 bp, Homo sapiens
gaagttactgccgcgccaccgagtccggaccggagactttggggcctaactagagatgaagttttaccatgttg

SEQ ID NO: 639843 - DNA, 74 bp, Homo sapiens
gaacagaagcggaacagccacagcagcctcccaaggagtctgcaagttgatggctttggaagattcagaacaga

SEQ ID NO: 639844 - DNA, 74 bp, Homo sapiens
cttcgggtgctgcggagccatgcgggagtcgcaatgtgtgcttggatcaaatgatgccaatgggtggaatgatg

SEQ ID NO: 639845 - DNA, 90 bp, Homo sapiens
cgccgagcggccgaggcgccgcggtcggctctgggactcgtctggcgtccctcaggtgtcgtgaaaactacccctaaaagccaaaatggg

SEQ ID NO: 639846 - DNA, 75 bp, Homo sapiens
aattcctcactaatgagctctccagaaaattgatgcaggcaactttttcctgtacctgtgaggagcagtacgtgg

SEQ ID NO: 639847 - DNA, 100 bp, Homo sapiens
ctgttttcgtgatcttcagaccccaggttctttggggaacgcccttttgcttgtgactggcagggctgcgacaagaagttcgcccgctccgacgagctgg

SEQ ID NO: 639848 - DNA, 90 bp, Homo sapiens
gctgttttggaactgtcaggtacctcaaagcaggcggggtttcaccatgttgcccagactggtcttgaactcctgagcttaagcaatcca

SEQ ID NO: 639849 - DNA, 82 bp, Homo sapiens
tcacatctggcctgccccgacgtcctgaacctgtccctaggtctcctccgggctggggctgagcaagccctcggagtgaccg

SEQ ID NO: 639850 - DNA, 83 bp, Homo sapiens
ctgcgagggcgctgcacaacctggcccagcaggcacccgagttcagcgccacgcaaggcatcgactacaagacgaccaccatc

SEQ ID NO: 639851 - DNA, 100 bp, Homo sapiens
gaaaacctttaccaaatggataaatgctcgattttcaaagatcttgtagaaaatttcagctgtagcccttggactagaagctgaaataacagaagctgtg

SEQ ID NO: 639852 - DNA, 83 bp, Homo sapiens
tctgagctcctgcagctcgtcagcccatttctgggatgccatggacaatattaccaggcagaaccaattctacgatacccaag

SEQ ID NO: 639853 - DNA, 100 bp, Homo sapiens
ttgcagaaggatgaaaaggctttattgccaaactctgcatatctatgtgagactgaattttcctcttagacttcagctaaaactgtgtattgcatcaggc

SEQ ID NO: 639854 - DNA, 100 bp, Homo sapiens
aagccaaagggcaggagaagacttgccgggaaaccgagcctcccgcgacgatgcccctcaacgttagcttcaccaacaggaactatgacctcgactacga

SEQ ID NO: 639855 - DNA, 100 bp, Homo sapiens
aacacagtagtggaagatgtaaagcaatatttcgagcagtttggcaaggtgaaagaacttgtcctggacaacagtcggtcgaatgaaggcaaactcgaag

SEQ ID NO: 639856 - DNA, 75 bp, Homo sapiens
tgctaaccatccctgagatcatcatcaaggacttgacacagcaagcaaaagacatacagaacataacagtccagg

SEQ ID NO: 639857 - DNA, 75 bp, Homo sapiens
gtctgtgtgagcagaggggagagcggccgccgccgctgccgcttccaccacaggcattcctgcatcgcatccggc

SEQ ID NO: 639858 - DNA, 75 bp, Homo sapiens
gttgatattacaaccagtgacactgcagaacccagtgacttgattgtaaaaatttacagagcggaatcatatgct

SEQ ID NO: 639859 - DNA, 100 bp, Homo sapiens
gatttgctgggtatgaataatgactttcctccaagagcacattgcctggtaagatgcagcagaatttcagcatttgctacttactggtagagaagaaaaa

SEQ ID NO: 639860 - DNA, 74 bp, Homo sapiens
tcgagcagctgctctcgggggctcactggatggaccagcccggtggcaccctggatctgaccctgatccgtgcc

SEQ ID NO: 639861 - DNA, 75 bp, Homo sapiens
cactgttggcaaagaaagaatgtcactaatttatttacaggagtttttcggagctgtacacgctgtcgctgcagg

SEQ ID NO: 639862 - DNA, 90 bp, Homo sapiens
ggactacagcacgacccccggcggcacgctcttcagcaccaccccgggagcatacatctgtggatggatatactgaaccacacatccagc

SEQ ID NO: 639863 - DNA, 90 bp, Homo sapiens
gaagggatacccttccatttcaaagaacagaatgctaaggaagctgtggcaattttcggctttgtgagaaaccttaccatcaaacacgat

SEQ ID NO: 639864 - DNA, 98 bp, Homo sapiens
cgggactgaggccgccctgcaccttcagcggatttggggattaggctcttttaggtgcgcttggtaattgctgaaaaggcattgaagtgcgaggaaca

SEQ ID NO: 639865 - DNA, 101 bp, Homo sapiens
gtcttccagagcgtgaagatcaagatcgggcttgctctcaattttgcgcaagttgaaaagtgcaccagaccaggaggtgagaatacttctcctgggcttgg

SEQ ID NO: 639866 - DNA, 75 bp, Homo sapiens
agcagctgcaaacccccgaaaaagaccctgtgtgagcagcttcggaaggagaacgaggctctgaaggccaagttg

SEQ ID NO: 639867 - DNA, 83 bp, Homo sapiens
cttcgcttctctgctgaccctctctcgtcgccgctgccgccgccgcagctgccaaaatgacgtgaccacgcagtctgtgatgg

SEQ ID NO: 639868 - DNA, 75 bp, Homo sapiens
ttttctttctcagaaagcagaggctcagagcttggagacagacgaggtgtgctctgaacaagccgagacggggcc

SEQ ID NO: 639869 - DNA, 75 bp, Homo sapiens
aagtctggcgtgatcaacattttgttaagattcaggtcaaagacagtgacattctgaaagttcccaaacctgaac

SEQ ID NO: 639870 - DNA, 83 bp, Homo sapiens
ggccacacgccccccctccttcacgccacacacacagacacctatggctgccgatgaaggctcagcagagaaacaggcaggag

SEQ ID NO: 639871 - DNA, 141 bp, Homo sapiens
tcatcactatacaacaaaacaggtcatcactaagaaatcaggtgtagttctgctgaatcctattcctaagcttccagctgatcttaccaagatgcatctcacagaaaaccctcatccacaggtgactcatgtgtcttctag

SEQ ID NO: 639872 - DNA, 80 bp, Homo sapiens
ggaaacttacgatcaggagtgttgcaacggttacagggtttgggggagataccattagatactccttcagcaaaaggaag

SEQ ID NO: 639873 - DNA, 80 bp, Homo sapiens
taacgcaggatccggctgccgaaggtcctcgccagccacagacccctttgcttctgtttttgggaatgaatcatttggag

SEQ ID NO: 639874 - DNA, 76 bp, Homo sapiens
ccgagatacagcagtctggttgccaaggatgatgaacgacagttgtcaaaatcttcccaagatcaatcagcagagg

SEQ ID NO: 639875 - DNA, 74 bp, Homo sapiens
gacagccctgtgtgacaccaagataagtaacgtccctccttgtggtccatttctgggcaccatgggctccacag

SEQ ID NO: 639876 - DNA, 101 bp, Homo sapiens
agcctattatgcccagacaagtccccagggaatgccacagcatcctccagcacctcaggatgttggttcctgcaaacaagaactgaccctatcacctctgc

SEQ ID NO: 639877 - DNA, 49 bp, Homo sapiens
cctgaactggtgtgtggtgatgctgagtgcaacaccagcctgtgcaaag

SEQ ID NO: 639878 - DNA, 75 bp, Homo sapiens
ctcacagctgcagtctaatagtaacacagagattcaagctagagccatctgtgagcctggtaaacgtgctagatt

SEQ ID NO: 639879 - DNA, 75 bp, Homo sapiens
ggcttcatgctgtgcagcaagaacccggatatgtttgccttcatgggcagcctggataccaagggtaccagctac

SEQ ID NO: 639880 - DNA, 50 bp, Homo sapiens
ccagcagccgccatggctctgctccgaggctgctctttggcgtaaattgc

SEQ ID NO: 639881 - DNA, 50 bp, Homo sapiens
gcctgaacaggcagggccagacccaggttgaaatcacaaagattagacac

SEQ ID NO: 639882 - DNA, 100 bp, Homo sapiens
tctacaatgactgcaccaacgcaagtagccggatcgagctgggagatgtgacaccacacaatattaaacagttgaaaagattgaatcaggtcatctttcc

SEQ ID NO: 639883 - DNA, 75 bp, Homo sapiens
ggacggtacttctgccactgctgctccgtggagatcgtcccgcgcctgccgatctgcagcctcctccgtggtggc

SEQ ID NO: 639884 - DNA, 82 bp, Homo sapiens
gggaggggggcagctggagcctcaggcggcagcgcttctaggttgaaatcacaaagattagacacctttttagataggtgtt

SEQ ID NO: 639885 - DNA, 100 bp, Homo sapiens
cgtgagcctcccgcccaaggagaatgcgctcttcaagcggatcttggttcgaggtgaattgctgcgggagagagtgcagcggatggaggcacaggaggga

SEQ ID NO: 639886 - DNA, 101 bp, Homo sapiens
agctggaagaacaattaagaataatggatcagaccttgaaagcattaatggctgcagaggataaggttctcaagactcagaagttagtgaagagcaaaaga

SEQ ID NO: 639887 - DNA, 100 bp, Homo sapiens
aatgtgtcagccgatgcaccgagtccagcccaggaaaatggagagggtgtgggccgaagatatgctcatgtggtgttgaggaaagcagacattgacctca

SEQ ID NO: 639888 - DNA, 75 bp, Homo sapiens
tggccggcagtcatctcgcggccgttcaggccgaatacatcaagcaatggtaacatctttaaatgaagataatga

SEQ ID NO: 639889 - DNA, 101 bp, Homo sapiens
tactgcaaggaacaaaatgtttgtaaattctccttttaccaagatgcagaatcctgatacactatcagcaatgtcaaaccctagagcaatgcaggccttgt

SEQ ID NO: 639890 - DNA, 99 bp, Homo sapiens
tcatcaagacctgggattttggtgtgaaatacgagcggattaagttcctggtcatcgccctcaagagctccgtggaggtgtatgcctgggcccccaaac

SEQ ID NO: 639891 - DNA, 83 bp, Homo sapiens
ctgcctacggaggtggcagccatctccttctcggtcttgccccagaagctgcgggcacatccacgcctgaaatgcggcgctca

SEQ ID NO: 639892 - DNA, 148 bp, Homo sapiens
ctagacagattattagcaatattatatagtatcgtggacagcagagttgctccaacagcaaatattttttcccaggtggagtacatcctgctgcttcaagggtagaagactcctcactgctttccttcatgagatttcaaaggaagtg

SEQ ID NO: 639893 - DNA, 82 bp, Homo sapiens
gtggaggtggctgacgagctgctgggctggacggcagtctggaaacgaccaatgagatcttggactctgcctctcacgactg

SEQ ID NO: 639894 - DNA, 100 bp, Homo sapiens
ggtcgcgggagtcgtagggaggacgccgggacacctggaagccgagaaatggtttgggttggtaccattgggtcaggccccaagggtcggaatctctgtg

SEQ ID NO: 639895 - DNA, 100 bp, Homo sapiens
gttttcttactgaacagctcaataaaaggtgcttcctggaggggcctgccccactgttcctgtgctgagttccaggacagcctcaacttcagctaccatc

SEQ ID NO: 639896 - DNA, 100 bp, Homo sapiens
gcgggaggagccacggagaaagtcagcatttaaatcaaacggtattgagatggattgggttatgaaacataatggtccaaatgacgctagtgatgggaca

SEQ ID NO: 639897 - DNA, 100 bp, Homo sapiens
cgtcgaagaggagggggctgcggtggccaccgcggcggagcccgagtctgcgggccaggcatcgacatccgcaacgactatcagcagctgaagcgcctgg

SEQ ID NO: 639898 - DNA, 51 bp, Homo sapiens
cagacggcgagacctcctgcacaggtgacagagttagtccttgataattgc

SEQ ID NO: 639899 - DNA, 75 bp, Homo sapiens
agtagcaaatgagatgaaccatcttcctgcacacagccaaagtctgcaaagatttggagtcaaaatatggacctg

SEQ ID NO: 639900 - DNA, 101 bp, Homo sapiens
gcatctccagtgacgggcgcccactagagaggcggtacctgtttcccaggcaactactgatcaggcatttctggaccccaaaacaacaaactgatttctta

SEQ ID NO: 639901 - DNA, 74 bp, Homo sapiens
ttcgaggagatggagggaacctccccgagcagcccaccacccagtggggttttccaagagataacttcaccaag

SEQ ID NO: 639902 - DNA, 115 bp, Homo sapiens
gcaatatacctgctccaatgacagtaggaaatattcaggcatctcaacaggttccaggaagaaggtgcattttggcagcatacatgatgcagtacgagctggagatgtaaagcag

SEQ ID NO: 639903 - DNA, 100 bp, Homo sapiens
cacctgcgctgtgatgcctgcagagctgtggcttaccagatagaagaggagttatgggaagaagaatttattgaacgctgtttccaagaaatgctggaag

SEQ ID NO: 639904 - DNA, 75 bp, Homo sapiens
gcccagcccaaaccaggagattgcgagggagcgatgcggtgcagcgcgagctgcggtgcaaccctgggcagtttg

SEQ ID NO: 639905 - DNA, 87 bp, Homo sapiens
atcgcttgggagagctcctgggccacccctcctttcaggtcaagggagcatttcctgaagacgtagtcatgcagcacgtcagcagct

SEQ ID NO: 639906 - DNA, 82 bp, Homo sapiens
ccggtatgggcccgcctgaccctgggcgccgcgccgcacgagcaccagcctagagccaggaggaagaacgtgcaaaacgtga

SEQ ID NO: 639907 - DNA, 75 bp, Homo sapiens
ctgcactgagcgggacctgcgagcagcgcgggcggcagcccgggggaagcggaggactcagagagagtaatgata

SEQ ID NO: 639908 - DNA, 96 bp, Homo sapiens
caggggtcttgtgcaggacctgaaagtgttccagcaacagatagaaatgctttaagttcactctggggaaagctggcctctgaaatcttaatgcag

SEQ ID NO: 639909 - DNA, 82 bp, Homo sapiens
gggttattcgagtgaccgagaccgcggccgggaccgaggcagtgactcttcgagaagacagtgccaagaggttggagaggag

SEQ ID NO: 639910 - DNA, 100 bp, Homo sapiens
tccctttgcctcatcccaggttgccttggaaaatgccaacgccgtgtctgaagatcacccggaagttcaggctgaattctgaaggcaaacttgagcagac

SEQ ID NO: 639911 - DNA, 97 bp, Homo sapiens
cagaggatggtcagtgtgccccaggtgaaggccagtgctctcaaggccaaagaggtgctgaaaaaatatttggagtccaaggaggatgtggctgatg

SEQ ID NO: 639912 - DNA, 82 bp, Homo sapiens
aggcaccttcgggccctcctgccttcatttgcttgctgaaaatggtcgattaagcaatacccaaggagtcgtttctgccttt

SEQ ID NO: 639913 - DNA, 100 bp, Homo sapiens
agggagttgtcggcgccgcggccgctgcggacggacgctcgcctgccggctgaggctactgcagcactggggtgtcagttgttggtccgacccagaacgc

SEQ ID NO: 639914 - DNA, 100 bp, Homo sapiens
gccggacacgctctgcttcgacaaggacgagttcatgaagtgttggagtttccagatcaaaagatgtgccaccatttggcccaccgattcccaaaggtgt

SEQ ID NO: 639915 - DNA, 100 bp, Homo sapiens
agactggttcccgatttcatgcaatactgtggcacaagcatttggatgatgcatgtaaaagcaacaggcctcaggcgtggtgtccctcgtggccgttcac

SEQ ID NO: 639916 - DNA, 75 bp, Homo sapiens
gaaagataggcggccatggtccaaccttgaaggagcaatttacagcaatgagggatttatacatgaaaaatggac

SEQ ID NO: 639917 - DNA, 80 bp, Homo sapiens
ttgctagtaacgtcatggaggatgaacgacagtattggtaaaggttttcaaggtgtcatgaaaagatggggatttaaagg

SEQ ID NO: 639918 - DNA, 98 bp, Homo sapiens
cggggcggctccggcgcctctgcccgccgttctgctcgctcgctccccgctctggaacactacaacaacaggagtgcaaacttctctacagccgaaaa

SEQ ID NO: 639919 - DNA, 138 bp, Homo sapiens
cacgatgggaagaggggaaagcccaggggtacaggaggcctctgggtgaaggcagaggctaacatggggagaggcaagagaaagctctgggcatcctgacatacctgggccagagtgcagcggaggcacagactcaac

SEQ ID NO: 639920 - DNA, 74 bp, Homo sapiens
cgaagctgagaggattcctaaccttcctcttcagagagcctcaggtttttcgttggaatatacgttgcacattt

SEQ ID NO: 639921 - DNA, 137 bp, Homo sapiens
taccaaatgcttattttctgcttccaaaggtccagagcattcagctgtctcaaatgcaggagttgatccctgaattttattatctccctgagatgtttgtcaacttcaataattataatcttggagtgatggatgat

SEQ ID NO: 639922 - DNA, 100 bp, Homo sapiens
cggagaccctcgaagtgcgcaaacttgacactcaccctgaccggtgctggagaatctggtaaaagcaccattgtgaagcagatgaggatcctgcatgtta

SEQ ID NO: 639923 - DNA, 83 bp, Homo sapiens
aagcagcatagagaatgagatagccgtcctgagaaagacactcatgaggaccatgatacttccactgagaatacagacgagtc

SEQ ID NO: 639924 - DNA, 83 bp, Homo sapiens
ccagaatttcctgcgctgttccacctcattcaacttcaggtgagcgagtgctgtgctttcatgggcctcttctttatgaagca

SEQ ID NO: 639925 - DNA, 97 bp, Homo sapiens
ctggagaaccgctgccagagcctgcaggaggagctggacttccggaagagtgtgttcgaggaggccatcgaggagggcacgctggaggagatcgaag

SEQ ID NO: 639926 - DNA, 100 bp, Homo sapiens
ctcttcagttctctggagccccagattcaacccgtgtacgtgcctgtgcctaaagatgttttcactccagaatgcaaattcaaggaatctgtgtttgaaa

SEQ ID NO: 639927 - DNA, 100 bp, Homo sapiens
gggagaacctgcggcggccggagcgaactcccccactggaaaggattctgaaagaaatgaagtcagccctcagaaatgaagttgactgcctgctggcttt

SEQ ID NO: 639928 - DNA, 90 bp, Homo sapiens
cccgctgccgtcgccgccgccaccatgcccaagagaaaggtgaaatgacaatggatgctctgttggctcgattgaaacttctgaatccag

SEQ ID NO: 639929 - DNA, 113 bp, Homo sapiens
gcgagcacagagcctcgcctttgccgatccgccgcccgtccacacccgccgccagctgcctgtggaggaaccgattgtgtccacagatgaggtcatcttcccactcaccgttt

SEQ ID NO: 639930 - DNA, 75 bp, Homo sapiens
ccatgggaaaggagagtggatgggactcagaccttctcttccaccttctaaacaagctaacaagaatctgatttt

SEQ ID NO: 639931 - DNA, 51 bp, Homo sapiens
agctggctaaccagaccgtgggcaggtgaacatgggtgatcggtttgggca

SEQ ID NO: 639932 - DNA, 82 bp, Homo sapiens
tacaggacatagcaactctggctgatcaaagaagagcagcccatggatacttctacatagacataatcaagttttgactatt

SEQ ID NO: 639933 - DNA, 90 bp, Homo sapiens
gctcctcccacgtttcataaatttctaagggacttgccatgaggtgttgaagccttgtttcactgagttggagagactggacctaaatgg

SEQ ID NO: 639934 - DNA, 98 bp, Homo sapiens
gaagtctgcaaaagagccttgaaggaagttagcaagatgatgaataaggtatttggaggtactgtgcacaaaaaaagtgtcagagaagatggagtttt

SEQ ID NO: 639935 - DNA, 74 bp, Homo sapiens
ttcagatgcagactacagctctggagtttaggcaacggattatcttacgacatgacaatggatgaagtccgaga

SEQ ID NO: 639936 - DNA, 100 bp, Homo sapiens
aataaccaactgcaattcctacctccaggatgttggttcctgcaaacaagaactgaccctatcacctctgcctcacagtgggtaaatatatcatacatct

SEQ ID NO: 639937 - DNA, 74 bp, Homo sapiens
cccctagaccggtttttagtccattgactatgcagcctaatgaaggacagaataacgggctcccagattcacaa

SEQ ID NO: 639938 - DNA, 99 bp, Homo sapiens
agcggccctggcgggtgccctggctaccatggaccatcctgctggtcagcactgcggctggtatgtcgagagtaccaacgtggcaattgcaaccgagga

SEQ ID NO: 639939 - DNA, 100 bp, Homo sapiens
agaggccttctctagaccttgccaagatggcacaggcaggtgacagcagggacatgtctcgggagatgcaggatgtagacctcgctgaggtgaagccttt

SEQ ID NO: 639940 - DNA, 75 bp, Homo sapiens
agagcgtctggccaagaatcagaggaagtgggtggctgtgttactgcaacgtgccacagttctgcgacagtctac

SEQ ID NO: 639941 - DNA, 100 bp, Homo sapiens
ggcttaaagggcaagaacgtgcggatttatcaaatagccttgaggaaatatatattgagaaagatcagtctaaagaaaaggagaagaaagtgaaaaaaac

SEQ ID NO: 639942 - DNA, 83 bp, Homo sapiens
attgtattcgaagtaaagataccgatgcacttatagatgcaattgacacaggagatgctaacatcagagaagttggccttgag

SEQ ID NO: 639943 - DNA, 115 bp, Homo sapiens
agctgctgctggattgaactcagagaagccgggtgcacttgcaggaaagacatggtgaagatttcaatggatatctttgtgaggaaatttcagccagacagatatcagctttgga

SEQ ID NO: 639944 - DNA, 100 bp, Homo sapiens
ataagatcaatgccctcattaaagcagccggtgtaaatgttgagcctttttggcctggcttgtttgcaaagtatttcagacaacttttaagaggtgcaga

SEQ ID NO: 639945 - DNA, 75 bp, Homo sapiens
tggggcggctggtgaagaggatcccggagtctcgaatctgctacatgctagatacctactggagcaggatttccc

SEQ ID NO: 639946 - DNA, 96 bp, Homo sapiens
ttggagagctcatctggaattttgccgatttcatgactaaccagtgatgaaacaggcgcctatttaatcgacagagaccccacctactttgggcct

SEQ ID NO: 639947 - DNA, 100 bp, Homo sapiens
ctgctgtgtgggaagaagatttgtaaagaaaactcttaggtgttgggctggatcttgatagcagttgttatcatcattcttctgatttttacatctgtca

SEQ ID NO: 639948 - DNA, 98 bp, Homo sapiens
tggatgccaactctgcccttatggaattggacaaaggatcttaagtaccaggcccaagataactttatgatgatggatgatgctgtcctctgcatgtg

SEQ ID NO: 639949 - DNA, 95 bp, Homo sapiens
gagactggcggagctggcggggagtcgcgggcgcctccgcctcaggtaaagattatagttcccaacagcacagcaggtctgataatagggaaggg

SEQ ID NO: 639950 - DNA, 75 bp, Homo sapiens
agccccttgccaggagtgttcaagatgctctctctggaccgatcccactatgagctgaagcacattattggggct

SEQ ID NO: 639951 - DNA, 87 bp, Homo sapiens
ctaagcatccagaggccctgagcagctttcagcactggagcccgagaccgaggacgagaagaagcgctttgaggaaggcaaagggcg

SEQ ID NO: 639952 - DNA, 82 bp, Homo sapiens
cgaaggggagccatggcggctgacagtcgggaggagaaaggtgacttaagagattaaaattaatttggttgctgttggttct

SEQ ID NO: 639953 - DNA, 96 bp, Homo sapiens
ccatactacattcgcttaaattttgcagagaaagggttgcttttgtaatgaagaagcacttaaatactcatctactaggcaagcatggagttggca

SEQ ID NO: 639954 - DNA, 100 bp, Homo sapiens
ctaaaagtccccgcccagaggccaattcgtcgcggcggcggtggagatcgcaggtcgctcagacacgaatgcagagtttgagtccagatcccaaagccca

SEQ ID NO: 639955 - DNA, 90 bp, Homo sapiens
taaaagatgacagacttggacaacatgtcccaacattacatcccaccaaatgatttctcagtatcactaaaagcacaagggaaaaacaag

SEQ ID NO: 639956 - DNA, 50 bp, Homo sapiens
tcggaatggacctgtgccacccaggctagcttgtcactttctgcaaaggt

SEQ ID NO: 639957 - DNA, 100 bp, Homo sapiens
ctgagccaggacctgggtgggggcaccctggccatggacacgctgccagataacaggaccagggtggtggtcaacgtattgaaacttactgttgaagact

SEQ ID NO: 639958 - DNA, 95 bp, Homo sapiens
ctcccccgcgtccctgcgaccgccgcggcgaagatggggcaagctctgtgtgattgattggaagacatcagagaaaccaaagccttttattcaaa

SEQ ID NO: 639959 - DNA, 75 bp, Homo sapiens
ctcaggcctgcacggacggtgttggttggggtgaacctggattcttgcaccagggaagagacaagccggaacatg

SEQ ID NO: 639960 - DNA, 100 bp, Homo sapiens
ggagcggccggtccacggaggagggccgttgctccagggagaactgcaaatatcttcatccacccccacatttaaaaacgcagttggagataaatggacg

SEQ ID NO: 639961 - DNA, 100 bp, Homo sapiens
cggagactagaggctggataccaaatagcagtggaaaccgagctatttatgaagaaattgatgctcaccagcacaaaggagctcaaaatgatggtgactg

SEQ ID NO: 639962 - DNA, 99 bp, Homo sapiens
gatcattgacctcgtgttggaccgaattcgcaagctggttggaaacacttttactgtattatctatgaagaaacgtttttgaggccattaagtcctaca

SEQ ID NO: 639963 - DNA, 75 bp, Homo sapiens
ttctgcgggatcttcaaccacctcgagcggctgctggacgaagttctaggcacagacagggtggagcagatgacc

SEQ ID NO: 639964 - DNA, 100 bp, Homo sapiens
tttgatgtgcgcaatggagggcagatccttatcgccgacctcaggggaaacattgcagcggcccgtgtggaacataaacagagaactaggcctgcctcat

SEQ ID NO: 639965 - DNA, 100 bp, Homo sapiens
ggaagaagcctggtctccggggccgctggattctgaggaccagcagatggccagtcacgagaacccagaacgatgccaacgggactgcaaagccgccttt

SEQ ID NO: 639966 - DNA, 83 bp, Homo sapiens
gaaggactcaccgaggcgcaggggctggaggtggtgctggggggggatatgagactttctactcggaatatcctgagtgttgc

SEQ ID NO: 639967 - DNA, 100 bp, Homo sapiens
ggttggaggaggtagatcaccctttctgcgggggacgatttcgtcggtggtaggcatctaataggattcaggaatcaaagaatcagtgtactcaggtggt

SEQ ID NO: 639968 - DNA, 50 bp, Homo sapiens
gcttccacaagaaccgcgaggacagaggctacgtggaagccgataaggag

SEQ ID NO: 639969 - DNA, 75 bp, Homo sapiens
tggcgccaggacgaaggccctactgggcaaggagctgaagtgggaatcagtacatcgagaatccacgcccgggga

SEQ ID NO: 639970 - DNA, 117 bp, Homo sapiens
cagtaatgcagccacctgttgcctatccagaagaaaatacactactcatcaaggaagaaccagcctcctgacaaggtgatccgggcgggccccgcaggaattttatcccctcaccgg

SEQ ID NO: 639971 - DNA, 100 bp, Homo sapiens
tacaagttcctgcagttcgcttacttcaagatgacggtcgaaccaaacccattccaaagaagggtactgtggagggctttgagcccgcagacaacaagtg

SEQ ID NO: 639972 - DNA, 90 bp, Homo sapiens
ccgcgccaccggcccgcgccccgccatggaggacctgggtgtattacctgactgcttaaccgatggctctgatgtggtcagtgaccttga

SEQ ID NO: 639973 - DNA, 100 bp, Homo sapiens
ttttactacagcaacagatgtccaaaatgcaatatagtagtacatcagacacaacctctttataacataaggctccagaaatgggaattaaatacatact

SEQ ID NO: 639974 - DNA, 75 bp, Homo sapiens
cagccctgcctctccctgggctctgaacggtggcagccgaagttaggaagcagatctccggacaatatagtggtt

SEQ ID NO: 639975 - DNA, 90 bp, Homo sapiens
ccgttagctaattaaaacatttttcagggacgtagccatccagaggtgtccaccccccagggttcctgacccctgcccctggacagcgac

SEQ ID NO: 639976 - DNA, 101 bp, Homo sapiens
gggcggtatgcgacacacgggccaaatatcgagagggacgacggcctcgtgctgtgaaggtcaatgtgacggtggactacattagaccagccagcccagcc

SEQ ID NO: 639977 - DNA, 74 bp, Homo sapiens
cggcccacagtgggggtgtgcaaacccgagagaactggcaggaacgaatgcaggaatttgggaactgagctgtg

SEQ ID NO: 639978 - DNA, 89 bp, Homo sapiens
ctaaactgcccttgaaatgaagctggacttggagctccaccgggggacggctacgtgcaggcggacgcccggggccccccggaccacga

SEQ ID NO: 639979 - DNA, 88 bp, Homo sapiens
cttgggaggctccgttgcctgctcccggagggagacgcgctgccgaggagaacccagcggggacatgagagatggctttagaagaaaa

SEQ ID NO: 639980 - DNA, 100 bp, Homo sapiens
gtcatgttggagcaaggaaaggaaccatgggcactgcagggtgagaggccacgtcagagctgcccaggtgcccttgctcgtgtgaatgaacagaggccag

SEQ ID NO: 639981 - DNA, 83 bp, Homo sapiens
ggagcgcaaggtcgccctcaaggccatgatcaaaacctgggatagatgggcagcagaagatcatgtgcttcgtgataccgatg

SEQ ID NO: 639982 - DNA, 82 bp, Homo sapiens
agttggaagcagccgatccagcctgcggagcctgtggggcaggaaagagacggctttggaggcctggcagcagccagaggaa

SEQ ID NO: 639983 - DNA, 100 bp, Homo sapiens
acctttgttcctcatcgcagcagttgttttggtgatgacgaacagagtgattggttctatgaaggagaatgtgtcccaggattcactgtccctaatcttc

SEQ ID NO: 639984 - DNA, 87 bp, Homo sapiens
tggataagctgaaggaaagagctcaaagatttggtttgaatgtctcttcaatctccagaaaggggataaaaacattcagatggcaga

SEQ ID NO: 639985 - DNA, 98 bp, Homo sapiens
gattatatcaatgccaattatgttgatgtgctccttgtcttctgagatgttgggcccctcttgggatggagatgaagcagaatccactggtgaaatca

SEQ ID NO: 639986 - DNA, 75 bp, Homo sapiens
ctgtgcgctcgatccagcaccatggggaagcgggacaatcgggtgtatatgactctcaacccttctactaagagg

SEQ ID NO: 639987 - DNA, 50 bp, Homo sapiens
cctgtcctcaggcatatcaaaggattcactccttctccagttgcacagcc

SEQ ID NO: 639988 - DNA, 83 bp, Homo sapiens
ctccaggccaagagggatccttcacccgtgtctgtaaccctccactgagtgaagaaatgttgcctcctggagagtggatgtgt

SEQ ID NO: 639989 - DNA, 75 bp, Homo sapiens
aaatagatctctcggctctgaggcctctgaagagccaatccattcaggatgggaaaccacgcaggcaaacgagaa

SEQ ID NO: 639990 - DNA, 89 bp, Homo sapiens
aatatctgtcttcggtggactccttcggcagtccacccaccgccgccgcctcccaggtctcctctgagcctccggcctccataagaccc

SEQ ID NO: 639991 - DNA, 100 bp, Homo sapiens
caacatacagtgacgcttcacaggggtgaaaatcctatttataagagtgccgtaacaactgtggtcaatccgaagtatgagggaaaatgagtactgcccg

SEQ ID NO: 639992 - DNA, 100 bp, Homo sapiens
gtgttcgttgtgccagcgactaaaaagagcaatgcagcaagtcttggaaaaccttacggagctgccctcgtctactggagcagaagaaatagacctaatt

SEQ ID NO: 639993 - DNA, 90 bp, Homo sapiens
ctcaggtccgcagtggaggccacatcaactcggcgccttgggaaccgctcgagcctaccagttttcatggagtgataatgaaaggagcag

SEQ ID NO: 639994 - DNA, 75 bp, Homo sapiens
ggacgctgccagtttgcacagcagcagatctgttacctaaagcaataaaaaatggccagaggatcagtgtccgat

SEQ ID NO: 639995 - DNA, 50 bp, Homo sapiens
ctggggcgcaccgccaagagctggggtgctggagaatctggtaaaagcac

SEQ ID NO: 639996 - DNA, 112 bp, Homo sapiens
aggaaccgggatgtgctttttatggatctcatcgagcttatgcagagcagcgagctatgtcttatggtgaaattgaaggtaaattcttgggacctagagaagaagtaacgag

SEQ ID NO: 639997 - DNA, 50 bp, Homo sapiens
acatgtggaccctcagcctgggtcgcctggaggccaaccagaccctggag

SEQ ID NO: 639998 - DNA, 98 bp, Homo sapiens
tgtacgcctcctgccaacgggacagacagtataatgggtcgacgtgttgatgcccaatgttggtgagattgtgggaggctcaatgcgtatctttgata

SEQ ID NO: 639999 - DNA, 82 bp, Homo sapiens
aacaaaaatgagtgtgaggcgaacagccatcccgggcactatgtgaatttgggacctgcctagagctggaacgttacctcca

SEQ ID NO: 640000 - DNA, 90 bp, Homo sapiens
ctggatctggccaacaccaccggcacagtgacggcttcagaggctattcctacttgtacggactttgaagtgattcagtttcctctacgg

SEQ ID NO: 640001 - DNA, 74 bp, Homo sapiens
gcgcttcaaaggaccggacccagagaagaggaaaactctaccggtgcagggatgggcgtgttttgggcgtgcta

SEQ ID NO: 640002 - DNA, 83 bp, Homo sapiens
ttaaaaactgctccaggcggccggacggcgggacaacgcctcctcacttgctcctctacgactagacgcttgaagcaaagctg

SEQ ID NO: 640003 - DNA, 73 bp, Homo sapiens
ttggaccctcctcccaactgtaggtaaaatctgtaaaaactgggtcagttttttggacaatgtgctgctgctt

SEQ ID NO: 640004 - DNA, 100 bp, Homo sapiens
taataaaagaaatgaattctgccaaagagaaatataaagaagctttagctaaaggactttggcatggcagaggaatttgcttccaaggctctcgaattga

SEQ ID NO: 640005 - DNA, 100 bp, Homo sapiens
ccggtgacctccctcctccgagggaggggggttgtgaccccagggaagatcagttttcctgccatccaggctgctccctccttcagcaactcattcccac

SEQ ID NO: 640006 - DNA, 100 bp, Homo sapiens
ctgaagctccccatcaagggaatgaacttcacacagttggtagcaagaccttccagtataaactatatggtggctcctgtaactggtaatgatgttggaa

SEQ ID NO: 640007 - DNA, 73 bp, Homo sapiens
aacttttggccaagagaatgaaggtggcaagaagaagccactgaaacagcccaagaagcaggccaaggagatg

SEQ ID NO: 640008 - DNA, 80 bp, Homo sapiens
gcccacactgaccccgggggagcggcagcagaatgttgtaccatctttgggtaggcagacttccctgacgacatcagtga

SEQ ID NO: 640009 - DNA, 100 bp, Homo sapiens
tggggacgaagagctgcagctcctcctgtgcggggatcaagtttgtggttctagcagatcctaggcaagctggaatagattctcttctccgaaagattta

SEQ ID NO: 640010 - DNA, 127 bp, Homo sapiens
tttgaagagaaaatggaggaagcagaaaccagaaactttaaatcttgagaaaagaagattgtctatcatgaaggaggttcatccacataaaacttatttcacagtagctgaaaaagggagttttcca

SEQ ID NO: 640011 - DNA, 83 bp, Homo sapiens
cagccagctgggtcagcccagcattttcgatacccagaaaggtcaggggccaggaggaggctggacggcagtctggaaacgac

SEQ ID NO: 640012 - DNA, 90 bp, Homo sapiens
cttcaaaaagttctgaaaacatgttggcttctgcttcagtttacccaacctcagcaaacatcgtttgctttggagaggaacttaaggact

SEQ ID NO: 640013 - DNA, 75 bp, Homo sapiens
ggccgatgaagtgcagaggtttttttctggtcacacatcccgggtcctgagtctgaccatgagcccagatggggc

SEQ ID NO: 640014 - DNA, 100 bp, Homo sapiens
aggccagatgcagatctgaagacctattttactgataagaaaacacatctttacacactaacagcagtgttgtactgctacttctataaacggacagccg

SEQ ID NO: 640015 - DNA, 87 bp, Homo sapiens
agcttaacttcttatccatcccatctcttggacagatgatgccagttaattactttgaatctgtgctgtcgtcatgcctcaaacccg

SEQ ID NO: 640016 - DNA, 48 bp, Homo sapiens
ggagctccccattagcggaggcagatgagtttgatgcctacatcattg

SEQ ID NO: 640017 - DNA, 101 bp, Homo sapiens
ctcagtcagtctcttggtttggtctctaaaagtaaagggtttcttgagtacaggcgatcaggctgcaaaggggaactatggactccttgatctcatacaag

SEQ ID NO: 640018 - DNA, 75 bp, Homo sapiens
caccaaaccaatttctcctgcaaaccagggtatcagagaccatcattgaatgtctaaaatatatttgtactggag

SEQ ID NO: 640019 - DNA, 75 bp, Homo sapiens
gcagccgatccagcctgcggagcctgtggggcagcgactgcatttgcctccagacttgtcagacacagtgagccg

SEQ ID NO: 640020 - DNA, 100 bp, Homo sapiens
ctggcatcttcgctctggccctggaagcaaagtttctggtcctcataccgtgtggttgagtgaaatcaaaacttccacgatagcaatgctgattggacaa

SEQ ID NO: 640021 - DNA, 76 bp, Homo sapiens
gtagaaggctgcacagagaagttcaagaccagcagagaccggaaggatcacatggacgagattgaggagctgcggg

SEQ ID NO: 640022 - DNA, 96 bp, Homo sapiens
accagattagccagatctccatgaagtcgccacagctgattttggtgaatatggccagcttcccagaggcagttgaagatgactttgtggaaatgc

SEQ ID NO: 640023 - DNA, 51 bp, Homo sapiens
aaatttccatcggaatatgtaccgactgatgaacgtgaagccagagaaaat

SEQ ID NO: 640024 - DNA, 75 bp, Homo sapiens
cgagccttggagctggagcaggagctgcgccagagctcgtccgcatggtgctgaatggctgaggaccttcccagt

SEQ ID NO: 640025 - DNA, 75 bp, Homo sapiens
aaatcaagcaaggcaatgacaatggttttgcgtgtgaagctgtgtggaaatgtgaaatactaccagtcacaccat

SEQ ID NO: 640026 - DNA, 75 bp, Homo sapiens
caaacttggattttttccagtctgatccttttgttggcaggcatttgtttacctgagcaatctgctgtatcccgt

SEQ ID NO: 640027 - DNA, 98 bp, Homo sapiens
ggggattgataggcagcatattcctgatacatatctatgtgaacgttgtcagcctaggatgcgactctgtacaagtgtcacagaaagtgaggttgcac

SEQ ID NO: 640028 - DNA, 101 bp, Homo sapiens
cgcggagggaagacgccctggtgctcaccaagcaagaatgaaatgaatgatgtgcctttctttgatatccaactgccttacgaattggcaatcaatatatt

SEQ ID NO: 640029 - DNA, 75 bp, Homo sapiens
tctatgaggtagatattaaaccagacaagtgtcctaggagagtgaacagcacccagtcagcttgaagagtttcaa

SEQ ID NO: 640030 - DNA, 100 bp, Homo sapiens
gtgagctgaatggaaaaaacattgaagacgtcattgcccagggttgtgtgttggatttgacatagatgaagacgcattggaaatatttaataggaatgca

SEQ ID NO: 640031 - DNA, 89 bp, Homo sapiens
ttcacacagctgcttccattggccagtatgaagtggtgaaggagtgtgtgcagcggatggccaggccatgttatgggatctcaacgaag

SEQ ID NO: 640032 - DNA, 82 bp, Homo sapiens
acaccctggaagccaggaaatgaatcagcatgattcttcagaggctcttcaggttctcctctgtcattcggtcagccgtctc

SEQ ID NO: 640033 - DNA, 100 bp, Homo sapiens
tccggcccgggcgagcgggtgcgtctgccgcagagtcggcacctgaaggacatggagcaaatcctgaaggaacccaaagtggctgcttctgttttgaatc

SEQ ID NO: 640034 - DNA, 75 bp, Homo sapiens
cttggacatatcaagcattggtgcacgatgtactggattgtctcaaagcttgccaggagcagattgaggcggtgc

SEQ ID NO: 640035 - DNA, 100 bp, Homo sapiens
gaggccaggtttactggagtaggtgttagtaagttccagaaaaggagacctgtttagatttggctggcaacccaggaatcctattgtttgaaatcctatc

SEQ ID NO: 640036 - DNA, 82 bp, Homo sapiens
gagaccagacctgcaagctctttgacacacagcagttcttgtcagtcgtgcacacctcctgtgtgccaggcacccagctgga

SEQ ID NO: 640037 - DNA, 82 bp, Homo sapiens
ctcccagtgacgggtctggagtgcgtgggggaccggctgttggcgggttatggaaacaaaggacatgctttacatcgtcact

SEQ ID NO: 640038 - DNA, 100 bp, Homo sapiens
ttctggccgctgagtgccgcgtaccaggacagcgagaggaaggcgcacaggcagaagagcagcagcgtcaggaaggcgacgttgtggacgtttaccagcg

SEQ ID NO: 640039 - DNA, 75 bp, Homo sapiens
agtgaaatcagacccacaacgaatgaatgaacagccacgtcagatatcgtgttgaagggataattccagaatcac

SEQ ID NO: 640040 - DNA, 101 bp, Homo sapiens
atcaacaggggcaaatcgaagtagagagcgaaaccatcttcaagttagcagcgtttattttacagtggaatgcagtagccctctgggcctgggatattgtg

SEQ ID NO: 640041 - DNA, 50 bp, Homo sapiens
ccatctgaattggctcaatgatgagtacaatgccagtgtttcagtcccag

SEQ ID NO: 640042 - DNA, 100 bp, Homo sapiens
ctgccactgtgaccacctggacgcagacccagacacttttgaaccccaaaaattcttccagacatcaggcctctccaagatgtcagccaatcaggtgaag

SEQ ID NO: 640043 - DNA, 97 bp, Homo sapiens
tcgcgggaagacttcgagtgggtctacaccgaccagccgcacgccgaccggcgccgggagatcctggcaaacggggattcagcgtccgatcctttgg

SEQ ID NO: 640044 - DNA, 50 bp, Homo sapiens
ctggcgccagcctggagcccaacagaattatgggcccaccgtgttagtgc

SEQ ID NO: 640045 - DNA, 97 bp, Homo sapiens
ttggggtcatggcgccccgaagcctcctcctgctgctctcaggggccctggccctgaccgatacttgggcgggcacccgagtgtacagccccccgga

SEQ ID NO: 640046 - DNA, 83 bp, Homo sapiens
ggtgccgtggcatgtcgatttgtccttcactacagcagcctcccgcgacgatgcccctcaacgttagcttcaccaacaggaac

SEQ ID NO: 640047 - DNA, 75 bp, Homo sapiens
ggacaaccagcgaacattaggttaaaacagagatccatggaggagcaggacttggagcgaaggttcgagctgctg

SEQ ID NO: 640048 - DNA, 134 bp, Homo sapiens
cccagccgaccttgagctccaggagttcgtctcttacgtctgcggaagtgcagctgcctcagttcttagcgcaggggcaagattcttgccaagagaattaatgtgcgtattgagcacattaagcactctaagag

SEQ ID NO: 640049 - DNA, 82 bp, Homo sapiens
gatgatgaggatgacgatgacgatgaggaagatgactggattatggacagaacttggaaatattgagaataatttcttaaag

SEQ ID NO: 640050 - DNA, 113 bp, Homo sapiens
ctgaacaggctgcaggtgatgctcctccaccttacagcagcatttctgcagagagcgcaggagtagcccatcgaagccagagcagtgaaggagtcagttctctcagcagctcg

SEQ ID NO: 640051 - DNA, 100 bp, Homo sapiens
tcggacacctaccaggtggacggcacggacgacagaagcgactttggtgagactctgcctgagagacactctcgtaagttacatgcaaactaaagaaagt

SEQ ID NO: 640052 - DNA, 100 bp, Homo sapiens
gtgacctcctcttagaagagtcaaatgttcagccagtatcaacaccagtaacagtgtgtggagatatccatggacagatcatacatctgtcggtggcctg

SEQ ID NO: 640053 - DNA, 100 bp, Homo sapiens
ggaagacagtggcattcccacagaagcattcttggcatcatgttatgctgtggttccagtattaggaacggcagagtcgaaacaaacaatgagggcgaac

SEQ ID NO: 640054 - DNA, 100 bp, Homo sapiens
ctcaagcagagcttacagtgcaaggaaatgctctatgtacagtgaagtgtgatgagaaagtgaaagtgttttctgtccgtggaacatcctttgatgctgc

SEQ ID NO: 640055 - DNA, 83 bp, Homo sapiens
caggcgtgcaccaccatgcccagcactatgagatgcttgctaatcgaacagctgcaaatggtcactgcattgatatttatgct

SEQ ID NO: 640056 - DNA, 75 bp, Homo sapiens
taaagcagcgtgcgttcagccctgggagtgcagccgtagcagagcgggagagggtgagccggctgtttgcagatg

SEQ ID NO: 640057 - DNA, 74 bp, Homo sapiens
acagttcctaccttatgagctcggttttcttatgcttataagagtggaacagcacccacatgcaggatctccag

SEQ ID NO: 640058 - DNA, 100 bp, Homo sapiens
tccagccgaaggagaaggggggttccaggtgccctggctggagtcagtcctcatcgtagtcagcaacaacattgacgaggaggcgctggcccgactggcc

SEQ ID NO: 640059 - DNA, 109 bp, Homo sapiens
tctggacagaccaacctgtcagtgctgcaagtgattgaaatctctgaatatcgaacccagctctatgaatatctacaaaatcgaatgatggccattgcacccaatgtta

SEQ ID NO: 640060 - DNA, 83 bp, Homo sapiens
cagacacggtggctactctgcctcggggacgaaagcagatatgtgtcacaaagatgtctacacggaactgccagggaatggac

SEQ ID NO: 640061 - DNA, 75 bp, Homo sapiens
aaagctgagctgcgaggaaaatggcggcgggaggtatcatgatattagctggtttgacatcaagtcatttgtgag

SEQ ID NO: 640062 - DNA, 90 bp, Homo sapiens
gtcagagctgcacaaagggaaagggagccccttgtggcagcagcactacctgcccagaaaaatgctggaggctgggcgtggccccaggcc

SEQ ID NO: 640063 - DNA, 51 bp, Homo sapiens
ggagatgcctggcagccccgctctctgcagccttggacaagattcgctatg

SEQ ID NO: 640064 - DNA, 75 bp, Homo sapiens
atcagaaggcaaagatgtcggagcgaaaagtattaaacgtgctggagaatctggtaaaagcaccattgtgaagca

SEQ ID NO: 640065 - DNA, 98 bp, Homo sapiens
atgcgctgagcgatttcttcgaggtggagtcggagctgggacgggattgtgtgcacactctgcattccagggacacgtggctgaagaaagcaagagtg

SEQ ID NO: 640066 - DNA, 50 bp, Homo sapiens
acattgggaagtcagtctccaccacaaatctatgggaccccctccagcag

SEQ ID NO: 640067 - DNA, 102 bp, Homo sapiens
tgctggaggtttggttctcccggcagcagcccgacgcaaaccaaggatctggggatcttcgcactatcccaaggaccgccgggagagcctgcccacctcccc

SEQ ID NO: 640068 - DNA, 92 bp, Homo sapiens
tgctgaagaaaaccaagaactctgaggagtttgctgcagccatgtccagagaataccttctgcctcctgagacacagcctctccatgaggtg

SEQ ID NO: 640069 - DNA, 82 bp, Homo sapiens
gggtgagaagatcctgggcagcctccagcagggacctgtgacaggataccagaaggccctattgatcaggggccagctatag

SEQ ID NO: 640070 - DNA, 82 bp, Homo sapiens
accgaggaacagggcggagtagcggccgagctgcgaaagagggtggcccagttgaaatccttcccttcctctaccttggaag

SEQ ID NO: 640071 - DNA, 73 bp, Homo sapiens
gtgattctgttggactggcaaaacagatagctttgcatgctgaactgtacgaattggagcaatgttggcttat

SEQ ID NO: 640072 - DNA, 75 bp, Homo sapiens
tacatttgcccattctcaggaagagcttgaaaagtcacggtctagatcacattctcgatccagaggaaggcgata

SEQ ID NO: 640073 - DNA, 50 bp, Homo sapiens
acagaaacctggtcttcttgggtgtggagctgatgagtctgccctaccgc

SEQ ID NO: 640074 - DNA, 100 bp, Homo sapiens
aaatccttaaaagagtcttaacgctgagtccacctcaggacgaggccagtgcctgaaacgcatccgctaccatggcagaggtcgctttgggatcatggag

SEQ ID NO: 640075 - DNA, 98 bp, Homo sapiens
aaggagttcacgttcatgggcgagggaacagatgagaaacccggcaatgaaagaaacatcgtgggaatcggccagtgcctgctgcatggcatgacggt

SEQ ID NO: 640076 - DNA, 100 bp, Homo sapiens
tgaagaacgccgccatccagccaccattccaagcagccttggaagtggagtttactctccccttgaggaagctgaaggtcagaaagggagagacgattgc

SEQ ID NO: 640077 - DNA, 100 bp, Homo sapiens
ttactgaaactagaaaccaatgaattccaacaacttcaaagtaaaatcagtttaatttcagaaaagggctacaccaagtccattgatatttggtctgtag

SEQ ID NO: 640078 - DNA, 100 bp, Homo sapiens
ggacaagaactcaagagcagaatctccgatagcctgggctggaagctcttctacgtcacaggctgcctgtttgtggctgtgcagaacttggaggactggg

SEQ ID NO: 640079 - DNA, 100 bp, Homo sapiens
ccataatgaacttctctggaccaacttgaccgtctactggaaatctgaatgctgttatcacgtggtccgtactgagaagaacagtttgaacaaccgattc

SEQ ID NO: 640080 - DNA, 74 bp, Homo sapiens
agttttcacttatctcgaaagcctatcagcatagttaaggttcgagaacttgtcttggacaattgcaaatcaaa

SEQ ID NO: 640081 - DNA, 75 bp, Homo sapiens
agctggaatgactggcaacccaggattgacatgtacgtggaggggacactggatctgctggaactgcttatcatg

SEQ ID NO: 640082 - DNA, 100 bp, Homo sapiens
tgtccgtgttcggtgaccgcagcactggggaaacgatccgctcccaaaacgtttcagctgtatatgactgtacactcaatttcagaaataatgaaaatcc

SEQ ID NO: 640083 - DNA, 75 bp, Homo sapiens
ggaagagaatgtgcgggacacacagcaggtgaccaccctccagctacccccggagacagtgtttcacaaaatgat

SEQ ID NO: 640084 - DNA, 74 bp, Homo sapiens
gctccgacggcggtccatcctgcaacctgcggcagatcttccagtccctgccgcccttcatggacatcctcctg

SEQ ID NO: 640085 - DNA, 100 bp, Homo sapiens
tcctagtgtgataaaaagagctgggatgcctaagtggccataaaatgcagtaaaaacaaatccagttcccaagaagctgtacaaatgctttcttctgttc

SEQ ID NO: 640086 - DNA, 107 bp, Homo sapiens
cgcctccggtgtttcccgcagccccggaaacagaactggttcttgggtcacctgggcctgggagctggactgtgccatgttacgccgcctggagaagaggattctgg

SEQ ID NO: 640087 - DNA, 100 bp, Homo sapiens
cgccgaatcgctcctgcagcagagtgttctaagaacggaagcatctgggctggatggaatttagcatcaagcagagtcccctttctgttcagagtgttgt

SEQ ID NO: 640088 - DNA, 80 bp, Homo sapiens
cgtcttgttgtttgttgatggagggtggatggtggatgttagagaggaagggaaaaggccgaggcatcagcgtgtgaaga

SEQ ID NO: 640089 - DNA, 88 bp, Homo sapiens
gagctgaagcagggctacacatttttcatcccttccgttggtgaggtaacatacgtggagctcttaatggacgctgaaggaaagtcaa

SEQ ID NO: 640090 - DNA, 80 bp, Homo sapiens
catcaatatgtttgcagtacacaactcccagctgaaaggggtgagcccctccagactccgaataggagatcaagagtttg

SEQ ID NO: 640091 - DNA, 75 bp, Homo sapiens
agtggcagaagattttaattaggaatcagtgacgttcagggatgtgactgtggacttcacccaggaggagtggca

SEQ ID NO: 640092 - DNA, 75 bp, Homo sapiens
gaaaacatgatgttgtttgaagttgttaaaatgggcaagagtgctatgcagtcttctcacaagactttcaggatt

SEQ ID NO: 640093 - DNA, 100 bp, Homo sapiens
gtcacctttgctgcaaaaaattacgggatctaagcctttcccacgttatggttataaaccctccccaccgaatggatgtggctctccactgtttggtgtt

SEQ ID NO: 640094 - DNA, 100 bp, Homo sapiens
atacgatagaaaatgtaaaggccaagatccaggataaggaaggctgaatcatacctatagtcaacttttaaaagagactgaagttttacaaactgaccat

SEQ ID NO: 640095 - DNA, 86 bp, Homo sapiens
cgcggagcccggctcccgcaccatggaggaggacgacagctacgggcgtctctggccgagcctctttttgtggaaaacgacagcag

SEQ ID NO: 640096 - DNA, 100 bp, Homo sapiens
cacaaatgaagaaactagagatcaaacttcgacattttgaagagctggaaactatcatggacagagagaaagaagctgtgaggaattttaaattggaaca

SEQ ID NO: 640097 - DNA, 83 bp, Homo sapiens
aaaaacatttgagagagccatgaaactggaacaggagtttactgaacatttcacaggtgcaagtgaaagtgtaggaaaacata

SEQ ID NO: 640098 - DNA, 87 bp, Homo sapiens
tggacgtgctggtgtctgagtggatggggacctgcctgctggttccagcaacagatagaaatgctttaagttcactctggggaaagc

SEQ ID NO: 640099 - DNA, 74 bp, Homo sapiens
cggcgcccagtggcggtgtgaactgtgaggagttcgccgagttccagtgcatttgcccagtataacatggatca

SEQ ID NO: 640100 - DNA, 116 bp, Homo sapiens
attggacagtcatcatcctgacctgccagtacaaggacagtgtccaggtctttcagagagggttgtgagtcccggcccagcccctccacccccctgcccccccgatgcgaccatgg

SEQ ID NO: 640101 - DNA, 99 bp, Homo sapiens
ggagaactatgttcattatggggaagagagaagggcacagttacctaagtatcaacgtaatcttcctcggccaggacaggcccccatcggtaatccacc

SEQ ID NO: 640102 - DNA, 90 bp, Homo sapiens
aatattaagaaaaccttatcattaagaaactgtggaccaaaagatctcagattgctataactgaaggtatatttgaacttccaaatctca

SEQ ID NO: 640103 - DNA, 83 bp, Homo sapiens
gcgctgcactgtctctccgacgcaagactgtcccggcccggagctgacatcgcgctgatcggattggccgtcatgggccagaa

SEQ ID NO: 640104 - DNA, 95 bp, Homo sapiens
cttcaaagcatggggctaactccagaatcccccattgacaggtgatttggcttctgcacagttaggaggagcaccaaaccgatgggaggttttgt

SEQ ID NO: 640105 - DNA, 100 bp, Homo sapiens
aagagcgaccgggccaggagctgaccgatgttaatggggtccggattgcagcacctggacctcttctcagctctcatcaagggccccactcgaaccccct

SEQ ID NO: 640106 - DNA, 49 bp, Homo sapiens
gaaaatgctttcctgaacctggccgatcaaagtccagatctccatctcc

SEQ ID NO: 640107 - DNA, 100 bp, Homo sapiens
cgccagcacgcgcctgcttcccgtctgcgcgagtccacgcagctccccaggggtcattgccggagcctttgtgggcatcctcctgtttctcatcctcgtg

SEQ ID NO: 640108 - DNA, 75 bp, Homo sapiens
agaatatggaggccatttcacctctaaaaaatgggatgggcatccgtgtcattctggaccttactcccaactacc

SEQ ID NO: 640109 - DNA, 114 bp, Homo sapiens
cgaaatccttcctgtaccgcttatgccaggccgatcccgacctggactcagacaagacaatgcagatcttcgtgaagactctgactggtaagaccatcaccctcgaggttgagc

SEQ ID NO: 640110 - DNA, 101 bp, Homo sapiens
ccggctctcgggagcgcaacactgcaggcaccaccaggaccagctgatcattccagcccacagcaatggagccacatgactcctcccacatggactctgag

SEQ ID NO: 640111 - DNA, 75 bp, Homo sapiens
tggcaagatcgacgtcagtctgaacatcagtttacccaatctgcactgcgagtttctcccagcaggaggagaaga

SEQ ID NO: 640112 - DNA, 100 bp, Homo sapiens
cacactctgcacctcgaaggctgacaagtcatctgggaaccaaggacgctgccaaggtctgcagagaattcaccgagcgtgagcaaggagaagtccgctt

SEQ ID NO: 640113 - DNA, 100 bp, Homo sapiens
ccgacagttgttaatgtcaccatcctcaacggcatgggagtcacaggaagaattgtagataagatcctccaggtcctattgacaatactaagattgcagt

SEQ ID NO: 640114 - DNA, 80 bp, Homo sapiens
tgggtcttccggtaggagctgtaatcaattgtgctgacaacacagtttcactgttacatgccttgaagtgatgaggaggt

SEQ ID NO: 640115 - DNA, 120 bp, Homo sapiens
cgtccgcccactccgcggcgttcggggaaatggctgcgagaccctagaggcctgcggcctgcgctgtcgcctggttgggcccggaaatgggacgtcgcgctttctcagggagcgtagaag

SEQ ID NO: 640116 - DNA, 75 bp, Homo sapiens
atttaaggatcccaactttgtggccctggccaacgtcaacattgggagcctcatctgcaatgtaggggccggtgg

SEQ ID NO: 640117 - DNA, 100 bp, Homo sapiens
atccctgcttcctacgcatacattggggcctttatcatctgctggactcctggattggttttgttacttctagacgtgtgctgtccacagtgcgacgtgc

SEQ ID NO: 640118 - DNA, 102 bp, Homo sapiens
ctcccagggccaggcgccgctcagaacgatgttctgccttactcaatacgggtcttgttggaagctgctgtacgaaattgtgatggctttttaatgaagaag

SEQ ID NO: 640119 - DNA, 75 bp, Homo sapiens
tgctctgaagcgcacgacctccgactactttctccttcaaggcaccgtctgcgtcctgctgtccttccccttcat

SEQ ID NO: 640120 - DNA, 98 bp, Homo sapiens
acctcctgcagcccatcatcgacacgtgcaccaaggacgccatctcggttggcaacattgtacaagtcacccagccagaaggaatgcacagtactgtt

SEQ ID NO: 640121 - DNA, 100 bp, Homo sapiens
cacctcagagtcggtcggggaaggccacccaggtttggtgcacctcgatttggaggaagtagggcagggcccttatctggaaagaagtttggaaaccctg

SEQ ID NO: 640122 - DNA, 75 bp, Homo sapiens
tggaacttcatcatcatctacttcacaggaattgccatttgccggctgttcggacggaagcatcaggctgcacca

SEQ ID NO: 640123 - DNA, 75 bp, Homo sapiens
tgtccagatggacagagttgatcaggccctggccaacgtcaacattgggagcctcatctgcaatgtaggggccgg

SEQ ID NO: 640124 - DNA, 83 bp, Homo sapiens
aggtgcttggcaaaatcgagcgggccattgggaaatcctcattgacgattcaatttgttgaaggccaatttgtggactcctac

SEQ ID NO: 640125 - DNA, 101 bp, Homo sapiens
cgcgggagggcatcccgttggggatccttccgcacactgaagagtacgtcttcgggtctacccctaatcacggtgtattgagaattaatccaaagaagttt

SEQ ID NO: 640126 - DNA, 75 bp, Homo sapiens
aatccgagaagagcagagcggagggagccccagacacgcacgagaagccctgccaacgtgggataagcagatcca

SEQ ID NO: 640127 - DNA, 100 bp, Homo sapiens
ggcccgggaccggcggcgcgcggcggccgaggccagaacccaagcaaacctcactttaatcactacatgtttgaagcaatatgtttatccataagaataa

SEQ ID NO: 640128 - DNA, 100 bp, Homo sapiens
acctcacacggtgtgggctgaatgaagagctgccagatcccacaggaaggatcagaatgttctctctccagtcaactgctggaatctcctcttaaaccag

SEQ ID NO: 640129 - DNA, 100 bp, Homo sapiens
caacttccgcctcccaggttcaagggattctcctgcctcagcctcccaagtagctgagattatagctccgccgcatgcaagagatgattgcaaggatgca

SEQ ID NO: 640130 - DNA, 83 bp, Homo sapiens
cgacgtcttgcctgtgtcccacttgttcgcggcctatagtacaaatggtgatgatcatcaggtcaaggatagtctggagcaat

SEQ ID NO: 640131 - DNA, 100 bp, Homo sapiens
cccgccgccgcgcacctgccttcgctcccgcaccgggtgatgttgcaaatgaagtggagactgaacaaatactctgcgatgcttctgtgatgtctttcac

SEQ ID NO: 640132 - DNA, 82 bp, Homo sapiens
tgggacgagttatttcagaatctcctccagatcagtgggaagccaggcttgatggtgtcaggctatgctgtgactggggctg

SEQ ID NO: 640133 - DNA, 83 bp, Homo sapiens
ggcgagtccggtctcaaaatggagggggatatgagactttctactcggaatatcctgagtgttgcgtggatgtaaaacccatt

SEQ ID NO: 640134 - DNA, 100 bp, Homo sapiens
ctttctactataaatcccggttttggctgcttaaactgctggatatcaatgcttacaattgtgaagagcccacagaaaagttaccttttcccatcatcga

SEQ ID NO: 640135 - DNA, 100 bp, Homo sapiens
tcctcttcctcccagtgttgctgcagctagccagcggctgagttatcggagaagcgtttgtagattattaaggccaacccatggccagcacagacatgat

SEQ ID NO: 640136 - DNA, 99 bp, Homo sapiens
cctgaagcggaaaatcgagatagaacggatcttgtctgtgtccctcagacagaaagaatttactttcaggttttcttacctaaagggagcaaagagaag

SEQ ID NO: 640137 - DNA, 50 bp, Homo sapiens
actctcggatgagatccaagtccagatgtgcactcccagcaacacccctg

SEQ ID NO: 640138 - DNA, 75 bp, Homo sapiens
atggccggaatgcagtaccctcagcagcagggtttcccaaactctcgattgcctcttgcaagcagatgacctggg

SEQ ID NO: 640139 - DNA, 100 bp, Homo sapiens
ctgcagtcactggtgctggagctggggagcccagtagacctgtctgcctccttttaggggaaagcaagatagtttcatttggatttggaagtagcacagg

SEQ ID NO: 640140 - DNA, 82 bp, Homo sapiens
tatgagttggggcgcccagctgccaacaccaagggtgcaaatagctatgggcaacttggcctcggccataaggaagatgtgc

SEQ ID NO: 640141 - DNA, 95 bp, Homo sapiens
caatgaagagaaaaataggctgccagcaaacagtcttccgcaggaaggagatgtggatccaacctggagaatgaagtctgtgaggattttagtgc

SEQ ID NO: 640142 - DNA, 74 bp, Homo sapiens
agggatttatttgcacatggggaaggcctggtaaagtggtcgcaatggaagaagagatcgccgcgctggtcatt

SEQ ID NO: 640143 - DNA, 100 bp, Homo sapiens
aatgatttatataagttccagcagcctccatcttccaagaagagcgatggttctgggacatatactaagttgcagaatacccaggtgagggtcatgtctg

SEQ ID NO: 640144 - DNA, 97 bp, Homo sapiens
catccagaagggacagtttgtgccagctctccagagagaaaagcggttaagaagattgtctaccaaatatagaacagaaaagatatatcccacagcc

SEQ ID NO: 640145 - DNA, 75 bp, Homo sapiens
gaggaatctggattgtcacctttgctgcaaaaaattacggctgtatgcaggagctattcttgaagtttgtggatg

SEQ ID NO: 640146 - DNA, 100 bp, Homo sapiens
gtgagaatttacagagatcatcctcttcagaaacaacatatgtagagtgtgtcggtcagaaggaacacctgagaaaccgctttatcatccttgtgtatgt

SEQ ID NO: 640147 - DNA, 82 bp, Homo sapiens
ctgcgaggctcggagaaacaggcgccgcgggctccgcgcccggccggacccgggcccgaggacatccggaacacggtgggca

SEQ ID NO: 640148 - DNA, 50 bp, Homo sapiens
cggaggagtctcagagctgtcagaaagaacattgacatcaccaatttcag

SEQ ID NO: 640149 - DNA, 120 bp, Homo sapiens
cggcggaggcggaactgcggagttgctgggtccaccgacccttaccctcagcgagagaagtaaccgaggaattgttgataaagaccttcgtcactacctcaacttacgatttcaaaaggg

SEQ ID NO: 640150 - DNA, 82 bp, Homo sapiens
gacgatcattctgcaagcaggcaacctgaatacaggtcacctggcggtagacccattcataagaggaaaagacagaattcac

SEQ ID NO: 640151 - DNA, 90 bp, Homo sapiens
actgccagaagctctttgtgtatgaccttcacgcagtcaagaacgacttccaggctagtcttgaattcctgacctcaggtgatcctcccg

SEQ ID NO: 640152 - DNA, 50 bp, Homo sapiens
cgacagggacgtcctcattgtcctcggcccgatgagagaaagggaaagtt

SEQ ID NO: 640153 - DNA, 76 bp, Homo sapiens
tctcttcaagtacatcataatcggcgacacagggcgaccctggacatctttgactacatctacatagatgcttttg

SEQ ID NO: 640154 - DNA, 75 bp, Homo sapiens
ccaccagcagcctcaacctcatggccgcagactgcaaacaggagtgcatcagggccctgggacagaacaaggctc

SEQ ID NO: 640155 - DNA, 82 bp, Homo sapiens
cggcgagtttccgatttaaagctgagctgcgaggaaaatggcggcgggagtgcaccaattccagctggacatcactgtgaaa

SEQ ID NO: 640156 - DNA, 83 bp, Homo sapiens
cgagtttggatctttgctcctgcgccgcgttctagagcaagggcgaccattgacgaggtggagacggacgtggtggagattga

SEQ ID NO: 640157 - DNA, 100 bp, Homo sapiens
ggcagaaatctgaaaatgcccctggggagacacatgcacaagacaaggtttgtgaagaaaattcaacctcagcaacttcagaaactgcccctgatacgtg

SEQ ID NO: 640158 - DNA, 82 bp, Homo sapiens
gcttcagtggaccgagggccgcattcccaggccgcgattcctcccagagatatgagatcctgactccaaactccattcccaa

SEQ ID NO: 640159 - DNA, 75 bp, Homo sapiens
gcagcatattacctatcaggagaggaggtattttggcctctccccagtctgctcctggaaacttggacaatagta

SEQ ID NO: 640160 - DNA, 97 bp, Homo sapiens
tgaacctggaccaggaggaggttttcaggaccaaaattgtggaaaagtcactctggtgattcctcctaaggagtggaagccaagacagtgctatgat

SEQ ID NO: 640161 - DNA, 103 bp, Homo sapiens
tgtgtcttctgcagtgattttaaccaaggcagttggtggaaatgagtgtgttcacaatgaaaccaagaatgaattggagaagatgttgaaatgtaatgaggag

SEQ ID NO: 640162 - DNA, 100 bp, Homo sapiens
ccagccgcggatggggagcgtgagtggcgagaggatgccagcccccatcagattgcgggagctgatccggaccatccggacagcccgaacccaagctgaa

SEQ ID NO: 640163 - DNA, 100 bp, Homo sapiens
cccgagtgtgcgaagctagccaaggaggactgacaaatggtagtggtcgatatatctctgcagcacctggagcagaagcaaaatatcgaagtgcttcaag

SEQ ID NO: 640164 - DNA, 98 bp, Homo sapiens
tgaagtgaaaaacaacagcagaattgcaatgttacggtttcagtggagagaaaccgggaagatttctacttatatcctgataacttaagtgactctct

SEQ ID NO: 640165 - DNA, 100 bp, Homo sapiens
caggacgaagtgctcggcggcatgtctatacgagatactccagccaaaaatgcacaaaagtcaaatcagaatggaaaagactcaaaaccatcatcaacac

SEQ ID NO: 640166 - DNA, 82 bp, Homo sapiens
aatctgcttttcaagtatgccaccaacagtgaagagcgtccagaggaccagaggttaatttattctgggaagctgttgttgg

SEQ ID NO: 640167 - DNA, 97 bp, Homo sapiens
cagccagtgtgacatttggtacatgaggttttctatggatttctggcaaaaggagaaggaagccaacatccttttggagccatgaatattgtccgaa

SEQ ID NO: 640168 - DNA, 75 bp, Homo sapiens
agcaattggcaatgcagcagcagctggcaaacagcttcttcccagatacaggaccgagcaggcactcccggactc

SEQ ID NO: 640169 - DNA, 101 bp, Homo sapiens
caggcggcgcagtacaccaacgcggtgcgcgaccgggagctggacctccgggatcaggcacaacctctcagaagtgcttcttgccaccatgaacatcttgt

SEQ ID NO: 640170 - DNA, 100 bp, Homo sapiens
accacctggaagcctagaaatggtctctaattaacagaagatggcaaagcccagccacagcagctatgtccttcagcagctaaacaaccaaagagaatgg

SEQ ID NO: 640171 - DNA, 83 bp, Homo sapiens
gagctttcacgaaggcaccgacgtcatcatgctgaccaccaatcagatccgtaaggccatgcggaccctcagttggaagcaca

SEQ ID NO: 640172 - DNA, 90 bp, Homo sapiens
tgtgtgatgttccctttcctgagtaacaccattttctatctaaatgaagaaatggaggcatggaaggactctccttcagcaactccagaa

SEQ ID NO: 640173 - DNA, 100 bp, Homo sapiens
cactgaggatgtggagaaggccacagaggatgttaagcaagtttttggacagaccacaattcatcaacatattccatttaactgggattcagaatttgtg

SEQ ID NO: 640174 - DNA, 151 bp, Homo sapiens
caagacctctgatgtccgaccagaatgctgccagctggggctatttcaacacgcagagccaaagctggaacgtagagacagatgacctgatcagagccatcaagaaactaaaggcacttggcactggcttcggcatcatccctgtgggcgg

SEQ ID NO: 640175 - DNA, 100 bp, Homo sapiens
tttgaagtagaagaagctgatgatactgtggatggtagggaagaaaagtctgcttctgattcttctggaaaacagtctactcaggttatggcagcaagta

SEQ ID NO: 640176 - DNA, 75 bp, Homo sapiens
aggtgacaaccggtatattgcaaataccgtagagccaaaagaatgcaatggtgtaaagattccagttgatgccag

SEQ ID NO: 640177 - DNA, 100 bp, Homo sapiens
gctgaatttgcagatgagcattcagactgggtaaacatcaccttctgtcctgtggatgacacaatggctgccatccggaagaaactggtgattgttggtg

SEQ ID NO: 640178 - DNA, 75 bp, Homo sapiens
gtcaggagggcagcagtagaatcacttgggttcattctattcaggtcatcgtattgaggaagttcctgaacttcc

SEQ ID NO: 640179 - DNA, 100 bp, Homo sapiens
ctcagcttcaccatcgtcagcctcatgtacttcgcctttaccagggcgaactttctgaccaagtatacaactacccagagggcctaggagaagtgctgta

SEQ ID NO: 640180 - DNA, 83 bp, Homo sapiens
cttccccaagtagtccgatggcagcggctgtgccgaggcgcccaactcagccgtttccctggggagatggtaaccatactcta

SEQ ID NO: 640181 - DNA, 85 bp, Homo sapiens
cggatattctaggatcttccggagctgccgtgcatacctgtgtgaaagcaaccttccacgaatgtatcctgtcaggtataatgtc

SEQ ID NO: 640182 - DNA, 75 bp, Homo sapiens
ctcgcaagcgaggcagccatgtcttatcccgctgatgattatgagtctgaggtcaatgtgacggtggactacatt

SEQ ID NO: 640183 - DNA, 89 bp, Homo sapiens
gtgcagctgcctcagttcttagcgcaggtatctagaagagcagaagacagagaatggaaaagataaggaacagaaacaaacaaataccg

SEQ ID NO: 640184 - DNA, 75 bp, Homo sapiens
gtattggacacaggaagattcatctaagcaggcagaaacatatttaaccagtggaatttcagtgttggccacttt

SEQ ID NO: 640185 - DNA, 100 bp, Homo sapiens
aacggagtgtgcgacggattgggaggttgtggaaaggaggagaacccctgctgaaattcgagaggagtttgagcggctgcagagagagagagaagagagg

SEQ ID NO: 640186 - DNA, 82 bp, Homo sapiens
tatttgaagtatttgacgaaaatagactgacccaacatgagtgaagtttcctgcaagaaacgggacgactatttggaatggc

SEQ ID NO: 640187 - DNA, 100 bp, Homo sapiens
ctggaacggaccaaaggcaacatgaagtacaaagcagtgagtgtcaacgaaggctataaagtctgtgagagattattggaggagctcttagtttccttgc

SEQ ID NO: 640188 - DNA, 73 bp, Homo sapiens
taacgctgcctttgctttaaaacagtattacttgcgagaaacagcacccaggactatcttccaaagagttctg

SEQ ID NO: 640189 - DNA, 74 bp, Homo sapiens
agacatttacgcggatgtcggcgaagagttcaaccaggtgagaagccctaccactgcaactgggacggctgcgg

SEQ ID NO: 640190 - DNA, 83 bp, Homo sapiens
caggcccggggagggtggttaccgctgaggagctgcagtctctgtcaaggttgtgaccgagattcccgacgagagagactgag

SEQ ID NO: 640191 - DNA, 83 bp, Homo sapiens
gccgctgctcaagttccagatttggtcaaaatgcagatcttcgtgaaaacccttaccggcaagaccatcacccttgaggtgga

SEQ ID NO: 640192 - DNA, 74 bp, Homo sapiens
gagaaaagccaagaggaccaggagcagaagaggaagagttggaaagatccaaataatgacttcagaaaaaactt

SEQ ID NO: 640193 - DNA, 97 bp, Homo sapiens
gggactcatcaacatggcagaggtccttgaatgggcaagagggcacatgaagtacggcgtcctccacattcacggcctctacacggacccctgcggg

SEQ ID NO: 640194 - DNA, 50 bp, Homo sapiens
gcgaccccttgttctttggtggcgctggtactccaaagattcaggtttac

SEQ ID NO: 640195 - DNA, 90 bp, Homo sapiens
gcaggccagggcaggccccgcccgaccaggaggccctgcaggctttatctgagtgtgcagtgacactgaaaacaattcatctcaaacggg

SEQ ID NO: 640196 - DNA, 75 bp, Homo sapiens
ccctggactatacgcagacttcagatcccggacgccacggccctggccaacgtcaacattgggagcctcatctgc

SEQ ID NO: 640197 - DNA, 98 bp, Homo sapiens
ttggaatcttctgcacgaaccatattacataatagtgccgaaaacatttgaagagtcggagattagtcagtgcaaaacagcttggtgtggatagaatt

SEQ ID NO: 640198 - DNA, 101 bp, Homo sapiens
ccaagatccactaccggaagaagaaacagctcatgatcatacctcactcctgttagggatgaagagtctgaatcccaaagaaaagcaagatctagacaagc

SEQ ID NO: 640199 - DNA, 82 bp, Homo sapiens
gaaagatccaaaacaagtggctgcggccgtcgcccaggagtcatcggacgccagaatctgccctgggcgctgcctatggcac

SEQ ID NO: 640200 - DNA, 100 bp, Homo sapiens
tcgagagtcggaggccaaacacaccgtatttcatctgtagcattcaagacttcaaactggtcttcgatgccaagaacatgatggctgcctgtgacccccg

SEQ ID NO: 640201 - DNA, 82 bp, Homo sapiens
cagggacagcacctcatcccctggatgggggaccacaagatcctcatcgacaggaacccaagacagaccaggatgaggagca

SEQ ID NO: 640202 - DNA, 75 bp, Homo sapiens
cgtgccggcgccgcccggaccgccagctctcccggggctgaagctgagtgcagatcaggtggccctggtctacag

SEQ ID NO: 640203 - DNA, 74 bp, Homo sapiens
cagggccgcaggaagacgcaaaagaagcttccggttctgaggtcctggaggtgccatttccctctctgttgaag

SEQ ID NO: 640204 - DNA, 100 bp, Homo sapiens
agagtcggagccgaataccaagctcggatccctgaatttgatccagtgtcgatatatagtatctggttttatgacaagaatgactgtcaccgcatagcaa

SEQ ID NO: 640205 - DNA, 82 bp, Homo sapiens
gccgtggacagcgaagctgctgcggttcctgagccggagaacccagtgacttgattgtaaaaatttacagagcggaatcata

SEQ ID NO: 640206 - DNA, 82 bp, Homo sapiens
atgacaatgactttgagccctaccttactggacagtcaaatcaggttaatgttcgtgaagaaattgaagagttttttccaag

SEQ ID NO: 640207 - DNA, 75 bp, Homo sapiens
cgcttcttactgccatggaagggaagcctcagccacagcaggatagatcttacagactctttcagcacctacgaa

SEQ ID NO: 640208 - DNA, 75 bp, Homo sapiens
ggcctcttgaaagtccacctccttacaggcctgatgaatttcagaaaaagtggacagggcagtgctgaaggaact

SEQ ID NO: 640209 - DNA, 138 bp, Homo sapiens
ctgaaacaaaggtcttcactgcctcatctgctccagcagagaatcacatcttacctgggcaaagctgggaaaacggcaatggattaataacaagaaattaatggtgaagtggtgacgaaaattctacattgcttagaa

SEQ ID NO: 640210 - DNA, 100 bp, Homo sapiens
ttcagtgcattgccacagggagagatgctgtgcataacaagttatggctccagatccacatccagcgaactgaaggatgtgaccatatgacctgctcaca

SEQ ID NO: 640211 - DNA, 75 bp, Homo sapiens
aagaattatgaatttaacagtaatgctgatgttctcagtgcagctgagtcttggtgagcagacatgggaatccga

SEQ ID NO: 640212 - DNA, 82 bp, Homo sapiens
caagcttagagcgtctggccaagaatcagaggaagtggaatgcttcagacatgcctgaaacaatcaccagccgggatgccgc

SEQ ID NO: 640213 - DNA, 100 bp, Homo sapiens
tttttggtaccagtcttggctcctgctctccataagacgtatttcattagctagtccacgtcagctttttaaggcttctaatatgacccagcgatggcaa

SEQ ID NO: 640214 - DNA, 99 bp, Homo sapiens
gagcagtatgccggaagctggttttcaggccacaaatgctttcacaggtattgttgcagcatctggcagtgagactgaggatgaggacagcatggacat

SEQ ID NO: 640215 - DNA, 75 bp, Homo sapiens
cacagtggatctctgtgccacatgggaggccccatggacgccagcgtggaggaggagggtgtgcggcgtgcactg

SEQ ID NO: 640216 - DNA, 98 bp, Homo sapiens
gagcccagagctccgatccctgcgcgggctcgagagctcgccccgaacgggggtcttcctcctccgccgttgacagatatttggagttcttacaacat

SEQ ID NO: 640217 - DNA, 88 bp, Homo sapiens
taaacatgcaatgaacccaaaaggccaagaagtatgatgcgtttttggcctcagagtctctgatcaagcagattccacgaatcctcgg

SEQ ID NO: 640218 - DNA, 82 bp, Homo sapiens
aattgttgtgacttcactaataaaggaaggaatgcagctcatttcagaaaagcctgagacggaagctgtggtgaaggagaaa

SEQ ID NO: 640219 - DNA, 74 bp, Homo sapiens
tggaatgaggtggatccttatcttttagataatccgcaagatgggattatggtgaaactagttgtcaatttgtt

SEQ ID NO: 640220 - DNA, 82 bp, Homo sapiens
accgacccccgacggtgcgtgttggctagagatttactacatccgtccttggaagaggaaaagaaaaaacataaaaagaaac

SEQ ID NO: 640221 - DNA, 90 bp, Homo sapiens
ggttgcaaagaaatgcgttgaggatttggcactctacttaaaaccactaagtggaggtaaagatcttgattttgccagccttgctcgagg

SEQ ID NO: 640222 - DNA, 97 bp, Homo sapiens
ggtgaggcggcgacgggctccggtaagctggcaccattcatcgccaaacgccgaacccccaagattcaagagcagtaccgcaggattggaggcggat

SEQ ID NO: 640223 - DNA, 100 bp, Homo sapiens
cgcattcagaatttgaccatcttggtgagaaacattaagacctactaccagtggtcatctccatcagaggcaactgaaagtttcttatcaaaagaaattt

SEQ ID NO: 640224 - DNA, 98 bp, Homo sapiens
agaaactgaaggagctagagcagtttataaatatgctgctaggtcatatgtcaatagaagttctacgggaagaagcatgtgactgtttatttgaagtt

SEQ ID NO: 640225 - DNA, 100 bp, Homo sapiens
ctgggcacgaggaccatgctgggccggagcctccgagaactttccagagtgttgaatcttccaccagaaaacttgatcacatcaatatctgcagttccaa

SEQ ID NO: 640226 - DNA, 82 bp, Homo sapiens
tctctcatctcgctcggctgcgggaaatcgggctgaagcgactgagtccgcgatggagaaaacctcggatcaattctcagct

SEQ ID NO: 640227 - DNA, 75 bp, Homo sapiens
cgtgccctacttcaaggataagggcgacagcaacagctctgccggctggaaggttggtgaaaaccctgtgtcctt

SEQ ID NO: 640228 - DNA, 51 bp, Homo sapiens
ctgcggacagtgcctgtaccactcatgatggagcagtccaagaagtcctcc

SEQ ID NO: 640229 - DNA, 82 bp, Homo sapiens
caacaccacaataatccacagccaagatgagttttgatcatcctgagaaaaatgggccttggcctgcagacccaataaacct

SEQ ID NO: 640230 - DNA, 75 bp, Homo sapiens
cctctctcaagagaagctgcaagagcaacatctttcctcaccccaagaatggagatctcctctcatcagtctcac

SEQ ID NO: 640231 - DNA, 75 bp, Homo sapiens
gattttcatgaatgaacggagccgggactgactttgcctacggggttgtgtccactgtggtccccgactctgccc

SEQ ID NO: 640232 - DNA, 74 bp, Homo sapiens
ggtgcagctgtgggccgcccacgcccatgaaggtccctagctgttggtagtaagtccggttataaatttttctc

SEQ ID NO: 640233 - DNA, 99 bp, Homo sapiens
acatgatggagaaaattaagagttatgtgaattatgtgctaagtgaaaaatcatcaacctttctaatgaagagacattccataagtggaccaatctcaa

SEQ ID NO: 640234 - DNA, 98 bp, Homo sapiens
gaatgatgaggtggtctaccctacctggctccatgaagatgccacagggatcctaaaatctttgattatggaagattcccacaagagtaccacgtcag

SEQ ID NO: 640235 - DNA, 101 bp, Homo sapiens
ttcaactccacttttatctccaccatagacatccacgacagcgatggcagttccagcagcagccaccagagcctcaagagcacagccaaatgggcggcatc

SEQ ID NO: 640236 - DNA, 75 bp, Homo sapiens
cagcacctacgtcccgctgccgtcgccgccgccaccatgcccaagagaaaggcgtccggcaccccaacatcatct

SEQ ID NO: 640237 - DNA, 75 bp, Homo sapiens
ccactggtaaccatctgtggccatcacctaaactctcacccagagaaatctgggcccgatttctagcatttgaaa

SEQ ID NO: 640238 - DNA, 75 bp, Homo sapiens
cattaactgaagcaaagaaattggcttctgcctctgcaaagctaaaggacatccaggcagaaattgatgcccaca

SEQ ID NO: 640239 - DNA, 90 bp, Homo sapiens
gaacttccggaaggcggtgatccagctcaccaccaagacgcagaaaatgtggacacagacttgccaggcagcctggggcagagtgaagag

SEQ ID NO: 640240 - DNA, 100 bp, Homo sapiens
tccaagccagatatggtacaggactgtcaacgaaacctggcacggctcttgcttccgattcagagcattcttcactccagaataatgagcaaccctcttt

SEQ ID NO: 640241 - DNA, 82 bp, Homo sapiens
atgcctgcagagctgtggcttaccagttgtcccttcagggtttctcagaacagcgggactggtcatgccaacccaactttca

SEQ ID NO: 640242 - DNA, 87 bp, Homo sapiens
taccacctcttctgcaacagttaataatccattccttccatctgaagatcaggtatccaaaacaagatggcagtgctggagattcag

SEQ ID NO: 640243 - DNA, 101 bp, Homo sapiens
gcgaacgctgagcacgcgcggaaaccctttaaagccaaaagaatgcaatggtgtaaagattccagttgatgccagtaaacctaatccaaatgatgtggagt

SEQ ID NO: 640244 - DNA, 80 bp, Homo sapiens
gtgaagagctgtcctgaccaagaggaccagactttgttaatgaagtcccacccgctgtacctgtgcaatgccagtgatga

SEQ ID NO: 640245 - DNA, 76 bp, Homo sapiens
aggatccagatcatagacagcaatggatagatgccattgaacagcacaagggaatatggagccattgatgatgtag

SEQ ID NO: 640246 - DNA, 76 bp, Homo sapiens
tgatggtgggattgtcgtctggaacatggacgtggagaggcaggagaccgcatggacctggaggagcccgaaaaag

SEQ ID NO: 640247 - DNA, 90 bp, Homo sapiens
ctggtatggaaacctaggcccgcgagtgcccgggcccagcccggcctagttcagaatgccgggacattctgcttcctgtcatcaccaaag

SEQ ID NO: 640248 - DNA, 78 bp, Homo sapiens
agttacactgcttgtagctcttaaggtcagcttttgccaactgttttcaaatcacatgcatgggggatcttacacaca

SEQ ID NO: 640249 - DNA, 100 bp, Homo sapiens
tgtgaatctagcttgcaaatataatctttgtatcataccaattggtgggggccgaaactccactgagtgtacgcttatcctgactgagggagattcagcc

SEQ ID NO: 640250 - DNA, 98 bp, Homo sapiens
tcatgctgaaccgcattgtggagaaagaatcggtggctgcctctttgatgagccgtatagcacatgtggatatagtcaatctgaaggtgatgacttca

SEQ ID NO: 640251 - DNA, 98 bp, Homo sapiens
gatggccgccgctgaggaaggctgtagtgtcggggccgaagcggacagggaattggaggagcttctggaaagaaacttggggatgggttgttcctgca

SEQ ID NO: 640252 - DNA, 121 bp, Homo sapiens
cagataagaacaaaccaaatatcaaaatttgtactcaggtgaaaggaccagcttcatgcagtaggccagcgactggagccagatgtgagctgagcccaagcggacgacctcgacaggatcc

SEQ ID NO: 640253 - DNA, 80 bp, Homo sapiens
agggcctgcagcgggagctggacggcgagcgcgagcggcgcgagaaaaacctaaaggcagacccagaagagctttttaca

SEQ ID NO: 640254 - DNA, 100 bp, Homo sapiens
taactcatccgaactctcagatgctttttctttggatacaacacaagacagtgaccaagaaaccactaatttgctaaactggtttgtaaatatttgaatc

SEQ ID NO: 640255 - DNA, 76 bp, Homo sapiens
aaaagaggacagcacttccggtcacgccatcgttgctgccttcttcgtcaaggtttccaatacttatctacaggaa

SEQ ID NO: 640256 - DNA, 75 bp, Homo sapiens
tttgaccttacctcagactagaggcgatggaaagaaaatagttagttaccagtctccccgagtgaaagaatcaat

SEQ ID NO: 640257 - DNA, 99 bp, Homo sapiens
tcaccccctacatcttatcatagcacagtcaatcagtctccctcaatgatgcacacacagtctccaggtgttttggggaacgagtttagtatattaaaa

SEQ ID NO: 640258 - DNA, 51 bp, Homo sapiens
ctgcctgcaccatgtccgccagagagcaaattggtcaggagatgttggaaa

SEQ ID NO: 640259 - DNA, 98 bp, Homo sapiens
gccggcaagccggctggtgcccgagtcggccaagcatgggcaaccactcaggacggcccgaggatccggaaccaggtgctggagaatctggtaaaagc

SEQ ID NO: 640260 - DNA, 50 bp, Homo sapiens
caaggaacatctcaccaattttaaatcagtctcaggtatgtctttatcag

SEQ ID NO: 640261 - DNA, 82 bp, Homo sapiens
gctgcccgcggcctgtaatgagcaagttccgaggcctacggtccggcgggcggtggcctccgtggtgggcggctggctgctg

SEQ ID NO: 640262 - DNA, 75 bp, Homo sapiens
ctgcctcagcctcccaagaagctgggattacaggccccagggagcgccatggcccgcgcacgccaggagggcagc

SEQ ID NO: 640263 - DNA, 75 bp, Homo sapiens
tgatatcagacaccgagcttcagcaagctctctccaacgaaataactgttcaaccaactgtggaagaggcctctg

SEQ ID NO: 640264 - DNA, 100 bp, Homo sapiens
ctgagggagggtccgagccagccgctgttttgccggaggagcccctcaggccattgtggtggtgccatgcagcaagaatcagagagatgcagagttagag

SEQ ID NO: 640265 - DNA, 100 bp, Homo sapiens
tgagaaggtgcttgtggaagggggcccggctccctaggcgtcccatctcgcagacggttgatgatgaagcgccggccgtgtaaatgaagatcgggtgagg

SEQ ID NO: 640266 - DNA, 100 bp, Homo sapiens
aaggccggggtgctcagccaggccgactacctcaacctggtgcagtgcgagacgctagagggtccacgctgcttttatgagctgtaacactcaccgcgaa

SEQ ID NO: 640267 - DNA, 89 bp, Homo sapiens
gtaaggtgtatcttccagaaccaccttttcctcatgcagagtgggaatgtaagacggacttagatattgcatacaaatttggaaaaact

SEQ ID NO: 640268 - DNA, 75 bp, Homo sapiens
ccgtgccgagcccactcgagccgcagccatgtctggggacgagttgattatggaagattcccacaagagtaccac

SEQ ID NO: 640269 - DNA, 87 bp, Homo sapiens
tctatatcctttggcagctcacagagtgtgaacatggctacgcctcttcattcccgtccatgccgagcccccgactgcagcattcaa

SEQ ID NO: 640270 - DNA, 80 bp, Homo sapiens
agaccactacatccacatcaagatacgagttccaaactcgaaaatggcagcaattgcaggccaagcgctatgcagaaaag

SEQ ID NO: 640271 - DNA, 90 bp, Homo sapiens
atgaacctgcccaaggggccggacacgctctgcttcgacaaggacgagttcatgaaggtgctgactgggttacttttttaaacactagga

SEQ ID NO: 640272 - DNA, 75 bp, Homo sapiens
gcaggagacacaagaagcggatccaggtgtctgtgacctttgaggatgtggctgtgacattcacccaggaggagt

SEQ ID NO: 640273 - DNA, 76 bp, Homo sapiens
atgtaactataagcagcttcggaaaggagccaatgagggctcaggcagctgtccaaggacctgttggtacagattt

SEQ ID NO: 640274 - DNA, 100 bp, Homo sapiens
tctgttgtaccccactgctggggtggtggttccaatgagacagggcacaccaaactccatctgtgacaaccatgagtggaaaaaactaattatggttcag

SEQ ID NO: 640275 - DNA, 74 bp, Homo sapiens
tctcctcctgatgcttttgcagaccgcggtcctgcaggggcgcttgctgcttgactatattgtggagtatgact

SEQ ID NO: 640276 - DNA, 76 bp, Homo sapiens
attttccgcaggtctttttacaactatgtggtatcttgatcctagcattagcaatatgggtacgagtaagcaatga

SEQ ID NO: 640277 - DNA, 75 bp, Homo sapiens
gatgaatttcttttggatttaggacatcatgaaagacgaagttatacggaagcgtctcctcattgatggagatgg

SEQ ID NO: 640278 - DNA, 98 bp, Homo sapiens
caagctctcggaggagatctcggctccagtttcggagcggatggtccccttcccctgagcccatctacaatagcgaggggaagcggcttaacacccga

SEQ ID NO: 640279 - DNA, 100 bp, Homo sapiens
catggctgcttaaaatggtctatggtctgtctctgtgaccctggcaaagatgagagtgcacatttcgtcctgcctgaaggtccaggagcagatggccaac

SEQ ID NO: 640280 - DNA, 98 bp, Homo sapiens
gagatcattcgctgcttgaaagcttttatgaacaacaaggtggacagcgccatgtccctgatccaggcagccaagaacttgatgaatgctgtggtgca

SEQ ID NO: 640281 - DNA, 100 bp, Homo sapiens
ggaaacgtcaccggaatcaggaccgagttgagtggtgattttatgcaatggcttcaagccacagttcttcaccagtgcctcaaggaagcagcagtgatgt

SEQ ID NO: 640282 - DNA, 100 bp, Homo sapiens
gatatctcaaaaggtgatctggacaaaggaacaggtatctcaggtttctgctttgggacaaccatacatctaattccttaaagtagttttatatgtaaaa

SEQ ID NO: 640283 - DNA, 83 bp, Homo sapiens
gagatttacctgtgagatgtttcatcccaacagttaatttggagtggcccctggagtcagtttcctacaccatccgaggcccc

SEQ ID NO: 640284 - DNA, 98 bp, Homo sapiens
ctgaatatggaaagggcacgagacaaagctaatgaagaaggtctggcattactacagactcctcgtgaagtggcccagcaggctgtggatgcggatgt

SEQ ID NO: 640285 - DNA, 51 bp, Homo sapiens
tgaacagttctggcagctctcaggggtggtggaggtggatacagcagtcgg

SEQ ID NO: 640286 - DNA, 100 bp, Homo sapiens
ttcaggaggaagcgatggcttcagacagcatatttgagtcatttccttcgtacccacagtgcttcatgagaggcatgaaaacagccctggaagtctgccc

SEQ ID NO: 640287 - DNA, 75 bp, Homo sapiens
ggcgccgctctccgagctcgatccgctgctcgcacgggagccagctgggtgaaaagaatggtttgtcattcattg

SEQ ID NO: 640288 - DNA, 50 bp, Homo sapiens
ctccctcagcttccgccccaaaaggttattcaaggacacggaaaagccaa

SEQ ID NO: 640289 - DNA, 100 bp, Homo sapiens
ctgagtacaacacggtggcaagcaagtttaatcagacctgctcacacttcagaatagagaaggtggtgaaggttgtcgtattgaactgtgagccatccaa

SEQ ID NO: 640290 - DNA, 100 bp, Homo sapiens
tagcttcggagtctcccgcgcgcacctcagccgcctcctagcggcgcggcgctcgctcctacgccagcaatacaggaatgcacaggaggcaaatcactga

SEQ ID NO: 640291 - DNA, 100 bp, Homo sapiens
ttggagccaggctgcccggttttatagccctgcttgacctgtgtgatccgagtcagattgttcgatatggtgagattccagctgaattaagggcggcggc

SEQ ID NO: 640292 - DNA, 75 bp, Homo sapiens
gtcctgccgtccatgcggaagatcgtcgccacctggatgctggagcagcctcccgcgacgatgcccctcaacgtt

SEQ ID NO: 640293 - DNA, 100 bp, Homo sapiens
ccggggagtccctcgccacctgcaagagcctgcagcagtcgcttctccgcaggtgcgtgagcatctgctccctggccttcagcatggacggcatgttcct

SEQ ID NO: 640294 - DNA, 75 bp, Homo sapiens
aaaatgtctctctatccatctctcgaagacttgaaggtggtggtcggtatgttccgggctcttcgggatcttcta

SEQ ID NO: 640295 - DNA, 82 bp, Homo sapiens
accggaggggagggccgggcgcggcggcggcggcggtggaggagccggagcataatgattgtcctgggtcacataatgccag

SEQ ID NO: 640296 - DNA, 88 bp, Homo sapiens
ctgagtgtgccacacaggtagccctggacggcattcagtgttttgagatttaccgcattgtttctcagaagcaaatgtcagacagacg

SEQ ID NO: 640297 - DNA, 75 bp, Homo sapiens
cggcgcgtccagcgcagcccgacgttccgctgctggggattgtcagtggcttcgccccgaggagagctgactgcc

SEQ ID NO: 640298 - DNA, 98 bp, Homo sapiens
ttgagtaaaggagcatgtagctcatccggagcaacatcttccaagtcaagattatggcatcgtcaaagcattgtggtgtcttttttactgctgcttgc

SEQ ID NO: 640299 - DNA, 82 bp, Homo sapiens
gaggtcctgccgtccatgcggaagatcgtcgccacctggatgctggaggtggtctttgggaagaagcttcctgcctttgcca

SEQ ID NO: 640300 - DNA, 50 bp, Homo sapiens
ggcattttgctgtctcctcctaatacgtgtaatgttcaagctcagaaatg

SEQ ID NO: 640301 - DNA, 75 bp, Homo sapiens
tggataaagtgaaaattgtagcctgtgatggtaaaaatatgagggaaggcaccattggagatatggctatcctgg

SEQ ID NO: 640302 - DNA, 100 bp, Homo sapiens
gccccctatcctatccgcaaacaggattaaagcctgtggtttccacagaagcaccacctatcatatttgccacaccaactaaactgacctccgattccac

SEQ ID NO: 640303 - DNA, 100 bp, Homo sapiens
atttcctgcagaaagacttgaaggcgtatacaggaacaatattgatgatgtagtaagatttgcttgtaaatgcatcacgaagaggcagcccagaatgaag

SEQ ID NO: 640304 - DNA, 87 bp, Homo sapiens
tgacgcacacaggagagccaggattcatgctctacatccccatagaggtcctggacccaagccagaagcctctgcaaagcttccttc

SEQ ID NO: 640305 - DNA, 100 bp, Homo sapiens
cggacggcgacgacgggggaatgtggcgctggatccggcagcagctggtatattcaagagcaaatgaccaagagccatgtgggtggtggttggctaaagt

SEQ ID NO: 640306 - DNA, 78 bp, Homo sapiens
tttgatttcatcgatgatctggcagacctcagctgcctggtgagtcagtggatcggtggggaaaatgctgcttaccct

SEQ ID NO: 640307 - DNA, 101 bp, Homo sapiens
gtgtacctcctgctccggcagcctgaaagaccacagcaagattctttcattcgtctcctcctagcctgggggaccaggctcgaactgaccctggacatcaa

SEQ ID NO: 640308 - DNA, 100 bp, Homo sapiens
cacatcttcctgacccgcttcaagaagcctgctgagttcaccacaggtggccatcatcgcagggaactttgagcttgcagaggttatcaagacccacaaa

SEQ ID NO: 640309 - DNA, 88 bp, Homo sapiens
gccgccgccgcctcgggtcgtggagccaggagcgacgtcaccgccatggcaggcatcaaaggtggagtctcactcttgttgcccaggc

SEQ ID NO: 640310 - DNA, 98 bp, Homo sapiens
cttttggactccctattgtatttgccagagcacatctggactctgaaaaggaatcttgcccaagcagtgatgaagttgatgaggaggaagaagaggat

SEQ ID NO: 640311 - DNA, 98 bp, Homo sapiens
ggactttggagcgtatggctccaaatcaactcattggctaaaacttgacggaaaatggtggttagtgcacactggtttttggctgttgtttgtttccc

SEQ ID NO: 640312 - DNA, 74 bp, Homo sapiens
cggacgctcacgataaccaaggacgaccgcgaaccaaggcagcggaggaggagaaagagatggacctcccggac

SEQ ID NO: 640313 - DNA, 101 bp, Homo sapiens
ggccttccagctgtttgaccgaacaggacaatagccggaggcagaagcagttgttaaaccagaggtttgagagcctgtgcgcagtgctggaggagcgcaag

SEQ ID NO: 640314 - DNA, 78 bp, Homo sapiens
tgagctgggaggccactagcagccagttccggcccgaggacaccgactaccagcagatgttcgagcctgtgagctgca

SEQ ID NO: 640315 - DNA, 83 bp, Homo sapiens
cgacgccggcggctgccggggcggcgaggcgcgaggagctagatcaatgtccgagttaccaccatggatgcagagctggagtt

SEQ ID NO: 640316 - DNA, 100 bp, Homo sapiens
aagttcacatcccgtcggtggggcccgaggccgaggggcccaggcagagcccggagaaaagccacatggttgggggccgtcccgctcctaaggcaggaag

SEQ ID NO: 640317 - DNA, 82 bp, Homo sapiens
taccgcctcaaccgcgacgccgagggtgtcggttggtggaaatatgaattctgctatggcaaacatgtacatcaataccatg

SEQ ID NO: 640318 - DNA, 76 bp, Homo sapiens
cttcttttgagcagttggcactacccgtcttgaggaattgtcaaaccagaagagaagtaaaattcaacaaaaattt

SEQ ID NO: 640319 - DNA, 100 bp, Homo sapiens
ggagatccatagggaggacggcggaacatctggaggctgggaaatggacttgagaccaggagacgtatccagcaagcggaacctctgggaaaagcaatct

SEQ ID NO: 640320 - DNA, 98 bp, Homo sapiens
cgccgcccccccagacaagatggacaccgcggaggaagctccagaaacatgacaaggaggactttcctgcctcttggagatcagaggaggaaatggca

SEQ ID NO: 640321 - DNA, 100 bp, Homo sapiens
acaaaacaaagacgctggggaaacttcaccaagagcctcggcagctccagagcgacgggaaacgaaagcatccgcagtgtcatgcagaagtacctggagg

SEQ ID NO: 640322 - DNA, 83 bp, Homo sapiens
ctgaggcttatttgggaaagaagctgcaagctttcttcctggtggcagatgacatcatggattcatcccttacccgccgggga

SEQ ID NO: 640323 - DNA, 49 bp, Homo sapiens
ccatcattgatgtggtgcgatcgatcctgcaccctgaggaatgcatgta

SEQ ID NO: 640324 - DNA, 100 bp, Homo sapiens
cacccccaccaccaccagacttttgctggcaaagactcgtgaaagacagggcatcactgtgttgccaaggctggtcttgaactggctcaagcaatctgcc

SEQ ID NO: 640325 - DNA, 75 bp, Homo sapiens
caggaactgggtgctggtgcctatagcatgaggagtccatagaggccactgtattctattgaagaacatgtctaa

SEQ ID NO: 640326 - DNA, 73 bp, Homo sapiens
ttcatatcattgtcttccacagatgtgtcaccaaaccagctgagaaatttcttgaatctgttgaaggaaatca

SEQ ID NO: 640327 - DNA, 78 bp, Homo sapiens
tgtacgagcgcaccagcgaccacaagatcgtcttctttaaagaacccagcgggtgccgcttctccacccgaggcttcc

SEQ ID NO: 640328 - DNA, 82 bp, Homo sapiens
ctcctccataaaaacaagtgtgtgcatctggctgttagaagaattcatgctcatccgggtgacttaagagattaaaattaat

SEQ ID NO: 640329 - DNA, 83 bp, Homo sapiens
gtgcatggcacggctcaagacagtcctgaaatacgcagcctggcatcctcgctacaacctcattgttgtgggccgatacccag

SEQ ID NO: 640330 - DNA, 98 bp, Homo sapiens
gctcattgtagcctcaaactcccaggctcaagcagtcctaccatgtcagccttcccagtagctgggaccacagatggtctcctgatcctggctgataa

SEQ ID NO: 640331 - DNA, 74 bp, Homo sapiens
caaaagaccatcctgctctcaactacaacatcgtttcagggaaggatttttactgggagaggtaagacaagagg

SEQ ID NO: 640332 - DNA, 101 bp, Homo sapiens
aagaagctggagagcagacgaggtgctattcgagtgctagtggtggaacgggaccacacgattcgccgttacaaagcgaacaaggacgtaatggagaaggc

SEQ ID NO: 640333 - DNA, 80 bp, Homo sapiens
cacagtgccagcagctccagatgttcttcctcttgcttgccagagagtgttctgccagttctggataatccactgtccaa

SEQ ID NO: 640334 - DNA, 75 bp, Homo sapiens
ccgtgggcgagccgcccgcccgccgagcagccatgaggtcaagagcaatctgaatccaaatgcaaaggagtttgt

SEQ ID NO: 640335 - DNA, 98 bp, Homo sapiens
tgggagatgaagatgaaaagagaaaaatctcagctattcggtcatatagagatgtcatgaagctaactgccttctatgaaagcagtcattattcaagg

SEQ ID NO: 640336 - DNA, 100 bp, Homo sapiens
cccggtactacccaaacgtcagtcgaatcacaggcaggaggtaagaattgtgacaaaggccagtcttttttcattgacgccccagattccccagccacgt

SEQ ID NO: 640337 - DNA, 83 bp, Homo sapiens
caccaagtatggcaacatgacagaggaccatgtgatgcacctgctccaggttgtacgtggacactataaaggtcagcaaattg

SEQ ID NO: 640338 - DNA, 128 bp, Homo sapiens
agggaggccacccacggcacccccgcagcgctgaggacgctccggagcccggcgaccgcggtaccgcgcgccactaacagcctctacggcagacacatgcaggccaacccagaaccaccgaagaagaa

SEQ ID NO: 640339 - DNA, 98 bp, Homo sapiens
agcgaaattggtcattctcgctaacaactgcccagctttgaggaaccactcgttttgactattattttatcactctttgtgaaacttcacaatgttcg

SEQ ID NO: 640340 - DNA, 90 bp, Homo sapiens
cgagagggagacggacgttgagagaacgaggaggaaggagagaaaatggcgtccacggggcgccctgcgtccggcagaggaggcgagcat

SEQ ID NO: 640341 - DNA, 114 bp, Homo sapiens
cccagaagaggcagcatgcggaaggcattgctgggagcctgaaaactgtgaatgctgaactagatgcagagcacgcccagaaggtcctggaaatggagcacacccagcaaatga

SEQ ID NO: 640342 - DNA, 98 bp, Homo sapiens
tctgagccccggggcatctatgccagtgagaggcccaagtccctaggcggctgagtgacagcccatcaatgaaaaaggagagcgagctgcctcgcagg

SEQ ID NO: 640343 - DNA, 75 bp, Homo sapiens
aaacaaaggtagaacatggaggatcgtcaggctctaaacaaaattctggtgaaaagccatacaagtgtacctggg

SEQ ID NO: 640344 - DNA, 98 bp, Homo sapiens
gaaaagcaaggcatgcggacacacgccgtctctgtgtcaggagagaagccacaagtcttaccgtcccttaacagtattgacatttcgcttaaattatt

SEQ ID NO: 640345 - DNA, 75 bp, Homo sapiens
atatcatatcacctgaactgatggttgtaaatgtcttaaaatccttattgtcaaatcttgatgaagtaaagaagg

SEQ ID NO: 640346 - DNA, 83 bp, Homo sapiens
ctggctgctggtgggaggccggcgactgagtaaggtgcccgtggttgacacgagctgtgtccccagctgttcccgtctacaat

SEQ ID NO: 640347 - DNA, 83 bp, Homo sapiens
tggtccccagcgcagtgaagtggtgagcctttttgtcactgaatcctcactatggatgggctcattgaggacattaagcatcg

SEQ ID NO: 640348 - DNA, 100 bp, Homo sapiens
taccgcaggagggcggtcttccccggctcgccaactcggctgctctgggggattcgtgcgcgggcctgtggaagtcaaagttcagccctgagaacacaag

SEQ ID NO: 640349 - DNA, 99 bp, Homo sapiens
ctcggccaaagaagagggcacgatctgtagaacgggttcttcagacccagaagaagaaagtgttctctactccaaccgagcagcatgtcacttgaagga

SEQ ID NO: 640350 - DNA, 74 bp, Homo sapiens
catcatcatgaaggacgtgcccgactggaaggattattatgacttcatcagcttcaggaatatatggcaacttt

SEQ ID NO: 640351 - DNA, 75 bp, Homo sapiens
tgcactccagcatgccgatagttcaaacttctatatcacagaaaaggctgtgcatttggatcagctgctatttgg

SEQ ID NO: 640352 - DNA, 100 bp, Homo sapiens
tgaacagctggtagatgggctggcttactgaaggacatgattcagactgtcccggacccagcagctcatatcaaggagtggccagaaggctcctctccag

SEQ ID NO: 640353 - DNA, 83 bp, Homo sapiens
gtctcaggctgccccggacatgagcaagcccccgacagctcagccagacttcccctatggtctcggcgcggaagatggccggc

SEQ ID NO: 640354 - DNA, 82 bp, Homo sapiens
ctcttcggccatggaagctgccggcagccctgcggctacggagacaggttaattatagaaaatgccaagtaggaaatttgcc

SEQ ID NO: 640355 - DNA, 75 bp, Homo sapiens
gtctctcttcaccctgccgtcatgtctaagtcagagggagtgcctgcagggcaccatccgcaacagccaggaggc

SEQ ID NO: 640356 - DNA, 100 bp, Homo sapiens
ctcacctttaaacatggtgaaataattattgttttggatgacagacgcagtaaaacgcaggactcttcccgcttggattcgcgaaggtcttgaaaaaatg

SEQ ID NO: 640357 - DNA, 90 bp, Homo sapiens
cttacatggtcagagctggtttttcctgccctcaaatatatttctctgactctaccggttagactagctcctgcagtgtgatagtcctcg

SEQ ID NO: 640358 - DNA, 90 bp, Homo sapiens
accgattttatctgaaggaagtgaacatcagcatgtatttggttaatggctccgctatggagggcctgggctttctggatgctcttaatt

SEQ ID NO: 640359 - DNA, 83 bp, Homo sapiens
agctcgctcacttgtgatgccctgactgagctgctggctaagatcaccaacacagacgtggaagctcttcgtgggcggtcttg

SEQ ID NO: 640360 - DNA, 83 bp, Homo sapiens
ccgcgagcgcggcctgcaggagccttcaagatggtcagcaaggccagcagtccacagcccaggtcaaagtccagtcccgcccc

SEQ ID NO: 640361 - DNA, 75 bp, Homo sapiens
gaagactgatggagcaggcttgcaatattaaagtatcacatcggtatcctcgaattcaaagtatcaaagtacaat

SEQ ID NO: 640362 - DNA, 101 bp, Homo sapiens
ggaggaggcagaggccaactgctccgtggcgttcgctgaggctcagagatgggtggagattggcagattgctactctggctttactcctgggcggcgctgc

SEQ ID NO: 640363 - DNA, 96 bp, Homo sapiens
gtaggtcgagcacagctggacgccatctcggagaaggtggatgtgattgccaagcgtgtgctggggtgctaaaatgatgtattttctggacaagtc

SEQ ID NO: 640364 - DNA, 100 bp, Homo sapiens
tttgactaccaatccaaaatgctggctttaacacggatgataccatcggggaccttaagaagctgattgcagcccaaactggtacccgttggaacaagat

SEQ ID NO: 640365 - DNA, 96 bp, Homo sapiens
acagaatgtttttgaagaagcttcaggaacaagtcaaggatgcattccaggaaagttctataaaaatataccatcaactccaacctgatatttgac

SEQ ID NO: 640366 - DNA, 82 bp, Homo sapiens
ccaagaccaggcaccggttgctgatttccttgttggagtcttcaccactatgagcacttgcttggctcaggaacaacagaag

SEQ ID NO: 640367 - DNA, 101 bp, Homo sapiens
tcaacaacccagaggatggatttttcaaaaaaactaaacggaaggtagtgccaccttctcctatgactgatatttggagttcttacaacatggcagacatt

SEQ ID NO: 640368 - DNA, 110 bp, Homo sapiens
ctgttggagttggatttggggctatagaaaagacggcatctgctacctttgagagtgccagagcccatggaacagacttacggcgtatgacctcatcggagacttgtaca

SEQ ID NO: 640369 - DNA, 49 bp, Homo sapiens
gtctcgtgtgtgaacatcacaggaggagtatttgaagacttctgagcgg

SEQ ID NO: 640370 - DNA, 82 bp, Homo sapiens
catattttctacccctagttcttctaacaggtttttaacaagttaatcaggcgctacaaatacctggagaaaggttttgaag

SEQ ID NO: 640371 - DNA, 75 bp, Homo sapiens
atgatatgtcagacacgattgcctttgaaagagcaagagtacaagaagatcatcctattatgtcttttactattt

SEQ ID NO: 640372 - DNA, 83 bp, Homo sapiens
aacctcaaggagcgttactactcagggctcatctacccaaataggaagagctctggtctgcagctcccagtgtgatcaatgca

SEQ ID NO: 640373 - DNA, 100 bp, Homo sapiens
gccgcttcaaccaggtctcctgcaaccaggcacccctgtaaaagagcccaacagtgaaaatgtagatatcagcagtggaggaggcgtgacaggctggaag

SEQ ID NO: 640374 - DNA, 100 bp, Homo sapiens
ccggcgtctgcgcttccccatggggctggcctgcggcgcctgggcgctctgagggttccccactgaaggacttggtccagctgtctggcagggaggagag

SEQ ID NO: 640375 - DNA, 98 bp, Homo sapiens
gactgtgaggcctttccccagaccccagagccttgaccttggggctaccttcacagtggatgcccaccaagttacagaaattatctcagagattcggg

SEQ ID NO: 640376 - DNA, 82 bp, Homo sapiens
gtaacccgtgtgactttgactggacttcccaagtaagaagcggaagaggagccgctggaaccaagacacaatggaacagaag

SEQ ID NO: 640377 - DNA, 80 bp, Homo sapiens
ttactgataagaaaacacatctttacacactaaataaaaatttccaatgggcaaatactggagcagctgtgtttggaaca

SEQ ID NO: 640378 - DNA, 100 bp, Homo sapiens
ccatcttcgtgcatgtggctgtcagtgacatcagcggtaaggtgaccctggcaaagatgagagtgcacatttcgtcctgcctgaaggtccaggagcagat

SEQ ID NO: 640379 - DNA, 88 bp, Homo sapiens
tacagggtcaaaggagagcacaaccatcgcagttggaagcccatggggcagggcgtctctggccgagcctctttttgtggaaaacgac

SEQ ID NO: 640380 - DNA, 100 bp, Homo sapiens
cagcatgattcaactttgtagtaagcttcgaaatttgctacatgacaatgagctgtcagttgtgcagaagattctgaccttatttgaggcttacatatag

SEQ ID NO: 640381 - DNA, 90 bp, Homo sapiens
aagaactgtgtgaaaatggggctggacatgtgtgaagccataaagaagaaggtagataatgactataatgcccttcgagaaagactcagc

SEQ ID NO: 640382 - DNA, 76 bp, Homo sapiens
gcctcggacaccttcgagggttgggacccccgcagcaaacacaagtttaagatccacacgtactccagccccacgt

SEQ ID NO: 640383 - DNA, 116 bp, Homo sapiens
cttctgtatgtttgtgctcacactgcgatcatctacaacgtgttcaggaacaatcaataccaccttcagatatggaaaattacctggggggaactttccagggaacaagtgaatct

SEQ ID NO: 640384 - DNA, 82 bp, Homo sapiens
agccagccccctacgaccagctcatcatcgacggatgctcagccagcattgggcagcccccgcttcctgctcccctaccccc

SEQ ID NO: 640385 - DNA, 100 bp, Homo sapiens
gctcaacaaagctgtctgggccaaaggaataaggaaatgaatcctcctgataacatcaaggatacaaaaagtgacatcatattctttcagagaagtgtcc

SEQ ID NO: 640386 - DNA, 101 bp, Homo sapiens
tccagaatgtcacaggtccagggcagaggaccaacatgggcattttgtttatgagcaaggtggacctcccccacacggcgatccaggaagcctccaacaag

SEQ ID NO: 640387 - DNA, 100 bp, Homo sapiens
cccagaaccacctcctttgcggagagctgcaagccggtgcagcagccttcagcttttggcagcatgaaagttagcagagctgtgactaatgagaattaaa

SEQ ID NO: 640388 - DNA, 99 bp, Homo sapiens
cacaaagatcctggaatatataaatgtgttgtttgtggaactccattgtttaatctctgctggatgaaccgaatcctaacagtccagccaatagccagg

SEQ ID NO: 640389 - DNA, 100 bp, Homo sapiens
gcagcactggggaaacgatccgctcccaaaacgtgatgatgatgtagaagaaacacatccaatggatgggaatgatagtgattatgatcccaaaaaagaa

SEQ ID NO: 640390 - DNA, 96 bp, Homo sapiens
gcatgaaatggaagagagggtggtgcggatagcttgaggaaggagtcgtaagaaagcagtgggagttgaagtcattgtcaagtgcttgcgatcttt

SEQ ID NO: 640391 - DNA, 96 bp, Homo sapiens
agccaatccattcaggatgggaaaccacgcaggcaaacgagaattaaatgccgagaaggccagtacgctgcggcatgaagctgaacctggactatc

SEQ ID NO: 640392 - DNA, 75 bp, Homo sapiens
tatgatcagatttctccaccaaattctcagcctgataagggcccaacacagagatactttcattgaagaacgcta

SEQ ID NO: 640393 - DNA, 75 bp, Homo sapiens
cggccctcgctcctccgccccgtgtctgcacccgccaaggttgggcccgaaggcatcctgcagaacggggctgtg

SEQ ID NO: 640394 - DNA, 77 bp, Homo sapiens
agacaaatcaaattagtggttttggttgtgggactggaaaatatcttaaagtgaacagccaggtacataccgtgggc

SEQ ID NO: 640395 - DNA, 50 bp, Homo sapiens
catcaacacgctctcggcaaaacgtgccaccttgcttagcgcccgtcaag

SEQ ID NO: 640396 - DNA, 98 bp, Homo sapiens
ccagaacctcacctcagagcccaccctcctgcagcacagggtggaggtgtttatctcagtggatgatctggaacccccggagccccaggaccctgaag

SEQ ID NO: 640397 - DNA, 98 bp, Homo sapiens
ggccgggcacctccgagcgcaaggacagcgcgaggtccgcgcagcccagcgcagccatatggtcatcatgggccagtgctactacaacgagaccatcg

SEQ ID NO: 640398 - DNA, 98 bp, Homo sapiens
cggggacccaggagtttcctgtgtccagcgctgccggagccgcctgagatcaatgaactgagccatgttcaaatccctgttatgttgatgccagatga

SEQ ID NO: 640399 - DNA, 98 bp, Homo sapiens
gcaacgccaaccgctccgctgcgcgcaggctgggctgcaggctctcggctgcagcgctggaaggccccctgctgaggccggctggccggaggaccacc

SEQ ID NO: 640400 - DNA, 100 bp, Homo sapiens
caagttgctactcgggacgctgcacctcccgcgccgcacggtggacgagaaattgcaggtgctgcagtgtctgaaatttccgggcctttctcaacagagg

SEQ ID NO: 640401 - DNA, 50 bp, Homo sapiens
agatggcctggatcctcatcccatggttgactatagtcaatggggccaat

SEQ ID NO: 640402 - DNA, 99 bp, Homo sapiens
gtccccagaacgcagatcagaggtagtcggacctttcccgctggcgcgcagcctcagctagaattgtgagaagctggagaataattttgatgacatcaa

SEQ ID NO: 640403 - DNA, 100 bp, Homo sapiens
ctaccttctgggccagtggccacgagatgctgatggggccttcacctgctgcaccaatgacaaggccacccagggtgaagagggaacagaaatctttgcc

SEQ ID NO: 640404 - DNA, 100 bp, Homo sapiens
ggggaagagaggggaggagagctctgagtgggaagcggagccgggggcctgggacccgtcgcgtcagagccaggtctcggcgcggaagatggccggcggc

SEQ ID NO: 640405 - DNA, 75 bp, Homo sapiens
catacacttacatctctagataacagtctgcactttcacccgtttcaggaaatctggcattttttaaagtttgcg

SEQ ID NO: 640406 - DNA, 75 bp, Homo sapiens
gaaagagattccttgcagagacagctcaacacggcacttccacagaggaaatatcattctgcaaaagaagcttat

SEQ ID NO: 640407 - DNA, 98 bp, Homo sapiens
tcattcaaggttacccagttggaccctttagatcctacaagatcagtgattgtgatccgctccctggtagcagatggtgtagcagaaagaagtggggg

SEQ ID NO: 640408 - DNA, 90 bp, Homo sapiens
gtctgcaggaccaacctctcctctggatgctctagacatggctccttactatgaagccttgtgcaaatccctcgactggcagatagacgt

SEQ ID NO: 640409 - DNA, 100 bp, Homo sapiens
gccgttgctgcgggggattgtgggagtctccgcgtcccgctcgctgggagagagccctgggcgctgcctatggcacagccaagagcggtaccggcattgc

SEQ ID NO: 640410 - DNA, 88 bp, Homo sapiens
attaaggagcacttccagaaaaggagttaactggaagaaatgagaactagggccagccaagtctcgggatggtgaacgtactgtctat

SEQ ID NO: 640411 - DNA, 100 bp, Homo sapiens
ggcggccaaggacctggccgacatcgcggccttcttccgatccggttggtcaaagaaaaagtgatgtatgaaaaagaggcaaaacaacaagaagaaaaga

SEQ ID NO: 640412 - DNA, 96 bp, Homo sapiens
cacctcagcactatcccaagactgctggcaacagccttcacagttgttgatcacatagcatggtcatccactcacagcttaaaaaaatacagggag

SEQ ID NO: 640413 - DNA, 100 bp, Homo sapiens
gtttcggcacatggagattgatgtggattctgaagagccagtctttgaggctgtcatcaactgggtgaagcatgccaagaaagagcgggaagaatccttg

SEQ ID NO: 640414 - DNA, 83 bp, Homo sapiens
acaccagcagctctgctgcggagcgggaggaggaccgaaagcaaattgtggctactaatttgccccctgaagatcaagatggc

SEQ ID NO: 640415 - DNA, 100 bp, Homo sapiens
acgagacggaggcgctgcagcgcttcttcgaagacaccattcgcttttcacccaagatgatttgatgtcttataaaactctgatgaaccatgatggctac

SEQ ID NO: 640416 - DNA, 100 bp, Homo sapiens
atgagaactggttctacacgcgagctgcgtctgaccaaacacaccaagttcgtgcgggacatgattcgggaggtgtgtggctttgccccgtacgagcggc

SEQ ID NO: 640417 - DNA, 90 bp, Homo sapiens
ctggagcggatcccacacctccggaccgagggacgcggaaccctcggcctcaggaaagtcggacagtattcagtggctcagtcagtattc

SEQ ID NO: 640418 - DNA, 100 bp, Homo sapiens
ctctagtccttcagaataacctaatccccaaagtgtgtccagagttatgcaacttgacccagatgtgtgttaaaagagctagaaacattgggaaaggact

SEQ ID NO: 640419 - DNA, 95 bp, Homo sapiens
ccgggagccgccgccatgggggcctgcctgggagcctgctccctgctcagctgcgttgttgaggcatcttcattaagctggagtaccaggataaa

SEQ ID NO: 640420 - DNA, 100 bp, Homo sapiens
cgcgcgctcggctgcgctgggcgggccccaggtggttgtgtcaaaccgattggtgacatctccatgctgtattgtcacaagcacatatggctggacagca

SEQ ID NO: 640421 - DNA, 100 bp, Homo sapiens
acccagaacggatagctccctcctggaaaaggtgtcatggagaaactccagctgggcccagagattctgcagcgggaaaatccaaggcttatttatgcca

SEQ ID NO: 640422 - DNA, 98 bp, Homo sapiens
gcgaccaccctttgtttgactgatgaggaaatcaaggctgatggaaaacggacgatgtattactaagctggaaaacatggggtttcgagtgggacaag

SEQ ID NO: 640423 - DNA, 100 bp, Homo sapiens
aggccctggcccagagggacaagaaccacgtgaatgttgagggggcgacacacaagcaggtggtggacctgattcgagcaggcgagaaggaattgatctt

SEQ ID NO: 640424 - DNA, 51 bp, Homo sapiens
cagaaggagcaggattaccaaaggatagaagagtgatggatgtcatttctc

SEQ ID NO: 640425 - DNA, 51 bp, Homo sapiens
tatccatagataccgccctgacctgatgtttgcatcactggttgctgttta

SEQ ID NO: 640426 - DNA, 75 bp, Homo sapiens
ggaccccaactcagccttcctgcataccctggaccagcagaaacctagagtgggagatgcacttatttacatgga

SEQ ID NO: 640427 - DNA, 83 bp, Homo sapiens
aaaagaaggacgtggtgggaagagcaagagggaacaggagtacagctgtgtagtaaagatgccttctggtgaatttgcacgta

SEQ ID NO: 640428 - DNA, 100 bp, Homo sapiens
acccgccgcggggaggaggagcgggcgagaagctgccgccgaacgacaggacgttggggcggcctggctccctcagaatcctgttacacctgggatttag

SEQ ID NO: 640429 - DNA, 101 bp, Homo sapiens
agagatgaagaatgaagctgagaccacatccatggtttctatgcccctctatgcagtcatgtatcctgtgtttaatgaggctggagtacaatggcacgatc

SEQ ID NO: 640430 - DNA, 90 bp, Homo sapiens
ccgacagttgtgttgtgccaatggtggagaagaaaacttcggctccaaagacaacaggccctccctctgccctcccgtctgtgagctccc

SEQ ID NO: 640431 - DNA, 82 bp, Homo sapiens
cgagcagcgccagcggccgagcgggcggcttcctggcctgggcgctccggtggcggcggagacccctttgctgatgcaagta

SEQ ID NO: 640432 - DNA, 101 bp, Homo sapiens
gcttgtacttcttcaggggcttattctcttgtcctgtgggtcatgataactgggtacgtggagttctgttccattctggggggaagtttattttgagttgt

SEQ ID NO: 640433 - DNA, 75 bp, Homo sapiens
cgtctctttgagtatggccagggtatttctgggaaaagccagcttctgtttgcactggtcttcacaactcgttac

SEQ ID NO: 640434 - DNA, 90 bp, Homo sapiens
ggaatcaggagagcaaactataaggaatcacccttcggtcatcgtgcagcctgggaagagacctttacctgtggaatccccggatactca

SEQ ID NO: 640435 - DNA, 75 bp, Homo sapiens
gtccctgggactgagtaaggggaataaatacagtgctcagggcgagcgacaggagaaggaagccaacatcctttt

SEQ ID NO: 640436 - DNA, 88 bp, Homo sapiens
ggaggagctggatggactggaccccaacaggacacttaccgaagaaggcagatgcagaggaccatcactcgccagatgtcctttgatc

SEQ ID NO: 640437 - DNA, 100 bp, Homo sapiens
tggcctaccatccttctgctgctgaaccaatgccaacaggtaattgctctagcagatgcagtggaggaaaaccaaggcaatctgttccagtcattcacca

SEQ ID NO: 640438 - DNA, 100 bp, Homo sapiens
actgactcatgggccctggcggtggacgagcaggaagctgcggctgagtcgagacgagttgtactgctgtcacaggaaatggacgctggattacaagcat

SEQ ID NO: 640439 - DNA, 75 bp, Homo sapiens
caaggtggccctctccatcaagggaggtcctttcaaagtaagactttgaccccgacgcaggcttcagtgattgcc

SEQ ID NO: 640440 - DNA, 74 bp, Homo sapiens
ggattccaagtaactcttatttggagcacaggagggttttccaggccatgtggctcagcttcctcaagcacaag

SEQ ID NO: 640441 - DNA, 75 bp, Homo sapiens
aagtgttgagtaaacagaccaagttggatggtccccatccctgctggagtatttacaatgggcacagatgatcct

SEQ ID NO: 640442 - DNA, 75 bp, Homo sapiens
ctatgggcacaggcagtgtctggaattggcttcattccagcgctccaatagtcatgacaaagtaaggagaatagt

SEQ ID NO: 640443 - DNA, 100 bp, Homo sapiens
gaggactttttaaagaacgctgggttctatctgtgagcgggcttggcctttgacctcaatgagccctcagctgatgtctcctctgcctgggcccagcatg

SEQ ID NO: 640444 - DNA, 87 bp, Homo sapiens
ttcgacaggtgtgcaggtttcggcacatggagattgatgttcgagaacttgtcttggacaattgcaaatcaaatgatggaaaaattg

SEQ ID NO: 640445 - DNA, 100 bp, Homo sapiens
acaccctagaaaaatgtcagagagaaaatggatttatgttaaaaagatcaagtggcatgagcagccttttggggaaaattggtgccaagaagcagaaaat

SEQ ID NO: 640446 - DNA, 98 bp, Homo sapiens
attctcaacaccacggaattccatgcctccggtgtggctgtctctgatggtgtcatcaaggtgttcaacgacatgaaggtgcgtaagtcttcaacgcc

SEQ ID NO: 640447 - DNA, 98 bp, Homo sapiens
tgaagatgtcatcagaaatgcctttgcttgctttgatgaagaagcaactgatggatctgagaacgctgtctgggcttggtaccaagagctggtatttc

SEQ ID NO: 640448 - DNA, 90 bp, Homo sapiens
aagctctactgtgacttcagagacactgccaagcagccttagccctagtgtagagtcagccttgtccaaatatgatgccactaaacaaaa

SEQ ID NO: 640449 - DNA, 88 bp, Homo sapiens
gagcggccggggcctggggctgcctgccgggcggccgggcgcggcgagcccaggggaacgcccttttgcttgtgactggcagggctgc

SEQ ID NO: 640450 - DNA, 75 bp, Homo sapiens
gagagcctactgagcagcctgagtggattcttctttggagcagaataaaagatctggcccatcagttcacacagg

SEQ ID NO: 640451 - DNA, 51 bp, Homo sapiens
cgagtctgaggcggagggagtaatgttaccggtattgtaagaacaagccgt

SEQ ID NO: 640452 - DNA, 83 bp, Homo sapiens
cctgcgtacattcggggtgccagaaggaaagcataggtttactcctggcttgggggcattaggaagcactggaggctcttcgg

SEQ ID NO: 640453 - DNA, 90 bp, Homo sapiens
ctggggcgcccaccggcggtctgataggctacatcgcggcatgagatgaagctgtgacagattgctcgctgtaagcagctcatctgtgac

SEQ ID NO: 640454 - DNA, 75 bp, Homo sapiens
tcaccagtgaagccgtgacatcctgggatattctttgttgagagacctgaaagatgtctgaaaattccagtgaca

SEQ ID NO: 640455 - DNA, 122 bp, Homo sapiens
gaaccatgcctggtggatccagacatgatcaaagccatcaaccagggcaactatggctctcagcagcgggaagctgagcagcgggctgccctggcacggctggcagggcagctggagtccat

SEQ ID NO: 640456 - DNA, 100 bp, Homo sapiens
cagcatctgacaaacactgtattcgttgacagagctttgatagtcgtaccatatgcagaaggagacagtgtttcacaaaatgattttccttctgaagctc

SEQ ID NO: 640457 - DNA, 90 bp, Homo sapiens
cgaaccttggagagaggagaacgaacatcttctggacctttgtccaggaaactggccaagaagcggaaagagaccatgagcagcacccga

SEQ ID NO: 640458 - DNA, 83 bp, Homo sapiens
atttttttccaaactcagccaggtggttcgaaagacttcaagcaattgggaaacactactatgaagtatcctgtcatgaccaa

SEQ ID NO: 640459 - DNA, 82 bp, Homo sapiens
agaaagatcacctcgaactgcaccatagacaatgcagatcttcgtgaagactctgactggtaagaccatcaccctcgaggtt

SEQ ID NO: 640460 - DNA, 75 bp, Homo sapiens
gaaaagaaggggaagaagatcaaaacccaccatgccccaggcaatctgaaagcaaatcctgtttagatgcaggcg

SEQ ID NO: 640461 - DNA, 82 bp, Homo sapiens
atccagccttagcaaaccagaggaaattccactttcagaaattctccgcatatcttcaccacgagatttcacaaacatttca

SEQ ID NO: 640462 - DNA, 118 bp, Homo sapiens
ccagataccattgatgaaggaaatgctaaagcgattccaagactggatacacgtctgtttaactacgcaaaaggtaatgctggcatggcttactgggaccctaagtgtggcgaaggga

SEQ ID NO: 640463 - DNA, 109 bp, Homo sapiens
tcctgccaaaaggaaatgcatctttatgtcagaaacacaaagcagcccaaccaaaggtgcaatgcgtgttttactatctaaattaccaagaccatggattgtggatgag

SEQ ID NO: 640464 - DNA, 75 bp, Homo sapiens
cttgctggtgcatgcgtcgtcggcctctgggcagcagccactgaggcggctcccagctgcgttggcgacatggcc

SEQ ID NO: 640465 - DNA, 100 bp, Homo sapiens
gccaaaactgcacagtggaaggcactttccatgaatactgagaatgccaaagtaaccagatctaacatgaggtggcacaagaatggctcaactctccaaa

SEQ ID NO: 640466 - DNA, 100 bp, Homo sapiens
agacttgaaaaagccagttctaatcaggctgtcattttagaaaatgaagaacttcccaaactgtttcttgatttcctaaatgtgcgacacttgccctctc

SEQ ID NO: 640467 - DNA, 89 bp, Homo sapiens
gggacaacagtgacgaagagaactgtctcctggtgaccgagcacccgcctccgggcatcttcaactggttgtgggaagaaaatgtattc

SEQ ID NO: 640468 - DNA, 100 bp, Homo sapiens
ttcctccagacagtgcttcagaagcaaactctcctgaggagctatccagcccagctgcagaaccttggcctgaaaatgctacattatatcagcaattgaa

SEQ ID NO: 640469 - DNA, 75 bp, Homo sapiens
cagtggcttcgggccggaggaagtctatgataagcgtgaaaatcccctcctccccgaggaggaggaacagagagc

SEQ ID NO: 640470 - DNA, 100 bp, Homo sapiens
ttcatgcatcagggaaatgcccgattccagcccaacaaacctttctatactcaaggtcttgctcagtgtgcagaactctgctggcagctgagaggggaag

SEQ ID NO: 640471 - DNA, 82 bp, Homo sapiens
accactcattcacttctagacgacaaaatgcaaaaaaggaggccaaagactttgtgactctcctattccatctgtttcttcg

SEQ ID NO: 640472 - DNA, 98 bp, Homo sapiens
acagatttggatgtagatacgttagccagtttacttaggtgatgaagaggccagccttggattacccataagccccttcatggatcgttctgctcctc

SEQ ID NO: 640473 - DNA, 100 bp, Homo sapiens
cccgggagccggacggcccagtagggcgcactggaggacgctccgctgcgggagagactctccaacatgtgccttctgaccatacaaatgaaacttccaa

SEQ ID NO: 640474 - DNA, 82 bp, Homo sapiens
ccgccagagaggcccgcccaccagttcgcccgtccccctgccccgttcacaatgaactgtggctgcaccatctgtcttcatc

SEQ ID NO: 640475 - DNA, 100 bp, Homo sapiens
aagaacgcaggggagcccgagaacacctatattctgcggcctgttttccagcagagggccaattcctgtccccccagcagcatggcatcgtgtgctgaac

SEQ ID NO: 640476 - DNA, 50 bp, Homo sapiens
gagcctgccacgccgaggacgtggacttcctcttcaaattcctggtgatt

SEQ ID NO: 640477 - DNA, 83 bp, Homo sapiens
cagagattgagaatgtccatggatttgtttctcattctcatatttcaccaataaagcttcatattctccaattcagcctcatt

SEQ ID NO: 640478 - DNA, 75 bp, Homo sapiens
gttttgagctaaatattgaggagctcctgaaattattcttgggttaccattttgtgaagctattgatatgtggtc

SEQ ID NO: 640479 - DNA, 76 bp, Homo sapiens
tggcaacctggaccccaaaattaccgagaaacctcgacctgtctcccagttggttgcacagcaggttactcagcag

SEQ ID NO: 640480 - DNA, 75 bp, Homo sapiens
aagagccctggatggttgtaaggaaagaaacaagcagacggtatccagcaatgcagcaagtcttggaaaacctta

SEQ ID NO: 640481 - DNA, 90 bp, Homo sapiens
agactgcaacattctggcttgggttccatccttatatgaaccagttcctgatgatgatgaggaacgtccttgtgaagacctttatctgag

SEQ ID NO: 640482 - DNA, 75 bp, Homo sapiens
ggaccagctcatgggcacggctcgggacgtgtaaacaggaacatcgataagtagtgtaaaaacttgcacaatgaa

SEQ ID NO: 640483 - DNA, 75 bp, Homo sapiens
atcgatagctatgagaaggacgttgccaagattaaccaggacccccaggtccaatagaaaaagttggtgtgctgg

SEQ ID NO: 640484 - DNA, 74 bp, Homo sapiens
aaggattcgttacagccagagattggacggtatgccctggtagttgcaggagatattgctgtatatgccacagg

SEQ ID NO: 640485 - DNA, 100 bp, Homo sapiens
taaaccagtacagaagttatttgcaatcattgtaggcagccttggaccttggataacaccatcagtgaagagaacagagctgttattgagaaaatgttgt

SEQ ID NO: 640486 - DNA, 82 bp, Homo sapiens
cacaggaactttaaatcttgacaggtggttccaggaaagaaatcactgaacactgggaatggcttgagcaaaatctcttgca

SEQ ID NO: 640487 - DNA, 82 bp, Homo sapiens
ccgcgtccgaggctcgcgggcggcgggcccggatgcttcaggactgccccaaggcccgcagggaggtggagctgcactggcg

SEQ ID NO: 640488 - DNA, 75 bp, Homo sapiens
cgacaagccgctggcagccgcggatctcaccgccgctcagggatatggttaataggagaattgccatggacttga

SEQ ID NO: 640489 - DNA, 102 bp, Homo sapiens
ctcctccccaccaccaccatctccatcacccaccaacaacaccacaataatccacagccaaggtcttctcgtgggcaccctggacgtggtgctggactccag

SEQ ID NO: 640490 - DNA, 50 bp, Homo sapiens
ctgaccaccaatcagatccgtaagattttcatcttcattggagagaccct

SEQ ID NO: 640491 - DNA, 100 bp, Homo sapiens
gcaacaacctctcctcttcgtctccgccatcagctcggcagtcgcgaagcagcaaccatggtgatgctgaacaggagcttggcccccctccatctgtaga

SEQ ID NO: 640492 - DNA, 50 bp, Homo sapiens
cggcaaccagatcggggccaagggacgtggcctggctgggtgaatgcgac

SEQ ID NO: 640493 - DNA, 97 bp, Homo sapiens
gccacaggaggctgtgcgggccccgctccgcttcgaatgggaggaagaaggcacctacgatcaaactctggagttccgtaggggaggtgatggccag

SEQ ID NO: 640494 - DNA, 83 bp, Homo sapiens
aaaggatttgacaaagccacttttgaaagtcagatgtctgtgatgaggggtcaggtagctacagcaagctgggtagcaggcag

SEQ ID NO: 640495 - DNA, 75 bp, Homo sapiens
ctggacttcgcctttcccgagccctggaggtggggagaaaaggttgatgtccgtggaggaagaactgaagaagga

SEQ ID NO: 640496 - DNA, 75 bp, Homo sapiens
gcttcctgcttccacttccgtgaccgttagggacaagacagagtcaagaattgaaggttggctttcagtaccaaa

SEQ ID NO: 640497 - DNA, 89 bp, Homo sapiens
ggtcagcatgagcgagctctaccctctgcagatctcccccgtgtcttcctatgcaggtatttaccttgctgtggattgctgactggatg

SEQ ID NO: 640498 - DNA, 82 bp, Homo sapiens
aggatatcgacgtcgtgatccagaagtccagagctgaggactgcctgtttgcaggcaccatgactcctgtgaggatgcagca

SEQ ID NO: 640499 - DNA, 100 bp, Homo sapiens
ctcctggaaagatgtaaatctcccaagtccaaaggtgaaaattgataccaaggccattccactgtttgggaactccctgaagcctgacagtctccggttc

SEQ ID NO: 640500 - DNA, 100 bp, Homo sapiens
gcagaagtcgcgtgtctaggtgagtcgcggtgggtcctcgcttgcagttcagcgaccacggccgccatggcatcagatgaaggcaaactttttgttggag

SEQ ID NO: 640501 - DNA, 90 bp, Homo sapiens
agagttgtgagtctctttcctgtttacctccagtgtcccttcttccacatgaaaaggataaggctatttttatgattcccacaaatccac

SEQ ID NO: 640502 - DNA, 100 bp, Homo sapiens
agacttcttgctcatttctgagtattgtctttatatcctgacactatgaatgctacttggatgcctcttaagggaagtcccacctggccatcgtgcagaa

SEQ ID NO: 640503 - DNA, 75 bp, Homo sapiens
tgccttcgcgtcttctcttccctcgggtgacttgaggatgaactggacctcacagacaaacacagagaagccatg

SEQ ID NO: 640504 - DNA, 82 bp, Homo sapiens
tgcagcacttgttccccaaacaagtgctcctacattctggtgtccctggccagtgtccttccacctgtccacaagcatgggg

SEQ ID NO: 640505 - DNA, 90 bp, Homo sapiens
ccttccagcccggccccagtgaacggttggctgttgaaggcacgaatggaatagataatcatgtacctacaagcactctagtccaaaact

SEQ ID NO: 640506 - DNA, 90 bp, Homo sapiens
taacaacctgcgtgggcaagagtttccacacctatgacgttcatcctaagttccactataaacaggctcatgactcgggcacagacactt

SEQ ID NO: 640507 - DNA, 100 bp, Homo sapiens
caaggatcacttggtgcctgaccctggctgccattatgaccaactaattgaaattaacctcagtgaggatgaaactgattccaagacagcctccccgtgg

SEQ ID NO: 640508 - DNA, 100 bp, Homo sapiens
ttgtgaacaccttcttcagcttccttcgacgcaaaacagactttttcattggaggagaagaagggatggcagagaaggaattgaatgatctggcacggga

SEQ ID NO: 640509 - DNA, 100 bp, Homo sapiens
cctacaattcatgaaactgactgattcgactaaaggatggatagtttgggcagcgttggacagctctatgaggggctggagtacaatggtgcgatctcgg

SEQ ID NO: 640510 - DNA, 50 bp, Homo sapiens
gacgacgagtacgactacctattcaaagaaaagacaactggcagtgcaga

SEQ ID NO: 640511 - DNA, 50 bp, Homo sapiens
tatcctgcagcacttccactctgagagcacagcctcccgcgacgatgccc

SEQ ID NO: 640512 - DNA, 50 bp, Homo sapiens
ccgatttctatttgactggcaatagtctgcaatcccacagagtattgatg

SEQ ID NO: 640513 - DNA, 100 bp, Homo sapiens
aaaccgtccctgctacagagcaggagttgccgcagccccaggctgagacagctgaaggaattgaagaatctgcagcagcaatacttacagattaatcaag

SEQ ID NO: 640514 - DNA, 98 bp, Homo sapiens
gggagggagatggggggcaaaagcaatacaattatcttcatgagtttcgggacaaattagctgcacatctatcatcaagagattcacaatcaagatct

SEQ ID NO: 640515 - DNA, 99 bp, Homo sapiens
agaggagtccatagtacaggaagaaaagaagaagctgacccctgaaggaaacaaagctctcatttcactcttcagtgttcctgttatttatgaacggca

SEQ ID NO: 640516 - DNA, 100 bp, Homo sapiens
agcccccgatccgccagcaccacctgaggatccagaaaccgccccagcgatggaagaggatcaggagctggagagagaattcgagaagagaagcgagaag

SEQ ID NO: 640517 - DNA, 100 bp, Homo sapiens
agcgggaacagtctcctccactcggagcgcataagctgtggccatgactactgaagtaggctctgtgtctgaagtgaagaaggactctagccagttagga

SEQ ID NO: 640518 - DNA, 100 bp, Homo sapiens
agatgctggaggacctgcggcgggaacagcaggccacagagctgcttgcggccaagtacaaggacccaatgttgtcttccagttgtgaaagcaccccaga

SEQ ID NO: 640519 - DNA, 82 bp, Homo sapiens
aaaaaagtggctcagattcagaatgatgcacttttgtcttcctggccagtgttttactacaatgaggatggcaagtctggac

SEQ ID NO: 640520 - DNA, 82 bp, Homo sapiens
gtgttcgagaacgaccccgagacggcagaacgcagagctggccaagcttcggcaggagctcagcaaggtcagcaaagagctg

SEQ ID NO: 640521 - DNA, 97 bp, Homo sapiens
cgcggtgaccgcgccgcccgggcgatgcccgcggggacgccgccggccagcagagcgagagagaagcaagcagaaggcccggaggagaacaagatcc

SEQ ID NO: 640522 - DNA, 75 bp, Homo sapiens
agaactcatgcaagtggaacttacagcttccttgatcggactcagcattcaaatttgaaagacatattggctgac

SEQ ID NO: 640523 - DNA, 75 bp, Homo sapiens
ctcctgaatagctgggactacagtttcaagtgtcgtcagatgtatcacgcacccacagactgtgccacaatccgg

SEQ ID NO: 640524 - DNA, 101 bp, Homo sapiens
cgcaaacttttcagagggagcttgcaagcctggctatgcttcagccttgatgacggccatcttcccccggccagcgtctagttagccctggctcagccaac

SEQ ID NO: 640525 - DNA, 50 bp, Homo sapiens
cttcgatgtgcgagactttggaaagtgccttgctttccatgacatttccc

SEQ ID NO: 640526 - DNA, 50 bp, Homo sapiens
tcccagcactttgagaggccaaggcaggcggatcacaaggtcaggagttc

SEQ ID NO: 640527 - DNA, 100 bp, Homo sapiens
aggaccccagacaccggagactgggaaatgaaagaagattggcccatgcacaagctggaatgttctcccatggttgtttttggggaaaactggaatccct

SEQ ID NO: 640528 - DNA, 82 bp, Homo sapiens
gattggaccatcccccaatcctctcatcttgtcctacctgaagtatgccattagttcccagccagatgaaaactcgctggat

SEQ ID NO: 640529 - DNA, 100 bp, Homo sapiens
ggaagatggaccaaagcgatacatggaggaatcagacatcattgatcttgagaaacgctattggttattgaaggctcaatcccggactggacgatttgat

SEQ ID NO: 640530 - DNA, 83 bp, Homo sapiens
cagagacatgcttcgacgaattaaggaagaagattgtgagaaagcattcttcaaaatggacaatgtgcttatagatgacagaa

SEQ ID NO: 640531 - DNA, 78 bp, Homo sapiens
ttgggacgagtgctgtgactgtgttgagtgaagtcaccctgctgagaaatgaagtggcacagctgaaacagcttcttc

SEQ ID NO: 640532 - DNA, 75 bp, Homo sapiens
ggcacctgcacacctggatccaggataacggaggctgggtgttgccacatctgcaaacttcctgggagagtaatg

SEQ ID NO: 640533 - DNA, 100 bp, Homo sapiens
ggcgtcaggactattttcacgttttaatgccgagaggtctctgtgacgattttgggaattgtactgccccagatcgtaactggagttgcagccaaccttg

SEQ ID NO: 640534 - DNA, 75 bp, Homo sapiens
gaagaaggaacgatctcgtaagaaggattcaattggggaccacaaattcagtgcccaccggattgtcttagcagc

SEQ ID NO: 640535 - DNA, 100 bp, Homo sapiens
acctttaggtgcttttatattcatctcaaaaacaaaattctgaactcaggacttggcaacctgaacccccgccaacaaacaaatggcaacttgataattg

SEQ ID NO: 640536 - DNA, 75 bp, Homo sapiens
ccgccgccctccctgaggagatccgttggctcctggaaggaattttggagagtaaaaggctgaaccttgttaaag

SEQ ID NO: 640537 - DNA, 51 bp, Homo sapiens
ctttattgacctcgactcccatgcgtgcacagccagagaacaacacatcac

SEQ ID NO: 640538 - DNA, 100 bp, Homo sapiens
ccggagccgccggccgctagcgtcagcgccagccagggtgttctaaggatacattttattgaagctcaggatcttcaggggaaagacacttaccttaagg

SEQ ID NO: 640539 - DNA, 73 bp, Homo sapiens
ggatttgttaaggattccaagtaactcttatttggtgattgaaatctctgaatatcgaacccagctctatgaa

SEQ ID NO: 640540 - DNA, 75 bp, Homo sapiens
gtcctatgtggacgttggcactgggaaggcttcaacggaccacaccaaaatgccatctcaaatggaacacgccat

SEQ ID NO: 640541 - DNA, 100 bp, Homo sapiens
tgatcatctcagctgctggccctaagctgtgccctccccgagaggattctgtcctttcgtggacgcttctccctggccggctggctcctctggaccctaa

SEQ ID NO: 640542 - DNA, 95 bp, Homo sapiens
aaggatgggacttcatctacaatttttagtggagttgccatctatgttaatggatacacagccctcttggaacagagatcatgatgacacggcat

SEQ ID NO: 640543 - DNA, 82 bp, Homo sapiens
accctcgctccctctgctcttcctcccttcgctcgcaccatgacctgcctagagctggaacgttacctccagagcgagccct

SEQ ID NO: 640544 - DNA, 98 bp, Homo sapiens
gacaaatggagcaacttcgaccccaccggcctggagcgcgccgccaaggcggcgcgcgagctggagcactcgcgactggacctacagagacatctggg

SEQ ID NO: 640545 - DNA, 82 bp, Homo sapiens
cctgttgtacatccactggacctaaaatatgaccctgatccagcaaaatgatgcttcaacacccaggccaggtctctgcctc

SEQ ID NO: 640546 - DNA, 100 bp, Homo sapiens
ccaaacaactggcagaatttgctaggtttcacgtgccacgatcatggtgccacggtactgcagtatgcacccaaacagcaactcctaatctcggggggta

SEQ ID NO: 640547 - DNA, 133 bp, Homo sapiens
ggattagcgagaagaaaatgtccacccccatcgaagtgttgtgtaaaggctacccttgccaagaagacgctggagggaggctgttaggagggactctgagcttcacacctgtctgctgccatgggtgcagagc

SEQ ID NO: 640548 - DNA, 100 bp, Homo sapiens
atgatgaagaagatccttcaaaattaaaagaggagcagcatggcatttcagtcactggtttgcagagtccaggtatggcccatctcctgtacgcttggag

SEQ ID NO: 640549 - DNA, 96 bp, Homo sapiens
ccgcgtcccgctcgctgggagagaggtacctctccttttccctctccctttccctaaggttgcagtattttacagagctagcccaaggcacaagat

SEQ ID NO: 640550 - DNA, 82 bp, Homo sapiens
ctgaagacaccaaagatgggggaggggaagggaaattcaactactgaggaggttacggcacaaaaatgtcatccagctggtg

SEQ ID NO: 640551 - DNA, 98 bp, Homo sapiens
cttcagggatgagtcatgtggtggtgaaaaatgaccctgaactggaccagcagatgcctgtgaggagccaccaacatttgaagctatggagctcattg

SEQ ID NO: 640552 - DNA, 75 bp, Homo sapiens
atgaccttggacacctccatgttatggacacggtctttcttattcagaaagctgacttcatgagaccgaggatct

SEQ ID NO: 640553 - DNA, 100 bp, Homo sapiens
ggaacccgagaccacagccaccactattctagcatccgtgaaggagcagctggacagtgccacatcgcttatccaggcagctaaaaacctgatgaatgct

SEQ ID NO: 640554 - DNA, 83 bp, Homo sapiens
atggcgaccaccgtcagcactcagcgcgggccgccgctgctttgatgggagcacccctgtccatgcagcagcattttcgggca

SEQ ID NO: 640555 - DNA, 101 bp, Homo sapiens
ccggagagaacgaagcctcggctgggagcggtgttgggctggatcttgatagcagttgttatcatcattcttctgatttttacatctgtcacccgatgcct

SEQ ID NO: 640556 - DNA, 96 bp, Homo sapiens
atccctgtgtgacagcaatgaggtgaacccaggggccgaagcccacccagggagttgatggacactggggttgggaaatcaagcatcgtgtgtcga

SEQ ID NO: 640557 - DNA, 83 bp, Homo sapiens
ctggacaagctggaatgcatccaagagaatccctcaacatgctgaacacaccacagccatcagcactggaatgcaaagaccag

SEQ ID NO: 640558 - DNA, 74 bp, Homo sapiens
tgcagatcgactttgccgacccctccagagcgacccctgaagaggagcggaacctgctgcatgctgacagcaat

SEQ ID NO: 640559 - DNA, 100 bp, Homo sapiens
ttttactcccatcctgggagcagccattgctgactcgtggttgggaaaattcaaaactgaaggcagaagctagtctaatggaccagatgagtagttgtga

SEQ ID NO: 640560 - DNA, 97 bp, Homo sapiens
aacagttgctggacagtttgaggatgcagatgttgatcactgaaaatgatttatgcaagtttaaggaaatgggtcctgatgaatatgaagagatgga

SEQ ID NO: 640561 - DNA, 74 bp, Homo sapiens
acagctccatttcacatgagagccctgcagtgaaagatgcggctgagttcctcggcgaaggagcagggccctgc

SEQ ID NO: 640562 - DNA, 101 bp, Homo sapiens
ctgcagaagccatttcaggagtacctggaggctcaacggcagaagcttcaccacaaaagcgaaatgggcacaccacagatcaatacaactgctgatgagaa

SEQ ID NO: 640563 - DNA, 99 bp, Homo sapiens
ctggtacccgtgagctgcagcgtctccttcccgttctccaggtgtctgcgagcctctccacgcacgtgccctccaggctgaagtgcagtggcgtgatct

SEQ ID NO: 640564 - DNA, 75 bp, Homo sapiens
caagaaaatgtcttatagtggaaagcagtctactgaggtttatgatgataaagactacaggagaattcggtttgt

SEQ ID NO: 640565 - DNA, 112 bp, Homo sapiens
tgtcgcgcagaagctcctcaatggccagcgccagctgcagccccggctgcccactcgcctcacctgagcctgggctcttcttccggaggcattaccccgtgaacagtgtgat

SEQ ID NO: 640566 - DNA, 100 bp, Homo sapiens
tcatttgttttctggtgtcatcgtaggtggccacctatggcttttggggtctcagcggcggtggcagccgaggtgcaggatgcaagaaggcgccccccgg

SEQ ID NO: 640567 - DNA, 50 bp, Homo sapiens
agcagcagagatgataacatgtttcagatgctgcagttggagaagaaact

SEQ ID NO: 640568 - DNA, 100 bp, Homo sapiens
ttccagtcctcctaggcatcttattgatcctccagtcgagagctggaagtcgagtgtgctactcaactcaggagatttggagacaaactgaacttccggc

SEQ ID NO: 640569 - DNA, 99 bp, Homo sapiens
cccggcctgggagaagcagcagagaaagaaccttgtgaaacatcttcctgagcagaagatactcaacgaattagcagagcttaagaatgaatatgatga

SEQ ID NO: 640570 - DNA, 98 bp, Homo sapiens
aagccgctggtcgtgttcgtcctcggcggccccggcgccggcaaggggacccagtgcgcccgcatcgtcgagtgccggtggtggtgtgcacattgagc

SEQ ID NO: 640571 - DNA, 98 bp, Homo sapiens
accttcagttccaaagatgatgaatctgaaaggaaatccggaattatcacagatttctctgcaggtggatattgttcccagccagggggagatcagcg

SEQ ID NO: 640572 - DNA, 75 bp, Homo sapiens
ctggtaatagatgtctgacaaactaaagaaagacttgtgttacgaaacctcgacctgtctcccagttggttgcac

SEQ ID NO: 640573 - DNA, 82 bp, Homo sapiens
tcaccgttacccggggcaacagctgagccgtctgggaagggatgcatctggggatatgagactttctactcggaatatcctg

SEQ ID NO: 640574 - DNA, 76 bp, Homo sapiens
acatgctttttattacaagactacggagcataggaggaaaattcatcatctgattgaagccttcagctgactgtgg

SEQ ID NO: 640575 - DNA, 50 bp, Homo sapiens
gggagctcttggcaaaacaccagatggtaattataaagtggactgtgcct

SEQ ID NO: 640576 - DNA, 95 bp, Homo sapiens
gcgccgtcagcctcatggagcggcggaggctcaaccagctgctcctgcccctgctgcagtgtatgtggtagaagaccaaagaagagatgagctag

SEQ ID NO: 640577 - DNA, 100 bp, Homo sapiens
gcgagcgtcattgttgtctttctgggaactcattcccatgagcgcataaagtcaggcagagatggcagtgggggctcccgtggcaaaagagaaggaagtg

SEQ ID NO: 640578 - DNA, 82 bp, Homo sapiens
ctacaacgaaggtgaagccacggaagataaggagtgtggccatctggggccgtgtggtatttgccactcaggagacatgtcc

SEQ ID NO: 640579 - DNA, 90 bp, Homo sapiens
tgggagcagaagggaggctccaagacctcatcaacaattaaggcatgccagaatcactcttgtactgctccctgcacgatccagtcagcc

SEQ ID NO: 640580 - DNA, 100 bp, Homo sapiens
gaaaacatcaaagaggtctagcaaaggacacaactcagatgggaagttcatcgcccgggcacagcggatagagtacgactgtgaactagttccccggcga

SEQ ID NO: 640581 - DNA, 127 bp, Homo sapiens
gccgcaccaatggcttccgtgctgtcctacgaaagcctggtccacgccgtggccggagccgtggcatagaatgtcaagctaaccaggcgtccgctacttcagaagagtgtactgtcgcatggggagt

SEQ ID NO: 640582 - DNA, 100 bp, Homo sapiens
aaagtgctggagtgcttccatcggcgcactggacagaagtgtgccctgaagtgttctccgtggcccgatgcccccacagcctatgtgaataacagccctt

SEQ ID NO: 640583 - DNA, 75 bp, Homo sapiens
ccgcgtcggcgctggggacaaaggacatggatttgattgacatactttggaggcaagatatagatcttggagtaa

SEQ ID NO: 640584 - DNA, 98 bp, Homo sapiens
ctggattgggaaagaccatggcagatcccttcccactggaggcatgtgatgagaggaaatcaccgaaaacgtggctgcttcaaggatcctgagccaga

SEQ ID NO: 640585 - DNA, 83 bp, Homo sapiens
tctccttttcgtttccggaaacatggtgtggacactgccagcggctgcagccgacttggaatgacctgggagacaaatacaac

SEQ ID NO: 640586 - DNA, 75 bp, Homo sapiens
gcaatctcaaataaaatcaccagttgtatttttcagttattacaggaagcaggacagagaaaagtgacagtttca

SEQ ID NO: 640587 - DNA, 100 bp, Homo sapiens
gcaaagactccagtaacactcaagcaaagaagagttgagcacaatcagacttaattcagtgcacaaatgagatgaatgtgaacatcccacagttggcaga

SEQ ID NO: 640588 - DNA, 100 bp, Homo sapiens
gcgaccactgcccggctgccttccacctccagtgctggaatgccgtcttggaagccgattttgcaaagaggggatacaagcttccaaaggtccggaaaac

SEQ ID NO: 640589 - DNA, 100 bp, Homo sapiens
aaggagtcaatggcaggaaacaagccagccaatgcagtcctgcacaaaggtctctgctgctgatgaagctgtgaccaaacgcacccaacccttggcagcc

SEQ ID NO: 640590 - DNA, 100 bp, Homo sapiens
ctccggctccggcttctgctgttgctcttctccgccgcggcactgatccccacagaatgagagactacaggcattgcttggagataatgaaaagatgaat

SEQ ID NO: 640591 - DNA, 51 bp, Homo sapiens
ggaggaagtcagcctggaggagttctttctttgttcaacacgccaagaacc

SEQ ID NO: 640592 - DNA, 83 bp, Homo sapiens
cgcgcgccaagatccattcgttgccgccggaggggaagcttgggatcatgagggacaaattcccagctgacggggaccacaac

SEQ ID NO: 640593 - DNA, 82 bp, Homo sapiens
tggtggcatgagcccttccggttgggcatccgcttttgcaccaatcgcaggtcccgcagcccccggaagccaatagactccc

SEQ ID NO: 640594 - DNA, 90 bp, Homo sapiens
cggaatccggacaattatgtccgcgaaaccaagttggacttacagagagttttcagataactattatcgtgcagaaatgattgatgccct

SEQ ID NO: 640595 - DNA, 80 bp, Homo sapiens
tgtgaagcggccaatggcacggaggcctgcgtatgtggacgagtgctcactagcagaaaaaacctgtgtgaggaaaaacg

SEQ ID NO: 640596 - DNA, 90 bp, Homo sapiens
acaccagaagagagcaaggaaaggcttgggatctctatgacgctggagtgaagaggaaaggaactgatgttcccaagtggatcagcatca

SEQ ID NO: 640597 - DNA, 75 bp, Homo sapiens
agcaccatggcgaccaccgtcagcactcagcgcgggccgaattaaatgtgagggagtctgacgtaagagtttgtg

SEQ ID NO: 640598 - DNA, 80 bp, Homo sapiens
gagaggatctggtgtaccaggcgaagctggccgagcaggctgagcgatacgacgatgatgataattccgaagaaggcttc

SEQ ID NO: 640599 - DNA, 83 bp, Homo sapiens
gcaagaaaaaagaaaaactttaagattgctgtgaaaataataggtatttaaagatcatgcaattgatggagaaactttgccat

SEQ ID NO: 640600 - DNA, 80 bp, Homo sapiens
tccgcctcctcccgggctggcgtgcgccagaggatccgcaaagtgctgaacagctgctctgttaaaagcgaaaatgaaac

SEQ ID NO: 640601 - DNA, 75 bp, Homo sapiens
gttcgagaacgaccccgagacggtatttaacatgaagtcgctccagattgtgttacctgcccgagcagaccccga

SEQ ID NO: 640602 - DNA, 75 bp, Homo sapiens
ggcgcttgagttggtcgggggcagcggcagctgcagctgtgatcctcggctgtctgttggcattgacgggacctg

SEQ ID NO: 640603 - DNA, 50 bp, Homo sapiens
caactccatccaacacttcgtttactccgatggtatgttacttacggtca

SEQ ID NO: 640604 - DNA, 100 bp, Homo sapiens
gttttcgcaaagaaacgaacaacgctgctattataaggcaagctggaaatgaccttggagattgtagcagagagtgagcatgaggagcggcctgctggcc

SEQ ID NO: 640605 - DNA, 100 bp, Homo sapiens
acgaacatgagcacggggcggagctatgcagatcgaagccgcggtcaaggccgccagagaagcctttcccagctggtcatcccgcagcccccaggagcgc

SEQ ID NO: 640606 - DNA, 76 bp, Homo sapiens
aaagctcgacttctcaatcccaagtggccaaagacaagcttaccattgttcagaagcaaacagtttgcagtaaaaa

SEQ ID NO: 640607 - DNA, 83 bp, Homo sapiens
cttgaccatgtgacatctgatgctgtggaacttgcaaatcgaagatcatggagtgcatcggatcctttctataccaacgacag

SEQ ID NO: 640608 - DNA, 82 bp, Homo sapiens
atacagggacgtgatgctggagaattataggaacctggtctccctggctatcagttgagggatttgcagttgataaaatggc

SEQ ID NO: 640609 - DNA, 83 bp, Homo sapiens
gttggctgttggaaattgcagagtaatgcctcaggtcttgagtcaccacgtccgaatataattcttgggttagtaatctgcca

SEQ ID NO: 640610 - DNA, 75 bp, Homo sapiens
cgaggagaaaacagcaggcacccaagcgggcggcagatgatggatttggacatgcttctatgaagaaatgccaca

SEQ ID NO: 640611 - DNA, 100 bp, Homo sapiens
ggggtccccgagtggttccatggtgcaatctcaagagacgagacggtcatctgttccagccgggccactgtgatgctttatgatgatggcaacaagcgat

SEQ ID NO: 640612 - DNA, 98 bp, Homo sapiens
ctggaagatgctaattctcatcaaagaggactactttcccagggacctcatgtcttggatcaatggaatacgggggttggtgtcctcagatgagctag

SEQ ID NO: 640613 - DNA, 100 bp, Homo sapiens
cgaagagacagaggtcatgattctgagatgattggagaccttcaaggtgaacaaatagaagctgagggtgaaggacctacagctgtcaccttcatctctt

SEQ ID NO: 640614 - DNA, 75 bp, Homo sapiens
acggatggtcttgaaacacaaatggtttttggtgataacccccgtgaggacaggccatggctacgtatacgagta

SEQ ID NO: 640615 - DNA, 96 bp, Homo sapiens
ctttaccacaacaatgaagagaaaaataggctgccagcaaacagtcttccgcaggaaggagatgtggttcaaaccttgtactactcagctgatcac

SEQ ID NO: 640616 - DNA, 113 bp, Homo sapiens
ccagcggtcacctacccccagcaccacctccagcccctgcgcctcgaacaaaatccagtctcatagcagaggagaatataatgtttacagcaccttccagagccatgaaccag

SEQ ID NO: 640617 - DNA, 100 bp, Homo sapiens
cacagagctagccggacgtcctccgactcaaggcactgtacaaaacgagttaaacagacatggcccttgccccctgggagttttcagtctaagatgatgc

SEQ ID NO: 640618 - DNA, 83 bp, Homo sapiens
ggttatgatgatgcctgggaccaggaccgcttcgagaaggcccgggcctccatgcaggctgagatggagctgaaggaggagga

SEQ ID NO: 640619 - DNA, 50 bp, Homo sapiens
gctctcggccgaagtcaagaacaagttctccaaggagaggcacatcatgg

SEQ ID NO: 640620 - DNA, 100 bp, Homo sapiens
ctatcagcaggctccgggctgaagattgcttctcttctctcctccaaggtttattgttggccaaaaccaggctttgattgaaccaggatgaatgcgggtg

SEQ ID NO: 640621 - DNA, 136 bp, Homo sapiens
ttcgggccgagatgtctcgctccgtggccttagctgtgctcgcgctactctctctttctggcctggaggctatccagccaaaatgatgcttcaacacccaggccaggtctctgcctcggaagtgagtgcttctgcc

SEQ ID NO: 640622 - DNA, 82 bp, Homo sapiens
gatcgatgtttcaatattggaagcgctttgatttacagcagctgcagtcccttaagctcctaggatttttagatgttgaaaa

SEQ ID NO: 640623 - DNA, 100 bp, Homo sapiens
cagaacgcagatcagaggtagtcggacctttcccgctggcgcgcagcctcagctaggatgaagatgggtttcaagaactaaatgagaatggaaatgctaa

SEQ ID NO: 640624 - DNA, 101 bp, Homo sapiens
ctttgtggaagcatttggcggcataccaccctgcactgtgagcggaaatgagaaagcagagggagttctatcacaaattgggcatggaggtgccgggagac

SEQ ID NO: 640625 - DNA, 126 bp, Homo sapiens
cttgcggcggccgtggaaggcgacccggcggctgtggaggccacgctcagctcgccaggcggcgcagggagcgtgaggatcatccccggagaggacgggaggatcggcagcacagggaaccatcag

SEQ ID NO: 640626 - DNA, 82 bp, Homo sapiens
atcaggtttccactaaatggctactgtcacctcaactcagtccagatctattccagaggggagcttcaccacttcattgacg

SEQ ID NO: 640627 - DNA, 83 bp, Homo sapiens
ctttcggcggagggaccaaggtggagatcaaactcattgaaagaaaatcttgcaaggtgttggacacttactgaagcagagaa

SEQ ID NO: 640628 - DNA, 75 bp, Homo sapiens
ctccagaaaattttcagagacaagcagtggaggattccctgggagcacccaccagctgagatctgcacatcagcc

SEQ ID NO: 640629 - DNA, 100 bp, Homo sapiens
tcctggacaccatcgagggagcaggagcatcaggcggccggcgcatggcgtgtctggccaaatcttcccgacagatggagttttaacattgaatgcggag

SEQ ID NO: 640630 - DNA, 75 bp, Homo sapiens
cgaccccgaactccaggacagcatccaggcctcattggacagcattcgagataccggggagaccacgacgctgcc

SEQ ID NO: 640631 - DNA, 100 bp, Homo sapiens
ggccgcggaaaccgatctgcccgttgtgtttgtgaaacagagaaagataggcggccatggtccaaccttgaagctctggaaaggaagagaaatggaagtg

SEQ ID NO: 640632 - DNA, 75 bp, Homo sapiens
cttccatcaatcatatctcacagacatgtgcaagccagccagcgcgccatagccttaattgcagaaatgatccac

SEQ ID NO: 640633 - DNA, 139 bp, Homo sapiens
cgttaggaggctcgggtcgttgtggtgcgctgtcttcccgcttgcgtcagggacctgcccgactcagtgctctacgaactcgacggggaccccaagaggaaggaattcctggatgacttgttcagcttcatgcagaagc

SEQ ID NO: 640634 - DNA, 100 bp, Homo sapiens
tcgctggctctgctgctgccgccggcgaaggaggaggcgttgccggcaatcatttggggaagaatctacagttgctgatggacagagtggatgaaatgag

SEQ ID NO: 640635 - DNA, 99 bp, Homo sapiens
ctggacaatcaaaacttaactcctggatacagcctctactcaatagtccccccagctttgtgtgctggtctcggggcttcatggagatgaatgggcggg

SEQ ID NO: 640636 - DNA, 100 bp, Homo sapiens
caagtggaatatgccattgaggctatcaaggaggcaagtgaggcctatctggttggcctttttgaagacaccaacctgtgtgctatccatgccaaacgtg

SEQ ID NO: 640637 - DNA, 100 bp, Homo sapiens
gactccgattcgtgaccctcagcgccggtgcatgtcgatcctgcctagggtagttaaaagacgagtgaatgctctcaaaaacctgcaagttaaatgtgca

SEQ ID NO: 640638 - DNA, 80 bp, Homo sapiens
ctcgacctgctaacagaactggaccttttcggctgctggtggtctacccttggacccagaggttctttgagtcctttggg

SEQ ID NO: 640639 - DNA, 101 bp, Homo sapiens
cggaagtcccggcgctacttctcctccaaccctatctcgctgccagtgcctgctctgaaacggtgggagcccagagtatatgagatgtcttcagaggctca

SEQ ID NO: 640640 - DNA, 99 bp, Homo sapiens
tcccccaaatgtctgactctgactctcggactgagaaacgcaaggttctccttactatgacaatgtccgccccctctcttaccctgattcggatgctgt

SEQ ID NO: 640641 - DNA, 87 bp, Homo sapiens
acagcttcgacttagccctgctccaggaatgggacctcgagtcactgtgagctgcagaaactggagggcagcagtggacctgtgcgg

SEQ ID NO: 640642 - DNA, 98 bp, Homo sapiens
gctccaatgaatttgaggaagaattagtgtctccatcgtcatcagaaactgaaggcaactttgtctatcgcacagcatgtgcaatgaattctcacaga

SEQ ID NO: 640643 - DNA, 75 bp, Homo sapiens
ctctggaactatccgtgtcaagatttgtcggcttcaaacactccagagtgaaaattcgaacctcaggaaacaggc

SEQ ID NO: 640644 - DNA, 75 bp, Homo sapiens
tggcagagcttgacccaggcactacggggatctgatgagcttctttcttctggcatcattaacggaccttttacc

SEQ ID NO: 640645 - DNA, 50 bp, Homo sapiens
cagtgctggtctgcctgacatgctggtgtttggaatgctttatcctgcat

SEQ ID NO: 640646 - DNA, 75 bp, Homo sapiens
ccgcagtccatctgactcctgcttcccgggtgttgctcgtgcaggtatgtttattcctaaaacgaggtgccaatc

SEQ ID NO: 640647 - DNA, 75 bp, Homo sapiens
ggaagaggctccacttttcccaggagaatcaattaaagccattggatcgaatcatcaatttagttgttggcagct

SEQ ID NO: 640648 - DNA, 98 bp, Homo sapiens
ccaggccggccaccgctgccgctgccgctgccggctccagggagccccgtgtcaagcaaggtcttatcgaatgttacttagcctccaacagtattcga

SEQ ID NO: 640649 - DNA, 100 bp, Homo sapiens
tcctacattagcgtctacgaccaccaaggttcctatatgatagtggactcttcagatcacgaccctggagaaaaagccagacttcagctgcctacaatga

SEQ ID NO: 640650 - DNA, 99 bp, Homo sapiens
gcctcgtcgacatgagtgatgtggaggaaaacaacttcgagggcagataagactttgaccccgacgcaggcttcagtgattgccgcggatcagaagcct

SEQ ID NO: 640651 - DNA, 138 bp, Homo sapiens
ctcatgggaaattgtattctccgagtcagattggagcatttgtgttgatgaagatgaaagagactgcaggaagagagaagggcacagttacctaagtatcaacgtaatcttcctcggccaggacaggcccccatcggt

SEQ ID NO: 640652 - DNA, 100 bp, Homo sapiens
tgtgctgaacgggaagggcctcggcactggtaccctttacatcgctgagagtagctgctgctggtggtgacaatgtcaaataacggcctagacattcaag

SEQ ID NO: 640653 - DNA, 100 bp, Homo sapiens
cgaaaagccacttgaagaaaagggtgaaggaggcgaattttcagttgatagcattttccaagccaccacagtgattcagctgcttcctctcctgcatctc

SEQ ID NO: 640654 - DNA, 100 bp, Homo sapiens
gcctgcagtcgccgccgccgccgccaggtttctgcataaagaccaactcctcggaagggaaggttttcatcaacatctgccactccccctctatccctcc

SEQ ID NO: 640655 - DNA, 100 bp, Homo sapiens
aaaaggaagcaaatgagctgatggaagatctgtttgaaactcccgatatcagaatgaattagctggcgtagataccgagctgctagccgagagattttac

SEQ ID NO: 640656 - DNA, 100 bp, Homo sapiens
acctgaagttgcactcaaaagcaagatatactactaactttgaaatggaataagagtggagcctttcaggctggcatggagagcttaaggggcaactgaa

SEQ ID NO: 640657 - DNA, 100 bp, Homo sapiens
ccagggccctcctccggccccaggcctaccccagtcacggacggttgactacagacaaaaagctgctgcagcaggtagaattcccacaaactatctgaga

SEQ ID NO: 640658 - DNA, 74 bp, Homo sapiens
tcgcatcaggtggccgggcacatgtacgggaaggacaaagtggagaccgtccaggctggacttgaactccttcc

SEQ ID NO: 640659 - DNA, 50 bp, Homo sapiens
gagaatcctgaaacagatttggatgataatgaagataattcaaatgatgg

SEQ ID NO: 640660 - DNA, 100 bp, Homo sapiens
tgtatgaccacaaacagccatcaagggagcatttccagctcgtttgaagaaggtgctgattgtgggggcacccatatggttccgagtgccctattccatc

SEQ ID NO: 640661 - DNA, 110 bp, Homo sapiens
tcgcagtactcgaacgttgttattttcggtgtgcctcagatgacctgtccacgctgagtttatagcaactgtcaattacggttcagattttcctaccccagcgtgacttt

SEQ ID NO: 640662 - DNA, 100 bp, Homo sapiens
ctgagagtttgatcccaggctttcaatcaacccaaggtgatgcttttgctacgacctcattttctgctggaactgaggaggctgcggaggaggaggagga

SEQ ID NO: 640663 - DNA, 100 bp, Homo sapiens
tctgatgataatcacagcgggactcttggcctgtccctcacatccgatgcaccctttttgtcagattatcaggatgaggacaaatcttcctattttcaag

SEQ ID NO: 640664 - DNA, 100 bp, Homo sapiens
tgtggatggcagaaaatcacagtggaatgtggtgaaaacagtagtcgtaatgctacagaaagccttgagccgggccatgcttctcacatcttacctgcct

SEQ ID NO: 640665 - DNA, 123 bp, Homo sapiens
ggtcatccaaagcagccgtcccctctgcagcctctctgacaagtggatgtaatccctgttcattactacttaatacctccaccaacaaagactaagaatggcagcaaagataaggaaaaagat

SEQ ID NO: 640666 - DNA, 88 bp, Homo sapiens
ttccgactctggttcagtcactgaaatccgcaatatcatctctgtcaaggctccttcgagagcagtggatccgggccaagtacgagcg

SEQ ID NO: 640667 - DNA, 100 bp, Homo sapiens
ctcctgagtagctgtgattacaggtaacaaggacgtctttgtgtgcatgcccacaggggcaggaaaatccctatgctatcagctccctgctctgttggcc

SEQ ID NO: 640668 - DNA, 75 bp, Homo sapiens
gctgtgctcattgattcaggtgacacctattattttggaggccgagacgcatccagagctttcgtgaccggggac

SEQ ID NO: 640669 - DNA, 83 bp, Homo sapiens
gaaaggacagagattgaactcagctatgcaaagcaactcaggaacaagttccagttccagtctaccacccaacacctagccag

SEQ ID NO: 640670 - DNA, 100 bp, Homo sapiens
gcgggaccatcaaagtcatcgacggcacctcgggggccacactgcaggcctccgcgctcagtggctcctgggtagaactgcacttcagcaataatgggaa

SEQ ID NO: 640671 - DNA, 100 bp, Homo sapiens
taggcggccatggtccaaccttgaagggaatgggtactgttcaaaaaggaatgccccacaagtgttaccatggcaaaactggaagagtctacaatgttac

SEQ ID NO: 640672 - DNA, 83 bp, Homo sapiens
tatgtcgagtttctctagggcgccccaggttcctgcacttggccatcatccatgaagaaaaggcactgaccatggaagtgatc

SEQ ID NO: 640673 - DNA, 97 bp, Homo sapiens
aattcatggctgttggagcaatagaaccccagttctacgagctgctgatcaaagggctggtgaattaccatatctccgtcaagtgcagtaaccagtt

SEQ ID NO: 640674 - DNA, 50 bp, Homo sapiens
gctataaaaagtatggaaaaatgtggggatgtagccatagctgtaacgta

SEQ ID NO: 640675 - DNA, 75 bp, Homo sapiens
atttcctgctcggaaccttgtttactaattggactgttcagtcttacactgaatgaacgtttcagtataaatggt

SEQ ID NO: 640676 - DNA, 80 bp, Homo sapiens
cgaaggctgaggtggcagcggcaggagagtccggccgcgacaggacgatgtgaagttcatttccaatccgccctccatgg

SEQ ID NO: 640677 - DNA, 104 bp, Homo sapiens
tgaaatgtttggatatatgaaattacatccagaggattttcctgaagaagccacaggaggaaattgctactaagaaactccgactaacaaaaccaagtaaatct

SEQ ID NO: 640678 - DNA, 83 bp, Homo sapiens
ctcagggcctggagggaacatggcgtgcggtgctttgcaagatatcaccttgtcacagcagaccccctccacttggaaggaca

SEQ ID NO: 640679 - DNA, 74 bp, Homo sapiens
agaccgtgaccgagagcgtgaccgagagcgcgaatatcgtcatcgttagaaggataaagtggccagtgtgtacg

SEQ ID NO: 640680 - DNA, 85 bp, Homo sapiens
caagaatcagcaggatgacggctaaattttcaggagtgaaaagaaaaagaggaaggaagaaacccctctcaggcaatcatgtaca

SEQ ID NO: 640681 - DNA, 100 bp, Homo sapiens
gcatcatgatgtcaacaaccgtggctcacaagatgaaagagcacctggaagatgagctggtgtcactgcaaaagaaactcaagggcaccgaagatgaact

SEQ ID NO: 640682 - DNA, 98 bp, Homo sapiens
gcatttagaattcattgaaaacagctggtggacaaaattttgtggcgctctgcgtcccctgaagacttcctctgctaaattacctcgctgccgacagg

SEQ ID NO: 640683 - DNA, 100 bp, Homo sapiens
tggctgcctcagccctaccagcactggtcatgtctaaaggtcaccgtcaactactatgacgaggaagggagcattcccatcgaccaggcggggctcttcc

SEQ ID NO: 640684 - DNA, 101 bp, Homo sapiens
ccggaacccgcaggaggacttcgagctgattcagcgcatcggcagcggcacctacggcgacgtctacaagccttcggacgctgactgggacgacctgtggg

SEQ ID NO: 640685 - DNA, 74 bp, Homo sapiens
aacaggggggcgagaagagaaacagtatgccgagattttgctgtcctggaggaccacaccctggctcacagcct

SEQ ID NO: 640686 - DNA, 74 bp, Homo sapiens
ctacaacaggaagcccctcatcctcgaagaattacctgtacttgcgaggttcagccgtctgtatatctccccag

SEQ ID NO: 640687 - DNA, 100 bp, Homo sapiens
acaccttgaacaaggcacctaacctcgccagagctttgatattatggtgggaatgggatattcacaagaagaaattcaagaatctcttagtaagatgaaa

SEQ ID NO: 640688 - DNA, 83 bp, Homo sapiens
ccgcgccgacggctgctcaaacatcagggtatcatgatattagctggtttgacatcaagtcatttgtgagtcatcagatcttc

SEQ ID NO: 640689 - DNA, 100 bp, Homo sapiens
atgcagtgacatgttgataaaaaatgatgattcgaagcttcttgagcctgggactgtatcttgatcattgcagaatccttgccacctaatgcattgcctg

SEQ ID NO: 640690 - DNA, 75 bp, Homo sapiens
ggacccaggagatcccgctggtgaccctgccgctggcgagcgccaccgcatgggaatcaaccctgcctaccggac

SEQ ID NO: 640691 - DNA, 100 bp, Homo sapiens
taagtacatgcccagtggatactccatgtgacatggtttctccctatgttacgtggatgtttgtaacgagtctgcactatggaaacaacctgtcaatcca

SEQ ID NO: 640692 - DNA, 100 bp, Homo sapiens
cagcggacagctcggacagcgcccagggccggagcccgagcccttggaggacctgagagtcagtatactaagactgcccaggagattgtgaacgtctgtt

SEQ ID NO: 640693 - DNA, 100 bp, Homo sapiens
agcccagggttgccgaggcggaggactgaggcaggggcagctgagattccagcaagattatggaagagcatagctacatacaaaaggagctagatttaca

SEQ ID NO: 640694 - DNA, 74 bp, Homo sapiens
ctagaaggagagcaattagtgagacagatcacacgcgctgcaacgtgtggattctggatggagacttgtaccac

SEQ ID NO: 640695 - DNA, 101 bp, Homo sapiens
agcgacggggcgctgcctggcccaggcgcacacggaagtgttcttttagaactcatcaaattgaagctgttccaaccagctctgcaagtgatggatttaag

SEQ ID NO: 640696 - DNA, 48 bp, Homo sapiens
tggattctacagcaacatattgctggttttccaagaattgatataaag

SEQ ID NO: 640697 - DNA, 90 bp, Homo sapiens
aagtgtaaggatcttcatgatgaaatttctgtaaatgacatctgaatgggactccgagtgccttacatccctgcagccccttcctcttcc

SEQ ID NO: 640698 - DNA, 90 bp, Homo sapiens
gtcgtccagtccgaaagaaaccaccttctccagcagttgatgataattagaagcatgctttccactgaacttcccgacaacatttgttat

SEQ ID NO: 640699 - DNA, 74 bp, Homo sapiens
tggtatcccagcctccaatgccagcatctacactgatacccaggtgttctctctgatgtccaggaggagaaagg

SEQ ID NO: 640700 - DNA, 75 bp, Homo sapiens
ctcacctgtgcgggatggaacaaaaggctactgcagcactggggtgtcagttgttggtccgacccagaacgcttc

SEQ ID NO: 640701 - DNA, 83 bp, Homo sapiens
gtgggagcaaaaccaacgcctggctcggagcagcagcctctgaggtgggtggagccgctgactgccgagggcagagcctcgct

SEQ ID NO: 640702 - DNA, 82 bp, Homo sapiens
gcaaaccgggaaaggagaggatcccggagccggagggtgaggacaaaatcttcttaatcaacaagcttcactccatctacga

SEQ ID NO: 640703 - DNA, 75 bp, Homo sapiens
ggtcgaacggactgcatccgagccctgatgctagcagacatatgtagagtgtgtcggtcagaaggaacacctgag

SEQ ID NO: 640704 - DNA, 82 bp, Homo sapiens
aagcgacttcagcgtgtggaccatcctgaagaagtgtgttggcctgggattgtcaatgaggcagatcagattccgatttgac

SEQ ID NO: 640705 - DNA, 50 bp, Homo sapiens
gcgcgatggggtaggctcccgatggggaaaacaatgaagagtcgttatat

SEQ ID NO: 640706 - DNA, 113 bp, Homo sapiens
gtgtaattatgcagaagaatggagctggattacacacagcaagttcctgcttctgggacagctctactgacggtgctggagaatctggtaaaagcaccattgtgaagcagatg

SEQ ID NO: 640707 - DNA, 100 bp, Homo sapiens
aagcttacattgacagcactgtagctaaacagctgaaagaacagcagatggtaatgaggggccaccgagatacctctatggttcatgagcttaataggta

SEQ ID NO: 640708 - DNA, 49 bp, Homo sapiens
ttacaacatggcagacattgacaaggattaatgaaaatcaagttccatc

SEQ ID NO: 640709 - DNA, 74 bp, Homo sapiens
tggctagccggcgacttgagtgacgagaaggaagcagccaccctcgccatggcctccccgcccgcctgcccctc

SEQ ID NO: 640710 - DNA, 82 bp, Homo sapiens
ggaggaggaggaagaggaggaagaaaaatctgaggttatcaatgacgaggccatatatgtctcttggaagtcttcgggatca

SEQ ID NO: 640711 - DNA, 100 bp, Homo sapiens
gctcctgccgtgtaagaagtgccttttgcctcccaccgtgattctgaggcctccccaaccatgtgcaatttaattcgccaaaatgacgaacacaaaggga

SEQ ID NO: 640712 - DNA, 101 bp, Homo sapiens
atgatgacaacttctgcaaggcggtttctagtgcaaatcccctgctcagggtcttcatccagaaacgagtacgacgagcatgtaatcagcccaaaggaatt

SEQ ID NO: 640713 - DNA, 100 bp, Homo sapiens
gggagtctccgcgtcccgctcgctgggagagaggtacctctccttttccctctccctttccctaagttacagaatgtctgaaggggacagtgtgggagaa

SEQ ID NO: 640714 - DNA, 100 bp, Homo sapiens
gtccaccagcagcgccgtccgcttgaccgagatgctgcgggcctgtcagttatcgggtgtgaccgccgccgcccagcaatgccaagtgagtacacctatg

SEQ ID NO: 640715 - DNA, 85 bp, Homo sapiens
gaacagccctccatcttgcagcccagaagcatctacgtcatgggcttggttctggagtggattaaaaacaatggaggtgccgcgg

SEQ ID NO: 640716 - DNA, 100 bp, Homo sapiens
tatcaagactcatggtgaacatgtaggttttagaattttcatggatgccatactactttctttgactagaaagcaaagtgcagaggaaagttccacttcc

SEQ ID NO: 640717 - DNA, 98 bp, Homo sapiens
gcgcgcagagcgaggctgcgggaccccaggatgggggacaggaggctgcggggcctcagaaatgagccgtcagactgctacagcattacctaccggta

SEQ ID NO: 640718 - DNA, 50 bp, Homo sapiens
gcgtggaacggctgcttttggaaggaactgcaagcacatgttgaccagat

SEQ ID NO: 640719 - DNA, 82 bp, Homo sapiens
cccgaagatattaagttccacttgtaccttgtccccagcgacgccttgctaacaaagggagtggacatccgccataacaagg

SEQ ID NO: 640720 - DNA, 74 bp, Homo sapiens
agagtgctgttttagagctggcagcagcatctcagcccaagagaaggaggagatgttaaagtaacccatcttgc

SEQ ID NO: 640721 - DNA, 100 bp, Homo sapiens
cgccttttcagaagcggctgcgcacggactgctggagatggtggagtccgtcagccaagcagatagaacttcagttcactattggcgaagccattaccag

SEQ ID NO: 640722 - DNA, 95 bp, Homo sapiens
gcggatggccccaggtgtaagcgcagaaagcaggcgaacccgcggcgcaataacggactgggcgttcatcaacaccaacatctttgccaggacca

SEQ ID NO: 640723 - DNA, 75 bp, Homo sapiens
ttcatcaataatgaaatgctgactaaggaacaagcttaccgcagtagtcaaatggaatcacagtttctcagagat

SEQ ID NO: 640724 - DNA, 100 bp, Homo sapiens
tgatttttttgtgcagtgggcaggaagaacccatcgggcagctacacatcttgaaagagaagctcttcctgtgagtgtgattctggagagtgacccccag

SEQ ID NO: 640725 - DNA, 76 bp, Homo sapiens
gttcagttggcaaaccagatatatgacttggatgaatgctatcaagtaagacaagtgtttgcccagaaacttcaca

SEQ ID NO: 640726 - DNA, 100 bp, Homo sapiens
catctctgcagaccccgaaaacaaattcagcattattctggcagacattcacaaagaactgacaaggaaagaagagagattcaagcctggatgaaaagaa

SEQ ID NO: 640727 - DNA, 90 bp, Homo sapiens
aggagatcggcctcagcccccgcaaggatggcctttcctaccaggaagcccagaacctcatggccctcaccaatgtggacaccccattga

SEQ ID NO: 640728 - DNA, 82 bp, Homo sapiens
cttccagacatcgccctggatgtcttcgcgctctggctggtctcccctctgctgggctacagcatgctggccatagggattg

SEQ ID NO: 640729 - DNA, 96 bp, Homo sapiens
tggaagtgcatgtctgtgttctggctccgattgggaaaagctgcttaaccactgcacatctccctaacacttcctgccaccttccgaggcaggaac

SEQ ID NO: 640730 - DNA, 88 bp, Homo sapiens
tccctggtggtgcacggaccgggggacttgcgcctggatctaccgctaccagtctcatgactatgccttcagtagtgtcgaaaaatta

SEQ ID NO: 640731 - DNA, 100 bp, Homo sapiens
gcaggctgctggagcgcctgctccccgggaccatcgagaaagaaacctcgacctgtctcccagttggttgcacagcaggttactcagcagtttgtgcctc

SEQ ID NO: 640732 - DNA, 90 bp, Homo sapiens
ttttcatgccgcagcctcctagctgggattacaggttacaggaaatacaggaggcagaggaacaaataaaagacaccacgagaaacagac

SEQ ID NO: 640733 - DNA, 97 bp, Homo sapiens
ttaccaccctcctcatcgcctgcctgctgctgcgcgtcttcagcttgtctccaatgttctcattttctcctgcaccaacatcgtgggtgtctgcacc

SEQ ID NO: 640734 - DNA, 83 bp, Homo sapiens
gtcccaatcccccactctttccgccctaatggaggtctccagtttcgatccagcacacggaagacatggagaacgagatcgac

SEQ ID NO: 640735 - DNA, 83 bp, Homo sapiens
gcacaggcatcagtcaggcagatgtttgtcgactggaatggttcccccagaagatcaatggaaggtggattccaaagagtggg

SEQ ID NO: 640736 - DNA, 97 bp, Homo sapiens
ctcagaagtaattgtggaccctatacagatcaacctctccacttctcctacacctgcacagttaataagccgttcccaggcttccagttctaccagc

SEQ ID NO: 640737 - DNA, 85 bp, Homo sapiens
ggaagtctccatggtgaagtataggctgaggctacctgtgaacagtacgcagtgaatgttgacaagaggaccctgccttggtgtg

SEQ ID NO: 640738 - DNA, 88 bp, Homo sapiens
cgtccccatcttgggcattcatgggggcgcatctatgatcatggctgacaagatcagccatgcagaagctggggacagaagtatttga

SEQ ID NO: 640739 - DNA, 75 bp, Homo sapiens
gaccaaaatattgtgggtgcaataaaagatgacggagggccgccgatgtcaagtacatcttcttgatgacaggaa

SEQ ID NO: 640740 - DNA, 82 bp, Homo sapiens
cgaaaaactgagaggcaaacaaagggactcactcaaaatgagacaagaaatagaagacttgttttcttcacttaaacatatc

SEQ ID NO: 640741 - DNA, 90 bp, Homo sapiens
ggcagtcaccttcagtggtggggacaagatgcttcggagcattaacctcaagaaggcatgaagccagcccctgcagtgccgtccacccgc

SEQ ID NO: 640742 - DNA, 75 bp, Homo sapiens
cgagtgaccgagaccgcggccgggaccgagggtcgcaatggaagaagagatcgccgcgctggtcattgacaatgg

SEQ ID NO: 640743 - DNA, 75 bp, Homo sapiens
ctgattggaaactctttgggaaagccactcgaaaaggtgactattatatggttaaaaagattttggaggaaaaca

SEQ ID NO: 640744 - DNA, 83 bp, Homo sapiens
ccccaggagaccgttgcagtcggccagcccccttctccacggttaaggtgagctcatcgattcagcacccagaaacacctctg

SEQ ID NO: 640745 - DNA, 100 bp, Homo sapiens
gggtagaggagagcccagtataccatctaacagaattaaaacagacggtgctgatcctttgcacatggcctgctatcaacaatcctctacaatgattctc

SEQ ID NO: 640746 - DNA, 97 bp, Homo sapiens
gctgctcctggttacgttgtgcctgaccgaggaactggcagcagcgatagtcagaacattatgcctttttctgactccagcagagagaaaatgctcc

SEQ ID NO: 640747 - DNA, 79 bp, Homo sapiens
agcagcaatgaccttccctcgggaattccacctctgcgtttttccctccagatggaatctcgctctgttgcccaggctg

SEQ ID NO: 640748 - DNA, 90 bp, Homo sapiens
atctgggactttcttcgttgccatgaggaaagaattctccgaggagatatgtcagtattgaattctcccagacatcagagctgtataatg

SEQ ID NO: 640749 - DNA, 100 bp, Homo sapiens
tttacctgcttcccaatcccactgatgaggatcagcccatggttaaagctgaagctcaacaaagatatagtgatctctgtgggcatttataatctggtcc

SEQ ID NO: 640750 - DNA, 98 bp, Homo sapiens
aggaggtcatacagctgatactacccacccccggttacgcctgtcacataaagaatgtgaaagatgttgcagaagtgttccagaagtggctgaagata

SEQ ID NO: 640751 - DNA, 95 bp, Homo sapiens
actagaattgcagcaattgaaccatcagattagccagcagacccagctacgtggactagagggtgttgaaagcagcaggggcctagaagacatta

SEQ ID NO: 640752 - DNA, 83 bp, Homo sapiens
caaaatagctacaaaccatactaaattattccatttgcaacttatccccaacagatttgaagaccttgcttctcatcacccac

SEQ ID NO: 640753 - DNA, 87 bp, Homo sapiens
aagagagaggtccgtctaatgaagaacagagttgttgcctgcaatctctatccctttgtaaagacagtggcttctccaggtgtaact

SEQ ID NO: 640754 - DNA, 74 bp, Homo sapiens
gcaatgagaccagtggaagcagcaccatcggggagacaagcaagatcttttgccagaaatgagggcatactggc

SEQ ID NO: 640755 - DNA, 90 bp, Homo sapiens
gttgacgtcgtccgagagtcttaaaatcctgctctggccggattccagactcgtgggggaaaggctgacatggcccatgaacatggacat

SEQ ID NO: 640756 - DNA, 75 bp, Homo sapiens
cgcctcgggtctcgggggccgctctgggatcccggccaccagcaattgtccggtctcggcgcggaagatggccgg

SEQ ID NO: 640757 - DNA, 100 bp, Homo sapiens
caaagtgtttactgctcggactggcagcagtatttgtgggagtctcaatacctttgggacccccgcccctggcttctcctccatgctgtatggaatgaag

SEQ ID NO: 640758 - DNA, 51 bp, Homo sapiens
atcttcttcttttcttaactggtcaagagctgcaagctttcttcctggtgg

SEQ ID NO: 640759 - DNA, 100 bp, Homo sapiens
ctatgaccggcgtcgagaatttcaactggagcctgggctgcactgtggtggagatgctgacagagaaaccaccgtgggcagagtatgaagctatggccgc

SEQ ID NO: 640760 - DNA, 75 bp, Homo sapiens
ctggaaactgattggaaactctttgggaaagccactcgaaaagcttgcattgaaaggctctagttacagtggact

SEQ ID NO: 640761 - DNA, 83 bp, Homo sapiens
gtcggctcaggacttacggaaacaggatttttagactctgaggagcagttggagctaatccacattatggaaatggaaaccac

SEQ ID NO: 640762 - DNA, 75 bp, Homo sapiens
tttcacaaccttcaagaaattcggacggtttgccagtcagtccttagaagaacaacacaggaatgcccagtgcgg

SEQ ID NO: 640763 - DNA, 100 bp, Homo sapiens
aataaagaagtggagcgtgtcctgaaggagttccaccaggccgggaagcccatcgggggctttgaccacgacctttgaagagcttcattttgagatcaag

SEQ ID NO: 640764 - DNA, 50 bp, Homo sapiens
ctttttcttcatggcaccaccccatcaggtgtaattattgaaacagatat

SEQ ID NO: 640765 - DNA, 60 bp, Homo sapiens
aacggagtgtgcgacggattgggagaccagattatcaaaaattctcatgattaaaaagga

SEQ ID NO: 640766 - DNA, 100 bp, Homo sapiens
ctgtacctgtgcccaaatggtgcccgctgtgccacctggtttcaagaccctacccgcttcactggcaccatgtctggcttcagccttgtcatgaaccacc

SEQ ID NO: 640767 - DNA, 100 bp, Homo sapiens
gaagcagagacaccaggacagaaaagacagtgttctgctttcatggagttcacagaagagtcgaggaggtaagaatgattgatgttggctgatattggag

SEQ ID NO: 640768 - DNA, 82 bp, Homo sapiens
cgaggtgtcagctctgccggccaccctagactgcgaagatgaagagatggctgacccaatggaagatgtgatcatcaggaat

SEQ ID NO: 640769 - DNA, 100 bp, Homo sapiens
ccttcagagagttcactaaaggaaaccataacatcctggtcatcatgaggtcctgctcgggcatcaactttgaagagttttaccacttcctcaaggtcat

SEQ ID NO: 640770 - DNA, 114 bp, Homo sapiens
aaaatgggaggaacaaacttcagaacaaatattcagactttaccgtgccattggaaatatagcatttccagcagtgaggagacagccagaagcaagcttttggagctgaaggaa

SEQ ID NO: 640771 - DNA, 96 bp, Homo sapiens
tgaggccgaggtgactgcagagcggctcgcgagatgaagacttccggggcaggcgtcaggaggcacccaaggtggaggaaggcctgcgagaaggac

SEQ ID NO: 640772 - DNA, 87 bp, Homo sapiens
cccgaaactttcaccgcgagcggcaaagttctcatatagatgtggttcgttttccatgtgtggtttatatcaatgaagtccgagtca

SEQ ID NO: 640773 - DNA, 74 bp, Homo sapiens
ggaaaatcgcttggttaaaacctgacacttttaacaggcagaagattttcgcaagctctggaaaactccacctc

SEQ ID NO: 640774 - DNA, 100 bp, Homo sapiens
ggagagaatcttgaaatgtcttttaggatcacttcagcatcggtgaggttggtctctcaagaacccaaagctctggtcagtgaatggaaggagcctcagg

SEQ ID NO: 640775 - DNA, 75 bp, Homo sapiens
aggattcgttacagccagagattggcattgctaccatttatgttcgttataagcaagttcatgctctgagtcctg

SEQ ID NO: 640776 - DNA, 82 bp, Homo sapiens
caccatttctttcacaaaccttgtgtctcaatttggctacaaaaggctactgcagcactggggtgtcagttgttggtccgac

SEQ ID NO: 640777 - DNA, 75 bp, Homo sapiens
aggagccagaaattgacagcccaggggcaaattgtggctactaatttgccccctgaagatcaagatggctctggg

SEQ ID NO: 640778 - DNA, 90 bp, Homo sapiens
tccagaaggtgcctgaccagaaaggaactcccaagcgactgcaggcagaagctgagacggctaaggtgctgagcgccgtcctcaaggatc

SEQ ID NO: 640779 - DNA, 97 bp, Homo sapiens
taccttagaactctatggagttgaattccactatgcaaggatattcttactgattctccgggctctgcagctcttgacccggctggtattgtctcta

SEQ ID NO: 640780 - DNA, 82 bp, Homo sapiens
ggcaagatctcatgtccatcatggaaatgcaggctcccctggctccagccctaaggtgctctcccagccgtccgacctggat

SEQ ID NO: 640781 - DNA, 75 bp, Homo sapiens
cgggggcggcggccacgccaaggacggcctaccgtatgtgaacgggagctgtgtgtgtttgcttttcaaaccctg

SEQ ID NO: 640782 - DNA, 51 bp, Homo sapiens
tatgcagccaaagaagatgcagatggacggacttcctgatccatttgctaa

SEQ ID NO: 640783 - DNA, 50 bp, Homo sapiens
ctatggagaagaccagtccaatggtttatcaacttatgaggaaatgctgg

SEQ ID NO: 640784 - DNA, 75 bp, Homo sapiens
attgacatttaattttagggtcctttatatagaagggagagtaggatggtgaagaagacgaagtaagtgctggag

SEQ ID NO: 640785 - DNA, 90 bp, Homo sapiens
ggagcggcatcttttcctattcaatgatctgtttgttgtggccaaaatcaacaagagcctcctgatctagcagccaagactccccctgac

SEQ ID NO: 640786 - DNA, 101 bp, Homo sapiens
tgtccgctacaagggggagatgtgctcaggagacagtgtttcacaaaatgattttccttctgaagctcccatctccttgaatctttctcataacatctgca

SEQ ID NO: 640787 - DNA, 83 bp, Homo sapiens
ctgagaggggctgcggccggagcgggcggctgagacaaaggcgacggaaaccatcaagatctcattttacagctgggattctc

SEQ ID NO: 640788 - DNA, 100 bp, Homo sapiens
cttgagttggtcgggggcagcggcagacattcacggcatggtgtaactcccacctccggaaggcggggacacagatcgagaacatcgaagaggacttccg

SEQ ID NO: 640789 - DNA, 100 bp, Homo sapiens
gtcgatgaagatcttgattgtgacctctgtggaaaatgagccatgaaccaaccaattcgacagaggtacgttcttggagacacagcaatgcagaagatgg

SEQ ID NO: 640790 - DNA, 101 bp, Homo sapiens
caatagggatattgtagaaactgtctttaacctggacacggaagtttccaatcagatcaccctcgtggaagacgtcttagccaagctctgtaaaaccattt

SEQ ID NO: 640791 - DNA, 100 bp, Homo sapiens
ggccgcagtctggccacccgcttccatgcggttcgggtccaagatgatgccgatcgcagaattggagacggaaaagagagacctggagaggcaagtgaac

SEQ ID NO: 640792 - DNA, 74 bp, Homo sapiens
tatttgagtcatttccttcgtacccacagtgcttcatgagagaaattccatgagtgaaaccgtcagactggtca

SEQ ID NO: 640793 - DNA, 82 bp, Homo sapiens
aacagcgtaactccagacatgccattatttggaaagcaggtctataaatgagaaagattatcatagtcgacgctacattgat

SEQ ID NO: 640794 - DNA, 74 bp, Homo sapiens
ctgctcccttcgccttcgccctttccacctcgcggcagttcggaatggaggggccctttggtggtggtatggaa

SEQ ID NO: 640795 - DNA, 98 bp, Homo sapiens
gattcttcaatagtagataatgagatcttactgtgccgagatcgctcacaatgtttcctccaagaaccgcaaagccatcgtggaaagagctgcccaac

SEQ ID NO: 640796 - DNA, 101 bp, Homo sapiens
atgtttccatctcttcagagatgaaccagaatgagtccctggaacgccagatgcgtgaaatggaagagaactttgccgttgaagctgctaactaccaagac

SEQ ID NO: 640797 - DNA, 90 bp, Homo sapiens
ctgctgccttcctactcgtgaggaaactgccgccgctctgccacggtctgcccacccaacgcgaagacgtttcctgttttccagcaccca

SEQ ID NO: 640798 - DNA, 50 bp, Homo sapiens
ggagatagtgcagagactgaagcgattactttttgcaaaactctttggac

SEQ ID NO: 640799 - DNA, 89 bp, Homo sapiens
cacgggccttcgttttggacgagtgccagaaaggcatttcatccttcatgaagccattcaggattttgaattgcatatgagtgcttggc

SEQ ID NO: 640800 - DNA, 100 bp, Homo sapiens
gagagatgcttaaaaatcaccagttactttaatgacaagaaaagcctaggcttctcgagcctttggattatgagactgtcattgaagaacttgaaaagac

SEQ ID NO: 640801 - DNA, 100 bp, Homo sapiens
ggaaatagaaatggggcttaagttccgtgaactcagtactgatgcccagtggggcattcgtcttggtaaacttggtcctccgcagcattcctagtgtctc

SEQ ID NO: 640802 - DNA, 100 bp, Homo sapiens
tacccttttggcattgatccaacaaagccacagacccaagcatgtcggaacaggattggtcagctatccagaatttctgtgagcaggtgaacactgaccc

SEQ ID NO: 640803 - DNA, 100 bp, Homo sapiens
caaaaccaacctatacatccgaggattgcaaccaggcactactgaccaagatcttgtcaagctgtgtcagccgtgaatatgaccatctcccagaacaggc

SEQ ID NO: 640804 - DNA, 100 bp, Homo sapiens
aaagagcctttattcatcgactcagtcagtctcttggtttggtctctaaaagtaaaggtgtgtggaccagttgacaaagatccaaactgaattacaagag

SEQ ID NO: 640805 - DNA, 100 bp, Homo sapiens
attcacctgtacgcagaggctgctgtgccccaggctgcagagcccatagccaccttctatgggttaaggcaacagatagaagaggagttatgggaagaag

SEQ ID NO: 640806 - DNA, 100 bp, Homo sapiens
cctccatcaggaccccagatgtctgacagccctgtgtgacaccaagataagtaacccgtggtccttcagcatatctctgtgctgcagacaacacaccttc

SEQ ID NO: 640807 - DNA, 90 bp, Homo sapiens
cagcctcatcacccggctgctggaggacagaccatggattcttacagtgcaccagagtcaactcctagtgcatcctcaagacctgaagat

SEQ ID NO: 640808 - DNA, 90 bp, Homo sapiens
cggaggaggagccgcgggcaacgagattggctcacagtggttgattgatcaaccccattggacgttggttctgtggtacaaatggagtac

SEQ ID NO: 640809 - DNA, 100 bp, Homo sapiens
gttacaaggccttctacattaccggcagctgttgtgctgtgtatggacgtgggctttaccatgagtaactccattcctggtatagaatccccatttgaac

SEQ ID NO: 640810 - DNA, 100 bp, Homo sapiens
gtcagtggaaaggagagctaccatcactaagattacctctctagtgacccttcagctgttaaccctggttggccatgacgatcagcttgatggaccaaaa

SEQ ID NO: 640811 - DNA, 51 bp, Homo sapiens
cacaattataaaatgtcagcttttaaggtattatcagaaaatccacccagc

SEQ ID NO: 640812 - DNA, 100 bp, Homo sapiens
agaacatggacaagatcaaggttccgacgcagatcatctgggggaaacaagaccaggatggggaaggccaacgcattgacatccagatgaagaaccggat

SEQ ID NO: 640813 - DNA, 97 bp, Homo sapiens
cgagcctccgacccaggtttgccagttgggcactgccaccctctcgtggtccaagcagcacatgagcagaaccaggtgctcaacaccaacagccggt

SEQ ID NO: 640814 - DNA, 101 bp, Homo sapiens
agtcttcagaccgtggacaatgtgctctttgcccctattatggagaaaggtgttccctagatcttagcaaagcaatgtctcaagatggtgcttctcagttc

SEQ ID NO: 640815 - DNA, 75 bp, Homo sapiens
gaggttgtatcagtaagaagggagcacggaacagattcaagctcagagagatgcaggtcagctcctccagtacca

SEQ ID NO: 640816 - DNA, 100 bp, Homo sapiens
cgggacgagctgttccgccggagcccccggcccaagggcgacttctccagccgggcccgcgaagtggaacttgcttgctagaaaacaaagtgcaaggctt

SEQ ID NO: 640817 - DNA, 83 bp, Homo sapiens
gtccagaagcctgtaggaaagcggaagcggcctggcaggggaaggatcgagtgatgtcttggcattgcccattttcaagcagg

SEQ ID NO: 640818 - DNA, 50 bp, Homo sapiens
ttcgcagtggtcgcttcttctccttggttgtggcatcagctgacacttca

SEQ ID NO: 640819 - DNA, 83 bp, Homo sapiens
gatcttcacagcacagttcctgggaaggtggagccaccagcctctccttgacttaattcagtgcacaaatgagatgaatgtga

SEQ ID NO: 640820 - DNA, 87 bp, Homo sapiens
gacccgttgccagagtgcagagacaacgtgtcctggagagacagcacaatgggctctatcttcatcacacaactcatcacatgcttc

SEQ ID NO: 640821 - DNA, 120 bp, Homo sapiens
cgccatggagggggtgctgtacaagtggaccaactatctgagcggatggctgcagctcctccaagttactgttttgttgccttccctccacgtgctaaggatggtctggtggtatttggg

SEQ ID NO: 640822 - DNA, 100 bp, Homo sapiens
gccgaacgacaggacgttggggcggcctggctccctcagctggagaagcgactggaggagtggttggggaggacattgcctggcagtgactggacaccca

SEQ ID NO: 640823 - DNA, 100 bp, Homo sapiens
caaggagttcacgttcatgggcgagggaacagatgagaaacccggcaatgaaaaaaaaggtgcactgcctcaacatggacagcctctctttccagctggg

SEQ ID NO: 640824 - DNA, 75 bp, Homo sapiens
gataagcaactggattttttaactgaagatagtgcctttcagccctaccaggaggctggcaggatgtacagtttt

SEQ ID NO: 640825 - DNA, 100 bp, Homo sapiens
tcccccatctcattgccacggctgaaccctccttctcaatcttggaacagcacccccttctttaagctgcacagttggggatcttcaaaccaagatagat

SEQ ID NO: 640826 - DNA, 100 bp, Homo sapiens
ctcccctgcgcactcccctcgctgcccgggcccggagcgcagcgcggccgcacagattttattgtcaagatatccgagcttatgacattttatttggaga

SEQ ID NO: 640827 - DNA, 83 bp, Homo sapiens
ctgtcttcggtggactccttcggcagtccacccaccgccgccgcctcccagcgccatcatgaccgggtcctataacaacttct

SEQ ID NO: 640828 - DNA, 83 bp, Homo sapiens
ttgcattggatattcgcatgcctggggttacacctaaacagatatggatgtaatgaggcccttgataaatgagcagaattttg

SEQ ID NO: 640829 - DNA, 82 bp, Homo sapiens
tccttctatggctggacgcccgtgcactgggccgcgcatttcggcaaggggcaagattcttgccaagagaattaatgtgcgt

SEQ ID NO: 640830 - DNA, 100 bp, Homo sapiens
ctctgcgggaagcggttcctggatagtttgcggctgagaatgcacttactggctcattcagagctgccaaatgctgttaaatcaactgagagaaatcaca

SEQ ID NO: 640831 - DNA, 83 bp, Homo sapiens
cagttaaacctgtcgggtagaaacctcagtgaagatttctcactatgtgcaatagacactttggcagtgttgtggcacaaacc

SEQ ID NO: 640832 - DNA, 98 bp, Homo sapiens
ctgccaaactcagatttcctggtgcatttttaccttgtgatgcacctgggattaaccagcgaggatcagatatgaggccccaggattcctggcgaggt

SEQ ID NO: 640833 - DNA, 90 bp, Homo sapiens
aaggattccaagtaactcttatttgccctatgcaggtatgcaagcctacgcttatccccaggcatctgccgtcacctcccagctgcagcc

SEQ ID NO: 640834 - DNA, 59 bp, Homo sapiens
agcagtttaaccagagattcatttatgggtctctcgtctccaccttgcgagaaataccc

SEQ ID NO: 640835 - DNA, 75 bp, Homo sapiens
aaagatttttattgcaaggcgctctctcttagagtgactctgacatcattagaagcatgccagaacagactggtg

SEQ ID NO: 640836 - DNA, 101 bp, Homo sapiens
atattccacccattcatcctggtgattcgcaaggggtggctcaccatcagcaacattggcatcatgaaaggcggctcgaagggatactggttcgtccttac

SEQ ID NO: 640837 - DNA, 74 bp, Homo sapiens
aaacgggtcagttggcagccatcaaagttatggatgtcactgagcgtacacagactttactaaaagagtacaaa

SEQ ID NO: 640838 - DNA, 100 bp, Homo sapiens
gcagtcatctcgcggccgttcaggttgtgaagatgagaaaagaagtgaagagaattcgagttttagttatccgaaaacttgtcaggagtgttggccgact

SEQ ID NO: 640839 - DNA, 75 bp, Homo sapiens
atggccttggagaactgccccaaggatttgcaagcctgcagtggtttctggtgtgcataagaaaatgaacattag

SEQ ID NO: 640840 - DNA, 133 bp, Homo sapiens
gataacccaactcctgagatggaagcagcgagacgttccctgtgctttagactggagcaaggtgctggagaatctggtaaaagcaccattgtgaagcagatgaggatcctgcatgttaatgggtttaatggag

SEQ ID NO: 640841 - DNA, 100 bp, Homo sapiens
ggagctaaatgaagtgggcttcaagtttgtcaggaagtgcatcaatattattgagaccaaagatcagtgtgcgtgtgaccaccatggatgcagagctgga

SEQ ID NO: 640842 - DNA, 90 bp, Homo sapiens
gctgcttcaaattggacttaagtctgaatttcggcagaatttaggatacatgtgctgcccttttgttctggacaaagatggagtcagtgc

SEQ ID NO: 640843 - DNA, 100 bp, Homo sapiens
ggctgccatgacaaccaggcaatgctggatagataccgaattcttatcacaaagtatgaaagttttcaagacgcctacaagtggaaaatgcactcctccc

SEQ ID NO: 640844 - DNA, 82 bp, Homo sapiens
ctattgtcctgcccgtaagttcccgttttgtgtgtgcttatgttcctgaggaagaattgaaggcagcagaaatagatgaaga

SEQ ID NO: 640845 - DNA, 49 bp, Homo sapiens
ctgcttcccaataaggaaacagtgaagctttgttctaagaatatttgtt

SEQ ID NO: 640846 - DNA, 75 bp, Homo sapiens
ccgggatctcaggtcctcgggggcggcggccacgccaaggacggggagttgaccacatttggccatttcccagaa

SEQ ID NO: 640847 - DNA, 100 bp, Homo sapiens
gagatacttaaataagattttaattgaagctggaaagcttggactttccaaaatccatgcagcacgcagcctgagtgagatcgccatcgacctgaccgag

SEQ ID NO: 640848 - DNA, 76 bp, Homo sapiens
ttcagattggagataaacttttagcagctatgcattcctgctgtttcaagatgaaagctctgtgcaggctctcatt

SEQ ID NO: 640849 - DNA, 98 bp, Homo sapiens
gggcagttggacgtgacccagagggccttgtacgtggaggtgatgctggagacctgtgggcttctggtcgcactggatggctgatcactgggaaactg

SEQ ID NO: 640850 - DNA, 76 bp, Homo sapiens
tgaagtcagttgttgcatcaaatacttcatatttggcttcaatgtcatattttggccaacaaatggaattttcttg

SEQ ID NO: 640851 - DNA, 83 bp, Homo sapiens
catgaatcccaacaccctcatgtcccatggtgtgccaaccccaccaacaactgaacgctttggtcaggctgctacaatggaag

SEQ ID NO: 640852 - DNA, 104 bp, Homo sapiens
gccgccgccgctgccgctgccgctgccgcacctccgtagctgactcggtgtcgtgaaaactacccctaaaagccaaaatgggaaaggaaaagactcatatcaac

SEQ ID NO: 640853 - DNA, 80 bp, Homo sapiens
gggaccgtggcttcggcttcatccgcttgcacatgattaagtaccggtacatcccgttcacacatgggaagagaaggtac

SEQ ID NO: 640854 - DNA, 102 bp, Homo sapiens
cggccgtctgggcggccgccgcgcttctgctctcagtgtcccggacttcagatgaacagactagccactttgcattgactggaaacaatggcatttacagaa

SEQ ID NO: 640855 - DNA, 100 bp, Homo sapiens
caacaagcagcctattatgcccagacaagtccccagggaatgccacagcatcctccagcacctcagttccatgtctgtgacaagcttggaggccgagttg

SEQ ID NO: 640856 - DNA, 100 bp, Homo sapiens
ggaaactgagtcgctccttaggaggagaaggagatctataaggacaggcagaaattctcagaacaggttttcaaagtggcctcctcagacctggtcaaca

SEQ ID NO: 640857 - DNA, 75 bp, Homo sapiens
ctcagacctgccaatttaccagagataattgataacaccctgtaacagctgagctggcttagcaggagctccagc

SEQ ID NO: 640858 - DNA, 95 bp, Homo sapiens
aaggacctactctatactctcagtggcttaggaagtcgaggctcaagaggttctcaaattgatagtcacagtagtaatagcaactatcatgacag

SEQ ID NO: 640859 - DNA, 96 bp, Homo sapiens
gggagctactgatgcttcttcctacatgtcctaatatgttgatggcattccagaatatctcagatgagcagatatttgaatggtggtacttccata

SEQ ID NO: 640860 - DNA, 89 bp, Homo sapiens
cgcgaagtggccgcatccgcaagaagatggctgtgccacccacgtatgccgatcttggcaaatctgccagggatgtcttcaccaagggc

SEQ ID NO: 640861 - DNA, 100 bp, Homo sapiens
gagctgctgggcgaagcacgctactacctggtgcagggcctgattgaggactgccagctggcgctgcaggatgaaggtttaaggctcagaaaggtagcac

SEQ ID NO: 640862 - DNA, 75 bp, Homo sapiens
gcgaccacagccaaagcgggcgtgccttatgcccgctcagaggcccacctcacagagctgctggaggagatatgt

SEQ ID NO: 640863 - DNA, 100 bp, Homo sapiens
tatgggacacagatatgttgaagcaccaaatcagatgaaagccaaggaagggaggaatgtgtacagttcttcacgctatgatgattatgacagatacaga

SEQ ID NO: 640864 - DNA, 74 bp, Homo sapiens
cacactgtacagttcctcaaccgcttttctacagtttgtgaggagagggtgtaaatccatctgttggaagatca

SEQ ID NO: 640865 - DNA, 75 bp, Homo sapiens
gggactcagtcccatcactccaaggagagaagatgaggagactgtccttcctgtttcgcagatgaggaaactgag

SEQ ID NO: 640866 - DNA, 100 bp, Homo sapiens
caagtctatgtccaaggaagctgtggccatctgcaaagggcgccctcacaaagccaatgctgaggagatgaccaagtaccacagcgatgactacattaaa

SEQ ID NO: 640867 - DNA, 96 bp, Homo sapiens
gatgtggaattctccgtccctttccagggagggaacaaagcccacaagcaccggcatcagtgtcattccaggacgtgactgtggaattcagccagg

SEQ ID NO: 640868 - DNA, 96 bp, Homo sapiens
ctgatggcagcagtctttccgggaagctggttgatccttgaagattaggcatctaataggattcaggaatcaaagaatcagtgtactcaggtggta

SEQ ID NO: 640869 - DNA, 83 bp, Homo sapiens
agcgctgcggcctttcggcagccgaacggccgcggcagcgagaattagaactgcagcgtcagcgtgacttgcataagatcaag

SEQ ID NO: 640870 - DNA, 101 bp, Homo sapiens
actgaaggccgtcttaaagttacgttgttagaatgtagcagcgtgacgacagcatgtacgatccctgaatgggcccgtgggcatatttagtcattcatttt

SEQ ID NO: 640871 - DNA, 74 bp, Homo sapiens
tgggaagaagcgttagagcgagcagcactcacatctcaagtgctatgaagggaaatcctccaaagatatcctga

SEQ ID NO: 640872 - DNA, 82 bp, Homo sapiens
gagaacaacggaggcagaggagctgaagactccagtatgcaactgactacaaggaggtcagggaagtcaaagatgcatccct

SEQ ID NO: 640873 - DNA, 100 bp, Homo sapiens
gaactccaaggagaaaggcggcggtgcgtgttgctgcgagtgggacgcgcactggtcggtgccggctcaggagccggggagcttcagtttcagcgactca

SEQ ID NO: 640874 - DNA, 127 bp, Homo sapiens
tcagaagccatgcccctcaggctggaacttgccctgtctcctcgcagatgagtagaacttcatggaggaacacggagtgacccaaaccgaacatatggctaccatagaagcacatgcagtggcccag

SEQ ID NO: 640875 - DNA, 90 bp, Homo sapiens
taccacttggccccctctgatctgcgccgggtcgccacatactgattcttctgatgtagagcgactggaaagattcttcgactcagaaga

SEQ ID NO: 640876 - DNA, 75 bp, Homo sapiens
cgtgtggtccttgcgccgctgacttctccactggttcctgggcaccgaaagctctactttacgaagtgtttctac

SEQ ID NO: 640877 - DNA, 100 bp, Homo sapiens
tgtcagccgatgcaccgagtccagcccaggaaaatggagagttgattccaggcgtgaattccaagaagaaccaaatgtattttgactggggtccagggga

SEQ ID NO: 640878 - DNA, 74 bp, Homo sapiens
cccgcgctgcccgcactcctggtcctgctcggggctctgttcccaggtgcagttttgccaaggagtgctaaaga

SEQ ID NO: 640879 - DNA, 100 bp, Homo sapiens
cgcggctgcagctcgggacttcggcctgacccagcccccatggcttcagaagagattctgaaaaagagttccacgtcctcccttatcgagtctttgttcc

SEQ ID NO: 640880 - DNA, 75 bp, Homo sapiens
gagaacctgaagccgcctctgcaggctcctgcaaagggccttcaagctctacgacttggacaatgatggctacat

SEQ ID NO: 640881 - DNA, 89 bp, Homo sapiens
cggcccggcaccccgtggaagagccgcgcgtacagcccgggcatccaggggtacagagtgaagacagtgtcctcctgtttgttattgca

SEQ ID NO: 640882 - DNA, 100 bp, Homo sapiens
caagagaaagccctaccacaagaagcggaagtatgagttggggcgcccagctgccaacaccaaggctcttgattgcggggactaactcctccgaccttca

SEQ ID NO: 640883 - DNA, 90 bp, Homo sapiens
gccagcccgcctcgccgaggaggccttcttccgtggggttagccagctcatcctgccccacgtggacatccagctaaagtattttgacct

SEQ ID NO: 640884 - DNA, 100 bp, Homo sapiens
tactcccttagtaactatgcagttttaatgaagcggttattgagcattcgctgtgtaccaagtgctgtccttgacaagaagacttacacccagtggtccc

SEQ ID NO: 640885 - DNA, 98 bp, Homo sapiens
ggaacccgtgggcctgtggactgcagcctcggcggtcagcaggatgttgcttcagagtgtgaagtcaaatgcatgccaacattccagttttttaagaa

SEQ ID NO: 640886 - DNA, 100 bp, Homo sapiens
cttgatcagtgtcaggctggttgtcaattttgatatgccttcaagtatggatgagtatgtccatcaggttgggggccgtcccgctcctaaggcaggaaga

SEQ ID NO: 640887 - DNA, 100 bp, Homo sapiens
gaaatcccctctcactctccaattctgttgttgcctccatgcgccaatccaaaccgaaagccagaagtcacatcgatcagacaacaacatggcaggaccc

SEQ ID NO: 640888 - DNA, 83 bp, Homo sapiens
tgtgaaaactctgttactgaaggcgttgcttgagtccatggttgatgctgctgagaatctttgtcccaatgtgatgaaaaaag

SEQ ID NO: 640889 - DNA, 82 bp, Homo sapiens
atcatctacgacgagaaccggggtggcccagttgaaatccttcccttcctctaccttggaagtgcctaccatgcatccaagt

SEQ ID NO: 640890 - DNA, 75 bp, Homo sapiens
acgctggctgcagggacccggtgacagcgtgagagattccctataaggagcccctgctggtgcaccagaactacc

SEQ ID NO: 640891 - DNA, 76 bp, Homo sapiens
gcgccattacgcagagagaaagttacgagggggacattgtgtcctgcgctggcacatatatccatgtgtggagcat

SEQ ID NO: 640892 - DNA, 100 bp, Homo sapiens
gaggaaactgaggcctggagaggttaaagagacccgttcagagtcctacagtggcagttctttatagctccaagctctacagattcttcaaatatattga

SEQ ID NO: 640893 - DNA, 100 bp, Homo sapiens
ctcggggaggggaccgcgcccgcctcatttgcgccttgcagcactgctggaccaggctgaactcacgggaatcaaatggcgtaggtacaattttggaggg

SEQ ID NO: 640894 - DNA, 128 bp, Homo sapiens
cttggaggtgaggacgtgcctcgtggtctaaagcttcggcacaagggcccaactggaattccacttacggtaccttccactggaagaatctcaaacagcgctacttactcaggatcagtggcaccagc

SEQ ID NO: 640895 - DNA, 82 bp, Homo sapiens
aggacttcacggagctctggagaaacatgaagttcgggactatcttctgggtcttactgaagtaacacaaagcttaaaaatg

SEQ ID NO: 640896 - DNA, 103 bp, Homo sapiens
ggaagaccgcgcgcagggcctgcagcgggagctggacggcgagcgcgagcggcgcgagaaaccggcacagtcttcactaccgtagaagaccttggctccaaga

SEQ ID NO: 640897 - DNA, 98 bp, Homo sapiens
tctagatgtaaatgtcagtggaaaggagagctaccatcactaagatgttgaaagtgtgatgaacagtgtggtatccctactcttgatcctggaaccag

SEQ ID NO: 640898 - DNA, 100 bp, Homo sapiens
gggtgtctctagcctcaaagatgggtgaggacgcttgagcggaagttagaagcaaaaatgatcaaggaggaaagcgactaccacgacctggagtcggtgg

SEQ ID NO: 640899 - DNA, 80 bp, Homo sapiens
ggggacatcatctgtgtgttctcacaatgctactatcattcacgatggccatgaggagaagatggaaaatggtcagatca

SEQ ID NO: 640900 - DNA, 75 bp, Homo sapiens
gccctggtgctcaccaagcaaggatgttgagaaagagaaggaaacccacagttacctcagcaaagaggagatcaa

SEQ ID NO: 640901 - DNA, 100 bp, Homo sapiens
tttagcctcaggaggcagctatccaagcaattgcttgttcagagctcttggtgatcaattggagggacactcacgaaatcatctcaagcacagacaggag

SEQ ID NO: 640902 - DNA, 87 bp, Homo sapiens
ccacccagacccccggcagaaggccctgtaccgccggcttgccacagtccacatgtcccggaatacaaactggactctcaggacaaa

SEQ ID NO: 640903 - DNA, 75 bp, Homo sapiens
ctgggcaaggggacgtctgcagctgagcaacgtgttggaccttccggagcttctcagaagacagagggttttctt

SEQ ID NO: 640904 - DNA, 51 bp, Homo sapiens
gccgcctcgatgcaggaggacgaacagatggagtctcgctctgttacccag

SEQ ID NO: 640905 - DNA, 75 bp, Homo sapiens
tacttcaaggataagggtgacagcaacagctcggcgggctggaagatacgatgaatggattaaagcagataaaat

SEQ ID NO: 640906 - DNA, 100 bp, Homo sapiens
caaatcttttccaataaggaggctggcatttacatcctgtaccacggaaaccccgttgtgaggaagcaggagctggccaacagctcggatgcgaccctcc

SEQ ID NO: 640907 - DNA, 78 bp, Homo sapiens
gattttgaagacaatcgtcacttatacagtgttatccaagataaattctgtgggattataaacatttcagtagaaggc

SEQ ID NO: 640908 - DNA, 97 bp, Homo sapiens
cagtggctggatgaccatccatctgaaaaggacaggctcctcctcatcagcctcttcagaagaaacttgactccttcccagctcaggacccttgcac

SEQ ID NO: 640909 - DNA, 75 bp, Homo sapiens
ccgacatggaacagggactcactggggtgaacctccttggcctgggcgaagctgtgtggaccaagcaagtcagga

SEQ ID NO: 640910 - DNA, 98 bp, Homo sapiens
ggagaactgtgcccattacttctgcctggactgcattgtcgaatggtccaagaacccttaggagaaatcttgagagtggacagcaattgtgaagatcg

SEQ ID NO: 640911 - DNA, 75 bp, Homo sapiens
cgcgcaagggctgcggagccgcgggccggcgagcgcgtcgccaccatggtgcggtctgcctgcagcctttctgcc

SEQ ID NO: 640912 - DNA, 75 bp, Homo sapiens
ccatagcatggacttcttcctgctcaagtgcgaaggttaaagtattgcacaatcagctggtccttttccacaatg

SEQ ID NO: 640913 - DNA, 94 bp, Homo sapiens
tactggggccagggaaccctggtcaccgtctcctcaggtgtcgtgaaaactacccctaaaagccaaaatgggaaaggaaaagactcatatcaac

SEQ ID NO: 640914 - DNA, 98 bp, Homo sapiens
ggccatgagcactgcagcgattgcgagaatgaggaggacaacagctacaaccgggggtgagagcacagagccgggataagcagatagaagaaaggatg

SEQ ID NO: 640915 - DNA, 50 bp, Homo sapiens
ggcagacctcagctgcctggtgatgtacagttacccagcacgtgtacctc

SEQ ID NO: 640916 - DNA, 100 bp, Homo sapiens
ggagaggcgggcgggaggccgatgggcttaggtcacgagcaaggatttggagccccttgtttaaaatgcaaagaaaaatgtgaaggattcgaactgcact

SEQ ID NO: 640917 - DNA, 98 bp, Homo sapiens
gtgatcgtgctgggcaccggcctgacgatcggcccgcggatgacactgcagctcatcaaggtccaggagggcgtcggggagggcaaagtgatgttcca

SEQ ID NO: 640918 - DNA, 123 bp, Homo sapiens
ctcaatgttctcgatgccaatctctgcttgaaaggagaagacttggattctcaggaaaggaaacagattcattgtctgtctgaggatgagttaagttcttctacaagttcaactgataagtca

SEQ ID NO: 640919 - DNA, 100 bp, Homo sapiens
gtcatcaacgggcagtttgtcgaacgatgttggactcatagtcactgccagaaaggtgcttacactccagagcccctcagcagtttccggtgggctcttc

SEQ ID NO: 640920 - DNA, 83 bp, Homo sapiens
catgaccagcttagcttctgtcctaaaggtttttagaacttcagccataaaaatgggcagaattttccttgatcatatcggtg

SEQ ID NO: 640921 - DNA, 75 bp, Homo sapiens
ctggaccctgccaagaagtcgcccatcgcagcagctcgatgaagactggcccatttgcagagcactccaaccagc

SEQ ID NO: 640922 - DNA, 139 bp, Homo sapiens
gacactgactgaggaccatggaaaggtgggagaggacgtgcggcttctctgcttcctttgaacagagctctagctcttgaatgtcgtctctcaactagccaaacggaatctgcgactgctggtcctaggccggaagcac

SEQ ID NO: 640923 - DNA, 75 bp, Homo sapiens
cgcggagctgcttaagcccttctcccgcctcacttccgagggattgcttatggatgcccaaatgcgttaagttcg

SEQ ID NO: 640924 - DNA, 98 bp, Homo sapiens
ccgcccaaggagaatgcgctcttcaagcggatcttgttccaggagctgttcctctagaatccatccaaggggggccctttgaggagaagatctacatc

SEQ ID NO: 640925 - DNA, 89 bp, Homo sapiens
ctgaggatccagaactaacgcattcaagtagtaacaagattgaatgtgacagtgatgataacatgggtgccaaaaatacttcaatagga

SEQ ID NO: 640926 - DNA, 97 bp, Homo sapiens
cttactcccgcaggggaatatgggagctgctgctgaaataccgacaagacttccaccctcctccactgccccaggaagacccctactgcctggatga

SEQ ID NO: 640927 - DNA, 100 bp, Homo sapiens
cttacgtccccgagtgcggcagtaccgcctccttcccagccgcgcggcttcctccagacctctcggcgcggatgccttcaattaagttgcagagttctga

SEQ ID NO: 640928 - DNA, 90 bp, Homo sapiens
tttaccaagaaagagcttcagatcctttacagaggatttaagaatgaagtttatctcgacaatgctagttgcagtctgtgtgaccctgac

SEQ ID NO: 640929 - DNA, 89 bp, Homo sapiens
tcatagattgtgtaggcgttggtcttctgatagcaactttaatgtgagttgtctctgtgggaagtttgtcctccgtccattgcgaccat

SEQ ID NO: 640930 - DNA, 75 bp, Homo sapiens
aacgtggctagtcttcaagagcttgaagtgatgagagcctatttacaacagctaaggcaagagactggactgaga

SEQ ID NO: 640931 - DNA, 96 bp, Homo sapiens
cagctaagttcacttctgaactaaggggttcctccaaatgttggctgaaattcatcccaaggctggtctgcaagcgcagttgtgtagcagttgagt

SEQ ID NO: 640932 - DNA, 90 bp, Homo sapiens
agaacaagagagaggacggcagcgccaagcaggagctgaaggacttcaggttctgggaaatggcttttacgttcaccggtctcaagctgc

SEQ ID NO: 640933 - DNA, 75 bp, Homo sapiens
gctgggattacaggcacgcgccaccactcccagatgtgttcagagcaacattgttttgttgacacaagcatttag

SEQ ID NO: 640934 - DNA, 89 bp, Homo sapiens
tgcgatcctgaccagtgcaaccacgggatgcagaagatggctgtgccacccacgtatgccgatcttggcaaatctgccagggatgtctt

SEQ ID NO: 640935 - DNA, 97 bp, Homo sapiens
ccaggcattcacgcactacaacatcaaccagagcagattccagcctccacatgtacatataagccctacaggtggcaactactagcccaactgccaa

SEQ ID NO: 640936 - DNA, 75 bp, Homo sapiens
cctgcagaaggtctctggagacatcttcagcagcactgtgacttctgccgtgttcaccgtgggagacaacgtggt

SEQ ID NO: 640937 - DNA, 75 bp, Homo sapiens
gaagccgagttcaacatcctcctggccaccgactcctacaaggttcagcagctggacatggagaaccaacgctca

SEQ ID NO: 640938 - DNA, 100 bp, Homo sapiens
cctactcccagatgcatccgtgtcaccaaaattgcctggaaaagagcagtgagaggagtccgggagatgtgtgatgcatgtgaagcaacattgtttaaca

SEQ ID NO: 640939 - DNA, 100 bp, Homo sapiens
cgacggggcgcctctgcaactcacatggaagatagatgataagcctgtaaaaattgacaagtgggatggatcagctgtgaaaaactctttggatgattct

SEQ ID NO: 640940 - DNA, 87 bp, Homo sapiens
gggatgtgaaggactccgggtgaggccggccacgccccgcacgctgctctgttaaaagcgaaaatgaaacaattgcctgcggcaaca

SEQ ID NO: 640941 - DNA, 74 bp, Homo sapiens
gtccacaacacgtgtaaactcctgggttgctgataaaactaaagatattgatgatgttaagaagttcaaaccgg

SEQ ID NO: 640942 - DNA, 75 bp, Homo sapiens
gcgagccttcacctacagcatcgtgggcgccggctcccagtttggggctgggttacgacccctacaaccctgagc

SEQ ID NO: 640943 - DNA, 100 bp, Homo sapiens
agcgggagtacaacctgaacttctcaggaagcagtactattcaagaggttttgaagggagcacctgtgagaggaatattgatgactgccctaaccacagg

SEQ ID NO: 640944 - DNA, 90 bp, Homo sapiens
ggaacaggctccgtgcagagctgggccgacccgaaaatcaggatcctcatgaccagccaaagagaagaagaattaggaagcataaatcaa

SEQ ID NO: 640945 - DNA, 97 bp, Homo sapiens
aactgctggggaaggcgattggcatcgatctctccatcccttccgaggcccgacttcgaacctcagaggatccagaacggcagctggtccttgctgg

SEQ ID NO: 640946 - DNA, 74 bp, Homo sapiens
gaaggttcaagatgtaaagaagactattcagaaaaagatgattgacgctctttggagtttaacccttctgccaa

SEQ ID NO: 640947 - DNA, 83 bp, Homo sapiens
caacagtgtaccagcagggcgttggctatgtgcccatcacaggcagatcgggagcggtgccgagaaaaatttccttactagat

SEQ ID NO: 640948 - DNA, 75 bp, Homo sapiens
agattcccaggatgtgagcaacacgggaccgtatgaagtgtaacagaacagactttaccacctgaaactgctgct

SEQ ID NO: 640949 - DNA, 100 bp, Homo sapiens
gaccgtgttggtgacgaccaacttggcccctcacgggaagtgaggagcgtctctgcctggccacccattgtctgagatgtgaggagcctctctgcccggc

SEQ ID NO: 640950 - DNA, 88 bp, Homo sapiens
ggaaatgttcccagaacattgcacgatgcctcctgactctgctaacaccagatagtggaaagaaaccatgtgctgaaatgtttgacga

SEQ ID NO: 640951 - DNA, 90 bp, Homo sapiens
gttttagacagcgtgtgccaagcagatgagaattcaggtagaggaaaaggcagggggcgaataagatctgaagatgaagaggacctggga

SEQ ID NO: 640952 - DNA, 100 bp, Homo sapiens
tttctaccttgtatgcctcaatttgctggatttaagcactgctgcactttatgagcagcgatggattttgggtggggaagtcctccttgcggagttggcg

SEQ ID NO: 640953 - DNA, 99 bp, Homo sapiens
aaccgacagatcgaaaagttgaagctggacctccaagagctgctttccccagacatggccaacaagggtccttcctatggcatgagccgcgaagtgcag

SEQ ID NO: 640954 - DNA, 90 bp, Homo sapiens
ccgcgtcccgctcgctgggagagaggttgccaacttggcctgttccatctcaaataatgaagaaggtgtaaagcttgttcgaatgtctgc

SEQ ID NO: 640955 - DNA, 76 bp, Homo sapiens
ccggcttcggagcgggagtgttcgttgtgccagcgactaaaaagagacctggcgcactgtcatgcctacctggtag

SEQ ID NO: 640956 - DNA, 82 bp, Homo sapiens
ccagcatctaggaggggtgaaaatatacgctcaacggcaagaaagtggaagttgccgtcaaacagatcatcgctggaaaagc

SEQ ID NO: 640957 - DNA, 100 bp, Homo sapiens
tggcgctctggctgtgctgcgcgacccccgcgcatggtctctaattaacagaagatggcaaagcccagccacagcagctatgtccttcagcagctaaaca

SEQ ID NO: 640958 - DNA, 75 bp, Homo sapiens
gagtgacccgggtgccgaggagcgggaagagttgctgggtattaaaggtggaagaaggtccatatctttttctgt

SEQ ID NO: 640959 - DNA, 100 bp, Homo sapiens
gtcctcgctggactgctcagggtgccagacctcatccatttaaatcaaacggtattgagatggattgggttatgaaacataatggtccaaatgacgctag

SEQ ID NO: 640960 - DNA, 75 bp, Homo sapiens
ccgcaacctggagaacgccaagcgcttcgccatcgacataggaggatgctggtggtggaggtggcgaacggccgc

SEQ ID NO: 640961 - DNA, 99 bp, Homo sapiens
gagactccttgggggtcgagcacataacggggttcgggtgtctcgtgtgtgaacatcacaggcaggtgacagcagggacatgtctcgggagatgcagga

SEQ ID NO: 640962 - DNA, 76 bp, Homo sapiens
tggagttcctcctggggaacccgttcagcacaccagtggggcagtgcctcgggatgatcatggtgattttactgct

SEQ ID NO: 640963 - DNA, 87 bp, Homo sapiens
ctcagttggaagcagccgatccagcctgcggagcctgtggggcagtttaatggatcgagaagtggcgttgcttgctgaaatggacaa

SEQ ID NO: 640964 - DNA, 82 bp, Homo sapiens
ggaacaggcgccttcaaaagcccacttggcgatgggttacagtaagaggcaaaaatagacatcttattagttggagatgtca

SEQ ID NO: 640965 - DNA, 50 bp, Homo sapiens
cgtggttgtagagttccgtgactcccagggcaagaggattatgacagatt

SEQ ID NO: 640966 - DNA, 90 bp, Homo sapiens
gagcaattgttgataccaatggaatcacggtttttggaacaaggattttggatgaagaagtttttgaggaaatgggtcctgatgaatatg

SEQ ID NO: 640967 - DNA, 75 bp, Homo sapiens
gggcgtgacgtcgggaggagggcaggtctcggcgcggaagatggccggcggcgtggacggccccatcgggatccc

SEQ ID NO: 640968 - DNA, 75 bp, Homo sapiens
gcccggttgcgacaggccgatgatgagcccaaaggatctgaaggccgttccaagcgagggtgcttctgaggacac

SEQ ID NO: 640969 - DNA, 97 bp, Homo sapiens
ggggctgcgctgccaccgcccccacggcctgacaggggccctcctggcactcagcatgtggatgccatggagactggaagaccattccaacttggac

SEQ ID NO: 640970 - DNA, 75 bp, Homo sapiens
tggagagctgctgaaacaggcggatctctacatttctgaaatatttgttcagtcgaatcaaggtgaagaggaaac

SEQ ID NO: 640971 - DNA, 100 bp, Homo sapiens
tgacaagaaaagaagagatgaaggatgaggaccgtgggagtggggcctttagcctgctgacagtgaagatagtactgtgtccatccagataaaattagaa

SEQ ID NO: 640972 - DNA, 87 bp, Homo sapiens
gctggcaattgtaaataggtttccaggatcaaaactaacctttcagggtgtgtccgcagccggccaggtggtatccctgaaggtgtg

SEQ ID NO: 640973 - DNA, 100 bp, Homo sapiens
gccccgcgctgacaggggggcctggccgcgcagccggtgtcatggagaaactccagctgggcccagagattctgcagcgggaaaatccaaggcttattta

SEQ ID NO: 640974 - DNA, 115 bp, Homo sapiens
cggcggtggaggactcacttcctgctccatccccggctgggccctggggcgctgtcctggataatgaaagacttactgcagaggagatggatgaaaggagacgtcagaacgtggc

SEQ ID NO: 640975 - DNA, 71 bp, Homo sapiens
ggtggtggcggccgctggccagtttggtctcttcccatggcgatgtccatctgccaccgtggcactggtat

SEQ ID NO: 640976 - DNA, 97 bp, Homo sapiens
gggtgatgactgggaggaggagaaaaattacctctttatcttgcatgaacatcttaattttcaggctctgcgaacatcaatagatgcttatgacaac

SEQ ID NO: 640977 - DNA, 100 bp, Homo sapiens
aggaaatgaaggcaatgctgtcatatgcctcattgctacgatttcagagtaccctggtaatagctgagcatgcaaatgattccctagcacccattacttt

SEQ ID NO: 640978 - DNA, 100 bp, Homo sapiens
cccacgagctgccacacggcctgcactctgcgctttgagctactgggctgtgagctgaacgatgaagatgtgtgtgtctttaagtgctcagtgtcccgag

SEQ ID NO: 640979 - DNA, 101 bp, Homo sapiens
atcaagcaggttttaaatcaagatttaacattccaacacataaaaattatttatccaacagctcctcccagcacccttacccttctgaagaacagaaaaag

SEQ ID NO: 640980 - DNA, 102 bp, Homo sapiens
tgaagaaagtgagcgaggagtcagaaactcagccactggttgccttggtaggcaataaaagaatggaagttggatacactttgtgacttgtacgagacactg

SEQ ID NO: 640981 - DNA, 50 bp, Homo sapiens
gaactgggctcatcaagggcgtgatctgcaactctttcaccatctgtaat

SEQ ID NO: 640982 - DNA, 96 bp, Homo sapiens
agaagaaaggattcgttacagccagagattggcttgcttccggcgtcatggctcaaagggccttcccgaatccttatgctgattataacaaatccc

SEQ ID NO: 640983 - DNA, 83 bp, Homo sapiens
cagagagggaagagattcagccagcacactcctcgcgagcaagccaccccacgtcatgctgcagcgccgcagagatcatggct

SEQ ID NO: 640984 - DNA, 101 bp, Homo sapiens
tgcgtggcgctccccaacgtgggcatgtgtccccagctttcgtgtgccttgacttttatgtacttacagcagcaacagggagctgccaccaccgtgtactg

SEQ ID NO: 640985 - DNA, 114 bp, Homo sapiens
cctggagccccttaaggccaccagcaaatcctaggagaccgagtcttggcacgtgaacagatagctgatctggccaatgaagatactccacagttgtatgtggcctgtggtagg

SEQ ID NO: 640986 - DNA, 74 bp, Homo sapiens
atacttgggacttgatgggtttgtggagaggatcaagcatgcctgtcaactggaatcagagatcattgatttct

SEQ ID NO: 640987 - DNA, 91 bp, Homo sapiens
cggtcacctggcacaccagcgcccgcaggatgcccaggacttccttcgctgggcatctggctgggattcttgttggactaatgtacactca

SEQ ID NO: 640988 - DNA, 50 bp, Homo sapiens
ggcctcccaaagttctgggactacaggcgtgagccaccatgcctggcctg

SEQ ID NO: 640989 - DNA, 98 bp, Homo sapiens
agcgcaacatccacgcagctgctcatcagtgtgctggatcgaaggggtattttgccactggaggaaagtggaagtcgacctcccagtactcaagagac

SEQ ID NO: 640990 - DNA, 82 bp, Homo sapiens
aggagattggaaaccagaaggtgatgaatggctgaagatgtcatagtttttctatatgagtggagaagacagctgttaccag

SEQ ID NO: 640991 - DNA, 75 bp, Homo sapiens
ccctccttctcccggcgcctcaagcggaagacatcgctattgcggttccgaggcagtgggaagagatgcggcccc

SEQ ID NO: 640992 - DNA, 90 bp, Homo sapiens
caacctcgccccttgcaacaaaggcagactgagcgccagagaggacgtttccaactcaaaactgtcagcatcaataaggccattaatacg

SEQ ID NO: 640993 - DNA, 82 bp, Homo sapiens
cggtccattcaagctgaacgcacccgctggttgtggaccgtctgccaggcaccacagacagaactgtaccgctctctttttg

SEQ ID NO: 640994 - DNA, 100 bp, Homo sapiens
ggtctggctgttgggaaggaaaaagaatagccaggtctggctgggtcggcacaacctgtttgagcctgaagacacaggccagagggtccctgtcagccac

SEQ ID NO: 640995 - DNA, 82 bp, Homo sapiens
tcccatggttgccggctcccctctcaggacaacccagatgtgcaacaaagtgcgatgtactatactggcaattgctggagaa

SEQ ID NO: 640996 - DNA, 100 bp, Homo sapiens
agagtagttgtggcggaataatctaaatatgggtgttggggtaaaccagacttgaatacaacattgccaattagacaaacagcatcaattttcaaacaac

SEQ ID NO: 640997 - DNA, 82 bp, Homo sapiens
gcttggtgtcgtttttccttgagctgaacgtcttgcaacagtggccgcacgcataggtgagaagccctaccactgcaactgg

SEQ ID NO: 640998 - DNA, 98 bp, Homo sapiens
ccgaaggtcattacaagaagatgaagaaggattctcaaggctctggcgttacgacgtattctgtacaccctggcacagtccaatctgaactggttcgg

SEQ ID NO: 640999 - DNA, 90 bp, Homo sapiens
ccagtgaccacctgaacaacagcacactgaaggaggctcagttcaaagacctgttcttaaaaaaagggagttctgggaaatcgttcattc

SEQ ID NO: 641000 - DNA, 50 bp, Homo sapiens
ccgccgcctctccttgctgcagccatggaaaatgagccgtcagactgcta

SEQ ID NO: 641001 - DNA, 50 bp, Homo sapiens
gtcacggagaaggcagcctacatagccgttcgaggctccatccagcaagt

SEQ ID NO: 641002 - DNA, 51 bp, Homo sapiens
ggctgaagatggctactctggagttgagggaacgatgcctctggaggtggt

SEQ ID NO: 641003 - DNA, 98 bp, Homo sapiens
gcgagcgagccgcgaaccgagcgggcggcgggcgcgcgcaccatgggggagaaacccgggaccaggacctgaaggagaagaaggagaaggtggaggag

SEQ ID NO: 641004 - DNA, 50 bp, Homo sapiens
ctggggccacgtcttctgggaccaggccccagaagagcgtgtggcatggc

SEQ ID NO: 641005 - DNA, 100 bp, Homo sapiens
gagatttcttattacacacaatccaaccaatgcgaccttaaacaaatttatagagaaagtgactgagaccgaagatgatagtgatagtgacagcgatgat

SEQ ID NO: 641006 - DNA, 73 bp, Homo sapiens
tgtgtccagaacgtgccatggagacgcttaacgggatcatggcccaagttgcaatgtccaccctccccgttga

SEQ ID NO: 641007 - DNA, 82 bp, Homo sapiens
agacggtgcccggcgcccacggggtgagcatgggtttatgcgtcttaggcattattgtgatggcgagcaccaattctctgat

SEQ ID NO: 641008 - DNA, 87 bp, Homo sapiens
gcggcagacggagggcacctaccggcccagtagcgaggagcagtgcccagcagaggagcacgcagctgaacaagaagagagccatcc

SEQ ID NO: 641009 - DNA, 93 bp, Homo sapiens
aaagatatcaggtggctggttataagtcttttggaggacgaacaactggaggagtctactcttcatcttgtgttgagacttcgtggtggtgct

SEQ ID NO: 641010 - DNA, 75 bp, Homo sapiens
gaaatcgacacacaaagaatagagttgagcctgtgggacacttcggctcggccgctactccgccctgttcctcgg

SEQ ID NO: 641011 - DNA, 100 bp, Homo sapiens
gtcaaatcataatccctcgaaacacaacctttaatgttgagtctaccaaaaagaatgaaccgcttgcttcttatttagcatgctacaagtgaaaactgat

SEQ ID NO: 641012 - DNA, 104 bp, Homo sapiens
ggcatgctttagctatctgaacgaaacttccctttggggagttaagttttccaggtttttcgttggaatatacgttgcacatttatggcgattctgagtgtgag

SEQ ID NO: 641013 - DNA, 89 bp, Homo sapiens
cgcgaatatcgtcatcgttagaagatgccagcacgagccgccgcttcacgccgccttccaccgcgctgagcccaggcaagatgagcgag

SEQ ID NO: 641014 - DNA, 88 bp, Homo sapiens
ggggccccgaagaggacagagcccgcggccgcgccgagcggggtcctcagccagcagagccacgttccttatgagcaccgtgggttta

SEQ ID NO: 641015 - DNA, 50 bp, Homo sapiens
atgagtcgcatcttcaacccccatcttaattataaagtggactgtgcctg

SEQ ID NO: 641016 - DNA, 84 bp, Homo sapiens
ctggggccagggaaccctggtcaccgtctcctcagacaagttggatggcttgaggactggtactaaaaggaaacgtgactggga

SEQ ID NO: 641017 - DNA, 100 bp, Homo sapiens
gccggtggaggggcggccccacggcgagcatggtgctggagaatctggtaaaagcaccattgtgaagcagatgaggatcctgcatgttaatgggtttaat

SEQ ID NO: 641018 - DNA, 102 bp, Homo sapiens
atgttgaagtggcctatcccaggacaggtggcactctttcaggttctggctccttggcagcaatggctgtatttgaagataagtttaggccagacatggagg

SEQ ID NO: 641019 - DNA, 100 bp, Homo sapiens
accttggtggagaacaagaaagctcagctggtggtgattgcacacgacgtggatcccatcgaggaaagcctgtattattttggagaaaggcgaacagata

SEQ ID NO: 641020 - DNA, 75 bp, Homo sapiens
cagatgccagccagagctctcctgtatgaggtaggtgatgctctgatgctgctgcctcttatgaattgacgacag

SEQ ID NO: 641021 - DNA, 75 bp, Homo sapiens
acagagggagctactctcaggctgcaggagccttccttccgacctggccttcaacggggacctggctaaggcagc

SEQ ID NO: 641022 - DNA, 50 bp, Homo sapiens
cttcaagagaaatggagcccttctccaagaggaagtggcttttaggaaga

SEQ ID NO: 641023 - DNA, 119 bp, Homo sapiens
aagagaagaaatggacatgattgcctaaatcagccaaacacagggcctcattgctacgatttcagagtaccctggtaatagctgagcatgcaaatgattccctagcacccattacttta

SEQ ID NO: 641024 - DNA, 74 bp, Homo sapiens
tggaaattactttggaagaggatagcattgaaagggaatctaagggaggaaattatcaactgtgcacaaggaaa

SEQ ID NO: 641025 - DNA, 87 bp, Homo sapiens
ggatgaaatctacacagtaccagaggtggggactgttgttggaggaacactttccaggatcctcctccgcctgccttcgtctgtcct

SEQ ID NO: 641026 - DNA, 73 bp, Homo sapiens
cgccatcccggaagcgcgagcaaggccgccagatgtgcagggccaattcctgtccccccagcagcatggcatc

SEQ ID NO: 641027 - DNA, 51 bp, Homo sapiens
gacgcctgccattgggccggatggcgagaaacgtctacaaggacctgcggc

SEQ ID NO: 641028 - DNA, 98 bp, Homo sapiens
caacagctctgccggctggaagaatgttctgaaggatctggaaaagagaaaagctgatttaaataccatcacagagagtagtgctgccctgcaaaact

SEQ ID NO: 641029 - DNA, 100 bp, Homo sapiens
cttgccatcaatggagtgacagagtgtttcacatttgctgccatgagcaaagaggaggtcgacagtcctagagatgtacagcaaactgagggaccagatg

SEQ ID NO: 641030 - DNA, 100 bp, Homo sapiens
tacgaacctgcagatacagctctgtgtgaccaagaatatggcccaggtgaccaaagccctggacaaggccctgagcaccatggacctgcagaaggtctcc

SEQ ID NO: 641031 - DNA, 83 bp, Homo sapiens
tcggtgccctctccttttcgtttccggaaacatgggaaccttctgaccagcctcatgggctcctcagagcaggaggatgggga

SEQ ID NO: 641032 - DNA, 100 bp, Homo sapiens
aaagaggaaagtggactgtccggggccgggctcaggagcagagagtaacagttacccctcaatgagcgacccctacctgtccagctattacccgccgtcc

SEQ ID NO: 641033 - DNA, 76 bp, Homo sapiens
cttccctggcaagattcttctgaattgtgctgccttggccaaaagagggtgtccgcaatgttgccagtgtctgtct

SEQ ID NO: 641034 - DNA, 76 bp, Homo sapiens
aaagctgaaaatttacttctggatgccaatctgaatatcaaaatagcagaatcattccgcgcacccacgttttcat

SEQ ID NO: 641035 - DNA, 100 bp, Homo sapiens
tcaacccaaccggctccagggcactggttacttgtctgcaagacttttttggtgatgacgatgtttttattgcatgtggaccagaaaaatttcgttatgc

SEQ ID NO: 641036 - DNA, 98 bp, Homo sapiens
tttcggaatagtctcaagatgctgcttactggtgggaaatcaagtcgtaaaaacaggtcaagtgcaactttcatcctttgaaacgtgtgctgaaaaag

SEQ ID NO: 641037 - DNA, 100 bp, Homo sapiens
attggacgtcaggatctttccaagcaggcctgcgaaggaaacttacccaaagggaagtcttgtcgaggagggccccaaccgcagcacagtcagccgcccc

SEQ ID NO: 641038 - DNA, 75 bp, Homo sapiens
gagctgtaatcaattgtgctgacaacacaggagctcttgtccctggcaaagcgaaagcgcagtgactctgaggag

SEQ ID NO: 641039 - DNA, 90 bp, Homo sapiens
gcggccccccagtccagggggaacgcagtgcgccccgcttcggtgttacttccctcaggttttgacaacaattcgttcagggcaccgagc

SEQ ID NO: 641040 - DNA, 100 bp, Homo sapiens
cgaaatgatccgcctgcctcagcctccaaagtagctgagactacaggggggagtctcaccttcttcctcggtgagtatgggggcctgatcttcatctggc

SEQ ID NO: 641041 - DNA, 75 bp, Homo sapiens
gaaaagggaagtgaaaagagatctgttttcaggcagaagattttcgcaagctctggaaaactccacctcgagaga

SEQ ID NO: 641042 - DNA, 75 bp, Homo sapiens
caggacagcagcttcctctcctctcttagacctttcctcatgaatggtctgccgaaaaccgaccgacccggttga

SEQ ID NO: 641043 - DNA, 100 bp, Homo sapiens
ccacctctacccggcagcgggggcagtcagagcggagccaagatgcgaatgggtgttctgggaatgtcagtggaatctgctcctgctgtggaggaagaga

SEQ ID NO: 641044 - DNA, 83 bp, Homo sapiens
tgggtcggtggcggaggctgaggagaaggaggagcgggccgtggaggcttcgccgcctagcacagacgcagtcttcagcaagg

SEQ ID NO: 641045 - DNA, 100 bp, Homo sapiens
ttgctgagagaaaggagacgacagcgaaaaaatagggaatctttccaggagctaaattgaagaaggagcgagcgcagcttttggtcaaccccaaaaaaat

SEQ ID NO: 641046 - DNA, 95 bp, Homo sapiens
gccagtgagcccatcccgttctctgatttgcagcaggttcagcgctgtgtggagatcctgagccgggccaagaggcctctgatggtgctggggag

SEQ ID NO: 641047 - DNA, 98 bp, Homo sapiens
aatatagccaacagagcagcagctacgggcagcagaactatttggagttttcctggtcttactggatgtcactctcgtccttgccgacctaattttca

SEQ ID NO: 641048 - DNA, 80 bp, Homo sapiens
cgtcccgaccctggccgccccgagcggagcctggagttacgccccatggtgtccatcctgccagcagactgattcagaat

SEQ ID NO: 641049 - DNA, 74 bp, Homo sapiens
atgatcgagtgtgacatgtgccaggactggtttcatggcagggtgctgtgccgttcctggtcagtgccacctct

SEQ ID NO: 641050 - DNA, 82 bp, Homo sapiens
gggaaatggcggagtatctggcctccatcttcggcaccgagaaagacaataattcgccaaaatgacgaacacaaagggaaag

SEQ ID NO: 641051 - DNA, 75 bp, Homo sapiens
ctcacctgcaaagctgatgctaaccccccagccactgagtaccactggaccacacgcatcttctctccagactgc

SEQ ID NO: 641052 - DNA, 50 bp, Homo sapiens
catagaccagaaccttagtcccgggaaagacatggatgggtgcaaaaaag

SEQ ID NO: 641053 - DNA, 90 bp, Homo sapiens
ctctctttcgctctttggactaatgggagttgcttttggaatgaatttggaatcttcccttgaagagctctcaaaggtctatggccctgt

SEQ ID NO: 641054 - DNA, 75 bp, Homo sapiens
gtgaaatagctacaaccagcctaagggtttctctactatgtccagtgaccaagaatatggcccaggtgaccaaag

SEQ ID NO: 641055 - DNA, 50 bp, Homo sapiens
ccataaaactgaagatgtgaatactctgatgacttcaaacctgcttctat

SEQ ID NO: 641056 - DNA, 75 bp, Homo sapiens
gaaaacctacaggtggtgtgtgtgtggccgcagcaagaagcaggattatgttgacaaagagaaggcaattgccaa

SEQ ID NO: 641057 - DNA, 89 bp, Homo sapiens
ttctggacaaaggaatgatgagcaccgtgacggaagttcgagccctcagatgctgagctttttataccaccaaagatcaacagaagaac

SEQ ID NO: 641058 - DNA, 82 bp, Homo sapiens
ggcagtgccgcttcggccgaaggcccgagcgcccgaggcgtctgggatggtgtgggaccggatggagacctcacagacacgg

SEQ ID NO: 641059 - DNA, 83 bp, Homo sapiens
tcagtgatggaggacagagtgcgaacatccagtcatggataaaaatgagctggttcagaaggccaaactggccgagcaggctg

SEQ ID NO: 641060 - DNA, 100 bp, Homo sapiens
cagtatatcaccccagcgttgacacactggccaggagtggtggctcacacctgtaatcccagctctgggaggccaaggccagtggattgcttgagcccag

SEQ ID NO: 641061 - DNA, 100 bp, Homo sapiens
gcttaagcgccgccgcggtctgcggaatgtcaactattcaacatggaggcggaggtcgataagctggaactgatgattctgcctgatcaatgcaggagtc

SEQ ID NO: 641062 - DNA, 75 bp, Homo sapiens
cgcctggccatcattgagtatatgccgctgctggcaggccagctgctccagaacctgggtatcaacccagcaaac

SEQ ID NO: 641063 - DNA, 50 bp, Homo sapiens
caagagtagaaggagcatcgatgcaggctattcatgctcttatggaaaat

SEQ ID NO: 641064 - DNA, 78 bp, Homo sapiens
ccagctaccatgccagagccagtttattttcactgtgcagctgttacaccagcctggtccagatccctgtgagcatgt

SEQ ID NO: 641065 - DNA, 100 bp, Homo sapiens
gttccagaggatgatgatgatgatgactaacaggcgttatctggaatgcgacacgtatggcgaaaggtggatacagtctgggtgaacgttggtggtcttc

SEQ ID NO: 641066 - DNA, 100 bp, Homo sapiens
cagggcatgtcagaccaacagaggggcaaatcagagtgaagaggaagccagaagatgggagagacatttttgaagcatcaagcatgatggaaccatgtgt

SEQ ID NO: 641067 - DNA, 101 bp, Homo sapiens
ctcgcctcgggtctcgggggccgctctgggatcccggccaccagcaattgtccggaaattatggaagtggaaattacaatgattttggaaattataaccag

SEQ ID NO: 641068 - DNA, 90 bp, Homo sapiens
cagcactaagggaacatagttatgatctggaccttctgggagtggtcagtgcccaagaacagaggctgaggggatctggcggtggagcgc

SEQ ID NO: 641069 - DNA, 139 bp, Homo sapiens
cagatggcaccccaaaaaaggatatgaaagaacaccaaaagggaactctaaagatttagttggaaaagtagatcctaattatctcatggctaatgaacgcatgaacctcatgaacatggccaagctgagtatcaagggc

SEQ ID NO: 641070 - DNA, 110 bp, Homo sapiens
gtgggctctgccatcagcaggaagcttggagacatgagaaaataagacctactcatctgtgagaacagaagctttatctgtgatagaattgctgcttaaaaaacttgaag

SEQ ID NO: 641071 - DNA, 101 bp, Homo sapiens
tgaagtacaccgtggtgacattgtatcattggtgtattaagtcatgatgcaggaatctgcgacagagacaataagcaacagttcaatgaatcaaaatggaa

SEQ ID NO: 641072 - DNA, 50 bp, Homo sapiens
catgtggcaaaacacacagctgaggttgcacagtgaattaaaagatgctg

SEQ ID NO: 641073 - DNA, 74 bp, Homo sapiens
atgcaggccatcaagtgtgtggtggtgggagacggatacggactcagaggaagacgaagaattcctgaaggacg

SEQ ID NO: 641074 - DNA, 100 bp, Homo sapiens
tcccgatctgccatgtattccagaaaggccatgtacaagaggaagtactcagccgctaaatccaaggttatcagtgagctgaatggaaaaaacattgaag

SEQ ID NO: 641075 - DNA, 100 bp, Homo sapiens
gtgtgaaaaactggaaatcccaaagcctcgaatggctgccactcagaaacttgttaaagacattattgactcaccccacacagaccgcgtttctctccag

SEQ ID NO: 641076 - DNA, 100 bp, Homo sapiens
aagagtgtctcatcagatatgcccaagaggcagtctttggatctggaaagtgaatatttggcaatattcaagaagacagttgcgatgcatgaagtgttcc

SEQ ID NO: 641077 - DNA, 75 bp, Homo sapiens
gaaataatggcaaataacttttccttggagagtcataacatatcactgactgagaacatcaccaccctgaagcca

SEQ ID NO: 641078 - DNA, 76 bp, Homo sapiens
gaggaattggtgctcctattgtacaggtgaccaagaatatggcccaggtgaccaaagccctggacaaggccctgag

SEQ ID NO: 641079 - DNA, 96 bp, Homo sapiens
ccaccgcctccagcttgccaccaaagacctgcgactttgctcaggacccttgaacatctgtgaagaaatgactattctgcatggaggcttcttgct

SEQ ID NO: 641080 - DNA, 100 bp, Homo sapiens
tcctgaacagcagagtcttgctgcaccacgccaaagctggcaccatcattgcccgccagggagaccagaccctggtgggcagcagtgggaccattctgac

SEQ ID NO: 641081 - DNA, 101 bp, Homo sapiens
gcctccattacactgctgagtcacacacaacgcttgttatgttttcatcacttctctccagaaggtgtgggccatgtttgaggattgccccagcattcagt

SEQ ID NO: 641082 - DNA, 100 bp, Homo sapiens
cttgaatggcgactagatgtacagcctctactcaatagtccccccagctttgtgtgctggtctcggggcttcatggagatgaatgggcggggggagttgg

SEQ ID NO: 641083 - DNA, 100 bp, Homo sapiens
gcctatggataaggtggaggaagctttgtgtccctggtgatgttggaacattaatgatggaacatggccaaacttcagtcatgatcctgaagccatggtt

SEQ ID NO: 641084 - DNA, 100 bp, Homo sapiens
ggcgccggggttcggtggcctctagtgagatctggagggaaatcctcattgacgattcaatttgttgaaggccaatttgtggactcctacgatccaacca

SEQ ID NO: 641085 - DNA, 119 bp, Homo sapiens
ttcgcagtgtaggagatggagagactgtggagtttgatgttgttgaaggagaaaaggcttcacaggctgctcaagaagccgagatcaatgccagaaaagccaaaaactctgttactagc

SEQ ID NO: 641086 - DNA, 101 bp, Homo sapiens
gctccgtggcgttcgctgaggctcagagatgggtggaggagcttgtacctccaggcccatacatccttccaaagctcccaactaccctacagagggaaacc

SEQ ID NO: 641087 - DNA, 82 bp, Homo sapiens
cctgtgtcccaaccggcctgagtcaaggggatatgagactttctactcggaatatcctgagtgttgcgtggatgtaaaaccc

SEQ ID NO: 641088 - DNA, 98 bp, Homo sapiens
tgtctttcctaccatctaaaatacgaaggtttctggctgggtttgttgataagccggggcccttcgtgggaccctgcggtcactggatcaggccctca

SEQ ID NO: 641089 - DNA, 75 bp, Homo sapiens
ctccccatttccgcgctcccgggaccatgtccgcgctggcggcttttcgctgtggcctgcagtttttaggcaaca

SEQ ID NO: 641090 - DNA, 86 bp, Homo sapiens
gatactcatcatttgcagcaaactcagcactgaggaggaagccaagaatctggtgagcgaagccatcgcagctggcatcttcaacg

SEQ ID NO: 641091 - DNA, 124 bp, Homo sapiens
ctcattaatgttgacccttgcgctaaaggctggattgactgggcagcttccaaagttcttttagagcaagatatatttcatcgttccttgatggcttgttgtttggaaattgtgctctttgcct

SEQ ID NO: 641092 - DNA, 100 bp, Homo sapiens
aagctgcactccaggtcagcatgaacgatggcctctcttttatctccagttctgtcatcatcaccaccacacactgtaaaaagcttgtggtgaagggggg

SEQ ID NO: 641093 - DNA, 100 bp, Homo sapiens
gcgcggggcgttgggtcagcgggtctgggactggtggcaccggcggcggcgtaggacggaggcgtcgctagaggccatgtggaagtgttacatcaccttt

SEQ ID NO: 641094 - DNA, 100 bp, Homo sapiens
tgacaccactgatgacgatgatgcactcgatcgccacatcacagaatcgtatctatctcacagctgacaaccttgtgctgaacctacaggatgaaagttt

SEQ ID NO: 641095 - DNA, 90 bp, Homo sapiens
gttcttttggggtagtgtctgggatccagtacgagttgaatcattgttcaaataaggaaatttgcgagaatccccgatttatcattgatg

SEQ ID NO: 641096 - DNA, 50 bp, Homo sapiens
cgggcaccgaggaccagctcaatgacagattatggtgacaagctgaacat

SEQ ID NO: 641097 - DNA, 83 bp, Homo sapiens
gatggcggcccatcaccggcagaacacagcagggcggaggaaagtgcaggtcagggaagtcaaagatgcatccctgagttctt

SEQ ID NO: 641098 - DNA, 83 bp, Homo sapiens
ccgctaccggaaggccatcgccaagagacacctatggctgccgatgaaggctcagcagagaaacaggcaggagaggcccacat

SEQ ID NO: 641099 - DNA, 101 bp, Homo sapiens
aaggagtggaagtttgagagaagtttaagagaagaaatggacatgattgcctaaatcagccaaacacagggctcgggttatgtatgattttgctgctgaac

SEQ ID NO: 641100 - DNA, 97 bp, Homo sapiens
aggtggcttatcaaacttgggaataaaaagtattgtaacagctgaagtgtcttcaatgcctgcttgtgttggagcgggccggagagaagtagagtgg

SEQ ID NO: 641101 - DNA, 75 bp, Homo sapiens
gtttcactctgctctgctactatgatcccaattcaggttgaaagaagctcaaaggcaagaatgttacttttgaat

SEQ ID NO: 641102 - DNA, 75 bp, Homo sapiens
ccggggtcacccgctacgggaagcaggcctcgccacaggttcagtctgcagccctggatgagatgtttcagcaga

SEQ ID NO: 641103 - DNA, 108 bp, Homo sapiens
gcagcgctaccgtgcccaggcaccccttggagctcatgcagtatgcagaccctgtggctgacctcctagaccgctggggtgtgttccgggcccggctcttcagagaat

SEQ ID NO: 641104 - DNA, 90 bp, Homo sapiens
cctgcgttctgatgtcgtgcccatgacagcaggtcaatggcatgcagctttatggaaaatctcgccgagaagcagtctcctttcttaaag

SEQ ID NO: 641105 - DNA, 140 bp, Homo sapiens
gttcaaacagcactgccaaatagcagaagaataccatgaggtcaaaaaggaaatcaccctgcttgagcaaaggaagaacaacttgaaacagccaggaagtttctatattatgaaatgggctataaatctcgatcagaaca

SEQ ID NO: 641106 - DNA, 75 bp, Homo sapiens
ctcccgagtagctggaactacaggtgcggggagcggcatcggccgagcggtcagtgtacgcctggccggagaggg

SEQ ID NO: 641107 - DNA, 88 bp, Homo sapiens
cgagggcggggaccggcggcgctggaggagcgaggcagctgtactaggactgggaacggacagacctcggctgcccgacaactacacg

SEQ ID NO: 641108 - DNA, 75 bp, Homo sapiens
gacgagaggatgcggagcccgcagaacctccacagtcaagaggacggtttacccaaggtccagcctagcccctag

SEQ ID NO: 641109 - DNA, 82 bp, Homo sapiens
ggacagcgagcccttcaccctggtggagcgagacggtttggtgcacctcgatttggaggaagtagggcagggcccttatctg

SEQ ID NO: 641110 - DNA, 117 bp, Homo sapiens
cagggaagaaggaatcatcgaggcatgggggtccacactgcaatgtttttgtggaacatggcatcagaacacaccatgatggctgtgacctaagaccctcaggaagccccggggtca

SEQ ID NO: 641111 - DNA, 123 bp, Homo sapiens
ccgaggcgcggcggcgcggctgccggctgccctgtgaatgggaagttacgcgaagtccacccagcgtttctgaggacgggctctacgagtgcattctctgtgcctgctgtagcaccagctgcc

SEQ ID NO: 641112 - DNA, 97 bp, Homo sapiens
tctgatgtggtgcttttgaaccactggaaagtgaggaattttgaagtacaccgtggtgacattgtatcattggtgtgacttaagagattaaaattaa

SEQ ID NO: 641113 - DNA, 112 bp, Homo sapiens
cggccgctctgcgggactctgaggaaaagctcgcaccagagatgtagaagaattacagctaaaacttacaaaggctaatgaaaatgcaagttttctgcaaaaaagtattgag

SEQ ID NO: 641114 - DNA, 98 bp, Homo sapiens
accagcaaggacctcatcagaatagatgagaacgggattcccagtagtccccagaaagtagctctgaccctggatcttgacctggagaaggagccgga

SEQ ID NO: 641115 - DNA, 51 bp, Homo sapiens
agcctctgccttgtggttccttagggctctggaacttcatccattctctat

SEQ ID NO: 641116 - DNA, 99 bp, Homo sapiens
cctctatggtcagagcattgggactgtccccacggtagacttggcctcgagtcactcagcctctgaagaagcttcgggttcagactcaggcagtcagtc

SEQ ID NO: 641117 - DNA, 82 bp, Homo sapiens
cgcaaacacgcgcagaccttcgttgccctctgtgccacagatctctgttgaggagctggcgcggaatctggtcatcaaggtc

SEQ ID NO: 641118 - DNA, 87 bp, Homo sapiens
gaatggagaaataggggaaagtcaagtgaaaggtggtgaagagccaattgaggtcattgaatctttgggaattattatttataaagc

SEQ ID NO: 641119 - DNA, 98 bp, Homo sapiens
cagatattgggagatccacagctaagacgccgggactccctggaaacctagaaatgaacctcaagaaggcatgaagccagcccctgcagtgccgtcca

SEQ ID NO: 641120 - DNA, 82 bp, Homo sapiens
agccgccatggatagcgacgacgagatggtggaggaggcggtggaaggctgcctgctgtttcccggggagatcatgaaacga

SEQ ID NO: 641121 - DNA, 98 bp, Homo sapiens
gtcagtcgcgagcgaacgaccaagagggtgttcgactgctagagccgagcgaagcacaatgcagatcttcgtgaagactctgactggtaagaccatca

SEQ ID NO: 641122 - DNA, 100 bp, Homo sapiens
gacaagtcctgcgcttggggatcctctgtacgcccgttcactgtgccggtggtggtgtgcacattgagccccggtatagacagttcccccagctgaccag

SEQ ID NO: 641123 - DNA, 75 bp, Homo sapiens
tcatccagaagcatctgaagaccatggatcacaaccggaaccgcagggactggactcgggccatatccgtggtgc

SEQ ID NO: 641124 - DNA, 82 bp, Homo sapiens
aaagattcagattacgaggattatggatgaacgtaacagacagtttctcaactcattggatgctaaagaaatatatttggaa

SEQ ID NO: 641125 - DNA, 51 bp, Homo sapiens
cggaccgcagcaatgacattgcccatgaaacccctgaaggccaccgccacc

SEQ ID NO: 641126 - DNA, 82 bp, Homo sapiens
tcagcactgactttcagctatggaatcgcaatgaggtcttactgtgtagcccaggctgctctggaactcctggactcaagtg

SEQ ID NO: 641127 - DNA, 50 bp, Homo sapiens
ggacccgaagcctaaattccaggagggttcgatacaagaggctgttttcc

SEQ ID NO: 641128 - DNA, 99 bp, Homo sapiens
tcctcgccagcagccgtccggagccagccaacgagcggccggtctaattgaagccaacggagaactcaaggtcttcatagaccagaaccttagtcccgg

SEQ ID NO: 641129 - DNA, 100 bp, Homo sapiens
ccgtcacccgtttgcacctctgcagctgtcaggagcgggtcagatgtggacgagtgctcactagcagaaaaaacctgtgtgaggaaaaacgaaaactgct

SEQ ID NO: 641130 - DNA, 75 bp, Homo sapiens
cctcactgaccccagagtggcagaaaggctgatgcagcaggacatcaaaggccagttctggaatgatgacgactc

SEQ ID NO: 641131 - DNA, 51 bp, Homo sapiens
atggagatacaggtgaaatctggttgctccttgagggcaggacagttctta

SEQ ID NO: 641132 - DNA, 75 bp, Homo sapiens
acaggttctgtgaaaagtgaaaggaatgacgttctgcccctttcaaactcagtgcctgaagatgtgggaaaagct

SEQ ID NO: 641133 - DNA, 131 bp, Homo sapiens
cccacagcagcagcacctgcttccagactcagagtgtgagaaaaaaataaactcctatttgtttatggcaagaacgatctggaaaaattttcaaaaggtattggcaggtttacaagagaagatcccacatt

SEQ ID NO: 641134 - DNA, 89 bp, Homo sapiens
agagacacagcccatttttttagaaaaagatcgttcagaagtttaccagaattaaaagatgctgtcttggaccagtattcaatgtgggg

SEQ ID NO: 641135 - DNA, 82 bp, Homo sapiens
aaggaagtcatcatgggccggcctggaacaggattatatctgtccaagatgcgagtctggttttatcgaggagcttccggaa

SEQ ID NO: 641136 - DNA, 96 bp, Homo sapiens
tccgcctgagccccggaagggtgatgtggctgcggcatcgccggcctcgctatggtccatggggccgatgtatgggagatgaatgtggtcccggag

SEQ ID NO: 641137 - DNA, 100 bp, Homo sapiens
attggagagcactcagtcccggctggacaatgtgatgaagaaacttgcaaaagtatctcatatgaccagtggtatgtgacgcattcccagactcttcagc

SEQ ID NO: 641138 - DNA, 90 bp, Homo sapiens
ccccgtggatccgctggagcggagccggccgtacgcggtgctgcgagggcagaacctgggcgttgacccggacgacacctataatgagac

SEQ ID NO: 641139 - DNA, 98 bp, Homo sapiens
cgacaccatcttcgacaacatcctcaagcgcccgggggctggagaaggccaggcagcagctgcaggaggagctccggcaggtcagcggccagctgttg

SEQ ID NO: 641140 - DNA, 100 bp, Homo sapiens
cgggtggcgcggcgggacgcgagcggcgagccggagcgcggagcccggctcccgcaccatggaggaggacgacagctacgacgtttgatgcaaatgattt

SEQ ID NO: 641141 - DNA, 119 bp, Homo sapiens
ccctcaaggacaacccgtacatcaccgacggctaccgggcctacctgccgtccaggctgtgtatcaaaagtcgtcctcttgagttctggcgccttgactactgggaagatgacttgcgg

SEQ ID NO: 641142 - DNA, 75 bp, Homo sapiens
agatgccacatatgatttcaagagaaagtctgtgattgctgtgagcttcatagcagcgttccttttcctgctggt

SEQ ID NO: 641143 - DNA, 100 bp, Homo sapiens
cggagcctcccctgcagcgactcggaagattcgaggcggcgggggacaagtcggcgccccagagcggacgagtgtctttctcgagaagcaggtggaaaca

SEQ ID NO: 641144 - DNA, 100 bp, Homo sapiens
aaagatccacaaaccagagaaagctttccagcagtcagttgaacaagacaacttatttgattcttgctgccagtcatcatggaaaggcttgagaaattgc

SEQ ID NO: 641145 - DNA, 100 bp, Homo sapiens
cggacctgggggatgcctgggccttcttctacaagtttgagctgcagcatggcactgagatgaaggatttgggggcagagcacttggcaggtcatgaagg

SEQ ID NO: 641146 - DNA, 100 bp, Homo sapiens
atccagcaaggtcggcagagcaaggggcttacgcagaaggacctggccacggctttatcctgtggataaacgcagagtgaacgagtttggggagtcctac

SEQ ID NO: 641147 - DNA, 76 bp, Homo sapiens
tgaccgagagcgcgaatatcgtcatcgttagaagaattggggcttgttgatggacaagaactggcggttgctgatg

SEQ ID NO: 641148 - DNA, 141 bp, Homo sapiens
cccggtctcggtgtagctgccgtggttgccaggagagctgcgccggcgagaagcggccgagccagcagcagacactttttcaaaaatggcaatggtatcagaattcctcaagcaggcctggtttattgaaaatgaagagca

SEQ ID NO: 641149 - DNA, 90 bp, Homo sapiens
agggaagcacctactatgattctttttaatgtggtgtttgcactgaggaacttcatggaggaacacggagtgacccaaaccgaacatatg

SEQ ID NO: 641150 - DNA, 50 bp, Homo sapiens
tgccgcaggacctgcagcatcccagagaattcaattcgtcataatctgtc

SEQ ID NO: 641151 - DNA, 75 bp, Homo sapiens
agtatttgatggagttgatgcaagctgccactgcagagccccgccatggaagacacgccgttggtgatatcgaag

SEQ ID NO: 641152 - DNA, 90 bp, Homo sapiens
aagaccatcatgctgcgcggccttcccatcaccatcacagagagcgatgtatattcagcatgcagctttactttttcaaagattccttca

SEQ ID NO: 641153 - DNA, 83 bp, Homo sapiens
ctggatgagcccggcggggaagcttcgcgtagcagtttctgggaaacagtgggttggcagctggagaagataatggacagaga

SEQ ID NO: 641154 - DNA, 124 bp, Homo sapiens
aatgcatcctggactggaaacctcagagctataaagtggagtgacatggaagacagacacggaggctgccacgccctactgccaataaagggaaaataagagatgctcatcgacgaattatgct

SEQ ID NO: 641155 - DNA, 83 bp, Homo sapiens
ggcgattccatctctgaagcaacaaggggaatggggtcaaaatgagcaggtataatgggtctctcccaaatggcgatagagga

SEQ ID NO: 641156 - DNA, 98 bp, Homo sapiens
aattgaaaaaatggttgacctcacccagggatggtgttccatactgtgagtccgactaccatgcccagtttggcattaaatgtgagacttgtgaccga

SEQ ID NO: 641157 - DNA, 82 bp, Homo sapiens
gcggcgcagcggcggcagcggagagcgagagaggggagcaggcatcattcttaacaaagaagttaaatattggtgggaaaag

SEQ ID NO: 641158 - DNA, 97 bp, Homo sapiens
tgacagtttatcatgaccgtgttcaggcaggaaaacgtggatgattactacgacaccggcgaggaacttggcagaaagtgagtgagaaggttggagg

SEQ ID NO: 641159 - DNA, 98 bp, Homo sapiens
gtcgccggccgcccgcacgtccgtccggttaagacatcagaattttatagatactcccgacagctccgttacgaagttgaccaagcattgaattactt

SEQ ID NO: 641160 - DNA, 100 bp, Homo sapiens
gttgacgatgagtatgaggacgaggaccagtgggaggatggagcagaggacattctagagaaaggacaaggtgctgcggatgctgtacgtgtgggcgctc

SEQ ID NO: 641161 - DNA, 74 bp, Homo sapiens
ttgcctttgttgattaactggacaaattcaggagttgatccctgaattttattatctccctgagatgtttgtca

SEQ ID NO: 641162 - DNA, 74 bp, Homo sapiens
tcctagtcagcagactcaggccgcttacccaaagtttctaagcatgaattgaggaacagaagaagcagagcaga

SEQ ID NO: 641163 - DNA, 100 bp, Homo sapiens
gcattgacatttaattttagggtcctttatatagaagggagaagaaacttgcccaggccaaagaagagaacgtgggcttacatcagacactggatcagac

SEQ ID NO: 641164 - DNA, 97 bp, Homo sapiens
ctcagttgtgcgttgcggccagtcgccactgctaaaatgcatccgatgcagatttatggctcctgaacagttgcactgtaaaaaacccagctgaaga

SEQ ID NO: 641165 - DNA, 51 bp, Homo sapiens
caggaacgctccgtctggaacggcgcagtgccctctggtggtcagaagatg

SEQ ID NO: 641166 - DNA, 83 bp, Homo sapiens
cctgaagaagcctcctgcctccaaatgcccccatcgctatacaaaaggttgaaaggaggagcaggaggtactgatggacaagg

SEQ ID NO: 641167 - DNA, 75 bp, Homo sapiens
cagcaagaaggcggcgggggaagatggcggtcctggggaccctgatgcttggtgtgacctgagtaaatttgacct

SEQ ID NO: 641168 - DNA, 51 bp, Homo sapiens
gaagttgccgcgcaaggtgctgcagcactagagacggggtttcaccatgtt

SEQ ID NO: 641169 - DNA, 80 bp, Homo sapiens
taaacagaaagagactgcccggttgcagggtgagaagccctaccactgcaactgggacggctgcggctggaagtttgcgc

SEQ ID NO: 641170 - DNA, 101 bp, Homo sapiens
aaattcctcggagctttcgtcacctgtccttctacattttcgatagagacgttttccggagggattccatcataggccggtctaattgaagccaacggaga

SEQ ID NO: 641171 - DNA, 50 bp, Homo sapiens
tgtaatgtttcttccagaaaagaaaggtcattcaagacacagatatgcac

SEQ ID NO: 641172 - DNA, 100 bp, Homo sapiens
tgcgcgcctgctggaggacctgatggacgagctgctggaagcccggtcctggctggcgggccgacggtcgcaaggtcctacggtcaagcatccgggagtt

SEQ ID NO: 641173 - DNA, 90 bp, Homo sapiens
gaggactggtgatctacgtgtgctttttcaagggagctgataaagaacttcttcccaaaatggcgcttctctgaagtagctttggaaagt

SEQ ID NO: 641174 - DNA, 83 bp, Homo sapiens
actgctcagcaaggtgttgtgaatttcccatatgatgatgaagaaaaaatgctgggcatcttggtgcagcacaaagtccggag

SEQ ID NO: 641175 - DNA, 127 bp, Homo sapiens
aaataccaggctaccatggtctacaagactctcttcgctctttgcatcttaactgcaggtgaaaggtgtagcagtcactcggcctacacccacagcatcgaccttgtgaacccagcgacctgactgc

SEQ ID NO: 641176 - DNA, 82 bp, Homo sapiens
tgggagagacgctgaatgaagaagagggaaggacggttagtcagatgccatggacaatattaccaggcagaaccaattctac

SEQ ID NO: 641177 - DNA, 100 bp, Homo sapiens
gggactgcacgtagcccggcgctcggcatggctctcctggtgctcggtttttagaacttcagccataaaaatgggcagaattttccttgatcatatcggt

SEQ ID NO: 641178 - DNA, 100 bp, Homo sapiens
gatgcgggacttcagtcctagtggcattttcggagcgtttcaaagagctttaacatacctcgtgccaaaagagagctggctcagctgaacaaatgcacct

SEQ ID NO: 641179 - DNA, 76 bp, Homo sapiens
cgactcctggagatagactccgtaggtgtttccccccgggccggcctgccgtgacgatcacagccctgccgtctca

SEQ ID NO: 641180 - DNA, 74 bp, Homo sapiens
caaaaggtgtcatcccaatgaatgccaagtcacggtctagatcacattctcgatccagaggaaggcgatactct

SEQ ID NO: 641181 - DNA, 101 bp, Homo sapiens
tcctgccattctcctgaagaacagaggcacactgtaaaacccaacacttccccttgcattctataaggtgattctggcggccccttgatagttcacaagag

SEQ ID NO: 641182 - DNA, 90 bp, Homo sapiens
agctgtactaggactgggaacgggttatgaagacagtatggagtttccagaccatagtagacatttgctacagtgtctgagcgagcagag

SEQ ID NO: 641183 - DNA, 89 bp, Homo sapiens
ccgctgccgtcgccgccgccaccatgcccaagagaaagggctgaagaagatgcagagcagcctgaagctggtggactgtatcatcgagg

SEQ ID NO: 641184 - DNA, 100 bp, Homo sapiens
ctggaagaacagctgcataatgaaatgcagttaaaagatgaaatggagcagaagtgcaggtttactcctggcttgggggcattaggaagcactggaggct

SEQ ID NO: 641185 - DNA, 82 bp, Homo sapiens
ggcgaagctggccgagcaggctgagcgatacgacggttgtatcagagtaagatggacggtagctttgattgtgattgtggtg

SEQ ID NO: 641186 - DNA, 100 bp, Homo sapiens
aggctggtcttgaactctgggctcaagtgatctgcctgcttcagcttcccaaagttctgggattacagggatacgtttgaaatggtttctgaagatgaag

SEQ ID NO: 641187 - DNA, 87 bp, Homo sapiens
aagactcccgaatacttcagaagtggggaaatggtactccaaagattcaggtttactcacgtcatccagcagagaatggaaagtcaa

SEQ ID NO: 641188 - DNA, 95 bp, Homo sapiens
gtcaacctggggctgaatcttcaacctgtcaaagccttcttaattatgtctgagaaaagagccagaggccaagaagagtaagacggccgcaaaga

SEQ ID NO: 641189 - DNA, 75 bp, Homo sapiens
actacctttttcagaaatgcgcagagcaaacatctttcaaagtgttcaagaaggaagtgtatcttcatacatcac

SEQ ID NO: 641190 - DNA, 74 bp, Homo sapiens
gagtagcaagtggccatggggagcctcagcggtctgcgcctggcagcagttttcggctttgtgagaaaccttac

SEQ ID NO: 641191 - DNA, 82 bp, Homo sapiens
ccaaaatgtcaaatttaggaaattgatgggtattaagaattcatctcctcctgctagcagccgcgtcctggaggagcagcgg

SEQ ID NO: 641192 - DNA, 100 bp, Homo sapiens
gtcacggatcggattcctcagctacgaggaggcgctgaggagaggcatagaatgtcaagctaaccaggcgtccgctacttcagaagagtgtactgtcgca

SEQ ID NO: 641193 - DNA, 51 bp, Homo sapiens
cctggctagccggcgacttgagtgacgacttgctcacttccgacagagaaa

SEQ ID NO: 641194 - DNA, 75 bp, Homo sapiens
gtcggaatcagatttgaaaatgaaagtcgctagtcctgctgatgggcaaagaaggtgtccacggtggtttgatca

SEQ ID NO: 641195 - DNA, 90 bp, Homo sapiens
cgaggaccctgccaagttcaagatgaagtactggggcgtagcctcctttctccagaaaggaaccgtccatcatcagggctcggcctcagc

SEQ ID NO: 641196 - DNA, 100 bp, Homo sapiens
ggacagacaattgttcagttgcaaaaagaaactggagccaccatcaagctgtctaagtccaaagatttttacccaggaagtgggacccatggcagccgag

SEQ ID NO: 641197 - DNA, 82 bp, Homo sapiens
ccaggcagaccttgcagtcaaagaattctcaagaaatttgaggaagaagatttggatgacattttaaggaaaagattgaagg

SEQ ID NO: 641198 - DNA, 98 bp, Homo sapiens
ctcccagagaaaaatcggcagatgttacagctgctcatgaaccacttggcaaagcaagacatctgtatagattctgcttcatccgtgagagagaataa

SEQ ID NO: 641199 - DNA, 100 bp, Homo sapiens
ctgccgcttcagttctcccggtgtggccacgagtcggaactctaagaaggagctgatgtggaggagcagctgagacagttcaagatgacgaccacagtag

SEQ ID NO: 641200 - DNA, 75 bp, Homo sapiens
cttaaaggagtggacattgctagcaatgagctcccaaagccatccaggacaacataacgatgcacggatgaacct

SEQ ID NO: 641201 - DNA, 83 bp, Homo sapiens
ccaacatcaccttctccctcaatgctgacgatgagaacgcgcagcccagcctcgaaatgcagaacgacgccggcgagttcgtg

SEQ ID NO: 641202 - DNA, 75 bp, Homo sapiens
aagttgaagatatcaatggatgtcctagaagtcagtctcagatgattctacaagggggttgctcctctctggatg

SEQ ID NO: 641203 - DNA, 101 bp, Homo sapiens
agagttggaaaagatcaagtaaggttgcaaaagcttctcatttcagagagatgccaggatcctaagtgcctgccaaacttaccaattctaaggaataagtg

SEQ ID NO: 641204 - DNA, 51 bp, Homo sapiens
gaatgattccgcgtctgtaatccagagaacttggaccacgggaaggcctgg

SEQ ID NO: 641205 - DNA, 59 bp, Homo sapiens
agccggatcctcactgctgcgggcagctggagccagagcctgcagggtgggtgtcggga

SEQ ID NO: 641206 - DNA, 97 bp, Homo sapiens
agatgcctgcagcctgccatgggacgtggggtccaccggtacaggtgtcccaggtatccagggcagcccaaatggcagtccccagctcgcggatcct

SEQ ID NO: 641207 - DNA, 98 bp, Homo sapiens
aaatgttgatgtggtacttgaagacacctgtactgttggccatttgtgtaggaccagaaaacatgcagataatgtatccagctatatttgaccagttg

SEQ ID NO: 641208 - DNA, 100 bp, Homo sapiens
gtttctcgtgactgagagccctgccaagtttgcactttataagcgttgtcacagggaagaccaagatgacgaagatgatcctgcagaagctgaaaaggag

SEQ ID NO: 641209 - DNA, 75 bp, Homo sapiens
cagaagctggatttcagtactggaaacttcaatgtgttagctgttaggagaatacttatctctggcgcacatcac

SEQ ID NO: 641210 - DNA, 82 bp, Homo sapiens
tcccatctctgcttggtacctttggaaggcccgaacaagacaggaacgtcctgtgccctggactgtggagctggcattggga

SEQ ID NO: 641211 - DNA, 100 bp, Homo sapiens
ggaggatgatttcatgtgcgatgatgaggaggactacgacctggcatcagcaatgcagaagcacggcagccagggaaggcccccaacttcagtgtcaact

SEQ ID NO: 641212 - DNA, 82 bp, Homo sapiens
cgggaagtgtgaagcggccaatggcacggaggcctgcgtcgggccccactggctctgccagctcttctgcccgccacctggt

SEQ ID NO: 641213 - DNA, 100 bp, Homo sapiens
ttcatggtgatataaaagcagcaaatctacttttgggttacaaaaatccagaccaggtgttggtgaaaatttgactgacccatctgtgataaaagcagaa

SEQ ID NO: 641214 - DNA, 100 bp, Homo sapiens
cgcctcctgatgcgcctaacagggaagaggcacttaagtattcatcgaagagtcaccccagtagcggtgatcacagacatgaaaagatgcgagacgccgg

SEQ ID NO: 641215 - DNA, 100 bp, Homo sapiens
gaccagcagcataagcaggaactgcacaagctcatggcccgtttaagtgctgtggggctgctaactacacagattgggagaaaatcccttccatgtcgaa

SEQ ID NO: 641216 - DNA, 99 bp, Homo sapiens
aatacattaaaaactactcatgtgttcctggcagacatggaaaataatgtactttttcgggatgatatagaatgtcagaaactcattatggaagcaatg

SEQ ID NO: 641217 - DNA, 107 bp, Homo sapiens
gcccagcagaatttgtatagagatgtgatgttggagaactacagaaacctggtctccctagctctgaccacaaagccgagctctctgtcctggctgccctctccctc

SEQ ID NO: 641218 - DNA, 83 bp, Homo sapiens
tgagcctgttggaggaactggcccggaaacaggaggacggcgtgatggtgggcatgggtcagaaggattcctatgtgggcgac

SEQ ID NO: 641219 - DNA, 75 bp, Homo sapiens
cctcttcactttcctcggcaagaaatgtgtgggaaatcctcattgacgattcaatttgttgaaggccaatttgtg

SEQ ID NO: 641220 - DNA, 142 bp, Homo sapiens
agcaaaagcctccgagctctccaaaaagaaagcatctgccctgttgttcagcagtgatgaggaggcctcggcaagacgcgcaggaagaccagcgcgcgggatgcgtcccccacgcccagcacggacgccgagtaccccgcca

SEQ ID NO: 641221 - DNA, 101 bp, Homo sapiens
cctgcatggattgggagatactggaaccttttgaagatgctctcaagaaccagcccttggggcccgtgttaagcaaggcagcctccgtggagtgcatcagc

SEQ ID NO: 641222 - DNA, 149 bp, Homo sapiens
ggaggaagaagcgggtgagaaacaaaacttctttccattgtcctgcccgtttctgcggacttgttctgaggccgaggatgtacagttacccagcacgtgtacctcctcctcctcctattgctcgggctgtagtgccctcgaaacgtcag

SEQ ID NO: 641223 - DNA, 100 bp, Homo sapiens
gccttcaggaaaagcatcccggaggaggaagaagaagtgttatatgtcctaaagtaaggtttcagaacccttaggagaaatcttgagagtggacagcaat

SEQ ID NO: 641224 - DNA, 75 bp, Homo sapiens
gccagagcgtggagcgctgcgcggcgcggcggccgggccctcgagacggggacgctggacccacaaaccgtggag

SEQ ID NO: 641225 - DNA, 74 bp, Homo sapiens
gaccaagatcactgataagaaatgttctcgacagcaagccattaagaagcctgtgggaaagacaaaggaggaac

SEQ ID NO: 641226 - DNA, 74 bp, Homo sapiens
gatgatcagactcagaaaattttggaaagagaagatgctcggctgatggggagaaagggatgaggatgttggat

SEQ ID NO: 641227 - DNA, 74 bp, Homo sapiens
ttaatgaatgacgataccctggtgaatgtgttatacgtcacacaacagatatgatgatgcctatagatttgggg

SEQ ID NO: 641228 - DNA, 75 bp, Homo sapiens
ggcacacgttactcagcccctgcgaacctgtatgtgcgaggtactccaaagattcaggtttactcacgtcatcca

SEQ ID NO: 641229 - DNA, 100 bp, Homo sapiens
gcatatctgaagcggctcccagtccctgaaagcattaccgggttcgctaggctcacagtgacacagattctcatgtatccagttctacctcagttcgatt

SEQ ID NO: 641230 - DNA, 78 bp, Homo sapiens
gaacggagagaaatcctcagtgaacttgggaagtgtgttgctggaaaagggccaattcctgtccccccagcagcatgg

SEQ ID NO: 641231 - DNA, 95 bp, Homo sapiens
ctccaccctgggggagctgaaacagaacctgtccaggagctggcatgacgtgcaggtctctagcgctgtcacccgcaactacctagactggctca

SEQ ID NO: 641232 - DNA, 90 bp, Homo sapiens
agctttctgtcctgcgcctcagtgtcagttacctccgggtgaagagcttcttccaagggtgaggtggctttgaccccgggttgcccggcc

SEQ ID NO: 641233 - DNA, 90 bp, Homo sapiens
ccaagatcggccccctgggtctgggagtgcatccgccccaacccttttccccctcgtctcctgtgagaattccccgtcggatacgagcag

SEQ ID NO: 641234 - DNA, 90 bp, Homo sapiens
gcccaggccacagtaccctattcacgctctgtgcttgtgccaagcagtgattccagcagtagttcaagtgatgattctccagctcgatca

SEQ ID NO: 641235 - DNA, 99 bp, Homo sapiens
cggcatgggcggcgctggccgaggaaaggccgagggggacggcaagatgcacatcaccctctgtgacttcatcgtgccctgggacaccctgagcaccac

SEQ ID NO: 641236 - DNA, 90 bp, Homo sapiens
agtcatgagcgacagcggcgagcagaactacggcgagcggagcaaaatatgctgtgaattccatcaagaagaaagtcaacgacaagaacc

SEQ ID NO: 641237 - DNA, 82 bp, Homo sapiens
tagcctcttctgcaagtggggcattcacacagttccagggtcacccccgagaggacaacaggcatctggaagtgctctctcg

SEQ ID NO: 641238 - DNA, 100 bp, Homo sapiens
ggccgcctccttcttcctcatcgtggcagctctgggggcaagattcttgccaagagaattaatgtgcgtattgagcacattaagcactctaagagccgag

SEQ ID NO: 641239 - DNA, 100 bp, Homo sapiens
aggatgtggactgcagtgctgcagtgccagggttctgatgactgtcttgtgaaaatatgggcaacagatgatgggaggttgttagctaccttaagaggac

SEQ ID NO: 641240 - DNA, 100 bp, Homo sapiens
gtttgacagagcagacttaccctgaagtagttagaatggaagatgatccctatgatcttgaagatgtttctgcacagaaatgagggaaatacaaagaacc

SEQ ID NO: 641241 - DNA, 75 bp, Homo sapiens
ctgagcctgcgggactgcaagctgcaggagttgctatagcccaaggtggaacaatccagatttctaacccaggat

SEQ ID NO: 641242 - DNA, 105 bp, Homo sapiens
gccggagctctgatcgccgggaacccttgccgctgctgtcctgcgaccccaagcagatgatatcatcaagttgaatcgaaaggaagggaagaagcagaattttcc

SEQ ID NO: 641243 - DNA, 100 bp, Homo sapiens
ggcactgcggcgccgaggcgcggcggcaggacgggaaccacgcgagctgcagccaggagtcagagtcagaagcaaaggtagatggagagactgcatcgga

SEQ ID NO: 641244 - DNA, 100 bp, Homo sapiens
ctaccttactggacagtcaaatcagactctgacaataaaggtgtgaattctggaagattggtagcttgcataaccactttgttcttattcagcaaaataa

SEQ ID NO: 641245 - DNA, 50 bp, Homo sapiens
aacgcattcgagaccggcccacctttgagagagatgtggataatttgccc

SEQ ID NO: 641246 - DNA, 95 bp, Homo sapiens
catcatgccatctctgctaaactgaacaagcccttcctgtttgacaccaagcctctcattgttcaaaatgcactcggtgatggaaagagagccac

SEQ ID NO: 641247 - DNA, 100 bp, Homo sapiens
ccggaagcgccaggacaatggggacccgggacgacgagtacgactacctattcaaaggagtccatagaggccactgtattctattgaagaacatgtctaa

SEQ ID NO: 641248 - DNA, 98 bp, Homo sapiens
caaggagctgcggcagaagtacaatgtccgctccatgcccatccgcaaggacgacgaggtccagttggctgattgcaattctggcccaactcaaccct

SEQ ID NO: 641249 - DNA, 99 bp, Homo sapiens
aactgtttctcttctgcagaaaaagaggctcttcctcctcctcccgcgacggacaaaaggagttattcttgtcctgtttgtgaaaagtctttttcagag

SEQ ID NO: 641250 - DNA, 75 bp, Homo sapiens
aaattccacctctgagtcctcaactgctgaccccggggtcagagtaatcaagtcagaggattatatgacttttat

SEQ ID NO: 641251 - DNA, 100 bp, Homo sapiens
gcagagctggatcggaggatagttgccctgcgcaagaagaaccaggccttgctccgcaggtaccagatcccagtggtagctattatggccactggtggtg

SEQ ID NO: 641252 - DNA, 98 bp, Homo sapiens
ccagttcatgctgcccacatctcatccaaacagatatacgccagcggttaggaaaaagaccacattctccggaaaaggcttttagtagtaaccccgtc

SEQ ID NO: 641253 - DNA, 75 bp, Homo sapiens
cggcggccttgggggcggccctacgtagcctggcttctggggctaagttctaaaaacatcagttcatctccaagc

SEQ ID NO: 641254 - DNA, 80 bp, Homo sapiens
gtgtccagcttgcagagtccccatcactcctgaaaatccttgcaaagaaattataggtgtaatcctgagagattcacatg

SEQ ID NO: 641255 - DNA, 83 bp, Homo sapiens
gcagatgttacagctgctcatgaaccacttggcaaacaccgaacaagatttgtgatgaaatggagcctggaacaaactctttt

SEQ ID NO: 641256 - DNA, 50 bp, Homo sapiens
cggaggtggagccggcggcagaggtcaaaatgcagatcttcgtgaaaacc

SEQ ID NO: 641257 - DNA, 50 bp, Homo sapiens
gaacatatcactcttgcttattctgagaaaggacctaagtgtgaaatacc

SEQ ID NO: 641258 - DNA, 74 bp, Homo sapiens
ttgcccccacccctcaccacacaccccagatgatgaactacttccttggtatttacttatgggatgtagaaggc

SEQ ID NO: 641259 - DNA, 80 bp, Homo sapiens
tcccggctatgccatcatggcggatggcgtgtcctgtgaagacctcctgccccccgaggtctgcagtctcctgaacccag

SEQ ID NO: 641260 - DNA, 100 bp, Homo sapiens
aggctggtgagtcggcagccctgtggcagccggcgggctggtttccatggttgcacgattaggctgaggttcaactatgctacctggaagcacaaagaga

SEQ ID NO: 641261 - DNA, 100 bp, Homo sapiens
gttcatcgccgtgttatccttgagtaaaggtcggcttcttcaagcggaaccggccacccctggaagaagatgatgaagagggggagtgatggtgcagcct

SEQ ID NO: 641262 - DNA, 142 bp, Homo sapiens
gccgggagaaattgctgaagaactcgcaagctcctacgaaagaaagctcatcgagggtcacctgtctgtgtgcccagtttgaagccgtcctgcagcatggcttgaagaggagtcgaggattggcactcacagcggcagcgat

SEQ ID NO: 641263 - DNA, 75 bp, Homo sapiens
caaaagcctcctacaagagtcctaccaaaagtactggaggcgcaaagaaggcatcagaaggagaaatctggcatc

SEQ ID NO: 641264 - DNA, 100 bp, Homo sapiens
gccgaaacagacagttaaaatctttaatataacagataatgctgcaattaaaccagaactttacagactagcatggcaaagcttctctccgatcttagtg

SEQ ID NO: 641265 - DNA, 75 bp, Homo sapiens
tgtttttgaccagaaaaccgacaaccttcccagaaagtccaagctcgtgctacagcctccgcttggcgtcccgat

SEQ ID NO: 641266 - DNA, 110 bp, Homo sapiens
ctagggatactcactcacctgtatagggactttgataaatgcaggtcctggtgcttgatggtcgaggccatctcctgggccgcctggcggccatcgtggctaaacaggta

SEQ ID NO: 641267 - DNA, 98 bp, Homo sapiens
agaagtgcattgttttggtgactgaacttatgacgtctggaacacttaaaacaatcctcactatggatgggctcattgaggacattaagcatcggcgg

SEQ ID NO: 641268 - DNA, 76 bp, Homo sapiens
atttcgtcaaggagttcggcctcatcgacaccaaggagctggagccactggagacctccgagcagctggtggcgct

SEQ ID NO: 641269 - DNA, 100 bp, Homo sapiens
aagagacaggaggcagtagccaaacacccagagacaaagcatggaggacacaagaatgggaggaaaggcggactctcaggaacttcattcttcacgtggt

SEQ ID NO: 641270 - DNA, 98 bp, Homo sapiens
gtgatccagaagtccagagctgaggactgcctgtttgcaggtatggtgacatggtgccaaaaaccatagcagggaagatttttggttctatctgttcg

SEQ ID NO: 641271 - DNA, 75 bp, Homo sapiens
cagtccggactcatctagcctcggggaagtttaattagcattgacagcacctgtacagagatgggcaattttgac

SEQ ID NO: 641272 - DNA, 100 bp, Homo sapiens
gtgcaacctggaattggaacggagttctgctgatggaacagccagccatgaacaaggtgaggaagaagaaagaggaagcgctgaattatctgaactggag

SEQ ID NO: 641273 - DNA, 98 bp, Homo sapiens
tcaatgtcaagagtgaaaaggtttacactcgccatggggtccccatctcagtcactggcattgcccaggtcattgctagaatcgtggatggaagcaga

SEQ ID NO: 641274 - DNA, 76 bp, Homo sapiens
tagacaccagctccgaaatcaccaccaaggtgtacatcggtgagctcccgcaggacttcctccgcatcacgcccac

SEQ ID NO: 641275 - DNA, 96 bp, Homo sapiens
ctgtgtggatgtcggcgaagccgcgggcgagggtttggatccagctcgagtcaacgtccctgtcattggtggccatgctgggaagaccatcatccc

SEQ ID NO: 641276 - DNA, 100 bp, Homo sapiens
aaaaatgtggccaagacagctaacaaggaccacttggttacagcctataaccatctttttgaaactaaggtgcatttcctgatgcccagcttccttctaa

SEQ ID NO: 641277 - DNA, 82 bp, Homo sapiens
agaagaaagtcaacgacaagaacccacacgtcgccttgtatgccctggagacattcactactttcactgcctaagaatcctg

SEQ ID NO: 641278 - DNA, 100 bp, Homo sapiens
cttggtcaaagaagtgaccaaaaagtcatctacatttcaggatgcctccattgcacacagattccacatcatgagagaaaaacacccagagaaattcaac

SEQ ID NO: 641279 - DNA, 100 bp, Homo sapiens
agatggaggacctgcggcgggagaaggatgctgccgagatgctgggcgccaagatcaaggtgagttcacagaggaagagattgagttcctggaagccagg

SEQ ID NO: 641280 - DNA, 88 bp, Homo sapiens
ggagaggtgaggcaggctcgagtgcacggagcgtcccttccatcaggagagaattaacactgaatcctccggaaggaattgtagcagg

SEQ ID NO: 641281 - DNA, 75 bp, Homo sapiens
cacacctaccaagaagccagtcaagcggccagaaaaactgcttaaggttgaaaagagaaatttaagaaattgctg

SEQ ID NO: 641282 - DNA, 82 bp, Homo sapiens
gtccccgcaccacctcctgctgccttcccgtcgccgctcccgaagcttttccaggtggacgcggatctgtcaacatgggtaa

SEQ ID NO: 641283 - DNA, 73 bp, Homo sapiens
ccctcgcaacctggcagccgccgccgtggaagatcctgtctacctttcatgaccaactacagttttcattgca

SEQ ID NO: 641284 - DNA, 50 bp, Homo sapiens
tgggaaaaaagtttattacccaggtggttatcactaggctaaaactggac

SEQ ID NO: 641285 - DNA, 99 bp, Homo sapiens
ccttgcggaaaggatgttggcggtccctgtgacctgtggagacacggccagatctgccctccagtttttcgttggaatatacgttgcacatttatggcg

SEQ ID NO: 641286 - DNA, 98 bp, Homo sapiens
gagatggtcaggtctggagctcgaccgggccagatacttggtgcttgaaaaactgaagaaggaagacgctgaccgaattcatatattcagttcttttt

SEQ ID NO: 641287 - DNA, 100 bp, Homo sapiens
cgactgtggttgagatcattcttcaagctgtgaaacaaggcttaaaggtggaacagaggctgaagttgttcaagttggcgtctgagaagcatcagcatat

SEQ ID NO: 641288 - DNA, 86 bp, Homo sapiens
ccacgatgccggggatcgacaagctgcccatcgaggagacgctggaggacagcccgcaggttttaaaatcaaagatgggaaaatcg

SEQ ID NO: 641289 - DNA, 80 bp, Homo sapiens
ccagcggtttctcggaaagtagcctcttctgcaagtggggcattcacacagtgtgtgatccagtcttgggtgacaagtgg

SEQ ID NO: 641290 - DNA, 75 bp, Homo sapiens
tccatatcataagtggaattttggagatattcaaaggcttctgggaacttggcagacgcagcttagagagactca

SEQ ID NO: 641291 - DNA, 136 bp, Homo sapiens
ctgtgagcggaccgcgagcgctgggcgggtccgcggcgcggtcggtcggcgcctgttctcgggctgtttggcggatcacccggaagttcaggctgaattctgaaggcaaacttgagcagacggtctccatggcaac

SEQ ID NO: 641292 - DNA, 75 bp, Homo sapiens
gctcgcgggcggcgggcccgggtagctacagcaagctgggtagcaggcagatccaaaggatatcatgaagtttcc

SEQ ID NO: 641293 - DNA, 90 bp, Homo sapiens
aattacatgatgacctaggagagtttccatatggagtccaaaactacttacctggaagaccttccaccaccccctgagtatgaattggcc

SEQ ID NO: 641294 - DNA, 51 bp, Homo sapiens
tcccacagccgggcgttgggggaaagttgcccctcgccatggcctgcagag

SEQ ID NO: 641295 - DNA, 100 bp, Homo sapiens
aaattcctcggagctttcgtcacctgtccttctacattttcgatagagacgttttccggagggattccatcataggtatcgagaaccttccctgcgaact

SEQ ID NO: 641296 - DNA, 100 bp, Homo sapiens
caaccagggctacatgccttatttaaacaggttcattttggaaaagaatttcgctaaggagtttgtgatcagtgatcggaaggagctggaggaagatttc

SEQ ID NO: 641297 - DNA, 99 bp, Homo sapiens
tgtgatcctagcgctcattttcctcccccaggctttcacggagacgcagaagaaacggctgctatcctggaaacagcaagtgctgaagctcctccggac

SEQ ID NO: 641298 - DNA, 106 bp, Homo sapiens
ccggagcggagctgcagcagcgccgccttttgtgctgcggccgcggagcccccgagggggggccctcagcctcttggccttgaacgggctgttcatcttgattcac

SEQ ID NO: 641299 - DNA, 79 bp, Homo sapiens
ttttacagtctgttccgcatgatcgttataataaggtgaccaagaatatggcccaggtgaccaaagccctggacaaggc

SEQ ID NO: 641300 - DNA, 119 bp, Homo sapiens
ggaagaccgcgcgcagggcctgcagcgggagctggacggcgagcgcgagcggcgcgagaaaaataccctctaccatctgctttggtcagggtgccgctcgaggatttaaaagcaacaag

SEQ ID NO: 641301 - DNA, 100 bp, Homo sapiens
ggagaacatcgccaagcagcaacagctggcagcatcacccccggacagcaagaatcttctgctgactctcaacttttcctggaaaaaatggatcattccc

SEQ ID NO: 641302 - DNA, 100 bp, Homo sapiens
tggagcacaacggggtgctggagtccgaagctgggcaaccccaggctctgttacagccaagttctacttctgaatctatggatcaactactaaacaaaaa

SEQ ID NO: 641303 - DNA, 74 bp, Homo sapiens
gagctggggcgacgaggcgattgcgggggcctgggctagcttagcctgcgacgcttatgattagagccaacaat

SEQ ID NO: 641304 - DNA, 74 bp, Homo sapiens
ccctggggagaagagagaagacgccggccaggcccctgtgcaggatcttacacatttgttccatggcttctcag

SEQ ID NO: 641305 - DNA, 100 bp, Homo sapiens
atgaggccctagagctccgggacaatgataagactcgctatatggggaaggggcaagaggattatgacagattacgaccgctgagttatccacaaacaga

SEQ ID NO: 641306 - DNA, 75 bp, Homo sapiens
tatactttggttacctatgtacctgttaccactttcaaaaaaaggatcaagaagacttccttttctaccaccaca

SEQ ID NO: 641307 - DNA, 96 bp, Homo sapiens
caacctggtccagtgtgagaccctagaagagctaaagttgcagacaagatccagctcatcaataatatgctggacaaagtcaatgagatgattatt

SEQ ID NO: 641308 - DNA, 100 bp, Homo sapiens
ctagtgttttcttatttagccggagtgagaagcaagaaggccctggacacagcaatatctctgggctttcacagtgccggtggtggtgtgcacattgagc

SEQ ID NO: 641309 - DNA, 96 bp, Homo sapiens
ctgacagctgtgtactttgccctcagcatctcccttcatgtctgggtcatgatctctccagcgaacactgaatgagttaaaagagtatcaaaagca

SEQ ID NO: 641310 - DNA, 98 bp, Homo sapiens
cgagatgtctcgctccgtggccttagctgtgctcgcgctactctctctttctggcctggaggctatccagcgagtaaaagtccctcgcaatttccgac

SEQ ID NO: 641311 - DNA, 51 bp, Homo sapiens
caccgtgacttcccggacgctgggaaatggaaatggatcagacaatggctg

SEQ ID NO: 641312 - DNA, 82 bp, Homo sapiens
tttacaagtgcaacacatttggagcatgtgaggcccatgtttaaggtgttactgcggaaatgcaaaacttagtccatcggcg

SEQ ID NO: 641313 - DNA, 100 bp, Homo sapiens
gctcgaggacttcggtcttttgttctgttgcagctgggtttgctgttgctaggggcaaacaatttacattttcttatgaaaatgaagtctgcaaacaaga

SEQ ID NO: 641314 - DNA, 100 bp, Homo sapiens
ggcgagaggccttacaagtgcactgtgtgtggccagtcatttaccaccaatgggaacatgcacagctgttccatttcctccaagtcaccggcttacagca

SEQ ID NO: 641315 - DNA, 75 bp, Homo sapiens
ctctgcgtacgctggttggcatttgctctgagcatcagtcacgggtactccaaagattcaggtttactcacgtca

SEQ ID NO: 641316 - DNA, 73 bp, Homo sapiens
cctaatcccaatgctgaagtaagattgtcttggaaatactaagttggttgccaccttccagagaagaggtacg

SEQ ID NO: 641317 - DNA, 100 bp, Homo sapiens
gggcgatgtcggcgtgcattgcgtgctccagggcctgcagaccccctcctgcaagatccagaagctgaggcgaacctcttcccggccgctctggtgcact

SEQ ID NO: 641318 - DNA, 98 bp, Homo sapiens
tggccatatttgggaagtgttgaaaaaaagcagacaatctgaggatgatgttgacttggggatccaaaggcacaggtccaggtgcaggtacagcagtc

SEQ ID NO: 641319 - DNA, 78 bp, Homo sapiens
agaaatcaatgttagcagatagccagcccatacaagatcgtcctcctgacaaggtgatccgggcgggccccgcaggaa

SEQ ID NO: 641320 - DNA, 129 bp, Homo sapiens
cagccgtcaacagcctggtcaatttgtacctgcaggcctcctacacctacctctctctgggactgttgacatttagggatgtggccatagaattctctctggaggagtggcaacacctggacattgcac

SEQ ID NO: 641321 - DNA, 75 bp, Homo sapiens
ggagccccttcacagccaagatcacaggtgatctgtgaaaatggttcgctattcacttgacccggagaaccccac

SEQ ID NO: 641322 - DNA, 51 bp, Homo sapiens
gacgcagagaagtttccgggactggctcttcttccggaggcattaccccgt

SEQ ID NO: 641323 - DNA, 100 bp, Homo sapiens
agacgcgagcggtgcgtgtgccgcgggtgcgctgccggtgacagtttgcctgagaatacagatcaacccacagaacaaagcggatttccaaggcatctcc

SEQ ID NO: 641324 - DNA, 115 bp, Homo sapiens
gcggctgaagtgtcacagcctgtttctggatttgcagatgtctttggtggacttgggaaagaggttgctagaagcagcaagaaaaggccaagatgatgaagtgagaacgttgatg

SEQ ID NO: 641325 - DNA, 100 bp, Homo sapiens
gttgccaggagagctgcgccggcgagaagcggccgagccagcagcaggtatggcatgaattgccttattcagtttgaagattttgccaatgtgaatgcat

SEQ ID NO: 641326 - DNA, 100 bp, Homo sapiens
aggccatgtcaggagacggagccacggagcaggaggaggaagccaagaatctggtgagcgaagccatcgcagctggcatcttcaacgacctgggctccgg

SEQ ID NO: 641327 - DNA, 100 bp, Homo sapiens
tttgtggcggaggtgaggccgagcatttaccctcccattccaggagaggagagctctctgaggtgggcaggaaagaaatttgaggagatcccaattgcac

SEQ ID NO: 641328 - DNA, 74 bp, Homo sapiens
aagctttggggctcttcctctaatcaggagaaagctgtagagacggggtttcaccgtgttagccaggatggtct

SEQ ID NO: 641329 - DNA, 98 bp, Homo sapiens
cccgttccgccggagctgaggaccagattgagattttagagaaaacaactactatctatgaggaagataaacgcaatttgcaacaggaacttgaaact

SEQ ID NO: 641330 - DNA, 100 bp, Homo sapiens
agagacaggatggtggacagaatgaatcttttaagagatatgaagaagaattagagatcaatgacttcccacagaaaatgatgcatcctgttgccagcag

SEQ ID NO: 641331 - DNA, 83 bp, Homo sapiens
gtcaactttactgagaattttccacctcctgacacaacaccactcagactttttttatgaagacatggagtccttgacgcaga

SEQ ID NO: 641332 - DNA, 100 bp, Homo sapiens
gataagaagcacctggatgagacatttgctacagcatcccacattaagtcaacggaagaagcattgcatgcatttattcagccagagattctggatggcc

SEQ ID NO: 641333 - DNA, 83 bp, Homo sapiens
cccattggaaggggactcttctctagagctgcttacatttgataatgaggaagctcaagcttttgtgaatagcacaatggaag

SEQ ID NO: 641334 - DNA, 100 bp, Homo sapiens
ggtcgcgccggtctccgcggaaatgttgtccaaagttcttccagtcctcctaggcatcttattgatcctccagtcgaggagccaagccgccatggcctac

SEQ ID NO: 641335 - DNA, 76 bp, Homo sapiens
tggaaacaatggcatttacagaaagagtcaacagcagtggcaacagggacaaaagtggctctcaatccagcacatg

SEQ ID NO: 641336 - DNA, 101 bp, Homo sapiens
agacacatgatccgcaagaacaagtaccgccccgacctgcgcatgaattcagaggtgtctgtgtttgaagtcaacattcgatttattggaggcctacttgc

SEQ ID NO: 641337 - DNA, 75 bp, Homo sapiens
gagttaaatgccctcaagtcgacaggggatgggaccctagaatgccgggacattctgcttcctgtcatcaccaaa

SEQ ID NO: 641338 - DNA, 101 bp, Homo sapiens
tcccagctctctctgggcatctggaaagagctcttcagtatccccatcagccagtttccgaggtgctgagaagcacagaaactccgcagactactcctcag

SEQ ID NO: 641339 - DNA, 75 bp, Homo sapiens
tataacatgcagatcgacttggtggaagcacacacaccacaccccactctggccggagcacgccaagcagctccc

SEQ ID NO: 641340 - DNA, 97 bp, Homo sapiens
gccccccgagtacctgaccagccccctgtctcagcagtcccagctccccctgcccaccaggacccaccgttggctgccatccagttggtacccaagc

SEQ ID NO: 641341 - DNA, 101 bp, Homo sapiens
caatgtggtccggaaacaggcagagaacctaaaggcagacccagaagagctttttacaaaactagagaaaattgggaagggctcctttggagaggtgttca

SEQ ID NO: 641342 - DNA, 100 bp, Homo sapiens
gtccgaggctcgcgggcggcgggcccggatacagatgtggtgtataaaagcgagaatggacatgtcattaaactgaatatagaaacaaatgctaccacat

SEQ ID NO: 641343 - DNA, 80 bp, Homo sapiens
ccgtgccctggggctgagccctcagtctcacagaaagttctccgctcccagacatgggtccctcggcttcctgcctcgga

SEQ ID NO: 641344 - DNA, 98 bp, Homo sapiens
cccaaaagatgactacaaacataggatgttttggcgagagatgtattcagtggaggaagctggcctgtgatacttgggctgtgatcctctagagccag

SEQ ID NO: 641345 - DNA, 90 bp, Homo sapiens
ttaatttcatggtacatgagtggctatcatactggctattatatggatgatgactttgagttcactggcagccacctgacagtaaggaat

SEQ ID NO: 641346 - DNA, 73 bp, Homo sapiens
cagtggtcgcttcttctccttgaatatatcactgatgtccattcgaatgacctgtctacaccacagatccttc

SEQ ID NO: 641347 - DNA, 83 bp, Homo sapiens
ctatattgttacaattttttttcaagaactgccgtcttctttgcctgcactaatgggtggcccagttgaaatccttcccttcc

SEQ ID NO: 641348 - DNA, 98 bp, Homo sapiens
tgagccccatcgtggattccaagacatccctgctgagagagccaagggcatttttggtcgaagagagctgaagtaatgagaagacatcatggaggccc

SEQ ID NO: 641349 - DNA, 75 bp, Homo sapiens
cagagacgggcccagaagactaaaggcaaatcgtacttgcccaatttgccgagctgatgcttcagaagtgcatcg

SEQ ID NO: 641350 - DNA, 50 bp, Homo sapiens
cggcccagaactggcagagagaagctgaaaatactccttgatcaagttga

SEQ ID NO: 641351 - DNA, 97 bp, Homo sapiens
gggagacgagccggccgtcccgggccgggggacccgcccgccatggccaccaagatattctctaagccgctttcatcatgggagaaatagagcagag

SEQ ID NO: 641352 - DNA, 98 bp, Homo sapiens
agacaggagtggagtgatatcagacaccgagcttcagcaagctctctccaacgatatctgtgtgaggctggattttctttgcctactccaaccaaagc

SEQ ID NO: 641353 - DNA, 83 bp, Homo sapiens
cgatgtcctccatcgtgatgaaggcagagagcagagacatcccgatctggggaaacaatgcagatcttcgtgaagactctgac

SEQ ID NO: 641354 - DNA, 100 bp, Homo sapiens
cacaaataatgaaaaagttgttgttaaaattctcaagctcactggacagccagtgctcattggtggcaccatgggaacctgtagttatgttcttactggc

SEQ ID NO: 641355 - DNA, 95 bp, Homo sapiens
tctgcaagaacctcaaccgggaggctcaacactgcactgggtgttcaacagccatcactccttggagcatctcctaccatttatacacagcaaac

SEQ ID NO: 641356 - DNA, 76 bp, Homo sapiens
ctcaggcaccttccaccaaccgccagatcgggtaattattcgaggtggaggacatattttaccctatgaccagcct

SEQ ID NO: 641357 - DNA, 90 bp, Homo sapiens
tgggagcagagtgtgcggctaggctcctgggatcgagggatgcagtacagccacagcatcatcacggacagttttagaagacgacagaaa

SEQ ID NO: 641358 - DNA, 116 bp, Homo sapiens
gcctgagcaagcggccgcgcactgaggaggcggcggccgacggtggcggcgggatgcagccgggtcccaatgataagaagtcagaactgctgccagctgggtggaacaacaataaa

SEQ ID NO: 641359 - DNA, 74 bp, Homo sapiens
gggagatccacagctaagacgccgggactccctggaaacctagaaatggtcctctcagggtgcgccatcattgt

SEQ ID NO: 641360 - DNA, 51 bp, Homo sapiens
gtacacagacgagcatggggaagatctccagcaccctgccggtggcactac

SEQ ID NO: 641361 - DNA, 100 bp, Homo sapiens
tgacagcagacggatatttgtgggccaggataatggagctgtaatgctcaagactgcagtgcagatgacgacaacttccttgtgcccatagcggtgggag

SEQ ID NO: 641362 - DNA, 100 bp, Homo sapiens
cgagggcctgggtggtcacgtggagcagctggtggcccgcagcaacatcatgacattgctgttccagtgcatgcaggtcaagtctggcaccatctttgac

SEQ ID NO: 641363 - DNA, 87 bp, Homo sapiens
gccctccagccttctgccgctcgccctctgcctgctggctgcacccgcctccgcgctcgtcaggttagctttatacgtctacgaata

SEQ ID NO: 641364 - DNA, 100 bp, Homo sapiens
ggggtccccaacgtgggcaagtcctccctcatcaactccctccggaggcagcacctcaggaaagcctctactcttcatggatcttttggatgaaagaaca

SEQ ID NO: 641365 - DNA, 51 bp, Homo sapiens
cggaacaccctggaagccgagaaatgccatccgggtgacctgcataggttc

SEQ ID NO: 641366 - DNA, 80 bp, Homo sapiens
accctggagcctcagttggaagcagccgatccagcctgcggagcctgtggggcagtcaaggagaagctgcgccttgatcc

SEQ ID NO: 641367 - DNA, 80 bp, Homo sapiens
ctacacgtatcctcctgcctagcgcagtgttttccaagcagtgaagcacttgccgtgttgaactgaatgcactactggag

SEQ ID NO: 641368 - DNA, 100 bp, Homo sapiens
gtaggggggacgcggcggcggcgttgacaatgttcttctcaccactaaatccaatacgagttcatattgatattggagctgatggcagagccacaggaga

SEQ ID NO: 641369 - DNA, 133 bp, Homo sapiens
gtttcaacctgcgcattgggaggccgaagggtccccgggacccgcctgctgagtggacccgggtagagacaagagagacacctccaacttcgacaaagagttcaccagacagcctgtggaactgacccccact

SEQ ID NO: 641370 - DNA, 90 bp, Homo sapiens
ctcctcccccgtcctccgttagctaattaaaacatttttcagggacgtagccatccagagggttgatttgggaagcagagcacagcagcc

SEQ ID NO: 641371 - DNA, 100 bp, Homo sapiens
tccttccgagaaatggagaatcagccccataagaaatacgaactcacgggtacaacacagaccagttctctccctatgctgccccctccccacaaggttc

SEQ ID NO: 641372 - DNA, 89 bp, Homo sapiens
cggaccggagactttggggcctaactagggttccattaacttcaaatgatgatgaagatgaagataaagagaaaatgcagtgtgacaac

SEQ ID NO: 641373 - DNA, 75 bp, Homo sapiens
ggtgtacgggagtttcttggtaaatccagaatcaggccgagttcccataattggggttggtggtgtgagcagcgg

SEQ ID NO: 641374 - DNA, 100 bp, Homo sapiens
tagtttccgatccattcgagagcatcagaagcatacacaagctgagggagaatgtctttcaagagcatcagacccttaaggagaaggaacttgaaacagg

SEQ ID NO: 641375 - DNA, 100 bp, Homo sapiens
gatttccaaggaagaatttcctctgaagcaccggtcaaaatgcagatcttcgtgaaaacccttaccggcaagaccatcacccttgaggtggagcccagtg

SEQ ID NO: 641376 - DNA, 97 bp, Homo sapiens
ctaaagcctcctcagccttctgagtcagcctgaaaggaacaggccgaactgctgtatgggctctataagaccatcatcatgtggaaactgaccaggg

SEQ ID NO: 641377 - DNA, 100 bp, Homo sapiens
gacaaaagaccgtttgtgttttgtgatggaatatgttaatgggggcgagatgtccagaaggcttcttgggggaatattgtcaacatcgagacccctgtga

SEQ ID NO: 641378 - DNA, 75 bp, Homo sapiens
ttcttggaaaaccagatccagaaactggaggagtcccgctcgaagctagaagcagtaccaccctgttgtacatcc

SEQ ID NO: 641379 - DNA, 95 bp, Homo sapiens
gagcccgggcggcgctcgtacttctggccactgggcgagcgtctggcaggtgtcatcggactggtggccttgtacctggtgttcggttatggagc

SEQ ID NO: 641380 - DNA, 75 bp, Homo sapiens
gtcggcgcctcattcgggtggagctgagccggagacagcctggaattgtctcgccatttaaacgagtattcctaa

SEQ ID NO: 641381 - DNA, 51 bp, Homo sapiens
ctacttagctcagcaattcttacctttctccaacctgtcccagtatttcag

SEQ ID NO: 641382 - DNA, 100 bp, Homo sapiens
tcacaaccacatgattgggattgggccagtcttaaatatctacccatggaataaagagctgtatttgatcaggaactgtggctgcaccatctgtcttcat

SEQ ID NO: 641383 - DNA, 100 bp, Homo sapiens
gtcaacatatcaatggagcaagtcacagtcgtcgatgccagcttcttcttgaaatgtatgttgagtctaaaaaggacagagtcacagtagtcttcagcac

SEQ ID NO: 641384 - DNA, 100 bp, Homo sapiens
gcgatggaataatgcccagcggcccgccaggtcccggaaccacgtgaatgttgagggggcgacacacaagcaggtggtggacctgattcgagcaggcgag

SEQ ID NO: 641385 - DNA, 98 bp, Homo sapiens
cctgacatatctgagggagaagcacaagatcatgcacagaggtgctttactccatgaactgtctaatgacggtgctcataagcagtttgatcactacc

SEQ ID NO: 641386 - DNA, 100 bp, Homo sapiens
aacctcaggaccctcatgactccttatagggtcaccttcgagtcacccctggagctctcagcccaagggcacttcaggcaaccggggcctccagggggag

SEQ ID NO: 641387 - DNA, 101 bp, Homo sapiens
gaaagaacttttgcagagctgtgatgttttggggattccactctccagtgtaatgattattgacaacagtgcaagcatctcttggcagtttacctgagtca

SEQ ID NO: 641388 - DNA, 51 bp, Homo sapiens
cagtataacgttttgtactgtaggtgtgctcctgagaaaattagaagcagg

SEQ ID NO: 641389 - DNA, 83 bp, Homo sapiens
agtgaagaaggcgcatcactcccagctgcgcaaagcttgcgaggtggcgttaggctccagggagttccacgctgtccagttct

SEQ ID NO: 641390 - DNA, 100 bp, Homo sapiens
aaaagacaatgctggcaactgggctctaatctcctaaagatagacagctcaaatgaattgcactatggagatgaccgccatggccacggaggacccccag

SEQ ID NO: 641391 - DNA, 97 bp, Homo sapiens
acctcatcatctaccacctttggtgctttcagaatcatgactctcaatgttgaagaatgggctactgcatggaagctccggaccaaaatttaacagt

SEQ ID NO: 641392 - DNA, 75 bp, Homo sapiens
gagtttgcagccctagtgtttgccggagccatggaatttgctgaaggtctccaccagctcctggccgggttcgag

SEQ ID NO: 641393 - DNA, 100 bp, Homo sapiens
cctcacctctacagcatctatcctcatggatcaactgataagttgccttatgtcaccatgggtttcggtggaccgggtcttaaagaccctgaaagaaaac

SEQ ID NO: 641394 - DNA, 101 bp, Homo sapiens
ggggccactgctgggccctgaggctgcaccaagtggcgaaggagccggctccaagacaatgcagatcttcgtgaagactctgactggtaagaccatcaccc

SEQ ID NO: 641395 - DNA, 86 bp, Homo sapiens
gggcggcggtcgccaggtctcagggccgggggtacccgagtaagactttgaccccgacgcaggcttcagtgattgccgcggatcag

SEQ ID NO: 641396 - DNA, 50 bp, Homo sapiens
accagggagcaggaaagccaaccttagaggagaaaaggagaaaagaggaa

SEQ ID NO: 641397 - DNA, 49 bp, Homo sapiens
aatgaatttgcaaaacttactgtagtggatgacgtagtagatgaaagtg

SEQ ID NO: 641398 - DNA, 100 bp, Homo sapiens
acacagtcatctttgctggcttcagtgcagagtccttggctgggaggatcaatgatgttggcaaacatgaattgactgggcataaagtagctgtgaagat

SEQ ID NO: 641399 - DNA, 100 bp, Homo sapiens
tggccaagacatgcagcaccaaggaccagcaattcaatggaaggaagctgaaggaaaagagttccgtttgagatcagcaaagaaagcttctgctctttca

SEQ ID NO: 641400 - DNA, 95 bp, Homo sapiens
cgggcggcgagcagaggagctaacaggtcaccctcgagtcctggctgattcttttcctggcagttccccttatgagggttacaactatggctcct

SEQ ID NO: 641401 - DNA, 100 bp, Homo sapiens
ccaccccaagagcttggcccttcccattgcagcttccagacaacaggttggatggcaagcatgtggtgtttggcaaagtgaaagaaggcatgaatattgt

SEQ ID NO: 641402 - DNA, 100 bp, Homo sapiens
aaaaaaggagcttgccttctgagctttgtaccaaagacctgggaaaactcaaagcattcagcaaaccagggttccaaggtgaatgtatagattttacaga

SEQ ID NO: 641403 - DNA, 100 bp, Homo sapiens
ctcaggatatgacaggggtaacacccttccagatgatttttgagaaatcatattccatgcccatcagcattgaatttcagcggagatatgcaacaattgt

SEQ ID NO: 641404 - DNA, 51 bp, Homo sapiens
gtcctgctgtcccccaggagaaccaagatgataagaccatcatcatgtgga

SEQ ID NO: 641405 - DNA, 75 bp, Homo sapiens
tctgcagcaccctccgcttcctctcctaggcgacgagacccagtggctagggagaggaggtgggcaggaggaacg

SEQ ID NO: 641406 - DNA, 140 bp, Homo sapiens
gaggacgcgaggagccatgaggcgccagcctgcgaaggtggcggcgctgctgctcgggctgctcttggaggtcaaaatgcagatcttcgtgaaaacccttaccggcaagaccatcacccttgaggtggagcccagtgaca

SEQ ID NO: 641407 - DNA, 100 bp, Homo sapiens
gatgacatatttttggacctgaaacagaaattctggaacacctatatggcgtcctgcctctgcggctctgccccctgcatcctgtgcagctgctgccccg

SEQ ID NO: 641408 - DNA, 78 bp, Homo sapiens
acatctgaaagccgggaaatggatggatagaatgacagaagatgctcttcgcttgaatctgttgaagcggagcttgga

SEQ ID NO: 641409 - DNA, 100 bp, Homo sapiens
ctaaaccgaagtgaccatgggatcttccactctcggaccagtctccagaaactgagcaccaagctcctgttcgacacagtggagaccatgggaaaagact

SEQ ID NO: 641410 - DNA, 59 bp, Homo sapiens
acgagctgagcttcaaaaggggggacatcctcaaggacccttcaaagttgtacaagaaa

SEQ ID NO: 641411 - DNA, 50 bp, Homo sapiens
ctagagtggttcagccacaaggaggatcttcaccaaggttgtgctggagg

SEQ ID NO: 641412 - DNA, 95 bp, Homo sapiens
gagagaatggctgctgggtacctgccccgctggtcccaggtagctacagcaagctgggtagcaggcagatccaaaggatatcatgaagtttccag

SEQ ID NO: 641413 - DNA, 83 bp, Homo sapiens
agaggtacctctccttttccctctccctttccctaaggtcagcccaaggccaaccccactgtcactctgttcccgccctcctc

SEQ ID NO: 641414 - DNA, 75 bp, Homo sapiens
aggcgatcaaggccaagtatccgccagtcaataggaagtacgagtgtgatgatgaacagtctacacagatggctg

SEQ ID NO: 641415 - DNA, 82 bp, Homo sapiens
gctaacttcagctgatattttgggggaagaaaaaggtgctgactgggttacttttttaaacactaggaatggtaatttctac

SEQ ID NO: 641416 - DNA, 100 bp, Homo sapiens
cacacagtgaggagggagcccaggagtatgtatcgctgttcaagcatcaggttgttcaaggctacaagcccccggggagagccccaggatggactctact

SEQ ID NO: 641417 - DNA, 98 bp, Homo sapiens
ctgtcattctggatgtgggaaccgaaaatgagcaattctgtggtgttcttggtcacacatttatggagtttctgaagggcagtggagattactgccag

SEQ ID NO: 641418 - DNA, 100 bp, Homo sapiens
tcttggagggcgtacaagaacatctataattgcaacaatttctcctgcatctctcaatcttgaggtgaccaagtcagccatcggggtgctctaactgggg

SEQ ID NO: 641419 - DNA, 100 bp, Homo sapiens
gattactctgcaacagctaaaggtgtgatgaatgcagactctgctaccattttggctgtttggatcctcctttgaaaaagtctcctaaacagacaggcta

SEQ ID NO: 641420 - DNA, 90 bp, Homo sapiens
cgctgcccgcgcgcatctggctgcagctctgcggggcgcaggaggcggtgcacagcgccaaggaatttatcatggcatccagcattgacc

SEQ ID NO: 641421 - DNA, 75 bp, Homo sapiens
ctggcagaccttcatcattgacttattattgcactgtccaagcaagctggttggaaggaaaatcatgcaacattc

SEQ ID NO: 641422 - DNA, 101 bp, Homo sapiens
gggagatttccagccttccaagctctactgtgacttcagagacactgccaagcagccttagccctagtgtagagcactattcatggccgaattgatcaagt

SEQ ID NO: 641423 - DNA, 101 bp, Homo sapiens
ggatctttgaattggtggaacttgttggaaatggaacatacgggcaagtttataaggtgccttagctggaccaattattgtggagccacatgtcacagcag

SEQ ID NO: 641424 - DNA, 133 bp, Homo sapiens
cgtgattgcgttacaagctttgtctccttcgacttggagtctttgtccaggacgcggacaaacataaattgcagagattcctgactgctgacatggccctggtggcgacagtctatgcgccaatcacttttcc

SEQ ID NO: 641425 - DNA, 99 bp, Homo sapiens
attgatgaacagatgttcccttgtcgattcattaaaatagttgataaagtccaaggcttgctagttcctatgaaattcccaatccatcacctggccttg

SEQ ID NO: 641426 - DNA, 75 bp, Homo sapiens
tcaagatctcttgttcttccccagtgatgacttttcaggagagcttatggatggagaccaaacatccagatctgg

SEQ ID NO: 641427 - DNA, 83 bp, Homo sapiens
caccgacaccatctggaggaggcgttgccgtgagggatgacccctccggcgaaggtgtcctgccctcggcccgcggcccagcc

SEQ ID NO: 641428 - DNA, 74 bp, Homo sapiens
tctttggatatgtgcatcagtggtttatgccaactctcctacaagcttgtgtgccctgtaaccagtatgtatgg

SEQ ID NO: 641429 - DNA, 82 bp, Homo sapiens
ggattcgtggcgccacaagctcattcactgtgtaggcagccagataagctggtggtggtatggacccgtcggaaccgacgca

SEQ ID NO: 641430 - DNA, 100 bp, Homo sapiens
gtcagcaggagggtttatcccgggacagaccctctccagaaagcaccctcaccgtgaccttcagccagatgaccactgagcagtttacaggagatcatac

SEQ ID NO: 641431 - DNA, 87 bp, Homo sapiens
ggggctcggccgcgcggactgaaggagactgaagttctgcctcctgggggcattgctggcccccatccgagtgcttctggcctttat

SEQ ID NO: 641432 - DNA, 100 bp, Homo sapiens
gtttaaagatatggactccagttatgcaaaaagagatttgtagccaaaccgtgcgccatagccctcaacattcaggccaatggaccacaaattgctccgc

SEQ ID NO: 641433 - DNA, 100 bp, Homo sapiens
tcttgattggcagtggtctgtatgatgaagcaatacggcatttttcaacaatgcttcagaaaggcctaaagaatgtatttgacgaagcaatattggctgc

SEQ ID NO: 641434 - DNA, 86 bp, Homo sapiens
ctgcacctgcgccggctcctgcaaatgcaaagagtgcaaatgcacctcctgcaagaaaagacctgacaggaagcggggccgccaga

SEQ ID NO: 641435 - DNA, 90 bp, Homo sapiens
cctgtctggagcaaggaaaagatccctggaatatgaagagacacagtatggtagccacacccccaggcaagaaacctattggaattcgag

SEQ ID NO: 641436 - DNA, 98 bp, Homo sapiens
agtcgtcaagaggctctgcaccctggatggaaagcagctaaaagatggcggcaaggcagcccaggcaaatgtaagaataggcgatgtggttctcagca

SEQ ID NO: 641437 - DNA, 75 bp, Homo sapiens
cgacgagatggtggaggaggcggtggaagagccttgaaaccagcgaaacaataatcaaagagcagttctgtcaaa

SEQ ID NO: 641438 - DNA, 75 bp, Homo sapiens
aaagaaaggacagagattgaactcagctatgcaaagcaactcagattaaaaggagcccaagccccatctcatcct

SEQ ID NO: 641439 - DNA, 87 bp, Homo sapiens
aactttgaaacaaaaatgggtggagtacagatctctgcagttacaggaacatcgtctgcttcatgaatggcgatcagtccacgaagc

SEQ ID NO: 641440 - DNA, 74 bp, Homo sapiens
cattgacatttaattttagggtcctttatatagaagggagagtaggagaatggtgttgaacgcgtgtgtcctga

SEQ ID NO: 641441 - DNA, 80 bp, Homo sapiens
agcagcagcaggactcagaggcgagagtggccccagccgggccagaagcaggatcgaatcatcaatttagttgttggcag

SEQ ID NO: 641442 - DNA, 96 bp, Homo sapiens
gtctgggaccaagaatacatgctttaccagaaaactctaaaatagagctcaagcttgagaagagagaaccactaaagggcagagcaaagactccag

SEQ ID NO: 641443 - DNA, 75 bp, Homo sapiens
ttgtcctgtgctggggctgacaggagtgagctgagtcgacagaaacttcatacccaagagctgctttctcagctg

SEQ ID NO: 641444 - DNA, 83 bp, Homo sapiens
gtaacgacggcctcagcaggcggggaagatgaaaggttgcagcatgagaaagccgaactagaacagcatcttgaacaagagca

SEQ ID NO: 641445 - DNA, 100 bp, Homo sapiens
ttattccccttaggcctctgagtacacctgaaccccccaactcaagcaaaaccggagatgtttcagtgcctgtgtaatagaagggtctgtattgtaaaag

SEQ ID NO: 641446 - DNA, 82 bp, Homo sapiens
ccgggtcttccagaaggctgtagaccagagtatcgagaagcaaatctctagaagatgacggtgttctttaaaacgcttcgaa

SEQ ID NO: 641447 - DNA, 98 bp, Homo sapiens
ccacaaatacggaaattacttcttccctggcacagaccaaaggtgagaaggtgcggactacagagactcaagtgtttgtggccacaccacagaagaac

SEQ ID NO: 641448 - DNA, 49 bp, Homo sapiens
gaagctgtcggagcttcccaaggaaaattcacgaattgtgagagtaaga

SEQ ID NO: 641449 - DNA, 100 bp, Homo sapiens
agccgttcagctttaccttctttgcagactttggttggtggaggctgtggcaatggaacaggcttgagaaacagcttgtcaaggtggctttggagaaaag

SEQ ID NO: 641450 - DNA, 117 bp, Homo sapiens
gggatcgtgaccgagaccgtgaccgagagcgtgaccgagagcgcgaatatcgtcatcgttagaaggaaactggagcacccatcctaactgatgatgttagcctgcaggtgttcatgg

SEQ ID NO: 641451 - DNA, 82 bp, Homo sapiens
cgccaccatcgcctgtcacctggacccgcgcgtgttcgtggacggcctgtgccgggtgcagaggccaagaccgttttgccca

SEQ ID NO: 641452 - DNA, 75 bp, Homo sapiens
gctgtatgcagttttatccttttctgtacaacatcacttcttctgtttgcagtgcttccagagcagttgtagcgc

SEQ ID NO: 641453 - DNA, 75 bp, Homo sapiens
gccccttgaaggtgaaattttccaaagttttaacaaaaggaaaggcagcaacaggtggaagctgttgagttggag

SEQ ID NO: 641454 - DNA, 75 bp, Homo sapiens
tcagccgtgaagcaagtgcagatagatggccttagatcatcttcagacaccaacgaaagtgaaataaagtcaaat

SEQ ID NO: 641455 - DNA, 90 bp, Homo sapiens
atcctggggacctggtacatgagctccttaataagcatttatagtcagtttttggcagcaatagaatcactaaaggcattctgggatgtt

SEQ ID NO: 641456 - DNA, 74 bp, Homo sapiens
aagaacatcatccagtggcagacactgaaaataaccaggtgactttatacacactttgggagatgcacatattt

SEQ ID NO: 641457 - DNA, 100 bp, Homo sapiens
ccaccaggcttctcctttccccgctggttggtgttcgaggaagagacattgttgttcttggtgtggagaagaagtcagtggccaaactgcaggatgaaag

SEQ ID NO: 641458 - DNA, 75 bp, Homo sapiens
tggggctgggccagaccactcatcctgtcgaatagagcgtttcctgcaggttcctaaaagtaaagctttagaggc

SEQ ID NO: 641459 - DNA, 51 bp, Homo sapiens
tgacttctccaacacgacagcaccatgttgcccatgcatgatgactatgac

SEQ ID NO: 641460 - DNA, 90 bp, Homo sapiens
cttggcgaggcctttcaccaagtccatgggtggcaatgaccatgagatcttcacagaccccagaaccatgggctactccgtgacagcgcc

SEQ ID NO: 641461 - DNA, 74 bp, Homo sapiens
gatattacctaccatttacaaagatttttcaagccacattcaattgataggatgaaaaaatttaagagaaggct

SEQ ID NO: 641462 - DNA, 100 bp, Homo sapiens
gcagaactcctctatgatgaagaagaccttgaaatgcatccgctggtcgctgccggaaatggccaggtacatgtgaagattttttggcagcttagcgtgg

SEQ ID NO: 641463 - DNA, 75 bp, Homo sapiens
gtcttcggtggactccttcggcagtccacccaccgccgccgcctcccaggtggagattctggacgcaaagacaag

SEQ ID NO: 641464 - DNA, 83 bp, Homo sapiens
actctcgaaacctcaacatccagctcaagtggaagagacccccagagaatgtccgacaaagcggctctccagcaagaaggtgg

SEQ ID NO: 641465 - DNA, 87 bp, Homo sapiens
cgtgcgaggtcgccgcggggctggccgccatgcacaagctgcacttcctgcacagacctcccagtgccaagtgtataagcgtgtcca

SEQ ID NO: 641466 - DNA, 100 bp, Homo sapiens
tcggggcctgctgctggccacaaagaactcccacctgcgacacatcgagcacatggagaaacaccatctgattcagatcacaagaagaagaaaaagaaaa

SEQ ID NO: 641467 - DNA, 89 bp, Homo sapiens
ctttcgggccaggtctggcaggacatactttcatgattcctctgagaagtgtgaaggttgggtatctacagccattggttgctgttcag

SEQ ID NO: 641468 - DNA, 83 bp, Homo sapiens
gccgggggcagccgccatcggcagcgccaggaacttgctactaccagcaccatgccctaccaatatccagcactgaccccgga

SEQ ID NO: 641469 - DNA, 75 bp, Homo sapiens
ctttacctcaagaaagtgatccagactactcagcacagaaatgcatcttctgcagacaccgggttaagagggtct

SEQ ID NO: 641470 - DNA, 97 bp, Homo sapiens
cccatgtctactcgcaggcgtcatgttgggaatcggtataaaagaagcctgtattgttttgaatttgaacgtcggttctgcactactgctgaaagat

SEQ ID NO: 641471 - DNA, 83 bp, Homo sapiens
ggaggttcggttgtcgcccgttggccgcgcggcgccgcgctcggcggccgccattgcagaataagttttacatcgaaaccaag

SEQ ID NO: 641472 - DNA, 100 bp, Homo sapiens
ccatgtgccatatgatttatcggaaggttttaggagaagttttagcacaacttctgcttcttcccaaaaggagattaacagaagaaatgctttttccaag

SEQ ID NO: 641473 - DNA, 90 bp, Homo sapiens
ggcccctgtgtatcttctcagattggcttcaactgcagttggtgtagtaaacttcaaaggtaaaatatacccaggaccataaacagatga

SEQ ID NO: 641474 - DNA, 74 bp, Homo sapiens
cggccccgacagcacggaagcagctggataaagaacaggccaggtcagagcagcccaccatgggatggggaggg

SEQ ID NO: 641475 - DNA, 102 bp, Homo sapiens
ggacaagatgaccacactccaggaatgccagtgcatcttttgcacagctatgtggaattagaagaagctattagaagaagtcttgaggaaatgtaattaaag

SEQ ID NO: 641476 - DNA, 78 bp, Homo sapiens
gccagcatcgccagactccgcatcgcaaaggggggcgtcaatgacaatttccaggagatgccgctgaccttccaggat

SEQ ID NO: 641477 - DNA, 82 bp, Homo sapiens
atccgcgagttcctgcgcggctgcggggcttccctgcggctggagacaatgcagatcttcgtgaagactctgactggtaaga

SEQ ID NO: 641478 - DNA, 98 bp, Homo sapiens
gagtttccccagctttcggaggatgtcaggctcgtgcaatccgcttcagacaggatggtaacgaagccgtcggaggattcttctctcagattgggcag

SEQ ID NO: 641479 - DNA, 85 bp, Homo sapiens
ttcacgcagaagttggcaggagcatgggcttcggaggcctatagcccgcagcttggattagaagaacaagaaagactccacctac

SEQ ID NO: 641480 - DNA, 100 bp, Homo sapiens
gaacaagctgacccttttgcggggagaagccgttccagtgtgagtttgagggctgcgaccggcgcttcgccaacagcagcgacaggaagaagcacatgca

SEQ ID NO: 641481 - DNA, 75 bp, Homo sapiens
aacagactgagcgcgtccaggcctgacagctctgcggctcgggccctgaggtctatgttaacaatgaatgggcaa

SEQ ID NO: 641482 - DNA, 97 bp, Homo sapiens
tccttttccctctccctttccctaaggtgagcagaagtggcctatatcgctccccgtcgatgccagagaacttgaacaggccaagactgaagcaggt

SEQ ID NO: 641483 - DNA, 83 bp, Homo sapiens
atttaagagagctctggacaagctggaatgcatccaagagaatccctcaacatgctggatgttgacaatgcgtctctggcacg

SEQ ID NO: 641484 - DNA, 96 bp, Homo sapiens
gcgacagcagccaggagtcatgagcgacagcggcgagcagaactacggcgagcgggaatgaatctgaagtctgctgcagtaaaacacagaaggctt

SEQ ID NO: 641485 - DNA, 82 bp, Homo sapiens
gttgtcccagctcggcccgcgggggagccccgggagccgcacggaatcccagtcagaagttccagcctgccactgttctctg

SEQ ID NO: 641486 - DNA, 100 bp, Homo sapiens
cctcggggacattattgcgcgtggaacggctgcttttggaagccctctgctccttcggctgtgggagtggcatctgcatcgctcccaatgtctgctcctg

SEQ ID NO: 641487 - DNA, 51 bp, Homo sapiens
ttttcataacggtagtaccaacggatgattgtagagttgtcttggcaaaac

SEQ ID NO: 641488 - DNA, 100 bp, Homo sapiens
aatgcctagaccctgcccaacagaatttatatagagatgtgatgttggagaactacagaaacctcgtctccctggtctctagtgatccctgaaaagttcc

SEQ ID NO: 641489 - DNA, 100 bp, Homo sapiens
gcttcgggtccagaccaaacatttccacatcaagtgtttcacctgcaaagatctttaatctcatgaagtacgacagctacagccgcttcttaaagtctga

SEQ ID NO: 641490 - DNA, 97 bp, Homo sapiens
cctgcgccacgccaaggtcgtctgggagatgctcaagtttgaagtggcgctcaggcccgcgatgctcccagcccggtgagacctgcctgaatggcgg

SEQ ID NO: 641491 - DNA, 75 bp, Homo sapiens
gcagccaccgcagctgccatgagagaaggactttcaaaattcaacaagatctatgaatttgattatcatctgtat

SEQ ID NO: 641492 - DNA, 111 bp, Homo sapiens
tccccccgcgcctctcttcgcctcgcctcgggacccgcggtccccgctcttgctggtatggagagtgcaatcacgctgtggcagttcctgttgcagttgctgctggatcag

SEQ ID NO: 641493 - DNA, 82 bp, Homo sapiens
tggaggccgacttcttgtatgcatactccacagcacctggctggtgagattggagagatgaaggatggagtcccagagggag

SEQ ID NO: 641494 - DNA, 83 bp, Homo sapiens
cggggacctgaagaagatgaacaagcgccagttgtaggacagtcccatctggacagcaacattgagaatcaagagattgtcac

SEQ ID NO: 641495 - DNA, 75 bp, Homo sapiens
cgtgatggcatccataccgggttgagaaatacaggtatcaggatgaagatacacctcctcaagagcatatttccc

SEQ ID NO: 641496 - DNA, 82 bp, Homo sapiens
ggaccgagaggaggatgagagcgttattgttgcacacttaagtcaagggtataatgggtctctcccaaatggcgatagagga

SEQ ID NO: 641497 - DNA, 97 bp, Homo sapiens
tgaagaccctgactggtaagaccatcactctcgaagtggagccgccaccaaaatgcagattttcgtgaaaacccttacggggaagaccatcaccctc

SEQ ID NO: 641498 - DNA, 76 bp, Homo sapiens
ctggccgaatcagccttttcacgctcaagtttgtgaagtgtggatatgcaggctctaactttccagaacacatctt

SEQ ID NO: 641499 - DNA, 101 bp, Homo sapiens
tagtggaaagaaaccatgtgctgaaatgtttgacgacactgatggtttgatccagacatttaatgtggatgcaccatgccagaccgtggaagatttaacga

SEQ ID NO: 641500 - DNA, 51 bp, Homo sapiens
tcagctcgatacaatttcacacctgttttgtttggctatgccaccacagtc

SEQ ID NO: 641501 - DNA, 98 bp, Homo sapiens
gtaactggcagaagttttggtgataaagattttcggacaggtttagaaaatggaatcctcctctgcgaattttcagctgaactctcatctctcaacac

SEQ ID NO: 641502 - DNA, 113 bp, Homo sapiens
ccgaaccccttcatgcccaaatcccggaaactccagcgtgtctccagccgtgcgggctgacgcacgaggcacacaggaaggaggtggagcaggtgtatctgcgctgtgcggcg

SEQ ID NO: 641503 - DNA, 51 bp, Homo sapiens
ccctttcgactagcctctgctgaaagctcgacccctttgaatccagtgatc

SEQ ID NO: 641504 - DNA, 100 bp, Homo sapiens
ctcaactctccactggaaaagataaactccttttcgccacagaaactttaccaacagggacgcttatgtcaactgggcagtgaattttgtgaattggaag

SEQ ID NO: 641505 - DNA, 75 bp, Homo sapiens
cattatcacgcccaaccagtttgaggccgagagggtgtgaagacagagaatgaccacatcaacctgaaggtggcc

SEQ ID NO: 641506 - DNA, 74 bp, Homo sapiens
tacaacaggaaaatcatattatagatggagtaaaggtacggttcctggagcagcagaacaagatgctggagacc

SEQ ID NO: 641507 - DNA, 76 bp, Homo sapiens
ccgaccctggccgccccgagcggagcctggagcctcccggcatggtgctcaaggccttcttccccacgtgctgcgt

SEQ ID NO: 641508 - DNA, 83 bp, Homo sapiens
tctctctcatctcgctcggctgcgggaaatcgggctgaagcgactgagtccgcgatggaggatgacgtagctttgccaaagac

SEQ ID NO: 641509 - DNA, 100 bp, Homo sapiens
gcactcggatgccgccgctgtcagatgctgatatgctaactggtgatgagcaagtatggaaggaagttcaagaatccctgaaaaaaattgaagaactgaa

SEQ ID NO: 641510 - DNA, 75 bp, Homo sapiens
tggccagaacacccagcgcttgaacagctccttgatgcttttggacataaatctaatattagccttgtctttgat

SEQ ID NO: 641511 - DNA, 110 bp, Homo sapiens
ggtgtctcgccgcagcctccggagaggaacagaccctcactctctctgtcagaaaaatagctaaagttgcagacaagatccagctcatcaataatatgctggacaaagtc

SEQ ID NO: 641512 - DNA, 100 bp, Homo sapiens
ctgtcgctcttgtgccctagcaccccgagaaccgtcagtttgagccagatgccattcaaactcctccccacgacactctgaagcagcgacggcacagcgg

SEQ ID NO: 641513 - DNA, 100 bp, Homo sapiens
gagaccgtgaccgagagcgtgaccgagagcgcgaatatcgtcatcgttagaagatggcccactgcgtgaccttggttcagctgtccatttcctgtgacca

SEQ ID NO: 641514 - DNA, 82 bp, Homo sapiens
cccaggtgatgcctgaagctcaagggactgtgtccaccctcaggtgaggcggaaccaaccctcctggccatgggaggggccg

SEQ ID NO: 641515 - DNA, 99 bp, Homo sapiens
ctgatgatcccggacctgagcagcccgtacctctccaacggacccctgtctcccggaggagcgcgcaccgaagaagaatttggacttgatgaagaagat

SEQ ID NO: 641516 - DNA, 75 bp, Homo sapiens
acgcggtgggccgcccctccgtgtgctggagaagagaaacgagttggcacacgcacagtgtttgttggcaatcat

SEQ ID NO: 641517 - DNA, 80 bp, Homo sapiens
cagagacagaaatgttgatgtggtacttgaagacacctgtactgttgatcttcttcagcagtatcgttctgctgtgtgca

SEQ ID NO: 641518 - DNA, 100 bp, Homo sapiens
gtccctccggaggcacattgggaaccctgagatcatacctggagctgatgctgatgcagctgttggaaccttggtgtcagcagctgagggggccccagga

SEQ ID NO: 641519 - DNA, 100 bp, Homo sapiens
tacagaacaagacgacctttaagtttcccagagaaaatgagatgctgatgttgaagacgacaccacgagctgaaagaagcccagcgaaggaagaagcagc

SEQ ID NO: 641520 - DNA, 100 bp, Homo sapiens
tccttccttcctccccacccattcctttaaatccggagggggaaaaaatcccaaggtctgcaaagagttgcatgctgagaatttgaaaaatgaagatgat

SEQ ID NO: 641521 - DNA, 83 bp, Homo sapiens
aaagaaaataatgggaaggaagaagtatccaagcgatctagggcagccctgcagaggtacctgttctactgtaatcgctatat

SEQ ID NO: 641522 - DNA, 80 bp, Homo sapiens
tccttcgggacaagattcgcttctatgaggaggagaacgaggagcgcacgatgattgaccccacttccaaggaagacccc

SEQ ID NO: 641523 - DNA, 100 bp, Homo sapiens
ctggaagaactcgtcatgctctttgtagcgtggtgcttctgttgctcacagacaagttggatggcttgaggactggtactaaaaggaaacgtgactggga

SEQ ID NO: 641524 - DNA, 97 bp, Homo sapiens
agcgtttcgtgcccctcggacccggccacgcagtccccaggggcccggcccggggcgcgttgaagctctcaggagaagtgattttgcaaattgccaa

SEQ ID NO: 641525 - DNA, 75 bp, Homo sapiens
tttctcatggatgttcttcttcgagtatttgtagaagggtttgatgaaatcctggaggccagtgatgggatcatg

SEQ ID NO: 641526 - DNA, 100 bp, Homo sapiens
cgctcccaagatgtcgcagacggccatgtccgaaacctacggtttttcgttggaatatacgttgcacatttatggcgattctgagtgtgagggcagactt

SEQ ID NO: 641527 - DNA, 50 bp, Homo sapiens
ccagatggcagccagtcagtggtggaggatatgctgcaggctgctagtca

SEQ ID NO: 641528 - DNA, 83 bp, Homo sapiens
gcgggggctctgcacacatgatcttcctgtccctggagagtctcactgtcgcccaggctgcagtgcagtggtgccatcacgcg

SEQ ID NO: 641529 - DNA, 96 bp, Homo sapiens
ttttcttccagaatctcagcagctgggagcaacctttcccctggatctcacaaaaactcgactccaaatgcaaggagaagcagctcttgctcggtt

SEQ ID NO: 641530 - DNA, 100 bp, Homo sapiens
ttcgaacttagacttccggaaggactttggcgagggtgaatggagtgaggccctttacccgctgctgaccactctcaccgactgcgtggccatgatgagt

SEQ ID NO: 641531 - DNA, 100 bp, Homo sapiens
gctgacatcagcggctctttgtatgatgacgtctcggcgcggaagatggccggcggcgtggacggccccatcgggatcccgttccccgaccacagcagcg

SEQ ID NO: 641532 - DNA, 100 bp, Homo sapiens
tgccactaaagaatgtcttcgctgcccttgttcagcagtgacatctacaggcagctgctctataatgctcccaaatgtgtcagaagaaacagtgtctccc

SEQ ID NO: 641533 - DNA, 50 bp, Homo sapiens
gcgctcttcaagcggatcttggtaaaaatgcatttgcaaagggagaaaat

SEQ ID NO: 641534 - DNA, 90 bp, Homo sapiens
ggacctgctgctggacccggcctgggagaagcagcagcgcaagactggaatcagccattttaccaagaaagttgggtttcttttactggc

SEQ ID NO: 641535 - DNA, 98 bp, Homo sapiens
aggaggctttcctgctggtggcaaccgcctacgagacactcaaggaactagaacagtctttggctagctggactcagaacttgaaagaacttcaaact

SEQ ID NO: 641536 - DNA, 90 bp, Homo sapiens
agagaatgatgaattggcactggagaaagccgacgtggtgatggtgactcagcagagcagtgacggtgaccatgcctgctctgggcccag

SEQ ID NO: 641537 - DNA, 90 bp, Homo sapiens
ccgggagctggtacacagcctcagggcagtgatcacaaccagattcaacgtatgcacaaagcagcggataccatggtagcggccgtcgct

SEQ ID NO: 641538 - DNA, 83 bp, Homo sapiens
ctgggatcccggccaccagcaattgtccggctttccttaaagtttcccatgtctcaatggactcctgaatataacgagctcta

SEQ ID NO: 641539 - DNA, 75 bp, Homo sapiens
tttgggaaggtgcaaggggtgtttttccgtaagcatactcaggttaagaatagacccaccagcatttcgtgggat

SEQ ID NO: 641540 - DNA, 116 bp, Homo sapiens
ctttggaatgctgggagagattctgccttttgatcctgcagtcccgccatggccgctctcacccgggacccccagttccagaagctgcagcaatggtaccgcgagcaccgctccga

SEQ ID NO: 641541 - DNA, 100 bp, Homo sapiens
tggccgcggttcccgagttgctgcagcagcaggaggaggaccgcagcaagcctggtccgacccccagtggcactaacgtgggatcctcagggcgctctcc

SEQ ID NO: 641542 - DNA, 98 bp, Homo sapiens
gaaaaatttcagaaccatcacaaactggttgcactgctgtgatccatcctcatctcctaaagatgcatcctgacttatctccacacttgcacactgaa

SEQ ID NO: 641543 - DNA, 83 bp, Homo sapiens
ggccaagatgtctgacatggaggatgatttcatgtgcgatgatgaggaggactacgacctgcactgccagtgaaagatgtaga

SEQ ID NO: 641544 - DNA, 86 bp, Homo sapiens
tgaagaagtgaagaaattattggtacctgcaattgagaggatccagaatccagatctctggaatagctaccaggcaaagaaaaaaa

SEQ ID NO: 641545 - DNA, 94 bp, Homo sapiens
ctggaccctgagccctgggacctctgaagtgaacactgcagggccatttgccagatctactgcatagagaatgcccacggacagctggtgcggg

SEQ ID NO: 641546 - DNA, 100 bp, Homo sapiens
cctccgaatttgcaaagaggaggaaggagggacttcttggcttctcccagcatagccccaggatttggtgatgttcagagatgtggctgtagacttttct

SEQ ID NO: 641547 - DNA, 75 bp, Homo sapiens
ggaagatcggcagcggctccttcggagacatctatctcgacttcagctacgggacggacgagtacgacggagagg

SEQ ID NO: 641548 - DNA, 75 bp, Homo sapiens
tgcagattatatcgcatcctatggctcaaagaaagatgattatatgctttttcacggatgcctctcatgaatggc

SEQ ID NO: 641549 - DNA, 100 bp, Homo sapiens
agcgacgagggcaatctccgagtactgccactatgttgctgggctggtcggaattggcctttcccgtcttttctcagcctcagagtttgaagacccctta

SEQ ID NO: 641550 - DNA, 100 bp, Homo sapiens
gccacgacccacgagatcatggggcccaagaaaaagcacctggactatactgaccgagctttatcattactggaagaatactgcaaaaaattaaggaaac

SEQ ID NO: 641551 - DNA, 106 bp, Homo sapiens
aaaggagttcgagcagatcgacaagtccgggagctgggcggccatttaccagtgctggctgaagatgcaatcaaggccgccctggctgattacaaattgaaacaag

SEQ ID NO: 641552 - DNA, 50 bp, Homo sapiens
cgcgcggcgtcctcctcccgctcggaagttccagaaacgccgctggactg

SEQ ID NO: 641553 - DNA, 97 bp, Homo sapiens
ctgttttgccggaggagcccctcaggccgtcaaaaaaattccagtcatttattgagagctgcttggtaaagaatcacagccagcgaccagcaacaga

SEQ ID NO: 641554 - DNA, 75 bp, Homo sapiens
ggctcctggaactcttatgtggattataagatattcctccatgcatttgaggagactcatctgacctcccttgac

SEQ ID NO: 641555 - DNA, 100 bp, Homo sapiens
cgagctttgcgggaaagcagcgattgtaaaccatggctgtgtggatacaagctcagcagctccaaggagaagcccttcatcagatgcaagcgttatatgg

SEQ ID NO: 641556 - DNA, 119 bp, Homo sapiens
gccacccgcgtacccggcgcagccagagccaccagcgcagcgctgccatggagcccagcagcaagagtgatcagcagctggactgtgccttggacctaatgaggcgcctgcctccccag

SEQ ID NO: 641557 - DNA, 75 bp, Homo sapiens
caccaagatgaaagcagcagttttcatcatctaagtgaaaggatgtcagctgcaacgagatcacagcgttgcccc

SEQ ID NO: 641558 - DNA, 100 bp, Homo sapiens
agggctggagcctctccagcctcccgcgaagcatcagaggctccttgaaatgctagatacagagaaggaactgttaaaagaaaaaataaaggaagctttg

SEQ ID NO: 641559 - DNA, 83 bp, Homo sapiens
ctacaacaagcacattaacatcagcttccacagagagggagaaattatgcagctgagctttggatatacaaatttctatgcag

SEQ ID NO: 641560 - DNA, 100 bp, Homo sapiens
atcgtgatggtgccgtcgctcatcaagcagcaggtccttaagacacgatgaggcgagtggtacgacagagcaagtttcggcatgtatttgggcaagcggt

SEQ ID NO: 641561 - DNA, 74 bp, Homo sapiens
cggcgtgtttggatgtactttacagtggcaccggatgcccaccacccaggagacagatggcttccaagtaaaac

SEQ ID NO: 641562 - DNA, 80 bp, Homo sapiens
agaaattccccccgaagaagactcccccacatctgggctaactcaggtgagatggagccgctatagtcctgaattcaagg

SEQ ID NO: 641563 - DNA, 100 bp, Homo sapiens
aacagaaggaaattgaaggaacttggagttaatggtctaatttatgatagggggatatgagactttctactcggaatatcctgagtgttgcgtggatgta

SEQ ID NO: 641564 - DNA, 100 bp, Homo sapiens
cggagtcgtccggagccgctgcgcgctggggtatggccgtcaatgtgtactccacatctgtgaccagtgaaaatctgagtcgccatgatatgcttgcatg

SEQ ID NO: 641565 - DNA, 76 bp, Homo sapiens
gcagagcctgtccgtcagtccctaggtatccgcactgctcaggggtttctgctttgggacaaccatacatctaatt

SEQ ID NO: 641566 - DNA, 75 bp, Homo sapiens
tttgcattggttggacaccttttaaaagctaccaccatctgtgacctggacacccagtttcgttgccaggagtct

SEQ ID NO: 641567 - DNA, 100 bp, Homo sapiens
cttgttggatgaattaatgaaccttgacccacaccaagacaccattcgcttttcacccaagatgatttgatgtcttataaaactctgatgaaccatgatg

SEQ ID NO: 641568 - DNA, 100 bp, Homo sapiens
tgttgacagcctagagacatgtcaaaaattagaacctcttcgccaaagccttaatttatctgaaaggatagaccactggaacaatgagaaggagagaatt

SEQ ID NO: 641569 - DNA, 50 bp, Homo sapiens
gccgttttcgcctgcagctgctcaccggctggagtgcagtggcgccatct

SEQ ID NO: 641570 - DNA, 83 bp, Homo sapiens
gctgcccctgacgccgcccgtctccctccccagaggtgccgtgagcgatgtggagatgcaggaacactatgatgagttttttg

SEQ ID NO: 641571 - DNA, 97 bp, Homo sapiens
cgccagttgggatcaaatgtgagcctatggatcaaggtttatggctacaaatgatttgatgacggaactgcagaaagattccatcaagttggatgat

SEQ ID NO: 641572 - DNA, 75 bp, Homo sapiens
ttggaagtatcagagccacaggacatacctgcaggctgggacaatgaaaagaaaatagctattttacatgaaaat

SEQ ID NO: 641573 - DNA, 100 bp, Homo sapiens
ccgaggcggccgccgctgcaccttcaccgcgtacccgggacccgcccgcccgcgggagcggtttccaacctagatgaggaaagccgatggacagtccact

SEQ ID NO: 641574 - DNA, 50 bp, Homo sapiens
cgacttactctctacccttggcagacgaaatctcacaaaactgtccctta

SEQ ID NO: 641575 - DNA, 51 bp, Homo sapiens
cgggtggagtgaaggtcacgtcgccatggaatctgtcttcctgacctgagt

SEQ ID NO: 641576 - DNA, 74 bp, Homo sapiens
accatctcccggctcttacagatgccggtgaggacgcttgagcggaagttagaagcaaaaatgatcaaggagga

SEQ ID NO: 641577 - DNA, 75 bp, Homo sapiens
tggcgtgcaacatggggcttgagaaaggcaatggctgccatccggaagaaactggtgattgttggtgatggagcc

SEQ ID NO: 641578 - DNA, 50 bp, Homo sapiens
caggagcactggatgcaagtcggcaggagcccagtttcctccaattgcag

SEQ ID NO: 641579 - DNA, 75 bp, Homo sapiens
cttggctcgacactgccagctggaaccagaccatcaagaggcggagtccaacctgcgcaaggccaagcagggtta

SEQ ID NO: 641580 - DNA, 100 bp, Homo sapiens
taagtgtcatgcagcaggacgtcactgttggaagaaggcggcgactggcggcgcgatggacctgaccgggctcctgctggacgaagaaggcaccttctcc

SEQ ID NO: 641581 - DNA, 113 bp, Homo sapiens
ctttattccaagtggctcatgatcccgactgtggagatgtggtgcgactagggaactctaatgatccaggacaaagaagttaccctggagtatgtatcaagcctggatttttg

SEQ ID NO: 641582 - DNA, 126 bp, Homo sapiens
ctgagcgtatgtgccacgccgcccaggagacccctctgctgcaccacttcatggtgctggcatcggccccaccattcagattggggaggagacggtgatcactgtggacactaaggcggcaggcaa

SEQ ID NO: 641583 - DNA, 136 bp, Homo sapiens
agcatgagtgaattctggttgtgtttcaactgctgtattgcagaacagcctcagcctatatgaaaaacagtagctccgtatcgaatacattgacaaatggatgtgtcatcaatggacatttggacttcccctccac

SEQ ID NO: 641584 - DNA, 80 bp, Homo sapiens
acctccttatgcaaacggtgaccctcatgttggacatgctttaaataagctctggaggctgccatcgagaacctcaatga

SEQ ID NO: 641585 - DNA, 76 bp, Homo sapiens
gcagaagccggcgtcgtcggatgttgtgttgcccgccaccatgagctacacagagtaaaggtgggattctatccaa

SEQ ID NO: 641586 - DNA, 75 bp, Homo sapiens
cacggcccactccgacgtgtgctccgcccagggggtgcgaggataccccacgtatatcaagttactgtgtatcag

SEQ ID NO: 641587 - DNA, 75 bp, Homo sapiens
ttgcaatccagccaaatacaactggaaaacagctttttgatcagttctgggaggtgatcagtgatgaacatggca

SEQ ID NO: 641588 - DNA, 104 bp, Homo sapiens
ctcgtggccgcctccttcttcctcatcgtggcagctctggggtgcgtcagggaaatcatgcagccatcaggacacaggctccgggacgtcgagcatcatcctct

SEQ ID NO: 641589 - DNA, 83 bp, Homo sapiens
ctgtgacttgcagtcatcatccattaccacaaaattagacctgcctagagctggaacgttacctccagagcgagccctgctat

SEQ ID NO: 641590 - DNA, 86 bp, Homo sapiens
ctcctggcgtggacacacaagcaccccaataacctcaaggtgcgcgcggagccatggttatcatgtcggagttcagcgcggacccc

SEQ ID NO: 641591 - DNA, 74 bp, Homo sapiens
cacagccacaagttacaatgcaacaggatgaagatgagctggattcccacaccatggtgaagactagtgtggag

SEQ ID NO: 641592 - DNA, 75 bp, Homo sapiens
tacgtggagatcaagcgcagcgatggctaccggctctctgaccagttccacgacatcctcattcgaaagtttgac

SEQ ID NO: 641593 - DNA, 50 bp, Homo sapiens
cgggcccatgaccctgcagcgccgagcaaactgcggaaccaggcacagag

SEQ ID NO: 641594 - DNA, 75 bp, Homo sapiens
ttgttggtggactactctcagcctactatctgtctggagaagaggcgcggatcaagaagatcatgcagacggacg

SEQ ID NO: 641595 - DNA, 124 bp, Homo sapiens
aaaatgaatggcaaagcctataataagaaaactctaaggacttctaaaacaaccaccaaatctgcacaagtttcagtgtagctcagaagccatttggagccacgtatgtatggagcagcatcat

SEQ ID NO: 641596 - DNA, 87 bp, Homo sapiens
ccgcggttcctcctcctgtcgctgcccgtgtgattactgagactcagctcatgacactgagaggttcggtcctggaggacgccattc

SEQ ID NO: 641597 - DNA, 83 bp, Homo sapiens
aaggaaggatcttctcatgcacagaggcaacaaatggcaactttctgaacctgcctagagctggaacgttacctccagagcga

SEQ ID NO: 641598 - DNA, 101 bp, Homo sapiens
cgcctgcctgcccaaagcaccgggactggagcacggagacctaccagggctaacaacagaatatccaggtcactatggtgaggaaatggacatgatttcct

SEQ ID NO: 641599 - DNA, 82 bp, Homo sapiens
cagaaaagaggcaaagcaagcgagaagtcgcgggcccagcccacagcaggcaaccatgtccaagggacctgcagttggtatt

SEQ ID NO: 641600 - DNA, 97 bp, Homo sapiens
ggaaaatactacagagtgtgcacactggctatcattgatccagtgtggcaaaggagcagagaactttgacaagttcttcacacgaggacagcccgtc

SEQ ID NO: 641601 - DNA, 74 bp, Homo sapiens
cagggagacacatgtttgtctttcagaattatatccagatcgagagacagaagattctgaaagggttcaatgaa

SEQ ID NO: 641602 - DNA, 98 bp, Homo sapiens
ttcattgtctcggacgtgcggggcctgggcctcccggtccgcaagcagggagagcaacaagccccggccctcagagctcagccggatgagcgcagccc

SEQ ID NO: 641603 - DNA, 75 bp, Homo sapiens
gctcccaagatgtcgcagacggccatgtccgaaacctacgctatcagttgagggatttgcagttgataaaatggc

SEQ ID NO: 641604 - DNA, 51 bp, Homo sapiens
aggacgttggggcggcctggctccctcaggctggagcgcaatggcgtgatc

SEQ ID NO: 641605 - DNA, 106 bp, Homo sapiens
agactttctccttggagaacacttattattggttggcaaccagaggcaatgccacttgctttgcttatggacagacaggtgctggaaagacctacaccatgatagg

SEQ ID NO: 641606 - DNA, 74 bp, Homo sapiens
tgggttttaactacagacccagtctctgccaaatgtatcctccactcctcgctggccaccatcctgctgcccaa

SEQ ID NO: 641607 - DNA, 87 bp, Homo sapiens
agtcttcccgcgtccgccgattcctcctccttggtcgccgcgtccttggctggcgtgtttgtctacagattttgagcgttcgaagtt

SEQ ID NO: 641608 - DNA, 97 bp, Homo sapiens
tgagcctgcagtgtgctgtgagagatctaccactagttgtggaagctgatcgaggaagcctaagcaggctctgtgaagtgggaatagtggtatttga

SEQ ID NO: 641609 - DNA, 50 bp, Homo sapiens
catggcagctgcagaggcccagggagagccgcggcccatggagcccgccg

SEQ ID NO: 641610 - DNA, 115 bp, Homo sapiens
aggaaacgtcggaaactttagagaagttaagagaagaattagctatcaaatccggccagaccagaagggaaagatttcagcattcatcgacttgtcctggggacacacacatcgg

SEQ ID NO: 641611 - DNA, 74 bp, Homo sapiens
tgcggaaccaccagacgccccggacacagcttgggctatggctttgtgaactacgtgaccgcgaaggatgcaga

SEQ ID NO: 641612 - DNA, 100 bp, Homo sapiens
tcacctccgctcccccgatcctattcccagtcgtctccagaacctgggtatcaacccagcaaacattggcttcagtaccctgactatggagtctgacaaa

SEQ ID NO: 641613 - DNA, 95 bp, Homo sapiens
cccctctgaagcctcctcgccgccgtttctgagaaggtgcagcggaactgctgcctgacgctctgcaacttcagcatccccgaggagctggaatt

SEQ ID NO: 641614 - DNA, 82 bp, Homo sapiens
taaagtttgatgacagtgacacagaacagatagctgaagaaggtgacgataatttggctaatattagttgccgctttgacat

SEQ ID NO: 641615 - DNA, 75 bp, Homo sapiens
tggacttgactacacaagttgttggctgcaagagaaatagtgtggttagaaagagaagagcgagccaggcagcac

SEQ ID NO: 641616 - DNA, 75 bp, Homo sapiens
tgcgcatccccgcggacgccacagcgctatgcaagtgctgctggaccaggcgggctgctgtatcgtgggtcagag

SEQ ID NO: 641617 - DNA, 50 bp, Homo sapiens
cagaagacagagggttttcttttgaggccaagttactggaggagatggac

SEQ ID NO: 641618 - DNA, 97 bp, Homo sapiens
cggctctcttatggcgaatgcaacccgaagagagagtgaggctaaagaacgtgccaatggaatggagcttgatgggcgtaggatcagagttgatttc

SEQ ID NO: 641619 - DNA, 100 bp, Homo sapiens
cgcaggctgggctgcaggctctcggctgcagcgctggctggattcactcctgcttgcgaaaagctgacaaaaacaaggacaacaagatgagcttcaagga

SEQ ID NO: 641620 - DNA, 98 bp, Homo sapiens
cgggaggtctacctgatgaacctgagcgggtgccgaagctactggactatgctgatgggccttggacctccagtctcggatactgaagcgagttccac

SEQ ID NO: 641621 - DNA, 100 bp, Homo sapiens
taatttgagacactttgcaaaaaaacttgatcctcgaagagaaggtggtgatcaaaggctcgttcgaccagtcaccatggtgcctagtgttccaggaatc

SEQ ID NO: 641622 - DNA, 75 bp, Homo sapiens
aagaaaaccaacgtctttaatgcaaccttccacatctgcacctgctgctggccccctctgatgtggccggatggg

SEQ ID NO: 641623 - DNA, 82 bp, Homo sapiens
cactttgtaattccagcgagtcgacttcccatcctgagttgatacacgataagaatactccatggaagtctttccttgtcat

SEQ ID NO: 641624 - DNA, 127 bp, Homo sapiens
cacacgccatgctgccctatgaccagtacctgcaccgctttgctgcgtacttccagcagggtgtgaccgagtgttatgagtgtcatcctaagccgacccagagaacctttcctggctgtacaattcg

SEQ ID NO: 641625 - DNA, 99 bp, Homo sapiens
ctcagtatgtctcagaaattttggaaaaagttacatgtgaaagaagatatattccaggtcctaggcctacttacaagcctccagtctcaaattatccag

SEQ ID NO: 641626 - DNA, 74 bp, Homo sapiens
agagacaagctgagcttgccgcacaaaaagctagagagatcctgtttgaccaaactcagagatcaattaaggca

SEQ ID NO: 641627 - DNA, 100 bp, Homo sapiens
gaagtactaggaggaaaggtgctttgtgtgtggagttttccatgaagtgcagtcccaactaaaaggctgcgttaaaggaaccttcagaagtttagtcttt

SEQ ID NO: 641628 - DNA, 75 bp, Homo sapiens
ataattgataacaccctgtaacagctgaggggtcctgatgacaacttaattgaaggtggaggaacaaaatttgtc

SEQ ID NO: 641629 - DNA, 75 bp, Homo sapiens
cagaacgcggctcccagccacaccaagttcagcgaatgacaacagagctgctcaaggcgggaactctgagctaag

SEQ ID NO: 641630 - DNA, 75 bp, Homo sapiens
ggcctgtgaccgactgagccaatcagatgatgaactggattctttccatgatttgaagaaacaggaaacagaaga

SEQ ID NO: 641631 - DNA, 75 bp, Homo sapiens
ttgctgcaggctcttttcctcattcaggccataggaaaaggatacagagtagagtttcatgaacctgaaacttgg

SEQ ID NO: 641632 - DNA, 100 bp, Homo sapiens
cctagaccctgcccaacagaatttatatagagatgtgatgttggagaactacagaaacctcgtctccctggcaacttgagttggtggaaccaagtggctg

SEQ ID NO: 641633 - DNA, 100 bp, Homo sapiens
ctcattgccaaatcctccatcaaaggaactcattatacaatgacaaatggaggcagcattaacagttctacacatttactggatcttttggatgaaccaa

SEQ ID NO: 641634 - DNA, 100 bp, Homo sapiens
ctttcttctggcatcattaacggaccttttaccatgaatagttctactccttctacaggtgtgtatgatcagcttgaacgggtctttttacgacttggcc

SEQ ID NO: 641635 - DNA, 82 bp, Homo sapiens
cccagtcccaatgaggaaccagcagggtgctttcttctgcgacctggtactcatctacctcatcaaaaagagagagttttac

SEQ ID NO: 641636 - DNA, 101 bp, Homo sapiens
ggtccctcgcctcccggccgagctgacggaatggcggcgctagatagtaaggcatcagggaagatgggaatgcgagctgtagtctattatatgactaccac

SEQ ID NO: 641637 - DNA, 50 bp, Homo sapiens
cccggagagtacatccccaccgtttgccgaggtactgtctgaatgccgcc

SEQ ID NO: 641638 - DNA, 100 bp, Homo sapiens
ggtgtatggccgtgggcatctcctacattagcgtctacgaccaccaaggtccaatgatgcatcagcagcctccttctcagcaatacaatatgccacaggg

SEQ ID NO: 641639 - DNA, 101 bp, Homo sapiens
accagtccccagtgagggtgtacaaatacccctttgaattaattatggctgtttgatatacgtttgatgaaagaaggtcgtatgaaaggacaagctttcat

SEQ ID NO: 641640 - DNA, 75 bp, Homo sapiens
atccgggccgccggttgccgggaggtgaaccgaggccctgggctgcatcttgtacctgctgtgcttccggcagca

SEQ ID NO: 641641 - DNA, 83 bp, Homo sapiens
tgcaccgtccgggattttatccaccggcactgccaagatcaggacccagccttgatgcccacttgggaggcagaaagcaccgg

SEQ ID NO: 641642 - DNA, 98 bp, Homo sapiens
caagaggtgaaccacgccgtggagggaagatcccagtgtctgagtgaactaacagtcctgctttcagccaccatttgcacaagacacccagcactgaa

SEQ ID NO: 641643 - DNA, 97 bp, Homo sapiens
aggattccaagtaactcttatttgtattgcggaatgctgcagcactccttactctcttttgggtttggtcttcacggtttcttttgttgccttgggt

SEQ ID NO: 641644 - DNA, 76 bp, Homo sapiens
ctctggcacagcccatcagggagaaagagcagagctaaagttgcagacaagatccagctcatcaataatatgctgg

SEQ ID NO: 641645 - DNA, 50 bp, Homo sapiens
accctaaggaggactcggagataaggaggagcatattatttaatatctag

SEQ ID NO: 641646 - DNA, 83 bp, Homo sapiens
tggtggagaacaagaaagctcagctggtggtgattgcacacgacgtggatcccatcgaggtcctccaccttctgggccccaag

SEQ ID NO: 641647 - DNA, 108 bp, Homo sapiens
gtggacagcaacatttcccacaggacacgaagtttgtcggcccttgccttggcagagctgaggtcacgactgctgaatatgagacgatctgcagcaccaagtcagttg

SEQ ID NO: 641648 - DNA, 83 bp, Homo sapiens
cttagacgctggatttttttcgggtagtggaaaaccagacctgcctagagctggaacgttacctccagagcgagccctgctat

SEQ ID NO: 641649 - DNA, 90 bp, Homo sapiens
actttatgattcagggtggggacttcagtgaaggtccttcagttgagaccaaagaccggtgtcaggggattgcacaaatcactcaccgac

SEQ ID NO: 641650 - DNA, 100 bp, Homo sapiens
aggaaactggcggctgctggtagttccatgctgtctgttcagacttcagcttggtgtgaagagcgattatatgttagagatagctgatcaagtggaccag

SEQ ID NO: 641651 - DNA, 75 bp, Homo sapiens
taccggactacatgtcggaggagaagctgcaggagaaaggctcctcctgctggaccctccagccccgggcctcag

SEQ ID NO: 641652 - DNA, 150 bp, Homo sapiens
ggtcccgtttccctctgtgcggcggccggcgggaccataagggcttaactcatatatttaacccccctccaaaaacttagaccatgctcagcctccaagcagccttgtcatcgacaaagaatctgaagtttacaagatgcttcaggagaa

SEQ ID NO: 641653 - DNA, 50 bp, Homo sapiens
cgtacgtggtggagctctgcgtgtgaattggagaatgatgcagcttttca

SEQ ID NO: 641654 - DNA, 90 bp, Homo sapiens
catcgcccgccccatcctcatcctcaaggagactcggcggctgccctgggccactggctacgcagagcaagtatatcgcgtcaacacagc

SEQ ID NO: 641655 - DNA, 51 bp, Homo sapiens
ggtgcttatatctgtaagcactgcagtttgctaatccagactttacacaac

SEQ ID NO: 641656 - DNA, 75 bp, Homo sapiens
gcggccaggtggaggaggagcgcggaggcgaccgcagatcattctcatcttggctgctgccgacccaaggattat

SEQ ID NO: 641657 - DNA, 75 bp, Homo sapiens
ctcgcgtttccacttcagagatctgtcttctcacaagactttcaggattaagcgattcctggccaagaaacaaaa

SEQ ID NO: 641658 - DNA, 97 bp, Homo sapiens
caaaaatctggtgaaattgccggcaagagggagttaaggacattccaggcagaggcaagtgtgcaggatgacagaattcgagtcgaaaggatggata

SEQ ID NO: 641659 - DNA, 74 bp, Homo sapiens
gtctagtcaaggccgcacaggaacaggagggtctgatgtcctccaggttggtgttcgaggaagagacattgttg

SEQ ID NO: 641660 - DNA, 100 bp, Homo sapiens
ggcggagcgcgagagcttcgagcggactcaggttttccaacctattggtggtatgtctgacagtggatcacaacttggttcaatgggtagcctcaccatg

SEQ ID NO: 641661 - DNA, 100 bp, Homo sapiens
agcctctctgcaaggagcccaatgcccaggagatacttcagaggctggagctcatccagtttccccacattatttccagtggaggacccagcactcagag

SEQ ID NO: 641662 - DNA, 142 bp, Homo sapiens
ccaggccggggggctgtttgcaaactgcgcccattttgtggggctgaatccgcccgggctacgctcctccatcacgtgaatggtagataacgcagatcatctctggaaaggatattgatccgcctcatgtaaagtatgctta

SEQ ID NO: 641663 - DNA, 51 bp, Homo sapiens
ggggacatacttcgcgaccatttatttacaaatgttggagtaataaagaag

SEQ ID NO: 641664 - DNA, 75 bp, Homo sapiens
ggattccaagtaactcttatttgaccctcgtcctttatgcccttggtgtggtacttcaggatcctaatacttggc

SEQ ID NO: 641665 - DNA, 75 bp, Homo sapiens
cctgtcagttatcgggtgtgaccgccgccgcccagctgcatcttcctcccgtgaggctggccgagctccacgctg

SEQ ID NO: 641666 - DNA, 98 bp, Homo sapiens
ttcagcctcagtgatgtccatgaggaagaacagcatgctaacacatctgccaattatgatgtggagctacttcatcacaaagatgcacatgtagattt

SEQ ID NO: 641667 - DNA, 74 bp, Homo sapiens
cccaggccggaccgggccgggcgcccgcaggtactccaaagattcaggtttactcacgtcatccagcagagaat

SEQ ID NO: 641668 - DNA, 100 bp, Homo sapiens
cctgcaggggtaagcccacctcccctacctggagccggaacacagcatcatcccagtaagctccaaccaggaagctattttgccagccacttcattatgg

SEQ ID NO: 641669 - DNA, 100 bp, Homo sapiens
tatatcagagaatgagttaatctcctcagaaatcactaaatactactctgaggggcttagaaattaacaggattcaaccctatgaaaagataaaggccag

SEQ ID NO: 641670 - DNA, 50 bp, Homo sapiens
tttgctggctgtgggggctacaaaaggtgtcctcatgacttctcttgtgg

SEQ ID NO: 641671 - DNA, 100 bp, Homo sapiens
attcgtgtctcttacaattaccaaacagaatggacaagcttaataaaataaccgtccccgccagtcagaagttgagttaaacacagtgggaatatcactt

SEQ ID NO: 641672 - DNA, 83 bp, Homo sapiens
ctgcccagcgtgaccagtggccacctctgcagtgtcttccacaacctggtttcagctgtgagttcaacatggaggcaaatcag

SEQ ID NO: 641673 - DNA, 75 bp, Homo sapiens
cagctggacagaggggtaatagagcaggcaacagctcattaaagggcagtatttaaagtcagttggcaagcagtg

SEQ ID NO: 641674 - DNA, 100 bp, Homo sapiens
atgagtcttctcaacttgaaggtcatttaaccaacctcagctttacaaaccctgaatttataactgagtaagaccatgaattatggcatttcttaaatga

SEQ ID NO: 641675 - DNA, 83 bp, Homo sapiens
tagctgtgctcgcgctactctctctttctggcctggaggctatccagccattcgggttgtggtcacggtggaacaaacagagg

SEQ ID NO: 641676 - DNA, 100 bp, Homo sapiens
ctggggccaagggacaatggtcaccgtctcttcaggtcagcccaaggctgccccctcggtcactctgttcccgccctcctctgaggagcttcaagccaac

SEQ ID NO: 641677 - DNA, 100 bp, Homo sapiens
gcagaatcacgcggacatcgtctcctgtgtggcgatggtcttcctgctggggctcatgtttgagctccgggttgacaaatggtggggtaacagaaaggaa

SEQ ID NO: 641678 - DNA, 83 bp, Homo sapiens
cggcggcagcgctggactaggtggcagctaggacttctctcaaacttgtgtgctgaggagactcagatgttggcctcagctcc

SEQ ID NO: 641679 - DNA, 100 bp, Homo sapiens
ccctcagtacgccacctactattacccccagtatctgcaagccaagatcagctgtttcatgtattagccttgcacatgcggctttatagcattgactctg

SEQ ID NO: 641680 - DNA, 98 bp, Homo sapiens
accttctctgttcatatgaccctgggcttcgatctgacagcagcacagggccctgaacttcggtggcatcggtgtggtcatgggccatgagttgacgc

SEQ ID NO: 641681 - DNA, 100 bp, Homo sapiens
ctttttcccccttgcctggctcctgtggtggcaggctgggcacgaggaccatgctgggccggagcctccgagaagccgttgatgctcactgccatcagct

SEQ ID NO: 641682 - DNA, 88 bp, Homo sapiens
tgtggggccgtgtctcagtccacccaaggtctcctcggatcgcctggagaggcactcggacctgatcatgattgagttctgtccaggg

SEQ ID NO: 641683 - DNA, 51 bp, Homo sapiens
cagaaacgggtcctgctgctcaccaagggtttccaggcctgaggtgcccgc

SEQ ID NO: 641684 - DNA, 100 bp, Homo sapiens
gccgtgcaggcggccgtcagcaacctcgtccggggccaagaccagcttcaagtctccatggtaccagaaaacaacaacctcacagcacctgaacctcaag

SEQ ID NO: 641685 - DNA, 96 bp, Homo sapiens
ccctgctggtcgggcgggaatttgtgagacagtattacacactgctgaaccaggccccagacatgctgcatagacatctgtgcaggttccatcacc

SEQ ID NO: 641686 - DNA, 51 bp, Homo sapiens
ttgctgcgttgtgaggggtgtcagctcaggcaaagcgaaggctggagctag

SEQ ID NO: 641687 - DNA, 101 bp, Homo sapiens
tggggttgtagcatagaagatgtggactacaatggaaaccttccagagccctatgagtttgtctctctggaatggctgcaaaagtggttggatgaatcaac

SEQ ID NO: 641688 - DNA, 100 bp, Homo sapiens
aggaagcacctgactcagatgccgaggtggatggtgtggatgaagaggaggaggacgaagaagggagagaaggtacccaaagggaaaaagggaaaagctg

SEQ ID NO: 641689 - DNA, 75 bp, Homo sapiens
ggagattatagctctgtatgagaaggacaacacctacttagatggaatgaaaccttccaaaaagaggtaatcggc

SEQ ID NO: 641690 - DNA, 100 bp, Homo sapiens
acactctgaactgaaacaagaagggaggagagagcgatggcttttttcacccagaaggccagccccagcggcttccccagcctccggaagtgggaccaca

SEQ ID NO: 641691 - DNA, 75 bp, Homo sapiens
ctgggagcacatccatttcattggcaagctctggtagctgaagaacatctcacagtggacgccagggtctattcc

SEQ ID NO: 641692 - DNA, 121 bp, Homo sapiens
gcccggagttggcgtcccttctccctctccgagtgctgctcctgtcattgtggccatggacgaaattcattgagtttgaagatgctctggaacaagagaagaaagagctgcaaatccaggt

SEQ ID NO: 641693 - DNA, 82 bp, Homo sapiens
gtttggttgaagttggagaagtatccaatagggatattgtagaaactgtctttaacctgtattccctgggcctccgatttgc

SEQ ID NO: 641694 - DNA, 100 bp, Homo sapiens
taggctgggaccataacacaaggtgacagagctgaatgaacctctctccaatgaagatcgaaatctcctctctgtggcctacaagaatgtggttggtgcc

SEQ ID NO: 641695 - DNA, 111 bp, Homo sapiens
atggaattgggagactgactgcctatgaatttgctaaacttaaaagcaagctggttctctgggatataaataagggatctatttgtgatgactatatggcaactctttgct

SEQ ID NO: 641696 - DNA, 75 bp, Homo sapiens
aatcttcaactattccaagtgatacctgggatgaactcctaattggtagtgtagaagtgaaaaaggtaatggcat

SEQ ID NO: 641697 - DNA, 96 bp, Homo sapiens
cccagctctccgtgttccggtgtgagataagccagagaatccagacagctcaccctgctgggcggcaggtgatgctgcactacctgctaccatgga

SEQ ID NO: 641698 - DNA, 100 bp, Homo sapiens
cggcgccgaggcgcggcggcaggacgggaaccacgcgagctgcagccagatagcctgggctggaagctcttctacgtcacaggctgcctgtttgtggctg

SEQ ID NO: 641699 - DNA, 74 bp, Homo sapiens
cggaggcagaggtggaggcgctttgaaaggctccagtgatcattctacatatattgtacaaacactagattttc

SEQ ID NO: 641700 - DNA, 96 bp, Homo sapiens
cggaaatgtgtcatcgaaagccagatgtctttggtggacttgggaaagaggttgctagaagcagcaagaaaaggccaagatgatgaagtgagaacg

SEQ ID NO: 641701 - DNA, 83 bp, Homo sapiens
ctccaccagaggaaaatagtatgggaattcctattatgtacctggagtagaacagaaaaattattatgtctgtgttcccttgg

SEQ ID NO: 641702 - DNA, 90 bp, Homo sapiens
cagcccggacctgctgatggcccgcagcttcggtgacaaggtgaccttgaggaaccctgggagctcaggaaggaaggagcgcccagaagc

SEQ ID NO: 641703 - DNA, 80 bp, Homo sapiens
ccggctttgtgcttctcccgaatcagcttcgtttggttccttgtgaatgagagccacaagtctgaatttatagagctgag

SEQ ID NO: 641704 - DNA, 75 bp, Homo sapiens
gcagccccgacccaagtttgtaaggccatgaatattgtcacttcagtgctgctgctttatgccaaagaggaggaa

SEQ ID NO: 641705 - DNA, 100 bp, Homo sapiens
cattcatacagcaggtttggcatgtcgagttatggatccaacaaagattctgataactggcaaaacaaggttgggataattcttcactattccacccttg

SEQ ID NO: 641706 - DNA, 75 bp, Homo sapiens
agtcacaggagctgtagagaggaccccggtacatctgaaagccgggaaatggaatcagagatcattgatttcttc

SEQ ID NO: 641707 - DNA, 50 bp, Homo sapiens
ctgcccttcaccctctacatggtgaaaggtgtagcagtcactcggcctac

SEQ ID NO: 641708 - DNA, 101 bp, Homo sapiens
ctgcaaggaggccgtcaccttcaaggccgtcagacaagatctgggacatgagcgatgatgagaccatctgagatggccccgctgtggggctgacttctccc

SEQ ID NO: 641709 - DNA, 114 bp, Homo sapiens
ctacatcggaagagtcttcggcatcgggcgacagcaggtcacagtggacgaggtgttggcggaagagcaacaagatatggatttggatatagaatttgatgtacaccttggaat

SEQ ID NO: 641710 - DNA, 50 bp, Homo sapiens
gaggccgaggcgggcagatcacaaggctggagtgcagtggcgtgatctcg

SEQ ID NO: 641711 - DNA, 100 bp, Homo sapiens
gtgcttttaccggtacatttttgatgcggagtgtgcactggagaaacttactaccgatcatgagaaaggacactgtcttcagccttttcttcaagttttt

SEQ ID NO: 641712 - DNA, 100 bp, Homo sapiens
agaccgccccgcaagtactcaggatcgcatatgggtgattttggaagcattcatagacccggaattgttgttgactatcaaaacaaatccaccaatgtga

SEQ ID NO: 641713 - DNA, 75 bp, Homo sapiens
gcggccgtctcccctcgcacaccaggagcacatggatgaagtatgctcctcgcagcttctaacttcagtaaggcg

SEQ ID NO: 641714 - DNA, 90 bp, Homo sapiens
cctgtccctattacgggagccgccttgccatccctgcagcccagacattcactactttcactgcctaagaatcctggaccttctcaaagg

SEQ ID NO: 641715 - DNA, 110 bp, Homo sapiens
ccaatcttttgtagatgtcagcataaaggatttccctcttgaggatgaatttcatcctttcatcgaagcacttctgccccacgtccgagcctttgcctacacatggttca

SEQ ID NO: 641716 - DNA, 82 bp, Homo sapiens
ggagagccacggaggagcaggctgcggcagcacacctaggaatgggtaccacagaccatgtcatcgtcctggcgtccacgaa

SEQ ID NO: 641717 - DNA, 50 bp, Homo sapiens
attcctctgctaagaccgctgcccagagcatgttccagatcccagagttt

SEQ ID NO: 641718 - DNA, 83 bp, Homo sapiens
gtgggtccctccctgctgcgggacagcagctgctgaagtggtgtgcttgggtcgctgtctactgctccttcatcagctttgcc

SEQ ID NO: 641719 - DNA, 101 bp, Homo sapiens
gaaaggagacgtcagaacgtggcttatgagtacctttgtcatttggaagaagcgaagaggtctagtgacggagcccgcgcgcggcgccaccatgcggcaga

SEQ ID NO: 641720 - DNA, 75 bp, Homo sapiens
cgcacgggatccagagcgccgcgcacttcgtcatgttcttcgcgccctgctgtcgcctggttgggcccggaaatg

SEQ ID NO: 641721 - DNA, 75 bp, Homo sapiens
tccatcattgtcaccctggccctcgcggtggctgcctttagtgcttttgaagatgatgatatcacgcacgttgaa

SEQ ID NO: 641722 - DNA, 82 bp, Homo sapiens
gctgcatgtgaacgatgacctcaacaacgtcttccttcgatacgagagcaaaaatattttgattctggggattacaacatgg

SEQ ID NO: 641723 - DNA, 83 bp, Homo sapiens
acgttcggccaagggaccaaggtggaaatcaaacacagcaccttgtattctggcctagatgaagtggccgaggagcagacgca

SEQ ID NO: 641724 - DNA, 75 bp, Homo sapiens
cggagatggtgcagaagatggaggaggctgaccccgcactacatctacccaccagccatcgtgcagcccagcgtg

SEQ ID NO: 641725 - DNA, 83 bp, Homo sapiens
cctttgatcaacccaatctcccataggcactcagtcaaggtatgacccatatagcaaagtcctatccagagaacactatgacc

SEQ ID NO: 641726 - DNA, 96 bp, Homo sapiens
gcagatcaaaagacatccggggtgggaggtctgaagagcccttggaggggagaatataaagaaccaagacatccaccgccaaatcaagccaattac

SEQ ID NO: 641727 - DNA, 100 bp, Homo sapiens
gaacaccgactgagacctcaaaccctggctccagtgtcatggaggacaaccacagctattatgtgtcccgtctctatggccccagcgagccccacagccg

SEQ ID NO: 641728 - DNA, 100 bp, Homo sapiens
tgctccacctctgattccaccaccggggagagtcacaccgggacagctcatgtcctatattcagctcttcaagaacaacctcaaagctctaatgaatcat

SEQ ID NO: 641729 - DNA, 102 bp, Homo sapiens
gggacagccgcccctggtgcacacaccctcgtattctcctgcccttccccagtggtggtcctgctccatgatgtccgtgatgtgagcgtggaggaggagaag

SEQ ID NO: 641730 - DNA, 75 bp, Homo sapiens
caaatccttaaaagagtcttaacgcattccaagaatcaagcactacaaagtgatgagcgtaggacaaaactacac

SEQ ID NO: 641731 - DNA, 100 bp, Homo sapiens
agtctggtttccggaagacatcaagattcgagacgcttatcagatgctgaagaaacaagctttcaagatgttagaaagttcaagccagaagtttcttcag

SEQ ID NO: 641732 - DNA, 90 bp, Homo sapiens
gtccagatagatgagcttgtggcatccattccccaagttcagatccctttcagctccctgcaaaaacagaaccaataaaagaacgagcag

SEQ ID NO: 641733 - DNA, 83 bp, Homo sapiens
ccggaaccagacgatgagacagagttgcgaccgcgcggcaggaactgtggctgcaccatctgtcttcatcttcccgccatctg

SEQ ID NO: 641734 - DNA, 75 bp, Homo sapiens
tcgcaagagaagcaccttcagaatgtaactgcccagcaggggctatctgatgggttagagtgcctttgagaagaa

SEQ ID NO: 641735 - DNA, 90 bp, Homo sapiens
gctacaacatcacattttcatgcatcattttttcaaaatagggatgcaattgtccaattattggtgaaattgtcatttcatgctattggc

SEQ ID NO: 641736 - DNA, 82 bp, Homo sapiens
ccctgagtctttgaggacacagcctcgctggaggcagtttctggtatcatgatattagctggtttgacatcaagtcatttgt

SEQ ID NO: 641737 - DNA, 100 bp, Homo sapiens
ggagagctcgaattccagaatgatgaaattgtgtgtaccaacattcgaccaggagagactggaatggatgtaacaagccgctgcacccttggagacccca

SEQ ID NO: 641738 - DNA, 100 bp, Homo sapiens
gaaggacctggaagagcaagacggccacgacctgggagcagcaggtggctgggagcccgagccccacacctgccgggcagcaggtgctggacgtcgacag

SEQ ID NO: 641739 - DNA, 48 bp, Homo sapiens
cagtagaccctaatgatgaagagatcatgcaacagatgagtgaccacc

SEQ ID NO: 641740 - DNA, 74 bp, Homo sapiens
ctcgcctttgccgatccgccgcccgtccacacccgccgccaggagaatggggtactaagagaaaagcacgaagc

SEQ ID NO: 641741 - DNA, 90 bp, Homo sapiens
ttcgcagtggtcgcttcttctccttgataatccaggcacatggcggcactgttgaccccaccttcacgagtcgatgcacgcaccttctct

SEQ ID NO: 641742 - DNA, 76 bp, Homo sapiens
cttaaatctgtcgtttgaatttaggaccacctcgcactttgatatgcctcatgatattgttgcatctgaagatggg

SEQ ID NO: 641743 - DNA, 74 bp, Homo sapiens
tagctggtgcagaagccattttttaaacttaggtatttaagtactgaaagcaggctatggaactcagtcaactc

SEQ ID NO: 641744 - DNA, 78 bp, Homo sapiens
aggactcctttaaaccgcttgtctgcatttctcctaatgccagctcctcttttgacttggactatgactttcaacggg

SEQ ID NO: 641745 - DNA, 96 bp, Homo sapiens
agttgacatctgacgacgtgaaggagcagatttacaaactggccaagaagggccttactccttcacagatcggatggtgccatgacaatggtgtga

SEQ ID NO: 641746 - DNA, 92 bp, Homo sapiens
accgcggggcccggggctccggcgcgcccggtgacggcggagaggcgccccccgcagcaggattatatctgtccaagatgcgagtctggttt

SEQ ID NO: 641747 - DNA, 90 bp, Homo sapiens
aaaggccccacccctgccattctagaatctctcatcagattctgccatgtaaatgtcagcttgagtggactccagctgagaagaaagaga

SEQ ID NO: 641748 - DNA, 110 bp, Homo sapiens
ttgacgccatgtcgggttattcgagtgaccgagaccgcggccgggaccgagggatgcagcagtctcggccctggctgctctatgcagtgaatattacatgaaggagccgg

SEQ ID NO: 641749 - DNA, 83 bp, Homo sapiens
aaccggcacggcctcgtgcccttcgccttcgtgcgcttcgaggacccccggaggctactcacagtcgaactacaactccccgg

SEQ ID NO: 641750 - DNA, 83 bp, Homo sapiens
ctctgcctctgctcttcaacctgatcaaggcagcggaggaggagaaagagatggacctcccggactcggcctcgagggtcttc

SEQ ID NO: 641751 - DNA, 86 bp, Homo sapiens
gaaaatgcaaactgaaacctgggaaacagtgcagaacggaaagatgctgaaggatgggagaccgttcagagaggaaggcctattcg

SEQ ID NO: 641752 - DNA, 100 bp, Homo sapiens
tgagggctagtggagggccagctgcctgtgggggctggacatcgtcaattcacagaagctgtgagtccttcagtgctacccccttcagctttgccactgg

SEQ ID NO: 641753 - DNA, 90 bp, Homo sapiens
ggaagaggcactgctgagggggcgcgaggggaacggaggccagagctgcgaagataccatcccacgaacacagatagaaagaaggaaaac

SEQ ID NO: 641754 - DNA, 75 bp, Homo sapiens
atggttccatcatggcgtcaatgcagcggggatctgatgagcttctttcttctggcatcattaacggacctttta

SEQ ID NO: 641755 - DNA, 100 bp, Homo sapiens
tttacctctgtagtttcaaattggaaagagccagacttctcagaggtcagtctgttcaacaagtgggaccccagggccttctgtatgttcagcaaagaga

SEQ ID NO: 641756 - DNA, 74 bp, Homo sapiens
tgggtgcagatgcagtgtggctctggatagcaccttatggacagttccaggtattcctgaagcagatcaacagc

SEQ ID NO: 641757 - DNA, 100 bp, Homo sapiens
gcggtaatgctggtggtctgcatcaccaccggatcaacttcgacaaatattaaacacagtgggaatatcacttttgatgagattgtcaacattgctcgac

SEQ ID NO: 641758 - DNA, 83 bp, Homo sapiens
ctcaaagctgctgccgccccttgggctaaaagggtgggctttgacagcgagaatcccggggacgacgggcagatgcacaaggg

SEQ ID NO: 641759 - DNA, 90 bp, Homo sapiens
ctgatcagcatccccaagaaaaccacagacacggccagtgtggactgggaggtgctggtcctagggaagctcaagtgggacctggctgct

SEQ ID NO: 641760 - DNA, 98 bp, Homo sapiens
cgcgaccacagctatgcgaccgaagacttaattcagtgcacaaatgagatgaatgtgaacatcccacagttggcagacagtttatttgaaagaactac

SEQ ID NO: 641761 - DNA, 74 bp, Homo sapiens
ggcaagctggtgattaacaaagacctcgcggaggaagggtcgcggagcctcgccggccgccatgtggagctgca

SEQ ID NO: 641762 - DNA, 83 bp, Homo sapiens
cggacctgtctgggtctcagccgccaaagaccccgtccggtaggtcaaaatgcagatcttcgtgaaaacccttaccggcaaga

SEQ ID NO: 641763 - DNA, 50 bp, Homo sapiens
cctctcctggccccctcagttctcccagctccccgcagccaccgccaccc

SEQ ID NO: 641764 - DNA, 75 bp, Homo sapiens
ccgaagttggaagtgtctcttagcagcgcgcggagaagaacggggagccaggccaggaatagttgctgaacaccc

SEQ ID NO: 641765 - DNA, 100 bp, Homo sapiens
ggtaccttccaccagcgctccacgatgaccgtgccctggcggccaggaaagcgacgcaaagtaacaatccgccattacaaaggtcgtcctccttgatcca

SEQ ID NO: 641766 - DNA, 74 bp, Homo sapiens
gaggtgctgccctgggcactcaggagtgagctgcgaggaaggctaccggctctctgaccagttccacgacatcc

SEQ ID NO: 641767 - DNA, 83 bp, Homo sapiens
caagtcctgcgcttggggatcctctgtacgcccgttcactgagatgagcatcaggattttatggatgagcaaaaacgactaaa

SEQ ID NO: 641768 - DNA, 50 bp, Homo sapiens
ggagcagaggaaccacacgctgatcatgggaatgcagagagcaaccaatg

SEQ ID NO: 641769 - DNA, 100 bp, Homo sapiens
ggagcaaggcgacgaaccttggagagaggagaacgaacatcttctggacctttgtccagcctgagaagccaggccccggcagcaaggaccccaaggccga

SEQ ID NO: 641770 - DNA, 75 bp, Homo sapiens
gaatcagttaagaagatgcgcgaggagaaacagtatctcacctccctaaactggttaatagtggcatggaagatc

SEQ ID NO: 641771 - DNA, 75 bp, Homo sapiens
ggtttaatatctgattgggacaacattcagacccatttccagtcatgacaaagattttttaagttcagccgagat

SEQ ID NO: 641772 - DNA, 78 bp, Homo sapiens
cgggaagtcgacggcgccggcggctcctggatggtccagcagtttggggtggattttgagaagaggatcgagggctca

SEQ ID NO: 641773 - DNA, 126 bp, Homo sapiens
tcgcctggaagaaactaaagcttgacggcttggacgaagatggggagaaggaagcgagactcatacgcaacctcaatggcgcctccggcatggcggcggccgaggggcccggctacctcgtgtctc

SEQ ID NO: 641774 - DNA, 100 bp, Homo sapiens
aggaggacggcgtgatcacggccagcgaggacagaattcagcttagagaactatcaacacaggacaatgcaagcccatgagctgttccggtattttcgaa

SEQ ID NO: 641775 - DNA, 50 bp, Homo sapiens
gtgaaatcagaggagatgtaactatcggtgccctcaccaccaatggcatc

SEQ ID NO: 641776 - DNA, 75 bp, Homo sapiens
gacctgaattggtaataccccctgtacttgaaaggtgtgatcccctgggcccgtttgttgtcgggggagaagact

SEQ ID NO: 641777 - DNA, 98 bp, Homo sapiens
gatgaacctgacaatgctcaaagcgtcctcttcactacaaggaaaatgtactggagcaggtgcttcggtggagttcattagctgaacctggctctgct

SEQ ID NO: 641778 - DNA, 83 bp, Homo sapiens
gcactctgcccttccagagcaagcatggagcaacaggatcagagcatgaaggaagggggaaccctactctggaaactgtcagt

SEQ ID NO: 641779 - DNA, 82 bp, Homo sapiens
tccctgcgcccgtgcgtccgtctgcgacccgaggcctccgctgcgcgctcaacagacagtcagctaaaactgtggaatgtag

SEQ ID NO: 641780 - DNA, 75 bp, Homo sapiens
gtgtttgagaactatgtggcagatatcgaggtggatggaaagcaggtctctagcatcaattcacgctttgccaaa

SEQ ID NO: 641781 - DNA, 100 bp, Homo sapiens
agcaccggcttctttttgaagtgtttgacgaaaaccgattgggccaaaagagaaacattggctactttgacaaccttaaagcggactccaggaatatcac

SEQ ID NO: 641782 - DNA, 97 bp, Homo sapiens
gcgatggctgggcccgcgtggatctctaagtctgcgctcctcagaccaccggcaggtgaacagcctgatgcagaccgaggagtgcccacctatgcta

SEQ ID NO: 641783 - DNA, 92 bp, Homo sapiens
cagcggtctgatgcctggagcaccactgcagccagaaagcgagacaatgcagatcttcgtgaagactctgactggtaagaccatcaccctcg

SEQ ID NO: 641784 - DNA, 75 bp, Homo sapiens
taccaccagtggagtccaggatgaggaaggcccttttgtctacttgtctttagtaggaaacgttgcaaattccga

SEQ ID NO: 641785 - DNA, 75 bp, Homo sapiens
gctgcgcatccccgcggacgccacagcgctactgtgagctgcttgtccccatcctgcggccgtcctggggacaca

SEQ ID NO: 641786 - DNA, 51 bp, Homo sapiens
taaggatgatgaattgtactctacaggtcctttcccataacctgtgcacgg

SEQ ID NO: 641787 - DNA, 96 bp, Homo sapiens
tgacctatgtttggatgacttgtcatgcaatcaaaatgaagttgaagcatcagatgatgataattccgaagaaggcttccacactattcattcagg

SEQ ID NO: 641788 - DNA, 90 bp, Homo sapiens
gtcctgaagcgcagagtcttttacgaatgcttttcaagcgaaatcctgcaaacagattagggctggtgaattaccagatctctgtcaagg

SEQ ID NO: 641789 - DNA, 83 bp, Homo sapiens
ctcccggcagcagcccgacgcaaaccaaggatctggggatcttcgcactatcccaaggtttggtgcacctcgatttggaggaa

SEQ ID NO: 641790 - DNA, 83 bp, Homo sapiens
aatcagaaggcacagattagaggaaggaagaggcatgttatttgaaagcaattgagacgcaaccgaactttgcagtagcttgg

SEQ ID NO: 641791 - DNA, 74 bp, Homo sapiens
ccatattctaccttggtgaataacagcgagtgtgttgcaaacatgaaagacactggccaaaagaagaccctaga

SEQ ID NO: 641792 - DNA, 100 bp, Homo sapiens
atttgtcccggcactggctcttcagtcccttcaaaaagctgtatgtgatggcttctgtgtttgtctgtctactcctttctggattggctgtgtttttcct

SEQ ID NO: 641793 - DNA, 51 bp, Homo sapiens
gtgtggactcggagaaacgcggagggagacgctgttgcggcagctggagac

SEQ ID NO: 641794 - DNA, 100 bp, Homo sapiens
gcgtccgccgattcctcctccttggtcgccgcgtccttggctggcgtcggaagccatcacctggatgcctacgtgggaagggacctcgaatgtgggaccc

SEQ ID NO: 641795 - DNA, 75 bp, Homo sapiens
tgtcagagcccggggacggcgaggccctcatgtaccacacggctgaccggttccctgatgtgttacctgcttctg

SEQ ID NO: 641796 - DNA, 100 bp, Homo sapiens
aagaacgtgagcaagcccaggcacagccgacgccgcggggccatccggctgtccttagagcaagccctgcctcctgagccaaaggaagaaaatgctgagc

SEQ ID NO: 641797 - DNA, 82 bp, Homo sapiens
agcgggcggcttcctggcctgggcgctccggtggcggcggaggagcggaaagaatgtcggagcgggccgcggatgacgtcag

SEQ ID NO: 641798 - DNA, 97 bp, Homo sapiens
ctccgttgggtccggccgctctgcgggactctgaggaaaagctcgcaccaggtttggtgcacctcgatttggaggaagtagggcagggcccttatct

SEQ ID NO: 641799 - DNA, 50 bp, Homo sapiens
caagatcaggaacctgccctgggtgaagtgatgaacctcctgatgttcct

SEQ ID NO: 641800 - DNA, 139 bp, Homo sapiens
atgaaaactgaagatggcaaagtagaaaaacactatctcttctatgacggagaatccgtttcaggaaaggtatgagggtgctggttgatgctcgagagaagcttcatattccctggggagacaactcaaaccaacaaca

SEQ ID NO: 641801 - DNA, 98 bp, Homo sapiens
gataccgtcaagctggccaagcacaaagagcttgctccctacgatgagaactggttctacacgcgagctgagaagttgatgacgcctgagatgttttc

SEQ ID NO: 641802 - DNA, 50 bp, Homo sapiens
tgacaattcaggagacccagctggataagaaggctgactgcacaatcaca

SEQ ID NO: 641803 - DNA, 100 bp, Homo sapiens
cagcagcttcctgtggatatcttgatattgcagatcatgtgtgatacttctaggccttctcctcctctatgatgtattttttgttttcataacaccattc

SEQ ID NO: 641804 - DNA, 100 bp, Homo sapiens
ctctagcctacaggatggcttggccttgcacataaggttcattcatggcattggacgatccggtgatatttctgctgtgcaaccaaaagctgcaggctct

SEQ ID NO: 641805 - DNA, 100 bp, Homo sapiens
attcaggcatcctgtgacgggacagttttctccagaaaatagtgaattcattcttcaagaagagtctcttgtggctcagagcataatttggcaataattg

SEQ ID NO: 641806 - DNA, 96 bp, Homo sapiens
cccgttccctggaggtcctgtggaatgacatcgtggacatcaagccggccaacatggaggaccttacggaggtgatcacagcatctgagttccatc

SEQ ID NO: 641807 - DNA, 76 bp, Homo sapiens
tggtgaatgtcagcagcatgggagacccttcatgtggcctttataaatatgcgtttgagacagagttatatgcaga

SEQ ID NO: 641808 - DNA, 75 bp, Homo sapiens
gtgcaaccttgactgccaggaagagccagattcctgcatcaggaactgtggctgcaccatctgtcttcatcttcc

SEQ ID NO: 641809 - DNA, 75 bp, Homo sapiens
cgaacagagagctgtggacacatccttgtacatactgcccaaggaagacagggacagaatgatgctgctgaaatt

SEQ ID NO: 641810 - DNA, 83 bp, Homo sapiens
actgcaattacaacagcttcaatccgtcgtcatagatggagaagagaaggttcttctgagctatgaaggggcccagatttaag

SEQ ID NO: 641811 - DNA, 103 bp, Homo sapiens
atgaaacgaagccctgaagagaagcaagagatgcttcaaactgaaggcagccagaaactccccaacttttaaatcatttgaagaaaaggtcgaaaacttaaag

SEQ ID NO: 641812 - DNA, 100 bp, Homo sapiens
gtcaacgcgctgctctgtcctctctgggtgggagccacctgtgtgatgatgcctgagttcagccctcagcagactccgtgggaaggaggcttgtttaaac

SEQ ID NO: 641813 - DNA, 50 bp, Homo sapiens
aaatatgtagctcatgtgtcccggtactccgtggaaggcttcatcgacaa

SEQ ID NO: 641814 - DNA, 100 bp, Homo sapiens
gtgaacagaccacagtggaccacttctgggccaaaattgcctggaaaagagcagtgagaggagtccgggagatgtgtgatgcatgtgaagcaacattgtt

SEQ ID NO: 641815 - DNA, 100 bp, Homo sapiens
ggcggggcggcgggccggcgggcggggcgcagagccaggcagcgcagagaccttggccagtgccaaggaggagaacgtcgagattcaccagaccttggac

SEQ ID NO: 641816 - DNA, 122 bp, Homo sapiens
caaggagtccccaaaggagtatctccagcctttcaaggacaaactagaggagttcttccaaaaaggtggagctcatgaaggacttcagcatttgggtccttttggcaacatccccaacatcg

SEQ ID NO: 641817 - DNA, 100 bp, Homo sapiens
gaaaatgtgaggtgctgaagaaaaaagtagggcttctcaaggaggcctgcactgcccaaagtcttggaaacttgctggatatgatgtaccgggagccagc

SEQ ID NO: 641818 - DNA, 75 bp, Homo sapiens
ctgtccagcatgactcatccccgggagtgttgaaacatccagtcatggataaaaatgagctggttcagaaggcca

SEQ ID NO: 641819 - DNA, 100 bp, Homo sapiens
gaccgtgctggtctttctcaacctcatcttctggctctccacacaaggagatgcaagtcaggtgattgggcctcttactgaaggacagagaagaaatgtg

SEQ ID NO: 641820 - DNA, 74 bp, Homo sapiens
ccgtgtctctggattcaagtcccaggagtcctgaccagagagcagtgtccttgaatccgacccctactttgggt

SEQ ID NO: 641821 - DNA, 80 bp, Homo sapiens
ggatttgttaaggattccaagtaactcttatttggtgcctgactgacagaagttcttgcccccggggagctggtgtggac

SEQ ID NO: 641822 - DNA, 75 bp, Homo sapiens
ctggatgatgtccccatccctgtgcccgctgagcacttccatgaagcccagtgtgccatcataatgtttgatgta

SEQ ID NO: 641823 - DNA, 83 bp, Homo sapiens
caaaaaactatggaacaaaacagatccttggagaagttgaagtatcagagaatcttggaacgattagaaaaggagaacaaaga

SEQ ID NO: 641824 - DNA, 100 bp, Homo sapiens
ccagccgctccggcctttcttgtgcttttgatttaatttggggaaactcattttttcccagctctgtgtatgctgatggtagcatatgtttagatatcct

SEQ ID NO: 641825 - DNA, 75 bp, Homo sapiens
ctccctgcctggacccctactattgcaacaagaaaaagcttgtggtgaaggggggcaaaaaaaagaagcaagttc

SEQ ID NO: 641826 - DNA, 82 bp, Homo sapiens
cttgtttgtggatcgctgtgatcgtcacttggtatgctccagaatcactgacagagagcaagttttctgtggcctcagatgt

SEQ ID NO: 641827 - DNA, 100 bp, Homo sapiens
tttgctacaaatggaggaggaggaggacgacgacgatggggatatcggttgctgcttttgctcagaggacatccatgaccctaatggtctttttgttcaa

SEQ ID NO: 641828 - DNA, 83 bp, Homo sapiens
agagtgctgatgtgaaaaataccacgacaaaaccaccctaattgctttattcaccaagtgaaaaacagtctctacaatgctgc

SEQ ID NO: 641829 - DNA, 51 bp, Homo sapiens
tgggctcgagcctgcacatgaagacatatctgaagagatggattaagaatg

SEQ ID NO: 641830 - DNA, 108 bp, Homo sapiens
agggtatggtccagctgtgccgcaccgaggcgagcaggagcagggaacagttttgtaccaatggctagaagcagatcgtcatggcaagagccaaggtgctgcaaatac

SEQ ID NO: 641831 - DNA, 100 bp, Homo sapiens
gggatgctgctgctcctgtttgccacacagatcaccctgggaatcctcatctccactcagcgggcccaggtctcctctgtggtctgcttcctactgtctc

SEQ ID NO: 641832 - DNA, 101 bp, Homo sapiens
ttccaatcttttacaaagcatgggagtgcagctgcctgacaacaccgatcacagaccaacaagatcatggggttgacagcagcattttccagaatcctaaa

SEQ ID NO: 641833 - DNA, 83 bp, Homo sapiens
cgacaagccgctggcagccgcggatctcaccgccgctcagggcgcctgtgtctggcagagctggtgtgagacgagacaatcct

SEQ ID NO: 641834 - DNA, 96 bp, Homo sapiens
tgaagctgcagaaccaacgaggtggccgaatcttccttcaggatatcaaggtggtgttcccactgatgaagagcaggcgactgggttggagaggga

SEQ ID NO: 641835 - DNA, 75 bp, Homo sapiens
cgagagcgcgaatatcgtcatcgttagaagggctagtgccacgaggtttacttgactgttgtgtgaaaagctgat

SEQ ID NO: 641836 - DNA, 137 bp, Homo sapiens
acgttaattaacgtgccaatggattcagaaccaccatctgaaattagcttaaaaaatgatctagaatttggaggttttggttcagttagtggaaaaattgaaatagaaatcaagatcaaccatgaaggagaagtaaa

SEQ ID NO: 641837 - DNA, 50 bp, Homo sapiens
aactccacctacgcagcagacaagggggaatcttgtcgattggcctggct

SEQ ID NO: 641838 - DNA, 98 bp, Homo sapiens
cagggtccggcgagcatcacgccgaggcccattttccagacgaccacgacgaggccggggtcacacccctcgccaacctctgaggaaatgacagactc

SEQ ID NO: 641839 - DNA, 52 bp, Homo sapiens
ccattatttgagatgagttacatcttggagataaactcatcctgaaagtcgc

SEQ ID NO: 641840 - DNA, 100 bp, Homo sapiens
tttcggtatcatcgtttcatgccctggacatggatttgattgacatactttggaggcaagatatagatcttggagtaagtcgagaagtatttgacttcag

SEQ ID NO: 641841 - DNA, 82 bp, Homo sapiens
ccctgtgtgctcatctcgggcctggtgctgctcgcctacttcctgccggcgcaggtaatttctatgcagcccccgacccaga

SEQ ID NO: 641842 - DNA, 75 bp, Homo sapiens
aatgcaagaagactgatggagcaggcttgcaatattaaacttcagtatcagacacagcacagcagccatctgaag

SEQ ID NO: 641843 - DNA, 75 bp, Homo sapiens
atgtggactgcagtgctgcagtgccagccaagccctataccaagtcctgttttggggcgaaagccaaatgctagt

SEQ ID NO: 641844 - DNA, 82 bp, Homo sapiens
aggaaataggatttaaccgctctctgcctcccaggccttcaatcaagcaggggcagggccgtacagtgaacttgtcctttgc

SEQ ID NO: 641845 - DNA, 75 bp, Homo sapiens
ggcaagagcaggagcccggcaccccccgccgacaaggaggggacagaagatgagcctgtcggtcctggagggtat

SEQ ID NO: 641846 - DNA, 98 bp, Homo sapiens
ttcatggatcagttatgcgccattcacttttgaagggaatttctgcccagatagtgtctgcagctgtaaaataccatgaagattttgaaaaaacaaag

SEQ ID NO: 641847 - DNA, 74 bp, Homo sapiens
gacgggatgcggggcctggcggtcttcatctcggatatccgcaactaatcctcactatggatgggctcattgag

SEQ ID NO: 641848 - DNA, 74 bp, Homo sapiens
ctgggcgccgcgccgcacgagcaccagcctagagccagattgcagttgctctacggtgagcccgggcgtgctgg

SEQ ID NO: 641849 - DNA, 82 bp, Homo sapiens
ggtgcgggagagtgagcgagccttcacctacagcatcgtgggcgccggctcccagtttggggagtaccctgacttctaccgg

SEQ ID NO: 641850 - DNA, 90 bp, Homo sapiens
ccaaggaagaaattgatattttgatgaacaatattgaacgctatcttaaggtcctcgaggccacacgggttaatcgaagaaagagcgcac

SEQ ID NO: 641851 - DNA, 100 bp, Homo sapiens
agacctgaagtttctagttgatggaaagtacatttatgcacataaagtccttctcaagattcggtgctggagaatctggtaaaagcaccattgtgaagca

SEQ ID NO: 641852 - DNA, 75 bp, Homo sapiens
cagccatgcaaaggcaggggaggaagccacctcgagattttgaagatgatgatctctacggccagtctgtagagg

SEQ ID NO: 641853 - DNA, 75 bp, Homo sapiens
ctgaagccgccatgcgacctctccatgcagtcagtggaagtggcggcgatcgccagctcgagtgcagattccttg

SEQ ID NO: 641854 - DNA, 96 bp, Homo sapiens
ggatcctctgtacgcccgttcactggtcctggctataagtcaccatggcacagcaagctgccgataagtatctctatgtggataaaaacttcatca

SEQ ID NO: 641855 - DNA, 100 bp, Homo sapiens
gatacaccttttccacagggaattgagttggagtgtggccatctggggccgtgtggtatttgccactcaggagacatgtccctatgacatagcagtggtg

SEQ ID NO: 641856 - DNA, 100 bp, Homo sapiens
agaatctgatattcttaagccaacagttctttatagctccaagctctacagattcttcaaatatattgagaatagggatgttgcaaaaacagtgttaaag

SEQ ID NO: 641857 - DNA, 100 bp, Homo sapiens
tgggctcaacggtgtggaccggcaaacactggtgtcagacaatattgaatggcccaacggaatcaccctgggacatttcatatatatggatttcacagct

SEQ ID NO: 641858 - DNA, 75 bp, Homo sapiens
aagaaagccttgtaaccatcaggtagatacagcaccaacggcaccatcatgtctgattattcagatgcctcgatt

SEQ ID NO: 641859 - DNA, 75 bp, Homo sapiens
aagtcgaaggggaaggcgcctgaagaggacgaaggccaaaaagcaaatggatttccacctgacaaatcttcggga

SEQ ID NO: 641860 - DNA, 50 bp, Homo sapiens
ctagattagaccatgaacgagccaagctggtggaggccattgtcttgcca

SEQ ID NO: 641861 - DNA, 101 bp, Homo sapiens
gatgctggcaccctcacagactataccaaccagctgctccaggcaatgcagcgcgtctatggagcccaggttgcatcataaatacaaaggactgaagttat

SEQ ID NO: 641862 - DNA, 82 bp, Homo sapiens
acctgtgtcctggttgagggtctccagggttctttggggcccgagggaaatcctcattgacgattcaatttgttgaaggcca

SEQ ID NO: 641863 - DNA, 88 bp, Homo sapiens
ttcctgctggtggcaaccgcctacgagacactcaaggagtctccccaggacagtgctatcacccgggatattaaccgaacattcccag

SEQ ID NO: 641864 - DNA, 75 bp, Homo sapiens
gacacagattgaagatgctgtctcctgtggctattatcatggaaaactaatttttcccagagaatttcctttcaa

SEQ ID NO: 641865 - DNA, 98 bp, Homo sapiens
cggactcaggctggggtctgcagtgcagcattaatgggccgctgacatgaatatggagtagttttctctagcaaagaggagagtacaggtcgtgctgc

SEQ ID NO: 641866 - DNA, 75 bp, Homo sapiens
aggggatcccggacgtgagtccgtgcagttggagaagctcatagccaaactgaaaagcggaggagagataaaatg

SEQ ID NO: 641867 - DNA, 98 bp, Homo sapiens
cccggctgcgtgcggtccagcggaaggcccgctttgccaagctcaagatccggggatttctttcacggtttgataatgtccttcccgtcagcctggca

SEQ ID NO: 641868 - DNA, 88 bp, Homo sapiens
tggtcttaccacttatcatctccagtcttgtcacagaggaagaagcccctccagatggtgctgttgccgaatacagaagagaaaagca

SEQ ID NO: 641869 - DNA, 50 bp, Homo sapiens
aaaacaagtccgacagtgagaatgtgtgccatgcggagctgaatgccatc

SEQ ID NO: 641870 - DNA, 90 bp, Homo sapiens
gctcatcatgctgggcctgagctacagaggactggacgtgctggtcccaaaggcgataacatctatgaatggagatcaaccattctaggg

SEQ ID NO: 641871 - DNA, 100 bp, Homo sapiens
cacgctgaagctgaatgaaaaacagtcctgtacggtggccagaattcttcatggtggcatgatccatagacaagattgttggaaacctcctgtactatcg

SEQ ID NO: 641872 - DNA, 75 bp, Homo sapiens
acttctggccactgggcgagcgtctggcagctgatcttgcatctttaatggataaaacatttgagagaaagttgc

SEQ ID NO: 641873 - DNA, 90 bp, Homo sapiens
cgagaggatctggtgtaccaggcgaagctggccgagcaggctgagcgatacgacggaaaaccaattctgtgtcctcggaggaccacagcc

SEQ ID NO: 641874 - DNA, 74 bp, Homo sapiens
cgaggacgctccccagccaggggaacatggcagtgcctgtgagaaactggcgatggaatatgagaggagccctc

SEQ ID NO: 641875 - DNA, 90 bp, Homo sapiens
cttttggaggaggaggatgaatttgatagagagagcatcctggccagaacaagccaaggagccaagacgagagggacacacggacaaaca

SEQ ID NO: 641876 - DNA, 90 bp, Homo sapiens
gcatgctgctggccagggacatgaggagctgcctcacaggtgccgtgagcgatgtggagatgcaggaacactatgatgagttttttgagg

SEQ ID NO: 641877 - DNA, 83 bp, Homo sapiens
ccggggccgctggattctgaggaccagcagatggccagtcacgagaacccagcaggaggccactgtctgcagctcccgtgaag

SEQ ID NO: 641878 - DNA, 50 bp, Homo sapiens
gacctgaggacctgaatccccccaaagaattaccttaacatccacgtgga

SEQ ID NO: 641879 - DNA, 50 bp, Homo sapiens
ctcaaggccatgatcaaaacggcagcgtccctccggtcatggccttccac

SEQ ID NO: 641880 - DNA, 100 bp, Homo sapiens
tttcctaagccatcccctggcggaaccgcccccagattacataccggttacggcacctccttcgtgcaaggtgtgatgcatccccagtgaccaacaacac

SEQ ID NO: 641881 - DNA, 100 bp, Homo sapiens
cgcggaaagcatgctgcttttctggttatattctgggcactaaatgaaggcgtttctaggcaatttgattcgttcagagatggatttgaatcagtcttcc

SEQ ID NO: 641882 - DNA, 74 bp, Homo sapiens
tttggcatctaacctcctgtggataagggctcagaatagcaccattgctgtgagaaagatcagtctaaagaaaa

SEQ ID NO: 641883 - DNA, 95 bp, Homo sapiens
gtgaaggggtcccataagaccctgaagctggtcgtcaaaaggaatacaaacagaagcttgcacgagtaacccaggtccgcaaggaactgaaatcc

SEQ ID NO: 641884 - DNA, 75 bp, Homo sapiens
gggatccgagaaaggaagacttggggatcttcaccaaggttgtgctggaggcgccactcatcacagagagtgccc

SEQ ID NO: 641885 - DNA, 50 bp, Homo sapiens
caaaaagtatactcttcgcatactggtgaagtacatgcgagaagccacgc

SEQ ID NO: 641886 - DNA, 76 bp, Homo sapiens
ggcggagcgccacaaggaggacttggaatttgagaaccctgaaggggaggactgctccggggagtacactccccct

SEQ ID NO: 641887 - DNA, 100 bp, Homo sapiens
cggcgctcagccatcccctgctctacgtgaagctgctcatccagacctgccgggaagagcacaagaagaaacacccggactcttccgtcaatttcgcgga

SEQ ID NO: 641888 - DNA, 100 bp, Homo sapiens
ctttatatatcatgtgtgttcctcactcagatatccttggaacagaagatcttattgtggaagtgacttccaatgatgctgtgagattttatccctggac

SEQ ID NO: 641889 - DNA, 100 bp, Homo sapiens
cgtcattactctggatggcctaaatgaaaatgctgttgtatgcagtgaaagagttgctgaactacaaagaaagattgggactttaaccaggacatctgac

SEQ ID NO: 641890 - DNA, 75 bp, Homo sapiens
aaaaaagtaaaagccagaagacctgtccccagaagttgtaaagaataccgaaatgccttagaggaattgtctaaa

SEQ ID NO: 641891 - DNA, 78 bp, Homo sapiens
cctcccgagtggctgggattacagggccatttctgagcagtggaggtttcaagtaatccactaacaaccagttccaaa

SEQ ID NO: 641892 - DNA, 88 bp, Homo sapiens
agcactttttctgtggaaattgttccaatatgcaagcaggaagaaccggacccggcgaacctggaagtggaccatgatttcttccagg

SEQ ID NO: 641893 - DNA, 75 bp, Homo sapiens
ctggcgagaggaagagggactaggtccaaacgctaggtggctgggtccagatccaagtattttagaacatgctca

SEQ ID NO: 641894 - DNA, 82 bp, Homo sapiens
cacacaccggcctcagcccgcaccggacagaagtggcggttgctgacgcctggaaattcccctgaaggtggagcaccaccca

SEQ ID NO: 641895 - DNA, 51 bp, Homo sapiens
ccaccagttatgccaggcatgccacctgggctaaagaattacctccaaagc

SEQ ID NO: 641896 - DNA, 90 bp, Homo sapiens
caaatcggcccgcggtgcggtgcggagactccatgaggccctggattaacctccatttcagctaatcatgggagagattaaagtctctcc

SEQ ID NO: 641897 - DNA, 75 bp, Homo sapiens
actcctggcagtgcgtcaatcagagcgtcctgtgcgcggggatctgatgagcttctttcttctggcatcattaac

SEQ ID NO: 641898 - DNA, 99 bp, Homo sapiens
gtgaagctcaccgagacggcgatccgggcgctcgagacttaccagagccacaagccctgggcgctgcctatggcacagccaagagcggtaccggcattg

SEQ ID NO: 641899 - DNA, 82 bp, Homo sapiens
ccgccgtctcttcgagttcttcgtgctgctcaagcagcccctgtcaaagggaacaggaagcagtccacggagggtgacgccc

SEQ ID NO: 641900 - DNA, 98 bp, Homo sapiens
ccaccatggcgctcctgctgtgcttcgtgctcctgtgcggagtagtgggtgctggagaatctggtaaaagcaccattgtgaagcagatgaggatcctg

SEQ ID NO: 641901 - DNA, 75 bp, Homo sapiens
atctacaagatgatgcagggaggagagtgcctggtgaagaatgtgatgggatcactagcatgtctgcggagagcg

SEQ ID NO: 641902 - DNA, 51 bp, Homo sapiens
tgatgatcaagagggcatttcgctaggaaccaccacacacgacacctgcag

SEQ ID NO: 641903 - DNA, 110 bp, Homo sapiens
ggcatactgtgctctggaaaacctgtatcttctgatgggaagggaactggaatatctagaggaggtacctccaggaaatgtgctaggtaacaaacctgaatttggcaact

SEQ ID NO: 641904 - DNA, 98 bp, Homo sapiens
cacgttttaatgccgagaggtctctgtgacgattttgaggccagctccaccagggcaagggtttttccctgcctgccactgtatgccgagtgtccaga

SEQ ID NO: 641905 - DNA, 102 bp, Homo sapiens
gaccgtgaccgagagcgtgaccgagagcgcgaatatcgtcatcgttagaagaacagctttgctgagccatcaaggtctaatggaagcatggttcggcattct

SEQ ID NO: 641906 - DNA, 82 bp, Homo sapiens
tctggatatccttcacttcaaaatagcttcataaagtcaggtcctaggcctacttacaagcctccagtctcaaattatccag

SEQ ID NO: 641907 - DNA, 100 bp, Homo sapiens
taaaaaaggcaaaagctgcagaaactagaaattcaacaattgtggcaattaataaagacccagaagctccaattttccaagtggcagattatggaatagt

SEQ ID NO: 641908 - DNA, 75 bp, Homo sapiens
cctattgagttaacacctctgccgctgctaaaagaaacacgaagacaccgactgtccctgcgtggtggtgtcctg

SEQ ID NO: 641909 - DNA, 83 bp, Homo sapiens
gccatgagggccctgtgggtgctgggcctctgctgcgtcctgctgaccttcgattctgaagactactttgaggtcaacattcc

SEQ ID NO: 641910 - DNA, 80 bp, Homo sapiens
ccggccctgcccgggctgggtgaggggcgcccgcctcaagctagaggtgcgcgcggagccatggttatcatgtcggagtt

SEQ ID NO: 641911 - DNA, 71 bp, Homo sapiens
cctccgagaggcacctgactctttgcctgagttcacggagcactacggcgggactgccaccttctacctct

SEQ ID NO: 641912 - DNA, 75 bp, Homo sapiens
ctttgtctatcttcttccttaggaaaccactctacattaatcatactcctccaccactgtccaagagtaaggaga

SEQ ID NO: 641913 - DNA, 82 bp, Homo sapiens
cgtcatcctgctgctgaagatctggaagacgcgctcctgcgccgatggctcgttcggaacaccacctggatacggctgcgct

SEQ ID NO: 641914 - DNA, 88 bp, Homo sapiens
ggcgctggaagggatgtcgtctcagcagtgctcgggcgcaggaacttgctactaccagcaccatgccctaccaatatccagcactgac

SEQ ID NO: 641915 - DNA, 99 bp, Homo sapiens
atgaaatcctgctttcttttcctcagaactactatattcagtggctaaatggctccctgattcatggcattgaatgccccagaggagcccgaaacctcc

SEQ ID NO: 641916 - DNA, 100 bp, Homo sapiens
gatttgttaaggattccaagtaactcttatttgacaagcaaagtggatcagcaaaggctgcagtcaccagcatcttttccaaccttaatgaactgtatcc

SEQ ID NO: 641917 - DNA, 100 bp, Homo sapiens
tcgaaaggagagcccgtcattagcgtgaaaaccacaagcaggtccaaagagagagaacaagatcactcaaggtgaaggataatctactaataccagcact

SEQ ID NO: 641918 - DNA, 83 bp, Homo sapiens
gccgcgaggaggcgcgggaggtgttcgagaacgaccccgagacggctgctgaataacgagggatcactgctggcctactctgg

SEQ ID NO: 641919 - DNA, 98 bp, Homo sapiens
agtacagcatccgagtctactgtctggatgacacccaggatgccctgaaggctggaatgataaaaagtgataatgaagagtatttcattgaacccttg

SEQ ID NO: 641920 - DNA, 110 bp, Homo sapiens
gggtgggcaacgggaccctgtgccccaactctacttccctctgctccttcccagacaatgcagatcttcgtgaagactctgactggtaagaccatcaccctcgaggttga

SEQ ID NO: 641921 - DNA, 83 bp, Homo sapiens
tcagaaataatatccaatcagtacaacaatgagccttcaaacatatttgagagtaattccctcctggtcccagacagtctaag

SEQ ID NO: 641922 - DNA, 88 bp, Homo sapiens
atcactcccagctgcgcaaagcttgcgaggtggcgttagctatcagaggactcctgaaacctggagagctacctgctgtataaaggct

SEQ ID NO: 641923 - DNA, 100 bp, Homo sapiens
tgcacagtctctgacatcagctctcctgggaccctccaagagcactagtgtctagaaggcactaagggtgctgtgcctgaggaacaataccatttttaag

SEQ ID NO: 641924 - DNA, 100 bp, Homo sapiens
aacctccttgttgcccccactgttgccttgagaattgaagacataacctgagctggctggaggagaaagagaaggaagttgtcagtgccctgcgctactt

SEQ ID NO: 641925 - DNA, 122 bp, Homo sapiens
ttgttggggagaagaggattggaggtgtcagtgttaaaggaacctctacaacgaaggtgaagccacggaagataaggtgagcgagtgctgtgctttcatgggcctcttctttatgaagcaaa

SEQ ID NO: 641926 - DNA, 82 bp, Homo sapiens
gctctttcaagtgaaccaaacctatcaaacctgtttagaaaataaaccaggcaccccctgtaatggcctatcctgctactac

SEQ ID NO: 641927 - DNA, 118 bp, Homo sapiens
ccaaaagatattcacaccctggcacagcttatttctgcttactcacttgtagatccagagaaagccaaagcctacgacgaggacttcaaccatgagccgtgtcagaggaagggccaca

SEQ ID NO: 641928 - DNA, 100 bp, Homo sapiens
ctggaagttataacgctacacgaagaactaagaatattattagcacaagagcaccatactttgaggggccgttgctccagggagaactgcaaatatcttc

SEQ ID NO: 641929 - DNA, 50 bp, Homo sapiens
ctgcaggccatcgacccccagagcaacgtgaaacctaaacatttgtcttg

SEQ ID NO: 641930 - DNA, 82 bp, Homo sapiens
atcccaactgggcatcacataggtgttgccacatctgcaaacttcctgggagagtaatggggattcgagtgcttcgattatc

SEQ ID NO: 641931 - DNA, 51 bp, Homo sapiens
agcaccatggggaagcgggacaatcgggtgtttcggagcaacatcccctgt

SEQ ID NO: 641932 - DNA, 98 bp, Homo sapiens
gaatctaaagagctggtctacctcgtgcagattgcttgtcagtacgaggatgtcgtccaggaaagattgtgcagatgactgaagcagaagttcgaggc

SEQ ID NO: 641933 - DNA, 100 bp, Homo sapiens
ctggccggggccgactggcagctcctagtggagacctcgggcatcagcatctaccggctgctggacaaggaatacatgcaccacctgctcgccctggagc

SEQ ID NO: 641934 - DNA, 100 bp, Homo sapiens
attaggattacagacatgagacatcacacccagccccagcacaatgttgaatctgccaatttgtggtgtctgaagaccaagactacacagctcattttgc

SEQ ID NO: 641935 - DNA, 49 bp, Homo sapiens
attttcgtcatctttggaacaaaggatgtgatcttcgtggtggaaagct

SEQ ID NO: 641936 - DNA, 95 bp, Homo sapiens
accaactagagataaaaataccagaaacatacccatttaatccccctaaggcagccatgttgttcagttctggagtcttttggatgggcttgtta

SEQ ID NO: 641937 - DNA, 100 bp, Homo sapiens
tggaattctcctacacttcctatttatgagcggctttgattcagcaagccacaacagttaaaaacaaggatatcaggaaatttttggatggtatctatgt

SEQ ID NO: 641938 - DNA, 101 bp, Homo sapiens
ttcctccctgtgtactttccatttgccttcctggttaagggaagaaagtcggaggctggctttggctgcgaaaagagaaaaaagaaaagagaagagaagga

SEQ ID NO: 641939 - DNA, 100 bp, Homo sapiens
agaagagccatggatatcagagggagaaatccaacgacctttctatccagccaaaatgaagtttaatccctttgtgacttccgaccgaagcaagaatcgc

SEQ ID NO: 641940 - DNA, 89 bp, Homo sapiens
ggtcatctcattgggcatgaaggtcctggaagtctgttatcagaacttaagtcaaagggaaacccagcgtttgctggcagaaccagttc

SEQ ID NO: 641941 - DNA, 75 bp, Homo sapiens
cttcgagtgacccgggtgccgaggagcgggaagagttgctgggctacgagttccagggagctctgtcctggtgac

SEQ ID NO: 641942 - DNA, 74 bp, Homo sapiens
gtttgagcaactgaactggaaacaagatgcaggtctcctctgagcctccggcctccataagacccaaaacagat

SEQ ID NO: 641943 - DNA, 101 bp, Homo sapiens
ttgaccccaaagttgcatttcctcgtcgagcgcaacccaagatgacaacggcaacacgacaagaagtccttggcctctaccgcagcattttcaggcttgcg

SEQ ID NO: 641944 - DNA, 138 bp, Homo sapiens
cccatcctgccgtccttctccactttcgccagcccgtgccgcgagcgcggcctgcaggagataagatttgtgaccaaatcagtgatgctgtccttgatgcccaccttcagcaggatcctgatgccaaagtagcttgtg

SEQ ID NO: 641945 - DNA, 101 bp, Homo sapiens
ccaggctcttcgagactttgagaaggaattacagtttgaaaggctgacccgagagctggaggctgaacggcagatcgtagccagccagctggagcgatgca

SEQ ID NO: 641946 - DNA, 100 bp, Homo sapiens
gaagctcatcatgaccttccagaattacgggcaagcgctgttcaaacccatgaagttaaataggattgcgaatcaggtggccattcagcggaagaagcag

SEQ ID NO: 641947 - DNA, 89 bp, Homo sapiens
tttgggagctgtttattgcagcactgttgtgccctctgatgacccctcggagacagaaaaaactcttttgccgctaccatgatggaaac

SEQ ID NO: 641948 - DNA, 98 bp, Homo sapiens
acccggccgaggcggtgctgcaagagaaggcactcaagtttatggtagcagaaggtcaagaaatttgtgtgattgaagccatgaaaatgcagaatagt

SEQ ID NO: 641949 - DNA, 110 bp, Homo sapiens
tttttccttgagctgaacgtcttgcaacagtggccgcacgcataggtccctgtgcgttttattgcgacctgccggtgggaactttgtctccgagtcggagcagcatggag

SEQ ID NO: 641950 - DNA, 74 bp, Homo sapiens
ttactcgcacgcggatttggctggcgtcccgctccaaaatccatgcagcacgcagcctgagtgagatcgccatc

SEQ ID NO: 641951 - DNA, 80 bp, Homo sapiens
ccatcgggcagctacacatcttgaaagagaagctcttcctgtgaggtgggttttattgactacattgtgcacccattgtg

SEQ ID NO: 641952 - DNA, 100 bp, Homo sapiens
tgaagaactttttcacttactgcaggattttcagcttcagcaagcagtttcggagcaacatcccctgtcacctggttgatatctcttgcggattaccctg

SEQ ID NO: 641953 - DNA, 89 bp, Homo sapiens
caccctggagtaaccctcactggagaatccagagatttgtgacccagaaggaaatctctgacctcagctgtggctcttggtgctggcca

SEQ ID NO: 641954 - DNA, 100 bp, Homo sapiens
gacaaccacctcgacacagtccctccctcggtttgcctactgaagagcttatcagagctctacttgggaaatcccaagaggaattacaagagtactgcag

SEQ ID NO: 641955 - DNA, 75 bp, Homo sapiens
tgcattccaacttcatgaggatttaatgaaggttcttaatgagctttatacgactgtacaatttgttcaaggaat

SEQ ID NO: 641956 - DNA, 83 bp, Homo sapiens
ggatgacttctcagcgttcccctctggcgcctttgctgctcctctctctgcacgtatgccgagattttgctgtcctggaggac

SEQ ID NO: 641957 - DNA, 101 bp, Homo sapiens
gtctcattaaaacgagtcttcactacccagaatcatttaatcatccatttcatcaaaaaaggtcagcccttcataaacccagatgggagtccagttgtgta

SEQ ID NO: 641958 - DNA, 98 bp, Homo sapiens
gcccctcaccatcaccatcctcatctctcttggcacatcctcatggcccagaggcaggtccaggtggcagaggaaggcctgcaggacttccaccgagc

SEQ ID NO: 641959 - DNA, 100 bp, Homo sapiens
agctcttcagcatctacgggaggcaaacttgtaaaacctggaacagcagcatcattgtcaaaggtctctcacaaacccaaatcactcactcatactcaag

SEQ ID NO: 641960 - DNA, 90 bp, Homo sapiens
cgaaattgtctacaagtcctgaatcctgttgagagaatatcagcagaggaatagccctggtgttcctacaggagcgaaaaagaagaagaa

SEQ ID NO: 641961 - DNA, 50 bp, Homo sapiens
cggcaaccaaatcggcgccaagtgtcaacagcatctccaccctggagcct

SEQ ID NO: 641962 - DNA, 100 bp, Homo sapiens
ctggtgttgctgctgtcctccttctccgacatggaaggtctttaatgtaactttaaatggttcaccaaaggatgctctaatggatgacagcgatactcct

SEQ ID NO: 641963 - DNA, 50 bp, Homo sapiens
caatcttctcagggaaggagcagcccaggcggcgactggcggcgcgatgg

SEQ ID NO: 641964 - DNA, 97 bp, Homo sapiens
tccaactcttcagcgatctgtgtctgaggaatcggcaaactccctggtctctgttggtgtagaagccaaaatcagatgttgaaacatttgtagcaga

SEQ ID NO: 641965 - DNA, 100 bp, Homo sapiens
aatagatgacatcaataccagtgataagggatttgtcttggctgttactatgacacgggaagcaattgatgaatttcggcgttttcagcgtgacaaggaa

SEQ ID NO: 641966 - DNA, 100 bp, Homo sapiens
cacagctgctgcaccaccaccttccgcaggatgcacagatggccagagtggttggaggtgccctgcctgtcagaatgtttctgcacatgttcctaatacc

SEQ ID NO: 641967 - DNA, 100 bp, Homo sapiens
tctagaggggtgacagcgaaacgttggtgttcgaggaagagacattgttgttcttggtgtggagaagaagtcagtggccaaactgcaggatgaaagaaca

SEQ ID NO: 641968 - DNA, 98 bp, Homo sapiens
tccagccagggtcctgggccgcgacctggttctcccggagtctacagaaacatgccctgaactgtcacagaatgaaaccagcgctcttcagcgtcctg

SEQ ID NO: 641969 - DNA, 46 bp, Homo sapiens
acaagactttcccagcagactgaagataactggagtgccaaggcta

SEQ ID NO: 641970 - DNA, 98 bp, Homo sapiens
cccagaatgaagagatgttacccagtatcttggtgttgctgaagagaaacctctgtagaggagcaggatgcaaccgacaggctgtggccggacagctg

SEQ ID NO: 641971 - DNA, 82 bp, Homo sapiens
gccgatccagcctgcggagcctgtggggcagagttgtctgctggttctcagcttgaagaagattctgcagtccttattgatc

SEQ ID NO: 641972 - DNA, 100 bp, Homo sapiens
gcacgccatgaaggcctcgggcacgaccacagcaccgggaagtccagtcagcggcagatggtgttcggggtggtcaccgccattgacttgctgaacttcg

SEQ ID NO: 641973 - DNA, 75 bp, Homo sapiens
agggccggcccgcctccctggccggggcgcagttcggaggttcaggaagtaccaccaagaacagggaaggacaag

SEQ ID NO: 641974 - DNA, 100 bp, Homo sapiens
aacactaacttgtttccctgggaatttggaggtgggttcgaaaaagtttgtggagaaaaacagcgctttgagaagttgatggaacatttcaggaatgaag

SEQ ID NO: 641975 - DNA, 131 bp, Homo sapiens
tgcctccaaggctatgtttgaatctcagagtgaagatgagttgacaccttttgacatgagcatccagactgaggctgatgtgaatccaaaggcctatccccttgccgatgcccacctcaccaagaagctac

SEQ ID NO: 641976 - DNA, 88 bp, Homo sapiens
tggatcttctgagtaacggaggacaattcaccatagttttctttaaggtgggtcatgataactgggtacgtggagttctgttccattc

SEQ ID NO: 641977 - DNA, 89 bp, Homo sapiens
ctgagggagggtccgagccagccgctgttttgccggaggagcccctcaggccgattttttatcaagcagaaatgcatcgaacaacgaga

SEQ ID NO: 641978 - DNA, 98 bp, Homo sapiens
cagaactgttccttcagccaaagaaacaagccgtggaataggtgtatcaagtaatggtgcaaagcctgaagcagatatagacaaagcagtgcaggcag

SEQ ID NO: 641979 - DNA, 82 bp, Homo sapiens
aggtcaagatcaagatccaggtctatttcacgaccaagaagcaggtgatgatgaacagtctacacagatggctgcaagttgg

SEQ ID NO: 641980 - DNA, 90 bp, Homo sapiens
gccggccagaaggagtgcttctaccagcccatgcccctgaaggcctcgctggagatcgagtaccaattttccaagagataacttcaccaa

SEQ ID NO: 641981 - DNA, 98 bp, Homo sapiens
ccggtcagagctttaagctgcagctctgatgccccagggacctctcagacccccctgcccagagcaggcagcccgcatgatctccttctgtccagact

SEQ ID NO: 641982 - DNA, 82 bp, Homo sapiens
gggacccaccgctgccctcagctccgagtccagggcgagcggctggactctattacctggcagaactgatagaagaatacac

SEQ ID NO: 641983 - DNA, 83 bp, Homo sapiens
ttgcagatcttcaacaagaggacccaggagaaattcgccctcaaaggtttccaggcctgaggtgcccgccctggccccaggag

SEQ ID NO: 641984 - DNA, 95 bp, Homo sapiens
acccagaggtcgtggaggtggccgtggaggcagaggtggcatgggggaacctcagggcatcatagcttgctgcaacccagtaccgccccttgtgc

SEQ ID NO: 641985 - DNA, 50 bp, Homo sapiens
cgaggagaaccaactggtcccgaaagagtcaaggatgctatctaaatggg

SEQ ID NO: 641986 - DNA, 100 bp, Homo sapiens
tggtgaagttgaagaagtactctcatggagacaaggctcctggcgacctccctgctgcagggggccctcccagcggggccatgcccttctacaaccctgc

SEQ ID NO: 641987 - DNA, 80 bp, Homo sapiens
ggaggaggcagaggccaactgctccgtggcgttcgctgaggctcagagatgggtggagagccccagtttgagggacagcg

SEQ ID NO: 641988 - DNA, 83 bp, Homo sapiens
aggcaattgatcccaagttgtcgacgaccgacagggtggtgaaagcagataatctcagtgataccttgaagaagctgaagata

SEQ ID NO: 641989 - DNA, 97 bp, Homo sapiens
gggactactggtgcctgcgctgaaaaaggtgtcagctgtgatgcatgtttaaaaggaaattttcgaggtcgcagatataagtgtttaatttgctacg

SEQ ID NO: 641990 - DNA, 75 bp, Homo sapiens
tgagcgaccatggaccggccggggttcgtggcagcgctggtgggccgttgctccagggagaactgcaaatatctt

SEQ ID NO: 641991 - DNA, 75 bp, Homo sapiens
gattcatccaaccgagagcagcggctagaggacaaaggagacctacaaattgccgcaccggctcatcgagaaaaa

SEQ ID NO: 641992 - DNA, 107 bp, Homo sapiens
gcctaaatgtagcatatatcctaaaggagatggaagtgatgtaccatcatgggtagcctttgataaacagttctttatagctccaagctctacagattcttcaaata

SEQ ID NO: 641993 - DNA, 100 bp, Homo sapiens
gccggagcaatggcaagtgggacaggccccaaattgtctgcaccaaacgctgttcggctcttgaatcccagcgatgaaaccaggaactcactttcccggg

SEQ ID NO: 641994 - DNA, 100 bp, Homo sapiens
ggggtgatgataccaatgatcctgaaaacagaaggaaattgaaggaacttggagttaatggtctaatttatgataggttgctcgtgggggccccgcgggc

SEQ ID NO: 641995 - DNA, 50 bp, Homo sapiens
gaaaaatgctaacaacagcttcacggaggaagaaggcacctacgatcaaa

SEQ ID NO: 641996 - DNA, 82 bp, Homo sapiens
gcatggctacttcatattttggaaagcagtttttaagacaaggtattttaagcctggaatattgtgtgggtattattggtgg

SEQ ID NO: 641997 - DNA, 96 bp, Homo sapiens
ctctcagaagatcagatgagccgtcttgccaagatatatatctgcctgtaattggtcagtcccctgtagttgataaaaagtttttactacttcaag

SEQ ID NO: 641998 - DNA, 100 bp, Homo sapiens
ctctcatcgctctcggcctcggcctcggcctccgacacgttacagaatgtctgaaggggacagtgtgggagaatccgtccatgggaaaccttcggtggtg

SEQ ID NO: 641999 - DNA, 95 bp, Homo sapiens
gcgaaccgcagtatcatgctggccaagaagatcatcattaaggacggaggcacggaagctcttcgtgggcggtcttgactggagcacgacccaag

SEQ ID NO: 642000 - DNA, 83 bp, Homo sapiens
ctgcacccttctgtacccatcagtaacgatgagataccatgtttgtgtggaagtgccccgtgtttgctatgccgatgctgtcc

SEQ ID NO: 642001 - DNA, 83 bp, Homo sapiens
cgtgccctacttcaaggataagggcgacagcaacagctctgccggctggaaggtcgcgtggggcaggcagtggcgctgcgggc

SEQ ID NO: 642002 - DNA, 101 bp, Homo sapiens
caaaaaccaaagtctcttctgctgggaaatcccagtacagatcatcacagattctgctggccatattctctactccaaagaggatgcaaccaaggggaaat

SEQ ID NO: 642003 - DNA, 90 bp, Homo sapiens
tgatgatggaaatgaagtataataccaagaaagccccacttgctccccccacccgctgcctgcggttttgtttctgttaaaacgtcacct

SEQ ID NO: 642004 - DNA, 87 bp, Homo sapiens
ttacccagcttaaagagctccacattcaggggaaccgcctcaccgttctgcccccagaactagaaaccgatctgctcctccgtataa

SEQ ID NO: 642005 - DNA, 98 bp, Homo sapiens
aaaaatgtgcatactcacagagttagagagagggatggtgggccgcgatgggcctcttggaacattggtgtgttcatctgcattcgatgtgctggaat

SEQ ID NO: 642006 - DNA, 98 bp, Homo sapiens
aagaagagaggcccaagatggagacggcggcggctgtagcggcgtgacagatctcccctgcgaccatgtcttccattaagattgagtgtgttttgcca

SEQ ID NO: 642007 - DNA, 75 bp, Homo sapiens
acagaaacagaaacgattgtggaaacaggtccttcaagggttagattacttacacagtaagtgcaagatcattca

SEQ ID NO: 642008 - DNA, 140 bp, Homo sapiens
gcgctagcttcggagtctcccgcgcgcacctcagccgcctcctagcggcgcggcgctcgctcctacggtgctggagaatctggtaaaagcaccattgtgaagcagatgaggatcctgcatgttaatgggtttaatggaga

SEQ ID NO: 642009 - DNA, 100 bp, Homo sapiens
ctgaaactgaggatgcagaaggcgctgaacaggcagtggtcttgcctcacccaagctagagtgcagtggcctttgaagcttactacagcctcaaacttct

SEQ ID NO: 642010 - DNA, 100 bp, Homo sapiens
ccgtgctcagacagaaacggagtctcggaagtgtagaaaataccagtgggaaaaggaagtgctgtgtaaacaggaacatcgataagtagtgtaaaaactt

SEQ ID NO: 642011 - DNA, 90 bp, Homo sapiens
gggatctaaagggagatagagacgcgggcctctgagggttgcatcataaatacaaaggactgaagttataaaagagaaaagagaagtttg

SEQ ID NO: 642012 - DNA, 98 bp, Homo sapiens
acctcgaagatttattggcagcccacgaacacctgtcaggtgattggcgaggacaacgtggcagtcccctcacacctttataaggtaatcctggcccg

SEQ ID NO: 642013 - DNA, 100 bp, Homo sapiens
gagagatccaagcgcacagaaaaacacaagaagattcagccctgtcatcttgtgcaaagaaaatctctaacttccaaggtcccaccaacagttcagaaac

SEQ ID NO: 642014 - DNA, 90 bp, Homo sapiens
tggctctgaattacatctgacccccaaagctcagcagtttgtacaatgacgacagaaacctgcttcgaattagagagaaggaaagacgca

SEQ ID NO: 642015 - DNA, 100 bp, Homo sapiens
aggaaatcatgtcaagcgaagccttgaaaaagctgccctgagacggtgtcccgccgaaaggagatctattgggaaactgattataaccactcgggcacca

SEQ ID NO: 642016 - DNA, 83 bp, Homo sapiens
cagccgatccagcctgcggagcctgtggggcagatcgccaaactgaggcagcaactacaacgcagtaaacagagtagtcgtca

SEQ ID NO: 642017 - DNA, 83 bp, Homo sapiens
ggaagtgctcctgctgggcctcaaggaccgcgaggctccaccgaggacaccgcgtccagcttgtgtggcgaggaggacacaga

SEQ ID NO: 642018 - DNA, 75 bp, Homo sapiens
ctcaagtaccagcagcaccaggagtccctctccgcccagttacaagatgctaatactggagaccgtggacagacc

SEQ ID NO: 642019 - DNA, 90 bp, Homo sapiens
tgatttccataaattgaagcaaagtgagatttcaatggaaaaagtgaaggtaaagcgttatgtgtccggaaaaaggccagactatgcccc

SEQ ID NO: 642020 - DNA, 117 bp, Homo sapiens
ctggcattcaggcacctgaagctgcccacggagtggaatgtattggggacagatcagagtttgcatggtccggcctctttggcctacccccgttggctccgctgccccaggtcgatg

SEQ ID NO: 642021 - DNA, 80 bp, Homo sapiens
cgctgctcaaaacctcgctccggaaaggggacacctgattttcagctgaactctcatctctcaacactggcaaatattca

SEQ ID NO: 642022 - DNA, 110 bp, Homo sapiens
ctgtggaaaatggccttcagtgatcttacatcgaggactgtgcatctttatgataattggatcaaagatgctggaatgaatctgaagtctgctgcagtaaaacacagaag

SEQ ID NO: 642023 - DNA, 74 bp, Homo sapiens
ctcagatccaagtcaacagtgtgaccaagaatatggcccaggtgaccaaagccctggacaaggccctgagcacc

SEQ ID NO: 642024 - DNA, 80 bp, Homo sapiens
ggctggacctccggtacaatagaattaaagcgcttccttctgggattggagctcaccaatgtctttggtggacttgggaa

SEQ ID NO: 642025 - DNA, 76 bp, Homo sapiens
ccttcaggttacttcatggcagctatcccacagacgagcttccccaactggtaacccttccacaccccaatcttca

SEQ ID NO: 642026 - DNA, 100 bp, Homo sapiens
gcggcggcggcggcggagtgtaggaagaggcactgctgagggggcgcgaggggaacggaggccagagctgcggaaaatatatgcagatgatgaacattct

SEQ ID NO: 642027 - DNA, 100 bp, Homo sapiens
gtggaggcattttggggcagaatacagagatatggaatcaggtcacccgtgtgaacagaaagtgagaggttgtagcacattgccaccgtccagatctcgg

SEQ ID NO: 642028 - DNA, 83 bp, Homo sapiens
tggaagctactactacgtggtgcttggaaaggaaattcgaaatgagtcccatgactatcctcatagagtggccaagtttccag

SEQ ID NO: 642029 - DNA, 92 bp, Homo sapiens
gagcggcggccgagttctccagcctgctgcgcaggataaaaggcaaactcttcacctgacaatgcagatcttcgtgaagactctgactggta

SEQ ID NO: 642030 - DNA, 97 bp, Homo sapiens
ctcgatgaggataacatccctccagaagatggatctggcaagtctgaaaatccctgagcaatttcgacatgcgatctggaagggcatcctggaccac

SEQ ID NO: 642031 - DNA, 82 bp, Homo sapiens
tccgcagctgctggctgctcatttgccggtgaccggagatgatatcatcaagttgaatcgaaaggaagggaagaagcagaat

SEQ ID NO: 642032 - DNA, 98 bp, Homo sapiens
actgagcctgttggaggaactggcccggaaacaggaggacggccgttgccgtctgcacccagaccctgagccgccgccgccggccatggaggtggcgc

SEQ ID NO: 642033 - DNA, 101 bp, Homo sapiens
gcatctttatccaatcaagtgcccttggacaaagcctgaaaccaggatttctctctgatcaaacggacagttcaggactcagaatctaaggatgaatgttc

SEQ ID NO: 642034 - DNA, 75 bp, Homo sapiens
gaggaagaggaggaggaagaagaaggtgatggtacaaattctgagctgtctaacccctctgaaacggaatctgag

SEQ ID NO: 642035 - DNA, 82 bp, Homo sapiens
gcaccgacctcgacgtcttgcctgtgtcccacttgttcgcggcctataggcagttgtgaaaaacttcaggacaaaaatgttt

SEQ ID NO: 642036 - DNA, 90 bp, Homo sapiens
ccgggtcctcttggatcaaacatggcactgagtgtactctctgccagtgcaaggttattgaagagagggaaaaactaaagaatgaccggg

SEQ ID NO: 642037 - DNA, 100 bp, Homo sapiens
cttttaacctatgtcttacaaaggcccaatcagtatttacaggatgaaagtaagaccaaaagaaatagtgatctgaatcttttagagtggacccatcaca

SEQ ID NO: 642038 - DNA, 90 bp, Homo sapiens
cgagagcgtggagcgggctgggccaggactgagcagggggaggaacatttaagctgatggaagtggaagtggaagttgctgtacattggc

SEQ ID NO: 642039 - DNA, 82 bp, Homo sapiens
ccggactcaaccgcgtaaaacatatttgaagatgggagacctttactactatggccaccaaaaccagtcacaagacctggag

SEQ ID NO: 642040 - DNA, 100 bp, Homo sapiens
tacctgtgaacagtacgcagtgaatgttgttgctccgactgtgtgttccaggagtggtggctctgaggtgtgaccctgcccacgtttgggcccagccagg

SEQ ID NO: 642041 - DNA, 82 bp, Homo sapiens
ggatcgcactgctcatcttggccatcactatacacaacgttccaggtgctcacatgccaggagaaataagctggtgatttat

SEQ ID NO: 642042 - DNA, 74 bp, Homo sapiens
gcataatggatgaaaggaaccgacagatgccgaatataccaactctcctttggtacctacattctgtactcctg

SEQ ID NO: 642043 - DNA, 105 bp, Homo sapiens
gtggaatattggggggctcggctgcagacttggccaaatggacgggactattaagacaatgcagatcttcgtgaagactctgactggtaagaccatcaccctcga

SEQ ID NO: 642044 - DNA, 82 bp, Homo sapiens
gatgatgtggaaccttaccctgaggtagacatctttagactcatcagaacttcctacgagtatcctctacttctactcctcc

SEQ ID NO: 642045 - DNA, 97 bp, Homo sapiens
ccatgaggagggacgtgaacggagtgaccaagagcaggtttgaggtgcttgtgagtgaggattctgacagtgatggcattgtggcccacttccctgc

SEQ ID NO: 642046 - DNA, 100 bp, Homo sapiens
gagatggttcgggcctagcggagccgggactggagcacagttttctgtacttccagaaatgttaccactttgtgtttcaacgatatcgcctggagcacta

SEQ ID NO: 642047 - DNA, 101 bp, Homo sapiens
tgatggggaccctgactgccctgatgattcagacgagtctttagatacctatgtaggtgcaaaaaactacagacatctctgtgctgtttattacaacaaga

SEQ ID NO: 642048 - DNA, 90 bp, Homo sapiens
gcaggacatgggccaagaagacatgttgcttccccttgcatgcgcaaatctgtccaaggctgcctggggagcattggagaagaatggcac

SEQ ID NO: 642049 - DNA, 75 bp, Homo sapiens
ggtggagattgatggggagcgcatcaagcttttctgggagaagaggctacaaggacttagtgcatcagatgtaac

SEQ ID NO: 642050 - DNA, 110 bp, Homo sapiens
actccaggcagagaaagccttggttgaatttaccaacagccctgattgcctgagcaagtgccagctactcctcgaaagaggaagtagcactggccttggttcccttcagc

SEQ ID NO: 642051 - DNA, 75 bp, Homo sapiens
tctgtgcaggtgcagtactacaacaaggccagaagcggactcctagaagaggggagcagcaaggatggaatgaca

SEQ ID NO: 642052 - DNA, 100 bp, Homo sapiens
attgagatgatccttacggaaaaggaacagattgttcctaaaccagaagaggaggttgcccagaagaaaaagacaattgtggcaattaataaagacccag

SEQ ID NO: 642053 - DNA, 83 bp, Homo sapiens
tccccacctgcccggtgcccgaggaggcagccaagctcgtagcctgccactccgtgcaacatccagtcatggataaaaatgag

SEQ ID NO: 642054 - DNA, 75 bp, Homo sapiens
aggactcgctcgacccgtccttcactcacgccatgcagctgctgacggcagacttctgctggatgtgtctaggag

SEQ ID NO: 642055 - DNA, 101 bp, Homo sapiens
atcgcgatcctgggctaccggtctgtgggtactaggttttgacaagcttgcatcatgcgtgagtataagctagtcgttcttggctcaggaggcgttggaaa

SEQ ID NO: 642056 - DNA, 82 bp, Homo sapiens
gagcccgtcattagcgtgaaaaccacaagcaggtccaaagagagaagctgcctgagaactggacagacacgcgggagacgct

SEQ ID NO: 642057 - DNA, 90 bp, Homo sapiens
aaaaatacaagacaggataattccattcttaaaggcatcacgagaaaatccagccatgcaggaaaaaaaaaggtcaagcatttggcagtt

SEQ ID NO: 642058 - DNA, 100 bp, Homo sapiens
aaggattcgttacagccagagattggcaagataacccctgtgacagaaggctactgttgctgtaacaaagggcatacatacattttcaagaactgcaatt

SEQ ID NO: 642059 - DNA, 82 bp, Homo sapiens
accgctgctccggggcttacgacctccgcatcctggacagcgcgcccaccgaggtcctgtaataaagagggatccgaacaag

SEQ ID NO: 642060 - DNA, 90 bp, Homo sapiens
gctgagtgtccgcttctcagcaacctcgatgaagggtggctttgagtataagcgcgctatcgtggactgcatcatcagcatcattgaaga

SEQ ID NO: 642061 - DNA, 100 bp, Homo sapiens
cccccatcactgcttccctcagccataacagacttcacagagaatgcagttgtcttgacttcaggtctgtctgttctgttggcaagtaaatgcagtactg

SEQ ID NO: 642062 - DNA, 73 bp, Homo sapiens
ggaccccggaatcccgcgcgctgcccacgattcgcttctgaggtaaattcaactggaagggaactattaaagc

SEQ ID NO: 642063 - DNA, 75 bp, Homo sapiens
tgtctgccttctggagagctgaccaaacactaagggctcttgtcaggatggtgaagctgttcatcggaaacctgc

SEQ ID NO: 642064 - DNA, 75 bp, Homo sapiens
aaccctgaagaataaaacggaatcaagtcttctagctaaattagaagattgctcttaaacttggtgtgactgcta

SEQ ID NO: 642065 - DNA, 75 bp, Homo sapiens
atcccagaccctgaagtaaactggatcccctgtaataatcgtaacagaaaaggaacggctgtagtagatctctct

SEQ ID NO: 642066 - DNA, 92 bp, Homo sapiens
atttgggagaagaaaatttcaaagccttgggtggcactgaatcaacaagacaagcaactcaattgattaatgctttgatcaaggatccagac

SEQ ID NO: 642067 - DNA, 90 bp, Homo sapiens
ggccacagagggctgccacaccaggaaggaagcctcaggtgattttacaacgagatgctgctctccatagggatgctcatgctgtcagcc

SEQ ID NO: 642068 - DNA, 90 bp, Homo sapiens
gccctgagtgccccgagggcagcggcaatgtgagctacgtgaagacgtctccattctccaaaaggaattcttcatttgtctcctgatgtt

SEQ ID NO: 642069 - DNA, 95 bp, Homo sapiens
ttttcttgctctggggctcttatgctcagaagaagggcagtgccattgataggtattgcctaagtgtaatcttgaacatgggcggtgctgtgagt

SEQ ID NO: 642070 - DNA, 101 bp, Homo sapiens
gttcctgtggagaaaaatggtgaagaaaacaaagatgatgataatgttttcagcagcaatttgccctcagagtagccggatcgagctgggagatgtgacac

SEQ ID NO: 642071 - DNA, 75 bp, Homo sapiens
ttaggcgagaacgagagaggcagacaaacccatcagccatggtctatgttaacaatgaatgggcaaccagtgttg

SEQ ID NO: 642072 - DNA, 125 bp, Homo sapiens
ccggaggcgacatggggcacccggtgtaccgcggcgagaagccccagctgcactacgcgtgccgtggaggtcccagcccccgctgcggttctcggaggtccggagcccctgatgcagtgcacagc

SEQ ID NO: 642073 - DNA, 100 bp, Homo sapiens
cgactgcaagcagtttcgggaggagttcaacaaagcgtggatacccatcaacgaagttttgatattggaattcagattggctatcagcgacgcaataagg

SEQ ID NO: 642074 - DNA, 100 bp, Homo sapiens
aggaagcccagtacatttcaagttggtcgcggcttgggctccgctttggggaggggcagcaggtgattcaggattacacaacaccgcctaatgaagaact

SEQ ID NO: 642075 - DNA, 50 bp, Homo sapiens
tcgacaccaaggagctggagccactggacgtgatgcctgggccacggcag

SEQ ID NO: 642076 - DNA, 97 bp, Homo sapiens
ccagcatgctggcctacacggaggactcgctgcagtacaaagcctgctcctgcaaccagcacgcccgacgctgccggttcaactctgagctgttcag

SEQ ID NO: 642077 - DNA, 98 bp, Homo sapiens
cggcgctcgcctcagcccggcggcggcggcggccgaacaatgaagctcctgaagccgacctgggtcaaccacaatgtatccggagtgtgatgcagaag

SEQ ID NO: 642078 - DNA, 83 bp, Homo sapiens
ttcgctgtggcatggcggacgaggggaagtcgtacagcggccgccgctgcccagcagatcccgatctcccttcacacatctct

SEQ ID NO: 642079 - DNA, 75 bp, Homo sapiens
ccgtctgtgcagcaggacatcaagttcttgccgttcaaggccacacgtgtctacacttagcctctatccatggct

SEQ ID NO: 642080 - DNA, 74 bp, Homo sapiens
ccatgatcctcaccgatgtcgggaaggtcactgaacctactcatgaaatggccacagatgataagacgtcccca

SEQ ID NO: 642081 - DNA, 100 bp, Homo sapiens
gctgagtaaggcagagtggtccaaactttttgaagctccaaacttctttcaaaagtacaatgttttccaagcagtgaagcacttgccgtgttgaactgaa

SEQ ID NO: 642082 - DNA, 100 bp, Homo sapiens
accagcggcagcatgcatctgatgctctctctccagtccttgctgaagagactttccgttacatgagcaaacccaccacgagtagctcagaagcatgtcg

SEQ ID NO: 642083 - DNA, 82 bp, Homo sapiens
ccagagaagagtcaagggcacgagcatcggtcgtgagatggagaataaagaaactctcaaagggttgcacaagatggatgat

SEQ ID NO: 642084 - DNA, 73 bp, Homo sapiens
gcagagcgcgggaggcggcggcggcgcggagcccagacacgatgaggcgagtggtacgacagagcaagtttcg

SEQ ID NO: 642085 - DNA, 90 bp, Homo sapiens
ggatcttacccgtgacaaaatgtgttccatggtcaaaaaatggcagacgcctctttttcttcatcagggaagactgagagcgaggcgcgg

SEQ ID NO: 642086 - DNA, 99 bp, Homo sapiens
tggtggagtaggtcctgacactgtccataaatgtgcagagggatgtcagagacgcccatgctcccatcctccctcatgctgctgaacacagcccacgag

SEQ ID NO: 642087 - DNA, 51 bp, Homo sapiens
gagcactagtgtctagaaggcactaagggagcatctttccttgaagaagta

SEQ ID NO: 642088 - DNA, 101 bp, Homo sapiens
gggaacaggcttcggcgaacacaaaggtactccaaagattcaggtttactcacgtcatccagcagagaatggaaagtcaaatttcctgaattgctatgtgt

SEQ ID NO: 642089 - DNA, 109 bp, Homo sapiens
cacgtcctcccgcttttcaacaccctgatgcctgaagtttgcctgagaatacagatcaacccacagaacaaagcggatttccaaggcatctccccagagcgagcctttg

SEQ ID NO: 642090 - DNA, 100 bp, Homo sapiens
gaagctggcagaacgcttcctggccaagacatgcagcaccaaggaccagcaattcaagtcagatgtggaggcactgaagcgagagctgcaggtgctatcg

SEQ ID NO: 642091 - DNA, 93 bp, Homo sapiens
gcgctactctctctttctggcctggaggctatccagcgaaaattgcctaagaattatgacccaaaagttaccccagatccagaaagatggctg

SEQ ID NO: 642092 - DNA, 100 bp, Homo sapiens
ctttgttattggagaaacatgcagattatatcgcatcctatggctcaaagaaagatgattatgtgctgtatttctctgaatccctcgtgcccacggcaag

SEQ ID NO: 642093 - DNA, 100 bp, Homo sapiens
gcgaggggcgcgcggagatggcagcgtccagcaactccagcctgtccggctcgtcggtgtcctccggctccctgactggcagtcctcacctttccgagct

SEQ ID NO: 642094 - DNA, 129 bp, Homo sapiens
gacaccaaggtacccaatgcctgtttattcaccatcaacaaagaagaccacacactgggaaacatcattaaatcgtccacctgggcttgcgaaggcacagattccccgtccacagctcacgaccagatg

SEQ ID NO: 642095 - DNA, 50 bp, Homo sapiens
ttttcctccacctaccttcccgagcattgaatgccccagaggagcccgaa

SEQ ID NO: 642096 - DNA, 100 bp, Homo sapiens
gggttacgctccccaggtcccttgctccaggtacggttcctggagcagcagaacaagatgctggagaccaagtggagcctcctgcagcagcagaagacgg

SEQ ID NO: 642097 - DNA, 78 bp, Homo sapiens
cgacctcgggcgccccgccggtcacctccgcgcggacaccaggcgttggagaccagggccagccctggccacacccca

SEQ ID NO: 642098 - DNA, 75 bp, Homo sapiens
accatggaggaggacgacagctacgattcttctgatgtagagcgactggaaagattcttcgactcagaagatgaa

SEQ ID NO: 642099 - DNA, 75 bp, Homo sapiens
ccatgtgtgcctcggcctttcccaagggccagcttcttcctggtgctttgcaagatatcaccttgtcacagcaga

SEQ ID NO: 642100 - DNA, 100 bp, Homo sapiens
aagaaaccatgtgctgaaatgtttgacgacactgatggtttggtctgagaaacatcttacctattacaacagcaaaggtgccaattgtgaagttcttcca

SEQ ID NO: 642101 - DNA, 100 bp, Homo sapiens
ttgaaatgcatttgccttatacagctaaagccatggaaaggtgcgagaagatgtactaaattcattgaataacaactttcttcaaacgctaaatcaagct

SEQ ID NO: 642102 - DNA, 75 bp, Homo sapiens
gcactgccctttttgcaccccagggagctgctgctgctgaccacgttgcctcttgtggtgtaaacttgtaccagt

SEQ ID NO: 642103 - DNA, 98 bp, Homo sapiens
gtcagtctaacagaatcctgtcggagttgtagccatgccctaggcactcaaggagttgcccctggtcctgtaattggacttcaggcaccatctactgg

SEQ ID NO: 642104 - DNA, 100 bp, Homo sapiens
gcgcgggccgggccggcgtggctgctgctggcaatctggaaatcatgaccaccccaggaaaagagaactttcgcctgaaaagttacaagaacaaatctct

SEQ ID NO: 642105 - DNA, 74 bp, Homo sapiens
caacatcgcagtggaaggccggaggacgtctgtgccgagccctgagcagtgtgttccagagaacaagccttcag

SEQ ID NO: 642106 - DNA, 100 bp, Homo sapiens
cttgactccgctgctcgccatggttctcccatgggcaggtggtctctctggatgagctgcgccccttccaggacccagacctgagctccctgcaggccgg

SEQ ID NO: 642107 - DNA, 101 bp, Homo sapiens
aacccactgaacgaagggacggacgcagcccgggccgccatcgccttctcctttttctccatcttcacctgggatgtcatgaccgggccgtcctgctctat

SEQ ID NO: 642108 - DNA, 75 bp, Homo sapiens
cagctgggaaagctgctcaaggagcagaagtacgaccggcagctgaggtaaacctagcctttaagcaacctggaa

SEQ ID NO: 642109 - DNA, 75 bp, Homo sapiens
aatgtgtgtgaattggatttgatcttccatatggataaggtagcatctccgcccccacttactgatactcctgac

SEQ ID NO: 642110 - DNA, 76 bp, Homo sapiens
tacagagtgggaaaaagtgaagtccctatttgaagaacttggaagtagtcaccccccaaagacacacgtgacccac

SEQ ID NO: 642111 - DNA, 106 bp, Homo sapiens
ggaagagcggccccgcggggggcgatgaccgtgcgctgaccctgactcactccagggagtgcatccgccccaacccttttccccctcgtctcctgtgagaattccc

SEQ ID NO: 642112 - DNA, 83 bp, Homo sapiens
tggaaaagctcctattctgattgctacagatgtggcctccagagggctagaattggcagagggggtcgatttgggaggaaagg

SEQ ID NO: 642113 - DNA, 88 bp, Homo sapiens
ccagttcttctgcagccgaaggcgattttaggtgatgggcaagtcagaaagtcagatggatataactgatatcaacactccaaagcca

SEQ ID NO: 642114 - DNA, 75 bp, Homo sapiens
aaagattgcttgaagaaatccatgccatgaaggggaagatggtgaaaggaatgggaggtgctatggatttagtgt

SEQ ID NO: 642115 - DNA, 95 bp, Homo sapiens
gagacggcaagggttggatttttcaaaagagtaaaccagagagagatcatcattgcctgaatttagctttgtgactgcaagagcaagaccagttc

SEQ ID NO: 642116 - DNA, 75 bp, Homo sapiens
ccggacagagcccgtggtcgcgcagaaaccctgaagctgttacagcgcctgctgaagtcaccaggctgccggaag

SEQ ID NO: 642117 - DNA, 79 bp, Homo sapiens
cgcgatacccaaggcagacattcaacacctttacatttagcaggaactcagcgagatgctgtacacagaccggcccgac

SEQ ID NO: 642118 - DNA, 75 bp, Homo sapiens
caggagtcgtccgcttatagtggaggctgctaggagccggtcagaggtttaacggatgaagagtcccggaaaaat

SEQ ID NO: 642119 - DNA, 90 bp, Homo sapiens
ctggaggaggagtgcgaccccccctcgtacacagctgggcagaggaagctgcggatgaagcaggccaactgcattgactccacagcctca

SEQ ID NO: 642120 - DNA, 98 bp, Homo sapiens
cactggaagaggaggggggaaacaacaactcgtttttgctgaattggtgtgcttatgtacataccaggttatctcccacagtgatattggacaaccag

SEQ ID NO: 642121 - DNA, 74 bp, Homo sapiens
tgccacaaacgccgcaccaggtcttgtagcagcgcctcctcgagttgttgcctgcaatctctatccctttgtaa

SEQ ID NO: 642122 - DNA, 90 bp, Homo sapiens
ttggaagcaatgtttgaacaaactcgaagaacagctgtggaaagaagttgcaaaacactggtggccaacagtgttgcaaacaggaacccg

SEQ ID NO: 642123 - DNA, 82 bp, Homo sapiens
tgtcgggttattcgagtgaccgagaccgcggccgggaccgagggcccagctgagagccagcctggaggttacccagcagcag

SEQ ID NO: 642124 - DNA, 95 bp, Homo sapiens
accccagctacctccccaataggtgcatcagccatgaggagtggaaccagatgcagagccaggaggatgaggtggccatcactgagcaggatttg

SEQ ID NO: 642125 - DNA, 102 bp, Homo sapiens
gaagaagttgcgaaggatccccaacggggaggccaacgtgaagaaatgtggacgagtgctcactagcagaaaaaacctgtgtgaggaaaaacgaaaactgct

SEQ ID NO: 642126 - DNA, 75 bp, Homo sapiens
atataattagacaactaagtagcctaaaactctgcagccattctttgaaggattattaccccgagataatccaag

SEQ ID NO: 642127 - DNA, 101 bp, Homo sapiens
gctgcgggtccgggattcccagccatggcagattcctccgggcagcaggatgatgataattccgaagaaggcttccacactattcattcaggaaggcatga

SEQ ID NO: 642128 - DNA, 132 bp, Homo sapiens
atttaagagagcaattggatattattcagcgactagtaagcctatgtcatttcatccaccacattacttagagtgttcatactgtggagcccgctgggaccagtataaactctgctctactccccagtgccg

SEQ ID NO: 642129 - DNA, 96 bp, Homo sapiens
gccgactcaaaagccattacaacctctcttacaacaaaatggttttccactccattgttgttagaagccagttcttttagaactcatcaaattgaa

SEQ ID NO: 642130 - DNA, 75 bp, Homo sapiens
gctgtgcagccgcgaggaggcgcgggaggtgttcgagaacgaccccgagacgagtaacacagcatctggtggaat

SEQ ID NO: 642131 - DNA, 100 bp, Homo sapiens
cgtctcggaaaccggtagcgcttgcagcatgggactttgaacatgtcggggatcgccctcagcagactcgcccaggagaggaaagcatggaggaaagacc

SEQ ID NO: 642132 - DNA, 75 bp, Homo sapiens
agtggagctggtcgcagatcctgagacccggacagtggcagtgaaacaggtggtgaaggtgggtctggttgaaga

SEQ ID NO: 642133 - DNA, 90 bp, Homo sapiens
agacttcctcaaggactacagtatgcacttaatgtccctgctgacttatccttgtataatgaattccgattgtggaaggatgagcccaca

SEQ ID NO: 642134 - DNA, 98 bp, Homo sapiens
ggcgctcgtcctccacccctggaatccctgtctgggtgcggactcggagaagccctcgagcatccccacaggactatctcagcaaaaactcatcatca

SEQ ID NO: 642135 - DNA, 98 bp, Homo sapiens
cattgtgcaaggaagggggaccatcctctgcaggtaattccactgcttcaagaggatggcattccctgtggatatgctggaaaattgcagccatgagg

SEQ ID NO: 642136 - DNA, 51 bp, Homo sapiens
acagcctatgtgggcttccacggagacatagatgagtgtgaagtttctggc

SEQ ID NO: 642137 - DNA, 90 bp, Homo sapiens
gggtgaaattgttaggcgtggagagggagtgatgtcttccagactcggtgctgtacccgccgtgctggagaatctggtaaaagcaccatt

SEQ ID NO: 642138 - DNA, 100 bp, Homo sapiens
tcttcgtactctaattgatccagagaacatgctggctacaactaataatccaagcaaaaatccctggattgaagcgcaaagctgaatgaaaacgcccaaa

SEQ ID NO: 642139 - DNA, 83 bp, Homo sapiens
gttcacgcacgggatccagagcgccgcgcacttcgtcatgttcttcgcgccctgtattaaaggtggaagaaggtccatatctt

SEQ ID NO: 642140 - DNA, 98 bp, Homo sapiens
ctgggcctctgctgcgtcctgctgaccttcggcatgttatgttacccagagaactttccaaacaagtacctaaaactcatctgatgtctgaagaggag

SEQ ID NO: 642141 - DNA, 75 bp, Homo sapiens
ctttacccgcccgcctgctcggcgaccagtaagactttgaccccgacgcaggcttcagtgattgccgcggatcag

SEQ ID NO: 642142 - DNA, 100 bp, Homo sapiens
tatttatataaagctggggcttggacacatgtaaagggaaacatgccaaatcagatgaagcaaactttaattagatcccaatttgcttgtacttataaag

SEQ ID NO: 642143 - DNA, 80 bp, Homo sapiens
tacaaggccaagttcatctcctccgtcaccagccacatctaccagacagaagcattaaaatgcgtggctcaggctagcaa

SEQ ID NO: 642144 - DNA, 80 bp, Homo sapiens
gcgccttgatcgagtacttgagatatggctcgtggacagcagaaaattcagtctcagcagaaaaatgccaaaaagcaagc

SEQ ID NO: 642145 - DNA, 97 bp, Homo sapiens
aaacaaggggccagggcagagggcacctgagcggctggagagcctgttggagaaacacaaagagttatctggaagtattttggatgtgtatagcggt

SEQ ID NO: 642146 - DNA, 75 bp, Homo sapiens
gagtattccaaatttgatggcaaggctcttgcagccaatgccggaacaggatttgctgttgctgagcctcaaatc

SEQ ID NO: 642147 - DNA, 82 bp, Homo sapiens
ggccctgagcacgctgctgtgtgagcagcaggagaactacgatgacccgcacaaaacccctgcctccccagttgtccacatc

SEQ ID NO: 642148 - DNA, 75 bp, Homo sapiens
gggctacggaggccgggttgccagattacggtggagtcattgggcgaagctgggccatgctgtttgccagtggag

SEQ ID NO: 642149 - DNA, 75 bp, Homo sapiens
cagatgcaaggcaactcgaccaattcgacggaggcgccttgcacgacttgctggtggacagacctctcagccaac

SEQ ID NO: 642150 - DNA, 83 bp, Homo sapiens
ctcggctgtggaccgggcggcacgcacgcggtgcagggtaacatggcggatgcggaaggtgtcgtgaaaactacccctaaaag

SEQ ID NO: 642151 - DNA, 100 bp, Homo sapiens
gtggtcgtaggaggctgtcctgtctgcaggtgctggagaatctggtaaaagcaccattgtgaagcagatgaggatcctgcatgttaatgggtttaatgga

SEQ ID NO: 642152 - DNA, 75 bp, Homo sapiens
gaaatagtaggagaatcaaatgataaactgcgaggacagagccactggaagcctaaagaaactgttccaactctt

SEQ ID NO: 642153 - DNA, 98 bp, Homo sapiens
ctgcccaacagaatttatatagagatgtgatgttggagaactacagaaacctcgtctccctggggaagatcagttttcctgccatccaggctgctccc

SEQ ID NO: 642154 - DNA, 82 bp, Homo sapiens
cagcggcggcgcggaggcggctgaggtgcgagccgggcctgtccttgatagtggtcgggaagcgaagtcccggagaagaacg

SEQ ID NO: 642155 - DNA, 96 bp, Homo sapiens
agcctcgctgcttcctgaggtgctccacttcaggaatttgctgattcccttggaattccgtttttggaaaccagtgctaagaatgcaacgaatgta

SEQ ID NO: 642156 - DNA, 101 bp, Homo sapiens
cccggcctctcggcctctgccggagaaacaggcattcctgcatcgcatccggcagaacgtggccgactcagtggagaagggcctcacggaggagaatgtca

SEQ ID NO: 642157 - DNA, 75 bp, Homo sapiens
cgttgcctgctcccggagggagacgcgctgccgaggagaacccagcggcaacccaaggagatctgtgcgctggtt

SEQ ID NO: 642158 - DNA, 100 bp, Homo sapiens
caaaaaagtggtgcagtttttgatgaaattgtagagaactgttcacctgcttccaggcgggcagggcgttgtattcatccctcgtcatgtctagtgcaaa

SEQ ID NO: 642159 - DNA, 101 bp, Homo sapiens
ttgacaagctatgccttgagctcctcaatgtgggtgtagagtctaaactcatccttaaaggggtcatactgctgacttcacagagaatgcagttgtcttga

SEQ ID NO: 642160 - DNA, 89 bp, Homo sapiens
cttcaattaaaaaatttattaaaggaagcacacctaagttagaagaacccgaagaacctaaagtgctaacaccagaagaacaattagca

SEQ ID NO: 642161 - DNA, 82 bp, Homo sapiens
ttcaagataaagtgattttttgcctttgttgattaactggacaaattcaggaaaacgggccttactatacatcatatccccc

SEQ ID NO: 642162 - DNA, 100 bp, Homo sapiens
aaaccgtttccttcatatgcatgagctgcaggaatgagcaacattttgcagatgttgtacttagtgaagaatttctcaatcttggcatcgaacaagtgtg

SEQ ID NO: 642163 - DNA, 100 bp, Homo sapiens
cccgagcggaaaatgaagctagaggacttcatcaagaacctccgagaatcactacggtgggctggatggaggccactacacagcctattgtaaaaatgca

SEQ ID NO: 642164 - DNA, 90 bp, Homo sapiens
acaatgacagcagctcggcccgcctctttgagaggtctcgcattaaggctctggcagtgtttcagaaatacaccaagtacagtaagcatg

SEQ ID NO: 642165 - DNA, 100 bp, Homo sapiens
ccagcaatgataagcatgtaatgagtcgtctttctagcacatcatcattagcaacctggaatggccaaatatcaaggtgaagttcaaagtttgaaactgg

SEQ ID NO: 642166 - DNA, 96 bp, Homo sapiens
tgcggggtctctatcgcactgctaggggttctgctgctgggtgcggcgcgcctgccgcgcggggcaggtctgctcaccaggtggccagataccgcc

SEQ ID NO: 642167 - DNA, 100 bp, Homo sapiens
cggctcaccgcaacctccgcctcccagaatggcctttgtgctgcaccaggctgggcccccccacagccacgggtctaggggagcagagtatgcaccgctg

SEQ ID NO: 642168 - DNA, 83 bp, Homo sapiens
ctttcacaggctggatgaagattgggatcggcttcagctccccaggaatatgattgaaaacagcatgtttgaggaagaaccag

SEQ ID NO: 642169 - DNA, 98 bp, Homo sapiens
ctcatgttcagctccatcgtctgcagcgtcccgcacacctggcagcaaaagagtcattgcacgtgcagaagagcgacgtggacctgatgagaacgaag

SEQ ID NO: 642170 - DNA, 51 bp, Homo sapiens
aaaggctattggatcagctcagcagggttatgatggagggtggtcgcagca

SEQ ID NO: 642171 - DNA, 75 bp, Homo sapiens
atgagcgagagggaggctgccccaaatgaggaagtttaagaattgtttaagctgcatcaatggagcacatacagg

SEQ ID NO: 642172 - DNA, 75 bp, Homo sapiens
gtaaagactaatcctgacatgttgttagcagtttttgaaggtaacttacgacctatttctccgtggcgttggctg

SEQ ID NO: 642173 - DNA, 100 bp, Homo sapiens
agcccctcaatatcactcaggtcctgagccatggagaagggacagacatcaacttttggatccaagctggagtgcctgtgagtgatggattggaactgag

SEQ ID NO: 642174 - DNA, 90 bp, Homo sapiens
aatgacaaacaaccagctcttcagagccctaaataagtcacacagcaccctgaaagtgattccctggtctacttgaatttgacacaagag

SEQ ID NO: 642175 - DNA, 100 bp, Homo sapiens
ataaggaaagttgactgaaaatggggcggaagaaaatacaaatcacacgcataatggatgaaaggaaccgacaggaatactctgaagatagtaactccga

SEQ ID NO: 642176 - DNA, 75 bp, Homo sapiens
catggaacccgtgaccaagtggagccccaaacaagtggtggactggactagagattgttcctgcctgattcataa

SEQ ID NO: 642177 - DNA, 75 bp, Homo sapiens
cgtcgcgcggcgtgccctgcttgtcacaggtgacttaagagattaaaattaatttggttgctgttggttctgaac

SEQ ID NO: 642178 - DNA, 89 bp, Homo sapiens
agcgcagcgacggcgtcgggagagcgcgcctagccggctcgcgagcatttggctttatgtcccgagttgccctacaagcagagaagatg

SEQ ID NO: 642179 - DNA, 100 bp, Homo sapiens
cctcccagccatcatggtgtccaacatgctagcacaggacagccacctgctgtcgggccagctgcccacgctgagtcagtgctgattctctcaaatagag

SEQ ID NO: 642180 - DNA, 83 bp, Homo sapiens
gtcaacaaccgcttcgagctggtgaccctggcaaagatgagagtgcacatttcgtcctgcctgaaggtccaggagcagatggc

SEQ ID NO: 642181 - DNA, 83 bp, Homo sapiens
cgctcagacaccatggggaaggtgaaggtcggagtcaacggatgaagctactgaatctttacatcaaacgtgcacaaacaggt

SEQ ID NO: 642182 - DNA, 148 bp, Homo sapiens
gtaccttattgaaacattaaatgacagttcacataagaagttcttcgatgtatctaaacttggcaccaagtatggaatgaatctgaagtctgctgcagtaaaacacagaaggctttaaaatgttttcttgcataaaattcaaaacttt

SEQ ID NO: 642183 - DNA, 100 bp, Homo sapiens
atcgcttcaaatgggaggccaatcaatgcagcattaggaaggcttcattcagctcagcaccaccttgggttctgcagctgattcatgagagagataacat

SEQ ID NO: 642184 - DNA, 100 bp, Homo sapiens
acgttagggtgctttcttccccggcagagtttttcgagctcatgaagtgccgcaaggtgtgtggcctgaatgtctctgaccgctgtgacttcatccggac

SEQ ID NO: 642185 - DNA, 83 bp, Homo sapiens
cgacgaggagcagggcctgactgcgcagcagcgggaggtgatgtggcaattgtgtgccatcaaaattacagaagctatacagt

SEQ ID NO: 642186 - DNA, 101 bp, Homo sapiens
gcttcgaggggcagttcagcatcaacaaggttattaatgctgcactggctttagcagcaaaaccacagagtaaactggcccaagagaacatggatcttttt

SEQ ID NO: 642187 - DNA, 100 bp, Homo sapiens
caagactctcttcgctctttgcatcttaactgcagctccatgtccatccgctggccgggccgccccctcggaagccatgcctggatactgatagccatgt

SEQ ID NO: 642188 - DNA, 83 bp, Homo sapiens
aggtacatcacctaccggctggtgcagtagctaccgcctgacaggagcatcagatccatgctgctgctgactcggagccccac

SEQ ID NO: 642189 - DNA, 118 bp, Homo sapiens
ggtggctccagcatgtatcagccgaggtggagctgcggggccctggcatgaaagacaatgcagatcttcgtgaagactctgactggtaagaccatcaccctcgaggttgagcccagtg

SEQ ID NO: 642190 - DNA, 100 bp, Homo sapiens
caatggaaagtgcgtcatcctaaggaacatcgacataacgaaggaggcccaacttcattcaataaggagcctgacggatttatcccagacggtagaacaa

SEQ ID NO: 642191 - DNA, 88 bp, Homo sapiens
ctacaaggaatctgagggtgccctcaatgagcacatgaccagcttagcttctgtcctaaagaataccgtgactgatctaaccgttcat

SEQ ID NO: 642192 - DNA, 82 bp, Homo sapiens
aacgagacttttctcagatgttggatatttgcttggaaaaacgtgtgggtacgaccttgcgttcatcaacaacttttggaat

SEQ ID NO: 642193 - DNA, 100 bp, Homo sapiens
gggagcggcgttggaggccaccgtttccaggtaattcatttgcacacctgttagcaagaaacagaagttgaaggactggaacaagtgaactaggaaagag

SEQ ID NO: 642194 - DNA, 98 bp, Homo sapiens
aggagtccacctggggctcccctgacagccacctgcccactttgtgatcagagccgtgttcggggagtctttcaggattttttatcaagcagaaatgc

SEQ ID NO: 642195 - DNA, 114 bp, Homo sapiens
aatgtggatcaagcaggttttaaatcaagatttaacattccaacacataaaaattatttatccaacagctcctcccagatatttggagttcttacaacatggcagacattgaca

SEQ ID NO: 642196 - DNA, 75 bp, Homo sapiens
ggaggaaatcatgtatttacgacagatatacaagcaggttcagcagctggacatggagaaccaacgctcatcacc

SEQ ID NO: 642197 - DNA, 82 bp, Homo sapiens
gaggggctgcggccggagcgggcggctgagacaaaggcgacgacaatgcagatcttcgtgaagactctgactggtaagacca

SEQ ID NO: 642198 - DNA, 153 bp, Homo sapiens
aaagataaagcctaaatgtagcatatatcctaaaggagatggaagtgatgtaccatcatgggtagcctttgataaacagctttgcaatcagcttgacctgtggggactcagaagaccctcctgccgatgtggcaatcgaactcaaagctgtgt

SEQ ID NO: 642199 - DNA, 82 bp, Homo sapiens
ggcatacatctttcttcgacaaaggcaaaagactgttgaagtagagagcattttgcccagctcactcggattctttgctggc

SEQ ID NO: 642200 - DNA, 100 bp, Homo sapiens
acccgatgaatggagtcgccttctgcctggtcgggatcccgccccgcccggagccccggcccccacaggcaggggaaatggaaggtgatgcagtcgaagc

SEQ ID NO: 642201 - DNA, 80 bp, Homo sapiens
ttctcagacacattcatttttacaccccagtattcgaaggacccaagtcattgatgatgagtcagattactttgccagtg

SEQ ID NO: 642202 - DNA, 98 bp, Homo sapiens
cgtcccccgggcgccactgcagagcctgtccgtcagtccctaggtatccgcactgctcaggggacttgtttacactgggcatgtaaacgaaaccatgg

SEQ ID NO: 642203 - DNA, 75 bp, Homo sapiens
ccccctgtgcttgaagaatgtacagtctatgtttgggatcccggctactcaacagaaatgaaggaggaatctgta

SEQ ID NO: 642204 - DNA, 90 bp, Homo sapiens
ttgtctctgataatgagaaatgaagaagctagtaagcagctggaggccctgaatgatgtgagctgagcccaggcgccaccactgatgcca

SEQ ID NO: 642205 - DNA, 100 bp, Homo sapiens
gcggagcacatgcggagactccgaggtggaggaggagtccccaggaaagcgcctggacgcagcccgagaccgaggacgagaagaagcgctttgaggaagg

SEQ ID NO: 642206 - DNA, 95 bp, Homo sapiens
gtggtcgcgtctcggaaaccggtagcgcttgcagcatggttctccttactatgacaatgtccgccccctctcttaccctgattcggatgctgtgc

SEQ ID NO: 642207 - DNA, 100 bp, Homo sapiens
atgcacagccaagcctagcagctcgggcaaggatggtggaggcgagaacactgaggaggcaaaatacatatctcagtgcattgatgagatcaagcaggag

SEQ ID NO: 642208 - DNA, 98 bp, Homo sapiens
cacgtaggcattcaccccagcaaggtgtttgatgcgatcatgaatttcaagaaagaggagacagcaaaactgatagagaaactggacatcaaactgga

SEQ ID NO: 642209 - DNA, 136 bp, Homo sapiens
ggcagattgtctctggatctcgagataaaaccatcaagctatggaataccctgggtgtgtgcaaatacactgtccagtaacaaatgtggcaattattttggatctatcacctgtcatcataactggcttctgcttg

SEQ ID NO: 642210 - DNA, 75 bp, Homo sapiens
ctgctgctgctctacgatgtcaccaacaaggcctcctttgacaacatccaggtgaacagtggtatagcagccact

SEQ ID NO: 642211 - DNA, 51 bp, Homo sapiens
ggaagtcattaggaacaatggtgcaagaaaaagcttgtggtgaaggggggc

SEQ ID NO: 642212 - DNA, 75 bp, Homo sapiens
tgcaccgccaagccaagctcaacctcaaatcagtactgagggccatggcaatgacaggctcaacaccttgctcat

SEQ ID NO: 642213 - DNA, 98 bp, Homo sapiens
tgaaaatccagcagtatgacaaggcactggatgatgcaatcaaagctcgacttctcaatcccaagtggccaaagatgactttgaagaagccaaggaaa

SEQ ID NO: 642214 - DNA, 87 bp, Homo sapiens
cagagagcaactatcctccccaggttggatggcaagcatgtggtgtttggcaaagtgaaagaaggcatgaatattgtggaggccatg

SEQ ID NO: 642215 - DNA, 90 bp, Homo sapiens
acaggatccgattatcagtatgtgggcaagcatgcaatgatgctacctgttctgacccatcatatccgctaccaccaatgcctaatgcat

SEQ ID NO: 642216 - DNA, 100 bp, Homo sapiens
gacgccagcatcatacaccggctgttcgaggccttgactgtagctcttttaaaggatctgtcttctcaaggagcctagttggctatgcacaaggaaagcg

SEQ ID NO: 642217 - DNA, 83 bp, Homo sapiens
ctggggtggcagcctgccacatcgggggcaccaccctccatgcctttgcagatcctctggaccttctccatctacctggagtc

SEQ ID NO: 642218 - DNA, 82 bp, Homo sapiens
atagactacaacacagttcatggcttggaaggcataaatattccagcagaccagccaattactaaacttaagaatttagaag

SEQ ID NO: 642219 - DNA, 90 bp, Homo sapiens
cgtcggaaaccttggaagtgggatttatttcagtgattcgctcagtccgcaaccatccctctgttcatgcgaaacaaagatgtcgctgca

SEQ ID NO: 642220 - DNA, 95 bp, Homo sapiens
tgcaatcagctgttttttcctagctgccaagactgttgaggaagatgagagaatgcagaagagggctgaacgattcaatgtacctgtgagcttgg

SEQ ID NO: 642221 - DNA, 100 bp, Homo sapiens
agttagtcgcagacatggacaccaaacatttcctgccgctcgcggggatctgatgagcttctttcttctggcatcattaacggaccttttaccatgaata

SEQ ID NO: 642222 - DNA, 82 bp, Homo sapiens
ttctggcctggaggctatccagcgataaagataaagtttctctaaccaagaccccaaaactggagcgtggcgatggcgggaa

SEQ ID NO: 642223 - DNA, 83 bp, Homo sapiens
gccaggaagagccgccgtccgcaccgggaccggagaggaagcggaggtttggtgcacctcgatttggaggaagtagggcaggg

SEQ ID NO: 642224 - DNA, 100 bp, Homo sapiens
agctgagctgcgaggaaaatggcggcgggagttgaagatgagcagccgtcaacactatcaccaaaaaaaaagcaacggaatggaggcatgcggaactcac

SEQ ID NO: 642225 - DNA, 100 bp, Homo sapiens
aggccgagaaaattctgcagatgaacatttgattccacagctgggctatgtggcaacaacaatgctgagctacctcttcatcgtaaaaaatgaactaccc

SEQ ID NO: 642226 - DNA, 100 bp, Homo sapiens
gtatcccggaagcactcatgcaactttggtggcggccactcagttttctctgccagtgtctggtggggaccaaggcatactgaacacattttttagcagc

SEQ ID NO: 642227 - DNA, 100 bp, Homo sapiens
atcagactactgagtagccctgacccggatgtaaagaagaactctatggaatgcatttacaacttggtgcaggcatgtactggcattgaaaacattgacg

SEQ ID NO: 642228 - DNA, 90 bp, Homo sapiens
caagtactcggcaagttgtcaggagactctacaggggcaggtaattcactggtccacaagcggtctcctttacgtcgaaaccaaaagacc

SEQ ID NO: 642229 - DNA, 99 bp, Homo sapiens
ggcaaagacacttggttaccaagaagccatacatgcatttaaatcaaacggtattgagatggattgggttatgaaacataatggtccaaatgacgctag

SEQ ID NO: 642230 - DNA, 83 bp, Homo sapiens
gtctgcgtgagaatagagaccaccgagcagcccctgtcaaagggaacaggaagcagtccacggagggtgacgccctagaccca

SEQ ID NO: 642231 - DNA, 100 bp, Homo sapiens
ccacggcggacgggcgagtggagctacctgagaggagggaagaactgaacctggcagtgctccatgcttttgtggatctgcatgagttcaccgacctcaa

SEQ ID NO: 642232 - DNA, 75 bp, Homo sapiens
tcgccgataatcgaggacctgccaataacgcgatgaggtatggcatttcaaatatagatacaaccattgaaggaa

SEQ ID NO: 642233 - DNA, 82 bp, Homo sapiens
ttctggacacccaggctaactgcctcctctggtatatggacaacccccagggtggcccagttgaaatccttcccttcctcta

SEQ ID NO: 642234 - DNA, 100 bp, Homo sapiens
cgagcagccagccagccacctaactcctcaggggtgggctgctatcgagtggataattgaacactctgaaagcgctgtgagctaaggaggcctgtgcctg

SEQ ID NO: 642235 - DNA, 101 bp, Homo sapiens
caaacaaggactctctgtataagaacctaaaggcagacccagaagagctttttacaaaactagagaaaattgggaagggctcctttggagaggtgttcaaa

SEQ ID NO: 642236 - DNA, 89 bp, Homo sapiens
aagcaagatctcagtcagagtaggaaataattttcacaaccttcaagaaattcgggtagagtacagagagatggatgaaagcttggcca

SEQ ID NO: 642237 - DNA, 100 bp, Homo sapiens
tacccatgtggtgcccatccaaagcaagatgctgtcataaggcaagagggcacattgggagattcagcttgcaagagtcctgaatctgatctagaagact

SEQ ID NO: 642238 - DNA, 89 bp, Homo sapiens
gccaggctgcagtgccaaagagctggccccggctgtgtcaggacacagcattgttggttttgccatgtactattttacctatgacccgt

SEQ ID NO: 642239 - DNA, 75 bp, Homo sapiens
ggagctgctctgtcaccttgacaacacagcccatggcaacatggcctgacctgatggccaaaagaaaggaagaaa

SEQ ID NO: 642240 - DNA, 107 bp, Homo sapiens
gcgggccccgaaggctctccatcgaaggcaacattgactcaccccacacagaccgcgtttctctccagtgtcgacctacacactcactgctcttaccagatgatgtt

SEQ ID NO: 642241 - DNA, 100 bp, Homo sapiens
cggcagccaccatggcgctcctgctgtgcttcgtgctcctgtgcggagtagtgggttttagctaaagaagatactgaggcagctattcaatcaatattat

SEQ ID NO: 642242 - DNA, 98 bp, Homo sapiens
gaaggaccgcactctgaccccgctgggtgaaatgacaatggatgctctgttggctcgattgaaacttctgaatccagatgaccttagagaagaaatcg

SEQ ID NO: 642243 - DNA, 75 bp, Homo sapiens
ctggaggaatccgagaagagcagagcggagggagccccagacacgggcagcatctcatcacggcagttgctgacc

SEQ ID NO: 642244 - DNA, 82 bp, Homo sapiens
tcgcccggtttctcggcgaatgacagcacaggtgaccaaaagccagccccactgtgagttgaactctttcgtgttgaccggc

SEQ ID NO: 642245 - DNA, 100 bp, Homo sapiens
caagctaagcgcctactagagcagggtttggagactcagaactctttcatcaatctaccaacagcccttaccaacgagcttgactggccccaactctctg

SEQ ID NO: 642246 - DNA, 82 bp, Homo sapiens
attgaggacaaagcgaatgatgaacagatctttgactgggtagaggtgtggacactgccagcggctgcagccgacttggaat

SEQ ID NO: 642247 - DNA, 100 bp, Homo sapiens
agcaagctgggcggcattccggttcatatccagctttcagagtggcaccgtgcaatttttcttccacaggcctggcttgcatacatgaatcgagcttatc

SEQ ID NO: 642248 - DNA, 100 bp, Homo sapiens
ttttggtggcacgcagcctggggactctgcctcgtgccgctgagcctggcgcagatcggtggtgctccaaattactaccccaacagctttggtgctccgg

SEQ ID NO: 642249 - DNA, 52 bp, Homo sapiens
actcggacctgagtgaccccatgtgggtaaccttgctagcaccttagggcag

SEQ ID NO: 642250 - DNA, 82 bp, Homo sapiens
aggcattaatagacaatccatctccaactttcatgtgctgctcttacagactgaggtataatgggtctctcccaaatggcga

SEQ ID NO: 642251 - DNA, 90 bp, Homo sapiens
ctgtcatggagcggcccaagacttgtggagatcacccaatcagggcaaaatggaatatgtttttgaattggatgttcccgggaaagtgga

SEQ ID NO: 642252 - DNA, 75 bp, Homo sapiens
cgccatcatgattatctaccgggacctcatcagccgtaagaatgattgatgttggctgatattggagtgctcatt

SEQ ID NO: 642253 - DNA, 75 bp, Homo sapiens
cccaggagtcatcggacgccagaatctgacaaatttacatgtattggagaccagaccagaagcccttctgaatta

SEQ ID NO: 642254 - DNA, 80 bp, Homo sapiens
aaaagggcactcgtctccgtgggtgtggcggagcgcgcggtgcatggtgctggagaatctggtaaaagcaccattgtgaa

SEQ ID NO: 642255 - DNA, 95 bp, Homo sapiens
gagactccctgtcccggaccgcaggagagaacattgaaagtattctctaagctatttgaagagagtgactaaatgcacctgggtcaggctgtctg

SEQ ID NO: 642256 - DNA, 75 bp, Homo sapiens
cgggaatggaccgtaccctttttcaaaaggaactcatgatgtatacaagaatgggatggtctagtaaggataacc

SEQ ID NO: 642257 - DNA, 100 bp, Homo sapiens
cgggatttgaaaaggaaacagaagaactgggcagcccggcagcccgagccgaccaaatttgactacctgaaggaggagatcctatagcaatggaactcag

SEQ ID NO: 642258 - DNA, 100 bp, Homo sapiens
ttgcactcaagtgaggagacaggccatgcctttcaagtgcatgcagctcactgatttcatcctcaagtttccgcacaggagagaaaggccttgggaaaac

SEQ ID NO: 642259 - DNA, 75 bp, Homo sapiens
cgaactgtgggcaaaaatggcggcaacatcagatgctgacctgaaagaacatatggttggaatcatattcagcag

SEQ ID NO: 642260 - DNA, 83 bp, Homo sapiens
tggagcctcagttggaagcagccgatccagcctgcggagcctgtggggcaggaggccccgtgtgggccgcggcccggccctca

SEQ ID NO: 642261 - DNA, 90 bp, Homo sapiens
cgtgttccctgccactgtcttgttccgaggcggccccagaggtatgaacgctgccgtccgtgccgtggtgcgcatgggtatctacgtggg

SEQ ID NO: 642262 - DNA, 48 bp, Homo sapiens
aaaggcctaagaattttggcattgatccagatgcagaggtgtgccttc

SEQ ID NO: 642263 - DNA, 98 bp, Homo sapiens
tggatggctatggagaagagagctaccctgctaagccccattggatgagaatgacctagaggaagatgtggactcagaaccagccgagatagaagggg

SEQ ID NO: 642264 - DNA, 100 bp, Homo sapiens
gcaacacgagcatggcatggccccgcaggtcttcacccaggccctggagtgcatgcgcagtaacattgagcagttttgctgttatttcaaagaactgccc

SEQ ID NO: 642265 - DNA, 98 bp, Homo sapiens
aagaagcagcctcatttgttttctggtgtcatcgtaggtggccacctatggcttttgggcctgtggacatctctacagcaatgagtgaacgggcactt

SEQ ID NO: 642266 - DNA, 100 bp, Homo sapiens
tcacttccagttgtgcaaaatgactccagtcgaggcagttctgtctcttcgaatcttcaggatgtgtttcacatggtagttgaagtaccacgctggtcta

SEQ ID NO: 642267 - DNA, 100 bp, Homo sapiens
agagtgtttgaagatcatgtgtgaaatcctaagtggattgcagttgggagactttctcattaaggcagctgagtatgtcccagagaaggtgaagaaagcg

SEQ ID NO: 642268 - DNA, 83 bp, Homo sapiens
ccagaatggcatccagagagaggctctttgaactttggatgctttattgtacaaagatggttggcaatggctgataaatgaca

SEQ ID NO: 642269 - DNA, 100 bp, Homo sapiens
gcaggggctacctctaccagcagctgtgctgcgtaggcccctggccccaacatggcccgtcgctctcagagctcctcgcagggggacaacccactggcac

SEQ ID NO: 642270 - DNA, 98 bp, Homo sapiens
gaaccagtttgattcagcgacttatgtctgttgcttatacgtatgataatctggctcctagagccacctgagctgaagattcccttgagaacaagtac

SEQ ID NO: 642271 - DNA, 50 bp, Homo sapiens
aagcatggctacaatgtggaacagatgaccctgatgatctgcaatgtaag

SEQ ID NO: 642272 - DNA, 100 bp, Homo sapiens
caaccccttcctggtcggattacactcctgcttccagacgacaagtcgaatccacacaggcgacagaccctacaagtgcccacatcctggctgcgagaag

SEQ ID NO: 642273 - DNA, 100 bp, Homo sapiens
agccgcctctgtattacttaccaggacaagatcgcagaggaaggtgggcggcgggagtgcccagccgtgtgacagcatcgttgtggcgtactacttctgc

SEQ ID NO: 642274 - DNA, 100 bp, Homo sapiens
gaggtgccaaccaatcaggaaatcgaaattgtctacaagtcctgaatcctggattttcagtcaatgcatcatcggagcgactcaacatgggtgaaatcga

SEQ ID NO: 642275 - DNA, 100 bp, Homo sapiens
ccaccagccaatgatcttttcaatgctgcgaaagctgccaaaagtgacatgcaggagtgtagcttttgtgaagaccctcgctttgctagaactggggttt

SEQ ID NO: 642276 - DNA, 75 bp, Homo sapiens
gtcaaatctgaatcgacagtttcttttccggccctgggatgtcacggtggctgtgaaaaacaatatcgatgtctt

SEQ ID NO: 642277 - DNA, 74 bp, Homo sapiens
aggaagagtgatgtggttttggataagcatacggaatggacagccgacctcccatggcaatttttgagttgttg

SEQ ID NO: 642278 - DNA, 100 bp, Homo sapiens
gaagattcaataacagttgcatttgaaaacaatcggcgtggcacaagcctaatggaagatgatgaagagccaattgtggaagatgttatgatgtcctcag

SEQ ID NO: 642279 - DNA, 83 bp, Homo sapiens
gtcagaggaaggcagtatccttggggtgttgctgaaggtggattctgaccaggaattacaaggctcttgccaaaggaacaaga

SEQ ID NO: 642280 - DNA, 50 bp, Homo sapiens
aggatcaagatggccatgtggcaggttgccttttcgggccttggcttcac

SEQ ID NO: 642281 - DNA, 50 bp, Homo sapiens
cccatccgcagcaaggacgtccgcagcagcacatgattaagtaccggtac

SEQ ID NO: 642282 - DNA, 50 bp, Homo sapiens
caaaatgggtaaatgcacaattttctaagagctcttcagtatccccatca

SEQ ID NO: 642283 - DNA, 100 bp, Homo sapiens
cgaaacctgctataaccccaaaggccgctttgtagttcagaatgtttctgcacagaaagatggagaaaaatctagagtaaaagtcaaagtgcgagtcaac

SEQ ID NO: 642284 - DNA, 99 bp, Homo sapiens
cttctccactttcgccagcccgtgccgcgagcgcggcctgcaggagccgtgttgccgcccgctgtgctatgagcagtcagagcgccgtctccacaagag

SEQ ID NO: 642285 - DNA, 99 bp, Homo sapiens
gccgtatccagcgactacgcggccgcggagacctacctgcggcgtcggcagctgctgctccgagaacccttaggagaaatcttgagagtggacagcaat

SEQ ID NO: 642286 - DNA, 75 bp, Homo sapiens
ccgcgagcgactgcggcgccgagccggcgagaaccactgtctctgatcaacgtgcggaagaggaacgtggaatct

SEQ ID NO: 642287 - DNA, 100 bp, Homo sapiens
aaataaaagagccctggaatgtgaagagacatgagacagtagtcaaatactcaggccaggagtggtggctcacacctgtaatcccagctctgggaggcca

SEQ ID NO: 642288 - DNA, 100 bp, Homo sapiens
ctcgctgttcctgtgggtgggggccacgccgcacctgcgcaacctcgccgtggccatgtgcagccgctacgcaggtgacagcagggacatgtctcgggag

SEQ ID NO: 642289 - DNA, 103 bp, Homo sapiens
aaaaggccactgactcctacttcctctgtatagagcaactgttgaactcagctgcctgtagagccctaagctgccgtgtaaggcatctgactacgctgaagcc

SEQ ID NO: 642290 - DNA, 100 bp, Homo sapiens
ttccgagcggcggctccggggcagctccggcgggcgaatgtggcagatcagattgcatttcaagctgctggtggattaacagcccttgaacacatccttc

SEQ ID NO: 642291 - DNA, 83 bp, Homo sapiens
cctcaccgttctgcccccagaactagttaccgaagtgcatgtttgggattttgttgaagaaagctggatacagtaaacggaaa

SEQ ID NO: 642292 - DNA, 75 bp, Homo sapiens
ccccctgcccccttttcctggtgcatgtgaagttatcaaaaacaggttcttcattagaagctgtaaccacctgtg

SEQ ID NO: 642293 - DNA, 75 bp, Homo sapiens
caaccacaagacgactcaataggaggaagttccaagaacccagaggaggcagaactagaagacacactcaatcaa

SEQ ID NO: 642294 - DNA, 97 bp, Homo sapiens
cacctcttcccggcccctgaagttggcactgcagcagacagctccctgggcaccaggcagctaacagatgggaatttcttagccataggctcacatg

SEQ ID NO: 642295 - DNA, 100 bp, Homo sapiens
ccactggtaattatgacttttggacagtccaagctatatcgaagttcttctggatctgcctcagtcctgacacacagcagctcgggaaatagtctaaaac

SEQ ID NO: 642296 - DNA, 100 bp, Homo sapiens
ctttcctttccgtctggcggcagccatcagtgttacatgagtgcctaccctgcatcctgtcccgcattgtgctggggacagagcagtgacccacagaccc

SEQ ID NO: 642297 - DNA, 95 bp, Homo sapiens
actatcaagttgggatcaggcagaggaggaattttgttgtcagagaataaaaggaggttgtccataattgactttaagcagcaatcagtaaaaca

SEQ ID NO: 642298 - DNA, 90 bp, Homo sapiens
agagcagcggaaaatgatccagtcacaggtgtgctgggatatgcagctatgaagggaagggtggaatgtgttccatccgtctcagcgaac

SEQ ID NO: 642299 - DNA, 100 bp, Homo sapiens
tggaaccctggggactacgacgtccctcaaaccttgcttctaggagataaaaagtgccggtggtggtgtgcacattgagccccggtatagacagttcccc

SEQ ID NO: 642300 - DNA, 100 bp, Homo sapiens
gctgctcgataaatcagacagaacagttaatcctcaatttaagcctgatctaacccctagaaacaggactcattctgaccagtttctggtggcattcaaa

SEQ ID NO: 642301 - DNA, 129 bp, Homo sapiens
taaatgtctatcagatatctgaggatggggagcagagtttgatcctgtctacttcacaaacaacaggacacattcagctaacgtattttagcaggtggagtgaggttgaagattcctgtgacagcgatg

SEQ ID NO: 642302 - DNA, 90 bp, Homo sapiens
aagatattttacagcgtgactcaaacaagagccagaaactgctaaagaaactcatgtcagaaatctttgtctccttaaaacatctgagag

SEQ ID NO: 642303 - DNA, 100 bp, Homo sapiens
tttgtggtgttttctatcccagttctttggcttttactaaaaatggacgcctggcaaccaaggccatgtttatgagtggactaagtgaaagcaaacaaac

SEQ ID NO: 642304 - DNA, 82 bp, Homo sapiens
caggaacgtggccgacgacaccagtgtgccggtccaacaaaagcccttgggtctgtttgacttgttcaagtgtccactgtgg

SEQ ID NO: 642305 - DNA, 83 bp, Homo sapiens
gtagagaaataagacaagctttcaagaaattggcattgaagttacatcctgataaaaacccgcaaaatgatgcttcaacaccc

SEQ ID NO: 642306 - DNA, 100 bp, Homo sapiens
gactttgagccctaccttactggacagtcaaatcaggttatgaagacagtatggagtttccagaccatagtagacatttgctacagtgtctgagcgagca

SEQ ID NO: 642307 - DNA, 101 bp, Homo sapiens
tccagccgaaggagaagggggagcagcccgacggccatggaggctgaagagacgatggaatgccttcaggagttccctgaacatcataaaatgatcctcga

SEQ ID NO: 642308 - DNA, 98 bp, Homo sapiens
ccttcattgctctgtgtgccaccgacgacaggatctgctcgccacccttcatggagctcacgagcctgtgcggggatgacaccatgcggctgctggag

SEQ ID NO: 642309 - DNA, 98 bp, Homo sapiens
ggagttagagagtgaagaggagagaagccggaaaatccagattatgtttgagaccttcaacaccccggccatgtacgtggccatccaggccgtgctgt

SEQ ID NO: 642310 - DNA, 74 bp, Homo sapiens
ttcatcccaaggctggtctgcaagtgtgctccatcctctggtctccccattacaaggagctcatctcaggccat

SEQ ID NO: 642311 - DNA, 98 bp, Homo sapiens
gcggcagagagcggggcggcggcagctgttggagccagcagacctgactggagagaactggatgatgagctcatgaaagaagctgtgctgtacgtgga

SEQ ID NO: 642312 - DNA, 74 bp, Homo sapiens
aaagatttggtttgaatgtctcttcaatctccagaaaggcctggtctccaagtcctctcctaagaagcctcgtg

SEQ ID NO: 642313 - DNA, 50 bp, Homo sapiens
ctattccttgggctgcctttcctgcagacaaacacttgaaggatctactg

SEQ ID NO: 642314 - DNA, 100 bp, Homo sapiens
tcatcgaggcatgggggtccacactgcaatgtttttgtggaacatggtgtcatggagaaactccagctgggcccagagattctgcagcgggaaaatccaa

SEQ ID NO: 642315 - DNA, 74 bp, Homo sapiens
ctatacaaagaagtgatgctggagaattacaggaatcttctctcattggtggttccccctggaagtcctgggcc

SEQ ID NO: 642316 - DNA, 100 bp, Homo sapiens
gacagatccattccaacagacatttatagtatgtccacctgcgtttcaaagttgattcttcaccacactgaaaccattaggaaaaatccttgtggttaac

SEQ ID NO: 642317 - DNA, 100 bp, Homo sapiens
atccgctggcgctagtctgaccctccgccaggcaaaaggaaggcattcccatcaagagcaccatggacaaccccaccaccacccagtatgccagcctcat

SEQ ID NO: 642318 - DNA, 100 bp, Homo sapiens
tccgcgttcccagcccgggtccccgcgttcacagccccagcgcagatgagcgggatcgtgtgcagaagaaaaccttcaccaagtgggtcaacaagcacct

SEQ ID NO: 642319 - DNA, 82 bp, Homo sapiens
cagaagtccagagctgaggactgcctgtttgcagaaatgacatcagatgtaccatcactgggtccagccattgcctctggaa

SEQ ID NO: 642320 - DNA, 100 bp, Homo sapiens
tgccccgcggccaacatgagcttcttgttcatttaaatcaaacggtattgagatggattgggttatgaaacataatggtccaaatgacgctagtgatggg

SEQ ID NO: 642321 - DNA, 100 bp, Homo sapiens
acagcatgaagaaaatattaaaaagttagcagaccagtttttagaggaacaaaagaggcatttcatccttcatgaagccattcaggattttgaattgcat

SEQ ID NO: 642322 - DNA, 75 bp, Homo sapiens
tgaattgttctcagtttctcggtttatgtgctcttccaggacgagattgaggagctgcgggccgagatgctggag

SEQ ID NO: 642323 - DNA, 75 bp, Homo sapiens
agaggacccgcgtgggcaccctgcaggtggtcagacatgtcatcaactcagctgaggagtttgttctggcagctc

SEQ ID NO: 642324 - DNA, 100 bp, Homo sapiens
gtaatgccttggctgctctcagcccccaagctggttcccgctgtagcaaacgtccgcggcctctcagaatgtgtgtaagaactgcagcggaaccttctgt

SEQ ID NO: 642325 - DNA, 95 bp, Homo sapiens
ccaaggaatttccccaggagaagatgtgtctgcggctcttcagtgggggcttatttggcctccccaggatggactggagcatcagtagtgcccgg

SEQ ID NO: 642326 - DNA, 92 bp, Homo sapiens
ctcggctgcgccgcgtgtcctcggagcgcggtccctgtattggtctcctgctcctagagacctcctgccccccgaggtctgcagtctcctga

SEQ ID NO: 642327 - DNA, 102 bp, Homo sapiens
cagctgcagccgcctgaccacggcgactggacttacgaggagcagtttaagcagcggggatctgacgagcttttctctacttgtgtcactaacggaccgttt

SEQ ID NO: 642328 - DNA, 74 bp, Homo sapiens
cttcatgcaaggaaacataagttggaggttctggaatctcaggacaaccctccatatgataagggagccttcag

SEQ ID NO: 642329 - DNA, 98 bp, Homo sapiens
cctattccactagaagcaagatggctgaactcaatactcatgtgaatgtcaaggaaaaggaatgggtaccacagaccatgtcatcgtcctggcgtcca

SEQ ID NO: 642330 - DNA, 82 bp, Homo sapiens
ggaaggctcaagatggcgtgcttgttggagaccccaatccgcatgagcgtcctttcgatcaatgtccgagttaccaccatgg

SEQ ID NO: 642331 - DNA, 98 bp, Homo sapiens
cctcgctcctcgatcgaggacgacttcaactatggcagcagcgtggcctccgccaccgtgcacatccgaatgggcaagaagagactgacaggagagtg

SEQ ID NO: 642332 - DNA, 78 bp, Homo sapiens
ccaaacgcacgagtattacccctatctcagcagtgatggggagagccatagcggggatgtggagacgctggtagcggg

SEQ ID NO: 642333 - DNA, 84 bp, Homo sapiens
tgtttgttccattgaacactaacccaaaagaggtccaggagatgaggaacaagggctcaaaatttgggcggggaactggactca

SEQ ID NO: 642334 - DNA, 106 bp, Homo sapiens
atccgaggactgcctccccacaccaccgaccaggacctggtgaagctctgtcaacccctccttttagaggactcagaagaagaagaaggtgacttatgtagaattt

SEQ ID NO: 642335 - DNA, 50 bp, Homo sapiens
aatgaaccaagcacacgtgtccgagttttcctttggaatatggataaata

SEQ ID NO: 642336 - DNA, 90 bp, Homo sapiens
actaacggggacttcacctttgtctcctcagcagacgcggaaggtttttagaacttcagccataaaaatgggcagaattttccttgatca

SEQ ID NO: 642337 - DNA, 75 bp, Homo sapiens
tatacgtgtatgttcacttacgcctctcaaggagggaccaatgaggtgtcctgtggccaggcggaaagcagtgag

SEQ ID NO: 642338 - DNA, 75 bp, Homo sapiens
tgcagacagcgtccatttttggctcagccaaaagcccccctccatgcgcctgaaggcccgacccagcagccctgg

SEQ ID NO: 642339 - DNA, 75 bp, Homo sapiens
aggaggaaagctggtcatcagtttggagttacatggcgctgcagaagcagaaccacagactatgacttggtcgga

SEQ ID NO: 642340 - DNA, 75 bp, Homo sapiens
tcgtggacaagatcatgggcaaaggacagatccagtgccctctggtggtcagaagatgctgtgctgtctcgttag

SEQ ID NO: 642341 - DNA, 100 bp, Homo sapiens
ctccaccaggccctgcagggctcagtggtggggagtcgctgctggtgaaacagatcgaggagcagataaagagttctgccttcccaggaccctgcccttc

SEQ ID NO: 642342 - DNA, 75 bp, Homo sapiens
acttttgaaggtgcaagatactatataaagaggcgattatgcagccccttgatcataagaatctggatatggatg

SEQ ID NO: 642343 - DNA, 109 bp, Homo sapiens
cagacgccaaggcccctccggccagggccgggagccgggccggcctagccaggtgagaagccctaccactgcaactgggacggctgcggctggaagtttgcgcgctcag

SEQ ID NO: 642344 - DNA, 96 bp, Homo sapiens
attcccaagccaaagctttccagatgctgagctgctggcgcactgcagcacaactagagatgtacggatgcccccatcttgatcttacagaatcag

SEQ ID NO: 642345 - DNA, 75 bp, Homo sapiens
tgaatttccatgtcaacatagtccaggccaaagatgaagaggaagcctttctggattggagtgatgatgatgatg

SEQ ID NO: 642346 - DNA, 100 bp, Homo sapiens
tggctctacttcttttccttcctgcgcctgggtggttggttttgacggctcttccacggttgatgagttcctccagcggctgaaccaggagataggcatg

SEQ ID NO: 642347 - DNA, 82 bp, Homo sapiens
tggtccgcggcatccgtaaccacaaggaggacgaggaacccaagacagaccaggatgaggagcattgccggaaagtcaacga

SEQ ID NO: 642348 - DNA, 98 bp, Homo sapiens
gtacaacagcatcttcagcctgctcagcttcgagaagattggctacacagggtgattctgggggtccacttgtctgtaatggtgtgcttcaaggtatc

SEQ ID NO: 642349 - DNA, 90 bp, Homo sapiens
ccgaggcacggacaacatcaccgtgaggcagggggacacagccatcctcagggcaagttaaagtcttcagagccctgtatacgtttgaac

SEQ ID NO: 642350 - DNA, 73 bp, Homo sapiens
tcagcttctgaaaaacccaagatcaaacccctcacaccactacacaggtttcaggcacagaactgtatatcca

SEQ ID NO: 642351 - DNA, 75 bp, Homo sapiens
gttgcttctggcggccatggtgttgctgctgtactccttctccggtaaggagtgccaatggaccgatgcctgcct

SEQ ID NO: 642352 - DNA, 75 bp, Homo sapiens
tccctgtcctacctcacgggggcggcgggtccctctctgtcctgctcgatgacctgcaggacctgagtgaagcca

SEQ ID NO: 642353 - DNA, 51 bp, Homo sapiens
gagaaacaaagccacccagccaatgaagctagcaattgactatgggattaa

SEQ ID NO: 642354 - DNA, 76 bp, Homo sapiens
acaatccgtctggatcacggatgtaggaagtgaccctgaaggaagattgggaatctgaaaaagatttatgtttaga

SEQ ID NO: 642355 - DNA, 100 bp, Homo sapiens
ggccccgccagtgcgcgcccccgcgctccgccgccaggccagagatcctgcatattttgatgaaaattggctaaacagaatcaaaactgaagtaggagat

SEQ ID NO: 642356 - DNA, 97 bp, Homo sapiens
cacctccagatcttgcagccgctttttgaagggaaccgcgggctctgccaggagagaagactggattactacagcatcccatttcccacacccacta

SEQ ID NO: 642357 - DNA, 76 bp, Homo sapiens
tgatgatgaacagtttgtcccagattttcagtctgataaccatgcgtctgttactagagtggagagtctaccttcg

SEQ ID NO: 642358 - DNA, 95 bp, Homo sapiens
gatgatcacgcagctggctggcttcagtggaccatttgcccagtatgcggagatcgtccacttcaccctcccagatgggactcagaggagcgggc

SEQ ID NO: 642359 - DNA, 50 bp, Homo sapiens
aacaaaatcccagatgctgacaaacggccaagattgccggtctctacaat

SEQ ID NO: 642360 - DNA, 88 bp, Homo sapiens
ttcatctacccggagaagcaggagccctactcggcagcatcaacaacagcaacttgtgattggcggtgaccggatattcagttgcaca

SEQ ID NO: 642361 - DNA, 75 bp, Homo sapiens
aattggagaaacaccaaaaggaatccgcagagagacaagagagacacctccaacttcgacaaagagttcaccaga

SEQ ID NO: 642362 - DNA, 90 bp, Homo sapiens
ctgcttttgagtgagatggtcccagaggcctggaggagcggactggcctgtatccggtgtccgaggcgaactcagtaagatgatgttaag

SEQ ID NO: 642363 - DNA, 75 bp, Homo sapiens
ttggatgttccttttaaagtcaaggctggccaaattgttgagcctaaggtgactgtgtatcctgcaaggacccag

SEQ ID NO: 642364 - DNA, 83 bp, Homo sapiens
aacatgcagaaggaagctattgctgctcacaagtcctggtacctgggataaaagttgcagcgtcccaccatccaccagacaga

SEQ ID NO: 642365 - DNA, 75 bp, Homo sapiens
acagaataagctggagcaagtagaaaaggagttgttgagagtagcaaccatgaagattatgacccacaaactgtg

SEQ ID NO: 642366 - DNA, 75 bp, Homo sapiens
gcagtggtcgcttcttctccttgaggacagcctcaaggatgggcaccagctgaaacaactgctgctgaaggccct

SEQ ID NO: 642367 - DNA, 100 bp, Homo sapiens
aggacaacctcagtgagatcttttttgttaaagattgcccaccaaatgagcttggatgaccatgaaagctgtggttctaattctaccaaccgtagtactg

SEQ ID NO: 642368 - DNA, 100 bp, Homo sapiens
gccatgtttcaagaaaatggatttaaacatatttccctgtggagcggagcgtgctttggacaccatgaattttgatgttataaagggcaagccagtacgc

SEQ ID NO: 642369 - DNA, 100 bp, Homo sapiens
atggccgtgacacccgtggcatcttccgagtccatcagtttgagaaggtccagggcatgtccttcatagcagcagtgttgatcttgaacttagatactgc

SEQ ID NO: 642370 - DNA, 87 bp, Homo sapiens
tgaagaagatcgtaacaacttatgacatggataaaagaatcagagtgtctcaacccttgacaagaggaccaagtgcctttattccag

SEQ ID NO: 642371 - DNA, 82 bp, Homo sapiens
agagataccgcgatatttgggagcggccccgagacgcgcctggcgcgggttaacacagaaatctgcctcctgggccatgccg

SEQ ID NO: 642372 - DNA, 75 bp, Homo sapiens
tcatttgaaatagccatgagagaccgaaatgcgttacaggtaatattaatgaagccaggaatatcttgaaaacat

SEQ ID NO: 642373 - DNA, 100 bp, Homo sapiens
gaaaactttcacagactgttttaactgtttaccgatagcagccatcgtggatgagaagatattctgctgtcatggaggaaaaatatattcagggggaaga

SEQ ID NO: 642374 - DNA, 75 bp, Homo sapiens
agaaccagtcttcaacaaatcatcctggagctaggtatgaagagattcatttgccacgattttcattaaagcaag

SEQ ID NO: 642375 - DNA, 75 bp, Homo sapiens
tcatgctacaggaagacctcggactttgcatccagcagatcacaaggccaatcagcccccccacggtgtccccca

SEQ ID NO: 642376 - DNA, 90 bp, Homo sapiens
cgcagcgacgccggcctctcgagaggcgcgcgccccgccgagatgtacgaaattccgggtagatatgcctggctcaggcagtgcattcat

SEQ ID NO: 642377 - DNA, 100 bp, Homo sapiens
cacgctgccccccgacgagatcttccgcaacctggagaacgccaagcgcttcgccatcgacatagccgcgaccatgcccaggaagaaggcggcggcggcg

SEQ ID NO: 642378 - DNA, 100 bp, Homo sapiens
ctcgaatgcagcagccacagatctctgtctacagtggttcagaccgacatgctgtacaggaagcaagaggctactatgagcagactggagttggacctct

SEQ ID NO: 642379 - DNA, 95 bp, Homo sapiens
aggcggcggacggctgcgtcgcccgaggcgaggaggagcgctggcggtacaccagaggatcgcttcctggcagaatttgggagctgtttattgca

SEQ ID NO: 642380 - DNA, 74 bp, Homo sapiens
gaacttacgcagggttacatatattttcacaagtttattcatggaggacacactgctaagatttcagattttag

SEQ ID NO: 642381 - DNA, 96 bp, Homo sapiens
aatttcccccttgctttggatcttggttgtggaagaggttacattgcacaatatttgaataagaactgataaatttcaaacggaagagagtggcag

SEQ ID NO: 642382 - DNA, 99 bp, Homo sapiens
cgtggccatgcagagtgctctgtgagtcaccgttaatttcaggtgtggggatattcagctttgccaggtatggcagtgatttttatagcatgcactata

SEQ ID NO: 642383 - DNA, 100 bp, Homo sapiens
ccgtccccgaaacgcgagtccggagaggagttccgcatggagaagttgaaccagctgtgggagaaggcccagcgacatttgacattgtgcagcaaagaaa

SEQ ID NO: 642384 - DNA, 98 bp, Homo sapiens
cagcttctcctggcccttgtcctctgggccagctgcccgccctgcagtggaaggaaagaaatactacccgccggactttgacccatcaaagatcccca

SEQ ID NO: 642385 - DNA, 75 bp, Homo sapiens
gagaagacatggatgatgagcgccttaaggatctctttggcaagtttggagtgggaatagctttgcgaaaaatgg

SEQ ID NO: 642386 - DNA, 108 bp, Homo sapiens
ctgaaggaccttcttcgtgctcagggcctgggagatattattgatatacctgcagatgaaatggcccctcctcgatgtcccctccagcgccacagtcaaggacacgag

SEQ ID NO: 642387 - DNA, 75 bp, Homo sapiens
ggaggaggcggagaccgaggagcagcagcgattctcttaccaacagggctgacagatgaagagattgatatggcc

SEQ ID NO: 642388 - DNA, 75 bp, Homo sapiens
aaagccttttgtaaaggtggaagatatgagccagcacagacaccttaccagaatgtctttggtttgaggttccac

SEQ ID NO: 642389 - DNA, 74 bp, Homo sapiens
tcatctgtagcattcaagacttcaaactgacatatctgaagagatggattaagaatgctttggattaaggattg

SEQ ID NO: 642390 - DNA, 97 bp, Homo sapiens
cacactcacctctctctgctcatgcagggaaagaatatggcaaagctgatgcaagatgggtttattttgatccaaccattgtgtctgtggaaattct

SEQ ID NO: 642391 - DNA, 100 bp, Homo sapiens
agagggggatcttccccaaggtggccaccaacatcatgcgagcctggttgttccagcacctctcgatgaaaaagcgggacctggagccctcggacgccac

SEQ ID NO: 642392 - DNA, 100 bp, Homo sapiens
ccggcctcggtgctcgccgtcctgcggaaccgctggctgtcagacagcttcaaggagacggcgtccgagctgggccacagcctgaacgagaacgtcctca

SEQ ID NO: 642393 - DNA, 80 bp, Homo sapiens
cgggggggagagccactgacgccgggaccgggaccgccgccgccgccgccaccatggctggcgcccatgcggctctacac

SEQ ID NO: 642394 - DNA, 100 bp, Homo sapiens
acaggcacagccactatcctcagctgcacgttcgcaaagccagccgtgagacacacaaaatcgcagtgttttacattgctgaaggtcaagaagacaagtg

SEQ ID NO: 642395 - DNA, 83 bp, Homo sapiens
tgctcctcgccgcggcggggactgcagatgtgcactcccagcaacacccctgccacgccgcccaacttccccgatgcgctggc

SEQ ID NO: 642396 - DNA, 74 bp, Homo sapiens
tacattaatactgcttctaagacagaccctgatgctcccataagacagaaaatgccccttgatgatctggatag

SEQ ID NO: 642397 - DNA, 82 bp, Homo sapiens
aagaaatgtaatggtacctgcagcagctccctcattctcacaggcccaacaggctctcactgacctatgaacgactctttgg

SEQ ID NO: 642398 - DNA, 98 bp, Homo sapiens
caagatgagccaagtagcccccagcctgtcagccctaattggggaagcgctggagattcacattttacctgattgccttcattgccggcatggccgtc

SEQ ID NO: 642399 - DNA, 90 bp, Homo sapiens
ctcagctgacatatgaaggactcattgatgaaatttatggcattcagaacagattttgacacttcatgacatgtcattatttagagcaat

SEQ ID NO: 642400 - DNA, 100 bp, Homo sapiens
gaacaaactcgaagaacagctgtggaaagaagttgcaaaacactggtgcctgtagtagaagaacatccatctcatgagcagatcattttgcttcttgaag

SEQ ID NO: 642401 - DNA, 74 bp, Homo sapiens
attcctcctccttggtcgccgcgtccttggctggcgtgtgccaacatcgcctctggtgaggaagtcgccatcaa

SEQ ID NO: 642402 - DNA, 74 bp, Homo sapiens
ggcggcttccaggcgcactaccgcgggaaagcaggcaggatgggagagtcgccgatagaaccacctcttccctg

SEQ ID NO: 642403 - DNA, 100 bp, Homo sapiens
caaggattttggatgaagaagtttttgagttaattggccttggtcctcacagctccaaaaagaaacaggatctcgataagctctatgagctgaagtccaa

SEQ ID NO: 642404 - DNA, 83 bp, Homo sapiens
ctgggatcccggccaccagcaattgtccgtccagttacaacacagggatcacaacaaacacaaccgccacagaagcactatgg

SEQ ID NO: 642405 - DNA, 75 bp, Homo sapiens
gaaacccctgattcctaccgagactctcctcatagtgaaaggtatacccgaaatcttgtggatcaaggaaatgga

SEQ ID NO: 642406 - DNA, 98 bp, Homo sapiens
gcgaggggctcccgttccgccggggcatccgtctgctggacagcggctccgtggagaacgtgctgcaagtcggaacaagttccagttccagtctacca

SEQ ID NO: 642407 - DNA, 75 bp, Homo sapiens
ctccaccgtcgcctcccactgcaaaaaggcctgggttactcctggatggagcacctctgatagcaatccacaaag

SEQ ID NO: 642408 - DNA, 83 bp, Homo sapiens
ctgcgctcgctcgggtggcgacttcctccccgcgccccctccccctcgccatgaaggtatcattgcccagtgcctaagatctt

SEQ ID NO: 642409 - DNA, 101 bp, Homo sapiens
ttgggaggctgaggcgggcggatcacgagactgtgccctgtccacggtgcctcctgcatgtcctgctgccctgagctgtcccgagctaggtgacagcgtac

SEQ ID NO: 642410 - DNA, 76 bp, Homo sapiens
ccgcaggggcgcgcagcgcggggagctgccagttgctgatagtccaactccaccgccaccacctccaccagatgac

SEQ ID NO: 642411 - DNA, 100 bp, Homo sapiens
accatttgtaatggagaagtggattgtaggaatagcaaaaagtcagactgtggagtgcactgtcacatatgaggttcagccaggcccaccaccatgtccg

SEQ ID NO: 642412 - DNA, 100 bp, Homo sapiens
tgggagaaccagccgactggagcaggcagcagcccagggttttttgattaactcaaaaccagagaatgcctgtgaacccatagtgcctccaccagtaaaa

SEQ ID NO: 642413 - DNA, 82 bp, Homo sapiens
ccaccgcggctccaggagtcctgtgactcaggcaggtacttcccggagcgagcggggaacgcgacgtaccccagtgcgcctc

SEQ ID NO: 642414 - DNA, 83 bp, Homo sapiens
ggctctgcagcgagcgctcgatggaacctcatcccaggtgctggagaatctggtaaaagcaccattgtgaagcagatgaggat

SEQ ID NO: 642415 - DNA, 89 bp, Homo sapiens
cagaaagttgttcccatcaccaacaaactatttgtaagactctcatcgactggaaaaagtttgctgatggccgccaaagttggagttcg

SEQ ID NO: 642416 - DNA, 87 bp, Homo sapiens
cagaagaaactcaagctggacatcgacaagagcatcagaccaaacattgtctggcttgcactgtaaaactagttagctgaagacgac

SEQ ID NO: 642417 - DNA, 116 bp, Homo sapiens
ttttttcattgttccactggacgctcatcagagggaagatctttttcctcaattggtgttggagcgggccggagagaagtagagtgggctgcgaggagaaggaaacaggcctttcg

SEQ ID NO: 642418 - DNA, 74 bp, Homo sapiens
gtgatctttctagcaaaacacagctgttacaggataccgcccaccaccattttcagaaaagttctttctagtag

SEQ ID NO: 642419 - DNA, 74 bp, Homo sapiens
ggccgagctgcctgcctctgtgcatgccctcacaggcgtggacctgtctaagagcctggagacacaggccccat

SEQ ID NO: 642420 - DNA, 100 bp, Homo sapiens
ggtgtgcaaacccgagagaactggaatggtcgatgtagggggccaaaggtcagagagaagaaaatggatacactgctttgaaaatgtcacctctatcatg

SEQ ID NO: 642421 - DNA, 75 bp, Homo sapiens
gaatgaagagaacttttttgaatgggaggcattgatcatggagaccctcacgcagggcttagagttctgtcggcg

SEQ ID NO: 642422 - DNA, 75 bp, Homo sapiens
agctccgggagcggcccgcgcagacaacagcagttctgtagagagtttaaatatgaaggaatggcaggacgggct

SEQ ID NO: 642423 - DNA, 100 bp, Homo sapiens
agctgctgaaattcctgaataagcactacaatctggagaccacagtcccacaggcctccaagactgcagagaatgccaccagtggggaaacattagaaga

SEQ ID NO: 642424 - DNA, 100 bp, Homo sapiens
ttcgacagtaacccgtttgccgacccggatctcaacaatcccttcaagtgtttctgaaagatctatccagcactccgatggccagcaacaacaccgccag

SEQ ID NO: 642425 - DNA, 101 bp, Homo sapiens
gtgggcccagtcctcggtgcggcgcggccaggtttttcgttggaatatacgttgcacatttatggcgattctgagtgtgagggcagacttctgccaggctc

SEQ ID NO: 642426 - DNA, 83 bp, Homo sapiens
caccatgtctcgccgcaagcaaggcaaaccccagcacttaagcaaacgggaattctcgcccccaccattgctctctctgtctt

SEQ ID NO: 642427 - DNA, 100 bp, Homo sapiens
agcagctgagggaccagtactgctttgaatgtgactgtttccgttgccaaacccaggacaagatattcccagacacccgatgccatttgctgcaaaaaac

SEQ ID NO: 642428 - DNA, 103 bp, Homo sapiens
cttccagaacatctgggagaatatttaatggaaaatcgcttggttaaaacctgacacttttaacaggtggaaccgtcccaaaatgtcccttgctcagaagaag

SEQ ID NO: 642429 - DNA, 83 bp, Homo sapiens
gtctggagtgcgtgggggaccggctgttggcgggtggggccatgagagcgctgtacgcctacagcccgctggaagacagctgg

SEQ ID NO: 642430 - DNA, 74 bp, Homo sapiens
cctagaccggtttttagtccattgactatgcagcctaatgatgaaagaaatgacctgccgtgatatcgttaaag

SEQ ID NO: 642431 - DNA, 87 bp, Homo sapiens
gcccccatcctccccgccccatcggttgttgtctgggcggtgtctttggtgcaacactaacaaggcttgtctggactacccagttac

SEQ ID NO: 642432 - DNA, 83 bp, Homo sapiens
ctatggtgaaacaccactgaagcattgccaaggcagttccggcgaggggggagcctcagcaggattgctgtgtgaaaaccgag

SEQ ID NO: 642433 - DNA, 97 bp, Homo sapiens
cccgctccggctgcaggcggaggagctggtttcagctcaggctccaaactctgccatcacagctcagactggtgttggggtagcgtctaccgtccac

SEQ ID NO: 642434 - DNA, 100 bp, Homo sapiens
tccaaagagatacagggcagaggaaaatgcaagaagactgatggagcaggcttgcaatattaaatggcagcgtgtgaagctacaggaaggcaactcttga

SEQ ID NO: 642435 - DNA, 90 bp, Homo sapiens
ctttccttcatgctacccaccacctcagtgctgaggtcaaggcaggcgctgcgtacacctgcttggaggctgcaacggggcgggctctgc

SEQ ID NO: 642436 - DNA, 82 bp, Homo sapiens
tctcttcgctctttgcatcttaactgcaggtttggtgcacctcgatttggaggaagtagggcagggcccttatctggaaaga

SEQ ID NO: 642437 - DNA, 75 bp, Homo sapiens
atggaaacaactttgaggatgagccacctttattagaagatcatggaagggaagtggttgctgtgtatgttactg

SEQ ID NO: 642438 - DNA, 90 bp, Homo sapiens
caactccgccgcccaccatggcttccgaggagctgtacgaggttctgaatgatgactgacgcgggtttgggtgatacccctcacagcccc

SEQ ID NO: 642439 - DNA, 82 bp, Homo sapiens
ggaaactgcaaagactgggaagttcttaaaaagaagtttgcctgcaatggtactgtaattgagcatccggaatatggagaag

SEQ ID NO: 642440 - DNA, 75 bp, Homo sapiens
ggccagtctcaataagtccaagacagagcgggatgccaccagcttgtccaaagggaagttccaggagctcctggt

SEQ ID NO: 642441 - DNA, 119 bp, Homo sapiens
ggtgagggatcgctgcaacctttagactaatgactgtccgaaacatcgcctccatctgtaatatgattttcagctgaactctcatctctcaacactggcaaatattcataagatctacc

SEQ ID NO: 642442 - DNA, 73 bp, Homo sapiens
cctggttctggaatcctcagttcaagaatgaaatatgactgaggactctcagagaaactttcgttcagtatat

SEQ ID NO: 642443 - DNA, 75 bp, Homo sapiens
aagatgttcaatgcactcattcaccgataccgggccagggaagaaatacaaggtgaaatttgacaacaaaggaaa

SEQ ID NO: 642444 - DNA, 101 bp, Homo sapiens
gatttgttaaggattccaagtaactcttatttgatatgagaccttggtggggacaattgggaaaaagtttgccagaaagagagaccatgccaattatgaag

SEQ ID NO: 642445 - DNA, 50 bp, Homo sapiens
tgcttcccgggtgttgctcgtgaccgcctatggctgcggtagcagtgaga

SEQ ID NO: 642446 - DNA, 75 bp, Homo sapiens
cagtgtgcttgcttggagatcaggacgcaaaggctggtggccatggctgcggtgggtgagcctgagaaggctggt

SEQ ID NO: 642447 - DNA, 74 bp, Homo sapiens
cacttatggccatttcagccagtcatacttacctggttgcttgcgcatctagtaatgttggatcatattctgga

SEQ ID NO: 642448 - DNA, 76 bp, Homo sapiens
ctcatgcccggctggtgtgctcctatatctgatctgctaaagaaagcacaggctctggaatgggcactctccttat

SEQ ID NO: 642449 - DNA, 100 bp, Homo sapiens
gatcgatgtttcaatattggaagcgctttgatttacagcagctgcaggctaggcagctggaagagaaagaccgagtgctaaagaagcaggatgcattcta

SEQ ID NO: 642450 - DNA, 99 bp, Homo sapiens
aaacgagattggggccatgccaaggactatgtggaggctaaagaattacctccaaagccattgtcaagaccacagcagtcatctgcaccagtccagctg

SEQ ID NO: 642451 - DNA, 100 bp, Homo sapiens
cacgcagcaagacccgcgccgccgggacccccaggacgacgtgtacctggacatcaccgcttagaccatgctcagcctccaagcagccttgtcatcgaca

SEQ ID NO: 642452 - DNA, 100 bp, Homo sapiens
accccctgggaagcctagaaaaatgagggaagtggaatcccgattgcttgatgattgatggactggtttctcagttaggagagcgaattgagaagttgtg

SEQ ID NO: 642453 - DNA, 98 bp, Homo sapiens
cagcatgtactggtgtgtggggccggaggagtcagctgtgtgtccagaacgtgccatggagacgcttaacgggagttctgggaaatcgttcattcatt

SEQ ID NO: 642454 - DNA, 75 bp, Homo sapiens
gatgatgatgttgtaagccttagcagccttgatctgaaggtttttgagttccagttgactgcagaggacatgaaa

SEQ ID NO: 642455 - DNA, 100 bp, Homo sapiens
tcctgacagagctgaccctgaagctgccttttctcaagtcaaagaaggccctgtcctagcaactagttcaggagctggtgtttttaagatgggacgattt

SEQ ID NO: 642456 - DNA, 74 bp, Homo sapiens
agctgcccccggattagacagcaggatgacaaggtccggcctctttggcctacccccgttggctccgctgcccc

SEQ ID NO: 642457 - DNA, 82 bp, Homo sapiens
ggggaatgtggcgctggatccggcagcagctgtgtgaagatcggagttgactattttaaagttggacgccatgtggatgcta

SEQ ID NO: 642458 - DNA, 100 bp, Homo sapiens
gctggagagagacaagatgtccgccagagctgcggccgccaagaaacgcttcgttaagggactcaggcagtacgggaagaacttcttcagaattagaaag

SEQ ID NO: 642459 - DNA, 50 bp, Homo sapiens
aacgattcgagaatggatgagagagggagcttgtattctgaatatgctaa

SEQ ID NO: 642460 - DNA, 90 bp, Homo sapiens
attccagagaagcctgtgaacaaagggactgtgaccctcctgggaatccagttcatggctattttgaaggaaataacttcaccttaggat

SEQ ID NO: 642461 - DNA, 75 bp, Homo sapiens
gttcatgtaaacagcatgacgtgaggccgtggatgcaggcattaaggctggagtgcagtggcacggtctcggctc

SEQ ID NO: 642462 - DNA, 90 bp, Homo sapiens
cggtcaacatcgcggtcatcaagtactgtccagccctgctgggagttttctgccacacagatttgcggaagaacctgaccgtggacgagg

SEQ ID NO: 642463 - DNA, 101 bp, Homo sapiens
cagtgacaggaattgtcgtgggggctttactaggagctggcttgctaatggccttctactttttcagcttattaatgtggctttgggtaaatgcatttcca

SEQ ID NO: 642464 - DNA, 98 bp, Homo sapiens
ttggagatgccagaaaccatgtgaaaaggcaccttgggatgagggaatacaagtgtcatgtctgtggatttctacctggacaaggactggtactatac

SEQ ID NO: 642465 - DNA, 51 bp, Homo sapiens
ctccttttccctctccctttccctaaggccccaataagaaacccttttccc

SEQ ID NO: 642466 - DNA, 101 bp, Homo sapiens
ggcaagtttgtccagtggaagaccatctacatctcccacaggaagtgtcacacagcagtcaagtatgtcccaaacgtctctctctgcgcccttgttgccac

SEQ ID NO: 642467 - DNA, 151 bp, Homo sapiens
ctacaggccattagatccaaagccattcccaaattatagagctaattacaactttcggggcatgtacaatcagaggtactaggttttgacaagcttgcatcatgcgtgagtataagctagtcgttcttggctcaggaggcgttggaaagtc

SEQ ID NO: 642468 - DNA, 82 bp, Homo sapiens
ccgcacggaccctctacttcacagatactttctgagtgcctactatgtgccagcctgtgctaggcactgaggacacaggtgg

SEQ ID NO: 642469 - DNA, 83 bp, Homo sapiens
ctcgaaggacacggaggattatatcactgaaggcataagattcagagacaatgcagatcttcgtgaagactctgactggtaag

SEQ ID NO: 642470 - DNA, 100 bp, Homo sapiens
gcccggctcaacattcccgtcagccaggttaacccccggcgacggtctccttctcccgcccctcctcctcgacggcgcaggactcccacaccaccaccac

SEQ ID NO: 642471 - DNA, 75 bp, Homo sapiens
ccaagacgtagatccatccaagacttgactgtaactggaacagaacctggtcagaaagttcaggagccctggaaa

SEQ ID NO: 642472 - DNA, 75 bp, Homo sapiens
ctgctctccaaggcctcggtgcagtttgtggaacacttccccaagctgctggggctcctttttcccctcctggcg

SEQ ID NO: 642473 - DNA, 100 bp, Homo sapiens
agttatatgttcaaaagggaacctcctgagggctgtgaaagggtcaaagtctttgaggaatgctcgggaatttcagagtgcctgccccggttgacatgca

SEQ ID NO: 642474 - DNA, 98 bp, Homo sapiens
ccctaaatcataaaactttgtaagtggcagaacaaggatttgaagctggcagtctggttccagaggttggaaagaaccatgactgtattcaggaaggc

SEQ ID NO: 642475 - DNA, 75 bp, Homo sapiens
tttgcagctgacctacatctcgaagggctttgttcgcgggggtcacagctctcatggctgcagctagcgtgaccc

SEQ ID NO: 642476 - DNA, 76 bp, Homo sapiens
ctttggggaaggagctctttatgtactttggaccaaaagctttacgaaaagaggcacagttagatgaagaaggaca

SEQ ID NO: 642477 - DNA, 100 bp, Homo sapiens
tgggcagcccccaccacccgcccaggccagccccagcagcaacagcagcacagagctcttcagaaaccaggctgctttcaggaacattgctgtggattcc

SEQ ID NO: 642478 - DNA, 100 bp, Homo sapiens
agatgatggaagaatttgtaccccatagcaagttttagaaagagcgttttcgctacgtaaagcacattcgataaaggatatggaaaatactttgcagctg

SEQ ID NO: 642479 - DNA, 75 bp, Homo sapiens
taaagagagcagtaccctgatggagtcccttgcaggtcaaaatgcagatcttcgtgaaaacccttaccggcaaga

SEQ ID NO: 642480 - DNA, 75 bp, Homo sapiens
gcagccccggaccccccgattcaccaacgagccctaggctcattgtcatccccaagccaggccagttctccaggt

SEQ ID NO: 642481 - DNA, 82 bp, Homo sapiens
ggagacagatgcgaggcggcggtcagacaatgcagatcttcgtgaagactctgactggtaagaccatcaccctcgaggttga

SEQ ID NO: 642482 - DNA, 82 bp, Homo sapiens
ggagagcggcctgcgggcgatcgggccgaggtgagaagccctaccactgcaactgggacggctgcggctggaagtttgcgcg

SEQ ID NO: 642483 - DNA, 75 bp, Homo sapiens
ctcgtgtcacatctgaaactcatctgtacctcacttagaaagacgcagggacagagctcatcgggaaatcaagga

SEQ ID NO: 642484 - DNA, 75 bp, Homo sapiens
agccgcgaggaggcgcgggaggtgttcgagaacgaccccgagacggccggctggatcctgcaggcagctgtagcc

SEQ ID NO: 642485 - DNA, 90 bp, Homo sapiens
tttgttaaggattccaagtaactcttatttgagggtgatgagacaggagtgatggataatctgctggaggccttgcagtccggggctgcc

SEQ ID NO: 642486 - DNA, 90 bp, Homo sapiens
cacagacaccgcctacaggagtatgatgcaagggaggggctggagacaggtctgaggaggaggcgtcatccacggagaaaccaaccaaag

SEQ ID NO: 642487 - DNA, 50 bp, Homo sapiens
ctccaaattcgcctccatctgtaccatggacccctcgtccagtcattgtg

SEQ ID NO: 642488 - DNA, 71 bp, Homo sapiens
ctttccaggcatgttccccttcaaggacaagttcggattatttgctgagggtgtgtccgcagccggccagg

SEQ ID NO: 642489 - DNA, 74 bp, Homo sapiens
ccgggagccctacgttcgtcagagagctccggagtaggacttttgacaggggatactgcatccaacctggggag

SEQ ID NO: 642490 - DNA, 50 bp, Homo sapiens
atcaaaaatagtgatagctttgataacctaatcacacggatgctacagag

SEQ ID NO: 642491 - DNA, 98 bp, Homo sapiens
tcgcagccagtctcctggccatgtgcgcaggggcagaagtggtgcacaggtactaccgaccggacctgtatccttttgatagagcagaaaaattcaat

SEQ ID NO: 642492 - DNA, 90 bp, Homo sapiens
tgcgcggttggggccactgcgaggccgttttaggtggtaaattcactccagcagcaacctcaggctgcatccccttcagtaccagagccc

SEQ ID NO: 642493 - DNA, 100 bp, Homo sapiens
ccggagagctgtgtcaccatgtgggtcccggttgtcttcctcaccctgtccgtgacgtggattgaaggctagccaggtccacactcctgctgatccccct

SEQ ID NO: 642494 - DNA, 97 bp, Homo sapiens
aagtcggtgactgcccacttggccgcgaagtggcccgagaccccgctgctgctggaggcaaggaatgtcgttgtctgctgggtcttcccctcttcat

SEQ ID NO: 642495 - DNA, 98 bp, Homo sapiens
aacttctgtgtcctgggcttctgggcgacagtcatcacacatcgctgctgtgagaggaaaggaaacagattcattgtctgtctgaggatgagttaagt

SEQ ID NO: 642496 - DNA, 99 bp, Homo sapiens
cccagagctcctggaccaatgcatcttcccaccaccttaaaccactggttattcacatcgaactcctttgatgtgatcagtgatgatgcttttattggt

SEQ ID NO: 642497 - DNA, 75 bp, Homo sapiens
gtggcgtccacctgctcgtccgcagaggccataaaattttgagtagaaaaatccagaaatttgaaaatcagtatc

SEQ ID NO: 642498 - DNA, 83 bp, Homo sapiens
tctcaaaaacaaaattctgaactcaggacttggcaagtgtttcccattaaacactaccaggacaaaatcaggccttacatcca

SEQ ID NO: 642499 - DNA, 130 bp, Homo sapiens
ttagtctcctcctcggcgggagccctcgcgacgcgcccggcccggagcccccagcgcagcggccgcgaggctgacccgcggctgattgagtccctctcccagatgctgtccatgggcttctctgatgaag

SEQ ID NO: 642500 - DNA, 98 bp, Homo sapiens
gagcagctttggataatgacgacagcaacccgaagacagggaaatttagattgagacctacaggctgacgttccgggcaaatgccagggcccgcaccg

SEQ ID NO: 642501 - DNA, 75 bp, Homo sapiens
ctgcgatgctgtctggactttgctgtctctgaacagtgattacatggatccaacacctgatccccaagattgaag

SEQ ID NO: 642502 - DNA, 50 bp, Homo sapiens
gttgaactgtggagtgtgtgggtcacggagctgctggacgtctccatgga

SEQ ID NO: 642503 - DNA, 74 bp, Homo sapiens
tgaaatcgcaaactgggcgtctgttccggcgccggacccctatttgcaaaggaaactgttaaggcagcaataat

SEQ ID NO: 642504 - DNA, 98 bp, Homo sapiens
gccgctcggacgccgccggcaccatgggctgctgcaccggacgctgctcgctcatctgcctctgcgcgctgcagttgatttgtccaatatgtgcagcg

SEQ ID NO: 642505 - DNA, 146 bp, Homo sapiens
gtccaggcggctacattcggcccggccatggcagcggcgcccctgaaagtgtgcatcgtgggctcggggaactggtttaactatagatcaacacatcatcttgcatctcatgggttctatgaatttttaaattggtttgatgaaag

SEQ ID NO: 642506 - DNA, 80 bp, Homo sapiens
actttatgaagaaggttccaacaaaagactttttaatgttgatcggcatgttggaatgcaagataaagccgatcttatcc

SEQ ID NO: 642507 - DNA, 87 bp, Homo sapiens
cccaggtcggcgaccgtctggtgctcaaagccatcgtgaacaatgccttcaaacatagcctcatctagttgaatctgaagatgtgga

SEQ ID NO: 642508 - DNA, 100 bp, Homo sapiens
agctatacatttacatcagattattgggagcctatttgttcatcatttctcgtgttcaaggtgccttagctggaccaattattgtggagccacatgtcac

SEQ ID NO: 642509 - DNA, 75 bp, Homo sapiens
gtggcctggagctcattgcctcagagggccatgctggataaggagctggctgcctctgtgaacatcctactcaag

SEQ ID NO: 642510 - DNA, 100 bp, Homo sapiens
ccaatttcctcttcaacccactgcttcctgactcgctctactccgtggaagcacgctcacaaaggacacagcattgttggttttgccatgtactatttta

SEQ ID NO: 642511 - DNA, 74 bp, Homo sapiens
tgaggcacctaaaaattgtataccgcagattcaggcatgtaatgagttcacgacccatgtcatgaacctgctga

SEQ ID NO: 642512 - DNA, 100 bp, Homo sapiens
gttaagttatgctgtggaggaagaacatgcatatttgggtccaactgtgaagccagatgataaggtatataccctctcagtgtctggagaccggctgatt

SEQ ID NO: 642513 - DNA, 83 bp, Homo sapiens
cgcggatcccagcttcctgcagccagacaatgcagatcttcgtgaagactctgactggtaagaccatcaccctcgaggttgag

SEQ ID NO: 642514 - DNA, 90 bp, Homo sapiens
ctttggaggaggggtgtttctggccacgtgcttcaacgctctgctgcccgctgtgagggaaaagtactgctgcgcacggccactgccaac

SEQ ID NO: 642515 - DNA, 75 bp, Homo sapiens
tgcacttcttgccacaatgttacagaggcaggtatgtttattcctaaaacgaggtgccaatcaacatgccactga

SEQ ID NO: 642516 - DNA, 75 bp, Homo sapiens
gcctttgcctcagtgagcacagttcagaagatgaccgtcgtaccttcacagcggaccgagaaagtcgttacgagg

SEQ ID NO: 642517 - DNA, 90 bp, Homo sapiens
gtggctgcctttgttgctgctgcacattaggttgcagtatgtggccagttatttgcctcagtaaaagagagttcatgatcaagtgttgcc

SEQ ID NO: 642518 - DNA, 97 bp, Homo sapiens
gctcgcgggtctttggacaccaccggtcctgagtccgcgtgtaagaagaagcttgggaagctgccacctcagtatgccctggagctcctgacggtct

SEQ ID NO: 642519 - DNA, 82 bp, Homo sapiens
ccacgctgcgggcccgggccatggccgccgccgatgccgagagtttgttgacatttgaagatgtggctgtgtatttttctga

SEQ ID NO: 642520 - DNA, 100 bp, Homo sapiens
gacattctgatttggatgatgctagagcacagaaaatagaatcatttgctgtttcaaatagagaactgtgcgatgatgagaaagagttcatacattttcc

SEQ ID NO: 642521 - DNA, 90 bp, Homo sapiens
atttctcttctaagagaagtagtaaaaccagctgcagtgttatcaaagattgagaggatccagaatccagatctctggaatagctaccag

SEQ ID NO: 642522 - DNA, 75 bp, Homo sapiens
tcatcccaggttgccttggaaaatgccaacgccgtgtctgaagatcctgcagctccaccaaagaaaccgcctcgc

SEQ ID NO: 642523 - DNA, 100 bp, Homo sapiens
cagggctggcacaggtgtggacaatgtggatctggaggccgcaacaaggaagggcatcttggttatgaagaccagcaacggagcgaggagctggctcgaa

SEQ ID NO: 642524 - DNA, 76 bp, Homo sapiens
ggaatcatgactcctggagaacggatcaagtgcttattacaggactcatctgatgatgtgagaagagttcagagga

SEQ ID NO: 642525 - DNA, 80 bp, Homo sapiens
ccctggtggggattgacagccacgggaaggtccctgtgcgttttattgcgacctgccggtgggaactttgtctccgagtc

SEQ ID NO: 642526 - DNA, 95 bp, Homo sapiens
gaaatcagctcgagacatgtgggctgattacatcctgaacgctgccaagaagagagaccaggagcaagtggagctggaaggcgagagctccgcac

SEQ ID NO: 642527 - DNA, 106 bp, Homo sapiens
tatggcctcaatatgtgccgccagtgtttccgtcagtacgcgaaggatatcggtttcattaagtgccgaaaacatttgaagagtcggagattagtcagtgcaaaac

SEQ ID NO: 642528 - DNA, 50 bp, Homo sapiens
tccagatcctccaaagacagatctgatgaagaggaagatgatgatgtagt

SEQ ID NO: 642529 - DNA, 99 bp, Homo sapiens
agagcagtaccctgatggagtcccttgcagatttgaccacctggtggccatagagcgtgccggaagagctgctgatggcaattactacaatgcaaggaa

SEQ ID NO: 642530 - DNA, 101 bp, Homo sapiens
cccccttcctattttgccacgttttactcgtgcacaccccggatgaaccgcaggaggaggaaaggcaagctctgactctgaggttggaggcagaacagcag

SEQ ID NO: 642531 - DNA, 75 bp, Homo sapiens
tatactacatggcaaaatgggaaagttgttgacctcctgtactggagagacattaagaagactggagtggtgttt

SEQ ID NO: 642532 - DNA, 129 bp, Homo sapiens
ttatctcaaacctttaaaccctcctcaggagctccttaatgtctaccccaataatctacaggcaactgcaggaacagatgctgcttgtgttgctcagagtcacggaatctgtactgaagatgccatcac

SEQ ID NO: 642533 - DNA, 96 bp, Homo sapiens
gccgccgccgccgccgccgcgccgagcggaggaggaggaggaggcgaggaggagagactccctgaccctctattctgcaccctgtgagccaccgag

SEQ ID NO: 642534 - DNA, 98 bp, Homo sapiens
tgccccaccaggaggcgactcctcgggcctccaaaggggcccaggctggtaatcctaaattggagagtcagagagtaaataaaaaagtcaataatgat

SEQ ID NO: 642535 - DNA, 83 bp, Homo sapiens
cgcagggcgacggccccacctccggccactgggacggcggcgcggagaaggcaggcgccatgtcagaaccggctggggatgtc

SEQ ID NO: 642536 - DNA, 100 bp, Homo sapiens
ttccctgatgatcagactcagaaaattttggaaagagaagatgctcggctgatgctttaccgatttgttacaactcaagcaagggccagcagaaattctc

SEQ ID NO: 642537 - DNA, 74 bp, Homo sapiens
ggatatggacccatcatttctagtctccctcagctgttgagcaggaggagcatattatttaatatctagaagtc

SEQ ID NO: 642538 - DNA, 88 bp, Homo sapiens
cactggacgccacaggggcaaggtggaagttaaacgagctgagcctcgggacagcaagagccaagcgccgggacagccaggtgccagc

SEQ ID NO: 642539 - DNA, 82 bp, Homo sapiens
ttcaaggtggggttggcatcccccacatacggttgttgatcattatgaaaatcctagaaacgtggggtcccttgacaagaca

SEQ ID NO: 642540 - DNA, 134 bp, Homo sapiens
cccggctaccctggacagcgcatcgccgcccgcccgggtcgccgcgccacagccgctgcggatcatgtactatactggcaattgctggagaagattttgcaattgttgcttctgatactcgattgagtgaaggg

SEQ ID NO: 642541 - DNA, 101 bp, Homo sapiens
gtcgagttcccaaaaagctccgcaggggctgtagggaggtggcagcacaccctgggccccccactccccgccgcaagtcctgaggatggccagcagagaaa

SEQ ID NO: 642542 - DNA, 101 bp, Homo sapiens
ccaaggcggccctggctgggggaaccactatgatcattggtgagtttgtaagtgatgcccttctcgttcctgacaagtgcaaattcttacaccaggagagg

SEQ ID NO: 642543 - DNA, 75 bp, Homo sapiens
cgccgtggcagcctgaacggagtgtgcgacggattgggagaacaaaatccagtctcatagcagaggagaatataa

SEQ ID NO: 642544 - DNA, 74 bp, Homo sapiens
gtccccggcgcgaagaggctggactcggattcgttgcctgaggtgccccctgataagtgccgatgtgccgtggg

SEQ ID NO: 642545 - DNA, 90 bp, Homo sapiens
ctgaagaagcagttctacaaggcgagccagaggcctttgaaattgttgttcgccatgccaagaactacaccaatgccatgttcaagaaca

SEQ ID NO: 642546 - DNA, 101 bp, Homo sapiens
tgtgaagaacatcaagcaggcagaatttggacgccgggagattgagattgcagagcaaggaattcaactgaaaaaggtgcaggagcagcgggagcaggagg

SEQ ID NO: 642547 - DNA, 99 bp, Homo sapiens
cttccgaaaccacaagtttgccgatgcgcacatggcacagcactcaagcctacggccccaccagtgtagccagtgcagctttgcctccaagaacaagaa

SEQ ID NO: 642548 - DNA, 101 bp, Homo sapiens
gctgggcaccctggcaggcagcaagtactataatgtggaagccatgtattgctacctgcgctgggttaaagcacgaattgggagctctcagcgacatcacc

SEQ ID NO: 642549 - DNA, 75 bp, Homo sapiens
cttccttatgaactgactgaaggggacatcatctgtgtgttctcacaatcagaagatttcttggttatacatgct

SEQ ID NO: 642550 - DNA, 75 bp, Homo sapiens
ggtcggatttcaccacaagaagggctgccaggtcatcatcagatttgaaatatttaaagtggatacaaaactatt

SEQ ID NO: 642551 - DNA, 50 bp, Homo sapiens
cctgaggagagtcaggccacgaacccacaatacattatatgcaccagaaa

SEQ ID NO: 642552 - DNA, 75 bp, Homo sapiens
gtgggcaccctgcaggtggtcagacatgtcatcaactcagctgaatgtctacacaaggaagtacaggatttggct

SEQ ID NO: 642553 - DNA, 88 bp, Homo sapiens
cggcgatgtgccaccgaggctgaggatgatggtagattgccaggtatctcttccaaatgcacaatgaaggagttctcatcaacagcac

SEQ ID NO: 642554 - DNA, 100 bp, Homo sapiens
accacggttctcgggctcctggatatttatggctttgaagtgtttcagcataacaggcgggcagggctgggcagcggcctgagtctcagcggacttgtcc

SEQ ID NO: 642555 - DNA, 90 bp, Homo sapiens
atcccactgagacgcttcggagagtgttgccaaaagtcagaagtattgggaaagggtcgttgtggtgcatagacccagagtatagacaaa

SEQ ID NO: 642556 - DNA, 100 bp, Homo sapiens
tttcaggagctattggaccctgtgtgtcactcaattctaaaggaccctgtgtgtctgaaaatttatcaggaactgttgccgttattacatcagatgggag

SEQ ID NO: 642557 - DNA, 75 bp, Homo sapiens
gggcactgaagggggactacaggttcgagactgggatctagcaattgggaggcagcagacttgggtaatgaagag

SEQ ID NO: 642558 - DNA, 100 bp, Homo sapiens
gaagctttacgttcatgtaaacagcatgacgtgaggccgtggatgcaggcattaaggatatttctttaatgggaaaaatgtacctcaaaacatcacctat

SEQ ID NO: 642559 - DNA, 50 bp, Homo sapiens
gtcacgagcctctcaaagagaaggaatctggtcggcagccctgaatggag

SEQ ID NO: 642560 - DNA, 83 bp, Homo sapiens
gagaaaagagaaatggagcaaaaacattccaccattcaacaaaagaattactggatcttcagcctttaccaatcacagctttg

SEQ ID NO: 642561 - DNA, 100 bp, Homo sapiens
ttcagatgtggtggaatatgccaaggaaaaactggagagcttcatcaaaaatagtgatagctttgataaatcagtacctgggaagtacgcctgtgggctc

SEQ ID NO: 642562 - DNA, 97 bp, Homo sapiens
cctcccctcaggaacgtgtcccggggccgacccggcccgtagtgtggaagcagcttcagacatgggatgtagagctggaaagatctgcagaatcctg

SEQ ID NO: 642563 - DNA, 100 bp, Homo sapiens
cgcctggagctgggcgacgtggaggaggaccaggtggtggccgtgttcgtggtcaccttcgacccccgctcggatacagatccacgggttttagaaaaac

SEQ ID NO: 642564 - DNA, 79 bp, Homo sapiens
tttgtggatcgctgtgatcgtcacttggtcaaaatgcagatcttcgtgaaaacccttaccggcaagaccatcacccttg

SEQ ID NO: 642565 - DNA, 80 bp, Homo sapiens
ctggaaattgcgctggaccgtcgccttgctcctcgccgcggcggggactgcaggctttccatctgatggtcccctggtgt

SEQ ID NO: 642566 - DNA, 101 bp, Homo sapiens
agattgctaatggctagcaaaaaagatgatccgggtataataatgaagttaaaagagcagcactccaagggttcttgaagcttttgagattaacaatggca

SEQ ID NO: 642567 - DNA, 75 bp, Homo sapiens
ctttgaactttttcgttgccatgataaacttctgcgaaagttaagggaagaaagtcggaggctggctttggctgc

SEQ ID NO: 642568 - DNA, 83 bp, Homo sapiens
gtccgggccagcataggtgctgggttcatttaccctttggtcggaacgcatcaacaaagagagcattgtggatgtagaaggtg

SEQ ID NO: 642569 - DNA, 75 bp, Homo sapiens
ggaaggaacagaagagtgtcgtctcctagaaatctagcactggagaaacgccctagcacaaaacacagatcttaa

SEQ ID NO: 642570 - DNA, 98 bp, Homo sapiens
cggaggcggctttggaagccgtgcggagcgagttacgagaattcccggccgctgcaaggggtggacattgcatctgggatggccattgaagggatgtg

SEQ ID NO: 642571 - DNA, 97 bp, Homo sapiens
tcccacagatcagcaaggaacattttacagtatatcaacaggaaatctctcagtttgtgaagtgtggatatgcaggctctaactttccagaacacat

SEQ ID NO: 642572 - DNA, 90 bp, Homo sapiens
ctacaaaggtctggacactgaaaccaccgtggaagtcgcctggtgtgaactgcagagtccctgtgaagcaggaagagtgagggcaggttc

SEQ ID NO: 642573 - DNA, 97 bp, Homo sapiens
ttcacacattgaaatctgtcatctttttcagagagaaactttcggtaatgtattggtgtgcccgtttaataaaagaatatggaaactgaacagccag

SEQ ID NO: 642574 - DNA, 73 bp, Homo sapiens
agacgggagtattatgaaaagatcgtgatggtaatgcccgaaggagcagacacggtgtccaggcccagtcccg

SEQ ID NO: 642575 - DNA, 51 bp, Homo sapiens
gccgcccgtccacacccgccgccagaactgaagagagatctggccaaagac

SEQ ID NO: 642576 - DNA, 111 bp, Homo sapiens
actccgtgtagacaaagccccactgactcccactggttacagaatgtctgaaggggacagtgtgggagaatccgtccatgggaaaccttcggtggtgtacagatttttcac

SEQ ID NO: 642577 - DNA, 100 bp, Homo sapiens
atcccactgagacgcttcggagagtgttgccaaaagtcagaccccagcatgagaccagatgtaagctctcctccatccagctcctcaacagcaacaacag

SEQ ID NO: 642578 - DNA, 97 bp, Homo sapiens
gacatttaattttagggtcctttatatagaagggagagtaggcagcccctggaagagatcatcacctactacccagccatgaaggctgtgaacgagc

SEQ ID NO: 642579 - DNA, 87 bp, Homo sapiens
ccgccccgcggggggtgggcgcagctcgtcgcgctccgcacaaacagggagagcaacaagccccggccctcagagctcagccggatg

SEQ ID NO: 642580 - DNA, 75 bp, Homo sapiens
gaacgagaggaggcgttggtcagaggagtcttcatgaaggtggtgaagcccaagatcaggatcctcatgaccagc

SEQ ID NO: 642581 - DNA, 96 bp, Homo sapiens
gagaaaagcgagaccgcgtgcgaggaccggagatggtaacctgcacctcaatgtgacggcggaggccttcagcccctcgctcctggctgccctgga

SEQ ID NO: 642582 - DNA, 99 bp, Homo sapiens
gaacttagaaggcaaaagagggaggagatgcgactcgaagcagaaaggtaaaagagaacctgctttcatgcaagatgctgctgcactgcaaacgggatg

SEQ ID NO: 642583 - DNA, 100 bp, Homo sapiens
ctgccggactatgagctcaagctcatccaccacgacagcaagtcctggaaagacaagcatcatgcctctgaccagtgccttcagggctgtggacaacgac

SEQ ID NO: 642584 - DNA, 98 bp, Homo sapiens
ctgaaaatgacttcgggaagggccctgagccagagtccgtcatcggttactccggagaagatttgctgctgctgctgggaggacgacggacggcagcg

SEQ ID NO: 642585 - DNA, 83 bp, Homo sapiens
cccgtcccgaccctggccgccccgagcggagcctggaggtctggccgtgggcctgggcttcggggcactggcagaggtcgcca

SEQ ID NO: 642586 - DNA, 80 bp, Homo sapiens
cgcgcctgtagctcgcgggcctcgcagttctgcctcctgggggcattgctggcccccatccgagtgcttctggcctttat

SEQ ID NO: 642587 - DNA, 100 bp, Homo sapiens
gcgcatctccaacagcgacctgagcggacatggatttgattgacatactttggaggcaagatatagatcttggagtaagtcgagaagtatttgacttcag

SEQ ID NO: 642588 - DNA, 96 bp, Homo sapiens
gagtccagagcagaggaatctatacaaagaagtgatgctggagaattacaggaatcttctctcattggagctgcagaaactggagggcagcagtgg

SEQ ID NO: 642589 - DNA, 51 bp, Homo sapiens
tgcactgaaaggaaatgacggattttgtcggtgcccactttctggaggcag

SEQ ID NO: 642590 - DNA, 100 bp, Homo sapiens
gggttcccgggattggaccgacgcagccatgatagggatgaggaagaaatgaccaaacgagatgacaaaagagatatcaacagatactgcaaggagaggc

SEQ ID NO: 642591 - DNA, 75 bp, Homo sapiens
catcaggaagcgcggggcggcggcgaaaggacgattgccatcacgaaagccaaagtggatttctccagtgtggtg

SEQ ID NO: 642592 - DNA, 51 bp, Homo sapiens
ctcatattaccaaccgcagagaggaaaatgtttataggaggccttagctgg

SEQ ID NO: 642593 - DNA, 75 bp, Homo sapiens
agcagtcaagtatgtcccaaacgtctacctaatctgggagcctgcaagtgacaacagcctttgcggtccttagac

SEQ ID NO: 642594 - DNA, 75 bp, Homo sapiens
agattgagtccaagttcaaccaagccattatctcaggaaacaggctcgacagctggaaaatgaacttgacctgaa

SEQ ID NO: 642595 - DNA, 90 bp, Homo sapiens
cagaaacctgaagttagaaaggctcaacgagaacaagctatcaggcagaaacggaattacagagagctgcaatggatgctagccgaacaa

SEQ ID NO: 642596 - DNA, 96 bp, Homo sapiens
gcatggcgaagtccccggagaactctaccctggaggagattctggggcagtatcaacggagtctccgggttggagaatctaatgctggacaaagat

SEQ ID NO: 642597 - DNA, 75 bp, Homo sapiens
gaaacaagttgcagagctacgtggacgcaggaactccagatggacactccacagctgaccttgactgaactccgg

SEQ ID NO: 642598 - DNA, 78 bp, Homo sapiens
aacagaatacactggacctgaaagttatgtggctcaaatgattgtgattctgatgctcacagtaccacctcaagtgcc

SEQ ID NO: 642599 - DNA, 95 bp, Homo sapiens
gcagccgaagctaccagaccaacacagcagacacagatgatccagctctgtcggaggcacgtaggcacagccaaatctcatgctgtacattgatc

SEQ ID NO: 642600 - DNA, 51 bp, Homo sapiens
cagaagcccttcctcagaccgggatttatagtaaaacaagtgtcttcccaa

SEQ ID NO: 642601 - DNA, 100 bp, Homo sapiens
agggaaagaaccctggctggggaaaagggaagtgaaaagagatctgttttcaggtgcgaagcagactgaggctaccatgacattcaaatataatcggcag

SEQ ID NO: 642602 - DNA, 98 bp, Homo sapiens
ggatgttcatgggcagcaccatcgagccagaagcagtatttgtcctggatgtggtaccacagattgtcccacctacacagcaggcttcaggacttgct

SEQ ID NO: 642603 - DNA, 75 bp, Homo sapiens
ggaagtgtctcttagcagcgcgcggagaagaacggggagccagtactatactggcaattgctggagaagattttg

SEQ ID NO: 642604 - DNA, 75 bp, Homo sapiens
tctcaagttcattgatcgtaagagctctctcctcacagagtctccagaaatgctttgggttcatctttcattgct

SEQ ID NO: 642605 - DNA, 56 bp, Homo sapiens
tgagcaaacctcgcctctcctacaacggtctcacttgccctggaacctctgtcaga

SEQ ID NO: 642606 - DNA, 74 bp, Homo sapiens
gctgatgacctcattgatgtggtggaaggaaacagatgactttgaagaagccaaggaaattttgacaaagatga

SEQ ID NO: 642607 - DNA, 75 bp, Homo sapiens
cgccgccattgccgctctctcggcctcattgctacgatttcagagtaccctggtaatagctgagcatgcaaatga

SEQ ID NO: 642608 - DNA, 75 bp, Homo sapiens
aaattggcaaatctgttactgcagacagatgggaaaaatatttgatcaaggtcgaatcaaatattcggaacaggt

SEQ ID NO: 642609 - DNA, 75 bp, Homo sapiens
aggggagccatggcggctgacagtcgggaggagaaagattccacagtggtgtgtggagtacatgcgatcattacc

SEQ ID NO: 642610 - DNA, 82 bp, Homo sapiens
agctcaccaggaagatgcccattattggtcgtaagttccagtgtctcgccccatcctcaccctcagggttcccagggcccag

SEQ ID NO: 642611 - DNA, 75 bp, Homo sapiens
cagctgctacagaccacaaacaccccatcagccaagagagacccttgaccattcctcaagaattttgtatccaag

SEQ ID NO: 642612 - DNA, 100 bp, Homo sapiens
tcctgagacagctgttaaattctgggcatatgaacaggcttgagaaagagatccaagatcttgaaaaagctgaactgcaaatctcaacgaaggaagaggc

SEQ ID NO: 642613 - DNA, 97 bp, Homo sapiens
catgaaggtggtgaagcccaagcttagcagtgtctgcaaaaacgaatcttttcctacaacctgttaactgactggactgttggtaacaaagtaattg

SEQ ID NO: 642614 - DNA, 102 bp, Homo sapiens
tacctttccccagtggcccagagccaggagttctctggccgctctctggacagccagggaagacctagagagtccactgcccaagccaaagccacacagttt

SEQ ID NO: 642615 - DNA, 100 bp, Homo sapiens
cagggacctagtggcccagtggaagaagctggttcctgtggaacgatctcagtgaccagctgctggaggtggtcggcttggaaggagccatggagatggg

SEQ ID NO: 642616 - DNA, 75 bp, Homo sapiens
atgcgtatctttaagaaattttatcttttgaaacacgttctgattaaccaaggattggctcaagctacccaggaa

SEQ ID NO: 642617 - DNA, 75 bp, Homo sapiens
gatgtacttgtgcttcctgctggccgtgctgctgcaggttgaagccatccttgtcaatatatttggtggtatcgt

SEQ ID NO: 642618 - DNA, 100 bp, Homo sapiens
agctccagcgtctgcattgctccggactcagccaagttccccaacggctccccgtcgtcctggtgctgcagcggttacaagatgttcacctaagattgag

SEQ ID NO: 642619 - DNA, 50 bp, Homo sapiens
gtggaagatggcgcctgttgtgacaggcgaatgctgatgtcttaaaggcg

SEQ ID NO: 642620 - DNA, 82 bp, Homo sapiens
attccccggaatcgtgtgctgggctggtcccccttggttcctgcacttggccatcatccatgaagaaaaggcactgaccatg

SEQ ID NO: 642621 - DNA, 100 bp, Homo sapiens
ggcagtcccgggagaacctgcggcggccggagcggcagtaccaagaagcaagagagacctatcttgatctggatagtaaagtgaggactttaaaaaagtt

SEQ ID NO: 642622 - DNA, 98 bp, Homo sapiens
gcttactgaatatcctcttataattaatgcaataaaacgcttccatctttatccagagcttacctgttgattcggtggtaattacagaatctgatgca

SEQ ID NO: 642623 - DNA, 100 bp, Homo sapiens
ggagagcccacaggtgctaaagagagcagtaccctgatggagtcccttgcagtgttctaagaacggaagcatctgggctggatggaatttagcatcaagc

SEQ ID NO: 642624 - DNA, 97 bp, Homo sapiens
aatagaagctgtggatgaatttgcttttctggaagtatcagatgtagaaggtggtgatggactgcagctcagaaaggaacatactctcaaaatattt

SEQ ID NO: 642625 - DNA, 100 bp, Homo sapiens
gttcctgagcatgaggctcccagcagtgagtccttccttcagaagggaaatttctgagggtcaggaaggggaatctgtacctcactccttgaacaccaag

SEQ ID NO: 642626 - DNA, 90 bp, Homo sapiens
aggagtggccagcgagcacatgaagcggcagtttctatggagctttcgcctacccggagaggcccagaaaattgaccggatgatggaggc

SEQ ID NO: 642627 - DNA, 74 bp, Homo sapiens
tcgactgtgtaaacaactagagaagattggacagcaggtcgacagttatcaatactctggctgaccatcatcat

SEQ ID NO: 642628 - DNA, 97 bp, Homo sapiens
cgcgtcccgctcgctgggagagaggtacctctccttttccctctccctttccctaagggagttggtctctcagtccatgggcaatttcgagtggcta

SEQ ID NO: 642629 - DNA, 74 bp, Homo sapiens
cagaatcgactcaagagttacatgcatcaggcaatgctggacgtggctgcaaaccagggctggctggtgactgt

SEQ ID NO: 642630 - DNA, 101 bp, Homo sapiens
ccctttctatgtactgcgcctggatgtggccagtttttgaaatcatgaatcctgtttatagtcctggatcttctggggttccctatgcaaatgccaaagga

SEQ ID NO: 642631 - DNA, 96 bp, Homo sapiens
aggacccaggagaaattcgccctcaaaggatcgcttacacctgagacgaactacagaacagcacgtaccagaggtggaagtccaagtcaaacgcag

SEQ ID NO: 642632 - DNA, 90 bp, Homo sapiens
gctatggtgacagactatggggcctttatcaaaatcccaggctgtcggaagcaagttgctctaggtcgtaaccagcctttgaaaaaggag

SEQ ID NO: 642633 - DNA, 97 bp, Homo sapiens
ctgaaagtcccagatttttgctcattaacagaaaagaagaggagaatgctaagcagagttcatcatgcctagtggcgtataagaagaccccgccacc

SEQ ID NO: 642634 - DNA, 74 bp, Homo sapiens
ggaggttttcaggaccaaaattgtggaaaagtcactctgatcaggatcctcatgaccagccaaagagaagaaga

SEQ ID NO: 642635 - DNA, 100 bp, Homo sapiens
gatgaggatgaagaagacgaggtgcagcgccgagccttcctcttcctcaacccggacgatcatggccgaacggcgtaatgcccgctgcttggtaaatgga

SEQ ID NO: 642636 - DNA, 96 bp, Homo sapiens
tgcaaggagctgagagaccctgtgacctcgggactcaacacctcggtgttcgttactatcttggaaggagtgctggcaaaattatccagatatgac

SEQ ID NO: 642637 - DNA, 100 bp, Homo sapiens
gacgaaggcaagaccacaatgaacttcattgaggcagcgttgttgatccagggctctgcctgcgtctacagtaagaagacccccccaagacacatatgac

SEQ ID NO: 642638 - DNA, 75 bp, Homo sapiens
agggcgcgctcgagacgctcctgagtacctaggtgctgatatggaagaatttcatggcaggactttgcacgatga

SEQ ID NO: 642639 - DNA, 87 bp, Homo sapiens
gcacttaagcaaacgggaattctcgccttcgagagctgtgcccaggagtgaacaaccagccctacctctgtgagagtggtcactgct

SEQ ID NO: 642640 - DNA, 98 bp, Homo sapiens
tagaaataaaagatgaactaaagaaaaagaagaatctcaaccgatctgattgtgcttgagaacagtagtcgagaagacaagcatgaatgtccctttgg

SEQ ID NO: 642641 - DNA, 100 bp, Homo sapiens
atccaaacctgtcaacatgttgaaattgtctgccgaagttcaacgcccattgagatggccgtgaaggagaagatttctatgttttgtcacgtgaaccctg

SEQ ID NO: 642642 - DNA, 100 bp, Homo sapiens
acaaggatggggtggtgaccatcggctgtgtgggccactcctcaggatagtcaggaaggaacctttgggtcagagcattcagcgtcaccatcacaaggga

SEQ ID NO: 642643 - DNA, 96 bp, Homo sapiens
tcctaccatgtcagccttcccagtagctggaactacagaggacagaaaaatggttcgtattgttcttacaaagacaaagagagatgcagcaaattg

SEQ ID NO: 642644 - DNA, 83 bp, Homo sapiens
ccaagactctgaggctgatatgcaatgtcacttacaacattaatcagatactgcatttaagctgcagaaccttggcctgaaaa

SEQ ID NO: 642645 - DNA, 80 bp, Homo sapiens
ctgaatcttctgggagctgaggaaccagatatcttgaaaagctgccagaaagattggctctaccagtgcacctggacagg

SEQ ID NO: 642646 - DNA, 74 bp, Homo sapiens
ccaggcatcctactatgcttcctgagtgcttctttcttggagctgaccatggagagtccaagtacctttgctca

SEQ ID NO: 642647 - DNA, 96 bp, Homo sapiens
ctctttcgaagccattcagtcctcaatctccttttccttggctacccgaccacctggcttcatgtgtggatttccacggctcttgcccagaggcgg

SEQ ID NO: 642648 - DNA, 99 bp, Homo sapiens
ccccgggctcccagctgcccacctcatagatccctcatccacctacatcaggcaactggagagcaaagtgaggctgctggagggtgacaagctcctcgc

SEQ ID NO: 642649 - DNA, 100 bp, Homo sapiens
actcatgcccagcagcagcaagcagtttgtgaagtgtggatatgcaggctctaactttccagaacacatcttcccagctttggttggaagacctattatc

SEQ ID NO: 642650 - DNA, 100 bp, Homo sapiens
aagagaagcagaattatacctagaagtctactaatggacagttagtcacccacctacatgttgagacaaaacttacctggggtccctacttatggtttta

SEQ ID NO: 642651 - DNA, 100 bp, Homo sapiens
cttttttataaactggctgaagcccatccagactgtttgatgctgaacttcaccgttaagtgcaagaagaaacacacgctgctgtgccccgactttgccc

SEQ ID NO: 642652 - DNA, 75 bp, Homo sapiens
aaactacaggcggggacggcttctcggatgtacagttacccagcacgtgtacctcctcctcctcctattgctcgg

SEQ ID NO: 642653 - DNA, 128 bp, Homo sapiens
ttatgttggtgacatcgtggacattccaggaacctctgttgccatcagcaactgtgatggtctggttttgaaacatctgtttaccagtcacagcactggcattggaagaaaaggatgccaattaacaa

SEQ ID NO: 642654 - DNA, 48 bp, Homo sapiens
agccccgcctctgccttcggataggtgacagatcagtcagtgaaagca

SEQ ID NO: 642655 - DNA, 100 bp, Homo sapiens
gagactgtaggcactgccatggcccctgtgctcagtaaggactcggcggacatcgagttaattggccttggtcctcacagctccaaaaagaaacaggatc

SEQ ID NO: 642656 - DNA, 100 bp, Homo sapiens
tgttggacccagaggttacccagcagaccatagagctgaaggaagagtgcaaagactttgtggacaaatggagatgaggcgcctggtgtttggatgatcc

SEQ ID NO: 642657 - DNA, 80 bp, Homo sapiens
ccagggcctcggcggccgctctgcctgcgcgctgctcctgctctgctacctgggttattttggagctgttggagcactcc

SEQ ID NO: 642658 - DNA, 75 bp, Homo sapiens
cctgcagaaggtctctggagacatcttcagcagggcgtggagcgcatcgacgagcccggcctgcggagcctgcgc

SEQ ID NO: 642659 - DNA, 90 bp, Homo sapiens
gtaaaatgcaaagtataaatgaagacttaaaagatatattacatgctgcaaagcagatagagggtgatgagactggtgtgatggataatc

SEQ ID NO: 642660 - DNA, 82 bp, Homo sapiens
ccgcgatggtgacccggttcctgggcccacgctaccgggagctggtcaagaactggtgagaagccctaccactgcaactggg

SEQ ID NO: 642661 - DNA, 50 bp, Homo sapiens
cagatacaaggacatactgccatgctacctcggacctgaacagctgcctg

SEQ ID NO: 642662 - DNA, 75 bp, Homo sapiens
aagcagcgtgcgttcagccctgggccgcgaccatgcccaggaagaaggcggcggcggcggcctgggaggagccga

SEQ ID NO: 642663 - DNA, 82 bp, Homo sapiens
ccagaagcgagtccccaatgcctacgacaagacagccttggctttggaggtgtctgacttccagcaactgctggcctgtgcc

SEQ ID NO: 642664 - DNA, 100 bp, Homo sapiens
ctgctaccatggggatcttagagaagatctcggagatcgagaaggagatcgctcggacacagaagaacaagggtgctgatagtctgcagcacaggtttag

SEQ ID NO: 642665 - DNA, 90 bp, Homo sapiens
ccttcccagtagctggaactacagatcctgtgccggtatcagaatatctggaacatcaacctgcagttgcggcccagcctcataacaggg

SEQ ID NO: 642666 - DNA, 75 bp, Homo sapiens
caccgtccgagacgccaaacacaccaactttgtggagttttacatgtggcacccataaaagatgaggctgagaac

SEQ ID NO: 642667 - DNA, 107 bp, Homo sapiens
gtaaggacttaaaaagacttttctccggaacacaggttttgatgatgatggttcagaatttcatgaacatatatttctggagaaacacctggagagctttccaaaac

SEQ ID NO: 642668 - DNA, 90 bp, Homo sapiens
gccgtgaggaactcttcaggctccagaagtgcagagcattgtagaccaaggagccatggataggagaagtatgggtgaaacagaaagtgg

SEQ ID NO: 642669 - DNA, 97 bp, Homo sapiens
gcagcccgcgcacagctgctcccttcgccttcgccctttccacctcgcggcagttcggaactgcctcctgagcgtggagcctgccattagcaccaag

SEQ ID NO: 642670 - DNA, 114 bp, Homo sapiens
ctacttcgtgctgtgcgggatcgacgcggacagcgggctggagcctgacgagctggcggcaattctgtggtgttcttggtcacacatttatggagtttctgaagggcagtggag

SEQ ID NO: 642671 - DNA, 100 bp, Homo sapiens
ccagaggatcagtgtccgatgaggaaatgatggagctcagagaagcttttgccaaagttgaatgtggacatgcttactcggggattgtggcccaccagaa

SEQ ID NO: 642672 - DNA, 88 bp, Homo sapiens
aaaggttggagctgccgccgcctgcagtcggtgaccgcgcgactcggcgcccgcccgcgttgaagactgggatagtttccaagctatt

SEQ ID NO: 642673 - DNA, 89 bp, Homo sapiens
cggcgaggccgggactcgggcttagggcctgctgtggaggcagcggcggacgccgagctaagcaatgcctataagaaaatcttagaaac

SEQ ID NO: 642674 - DNA, 90 bp, Homo sapiens
gcagccaaccagacaccatctccattgcttctaggacctctcagaacacagtggacagtgacaaggcaaaatcctgacagatgactttgc

SEQ ID NO: 642675 - DNA, 89 bp, Homo sapiens
cgctatgatgtggaccgggccatctccgggggctccattcaggttactgcgatggcagatcagaaagaaaccttttgtagcaatatcaa

SEQ ID NO: 642676 - DNA, 101 bp, Homo sapiens
gccaaatagcagaagaataccatgaggtcaaaaaggaaatcaccctgcttgagcaaaggaagtacagaggtgcagttccatggtacaccataaatcttgac

SEQ ID NO: 642677 - DNA, 117 bp, Homo sapiens
aatggcatttacagaaagagtcaacagcagtggcaacagcatttgacattgtgcagcaaagaaatggttatggagaagcccagtccgctgcttgtagggcgggagtttgtgaggcaa

SEQ ID NO: 642678 - DNA, 75 bp, Homo sapiens
tgagcaggctgcagccggtgttgcagcctctaccgagcccaggtggtggaggtggatacagcagtcggagaacat

SEQ ID NO: 642679 - DNA, 98 bp, Homo sapiens
atccttccccacccaggaccacctcccggccacgccccgggtccggctctcattcaaaggtgctggggagtcagggaagagcaccatcgtcaagcaga

SEQ ID NO: 642680 - DNA, 100 bp, Homo sapiens
ggagagtctaacagtctgacaaaatctggaaaaacagcactggaggcaatgtttctataaatcaaagaagagacagtgtgagaatgtcagccctcaactg

SEQ ID NO: 642681 - DNA, 82 bp, Homo sapiens
gtccggccgctctgcgggactctgaggaaaagctcgcaccagttgatattcactgatggactccaaagaatcattaactcct

SEQ ID NO: 642682 - DNA, 90 bp, Homo sapiens
cgccaccatggcggcgcccccgcagcccgtcacccacctcatctttgacatggacggacttcttctggatgtcagtattgaatatggtgg

SEQ ID NO: 642683 - DNA, 73 bp, Homo sapiens
attaacccatggaaattgaacacactttggaccagatgatctctaaggccagtgaagaagcaaaggaagacat

SEQ ID NO: 642684 - DNA, 51 bp, Homo sapiens
tgtcatcaagaagaatgacgatgttgaagatgagcagccgtcaacactatc

SEQ ID NO: 642685 - DNA, 100 bp, Homo sapiens
gacttggccatgtgagatacaaggctacacagagacagatcaaagcagctcatctattaatgagatgaagcggttggaagaaatgtcaaatatgtttcag

SEQ ID NO: 642686 - DNA, 101 bp, Homo sapiens
gataaagaccaagaagtgggattactggattatatggttatcaatactctggctgaccatcatcatcgtgggactgactttggtggaagtccttggttaca

SEQ ID NO: 642687 - DNA, 100 bp, Homo sapiens
tattagcctaacaagatggaagcaggtttaaaattttacataagaagttacctttttcagctttccccacaaataaaccagagaaagatgcaagacatgt

SEQ ID NO: 642688 - DNA, 50 bp, Homo sapiens
gccaatctgaatatcaaaatagcagagccctccttcagcaaagaccaaca

SEQ ID NO: 642689 - DNA, 100 bp, Homo sapiens
tgaggaaccatgtctccatccccgaccgccctcttctgtcttgatccagacatttaatgtggatgcaccatgccagaccgtggaagatttaacgaatggg

SEQ ID NO: 642690 - DNA, 101 bp, Homo sapiens
tggggcagctgaactgagcgtatgtgccacgccgcccaggagacccctctgctgcaccacttcatgaaaaattgcttcgccccacaatgtcctgcgtacgc

SEQ ID NO: 642691 - DNA, 83 bp, Homo sapiens
gtcgccgtcccgggcggcgtggacctcctcaccctgccgcagctgtgcttcccaggaaagatgaatgggagggctgattttcg

SEQ ID NO: 642692 - DNA, 75 bp, Homo sapiens
caaccatgatctcttccaaagaatgccacagaatcaggggaggcatgcttcagaacactggaactattttggggc

SEQ ID NO: 642693 - DNA, 82 bp, Homo sapiens
atcgtctttccgtcctctgaggcgacggccgcggctgcacaggtttctgacaaagcgggagcaaaaattaatgcaacggcga

SEQ ID NO: 642694 - DNA, 98 bp, Homo sapiens
gaagaatggaggaccatccataattcctatctttaaaagagtgcacttcagaaggagatcacaacgcgttatcaactggatccaaaatttatcacgag

SEQ ID NO: 642695 - DNA, 102 bp, Homo sapiens
acatccctctgaaggagatgccggccgtgcagctggacacgcagcacatggggaaagaatatggcaaagctgatgcaagatgggtttattttgatccaacca

SEQ ID NO: 642696 - DNA, 100 bp, Homo sapiens
agagggcagggatcctagctgacacatctatgtcctcgccttggttggagattatgtctactttgagaattcctccagcaacccatacctaataagaagg

SEQ ID NO: 642697 - DNA, 100 bp, Homo sapiens
ccaaggacacctacagccccgacgaacatttctgggtgacactcaacaggattcccggaacaaccaggaagctatatgagaaaaagcttttgaaactgag

SEQ ID NO: 642698 - DNA, 87 bp, Homo sapiens
ggaaggagctgaggaatgactggactgtgcagggagtgcatccgccccaacccttttccccctcgtctcctgtgagaattccccgtc

SEQ ID NO: 642699 - DNA, 75 bp, Homo sapiens
ctgtgcataatgatagtgatgatactctttatgatcctgataacttaagtgactctctcttttccggtgatgaag

SEQ ID NO: 642700 - DNA, 98 bp, Homo sapiens
tacaaactcgtcatccacaagaagggctttgggggcagtggcaggacagacggccctgatgctggccgtcagccacgggcgggtggacgttgtcaaag

SEQ ID NO: 642701 - DNA, 75 bp, Homo sapiens
tgcgcgggggctgtggctccgggactgcgatgtcaccagcacctgcctagctgtcaaggagtggtttgtgtatcc

SEQ ID NO: 642702 - DNA, 87 bp, Homo sapiens
tcattttttgcttggtttggaaaaatttcattagagttgcaggaccagctctgccccctaattataaaagcagtagttcagattcat

SEQ ID NO: 642703 - DNA, 100 bp, Homo sapiens
agaaaggagagcgcgacatcctctccaacggccagcaggctgatgtagcccagcagttccagtatgctgtgcgggtgattggcagcaacttcgccccaac

SEQ ID NO: 642704 - DNA, 100 bp, Homo sapiens
gtggtgacaaaggagacacaggaccccctggtccacaaggattacaagtggcaggttttaagaagcaaatggcagatactggaaaactgaacacactgtt

SEQ ID NO: 642705 - DNA, 83 bp, Homo sapiens
cgacaagccgctggcagccgcggatctcaccgccgctcaggagcagcaagatgggcatggaggcggtgatggcgctgctggaa

SEQ ID NO: 642706 - DNA, 98 bp, Homo sapiens
cgccagctgcagccctggccgcgcactcgcctcagctgagcctggggttttggccaaattgggcgagggcacaaaataaccacttaccccttctcacc

SEQ ID NO: 642707 - DNA, 82 bp, Homo sapiens
agctgctggaggacgagggccagctgacggagatggtgcagaagatggaggagcaaccatgtccaagggacctgcagttggt

SEQ ID NO: 642708 - DNA, 123 bp, Homo sapiens
gttcattgatcgaacaatagtaaagggatataacgagaatgtctacacagaagatggcaagctttgttgtggcataatgtgtctggagttggttcctgccggtgggttcgtggtctcgctgac

SEQ ID NO: 642709 - DNA, 98 bp, Homo sapiens
acacttaggcaggaggatcactcgagcccagaagatcaagactagtgtgagcaacaaagacctaaagggagcatcgttaccgacagcaggcaggtgcg

SEQ ID NO: 642710 - DNA, 50 bp, Homo sapiens
agccgagacccaccgaggcagcccagaaagttcaggagccctggaaagga

SEQ ID NO: 642711 - DNA, 74 bp, Homo sapiens
gcgggaaaaggctaatggcacaactgtccacgtaggcattcaccccagcaagacctgtgaccgcatcaagcagt

SEQ ID NO: 642712 - DNA, 100 bp, Homo sapiens
agcaacttcggatttcactctacccggagagtttcccgcttggttgaacacattggcctcaggaaggtcatgttccttggggaactggaagaaatattgg

SEQ ID NO: 642713 - DNA, 83 bp, Homo sapiens
ctccgacggcggtccatcctgatggtcagtaggacagaaggtaacattgatgactcgctcattggtggaaatgcctccgctga

SEQ ID NO: 642714 - DNA, 100 bp, Homo sapiens
gctctggctgtgctgcgcgacccccgcgcatggagtagctcggagaggaggaaggagaagtcccgggatgctgcgcggtgccggcggagcaaggagacgg

SEQ ID NO: 642715 - DNA, 75 bp, Homo sapiens
gcgcccggcccggctggggaacgcagaggcattgaatgccccagaggagcccgaaacctcccaggcttggtgcag

SEQ ID NO: 642716 - DNA, 90 bp, Homo sapiens
gcggcagtcgggccagacccaggactctgcgactttacattccaaaagatgagcatattcttcggttcctccgtgcacgggattttaata

SEQ ID NO: 642717 - DNA, 100 bp, Homo sapiens
cgtggagccgggcaggagccgcgagccagctgcgcgaagagcgcatcagcgaggaggtggggctgctgcagctccttggggaccccccgccccagcaggt

SEQ ID NO: 642718 - DNA, 75 bp, Homo sapiens
cacagaatagacctgaagacaaaaatccagaagtacaagcagtctgatgccgacaaaaggatcaaggtggcgaag

SEQ ID NO: 642719 - DNA, 100 bp, Homo sapiens
ctatgggattttcagctcgatacaatttcacacctgacggaatcagtccccaatgcctggaaattcctcattggattactgtgttttaaacagaatttcg

SEQ ID NO: 642720 - DNA, 50 bp, Homo sapiens
ggaacacttcagtgcattcaaggttgttcctggtcattgagtacgtcaac

SEQ ID NO: 642721 - DNA, 100 bp, Homo sapiens
atcgatctctccatcccttccgaggcccgacttcgcattgactgtgccggaatcctgaaactcagaaactccgacattgaacttcggaaaggagagacgg

SEQ ID NO: 642722 - DNA, 100 bp, Homo sapiens
gttcgacggagcggagttccaggggcggcggtatcggtggctgccctactacagcggagccatccgcaagcagttggcggctttcttagaaggcttctat

SEQ ID NO: 642723 - DNA, 100 bp, Homo sapiens
gactccctctatggcaccgtgcgccgcttcctctcggtggtgcagctcaatcctttcccttcaggagctcttgtccctggcaaagcgaaagcgcagtgac

SEQ ID NO: 642724 - DNA, 74 bp, Homo sapiens
ttcacagagaggaggtcctggatcagcaagaggcgttcgaggtgtggtggctggaggtggccgaattgacaaac

SEQ ID NO: 642725 - DNA, 75 bp, Homo sapiens
tgggcagctacaaaatcaatggccggacgaaagaggactggaatgaaattgaccccattaaaaagaaagaccttc

SEQ ID NO: 642726 - DNA, 100 bp, Homo sapiens
ctaggacttcctcatctgccatcccccaagcagcgggccaagttcaagaggctactgcagcactggggtgtcagttgttggtccgacccagaacgcttca

SEQ ID NO: 642727 - DNA, 75 bp, Homo sapiens
ggtctccttgtcagaatttaggaatcccctggcccccgctgtgcaggaggtattgttgcagcatctggcagtgag

SEQ ID NO: 642728 - DNA, 102 bp, Homo sapiens
atttctctgaacatactgccttatgggacagatcaagtattcttggcgttaccaactgagagaatttaaaagtgaatatcgagttgtagcactggatttgag

SEQ ID NO: 642729 - DNA, 100 bp, Homo sapiens
cccatcgtcaccgtgtgggagcgggagctgcggaaagtaagactttgaccccgacgcaggcttcagtgattgccgcggatcagaagcctgagcactttgg

SEQ ID NO: 642730 - DNA, 50 bp, Homo sapiens
ggattatccggagccaaggtccgctcggtatcttaaatagcgaagatgga

SEQ ID NO: 642731 - DNA, 90 bp, Homo sapiens
attctaaaaccatgacctgtttttcggctttgtgagaaaccttaccatcaaacacgatggccagcaacgttaccaacaagacagatcctc

SEQ ID NO: 642732 - DNA, 90 bp, Homo sapiens
ggccctgaggcatctgagtcaacaacggatgaaaatgaagacgacattcagtttgtcagtgtcaagaagtggttttcaagtgccttgggg

SEQ ID NO: 642733 - DNA, 100 bp, Homo sapiens
ccgctcattggctgggtcctgcgtgcggccctggattcaggggccttccagagccggcgcgacctggagattgagcgaccaatgccgggaacccacacag

SEQ ID NO: 642734 - DNA, 50 bp, Homo sapiens
atgctggcaagtctgaaggtcaatggacagaggactgcagaaaatcaacc

SEQ ID NO: 642735 - DNA, 95 bp, Homo sapiens
acagctatcccctgaggcccgacccaggtttgatgaacttgtgaaaaaattcaaagtcgaatatcatgctggtggctctacccagaattcaatta

SEQ ID NO: 642736 - DNA, 75 bp, Homo sapiens
gcaccccagagggttctattgcccacacaaaaatctctggaatctgttctgcgccacccggcagataatcgcacc

SEQ ID NO: 642737 - DNA, 100 bp, Homo sapiens
tggaagctaaagctaccaaagacgtagaaagaaatcttagcagaaagcaagggcggaccatggtttgattccagatgtgaagttagaaaaaacagtcccc

SEQ ID NO: 642738 - DNA, 100 bp, Homo sapiens
tgaaaatacacctgttaaaggaggaactgtagcggatctaggcctctgagcccaagtctgcacgtattcatccagatggcctgaagtaactgaagattca

SEQ ID NO: 642739 - DNA, 100 bp, Homo sapiens
taccatgctttcaaaatagctcctcaaaaatttcatctgagttcacctatgcatggtcggtggagagacagcgtctggagaccatcctcagtctctgtgc

SEQ ID NO: 642740 - DNA, 96 bp, Homo sapiens
cccagtgcccaggcactgggcctgggcaaacataattactgccggtatgatgaaatgagtattctcttcacagttttggttactgaaactactttg

SEQ ID NO: 642741 - DNA, 100 bp, Homo sapiens
gtggtgtggctgtgggacccgtgagcaagcagcgacgccagcggcggagaaccgacgaaaggttttgcactgattgcaaaaataaagtcctccgagcata

SEQ ID NO: 642742 - DNA, 80 bp, Homo sapiens
atggcatcctctaccagcagcatgtcaagtttggcaagtcccaggggcagccactggcctcccagcccccggtcgtcgac

SEQ ID NO: 642743 - DNA, 100 bp, Homo sapiens
ttaggtggagtacatcagtgtcctttgggcattcctcatgccaaaggaaagatttccacaagacggcaccctatgtcgtcactggcagcgtagatcaaac

SEQ ID NO: 642744 - DNA, 88 bp, Homo sapiens
tccttgcagaggccatggaggacgaggagagacagaagaagctggaggccggcaaagccaagccacagctccggagcaagccccagcc

SEQ ID NO: 642745 - DNA, 101 bp, Homo sapiens
gcctcaaaatggccacacgcgtacccccgtagcggaaaaacagcctggcagagagcaggtgtgtgatacacgtcgtcaggtgactgaccgaggaattcagg

SEQ ID NO: 642746 - DNA, 82 bp, Homo sapiens
ttaagcaagatgcattattattagaaagatggatcttggagccagttcctcgacagtcccagagaactacttctatgtgcca

SEQ ID NO: 642747 - DNA, 73 bp, Homo sapiens
ccagccttacagctccagtatgaccattgtaagctcctactactgattccttgaacagcagtaagagccctca

SEQ ID NO: 642748 - DNA, 100 bp, Homo sapiens
gcaaagtgtgtgcaagcaaatgcttttattcaggctcaggcagctgtccaaggacctgttggtacagatttcaaacccttaaatagtacccctgcaacaa

SEQ ID NO: 642749 - DNA, 100 bp, Homo sapiens
tgacatagagtaactccacagcatgtgtcttcaagagcttccctaaaaggtacttaaaacagatgctgaggaacttgtctccagaagctattgggataca

SEQ ID NO: 642750 - DNA, 71 bp, Homo sapiens
cgtgtgcccaggccctgaggtgggccggacctgggagtggcaggccaggtcagagcagcccaccatgggat

SEQ ID NO: 642751 - DNA, 101 bp, Homo sapiens
ctcggtccgtggcttcggaggcaagtttggtgtccagatggacagagttgatcaggctgacaaacgggctcatcataatgcactggaacgaaaacgtaggg

SEQ ID NO: 642752 - DNA, 87 bp, Homo sapiens
agggaccatggccgatcctcgcgtgagacagatcaagatcaagaccggcgtggtgaagcgcctcacgattttgatgaatgtcgattt

SEQ ID NO: 642753 - DNA, 75 bp, Homo sapiens
cgaaactgtcaagattggcaaggaagacaactgttagttttgtggcttactgctgctccacccagtgtctgcaga

SEQ ID NO: 642754 - DNA, 100 bp, Homo sapiens
cgcggggaggcggccccggagaaccgcggggacagcagccggccagccggggggcactgcccgcccgggctctgatgccttcaattaagttgcagagttc

SEQ ID NO: 642755 - DNA, 83 bp, Homo sapiens
cttggactgagtcctgcaggacacaggctttatcctgtggataaacgcagagtgaacgagtttggggagtcctacgaggagaa

SEQ ID NO: 642756 - DNA, 75 bp, Homo sapiens
tactctaattgatccagagaacatgctggctacaactaatactgcagttcgtcatgaatcatgcagtggtctcta

SEQ ID NO: 642757 - DNA, 100 bp, Homo sapiens
cgctcaaggtgttcatgcacgaaaacctctacttcaccaaccggaaggtctctaattaacagaagatggcaaagcccagccacagcagctatgtccttca

SEQ ID NO: 642758 - DNA, 98 bp, Homo sapiens
ggggcgcagcgtgacggctggcatcatcattgttggagatgagatccttaaggtggtttcagacaccctcacaggttttctaccatgcagcaactgaa

SEQ ID NO: 642759 - DNA, 98 bp, Homo sapiens
agccattgtggattgaggagccaacctcccctgatgacattctggggcacgccaccatttccaagtctcaaaccatgaattatgtgggacagctggct

SEQ ID NO: 642760 - DNA, 82 bp, Homo sapiens
ttaaaagacagtcctcgtcagcactgactttcagctatggaatcggagccttcacgtaaatgggtccagtcatgcctcccag

SEQ ID NO: 642761 - DNA, 100 bp, Homo sapiens
ctggtttcaagaccctacccgcttcactggcaccatggcccgctacaacttcatccgaagcatggccgcctacagcctcctgctgttcctgctgcagatc

SEQ ID NO: 642762 - DNA, 75 bp, Homo sapiens
ccaagagaaggttttttctaggaggaggaagtgatccattgtgtaagatggtggatgcttccaaaagcatcgaag

SEQ ID NO: 642763 - DNA, 80 bp, Homo sapiens
atatggccgtgatcgtgcccaaagaggagggcgtcatcagcgtctccgaggacaggttgtgctggtgaggtggaatgagc

SEQ ID NO: 642764 - DNA, 71 bp, Homo sapiens
gggagaggatatgtagcgaggaggaacgcgctaaggcaaagcacctggtcaaaatgcagatcttcgtgaaa

SEQ ID NO: 642765 - DNA, 97 bp, Homo sapiens
agattccatcaggggagcaccccaattctgccagccgtgcccctgtcccctgccccacttggccaagatttaagaggggtgcagatcccggaatgcc

SEQ ID NO: 642766 - DNA, 101 bp, Homo sapiens
tgtcctgaagaattatggagagaacccagaagcctacaatgaagaactgaagaagctggagttgctcagacaggttctgcacttttaaaagaaaagcaaag

SEQ ID NO: 642767 - DNA, 89 bp, Homo sapiens
attcggtttgtaggtcgtcagaaagagccctccagaatacccatcatatagcccctgaggtggcatggtgatgtctccatgagggaacc

SEQ ID NO: 642768 - DNA, 82 bp, Homo sapiens
ctgcccttcccatgaggcaggctcttcagaggaccccgttctggagcgttatttcaaaggccacaaagctgcgatcacctcc

SEQ ID NO: 642769 - DNA, 75 bp, Homo sapiens
ccatcgtggagaatctgaagaagagatacatggatgactacatttttgaagcctctgaggagaaaaacaaaggga

SEQ ID NO: 642770 - DNA, 74 bp, Homo sapiens
ccagctgtccaatcacctcgcaggagccctagggctgtgaacgctgccaagcacggggtagctggggtgctggt

SEQ ID NO: 642771 - DNA, 100 bp, Homo sapiens
acgacattcgagacatgctgctctcctgccacttccggggggaggtctgcagcgctgaagacttcaaggtgggaggctatcatctcccagaagcggctgg

SEQ ID NO: 642772 - DNA, 100 bp, Homo sapiens
aaaattaccgagccagccagcaggaaatacagcatagcattagtttggatgaattcaagtcattttgccattttacaacccacttggaagactttgctat

SEQ ID NO: 642773 - DNA, 50 bp, Homo sapiens
gaacgaggacgcggactgcgaaggcagtaatctcaggggcgatataatca

SEQ ID NO: 642774 - DNA, 75 bp, Homo sapiens
gaagcgcggaagaaggcctccgtggaggccagattgaagcctcccgagcacaacaaggagaggtgatgaggttgg

SEQ ID NO: 642775 - DNA, 75 bp, Homo sapiens
ccgccggcgaaggaggaggcgttgccgggttgtatcagagtaagatggacggtagctttgattgtgattgtggtg

SEQ ID NO: 642776 - DNA, 101 bp, Homo sapiens
ggcgcacgggtacctcaacttgggccagggacctcaggatggaaaccagcagcctgcaccgcccgagaaggtcggctgggtccggaaattctgcgggaaag

SEQ ID NO: 642777 - DNA, 75 bp, Homo sapiens
tgaagaccccagttttgctgaccttattcaccatgacttatcaggcatcctctggtatcacgattccaaaacccc

SEQ ID NO: 642778 - DNA, 74 bp, Homo sapiens
ggcccagccaatgaagatgaagacataggaggctccccaggaagctctcagtctgggagcaggcacagttctcc

SEQ ID NO: 642779 - DNA, 75 bp, Homo sapiens
cctccagctgccccctgtgtggcaaacctttcttgagctcagtcctggatcagtgacattcgagcaggaaccgcc

SEQ ID NO: 642780 - DNA, 100 bp, Homo sapiens
ggccggagggaggatgttaaagccccgcgatgcccagcctacagagtctgagaaggaaatttataatcaggtgaatgtagtattaaaagatgcagaaggc

SEQ ID NO: 642781 - DNA, 96 bp, Homo sapiens
gccgtgcccgagaatagctccgtccagcagagctcttcagtatccccatcagccagtttccgaggtgctgagaagcacagaaactccgcagactac

SEQ ID NO: 642782 - DNA, 74 bp, Homo sapiens
gagcaccaggagactgcctatgtaccataacagcttgggggaaagaccatgaaaaagatgcttttgaacatatt

SEQ ID NO: 642783 - DNA, 83 bp, Homo sapiens
ctgccgccgaacgacaggacgttggggcggcctggctccctcagtatccatatattcctgcacatattacaaagcctaaggaa

SEQ ID NO: 642784 - DNA, 90 bp, Homo sapiens
agcaaagtgaggctgctggagggtgacaagctcctcgcacaggttgatgctatgaaactgggagtaaaggaaatgaagaaggcatacaag

SEQ ID NO: 642785 - DNA, 100 bp, Homo sapiens
cctcctcctaccaaaatttggtttggagcgaccattctcagacattagaccagctcccactcaccaaccctgagcattttggcactccagtcataggaaa

SEQ ID NO: 642786 - DNA, 83 bp, Homo sapiens
gcccaccgacatggcccggaggcagcagaaggtattccagcgtcttcaggaaacagtttagactctcttcaagatgacaatcc

SEQ ID NO: 642787 - DNA, 100 bp, Homo sapiens
aagtctttggaaagcatagtaaagtctgaagtatttcctgtatcaaaaacgctgattgctggaatgactcttccatatgatactctggatcaagtaagga

SEQ ID NO: 642788 - DNA, 106 bp, Homo sapiens
gcggcagtcgggccagacccaggactctgcgactttacgtactccaaagattcaggtttactcacgtcatccagcagagaatggaaagtcaaatttcctgaattgc

SEQ ID NO: 642789 - DNA, 74 bp, Homo sapiens
cttgtctcgctggcctgcgacccagccagccagcaacctggaccggtgaacttcacggtagaccagatccgcgc

SEQ ID NO: 642790 - DNA, 101 bp, Homo sapiens
cggcggattcgggaactgactgctgtagttcagaagaggtttggctttccagagggcagtgtagagtgatgcagccaacacgaacggttgtcatgtgtaac

SEQ ID NO: 642791 - DNA, 101 bp, Homo sapiens
gcatctctgggtgggcaacttacccgagaacgtgcgggaagagaagatcatcgagcatttcaaacggtactctgtggatatccccttggacaaaactgtcg

SEQ ID NO: 642792 - DNA, 82 bp, Homo sapiens
caggaagtggccgtagcggcttgttggataagatcctctggaccttctccatctacctggagtcagtggccatcttgccgca

SEQ ID NO: 642793 - DNA, 75 bp, Homo sapiens
aagattgtggtgcacacgccctgcatcgagcagctggagaagctcctactccaatgtggccagatgacctgcaaa

SEQ ID NO: 642794 - DNA, 100 bp, Homo sapiens
gtggacgttgtctaaatttcggtagccatggcacaagaatataattctgtttctggcgtctgcatacgcaagtccccaactcgctgaggagagctgttca

SEQ ID NO: 642795 - DNA, 51 bp, Homo sapiens
ctggatattgtgagagatccaaagcagtgcctgatttgagatggggtccca

SEQ ID NO: 642796 - DNA, 74 bp, Homo sapiens
gcagacatctacaaccttcgatctcctgacgatttcagctcctggcatcagctctattcaaatctggttcagat

SEQ ID NO: 642797 - DNA, 83 bp, Homo sapiens
cagtagtggaagatgtaaagcaatatttcgagcagtttggcaaggtttgtcctggttgtggtcaagactggatgatgtaactg

SEQ ID NO: 642798 - DNA, 88 bp, Homo sapiens
tctagagcaaggaaaagagccctggaatatgaagagacatgcgatggtagatcaacccccaggagaaactcccatgtatggaatccca

SEQ ID NO: 642799 - DNA, 75 bp, Homo sapiens
cgtttcatttcctcactttgcgttgtagtcgtctcaaaggggtatattacagctaatactgacacagaagaacag

SEQ ID NO: 642800 - DNA, 100 bp, Homo sapiens
aagcagagacttacagaactattgagaggatccagaatccagatctctggaatagctaccaggcaaagaaaaaaactatggatgccaagaatggccagac

SEQ ID NO: 642801 - DNA, 100 bp, Homo sapiens
atgccaaagaccatcatgcacctcatgatcaacaatgctttctctgctcagagctccaagccacccgcctcctgtgcctccgctctctgctggatccgag

SEQ ID NO: 642802 - DNA, 99 bp, Homo sapiens
gcagttgtctgatgaagagaagatgcctgaggaagtgcaccatggagaggaggaggtggagacttttgcctttcaggcagaaattgcccaactcatgtc

SEQ ID NO: 642803 - DNA, 100 bp, Homo sapiens
gtacctctccttttccctctccctttccctaaggaactgtggaaggtgcatcagtgaagaaatggaccaatgtgtataatcatggaatctccttgctaac

SEQ ID NO: 642804 - DNA, 83 bp, Homo sapiens
cgtggccggagcggcccgcgcctgggctgccggcacttcgcggcagcttccccgggcgctgcctggacaggcctgcctgcgtg

SEQ ID NO: 642805 - DNA, 83 bp, Homo sapiens
ctgacgcatctgtctgaggagcggtcagtgacgcgatggagcgggcaagacctgcctagagctggaacgttacctccagagcg

SEQ ID NO: 642806 - DNA, 75 bp, Homo sapiens
agcagtgcaactggctcagtattcacagggaaagctgtgagggacttaaccaccaccatgtcgagcaaaagaaca

SEQ ID NO: 642807 - DNA, 75 bp, Homo sapiens
gcggagcgggcggcagagcagggcggcggcgactcgacaatgcagatcttcgtgaagactctgactggtaagacc

SEQ ID NO: 642808 - DNA, 87 bp, Homo sapiens
tgaagaccccagttttgctgaccttattcaccatgacttatcagataaacctctacttgaaaatggagaaaaaacctaacaaaaagg

SEQ ID NO: 642809 - DNA, 92 bp, Homo sapiens
ggaggcaccgactcgagcttaaccagggtcagcgagatgagtgtccccacaccctcctctgagacgccatgttcaactcgatgaccccacca

SEQ ID NO: 642810 - DNA, 49 bp, Homo sapiens
tggtaaaaagcttgaattttgcacgatctgggacatgagcgatgatgag

SEQ ID NO: 642811 - DNA, 100 bp, Homo sapiens
agtttaaaacctccgtgtctctggctgtctctaggctaagcagaataactggagtgccaaggctaaaagacgaaataccaccggaactggtcgaatgagg

SEQ ID NO: 642812 - DNA, 85 bp, Homo sapiens
ttcttgcgggagaacatcaaggccagcaccggaataagacgagttggaagaagacctgatcaacaacttcagggtgaagggaaaa

SEQ ID NO: 642813 - DNA, 101 bp, Homo sapiens
ctcaatgctgctgtgtgggaagaagatttgtaaagaaaactcttagcaatggctgccatccggaagaaactggtgattgttggtgatggagcctgtggaaa

SEQ ID NO: 642814 - DNA, 100 bp, Homo sapiens
cttacaacaaaatggttttccactccattgttgttagaagccagactgcacctccagcggctggtgagcaatgagagccagaggcgccagctggtgggga

SEQ ID NO: 642815 - DNA, 119 bp, Homo sapiens
tgggggttcgcgcccgccgacccgcgccctgctccctctcagcacctgggcggacggtagaaacctgtgggttcttgttgtggggcggtttccaaaggaacacagaattgggattccag

SEQ ID NO: 642816 - DNA, 101 bp, Homo sapiens
aacaagacgacctttaagtttcccagagaaaatgagatgctgatgttgaagacgacaccacgggatacctcagacaatggcagcttttggattgaaatatt

SEQ ID NO: 642817 - DNA, 100 bp, Homo sapiens
tccatcagttacacaagtgacaagaaatgttccaccaggacttgatgaatataatccattctcggattctagaacaagtgctgcagcagctcccagtcca

SEQ ID NO: 642818 - DNA, 100 bp, Homo sapiens
aaatgagatgtttgctataaaagccttaaagaaaggagatattgtggctcgagatgaagtagacagagcaatatactttgctgcttattcaaactgcaag

SEQ ID NO: 642819 - DNA, 74 bp, Homo sapiens
cccaccactggagcctggcaggaggtctggcgggaacagaggtgatctgctgtgaggggaatgctgggttttat

SEQ ID NO: 642820 - DNA, 82 bp, Homo sapiens
agaaagagtcaacagcagtggcaacaggtcctcagaatggttggaatgaccctccagctttgaacagagtacccaaaaagaa

SEQ ID NO: 642821 - DNA, 75 bp, Homo sapiens
gaagattttaggcggtatcaaatggaaagtttttccaaatattcatctgtacagtgttctcctaagtgctgtaag

SEQ ID NO: 642822 - DNA, 101 bp, Homo sapiens
cgaaacggctgcatgtctctaatattcctttccgcttccgggaccctgacctccggcagatgtttgggacggtgtacaacctggctgatgtggcctgcaag

SEQ ID NO: 642823 - DNA, 83 bp, Homo sapiens
ccaacattgacctcacaaccgagcaaattgaagagacgttaaaatacttccgatttctctgcctcttccaaacttttcctccc

SEQ ID NO: 642824 - DNA, 90 bp, Homo sapiens
cgaccccggagtctccgcgggcggccagggcgcgcgtgcgcggagctcccctgggacctgtggccgccgcccacagaccatgctcctggg

SEQ ID NO: 642825 - DNA, 50 bp, Homo sapiens
cttgcagaaggaatctcactctcagctcctcaagagttactgatctatga

SEQ ID NO: 642826 - DNA, 75 bp, Homo sapiens
gcgggagaagtccacaccggggctccctggggaagggaatgcagggttgctggggctgggcccagaagcagcagc

SEQ ID NO: 642827 - DNA, 75 bp, Homo sapiens
agcttgctggatcattgtattactcatcacagatcggaacggaggcctgtgtctctagtgatccctgaaaagttc

SEQ ID NO: 642828 - DNA, 75 bp, Homo sapiens
gcggagctgacggtggaggttcgcggctctaacggggctttctacaagatccaacttagaaataatgtttcattc

SEQ ID NO: 642829 - DNA, 100 bp, Homo sapiens
ctaccatggggatcttagagaagatctcggagatcgagaaggagatcgctcggacacagaagaacaaggaatggagatttacagacagtcatctgggtgg

SEQ ID NO: 642830 - DNA, 82 bp, Homo sapiens
ggaagaacaagcagcgaactaaagggaacctgagggttcctggtagagttacacagttgtgccgccagtatagcgacatgcc

SEQ ID NO: 642831 - DNA, 100 bp, Homo sapiens
gatgcaaggtccaaatctcagcaacccctgtgcttctccccaggtccagccaatgcattcagaagccaaaatggaagtcctggctgagcaaggttggaag

SEQ ID NO: 642832 - DNA, 50 bp, Homo sapiens
atgatatttattcaccaaacaaggattccagacagcattggaaaagacat

SEQ ID NO: 642833 - DNA, 98 bp, Homo sapiens
cggcgggaacgattgggctgagcagaggacgacatgttgcttttcgtggagcttaattggcttagtgtcgacttcaataattggaaagactgggaaga

SEQ ID NO: 642834 - DNA, 100 bp, Homo sapiens
ccccagccagcgcagcgacggggcgctgcctggcccaggcgcacacggaagtggttttcctaggacattaggacaagccgaagccctggacaaaatctgt

SEQ ID NO: 642835 - DNA, 82 bp, Homo sapiens
cttctcttcagggatgagtcatgtggtggtgaaaaatgaccctgaactggaccagcaggtatcgagaaccttccctgcgaac

SEQ ID NO: 642836 - DNA, 100 bp, Homo sapiens
ggacattccaacacagagattgacgtggattctcaaagttggattggtggaaacaatgaaccattgacaggctttacatggcgaggtggctgtgaaagag

SEQ ID NO: 642837 - DNA, 51 bp, Homo sapiens
aattggtgctcctattgtacaggtgcttgtgaatgacttcttcttggtggc

SEQ ID NO: 642838 - DNA, 90 bp, Homo sapiens
tgacactcaacaggattcccgtaaaagaatgtgtggatcatttaagtagagatgaggatgaagagaaactggtagcctcactatggggag

SEQ ID NO: 642839 - DNA, 75 bp, Homo sapiens
gtaaaacaaaaatattatggtctttgtgcacatttacatcaagcactctggcccccagaagcttctccacattgc

SEQ ID NO: 642840 - DNA, 90 bp, Homo sapiens
cgatcacacagaaactcctcagtggccctttcaacctgccaaggcttggcagtggcgattttgacagccacataccctgtgggtcacatg

SEQ ID NO: 642841 - DNA, 74 bp, Homo sapiens
agcaacgtgcggcgagtcatggccgagctttatcctgtggataaacgcagagtgaacgagtttggggagtccta

SEQ ID NO: 642842 - DNA, 90 bp, Homo sapiens
tgcgggaaatcgggctgaagcgactgagtccgcgatggaggcctatatgaacccaatagcaatggcgagatcaaggggtccaatccagtc

SEQ ID NO: 642843 - DNA, 75 bp, Homo sapiens
ggacaaggctccggcctgcgaggagggaggttatattcaaaagaaaaaggaactgtggggaatctgtatctttat

SEQ ID NO: 642844 - DNA, 101 bp, Homo sapiens
ctgattttatgggaaaattaagcagatgctccagtttgagaaacctggatctgcgatctgtttgtggcaaaggccaggatggaattggtagcaaggcagag

SEQ ID NO: 642845 - DNA, 100 bp, Homo sapiens
gggcttgagagctgggttctattttccctcctcaaactgactttgcagccacggagagatgtcagtattgaatatggtggtgaggcgtgaccctggcaac

SEQ ID NO: 642846 - DNA, 83 bp, Homo sapiens
cgatcttttgtcttcttctgaagaggagtgcaaggataggttatcaatactctggctgaccatcatcatcgtgggactgactt

SEQ ID NO: 642847 - DNA, 83 bp, Homo sapiens
gaaaactatccaagaatgtgacttcctggagtagagtcttttttcactgaggcacaccaaatgaaaagctgttgggtcatttg

SEQ ID NO: 642848 - DNA, 98 bp, Homo sapiens
ggttatacattctaggaatctcaaaggttaagttcagtgaactaactgttgacatgttccggatgttacaagctctggaaagggagccaatgaattta

SEQ ID NO: 642849 - DNA, 100 bp, Homo sapiens
cagagctgtgcctcccagcaccacagtccttctgcagtccctcgtccagccacccccagctgggaagcacacagccaactcgcaccacctctctgccttg

SEQ ID NO: 642850 - DNA, 75 bp, Homo sapiens
ctgctttaaacttaaagacctctttggacccgaaattgtaagacgcaaacatgcagatctttgtgaagaccctca

SEQ ID NO: 642851 - DNA, 99 bp, Homo sapiens
cccattggtctaaacttgatccaaagacaatgaagcctactcaatgtgaagatgatgaggatgaaaacctttgtgatgatccacttccacttaatgaat

SEQ ID NO: 642852 - DNA, 82 bp, Homo sapiens
ggctctatcaaggggctggtgtactccagcaacttccagagctcccagctcctccagcagccgacaggaggcccgtcaagat

SEQ ID NO: 642853 - DNA, 75 bp, Homo sapiens
gcggaagtgcagctgcctcagttcttagcgcaggggatgtggagacgctggtagcggggccaggaaggctccgga

SEQ ID NO: 642854 - DNA, 98 bp, Homo sapiens
gataagaaatcaaaaatctggtgaaattgccggcaagagggagttaaggacattccaggcagaggcaagggtgttttgaatgctgtatcaaatgcctg

SEQ ID NO: 642855 - DNA, 80 bp, Homo sapiens
agctcagcgcagcgctgcggcctttcggcagccgaacggccgcggcagaactgccattggatgtccagaatcccctgtag

SEQ ID NO: 642856 - DNA, 100 bp, Homo sapiens
caccatcgagcgggagttcgaagagttggatactcagcgtcgctggcagccgctgtacttggttggtgaaaaccctgtgtccttggagaaagctggttcc

SEQ ID NO: 642857 - DNA, 90 bp, Homo sapiens
agaatgcacattaaagccatgcccgaggatgctaaggggcagaggcaatgccacttgctttgcttatggacagacaggtgctggaaagac

SEQ ID NO: 642858 - DNA, 100 bp, Homo sapiens
agagaggcaccgggatcgtgaccgagaccgtgaccgagagcgtgaccgagagcgcgaatatcgtcatcgttagaagggaagctgcccgggagtgtcgcag

SEQ ID NO: 642859 - DNA, 99 bp, Homo sapiens
aaagagtcaacagcagtggcaacagctggattgccttttgcaattcttacttcaaggcatacccccttccaacgaggagtattctgtaatgatgagtcc

SEQ ID NO: 642860 - DNA, 90 bp, Homo sapiens
cgtgatgttggtgtgttcacatttgatcatggcatgtgggacacagcaggccaggaaagatttcgaacaatcacctccagttattacaga

SEQ ID NO: 642861 - DNA, 75 bp, Homo sapiens
cgcgtccgccgattcctcctccttggtcgccgcgtccttggctggcgtatctgactgcagccatgagcagcaatg

SEQ ID NO: 642862 - DNA, 100 bp, Homo sapiens
tgaggctctcaaagatgcccaggagaagctggagctggcagagaaaaaggccaccgatgatgagagccactcagagtgggtgtcttgtgtccgcttctcg

SEQ ID NO: 642863 - DNA, 100 bp, Homo sapiens
gaaggtggaggtgctcaacagtgatgctgtgctccccagccgggtgtactggatcgcctctgtcatccagacagcaggtactccaaagattcaggtttac

SEQ ID NO: 642864 - DNA, 75 bp, Homo sapiens
agcaagggtgcatctgagataattctgaaaaagaatttgcaaacacttctggatgatgaaggtgataactttgag

SEQ ID NO: 642865 - DNA, 51 bp, Homo sapiens
ctgaggcagagtgtggttcaattcatgatgttgctatcaaaagttgagaaa

SEQ ID NO: 642866 - DNA, 100 bp, Homo sapiens
atcgaaagcgttggagaggtgttaccggaacggcggcgacaagggtgttcccgaactagagtggcatgcttttcacttccactgcatctctcgctggctc

SEQ ID NO: 642867 - DNA, 74 bp, Homo sapiens
tgaaccggcacctgcacacctggatccaggataacggaggctggtcccaggacatcaaagctctgcagaaagaa

SEQ ID NO: 642868 - DNA, 51 bp, Homo sapiens
ctgtggctgggacaagctggtcaaggtacttacaatttcatcagaaattcc

SEQ ID NO: 642869 - DNA, 139 bp, Homo sapiens
gaggaccaagagcgtggatgccctgaagaagtgtgagcatgacccccatgtgctcctggccgtggccaactccatttatcttaaagaaattggacagcatatgaagacaggacatcacatatgaatgcacgatatgaag

SEQ ID NO: 642870 - DNA, 100 bp, Homo sapiens
tgcaattcataatggagctactgtactggctattggaaggaggagattctgaagataaggagatatggatcagaaactttcgaagttggtagaagagctc

SEQ ID NO: 642871 - DNA, 100 bp, Homo sapiens
agatgttgcaggcgccgagagggcgggccagggccgcactccggagactcgcggttgctacgcgcaccatggctggagctgcttttctaacccaaactgt

SEQ ID NO: 642872 - DNA, 51 bp, Homo sapiens
gatattcacagacatgcggaatttgagacaagttggatggcttgaggactg

SEQ ID NO: 642873 - DNA, 83 bp, Homo sapiens
cagagagggaagagattcagccagcacactcctcgcgagcaaggaattccaggcttggactggagtgaagccctcaagatcca

SEQ ID NO: 642874 - DNA, 82 bp, Homo sapiens
cccaccatgtcagacgcagccgtagacaccagctccgaaatcaccaccaaggaggcatacacggaatacctgaggagcatcc

SEQ ID NO: 642875 - DNA, 98 bp, Homo sapiens
agagaaatgaaataacctttgacaagattttcaatcagaaaattggatttggagttccatggagtgatgagattttattttcaagataaagctgctgg

SEQ ID NO: 642876 - DNA, 75 bp, Homo sapiens
ctacctggggatatacatgcatgcaccaaaacgaggacagagccagccccagtgcctgctgagccgtttgacaac

SEQ ID NO: 642877 - DNA, 75 bp, Homo sapiens
tgggcagaacgaattcagtgatatcattaagtccagatctgcatcaattcctgaagattgccaagcccctctcca

SEQ ID NO: 642878 - DNA, 90 bp, Homo sapiens
agatgggaagttctgtgactgctgctactgtgagttcttcggccacaatgcgatcctgaaggacacagccctgcagaaagtgaagcgtgg

SEQ ID NO: 642879 - DNA, 100 bp, Homo sapiens
tctccctgacatgcaagaacagggtccaggtcggcttcttcaagcggaaccggccacccctggaagaagatgatgaagagggggagtgatggtgcagcct

SEQ ID NO: 642880 - DNA, 74 bp, Homo sapiens
agctttcctaggccaaaaagagggttttggccaaattgggcgagggcacaaaataaccacttaccccttctcac

SEQ ID NO: 642881 - DNA, 83 bp, Homo sapiens
ggcgtggagatatggcgcaactgcggcgcaataccgtagcagtaggcaggacagttccaattcaacaaaaacctctttaccct

SEQ ID NO: 642882 - DNA, 103 bp, Homo sapiens
ttttttataaactggctgaagcccatccagactgtttgatgctgaacttcaccgttaagctactcccgagcccggagaggacccacgcgtgacccgggccaag

SEQ ID NO: 642883 - DNA, 100 bp, Homo sapiens
ctcccaccgccccaccgtacttgcaagaaagcagccccagaggagcagcatttctttctattactactatctatgctgagactggttcaggttttgtagt

SEQ ID NO: 642884 - DNA, 82 bp, Homo sapiens
gcgtgtctaggtgagtcgcggtgggtcctcgcttgcagttcagcgaccacggtgcgcgcggagccatggttatcatgtcgga

SEQ ID NO: 642885 - DNA, 100 bp, Homo sapiens
gctccttcagtgagcaaggcatcaacgagtttctcagttttctggatatgccgcagaaggatccgtgccagaagcaagcctgtgagatacagaaatgttt

SEQ ID NO: 642886 - DNA, 83 bp, Homo sapiens
ggcctgcagcgggagctggacggcgagcgcgagcggcgcgagaaacggacaaggcaaaatctcagcaagttcggacctctagt

SEQ ID NO: 642887 - DNA, 100 bp, Homo sapiens
tgccctggttgccctctcctggaatagggcagattacatgaagcagatgacatttgaagcccaagcctttttagaagctgtgcaattcttccgacaggag

SEQ ID NO: 642888 - DNA, 101 bp, Homo sapiens
ctgcctgctccacaagcggcgccgcgccctcggcctgcacggcacccttacccttctgaagaacagaaaaagcagttggcacaagacacgggactcaccat

SEQ ID NO: 642889 - DNA, 90 bp, Homo sapiens
gttgattgatggcatccgcgtggcaacaggctcctacaggtttgttgataagccggggcccttcgtgggaccctgcggtcactggatcag

SEQ ID NO: 642890 - DNA, 101 bp, Homo sapiens
ggggagttgtgttctgtcccccagccacgtggcctcccgctgcaggtttaaagtaaaggtgggtgctgatctccaggatgacatgcgaagatgccaaatca

SEQ ID NO: 642891 - DNA, 75 bp, Homo sapiens
ctaggatgggcgattccccgctttctaagaaccttttgcccagagtagcagccaaacttgaggttgccccgattt

SEQ ID NO: 642892 - DNA, 100 bp, Homo sapiens
cgcgccagctcctactcctccctcaactccctcatcgattctgagaacaataactccacaatggcgtcggcctcggagggtgaaatggagtgtgggcagg

SEQ ID NO: 642893 - DNA, 82 bp, Homo sapiens
agagggaggctgaatttattgacaggccttctgcagttccctccagaggaaaatcctgccttgcttcgttgggcctatgcaa

SEQ ID NO: 642894 - DNA, 75 bp, Homo sapiens
cagaggccctcatcaacgcgggagacttccacggcctgcaggagaactgcgctatcctcaaggagctggtgacgc

SEQ ID NO: 642895 - DNA, 98 bp, Homo sapiens
cgtgatccaggcgaagcgccccaggaaggattggggtacatgtcccagagcaagcacacggaggcccgggagctcatgtactcgggagccctgctctt

SEQ ID NO: 642896 - DNA, 50 bp, Homo sapiens
ccacggccgcctccggagcccgacgcggcaaactcttccacatagacttt

SEQ ID NO: 642897 - DNA, 78 bp, Homo sapiens
gcgcagcaacgtgcggtgggaccacgagagcggatggatgaatgagatttacaactatgatccagaaacctaccatgc

SEQ ID NO: 642898 - DNA, 101 bp, Homo sapiens
tgtgtgagtaagcaagaacctggctacccacctttctgttctgagacccctcaagagacatataagaaggtgatgaactggaaagaaactttgacttttcc

SEQ ID NO: 642899 - DNA, 127 bp, Homo sapiens
tcggagcttatactcctcccagtgacgggtctggagtgcgtgggggaccggctgttggcggaggtggggctggtgtccgagcacttctcgcaggccccgcagaggctgtccttctacagctggtacg

SEQ ID NO: 642900 - DNA, 75 bp, Homo sapiens
acattggatacacctcaactagaacgcaaaagtggaatcaactatgaaattataatcatagatgatggaagccca

SEQ ID NO: 642901 - DNA, 99 bp, Homo sapiens
attgatcctggctttggaatatataaggaaggatcgagatcgagaccgggatcgtgaagatcggtctaaagatcgagaccgagaacgtgatagaggaga

SEQ ID NO: 642902 - DNA, 80 bp, Homo sapiens
ggagaagccgcccaaagaactgagtaacagttacccctcaatgagcgacccctacctgtccagctattacccgccgtcca

SEQ ID NO: 642903 - DNA, 101 bp, Homo sapiens
tggtctctccagccctcactcggaaccgcacgatgatgatgctgaagctatccttgctgcagacttcgaaattggtcactttttacgtgagcgtataatcc

SEQ ID NO: 642904 - DNA, 88 bp, Homo sapiens
ctggggctttggagggaatcgtgagcgggcgggaggaggccggggaccacacagggcagcgggtggcatgagacgtgggaacatgggc

SEQ ID NO: 642905 - DNA, 75 bp, Homo sapiens
attgatattgaagaaggcatcaaaaaggaacaagctctccagtaacaaatgtggcaattattttggatctatcac

SEQ ID NO: 642906 - DNA, 100 bp, Homo sapiens
cagtctcttgcgtttattacgactttcaaggttaattagatacatacatcaatgggaagagctgatgaaaccaaggccctgaaaggttcaccaagttgcc

SEQ ID NO: 642907 - DNA, 101 bp, Homo sapiens
atcaccatgtcggctttcgacaccaaccccttcgcggacccagtggatgtaaaccccttccagcttagaccatgctcagcctccaagcagccttgtcatcg

SEQ ID NO: 642908 - DNA, 74 bp, Homo sapiens
gactatattgagaaggaggtaaaggtgaacctgagcaaggtgggcgagtattggtggaacgccatcctggaggg

SEQ ID NO: 642909 - DNA, 49 bp, Homo sapiens
tgacggcgtgaccgacccgagccgggcagcgggtggcatgagacgtggg

SEQ ID NO: 642910 - DNA, 101 bp, Homo sapiens
aatgtttgcaaatgcagaggaagaatttttctatgagcattgtcgtggaagttctccgaatcctggttttgattggtcagattcttttttcactagcggcg

SEQ ID NO: 642911 - DNA, 82 bp, Homo sapiens
ctgggctccttcactttggtctcggcttttatctgcctccctgaaacctgtctccagagaagattttccacgtcattgtggc

SEQ ID NO: 642912 - DNA, 100 bp, Homo sapiens
ctttgcctttgccactatcacgcctctcatgttcacaggtgacctcacaaagttcggccgtggggatgcctcctccccagccccggccacaaccttggcc

SEQ ID NO: 642913 - DNA, 82 bp, Homo sapiens
cccatacctggcctgccgtctcctggctgctgcttgcatatgcgagagcccagagagctgaacctgcatcccggacctgcgg

SEQ ID NO: 642914 - DNA, 76 bp, Homo sapiens
ggaagatggcgtctcccacagacggaactcaacagaggcaattattatcccgactgcaaatcgacccagtaatggc

SEQ ID NO: 642915 - DNA, 98 bp, Homo sapiens
tcagcaagactgaagaggtggttgaaaaagagctgctcctccagagataattgacgaccttgccaacctagtggagaacacagatgaaaaacttcgca

SEQ ID NO: 642916 - DNA, 109 bp, Homo sapiens
gcaaggagcagaagcagcccttacaagttgcaaaggaaatgccagtcctcgattcatccgttgtacaacatactgttttccatgcacgtcagatatggctaagcaagct

SEQ ID NO: 642917 - DNA, 97 bp, Homo sapiens
cagactccaaaaggcccttttcagggcccccaaactgtcacagaaagagctgttaacacttcctagataacggctgggatctagcaattgggaggca

SEQ ID NO: 642918 - DNA, 76 bp, Homo sapiens
gctactatgggaaccgaggggagcctgatcctatcgttttgacgccagagtcataaacattctaagtgcatacggc

SEQ ID NO: 642919 - DNA, 73 bp, Homo sapiens
tcacactgctgtctctgtatatgttctgtgagattgtgaaagatgcataccaagaaaagacagccacagttta

SEQ ID NO: 642920 - DNA, 97 bp, Homo sapiens
agtggttagatgaactggattctgggctccaaggtatatgaatgacctaaaggtacaaataaagacggagagagaacagtgccaactgggagcaggg

SEQ ID NO: 642921 - DNA, 75 bp, Homo sapiens
cgcggttggggccactgcgaggccgttttagggcttcgtgggacacatatgcaacatgcctatgatttttacaag

SEQ ID NO: 642922 - DNA, 83 bp, Homo sapiens
gagtaacaaccatgagaatgtgtctcttgccaaagcgaagggtgatcagcccatgacctaaacctccagacaaaataaaacgg

SEQ ID NO: 642923 - DNA, 87 bp, Homo sapiens
aagagtgcagagacagtagccatccagccagaacatacatatgatagttgagaaagacacatattctgatcatgaagaaataaacac

SEQ ID NO: 642924 - DNA, 100 bp, Homo sapiens
gcccagcctcgtcctgcccggcctgagcgccccgcccagcagccggctctggcccaccggggtccgggagaatccggacaatcagatagttcaaaccagc

SEQ ID NO: 642925 - DNA, 75 bp, Homo sapiens
aacagagcttttggaatctgaacaaggggactgttccctgatgtgggtggaggttatttcttgccacgactccaa

SEQ ID NO: 642926 - DNA, 100 bp, Homo sapiens
cgactgaccggagcgtgggagataattcaagtgacttgtccaatgtggctgtcattgatggaaaaccacatattcttctctttagacgacctcttccaaa

SEQ ID NO: 642927 - DNA, 95 bp, Homo sapiens
ctttttgatattcagagccttggaagtcaacactgtcagtaaagaagcttcttaataaagtagtgctccgtgaatcttgcttttaccggaaatta

SEQ ID NO: 642928 - DNA, 96 bp, Homo sapiens
agcatcccccctccactcacccggcagatatccgtgaaggctctagatacagaattcgttgttgggaaggactggggaaacagctgtaacatttgc

SEQ ID NO: 642929 - DNA, 100 bp, Homo sapiens
ggaagtaaaaaaaggtctagataacctctacaagaaagttgataaacatttatgtgaagaagagaacttacttcaggtggtctccgtgggcatcaaagac

SEQ ID NO: 642930 - DNA, 76 bp, Homo sapiens
gaagtgaagttgggcggatcacttgagactcagattgatggacaacttttcttaattaagcaccttttgatacttc

SEQ ID NO: 642931 - DNA, 100 bp, Homo sapiens
ctggagcccatcacctacatgcaggacgtaattgcacacgggcgcctcccatcatttggttgctaaggagacagaaggctggtgtttccgatttgccact

SEQ ID NO: 642932 - DNA, 50 bp, Homo sapiens
cggcgaatggagcaggggcgcgcaggaaacagtactgctggagcaccctt

SEQ ID NO: 642933 - DNA, 50 bp, Homo sapiens
ggagacttcggagactgcagttgcaggctcttgatggaaatgtgtatgat

SEQ ID NO: 642934 - DNA, 101 bp, Homo sapiens
tcaaaaacaaaattctgaactcaggacttggcaagaaacctgtaggaagtgtcagggactctggaaagaacataatggcctcacctgtgaagagctggctg

SEQ ID NO: 642935 - DNA, 75 bp, Homo sapiens
ttttgcattgaaaaagttggcaaagacacttggttaccaagaagccatacatgcatgttggcagataaattgaac

SEQ ID NO: 642936 - DNA, 98 bp, Homo sapiens
tggcgctgccgcccaccttgtggccctgggctttaccatctttgtggctgtgcttgccaggcctggctccaataatcagacagctaaatggagtctga

SEQ ID NO: 642937 - DNA, 100 bp, Homo sapiens
gtccagggagtggtagttcccatggtacacaatggttatggatttttctaccatatcagagatgacagtgactacctgtttaagctgcttttgattggcg

SEQ ID NO: 642938 - DNA, 83 bp, Homo sapiens
agccaggaggactcttcggacggggacagagagctgatgaagagctagagccggtgcaggccacgcagaacaagacagggaag

SEQ ID NO: 642939 - DNA, 100 bp, Homo sapiens
cacaagaagaaacgcctggtgcagagccccaattcctacttcatggatgtgaaatgcccaggcctgtgtgcgctctatccagctggacgggctggtctgg

SEQ ID NO: 642940 - DNA, 71 bp, Homo sapiens
gctggacttctccatcaccaagtcaggtagcattggtgctgcagatagtcctgagaactgggagaaagtct

SEQ ID NO: 642941 - DNA, 101 bp, Homo sapiens
ttggagactcctgcgtcctccgacttttcatggttggtaacaaggaagatgctgagaaggaagtagctatttctaccttctcatccagtaaccaggtatcc

SEQ ID NO: 642942 - DNA, 100 bp, Homo sapiens
acccgtgcttcagggtctagcccagccgaatccgcgtcgggctgtaactcgagtgccaggttctggctccttggcagcaatggctgtatttgaagataag

SEQ ID NO: 642943 - DNA, 75 bp, Homo sapiens
tgggaacgcttattcaacggcaaaagtcccccagtcaaccagagaggagaaaagagaaaatgggcttgaagctag

SEQ ID NO: 642944 - DNA, 89 bp, Homo sapiens
gacttcaaagctactgcagacgacgagctgagcttcaaaaggggggacatcctcaaggtagacgttacatccaagaggaaataatccag

SEQ ID NO: 642945 - DNA, 83 bp, Homo sapiens
gccgggcacctccgagcgcaaggacagcgcgaggtccgcgcagcccagcgcagccataaggagaggacttgggtgaggagctg

SEQ ID NO: 642946 - DNA, 100 bp, Homo sapiens
cagaatgtgaaggattatttactcgatgatggaactctggtggtttcaggaagaagcctggctcctacagctgccgccaagagaagaattacaagatcga

SEQ ID NO: 642947 - DNA, 100 bp, Homo sapiens
ttggagaattacgaaccatgttcaagtcaaaactgcagctgctaccatggtgagaaagatcagtctaaagaaaaggagaagaaagtgaaaaaaacaattc

SEQ ID NO: 642948 - DNA, 80 bp, Homo sapiens
aactggcagctcacggaggaggattttgggaacacatcaggccgtctctgtttgaacaaatcaggatcctcatgaccagc

SEQ ID NO: 642949 - DNA, 100 bp, Homo sapiens
ctcagaaacccacagctaagtttcccaggactccagaaaattcagcaaagaagaagcttttaaggtctagaattacggagtcaacaaagcaaacctcaag

SEQ ID NO: 642950 - DNA, 80 bp, Homo sapiens
gtcgggcgctgctgtctgtgaattctttttgaaagctgcctgcggcaaaggccagtacacaacaggccggggctcctcag

SEQ ID NO: 642951 - DNA, 75 bp, Homo sapiens
ggaccccagcccctctccagctcgaaatctttgtcctgaagaattatggagagaacccagaagcctacaatgaag

SEQ ID NO: 642952 - DNA, 75 bp, Homo sapiens
actgggccacccacgtctatgtaccatgctttcttggctacacaagtagtttatcatttttctttatgatgttct

SEQ ID NO: 642953 - DNA, 80 bp, Homo sapiens
ccgagaacgtgcgggaagagaagatcatcgagcatttcaaacggtctctaattaacagaagatggcaaagcccagccaca

SEQ ID NO: 642954 - DNA, 83 bp, Homo sapiens
acagaaacccattatacttcaagtggtaaccctcaaaccaccacacggaaattggagatgcggcattccaaaagaactcactg

SEQ ID NO: 642955 - DNA, 98 bp, Homo sapiens
agaaaagtttcttaagcattcagacgaagccctgaaaatcctagggggtgttggactcttctttagctttacagagctgattgggcagaaagtggccc

SEQ ID NO: 642956 - DNA, 97 bp, Homo sapiens
ctgaaaccactgaaaggggtagatcctaacttaatcaacaacctggaaacattctttgaattggattatcccaaaagtctcactgtgttgcccaggc

SEQ ID NO: 642957 - DNA, 73 bp, Homo sapiens
tggggacgaagagctgcagctcctcctgtgcgggaattgaaatgcaccagcggttgtctaacatagaaaggaa

SEQ ID NO: 642958 - DNA, 75 bp, Homo sapiens
cgagaccgcttaccgcatctggctggagccctgcattcgcggcgtgtgcagagcaagtgcaccggcacctggacc

SEQ ID NO: 642959 - DNA, 74 bp, Homo sapiens
cagatgctgccagggtccctgaagagggaagacacgcggaaacagaagctaaaccagccccagaaatatttgaa

SEQ ID NO: 642960 - DNA, 99 bp, Homo sapiens
tcttgccaccgggcctgtcagttgacctaccccttgcacacctaccctaaggatgtgcttttggggcaagacagtggctttggtcttgtgaaggatcca

SEQ ID NO: 642961 - DNA, 100 bp, Homo sapiens
ggaggagaaaacagagtcagcatcagagcagcaggagggaaaatgaagaaggaacgatctcgtaagaaggattcagatgccaggccaaggtggagcaagc

SEQ ID NO: 642962 - DNA, 82 bp, Homo sapiens
actgaaacgatcctctcatctcagcctccaaaagtgctggcattacagagaaacttgcccaggccaaagaagagaacgtggg

SEQ ID NO: 642963 - DNA, 98 bp, Homo sapiens
catattccgctccagaaattctgcttggtgatgagtatgatgcacctgcagtagcacgcactcctggctttaaagtttatacttgcatttgccatacc

SEQ ID NO: 642964 - DNA, 100 bp, Homo sapiens
cgcggagcgggagagcggccacaccatgcgagcccagtggagcaaaatgagagcgcagtgagccgggcccagcttctctcctagccgttccgactcccac

SEQ ID NO: 642965 - DNA, 90 bp, Homo sapiens
gagcacatcgagaccgcttaccgcatctggctggagccctgcattcgcggcgtgtgcaggaggagccgaggaaggtctgcttcacctacg

SEQ ID NO: 642966 - DNA, 74 bp, Homo sapiens
gccgtcagcaacctcgtccggacattcacggcatggtgtaactcccacctccggaaggcggggacacagatcga

SEQ ID NO: 642967 - DNA, 90 bp, Homo sapiens
tatggcaaaagtctatcaaacagcaagcactgacaagcagcacattctcaagagcacacaggagtggcaaaattctattcagaagaatgc

SEQ ID NO: 642968 - DNA, 100 bp, Homo sapiens
tgcttttggtttccctggcaggggttgaactgtggagtgtgtggatggagctggaggaggggaaggcaggcagcggactccgccaatattatctgtccaa

SEQ ID NO: 642969 - DNA, 100 bp, Homo sapiens
acatgtggttccatcagtcaggtcattgagcagttacctcagccaaacaggacaagcagatgggagtacatgcattcaccctcagagaattccaaagaag

SEQ ID NO: 642970 - DNA, 100 bp, Homo sapiens
cggatggaaatcctaatgacagtctccaaattcgcctccatctgtaccatgacaccttcagcagtaaacaagataaaacaacttcttaaagataagcctg

SEQ ID NO: 642971 - DNA, 75 bp, Homo sapiens
aaaagagtgagacctctggagaagcaggatccatttgaatccaggaactaagcgtcttgtagaaggaactattaa

SEQ ID NO: 642972 - DNA, 88 bp, Homo sapiens
actcgtcatgctctttgtagcgtggtgcttctgttgctcacaggtctcagtggcccttagcagcagctccattcgtgtggccatgctg

SEQ ID NO: 642973 - DNA, 100 bp, Homo sapiens
ggagagtcctttcagtgtcgaggtgggatgtgtgtgggctgaaattccgagctgcggttgtgcatgagaatacacccttcgtggtaccccatctccggga

SEQ ID NO: 642974 - DNA, 99 bp, Homo sapiens
cgggagcgcgaggtcgatgaggactcggagcctgagcgggaggtgcgaggtgtcagctgtgatgcatgtttaaaaggaaattttcgaggtcgcagatat

SEQ ID NO: 642975 - DNA, 97 bp, Homo sapiens
agctgagcgagctgtcagagcccggggacggcgaggccctcatgtaccacacgtctttcccagggaactccgatgaagtgttccaacaaaatgagcg

SEQ ID NO: 642976 - DNA, 126 bp, Homo sapiens
tcagccaccagcaccccagccacccccagctcttcagcattgtccgccaggcctgtgtccggagcctgagctgtgagctcctgggcaacgtgctggtctgtgtgctggcccatcactttggcaaag

SEQ ID NO: 642977 - DNA, 100 bp, Homo sapiens
ggagagtcaatggctccccagttgacaattttaccaaatgttgcaagaactctggagttcttatggtagtaaaatgccggaaagaaaattctgcattgaa

SEQ ID NO: 642978 - DNA, 50 bp, Homo sapiens
aatgcaattactgagagacaacttgacagcaatgaggaaaggtctactag

SEQ ID NO: 642979 - DNA, 98 bp, Homo sapiens
aagacggctgagcagacagccagcagatatgagagctccacgcaggagatcggtgaggagctgatcaacggagtcatctactccatctccctgcgcaa

SEQ ID NO: 642980 - DNA, 75 bp, Homo sapiens
ggcctttgcctttgttacatttgcagatgatcaggtgtgatccctcacatccacaaatctctgattggaaagaag

SEQ ID NO: 642981 - DNA, 50 bp, Homo sapiens
tttcaattgatgctttatggacttgatttttattgaaggatggtcagctg

SEQ ID NO: 642982 - DNA, 82 bp, Homo sapiens
acgtggacaaagctgttgtctcagggagcacagaaggcatccctcagaagggctttatttgaaccccggtgatatgcagcgg

SEQ ID NO: 642983 - DNA, 82 bp, Homo sapiens
tttcgtcctcggggagaagagaccccaagagtgttgagcagcccatcgtgcttaaagaaggttccagggtctccctccactg

SEQ ID NO: 642984 - DNA, 50 bp, Homo sapiens
gggaaaatctccccggtgactttcagtggagagagtggagctgggaagac

SEQ ID NO: 642985 - DNA, 82 bp, Homo sapiens
ggcagctgcgggcgctgcgtgccgtgttccggagccagcagcagaaagcgtggatacccatcaacgaagttttgatattgga

SEQ ID NO: 642986 - DNA, 50 bp, Homo sapiens
caggaatgtcctccaaggaaatctatgatacctggactacagacgagtgc

SEQ ID NO: 642987 - DNA, 100 bp, Homo sapiens
gttgttaaattcattgactacggaaactatgaagaggtgctactgagcaatatcaagcccattcaaacagaggcatggactgctcactagaagctcagcc

SEQ ID NO: 642988 - DNA, 101 bp, Homo sapiens
agtagctttccgcagattgaaattaataaaatgcacatatcccagtccattgaggttgttcggaatcctataattgaaaaacagtaaagatggaaaaccag

SEQ ID NO: 642989 - DNA, 82 bp, Homo sapiens
gggcacggcggaggcagcggagccctgggccatcgaggttgacggatatattcagacgttacgacacggatcaggacggctg

SEQ ID NO: 642990 - DNA, 48 bp, Homo sapiens
cagcagctgcctcaagaggagcaggcagcgtctcctccctgggccccg

SEQ ID NO: 642991 - DNA, 100 bp, Homo sapiens
cagcagattctaaaaaggaagaataagcaggcttttttagatgagctggagagacagcgtctggagaccatcctcagtctctgtgctgaatacacaaagc

SEQ ID NO: 642992 - DNA, 51 bp, Homo sapiens
gctggagaaggcctatgccaaggtaaatggcagctacgaggccctgtcagg

SEQ ID NO: 642993 - DNA, 75 bp, Homo sapiens
tttcatctgtagcattcaagacttcaaactggaaaccctggaggacatcgacaagaacggggatgggtttgtgga

SEQ ID NO: 642994 - DNA, 90 bp, Homo sapiens
tgtagagacagtcagcctattgtcctgccaacagagcaccgccattcgttatctatgacatgaattccttaatgatgggagaagataaaa

SEQ ID NO: 642995 - DNA, 74 bp, Homo sapiens
cgcctcgcctggatgtgagtttcagccaggacttgacccaatgaaagaagcatatggcacttgtgaagataaat

SEQ ID NO: 642996 - DNA, 96 bp, Homo sapiens
ctggaaccagatcggcccaatggggtaatcctggaatatgaagtcaagtattatgagaagtgctcccaagaagatattgctgataaactaggtgtg

SEQ ID NO: 642997 - DNA, 97 bp, Homo sapiens
attgaggacaagaccatcgagctcatggctgaccggttccctgatgtgttacctgcttctgctactgatccaaactgcagaacttctcattcatccc

SEQ ID NO: 642998 - DNA, 75 bp, Homo sapiens
agcagtcacgacctccagcacagttggaatcaactggactcggccttagtagtagtagactaagaacaactctaa

SEQ ID NO: 642999 - DNA, 75 bp, Homo sapiens
caaaggggtcctgtctggataagcggtacggctgtaagaattgtggcagggccttctgttcaggctgcctaagct

SEQ ID NO: 643000 - DNA, 88 bp, Homo sapiens
acaaatccgggggcaaggccaaaaagaagagtggggccaaaggctgcgaggttgtggtgtctgggaaactccgaggacagagggctaa

SEQ ID NO: 643001 - DNA, 101 bp, Homo sapiens
gcacagcatcgcgcagaacaaagggatcaggatggtggatgtggggggccagcggtcggagcggaggaagtggatccactgctttgagaacgtgacatcca

SEQ ID NO: 643002 - DNA, 100 bp, Homo sapiens
ccagggtccctgaagagggaagacacgcggaaacaggggcaagattcttgccaagagaattaatgtgcgtattgagcacattaagcactctaagagccga

SEQ ID NO: 643003 - DNA, 90 bp, Homo sapiens
caacattccagttttttaagaagggacaaaaggtggtgctagaaaagccaaatggctttagtcagagtcccacagccctgtacagcagcc

SEQ ID NO: 643004 - DNA, 100 bp, Homo sapiens
agacggagctggagcgaccgagagagacagtaacagtttggaggatcaagatgttgaccaacttgaggatatttgcaatgagtcatcagacaatacccag

SEQ ID NO: 643005 - DNA, 100 bp, Homo sapiens
tcaagtactggctatattatttgcacccagtcctgcagcgccagcagctggactatggcatctatgttatcaaccagccggcagcaaaagtggaccaaga

SEQ ID NO: 643006 - DNA, 78 bp, Homo sapiens
tcagaatatgagggctcccctagaccctgaattacatgaatgacagtcttcgaaccaatgtgtttgttcgatttcaac

SEQ ID NO: 643007 - DNA, 75 bp, Homo sapiens
cggatctcatatcttcacttggcaaactcaacaaggttatcaatactctggctgaccatcatcatcgtgggactg

SEQ ID NO: 643008 - DNA, 101 bp, Homo sapiens
cgtttacaggaggcagaaagttccagaaaccaaggagccaacctgtggattaaagggacttggactaaagtctgatgaacttcccaatcagatgagcatgg

SEQ ID NO: 643009 - DNA, 83 bp, Homo sapiens
aggctccctgctcagctcctggggctgctaatgctctgggtctctgcctccatccctgtgagatcactgccctgagccaatcc

SEQ ID NO: 643010 - DNA, 51 bp, Homo sapiens
gagaagagcttggcagaggtgttcgaaaaggcatggagagtgtgaagcagg

SEQ ID NO: 643011 - DNA, 74 bp, Homo sapiens
ttcagagctgatcacaaggaagctgtaagaaccataggtttgctgactgcgccatattgttgctgacacaactg

SEQ ID NO: 643012 - DNA, 74 bp, Homo sapiens
aatgggctgagggatggcgggaacttccccaaggagctgctgaaggaaagagccagacttctcagaggtcagtc

SEQ ID NO: 643013 - DNA, 100 bp, Homo sapiens
ggctaacttcagcggtggcaccgggatcggttgccttgagcctgatatgggacacagcaggacaggaacggttccagtctctcggtgtggccttctacag

SEQ ID NO: 643014 - DNA, 100 bp, Homo sapiens
ctttggttacctatgtacctgttaccactttcaaaaccgatggatgcactgactggtctatcgatatcaagaaatatcaagttttggtgggagagcctgt

SEQ ID NO: 643015 - DNA, 100 bp, Homo sapiens
gagcctgggaggccggccggtgccagcacctttcggcttctgagacggcggcagcagcggcattcaggtctgtgatgaggaatggcaccactacgtcctc

SEQ ID NO: 643016 - DNA, 50 bp, Homo sapiens
cggaactcgggcatcatggcctcaggtcccgcagcccccggaagccaata

SEQ ID NO: 643017 - DNA, 103 bp, Homo sapiens
gaaaatggcgggcagccaaggcaggcgagaagaccatctctgtggtcctacagggtgtgggccgaagatatgctcatgtggtgttgaggaaagcagacattga

SEQ ID NO: 643018 - DNA, 100 bp, Homo sapiens
aagcagtcctaccatgtcagccttcccagtagctgggaccacaggcattcccatcaagagcaccatggacaaccccaccaccacccagtatgccagcctc

SEQ ID NO: 643019 - DNA, 83 bp, Homo sapiens
ttatctttcatatgtccgagaaaccaagggtaaactaccaagttacaagaggagatatttcatcaaatactccagactatgcc

SEQ ID NO: 643020 - DNA, 83 bp, Homo sapiens
ttcagtcctcaatctccttttccttggctacccgttttaaaatcaaagatgggaaaatcggagaaaattgcccttccccatgg

SEQ ID NO: 643021 - DNA, 80 bp, Homo sapiens
agccccggacgagaagcgcagcaacgtgcggtgggaccacgagagcgtgtcagaaactatttaaaagaagcactggtgaa

SEQ ID NO: 643022 - DNA, 125 bp, Homo sapiens
gatgcctccggctagtccgtcatttccaagaaataaaaggacagatgcaaatgaaagctcttcttcccctgaaatcagtgattcgcctttgccagtctcatctcgtgtctgctttgttaagttcc

SEQ ID NO: 643023 - DNA, 100 bp, Homo sapiens
cagcctttgacagaaatgtttaccagttccttctgtaagaactatgaatagactgacccagctggaaagactggatttgggaagtaacgaattcacggaa

SEQ ID NO: 643024 - DNA, 96 bp, Homo sapiens
atgcaagagcccttatgcaagcaaaaacactgtttcccaacagctacttgttggtaggagatttgttgttggggatagataaggaaagaagaaaaa

SEQ ID NO: 643025 - DNA, 101 bp, Homo sapiens
ctggagagcatccgcaaacattcagacaaaattggagagactgccatgaagcaagtgagatcggactggaactgttcggctgcgaccagaaatttattttc

SEQ ID NO: 643026 - DNA, 98 bp, Homo sapiens
cgcggcggcgccgggtggtggttaaaccatgttaaggaggattttacagagggagggggtccgcatggaagaaatagttgaaggttgtaccggagccc

SEQ ID NO: 643027 - DNA, 90 bp, Homo sapiens
agtcaaggttgcccccaggcggtccttcctgggtggagccgccaccaaaatgcagattttcgtgaaaacccttacggggaagaccatcac

SEQ ID NO: 643028 - DNA, 87 bp, Homo sapiens
gggctgcggcgtgtgcgcgcccgccagctgctccggagatacggcctgggcagtttttaaagggaagtttaaagaaggggacaaagc

SEQ ID NO: 643029 - DNA, 100 bp, Homo sapiens
gttaattgatgtgcaggctggaagtcttacagctaaggtcacagcaccacaggtacatcaggaacgtctctatcaagaatacaatttcagcaaggctgag

SEQ ID NO: 643030 - DNA, 75 bp, Homo sapiens
cggacacataacaagcagcagtgaggacaccaaagggggcccatgtgaccatcaacgcacgggccgaggaggatg

SEQ ID NO: 643031 - DNA, 100 bp, Homo sapiens
cgacagaacatgatgttgacacgggctgggcgcccccagaagcccgggaacaaacgtgaccatggaggaagaagatgagtctcgagggaagacagaggag

SEQ ID NO: 643032 - DNA, 89 bp, Homo sapiens
gaattttactgggataattatccaaataaattgcaagcattctatccaaatggaggtgttggaattggccttctccatcctgtatgacc

SEQ ID NO: 643033 - DNA, 82 bp, Homo sapiens
acaccccggacatccgcgccacaccttcggaaccaaaaagaagcttcccagagccggggccaggagccccaagcgccctcta

SEQ ID NO: 643034 - DNA, 74 bp, Homo sapiens
aaattatggtgatgctgggggaaaatgcaagaagattctgtcactgagttaacagtggaagattctggtgaaag

SEQ ID NO: 643035 - DNA, 48 bp, Homo sapiens
cggagcccggagcgtcgtggaaagctgcagacattcaatactgcctca

SEQ ID NO: 643036 - DNA, 75 bp, Homo sapiens
atccttgggaccgcctgcctggccattgcgagcggcatctacctactgctctggcaggctgccctgagcacgctc

SEQ ID NO: 643037 - DNA, 100 bp, Homo sapiens
tgtgatgttggagaactatagcaatctggttttcttgggaattgaataccagctttgaagagtgggaaaaaataatgagaactccaaattcaggtgccat

SEQ ID NO: 643038 - DNA, 100 bp, Homo sapiens
accgacaccatctggaggaggcgttgccgtgaggggacctaccagggccagtgggtcggtggcatgcgccagggctacggcgtccggcagagcgtcccgt

SEQ ID NO: 643039 - DNA, 90 bp, Homo sapiens
cacctcctcctccaccaccctcaccagaaaggtcaaggtcagcatctcctcgacgatcaagatctatctctcttcgtagatcaagatcag

SEQ ID NO: 643040 - DNA, 100 bp, Homo sapiens
cactcggcttcatcaaggtcctcgagtggacagattatgagggacaagccaagaaactcctggaactgatggaaaacacggatgtgatcattgttgcagg

SEQ ID NO: 643041 - DNA, 101 bp, Homo sapiens
agtcagggtccgccagctcggggccagcgcatggggctgctgagaccgctccggacgtgcgaagcgttcgcggtgcgagaaatggtcaatgcatggtttgc

SEQ ID NO: 643042 - DNA, 100 bp, Homo sapiens
tgtcgcctgccgctcgctctggggctcgatgtgaatatatattatgtctgcctgttctcccctcgtcggtggctaaggcagaagctcctcctggggtaga

SEQ ID NO: 643043 - DNA, 100 bp, Homo sapiens
ctgcaagctatcaaatctgaggtcttattttgttgagtcgaaagtgaaattttcctttggccaacgtgacagcttttacaactgggacgctgatattgct

SEQ ID NO: 643044 - DNA, 76 bp, Homo sapiens
ggaaggctgacacaggcaagatagagtttgaggagacaatggatgcactccaggctgacatcgaccagctggaggc

SEQ ID NO: 643045 - DNA, 82 bp, Homo sapiens
gagactcatacgcaacctcaatgttgatattcactgatggactccaaagaatcattaactcctggtagagaagaaaacccca

SEQ ID NO: 643046 - DNA, 50 bp, Homo sapiens
caccagaggcacctaccttgcagctggtggagttgagatctataatggag

SEQ ID NO: 643047 - DNA, 82 bp, Homo sapiens
ccaaagtgaaagtggcggtgcggatacgacccatgaaccggcgaggcacagcgtcaccttcgtcccctccggagctgcacgt

SEQ ID NO: 643048 - DNA, 80 bp, Homo sapiens
tggaaacacatgtgggacatacaagcgttggatatagaggtgagacacagtaacctggttgaactctgcatctggaaagc

SEQ ID NO: 643049 - DNA, 82 bp, Homo sapiens
gtacaggatatgaagaaattgagggttcttgccatgcaacaatggtgtggttggtgaatatggcagaaggagacccggaagc

SEQ ID NO: 643050 - DNA, 74 bp, Homo sapiens
ggagccaggaattcccagtttgacaccacaggctgagctccctgaaccagggctgccactccccaccaccgtcc

SEQ ID NO: 643051 - DNA, 75 bp, Homo sapiens
aactctacagatatcaagttatctgctacaggccaaatttgagcaccttaagagacttcaccaagaagagagaat

SEQ ID NO: 643052 - DNA, 83 bp, Homo sapiens
attctggtggggagatgaacccaacctagtgggtgtaatacatcatgaactgcaggaccttgtgccggagccgactactggag

SEQ ID NO: 643053 - DNA, 98 bp, Homo sapiens
gggatcccagcctcaggcctgcacggacggtgttggttgggagggaatctggaaaaattgcaatcaaaacatcatttctctaagaaaattttgggtaa

SEQ ID NO: 643054 - DNA, 95 bp, Homo sapiens
cctggcctacttcgtgcgtgagcgaggttatgatgtgattgctcaagcccaatctgggactgggaaaacggccacatttgccatatcgattctgc

SEQ ID NO: 643055 - DNA, 74 bp, Homo sapiens
actttctgtctctatgaatgtgactaccctggttacctcatatcgccctcacaaagccaatgctgaggagatga

SEQ ID NO: 643056 - DNA, 96 bp, Homo sapiens
ccgaccaccgaggctggagggggagaacacccaggtagtgtgccagtatttgaaaaatcccaatgtatctgattcactgctgctgcagaatatttt

SEQ ID NO: 643057 - DNA, 97 bp, Homo sapiens
atcctggagcgaatcctaccttccaaacagtctattgcgtctgcagacatggatttcaaccagctggaggcattcttgactgctcaaaccaaaaagc

SEQ ID NO: 643058 - DNA, 83 bp, Homo sapiens
ctcagtgaccttggctagaaaccaatggctgtgcggcgtgagtaagactttgaccccgacgcaggcttcagtgattgccgcgg

SEQ ID NO: 643059 - DNA, 100 bp, Homo sapiens
ttctctttgtggccagatgggtttgtatggacaggcttgtccatctgtaacttcattaagtcgctccccaagtagggagaagaagagagctcgttgggag

SEQ ID NO: 643060 - DNA, 121 bp, Homo sapiens
tggaccctggaaaacctggccctcttcaatttctgacaaaagcatgctacaagtgaaaactgatgagaaactgaatgtgtctgatgagaatacagcaagttgccctttgagccccattaag

SEQ ID NO: 643061 - DNA, 100 bp, Homo sapiens
cccagaacatcctggtgcctctggccaacactgcctttttccaggagcttactccacgggaacagcctctagataatctgagttgttgaaaatacgaagc

SEQ ID NO: 643062 - DNA, 100 bp, Homo sapiens
tcaactgcaggcaatgaaggccttggtggtatagatttcagtagctcctcagataaaaagaactctgtttgctggctacacggacaacctggtgcgagtg

SEQ ID NO: 643063 - DNA, 88 bp, Homo sapiens
agaccttgcgattctacgattgcagcgcagtggaagtcaagagcaagatggccaccatgtctgggagatggaagcgaaaactgaccgg

SEQ ID NO: 643064 - DNA, 74 bp, Homo sapiens
cggccctttggggaaatgcgtgcactgcgtccctctagaggtgcccctgggcgctgggattgctctagcctgta

SEQ ID NO: 643065 - DNA, 75 bp, Homo sapiens
ggagactcctgaccctcagaatgaaggacagaataacgggctcccagattcacaagccccaccaagaggatcacc

SEQ ID NO: 643066 - DNA, 90 bp, Homo sapiens
ggagacaaacctcatatgcagacttatgaagttgaccttaataataacaaatgtggcaattattttggatctatcacctgtcatcataac

SEQ ID NO: 643067 - DNA, 75 bp, Homo sapiens
gccactacagttcatcaacatcaactacgtccctctgaagctaaaacagcggaagaggtgatttattatatggtt

SEQ ID NO: 643068 - DNA, 74 bp, Homo sapiens
gagggcatggacgagatggagttcaccgaggcagaggtgatcatgaactaccatgtcggggagacggtgctgtc

SEQ ID NO: 643069 - DNA, 107 bp, Homo sapiens
caggtactctacccagcgagcagctgccaccttttccaggaccttctctaacccaggtgtgctacattgagggtcatcgggtaattaatctggccaatgagatgttt

SEQ ID NO: 643070 - DNA, 100 bp, Homo sapiens
gattccattttacaggcattaacaaatacatctcctacataactttgaccagaataagctggaagaagaaatgagaaagcgaaaagaaagagtagaaaaa

SEQ ID NO: 643071 - DNA, 90 bp, Homo sapiens
cggagatattccaggcccactccagggcagtgaaatgcaaaatggaggacgatgcagtacctgcagccaagatgaaaattccatcatctt

SEQ ID NO: 643072 - DNA, 75 bp, Homo sapiens
gagtggttgtgtggtcgcgtctcggaaaccggtagcgcttgcagcatgtgaggacccttggagggctgctaaaat

SEQ ID NO: 643073 - DNA, 88 bp, Homo sapiens
attgattatctgtcccccagctattcaaggtggtcttggaggcattgggatgggacttggtccgggtggacagcctattagtgccagc

SEQ ID NO: 643074 - DNA, 100 bp, Homo sapiens
ccacagcttgtgccaccgccgtgctgggcaatcagaatgacatctctgaaaaggagcaacgatggggagccaagaccatcgaggggtctggacgcacaga

SEQ ID NO: 643075 - DNA, 100 bp, Homo sapiens
gggacgtggcttttgtgaagcacagcacggtactggagaacacggatgacctcctgccccccgaggtctgcagtctcctgaacccagcagccatctacgc

SEQ ID NO: 643076 - DNA, 51 bp, Homo sapiens
ggtgatgacagaatcagctttttgtactaatggtcacttgatgtgcgctgg

SEQ ID NO: 643077 - DNA, 100 bp, Homo sapiens
ttccaaggggattcaaacttcaacagaatgtggcaaccagcatcaatcctttccatataacaaaaatggattcaaagttggcatgaaattagaaggcgtg

SEQ ID NO: 643078 - DNA, 74 bp, Homo sapiens
gaatagaccctctgtccaggcagcattaaaacttaagcagtttgaaaatctgaacacagttgctgagtgtctgt

SEQ ID NO: 643079 - DNA, 87 bp, Homo sapiens
cccacagcctcctcttccagaatgcctttgcgcagaagagtcaagtaccattggccaggatcaaacgcttatggaacgtgatacaga

SEQ ID NO: 643080 - DNA, 80 bp, Homo sapiens
gtcgacatgagtgatgtggaggaaaacaacttcgagggcagactgacatagcccagagatacaggataagcaaataccca

SEQ ID NO: 643081 - DNA, 100 bp, Homo sapiens
ggctcctggacttcgcctttcccgagccctggaggtggggagaaaagtgtgtaatgctgtgtcatggagctaaaatcggatttttccaaggagatatcag

SEQ ID NO: 643082 - DNA, 90 bp, Homo sapiens
ggcgcctaaagtctgagagagggaagtcgcctctgtgctcatggcagaaacggtggacacaagcgaaatggtcaacggcgctacagaaca

SEQ ID NO: 643083 - DNA, 97 bp, Homo sapiens
agggacagcacctcatcccctggatgggggaccacaagatcctcatcgacaggtggatccataaagaacccagccaacccgcagagggaggggaggg

SEQ ID NO: 643084 - DNA, 75 bp, Homo sapiens
agtgctgaggcggaacaggccgggcaccaaggcgcagcttttcaggctgcctttcgagctcaggggcccctggct

SEQ ID NO: 643085 - DNA, 74 bp, Homo sapiens
tcagcctcctgagtagctaggactacagatccaagaagatcccagcctatgcggagacaaaccctccatctcag

SEQ ID NO: 643086 - DNA, 82 bp, Homo sapiens
ggccgaggccatatccgagcgacctcctgccccccgaggtctgcagtctcctgaacccagcagccatctacgccaacaacga

SEQ ID NO: 643087 - DNA, 90 bp, Homo sapiens
tgaggatgatgatgaaatcaccccggatttgtggcaagaagcatgctggattgtaatcagaaagacctctagttttccagactcccggag

SEQ ID NO: 643088 - DNA, 90 bp, Homo sapiens
ccattcttatcatttctaagcaggttcatgccagcccagaacagagaatcaggtactataagatctccgtggtgctcatgtgctttgtgg

SEQ ID NO: 643089 - DNA, 51 bp, Homo sapiens
gggagaggctctgagaggcgaggccgggagaacccatacgtcatgcgccgg

SEQ ID NO: 643090 - DNA, 100 bp, Homo sapiens
ctggagccgcccccgggacgtcagtcctggaggaggcgaggacatagggcctgattacattccaacagaggaagaaaggagagtcttcgcagaatgcaat

SEQ ID NO: 643091 - DNA, 75 bp, Homo sapiens
actccaatgggcctttccagcccgtggtccttctccatattcgagggaccagttactctccacaagaaaattcac

SEQ ID NO: 643092 - DNA, 75 bp, Homo sapiens
atgatgccagttaattactttgaatgtttccatgggtgaactatcaagatggcaacctcaacatttcaattccag

SEQ ID NO: 643093 - DNA, 87 bp, Homo sapiens
tcgagtgaccgagaccgcggccgggaccgagggagcctcctcaacaagcccaagagtgagatgaccccagaggagctgcagaagcga

SEQ ID NO: 643094 - DNA, 50 bp, Homo sapiens
gctcatgaaccacttggcaaagtcaaaatgcagatcttcgtgaaaaccct

SEQ ID NO: 643095 - DNA, 88 bp, Homo sapiens
gccgatccagcctgcggagcctgtggggcaggcaaatgttctgaaaaagactctgcatgggaatggcctgccttacgatgacagaaat

SEQ ID NO: 643096 - DNA, 100 bp, Homo sapiens
gtatgagaagtacagggagcgagagctggagaagctgggattggagattccacccaaacttgctggtcactgggaggcagaagctcctcctggggtagag

SEQ ID NO: 643097 - DNA, 82 bp, Homo sapiens
cgccggggggctatgggcccatcgactacaaacggaacttgccgcgtcgaggactgtcgggactgttatgaacactatccaa

SEQ ID NO: 643098 - DNA, 90 bp, Homo sapiens
gcgccccgcagcgccccgcagagcagtcgagatctcaggaaattttctgatggaatttcaagtgaaaaatgttccttcagaaagaattgc

SEQ ID NO: 643099 - DNA, 87 bp, Homo sapiens
gggacaggaggctgcggggcctcagagacccatctattttggatagtttagatttgaatgaagatgaacgggaagtactcattaata

SEQ ID NO: 643100 - DNA, 121 bp, Homo sapiens
tggtcagcttagtgcgttctacctttttgcctgtgtttggggcacattcattctcatctctgtgatcttattcctgataatgttggttatgcgcaaacgtgttgctcttaccatcgccttg

SEQ ID NO: 643101 - DNA, 89 bp, Homo sapiens
cttccccagcatcccgggctacaacctgccgctgtatggtttgaagtggtgaacatggatttttctcggcttcacatgtacagtcctcc

SEQ ID NO: 643102 - DNA, 50 bp, Homo sapiens
atctcttctccctccccttcttgattaattggcacggcgactgtagccct

SEQ ID NO: 643103 - DNA, 98 bp, Homo sapiens
caccatctaaagtggttcatcttggagataaagaacaatctaactgggcaaaagaagtacaaggaatttcagaacattttggagtccagaacatgtaa

SEQ ID NO: 643104 - DNA, 100 bp, Homo sapiens
ggcttggcccgcctaaggcactgggtgtacctgctttgcttctctgcaggtgaccctgagagtgtggctggggagtatgggcggcactccctctacaaaa

SEQ ID NO: 643105 - DNA, 100 bp, Homo sapiens
ggacaccccggaagctgggaaatggtgttcctccaagaaaagctggttatattgaagacctggttttgatgctgcctcagaacatttgggataacctata

SEQ ID NO: 643106 - DNA, 90 bp, Homo sapiens
acggtctgcccacccaacgcgaagacggtaacccgtgtgactttgactgggaacggcagagtcgaaacaaacaatgagggcgaaccagtt

SEQ ID NO: 643107 - DNA, 74 bp, Homo sapiens
cggaggggctggacgttccacgccaaagtgctgattcctaaagaaaagcccccaatcacggttgtgggtgatgt

SEQ ID NO: 643108 - DNA, 75 bp, Homo sapiens
tggtcccagaaacgtcactatcaagaagcccagcagttgaacccaggctttcagctttcttttgcatcatctggc

SEQ ID NO: 643109 - DNA, 90 bp, Homo sapiens
gtcctttatatagaagggagaggctattcacgaaaagcagcagctctagagttcttaaaccgctttgaagaagccaagcgaacctatgag

SEQ ID NO: 643110 - DNA, 99 bp, Homo sapiens
aaggcccacgaggcgcacaagatgcagagcaccccgcaggcccggcgcaaggaatgggatacgtaggaagcctggacgtgccaaggcccaacagcaggg

SEQ ID NO: 643111 - DNA, 51 bp, Homo sapiens
gggatgtgccttagaggattatggctacacaaagggagatttagacttcac

SEQ ID NO: 643112 - DNA, 82 bp, Homo sapiens
aatgcaacttgagaaacccaaacctgtaaaaccagtgacgttttccacaggcatcaaaatgcatgattatgatatgagggtg

SEQ ID NO: 643113 - DNA, 74 bp, Homo sapiens
gtcgggttattcgagtgaccgagaccgcggccgggaccgagggtcaccttccgcaaccctgtcattgagaggat

SEQ ID NO: 643114 - DNA, 75 bp, Homo sapiens
ctgcgcctcacggccagatcccagatgctaatcctgaggtgacgatgacaatgcttcgctggatctatacagatg

SEQ ID NO: 643115 - DNA, 100 bp, Homo sapiens
cggcgagcccttgggccgcgtctcctttgaggttccaaggagcaggggcctcgacaaaggaagggagcagccccagcagagaagaaatgtggagcggaaa

SEQ ID NO: 643116 - DNA, 100 bp, Homo sapiens
aggatgaggtgggcgcaccgggcatagtggttggagtttctgtagatggaaaagaagtctggtcagaaggacttctgtttcctgctctcgacaagggctg

SEQ ID NO: 643117 - DNA, 118 bp, Homo sapiens
gacagtgctcacgccactaacagagaaggattatgaggggttgaagagggtgctccgttccttacagtctgcagatctccaggggagcccaccagcctagtcaacatggcctcggaag

SEQ ID NO: 643118 - DNA, 95 bp, Homo sapiens
attttggtaatactacaccaagaaaccaggttatccctcgaactcctagctcatttcgacagccttgacataagcagctctatgaccaatagcac

SEQ ID NO: 643119 - DNA, 75 bp, Homo sapiens
tcggatgagcttggcatttcccaggatgagcagctatccaagtcaagtctgctgagaacagacccagtccctgag

SEQ ID NO: 643120 - DNA, 75 bp, Homo sapiens
actgggggcaccattaacatgatggagtacctgttgcagggctacagcatgctggccatagggattggaaccctg

SEQ ID NO: 643121 - DNA, 100 bp, Homo sapiens
gtggccctgttctgggatgagcaaggtgtaaagggtttggtaaaggctccagtgtggtggcctatgaaggacaatcctggcacgactactgcttccactg

SEQ ID NO: 643122 - DNA, 73 bp, Homo sapiens
ggctatcaaggcaatgcaccaagcacagaccatggagaagtctggctagataatcccaaaatgtggctccgag

SEQ ID NO: 643123 - DNA, 90 bp, Homo sapiens
cgtcttgtgccttttcttgttcctactgtaaaggagatgggttagatgttccgattacacctcaacaagaaggcaactgacaaacagcct

SEQ ID NO: 643124 - DNA, 98 bp, Homo sapiens
agcaactggattttttaactgaagatagtgcctttcagccctaccaggtgtcagttgtacccgaggcgttctcagcagcagcaagtacctgtggtgga

SEQ ID NO: 643125 - DNA, 75 bp, Homo sapiens
atcgcgacggccaaaaggagcggcgcggtcttcgtggtgttcgtggcaggcatatactagtgtctcaaaggcttc

SEQ ID NO: 643126 - DNA, 83 bp, Homo sapiens
gtccgccgccaccacccactccggacacagcacacttccaccctgggcagcgtgtttggggacgcgtactatgagcagcagat

SEQ ID NO: 643127 - DNA, 75 bp, Homo sapiens
cgaattctactatcgctacccaactctaggagtccagagtatcaactggcagacggccttcaaccgacaagcgca

SEQ ID NO: 643128 - DNA, 100 bp, Homo sapiens
tggccaaagcctgcccagacggctcacctgtgcgggatggaacaaaagagctgtccgtggcacagtgcacgcagcggcccgtggacatcgtcttcctgct

SEQ ID NO: 643129 - DNA, 97 bp, Homo sapiens
agaggactgggaccgggacctgctcctggacccggcctgggagaagcagcagagaaaggtgctttacaaggccaagtacggtccaatgtggatgtcc

SEQ ID NO: 643130 - DNA, 100 bp, Homo sapiens
tggagatggaccaaatagaagaataagcagtgcctgtgtggcacagttggtggatctgaaatctgaactgacagaaacccaagcagagaaagttgttttg

SEQ ID NO: 643131 - DNA, 75 bp, Homo sapiens
ccatgaaagctaagctgctgaagctggaggaaagcaggaatgttcagaggcaaatgaagattctgcagaataagc

SEQ ID NO: 643132 - DNA, 73 bp, Homo sapiens
acggccatcattgacgggacgggctctgtagaggtacagccccgtggtggaggccggctcggacatggtcttc

SEQ ID NO: 643133 - DNA, 100 bp, Homo sapiens
tgggtattactttgcaatcgatcctaatggttatgttttattacatccaaatcttcagccaaaggcctataatgcaaagagcaaaagctttgaagatcct

SEQ ID NO: 643134 - DNA, 101 bp, Homo sapiens
tggagaatcaggtccagctgtgtcctacagatttataccctcactttggatgcactgtgaatcttgaaacaagatggacactccacagctgaccttgactg

SEQ ID NO: 643135 - DNA, 125 bp, Homo sapiens
gtgaactttatgcaattctgagttgactccaatccagatgtattttggaactaggtagaatatgactggtcaaaatgcagatcttcgtgaaaacccttaccggcaagaccatcacccttgaggtg

SEQ ID NO: 643136 - DNA, 90 bp, Homo sapiens
gagtgcccttaatgaaaacaacagaaatttgtggtgcaccaggtgttggaaaaacacaattatgatccacctccgacccttaagccagag

SEQ ID NO: 643137 - DNA, 111 bp, Homo sapiens
gctgatcgagcaggcggcgcagtacaccaacgcggtgcgcgaccgggagctggacctccgggatgcagcagcttttttatgagaattacgagcagaacaaaaaggggtaca

SEQ ID NO: 643138 - DNA, 51 bp, Homo sapiens
ctcgcggcccggcgcctggacgggggagttattaagatgttctacgaggag

SEQ ID NO: 643139 - DNA, 100 bp, Homo sapiens
ttgaaccactggaaagtgaggaattttgaagtacaccgtggtgacattgtatcattggttttctctgtttgaagaacataaggacatttctcacggcctg

SEQ ID NO: 643140 - DNA, 82 bp, Homo sapiens
agtgaagctcaagttgctactcgggacgctgcacctcccgcgccgcacggtggacgagccacacccactcgcccgggtctat

SEQ ID NO: 643141 - DNA, 80 bp, Homo sapiens
tattctttattgcagttacactgttggaccaagttttgccagacacctagctgttgggcagaagagggtgcagaaaagag

SEQ ID NO: 643142 - DNA, 82 bp, Homo sapiens
gaccagtccatttggggaaatccttcggatggtgaactcattagaaagtactgtggacaaactcattaagaagacaaacctg

SEQ ID NO: 643143 - DNA, 106 bp, Homo sapiens
tttgggctttggagccccccaggccccagtagacatcgctattgcggttccgaggcagtgggaagagatgcggcccctggacatcgtcgagctggcggaaccggag

SEQ ID NO: 643144 - DNA, 75 bp, Homo sapiens
gtcggccagcctgagcaagcggaggacctacgccggcctggacttcgtgaagatgcatcaactgtaaaatctgcc

SEQ ID NO: 643145 - DNA, 100 bp, Homo sapiens
tgcctgagactaacagaactgctgggcgaatctgagcaccaactgcacctcaccagatggaacttgctaaggaagaaaagtgtgaatttctgccattcct

SEQ ID NO: 643146 - DNA, 97 bp, Homo sapiens
caaggctactgaagcactgaaggggcaagattcttgccaagagaattaatgtgcgtattgagcacattaagcactctaagagccgagatagcttcct

SEQ ID NO: 643147 - DNA, 100 bp, Homo sapiens
gttccatgtgatggtggagtaggaggcaggtctccgcgggtactggctgtcacgctgacatgagcccccagcactcctccgtctaccatggccaccctta

SEQ ID NO: 643148 - DNA, 74 bp, Homo sapiens
agaacagttggatcttgctcagtctctgtcagaggaagatcccttggtgtcagcggtgcccactgtgctggcca

SEQ ID NO: 643149 - DNA, 82 bp, Homo sapiens
gttaaggattccaagtaactcttatttggtctcctaaaaacccagaacagaagatcattaagagagtgattgctcttgaagg

SEQ ID NO: 643150 - DNA, 97 bp, Homo sapiens
aaagcattggttctccagttaaggttggaaagatggatgctacttcctattctatgccagctccaagatacacagtggaactggcttgtggttttgg

SEQ ID NO: 643151 - DNA, 75 bp, Homo sapiens
ggattccaagtaactcttatttgggagtatgcggttaatgaagttgtggcagggataaaagaatacttcaacgta

SEQ ID NO: 643152 - DNA, 75 bp, Homo sapiens
agcccccgaaggccctatcaggacatggagtatgaaagacgacagcaacagaagctcctgaggagccctccaccc

SEQ ID NO: 643153 - DNA, 83 bp, Homo sapiens
atctacgccatgcactggggcacagactccagtccccacaggagacaaccctgacgggagcatggagctgctgtccacgcccc

SEQ ID NO: 643154 - DNA, 75 bp, Homo sapiens
ggccctgccgccatcgccgcagatccagcgcccagagagacaccagagaacaccttccaccatgaccacctcagc

SEQ ID NO: 643155 - DNA, 74 bp, Homo sapiens
agtatgttccctactcggagagcttcagccaagttttagagaaaagcacttggttctgcttcgagatggaagga

SEQ ID NO: 643156 - DNA, 102 bp, Homo sapiens
cttggacttccagcctccagaactgacagtcggcccaatatgtcaagacctctgatcactagatcccctgcatctccactgaacaaccaaggcatccctact

SEQ ID NO: 643157 - DNA, 75 bp, Homo sapiens
ggggggacgctcttctccaccacaccgggagattgtcttcgcagttttaccgacttagaagaacttgatgagaca

SEQ ID NO: 643158 - DNA, 51 bp, Homo sapiens
cttctgatttctgccattgggctcagcaaaacccagcagctcagattcctg

SEQ ID NO: 643159 - DNA, 90 bp, Homo sapiens
tcctctgccgagtggatcgcctgcctggataaaaggtgcatacattcagagggccacactggtgtgaatactgtgccaactttatgtggg

SEQ ID NO: 643160 - DNA, 75 bp, Homo sapiens
ccatatgtgaccatggatataaaatcacaggtcgggaacatgccctgtgtgccgccgtcatttcccacctgcggt

SEQ ID NO: 643161 - DNA, 100 bp, Homo sapiens
agcctgcagagcgcgcagtacctccgcaacatggccaatctttcctaagctgctcagcttacaagaaaaggaatcatactgctaagaattcaaacttcag

SEQ ID NO: 643162 - DNA, 87 bp, Homo sapiens
tagctgctcacatatggatactttcacagttcaggaatctgagaaaaaggggttgattgaaagaatctatatggtacaggatattgt

SEQ ID NO: 643163 - DNA, 95 bp, Homo sapiens
gtgcgcgacacggagctggccaagcttcccgagggcaccttgggtcacatcaaacgccggtacccgcaggtcatcagactagtgctgagtcttgg

SEQ ID NO: 643164 - DNA, 100 bp, Homo sapiens
gtgtcatccagccttagcaaaccagagagttgtctctgtgggaagtttgtcctccgtccattgcgaccatgccgcagatactctacttcaggcagctctg

SEQ ID NO: 643165 - DNA, 89 bp, Homo sapiens
gagcgaggggcgccggctggggtgtgtgctcctgggtggtgagaagctgcaggatgcctactacatcttccaggagatggctgacaagt

SEQ ID NO: 643166 - DNA, 90 bp, Homo sapiens
gccaaatgattcagtccttgaaaacaaggtatctgcgggatggtggccatctcctggtacgccttcaacatcacccgggacttcttcgac

SEQ ID NO: 643167 - DNA, 97 bp, Homo sapiens
tccctacctcgagttcccggggactgtccacctggtggccttcaagtcacaggacgcagcgattccctgccctcttcggtgttattacacaggcagg

SEQ ID NO: 643168 - DNA, 146 bp, Homo sapiens
cttcctcggcttccgcccctttccggcggagtggagatcctattcagaggggccggtctctctaaatatgccccaggtgctggagaatctggtaaaagcaccattgtgaagcagatgaggatcctgcatgttaatgggtttaatgg

SEQ ID NO: 643169 - DNA, 51 bp, Homo sapiens
gagcaacctgcactcctccgtgagacggtggagaactgcgtgtgcaccctg

SEQ ID NO: 643170 - DNA, 75 bp, Homo sapiens
ggctggcctgcggcgcctgggcgctctgaggttgtgagaactgctttattggatgctgctggtgtggcctctctg

SEQ ID NO: 643171 - DNA, 100 bp, Homo sapiens
ccttgcccgaggacagagatggcgagcgcccggattggggatgagtatgcggaggacagctctgatgaggagatgaagatctccttcaacgacaaaagcc

SEQ ID NO: 643172 - DNA, 75 bp, Homo sapiens
tggaggagatggtcaagaatcgctctataagatctgcaaggaattgaagccattttttatgaaggaagttggcag

SEQ ID NO: 643173 - DNA, 75 bp, Homo sapiens
tgtgaccacccctgaagaaattgcacaggtgggtgaattttctggagccaataaggaaaagcttgaagccaccat

SEQ ID NO: 643174 - DNA, 101 bp, Homo sapiens
gtacgacgccgctcccctcacctggtcccgctgcagccgccagtatatcaccaggttccttgagtgagcgagtgctgtgctttcatgggcctcttctttat

SEQ ID NO: 643175 - DNA, 100 bp, Homo sapiens
ttcgttccccgccaaccgcaaccattgacgccatgtcgggttattcgagtgaccgagaccgcggccgggaccgagggaacttgctactaccagcaccatg

SEQ ID NO: 643176 - DNA, 50 bp, Homo sapiens
tcgagtctggggctgtcgctgtgctctgagaggcagatgcgaaccagaac

SEQ ID NO: 643177 - DNA, 98 bp, Homo sapiens
tggcccagtttgatgccatcccaggcaaaaaaggcactcgtgttctcatttggaacatccgcaggtgatgatggcttgcagggtcagccaggacttcc

SEQ ID NO: 643178 - DNA, 71 bp, Homo sapiens
agacccaggactcccaggtctactggacagtggcgtgtggtgttttcgccatcagggtgtattggaggctg

SEQ ID NO: 643179 - DNA, 100 bp, Homo sapiens
gctggtggagtattccacgtcccgcggcttccgcagcgaggtggacatgttcgtggcccaggccgtgctacaaactggtcatgctgctggagtggtggtc

SEQ ID NO: 643180 - DNA, 88 bp, Homo sapiens
gggcaccggggagccggccttggacacgtcttcatctgtcacccagactggagtgcagtggcgcaatcttgcctcactacaacctctg

SEQ ID NO: 643181 - DNA, 82 bp, Homo sapiens
cggttcttggtgggatctgagcagctctacgaactcgacggggaccccaagaggaaggaattcctggatgacttgttcagct

SEQ ID NO: 643182 - DNA, 75 bp, Homo sapiens
cttcagacaggattcttgaactggaccaggagctcataaaagctgcaaggcatctttacatatgtgattatcata

SEQ ID NO: 643183 - DNA, 75 bp, Homo sapiens
cagatccctctatgactgcaatgtgagatggagtcccctgtttccacaccagcagtgctgccaatacaccttttg

SEQ ID NO: 643184 - DNA, 100 bp, Homo sapiens
ggaagatccacgtgggagaagagaaacggatcttcttagatatccagttccctggtttcctgaggtttgtgagggttttatgtggcatgtcttctgatga

SEQ ID NO: 643185 - DNA, 100 bp, Homo sapiens
gcgggcgcgcaggccgcggggagcacctggattgttttcagagggaggcaacttttctcctaaagaaatcaattcactgtgttcccgactggagaaggaa

SEQ ID NO: 643186 - DNA, 100 bp, Homo sapiens
tggaggtggtgctgctggggaacgggagctggatgagttgccctcaaattggctgtagccacacggatataagaaagtcagatcttatccaggatgaagc

SEQ ID NO: 643187 - DNA, 101 bp, Homo sapiens
aaatggttgaaaacagatatacagggacaggagagagtggcaagagtacgtttatcaagcagatgagaatcatccatgggtcaggatactctgatgaagat

SEQ ID NO: 643188 - DNA, 111 bp, Homo sapiens
ggcctcttcctgttgcaccaggttcttcgaaaactgaagcagatgttgaacaacaagattacgatgaggacctggtgcaggaagcttcatctgaagatgtcctgggcgttc

SEQ ID NO: 643189 - DNA, 98 bp, Homo sapiens
acagggcacaccaaactccatctgacctcctgccccccgaggtctgcagtctcctgaacccagcagccatctacgccaacaacgagatcagcctgcgt

SEQ ID NO: 643190 - DNA, 50 bp, Homo sapiens
ccagaaacaggttcattcattggtttctaccatgaatgaaatgaagagtt

SEQ ID NO: 643191 - DNA, 100 bp, Homo sapiens
caggcttaactccaagactgtgttcgggagtccttggaactgtggtccatggtaaagttttacaggcatcatgacggtgatgtcagctctgtcggtggcc

SEQ ID NO: 643192 - DNA, 75 bp, Homo sapiens
caggaaacaagagattgttgctggtgagaaggactggcagaaatacgagactgctcggcggctgaaaaaatgtgt

SEQ ID NO: 643193 - DNA, 110 bp, Homo sapiens
cacggctacttctgcttccacgaggctgctgaccagaagaggtttagtgccctcctgagtgactgcgtcaggcatctcaatcatgtgggtaattccagaattgattggcc

SEQ ID NO: 643194 - DNA, 111 bp, Homo sapiens
ctgctgctacggctgttgccatgaggcgaggctagggaggacctcacttccccggggtgtaataatgttaactgaggcctatatgaacccaatagcaatggcgagatcaag

SEQ ID NO: 643195 - DNA, 100 bp, Homo sapiens
agttccctgctgaagatggccagatccccttgtctgaggtcggatccgcagctgcttgcccggttctactatgccgacgaggagctgaaccaggtggccg

SEQ ID NO: 643196 - DNA, 97 bp, Homo sapiens
cgaagagtccccccaagtctcctgaagaggaaggagcggtgtcctcttaagaaaatggagcaccctgagcgtgtccctggagcaggcggccatcttg

SEQ ID NO: 643197 - DNA, 74 bp, Homo sapiens
ccgaacgatgtgcgagaactgcgcagacctggtggaggtgttaaatgaaacatttcacaggacatgcaacgcca

SEQ ID NO: 643198 - DNA, 90 bp, Homo sapiens
tccaatgggcctttccagcccgtggtccttctccatattcgagtcaaatgcaccatgtatcattttcattgatgaaattgatgctattac

SEQ ID NO: 643199 - DNA, 100 bp, Homo sapiens
ctcacaactgctcgcgtgacgaccgcattcgtggcagcatgtcagtgaaaaaaccagtgaatcgccttccaaaccaggagaaaagaaaggatcagatgag

SEQ ID NO: 643200 - DNA, 102 bp, Homo sapiens
atgagatggtagccaaacccccaggaaacaaagcttagcaggagaggagagccagagaagtgacagggaagctacaggttacaacagatttgtgaactcagc

SEQ ID NO: 643201 - DNA, 86 bp, Homo sapiens
gaaggaggagaggcatggcggccttgaccagccagtggttggagttgctgtgggtgagctgctgtggtctgtagccaagcatgctg

SEQ ID NO: 643202 - DNA, 75 bp, Homo sapiens
ccgcgtcctcagccaccgctccctcttcccacggtcaacaaaaatctctcatttacttcaccaccagcagtttcc

SEQ ID NO: 643203 - DNA, 98 bp, Homo sapiens
gaaggaacggaaacaaagttattttgctcggtcgggtcacaaatcttcgaagagtgacatatgttgttttagatgaagcagacagaatgtttgacatg

SEQ ID NO: 643204 - DNA, 74 bp, Homo sapiens
tcgcagtggtcgcttcttctccttgttttccacctatttccctggatattttgatggtcagtactggctctggt

SEQ ID NO: 643205 - DNA, 80 bp, Homo sapiens
tgagctgatggaagatctgtttgaaactgtttgaggaaccactggccaacctgttaaatgaacaacatcggacagtgaag

SEQ ID NO: 643206 - DNA, 75 bp, Homo sapiens
caacctagtgggtgtaatacatcatgaactgcaggctgtcaggaatgacaggaacaagaaaaagaaggagacttc

SEQ ID NO: 643207 - DNA, 75 bp, Homo sapiens
tctgggaaccacccttctactttctgtctctaggaatttcactactctagacgcccctgtcctggcaagagctag

SEQ ID NO: 643208 - DNA, 100 bp, Homo sapiens
cttaagaagttcatctgcatatctgaccttcgggcccaagtgcataagctggagcctgaggcgtggaaacacgtggaagccgtatatatagacattgcag

SEQ ID NO: 643209 - DNA, 102 bp, Homo sapiens
ggcgtgcggatacagttcaagcaagtgtactatgaggggctgcaggacaagctggcacagatccgcgatgcccggggggcgctgagtgccctgcgcgaagag

SEQ ID NO: 643210 - DNA, 100 bp, Homo sapiens
taagattccaggctgccctgaagaactacctgaaccgacagatcgaaaagttgaagctggacctccaagagctgatctggcagactttcttcaggggccg

SEQ ID NO: 643211 - DNA, 83 bp, Homo sapiens
agccgatccagcctgcggagcctgtggggcaggtttgcctgcaatgagatttcattctctacatttaaaggacatcctttctg

SEQ ID NO: 643212 - DNA, 100 bp, Homo sapiens
atgaaagtagttcgaggggagaaggggaaccttggaatgaactgccagcaggcgggacacttaacattcagggacgtggccatagaattctctcaggcgg

SEQ ID NO: 643213 - DNA, 80 bp, Homo sapiens
cgacgcggacagcgggctggagcctgacgagctggcggtgagacggtttaagcggaagcatcttactgccattgactgcc

SEQ ID NO: 643214 - DNA, 100 bp, Homo sapiens
gccagcgagcgggagctggcagcctgccagctgctcatctcccagggtccagcacttataaatatacaggagtatccaatagaaagacatgaagaaagat

SEQ ID NO: 643215 - DNA, 50 bp, Homo sapiens
cctggctgagctgtcatcccccagctgccccagagcacatcagctatgtg

SEQ ID NO: 643216 - DNA, 75 bp, Homo sapiens
agaggcaccaaggacctccaagacagggtgtccgcaatgttgccagtgtctgtctgcagattggctacccaactg

SEQ ID NO: 643217 - DNA, 80 bp, Homo sapiens
caacctggatcttcgaacttttgacacggctttggaaacgacgtcatgtgttaggaaataatgaagatgtttcattttca

SEQ ID NO: 643218 - DNA, 100 bp, Homo sapiens
tggcagatattatcatagttgctgcagagagacaagagagacacctccaacttcgacaaagagttcaccagacagcctgtggaactgacccccactgata

SEQ ID NO: 643219 - DNA, 75 bp, Homo sapiens
gaaaattacaaggtcgttgaacaaggaacaagctgaaagctggatacctaatgtcagtggagtcttctgagtgtt

SEQ ID NO: 643220 - DNA, 82 bp, Homo sapiens
agctgttgggccaactacacagaccttactccccttagaacagatccagacatttaatgtggatgcaccatgccagaccgtg

SEQ ID NO: 643221 - DNA, 100 bp, Homo sapiens
catttgcaacttatatcgccagtccagcagctaaggatattttgtgcaggctcaggccacagggtcaccacatacatcgcccacccatggaggcggccgg

SEQ ID NO: 643222 - DNA, 100 bp, Homo sapiens
gagcccgggacccccgggggcgcagttgtcgccgtgatcctgaaggcgctgacctacgacgagaagcggggtgcctgcagcgtgggcaccaacgtcaggg

SEQ ID NO: 643223 - DNA, 75 bp, Homo sapiens
aatctctccttgtctgtggtcgtggagaggagcaggccaaaaaacgcgtgtggaatcaactatgacaagccgctg

SEQ ID NO: 643224 - DNA, 75 bp, Homo sapiens
ccgttgacaaggcactgctttttcatgacgcagtgcctgatttgagatggggtcccaggtctcggtggaatcggg

SEQ ID NO: 643225 - DNA, 100 bp, Homo sapiens
ccacccagggggtccactccaggacagactgtgcctgaaaattgataccaaggccattccactgtttgggaactccctgaagcctgacagtctccggttc

SEQ ID NO: 643226 - DNA, 90 bp, Homo sapiens
cggcgctacagcaagttttttgacctccagttggctgattgcaattctggcccaactcaaccctctctttggaccgcaattgaaaaatga

SEQ ID NO: 643227 - DNA, 100 bp, Homo sapiens
agaactgaccgaacatgaacatcagcagatgagagacgacttggagaaagagaggatattctgcctccatggtggcctctctccatccatagacacactg

SEQ ID NO: 643228 - DNA, 75 bp, Homo sapiens
gcagatccggcagctttccgaaagggtgataaaagaaaatgtggctgaagttacccgaagttcagcttgcagtgt

SEQ ID NO: 643229 - DNA, 89 bp, Homo sapiens
cagaatacatcaagaaccacaaggaaacagacattggtactccaaagattcaggtttactcacgtcatccagcagagaatggaaagtca

SEQ ID NO: 643230 - DNA, 98 bp, Homo sapiens
gccgtatccaagacagtatgcaaggccacgacccacgagatcatggggcccaagaaaaagcacctggactgtggtatgcaagattacaattatgtgtg

SEQ ID NO: 643231 - DNA, 100 bp, Homo sapiens
gacaaatgcttgtattgccttaagtcaaagatggattactgaggcaagtgaggcctatctggttggcctttttgaagacaccaacctgtgtgctatccat

SEQ ID NO: 643232 - DNA, 100 bp, Homo sapiens
tatctgtcttcggtggactccttcggcagtccacccaccgccgccgcctcccagcaagagtgagccatggagctacgtgtggggaacaagtaccgcctgg

SEQ ID NO: 643233 - DNA, 82 bp, Homo sapiens
gtggccgtgttgctgatcgcctgggtggttgttggcgtgtccctgcagcgaaggatcctgtgttctaagaacggaagcatct

SEQ ID NO: 643234 - DNA, 75 bp, Homo sapiens
caggattgggagagaggtagctacccggatgcagtcctttgggatgaagattgctctggaagcagccaaagcact

SEQ ID NO: 643235 - DNA, 95 bp, Homo sapiens
gcgagttgaactttaggagagctgtgttctctgcagattctaaatatgaagagaaggctactaaagacttggaacgatacaatagtcaaatgaag

SEQ ID NO: 643236 - DNA, 99 bp, Homo sapiens
tgattatagattagaagaggtcaagaaagtctttatctcttgcaaggttcagtagtggcagatcatgactacattggattgcctgaaattccgattgga

SEQ ID NO: 643237 - DNA, 51 bp, Homo sapiens
gattcgcagtggtcgcttcttctccttgagctgaggcttcgaagacctcag

SEQ ID NO: 643238 - DNA, 97 bp, Homo sapiens
cttcgctggccatttaggagctctgctcaaagccagacggtggaaatgagttctcaacagtttcctcggttaggagccccttctaccgggctgagcc

SEQ ID NO: 643239 - DNA, 75 bp, Homo sapiens
ggaagaggtacaacatcctgaatcaggagcagcccctggcccagccaggtgagcgagtgctgtgctttcatgggc

SEQ ID NO: 643240 - DNA, 98 bp, Homo sapiens
tcaggatgttctgagattgcatcaggatattaatgattataaccggagattctcagggcaacccagatctgtccgtttattaatggttagtcgaatgg

SEQ ID NO: 643241 - DNA, 75 bp, Homo sapiens
gccacagcatctttgtctagccccagtgcaggtcaaaatgcagatcttcgtgaaaacccttaccggcaagaccat

SEQ ID NO: 643242 - DNA, 98 bp, Homo sapiens
aaaagtcgtgtttctgtgtctccagggagaacttcaggtaaagtgacctagagtcccgcagggatgtgaagagagaagaaggagaggcctttgctagg

SEQ ID NO: 643243 - DNA, 124 bp, Homo sapiens
cagaacaactaaaacagtatgaaataaacgccactcctaaaggctggtcctgccactgggacagagaaaatgtgatggaggatatttgtagtaaactgcaagagattaggaacccaatccatgc

SEQ ID NO: 643244 - DNA, 100 bp, Homo sapiens
tgcagatgaacctgtacgccacctgggaggtggaccggagctcgtccagctgcgtgcctagtggcaccctgtgctgcgcacactaaagaaccgcattgaa

SEQ ID NO: 643245 - DNA, 100 bp, Homo sapiens
ccaagaggtggaagaggacgggctttaggctggaagcgccttagaggagccatttttccagctccctgccgtggcctttaatgtgaacaacctgcccttc

SEQ ID NO: 643246 - DNA, 75 bp, Homo sapiens
gaagaaatccaggaacaactgtgtcagcagctagcccttttcctcaaggtgtgaagcttacactctctgctctgg

SEQ ID NO: 643247 - DNA, 96 bp, Homo sapiens
tgggaatcctggccctgtcccacaccatcaggtcaaaatgcagatcttcgtgaaaacccttaccggcaagaccatcacccttgaggtggagcccag

SEQ ID NO: 643248 - DNA, 82 bp, Homo sapiens
cgcggggaagcagtgggaaaatcgcaaggaagccggctcaccatggatgatgatatcgccgcgctcgtcgtcgacaacggct

SEQ ID NO: 643249 - DNA, 100 bp, Homo sapiens
ggaccacctgcccagcgttggcgaggagccccgggaggtgcttctgcggctgtacggagccatcttgcagtgggctcgggatgagtttgaaggcctcttc

SEQ ID NO: 643250 - DNA, 75 bp, Homo sapiens
atcacattggaccctcctcccaactgtaggtatggtgtggtggactttctttgagtactgggatgcaggttccaa

SEQ ID NO: 643251 - DNA, 100 bp, Homo sapiens
tccaaggttgatgcatctctctcagaggtcgaacaagtaaaattacttgaccgattcagtaccagcaacaagtcattaacaggaacactgtatcttacgg

SEQ ID NO: 643252 - DNA, 75 bp, Homo sapiens
agaagatgactatgaaagtgacgcagctacaattgtccagaaatgtgatgatgatgctgaagctatccttgctgc

SEQ ID NO: 643253 - DNA, 100 bp, Homo sapiens
atgaacttcctgttcaccatgctgcgggaagagaggctgacccgcggctgattgagtccctctcccagatgctgtccatgggcttctctgatgaaggcgg

SEQ ID NO: 643254 - DNA, 101 bp, Homo sapiens
agttactggcagtcgcagactttggaccccgggatgaaagagacaactttgtacaaaatgatttcaggtagcagggcgccaagcagtgacttctgaccaac

SEQ ID NO: 643255 - DNA, 100 bp, Homo sapiens
aacagatcctagcccttattgcattgttgctccagacacagtgatccactgcgaaggggagcctatcaaacgagagaagagtccaaataagattgcatct

SEQ ID NO: 643256 - DNA, 90 bp, Homo sapiens
atctcttctccctccccttcttgagtgtgaacatggctacgcctcttcattcccgtccatgccgagcccccgactgcagcattcaaagcc

SEQ ID NO: 643257 - DNA, 100 bp, Homo sapiens
acctacagccccgacgaacatttctgggtgacactcaacaggattcccgaccctcaaactgacacaagacctacagagaaaaccctttgccaaatctgct

SEQ ID NO: 643258 - DNA, 75 bp, Homo sapiens
ggaagagattcagccagcacactcctcgcgagcaaggctccccacaggtgcaggaagccgccgcccagccatgga

SEQ ID NO: 643259 - DNA, 110 bp, Homo sapiens
ggccagatggttcttacccaacgtttgatggctcatcaaactgcaatttgacggactggacaaagcttctatagcaaactcagatggccccacagcaggttcccaaacac

SEQ ID NO: 643260 - DNA, 100 bp, Homo sapiens
agagctcatcaaaaacgagccggaaggtgctggagaatctggtaaaagcaccattgtgaagcagatgaggatcctgcatgttaatgggtttaatggagag

SEQ ID NO: 643261 - DNA, 75 bp, Homo sapiens
gagctggctccctatcccaagagcaagaaggcccagctcaacattggcaatgtgctccctgtgggcaccatgcct

SEQ ID NO: 643262 - DNA, 75 bp, Homo sapiens
gcctggaatagaagagaatgacctagcaaaagttgatgatcttccccctggtgacttcatggtcatgacgatttt

SEQ ID NO: 643263 - DNA, 82 bp, Homo sapiens
ttctagctgcattggaactagtgacagttgatggcagtgctcggaatgtgaccaggcagggagcagtgacatggaagcagat

SEQ ID NO: 643264 - DNA, 90 bp, Homo sapiens
caggacccgctttctaccattaaggtacctggtgacctttagccccctgatggacacgcaggatgaccctcaggccataatcatctggga

SEQ ID NO: 643265 - DNA, 118 bp, Homo sapiens
tggacacagtatgcaggctgtatgaagtgggcaggcagcgtctggcagaggatgaggatgaagaggaggaccagctcagtaaacgctctgccactgacctgtgtggcaggaatgatgg

SEQ ID NO: 643266 - DNA, 75 bp, Homo sapiens
cctaccagctggtgctgcagcacagcaggctccggggccgccagcacggactgtaccccatctggagacctgagc

SEQ ID NO: 643267 - DNA, 74 bp, Homo sapiens
cgcaccccgatggtagccgaggagctgctccagaacctgggtatcaacccagcaaacattggcttcagtaccct

SEQ ID NO: 643268 - DNA, 101 bp, Homo sapiens
gaacagccagaagaaaccttccctaacactgaaaccaatggtgaatttgtacctcccagagctgctaggcaacaccggactcttaatgaagttgagtgact

SEQ ID NO: 643269 - DNA, 74 bp, Homo sapiens
gcagatgttgtcaaggtggcctaccaggaggccaggggtgtcgccatgaagactggagcgctcagcctgccacg

SEQ ID NO: 643270 - DNA, 100 bp, Homo sapiens
gcccagctggacgcctataatgcgagaagccagagcccagaggtggagcagttagggagggttgtggaactggacagtgacatggtagatatcacccagg

SEQ ID NO: 643271 - DNA, 75 bp, Homo sapiens
cttgccctggtcttgctcggccgatgaagtgcagaggtttttttctgcaacctacagctggagtcgagagtctgg

SEQ ID NO: 643272 - DNA, 90 bp, Homo sapiens
agcaaactatgtataggaattccaaagagccttgcaaaggaccatcgcatgaaacttatgcaacaacaacaggaagtggctggactctct

SEQ ID NO: 643273 - DNA, 74 bp, Homo sapiens
ctcgtcgacatgagtgatgtggaggaaaacaacttcgagggcagagcggtgtctcagggcagcagcgactctca

SEQ ID NO: 643274 - DNA, 100 bp, Homo sapiens
cttggcgcctcggggaggggaccgcgcccgcctcatttgcgccttgcagcactgctggaccaggacctcagcagccatgtcgaagccccatagtgaagcc

SEQ ID NO: 643275 - DNA, 100 bp, Homo sapiens
taatgtgtgacacctcatcatggacacgctactttagctaaggcatgaccagcaatgaacagtagtaagtgtgctggaattgatgttcgtctgtgtgatg

SEQ ID NO: 643276 - DNA, 98 bp, Homo sapiens
ctcgtagagtgagaactcattcactaccatgaagacaacaccaagccattcctgaggcaattaagttggaatatgcaaggttggttaagttggcccaa

SEQ ID NO: 643277 - DNA, 82 bp, Homo sapiens
agtgttcaccatcctggccccggaaggaaagccatcaccaagtcgggcctccagcacctggccccccctccgcccacccctg

SEQ ID NO: 643278 - DNA, 100 bp, Homo sapiens
tcaattgtcagaggcaataccatctcacctataataaaactgctcaaagaatctggtgcaaaagaggatgatgccaataatgacccacagtggtctgagg

SEQ ID NO: 643279 - DNA, 100 bp, Homo sapiens
gacattcaacacctttacatttagcaggaattcctcctgatcagcagagactgatctttgctggcaagcagctggaagatggacgtactttgtctgacta

SEQ ID NO: 643280 - DNA, 82 bp, Homo sapiens
tcagttggaagcagccgatccagcctgcggagcctgtggggcaggcctgtatccggtgtccgaggcgaactcagtaagatga

SEQ ID NO: 643281 - DNA, 100 bp, Homo sapiens
cggcgcggcgcgggctggcggtggctccacgaattaaacaaccaccatgtcgagcaaaaaggcaaagaccaagaccaccaagaagcgccctcagcgtgca

SEQ ID NO: 643282 - DNA, 101 bp, Homo sapiens
ctgatcccggaatgtaccagctggacattacattaagaaggggtcaaagtttagctgctcgagatcgaggaggaactcttggtgtaataacagaagctaca

SEQ ID NO: 643283 - DNA, 83 bp, Homo sapiens
tgcggcgaggatggagggcctggcagtgcggttgctgcgcggcagcaggctggaaatctggcattttttaaagtttgcgcccc

SEQ ID NO: 643284 - DNA, 83 bp, Homo sapiens
cgcggatctcaccgccgctcagggagggtgaggacaaaatcttcttaatcaacaagcttcactccatctacgagaggaaggag

SEQ ID NO: 643285 - DNA, 97 bp, Homo sapiens
agcaagagctggatctcgtctttctgcgcagttgtgtagcagttgagtaatgctggttagctgttaaggtggcgtgttgcagtgcagagtgcttggc

SEQ ID NO: 643286 - DNA, 74 bp, Homo sapiens
tcaccttcgacctgctcttcatctccctgctctggatcatcgaactgaatcatggaggcgccattgtgtcggct

SEQ ID NO: 643287 - DNA, 50 bp, Homo sapiens
attacaggccaaattagcaagctccttcctcagagaagcttcctgttatg

SEQ ID NO: 643288 - DNA, 75 bp, Homo sapiens
tagggtcctttatatagaagggagagtaggatcatgtatatgaacttctcaacaccattgatgcctgccagtgcc

SEQ ID NO: 643289 - DNA, 97 bp, Homo sapiens
ttgaagcctgctattgcaacatgggattttcaggaaatggtgtcacaatttgtgaagagaattcggtcaacagtggatgaaaaagaacaaaaacaac

SEQ ID NO: 643290 - DNA, 100 bp, Homo sapiens
gccgcggccagggaacggggcatcgcggttccaacggttaaaagccaactgcaaggtctaatgactgcaggatctagctatccattgtttctggccgcct

SEQ ID NO: 643291 - DNA, 96 bp, Homo sapiens
tcctgtagaaattcaaaccctagtgaataaagccaagagagaccttggagtaattcgtcgacagtattggtaaaggttttcaaggtgtcatgaaaa

SEQ ID NO: 643292 - DNA, 100 bp, Homo sapiens
ccgtgaaggcaatgatttataccatgaaatgattgaatctggtgttatcaacttaaaagatgccacctctaagctcattcttggaatcccagaacaggcc

SEQ ID NO: 643293 - DNA, 100 bp, Homo sapiens
cgcgcagtcccagcgccaccgggcagcagcggcgccgtgctcgctccagagaagctgatcgtcgaagggcatctaaccaaagcggtagaagaaacaaagc

SEQ ID NO: 643294 - DNA, 90 bp, Homo sapiens
gccctcgcgacgcgcccggcccggagcccccagcgcagcggccgcgagggtgtttgtgagatatggttgaccagtgaagacacgggggct

SEQ ID NO: 643295 - DNA, 83 bp, Homo sapiens
caactccacctacgcagcagacaagggggagaatggggtactaagagaaaagcacgaagctgtggatcatagttcccagcatg

SEQ ID NO: 643296 - DNA, 74 bp, Homo sapiens
tgggatgccggcagtcagagtcaaaacagagcttttggaatctgaacaagggaggcgaatctttagataacctg

SEQ ID NO: 643297 - DNA, 78 bp, Homo sapiens
tctcctcgtctcccgctccgccctcccttttccctgataagatttgtgaccaaatcagtgatgctgtccttgatgccc

SEQ ID NO: 643298 - DNA, 116 bp, Homo sapiens
atcctcaagaagaagaagttgcgaaggatccccaacggggaggccaacgtgaagaagtgagaagccctaccactgcaactgggacggctgcggctggaagtttgcgcgctcagacg

SEQ ID NO: 643299 - DNA, 98 bp, Homo sapiens
gaggactggggcctcattttggatatctgtgataaagttggtcagtctcgcactgggctgtgggtgagcgtggaggatgctcagatgcacaccgtcac

SEQ ID NO: 643300 - DNA, 74 bp, Homo sapiens
ctcaagaaaggtgacttggtcctcgcggacgccagtggtaggaatgggatcctggtgcttccacatgactctga

SEQ ID NO: 643301 - DNA, 83 bp, Homo sapiens
cgaccctcggagacaccgatatgaccatcaccagagcctgcggcgagagggctacaccgtgcaggtgaacgtgaacgactatc

SEQ ID NO: 643302 - DNA, 74 bp, Homo sapiens
ttgatggtctggtagaaacaccaacaggatacattgaaaggagggcatcctggctgtttcacccgtggacttga

SEQ ID NO: 643303 - DNA, 75 bp, Homo sapiens
tggggatgaaggccgagggcttcgtggatgccctgcaccgggtccggcaggaatatatatgtcccagatgtgaat

SEQ ID NO: 643304 - DNA, 88 bp, Homo sapiens
attcccaaaggatggccttgacccttcatcacgttgtccttctgcaagctgaccggtgatcagcccatgacctaaacctccagacaaa

SEQ ID NO: 643305 - DNA, 74 bp, Homo sapiens
agaaggaagtagacttctgcatctcactgcttcgggaacggtactataaccaagagtggacattgtgggatcgc

SEQ ID NO: 643306 - DNA, 80 bp, Homo sapiens
gcgcggccttcccatcaccatcacagagagcgataatttagcttgggttaaatcatataacatctgctttgaattggaag

SEQ ID NO: 643307 - DNA, 77 bp, Homo sapiens
tgtttgtaactacctggcattgccttttgttgaggctaacagagaccctgatgctggaattgatgaagctcaagttg

SEQ ID NO: 643308 - DNA, 100 bp, Homo sapiens
gggatatcccaatctttggactgcatcctggttgcctctactgtggtcacctttggagccctacagagagacaagtatgggagtaaagctaaacattgca

SEQ ID NO: 643309 - DNA, 50 bp, Homo sapiens
gtagccatggcacaagaatatagtggttctaactttgatggtttgagacc

SEQ ID NO: 643310 - DNA, 126 bp, Homo sapiens
ctacttcggcagatgtgggagaggatggacgagggatgcggagagaccatatatgtcattgggcagggatcaggtggctttcctgggggaatgcctggtaattttcccggaggaatgcctggaatg

SEQ ID NO: 643311 - DNA, 100 bp, Homo sapiens
cggagaggtgctcggattctcgtagctgtgccgggtttttcgttggaatatacgttgcacatttatggcgattctgagtgtgagggcagacttctgccag

SEQ ID NO: 643312 - DNA, 78 bp, Homo sapiens
ctgtgtgagaaatggcctcattcggtgactgtgagtgacacagcagaaagttgtggagcccacagtgaccatctcccc

SEQ ID NO: 643313 - DNA, 100 bp, Homo sapiens
ttgcaactccagctcagacgcttaccgacactcttgatgacctgatagcaggtttattcttcagtccaaggaagcaattcacagtcagctgttagagaag

SEQ ID NO: 643314 - DNA, 51 bp, Homo sapiens
cttcctcctcgctttgtgatgcagtgcacagccagagaacaacacatcaca

SEQ ID NO: 643315 - DNA, 101 bp, Homo sapiens
cctgctatgtgccctctttgttcctaaagtttctcccgtacatcccagtccagccccagcctctggagttatctttctacaccatggatctgatcacagta

SEQ ID NO: 643316 - DNA, 83 bp, Homo sapiens
agccgcggcggggggaaaatggagcccttcaccaatgcaaggacacccaggcccattattttcctccagcctccatggaccac

SEQ ID NO: 643317 - DNA, 100 bp, Homo sapiens
ctggagctacagctgcgggagagccgggtaccggccgtggaagcggccaccgactactgtcagcagctgtgccaggtgcaaagttccccatcaagtggac

SEQ ID NO: 643318 - DNA, 100 bp, Homo sapiens
cctgcgctcctgcagccttgtgctggagcaccagccagacaacatcaaggctctcttccgcaagggcaaggttttgcagccactcttgatgatgacaaac

SEQ ID NO: 643319 - DNA, 50 bp, Homo sapiens
gcaatgggagcgcccaacacgatatgcagcagcctatgaatgtgatgact

SEQ ID NO: 643320 - DNA, 82 bp, Homo sapiens
gacccggcgccgaggcggccacccgagacgcggcgcgcacgctccggcctgcggtttggtgcacctcgatttggaggaagta

SEQ ID NO: 643321 - DNA, 99 bp, Homo sapiens
cggcgttcttccgctggctcagccgcaagtacccgtccatcatagtcaactgcgtggaagagaagatatggaatgtgcagatgtcccactattaactcc

SEQ ID NO: 643322 - DNA, 100 bp, Homo sapiens
atatgttttggtgaggcagaaagctggacagacaccacaagagcgagtggaagaagtccttagtggcaagtgctcccaagaagatattgctgataaacta

SEQ ID NO: 643323 - DNA, 87 bp, Homo sapiens
gatgacaaaaagggtggctttgtgccctacagagattccaagttgactcgactgcttcaaggaggagatgttaaagtaacccatctt

SEQ ID NO: 643324 - DNA, 50 bp, Homo sapiens
ctgactctcagtcctgctgtccaaagaggtgagtgccgggctcggcgctc

SEQ ID NO: 643325 - DNA, 100 bp, Homo sapiens
atccgatggagaggctgagctgctccaggacttggggaaacttggatttaactggccagaagcaggtattcaaagcagagaacaatccctgggtgacccc

SEQ ID NO: 643326 - DNA, 51 bp, Homo sapiens
gttaccagcaatgacactacgccaaatgggcggactgttgaagtggctgag

SEQ ID NO: 643327 - DNA, 75 bp, Homo sapiens
ttcctaagctcaactctagccagctaggttcctggtgctttggggggcactgcacttggctgtgattcatcagca

SEQ ID NO: 643328 - DNA, 100 bp, Homo sapiens
tttgccctcagcatctcccttcatgtctgggtcatggtcctggaccggatcaaaggctcactgctgccccggcctggccacaactttgtgcggcaccatc

SEQ ID NO: 643329 - DNA, 74 bp, Homo sapiens
cggggcaaccactgcgagtactgcttcaccaggaagatttcgatgtcgatcattttgtgtctgactgtaggaag

SEQ ID NO: 643330 - DNA, 100 bp, Homo sapiens
cagcagtgggcatacagaggcagtcgggacccgtctggaagagcctccgcccgggttgtggtcagaaatgagaagacatgaaatgttgagggaggagctg

SEQ ID NO: 643331 - DNA, 101 bp, Homo sapiens
gcaagtacccgtccatcatagtcaactgcgtggaagagaaggtgctgtgattctcttgggaagaaccaatatgtttcgctttaaccatccaaaggaagccg

SEQ ID NO: 643332 - DNA, 100 bp, Homo sapiens
cctgtgggtgaggagggaaatgctaaccccacccaccgcctcctctgctacttgctgcacctcagggatcaaaggaagcagttccaggtactggtagaga

SEQ ID NO: 643333 - DNA, 78 bp, Homo sapiens
ttcggttcgggtgcgctgctcaaggacacggtctacaccgacttcgacggtgcctcaggaaccctgaagctgggctga

SEQ ID NO: 643334 - DNA, 100 bp, Homo sapiens
ggcggtgcgcactgcgggcgcatccctgccccggcgccgtccgtgcccgcgggacctgacagccgggtcagaggatgggagtcccagcttctggagacgg

SEQ ID NO: 643335 - DNA, 100 bp, Homo sapiens
tttgcgagtactcaacaccaacatcgatgggcggcggaaaatagcctttgccatcactgccattaaggccagatcagaaaagggagctcaggtaccttcc

SEQ ID NO: 643336 - DNA, 100 bp, Homo sapiens
aagacacaaacattgaagatcagcacagaaatcccaggaggagcctaagtcatattccagagagactctgtgaaagtaaagaaggtggtcaaggtgaaga

SEQ ID NO: 643337 - DNA, 100 bp, Homo sapiens
ctgccaggactgttgccaggagcacagtggccacaccatagtctccctggatgcagcccgcagggacaaggaggtccagccgccgcagggaatgacgccg

SEQ ID NO: 643338 - DNA, 111 bp, Homo sapiens
aacaagaattacagcagccaacctatgttgccctgagttacataaataggaatacaatagatatggctggtgggtaggagaaatgaagggagccattggcttggtgcctaa

SEQ ID NO: 643339 - DNA, 74 bp, Homo sapiens
gccggagtcagcgatggtgcccggcgaggagaaccaactggtcccgaaagagattccgaagaggctcaatctgt

SEQ ID NO: 643340 - DNA, 75 bp, Homo sapiens
cggagtacaatgagccacacgagagccgcaccaacgccgacatcatcgagaaccccaaaagggagattcaaaaga

SEQ ID NO: 643341 - DNA, 74 bp, Homo sapiens
atgctggattgtagaacttctctctctcccctggcaaccactaatctgctttctatctatggatttgcctattc

SEQ ID NO: 643342 - DNA, 97 bp, Homo sapiens
cttaccttgcccaccaacttcagagatttgtccaaggtactaggttttgacaagcttgcatcatgcgtgagtataagctagtcgttcttggctcagg

SEQ ID NO: 643343 - DNA, 75 bp, Homo sapiens
ctggaccccctgctctgcgacttcctgggtgcccagggtggctccgtggcccgcacactcctggaagatgggaca

SEQ ID NO: 643344 - DNA, 98 bp, Homo sapiens
caccaggtcttgtagcagcgcctcctcgagacacctatggctgccgatgaaggctcagcagagaaacaggcaggagaggcccacatggctgcggacgg

SEQ ID NO: 643345 - DNA, 75 bp, Homo sapiens
gcgacctccccgcgttccatgcgcacagggacagggctgtcggaaaaggtaacagaagatggaactcgaaatccc

SEQ ID NO: 643346 - DNA, 74 bp, Homo sapiens
gctcttcagttcgtgtgtggagacaggggcttttatttcacctgtcctgggagctggagaggatgtcagcgagc

SEQ ID NO: 643347 - DNA, 74 bp, Homo sapiens
gaaaagaatacattcctgattacctgccacccattgtgtcttctcaagaaggtccagagggggcaaacctcttt

SEQ ID NO: 643348 - DNA, 50 bp, Homo sapiens
ccatctctgggaaagccacagtatccgactggagacgggctgaaggccag

SEQ ID NO: 643349 - DNA, 98 bp, Homo sapiens
gcgggtcttgggtcctccgagagcagcagcgctccgagccctggaggagcagcacggagcgggagagcgtggcgagagaatgaagaaaccaatcgccc

SEQ ID NO: 643350 - DNA, 75 bp, Homo sapiens
cagacaagcagcttttcagatgcaaatggtttcctcaggagttgaatgtgggaaaagtcagcgcagaagtgatgt

SEQ ID NO: 643351 - DNA, 74 bp, Homo sapiens
ttggctcttatctactttggaggcctgtctggctcctttctctacacaggaggatctgtgccagttcagaagca

SEQ ID NO: 643352 - DNA, 100 bp, Homo sapiens
gcgacggagcctttgggaaagtgtacaagccggctcagttcggggaagctgcaggagttcggcgtgggtgatggcagcaagctgaccttggtacccaccg

SEQ ID NO: 643353 - DNA, 83 bp, Homo sapiens
cggagacctgagagatgttaaccaaattcgagaccaagagcgcgcgggtcaaaggaggactggaatgaaattgaccccattaa

SEQ ID NO: 643354 - DNA, 98 bp, Homo sapiens
cgagatgtctcgctccgtggccttagctgtgctcgcgctactctctctttctggcctggaggctatccagcacaccattcgcttttcacccaagatga

SEQ ID NO: 643355 - DNA, 75 bp, Homo sapiens
ctgactccggcgggagagtaaaggatagagggaggaatcagcagcttggaaattcaagcacgtgatctggcggga

SEQ ID NO: 643356 - DNA, 75 bp, Homo sapiens
cggcgtgcggcctagcgtctcagttacagaatgtctgaaggggacagtgtgggagaatccgtccatgggaaacct

SEQ ID NO: 643357 - DNA, 142 bp, Homo sapiens
cggctggggtccggctcctggagaacatggcccggcctcccgggggctctggtcccctcctcgggccgttgctccagggagaactgcaaatatcttcatccacccccacatttaaaaacgcagttggagataaatggacgca

SEQ ID NO: 643358 - DNA, 88 bp, Homo sapiens
aatcatcctgagctacacatggtactcagtaatctagctgcagttttgatgcacagaggtcttgcaagagcaaaatccgtccctagcc

SEQ ID NO: 643359 - DNA, 50 bp, Homo sapiens
aacaagggccggattctcacccaggtactaggttttgacaagcttgcatc

SEQ ID NO: 643360 - DNA, 50 bp, Homo sapiens
ctccgcaagaagtaccgagaaggatatggtgcctgtcatagttgattact

SEQ ID NO: 643361 - DNA, 95 bp, Homo sapiens
gttgattctgacagcaatcttctggctctcattcgagatgtcttacttccccagtgtatgtgctgaagcggccacatgtggacgagttcctccag

SEQ ID NO: 643362 - DNA, 82 bp, Homo sapiens
cgccctgttccccgcgctgcggcctggcggcttccaggcgcactaccgcgggtgcggggggcaatggcactgcagctctggg

SEQ ID NO: 643363 - DNA, 100 bp, Homo sapiens
gagcagtatcgcaggagagaagcgcggaagaaggcctccgtggaggccagattgaaggtaaagtaatctcacaagctgccaaagaacacatcccaagcag

SEQ ID NO: 643364 - DNA, 82 bp, Homo sapiens
gagagaagaaggcaaagaggatccagagaaggacgtccttctcttcccggataagaagcagaggaccttccagccacccgcg

SEQ ID NO: 643365 - DNA, 96 bp, Homo sapiens
cagagccacttctcaccgagatgattcatgaacactatggagatgaccgccatggccacggaggacccccagagcgccacggccgggactcccgtg

SEQ ID NO: 643366 - DNA, 100 bp, Homo sapiens
caaaccttgctttggattttatgtgctacagtctgcggaacggagcagtatttcaatgtggaggtggcggttagttggggccagggaagcgtggagggtg

SEQ ID NO: 643367 - DNA, 123 bp, Homo sapiens
gaaaggagacgtcagaacgtggcttatgagtacctttgtcatttggaagaagcgaagaggaattgactttaaaattaggaccatagagctcgatggcaagagaattaaactgcagatatggta

SEQ ID NO: 643368 - DNA, 90 bp, Homo sapiens
cgcccatggcagagccagaccgtcctggatgcctcatcccttagtttcaacaccagattgaaatggtttgccatctgcttcgtatgtggc

SEQ ID NO: 643369 - DNA, 75 bp, Homo sapiens
caccatttgaccaaccaatgagtcgaaggtctcgtagagcttccttagatgtggagagcatcttgtgcgcaccat

SEQ ID NO: 643370 - DNA, 75 bp, Homo sapiens
ctggaaacatgatacaatctgcaaatgattcaggtttactcacgtcatccagcagagaatggaaagtcaaatttc

SEQ ID NO: 643371 - DNA, 100 bp, Homo sapiens
cgaaaagaatactgtgaattatgcaagcacagatttgcttttacaccaagtattttgatcacaactatagcctccaagggagaattgcagaattggcctg

SEQ ID NO: 643372 - DNA, 82 bp, Homo sapiens
gcgcgcagagcagcctccggccgccgccgcgcagggggatatgagactttctactcggaatatcctgagtgttgcgtggatg

SEQ ID NO: 643373 - DNA, 75 bp, Homo sapiens
ccgagagcgtgaccgagagcgcgaatatcgtcatcgttagaaggagaagtctggcctaggaggtggaggatgcag

SEQ ID NO: 643374 - DNA, 75 bp, Homo sapiens
ctttgctcttccatccgcctttgatcgtcttcctcttcagccatccaggaaaatgtttataggaggccttagctg

SEQ ID NO: 643375 - DNA, 97 bp, Homo sapiens
tacatcctgggcgtcttcccaggctgtcatataactcctgagaatagtggttcttaactctgacagtcattttgtttactcattcagccctgttgca

SEQ ID NO: 643376 - DNA, 74 bp, Homo sapiens
gtggaccacatagacatttacgcggatgtcggcgaagagttcaaccaggggacggcaaaacagaacagaaaggc

SEQ ID NO: 643377 - DNA, 75 bp, Homo sapiens
ctcgccgcggccctgctgctcctggccctctgcttgcttgtccggcgcaccagagccagtcttggtgctctgtgt

SEQ ID NO: 643378 - DNA, 100 bp, Homo sapiens
tcttcgccagcaccgtgctctccaccacagcacacactcacgggacacagtgggaaagtgctgtctgctaagttcctgctggacaatgcgcggattgtct

SEQ ID NO: 643379 - DNA, 100 bp, Homo sapiens
aattgatctcctgtggcggtgatggtgggattgtcgtctggaacatggacgtggagaggcaggagtcaccgttacttcatccccaatccgaggagcagga

SEQ ID NO: 643380 - DNA, 82 bp, Homo sapiens
tggttttcaacaaccatgggaagccacggctagtccgcttctaccagcgtttcgtttgggccccatggtatccctgtgacag

SEQ ID NO: 643381 - DNA, 100 bp, Homo sapiens
gagcggaagcttcgaggcatgatggtcgactacaagaagagggcggagcggagacgggagtattatgaaaagatcacgctgaccggaaaggagattgaga

SEQ ID NO: 643382 - DNA, 95 bp, Homo sapiens
gattacacagttctggatgatgtgggccatggtgtcaaggccaaatttgagtttcatcatggtgactatgaaaaacagtttctgcatgtactgag

SEQ ID NO: 643383 - DNA, 83 bp, Homo sapiens
ataatttctttctcgctgatcgcctaacttctactgacgaagcttggaagttgcagaagggtgagcccatcactttctgtgag

SEQ ID NO: 643384 - DNA, 100 bp, Homo sapiens
ggagggcggagctggcgcggcccctagctttctccttctggtgtggggcccgagactcactgccacaacgacattgtcaaccttctcctggactgtgggg

SEQ ID NO: 643385 - DNA, 75 bp, Homo sapiens
gtcggagaatgagcgcctggcctctgtggcccaggagctgaaggagagaccatggtgagagcaccagcaagctgg

SEQ ID NO: 643386 - DNA, 82 bp, Homo sapiens
tattcagatcatccaagtggaggttcctacagagattcatatgagagttatgatattgagctcctggcagcttgcagagaag

SEQ ID NO: 643387 - DNA, 50 bp, Homo sapiens
gcacctatggacaagtctataaggtacagcctttccttcataccatttgc

SEQ ID NO: 643388 - DNA, 82 bp, Homo sapiens
ttggactgagtcctgcaggacacagggttaccgcagaagtgaagcacaacccaaccaacaccattgtttgtaaagcccatgg

SEQ ID NO: 643389 - DNA, 75 bp, Homo sapiens
ggattcacaatttgattccacaactggatttctagatatccatgacgacattgaaaatgaattttttgtattcac

SEQ ID NO: 643390 - DNA, 132 bp, Homo sapiens
attaaaagttaaacccaggaagctttggatcagacttttgtgttgcagttcggcaattctgtggtgttcttggtcacacatttatggagtttctgaagggcagtggagattactgccaggcacagcacgacc

SEQ ID NO: 643391 - DNA, 82 bp, Homo sapiens
caccgtgttgcagatatatctggggtcaatgggatgtcacctaccaaaatccaaatcctccaggaaaaactactacactaaa

SEQ ID NO: 643392 - DNA, 82 bp, Homo sapiens
gacagcaatgccttcacccgggatacgctgcaagagattttccagaggttctccttactatgacaatgtccgccccctctct

SEQ ID NO: 643393 - DNA, 75 bp, Homo sapiens
gaaaggcgctagaattgattttaaagcttgcattcacaagagatgggctctgtggtctgtggaatgaaatggtta

SEQ ID NO: 643394 - DNA, 71 bp, Homo sapiens
gcctgccccgcggccaacatgagcttcttgttgccactgcagaacaaattagacttgcacagatgatttcg

SEQ ID NO: 643395 - DNA, 100 bp, Homo sapiens
ctagaatctgccgtcttttgaagcaccctaatattggtgtatactcttgatgtaccagatgcattctattactgttatagtccagaccctggtaatgcaa

SEQ ID NO: 643396 - DNA, 98 bp, Homo sapiens
tgaatcatcgggtgttctctactccagagctccgacttatttctgtgggcagacattaacattcaggcttcattccagcgctccaatagtcatgacaa

SEQ ID NO: 643397 - DNA, 87 bp, Homo sapiens
gatcgacaagtccgggagctgggcggccatttaccagatttattgctaaacatgggtgcatttttggataaacccaaaactgaaaaa

SEQ ID NO: 643398 - DNA, 98 bp, Homo sapiens
gttggtggtcactgcttctgggacaccctggttctcttcacagtgttttccgtctggctcctctgaaggtgtgtgggcaagtcttcgctctagcactc

SEQ ID NO: 643399 - DNA, 100 bp, Homo sapiens
ggcctactcgcccgccaccctgcgctgccgccgctctgaggagttaaagtggaagatagatgataagcctgtaaaaattgacaagtgggatggatcagct

SEQ ID NO: 643400 - DNA, 99 bp, Homo sapiens
aattattctgcaagacaaagggaagaaataaaattttcccatactgagactggcattgcggactgacctccagggagaggcccagatctgatctgcaga

SEQ ID NO: 643401 - DNA, 96 bp, Homo sapiens
ggaggggctgctgagatatcctgtgccctggcagttagccaagaggcggataagattgaaagtagtgttccctgccaactgctagagtcagtgcta

SEQ ID NO: 643402 - DNA, 75 bp, Homo sapiens
ttaattttagggtcctttatatagaagggagagtaggtggtggcaaaggaagcctgggagaatcacaggttgagg

SEQ ID NO: 643403 - DNA, 90 bp, Homo sapiens
tttcgggacattaccaaaccactcattttaggtgtcccgacccaggctaagcttgagcatggctgagcaggagcccacagccgagcagct

SEQ ID NO: 643404 - DNA, 50 bp, Homo sapiens
atgtgttcctcaatgaatcacgctgaccaactgactgaagagcagattgc

SEQ ID NO: 643405 - DNA, 100 bp, Homo sapiens
gctgaggcgggtggcatggcggagaaggatgacaccggagtttgacgaagaggtggtttttgaggttctggctccttggcagcaatggctgtatttgaag

SEQ ID NO: 643406 - DNA, 101 bp, Homo sapiens
gtgcgcactggtgatgacaaaggggagagcaatgacggcaagtctaaagtgacccatgttatgattcgctgtcaggaactgttgccgttattacatcagat

SEQ ID NO: 643407 - DNA, 74 bp, Homo sapiens
cagcatctaggaggggtgaaaagtacagagccagatggactccttcggacaaactacagttctgtgttaacaaa

SEQ ID NO: 643408 - DNA, 100 bp, Homo sapiens
cctgtacttcattttggacaagaagattcctgatgttgcacccattgtaagtgatcagaaaccatctgtatcaaagtctggacggaagattaaaggaagg

SEQ ID NO: 643409 - DNA, 98 bp, Homo sapiens
atttttatatgatgaaactcaatacggaacagagactctttggtcaaaagatatggcgccatatcagggtgctggagaatctggtaaaagcaccattg

SEQ ID NO: 643410 - DNA, 82 bp, Homo sapiens
ttgcatggtgtttcaaagggtggtgaagaactaagctcttggataagcacaagaatacagagagcatggtggagcttctgga

SEQ ID NO: 643411 - DNA, 75 bp, Homo sapiens
aagtgcgcggttggggccactgcgaggccgttttagctttctgaaacaaagactcattttgaagatgtttaacaa

SEQ ID NO: 643412 - DNA, 100 bp, Homo sapiens
ctcagaaccatctcctgagaaagcatccttttcagtatttggagctggttatccaagtctgccaactatgacggtgagtgactggtatgagcaacatcgg

SEQ ID NO: 643413 - DNA, 100 bp, Homo sapiens
cgcgtcgaaagcctgaggaaaaagcggccgcctgaagaagcatctgtagggaatccagaaggagcgttcatgaagatgttacaagcccggaagcagcaca

SEQ ID NO: 643414 - DNA, 100 bp, Homo sapiens
acttatccagacccaatggaacatcagcaatgcttctgcctcctctattggcccaggaagcccacccagccccgccacgcagagcccagaaggaaagaaa

SEQ ID NO: 643415 - DNA, 98 bp, Homo sapiens
tgaaccaggaatccgcccgcaagagcgagccgcctgccccggtgcgcagacagagctattccagcaccagcagagcacttgcacctcctgcgccgccg

SEQ ID NO: 643416 - DNA, 75 bp, Homo sapiens
gagagggccccgctgggctggccctgcagggaccatggaatccagagctgatttgcctatctggggcgcctggct

SEQ ID NO: 643417 - DNA, 100 bp, Homo sapiens
aaccctctgcacattgcccagaagcttttccgagaacactggagttcctgatgagacacttgtctcttctagctgactattgttccatcacaaatatgca

SEQ ID NO: 643418 - DNA, 83 bp, Homo sapiens
aaagtttgtcattaaacccatcgacaagaaggcacctagtattgggaaagggtcgttgtggtgcatagacccagagtatagac

SEQ ID NO: 643419 - DNA, 82 bp, Homo sapiens
gggcctatattgcagggtttgatgatatgttttgaaacaaagttatgtcagatattttcagacctcaatgccacctatcgta

SEQ ID NO: 643420 - DNA, 98 bp, Homo sapiens
tgtgtaacgactgtaatcaggttgtcaaaccgcaggcatttcaatcacattatggcttcggtagattgcaaatgacctgctttctttcggatcccggg

SEQ ID NO: 643421 - DNA, 90 bp, Homo sapiens
gcacacacagtgggacctagacaaagggagagggtgaccgacatcccaactagggctgcgctggcctcggcacaccagtgccacccgctg

SEQ ID NO: 643422 - DNA, 102 bp, Homo sapiens
cagtaacactcaagcaaagaagagttgagcacaatcagggcctcatctttgtggtggacagtaatgaccgggagcgggtccaagaatctgctgatgaactcc

SEQ ID NO: 643423 - DNA, 90 bp, Homo sapiens
acttggtctgattttccaagctggagaaagtggctcatgccaaagaagaaaaccttagtatgcatcagatgctggatcagactttactgg

SEQ ID NO: 643424 - DNA, 89 bp, Homo sapiens
tccccaacggggaggccaacgtgaagaaggctgggttacgacccctacaaccctgagctgcccaagccccccgcgcagagggagaatgg

SEQ ID NO: 643425 - DNA, 90 bp, Homo sapiens
tgtggaaatgaaaactgatctcttgattgttctttcagatgtagaagattattataagtataggcctcatgttttatgtagttcatcgag

SEQ ID NO: 643426 - DNA, 90 bp, Homo sapiens
ctggaggattgtcactccaacctcttttcgctggtgccagtgacggggtggcccgtgagctgatgacgaggactggcttttaatccttgg

SEQ ID NO: 643427 - DNA, 103 bp, Homo sapiens
caggtcctcaagaagacaggcaaggaggtggtgctggagggatgctttcattggatttggaggaaatgtgatcaggcaacaagtcaaggataacgccaaatgg

SEQ ID NO: 643428 - DNA, 74 bp, Homo sapiens
cggaagattgcccgagagcaaaaagacttaattcagtgcacaaatgagatgaatgtgaacatcccacagttggc

SEQ ID NO: 643429 - DNA, 50 bp, Homo sapiens
gtagcctgagtagctgggactaaaggtggttgtgggaagagaagtttgca

SEQ ID NO: 643430 - DNA, 87 bp, Homo sapiens
tacggaggtggcagccatctccttctcgatcttgcttctgaaatatctacctgggatggagtgatagtaacaccttcagaaaaggct

SEQ ID NO: 643431 - DNA, 82 bp, Homo sapiens
ctatgagagtcccatcttcagcagaggtctccgggccagggcaatgttccgcacggcagtgatgatggcggccagcctggcg

SEQ ID NO: 643432 - DNA, 82 bp, Homo sapiens
aagttacgactctactgcaaaggagctaatgttgtaccatctttgggtaggcagacttccctgacgacatcagtgataccca

SEQ ID NO: 643433 - DNA, 75 bp, Homo sapiens
acgaggaggacctcaccgacctccaggtcaccatcgagggccctgctttggagtttaacccttctgccaatccag

SEQ ID NO: 643434 - DNA, 98 bp, Homo sapiens
cccacttggcaccagtggtcagcagcactgtttcctatgatcctaggaaacccactgtgaagagtgtggagggcgcagctttccagagccgacttcct

SEQ ID NO: 643435 - DNA, 82 bp, Homo sapiens
gaaaatggaagtgagcaagggtcctatgatgcagataaagttctttcagaatggaaagtatacataataagatgagaggtgc

SEQ ID NO: 643436 - DNA, 127 bp, Homo sapiens
tgttcatttgacctggcaattaaaggtgttaaatctccttggtgtgatgtttttgacatagatgatgcaaagtcacccacaaaagctgtatataatgccagacattggaatcatccagattcagaag

SEQ ID NO: 643437 - DNA, 100 bp, Homo sapiens
gatgataaacaatggctcaccacaatctctcagtatgacaaggaagtcggacagtggaacaaattccgagaccttgctcctgagaccaaggctgtcattc

SEQ ID NO: 643438 - DNA, 50 bp, Homo sapiens
ccatgtttggcactgaatcttcatgtctgtttatgatggtgaagaacatg

SEQ ID NO: 643439 - DNA, 105 bp, Homo sapiens
ctgcccgcgaccatggcctcctccgaggtggcgcggcacctgggctccgccatgtcacagatgaccagaagacatacaaaaatcccagcctgcgggctcaaggag

SEQ ID NO: 643440 - DNA, 83 bp, Homo sapiens
gaaggtgcttgtggaagggggcccggctccctaggcgtcccatctcggagaatggggtactaagagaaaagcacgaagctgtg

SEQ ID NO: 643441 - DNA, 50 bp, Homo sapiens
agtgggacctcgctgctctgctcccagttcctgctcattttccacaaggc

SEQ ID NO: 643442 - DNA, 100 bp, Homo sapiens
gaagagggtgggcttcgcagcgagcccctgtgcagtgaagatagtgatccggggagacaggaacacgggcaagacagcgctgtggcaccgcctgcagggc

SEQ ID NO: 643443 - DNA, 107 bp, Homo sapiens
caagaagccggactacaaggtcgcctacgtgcagctggattttttatcaagcagaaatgcatcgaacaacgagaatcaagatcactgagctaaatccccacctgatg

SEQ ID NO: 643444 - DNA, 102 bp, Homo sapiens
tcttgagttgatggaagatattgtggatttggcaaagaaagttgctgtctgagaaagaaccccagtttaagtttatctacttcaaccacatgaatctcgccg

SEQ ID NO: 643445 - DNA, 100 bp, Homo sapiens
cccgcgcagggtcgcgatgctgcccggtttggcactgctcctgctggccgcctggacggctcgggcgctggagaatcagcatgattcttcagaggctctt

SEQ ID NO: 643446 - DNA, 75 bp, Homo sapiens
catgcagtggtacaaggaccagaagaaactgcaccggaaatgtgcctaccaggttgatgctatgaaactgggagt

SEQ ID NO: 643447 - DNA, 100 bp, Homo sapiens
agtacaccgtggtgacattgtatcattggtagtaaagatggcaaaagtccactgcacatgacagctgtccatggaaggttcacacggtcacagaccctca

SEQ ID NO: 643448 - DNA, 50 bp, Homo sapiens
ctgagtcaggacgtaaatggaaccctgatggagttttaacattgaatgcg

SEQ ID NO: 643449 - DNA, 101 bp, Homo sapiens
tttacgtggagatcaagcgcagcgatggagatgagtatgatgtatgtgccatttgtttggatgagtatgaagatggagacaaactcagaatccttccctgt

SEQ ID NO: 643450 - DNA, 82 bp, Homo sapiens
aacaagagtgcttatcccagctaagctccaggacaatgcagatcttcgtgaagactctgactggtaagaccatcaccctcga

SEQ ID NO: 643451 - DNA, 75 bp, Homo sapiens
atgtggaaagtgtgatcgctgggtccattccaaatgtgagaatctttcagattaccaaagttccagagaacctgc

SEQ ID NO: 643452 - DNA, 101 bp, Homo sapiens
ggaggacgcgccgcggccaggcagggaggagaccggcacccagacaggtggcgaaggcagaggagtatagctgtggaccaactgtatatgatcatgcgcac

SEQ ID NO: 643453 - DNA, 100 bp, Homo sapiens
tacctcattccctaagacttcaccatgagtgtcaactgacggacgcttgtttagtctgaagccaacatccggacctgtcttaacagtaactctgtttggg

SEQ ID NO: 643454 - DNA, 74 bp, Homo sapiens
ttctgtggttggagagtttaagggacatctttgagcgggtcattcatctgagcttggcccccaagagaatgaag

SEQ ID NO: 643455 - DNA, 96 bp, Homo sapiens
gatgagtcaatgcagcgcttccacaaccgcgtgcgtcagattctcatggcctctgggtccaccaccttcaccaagtgcacagccagagaacaacac

SEQ ID NO: 643456 - DNA, 100 bp, Homo sapiens
atgactggtataccaaggttacctcagtggtggtagatgttgtgcctcggcagctgggagctgccttgaggtgcagtgttggggatccagagccatgtcg

SEQ ID NO: 643457 - DNA, 100 bp, Homo sapiens
ggcagcctagcgcaatgaggcgggcagcactgcggacctgaaggagaagaaggagaaggtggaggagaaggcaagccggaaagagcgaaagaaagaagtg

SEQ ID NO: 643458 - DNA, 100 bp, Homo sapiens
ataaagtctaccttacagggtataactttacattagcagatatactattgtactatggacttcatcgctttatagtggaatgaatcttacttgttgaata

SEQ ID NO: 643459 - DNA, 100 bp, Homo sapiens
gttattgataaagactccttaggaccgcttttacttcaggcattagatggcttcattatcgcagtgacaacagacggcagcatcatctatgtctctgaca

SEQ ID NO: 643460 - DNA, 80 bp, Homo sapiens
tcaatactacctttatttccaccatagtctttaacacctctgtgtgaagatgacaaccaggcacaggaaatcattaagaa

SEQ ID NO: 643461 - DNA, 88 bp, Homo sapiens
aagtatccagatgagaagtcggtgtgcctccggggctgccccaagatgacccagcactgaggaggggttgctccgcctggcctggcca

SEQ ID NO: 643462 - DNA, 75 bp, Homo sapiens
gacagctgtgtactttgccctcagcatctcccttcatgtctgggtcatgctggcataaccttgacaacagattgc

SEQ ID NO: 643463 - DNA, 80 bp, Homo sapiens
aagccgttttttgacatctgtacttcaagaaaggttgaaaggattgttgacaaaaggaaaaataaaaaagggaagacaga

SEQ ID NO: 643464 - DNA, 89 bp, Homo sapiens
accatcctgctcctgaacttcctgcgctcgcactgtttggtaactctcattcgacatccatctgaactaatgaatgttcctcttcagca

SEQ ID NO: 643465 - DNA, 83 bp, Homo sapiens
ctgtcgtctgtgttgtgactgctttggacgtgggagtcacctgaaagccaggaaatgttcagaatgaccgaagaagcatgccg

SEQ ID NO: 643466 - DNA, 100 bp, Homo sapiens
atggccgtggccgtggggagaccgtctatatggtccggaaaaagaacccccctctgagaaacgttgcaagtgaaggcgagggccagatcctggagcctat

SEQ ID NO: 643467 - DNA, 100 bp, Homo sapiens
cgggcactacgctggagaagatgcaacgatatgcacccaatgtccagggagcgtgcaaaatttgtcaaaagtggccttttattgtaaaacgacacgagag

SEQ ID NO: 643468 - DNA, 83 bp, Homo sapiens
gagaaaaagagaagatgaagaaacccagcttgatatgttgatagggccagatttgagtgtgtgaatttttgagtgaaacctgg

SEQ ID NO: 643469 - DNA, 100 bp, Homo sapiens
aagaacatgacttgtattaaagtttctattgatccaaaggtgactcttttgatggtgggacttgataatgctggtaaaaccgcaacagcaaagggaatcc

SEQ ID NO: 643470 - DNA, 95 bp, Homo sapiens
aacgaccaagagggtgttcgactgctagagccgagcgaagcatgatatcatcaagttgaatcgaaaggaagggaagaagcagaattttccaagac

SEQ ID NO: 643471 - DNA, 87 bp, Homo sapiens
gcatcatcaaggacttcaccaagcaggttatgaagacagtatggagtttccagaccatagtagacatttgctacagtgtctgagcga

SEQ ID NO: 643472 - DNA, 75 bp, Homo sapiens
catcaacatcaactacgtccctctgaagcaacgttggcccagaaaaccccagcaggatctgcatcgtcatcgagc

SEQ ID NO: 643473 - DNA, 100 bp, Homo sapiens
gccagctcgaagaaggcgagcagggtgcgggagagccccttgcagaagacgccgtacgagcctcttctgaaacagtctccctggagcaaccatcagagca

SEQ ID NO: 643474 - DNA, 100 bp, Homo sapiens
tgaagctgctcgcagcaactgtgctactcctcaccatctgcagccttgaagtgtactatgaggggctgcaggacaagctggcacagatccgcgatgcccg

SEQ ID NO: 643475 - DNA, 74 bp, Homo sapiens
tggatatatataggacacctctgtatgaccttcgtattgaccaaaagagaatcctacggcccctgaatattttg

SEQ ID NO: 643476 - DNA, 98 bp, Homo sapiens
agaaggggacggcctatgacagcagtgccgactggttctccctgggctgcatgcttttcaaacttctgagagggtaaaatatacccaggaccataaac

SEQ ID NO: 643477 - DNA, 76 bp, Homo sapiens
aaaacccaccaattctggacacattgggattaaaggtgagcgtcctgaccaccctggagcgtaggttcaacctgca

SEQ ID NO: 643478 - DNA, 83 bp, Homo sapiens
gcgcggtagcgtcccgggtcccctagcagggctctagagaccacgtgaagtctcctcgagacgagttgtactgctgtcacagg

SEQ ID NO: 643479 - DNA, 100 bp, Homo sapiens
tgtgaaggattactcgcccccacctgtggactctgaccgcaaacaaggagagcctactgagcagcctgagtggatggcaggagagctggctgacaaaaag

SEQ ID NO: 643480 - DNA, 100 bp, Homo sapiens
ggttgctgtcattgtccggccagcaacacagtcactcctggcggcaaaccaaacaaaaccagagtcatctggggaaaagtaactcgggcccatggaaaca

SEQ ID NO: 643481 - DNA, 147 bp, Homo sapiens
tggttctccgggtccagctctggaaggacctaaaggcaaccctgggccccaaggtcctcctgggagaccaggtatgtgactggtgtaagcacataagacacacaaaagaatacctggattttggggacggggaaagaaggcttcagt

SEQ ID NO: 643482 - DNA, 100 bp, Homo sapiens
gaaaggatttggttataagggttcctgctttcacagaattattccagggtttatgtgtcagctgcgatctcttggagcgaccagaccctgctggccactt

SEQ ID NO: 643483 - DNA, 88 bp, Homo sapiens
aaaatacttgcagctccagcaagaaaaagaacaagaactttctaagctaaaagccttgataaatttgctgaagttccttatgtcaaat

SEQ ID NO: 643484 - DNA, 100 bp, Homo sapiens
tacgagtttgtcctgggagattgtatggagatcactccaagaactgaggcccctgtcagcagtgtcagtaatagtttggagaatgccctgcacacatcag

SEQ ID NO: 643485 - DNA, 90 bp, Homo sapiens
aaggattctcgctgtgacagagacaacaccgagtatgagaagttcaaaatgagcctgtttggaacaacctcaggttttggaaccagtggg

SEQ ID NO: 643486 - DNA, 75 bp, Homo sapiens
ggcatggtggtctggggcaacgcggaagcaaaagctggcaggctgacagaggcggcctcaggacggaccttctgg

SEQ ID NO: 643487 - DNA, 100 bp, Homo sapiens
ggagttaactttggtgatattttgatctgccgtgatcaatatcaggaaaggccccatcttcccttcacacctggacctgctgagcatcgtggccagcgtc

SEQ ID NO: 643488 - DNA, 73 bp, Homo sapiens
acggcgagcagtctcaggcctttagtgatgatgatccaaattccagaatttgtggacatttactcataggtgc

SEQ ID NO: 643489 - DNA, 97 bp, Homo sapiens
cggaaagtggaaattacaacagagactattaaattgcaacaggattcagaaatcatggaaagcaggagccctctggcacaaatggaagaagaaagaa

SEQ ID NO: 643490 - DNA, 98 bp, Homo sapiens
cttctgccgcaccaggctcatcctgtccatcgtgtgcctgatgatcacgcagctggctggcttcagtggaccagaatccctaacactggaggatgtgg

SEQ ID NO: 643491 - DNA, 83 bp, Homo sapiens
ctctggaaagatgtggtgatggggcattcttgctaacaacggatgaaaaaatcccgttctctggagaatgagaaccttcaaag

SEQ ID NO: 643492 - DNA, 90 bp, Homo sapiens
agcaaatgctgaggactcagaccagtctctgcaagaggcccagtcctatgcggagagactgcgtctgggtttggccgtcattcacgggga

SEQ ID NO: 643493 - DNA, 87 bp, Homo sapiens
aaaacatgaccgctgagcccatgagaaatgcgtgtactgccggaagcggatgaagaaggtgtcaggtgcctgtatccagtgctccta

SEQ ID NO: 643494 - DNA, 100 bp, Homo sapiens
cctggactccctggagaagcagatggaaaagcgcgagcccagcattgacctgctgcaggccttcgtggagcactggaagggcatcacgcactactacatc

SEQ ID NO: 643495 - DNA, 50 bp, Homo sapiens
atccccgaccacttgcggcctgagtatgatgctgtgggccctgagggaaa

SEQ ID NO: 643496 - DNA, 90 bp, Homo sapiens
ctggccgagcaggctgagcgatacgacgtcattttttgagaccagtactgttataatccctatttacagatgaagaaactgagcttcaaa

SEQ ID NO: 643497 - DNA, 100 bp, Homo sapiens
gaggagcagctgctcaagtactcgccggacccggtggtcgtccgcggctccggtcacgtcaccgtgaaaatgtttataggaggccttagctgggacacta

SEQ ID NO: 643498 - DNA, 75 bp, Homo sapiens
ccccaacaaggacggagacgccggcgtgggcagcggccactgggagctgaggtccccttcccctgagcccatcta

SEQ ID NO: 643499 - DNA, 98 bp, Homo sapiens
catcctggtattttttggagcttccatcctggttcttccaaagtgcccggacccaaaacaggaaggtatttgaagtataccatacaactgttttgaaa

SEQ ID NO: 643500 - DNA, 98 bp, Homo sapiens
agaaagtgaagtgttttctggaaaaaaattctggggaccaggattcaagatctggacataatgaggctatgtggttgatgttgcagaatgatgagccg

SEQ ID NO: 643501 - DNA, 109 bp, Homo sapiens
ccacgttcccacacctggaaaggtgcaggtgcaggcctctcagctttcctccctgccacagtggccgtaacatcccgtcctgactgctactggggccgtaactgccgca

SEQ ID NO: 643502 - DNA, 100 bp, Homo sapiens
gaagaagaggaagaggattatgaagatgacaaggatgatgatattagtgatactttctctgaaccagagcagcccgacggccatggaggctgaagagacg

SEQ ID NO: 643503 - DNA, 75 bp, Homo sapiens
accactatttgagtttctgcctctacaaatttgactattctaggtacttcatgcttcctgttggataaaaaaatt

SEQ ID NO: 643504 - DNA, 50 bp, Homo sapiens
cttctgaggagctcccaaacctgcggataaccgtctggtccttgtgcaca

SEQ ID NO: 643505 - DNA, 117 bp, Homo sapiens
caggctgatagactgattgctcagcatcgctgtcaaagaactcaagctgaaacagagaaagatgttgtgtccctcctggtgagcgctgtcccagtgcacccgataatggcgaagaaa

SEQ ID NO: 643506 - DNA, 82 bp, Homo sapiens
cccctatgagagtcccatcttcagcagaggattattgcatcgagcttttagtgtcttcttattcaacaccgaaaataagctt

SEQ ID NO: 643507 - DNA, 75 bp, Homo sapiens
gtaccacgaaaaatcaatgtcagcccaacaacttacagtacggatttgtgaatcacgccctggagttgctggtga

SEQ ID NO: 643508 - DNA, 73 bp, Homo sapiens
agaaatggaaattgacagaattctctttgaaattacagcagggtctccgtctctccaccgggggcttcatcct

SEQ ID NO: 643509 - DNA, 100 bp, Homo sapiens
ccgccagtgaccctggacagtaacaaaacatataaagcccgagcccaaaccccgccaccatcatagtattaattttaaagacccacagtttgctgaagat

SEQ ID NO: 643510 - DNA, 49 bp, Homo sapiens
ccctgacagccccatcagtcagctggcagccaggaggcaggagcagcgg

SEQ ID NO: 643511 - DNA, 101 bp, Homo sapiens
aactctgccgaattcctgtgccacctcctcctttagaaaactgatcttaatacaggggtgctttccagacaggccaaggacctctcgatgcccaagtgaag

SEQ ID NO: 643512 - DNA, 105 bp, Homo sapiens
ttcatgttccagtgcctcgagcgctcaggatggaggaagactcgatccgcctgcctgcgcacctgcgtactaggttttgacaagcttgcatcatgcgtgagtata

SEQ ID NO: 643513 - DNA, 100 bp, Homo sapiens
aattgtaggtattgaaaggaaactggaagaaaaaagaaaagaaactgacaaaaacatttctgaggtggaagttaaacgagctgagcctcgggacagcaag

SEQ ID NO: 643514 - DNA, 75 bp, Homo sapiens
ttttcttatcagcatttatcaagtcttacaggagcatcagcacaggtgacttaagagattaaaattaatttggtt

SEQ ID NO: 643515 - DNA, 101 bp, Homo sapiens
acaccagcgtgccaaaagagcagtctcacatgaagaccaatttttacgtctagatttccatgcccatggaagaatcatttgctgtttcaaatagagaactg

SEQ ID NO: 643516 - DNA, 100 bp, Homo sapiens
cccgcgctggtgcagccaccctcgctccctctgctcttcctcccttcgctcgcaccatgcttcgagagctgtgcccaggagtgaacaaccagccctacct

SEQ ID NO: 643517 - DNA, 82 bp, Homo sapiens
gggaagagattcagccagcacactcctcgcgagcaaggttacaggaggttccagtggcatcgggaagtgcattgctatcgag

SEQ ID NO: 643518 - DNA, 97 bp, Homo sapiens
ggaaggaggagcagcagactcggacgtggacgcctttttccggacaggtttcctgctgatcttggcactgaccgaagcgctggcatttgccatccag

SEQ ID NO: 643519 - DNA, 88 bp, Homo sapiens
gatggtgccgtcgctcatcaagcagcaggtccttaagctgcaagctttcttcctggtggcagatgacatcatggattcatcccttacc

SEQ ID NO: 643520 - DNA, 100 bp, Homo sapiens
tggactgcactggtgctgatattaaaatctcaggcataaaatttgttcagcatgatgctgtagagggaatcttaaagaaagtttcattgtgcaaatctaa

SEQ ID NO: 643521 - DNA, 90 bp, Homo sapiens
taagctgcaggccaagcaggaggtcgataatggaatgctttacctggaatggatggacttcatctgcagcatcctcaccattaaaaaaag

SEQ ID NO: 643522 - DNA, 82 bp, Homo sapiens
cgccgccccctccggcgtgttcatgcccccgggggcttgtcaatgaggcagatcagattcaggttcgacgggcagccaatca

SEQ ID NO: 643523 - DNA, 51 bp, Homo sapiens
ctctggcagaatgcactgcttgaaaagagccctggaaaccaacaggtataa

SEQ ID NO: 643524 - DNA, 107 bp, Homo sapiens
cttcgctccaactcctgcagagctgagccggaggggaatccggaagggacacgctgaacagagtaatcaagtcagaggattatatgacttttatctgcctagagaag

SEQ ID NO: 643525 - DNA, 75 bp, Homo sapiens
ttgcctttgggactctgaaggctgaaggaacctgagctcggccgatgcaggccgccagaccatgcgtaactactc

SEQ ID NO: 643526 - DNA, 100 bp, Homo sapiens
gcaagattcgtttaagacaacaactggaaatgtattccatttgtgaatctggattgggaaagtcgacattaatcaactcattattcctcacagatttgta

SEQ ID NO: 643527 - DNA, 100 bp, Homo sapiens
gctctcccgcgatctgcaccgggggaagcgcatgatcaaccagatggcaacagcaccagattctcagagattaaagctattaagagaagtagctggtact

SEQ ID NO: 643528 - DNA, 50 bp, Homo sapiens
gcggctgcacgtctcgcggatcatgctggtaacacgtgccatcagtgtcg

SEQ ID NO: 643529 - DNA, 96 bp, Homo sapiens
gaaaggcactatcgagattggaaccacagaaggtgcaagcggtcttctctgtcttctttatggccagtaaaattctccagaagagatttatggcag

SEQ ID NO: 643530 - DNA, 75 bp, Homo sapiens
tggatcttgctcagtctctgccaggggaagattccttggcattgaacctggccacatcccaggtaccgtgaacat

SEQ ID NO: 643531 - DNA, 100 bp, Homo sapiens
ggcagtgttctcagtagtccgaactctaatatgagcagcatggtagttacagcaaatgatgtgcttgcttttggaacattggtcagtacttccaatacct

SEQ ID NO: 643532 - DNA, 83 bp, Homo sapiens
ctgcagcggaaccggacccagtccctgagccgcccctacacccacagggcttctaccactgctgatgcaaaaccacaaaggga

SEQ ID NO: 643533 - DNA, 100 bp, Homo sapiens
cgggcactccacagattctgttgcgaaggcagccatctttagttcgtctttcctagagaggtatctagaagagcagaagacagagaatggaaaagataag

SEQ ID NO: 643534 - DNA, 100 bp, Homo sapiens
cgtttttatggtcccctatgcctgaacattatgtggaaggatcaacagtcaattgtgtactagcattccaagttgaacgaagaagaagatttaacataaa

SEQ ID NO: 643535 - DNA, 50 bp, Homo sapiens
ccaagtccagccccagcatggcatactataaccaagagtggacattgtgg

SEQ ID NO: 643536 - DNA, 82 bp, Homo sapiens
aagctcaagtatatcaagcattcaaattgctcacagctgatcctaaggttgctgctgactcagccattctagaagttcttca

SEQ ID NO: 643537 - DNA, 75 bp, Homo sapiens
cggcggcggcggcggcggcggcgctgctcccgggggcgacggttcaaaaggtgatgacctatcaacagccattct

SEQ ID NO: 643538 - DNA, 100 bp, Homo sapiens
cttgcaggagacagaaactggcatgaggattctgccaccatggaagggctcctgtctccgatgaggacgaaggaagaaacatattgccgagtggatgccg

SEQ ID NO: 643539 - DNA, 83 bp, Homo sapiens
tggagctacaacttctgaaggtctaaggagctgcagatcaagaagcagttccaggagacgtgtaagatccagactcggcagta

SEQ ID NO: 643540 - DNA, 100 bp, Homo sapiens
ttgatgttgactgcaagcacccggaagccatcttgaccccgatgcccgagggtttatctcagcagcagggcaaagctgttggggtgactattggctgcat

SEQ ID NO: 643541 - DNA, 75 bp, Homo sapiens
cttgaggacctactcacagataggaattgaagaccatcatggagcagttcaaccctagcctccggaacttcatcg

SEQ ID NO: 643542 - DNA, 82 bp, Homo sapiens
ccgagtgtgagcggaaaggggcccggcgtctgcctcgagactgaagaccgtacctggagtagaacagaaaaattattatgtc

SEQ ID NO: 643543 - DNA, 75 bp, Homo sapiens
gacttttgatatggaagatgaatacatgctgggcctaccccttgctcaggttcaagaagacagtgaagaggctca

SEQ ID NO: 643544 - DNA, 138 bp, Homo sapiens
ttttatcacgagtcatgaatacaggatcacagtttgtgatggaaggagtgaagaacctggttttgaaacagcaagcatttacagagacacagaaaaaaagattgttgtcatggaaacagcaggtgcagaagctctttc

SEQ ID NO: 643545 - DNA, 100 bp, Homo sapiens
cggacgggttcctctccgagctcacccagcagctggcgcaggccaccggcaagcccccccagcaaaccaccagcccagctgtcgccatctgttcccaaga

SEQ ID NO: 643546 - DNA, 100 bp, Homo sapiens
ggcgagccggagcgcggagcccggctcccgcaccatggaggaggacgacagctacgatgatatcatcaagttgaatcgaaaggaagggaagaagcagaat

SEQ ID NO: 643547 - DNA, 50 bp, Homo sapiens
gagagaagtcatatgcccggcacatggtggtgaccgcggtggcttcaaaa

SEQ ID NO: 643548 - DNA, 100 bp, Homo sapiens
tcctctgcccgggttgcgtggatctccagtggaaagagacattccataagtggaccaatctcaacatccaaacccctgacagccctgtcagataagagac

SEQ ID NO: 643549 - DNA, 80 bp, Homo sapiens
aaagagtgcatctgtagatgctgaaaaatcaatgctgtccaaacttaaacatgaatcttctgctgactctcaacttttcc

SEQ ID NO: 643550 - DNA, 100 bp, Homo sapiens
ggaagcagcacgggatcccagcctcaggcctgcacggacggtgttggttgggttacagaatgtctgaaggggacagtgtgggagaatccgtccatgggaa

SEQ ID NO: 643551 - DNA, 100 bp, Homo sapiens
atgtgatcatccttggagagagatacgctctgctgttgcccgtattcaggagttcttcagacggagaaaagaaaggaaagaaatggaagaattggatact

SEQ ID NO: 643552 - DNA, 51 bp, Homo sapiens
tctacgaaggcggctacttcaaggagaagatggtataaactggtccatcag

SEQ ID NO: 643553 - DNA, 83 bp, Homo sapiens
agaagggccaggagaggagcactttgaggacatggcctccgacgaggacatgtttacccaaggtccagcctagcccctaggca

SEQ ID NO: 643554 - DNA, 74 bp, Homo sapiens
gacattcagtcagaagaaggctgctattgaaagagagtatgcacaggtaaagggagaagatgaggaagagaaca

SEQ ID NO: 643555 - DNA, 100 bp, Homo sapiens
acccccgagatctccttggaagcagaacccatagaactcgtggaaactgttcttggccaggctgactgagagatttgtgctgggagtggatatgttcgtg

SEQ ID NO: 643556 - DNA, 134 bp, Homo sapiens
agattttttagtctaaatgatgggcagtcatggtcccagaaacgtcactatcaagaagaaacattattccatcatttgtgttgatggatatccaggcttctacagtggtcacctatgtgtatcagctaattgga

SEQ ID NO: 643557 - DNA, 74 bp, Homo sapiens
ctggggctgtgctccatggcgagctggtggtgccaccgaacatcgcagaactgaagaatttggaggtgctcaac

SEQ ID NO: 643558 - DNA, 75 bp, Homo sapiens
agctgcaagccggtgcagcagccttcagcttttggcagcatgaaagttagcagtttggtgcacctcgatttggag

SEQ ID NO: 643559 - DNA, 90 bp, Homo sapiens
gcggaatgtcaactattcaacatggaggcggaggtcgataagctggaactgatgacctctgtgagtgaaagccttcagagggaagctgct

SEQ ID NO: 643560 - DNA, 100 bp, Homo sapiens
tactgcacggtgaacctggaccaggaggaggttttcaggaccaaaattgtggaaaagtcactctggccagaagcggactcctagaagaggggagcagcaa

SEQ ID NO: 643561 - DNA, 97 bp, Homo sapiens
gtaaaggatcatttgctggtgtctacagagctgagtccattcacactggtttggaagttgcaatcaaaatggatgatgatgctgaagctatccttgc

SEQ ID NO: 643562 - DNA, 98 bp, Homo sapiens
cgagctgcggctcggacgccagcggacacgcgggcgaggtgtagtcgccgccgccagccgccatgggcaaacagaacagcaagctgcggcccgaggtg

SEQ ID NO: 643563 - DNA, 75 bp, Homo sapiens
ctggctgtgctgcgcggcccccgcgcatgaggaattccagggaagaaatgtggtacaatcatacttacagcagag

SEQ ID NO: 643564 - DNA, 120 bp, Homo sapiens
ccatgacgtccatccatttcgtggttcacccgctgccgggcaccgaggaccagctcaatgacagatctaagctggaaccagaaccaaatacaaagacaagagaatccacatcttctgaga

SEQ ID NO: 643565 - DNA, 90 bp, Homo sapiens
cggaaatttgaacagttgaaacaggagagaattagtcgatatcaggggcgtgaggtcccaggaagtggccaaaagctagacagatccccg

SEQ ID NO: 643566 - DNA, 82 bp, Homo sapiens
ggtccctgtgacctgtggagacacggccagatctgccctccagaatccttaaacacattacttaaacagctagaagaagaaa

SEQ ID NO: 643567 - DNA, 75 bp, Homo sapiens
gtgggagcaaaaccaacgcctggctcggagcagcagcctctgagggggggccctcagcctcttggccttgaacgg

SEQ ID NO: 643568 - DNA, 142 bp, Homo sapiens
ttggtgcggaggcttttatatgccagagaaccctgagtgtgcccctgacatgacaaggagccgtcgtcgttaggttccagcaacagatagaaatgctttaagttcactctggggaaagctggcctctgaaatcttaatgcag

SEQ ID NO: 643569 - DNA, 100 bp, Homo sapiens
cagacctccagaactacctgtaaattatgtgaaacctccaaatgtggataacagacgagtacctttggaaaggtcacgctctcgccacaatggagctatc

SEQ ID NO: 643570 - DNA, 87 bp, Homo sapiens
gcgcccagcgtcccagggcccaggccgagcagcacaggaagtcctggagaacctgaaggaccgctggtaccaggcggacagcccccc

SEQ ID NO: 643571 - DNA, 86 bp, Homo sapiens
ctcgcgctactctctctttctggcctggaggctatccagcattcccaacttcttctggagcctggggatcggtcacactggtgcgt

SEQ ID NO: 643572 - DNA, 88 bp, Homo sapiens
gaaacagaaattctggaacacctatatgatcttactgtgccgagatcgctcacaatgtttcctccaagaaccgcaaagccatcgtgga

SEQ ID NO: 643573 - DNA, 75 bp, Homo sapiens
ccgaagtctgcttctgcttccaaaggagaaccgcagtgaaagcagtgggagacatttagtgaacgctcttcaagc

SEQ ID NO: 643574 - DNA, 76 bp, Homo sapiens
aaaatcagaaatctctagaacaacttagtgatgtaatccttcagggtgtgtccgcagccggccaggtggtatccct

SEQ ID NO: 643575 - DNA, 100 bp, Homo sapiens
gtggccggccctgcaggaactggcccggtgtgggaacctggcctgccggtcagacctccagttctcactgtcaccggggagccctgccacttccccttcc

SEQ ID NO: 643576 - DNA, 83 bp, Homo sapiens
gagaagatccttgggctccaggtccagcaggcggagcactgttcaacaatgcagatcttcgtgaagactctgactggtaagac

SEQ ID NO: 643577 - DNA, 100 bp, Homo sapiens
tggaccacctaccatcctcctaggtcttgtcctgggcaccacggggactcggagacagggtggtatttccaacattttggaggaactggttgtccagcct

SEQ ID NO: 643578 - DNA, 100 bp, Homo sapiens
cggaggcttcgcgggaagacgcggcggcggcggcggaggatgagcctgcagagcgcgcagtacctccggtgcactacatcctccaggaggtggtgatggg

SEQ ID NO: 643579 - DNA, 129 bp, Homo sapiens
ctgcatactatcctcctagccaaattgctcaactaagaccaagtcctcgctggactgctcagggtgccagacctcatctgcagtcattggagaaatcgatgaagaaacagattctgcgcttgatttggg

SEQ ID NO: 643580 - DNA, 99 bp, Homo sapiens
agaagatggttttggagagcaccccttttaccactgcctggttgcagaagtgccgaaagagcactggactccggaagtgatcgaactgtgagaatttgg

SEQ ID NO: 643581 - DNA, 95 bp, Homo sapiens
ggcgatccgagcatgagcctggagcgcgagcttcgccacgcaggaggcgcaggtgctgaagcagctggcggagcggcgcgagcacgagcgcgagg

SEQ ID NO: 643582 - DNA, 87 bp, Homo sapiens
taccaccctgttgtacatccactggacctaaaatatgaccctgatccagctgagatgattgacaaattgacattgacattcaaccgt

SEQ ID NO: 643583 - DNA, 75 bp, Homo sapiens
gcatctctccaccatcgactacgtggaggacggaacctaattcatctctccagcaaaggacacatctctccagca

SEQ ID NO: 643584 - DNA, 75 bp, Homo sapiens
gcggagacagagccctccggccagcggggaggtgcacttactggacttccccaatattgtcatcaaaggatcgga

SEQ ID NO: 643585 - DNA, 50 bp, Homo sapiens
ttttaaaggcccagacatatcacttggttacagattatgccattgccagg

SEQ ID NO: 643586 - DNA, 102 bp, Homo sapiens
ggggaaggtcctcctgaggaatgtcatccggcacacagatgctcacaataaggggtattccctcagcggatactacacccatccatttcaaggctatgagca

SEQ ID NO: 643587 - DNA, 100 bp, Homo sapiens
gtaccaggcgaagctggccgagcaggctgagcgatacgacggtttatgctaaaactatcgatgggcaacagactattattgcatgtattgaaagccacca

SEQ ID NO: 643588 - DNA, 99 bp, Homo sapiens
agaaggagcaggatctgaaagctgaaattgagaagctttgtgagaagggcagaaggcaagaaataatggcggcagctacgggggatcctggactctcta

SEQ ID NO: 643589 - DNA, 75 bp, Homo sapiens
ttggagggggcttccccggaatggagggctccgggcccaagtttgaggagaacaagttgaaatcatcgcagaagg

SEQ ID NO: 643590 - DNA, 100 bp, Homo sapiens
gcggagggggcggcggcagcgacggcagcggcggcggctggactaaacaggtcacctgcagatttatgtgatcagtttggctgaaccccgtctgcccctg

SEQ ID NO: 643591 - DNA, 99 bp, Homo sapiens
ctcggtgttcctaatcctcggacttccaatgaagttcagtatgaccaaaggctcttcaaccaatccaagggaatgggtactgttcaaaaaggaatgccc

SEQ ID NO: 643592 - DNA, 100 bp, Homo sapiens
gtacttcgtctatgtggcgcccggcatagaggacgtcggtgatgaaggagaagaagaaaaagaattcatttcctataacatcaacatagacattcattat

SEQ ID NO: 643593 - DNA, 100 bp, Homo sapiens
gtcggcatcaaggcaccctgagcccgtgcccgaagagggctcggaggatgagctaccccctcaggtgcacaagctcatcagcgatggcagtgtggtctgc

SEQ ID NO: 643594 - DNA, 75 bp, Homo sapiens
ctggggttcggcgctatggaggagctcgatggcgagccaacagtcactgaatgaatctgaagtctgctgcagtaa

SEQ ID NO: 643595 - DNA, 100 bp, Homo sapiens
acttcgttccaacatggacatcctgaagccaatcctgctggagaccatggccaaaatggaggtgaaaacctcacttctggacaatatgattggagttggg

SEQ ID NO: 643596 - DNA, 101 bp, Homo sapiens
gaaggtgaagccacggaagataagacctactgaacgtgaacgaacagaaaggctaattaaaaccaaattaagggagatcatgatgcagaaggatttggaga

SEQ ID NO: 643597 - DNA, 90 bp, Homo sapiens
cagaactcgtcagattcttgcctgcaggcagctgcattcagcctcagcggaggacacgcctgtggtgcagttggcagccgagaccccaac

SEQ ID NO: 643598 - DNA, 98 bp, Homo sapiens
tgggcttagcggcagcccgtatcacatcctagactttttacttcgaggagaagagtctcacgagttgtcctggaagagccctctggcacaaatggaag

SEQ ID NO: 643599 - DNA, 74 bp, Homo sapiens
tgatatgtggaaaagacatttcttctggatgactcatctgatgatgtgagaagagttcagaggagggagaaaaa

SEQ ID NO: 643600 - DNA, 75 bp, Homo sapiens
ctcgggagggagactgttgttcccggagatgcggcgcgcagactactgtcagaggatgtaggaatggacatcccc

SEQ ID NO: 643601 - DNA, 80 bp, Homo sapiens
cttgaaaagactgggcttgtccttgctggtgcatgcgtcgtcggcctctgggcagcaggatgagcacaagcctgggagat

SEQ ID NO: 643602 - DNA, 75 bp, Homo sapiens
cttcccagtagctggaactacagtcgtgatgagaggagatggattgaaaagcagaacagagcaacaagagcacaa

SEQ ID NO: 643603 - DNA, 75 bp, Homo sapiens
aactggttctacacgcgagctgattatggtgacaagctgaacatggagctgagtgagaaatacaagctggacaaa

SEQ ID NO: 643604 - DNA, 50 bp, Homo sapiens
atgtatctggctcagaactatgataaaaatatgtcgtaactgcaagtgtg

SEQ ID NO: 643605 - DNA, 90 bp, Homo sapiens
tactggaaatctgaatgctgttatcacaaatgggacgtcggtcatcagatactgaagaagaaagcagaagcaagagaaaaaagaaacacc

SEQ ID NO: 643606 - DNA, 100 bp, Homo sapiens
ccaaactctgctatgacccagattttattgaaggcctgatggatgatgtggacttcaaggcaaaagtgactcgtgtggaatttgaggagttgtgtgcaga

SEQ ID NO: 643607 - DNA, 80 bp, Homo sapiens
tgggttatatttggaaccttcgggcaaacaggattccacagtgtcctctggaaaatggtcctcagaatggttggaatgac

SEQ ID NO: 643608 - DNA, 100 bp, Homo sapiens
ctgcccgcgtccgaggctcgcgggcggcgggcccgggtctgtttatgatggtgaagaacatggacgtttcatggagaagcttgaaactcgtatccgtaat

SEQ ID NO: 643609 - DNA, 75 bp, Homo sapiens
caaaggccttttcagttgtcatacagactcgagaacaggaagaactggaagaagctttagaagtggaacgacagg

SEQ ID NO: 643610 - DNA, 100 bp, Homo sapiens
gatgtggtggtctactctgatgtcaatcttgagggctaggggaccctcacaatgatcccaatgctcagggggatgccttcaagactctcttcgtggcgag

SEQ ID NO: 643611 - DNA, 100 bp, Homo sapiens
tttgggattagatccttgactccttgcgtcagtagttaagattgggctaatggatactacagacaacagagaaaacttgttgaagagattggctggtcct

SEQ ID NO: 643612 - DNA, 97 bp, Homo sapiens
gcccaagggcgacttctccagccgggcccgcgaagtggagattacctggggcaattgatgttatcggtcagactataactatcagccgagtagaagg

SEQ ID NO: 643613 - DNA, 75 bp, Homo sapiens
gaccctggccgccccgagcggagcctggagtggtcccaggctgcacccatggcagaaggaggagggcagaatcat

SEQ ID NO: 643614 - DNA, 101 bp, Homo sapiens
cctgactctagggacagagaagatcagctgcagacaactgaggaatcctttgcaaaggattatgtgctggccgtggaggcgtatcattcggttatcaagta

SEQ ID NO: 643615 - DNA, 82 bp, Homo sapiens
aggcggaccatgataatttccccagagcgtcttgatccttttgcagatggtggccttggataagggctgctcccaattccgc

SEQ ID NO: 643616 - DNA, 51 bp, Homo sapiens
ttctgcgctcccttcctcagcgtttcaagatccgtgggcgtgagcgcttcg

SEQ ID NO: 643617 - DNA, 100 bp, Homo sapiens
cgacgtacccgccgccgccgttggctggagagttcggaatccagcattaagaagaaatttctcaagaggaaaggaaagaccgacagtccctggatcaagc

SEQ ID NO: 643618 - DNA, 102 bp, Homo sapiens
tgtaaagaacttgcagttgaaggagtataacacagggttatatcctgtgttgtgacctcatggtttaagtgggaataaagatgagtataagcagtgatgagg

SEQ ID NO: 643619 - DNA, 75 bp, Homo sapiens
ggggcctcccaggggacactggacctaaggaggaacagcacagcatgctgggctctggatttaaagctgagcgct

SEQ ID NO: 643620 - DNA, 83 bp, Homo sapiens
gctgggtctggagacgccgtggcagcctgaacggagtgtgcgacggattgggaggagctcgcccgtcagcgaggagtcctgga

SEQ ID NO: 643621 - DNA, 83 bp, Homo sapiens
cttggactgagtcctgcaggacacagagttgatctctctaatgtattagatcttcatgcctttgatagtctctctggaataag

SEQ ID NO: 643622 - DNA, 95 bp, Homo sapiens
cgcagctaaataatattccaccaactcaggaatcctactatgatcccaacctgaggcgtagaggctccggtgttttttgtgccaattgcctgacc

SEQ ID NO: 643623 - DNA, 100 bp, Homo sapiens
agaacatcaagcaggcagaatttggacgccgggagattgagattgcagagcaagccctgaaacatgtatctgatgacatgaagactcacaagaaccctgc

SEQ ID NO: 643624 - DNA, 73 bp, Homo sapiens
gggagcggcagaagttacggcgacagctcctcgcgcagcagtctgcgggccaggcatcgacatccgcaacgac

SEQ ID NO: 643625 - DNA, 75 bp, Homo sapiens
ggatcaaccagacggaaaacccgtgtaaacaggaacatcgataagtagtgtaaaaacttgcacaatgaaatccga

SEQ ID NO: 643626 - DNA, 75 bp, Homo sapiens
ctcagatgctgccagggtccctgaagagggaagacacgcggaaacaggtctcggtccagctcgacttccagctca

SEQ ID NO: 643627 - DNA, 75 bp, Homo sapiens
ggtaatgtgtccattcgagggcggatcctctctgcaatcccacagagtattgatgaggaaactgaagtttggagc

SEQ ID NO: 643628 - DNA, 75 bp, Homo sapiens
ccagcctgcggagcctgtggggcaggtgcctgactgacagaagttcttgcccccggggagctggtgtggacagag

SEQ ID NO: 643629 - DNA, 100 bp, Homo sapiens
gaagatgagcctgacaccattccgacatccgtcctcctgcaggtggtggagctgctagatggcgggtgaaaaagttgagaagccagatactaaagagaag

SEQ ID NO: 643630 - DNA, 100 bp, Homo sapiens
actccgcaatcagatgttacagaggatggtgagagccctgaagatccctcagggacagagggtgggaagggttcctcgccctccatcagaccaatccaag

SEQ ID NO: 643631 - DNA, 75 bp, Homo sapiens
ggtggacctgctggcgcaggacgccgacatcgtgtgccgctgccagtctgagggaaaaggccataccaatgctgg

SEQ ID NO: 643632 - DNA, 101 bp, Homo sapiens
cttcggcaagatccagatcgggatttacgtggagatcaagcgcagcgatggacagagcgggatgccaccagcttgtccaaagggaagttccaggagctcct

SEQ ID NO: 643633 - DNA, 98 bp, Homo sapiens
agagcctcgcctttgccgatccgccgcccgtccacacccgccgccaggaggagtatttgaagacttctgagcggaggagtcgcatgtcagagctgtcc

SEQ ID NO: 643634 - DNA, 82 bp, Homo sapiens
gcatacttggaatgaatccttctagagacgtccacggacatggatttgattgacatactttggaggcaagatatagatcttg

SEQ ID NO: 643635 - DNA, 141 bp, Homo sapiens
tttatccagcacgagtgggcgcgcttcgaagccgagaaagcccgctgggaggccgagcgcgccgagttacagcttcggaaccaaaaagaagcttcccagagccggggccaggagccccaagcgccctctagcagcaaacac

SEQ ID NO: 643636 - DNA, 101 bp, Homo sapiens
gtatctggcctccatcttcggcaccgagaaagacaagaggaagttaacatccctaataggagggttctggttactggtgccactgggcttcttggcagagc

SEQ ID NO: 643637 - DNA, 100 bp, Homo sapiens
aaaacactaaacgccaataatatggagacactaatcgaatgtcaatcagaggtaacgtgaagcacctggttctcttcctccatgaggctgtcctggtgca

SEQ ID NO: 643638 - DNA, 100 bp, Homo sapiens
tatgatatggcagatgtatgggtgaagatccaagatgttctacagttggagtcattcgttgcccagtttgcagccaagaatgtgcagagagacacatcat

SEQ ID NO: 643639 - DNA, 100 bp, Homo sapiens
aatcccaagttgcttcagttggtcgaagacagaggttcagggccgagatggacgaaaaaatgtggttccttgtgttctctctgtaaatggggacctagac

SEQ ID NO: 643640 - DNA, 82 bp, Homo sapiens
tgaaggtccaggcgctggccaggttttaaaatcaaagatgggaaaatcggagaaaattgcccttccccatggccagcttgtt

SEQ ID NO: 643641 - DNA, 75 bp, Homo sapiens
ggagctgcgcgaagccggggcggagcacgcgagctatgctgaagaaatcaggggagaaacccctgcttggtggaa

SEQ ID NO: 643642 - DNA, 98 bp, Homo sapiens
tccaaatgctgattcagactttagacaaagggaagcccatgaaacctttaatgagtggtttaagcatatgaattcagttccacaaaaacctgctttga

SEQ ID NO: 643643 - DNA, 75 bp, Homo sapiens
tccctgctgggccgtgtttggactcctgcctcgcaattctgtggtgttcttggtcacacatttatggagtttctg

SEQ ID NO: 643644 - DNA, 100 bp, Homo sapiens
ccgggattgtacctgcaggcagaaagtcttcctacgaccgtcttttcccttagaggcaccaggtgatattatacccaacttctaatagctccaaatcagc

SEQ ID NO: 643645 - DNA, 75 bp, Homo sapiens
tggaatgtgctttagaagttaaaaagcaaaccagtccagctacgggggcccagccagccagcagctgagtggggg

SEQ ID NO: 643646 - DNA, 97 bp, Homo sapiens
aaccatcgcagttggaagcccatggggcaggtactgggcctaatcgctacgtgcctctttggctatgatgcctatgtcaccttccccgttcggcagc

SEQ ID NO: 643647 - DNA, 96 bp, Homo sapiens
ggcggcggctgagccgcgctgcgcagccgacgcgggaatgaagcgggcgctgggcaggttggacaccgaggaacagtaagagattatccagacttt

SEQ ID NO: 643648 - DNA, 105 bp, Homo sapiens
taaaaacaagactggggctgctcccatcattgatgtggtgcgatcgttatataagtttggagagacagtttctattgttttttggacagacacttggagaccaga

SEQ ID NO: 643649 - DNA, 98 bp, Homo sapiens
cttgctgatattttcaggatttatgctcctgaagctccttacacatcccctgataaactaaagggttctgagcaaggttcaaccagtcaagaacaggc

SEQ ID NO: 643650 - DNA, 83 bp, Homo sapiens
cccaccgctgccctcagctccgagtccagggcgagtttggtgccctggttgtcagatgttggaaagcagtaggacggaacata

SEQ ID NO: 643651 - DNA, 97 bp, Homo sapiens
taattgacacttttgggatccgatggcctgaggagcttgaatgtgacaggtaggagtcaatcccaccagcattgactcagtcgtaattgggaaggac

SEQ ID NO: 643652 - DNA, 100 bp, Homo sapiens
ggataaagatgaaaagatctcccgtgatgagctgttacagattggtggaacgagaatgcctacacgcagccacaggaatccagtttccatggaaaccaaa

SEQ ID NO: 643653 - DNA, 75 bp, Homo sapiens
ctcgcaggcaatgggtactacgacaggtggagccccctgagctgcccgctgatctgcagcactggatctcctaca

SEQ ID NO: 643654 - DNA, 51 bp, Homo sapiens
aaagaacaccgacttcattgagaagctgtccctttccccccaacacatcgc

SEQ ID NO: 643655 - DNA, 98 bp, Homo sapiens
ctccgggcactcccacgaccaggtaggagagcgacttgcagttgtggaggtacagtgtgaacggctgaggatgctctaccgggactgtgctcggcccc

SEQ ID NO: 643656 - DNA, 100 bp, Homo sapiens
ccgccgccgccgccgccatcatgagggaaatcgtgcacttgcaggccgggcagtgcggcaaccaaatcggcgccaagcagcaatgcagagtccctggaca

SEQ ID NO: 643657 - DNA, 75 bp, Homo sapiens
gaagaaacccagcttgatatgttgccatcactggtgcaagctatatttaacggagatcctgatgaagttcgagca

SEQ ID NO: 643658 - DNA, 101 bp, Homo sapiens
atgccaacccacctaactacggaaaacctgatcccaaaattattgaaaacactcgaagggtgcgtatagcagcaaaattcatcattcatgcccctcctgga

SEQ ID NO: 643659 - DNA, 100 bp, Homo sapiens
cttggaggggtaatggttctcagtcagaggcagcatgaaatcattttgaaagctgcacaagaactgaaaatgcttcggttgacctgacagttcaagaaaa

SEQ ID NO: 643660 - DNA, 83 bp, Homo sapiens
cggagtccttggggacggagcagcgcgtcgtggggcgagcggcagggtggcccagttgaaatccttcccttcctctaccttgg

SEQ ID NO: 643661 - DNA, 83 bp, Homo sapiens
agaggatccaggaggaggagttgcagaggaattacatgaatgacagtcttcgaaccaatgtgtttgttcgatttcaaccagag

SEQ ID NO: 643662 - DNA, 100 bp, Homo sapiens
ctatgaggaggagtcaaggcatcaccacagcgaacgcatgcaacacgtggtccagcttccccctgagccggtgcagttggaatccacaggtttaaaagag

SEQ ID NO: 643663 - DNA, 92 bp, Homo sapiens
gccttagctgtgctcgcgctactctctctttctggcctggaggctatccagcgttgtgaccgagattcccgacgagagagactgaggggaag

SEQ ID NO: 643664 - DNA, 51 bp, Homo sapiens
aaacaacattggagttttgccggagctctgcaagtgagtctggttctcaaa

SEQ ID NO: 643665 - DNA, 90 bp, Homo sapiens
cattgctgcatcaagaaacccaagctgctgaggctgcagatcaaattacgaagctgtataatctcttcctgaaaattgatgctactcagg

SEQ ID NO: 643666 - DNA, 74 bp, Homo sapiens
caaaatcttattccttggagcaggagaggaggagatgttaaagtaacccatcttgcaggacgacattgaagatt

SEQ ID NO: 643667 - DNA, 75 bp, Homo sapiens
cgctcgctgggagagaggtacctctccttttccctctccctttccctaagtgtatgtggtagaagaccaaagaag

SEQ ID NO: 643668 - DNA, 100 bp, Homo sapiens
ggagctgttcctattgggccatcttggctccaccaccctggtgtctggaaatgaagtatggaaatgaaatcatgaataaagacccagttttcagaatctc

SEQ ID NO: 643669 - DNA, 75 bp, Homo sapiens
gagaaagtcctacaacagtttggcgtgcaacatggggcttgagaaaggctccgtggatggccgcgtgagacgcta

SEQ ID NO: 643670 - DNA, 82 bp, Homo sapiens
caagaaatcaaaataaaggaaacacatttcatatactgcaggcagctgaaaaagttggatgaagatagtttaaccaaacaac

SEQ ID NO: 643671 - DNA, 50 bp, Homo sapiens
cgaacgggttgcttcccccgctgcgagcatggtggctgtatggacagtct

SEQ ID NO: 643672 - DNA, 80 bp, Homo sapiens
cttttcatgtaccaagtcttgaagagcttgctggaggaagcagttcaggtacttttgaagcattctgcagatgttaatgc

SEQ ID NO: 643673 - DNA, 82 bp, Homo sapiens
atcctcatgttcactacccttcatgcatgaaagacaaagctactcaggccatggttgcttgttatccgggcaatggaacggg

SEQ ID NO: 643674 - DNA, 83 bp, Homo sapiens
agccaacactccagaggaggaccagaggtgtgtccagcatcatggcctcctcccagtaacttcaggtgtttaataaagatgtg

SEQ ID NO: 643675 - DNA, 98 bp, Homo sapiens
ttgagtctactctgtcgctcttgtgccctagcaccccgagaaccgtcagtttgagccagatggacctgaaggagaagaaggagaaggtggaggagaag

SEQ ID NO: 643676 - DNA, 82 bp, Homo sapiens
attgctgcagccgcttgtcagtgtgatgaagattggcacccaggtgaaagaacttgtcctggacaacagtcggtcgaatgaa

SEQ ID NO: 643677 - DNA, 105 bp, Homo sapiens
gtggcagaagtgggcaaggtggcagagaaggaaggatggcctctggacatccgagtggagccacctgagctgaagattcccttgagaacaagtactgtcctgtgg

SEQ ID NO: 643678 - DNA, 75 bp, Homo sapiens
cgacggcggcggtggcggcttggacgactcggagagccgagcaaatcatggaggaagataaaaaacatggtgcac

SEQ ID NO: 643679 - DNA, 90 bp, Homo sapiens
cggcacacgcgcagccccggcctctcggcctctgccggagaaacaggagcatcagatccatgctgctgctgactcggagccccacagctt

SEQ ID NO: 643680 - DNA, 100 bp, Homo sapiens
tgagaagggagacgacgctgctgggtccgctgagcggggcgacccgagcttagaccatgctcagcctccaagcagccttgtcatcgacaaagaatctgaa

SEQ ID NO: 643681 - DNA, 50 bp, Homo sapiens
cctatttataatctatatgcaatttcgctcctcaagagttactgatctat

SEQ ID NO: 643682 - DNA, 75 bp, Homo sapiens
cctgggtgctggcgaagcggaggccggaggaatttaaactttgggataatgagctgcagtatgtggaccaacttc

SEQ ID NO: 643683 - DNA, 96 bp, Homo sapiens
ctatagactacttctactccaccaggaaggttctggcctataggaacaagacattttcagtaatggaagaaggagcttccaggctggggaagatca

SEQ ID NO: 643684 - DNA, 100 bp, Homo sapiens
attcgcagtggtcgcttcttctccttggttcggactaaggatcaccgctttgaaagtgtcagtcaccttatcagctaccacatggacaatcacttgccca

SEQ ID NO: 643685 - DNA, 100 bp, Homo sapiens
gtacaccttagaagtgcttaaggaagagtgatgaaggttgcgggaacagtgccctgagctacgagctgttcctcggaggcttccctaatgtgaccagtgt

SEQ ID NO: 643686 - DNA, 51 bp, Homo sapiens
ccgacccggatctcaacaatcccttcaagacttaattcagtgcacaaatga

SEQ ID NO: 643687 - DNA, 90 bp, Homo sapiens
agcgaccgagcgggccgccgccgccgccatgaaccccgaatagttttttggaacgaagtggatgatgttcctcgctgtgggcatctacgc

SEQ ID NO: 643688 - DNA, 51 bp, Homo sapiens
cacatcctaagcgtctgagtgctgcaggtttttggattcaaagcataaaaa

SEQ ID NO: 643689 - DNA, 78 bp, Homo sapiens
cagcaagcttccttcctccttcatcagtgaagaaacgaggcctttccacgaagagtcctcagccttctccctccagcc

SEQ ID NO: 643690 - DNA, 90 bp, Homo sapiens
ctacgtggccatgctggccaagcagtctaccagggtcagtttgaaaaggaggatcgagctcactgtggagtatccatggagatgtggagc

SEQ ID NO: 643691 - DNA, 51 bp, Homo sapiens
gatgttactgctcaatttgaaaggtactctttgagcacatcaaattcttcc

SEQ ID NO: 643692 - DNA, 100 bp, Homo sapiens
ccccagctctgcagccacatactatccgtttgttcaggaaccaccagtgacagagcatcagcaggactcagacctctcagcagcgtgctctgacgctgac

SEQ ID NO: 643693 - DNA, 50 bp, Homo sapiens
gaaaactgcacataactccgaagcatttaaatcaaacggtattgagatgg

SEQ ID NO: 643694 - DNA, 50 bp, Homo sapiens
cgagaagacggaggaggactcagaggaggcgcagacggggaagcggagcc

SEQ ID NO: 643695 - DNA, 90 bp, Homo sapiens
ctggttctgtgtttggtcaagcagccagtactggtggaatagtctttggccagttgatgcggatgaaattaaaaggctaggaaagagatt

SEQ ID NO: 643696 - DNA, 100 bp, Homo sapiens
ctcctcggcgggagccctcgcgacgcgcccggcccggagcccccagcgcagcggccgcggtagggttctttcacagtctactcccggaactccatcaaag

SEQ ID NO: 643697 - DNA, 75 bp, Homo sapiens
tctagataaaccacagttacaaggaattccagtcacgagaagagaatgccttctagatgcaaaatcacctccaaa

SEQ ID NO: 643698 - DNA, 100 bp, Homo sapiens
agctgcattcactgcagagctcacttggccaatcatgatgaactaatttccaaggtactgaagcccagtcttcacttttgaaagcagtggctttcttctt

SEQ ID NO: 643699 - DNA, 95 bp, Homo sapiens
ggaccctggaaaacctggccctcttcaatttctgacaaaagttagggcctagtcaaaattttgaagctgagtcaattcaagataatgcgcatatg

SEQ ID NO: 643700 - DNA, 82 bp, Homo sapiens
gaaggggagcccgggacccccgggggcgcaggctttgtgccttgggcaaagggcagcttactcctggaagaggactgactca

SEQ ID NO: 643701 - DNA, 101 bp, Homo sapiens
cggccatggaggtctacatcccgtcctttcgctatgaagagagcgacctggagcggggatacacggtatctctcctctttgtcacaacctctttgccctgt

SEQ ID NO: 643702 - DNA, 88 bp, Homo sapiens
cggttttggtgaataacatcaccacaggtgagaggctcatccgagtgctgcaagattgaaggattctcattaagcaaactagggaatt

SEQ ID NO: 643703 - DNA, 100 bp, Homo sapiens
gagcagccaacacaccagcccagacagctgcaagtcaccatggacgctgaagcatgatgccttcttctgtagagtgggcgctttgcagaatacgtgttga

SEQ ID NO: 643704 - DNA, 74 bp, Homo sapiens
cgtggattcagcgcgatgcccaaatccaagcgcgacaagaaaggctcaaaactgaaggagatctttgacaagat

SEQ ID NO: 643705 - DNA, 100 bp, Homo sapiens
ggaggattgtaaatgcaccaatcagcatgctgtgtctagctcaaggattcttactacagatttaatgaccttaactacagatgggtctctttggataact

SEQ ID NO: 643706 - DNA, 100 bp, Homo sapiens
ggcgtgcgcggacggtgtgcgggattcactccttctccagttgcacagccacacccttcagctggccttaatgttgactttgaatctgtgtttggaaata

SEQ ID NO: 643707 - DNA, 96 bp, Homo sapiens
aaacagaaggaagagctgaacgtttagaggcaacagaataccttgtctcagctgctgaagctggtgttcctccaagaaaagctggttatattgaag

SEQ ID NO: 643708 - DNA, 109 bp, Homo sapiens
caacaagtaggagcgctctctccctcagctgtgtcatctgcagcccctgctgttgctacaactcaggagagctggaggtgtttcagaaagatggggaacgaaaaattca

SEQ ID NO: 643709 - DNA, 100 bp, Homo sapiens
atgagctcaatcggcactgggtctgcgggccaggcatcgacatccgcaacgactatcagcagctgaagcgcctggagaactgcacggtgatcgagggcta

SEQ ID NO: 643710 - DNA, 98 bp, Homo sapiens
aggcattgaggactttccttacctgtttttccagctcacccactgccagcagagcatacttccacaggctgcactcgaggagatccacaaattctcag

SEQ ID NO: 643711 - DNA, 75 bp, Homo sapiens
aaagataagaagagaaaaagagaagatgaagaaacccagcttgatatgttggagaataaaggcagccccgttgat

SEQ ID NO: 643712 - DNA, 114 bp, Homo sapiens
gcggaacctgcggggcagaggcggcggccgcagcggcgcagctgatagcaggaacagacctatgtgcccaccgtgttcgaaaattacacagcctgtttggagacagaggaacag

SEQ ID NO: 643713 - DNA, 73 bp, Homo sapiens
accaagagggtgttcgactgctagagccgagcgaagctttcactgttacatgccttgaagtgatgaggaggtt

SEQ ID NO: 643714 - DNA, 82 bp, Homo sapiens
cgggacagcggccccctggagggggcagtcccgggagaacctgcggcggccggagcggtcacgagaagagaatgccttctag

SEQ ID NO: 643715 - DNA, 96 bp, Homo sapiens
gagccccgccaggaccatgcccactgctgtgttgaaatgggtctcagcatgatcaaaaccatcagggtgtgtccgcagccggccaggtggtatccc

SEQ ID NO: 643716 - DNA, 83 bp, Homo sapiens
ccttggagttcttgagaaaggattgcgccaacgtcaatggtttactcctggcttgggggcattaggaagcactggaggctctt

SEQ ID NO: 643717 - DNA, 100 bp, Homo sapiens
ttggcattttagatctaattcaagagtgattcgggaaagttacctcaaaggccacgaccagctggttcccgtcaccctcttggccattgcagtcatcctg

SEQ ID NO: 643718 - DNA, 100 bp, Homo sapiens
gtgttccttccgctagtgatcctttgcaccctgcttggagacggacttgcttccggttatcaagttatacccaaccagcagcaaaactaccaaggaatag

SEQ ID NO: 643719 - DNA, 90 bp, Homo sapiens
aactggcaaggagaagctcccgcggtactacaagaacatcggtctgggcttcaagacacccaaggaggctgaggcaggagaatcacttga

SEQ ID NO: 643720 - DNA, 116 bp, Homo sapiens
ctcgatctaggttctgcggcacgggatggcggaggcgcctcctgtctcagctggagaatgctggaggagaccttaaggatggccaccaccactatgaaggagctgttgtcattctg

SEQ ID NO: 643721 - DNA, 139 bp, Homo sapiens
caccagcggctgcaggactgggcacagcatgagatccaaaggcagggcaaggaaactggccacaagtttatcaggtagaagatgtgtgtgaagaagaaatgccagaagagtcagatgaatgtgtccggatggatagaac

SEQ ID NO: 643722 - DNA, 74 bp, Homo sapiens
ttttcaagggagctgataaagaacttcttcccaaaatgggctctgaagagtgttgtactctatgttatcctggc

SEQ ID NO: 643723 - DNA, 50 bp, Homo sapiens
cctcccgagaagaagttgaggcgctattgtcctcagcctgcgggggctgc

SEQ ID NO: 643724 - DNA, 73 bp, Homo sapiens
ttgagggggggctctgtcagacatgccgggtacatccccaccgcagctgcgtttggcggtttgtgcattggcg

SEQ ID NO: 643725 - DNA, 98 bp, Homo sapiens
tttctgcgccatcctgcaccgccaccggcccgacctcatagctgaagaagcaggtggagagtgccgagctgaagaaccagcggctcaaggaggttttc

SEQ ID NO: 643726 - DNA, 101 bp, Homo sapiens
aaggaaggcatggaaagttccagccggttcgagagctaggctcttgtcaggatggtgaagctgttcatcggaaacctgccccgggaggctacagagcagga

SEQ ID NO: 643727 - DNA, 75 bp, Homo sapiens
aggaagcagtactattcaagagttctttatagctccaagctctacagattcttcaaatatattgagaatagggat

SEQ ID NO: 643728 - DNA, 101 bp, Homo sapiens
tccggagcttctcagaagacagagggttttcttttgagcgtttagtcacatcaagaaatagaacagaattcagccatggccccaagaaagagaggtggacg

SEQ ID NO: 643729 - DNA, 97 bp, Homo sapiens
gatagcacctggaaccaaacaaacaaaatattcactgatgagcgacttcaagaacttcgagaaaccaagacctctgaatacttcagcctttcccacc

SEQ ID NO: 643730 - DNA, 82 bp, Homo sapiens
ccagctggaggacgacggcgagttctacatgatcggctccgagggctggaccccaatggagaacaggtggtgtggcaggcga

SEQ ID NO: 643731 - DNA, 82 bp, Homo sapiens
ttttacctcagccaccgagaaggctacggcaccatgtacatgaagacacggcttttccaggcacctgaatggacagaagagg

SEQ ID NO: 643732 - DNA, 100 bp, Homo sapiens
tggatgtttcacagccaggcagtttatgatattaacagactagactccacagccgagaccgacccgcccgcccgcggccccgcagcagctccaagaagga

SEQ ID NO: 643733 - DNA, 75 bp, Homo sapiens
tggggtggcagcctgccacatcgggggcaccaccctccatgcctttgcagcctgagagacactctcgtaagttac

SEQ ID NO: 643734 - DNA, 90 bp, Homo sapiens
aaaacatcgtggccaacacggtcttgctgaaagccagggaaggtgctcaggaacagcccatggaagaatcatatgaagaggtggtgactg

SEQ ID NO: 643735 - DNA, 75 bp, Homo sapiens
cgcagagagtaatgctgaacttaaggagtgattcgggaaagttacctcaaaggccacgaccagctggttcccgtc

SEQ ID NO: 643736 - DNA, 76 bp, Homo sapiens
ctttgtgaagactattttaaacctccatttggaccatatcctgaaaagaggtttgaaagagaagatagtgaggagc

SEQ ID NO: 643737 - DNA, 100 bp, Homo sapiens
aagtccaagtcaaacgcagaaggactgcctcactgagcaaccaagacccgtgctttgaagaagaggagcacttcaaggtgctggtgaagatgaccgccca

SEQ ID NO: 643738 - DNA, 75 bp, Homo sapiens
gcgcggaatcggggagcgtccggagctagctggatcctctaggcaggtaggtagccatccaagcttcctgaagga

SEQ ID NO: 643739 - DNA, 75 bp, Homo sapiens
gccggggggtcgacatgcgtcttccctgacaagaagtccgaaggggatgatcggctgaatgtaacagaggaacta

SEQ ID NO: 643740 - DNA, 80 bp, Homo sapiens
gcagcctccacccaccggcccaccctacatttagcgcatcatgtgatccgggcaaggggagagccagttgcgcagagccc

SEQ ID NO: 643741 - DNA, 75 bp, Homo sapiens
caacaccaaaaagctttctgctagggagttcttcgtaagtacatcttaaagctgtcaagatggttctagcagacc

SEQ ID NO: 643742 - DNA, 100 bp, Homo sapiens
gggcgaggcgcagggctctcccacacttcgcgccgccaatggcaagttggagggagagatgcaaataccagggtctctcattcatcacttttatctgcta

SEQ ID NO: 643743 - DNA, 97 bp, Homo sapiens
gcactcaaaagcaagatatactactaactttgaaatggaataaggaacttagtgatttggcccgtgaccctccagcacaatgttctgcaggtccagt

SEQ ID NO: 643744 - DNA, 82 bp, Homo sapiens
caccgctgccctcagctccgagtccagggcgagaacccagcgggtgccgcttctccacccgaggcttccacctccaacgagc

SEQ ID NO: 643745 - DNA, 75 bp, Homo sapiens
ttagtgcacaccaccacacctaggacgggctctacgagtgcattctctgtgcctgctgtagcaccagctgcccca

SEQ ID NO: 643746 - DNA, 51 bp, Homo sapiens
aacactacaagtccacggtgggagtaatggaggggaaagttccagtcgcag

SEQ ID NO: 643747 - DNA, 90 bp, Homo sapiens
gttaaacatagatgtagctgatgtggagagcttgctggtgcagtgcatattggataaactttattacaactaccacctgctatggtagaa

SEQ ID NO: 643748 - DNA, 82 bp, Homo sapiens
accatcattgcatttacctcggatcatggccaataacggaaaactgcctgacaacaaagtcattgctagtgaactaggcagt

SEQ ID NO: 643749 - DNA, 100 bp, Homo sapiens
ggagatggaaatctggctgagtgtgaaagcaggggaaatgctgtctgtagctgagcacttcctggagcagcagatgcacccaacagtggtgatcagtgct

SEQ ID NO: 643750 - DNA, 100 bp, Homo sapiens
ggaagattgagtcgctggaggaggagatccggttcttgaggaagatccacgaggaggaaatccaggagctgcaggctcagattcaggaacagcatgtcca

SEQ ID NO: 643751 - DNA, 100 bp, Homo sapiens
ctgcaactatgccagcaaaggaacagcccggcttattgaacacatcagaatccacacagacgccacaggtcatcatctggatcatcccattctggttccc

SEQ ID NO: 643752 - DNA, 83 bp, Homo sapiens
agaggccatgctgacctacaagcagaagagatgtgaagttcatttccaatccgccctccatggtggcagcggggagcgtggtg

SEQ ID NO: 643753 - DNA, 75 bp, Homo sapiens
ttctgcctcgggccctgcccctacatttggagcctggacacgcagtacagcaagagcaaaccctggaagaagctg

SEQ ID NO: 643754 - DNA, 83 bp, Homo sapiens
caaaaaacgtgcgtgtgctcaaatgtgggcacaagtatcacaaaggggccataaagaatgctgatgggagaaccattttccta

SEQ ID NO: 643755 - DNA, 101 bp, Homo sapiens
atgctattgagttaaatgcagccaattatacagtgtgttgcaggaagaggcagaggaagaggaagaggaagaggacgtggccgtggcagaggaagaggggg

SEQ ID NO: 643756 - DNA, 89 bp, Homo sapiens
gcggccaaaggggacctcggcgcagtaatgtcaacatgaatgtatcctgtcaggtataatgtcagtgaatggcaagaaagttcttcata

SEQ ID NO: 643757 - DNA, 98 bp, Homo sapiens
gttcctgctccttctacatctgcagataaagtggagaggatgtagtaactggagttagtcccctgctcttcaggaaactcagtaatcctgacatattt

SEQ ID NO: 643758 - DNA, 74 bp, Homo sapiens
aggtatccgagttcttcaggaggcacgaggtctgatgaccctgtcgaagatgataaagaaaaaaaagaacttgg

SEQ ID NO: 643759 - DNA, 100 bp, Homo sapiens
tgtgcagccgggccggggacaggggcagggatgtgctctccgcggtgctttccggcatggggaccgcctacccacagcctccaatatcgataatgttgtc

SEQ ID NO: 643760 - DNA, 82 bp, Homo sapiens
tgcccttcaccgcgggcgccaatggggagcagaaggactcggacacaggctctgacgcccgctctgcggcttcggtgtttga

SEQ ID NO: 643761 - DNA, 100 bp, Homo sapiens
gactcgagcgccctgccctggtccatcaacagggacgattacgagctgcaggaggtgatcgaaatgccagatctggagtaaggaatattgtcatcacctg

SEQ ID NO: 643762 - DNA, 96 bp, Homo sapiens
tcgcagaagcctacgctaccaaaggttttgatgatgatggttcagaatttcatgaacatatatttctggagaaacacctggagagctttccaaaac

SEQ ID NO: 643763 - DNA, 83 bp, Homo sapiens
ctcaatatctgtcttcggtggactccttcggcagtccacccaccgccgccgcctcccagatccggaacatggtggcggtgctg

SEQ ID NO: 643764 - DNA, 100 bp, Homo sapiens
taccttcagaaggagacttccactttgcaggtggaacagaatggggactatggtaggggcagaccattaaaaatctcaagtgacgactttgggaaactct

SEQ ID NO: 643765 - DNA, 95 bp, Homo sapiens
cccgcggccgctcaaagccgggagatcgactgtttgagcccggaagcgcagaagctggctggcgcccatgcggctctacacgctctccaagcgcc

SEQ ID NO: 643766 - DNA, 74 bp, Homo sapiens
tgatgcggtggtgggggacctgccggcacgcgactccccccgggcccaaaaggctgggaggcggcagaatgcag

SEQ ID NO: 643767 - DNA, 98 bp, Homo sapiens
ggaaaatggcggacgggaaggcgggagacgagaagcctgaaaagtcgcagcgagctggagccgccggaggctgggatatgaagaacaacagcctgagg

SEQ ID NO: 643768 - DNA, 100 bp, Homo sapiens
cgtattcttttagtggaccaccagagcaaaagcggcgccaggaaattgaacaaaaacttgaagttcaggcagaagaagagagaaagcaggttgaaaatga

SEQ ID NO: 643769 - DNA, 100 bp, Homo sapiens
ccgaggcccccaggacctccatctcccaatgttggagcatgtccggcatgatttcgggtggcaacaaccccttgggaactcccggcaccagcccctcgca

SEQ ID NO: 643770 - DNA, 74 bp, Homo sapiens
agcgtgtccggcttcgaggagttccaccgggccgtggaacagcacaatgtgtctttggtgcaacactaacaagg

SEQ ID NO: 643771 - DNA, 50 bp, Homo sapiens
agacaccctgcagatcctcatggaaaactctctgcagaggaattagagcg

SEQ ID NO: 643772 - DNA, 90 bp, Homo sapiens
gcagctgggcctgaccaacccgaaaacattgctaggctcagccgcccagtgggctcaggcccagagcccagagcaaccagcacaatagcg

SEQ ID NO: 643773 - DNA, 98 bp, Homo sapiens
cggcagcaagggcggcggtggcggcggcggcagctgcagtgacatgtccagcatgaatcccgaatatcttgtgaaaatgccattgtgtgctggaaacc

SEQ ID NO: 643774 - DNA, 78 bp, Homo sapiens
tgtggacactgcattgagtttttaccatatggctggagcatctcttgataaagtgctcaatggtgcccaggctggagt

SEQ ID NO: 643775 - DNA, 95 bp, Homo sapiens
actgagcctgttggaggaactggcccggaaacaggaggacgtttggtgcacctcgatttggaggaagtagggcagggcccttatctggaaagaag

SEQ ID NO: 643776 - DNA, 140 bp, Homo sapiens
cacaagaacaagaagattggaagaaatatattactggcacagatatattggatatgaaactggaagacatcctgcttctcaataggtttggcatggacaagatctatgaaggccaagtggaggtgactggtgatgaatac

SEQ ID NO: 643777 - DNA, 100 bp, Homo sapiens
gggaagaaggtggaggtggagccgcccccagatcggccagtccgagcgtgccggacacagccagctttagcgtcacctccctcactgggcagcatggggg

SEQ ID NO: 643778 - DNA, 119 bp, Homo sapiens
catcgacaaaagaaccattgaaaaatttgagaaggaggctgctgagatggcttcagtgacagatggtaaaactggagtcaaagatgcctctgaccagaattttgactacatgtttaaac

SEQ ID NO: 643779 - DNA, 51 bp, Homo sapiens
gaaaaaatggttgacctcacccaggtgtggctgcccggactcctgctgttg

SEQ ID NO: 643780 - DNA, 97 bp, Homo sapiens
gtctatgattccttcagataccagggactggcgccaagcccatctttgtgtgcttgcatccaactgtgatgagcctatgtatgtcaagttggtggag

SEQ ID NO: 643781 - DNA, 89 bp, Homo sapiens
gcatcgtcctcagcgcctggggagtgatcatgttgagtggcagacgaaatgttgatttggatttggcagcatctcacagaaagagaggt

SEQ ID NO: 643782 - DNA, 96 bp, Homo sapiens
aattcttttcccgagaggctgacaatgttaaagacaaactttgcagtaagcgaacagacatatctgaagagatggattaagaatgctttggattaa

SEQ ID NO: 643783 - DNA, 96 bp, Homo sapiens
tgagcactattttggattagtcaatgacccctcgtccagtcattgtggaacccatggagcagtttgatgatgaagatggcttgccagagaagctga

SEQ ID NO: 643784 - DNA, 74 bp, Homo sapiens
gctcaccctcccgagttgaaaaaaggactactgagcccagccaggctgtatgccattgctgccaaagaaaaaga

SEQ ID NO: 643785 - DNA, 100 bp, Homo sapiens
ggaaatgcctggaccctgctcagaggactctatacagggacgtgatgctggagaattataggaacctggtctccctgggaacagcatatgccatatatga

SEQ ID NO: 643786 - DNA, 98 bp, Homo sapiens
gcgaagtcatggggctctgtcgggaaggtgtttttccacagcaggaaatgatgcagttgaagaaatggtctgtgtgtctgttctcaagctctggcaag

SEQ ID NO: 643787 - DNA, 51 bp, Homo sapiens
catcagagtgtgggggttgtgaaagcaagagctttttaagattctgcatag

SEQ ID NO: 643788 - DNA, 75 bp, Homo sapiens
catcagccccaaacaggacgaaggcgtgctgaagctacgagttccagggagctctgtcctggtgaccgtgcccgg

SEQ ID NO: 643789 - DNA, 73 bp, Homo sapiens
ttccagagtcactgtggatagatccaccattgcaagacatttgctcaggtctggtgtcggcgcgcctgttatc

SEQ ID NO: 643790 - DNA, 82 bp, Homo sapiens
cagaccctggagcctcagttggaagcagccgatccagcctgcggagcctgtggggcaggtggacacctgcgcaggtgtgtgc

SEQ ID NO: 643791 - DNA, 100 bp, Homo sapiens
ctgcagttctctatccttcacacagctgctgtaagtaaagatgattccattatttcaagtcttgatgtcactgatattgcaccaagtagaaaaaggagac

SEQ ID NO: 643792 - DNA, 115 bp, Homo sapiens
gcggcggtggcggcggcggcagctgcagtgacatgtccagcatgaatcccgaataacacttcgtgtatgatcatgtgttcgctgagaagatcacttccttgcaaggtcagccaag

SEQ ID NO: 643793 - DNA, 101 bp, Homo sapiens
gggacctgtcccacctggcggccatcgtcatcctgctgctgaagatctggaagacgcgctcctgcgccgggcaattgaaggaacagactaaaaatcgtgtc

SEQ ID NO: 643794 - DNA, 90 bp, Homo sapiens
tcaaagggtggtgaagaactaagttgtattccctgaatgactataaaccacccatttcgaaagcgaaaatgacccaaattactaaggcag

SEQ ID NO: 643795 - DNA, 50 bp, Homo sapiens
tttttctcagaagagaattccacaagaatgtgacagtgatgataacatgg

SEQ ID NO: 643796 - DNA, 110 bp, Homo sapiens
gctttgttccaataattttgtgctcggcaggatggggaagcagaatagcaaactggcccctgaagtgatggaggacctggtgaagagcacagagtttaatgagcatgaac

SEQ ID NO: 643797 - DNA, 80 bp, Homo sapiens
cagcgttcacctctctgcgcccaaacggatcttgagacggtttaagcggaagcatcttactgccattgactgccagcatt

SEQ ID NO: 643798 - DNA, 100 bp, Homo sapiens
aagtgttctttatggctgtagatggtgtggctcctcgagcaaaaatgaaccagcagcgtgggaggcgttttagtgataatatgcagcatgcatactggga

SEQ ID NO: 643799 - DNA, 90 bp, Homo sapiens
accccactgctggggtggtggttccaatgagacagggcacaccaaactccatctggacgtggcccagtggaacatcgggagcctccggac

SEQ ID NO: 643800 - DNA, 88 bp, Homo sapiens
cagattcgcagtggtcgcttcttctccttggagttagccctgcgtagccagttaccaacactggagcaggatggtgggactcaaaatc

SEQ ID NO: 643801 - DNA, 75 bp, Homo sapiens
ccgtggtgacattgtatcattggtgtttgcctgcaatgagatttcattctctacatttaaaggacatcctttctg

SEQ ID NO: 643802 - DNA, 82 bp, Homo sapiens
gtcgcctgttaattaatgctgatcccttcaactctgaaccagaaaccctcccccaggacgtgctgctgaggacacaggtgcg

SEQ ID NO: 643803 - DNA, 100 bp, Homo sapiens
actttgcacattatgaaaagcgtcaagaagaggaggaagccatgcgtaggacttgtgcaccatggacaattttgctgagggagatttcactgtggcggat

SEQ ID NO: 643804 - DNA, 87 bp, Homo sapiens
gccggtgccagcacctttcggcttctgagacggcggcagcagcggcattcagtgagaaggcaaccaaagtgcaggacatcaaaaaca

SEQ ID NO: 643805 - DNA, 100 bp, Homo sapiens
tgggggtgtgcaaacccgagagaactgggaaggaaaatcacctcggcagtgtttgaaggaaggatactgcaactctttgaagtacgcattttttgagtgt

SEQ ID NO: 643806 - DNA, 100 bp, Homo sapiens
cactgctttgaatgctatggctacgacatcatcatcgacgacaagctgaagccctggctgatcgaggctttcagtccagtgtaaagctgttggagcgcgg

SEQ ID NO: 643807 - DNA, 74 bp, Homo sapiens
tttggagttcttacaacatggcagacattgacaagtgacctgagcatctctgcagaccgcctgagtgagaagcg

SEQ ID NO: 643808 - DNA, 75 bp, Homo sapiens
cctccttcttcctcaactatctcgctgacacgcaggtaactaggatttctacctcaaccgcgagacctatgcaag

SEQ ID NO: 643809 - DNA, 90 bp, Homo sapiens
cgacggagcctttgggaaagtgtacaaggaataggaggccttcaagattttgtgctgaaatctgcaacactgtgtagcctgccatcctgc

SEQ ID NO: 643810 - DNA, 76 bp, Homo sapiens
tgttctcattagagaccccatcagagggcagccagaagctcagatggatgctccaccactctctccttttccacat

SEQ ID NO: 643811 - DNA, 91 bp, Homo sapiens
ccccggcgctccgtgcgcggagccgtctgcctgcatctgctgctgaccctcgtgaaagcatatgcttacgcagatgaagatgaaggacgcc

SEQ ID NO: 643812 - DNA, 100 bp, Homo sapiens
aggaggccaaggcgccagtgagaggcggtctcctctgagcctccggcctccataagacccaaaacagatgacacctcttcccagtcccccgcgccttccg

SEQ ID NO: 643813 - DNA, 82 bp, Homo sapiens
tggaagagtgccaggcggccctacaaggtgaaaagttcggaccctttgctggagagaagagaatgcctgaagacttggatga

SEQ ID NO: 643814 - DNA, 75 bp, Homo sapiens
ctggcagaaacagaggactaattttggcagttctaaatttgaatttgagagacgagttgtactgctgtcacagga

SEQ ID NO: 643815 - DNA, 100 bp, Homo sapiens
atgatgcccctgaagatgtgcacctagggggcggctaccccgtgggggtgaagttgaacaaattgctatgatgaaaccaaaaggccagactgaacacgat

SEQ ID NO: 643816 - DNA, 100 bp, Homo sapiens
agcatggctacttcatattttggaaagcagtttttaagacaaagagcagcacttgaggcatgtcacaagggctggggcgtcagcgtcgtggttggagtag

SEQ ID NO: 643817 - DNA, 101 bp, Homo sapiens
gggaattggccaatatgatatacaagacaaggtgaagcctcggaaggaaagtggagaatgaggacatgaataaagaccagatcttgctggaaaaagaagct

SEQ ID NO: 643818 - DNA, 90 bp, Homo sapiens
attaaaggagtcatacctgataccagaacttgtccgtccagctacgactttgtatcagcataacttgactggaattctagaaaccgctgt

SEQ ID NO: 643819 - DNA, 75 bp, Homo sapiens
ggagccgaggcgcaggtggcgctggaacccttaggagaaatcttgagagtggacagcaattgtgaagatcgccag

SEQ ID NO: 643820 - DNA, 49 bp, Homo sapiens
agccactagtgggtttgccagtggaatttcaccagtgatcattaaagaa

SEQ ID NO: 643821 - DNA, 89 bp, Homo sapiens
ctgtaaaagaatacccagatgttggtgaaagatgctccttgggatgaggtcccgcttgctcactccctggttggttttgccactgctta

SEQ ID NO: 643822 - DNA, 100 bp, Homo sapiens
aatacagtaatggacaggcgggtgcgatagaacatgatattttgctcatcaacctcattatagaacatatgatttgtgatacagatcctgaacttggagg

SEQ ID NO: 643823 - DNA, 83 bp, Homo sapiens
tcaagatctcagagaaggaggaggtgaccacgcgcgaggtatcacctcttctgggctcaagatggacaacaagaagcgcctgg

SEQ ID NO: 643824 - DNA, 100 bp, Homo sapiens
ggaagactggtctaggtgctgctcctgaacttggtctctgagccatggcttcccatagacactcaggaattccagagacgctgtaacactctgatttcat

SEQ ID NO: 643825 - DNA, 98 bp, Homo sapiens
agcagcgaaagatcctactggacatgtcagtgtcctttcacacccatgtgaaagagggatcgcttacacctgagacgaactacagaacagcacgtacc

SEQ ID NO: 643826 - DNA, 51 bp, Homo sapiens
cgaacatgcgcttttgacacattggaggcactacctggcagcaccatctaa

SEQ ID NO: 643827 - DNA, 111 bp, Homo sapiens
ggacatctcgacaagtgggtgaacgtacgttaacggggatagtcattgacagcggagatggagtcacccatgttatcccagtgatggagtttcgctcttgttgtccaggct

SEQ ID NO: 643828 - DNA, 75 bp, Homo sapiens
tggtcaaagaaaagatgatcacaattgaggaagcacttgctaggatcaaaggtccatcatcaaaacaccaaagac

SEQ ID NO: 643829 - DNA, 82 bp, Homo sapiens
accagtaaaatatggtgaactcattgtcttagggagaccagtatgatgtctgtgccatttgcctggatgaatatgaggatgg

SEQ ID NO: 643830 - DNA, 100 bp, Homo sapiens
cactgtcagggaagaagcgcagaaaactcctccagcagatccggcttgcccagaaagagaagacagccatggaagaagctgccagtaactcagattctag

SEQ ID NO: 643831 - DNA, 75 bp, Homo sapiens
tcctctgaagatcgacctactggattagttgtactgttacaagcatcctcagttccaagttcttcgatttgattt

SEQ ID NO: 643832 - DNA, 101 bp, Homo sapiens
cacacgcccggtgaccatcaaatctgtctgcactccaattctaccaggatggctctcttcgctggtggcaaactgccattatcaaaactgcatgccaatgg

SEQ ID NO: 643833 - DNA, 100 bp, Homo sapiens
tgggaagtggagcaccgatgatgtgcagatcaatgacatttccctgcagacttcctagcatgggctgttgtgctggagagaacgagagctacgaagagac

SEQ ID NO: 643834 - DNA, 83 bp, Homo sapiens
acaacttcagaaaatggaatacattctgaatttagaggtatgggaggacatggctatggtggagctggtgatgcaagttcagg

SEQ ID NO: 643835 - DNA, 74 bp, Homo sapiens
ccaattcaacaatcaaaaagaaagctgctgttatcatcatggctgtagagctctttacacgctgtcttacaccg

SEQ ID NO: 643836 - DNA, 100 bp, Homo sapiens
attttgctgtctcctcctaatacgtgctgaggaatgtaaacaagtttgctgggccttgcgagacttcaccaggttgtttcgatagctcacactcctgcac

SEQ ID NO: 643837 - DNA, 75 bp, Homo sapiens
acatcagaggaataatgtggggaggccagccagtcggtctaatttgaaagaaaaatgtaaggggtgaattcactt

SEQ ID NO: 643838 - DNA, 95 bp, Homo sapiens
actgtcgtatcctatatcatgcagagaaaagagatggaaacttacttgaagaaggagtctgaggggggcctctacatctgtatgaacacgtttct

SEQ ID NO: 643839 - DNA, 101 bp, Homo sapiens
cagcagttgcaccctgttttgcaaaaaccatcagtgtttgggaatgattctgatgatgatgatgaggccgaatacatcaagcaatggtaacatctttaaat

SEQ ID NO: 643840 - DNA, 100 bp, Homo sapiens
tttgctcttccatccgcctttgatcgtcttcctcttcagccatccagattgttcttccgatgcattagaagtaaggcagaggggaaacgctggtgtggaa

SEQ ID NO: 643841 - DNA, 95 bp, Homo sapiens
agctccgagtcatcgcgtctctccacagagccatccagcgaggtggtgatctttgtgaagtctgtgcagcggtgcattgccttggcccagctact

SEQ ID NO: 643842 - DNA, 101 bp, Homo sapiens
cggagaccgagggggagccccgcgcgcggcgtcgccctaccacttatgtcttggatgaagatgaacctcgattccttgaagaagttgattacagtgcagaa

SEQ ID NO: 643843 - DNA, 75 bp, Homo sapiens
gtctaaacctgtgaccacccctgaagaaattgcacagagtctagaaggaagctcataccgggggagcttgaaaga

SEQ ID NO: 643844 - DNA, 51 bp, Homo sapiens
ctttgatccagaacttgcagcaacaatagaagatggcagtgaacgtatact

SEQ ID NO: 643845 - DNA, 74 bp, Homo sapiens
cagcccaagatggccgacttcgatgatcgtgtgtcggatgaggagaagtaacaacatgctgtaccccaaggaag

SEQ ID NO: 643846 - DNA, 100 bp, Homo sapiens
ctcgcttcctgctcgacctgcggcagtacttggatagtagttcctcagggaagaacagaaaagaggaaagttatatatttgagtcaaagggtgatggagg

SEQ ID NO: 643847 - DNA, 83 bp, Homo sapiens
gggttttcttagccctctacttttcaagacaccaagtgagaggccaaccagtggagtacgacaaggagttctcccctcgtcag

SEQ ID NO: 643848 - DNA, 82 bp, Homo sapiens
gaacttgtacaaacaggacctgcctaattaccttcaaacctgactgcaaaattcaaaatggggctcaaggtattcgtttcat

SEQ ID NO: 643849 - DNA, 80 bp, Homo sapiens
cccagctggagcaggaagctgggaaaccacaaaggaatggtgtcagaaactatttaaaagaagcactggtgaatataatt

SEQ ID NO: 643850 - DNA, 99 bp, Homo sapiens
gtttgatgtccggctgagtgggaagaccaagacagtgcctggataccttcgaatagggttggatggcaagcatgtggtgtttggcaaagtgaaagaagg

SEQ ID NO: 643851 - DNA, 75 bp, Homo sapiens
ttttggaggaggaggaaggatgcagagagaaaggagaggcatgcccaagagaatcgtaaatgcaaaaattgcttg

SEQ ID NO: 643852 - DNA, 97 bp, Homo sapiens
tgccggacccgatgagctcgggagtccaccatcgctctgcaagccgcagacaatgcagatcttcgtgaagactctgactggtaagaccatcaccctc

SEQ ID NO: 643853 - DNA, 100 bp, Homo sapiens
attgctcctggagcagttgtatgtgtagaaagtgaaatcagaggagatgtaactatcggttttcctttggaatatggataaatacaccatgatacggaaa

SEQ ID NO: 643854 - DNA, 50 bp, Homo sapiens
ccgtggtcaagttcaccatgagaggatgagcctgaagtcttgacagaacc

SEQ ID NO: 643855 - DNA, 88 bp, Homo sapiens
taaaagacagtcctcgtcagcactgactttcagctatggaatcgacactattttagaggctgaggatacatcagtgaacaaaagaggc

SEQ ID NO: 643856 - DNA, 90 bp, Homo sapiens
gggttatagccatgtgactgatcttcgtccaagaatatgtaaagaaaaagtgttgagttggcttttaggagcatttcctccctctgctat

SEQ ID NO: 643857 - DNA, 100 bp, Homo sapiens
cattaacctgcgagaagtcatctgcacgtccaggaatctgctggagcagcaaccactgaggccctctcacctccaaagacacccagcctcctacccccgc

SEQ ID NO: 643858 - DNA, 100 bp, Homo sapiens
actctttaattaaagagacatgaaatgacaagattttaaaaaaatcccatgaggagaaggcattctaatttaggaatgctgtctctgcaatttgagagga

SEQ ID NO: 643859 - DNA, 75 bp, Homo sapiens
tccggaggccagcggccgggatagccccggcggagcccgcagcttccctgccggacatggcaaccacagagagag

SEQ ID NO: 643860 - DNA, 100 bp, Homo sapiens
cacaatgcccacctccgcggcccaccaccaaagctcatccctgtctctggaaagctggagaagtttgaaattggcacaatggaagaagctggaatttgtg

SEQ ID NO: 643861 - DNA, 98 bp, Homo sapiens
cctggccagcaggaagtcggatgccatcttcagagctgccaagaaggacctgctcaccctgatgaagctggaacaccaggagcagcactcggagggcc

SEQ ID NO: 643862 - DNA, 75 bp, Homo sapiens
tggctggactgcgacaaggagggggagaacatctgctttgaggacctaaagcgattcttgtataaaaagttacca

SEQ ID NO: 643863 - DNA, 98 bp, Homo sapiens
ccagtgtgctgcaggctgcacaggcccccgggagagcgactgcctgctgaaagacgatgacaagcttatgcttctcctggaaataaacaagctaattc

SEQ ID NO: 643864 - DNA, 90 bp, Homo sapiens
aaacaattgaaggagtctataacacagttccccctactgagacagttcctcaggtcaaaaaagaaaaacatagcacacaagctaaaaata

SEQ ID NO: 643865 - DNA, 75 bp, Homo sapiens
cgggcgccccgagctgcccccgcaggcccacggtctcggcgtagacggcatggatgagttgatggaggtgtcttt

SEQ ID NO: 643866 - DNA, 100 bp, Homo sapiens
cagaggaggaatatggcgctcttaggcagccgagcggagctggaagcggacgaggcaactactctaagagtgaggaaattagaagaaaacattgaagcag

SEQ ID NO: 643867 - DNA, 100 bp, Homo sapiens
tgtccttccaacggggtgacctcatccgtattctgagcaagcaatctgcacatcgtgctgccacacgaggcttcattcgttatggctggcgctggggttg

SEQ ID NO: 643868 - DNA, 95 bp, Homo sapiens
attctgatgaagaagttattcaagatggtttccaatacttatctacaggaatcgccatgaccccagctctgagggaggcaacagcaaagggtatc

SEQ ID NO: 643869 - DNA, 100 bp, Homo sapiens
cttttgcccggggaaccaaagctctcatggatgaggtggtgaaagccacttctaggggctgcatcaccatcatagctttgttgacgaggaccttcactga

SEQ ID NO: 643870 - DNA, 82 bp, Homo sapiens
aggtggagcccctacagaaggtggagcccgggcgggtcagtttgctgagaacgaaaccaatgaggtcaattttagagagata

SEQ ID NO: 643871 - DNA, 90 bp, Homo sapiens
ctgacaccacaccattgcgaacatcggaggatctggtaaagtcagtgataaatcttttgtttgctgcatatactggagatgtgtctgcac

SEQ ID NO: 643872 - DNA, 95 bp, Homo sapiens
cagctggcccctgcgactcgcgggtgtgacgttgaagatgtcggccttctgagccgactgcggtggtcaagagtgatggtcattgtcctccagag

SEQ ID NO: 643873 - DNA, 76 bp, Homo sapiens
aaagcctgaatttcaggatctttcaggtgaccaagaatatggcccaggtgaccaaagccctggacaaggccctgag

SEQ ID NO: 643874 - DNA, 74 bp, Homo sapiens
cggaccccgaggatcaggaaaaactatggtaacaaacctgaatttggcaactggcatcataaacagaagcagtg

SEQ ID NO: 643875 - DNA, 101 bp, Homo sapiens
agaagacgaggcagacgtggctcctgctgcacatgtatgacagtgacaaggtgaatgtaaaagctttaaagagaaattcatgaagtgtcttcataacaata

SEQ ID NO: 643876 - DNA, 100 bp, Homo sapiens
cagctggttgtagagacgtagcaggagacatttctgggaatatggtagatggatatagagattttttttgaagaagcaggatgctgatctaaacgtggaa

SEQ ID NO: 643877 - DNA, 50 bp, Homo sapiens
atctaaaatacgaaggtttctggctggccccacagccaagctcttcagga

SEQ ID NO: 643878 - DNA, 102 bp, Homo sapiens
tgatcctagacctggtcgtactaatgtccagcagacaactgatctagaaataccacccccaggatggcacatttcctagaggcagaatcctacaacttccac

SEQ ID NO: 643879 - DNA, 100 bp, Homo sapiens
atggaattatggtaccctccctcaggtccagtggcattgcagagcacggatggttgcaggagccaacttttacattgttggacgagaccctgctggcatg

SEQ ID NO: 643880 - DNA, 75 bp, Homo sapiens
tctgctgtgagctgagtcttggcctgtggccagggatgtgtttggccaaatgggagagtggttacaacacacgag

SEQ ID NO: 643881 - DNA, 100 bp, Homo sapiens
ccagggctctggtggtggatgtgcagaatgggtacctgctctgcgaactggtgtctgacgacccccgctgccgcctaagcctcgatgaccgagttctgag

SEQ ID NO: 643882 - DNA, 90 bp, Homo sapiens
cccggcccccatcctccccgccccatcggttgttgtctgggcgggtccggtttatcactaaaatatggcatcctaatattagttccgtca

SEQ ID NO: 643883 - DNA, 75 bp, Homo sapiens
gaaaacgcctgtgttccaccgttcaccatcgaggtgaaggtcattgacgagactctggatgttaaggaaatgatt

SEQ ID NO: 643884 - DNA, 149 bp, Homo sapiens
aggctccgagccttcagcagaggcggcagcctggagagtcgaagcagcagctctcgctccagaagcttcactttggtttttcgttggaatatacgttgcacatttatggcgattctgagtgtgagggcagacttctgccaggctcagca

SEQ ID NO: 643885 - DNA, 107 bp, Homo sapiens
acctaatgaggcgcctgcctccccagcaaatcgagaaaaacctcagcgacctgatcgacctgaaggtagaagatagcaccatgccgattcgtcgaactgtgaattct

SEQ ID NO: 643886 - DNA, 101 bp, Homo sapiens
ttctatttcttgtggatattatggctaataacacaacaagtttagggagtccatggccagaaaacttttggggggccaccttatcttagttccagaattta

SEQ ID NO: 643887 - DNA, 85 bp, Homo sapiens
gtgtggtcctttggaatcctcctatacgaaattgtcacctatgggaaaattccctacccagggttagtcagcaacataaaatcaa

SEQ ID NO: 643888 - DNA, 114 bp, Homo sapiens
aggaggctggagtgggcgcggaggcgaccgccatggcgttcctcaaactccgtgaccagaactctaagaaggagctgatgtggaggagcagctgagacagttcaagatgacgac

SEQ ID NO: 643889 - DNA, 136 bp, Homo sapiens
cggagcagtaggcacccgagcagcgccagcggccgagcgggcggcttcctggcctgggcgctccggtggcggcggaggcctccggtgtggctgtctctgatggtgtcatcaaggtgttcaacgacatgaaggtgcg

SEQ ID NO: 643890 - DNA, 75 bp, Homo sapiens
ctgggccggagcaggcgaggtggccggagccgtgtggaccaggaggagcgctgcaagtgaaccggagcaaacgac

SEQ ID NO: 643891 - DNA, 96 bp, Homo sapiens
tgtgcgaacatgtaacaagaatccaaagaaaacaaaatggtggtatcatgatgcacagtttgaaaatgatgaacgaattacacccttggaatcagc

SEQ ID NO: 643892 - DNA, 75 bp, Homo sapiens
cttgagtattttaacacaggatgattctgattttcaaggtatgatctcgtgaaaccttgagagaaactgaatgac

SEQ ID NO: 643893 - DNA, 78 bp, Homo sapiens
gagttccaagtccgggtttgtgattcttgttacgactccatcaaagatgaagagatgaagatttgataaagtggaagg

SEQ ID NO: 643894 - DNA, 100 bp, Homo sapiens
gatacatcttgttttttcatattacatctacaagaggggacaagtacctttatgaaccagtgtatcccaatgattcgcctttgccagtctcatctcgtgt

SEQ ID NO: 643895 - DNA, 78 bp, Homo sapiens
ccatgtggcctacgcccagcatcactgtggatctgcttaccaaaagcatggagatatggaccaaaaggaacgagacgt

SEQ ID NO: 643896 - DNA, 100 bp, Homo sapiens
ctgctgctgaggagaggagcgtcaacagcagcaccatgggtggtatggtcaggaaaaagactacaatgtactagtcatggatcttctgggacctagcctc

SEQ ID NO: 643897 - DNA, 112 bp, Homo sapiens
attgtcatgattgtttatcctaatcccaatgctgaagtaagattgtcttggaaatactaagttggaaatctcctgcaaagaagctgagccatgcaattagtaaatctttggg

SEQ ID NO: 643898 - DNA, 97 bp, Homo sapiens
catcgacatcctggagatgctgagcagagccaaggatgagtatgagagggagtttgggctttgcaaaactgagaacaaagccaagtcgggcaaacag

SEQ ID NO: 643899 - DNA, 50 bp, Homo sapiens
agcctctgcctcccagaaactcagtgcacagccagagaacaacacatcac

SEQ ID NO: 643900 - DNA, 100 bp, Homo sapiens
ggcaaaggtggctaaggacctcaacccaggagttaaaaaggaagaggagcaggacttggatggtgagaaggggccatcatcggaagggcctgaggaggag

SEQ ID NO: 643901 - DNA, 101 bp, Homo sapiens
ccgcggccggcccggcagcgcccggcccccggctcagcccccggagtgcggagccgaccaggtctgtttatgatggtgaagaacatggacgtttcatggag

SEQ ID NO: 643902 - DNA, 75 bp, Homo sapiens
tggcgcagcccacgctcatgatcgacttcctcacccgcgcctgcgacctcggcgaggaggatggccgagaccagt

SEQ ID NO: 643903 - DNA, 82 bp, Homo sapiens
agcaagagctcacaccgctgcccctgctcaaaggccaaagaagcccaggatgacctggtgaagaccaaggaggagctgcacc

SEQ ID NO: 643904 - DNA, 100 bp, Homo sapiens
aggcgggcggcgcgcggcggcggcgctcggcgatggtaggcgtccctggagcggccgccttccagcacccaacatgagtgaagtttcctgcaagaaacgg

SEQ ID NO: 643905 - DNA, 100 bp, Homo sapiens
tgtgcaaagttcctattgatggtccccccataagtatgccaagatggaaggaagcctcatacagtgagattaataatccgtcggtattcctctgagaagc

SEQ ID NO: 643906 - DNA, 101 bp, Homo sapiens
gatatggaacccaagcagtggcgaagggaatcgcaaggctcttccctgaccattttctactgtccctgcgcgaggtgcgtatagcagcaaaattcatcatt

SEQ ID NO: 643907 - DNA, 96 bp, Homo sapiens
gtttacctggcactcctggacaggatggattgccagggcttcctggcccgaaaggagagcctatgcagctgtcttctcctcagtgctggcgctctg

SEQ ID NO: 643908 - DNA, 75 bp, Homo sapiens
attttgatgtggatgatgccaaagttttattagccccatggctgggggttatggagtgatgggtgacgatggttc

SEQ ID NO: 643909 - DNA, 97 bp, Homo sapiens
cctcatgtatcatgcaaggatattcctcatatatcatatcacaaaatttgtccaggatagacatagagctagaagaaacagacttcgtaaagatcaa

SEQ ID NO: 643910 - DNA, 75 bp, Homo sapiens
ggaggatgtcgggacaccccggaagctgggaaatggccactgcagaacaaattagacttgcacagatgatttcgg

SEQ ID NO: 643911 - DNA, 77 bp, Homo sapiens
acagtctatgaatgagatagtccagagcaacctctttaaaaagcaagtttccaacatggctagatccatcagaaact

SEQ ID NO: 643912 - DNA, 83 bp, Homo sapiens
atgaatcccaaatggttatccgtccccacaagtcatttgatgagcatcaccaaataatccagcagtacatggtgaccctggag

SEQ ID NO: 643913 - DNA, 74 bp, Homo sapiens
acgtcaatgagcactatccacacgacaggcctacactctattcaaacagcctaaatggaaacctgataaaacca

SEQ ID NO: 643914 - DNA, 89 bp, Homo sapiens
atttttaaaagcctttggcaaaacatagctcaccatggcacctttatggaggagttcaacctgatctagttgaatctgaagatgtggac

SEQ ID NO: 643915 - DNA, 100 bp, Homo sapiens
atacaagacaaggtgaagcctcggaaggttaacctcaccctacagatgaagataatagagcaagaaaaagaaattgcagaactaaagaagcagctaaacc

SEQ ID NO: 643916 - DNA, 74 bp, Homo sapiens
agtgggttcgttgtatttgtgacatctgtgggtttaatccaacagaagaaggcatgaacaaccgggaggtgctg

SEQ ID NO: 643917 - DNA, 74 bp, Homo sapiens
agaggcaaaggggaggttacgcagcaaaccatccagaaggcacgctacaccccaactgccaagacagcagcggg

SEQ ID NO: 643918 - DNA, 100 bp, Homo sapiens
ccaccaacaacaccacaataatccacagccaaggaattcggcgttggaactactttttcccagaagaattactggtttatgatatttgtaaatatcggtg

SEQ ID NO: 643919 - DNA, 100 bp, Homo sapiens
gaggaggcggcggccgacggtggcggcgggatgcaggtatcgagaaccttccctgcgaacttcagaggaacttccagctgatgcgagagctggaccagag

SEQ ID NO: 643920 - DNA, 150 bp, Homo sapiens
cagataccaccagcaacttctaatggatcctcttccaaaaccacaaacttgcctacgtcagtaacagccaccaagcatatgagctatttgcattcatcagtcacatgggaacatccacaatgagtggtcattacatttgccatatcaaaa

SEQ ID NO: 643921 - DNA, 75 bp, Homo sapiens
ctcatctccaggacagtgggaagagtggctggaggaattcagtttcttgggggttgacctgacagttcaagaaaa

SEQ ID NO: 643922 - DNA, 100 bp, Homo sapiens
agactgacccgtcctggttcctcttacttcaatttgaacccatttgagatgctattaactgagtacttggatatgaaaaatactcgtacggcctctgaac

SEQ ID NO: 643923 - DNA, 100 bp, Homo sapiens
tgctggcctccttcctgctcctgctgctggggctgggccatcaccatcgaggctgagccaagagctgatggcagccgccggaccacccgctatgacatcg

SEQ ID NO: 643924 - DNA, 74 bp, Homo sapiens
agagggacctcctcccaaagatgttggatggcaagcatgtggtgtttggcaaagtgaaagaaggcatgaatatt

SEQ ID NO: 643925 - DNA, 100 bp, Homo sapiens
tgtttgcagaagtaacattcctttgaacactcagctttctgaaatggtgtcccaccgcaaggactggagaaggggaaacagtgcttcttagtcctacgtc

SEQ ID NO: 643926 - DNA, 100 bp, Homo sapiens
ggctccgcctcaccagcaagcgcattcccagattgagaggatccagaatccagatctctggaatagctaccaggcaaagaaaaaaactatggatgccaag

SEQ ID NO: 643927 - DNA, 100 bp, Homo sapiens
gcagcgggagcagccggaacgatgccggccgtgagcctcccgcccaaggagaatgcgctcttcaagcggatcttgtcaagagaatccatcccattaaatg

SEQ ID NO: 643928 - DNA, 88 bp, Homo sapiens
ccggcctcatcgtgccggcttcgcgcgcgaacccggctttcgcatttgggaccctgcagggacctggagttgctggctaccttaccgc

SEQ ID NO: 643929 - DNA, 51 bp, Homo sapiens
gtggtttcagcagtgtgctacagtttttagtgatgcttttgacatacaata

SEQ ID NO: 643930 - DNA, 75 bp, Homo sapiens
tctggtcatactaaagaacacatctggaaggatgcaaggtgttgtaaaccgactgtccaagttactgaaacctgg

SEQ ID NO: 643931 - DNA, 83 bp, Homo sapiens
aacacataaaaattatttatccaacagctcctcccagtaatctcaggggcgatataatcaatgaggtggtcctaaagttgctc

SEQ ID NO: 643932 - DNA, 74 bp, Homo sapiens
aaacaacagacagccctatgctgtcagtgaattagcaggtcgcttataccaagttgaatatgccatggaagcta

SEQ ID NO: 643933 - DNA, 82 bp, Homo sapiens
agcgccttcctcaacgacgcggacatggtcatgagctttgtgaacctggggacccagacatggagctgcgggaagaagcctg

SEQ ID NO: 643934 - DNA, 99 bp, Homo sapiens
cttgcagatgcttcgggagaacctggaggaggaggccatcatcatgaaggacgtgcccgactggaaggacgtgttcctcatgatccggcgccacaagac

SEQ ID NO: 643935 - DNA, 74 bp, Homo sapiens
tgatccacaaggcattagagcatggtacaccaggggttggaaaaaccacactaggcaaagaacttgcgtcaaaa

SEQ ID NO: 643936 - DNA, 75 bp, Homo sapiens
tcggcccgacagcctcgcttggccgccagttcttctgcagccgaaggcgcctctggaattgctttggcactcgtt

SEQ ID NO: 643937 - DNA, 110 bp, Homo sapiens
caggaccgccggccgggggacgagctcggagcagcagccaggcacgggcgagagcgggaagagcacgttcatcaagcagatgcgcatcatccacggcgccggctactcgg

SEQ ID NO: 643938 - DNA, 73 bp, Homo sapiens
atggagccctgggcgcgggggcggcgtgtcaggtggttgcggagctggtgagcgagtgctgtgctttcatggg

SEQ ID NO: 643939 - DNA, 100 bp, Homo sapiens
caggcctcgtgccgttacggccatcacggcggccgcagtggcgtcctggagccctcctcagggtgttttgaatgctgtatcaaatgcctggggggcattc

SEQ ID NO: 643940 - DNA, 89 bp, Homo sapiens
cgtctccgcgttcccagcccgggtccccgcgttcacagccccagcgcaggttcgagaacttgtcttggacaattgcaaatcaaatgatg

SEQ ID NO: 643941 - DNA, 90 bp, Homo sapiens
caggagcccggccaggcgctggggaaagtatattgagtatggacagcagtctagagatcctcctgtgaaaatgcaaggctctatcacaac

SEQ ID NO: 643942 - DNA, 83 bp, Homo sapiens
ctcccccgagcgggagcacgcccccccagggcccccgcaccaggatgttctcagacaatgcagatcttcgtgaagactctgac

SEQ ID NO: 643943 - DNA, 75 bp, Homo sapiens
aggaaaattacaactattttcaattgacgttgaatagggattctgaacacgaccctctttgagagttgggagata

SEQ ID NO: 643944 - DNA, 96 bp, Homo sapiens
agaaaaggcaacatcctgtcacaggccatgctctggcaaaaacgaaattcagttcatgaagataagaagtttcttgacaaatacatgccccagttc

SEQ ID NO: 643945 - DNA, 76 bp, Homo sapiens
tcctatgtggacgttggcactgggaagggcagcttgtgcagctggaagagaaagggcagggttcagtgccctggtc

SEQ ID NO: 643946 - DNA, 83 bp, Homo sapiens
gaagatgatgatgatgatgatgtcaagagcacttctgaagactacttaatgatatctttttataggcaagcaataaacagcaa

SEQ ID NO: 643947 - DNA, 50 bp, Homo sapiens
gaggaccaggggatgcgaagggaactttatattgctgttggaatatctgg

SEQ ID NO: 643948 - DNA, 100 bp, Homo sapiens
caagctggcaaagaagttgctgttggggactcggaaggccgtatttgggtctatgacgttggagaggtggagccgccaccaaaatgcagattttcgtgaa

SEQ ID NO: 643949 - DNA, 83 bp, Homo sapiens
cctggaatcgcccaagtccctctactcgcgaggtcaccgaggaggagcccagctccaaccacacggtcatgatccaggagacg

SEQ ID NO: 643950 - DNA, 101 bp, Homo sapiens
cctgagggagcaatgctgaggcttggcatgacaaatccgccctatattttagagcatctggagatcctaatgctttggctggccagaatggccctgaccat

SEQ ID NO: 643951 - DNA, 75 bp, Homo sapiens
gccaagtccccccaacactgcatggagcggatccaggcatctgcaggaaccacaccacactttggaggccatgct

SEQ ID NO: 643952 - DNA, 101 bp, Homo sapiens
ctctttcttctatttcttgtggatattatggctaataacacaacaagtttagggagtccatggccagaaaacttttgggtgcaagcagctaatgactcagt

SEQ ID NO: 643953 - DNA, 50 bp, Homo sapiens
agggttttgggctggtggtctcggcaggctttgaacttggcctactccag

SEQ ID NO: 643954 - DNA, 100 bp, Homo sapiens
agaacaagccaggaaaaccccgaaaacgcaagaagcgtggtggttctcttcccaaagtggaagccaaattcatcaattatgtgaagaattgcttccggat

SEQ ID NO: 643955 - DNA, 100 bp, Homo sapiens
tccccactcctccaagaaccaacccccaaattggctgggacagcttcttctcagcctgttgataaccatgttagcccatcttccttcttgggccagacac

SEQ ID NO: 643956 - DNA, 97 bp, Homo sapiens
gtccctacatcgagcccgggccctgcagaagaggcatgatgactttgaagaggtggctcagccatcttatttgccatctctgtatttggaccggctt

SEQ ID NO: 643957 - DNA, 51 bp, Homo sapiens
tcttccacagcacctgaaagagatcagaccttccagctgcctctcatgtac

SEQ ID NO: 643958 - DNA, 100 bp, Homo sapiens
agctgcaggaggaggagagagaaaggagagacaattatgttcctgagcttccacagcgcggcacctgtacctccggggtggcgctggggttggctccatg

SEQ ID NO: 643959 - DNA, 74 bp, Homo sapiens
atcgactggaccaagatcgagcccagcgtcaacttcctcaagtcgcccaaagaggctgaggggatctggcggtg

SEQ ID NO: 643960 - DNA, 100 bp, Homo sapiens
atgtactggtgtgtggggccggaggagtcagctgtgtgtccagaacgtgccatggagacgcttaacgatcaggagaacctcagtctgacgacattgaagc

SEQ ID NO: 643961 - DNA, 100 bp, Homo sapiens
tgtgcattaaaattcttcagacattacgagaaatgttagagaagaaagacagctttgtggaagaggcttgcagccaatttactggagcagggatgacgta

SEQ ID NO: 643962 - DNA, 90 bp, Homo sapiens
ttcgttatggagaagtgtgagaggaagctgagttacccagactggggaagcggatgctatcaggtatttttactgattgggaaggaatgc

SEQ ID NO: 643963 - DNA, 140 bp, Homo sapiens
gtgccttgcttatgtttgttaggaccaaacctcaaagcatggctaagagtgttcagtagaaatgggactttgaagaatatcctgaacatagaacgaactttttcttactacttcaggctgtcaattctcattgtttccca

SEQ ID NO: 643964 - DNA, 100 bp, Homo sapiens
cgtggatgccctgaagaagtgtgagcatgacccccatgtgctcctggccgtggccaagtaccgtacagagtggatttgcagggcagtggcatggagcccc

SEQ ID NO: 643965 - DNA, 110 bp, Homo sapiens
tccggaacagcaagaactgcaccgaaccaggaggagatgaccgccgggttctgctatggcacatggaacaagccatccactccagggtcaagcccatacagctgaaagga

SEQ ID NO: 643966 - DNA, 98 bp, Homo sapiens
ggaaacaaaggcacgcaaaacggaaaagcgtgtgtaggggagcggaaaaggaagtcaccaccgtggcctgcgacggaatccatgtcagtgaacgcctc

SEQ ID NO: 643967 - DNA, 80 bp, Homo sapiens
gaccaacttgctgcggtttttgttcctggggctgagtgccctcgacaagcagatcgacctgagcacagtggacctgaaga

SEQ ID NO: 643968 - DNA, 90 bp, Homo sapiens
tcgtgagctccggcccgggcgagcgggtgcgtctgccgcagagtcggcacctgaaggacatggagtcttccgtgtgtgctaagatcgtgc

SEQ ID NO: 643969 - DNA, 78 bp, Homo sapiens
tgtgtatggggtccagccagctcagcagctgcaatggaaccttactcaggctggagtgcaatggcgcaatctcggctc

SEQ ID NO: 643970 - DNA, 100 bp, Homo sapiens
cagcgacagcagcggcttcagcgactcggagagtgcttttaagccctgtgaatatttactgggaagctggatgattcgtcttactgtgtggttcattttc

SEQ ID NO: 643971 - DNA, 98 bp, Homo sapiens
tggacaaagcgtccatcatccgcctcaccacgagctacctgaagatgcgcgccgtcttccccgaaggtgctggagaatctggtaaaagcaccattgtg

SEQ ID NO: 643972 - DNA, 75 bp, Homo sapiens
cttgtcctggctggacgctactccggacgcaaagctgtcatcgtgaaggaagagagaagggcacagttacctaag

SEQ ID NO: 643973 - DNA, 75 bp, Homo sapiens
ttgacttatgcaaagccggatgaattttcagccctttgtggctggagcattggatttgctaaaggagcttaagaa

SEQ ID NO: 643974 - DNA, 100 bp, Homo sapiens
aacttgcagaaatcacattggaccctcctcccaactgtagcatcatcatgaccatctcctccacgcttctggccctcgtcttgatgcccctgtgcctgtg

SEQ ID NO: 643975 - DNA, 90 bp, Homo sapiens
atagattgtgtaggcgttggtcttctgatagcaactttaatgtggccggagcctcaacagaaagctcctttagttcctcctcctccaccg

SEQ ID NO: 643976 - DNA, 100 bp, Homo sapiens
cgcagatgctggagaagtccccttatgaccaggttgcccgaagctcagcagagagtcggaggctgctttttaaacctgatgccacagatgaaaaccctgt

SEQ ID NO: 643977 - DNA, 100 bp, Homo sapiens
gacctaggctcatggacgagatgggaaggcacagggagaagggataaccctacacccagaccccagggccaaaagagaaacattggctactttgacaacc

SEQ ID NO: 643978 - DNA, 75 bp, Homo sapiens
actacgagtgggcccttctggtcgccgtggagatgggccacgtggagaatgtgctagtgctgctgatgacagatg

SEQ ID NO: 643979 - DNA, 96 bp, Homo sapiens
gagggctggttccggctgcagcccgaccagtccaagagccggcagcatgacgagtctcaatgccaggaagcctcccgctcctaaacagcgtgttcg

SEQ ID NO: 643980 - DNA, 100 bp, Homo sapiens
gtcgtgctctcgccccaacccgcgcgccaggtatgcaaccactcatgtattcggttcaggaagcattaaatgccagaccatggtggattcgtatggggac

SEQ ID NO: 643981 - DNA, 75 bp, Homo sapiens
ttgagcctggcacagcagcagactcgcagcagggctacttctacaagtccgaacagccagtccagcaaaatgaac

SEQ ID NO: 643982 - DNA, 98 bp, Homo sapiens
gccctggcgggtccggaccaagacagttgcatctataaaaaggtttgcccctttaatggtggctcttttttggttcaaccttctgcgtcagatttcca

SEQ ID NO: 643983 - DNA, 75 bp, Homo sapiens
aggaaaaactggagagcttcatcaaaaatagtgatagctttgataagtgacttaagagattaaaattaatttggt

SEQ ID NO: 643984 - DNA, 82 bp, Homo sapiens
cccgccgctctgtctacaacccgaggtgcagaccatgaattacgtggggcagttagccggccaggtgtttgtcaccgtgaag

SEQ ID NO: 643985 - DNA, 100 bp, Homo sapiens
gcctgccatcccagtcttctccttcagtaaggcacagccaaaattggtcagaaaggggagtaaagtgggacacgagcttcaaagtagggaaaccaaagaa

SEQ ID NO: 643986 - DNA, 100 bp, Homo sapiens
agatgttatcatgagggaattccggtcagggtcaagtcgtgttctgatcactactgacttgttgagagagcaggagattcggatgggtcagatggctatg

SEQ ID NO: 643987 - DNA, 87 bp, Homo sapiens
ttttttcctgtatgaagcggttggcaccactgaagtgaccgaatgagtattctaccttgtaaatactgttatttgtatatactgtaa

SEQ ID NO: 643988 - DNA, 50 bp, Homo sapiens
tggggagcttgaggacacttaccacgaagatcttacacatttgttccatg

SEQ ID NO: 643989 - DNA, 98 bp, Homo sapiens
agatatggtttgaatatgaaggcacaccactgaaatgggagcaccaagaactactgaaacaaatgaaggaaactgaaagtcattcagtctgtgacgac

SEQ ID NO: 643990 - DNA, 83 bp, Homo sapiens
ccggactcagccaagttccccaacggctccccgtcgtcctggtgctgcagcggatgaaacaggcgcctatttaatcgacagag

SEQ ID NO: 643991 - DNA, 144 bp, Homo sapiens
aaagaagccaaactgtcggcttcaaagagaaaaggcaacatcctgtcacaggccatgctctggcaaaaacgctgccaaacgagggattctttcatctggtcggggcagaggaattcattcaagaggtcgaggtgcagttcatgg

SEQ ID NO: 643992 - DNA, 51 bp, Homo sapiens
gcctaattaccttcaaacctgagtaatcaagtcagaggattatatgacttt

SEQ ID NO: 643993 - DNA, 98 bp, Homo sapiens
tagcagtggattcaaatggaaacatcattgtggccgactggggaaacagcaggatccagtatacttctgctctgacctatgatgccgttcaagtgatg

SEQ ID NO: 643994 - DNA, 50 bp, Homo sapiens
caccaagagtcaggcagtgaagataacacttacttgtgcctggctgtgct

SEQ ID NO: 643995 - DNA, 75 bp, Homo sapiens
gccttagataacagccatcctattgaagaagatgaagatcctgccaaaggtgatcagagtcgatcagttgacctt

SEQ ID NO: 643996 - DNA, 106 bp, Homo sapiens
tcagcggactacgtggaacgtgggcaggagcacgtcaagacggccctggagaaccagaagaaggcgaggaaggtttgatgccttctatggggagaggagtactcag

SEQ ID NO: 643997 - DNA, 75 bp, Homo sapiens
cggggatgtatgcttcatggacaaaggcttgcagaggtatgttgagtctaaaaaggacagagtcacagtagtctt

SEQ ID NO: 643998 - DNA, 82 bp, Homo sapiens
agcgcccgggcgtcggggcggtaaaaggccggcagaagggaggcacttgaggatcccctaacaacagtgagagagcaatgcg

SEQ ID NO: 643999 - DNA, 83 bp, Homo sapiens
cgcttcagcacaaggaatgtcatcaagacctcctgccccccgaggtctgcagtctcctgaacccagcagccatctacgccaac

SEQ ID NO: 644000 - DNA, 83 bp, Homo sapiens
cgggagcgcaaggtcgccctcaaggccatgatcaaaacttctgcctcctgggggcattgctggcccccatccgagtgcttctg

SEQ ID NO: 644001 - DNA, 90 bp, Homo sapiens
acagaaacagattcgacaactggagagccacctgagccttggaagaaagcgtgaagacattcagtgaagcttgcctgatggtaaggaaac

SEQ ID NO: 644002 - DNA, 82 bp, Homo sapiens
caaactcgaagactggcatgaggctcttgatggaaatgtgtatgatcatctcaaggattatttaatagccttcagccggact

SEQ ID NO: 644003 - DNA, 107 bp, Homo sapiens
ctttactgaagtttatcttattaaatttatgaacttacaaagtgcaaggttggatggcaagcatgtggtgtttggcaaagtgaaagaaggcatgaatattgtggagg

SEQ ID NO: 644004 - DNA, 90 bp, Homo sapiens
cgcagccaggagatggttcgggcctagcggagccgggactggaggggttgtagaaggtgatttagctgccatagaagcatacaagtcatc

SEQ ID NO: 644005 - DNA, 82 bp, Homo sapiens
attctccaacaatggaggccagtggctggtctcagtgtgccccctaccaccggagccagagaatggtggctacatctgccac

SEQ ID NO: 644006 - DNA, 75 bp, Homo sapiens
gccgggaccctcaggctcagatcagtggccgaggccccagaggtagaagaagtatgtcttcctggaccccctggc

SEQ ID NO: 644007 - DNA, 75 bp, Homo sapiens
cagagaaaaatcggcagatgttacagctgctcatgaaccacttggcaaaagccatgggaccacaccaccaccacc

SEQ ID NO: 644008 - DNA, 100 bp, Homo sapiens
ttcttactcctatggaaccaatgatagaaatgaagaaaagagaagaaccagaatttcctgagccttccaaacagatcagcgaacaagaggagcacgttaa

SEQ ID NO: 644009 - DNA, 90 bp, Homo sapiens
gggccagcagatgcaggaaaatttcgatattgaagtgtcaaaatccatagatggaaaagatggctttccagaccttgctgtcattttgct

SEQ ID NO: 644010 - DNA, 75 bp, Homo sapiens
caatgagaagcaggcagaagattgcatcacacgctgatcttgcatctttaatggataaaacatttgagagaaagt

SEQ ID NO: 644011 - DNA, 100 bp, Homo sapiens
tccctgctcggaggcggtggcgaaacagactgaatttgatctgattaatgtgaaggactggccagtctgggaaaccgcctgccacgtggaagagccaaac

SEQ ID NO: 644012 - DNA, 100 bp, Homo sapiens
ccccgagcgaggccaaccttcaggaggaggagcattactctactgactggcagagacaggagaggtagatgtccacgcccacagaccctggtgcgatgcc

SEQ ID NO: 644013 - DNA, 82 bp, Homo sapiens
ggcagtccacccaccgccgccgcctcccagaacgtgcgcatcgaccccagtagcctgtccttcaacatgtggaaggagatcc

SEQ ID NO: 644014 - DNA, 50 bp, Homo sapiens
gcaggttgggaggagcggccgaaggccatcgaagacggcaatttggagga

SEQ ID NO: 644015 - DNA, 82 bp, Homo sapiens
cgacaagtccgggagctgggcggccatttaccagacctgcctagagctggaacgttacctccagagcgagccctgctatgtt

SEQ ID NO: 644016 - DNA, 83 bp, Homo sapiens
atttcccagcttacacagatattaaggtcgttccaggggtagaggaggcatgaaggatgaccgtcgggacagatactctgcgg

SEQ ID NO: 644017 - DNA, 119 bp, Homo sapiens
ctcagaaggtgccctctttgcaacatttcaggaaaacagagaaagaagtgataggagggctctgtaggccaagtacctggcccagatcattgtgatgggcgtgcaggtggtgggcaggg

SEQ ID NO: 644018 - DNA, 101 bp, Homo sapiens
ctggctttcagagagaacagcgtttcagttttggtcatcggaagtggtgccttcagcacagggtcccaagcaagacagaactgcagaagggcaagcactaa

SEQ ID NO: 644019 - DNA, 75 bp, Homo sapiens
ctcctgagtagataggactacagactttgggatcatgctactatgacagaagtgaaatctctaaattttaatatg

SEQ ID NO: 644020 - DNA, 75 bp, Homo sapiens
gccgcgggagccgcacgcggcgatatggaagaggagggcaagaagggcaagaagatgctgcctcgaactctgtca

SEQ ID NO: 644021 - DNA, 100 bp, Homo sapiens
caggagcagcccaagcgccttccctcacgcagatatccaagtagagcagaaccggcaacacttctatgaactgtctctcgagtatgtgtgtaagctgcag

SEQ ID NO: 644022 - DNA, 100 bp, Homo sapiens
gttgtattcatcaataatgaaatgctgactaaggaacaagacatatctgaagagatggattaagaatgctttggattaaggattgtggagcacatttcaa

SEQ ID NO: 644023 - DNA, 119 bp, Homo sapiens
tctacattgaacgggtgcagcgggaaaaggctaatggcacaactgtccacgtaggcattcaccccagcaaggagtaaaccaagccaattcagcacttcctgtttacttccttgtcatat

SEQ ID NO: 644024 - DNA, 87 bp, Homo sapiens
catgaaggacctgagcctgacgcgggccgcgcgggccagcggagcctgcaccaccgtggagacaacctggagaccctggtcctcctg

SEQ ID NO: 644025 - DNA, 83 bp, Homo sapiens
tctcgacctgctaacagaactggaccttttcgatttaaggaccatagtacagctatggatactgaaccaaacccgggaacatc

SEQ ID NO: 644026 - DNA, 83 bp, Homo sapiens
agcgaggagaagcgagaaaagatgaaacggacccttgagaaggcaaccaaagtgcaggacatcaaaaacaacctgaaagaggc

SEQ ID NO: 644027 - DNA, 74 bp, Homo sapiens
aacaggcgtattctggtaatttcgaggagccgctgccatggcccagacactgcagatggagatcccgaacttcg

SEQ ID NO: 644028 - DNA, 90 bp, Homo sapiens
gtccagcagatggcggatgccctgcagtacctgcagaaggtctctggagacatcttcagcagtttacaggcagcattaagagcagaccca

SEQ ID NO: 644029 - DNA, 94 bp, Homo sapiens
cgagaagcctgaaaagtcgcagcgagctggagccgccggagggtgagcttgtcggccacagactgctacattgtgcatgagatctacaatgggg

SEQ ID NO: 644030 - DNA, 99 bp, Homo sapiens
gagattacaatttgactgaagaacagaaggcgatcaaggccaagtatccgccagtcaataggaagtacgagtgatgtatcaggacaaactggcttctct

SEQ ID NO: 644031 - DNA, 100 bp, Homo sapiens
aaaacaaatcagagagccagtagacttacagaaaaagaagaagcggaaacaacgttctcccgcaaaacatgcagcagaactgattaaaacagtggcatct

SEQ ID NO: 644032 - DNA, 100 bp, Homo sapiens
ctcggcaggaagtgggaccggtgtctggcggatgcggtcgtgaagatagggatgcttcctttggaaattgcacttacaatctcaccattctcgactgttt

SEQ ID NO: 644033 - DNA, 80 bp, Homo sapiens
acagccgcttgctagaggttgaggacgctcagtgctgggcgtcctcttctttgccatagcctgcttcttatacaagcccc

SEQ ID NO: 644034 - DNA, 100 bp, Homo sapiens
tggagtgcaagaagaaattcccacctgtcaaagagtactatactggcaattgctggagaagattttgcaattgttgcttctgatactcgattgagtgaag

SEQ ID NO: 644035 - DNA, 96 bp, Homo sapiens
ccactccgtcccccgcgggtctgctctgtgtgccatggacgggaacttgctactaccagcaccatgccctaccaatatccagcactgaccccggag

SEQ ID NO: 644036 - DNA, 74 bp, Homo sapiens
tctgatatcttcctgtcatggttccccttctactacatgctgaagaaaaggcgacggcggattgacagaagtat

SEQ ID NO: 644037 - DNA, 88 bp, Homo sapiens
cctcaagaatctcgtgctcaccggtttctcccacatcgacctgctcccctcccacccggtcactccgtccagcaagcacgcagacagc

SEQ ID NO: 644038 - DNA, 100 bp, Homo sapiens
attcctaaaggattatcagagtttacaaaacagcaaatacgctacattctgcaggctcttgcagccaatgccggaacaggatttgctgttgctgagcctc

SEQ ID NO: 644039 - DNA, 90 bp, Homo sapiens
attaacaaatggttttgacactccagaagagaggtatcagaagcttaaaaaggaaaaccaattctgtgtcctcggaggaccacagcccag

SEQ ID NO: 644040 - DNA, 75 bp, Homo sapiens
tgaacaaatccgggggcaaggccaaaaagaagtaagcactatcctttgtactccctcaacgtggcctccatgtgg

SEQ ID NO: 644041 - DNA, 100 bp, Homo sapiens
cagctggccacggaccagatgctcctgcacttcggaaacctggccatgcacatgaacggggagctcgttctccggaaggaagcaatgaggctccccaaga

SEQ ID NO: 644042 - DNA, 100 bp, Homo sapiens
ggaagcagcgtgagcagccggaggatcgcggagtcccaatgaaacgggcagccatggccctccacagcccgcaggtcttcaaagcttcacctttctccaa

SEQ ID NO: 644043 - DNA, 90 bp, Homo sapiens
aaaagcatccccctcaaaatgtgctacgtcactcggagtatggccttggccgaccctgagaacagtattggtaaaggttttcaaggtgtc

SEQ ID NO: 644044 - DNA, 90 bp, Homo sapiens
gcttttgatgggaggccagcagactatttattcatgctcctctttaactggatttgcatcgtggcatatccccccacgtccatgtccagg

SEQ ID NO: 644045 - DNA, 75 bp, Homo sapiens
tttgtcagattatcaggatgagggctcctccattaccatccgcctcatcttgatattgttccatggacattaaat

SEQ ID NO: 644046 - DNA, 50 bp, Homo sapiens
tccacctcattttagagtatcaagcagggcagtaaacggctttgaccccg

SEQ ID NO: 644047 - DNA, 75 bp, Homo sapiens
agaaagacagctttgtggaagaggacaaggagcatccaagatacctgatcccagaactttgcaaacagttttacc

SEQ ID NO: 644048 - DNA, 110 bp, Homo sapiens
ccgcgcgcagggcctgcagcgggagctggacggcgagcgcgagcggcgcgagaaatccctgagattctgcagctcagcgatgccctgcgggacaacatcctgcccgagct

SEQ ID NO: 644049 - DNA, 97 bp, Homo sapiens
gagaaaagtaggatgaacctgcccaaggggccggacacgctctgcttcgacaaggacgagttcatgaagacaagttggatggcttgaggactggtac

SEQ ID NO: 644050 - DNA, 90 bp, Homo sapiens
ttgcaggggtgcagtgtgtctggtcttatgaggcaaatgaagaggattcttccagttctctagtgaaggatcacctttttcagcaagaga

SEQ ID NO: 644051 - DNA, 73 bp, Homo sapiens
agatgtggagttacgcagcaaagggtaagatgatcatgcaggataaactggagaaggagcggaatgatgctaa

SEQ ID NO: 644052 - DNA, 74 bp, Homo sapiens
gattgtgtctgcttggtgtggagccatgaagagctccacgcaggagatcggtgaggagctgatcaacggagtca

SEQ ID NO: 644053 - DNA, 100 bp, Homo sapiens
ttcatatttggcttcaatgtcatattttgggacagacccacgaagtcaagcatgcggagtgcagccaagccctggaacccagccatcagagcagggggcc

SEQ ID NO: 644054 - DNA, 82 bp, Homo sapiens
tggtgcttcctgttcgcagctgcggcagtgagaactcgaatcatttatgacagaaagtttctgttggatcgtcgcaattctc

SEQ ID NO: 644055 - DNA, 100 bp, Homo sapiens
gtcttcctgcccaaagtcctggacctcattgtcaatggcatttctatcaacagtgcttatacctccaagattctgtttacaccccgccactcctgagcac

SEQ ID NO: 644056 - DNA, 83 bp, Homo sapiens
cagaagatttctggccagtggagagaggaattcctcaagacaccattccagtatgtaaagaattcttgaaccgattctacaag

SEQ ID NO: 644057 - DNA, 74 bp, Homo sapiens
cagggacatggccacctgggacgaaaagcaagtttatttctgatcgtgaaagtagaagaagtctcacaaacagc

SEQ ID NO: 644058 - DNA, 88 bp, Homo sapiens
cgtcaagtacactgaaattcatcctgagatgaggtgcatggctgcctcctaatcccatagtccagaggaggcatccctaggactgcgg

SEQ ID NO: 644059 - DNA, 88 bp, Homo sapiens
gtcacgctatgtgctgccccgggaattactgcaaaaatgacttaattcagtgcacaaatgagatgaatgtgaacatcccacagttggc

SEQ ID NO: 644060 - DNA, 73 bp, Homo sapiens
ggctcccttctgccccagctccgtctcggcggcggcgggaggagtatttgaagacttctgagcggaggagtcg

SEQ ID NO: 644061 - DNA, 83 bp, Homo sapiens
gcggaggcttcgagtgacccgggtgccgaggagcgggaagagttgctgggggagctgcagtccatggctgaccaggagcaggt

SEQ ID NO: 644062 - DNA, 50 bp, Homo sapiens
ccgccgccaccatgcccaagagaaagaatggcttcctttgggtggaagag

SEQ ID NO: 644063 - DNA, 97 bp, Homo sapiens
acacagctcagaacagttggatcttgctcagtctctgtcagaggaagatcccttgcttctagggacctattaaaagagttcccacagcccaaaaatc

SEQ ID NO: 644064 - DNA, 97 bp, Homo sapiens
tcgccgccatcctcggcgcgactcgcttctttcggttctacctgggagaatccaccgccatccgccaccatgttccagaaacgccgctggactgcga

SEQ ID NO: 644065 - DNA, 98 bp, Homo sapiens
ccagaagaaactgcaccggaaatgtgcctaccagcacacagcaagaaggaggccatcagcaaactgggaagaggaccctcaccaggaaccacatctgc

SEQ ID NO: 644066 - DNA, 99 bp, Homo sapiens
tgaagaagtgcaagagcagaggccttctctagaccttgccaagatggcacaggtacttggaaaaatggacaaggattgtgaaatgaaacgcaccacact

SEQ ID NO: 644067 - DNA, 73 bp, Homo sapiens
agctgtggtcagaagcatttgacgagctgctagccagcaaatgaaccacgtgaatgttgagggggcgacacac

SEQ ID NO: 644068 - DNA, 75 bp, Homo sapiens
aaggattccaagtaactcttatttggccctcctccagagttctgcaagtcgaaaaacccagaaaaagaaaaaaaa

SEQ ID NO: 644069 - DNA, 141 bp, Homo sapiens
ctggccccgggtggcgcctccctgcgactcctggaccaccgggcgctggtctgctcccagccggctcacagaacatttcctgcctgttgctcacactctgttgtccacagcatacccgcaccctagatggctgactcttgt

SEQ ID NO: 644070 - DNA, 100 bp, Homo sapiens
cgctgctgggtccgctgagcggggcgacccgagagagcacagtcagacgaactcgaaaaaatagaaaagcatggccgatcttccaaagacaaggaaaatg

SEQ ID NO: 644071 - DNA, 100 bp, Homo sapiens
gctctgccttgctgcccccaggtgggccgccaccccctgacctgcctgggtccaaagaccatgtcgcctgaagaatggacgtatctagtggttcttctta

SEQ ID NO: 644072 - DNA, 99 bp, Homo sapiens
agtggagctccttttcctccacctaccttcccgagatctatcttgggatcccatggctttctttactgggctctggggccccttcacctgtgtaagcag

SEQ ID NO: 644073 - DNA, 97 bp, Homo sapiens
gactggtccacggagtgtatgaccacaaacagccatcaaggtcctgtccctgctatcagtggggcactgaagaaagcaggactgagtcttaaggaca

SEQ ID NO: 644074 - DNA, 96 bp, Homo sapiens
tcagggtcaagtcgtgttctgatcactactgacttgttgcttatcacacagactttcagccaccacaatcagctggcacagaagacccggcgggag

SEQ ID NO: 644075 - DNA, 113 bp, Homo sapiens
ttaggaatgcagtggagatgatgattgcacggttagacacacagctgaagaataagcttataacactgatggatgtgtcgtggaggccgaatgtttgcaccaaccaaaacctg

SEQ ID NO: 644076 - DNA, 75 bp, Homo sapiens
aaggaagtaaaatggcggacctggcgaacgaagccatggccctacgctaccctatggccgtgggcctcaacaagg

SEQ ID NO: 644077 - DNA, 75 bp, Homo sapiens
gataccgaagcgggctgtgtgccccttctccacccagaggaaacaatgtgatgagaaccattcatggggtgggag

SEQ ID NO: 644078 - DNA, 100 bp, Homo sapiens
ttgctcaactaagaccaagtcctcgctggactgctcagggtgccagacctcatcgtgatgtggaaacagctgtaaaatttgcaactcagcttattgacct

SEQ ID NO: 644079 - DNA, 100 bp, Homo sapiens
ggagactgttgttcccggagatgcggcgcgcagagctgacatcgcgctgatcggattggccgtcatgggccagaacttaattctgaacatgaatgaccac

SEQ ID NO: 644080 - DNA, 75 bp, Homo sapiens
tgggcatctgggcctggaacctcgggtatttggcaccaatgtgatggtgacagtggccaagtccttcgaggcacc

SEQ ID NO: 644081 - DNA, 100 bp, Homo sapiens
cactatgtgtatgatttccttgagaacaaagcctacagtaaaggaaaaggggattttgctcgcaaggcccagcagcaaagaaacctggataacatcgtct

SEQ ID NO: 644082 - DNA, 100 bp, Homo sapiens
agatcggtgacacagttcacatcctggagatgtacgagggtcggcggaagcagaagtgggctgtggatcctcagaacactgcctggagtaatgacgattc

SEQ ID NO: 644083 - DNA, 102 bp, Homo sapiens
ggctccggcccccgcaggagcaggtacctgcaccagtcaggggccctgaccatggaggccctggaggacccttcccccgagctcatggagggcccagaggag

SEQ ID NO: 644084 - DNA, 131 bp, Homo sapiens
ctcgggtccccgcaccacctcctgctgccttcccgtcgccgctcccgaagcttttccagttttcggctttgtgagaaaccttaccatcaaacacgatggccagcaacgttaccaacaagacagatcctcgc

SEQ ID NO: 644085 - DNA, 98 bp, Homo sapiens
tcaacttggtttaggagagataatcctgcgatctagggcagccctgcagaggtacctgttctactgtaatcgctatatgaaccacatgcagagcctgc

SEQ ID NO: 644086 - DNA, 100 bp, Homo sapiens
cctgaaactaaaagatgtcacaaaggaaaacgaggaaagtcccaggatgactactgtgtcaatgtgctgctctggttggtgaagaccagcctctttgccc

SEQ ID NO: 644087 - DNA, 100 bp, Homo sapiens
ggaagctccaaagtccttcagcttcgactattcctactggtctcatacctcattaacaagcacaagccctggctggagcccacctaccacggcatagtca

SEQ ID NO: 644088 - DNA, 101 bp, Homo sapiens
gaatcccctgtttgagaaaaggcctaagaattttggcattgtcacatcgatcagacaacaacatggcaggaccccaggaaggccatgctgtcccagatgaa

SEQ ID NO: 644089 - DNA, 75 bp, Homo sapiens
ggcagtttgaggagctgctgcgcctcaaagccaatcaccaggagactaaagtccatcaaaaacatccagaaaatt

SEQ ID NO: 644090 - DNA, 82 bp, Homo sapiens
ctgtcttcggtggactccttcggcagtccacccaccgccgccgcctcccaggtgactgtctctgtacaaccagcttcaaagt

SEQ ID NO: 644091 - DNA, 83 bp, Homo sapiens
gccaggctccgttgtaggggttacagaacagtcgttcccgcctcacaacctgttacatggacacagaacagtatgaagaagca

SEQ ID NO: 644092 - DNA, 98 bp, Homo sapiens
tcatcgtggtgcagcagggcatgacaccctccgccaagcagcccgtgtccaggagccccgccaggtgcccgcgccaggccctcagtcttcctgccggt

SEQ ID NO: 644093 - DNA, 83 bp, Homo sapiens
tactaaccacgaccatcaaatccgtgtcggagtccttacagggggatatgagactttctactcggaatatcctgagtgttgcg

SEQ ID NO: 644094 - DNA, 83 bp, Homo sapiens
gtggaggttcctacagagattcatatgagagttatggaactgtggctgcaccatctgtcttcatcttcccgccatctgatgag

SEQ ID NO: 644095 - DNA, 90 bp, Homo sapiens
tattctctgaagcctggaaacgaggcactcagttggaagagtccagcaaggcagagtggcatgattccgactggatactctcagtgccag

SEQ ID NO: 644096 - DNA, 98 bp, Homo sapiens
agcctctacattctctcctgacggaagagtttttcaagttgaatatgctatgaaggctgtggaaaatagtagcttgacaaaagtaagctgaagccagg

SEQ ID NO: 644097 - DNA, 83 bp, Homo sapiens
atcaattcggaaccgaagattaaaaaactggagccagtccttttgccaggcttgaacatgacaagcagatttgggagtccaag

SEQ ID NO: 644098 - DNA, 75 bp, Homo sapiens
gggaaacaagaaaacatcaaagaggtctagcaaagagcccagctcagagtctgatccagcgtaaatatttattac

SEQ ID NO: 644099 - DNA, 100 bp, Homo sapiens
tggcagattcctatttagatgaaggaaggtgtcttgctgcaggtaactaatgaagaagtggtcaaccacagagtcttcaagaaataagaaattctgtacc

SEQ ID NO: 644100 - DNA, 83 bp, Homo sapiens
cgctctggctgtgctgcgcgacccccgcgcatggctgaccccgcactacatctacccaccagccatcgtgcagcccagcgtgg

SEQ ID NO: 644101 - DNA, 75 bp, Homo sapiens
gccatgcaggcaggccctgagcacgctgctgtgtgagcagcaggaccacatgcaaagggccaatgtgccagcaga

SEQ ID NO: 644102 - DNA, 75 bp, Homo sapiens
tactggccgagatggctaagaagtccatgccaggaggtcgtctgcagtcaggaggagatgaacggctggctggag

SEQ ID NO: 644103 - DNA, 100 bp, Homo sapiens
tccccggggtgtaataatgttaactgagtgtctcagtttgaaactgaattctacatcagtggacttgcacctctctgtgatcagcttgttgtactttcgt

SEQ ID NO: 644104 - DNA, 100 bp, Homo sapiens
ccattggagacttggtaaagagcaccttgggacccaaaggcatgagtgttcatactgtggagcccgctgggaccagtataaactctgctctactccccag

SEQ ID NO: 644105 - DNA, 100 bp, Homo sapiens
cactgccggaaaatgttcaaggccgagatccccttctccaatgtcatgacctgcgaggacgatgacaagggtgtgtccgcagccggccaggtggtatccc

SEQ ID NO: 644106 - DNA, 74 bp, Homo sapiens
ttcttgtttgtggatcgctgtgatcgtcacttggtgagaattatgaagatgatgacctagtaaattctgatgag

SEQ ID NO: 644107 - DNA, 100 bp, Homo sapiens
gttctgtaggagatgcgccttgaagtcagtgttttacgacgacgacttgactgatgctgtgtttaaaacgctctcccgactcgcccacagattgaaaaat

SEQ ID NO: 644108 - DNA, 100 bp, Homo sapiens
ggagacccggggacagcatcgcccaggcccctgatacaaccagacctccaaagaaagacgaagaaaatggaaagaattattactttgtatctcatgacca

SEQ ID NO: 644109 - DNA, 74 bp, Homo sapiens
atcttcggcaccgagaaagacaaaaactatgttccaacttcctgtcaacaatcttggcagtttaagaaaagccc

SEQ ID NO: 644110 - DNA, 75 bp, Homo sapiens
acgacatcgccatgaccgcggggtggtggtatcatggatacagaaatgtctgaagatatagaccacaacttaact

SEQ ID NO: 644111 - DNA, 75 bp, Homo sapiens
tccccagggagggagtccgcagcctgagcaccaatgttgttatgaattattcagagatcgagtctaaggttcgag

SEQ ID NO: 644112 - DNA, 97 bp, Homo sapiens
ctggcgtgggagctgcctaggccgggccctgccagggagcaagtctgcatcgcagaggccaggttctgggaagtcatcagtgatgagcatggcatcg

SEQ ID NO: 644113 - DNA, 149 bp, Homo sapiens
tgaagtcggggcagagagtggccgctactactgtctgaacgtgcccctgcgggatggcattgatgaccagactggagagatttaccagcatgagaattaagaaggagaaggaaaagcccaattctgctcatagaaattcttctgcatca

SEQ ID NO: 644114 - DNA, 75 bp, Homo sapiens
tagatacaaatttttggatgatgatggatccatttctcctattgaggagtcaactttgcagaaaaaacttcagca

SEQ ID NO: 644115 - DNA, 100 bp, Homo sapiens
tgtctttctcagcaccttggcgaagccttgggtttctttcttaaaggactgatttttagaactccacatttgagttgtaggacagtcccatctggacagc

SEQ ID NO: 644116 - DNA, 51 bp, Homo sapiens
tgtgcaagctcagcttggagggtgatgtggcctccatgaaccagcgccgtg

SEQ ID NO: 644117 - DNA, 100 bp, Homo sapiens
agaacccacaggtgcatttcacagcactctgggcgaaaattggatgtgaaaatgaagccagaccgagtctgcgggccaggcatcgacatccgcaacgact

SEQ ID NO: 644118 - DNA, 75 bp, Homo sapiens
cacagattccagcttcggaacaagagaccctggaaggtgggagtcaatcattttgacaagtctcctgaaaggaac

SEQ ID NO: 644119 - DNA, 75 bp, Homo sapiens
tgacagaacttcacaggagaactctcctgcccttttaggagtgcaaaaagccccagcatgagaccagatgtaagc

SEQ ID NO: 644120 - DNA, 100 bp, Homo sapiens
ctcagcttcaggagtttggtcaaagcaaccgaaaaggagagtttcctgctcattcagaccaataagctgaagcactaccccagcatccacggagacttca

SEQ ID NO: 644121 - DNA, 90 bp, Homo sapiens
aggacaaatatgaagaagaaattaaacttctgtctgacaaactgaaagaggtattggaagaaatttcatgttaccctgagaataacgacg

SEQ ID NO: 644122 - DNA, 100 bp, Homo sapiens
aactggaaagaagatgctaattaaagtgaaggtgtcgtgaaaactacccctaaaagccaaaatgggaaaggaaaagactcatatcaacattgtcgtcatt

SEQ ID NO: 644123 - DNA, 98 bp, Homo sapiens
acaggctcttcagctccctgcaagtgaccgggcctggggaacagcatcttggtgaacatggatgacaacatcatcgagcactactcgaacgaggacac

SEQ ID NO: 644124 - DNA, 101 bp, Homo sapiens
cctgggagcggaggtttgaagggcgagccgggagacgtggggcctcagcctaactctggaattgagaactttttagcatctttgaatatctccaaagaaaa

SEQ ID NO: 644125 - DNA, 100 bp, Homo sapiens
ggacatcctggaagctgggaaatggcttatccagaatcagatcacagctaaggggactgcccagctggcagatgcgttacagagcaacactggcataaca

SEQ ID NO: 644126 - DNA, 52 bp, Homo sapiens
cctgaatcttggtgtttggacataggaggaaaatactgagatcctcggctac

SEQ ID NO: 644127 - DNA, 124 bp, Homo sapiens
tggatttaaaagacagtcctcgtcagcactgactttcagctatggaatcggtcaacaacggttccagcctcagggatgagtgcatcacaaacctactggtgtttggcttcctccaaagctgttc

SEQ ID NO: 644128 - DNA, 100 bp, Homo sapiens
agagctgcatcattccttggggcaaaatgtggacaagggaagatttcgatgtcgatcattttgtgtctgactgtaggaagcgggtccagctggaagaact

SEQ ID NO: 644129 - DNA, 100 bp, Homo sapiens
cgtccgagcccttcctgaccccgtacctgctggggccggacaagaacctgaccgagagggagatatgcaatatgatgaggatgatgatgaaatcaccccg

SEQ ID NO: 644130 - DNA, 83 bp, Homo sapiens
ggcgggcgccgcgggacctctccgggccatggggagttgaccacatttggccatttcccagaagggccccaccccaagggtga

SEQ ID NO: 644131 - DNA, 98 bp, Homo sapiens
tttgagaatttcctgcacaactccatcttcgtgcccagataaactgtgtgacgttccctcacccagacacgatgccggaacagcagctgctgaaacca

SEQ ID NO: 644132 - DNA, 75 bp, Homo sapiens
gctcgcccacgcccagcgccgcctcctcctcggccagcaacagcgaggctttttctcctccgtgacagccagagt

SEQ ID NO: 644133 - DNA, 75 bp, Homo sapiens
gatggcggttctctggaggctgagtgccgtttgcggtgccctaggaggccgagacctgcctagagctggaacgtt

SEQ ID NO: 644134 - DNA, 75 bp, Homo sapiens
cccgccggttcctcaccctcggggagcaacatgggtgtgatgaatgcagactctgctaccattttggctgtttgg

SEQ ID NO: 644135 - DNA, 98 bp, Homo sapiens
ggcagacccggcacgcaggtgggggccggcggggtccgtggccaggctttgggaacgatcactgcagtgcctgtcacgggtcctcaggtcagctcctt

SEQ ID NO: 644136 - DNA, 100 bp, Homo sapiens
caaagaaggagacgtggggtcactggtgtatgtcatggaagggagaaaactggttgtcctggatgtttgaaaagttggtcgttgtcatggtgtgttactt

SEQ ID NO: 644137 - DNA, 101 bp, Homo sapiens
gttcatttcaacagccagggagaaagcctggatgctcaagcacaagtggaagtgctgtccgctgcactacgtgcttccagcctggatgcacatgaagagac

SEQ ID NO: 644138 - DNA, 100 bp, Homo sapiens
agaaagtcttacatgacacaatggatctgaatcatctcttgaaagccaggaagaaagctcaggcccattagtgatgactctgaaagcattgaagaaagtg

SEQ ID NO: 644139 - DNA, 74 bp, Homo sapiens
ggagtcaagaccgtgctcatctcccgactcaagcaggtttcccaacagtgatgtcacaagattgaccacattga

SEQ ID NO: 644140 - DNA, 101 bp, Homo sapiens
agcagccccggctctgggctacggactatgggcgaatagctctgaccacccggcgaaggacaggcgacactaacaggtgaagatctcgggagaccatgact

SEQ ID NO: 644141 - DNA, 98 bp, Homo sapiens
aagcttgaagggtttggttaaggagaaggaagccaacatccttttggagccatgaatattgtccgaactccatctgttgctcagattggaatttcagt

SEQ ID NO: 644142 - DNA, 98 bp, Homo sapiens
aacgtcatccgctacatcgtgtgcagaccatcctcatgtcccccaaattccactgtacagaggagatcctgaccattgtctccctgctgtctgtggac

SEQ ID NO: 644143 - DNA, 75 bp, Homo sapiens
tcaactaagaccaagtcctcgctggactgctcagggtgccagacctcatccaaagctgtggggatgccttcccct

SEQ ID NO: 644144 - DNA, 50 bp, Homo sapiens
atttcctgctaccacctggatcaggctaaagcagtagctgcagaatcgaa

SEQ ID NO: 644145 - DNA, 75 bp, Homo sapiens
tgcggtgctcgtcgggagtgatcacctaccctacaggtttctctggaaacccccctggtaagtgtggaggaggcg

SEQ ID NO: 644146 - DNA, 98 bp, Homo sapiens
tgctgatgaattactacaaaactcccatcgcgtcgtggaggagtactttgtggcccccccaggaactcaccacattgcctgtcctctacctgtgcgag

SEQ ID NO: 644147 - DNA, 83 bp, Homo sapiens
cagcagccggccgacccagagtacctgcctagagctggaacgttacctccagagcgagccctgctatgtttcagcctcagaaa

SEQ ID NO: 644148 - DNA, 75 bp, Homo sapiens
agttccttccttaacggtcaatacaactgaatatgagtctgaacaacccagtcctgccagctccagctccagctc

SEQ ID NO: 644149 - DNA, 51 bp, Homo sapiens
tcccatcatttccagaaaggacatcacagataccacgaggaacccgaggcc

SEQ ID NO: 644150 - DNA, 100 bp, Homo sapiens
ccaccaggtcaccctggaagagtcgctggccgaagttcgcctctacggaccaaacttcatccttcaggtgtactcatctcagaggaagtcctggcaccct

SEQ ID NO: 644151 - DNA, 74 bp, Homo sapiens
ccgtgctggcagtagggggcgtgggagacctagaggatcaagacataatgggagcatttttagacaagccaaag

SEQ ID NO: 644152 - DNA, 50 bp, Homo sapiens
gggctgtgcaggattggtggtgactggtgcagtggctcatgcctgtaatc

SEQ ID NO: 644153 - DNA, 51 bp, Homo sapiens
actctggagatccgagaaggaagccatgtttgaccgtgagaacaaggccgg

SEQ ID NO: 644154 - DNA, 50 bp, Homo sapiens
cagaagctgcttccaggatactacatgaacctcaaccagaacccgcggac

SEQ ID NO: 644155 - DNA, 134 bp, Homo sapiens
gaaacctcagacagatcgccggggaggcagcgcgggatcccagcctcaggcgtgcgcggacggtgtgcgggatgatcaggatggtgctttcacaaaatggagagtggagaattcatggggtgaagaccatggcc

SEQ ID NO: 644156 - DNA, 99 bp, Homo sapiens
agagcttctcccgcctggagaacctgaagatccacaaccggtcgcacacagtggcctgaagcacgaggacaaacgtggaggtagcggatctcacaactg

SEQ ID NO: 644157 - DNA, 100 bp, Homo sapiens
tgtttaaataatattggtgactcctctcctctgattagagccactgttgctatgaagacggccaagtgggagatgcaaatattaatacacaagaaggagg

SEQ ID NO: 644158 - DNA, 101 bp, Homo sapiens
gaaaagagactgttcaaaccactgaggatcagattttgaagagagatatgccaccagcatttattaaattgagatggcacagaagctattgaactctgacc

SEQ ID NO: 644159 - DNA, 50 bp, Homo sapiens
ttgggaaccgctcgagcctaccagaagaagctactatggaggaaactggg

SEQ ID NO: 644160 - DNA, 76 bp, Homo sapiens
atgttcagcagcgcggcagagtcatggggactacgtctactttgagaactcctccagcaacccatacctgatccgg

SEQ ID NO: 644161 - DNA, 82 bp, Homo sapiens
caggggcaagtacagttactctggggaggttttaaaatcaaagatgggaaaatcggagaaaattgcccttccccatggccag

SEQ ID NO: 644162 - DNA, 100 bp, Homo sapiens
gtggctgtgcttgccaggcctggctccaatgccatggacaatattaccaggcagaaccaattctacgatacccaagtcatcaaacaagaaaacgagtcag

SEQ ID NO: 644163 - DNA, 74 bp, Homo sapiens
gacatttcttcggcattctgcaacagcaacttgagttggtggaaccaagtggctggattcatgttcccttaact

SEQ ID NO: 644164 - DNA, 100 bp, Homo sapiens
ttcagggaataggagctggggagcccttctgcgccacagctccgacagttagttaatatgtgcatcaacccagatccagagaagcgaccagacgtcacct

SEQ ID NO: 644165 - DNA, 83 bp, Homo sapiens
gggaagttaatgtttacggcgaagtctactcaacgtttccaagaatcttgccctgtcgctcaagctggggtgcagcggtgtga

SEQ ID NO: 644166 - DNA, 75 bp, Homo sapiens
aggctgaggctacctgtgaacagtacgcagtgaatgttaaaaggcgacggcggattgacagaagtatgattggag

SEQ ID NO: 644167 - DNA, 100 bp, Homo sapiens
ggtccagtgtccaaccagggctacatgccttatttaaacaggttcattttggaaaaggtgaatgaaaactttgccattgatttgatagcagagcagcccg

SEQ ID NO: 644168 - DNA, 75 bp, Homo sapiens
gctccttctcctggagacgcaactcaaggtcagcccaaggccaaccccactgtcactctgttcccgccctcctct

SEQ ID NO: 644169 - DNA, 74 bp, Homo sapiens
tggcctttggaaagcctgccaaatgtgacactcagtgctctgaacgactccgatgccaacagtgacgtggtgga

SEQ ID NO: 644170 - DNA, 73 bp, Homo sapiens
atccgtcagtttgtccacatcaaaaaatttccaggaatatggatctactggaacagcccatgctgatagtgaa

SEQ ID NO: 644171 - DNA, 114 bp, Homo sapiens
ttcgaattctggtgaaaaaggaagaattgacccttgaaggaatcaaacagttttatattaatgttgagagagaggaaattatggaagtggaaattacaatgattttggaaatta

SEQ ID NO: 644172 - DNA, 75 bp, Homo sapiens
cgctccggaaaggggacacctgcatttatgacattaacagagaacaggactatgtcaagaattctgagggtatac

SEQ ID NO: 644173 - DNA, 100 bp, Homo sapiens
ttttattcaccgcctccgaatttgcaaagaggaggaaggagggacttcttggcttctcccagcatagccccagttatggagaaaacttgtatagatgcac

SEQ ID NO: 644174 - DNA, 74 bp, Homo sapiens
ccgaactggccctggactacctctgcaggcctgtcccctcagttcccaggtgccatgaggaagcctcgtcggaa

SEQ ID NO: 644175 - DNA, 51 bp, Homo sapiens
ctgtaatcaattgtgctgacaacacagggatgctgtggagatgataatggt

SEQ ID NO: 644176 - DNA, 75 bp, Homo sapiens
ctgccgggccgggactggtgcgcgagggtggaatgcagtagccctctgggcctgggatattgtggttgataactg

SEQ ID NO: 644177 - DNA, 100 bp, Homo sapiens
agggaaagtgaggcagctgcaaggagggcggcgggactgcactcgagtgtccagacctgctcgatgatcccagattacaggaatgcagtaatcgtggcca

SEQ ID NO: 644178 - DNA, 100 bp, Homo sapiens
agagacatgaaatgacaagattttaaaaaaatcccatgaggagaaggcattctaatttagctctgccccacagacaagaccatggagtttggccgagact

SEQ ID NO: 644179 - DNA, 75 bp, Homo sapiens
agaggatggaacacttcagtgcattcaaggtggttatccaaatgccaacccagtccaggtttcaacagcaacatt

SEQ ID NO: 644180 - DNA, 100 bp, Homo sapiens
ctcctgctcctggtggccgccagccggcgcgcagcagacttgccttcaaggtgtgcaagtaaggacttatctccagaaaagaacacttatgaaacagaat

SEQ ID NO: 644181 - DNA, 83 bp, Homo sapiens
cgcggcagcggagggacggcagtctcgcgcgttactatgcgagtcagaagaaaacatttgaaattaatcccagacacccgctg

SEQ ID NO: 644182 - DNA, 89 bp, Homo sapiens
caccgtggggccctgctctgaccacagactccgatggcagcggcggcgctgcgggaccccgcgcagacccagtcatggcagcctccagc

SEQ ID NO: 644183 - DNA, 50 bp, Homo sapiens
gcggatggatcaacgccgccaagtggccataggaaaaggatacagagtag

SEQ ID NO: 644184 - DNA, 95 bp, Homo sapiens
agagaggaggaagagaggatggcgccggcctctgagtcctctgcttccggagtgtggctggctacccaaaaccacagcactctggtgacagagcg

SEQ ID NO: 644185 - DNA, 100 bp, Homo sapiens
gaggagcagttgtctgatgaagagaagtgccggatggagtgctgtgatgtgccagccgagacactctacgacgtcctacacgacattgagtaccgcaaga

SEQ ID NO: 644186 - DNA, 96 bp, Homo sapiens
ttctgacattttgccttctgattctaactgcaaagaagcagagcccctggaaaactcacatatgtgtcaacaatagtccttgatgcccctgtaaca

SEQ ID NO: 644187 - DNA, 90 bp, Homo sapiens
ctcctcctcctgaagaagatgaggacccaggtgttcaggtctcagatgatgataaagaaaagggagagggagctcttccaactgggaaat

SEQ ID NO: 644188 - DNA, 100 bp, Homo sapiens
atctggaaatgaaaatggagagttctacctacgagtaaaggccgaggggcaaagaaaaggaaagcatctggctctgaaaatgaaggcgattataaccctg

SEQ ID NO: 644189 - DNA, 100 bp, Homo sapiens
cgggacgcggcgccgcggcaccagggcgcgcagccgggccggcccgaccccaccggccatacgatgatacaccccctgaagactccattcctttggtctt

SEQ ID NO: 644190 - DNA, 75 bp, Homo sapiens
gccgccgcctgccctcagccgcccgctggccgggagcggagcccctgtgggcaatgaatcgctccctggctaatg

SEQ ID NO: 644191 - DNA, 75 bp, Homo sapiens
ctgcggcccagtgggccatctcacagaaaaggtgtgagcggtactgggcccaggagcaggagccactgcagactg

SEQ ID NO: 644192 - DNA, 97 bp, Homo sapiens
atctgatgtgatctctcagctggagcaagaagaggacctgtgcagggcagagcaggaggccccccgaggttttacacatccataagtagaccttttt

SEQ ID NO: 644193 - DNA, 100 bp, Homo sapiens
aggaactggagaggaccaacaaattcatcaaagacgtaatcaaagacggcaacgcgcttatcagcgctatgagaaccacaatggtgcgcatgaatgtcct

SEQ ID NO: 644194 - DNA, 50 bp, Homo sapiens
cggagctcccccaagagccggaaaggtggacccccaaaagtacaagggca

SEQ ID NO: 644195 - DNA, 100 bp, Homo sapiens
cgtagataccgagctgctagccgagagattttactaccaagccctgtcagtagctcctcagattggacagagcgggatgccaccagcttgtccaaaggga

SEQ ID NO: 644196 - DNA, 90 bp, Homo sapiens
tccacagcaggatcatccaggtctcctgaatctgaaaagccagggtgtcaaattgagaaccaggtagatccccaccacctacagtaaaaa

SEQ ID NO: 644197 - DNA, 90 bp, Homo sapiens
ggaggaaggagagaaaatggcgtccacggccaaggctaagtcgaaatgtggcccaaccttcttcccctgtgccagcggcatccattgcat

SEQ ID NO: 644198 - DNA, 83 bp, Homo sapiens
aacagaagagtgagagatggaacccgaagaagaaaggattcgttacagccagagattggaggaagagctgcgcaaaggtggag

SEQ ID NO: 644199 - DNA, 50 bp, Homo sapiens
gccagttcgtgtccctggacggccctcgggaccaaggatcacgtcatgac

SEQ ID NO: 644200 - DNA, 143 bp, Homo sapiens
atctgcaggtccggagagacgcacagctaagatgtcaggacatcctggaagctgggaaagggctgtggaaaatctctgttctcacaaagtctccccaatgctctacaagcaactgcgtcaggcctgtgaagaccacgtccagg

SEQ ID NO: 644201 - DNA, 75 bp, Homo sapiens
ctgggggccatgtggaaactacataaggggctttgttatgcacctaaagccatattggaagctccagaagaaaga

SEQ ID NO: 644202 - DNA, 100 bp, Homo sapiens
cggtgctggtgggccctgtgccagcagggagacacatgtttgtctttcaggttatcagtgagctgaatggaaaaaacattgaagacgtcattgcccaggg

SEQ ID NO: 644203 - DNA, 100 bp, Homo sapiens
aaaggctggtttgagcgagtgttcataggagagtttgcttacacttacgctgccatgtatgacaaaggacccttccggaaccttattttggggagtaaag

SEQ ID NO: 644204 - DNA, 74 bp, Homo sapiens
agaagtagctaatgaaattgaaaacctgggatccacagaggaaagtttgaaaatctgaacacagttgctgagtg

SEQ ID NO: 644205 - DNA, 101 bp, Homo sapiens
tctggaagctgagggcacgtgtttgcggttcagccctttgatgaccgcagcagtgctacagttgaaactccagcagcgccggacccgggaagaactggtga

SEQ ID NO: 644206 - DNA, 82 bp, Homo sapiens
cgcaataagatcttcatggagttccgcaaattgcaaaggtcacattgaagtagtgaaattgcttgtgtcgcatggagctgaa

SEQ ID NO: 644207 - DNA, 75 bp, Homo sapiens
gggaagagaaagcgaagccagtaccagcgtttcacctaccttcccgccaacgaggccacaagaggaagctgaatg

SEQ ID NO: 644208 - DNA, 98 bp, Homo sapiens
caatcacattaattcatatgaccatgctcacaagcagatcagcaaagacccgatttttgtaccaggcgtctgggggccttatttctcagccatggtac

SEQ ID NO: 644209 - DNA, 98 bp, Homo sapiens
cccgtccccggcagcgacaatgagcaggagcttccagcccgtgtgaacctctcagctgccccagccccagtctctgctgtgcccaccggcctacactc

SEQ ID NO: 644210 - DNA, 90 bp, Homo sapiens
ctcctcagcagcagacaggggaccgaggagagcagagcccaggaactggacagcagacaaggaaggggcagtggaagccgttggagggcc

SEQ ID NO: 644211 - DNA, 50 bp, Homo sapiens
gatgaaatagatctctcggctctgaggatagcaaagccattgtggatggg

SEQ ID NO: 644212 - DNA, 51 bp, Homo sapiens
gaagaaaggcttcggttggagcagcaaaagggaagcaagcacttatttggc

SEQ ID NO: 644213 - DNA, 51 bp, Homo sapiens
aagaacccagggcagaaaggtttaggggtaaaagcatgtctacgaagaaaa

SEQ ID NO: 644214 - DNA, 88 bp, Homo sapiens
tggctggaacacacatcagtcacccagagagatgacacgggggaaattcctcaatattctagagaagcccaagaagtagcagctgctt

SEQ ID NO: 644215 - DNA, 96 bp, Homo sapiens
agttcaaagacctgttcttaaaaaaaggactcacaccacccggcaagaactgctcactacggctccctgccccagaagtcacacggccggacccaa

SEQ ID NO: 644216 - DNA, 75 bp, Homo sapiens
gggacgtgccgcccctttgcgggtcttgggcgtctttggtactggcttttttaggggtctgcctggggattaccc

SEQ ID NO: 644217 - DNA, 76 bp, Homo sapiens
tttaggattgttgttacatcccttcagagacctaacgctgcctgtggaggaaccgattgtgtccacagatgaggtc

SEQ ID NO: 644218 - DNA, 50 bp, Homo sapiens
tgacgacatcacgcacaaggtgctcagttcaatctcatccctcccagcag

SEQ ID NO: 644219 - DNA, 75 bp, Homo sapiens
gggtgaggaagattttgaagacaatcgtcacttatacaggtgatttgaagatattaaagctagaaattggaacta

SEQ ID NO: 644220 - DNA, 100 bp, Homo sapiens
gctggtcgtctccgagatcttcgtcagccagacaaccttcgtgggcatcgtccctcttgccatgaacaaatttcaaggaatggtctttgacttcgtaacc

SEQ ID NO: 644221 - DNA, 100 bp, Homo sapiens
aaaatggcggcgcctgaggagcgggatctaacccaggagcagacagagaagctgctgcagtttcagtcttactactttgaccgcgatgatgtggctttga

SEQ ID NO: 644222 - DNA, 82 bp, Homo sapiens
ccacccgcgccaggaggccgaacgcggactcgccacccggtctgaacaacccagtcctgccagctccagctccagctccagc

SEQ ID NO: 644223 - DNA, 100 bp, Homo sapiens
caggagccgcggagccggcgctgagaggggctgcggccggagcgggcggctgagacaaaggcgacgattactgactcagcaatggagatgttatcggcaa

SEQ ID NO: 644224 - DNA, 101 bp, Homo sapiens
gtctcaatatctgtcttcggtggactccttcggcagtccacccaccgccgccgcctcccagaatcggcaaggttggaaaccagaagcgtgttgttggtgtg

SEQ ID NO: 644225 - DNA, 96 bp, Homo sapiens
tagatgcaagtgatgatggaatcttggccaaaatcgtgtggtgccagtgaagaagaggacacatgaaggcttgctacccccagtggaaaatcatcc

SEQ ID NO: 644226 - DNA, 82 bp, Homo sapiens
agcgccagcggccgagcgggcggcttcctggcctgggcgctccggtggcggcggaggactcagtggtctttgaggatgtggc

SEQ ID NO: 644227 - DNA, 80 bp, Homo sapiens
cgggagctggacggcgagcgcgagcggcgcgagaaagtgtcagagatggctgaagatgggagcgaagagatcatgttcat

SEQ ID NO: 644228 - DNA, 75 bp, Homo sapiens
gtccactctgattcaggcctctgacagctcttggaaggtcatacagcagatggaacaaaaaaaattacaacaagg

SEQ ID NO: 644229 - DNA, 83 bp, Homo sapiens
cggggagatgtggccatcaagctcaagttcctggaagaaaacaaggtgaagccaaaaaccttccctcttacccggggccgagc

SEQ ID NO: 644230 - DNA, 101 bp, Homo sapiens
cgcttcgaaatcgcctgctacagaaacaaggtcgtcggctggcggagcggcttattcttacaaccagtacagaaaatagacatgaatctcacagatcttct

SEQ ID NO: 644231 - DNA, 75 bp, Homo sapiens
ggagttaatgtccaacctagggtctgcggagacccgatccgaggtttttagaacttcagccataaaaatgggcag

SEQ ID NO: 644232 - DNA, 98 bp, Homo sapiens
gccacttcaggtttgcagtcgagcgcaaacccaggccgttagtggaggagggtgaggacaaaatcttcttaatcaacaagcttcactccatctacgag

SEQ ID NO: 644233 - DNA, 75 bp, Homo sapiens
cgccgacgtcgaccagcagagactgcattcgttcagtcagagagcataatagaagtactgcgttttgatgatgga

SEQ ID NO: 644234 - DNA, 75 bp, Homo sapiens
ctccttttccctctccctttccctaagaaggacagaataacgggctcccagattcacaagccccaccaagaggat

SEQ ID NO: 644235 - DNA, 128 bp, Homo sapiens
ctgagacatctttgctgcaagatcgaggctgtcctctggtgagaaggtggtgaggcttcccgtcatattccaggccctcaggtctctgcaggtgtcgtggaggaacctagcacctgccatcctcttcc

SEQ ID NO: 644236 - DNA, 88 bp, Homo sapiens
tcgccgctggcgtcaggactattttcacgttttaatgccgagagatctcgacatggcaggagctgaggcagctgcaggagcagatccg

SEQ ID NO: 644237 - DNA, 74 bp, Homo sapiens
ttggatcttatatgtagagcccatcagtgtgatccagctttgcttcctgagcccaatcacgtcatgctgaacca

SEQ ID NO: 644238 - DNA, 90 bp, Homo sapiens
gtcaaatataagagtctgactacttgacacactggctcggtggatatggttatagaagaagtggccgagataaatatggccctcctactc

SEQ ID NO: 644239 - DNA, 100 bp, Homo sapiens
aaacgttctgtactgtccaagtcagttcctgggtacaaggaattacatgaacgacagccttcgcaccgacgtcttcgtgcggttccagccagagagcatc

SEQ ID NO: 644240 - DNA, 90 bp, Homo sapiens
cttgcttccctcggccgggccgtcctcggcggcagtgtcaggtgaacacctacctcttcatgatgcaagcccaaggcattctgatccggg

SEQ ID NO: 644241 - DNA, 75 bp, Homo sapiens
cttatgctcctatcaatgccaatgccatcaaagcagagtgttcgagaaatggctgctactaccttaagcggtctg

SEQ ID NO: 644242 - DNA, 82 bp, Homo sapiens
ccgcatgctgagagcgcagagataccaaatactgctgaaaggatgcaaaggatgataggatgaaagaatgtcacaaaaagca

SEQ ID NO: 644243 - DNA, 101 bp, Homo sapiens
ctgctatgggaattctgaatacaattgatacacttcttagtgtagttgaagatcataaagaggctgatgtccggccccaaactgatggctgtaacggtcta

SEQ ID NO: 644244 - DNA, 74 bp, Homo sapiens
tacagagccggtgatatgatctgtcctgaatgtggcttggttgtaggactcagaattcatgattgaagaaatgc

SEQ ID NO: 644245 - DNA, 75 bp, Homo sapiens
ctgccaaagctgcagggccactgcaagtctataaagaacacgctcaggagcggtttccaacctagatgaggaaag

SEQ ID NO: 644246 - DNA, 50 bp, Homo sapiens
ctggcattgctggaggatacaaacgtattgcacatctattacaaatttcc

SEQ ID NO: 644247 - DNA, 100 bp, Homo sapiens
cccgggcctggtgggggacgcgcttcttcccacactgtgagcctcagcagctccagccagcggacccgacggctgagagatgttcatggggttcaccagg

SEQ ID NO: 644248 - DNA, 98 bp, Homo sapiens
aaatgcttcgtttaccacttcgccgtaacgctgcgatgactggggactagacaccatgaggcaaatccaagtgtttgaagatgagccagctcgcatca

SEQ ID NO: 644249 - DNA, 75 bp, Homo sapiens
aatgcactgaagagaggagagatcattgcaaagcagggaggaggctaggaattatctgtgaatgtaggaccactg

SEQ ID NO: 644250 - DNA, 100 bp, Homo sapiens
agattttggtttaatatctgattgggacaacattcagacccatttccagtcatgagtccttccatagtgacgccccccaaggacatctggaatgtcactg

SEQ ID NO: 644251 - DNA, 95 bp, Homo sapiens
tccgaccggctgaggcggcgcggcagcggagggacggcagtctcgcgcggtgtcgtgaaaactacccctaaaagccaaaatgggaaaggaaaaga

SEQ ID NO: 644252 - DNA, 101 bp, Homo sapiens
ggcagcaagagatgcacaggaggctattttggcattctgctggatatatgttcgtaaataccaaagtcggcgggaaagtgaagttgtctccaccataacag

SEQ ID NO: 644253 - DNA, 82 bp, Homo sapiens
cctgcccttacacctgtgctcctatacaagattaacattcagtgaaatgtgaccattactggccattcacggaagaacctat

SEQ ID NO: 644254 - DNA, 50 bp, Homo sapiens
ccagtccgggctccacaaagggcgcgggtcagttaaatgaaagcatggac

SEQ ID NO: 644255 - DNA, 83 bp, Homo sapiens
ttgacaattatcggcgctgtgtcagcagatatgtgctgattagaaggctcacttgtgcagtgtggaggataaccagtgcctta

SEQ ID NO: 644256 - DNA, 98 bp, Homo sapiens
aacccgctcgggaagcagctcttgccaaaaacctttggacagtccaatgtcaacattgcccagcaagtgaaaaatggctacaaacttcctagcacatg

SEQ ID NO: 644257 - DNA, 100 bp, Homo sapiens
caaaaaatgatttggtggtcagcttgcctgaggaggtaatgaaagcatgggatgctcatgtgacagcagtttgctcccaagatgccagtgaacttgtaag

SEQ ID NO: 644258 - DNA, 82 bp, Homo sapiens
ttgggatcctttatcctggtcatcttctatttccaaatataatggaatgtgcttacaagggccagcaggagtgcctggtcga

SEQ ID NO: 644259 - DNA, 50 bp, Homo sapiens
acattgacagttggtggaggggtaatgtttgaaacttaccagttttccgg

SEQ ID NO: 644260 - DNA, 97 bp, Homo sapiens
tgagcttgatgctgtggagaaccagctcaagtgggcatcctgggagctccattccctaaggcactgtggttgggggccgtcccgctcctaaggcagg

SEQ ID NO: 644261 - DNA, 82 bp, Homo sapiens
tgcgggcaccgcagtcgccgtgaagatggcgtctaccagccggtaatactgcattgcatgattgtgcagaatctggaagttt

SEQ ID NO: 644262 - DNA, 76 bp, Homo sapiens
tcctctagagccactgctggatactaaatgtgattgggtcaacaacctggaggttgatagcagatataattcgtgg

SEQ ID NO: 644263 - DNA, 50 bp, Homo sapiens
cagctccacactgtgaactaattcctctgtgacgagggtgcaggtatctc

SEQ ID NO: 644264 - DNA, 100 bp, Homo sapiens
tacctgccttgtgaagatcattaatgaagtaaagcccacagagatctacaaccttggagcccagagccacgtcaaaacctgcctagagctggaacgttac

SEQ ID NO: 644265 - DNA, 100 bp, Homo sapiens
ccgggactgaggccgccctgcaccttcagcggatttggggattaggctcttttaggcagctgctcccaaccccagaacctttgctgtcttgggacggatc

SEQ ID NO: 644266 - DNA, 100 bp, Homo sapiens
tgactcggaaactgcagttgtaaatgtaacctattccagtaaggaccaagctagacaggatccctgagatgttcatactctgcattctcatgtgcatgat

SEQ ID NO: 644267 - DNA, 98 bp, Homo sapiens
atgaccagggcagaagaagccatggaactttaccacatagcactgttcttggaatttaacatgcttgcacaagatgaggatggcaataaccagtggcc

SEQ ID NO: 644268 - DNA, 101 bp, Homo sapiens
tggacgtgcacgcagcccggcgggaggataaagaccaccacgatgagattgtggggaacctgggtgaaggcacctttggcaaggtggtggagtgcttggac

SEQ ID NO: 644269 - DNA, 95 bp, Homo sapiens
tgagcttgccgcacaaaaagctagagagggcactccagtgtttgtccatgctggcccgtttgccaacatcgcacatggcaattcctccatcattg

SEQ ID NO: 644270 - DNA, 90 bp, Homo sapiens
gatttttgcaagaaaaggggccttctgtggattggggaaaaatccagagaccccctgaagattcgaatttctctgcaaagaatgtccaaa

SEQ ID NO: 644271 - DNA, 73 bp, Homo sapiens
gccactgttctctgggacaatgcttttgcagagcctagacccactgctaaggagttattgaagcacaagttta

SEQ ID NO: 644272 - DNA, 90 bp, Homo sapiens
gacggcttggaaaacggagagactggggagaaaatgctatgaacctacctcctgacaaagccaggttactgcggcagtatgataatgaga

SEQ ID NO: 644273 - DNA, 75 bp, Homo sapiens
ttcttctaatactcctcctctaacatgtcagcgttattgtaatgcaaggtaatcaatgagcttattggaaatctg

SEQ ID NO: 644274 - DNA, 90 bp, Homo sapiens
ttcgacttcgatgatttactgaaatttgatgacctagatggaacacatgctctgatgaactggaagaagttcgggaactcagagtttgac

SEQ ID NO: 644275 - DNA, 103 bp, Homo sapiens
agaagatgcatgccagagacttcacagtttctgctctgtcatccgtccttggctcaggatttggagagcttgcaccaccaaaaatggcaaacatcaccagctc

SEQ ID NO: 644276 - DNA, 76 bp, Homo sapiens
cacacagaggatgatgctgactttgatgaaggagcttttgatgggaggccagcagactatttattcatgctcctct

SEQ ID NO: 644277 - DNA, 80 bp, Homo sapiens
tgttgccactgctgttttagaacatataaagagatgtcattgctgggagaggtatccactcaaaggtgaagtctgcaaag

SEQ ID NO: 644278 - DNA, 74 bp, Homo sapiens
tggacctgaaggaggccggtgactttcacttccagccagctgtgaagaaggtatctcattcagttgctaaactt

SEQ ID NO: 644279 - DNA, 90 bp, Homo sapiens
gcgcgaagctggccaaagcctgcccagacggctcacctgtgcgggatggaacaaaagatgacagatttgaagatctggaagaggcaaatc

SEQ ID NO: 644280 - DNA, 100 bp, Homo sapiens
atgggacactgagctttgtggaagcatttggcggcataccaccctgcactgtgaggaggctgaaccgtctgagcccagaagtgctgaggtgacgaggaag

SEQ ID NO: 644281 - DNA, 82 bp, Homo sapiens
ctccaaaagtgctggcattacagctcctgcttcaggtgcagaaatacagcgatttccagtgccagctgttgagccagtgcca

SEQ ID NO: 644282 - DNA, 75 bp, Homo sapiens
agaagcagttctacaaggcgagccaggttatcagtgagctgaatggaaaaaacattgaagacgtcattgcccagg

SEQ ID NO: 644283 - DNA, 94 bp, Homo sapiens
ctcgcctttgccgatccgccgcccgtccacacccgccgccagctgagcgggctttggacaccatgaactttgatgtgattaagggaaagccaat

SEQ ID NO: 644284 - DNA, 78 bp, Homo sapiens
agcattctcctctattagactagaactgtggataaacctcagtgagaaagatcagtctaaagaaaaggagaagaaagt

SEQ ID NO: 644285 - DNA, 75 bp, Homo sapiens
gcctgacagctctgcggctcgggccctgagctgcttttctaacccaaactgtatgtcttgatgacactacagtaa

SEQ ID NO: 644286 - DNA, 100 bp, Homo sapiens
caaacaaacccaattcctggtgtcccctagtcttggcggaggagccttttagatgagccccgaaaggccgggcagaatgtgaaggctgtgtctgagactc

SEQ ID NO: 644287 - DNA, 75 bp, Homo sapiens
ctgggaaacccggggctaatgttgacaacaggctcgaggtgccagcgagatttcagattcctgtaaacctctaaa

SEQ ID NO: 644288 - DNA, 82 bp, Homo sapiens
atcaaaacctggaccttctggattacaggccaaattagcaagtacagcagggaagaactggaaactcagagaaagaaactgc

SEQ ID NO: 644289 - DNA, 100 bp, Homo sapiens
gacgatctgcacttcgcattttggcattgacatttaattttagggtcctttatatagaagggagagtaggcctcgaaggagctccagcaagcccagacaa

SEQ ID NO: 644290 - DNA, 75 bp, Homo sapiens
ctttatgtccttacaccagatttgccaccaccttcatcatctagtcatgctggccgctgctttgatgggagcacc

SEQ ID NO: 644291 - DNA, 82 bp, Homo sapiens
ccccgaaggaaaaggaggaattcgccgtgcccgagaatagctccgtccagcagggccgctgtcccgaggttcatccagcaga

SEQ ID NO: 644292 - DNA, 75 bp, Homo sapiens
aagtaatgcaatggtctcaatctctggaaaaacttcttgccaaccaaaatactttacttgtgaaagaaccagtgg

SEQ ID NO: 644293 - DNA, 100 bp, Homo sapiens
ccgacccggatctcaacaatcccttcaagatttgtcttcagcgaagcggaagtttgcagattccttaaatgaatttaaatttcagtgcataggagatgca

SEQ ID NO: 644294 - DNA, 75 bp, Homo sapiens
tttgtggctggctggatctctggcctcagctgttgaagaacgctctgcagagagcagtagagaggggccagttag

SEQ ID NO: 644295 - DNA, 122 bp, Homo sapiens
gtcgaatctgagcaaaggcacgggcagccggaaggacaccaagatgcggatccgggcctttccgattgtgcttcaagaagaccatagggaagaacgcattttcatcttgctgcaaaagttgc

SEQ ID NO: 644296 - DNA, 90 bp, Homo sapiens
ggtggccataccgttgaccgctcctccaactaaccaatggcctctccagaggagaagtgtcaacaagtcttggaacccccttatgatgaa

SEQ ID NO: 644297 - DNA, 75 bp, Homo sapiens
gttggaagcccgggaccgtttaaaaaactgggagcaatggaccacagaaattctgcattgaaaaagttgggaaag

SEQ ID NO: 644298 - DNA, 110 bp, Homo sapiens
ctcaggagccgcagcgcccgcgggcccgggtgcgggcccggcgccgcaccagcagaacgcttaacattggtatcccttccctgacaaagtgttgcaaccaacacgacagg

SEQ ID NO: 644299 - DNA, 82 bp, Homo sapiens
agttacgttatactgcccctgcattgttggtattgaaatacctgtttgaaaatggtagaatagataacatttttactgagcc

SEQ ID NO: 644300 - DNA, 75 bp, Homo sapiens
gcagaagattatacctcactattctcttgctcgatggctactctgtaatggcagaacattctagtatgccagtag

SEQ ID NO: 644301 - DNA, 75 bp, Homo sapiens
atgtccgctatccagaacctccactctttcgcaaccatgtccaagggacctgcagttggtattgatcttggcacc

SEQ ID NO: 644302 - DNA, 101 bp, Homo sapiens
ctcaagagcatcagtgatgtggaaccgaacacagccaaatttgtatcctactgtggggcttcaaacaccaggagaagtggtcgatgccaattttgggcaac

SEQ ID NO: 644303 - DNA, 75 bp, Homo sapiens
gtttgtcgtcgtcggggtcctgctgcagtgcttgcgctccaggcccgaaagaaaaggaccaaggccaagaaggac

SEQ ID NO: 644304 - DNA, 100 bp, Homo sapiens
tgatatcagacaccgagcttcagcaagctctctccaacgttctcaaaagtctatggtcctgtgttcaccgtgtattttggcatgaatcccatagtggtgt

SEQ ID NO: 644305 - DNA, 100 bp, Homo sapiens
cctaaggctcgaacttacactgaaactgtcaaccatcactacttgctctttcaagacacagatttgattgccaggatgggatttaatgcatcttccatgc

SEQ ID NO: 644306 - DNA, 75 bp, Homo sapiens
aagatttgggagcatctactttgtgccagaatctgtgtttgtggatatcctcgacaacatgtaagaaaatataaa

SEQ ID NO: 644307 - DNA, 98 bp, Homo sapiens
ctgggccggtgcaactattcgcagtccgagcgaccctgtattcagtggatcagctggcaccacccaaatagataaattggcccatctggtcttgtggc

SEQ ID NO: 644308 - DNA, 100 bp, Homo sapiens
tcgcagtctccacggcgcaggcccacggtagcgcagccgctctgagagatgcacaggtgattgagctgtaggtgagcagtgacgtgaagaggggttctag

SEQ ID NO: 644309 - DNA, 71 bp, Homo sapiens
agaagcaggaccgcggggagctgaagctgctgcttttggattgagaacacagaagcagtacatcaacaatt

SEQ ID NO: 644310 - DNA, 109 bp, Homo sapiens
gaaccttctaattgtgaaggatctgttaaggtatcccatttggcagaggttgaaaagataattgcagttgcctgggacatttttcagccccttctttttggactaattg

SEQ ID NO: 644311 - DNA, 98 bp, Homo sapiens
aagtgcgagcccagcgggagaaaatcaaggagcatttttgaaacgttggggttgttggagtggttggattttccctggaattgagtgagaaattcaga

SEQ ID NO: 644312 - DNA, 100 bp, Homo sapiens
ggcggcggaggaggagacggcaggtcgggcatgggactcgctgtgctggagaagtggcagccgctgcaaacaattcgcactgcacagtcggaattgcttt

SEQ ID NO: 644313 - DNA, 78 bp, Homo sapiens
tttgaagaaagtgaattacatcaaaatcttgtttaacccagaactggtgctggtctcagctggctttgatgctgcacg

SEQ ID NO: 644314 - DNA, 75 bp, Homo sapiens
aaaggagctgctgtctggaattggcaacatctctgagagtttgtgctgaagcacacggccttcgcccacctgcgg

SEQ ID NO: 644315 - DNA, 75 bp, Homo sapiens
tcctgtacagcctgcagaactagtctttgtggaagtggtgaaaagtacatcccacctcatgtgaggcaagctgag

SEQ ID NO: 644316 - DNA, 50 bp, Homo sapiens
ggtttcattcgaggtttcgggccggccaagctataacatcagaaatggtg

SEQ ID NO: 644317 - DNA, 100 bp, Homo sapiens
gctactcaaaattctacgttagagagactgaaaagacatctaatttcattgctcggcaggtggaggtggaggaagcgtccctgggatcgagaggatgggt

SEQ ID NO: 644318 - DNA, 75 bp, Homo sapiens
ggagagcgcgttggtggcgacggccgagtcaggttgcctgtgatttgcttcggaggattattcgtatcttgaatc

SEQ ID NO: 644319 - DNA, 100 bp, Homo sapiens
tgtcccgatcccgctgtgtgtctcgggcgttcagccgctcgctctccgccttccagaaggtactactgagcgagtgtgcttgatccagggaacggttgaa

SEQ ID NO: 644320 - DNA, 100 bp, Homo sapiens
ggcggccaaggacctggccgacatcgcggccttcttccgatccggcttctgcttcagtttacccaacctcagcaaacatcgtttgctttggagaggaact

SEQ ID NO: 644321 - DNA, 50 bp, Homo sapiens
aaaagggagcacttaaggaagaatacactctgtgcagttttagagagaga

SEQ ID NO: 644322 - DNA, 83 bp, Homo sapiens
ccatgaagcagtacaacggcgtccctctggatgattcctggtcgggtggcttccagtggtcttcagtctgtcgtgcaccgatg

SEQ ID NO: 644323 - DNA, 98 bp, Homo sapiens
aaatcttgcctcaggacttgctgccaggggaacgcagactcagagcgtcctctttggagaagcccaagtctggttgcccccaaaccacatcctagaga

SEQ ID NO: 644324 - DNA, 75 bp, Homo sapiens
tcatggatcaactgataagttgccttatgtcaccatggttgaggctgtgaagctgggcagggtttcagctgagct

SEQ ID NO: 644325 - DNA, 100 bp, Homo sapiens
aatacatcagcttgtaggagacagagaacatctgctcaaattaatgaccatgggggatatgaagaccccagactttgatgacctcctggcagcatttgac

SEQ ID NO: 644326 - DNA, 73 bp, Homo sapiens
tggggcagaatacagagatatggaatcaggacacagcattgttggttttgccatgtactattttacctatgac

SEQ ID NO: 644327 - DNA, 100 bp, Homo sapiens
gaagctgatggcatagttatgagaggggtgaagactgcgactgcatttccaacagaccctgaggacaattgggaagaatagatgaggtctcactatgttg

SEQ ID NO: 644328 - DNA, 99 bp, Homo sapiens
cttaggaatgttatcgaaggacaagaggatctgttcttccccttcgaggaatgaattcaggactcaagaacctgtaaaaaatacaaataaataattaaa

SEQ ID NO: 644329 - DNA, 75 bp, Homo sapiens
acagatttccttgcacttatgccaatgaagtataaaagaagcctgtattgttttgaatttgaacgtcggttctgc

SEQ ID NO: 644330 - DNA, 51 bp, Homo sapiens
ctcttttaaatgcttttggaagcagccagactgccttccgggtcactgcca

SEQ ID NO: 644331 - DNA, 99 bp, Homo sapiens
aacccctccggctacgggccccttaccgagctcccagactggtcatatgcggccctgctgcaactgggacgcaaagaagggggagtatgtatttcccgc

SEQ ID NO: 644332 - DNA, 98 bp, Homo sapiens
ttgtgaagaagaatttcgatctccgccctggggtcattgtcaggtctgcattacatttactgaatttggaaaaatgcaaaatatttgtaactttcttg

SEQ ID NO: 644333 - DNA, 100 bp, Homo sapiens
ggaaattcatttacgacttgggcttatgttcaaagtgaacacagactatgagtctagtttaaagccaaaagaatgcaatggtgtaaagattccagttgat

SEQ ID NO: 644334 - DNA, 75 bp, Homo sapiens
aaaggaactcccaagcgactgcaggcagaagctgagacggctaagcctttctgagaaaagtctacagcattcttt

SEQ ID NO: 644335 - DNA, 90 bp, Homo sapiens
cattctgagagcagcagcctggctcctggtggctccagcagcagaccttgaagctgatgatgttaagggcagtgtaccactgtcttcaag

SEQ ID NO: 644336 - DNA, 99 bp, Homo sapiens
ctctgaagccgcgtcctactttgacagctgcagggccgcggcctgggtgtgcaactgaggaacatggctcaagaaactaatcacagccaagtgcctatg

SEQ ID NO: 644337 - DNA, 75 bp, Homo sapiens
tccttccagcgctgcgcccggacagacaaggtgtgatccctcacatccacaaatctctgattggaaagaagggac

SEQ ID NO: 644338 - DNA, 83 bp, Homo sapiens
ctaggttctgggaagatggcgaaggtctcagagctttacgatgtcacttgggaaggcataagatgcacatttttctgctctgg

SEQ ID NO: 644339 - DNA, 97 bp, Homo sapiens
ctctagggaccctgctgaatagctggggctacaggcgtgtgtcactgcgcccagatgggcaccaacaagtttgccagccagcagggcatgacggcct

SEQ ID NO: 644340 - DNA, 100 bp, Homo sapiens
cggaaactccagcgtgtctccagccgtgttcaactttgtggggaaacttttgggtccacgtggcaattctctgaagcgtttacaagaagaaaccttgaca

SEQ ID NO: 644341 - DNA, 97 bp, Homo sapiens
tatcacttcatctgcaaatatttcaataagtacccaaaagatggctctgagagattcctctgcgaatctgtttttagctatcaagtggcatccacgc

SEQ ID NO: 644342 - DNA, 75 bp, Homo sapiens
aacagaataagaacattagttgcgacgagtagaacagcccctctatggtttagatggcagtgctgcaaaggaggc

SEQ ID NO: 644343 - DNA, 106 bp, Homo sapiens
tttgctgtactttatatgatatgcttgcttctattaaaagtggtgatgaacttcaggatgagacaaatcttcctattttcaagctgaaagaatctactgttagaag

SEQ ID NO: 644344 - DNA, 100 bp, Homo sapiens
aagcttccggttctgaggtcctggaggtgccatttccctctctgttgaagcaaaggccggggcagacctcctagttaatccctatatcctgaagaagaac

SEQ ID NO: 644345 - DNA, 75 bp, Homo sapiens
cgcctccgtgtgccctggttgtgagaagacgtctgtgtcgtgcggaagaggatcacctagcccgggtagaagagg

SEQ ID NO: 644346 - DNA, 83 bp, Homo sapiens
gtcgcagtctccacggcgcaggcccacggtagcgcagccgctctgaggtggccagcatcgaaatgttcagccttttagtgatg

SEQ ID NO: 644347 - DNA, 74 bp, Homo sapiens
ccagtcagaccagcgcgtcatcatcaagtttaattggttggggtcagataagaagaggagtgacaatcaagcca

SEQ ID NO: 644348 - DNA, 121 bp, Homo sapiens
gtgaattgatccgggagttgaagagggctgcaaggtgggaagtgaagtcagtgcctcagttgctgtgcatagtatgggactgggactccaatggcaagcatgacttcattggagaattcac

SEQ ID NO: 644349 - DNA, 120 bp, Homo sapiens
aaatttacatgtattggagaccagaccagaagcccttctgaattaaggttgtgcctttttagccaagaagcatggaagtcattcacggcaggccctactgttgcagggagcttgaaggag

SEQ ID NO: 644350 - DNA, 83 bp, Homo sapiens
gtccagctcgcccagctcgcccagcgtccgccgcgcctcggccaaggcccggcagccatggcggtggaaggaggaatgaaatg

SEQ ID NO: 644351 - DNA, 100 bp, Homo sapiens
ttctcagcagcaacatccccaaacagcggcgtttcacggtggcacatacatgcctcagggatttagagatactgttgttacttctgcatgttcattgcaa

SEQ ID NO: 644352 - DNA, 111 bp, Homo sapiens
cagtttgctgaagcttggactccaaatgacagttctgaagagttaaggaaggaagctttgttcactcacgtgatgatgaacagtctacacagatggctgcaagttgggaag

SEQ ID NO: 644353 - DNA, 135 bp, Homo sapiens
gtggaagtggtgaaacccaaacaacatctcctgctattccttgggctgcctttcctgcagagttcgttttctagccaaggaaaatgtaacccaggacgctgaggacaacacagtctctttcctgcagcccaatgg

SEQ ID NO: 644354 - DNA, 101 bp, Homo sapiens
gagcactggagagaaaggatttggttataagggttcctgctttcacagaattattccagggtttatgtgtcagggtgctatgatgtctattgcatttaaag

SEQ ID NO: 644355 - DNA, 80 bp, Homo sapiens
ctatgtcatttcatccaccacattacttaggaagcgttgttgacgaccatggacatcatccacgatggatttggattcat

SEQ ID NO: 644356 - DNA, 51 bp, Homo sapiens
tgcctcactgagcaaccaagaactgcttccccacaacaaagagaaatgatg

SEQ ID NO: 644357 - DNA, 75 bp, Homo sapiens
aggaaaaaagtagctgtcattggtggtggcttgcggggatctgatgagcttctttcttctggcatcattaacgga

SEQ ID NO: 644358 - DNA, 75 bp, Homo sapiens
tgtcacgccttggccaagatgacccaactccctcgaggcggtgcgtctttctacgtgaataggattttgtggctg

SEQ ID NO: 644359 - DNA, 99 bp, Homo sapiens
accaagcacatggcaaccgtctcagaagaggcaaagggcatgaccattcggcccctggtagacctgttggctgtgaagaaaaagcaagagacgaagcgc

SEQ ID NO: 644360 - DNA, 91 bp, Homo sapiens
ctgaagagcgacaagccgctggcagccgcggatctcaccgccgctcaggggcgaactttctgaccaagtatacaactacccagagggccta

SEQ ID NO: 644361 - DNA, 100 bp, Homo sapiens
aaagagtctcttaccttgtgtttgatgaagcagatcgaatgtttgacatgggatttggaatatatatgtcccagatgtgaatcaggctttattgaagaag

SEQ ID NO: 644362 - DNA, 73 bp, Homo sapiens
caacaggaaaatcatattatagatggagtaaaggttacaagtgaacctgaaatgattggagctgaagttattt

SEQ ID NO: 644363 - DNA, 74 bp, Homo sapiens
gggacacgcaggaacggctccagcatcaagatccgtctgacaggtttcccggtcctctggcgaggatcctccaa

SEQ ID NO: 644364 - DNA, 100 bp, Homo sapiens
ccaatctgtgactgcttgggctttgtggacgtgactctggacccagacacggcctaccccagcctgatcctctctgataatctgcggcaagtgcggtaca

SEQ ID NO: 644365 - DNA, 76 bp, Homo sapiens
gaaaggcatctgtcccaagcaggagaacattgcagagaagcaaatgctggcacaaggataccctgcttacacgaca

SEQ ID NO: 644366 - DNA, 83 bp, Homo sapiens
ggggatgtgagcgctgagcccttggcaggtccgcgggagagctgtggggcttggtgagtgtttcgtggcctctcgggttggtc

SEQ ID NO: 644367 - DNA, 75 bp, Homo sapiens
gagtgcaagcttagagcgtctggccaagaatcagaggaagtggcggagctccctgggtcctcagcagtgaggctg

SEQ ID NO: 644368 - DNA, 80 bp, Homo sapiens
gaaattgtgcttcatgtgctgcattgtttacattccctagcgattcctttaaaccaagaggagttcattgctattatgac

SEQ ID NO: 644369 - DNA, 76 bp, Homo sapiens
caaggcattacggctcccattgagacgctgagcgtgtccatgctgctgcggtactcacaccaccagatcttcgtct

SEQ ID NO: 644370 - DNA, 87 bp, Homo sapiens
gctgaggaaccagatatcttgaaaagctgccagaaagacaccattcgcttttcacccaagatgatttgatgtcttataaaactctga

SEQ ID NO: 644371 - DNA, 100 bp, Homo sapiens
ctgctctaatggtccggacttccgtgtacctgcctagagctggaacgttacctccagagcgagccctgctatgtttcagcctcagaaatcaaatttgaca

SEQ ID NO: 644372 - DNA, 83 bp, Homo sapiens
ggatcccttctctattacctcaccttggcatcgacaggatcaaagttctgatcgtaccagtctttcttcagtgggagcccagg

SEQ ID NO: 644373 - DNA, 82 bp, Homo sapiens
tcaaccccgagctggtgtgctgcaacccccatcaccttagccgactctgcgaactagacaatgcagatcttcgtgaagactc

SEQ ID NO: 644374 - DNA, 118 bp, Homo sapiens
cacctcgcctggccagttttccctttacaaaaactggaatgctgagccggggggcagatggcctgtcggagccagagggcatctctctgaagcgggtcgctgtggtggaagatttctt

SEQ ID NO: 644375 - DNA, 75 bp, Homo sapiens
gtgctgacattataagcatgagcagctgcaccctactagtgagtattggaacagttgtgctgctgccagcgatcc

SEQ ID NO: 644376 - DNA, 101 bp, Homo sapiens
agcggaactggagaaagctgaggatggagtggtttaataattataaaagatctcttgctacttatatgaggtcactgggaggagatgaaggtttggacatt

SEQ ID NO: 644377 - DNA, 90 bp, Homo sapiens
gccgaggccagatcctctggttccggggcctgaaccgtatccagactcagttagggcctagtcaaaattttgaagctgagtcaattcaag

SEQ ID NO: 644378 - DNA, 96 bp, Homo sapiens
ctgcgcttccgacggggcggccgggggctcagagatccaagtgcgcgccctggcgggtccggaccaagacgaatatgatgacaagcagccactgac

SEQ ID NO: 644379 - DNA, 80 bp, Homo sapiens
agaccgatatgtcaaaatcaaggttaaataggattgcgaatcaggtggccattcagcggaagaagcagtttgtggagcga

SEQ ID NO: 644380 - DNA, 95 bp, Homo sapiens
acagtgatgaagaaagtgttagaaacagtagtggagaatcaagagcctggagaaagttcttgtggaattcagtcacaaggagttgtttgatttct

SEQ ID NO: 644381 - DNA, 89 bp, Homo sapiens
ctccaagatacaccccttagaaaatggagaggaagctgccctctgtcgacagctccccatggaagctgagactcttgccccagttcagg

SEQ ID NO: 644382 - DNA, 78 bp, Homo sapiens
ctgaggccgtgtcagcacgatggaccccaaacagaccaccctcctgtgtcttggccccttcacagatgtagtcactac

SEQ ID NO: 644383 - DNA, 74 bp, Homo sapiens
aaccatcttcctgcacacagccacgatttgcaaaggtagcacaggcggagtgcagcggaggcccctgccgctgc

SEQ ID NO: 644384 - DNA, 51 bp, Homo sapiens
tcttgaaagagaagctcttcctgtgaggagatcctgctgggccgtggcttc

SEQ ID NO: 644385 - DNA, 87 bp, Homo sapiens
ccggagcccctttagccatgtggatacctacggagcacgagaaatacggcgtggtacttcctcctgtgctggttccaagacacagcg

SEQ ID NO: 644386 - DNA, 100 bp, Homo sapiens
gttaaaggaacctctacaacgaaggtgaagccacggaagataagatatctcttccaaatgcttgatgaaaaaggtgggaggatcacttgagccagggagt

SEQ ID NO: 644387 - DNA, 75 bp, Homo sapiens
ggcggaggaacctcagcagcagaagcaggagccgctgggcagcgactccgaagattatgtgtgacaatccaagaa

SEQ ID NO: 644388 - DNA, 75 bp, Homo sapiens
ctgtgttgtgactgctttggacgtgggagtcacctgaaagccaggaaatgtactttgaatactctgctcaacatg

SEQ ID NO: 644389 - DNA, 75 bp, Homo sapiens
tattcccaagtccttcacccggagcaagtgcaccggcacctggaccaacacgaagtgagatacctgcagtttgcc

SEQ ID NO: 644390 - DNA, 83 bp, Homo sapiens
ctggacgcgagctgcgctgcaaggctttcttgttgccaaaccagcactgatctccctattggagcaaggagaggagccggggg

SEQ ID NO: 644391 - DNA, 90 bp, Homo sapiens
ccaatccaatggtgcgagggctggcgttacggagcatgtgtagcctcagccagtcacagcaccagccagctctcccagaaactgaagacc

SEQ ID NO: 644392 - DNA, 75 bp, Homo sapiens
aagtcagccatgtgagcactgggggtggtgccagtttggagctcctggaaggcagactgccagattcacttacag

SEQ ID NO: 644393 - DNA, 74 bp, Homo sapiens
cggcccccggcgccgtccagcccggagggacctggatgggtcatcagttaaggaagttgaaacctaccaccgga

SEQ ID NO: 644394 - DNA, 75 bp, Homo sapiens
gaaagaggagcggcagagcctgctgggcgacattgactacagcaccgtgctcctcggcatgctggtgacgcagga

SEQ ID NO: 644395 - DNA, 96 bp, Homo sapiens
tccgactgggagcagaggaagccttgaggacctactcacagataggaattgaagtgtctcgactgcattgtgagagtgaatctttcaagatggatc

SEQ ID NO: 644396 - DNA, 101 bp, Homo sapiens
gtccagcatcctttagaagaatccagagagatgctggggttactattaatctcaagagccaactggtgtagatactgaattgtccttcccttctgcttttc

SEQ ID NO: 644397 - DNA, 87 bp, Homo sapiens
cagcccatcaaagaaagagcctggcccctgaacctgtgcagaacatggtccaagacaattcctgggaaagttcagttcttctcaagt

SEQ ID NO: 644398 - DNA, 98 bp, Homo sapiens
gcacaagttcctgatgatgaacagtttgtcccagattttcagtctgataacccttcagcgcctgctcctggtcatcactaaccagatttacttggagt

SEQ ID NO: 644399 - DNA, 98 bp, Homo sapiens
gcctcccaagtaggtgggactacagacaccattcgcttttcacccaagatgatttgatgtcttataaaactctgatgaaccatgatggctacacagac

SEQ ID NO: 644400 - DNA, 101 bp, Homo sapiens
cgcgggcgagctgcggctcggacgccagcggacacgcgggcgagagtgtgaacatggctacgcctcttcattcccgtccatgccgagcccccgactgcagc

SEQ ID NO: 644401 - DNA, 80 bp, Homo sapiens
gcgccgaggagccggtctaggacgcagcaggtgagaagccctaccactgcaactgggacggctgcggctggaagtttgcg

SEQ ID NO: 644402 - DNA, 98 bp, Homo sapiens
ttctgagtccagccaacagcagaagagaaagccagttatccacggactggaagatcaaaagaggttgactatattgtggagtatgactatgatgctgt

SEQ ID NO: 644403 - DNA, 89 bp, Homo sapiens
atcctcaagagtcagctggcaggctcatgctgaagattcggttatggaccatcatttccggaagccagcaaatgatataacgtctcagc

SEQ ID NO: 644404 - DNA, 82 bp, Homo sapiens
cccagcgcccactggggatggcaaagacgacatccggtgcgccgaggctgctcacaaaaacagcccacctgaggatattgac

SEQ ID NO: 644405 - DNA, 100 bp, Homo sapiens
aagctggttctctgggatataaataaggttgctgcagcaactggtcacacagtagtgttggtagaccagacagaggacatcctggcaaaatccaaaaagg

SEQ ID NO: 644406 - DNA, 75 bp, Homo sapiens
gatggaaggaaggagcgcagcgagctccaaacgagaatggaagccgctggaggaccgtagctgcacagacatacc

SEQ ID NO: 644407 - DNA, 75 bp, Homo sapiens
aaaagagccaaactcagctcgcccggtttctcggcgaatgacagcacagtatccttttgatagagcagaaaaatt

SEQ ID NO: 644408 - DNA, 74 bp, Homo sapiens
ctacaacttattcctgtccggagacagcctaagggaaactcgaactatctaccagtttcattacaagaattggc

SEQ ID NO: 644409 - DNA, 100 bp, Homo sapiens
gcgccgtggtgcgcaccgagcccttccaggacggctacagcctgtgcccgggccgggagctgggcagaatgtatgacaacatgtccacaatggtgtacat

SEQ ID NO: 644410 - DNA, 100 bp, Homo sapiens
ccgggctcctcaggttcagacccgaccgttatccagtcggttcgtggagaggagaggcattggacaaaatccggtatgaaagcttgacagatcccagtaa

SEQ ID NO: 644411 - DNA, 100 bp, Homo sapiens
gcttcattcagatgtggtggaatatgccaaggaaaaactggagagcttcatcaaaaatagtgatagctttgataagatatgtgaacttttgcaaagcgga

SEQ ID NO: 644412 - DNA, 100 bp, Homo sapiens
ctctcctggtccaaggacacctacagccccgacgaacatttctgggtgacactcaacaggattcccgttctcctgtgcctcctgttggctctctttgcat

SEQ ID NO: 644413 - DNA, 90 bp, Homo sapiens
ctggttggcaatatgatactcagtgttcactggcaggagatctcatcctggccttgggtgtcctggcccaaagccggccggtgtccaggc

SEQ ID NO: 644414 - DNA, 101 bp, Homo sapiens
gctccaagacacaccttcagaacccatggaaaaggacccagcagagccagaaacaggttctttagaagattgggatatagctgttcagaaaactgaaaccc

SEQ ID NO: 644415 - DNA, 128 bp, Homo sapiens
gagaactcggcgccgccaaacagcccagctcgcgcttcagcgtcccggcgccgtcgcgccactcctccgaaatggattgggatgatgaatattctcataattcttttgacctacattgtttgttaaac

SEQ ID NO: 644416 - DNA, 90 bp, Homo sapiens
gaactgtatccatccccatcatgatgtacagaaccaagtctcttcactaatggtcagtaggacagaaggtaacattgatgactcgctcat

SEQ ID NO: 644417 - DNA, 127 bp, Homo sapiens
caggcggtccgtgcgagaggaccaacggagcgctgaggcgggcgttttcttggatgaattgcttgctttggaggacctgaaggagaagaaggagaaggtggaggagaaggcaagccggaaagagcga

SEQ ID NO: 644418 - DNA, 51 bp, Homo sapiens
cacacacacttttagtaggagagtcagattcagtgctcaagagtgaagaaa

SEQ ID NO: 644419 - DNA, 100 bp, Homo sapiens
gccccaccttcccgtcgacccccgcgggaaggtcctggggctgccaccctcgttcccccgattggggccgcagagacctcatggcctatgacagaagagg

SEQ ID NO: 644420 - DNA, 75 bp, Homo sapiens
caagaacaagggccgcgatgtggaaaaatctccgagaagcaagggataatgctgtggctgaaaaggaacgagcag

SEQ ID NO: 644421 - DNA, 80 bp, Homo sapiens
tggcagtggaaaatgcgctcgggctggaccagcaggcatctgcatctgggaccgacctcctgggctggctgatcaaagag

SEQ ID NO: 644422 - DNA, 100 bp, Homo sapiens
taatgaggctcagagatgcctgtaccgtgacgtgatgctggagaccttgacacttatatcctccctgggtaagggttcatgtaatcaaagaagtttcttt

SEQ ID NO: 644423 - DNA, 74 bp, Homo sapiens
ggatgctgcagacactgaacgaggagccagtgactatgaaatccctggagaatttttggtgacatgcactgagc

SEQ ID NO: 644424 - DNA, 100 bp, Homo sapiens
ctgagacggtgtcccgccgaaagctttgactctcccggatcttgcagagcagtttgcccctcctgacattgccccgcctcttcttatcaagctcgtggaa

SEQ ID NO: 644425 - DNA, 112 bp, Homo sapiens
gcggacgggccatacccaataaccaggtgcttggcaaaatcgagcgggccattggtgagaagccctaccactgcaactgggacggctgcggctggaagtttgcgcgctcaga

SEQ ID NO: 644426 - DNA, 82 bp, Homo sapiens
tttgttggttgcatctgctaaagaggatcctgccaacattttacaggtgatcagcttgaaattcagctaaccgagcagctac

SEQ ID NO: 644427 - DNA, 98 bp, Homo sapiens
attccctgggtcctgagaagttcccgcttgtggagcaaacatttttccccaaccataagccaatgctggacaacctggttctgattaacaagatcaag

SEQ ID NO: 644428 - DNA, 50 bp, Homo sapiens
ccatcttagtgaagaattaggatacaggcatcaagcatgatggaaccatg

SEQ ID NO: 644429 - DNA, 100 bp, Homo sapiens
ggactgaagtatccagcgctcattgggaatttagttaagccaagaccgaggataggtgtggccattggcgaccagatcctggacctcagcatcatcaagc

SEQ ID NO: 644430 - DNA, 75 bp, Homo sapiens
gggatcccagcctcaggcctgcacggacggtgttggttggggtgtggacactgccagcggctgcagccgacttgg

SEQ ID NO: 644431 - DNA, 98 bp, Homo sapiens
aagctgatgctgctggacgccactttccggggtgcacagcaagtgagtaatgggaccactgagcatcaggtggaatctttcataaggaaaaaactgga

SEQ ID NO: 644432 - DNA, 100 bp, Homo sapiens
agccggtgcgccagaagaagcggatggacagcaggccccgcgccgggaaagaaagaaatctcgttttgggaatgctttccacctgtgtcgggaagttctg

SEQ ID NO: 644433 - DNA, 78 bp, Homo sapiens
ttacagttggctgatgattccacagataacccagcctattttcacaatggagactatcctggagaaccctttatttta

SEQ ID NO: 644434 - DNA, 100 bp, Homo sapiens
cagagtattggtcctaaagtccagagacagagcactaattaggttcaaaccttgtactactcagctgatcacaagctgcttgatgggaacctactagatg

SEQ ID NO: 644435 - DNA, 100 bp, Homo sapiens
ctttcacactggagatgttttgaaggtggataagattgtggaccagctgcagcagttaatgcaggtgtatgacttggctgcccttcgggattattggagc

SEQ ID NO: 644436 - DNA, 82 bp, Homo sapiens
ccgactcaacgtgagacgcaccgcccggactcaccatgatattgaagcacagattcgagaaattcaaggcaagaaggcagct

SEQ ID NO: 644437 - DNA, 98 bp, Homo sapiens
ggtgacttctacgaaaaagccctggtggagctgaaggttgcaggatccctccccgcggcggcgatggcccgagccatgagagtgaggactttccgcgc

SEQ ID NO: 644438 - DNA, 51 bp, Homo sapiens
gacagctcaacacggcacttccacagagccggcgattagatactgaagaat

SEQ ID NO: 644439 - DNA, 75 bp, Homo sapiens
catcatgacagcagacggatatttgtgggccaggataatggagctgtaatgccttatgccagcctggaccatctt

SEQ ID NO: 644440 - DNA, 82 bp, Homo sapiens
ccctaaacagtggactcaacttcaaagacgttctcaaggagaaggcagacctggatacactctgtgcagttttagagagaga

SEQ ID NO: 644441 - DNA, 100 bp, Homo sapiens
tcttgctggagcagcctgagatccaggaccgagatctcactcagcagacagcagcagcccgggagcctgagctcaggaggaactcttacctggaaattgg

SEQ ID NO: 644442 - DNA, 100 bp, Homo sapiens
cttctttgactgtcttaactggaggaaagtagctaagtccacaggtcctggctaccctgggaagagacaagaagtaaatgaagaaagaggaagattccag

SEQ ID NO: 644443 - DNA, 75 bp, Homo sapiens
gttccaccaggccgggaagcccatcgggagtggagtcaacatatcaatggagcaagtcacagtcgtcgatgccag

SEQ ID NO: 644444 - DNA, 75 bp, Homo sapiens
caccacgcactgggtcgtcacggaggacgggaaaatccagcagcagagtcctccctgctgctgtgtggacgacac

SEQ ID NO: 644445 - DNA, 82 bp, Homo sapiens
cgacgagtttgaagagttccctgccgaagacctcccagtgccaagtgtataagcgtgtccagaattggtgggtctcactgac

SEQ ID NO: 644446 - DNA, 76 bp, Homo sapiens
aacccgaagaagaaaggattcgttacagccagagattggtggcagagtttgtggatgagcggccagaagaggtaaa

SEQ ID NO: 644447 - DNA, 75 bp, Homo sapiens
ttttggcattgacatttaattttagggtcctttatatagaagggagagtaggttttagctaaagaagatactgag

SEQ ID NO: 644448 - DNA, 51 bp, Homo sapiens
aacagtatttactgagagctcatcagcacgaaaggtaatacaggtagatga

SEQ ID NO: 644449 - DNA, 100 bp, Homo sapiens
ctttgccactcccttggcaaggagagccgagacctcagttcccggcggctcttgcggggcacaggatcccgctgcacaagttcacgtccatccgccggac

SEQ ID NO: 644450 - DNA, 100 bp, Homo sapiens
gagcccatcactgtggcccacatcgtggtggaggcggcctctctggcagcagacatcagccacgcatctgaccttgttgctctggcaggctgccctgagc

SEQ ID NO: 644451 - DNA, 102 bp, Homo sapiens
agatgacacgtgcgtggggtgttggtgggtcctggccttcgagatcttcatccccctggtgctgttctttatcctgctggggctgcgacagaagaagcccac

SEQ ID NO: 644452 - DNA, 82 bp, Homo sapiens
cgcaccttgtgttccggaagttccaggttgattcttcaccacactgaaaccattaggaaaaatccttgtggttaacagcaga

SEQ ID NO: 644453 - DNA, 75 bp, Homo sapiens
gcgaccccagtcggtgctccggggaggtcacctgacgaggagctgcctcccgaatgatcaccaacagcctgaacc

SEQ ID NO: 644454 - DNA, 83 bp, Homo sapiens
cgcagagctgcagctcggggccgagggttaaagatcgaggtccggaagccactaggagattttttaattggttttattggagc

SEQ ID NO: 644455 - DNA, 50 bp, Homo sapiens
cacacctgtgtggccttcgcctggtctattatcctcccagtccacaacgc

SEQ ID NO: 644456 - DNA, 100 bp, Homo sapiens
caaattgaagccattgcttcctcgttaggttttggctacgggcctccacctccaccgccagatcagtttgcccctccgggggttcctcctccaccagcca

SEQ ID NO: 644457 - DNA, 100 bp, Homo sapiens
ggggatattatcaaatctactactgttcatggcagacctgtcatttactccatcctttatagtgatgctacaggacgaagaggaatggataaaaacattg

SEQ ID NO: 644458 - DNA, 88 bp, Homo sapiens
gcggcggcggcggaggatgagcctgcagagcgcgcagtacctccgattgagatgctaccagatgggctgtttcagtgcaaaaagctgc

SEQ ID NO: 644459 - DNA, 121 bp, Homo sapiens
ttctccctcgaactttaaagtccgcttctttgtgttaaccaaagccagcctggcatactttgaagatcgtcatgggtgcagaatacagaaactgcagccatgaccacgcacgtcaccctgg

SEQ ID NO: 644460 - DNA, 73 bp, Homo sapiens
ggaagaacagggtcgaggatcgaggttttggcacaaataccagtgggaatagtatttttggaagtaaaccagc

SEQ ID NO: 644461 - DNA, 51 bp, Homo sapiens
ggctgtagaccagagtatcgagaagtttgtacaatgacgacagaaacctgc

SEQ ID NO: 644462 - DNA, 75 bp, Homo sapiens
gccggccacggagcgcctgcagaaaatgcatccgatgcagatttatggctcctgaacagttgcactgtaaaaaac

SEQ ID NO: 644463 - DNA, 50 bp, Homo sapiens
caacaccaagagtcaggcagtgaaggaattgaatgatctggcacgggacc

SEQ ID NO: 644464 - DNA, 100 bp, Homo sapiens
aagaagctgtaactcttttaaagtatatgtatgacttttaaaagagagagcttgtgaaactgagggaataggtatggacctgtctgccaatcaggacgag

SEQ ID NO: 644465 - DNA, 100 bp, Homo sapiens
ggcgggggagatggcggcgcgatggagcagcgaaaacgtggttgtagagttccgtgactcccaggtattatccatgcagcagaagagaaggactggaaaa

SEQ ID NO: 644466 - DNA, 100 bp, Homo sapiens
ccaaattggaatctaagccatctaatggagatagaaaccagggtggttatgaccgctactcaggaggaaattacagagacaattatgacaactgaaatga

SEQ ID NO: 644467 - DNA, 82 bp, Homo sapiens
aaaaaggagatgcctggcagccccgctctctgcagataccgaagtgtataaagctacagtaaaagatgacctcaccaagtgg

SEQ ID NO: 644468 - DNA, 100 bp, Homo sapiens
ttggcgcctgaggttctcccattaggtgtgcaactgaggaacatggctcaagaaactaatcacagccaagtgcctatgctttgttccactggctgtggat

SEQ ID NO: 644469 - DNA, 100 bp, Homo sapiens
aaagttcttgggacaaacttcatttggtacctttgacaggagcgtgaccctgctggaggtgtgcgggagctggcctgagggcttcgggctgcggcacatg

SEQ ID NO: 644470 - DNA, 137 bp, Homo sapiens
cgaggacagagatggcgagcgcccggattggggatgagtatgcggaggacagctctgatgaggaggtacgtgaacacactcctgaaactcatcccgctggtgctgggtctgcaggaacaactgcggcaggcagtgca

SEQ ID NO: 644471 - DNA, 97 bp, Homo sapiens
atcgtggccaacacggtcttgctgaaagccagggaaggtcgaactggaaggtacacccttatagagaaatggagagatactgaaagacacttagcac

SEQ ID NO: 644472 - DNA, 100 bp, Homo sapiens
ctggatcctgtgcaggacaaaactcctctctatagtcaactccttcaagcatataagtggtcaaacaagctccaagccctcagtgagcctcagcccaggc

SEQ ID NO: 644473 - DNA, 100 bp, Homo sapiens
agcacatcgaccggcgacagcagccaggagtcatgagcgacagcggcgagcagaactacggcgagcggcttactgaaacaaatgcaggtatcaagtgctt

SEQ ID NO: 644474 - DNA, 50 bp, Homo sapiens
agccgcttggccaactttgggggctgggacgcagagaccggcagcgattc

SEQ ID NO: 644475 - DNA, 89 bp, Homo sapiens
gacaaatggaagtgttatgatgcccttcgaaaaatgatcaactattgaccatatagttgacatgaagacaatggagactgcagagaaac

SEQ ID NO: 644476 - DNA, 100 bp, Homo sapiens
gaagaagatcaaaacccaccatgccccagactggattatggacagaacttggaaatattgagaataatttcttaaagccacttcatataggacttaatat

SEQ ID NO: 644477 - DNA, 92 bp, Homo sapiens
agatcttcaagaagaagacctgcacgacgttcatagttgactccacagatccgggggacgtccagatcggtgacatcgtcacagtgggcgag

SEQ ID NO: 644478 - DNA, 100 bp, Homo sapiens
cggggatgaagcagctggcttagaagcagatctggaatgcaaacagatctggcaaaatttgggctgaccacagtggccgagaagtcgcgcgtgctgcagc

SEQ ID NO: 644479 - DNA, 100 bp, Homo sapiens
ggtgcttgagaacttgtgccccagttgctgtgctccaaggacacacaggatcaattacatctttacaggcaaacctgtatgtgggactggtggtcatgtg

SEQ ID NO: 644480 - DNA, 100 bp, Homo sapiens
tctgtcgagcagcggacgccggtctctgttccgcaggatgtctctggatggtcgtcagatccgtgtggatcatgcaggcaagtctgctcggggaaccaga

SEQ ID NO: 644481 - DNA, 100 bp, Homo sapiens
cctcaggaaggctcatttctcctatcaaggtgaaaagtgagattcagactcagatgggcaaaacatgtagctgagaaaaatggctacttgggccatgtca

SEQ ID NO: 644482 - DNA, 100 bp, Homo sapiens
tggtggatgctcttcagttcgtgtgtggagacaggggcttttatttcaagccgctcccgaggccccggcgcggcgcgagggcgcggggcgcggcgtccac

SEQ ID NO: 644483 - DNA, 83 bp, Homo sapiens
gtggaaaggctctcagtgaaaaagcattatctaaaaatgaagtgttatatgacggagaaaaccatgattgtgaggaaaagcca

SEQ ID NO: 644484 - DNA, 100 bp, Homo sapiens
tgcctggctgggattcctacacaatgcgttgcctggctccacgccctgctgggtcctacctgtcagagccccaagaaatgagccgtcagactgctacagc

SEQ ID NO: 644485 - DNA, 75 bp, Homo sapiens
acatttccatcaaaccctgagagctttattaccagacatgatctttcaggctggagtgcaacggtgcgatctcgg

SEQ ID NO: 644486 - DNA, 75 bp, Homo sapiens
agcccatcgtgtgaactatagagtttgtggacagatttatattgctattgacctgaaaagtggttctggaaaagt

SEQ ID NO: 644487 - DNA, 100 bp, Homo sapiens
acttcttcctgttataaatacgatgttgcagctcagccctgaagaaaagggaaaacttgctgcggttgctcaaggtctggtgagctgtaccttctttctg

SEQ ID NO: 644488 - DNA, 82 bp, Homo sapiens
tgaaagatcagatagcagagctgaatcatgaggacatggatttgattgacatactttggaggcaagatatagatcttggagt

SEQ ID NO: 644489 - DNA, 100 bp, Homo sapiens
gatagaggccagattgtcttggaagttccaaagttgcaacgatttctgacctgaaggagaagaaggagaaggtggaggagaaggcaagccggaaagagcg

SEQ ID NO: 644490 - DNA, 75 bp, Homo sapiens
ggaagagcagttcctcaacctcgtgggatactgtgctggatcgcgtcttcgccaggaggactttcccccgcggat

SEQ ID NO: 644491 - DNA, 75 bp, Homo sapiens
cttgcccagcatccctgcctggactggtcctgagattcctgaatcaggtaacctgtgtatggtgactggaggtgc

SEQ ID NO: 644492 - DNA, 100 bp, Homo sapiens
aaagtatgggcaggcttgatttctttagaagactccagcggagaactgtgtctccttgcttctgccgcttacaaacacgcagatggcaagaagattgatg

SEQ ID NO: 644493 - DNA, 100 bp, Homo sapiens
cacagactctcacccccatcctgggcatccacgggggctcctctatgataatggcagataaggaaactggtcaaagaactcatgcaagtggaacttacag

SEQ ID NO: 644494 - DNA, 75 bp, Homo sapiens
actcctgctcagtgtagcattaagcggccctccaggcactgaagcgtaagaagaggtatgagaagcagctggcgc

SEQ ID NO: 644495 - DNA, 75 bp, Homo sapiens
gtggaccgggcggcacgcacgcggtgcagggtaacatggcggatgcggaagggagtgcatccgccccaacccttt

SEQ ID NO: 644496 - DNA, 50 bp, Homo sapiens
atttgtgctcaaaacccccaaggccataaaattttgagtagaaaaatcca

SEQ ID NO: 644497 - DNA, 100 bp, Homo sapiens
cacggaagcgcggacggcgcacgacgagtactggcatgcgcacgtggacaaggaccagctgtactggcgctacgatgaccacacgaggcacatggacccc

SEQ ID NO: 644498 - DNA, 75 bp, Homo sapiens
agctggcaaatttctgttccatcagcgtttgtttggccaaggagctactgcaaatgtctttcgtggaagacataa

SEQ ID NO: 644499 - DNA, 114 bp, Homo sapiens
agactgctccagaagtggagaccagcagaactccaccaggtcctggagtacaatgccattggaggcaagtataaccggggtttgacggtggtagtagcattccgggagctggtg

SEQ ID NO: 644500 - DNA, 96 bp, Homo sapiens
gaagtttgtggatgaaaattgggaaggttccctcaagtccaaggatttggtgctatggagaaatttttggtagaatataagagtgcagtggagaag

SEQ ID NO: 644501 - DNA, 100 bp, Homo sapiens
ctggtgcagatcaagagcacaaaacagatgagatgcacactgccttaatggaggcctgcatgaatgcaagttctagccggtttttcctacaaggaatcca

SEQ ID NO: 644502 - DNA, 91 bp, Homo sapiens
cgtgagagccgcagtggatggctggaggtgcagggccaggaggaacatgagctccttgctcggattgaacgtatggaaaggcggatgcagc

SEQ ID NO: 644503 - DNA, 100 bp, Homo sapiens
ttgtacagagatgtgatgttggagaactatagcaatctggttttcttggaaactgccaagttttggaccttatctggaacagcgcaagaaaatcatagca

SEQ ID NO: 644504 - DNA, 88 bp, Homo sapiens
tttgttccctgcagccctcccacgaccctgcacttgatggaccagctggcaccacccagatcaataaactggcttatttgaatttgcg

SEQ ID NO: 644505 - DNA, 74 bp, Homo sapiens
tttactgcatcagtgatggaggacagagtgcggtggaagttaaacgagctgagcctcgggacagcaagagccaa

SEQ ID NO: 644506 - DNA, 101 bp, Homo sapiens
cggtgtcctcgggatatcgccaatgtgatgcagaggctgcaaggtgctgactgggttacttttttaaacactaggaatggtaatttctactcttctggact

SEQ ID NO: 644507 - DNA, 49 bp, Homo sapiens
tggtactaaagaaagagcttgttgcggagcatggggaagtgattgactg

SEQ ID NO: 644508 - DNA, 75 bp, Homo sapiens
cgctactctctctttctggcctggaggctatccagccggttaagaagattgtctaccaaatatagaacagaaaag

SEQ ID NO: 644509 - DNA, 100 bp, Homo sapiens
catgtcaccaacccggccttcaccaaactccctgaacagctttctcaagttctcgatgccatgtttgaaaggatagtcaaagctgatgagcatgtcattg

SEQ ID NO: 644510 - DNA, 75 bp, Homo sapiens
acagggtcacagctctcacccagtaaacattgctatcttcagaaattaaggaatgagaggcaaggaagaaaggac

SEQ ID NO: 644511 - DNA, 83 bp, Homo sapiens
ccgcccaggacccccaagccgccgcggacgcagatgccgacaaaaggatcaaggtggcgaagcccgtggtggagatggatggt

SEQ ID NO: 644512 - DNA, 83 bp, Homo sapiens
ccaaacttgctggtcactgggagatgctcagccagcattgggcagcccccgcttcctgctcccctacccccttcacatggcag

SEQ ID NO: 644513 - DNA, 75 bp, Homo sapiens
gaccatcaaatccgtgtcggagtccttacaggtcagcccaagactaccccgtcggtcattctgttcctgccgtcc

SEQ ID NO: 644514 - DNA, 118 bp, Homo sapiens
gcattttggcattgacatttaattttagggtcctttatatagaagggagagtagagctgaggcttcgaagacctcagaggacttctctcagcactcacagaaacctcctacaccctcg

SEQ ID NO: 644515 - DNA, 50 bp, Homo sapiens
ccagctacaaactctaggtttgaaagatgaactgtctcattgtgttgagc

SEQ ID NO: 644516 - DNA, 100 bp, Homo sapiens
tatcggggacctcaccatggccgatggggttcctggtgtgcagaacattctcaaaattggcttcctgaatgacaagtgtactaatggtcacttgatgtgc

SEQ ID NO: 644517 - DNA, 100 bp, Homo sapiens
ctcctttgaggccatggtcactgcattaggaaaaagacttttaatacaggcaggctatgatgttaatattaaagactatgatggctggacacctcttcat

SEQ ID NO: 644518 - DNA, 100 bp, Homo sapiens
gccttcttcatttggctgtgataggtgctttgctggctgtgggggctacaaaagctactctcggaaccgcacgtttgacacgtacattgggcagggctac

SEQ ID NO: 644519 - DNA, 82 bp, Homo sapiens
aaaaaaatcccatgaggagaaggcattctaatttaggcattgatgacggggagccttcctggctttgtcgacgtcatcagga

SEQ ID NO: 644520 - DNA, 90 bp, Homo sapiens
cgcaagtccatgtacacgcgagattataagaagcttgggttcattgttaaagcggcaactggggaagaagtatctgctgaggatcttgga

SEQ ID NO: 644521 - DNA, 82 bp, Homo sapiens
ggtccagacccacgcggcgccagttctccggcgggaaggaaaaccgcgcagagaggtgacttaagagattaaaattaatttg

SEQ ID NO: 644522 - DNA, 76 bp, Homo sapiens
gtcataggattagatgatccaagtcaccaagaaattactgtctcaagtgatacggaaccttccctgtatactgtca

SEQ ID NO: 644523 - DNA, 100 bp, Homo sapiens
tctaattctggcacaatcttatctagctatagttcctcatggtcctgcactccatggactaaattgaagagagcgatgtttcagaagatcgtggatgagt

SEQ ID NO: 644524 - DNA, 100 bp, Homo sapiens
ttccctatgtccaaaaacgtttttcctgataactggaaagttcctcaagatggagactttgactttcttcttccagaccagctggtcttgcttctggagc

SEQ ID NO: 644525 - DNA, 88 bp, Homo sapiens
gcctgccgtacttctgattttgaaacacctgggtctgggcttcccgggcgagcggtgggaagaaggcgtcgtgaaggagatagacatc

SEQ ID NO: 644526 - DNA, 100 bp, Homo sapiens
ggaataaacatgcaatgaacccaaaagggtgcagcggaactgctgcctgacgctctgcaacttcagcatccccgaggagctggaattccagtaccgccgg

SEQ ID NO: 644527 - DNA, 75 bp, Homo sapiens
cttccacttgcacgaaagctttcctaggccaaaaagaggtttttctatatgagtggagaagacagctgttaccag

SEQ ID NO: 644528 - DNA, 100 bp, Homo sapiens
cacagtttcaggaatctgatgatgcaggcagcacagtcagtgctgatttcattatttgaactcaataccccagagtttacaatgttattaggagctttac

SEQ ID NO: 644529 - DNA, 96 bp, Homo sapiens
ctgccctctgaggagatggtcatgacagatccacatgaagaccatgcccgccgccatgttcaggctcctcacgggtcaggagaccccgctgtacat

SEQ ID NO: 644530 - DNA, 100 bp, Homo sapiens
caaagactggacagtgacacctgagcacgtcttgcctgagtcccaggtggccgtttgtatgcaggggcaaaaggtgctcttggagaaaactggatctcag

SEQ ID NO: 644531 - DNA, 95 bp, Homo sapiens
gtcgctgctgcaaccccaagatgtcggagacacggtggaaacgcttatggctgtctgtccccagaccccagagcacgtccggcaccaccatgact

SEQ ID NO: 644532 - DNA, 75 bp, Homo sapiens
ttcaacgatggcgaacctcccaccaaaaagcccaggtactttaattatcggactaccaggttcctggctgaggag

SEQ ID NO: 644533 - DNA, 88 bp, Homo sapiens
aaatgccagcagttctgacattttgccttctgattctaactgcaaaggtatatttgcttacttaaactaccatgttcctcgaacgaga

SEQ ID NO: 644534 - DNA, 75 bp, Homo sapiens
atgaggtcaatggattaataaggttgaaggggcccggccaggactcggggaagggtggcctgagagcagcgatga

SEQ ID NO: 644535 - DNA, 97 bp, Homo sapiens
gaatgcagtaccctcagcagcaggtccatctgaactgtttactgtttgttcatcgattagcagaagagtccaggacaaacgcttgtgcgagtaaatg

SEQ ID NO: 644536 - DNA, 75 bp, Homo sapiens
cccaacgtggtgctgctcctcacggacgaccaggacgaagtgctcggcggcatgtctctggctgatgaacttgct

SEQ ID NO: 644537 - DNA, 100 bp, Homo sapiens
tcgaattacagctgctagccaggaacatggactgaagtatccagcgctcattgggaatttagttaagtctgatgaccgggattccaagcgggattccctt

SEQ ID NO: 644538 - DNA, 98 bp, Homo sapiens
ccgagagccgccgacatgaagaaagacgtgcggatcctgctggtgggagaacgatgcagcagtctcggccctggctgctctatgcagtgaatattaca

SEQ ID NO: 644539 - DNA, 96 bp, Homo sapiens
cgtctctgcctccctccaggaccagcactgcgagagcctgtccctggccagcaacatctcagggttttgtggtggctatcctctactgcttcctca

SEQ ID NO: 644540 - DNA, 80 bp, Homo sapiens
aggatgccctggagacacacaggcagacccatactgatgacaggattggacattgagaaggaccagattattgagatggc

SEQ ID NO: 644541 - DNA, 98 bp, Homo sapiens
tccatgaccgggtaaaaaatgtcttgaaatcacatcaggctcatcaaagacatttatatcagctcttgccaggtaaaaagttttgggaaacagatgaa

SEQ ID NO: 644542 - DNA, 83 bp, Homo sapiens
gcccagcacccgcctgccaggcgctcgggggccgaactggccctggactacctctgcagatctctgttgaggagctggcgcgg

SEQ ID NO: 644543 - DNA, 83 bp, Homo sapiens
ctcgtcgacatgagtgatgtggaggaaaacaacttcgagggcagaatcgccaaactgaggcagcaactacaacgcagtaaaca

SEQ ID NO: 644544 - DNA, 90 bp, Homo sapiens
gaaagaaggtgggagcggagagcgcaggcgtgcatcaacaacagcaacttgtgattggcggtgaccggatattcagttgcacatccccac

SEQ ID NO: 644545 - DNA, 107 bp, Homo sapiens
gtgatgttggagaactatagcaatctggttttcttggaagggacttcctcgcccgaagagcgcgggcacagcaacgcagatgcggcaaagctccagctggacgcgag

SEQ ID NO: 644546 - DNA, 98 bp, Homo sapiens
tagacttcattttttgtttagttttagttgaagttctaaagcaggaccccactgatgactccaggcttcccagggccgaagcggagcaggaaaaggac

SEQ ID NO: 644547 - DNA, 75 bp, Homo sapiens
agtgggactttgccttctcagcccaaagtcagcactcctgggagagttggctctcaaggttctgatttagattca

SEQ ID NO: 644548 - DNA, 100 bp, Homo sapiens
aacgcctgcaagtgccatctcaaacaaagaggcaagcagtggctctgatgcctgtggtctctctgatgtagcccatgtggaaagcttgcaggaaaagtct

SEQ ID NO: 644549 - DNA, 100 bp, Homo sapiens
aagaaaaactcgtagagaaacacaaggaaatacgtcagcagatcctggatgaaaagcccaagcggcgtcttcgacatcttcggaacattgctgcccggaa

SEQ ID NO: 644550 - DNA, 95 bp, Homo sapiens
ataaaactccagcgagatccgggccgtgaacgaaagcagtgacggaggagcttgtaccaccgatgcctgaggaaacccagacccaagaccaaccg

SEQ ID NO: 644551 - DNA, 100 bp, Homo sapiens
ctccgagtttgcgactcgcggaccggcgtccccggcgcgaagaggctggactcggattcgttgcctgagatatgaggccccaggattcctggcgaggtcc

SEQ ID NO: 644552 - DNA, 100 bp, Homo sapiens
gtggcgcctaaagtctgagagagggaagtcgcctctgtgctcgtgagtgcatggggtataagggacctaatacctatcattgctgctctggaatataatc

SEQ ID NO: 644553 - DNA, 75 bp, Homo sapiens
cggcccgagcgggagcgggagcggacgcggcctcagtcctgcgcggatggcccactgcgtgaccttggttcagct

SEQ ID NO: 644554 - DNA, 76 bp, Homo sapiens
cgcggggaccgctgtgctctcgctttggagtttaacccttctgccaatccagaggcaagcacaatattccagagga

SEQ ID NO: 644555 - DNA, 73 bp, Homo sapiens
gaagactgcatttcaacttcaagaatgagatgtgaatacagctgtgatggagttgctcatcatggcttacgca

SEQ ID NO: 644556 - DNA, 90 bp, Homo sapiens
ctttggttacctatgtacctgttaccactttcaaaagaaaaccaattctgtgtcctcggaggaccacagcccagttgggccccaggcgaa

SEQ ID NO: 644557 - DNA, 78 bp, Homo sapiens
taaatctctctcttccagtgctctgtctgggccagaggattcaggcacaggaagggcggaccccggaggcctgagcgg

SEQ ID NO: 644558 - DNA, 101 bp, Homo sapiens
atatatcaagaccagcgcccactacgaggaaaataaatctcgagaatggcatcatttcctggtggtcaacatgaagggcaatgacatcagcagtggcacag

SEQ ID NO: 644559 - DNA, 50 bp, Homo sapiens
cagagtcttgctctgtcgccaagctggagtgcagtggcgcaatctcggct

SEQ ID NO: 644560 - DNA, 100 bp, Homo sapiens
gtgcggcgggtcctggccgaagtaagactttgaccccgacgcaggcttcagtgattgccgcggatcagaagcctgagcactttggctcgagacaattaag

SEQ ID NO: 644561 - DNA, 97 bp, Homo sapiens
ccatggaagtgaagatgcaaatgttccagcttgcaaaccatactgggtacatcaaagttgactggcaacgagtggagaaggacatgaagaaagccaa

SEQ ID NO: 644562 - DNA, 75 bp, Homo sapiens
caggaccggccgcagtgccacttcgacatcgagatcaaccgggagccgggtacagcagggaagaactggaaactc

SEQ ID NO: 644563 - DNA, 80 bp, Homo sapiens
gcccactcccatggtcctgcagagggatagctgggagtatggccaccctgctccacgatgcggtaatgaatccagcagaa

SEQ ID NO: 644564 - DNA, 75 bp, Homo sapiens
cctggatgaatccaagttaacccttaccacccagcagcagggcatcaaggagcccagcagccggggccgccctat

SEQ ID NO: 644565 - DNA, 90 bp, Homo sapiens
ttcagaagttcttccttgaagaaatacagcttggtgaagagttactagctcaaggggaaaagtatgaattgcacgcagcgactgacacca

SEQ ID NO: 644566 - DNA, 98 bp, Homo sapiens
ggaaatggaggcccagaaagatgaaatcatctgccccagctgtaataggactgcccatccactgagacatagtgattgcagtggtcatggacgtgttc

SEQ ID NO: 644567 - DNA, 90 bp, Homo sapiens
cagacttctccggaatccgtaacatcagtttcatggtgaaacgcataagagtgaacagtggtatagcagccactccagcctctgctgcag

SEQ ID NO: 644568 - DNA, 82 bp, Homo sapiens
ggccgtgctgcttatggcggcgctggagagggggcgctgagctgttggggccactcttcacctccaccatgagcctggacat

SEQ ID NO: 644569 - DNA, 83 bp, Homo sapiens
cggcgaaggaggcagaggcacttatgcttgtcagccgagccacatcgctcagacaccatggggaaggtgaaggtcggagtcaa

SEQ ID NO: 644570 - DNA, 82 bp, Homo sapiens
cggcgagagtgggcgagaacgtccactgcgggccggcgaaagctgatcttgatgtggaagaaatggaggactcagaaccaag

SEQ ID NO: 644571 - DNA, 100 bp, Homo sapiens
cctgacatatctgagggagaagcacaagatcatgcacagagatgttggtgcatgtagacaatgaagcatcaatcaaccaaacaaccctggagctgagcac

SEQ ID NO: 644572 - DNA, 82 bp, Homo sapiens
cacgcgatacgctgacgccccgacgccgatccggccgagccaaaggctgaggggatctggcggtggagcgctaggatcagac

SEQ ID NO: 644573 - DNA, 50 bp, Homo sapiens
taaaaatctgcaaatccgcctgaagggaggtacgacttgggagaaatggg

SEQ ID NO: 644574 - DNA, 73 bp, Homo sapiens
ccatgtccgacggctggaagttcgagcagagccctgaggatgatgacaggaaggtccgaaggagagaaaaaaa

SEQ ID NO: 644575 - DNA, 87 bp, Homo sapiens
cgccggcgccgcggcctcttcggctgcggaccctgccattccggaggaggcccctgagatgctcatgcccttggattaaacccctgc

SEQ ID NO: 644576 - DNA, 90 bp, Homo sapiens
agtatcaacggagtctccgggactgctgcagtaagaatgtcttttccacctcatttgaatcgccctcccatgggaatcccagcactccca

SEQ ID NO: 644577 - DNA, 97 bp, Homo sapiens
ctggtgtaccaggcgaagctggccgagcaggctgagcgatacgacggatatgtgatggcgtccagtttggagctgggataaggttcctgtagccgac

SEQ ID NO: 644578 - DNA, 110 bp, Homo sapiens
aagagaaaaagcccaggcataaaatcatctccatattctcaggcacagagaaagatgatatcatcaagttgaatcgaaaggaagggaagaagcagaattttccaagacta

SEQ ID NO: 644579 - DNA, 75 bp, Homo sapiens
cagctgcagaaggagaagagggtcacagtcctcgagcagaacggggagaagctgtgtcagcgtgttatgatgccg

SEQ ID NO: 644580 - DNA, 82 bp, Homo sapiens
gactccaggacacccctgaagccgagaaatgaacatccagtcatggataaaaatgagctggttcagaaggccaaactggccg

SEQ ID NO: 644581 - DNA, 74 bp, Homo sapiens
agatccgatctactgagagctgcgaggcccggtggttctgggaagcgtacttccagtcaattaaagccattgcc

SEQ ID NO: 644582 - DNA, 100 bp, Homo sapiens
tattgcgcgtggaacggctgcttttggaagcattactctactgactggcagagacaggagaggtagatgtccacgcccacagaccctggtgcgatgcccc

SEQ ID NO: 644583 - DNA, 100 bp, Homo sapiens
ctcagaaatccaatctacttaattcccgttaatttggagacctctggggccggagagtctcctgcttcgtggagccagattaaaaaacacaaaagaaatt

SEQ ID NO: 644584 - DNA, 75 bp, Homo sapiens
cgcgtccagctcgcccagctcgcccagcgtccgccgcgcctcggccaaggggacggcaaaacagaacagaaaggc

SEQ ID NO: 644585 - DNA, 100 bp, Homo sapiens
gacatcctggaagctgggaaatggacaagaggcgccggtacagcatgctgcactctcaggagtctggcagctctgtcttctaccactctcaggatgacgg

SEQ ID NO: 644586 - DNA, 50 bp, Homo sapiens
cctggcaaccgccccgtctgagaactcctgtaggcatctcctgaattaag

SEQ ID NO: 644587 - DNA, 100 bp, Homo sapiens
cgtggatccgctggagcggagccggccgtacgcggtgctgcgagggcagaacctggattgatgactacagcatggttcgatttttaccttacgatcagtc

SEQ ID NO: 644588 - DNA, 89 bp, Homo sapiens
gaatattcccaagtccttcacccggatgctattaactgagtacttggatatgaaaaatactcgtacggcctctgaaccatcagctcaac

SEQ ID NO: 644589 - DNA, 82 bp, Homo sapiens
gatgacacagccctcagcgagagtgccaaccaggccttcctgcacatctccatcccccagcctgactgccccgcagaggcgc

SEQ ID NO: 644590 - DNA, 100 bp, Homo sapiens
ggggggcgccccgatgagccccgagtgcgaggagccgccgccccccctcgcagctgctggagccagttctgcttctcggcaaggagcgatttgctggtgt

SEQ ID NO: 644591 - DNA, 99 bp, Homo sapiens
gtcaccgaatggccacagcttgtaaaagggctatatcagtgtaaatgagattaatgagccgtgtggcaattccacgaatctatccccttccactcagtt

SEQ ID NO: 644592 - DNA, 100 bp, Homo sapiens
ggctggacagctagctgcttatggctataaaattacagtcaaaccggcacgatgtccaggcaccagaaccagaacaccatccaggagctgctgcagaact

SEQ ID NO: 644593 - DNA, 100 bp, Homo sapiens
ggacaggaaccagaacccaggcccacggaggaagagccgggcagtccctggagcgggccagtgatgaacggcagcagccactcaccaacagccatcaatg

SEQ ID NO: 644594 - DNA, 90 bp, Homo sapiens
ggagcggggggaggaggacccagaagttgttagagttggaagcttggcagttggcctcccttcttcccatggaggacgggggcttaacag

SEQ ID NO: 644595 - DNA, 74 bp, Homo sapiens
ggtgcaggcgagggtgcagagcctggagagcatgccccggccccctgagcagctctgcatgaaggataaagacc

SEQ ID NO: 644596 - DNA, 50 bp, Homo sapiens
gccggacgccctatcgcaagcaggttgcctggcagagcagtggtccggca

SEQ ID NO: 644597 - DNA, 83 bp, Homo sapiens
gaacgacctgtggaaacctgtgatccattctcattaaataaatctctgggtgtttcagatacaaattcaaagagctgggcaaa

SEQ ID NO: 644598 - DNA, 97 bp, Homo sapiens
tatgcacgcagatgctggagaagtccccttatgaccagcacacagcaagaaggaggccatcagcaaactgggaagaggaccctcaccaggaaccaca

SEQ ID NO: 644599 - DNA, 99 bp, Homo sapiens
gtcttgaacgtgctccgccactgggtgtccaagcactctcaggtacaagaactgcaaagccctccaagagccagccaggtggtaaaggattgtgtgaag

SEQ ID NO: 644600 - DNA, 74 bp, Homo sapiens
atgaggagtcagagcacaatcaagatggattaccgggccttggtgcatgagcgagatgaggcagcctatgggga

SEQ ID NO: 644601 - DNA, 75 bp, Homo sapiens
catgggacactattacgcaacagggagaatgctggagaaccagactcctggagcagtttatcctatgaaataccg

SEQ ID NO: 644602 - DNA, 100 bp, Homo sapiens
agtcattccagcaccaacaggatccaaattcaattagcagagcctcacagacaatggccaaatgtgtcaaagctgtcacagagggtgcccaggcagtaga

SEQ ID NO: 644603 - DNA, 82 bp, Homo sapiens
acaacatcgaggaagccctcctgctcctcctcatcagcgaatccatgcttaaagcttttcaagccaggccaagaagctgtga

SEQ ID NO: 644604 - DNA, 82 bp, Homo sapiens
ccccgcgagcacagagcctcgcctttgccgatccgccgcccgtccacacccgccgccagcgctggccgcgcgccgaacccga

SEQ ID NO: 644605 - DNA, 75 bp, Homo sapiens
ctacgcctggacaaatactatatgatgccaacgtccggcggtacctccagctgacacagtcagaactcagcagct

SEQ ID NO: 644606 - DNA, 100 bp, Homo sapiens
gggggcgtccagccctacctatagaagggccgagcacagcaatgcaacgatatctggtttatgccatactctggtccctgtctggagacagccggctaaa

SEQ ID NO: 644607 - DNA, 82 bp, Homo sapiens
attaaagggggaaatgcaaatgcaacagtgacaaaagtacttaaagatgtggacagacatggtggttctgattgcctgggag

SEQ ID NO: 644608 - DNA, 75 bp, Homo sapiens
gcgccccttcgcgtcccctgcaccatgagctggggcaccgagctctgggctgaccaactgactgaagagcagatt

SEQ ID NO: 644609 - DNA, 88 bp, Homo sapiens
gaaacttcagatacgaaatatcccgcctcatttacagtgggagttgacgaaggatcagagattggtgtattcgggcagactgcttccc

SEQ ID NO: 644610 - DNA, 82 bp, Homo sapiens
cctgatgccaacagtgtaccagcagggcgttggctatgtgcccatcacagtccacaggtcctggctaccctgggaagagaca

SEQ ID NO: 644611 - DNA, 101 bp, Homo sapiens
ttcgcagagtccacgtgcccaacaccttccaccatgaccacctcagcaagttcccacttaaataaaggcatcaagcaggtgtacatgtccctgcctcaggg

SEQ ID NO: 644612 - DNA, 100 bp, Homo sapiens
cgccgctgggcctgcaggtctctgtcgagcagcggacgccggtctctgttccgcaggatgtcatacagtttgtcaagaaagaaaatagtgcactacacct

SEQ ID NO: 644613 - DNA, 75 bp, Homo sapiens
ttgagactttgacaagtcaaagagcacagctggaatgcaagtcaagcctcgaaaaagcccaagacagcagaagca

SEQ ID NO: 644614 - DNA, 99 bp, Homo sapiens
atctgcctcttcgtgggctccaccatcttcctggccggcatcgagaacgaaggcggccagaacacagcccacttggatcagtttgaacgaatcaagacc

SEQ ID NO: 644615 - DNA, 96 bp, Homo sapiens
tgctgctctgacgtgctgaagaaatttgtgtggagcgaggaaaggtgtgctgtgcctgaggccaggggaacttatgacattttagtaacaaaagat

SEQ ID NO: 644616 - DNA, 90 bp, Homo sapiens
tgctgctctgggttggcatctacgtgtgagcacccaagggtgtcgatgagcagagcgacagtagtgaggagagtgaggaggagaagccgc

SEQ ID NO: 644617 - DNA, 82 bp, Homo sapiens
cgggcggctgaggtggagatgcagctgaggagcctcatggagtcaggtgccaaatgtgacatccagatgacccagtctcctt

SEQ ID NO: 644618 - DNA, 51 bp, Homo sapiens
gggcacccacggagcctccggggctgggctggccctggccttccacgacgg

SEQ ID NO: 644619 - DNA, 75 bp, Homo sapiens
ggagacgggtgaggtacaggctcagtctgcggccaagactccgtcctgcaaggatgccaaagaagaccatgaaag

SEQ ID NO: 644620 - DNA, 50 bp, Homo sapiens
ctgagacggacttcgggggagactccttgctggtgcagacgaagcggcgg

SEQ ID NO: 644621 - DNA, 50 bp, Homo sapiens
tcgagctgctgttatcccaccaatgggagactcatgcatctgtatgccgt

SEQ ID NO: 644622 - DNA, 134 bp, Homo sapiens
ctaatggatactacagacaacagagaaaacttgttgaagagattggctggtcctatacagataaacctctcataatgaaggcccccgctgtgcttgcacctggcatcctcgtgctcctgtttaccttggtgcag

SEQ ID NO: 644623 - DNA, 75 bp, Homo sapiens
ctcatagaagcatacgttattcaatgtcaggctgaagctcaagaagttgcctgtgtccctggagtgttacacagt

SEQ ID NO: 644624 - DNA, 88 bp, Homo sapiens
ggcaagacaagctcagaactgagaagctgtcaccacagggtcttgctctgttgcccacgctggagtgcagcggcgtgatctctgctca

SEQ ID NO: 644625 - DNA, 108 bp, Homo sapiens
gaaatgtgcagatcctgatttgaatgctgtcctttataccaaccgggcagcagcacagtactatctggacctgtttgattcacatgatgacagagatgatgatgcgga

SEQ ID NO: 644626 - DNA, 83 bp, Homo sapiens
cagcactctgggcgaaaattggatgtgaaaatgaagccagaccgaggtacaccagaggatcgcttcctggcagaatttgggag

SEQ ID NO: 644627 - DNA, 114 bp, Homo sapiens
ccgagcacgagctgtgaggggattcacttgtgtgcggaactcctcggaaccatggtctcctccgggctggggctgagcaagccctcggagtgaccgtgggtgacagcggctcca

SEQ ID NO: 644628 - DNA, 75 bp, Homo sapiens
gagaacggccaacaggctctttggagagaaaacttgtcagttcctctcaattatggattggatatgtctacttct

SEQ ID NO: 644629 - DNA, 98 bp, Homo sapiens
gaagaggaaaggctcaaccaagagaaaaaggtctctgtttatttagaagacacagactaacaattttagatggtgctggaaacatgcatgaagagctg

SEQ ID NO: 644630 - DNA, 75 bp, Homo sapiens
ccacaatattcacgcctcttcccaaacgcatctcagcacatccgcaaggaggaagccgtgcgtggactagaggag

SEQ ID NO: 644631 - DNA, 100 bp, Homo sapiens
gcgagagggagccgcagctgatgtcagccgttggacataccagatggtcgaagagctccacttcctgctcattaccggagcagtagtactcgcagcattg

SEQ ID NO: 644632 - DNA, 50 bp, Homo sapiens
attcgcagtggtcgcttcttctccttgatgaggtttatataactttccaa

SEQ ID NO: 644633 - DNA, 74 bp, Homo sapiens
aatagcctttgccatcactgccattaaggtgtgggcagaagaaaaagctagtgatcaacagtggcaatggagct

SEQ ID NO: 644634 - DNA, 98 bp, Homo sapiens
tgcacctggtgattgtgggtcctgaaactacagtgactatggtgggaagcttctctccaagacactcaaagtgcatggtgaagaatgtggactctagc

SEQ ID NO: 644635 - DNA, 90 bp, Homo sapiens
ggcaccctgacttatgaagcagttcaccaaacaacgcaagttggattggggcagtctttgtgcgttggctctccagcagaactatctcct

SEQ ID NO: 644636 - DNA, 100 bp, Homo sapiens
gcgcaacatcctggacgtgcgcccgccctccggcccccgccgcagccagtcggccagcgacgcccccttgtcgaacccccagacctgactccggaggagc

SEQ ID NO: 644637 - DNA, 100 bp, Homo sapiens
catcgtcgtcttccggacagactatggtcagtttgctgatggccgccaaagttggagttcgtatgttgatgacatctgattagcagaagtcatgttccag

SEQ ID NO: 644638 - DNA, 75 bp, Homo sapiens
tgtgggcacatggttacctgcaccaagtgcggcaagcgcatgagtctacatgttcaagtgcgtgtggcggtgcta

SEQ ID NO: 644639 - DNA, 80 bp, Homo sapiens
tgaagtacaccgtggtgacattgtatcattggtgtcgtcacgctgtggtacagagcacccgaagtcttgctccagtccag

SEQ ID NO: 644640 - DNA, 100 bp, Homo sapiens
tgtgaaggagcggaaggttaatgttcttcagaagaagctatatgttctcctttcagccaagacctttcaccagtgcaggggatagaagattcattccaca

SEQ ID NO: 644641 - DNA, 97 bp, Homo sapiens
ttgctgatctttgtctacaatttcatcagacctgtgaaaggcaaggtcagcagcatccaggacagccagaaatgcactcggtgatggaaagagagcc

SEQ ID NO: 644642 - DNA, 101 bp, Homo sapiens
gtccaggatgcctttgccgccgccaagctcctggccctggccctgatcatcctgctgggcttcgtccagatcgggaagggggataaaaacattcagatggc

SEQ ID NO: 644643 - DNA, 82 bp, Homo sapiens
cctactcccagatgcatccgtgtcatttctgcagaaaaatgtgggccccctccacctattgacaatggagacattacttcat

SEQ ID NO: 644644 - DNA, 100 bp, Homo sapiens
ggagaacggccatatttatgtgtgtgggacctagatgtgaaggctggtggaggctgtgtaatgaccattggagaaatgctacgatcttttctcacaaaac

SEQ ID NO: 644645 - DNA, 90 bp, Homo sapiens
atcaccctgcggaacctggaggaggtggagttctgtgtggaagaggttgacggatatattcagacgttacgacacggatcaggacggctg

SEQ ID NO: 644646 - DNA, 88 bp, Homo sapiens
cacctcagggacaaagagatctggacagaatcgccggacaggtggagccgccaccaaaatgcagattttcgtgaaaacccttacgggg

SEQ ID NO: 644647 - DNA, 75 bp, Homo sapiens
cacagaattatcaaagacttcatgatccaaggaggtgacccaacagggacagagttttcctccaacgacagaaaa

SEQ ID NO: 644648 - DNA, 75 bp, Homo sapiens
ggatgttcttcttcgagtatttgtagaaggggtgcagacgtatgtcggctttggcgtatccatcaagctttatat

SEQ ID NO: 644649 - DNA, 83 bp, Homo sapiens
ctgttttgcctgaatacatgatttaaacaagagatttccacagaagaaccaaaaacttttgctagaaaatcagcttttacgag

SEQ ID NO: 644650 - DNA, 87 bp, Homo sapiens
gactcccaaagtgggcaacacccagtggaagaaagtgctgattgttctaaatggctatgactttgcagccgtcctggagtggttcgc

SEQ ID NO: 644651 - DNA, 90 bp, Homo sapiens
atattcagtattccaatcacagagaacttaagactgacaatctacctaatcaagctttgcggtccagcacagagctccatccagacctgc

SEQ ID NO: 644652 - DNA, 74 bp, Homo sapiens
tgcagaatgggattgatgcagacgtcaaagattttagggactggtgattgcagctggaagtgcccatgaccgag

SEQ ID NO: 644653 - DNA, 100 bp, Homo sapiens
ccagatcgagaccactttggccgtacattctataatcaggcaattatgtcttctaaaaatattgcacaggttaaaaatgtgtctgcaggcacacaggacg

SEQ ID NO: 644654 - DNA, 96 bp, Homo sapiens
cgcccagcgccgccgccccggacagcggccccgaagcgggcggcctgcactcggggcgaactttctgaccaagtatacaactacccagagggccta

SEQ ID NO: 644655 - DNA, 101 bp, Homo sapiens
gggatcaaagagcagtgggggttgctgacccagaggagagttctccaaacatgatcgtttactgcaaaacaagttggatggcttgaggactggtactaaaa

SEQ ID NO: 644656 - DNA, 109 bp, Homo sapiens
ctaaacttcaccaaataatagctgtttgtattttggctgctgcaggagccattttagatatgaggccccaggattcctggcgaggtcctcctccccttttccagcagca

SEQ ID NO: 644657 - DNA, 100 bp, Homo sapiens
ttaatgaccttgttatcagtgatggctcttctctggaagatcttgtggagaactgtgtttatgaaactgtagttttgcctttggatgaaagggcatttga

SEQ ID NO: 644658 - DNA, 96 bp, Homo sapiens
tgggctggctccgggggtggcgggcgcagctgctgtgacaggtagagcaagaaaagctggacaagatctggcctaagcttcgggtcctggcgcgat

SEQ ID NO: 644659 - DNA, 100 bp, Homo sapiens
gcaggagggcagcatgttaataaaactgatagtgccgtcagacttgtccacatccccacaggattctgagaaacgaacccctcttcatgtggccgcattt

SEQ ID NO: 644660 - DNA, 101 bp, Homo sapiens
tactaaagaaggaaaaaggaacgaacttcaaccaggtgctggaagcccaggaagcacacatcaaggctcccttgccagcagggtgctgccaataaaaggta

SEQ ID NO: 644661 - DNA, 87 bp, Homo sapiens
gggttgggctgtgacgctgctgctggggtcagagaaaatattctctttggaatgggaaatcctctgcttgacatctctgctgtagtg

SEQ ID NO: 644662 - DNA, 75 bp, Homo sapiens
ggagattttgatgtggatgatgccaaagttttattagcaatcccacagagtattgatgaggaaactgaagtttgg

SEQ ID NO: 644663 - DNA, 82 bp, Homo sapiens
caaaaagcataggcggaccatgataatttccccagagcgtcttgatccttttgcagatggaagaggatcacctagcccgggt

SEQ ID NO: 644664 - DNA, 74 bp, Homo sapiens
cccttccgggagcctagatcctgtgctttactctgaagactcgaaattggatacactcacatgaaaatagcgga

SEQ ID NO: 644665 - DNA, 95 bp, Homo sapiens
aaatattggggccatttagtaacttctttgcaaggaaccatcactgttgctggaggcacctgacaaatcctagcgaatttttggagcatctccac

SEQ ID NO: 644666 - DNA, 100 bp, Homo sapiens
cagcgttttgactttgctgttctctggcttgtggcatttaggattaacagcgacaaactgaaaatcagtggaatgagcttcttgaaactctgcacaaact

SEQ ID NO: 644667 - DNA, 100 bp, Homo sapiens
cgcgggacaagaaaattcatgcggccttgaaccggggcattgctgctgtcaaggaggatgcagtcgagatgctggccagctacgggctggcgtactccct

SEQ ID NO: 644668 - DNA, 75 bp, Homo sapiens
tgattgccatctttgccctgatgagctcctgtttagccactgcagtcacaatatggagcttccgtttctgccaag

SEQ ID NO: 644669 - DNA, 75 bp, Homo sapiens
cacggtttttattgacagagctctgatagttgttccttgtgcagaaggtctggcagacccgtctgcgttaacaca

SEQ ID NO: 644670 - DNA, 100 bp, Homo sapiens
tcaagaagaccatcctggacaagatccgggatcagttgaaggaagaggagatccacatctaccagttccccgaatgtgactctgatgaagatgaagactt

SEQ ID NO: 644671 - DNA, 89 bp, Homo sapiens
atcggttggatggataagaattttgataaaatcagagtgtggctgcaaagtgaaaagcttgaacactacatgaggaaataattgacttt

SEQ ID NO: 644672 - DNA, 97 bp, Homo sapiens
ggtcgcactgagggtgaagtggcaggaggaggaggaggggctccggctggtctgtggtgagccccaggaccaaattaccatcacagggtacgaaaag

SEQ ID NO: 644673 - DNA, 75 bp, Homo sapiens
gaaggatcttctcatgcacagaggcaacaaatggcaactttctgatctcaaaccatgaattatgtgggacagctg

SEQ ID NO: 644674 - DNA, 75 bp, Homo sapiens
agaaacttaaagcctggaatgatatcaaaaagtttcctccctcaggtaacagatctgaatttcctgatgtgaaaa

SEQ ID NO: 644675 - DNA, 75 bp, Homo sapiens
atctcttcaacagggcttcaccactggaacaagcacaaggtggaggaactgcaatgtctggtggagaacagaaac

SEQ ID NO: 644676 - DNA, 48 bp, Homo sapiens
gtctccctgaagaaccgagcggccagtgccagccatttttggagtctc

SEQ ID NO: 644677 - DNA, 74 bp, Homo sapiens
cagaaatcacctatgtttacagcgacagaccgcaaaccaagggccaaaatttaaagaccgtcggctacagatat

SEQ ID NO: 644678 - DNA, 98 bp, Homo sapiens
tctttccgccctaatggaggtctccagtttcgtccctgaagaggaaggagaaggaatatgagcatgaaatggagcggctggcacgtgagaagattgcc

SEQ ID NO: 644679 - DNA, 82 bp, Homo sapiens
ccaagatgtctgacatggaggatgatttcatgtgcgatgatgaggaggactacgacctgattctgatgctcacagtaccacc

SEQ ID NO: 644680 - DNA, 83 bp, Homo sapiens
ccgcagcatagactgggacttggctactgcagcactggggtgtcagttgttggtccgacccagaacgcttcagttctgctctg

SEQ ID NO: 644681 - DNA, 75 bp, Homo sapiens
gctgctccgcgggtgcatcgaagccttcgtgaccaagcagagagactcggagatgggccagcagagcctcctctt

SEQ ID NO: 644682 - DNA, 75 bp, Homo sapiens
ggaaggacaccctgaaggctggcaaaaatgcagtcgagaggaggtcgaacagatacctgtcgcgaaatcgccttt

SEQ ID NO: 644683 - DNA, 87 bp, Homo sapiens
ggcggccccgacatcttcctgcacatctctgagctttcacagtggtgacagtcttcaattccatgacttttgctttgaaagtaacac

SEQ ID NO: 644684 - DNA, 119 bp, Homo sapiens
gactctttctgttcaggccagaccctctgggagcttctcagccattttccacagatcagacaatgcagatcttcgtgaagactctgactggtaagaccatcaccctcgaggttgagccc

SEQ ID NO: 644685 - DNA, 100 bp, Homo sapiens
ggaggttttccgagacaacaacggcaccgcggtcttgagtcaccacgtccgaatataattcttgggttagtaatctgccaaaaaatcaaacgtcccgcaa

SEQ ID NO: 644686 - DNA, 150 bp, Homo sapiens
tgaagtcggggggcacgcagctgaagctcatcatgaccttccagaattacgggcaagcgctgttcaaacccatgaagtacatgtcccagagcaagcacacggaggcccgggagctcatgtactcgggagccctgctcttcttcagccatg

SEQ ID NO: 644687 - DNA, 82 bp, Homo sapiens
tctgagcttcatgtggtggtcaaagaccatgagacgatggggaggaacagccaaaactggacaagccaaggcatctgtagcc

SEQ ID NO: 644688 - DNA, 90 bp, Homo sapiens
ggcgtgcccgccggggggctagtggccacgctgcagagcctcgccatggcaatgacaggctcaacaccttgctcatccatgagtaaccac

SEQ ID NO: 644689 - DNA, 82 bp, Homo sapiens
gcacgggagaagaggaggatgcggctcgtggtggatggcatggggcgctttggcaggcattgaagttgatatcgatgtggag

SEQ ID NO: 644690 - DNA, 100 bp, Homo sapiens
cagaggaaacgaggcgccgcgttggcgcttggacggcgggaaccggctccggagcgagaacgcgcgacgctgtgcagagctgcaagtccgtatcactgag

SEQ ID NO: 644691 - DNA, 95 bp, Homo sapiens
taaaatcagaagttcagaagctacagactcttgtttctgaacaggttcatcttccttcctgtacagtattttcaaacttcccagtcattaaaaat

SEQ ID NO: 644692 - DNA, 107 bp, Homo sapiens
cctttttaggccatgatttctggagagcttgacattctcaaagactggtgctatgaagctctctggattaatcgaattacagctgctagccaggaacatggactgaa

SEQ ID NO: 644693 - DNA, 96 bp, Homo sapiens
aagaacccattcctacagctcagctggtacagagagtagcttctgtgatgcaagaatatactcagtcaggaacaacatagacgtttgtcctgaatg

SEQ ID NO: 644694 - DNA, 75 bp, Homo sapiens
ccacacacagatgtggtgaaatgtacccagttagtaagagaaaaccatgagctgttttccaagagcttcatctcc

SEQ ID NO: 644695 - DNA, 100 bp, Homo sapiens
tgaagatcttgaaaatttgacaacttacggttttcgtggagaagccttggggtcaatttgttgtatagctgagagaatgtccaagcacacagatgcagca

SEQ ID NO: 644696 - DNA, 136 bp, Homo sapiens
agtgaaccggagaccccgaaaacggaagcgcagggagaaggaagaggtgtttgaaaagcctatttgatggctttgcagatggactaggagttgctgaagctatttcatatgtggatcctcagttccttacctacat

SEQ ID NO: 644697 - DNA, 48 bp, Homo sapiens
cctctacctcaagtatgagccagcccccaaatacatcaagatgtttgt

SEQ ID NO: 644698 - DNA, 80 bp, Homo sapiens
cggcaagctggctgcgagcggctgagagcgccgccctgtgctgggctgccgggagctcgtcttcaggaacctctccaaga

SEQ ID NO: 644699 - DNA, 82 bp, Homo sapiens
aactgctaacaaccagctggaggatggagctaacacccattatggagattaaccacttttcatcaggtttttaacttaagtc

SEQ ID NO: 644700 - DNA, 147 bp, Homo sapiens
ggaaagtgacgcccttggagtgaggcgagcagcacagagacggctgaaagctgagctaggaattcccttggaagaggacttcatagacctcacgttgtcgaagactcaacgaaagactccaaccgttattcataaacattaccaaat

SEQ ID NO: 644701 - DNA, 82 bp, Homo sapiens
tgagcagtctctgcccccgccggccggcctcaacaacagaatgttgctgcgggatgtaaaagctcttaccctccactatgac

SEQ ID NO: 644702 - DNA, 101 bp, Homo sapiens
cggcgaccgagctgggcccgtgagccactcggcctcagatgaaggatttgggggcagagcacttggcaggtcatgaaggggtccaacttctcgggttgttg

SEQ ID NO: 644703 - DNA, 88 bp, Homo sapiens
ctggtatcgggaggtgccgaacactggcttccagctggtctttttaccctttgctgatgataaaaggaagatgccctttactgaaaaa

SEQ ID NO: 644704 - DNA, 80 bp, Homo sapiens
acaggggccactcagagtcgcccgagaagccactggaagggaacacctgcctctcccagatgcacagctgggctccgctg

SEQ ID NO: 644705 - DNA, 75 bp, Homo sapiens
ggactgactggggttctgagactccctgtcccggaccgcagggatgggcgtgttttgggcgtgctagaggtgtca

SEQ ID NO: 644706 - DNA, 50 bp, Homo sapiens
cgggtggagtgtaggtcatatcgccgcgacctgcctagagctggaacgtt

SEQ ID NO: 644707 - DNA, 82 bp, Homo sapiens
agcgctactcgcaggaggtcttcgatcacggatacacgactctagccaccagtgtgaccctgttaaaagcctcggaagtgga

SEQ ID NO: 644708 - DNA, 90 bp, Homo sapiens
gacaaccatccgtgtggtgtccatggacagagactaccacgtggcatgttaccactgtgagatgccgcatcctcgaaggtaccactcctc

SEQ ID NO: 644709 - DNA, 96 bp, Homo sapiens
ggatctttccggatcaatccagatggcagccagtcagtggtggagacgtgctatgggaagagggcaaggcagccttggagcagctgcttaagttca

SEQ ID NO: 644710 - DNA, 99 bp, Homo sapiens
tgttcttcttgcctgtggcataaacccggaaaaaagcatccttttccaacaatctcagggtcatcgagcagctcggtgggaagcagctggtcatgaacc

SEQ ID NO: 644711 - DNA, 78 bp, Homo sapiens
ctctttctggcctggaggctatccagcaccattactgggacttccacccccaccacgtgcacagcgagttcgagagct

SEQ ID NO: 644712 - DNA, 101 bp, Homo sapiens
cttggactgagtcctgcaggacacagacaatgcagatcttcgtgaagactctgactggtaagaccatcaccctcgaggttgagcccagtgacaccatcgag

SEQ ID NO: 644713 - DNA, 101 bp, Homo sapiens
cacccgggcccgggtctctctaaaggacctggccctgcagctgctgcacaagaagatccaggccccatggcgggtgccagaaaatggacacgaccttcacc

SEQ ID NO: 644714 - DNA, 80 bp, Homo sapiens
cggggacattattgcgcgtggaacggctgcttttggaagaggagcaggagcggcttcgcttggagcaggagcgagagcag

SEQ ID NO: 644715 - DNA, 75 bp, Homo sapiens
ttggtttggaaaaatttcattagagatatgattctataacagactcttccagaaatgatatgaagaggaaatttg

SEQ ID NO: 644716 - DNA, 80 bp, Homo sapiens
ttggaagcagccgatccagcctgcggagcctgtggggcaggttgtttacattcagagctctatcaataagaggaatacat

SEQ ID NO: 644717 - DNA, 97 bp, Homo sapiens
gaaaaggaagcaaatgagctgatggaagatctgtttgaaactggttaaagcacgaattgggagctctcagcgacatcaccagtcagcagccaaagac

SEQ ID NO: 644718 - DNA, 100 bp, Homo sapiens
atcagataatgattatgacggaattaagaaattactgcagcagaatgaaatatgactgaggactctcagagaaactttcgttcagtatattatgagaaag

SEQ ID NO: 644719 - DNA, 50 bp, Homo sapiens
ttggagtgtgcgtgcgcgccgagcggcctccggtgtggctgtctctgatg

SEQ ID NO: 644720 - DNA, 74 bp, Homo sapiens
aaacgccaataatatggagacactaatcgaatgtcaatcagagaaccccgagatgcccctgtccttcacaataa

SEQ ID NO: 644721 - DNA, 50 bp, Homo sapiens
cgagtgcccgggcctggccccgggggtgaatctctacattaagaacttgg

SEQ ID NO: 644722 - DNA, 75 bp, Homo sapiens
atggaagaacttcacaatcaagaaatgcagaaacgtaaagaaatgcaattgaggccagaagcggactcctagaag

SEQ ID NO: 644723 - DNA, 96 bp, Homo sapiens
cagggagtgcatcaaaggtgtgaacacagggaacgtgtgaaagaagaattgtggggaaaaaaaagcaagcataaccaaagatcatcagcagtgaag

SEQ ID NO: 644724 - DNA, 90 bp, Homo sapiens
ccccccggagaaaaagttgaagcgttattgaatggtagtgtctagaaagggtatgtcccttcaagagagaggtgccaatgtccaaccggc

SEQ ID NO: 644725 - DNA, 73 bp, Homo sapiens
cgggcatggtggtctggggcaacgcggaaggcatggctctgtgagcgctgatgaggctgcccgcacggctccc

SEQ ID NO: 644726 - DNA, 75 bp, Homo sapiens
caccattggcaaaactgtggagtatctgcactcacagggggactcacaccacccggcaagaactgctcactacgg

SEQ ID NO: 644727 - DNA, 75 bp, Homo sapiens
cttggaacaatttatgatagaggtgctttacaaggccaagtacggtccaatgtggatgtcctacttagggcctca

SEQ ID NO: 644728 - DNA, 100 bp, Homo sapiens
gcccctgccttcgaaaccgttatggtgaagaggtcagggatgctctgctggatccgagctgccactgccagaacctgaggagcagagccggccccgcaaa

SEQ ID NO: 644729 - DNA, 82 bp, Homo sapiens
agtatttgcctcctgtgtcccaaccggcctgagtcaagcccagatgatcttcctcaactgtggccacgtctgctgctgccag

SEQ ID NO: 644730 - DNA, 83 bp, Homo sapiens
agcgaggccacgccagcagtggggcagcacctgcacctacggcggaaggcaacagcccccaggggagcaaccagggagtcaaa

SEQ ID NO: 644731 - DNA, 97 bp, Homo sapiens
ccttcacaatccaagttccacaatatattgactactgccacaattccggttgcagctggaagctggatggacagatgcaaattttggaattttctcc

SEQ ID NO: 644732 - DNA, 90 bp, Homo sapiens
gggtgacagcaacagctcggcgggctggaaggtctctaattaacagaagatggcaaagcccagccacagcagctatgtccttcagcagct

SEQ ID NO: 644733 - DNA, 100 bp, Homo sapiens
tgccaacgccccggtggagaagctgaggctggcagtgatggtgaaagcataggaaactgccccttttcccagaggctcttcatgattctttggctcaaag

SEQ ID NO: 644734 - DNA, 75 bp, Homo sapiens
ttatttcggctgtgaaggacctgtttggggagtttttgaatcagagccgacaggcacttgaattgaaaatggaaa

SEQ ID NO: 644735 - DNA, 82 bp, Homo sapiens
tgatgaagaggaagaagtcaagccgatcttgcagaaattgcagagctggaagtcgagtgtgctactcaactcaggagatttg

SEQ ID NO: 644736 - DNA, 75 bp, Homo sapiens
actgctctggatgatgcagaagaggagtcctttaggaaggtgcaggttttgcagcatttggacaaacaaagccag

SEQ ID NO: 644737 - DNA, 75 bp, Homo sapiens
gaatcttctggtgtactctttttatgaaaagtgatggaatggggagaagatattaaagcagtttcaaaagatgaa

SEQ ID NO: 644738 - DNA, 97 bp, Homo sapiens
cctttggtggtggtatggaaaacatgggtcgatttggatctgggatgaacatgggcaggataaatggtcccagcacacctggaaagttctgcaaggc

SEQ ID NO: 644739 - DNA, 114 bp, Homo sapiens
ctctgttgacctatgatctgcagggagacgcacagccaggacatcctggaacctgggaaaggctcatgatggagcagtccaagaagtcctccctcatggtggcccgcagtattc

SEQ ID NO: 644740 - DNA, 82 bp, Homo sapiens
gagaggtctctgtgacgattttgagctgaagtttcctgcaccaggcaagcctggaaattatcagtatactgtgtttctgaga

SEQ ID NO: 644741 - DNA, 50 bp, Homo sapiens
aagacttgcccatccaatctgatatcagttttagagaatgtggcgtggag

SEQ ID NO: 644742 - DNA, 90 bp, Homo sapiens
ccgggcctgagctgtgctagcacctcccccaggagaccgttgcagtcggccagcccccttctccacgacctgcttttttaaaggctgcag

SEQ ID NO: 644743 - DNA, 100 bp, Homo sapiens
caaggatggtgcagattttggcagattatggctttgtccccacccagcactgatgatattataaaggaaatcctcattgacgattcaatttgttgaaggc

SEQ ID NO: 644744 - DNA, 75 bp, Homo sapiens
cgagaagttgagggagaaaggcgggcccgggaacaggaccatcagcacgtgcccatcgacatccagaccagcaag

SEQ ID NO: 644745 - DNA, 78 bp, Homo sapiens
ttttgccacctttccctttatttccggagtcatccgtccttggctcaggatttggagagcttgcaccaccaaaaatgg

SEQ ID NO: 644746 - DNA, 74 bp, Homo sapiens
tcgtcctccatgacaacaagcacgactgcaaagaagattgcaacacctgctcggtataccgtgactttgggagg

SEQ ID NO: 644747 - DNA, 120 bp, Homo sapiens
cgccggagctctgatcgccgggaacccttgccgctgctgtcctgcgaccccaagcaggtactccaaagattcaggtttactcacgtcatccagcagagaatggaaagtcaaatttcctga

SEQ ID NO: 644748 - DNA, 82 bp, Homo sapiens
ctaaggtcgaatcatcaggcgtccccgtcacccaacaacccactcaggcacttccgctgctgatgcaaggaatcccctgggc

SEQ ID NO: 644749 - DNA, 100 bp, Homo sapiens
tggccggggctacctccggatgttccccactcttcaaagccaagatggttggtgcagcatgatagagctcaatttcaaggatgcatttgattcctttgag

SEQ ID NO: 644750 - DNA, 74 bp, Homo sapiens
ccaggagaaccaagatccaaggaaagttcaggagccctggaaaggagaaggaataagacggcaggaggaagaga

SEQ ID NO: 644751 - DNA, 83 bp, Homo sapiens
gtctctgatccgcaagcatgctcagaccttcattgctctgtgtgccaccgaagctccaccatgaggcgaggtggatggaggaa

SEQ ID NO: 644752 - DNA, 97 bp, Homo sapiens
cggaaactgtcatctgaaaaacaacgtctatgtcaaatcgacaaccatggaatatgatgaagaatgggctaagaaaattcagagtgaaaagtttcgc

SEQ ID NO: 644753 - DNA, 100 bp, Homo sapiens
tttcgacctggagaacatcatcttccgctgtcttgtcgacggtctcactgatgcctcttctgcattcaaagttcctcgacccgggccagatacactccag

SEQ ID NO: 644754 - DNA, 138 bp, Homo sapiens
tccgccctccacctggccatcgccctgcgcaccaacgcccaggaccagttcctgctgaagcaggtgaagccatcagtgtctacagcttcagctattgcccgtgtgcagatggtgcttaatctctcttgtgccttccag

SEQ ID NO: 644755 - DNA, 75 bp, Homo sapiens
tctggaccttggaggggggcagcttgagcaagcggcaaggcctctttgaggtatctggccaggaacagtcttcac

SEQ ID NO: 644756 - DNA, 75 bp, Homo sapiens
tactcttgatcctctccggctgcttggtctacggcacagtgaaacccagggccccaggaaacctgacagttcaca

SEQ ID NO: 644757 - DNA, 98 bp, Homo sapiens
agtggttcatcttggagataaagaacaatctaactgggcaaaagaagtacaaggaatttcagaacagagcaggggagagaagacagaagaggttggag

SEQ ID NO: 644758 - DNA, 90 bp, Homo sapiens
gagatggggaccgccctggacatcaagattaaaagagcgaataaagtttatcacgccggggtgctttacaaggccaagtacggtccaatg

SEQ ID NO: 644759 - DNA, 115 bp, Homo sapiens
cttgtacagcaatctcctcctccactgccactacagggaagtgcatcacatgtcaggaattggagctctgccgaagattatacaaattgcattttcaattgctgcttctgttcca

SEQ ID NO: 644760 - DNA, 99 bp, Homo sapiens
tttattcagcactcagaatgctccaggcagtgtaatctcattccatcttcattcatgactccagacaggctcgcaggaaggaggtatttatccaggaac

SEQ ID NO: 644761 - DNA, 90 bp, Homo sapiens
gttgaactagtaaaagattgtaaaggtttgggattcagcattttggattaccaggctgaactcacgggaatcaaatggcgtaggtacaat

SEQ ID NO: 644762 - DNA, 75 bp, Homo sapiens
gttaaagtctctcttcaccctgccgtcatgtctaagtcagaggccacctgaaccccatgtcgtacacccagcact

SEQ ID NO: 644763 - DNA, 100 bp, Homo sapiens
ggggctgcagtgcatgaacaccagcacgagctacctcagcaagacgagagaaaaggaacagttccgtaagctctttattggtggcttaagctttgaaacc

SEQ ID NO: 644764 - DNA, 74 bp, Homo sapiens
cggaaggacaccaagatgcggatccgggcctttccgtccaagtggtaagaagttcagaagcaagcctcagttgg

SEQ ID NO: 644765 - DNA, 82 bp, Homo sapiens
ctgggcgctccggtggcggcggagcagcccctgtcaaagggaacaggaagcagtccacggagggtgacgccctagacccacc

SEQ ID NO: 644766 - DNA, 96 bp, Homo sapiens
ctgggagagaggtacctctccttttccctctccctttccctaagctgggagtgtccactcgccttccaccagcatggcaacgtcttcacagtaccg

SEQ ID NO: 644767 - DNA, 82 bp, Homo sapiens
tgaaaatattggggccatttagtaacttctttgcaaggtgtcgtgaaaactacccctaaaagccaaaatgggaaaggaaaag

SEQ ID NO: 644768 - DNA, 90 bp, Homo sapiens
acagctcctaccttggacgggagggcgcaccctacgacgcgcacaccaccggcatgaccggcgccatcagctaccacccgtacggcagcg

SEQ ID NO: 644769 - DNA, 75 bp, Homo sapiens
ccccgccgctctgtctacaacccgagagccaaatctcctcagccacctgttgaagaagaagatgaacacttcgat

SEQ ID NO: 644770 - DNA, 98 bp, Homo sapiens
tgccctgaggagtccccgctgcttggaaacaagtttcagccactaaggccgaagcagaaaaggatggagtgaaggtccccacaaccctggcggaatac

SEQ ID NO: 644771 - DNA, 100 bp, Homo sapiens
gccagttccggcccgaggacaccgactaccagcaggaaggtgctcgggtcttcggggcactgggtcccatcggtccctcctcacctgggctcaccctcgg

SEQ ID NO: 644772 - DNA, 111 bp, Homo sapiens
ttgaggagctgctcttcctccagaatgcgctcggacggaacgttaggaaggccctgctcattgctatggacagtgctatcaccctgtggcagttccttcttcagctcctgc

SEQ ID NO: 644773 - DNA, 51 bp, Homo sapiens
agaacaagaactttctaagctaaaaggttgcagatattttattccaaactg

SEQ ID NO: 644774 - DNA, 82 bp, Homo sapiens
cgggtgccgaggagcgggaagagttgctggggattttttatcaagcagaaatgcatcgaacaacgagaatcaagatcactga

SEQ ID NO: 644775 - DNA, 74 bp, Homo sapiens
aggaaactcagaagatgctgttcagttgagttacagacatcctgccaaaatgatttcttcaaagcccagacttg

SEQ ID NO: 644776 - DNA, 50 bp, Homo sapiens
aggtagctggtgatttgcataaggacctagatgtgaaggctggtggaggc

SEQ ID NO: 644777 - DNA, 100 bp, Homo sapiens
ggaagaaagaactcaagtacaacccaatgagggagctgtggcgcggggccttccaggagtctgagctatgagtggcccctgtggagagaagcctgtcctg

SEQ ID NO: 644778 - DNA, 75 bp, Homo sapiens
ttctggtaaagaagtgagggtaccagctactgccttgtgtgtcttctctcacagaaagttctccgctcccagaca

SEQ ID NO: 644779 - DNA, 83 bp, Homo sapiens
caggaagaaaagctgctcatcagtgcctggtataatatggtttggtgcacctcgatttggaggaagtagggcagggcccttat

SEQ ID NO: 644780 - DNA, 74 bp, Homo sapiens
gaaatggtcgcttgcccctagtctagacacgccctactgccaataaagggaaaataagagatgctcatcgacga

SEQ ID NO: 644781 - DNA, 82 bp, Homo sapiens
agtgacctgactgatgccttcgtggaggattcctacaggaagcaagtagtaattgatggagaaacctgtctcttggatattc

SEQ ID NO: 644782 - DNA, 90 bp, Homo sapiens
gtggttgtgtggtcgcgtctcggaaaccggtagcgcttgcagcatgaacactatggctatgcatcctccaacgtcagccccgccctgccg

SEQ ID NO: 644783 - DNA, 99 bp, Homo sapiens
ttcaggcccgatatctctccctattttggcctattctatgagagttcactgcatccaagaagaggagaaaacactgaacaaagagcctggtgtagtttt

SEQ ID NO: 644784 - DNA, 82 bp, Homo sapiens
ccgcggcgggaggagcctgttcccctgagctcacaggcgcctgaagtacatatccctagctgtgctggtggtccagaatgcc

SEQ ID NO: 644785 - DNA, 95 bp, Homo sapiens
ggggagacgctgtggtgtgactggggcaggaccatcaggttcccagtagctgcagcagtgaaagacagtgattggctccagtgctcccagaagga

SEQ ID NO: 644786 - DNA, 80 bp, Homo sapiens
cgagctccagccgaaggagaaggggggcacttaagtattcatcgaagagtcaccccagtagcggtgatcacagacatgaa

SEQ ID NO: 644787 - DNA, 82 bp, Homo sapiens
ctgtccccgaggaggggaccatgacacagaggatacgaagcgttttcggcttcctgcccggagctgtgcagcaaacagtcga

SEQ ID NO: 644788 - DNA, 73 bp, Homo sapiens
ctcattgatgaaatttatggcattcagaacaggtgaggacgcttgagcggaagttagaagcaaaaatgatcaa

SEQ ID NO: 644789 - DNA, 82 bp, Homo sapiens
ctgttaactacattctgcaggtattggttggaagagaatctgagtacaaacagacttaattcagtgcacaaatgagatgaat

SEQ ID NO: 644790 - DNA, 51 bp, Homo sapiens
tgggaaaggagagtggatgggactcagcttcccatcgacggtcagtgcgca

SEQ ID NO: 644791 - DNA, 75 bp, Homo sapiens
gggtgtaataatgttaactgaggactcacaccacccggcaagaactgctcactacggctccctgccccagaagtc

SEQ ID NO: 644792 - DNA, 124 bp, Homo sapiens
gggcccaggaaaaagaggaaagtggactgtccggggccgggctcaggagcagagtttttgaagaatgccggccagtcatcgagtgcccttggtttgggtacaaggtgcgttttcctaacttgcg

SEQ ID NO: 644793 - DNA, 74 bp, Homo sapiens
agggcgccgagctggttgattctgtcctggatgtggtacggaaggaggctgaggaattcctctacagattcttg

SEQ ID NO: 644794 - DNA, 82 bp, Homo sapiens
ctgtgatgtaaatgactgtgtccagcaagttgtggaacttctacaggaacgggtagctacagcaagctgggtagcaggcaga

SEQ ID NO: 644795 - DNA, 97 bp, Homo sapiens
tgagcccgcggagtatacaccatgagcaaagctcaccctcccgagttgaaaaactttaccgatttgttacaactcaagcaagggccagcagaaattc

SEQ ID NO: 644796 - DNA, 96 bp, Homo sapiens
ggagcctggcgaggatgcaccttcccctgccttggaaaggtcccctcttgctgttggctgcacatcaggaaggctgtgatgggaatgaaggtgaaa

SEQ ID NO: 644797 - DNA, 101 bp, Homo sapiens
gtcctgagcgccatggctcactccccggtgcagtcgggcctgcccggcatgcaggacccagatgatgtggtaccagttggccaaagaagagcctggtgttg

SEQ ID NO: 644798 - DNA, 96 bp, Homo sapiens
ctcaggcaacccaaacgtatggactacctccttttgggggaacacacctgaaactagaggaacagcttatgtggtctatgaggacatctttgatgc

SEQ ID NO: 644799 - DNA, 97 bp, Homo sapiens
taaagaccagatcttgctggaaaaagaagctgaggttggactagtactacaatagatggatatttttatttctagaactctgacatcatcatttgtt

SEQ ID NO: 644800 - DNA, 101 bp, Homo sapiens
gaaggagggcgtccgagtcaacaaccgcttcgagctgctcaccatggatgatgatatcgccgcgctcgtcgtcgacaacggctccggcatgtgcaaggccg

SEQ ID NO: 644801 - DNA, 100 bp, Homo sapiens
cagggaccagcagttactgggaagcctggagatgcccaaagatgagctgcccaaccataactgcattaagcacctgcgctcagtggtacagcagcagcag

SEQ ID NO: 644802 - DNA, 90 bp, Homo sapiens
cggctttggaagccgtgcggagcgagttacgagaattcccggccgctgcaaggggccctggccaacgtcaacattgggagcctcatctgc

SEQ ID NO: 644803 - DNA, 78 bp, Homo sapiens
tcgcagtgagtgttacagctcttaagggacctcaggatggaaaccagcagcctgcaccgcccgagaaggtcggctggg

SEQ ID NO: 644804 - DNA, 73 bp, Homo sapiens
tcgcctcccgagtcactgcagccaacccttcagcaagatgaaaacttttcagttcctcataataaaagaggag

SEQ ID NO: 644805 - DNA, 75 bp, Homo sapiens
caaattaatgaatgacgataccctggtgaatgtgttatacgtcacacaacaaggccagtcaccactgcacatttt

SEQ ID NO: 644806 - DNA, 99 bp, Homo sapiens
gtggtctacgagctgtttctcatctttatactcttccaggagatggtaacctgcacctcaatgtgacggcggaggccttcagcccctcgctcctggctg

SEQ ID NO: 644807 - DNA, 98 bp, Homo sapiens
tggccccacagcaacagaggcacagcttcaagggggaggagtgtccagcagacatcgttggaactgcccgaccggatgagaaagccatcatgacttac

SEQ ID NO: 644808 - DNA, 100 bp, Homo sapiens
ccgagctgctgcggcgccgcaactttaaagtcatgatctaccaggttggtggagtccacattcaaactggtattgactgcgaacctctacttttaaatgt

SEQ ID NO: 644809 - DNA, 75 bp, Homo sapiens
atgaatggtgctatacttgaattttctaaggtgtcattaggtaggtttagactctgatgccagtatggactggag

SEQ ID NO: 644810 - DNA, 74 bp, Homo sapiens
tcaaccctcacttcgatttggaggacagagactgcaagtccagaggtgtccttctaaagctggtagaggtttca

SEQ ID NO: 644811 - DNA, 99 bp, Homo sapiens
aatattccatgacttggatatgctgacgactgtgcaggaagaaaacgagccagtgatttacaatagagcaaggtttcctatcctgggagcaggagagtg

SEQ ID NO: 644812 - DNA, 75 bp, Homo sapiens
ccgcaggatacccgccgagggtagggtcgcgctcgcccgggcggcagagagcttcaggatggttcgtactaagac

SEQ ID NO: 644813 - DNA, 82 bp, Homo sapiens
ccgtcgctggtcgtgcgacccaagcccctgcattcctgtacggcacctgtggaatcctctcaagaggaacagtcattgtgtg

SEQ ID NO: 644814 - DNA, 83 bp, Homo sapiens
gtacactgaaattcatcctgagatgagtttgttgaaattaaaggaagtgttttcaagaagtttgaaaagaacaatctctttca

SEQ ID NO: 644815 - DNA, 100 bp, Homo sapiens
gatgtatctggaactatgaatagctattcctctacacagccgactagttatgatcagagcagttactctcagcagaacacctatgggcaaccgagcagct

SEQ ID NO: 644816 - DNA, 104 bp, Homo sapiens
ctgaggtggatggagaagcagctgggggccttggctgtaaggacccctaaggggtatcgggtgctgcttcggtatgaaggctttgaaaatgacgccagccatga

SEQ ID NO: 644817 - DNA, 98 bp, Homo sapiens
cgttcttccgcagcatagactgggacttgttacagaatgtctgaaggggacagtgtgggagaatccgtccatgggaaaccttcggtggtgtacagatt

SEQ ID NO: 644818 - DNA, 96 bp, Homo sapiens
gggaggagccgcagcgccgggcgaccccgcccgggcctcggatgacgtccggttgtttgccttcgtgcgcttcaccaccggggatgccatgagcaa

SEQ ID NO: 644819 - DNA, 82 bp, Homo sapiens
caagttccggcacaccgaggctcggccgccccgccgcgaggttattcagcttctcaaggctggaaaagcgaaggaagtttcc

SEQ ID NO: 644820 - DNA, 97 bp, Homo sapiens
ccggcctcctcagtgcgaagaagctgcagccgcacctggccaagggtgcgtgagcatctgctccctggccttcagcatggacggcatgttcctctcc

SEQ ID NO: 644821 - DNA, 83 bp, Homo sapiens
ccggaacacaagctgtgaaacactagtgttatccaagataaattctgtgggattataaacatttcagtagaaggcctgcatga

SEQ ID NO: 644822 - DNA, 90 bp, Homo sapiens
gcgacaaggaggacgccacccgccgcttccagatccaggctttcaacgtaatgggggagcagttctcctacgccagcgactgtgccagct

SEQ ID NO: 644823 - DNA, 100 bp, Homo sapiens
gtgtgaactgtggccactggcggggtcgggggggggcagcggcggagccgcctcggacggtatgatctcgtgaaatcttgagagaaactgaatgacgaat

SEQ ID NO: 644824 - DNA, 98 bp, Homo sapiens
attaaccgacttgcagagggatcctcctgcccagtgttctgcaggacctgtcggtgatgactagtttcgctcttgttgcccaggctggagtgcaatgg

SEQ ID NO: 644825 - DNA, 101 bp, Homo sapiens
aaccctgggacctcaactctggagatggtgccttctatggacctaaggctgttttggagtcagcggaagatcaccaaggccagggagtggttccaccgcac

SEQ ID NO: 644826 - DNA, 100 bp, Homo sapiens
atagccctcagaagaaagattctggaggaaaggtttacaagcaggccacgattgaatctctgaaggagtattgtcataggcaacagtccagaactcagga

SEQ ID NO: 644827 - DNA, 50 bp, Homo sapiens
acatgcttcatagtccttgcgtctctctagctgcagcagttctataacag

SEQ ID NO: 644828 - DNA, 73 bp, Homo sapiens
aagttgactaccaccagtggagtccaggatgaggccaaggagctactgcaaatgtctttcgtggaagacataa

SEQ ID NO: 644829 - DNA, 101 bp, Homo sapiens
ggaaattctgtatgttcttcgccattatattcaggctcgtgaagaagaaatgactgcaaaagtaagggacctgcagactcaacttgaggagctgcagaaga

SEQ ID NO: 644830 - DNA, 100 bp, Homo sapiens
gggtcttgggtcctccgagagcagcagcggatgtcttgtattatgagcagcttaagaccaatgtgatacaacatgaccttttggtggacagtctaatcta

SEQ ID NO: 644831 - DNA, 74 bp, Homo sapiens
ttagcttcaaagaaggcaatcaggaatgtgaagatgccaccttggccctgcttgcccggatgggggggcagcca

SEQ ID NO: 644832 - DNA, 100 bp, Homo sapiens
aataggagctggggagcccttctgcgccacagaatcccgcccattgtcagttcctgttaaagccatgttgaatatatctgaaagctgtagaagtcctgaa

SEQ ID NO: 644833 - DNA, 75 bp, Homo sapiens
aactgcccagcgtgaccagtggccacctctgcagtgtcttccacaacctgggattgacatgtacgtggaggggac

SEQ ID NO: 644834 - DNA, 101 bp, Homo sapiens
gagaggaccatcctgggtgctggccctgtgctggaggctgaaggtgatgtggccgccctcaaccgacgcatccagctcgttgaggaggagttggacagggc

SEQ ID NO: 644835 - DNA, 51 bp, Homo sapiens
ggagtccggacatctgaaacttgcagcctagggcctaggcccgggccacca

SEQ ID NO: 644836 - DNA, 74 bp, Homo sapiens
aaccacatcctcctcctcctacacccaaaggctcccatggagagctcagggatgccattattacttgcaatcct

SEQ ID NO: 644837 - DNA, 98 bp, Homo sapiens
ccacctcgtctgggctcgcggcgtctccggggaaagccgtggccccgagggcggatccgagctctgtatgaaaaagctgatatcaaggggcctgaaga

SEQ ID NO: 644838 - DNA, 98 bp, Homo sapiens
ggccggccggtgccagcacctttcggcttctgagacggcggcagcagcggcattcagtccggttctccaccgagggacatgaggctgctttcactatc

SEQ ID NO: 644839 - DNA, 93 bp, Homo sapiens
cgggcggccccggccgcctccgcgagggcaccatggaggtgaatgcagggggatatgagactttctactcggaatatcctgagtgttgcgtgg

SEQ ID NO: 644840 - DNA, 90 bp, Homo sapiens
gcacacaggagagccaggattcatgctctacatccccatagagtgatggctcatgaagcaatggaatatgatgttcaggtgcagttaaat

SEQ ID NO: 644841 - DNA, 88 bp, Homo sapiens
ggcgatcaaggccaagtatccgccagtcaataggaagtacgagtgctttacaggaagtatggtgctggcatctgcttggcttctagag

SEQ ID NO: 644842 - DNA, 90 bp, Homo sapiens
cggtcatcggcggcgggctgatgggcgccggcattgcccagtggcatgccctctcccgtgaagagcaggctaaatattatgaattagcac

SEQ ID NO: 644843 - DNA, 100 bp, Homo sapiens
ctagattttctctcaaactacgaggtcctgcatctccagtatggaatgtatgtttggccctgtgctgtggtcctggcccagtacctttggtttcacagaa

SEQ ID NO: 644844 - DNA, 50 bp, Homo sapiens
cgcttctggtggacagattgagcaaagaatgtgaaggctgtgtctgagac

SEQ ID NO: 644845 - DNA, 82 bp, Homo sapiens
caacaactgcgaggaaaatgagcagtctctgcccccgccggccggcctcaacagcccgatgagagaaagggaaagttaagga

SEQ ID NO: 644846 - DNA, 100 bp, Homo sapiens
cagagtgtgagaaaaaaataaactcctatttgtttatggcaagcctggagtactcgggtactttgagttcagtggctcaccccagcctcctggttatttg

SEQ ID NO: 644847 - DNA, 100 bp, Homo sapiens
gcggaggcagaggtggaggcgctttgaaagatgaccgcacctcgagcaggagtggggatgccacgtctgcccccagcgcccggccctctgtccaccacgg

SEQ ID NO: 644848 - DNA, 75 bp, Homo sapiens
agttccaatcaaaacgcacaagccagaccctggcacgccccagcacacgaggtctacatgttcaagtgcgtgtgg

SEQ ID NO: 644849 - DNA, 90 bp, Homo sapiens
aacaagagacactgctgagcaccattaagtgtgggcgtctacagagcatttgatgaatacagaaatatcagccaaaaggacattgtggac

SEQ ID NO: 644850 - DNA, 83 bp, Homo sapiens
gtggccgaggcccacctgctgacatctacctgccaggagtgtggccatctggggccgtgtggtatttgccactcaggagacat

SEQ ID NO: 644851 - DNA, 80 bp, Homo sapiens
ccagacggctcacctgtgcgggatggaacaaaaggctggtgcagtggtgtcatcttggctcagtgcagcctcgacttcct

SEQ ID NO: 644852 - DNA, 99 bp, Homo sapiens
gagctcctgagcgagatggcggcggcggtgcaggagagcgcgcgaagtacgggaccgaggaccagctctcagctgatatgtacagttttgtggccaaag

SEQ ID NO: 644853 - DNA, 101 bp, Homo sapiens
ctgactgccacacacctccagaatcaggtgtctgaaaaggtctccgtctctccaccgggggcttcatccttccagggaggagaagagggactccagaatgg

SEQ ID NO: 644854 - DNA, 75 bp, Homo sapiens
gtctccttagctgctcacatatggatactttcacagttcaggcctccggtgtggctgtctctgatggtgtcatca

SEQ ID NO: 644855 - DNA, 76 bp, Homo sapiens
attttttctcatggatgttcttcttcgagtatttgtagaagggaatcggggctgtctgtatggattggtgggcagc

SEQ ID NO: 644856 - DNA, 98 bp, Homo sapiens
ctgtaatgggcaaggagccacaaagaagaaaacatttcttttaatttttaaacttggtttgaaagtggtggtgaccgcggtggcttcaaaaattttgg

SEQ ID NO: 644857 - DNA, 73 bp, Homo sapiens
tgcttacaaagggcatcattaccctggacctggaaaccatttttttaagcatgattgggacagaatgatagaa

SEQ ID NO: 644858 - DNA, 97 bp, Homo sapiens
cacggcccctttggcggtctcggggctgctgggctgcaagcagtgcggcgggggccgcgaccaggacgaggaggagactcgaaagaagcccaagatg

SEQ ID NO: 644859 - DNA, 101 bp, Homo sapiens
ctgactggggttctgagactccctgtcccggaccgcagagctaaagttgcagacaagatccagctcatcaataatatgctggacaaagtcaatgagatgat

SEQ ID NO: 644860 - DNA, 83 bp, Homo sapiens
cgcgtgggcaccctgcaggtggtcagacatgtcatcaactcagctgatggtcatcatgggccagtgctactacaacgagacca

SEQ ID NO: 644861 - DNA, 83 bp, Homo sapiens
ccggattccaaatcagataccaccgttgaaagctcccattcaggtactttagattgattgccgagcggggcagttttgtgagc

SEQ ID NO: 644862 - DNA, 75 bp, Homo sapiens
gtaaggatttcaacatgcctctgacaatctctagtgagttgatccctgaattttattatctccctgagatgtttg

SEQ ID NO: 644863 - DNA, 90 bp, Homo sapiens
gagttgcagcttacaacaagaaaaagaagcgtatggactactatgactctgaacaaatggcaacatacttgtttaacattgaattctgtg

SEQ ID NO: 644864 - DNA, 75 bp, Homo sapiens
cttaagacacccgtggcttcagattcctctctttggtgctgacactattggccagagaagtcctgatggaccggt

SEQ ID NO: 644865 - DNA, 100 bp, Homo sapiens
tcttgtgccagaggagtgtgccatattccaatggctgagccgttttgccccaaaacgagagaggaaattgaacttagctcattaagggaagctttgtctt

SEQ ID NO: 644866 - DNA, 83 bp, Homo sapiens
agtcaggcagatgtttgtcgactggaatgggtcctggctataagtcaccatggcacagcaagctgccgataagtatctctatg

SEQ ID NO: 644867 - DNA, 101 bp, Homo sapiens
gcggcaacgcccccgggacatgcatcgtcccctggactctctcaaggtcggtgtacccgagagaactgcaagtaccttcaccctcctccacacttaaaaac

SEQ ID NO: 644868 - DNA, 107 bp, Homo sapiens
atctgatgtacctggtgatggtggcagccatagcatgggagtaactgcgtcattgattggctggtatccaaccagtctgttaggaatcgccaggaaggcctcatgat

SEQ ID NO: 644869 - DNA, 90 bp, Homo sapiens
gaagaccctggagccagagagcctaggcttagtcctagccctgcactgaaggaagtttatctcgacaatgctagttgcagtctgtgtgac

SEQ ID NO: 644870 - DNA, 82 bp, Homo sapiens
tttgagaaggagcagcaacaactcaactggaagcaggcttcctcaaatcccgggaacgctccagccacaaactttactctca

SEQ ID NO: 644871 - DNA, 100 bp, Homo sapiens
cgatcgccgcggggcagttcgggccggctgtcctggcgcgtctgaaaacttagagaatacagtaatcataccagatatcaaactacatagcaatccttct

SEQ ID NO: 644872 - DNA, 50 bp, Homo sapiens
atcaacaccaaaaagctttctgctagggactctccagaaagagcaacagt

SEQ ID NO: 644873 - DNA, 75 bp, Homo sapiens
tgtacactctcattgggtcaaaggagtacaagcgcaagctagccagagtttccctggtgcgcaaagaactcaggt

SEQ ID NO: 644874 - DNA, 88 bp, Homo sapiens
gacatggggcttaagatgtcctgcctgaaagacggttgatgatgaagcgccggccgtgtaaatgaagatcgggtgaggagcaggacga

SEQ ID NO: 644875 - DNA, 74 bp, Homo sapiens
aaaaacaaaattctgaactcaggacttggcaaaggccatggcaatgggcaaactgcacaaagaaatgggtcagc

SEQ ID NO: 644876 - DNA, 104 bp, Homo sapiens
caagagctttctctccaaaatccccagtgtcgtcacaggtaccaggatcatctatgaccggaaattcctgatggagtgtcggaactcacctgtgaccaaaacac

SEQ ID NO: 644877 - DNA, 82 bp, Homo sapiens
cacagcccgagaaaccgcagcactacacgttgatgataattagaagcatgctttccactgaacttcccgacaacatttgtta

SEQ ID NO: 644878 - DNA, 80 bp, Homo sapiens
ccccccaggagaaggcggaggacaagcccagcaccggatgggagtcccagcttctggagacggggttcctggggatcttc

SEQ ID NO: 644879 - DNA, 100 bp, Homo sapiens
tttgcattgacttggatacgaacatgttatatgttggtgcctgtggagaggtaaagctggctttcgagaggaaaacatgtaagaaagtagccataaagat

SEQ ID NO: 644880 - DNA, 90 bp, Homo sapiens
ctttaagactgtgaaagagttcaaggaggagaccagcataaacactttggggactgagaggataagccatatcattagtgaccctcggca

SEQ ID NO: 644881 - DNA, 100 bp, Homo sapiens
cccagtatgttttagatggcagtggccacatactttctcagaaaccttcacatcttggtcaagtattggtaaaggttttcaaggtgtcatgaaaagatgg

SEQ ID NO: 644882 - DNA, 100 bp, Homo sapiens
gacactttcgcaacatcaagggagttttccggggccctctcagcaagaacgggaacaaaactctgggcctgctttcttccccgggcgatgtgcagagatc

SEQ ID NO: 644883 - DNA, 127 bp, Homo sapiens
cgcaatctcagctcactgcaagctctgtctcccgggttcacgccgttctcagcctctcgagcagctggaactacaggaagaaggtagataatgactataatgcccttcgagaaagactcagcacctt

SEQ ID NO: 644884 - DNA, 74 bp, Homo sapiens
ggaggtggcagccatctccttctcggtgacaatctccaatagacttgtgtcttcaccttgctgcattgtgacca

SEQ ID NO: 644885 - DNA, 100 bp, Homo sapiens
ctgtgtgaagtagtaacaccgccctgccagtaggatatagctgctgaggaggtgattgggagcactggaataagaaacttcagccttattattatccaac

SEQ ID NO: 644886 - DNA, 90 bp, Homo sapiens
agcaattgttgtgacttcactaataaagctccagaaacatgacaaggaggactttcctgcctcttggagatcagaggaggaaatggcagc

SEQ ID NO: 644887 - DNA, 100 bp, Homo sapiens
ggagatcatgaaacgaggtcgccttcccagcagcagtgaggattctgacgacaatggcagaaaccacccctactcctaatcccccgactacagaagagga

SEQ ID NO: 644888 - DNA, 100 bp, Homo sapiens
atgtcaccaccactgtgcatatggatgcagccacacctgaactaccaaaagacttccattctttatcgactctgctctttcgacgtgtagcagcagcttt

SEQ ID NO: 644889 - DNA, 83 bp, Homo sapiens
ccccaatgtggggggatttttgtagaaggcatggagagtggtgaagattttgatggatcatcaaaatctgtcagaacatgtac

SEQ ID NO: 644890 - DNA, 98 bp, Homo sapiens
tgcctgcctcagctgagaaagcttgtggtgcctgcccactgtggggaaaatgtgatgggtctcatgattccttcagcttctacattgatgaagcctct

SEQ ID NO: 644891 - DNA, 76 bp, Homo sapiens
gaaacgctgcctggaaaggaagtaccaggacttgcacaggatgagtagtatgtcagcactctttcagctatctatg

SEQ ID NO: 644892 - DNA, 75 bp, Homo sapiens
gattttttccagtctgatccttttgttggcaagtcttctgaagaggagtctgatgatgaaatagcagataaggat

SEQ ID NO: 644893 - DNA, 98 bp, Homo sapiens
gatgctttccttgacctgaagaagcctcctgcctccaaatgcccccatcgctatacaaaaatgccttcaattaagttgcagagttctgatggagagat

SEQ ID NO: 644894 - DNA, 82 bp, Homo sapiens
cggcgccgagaggccgtgcgggacgcgggcgccaggaccggccgaacgcagaggctcttgtcaggatggtgaagctgttcat

SEQ ID NO: 644895 - DNA, 96 bp, Homo sapiens
cactgcgtgaggctagcactcatccgcttccgggtcaaggaaccactgacatttaaagatgtcgccatagaattctctctggaggagtggcaatgc

SEQ ID NO: 644896 - DNA, 93 bp, Homo sapiens
aaagatgtcatgatggagaattatggaaacctggtctcactgggtgagaaaccttaccactgtgactgggacggctgtggatggaaattcgcc

SEQ ID NO: 644897 - DNA, 75 bp, Homo sapiens
ctgcaggaagcccttccgcggaccgaaagatcactgtgtccactactatgatcttcgtaacactaaacagccaat

SEQ ID NO: 644898 - DNA, 51 bp, Homo sapiens
gtggaatagtgctgtcttccttggtgtttgcttggggttataacaactgtg

SEQ ID NO: 644899 - DNA, 95 bp, Homo sapiens
tgaattggcaccaagccttcccagttatcataaccttgaatggcgactagatgtacagggccgttgctccagggagaactgcaaatatcttcatc

SEQ ID NO: 644900 - DNA, 100 bp, Homo sapiens
ggtcattctcgctaacaactgcccagctttgagctgggaagttatcaattccaaaccagatgaaagacccaggctcagccactgtattgcagaatcatgg

SEQ ID NO: 644901 - DNA, 100 bp, Homo sapiens
cggcggggttcggcctgagctggattgacatagcccttggcggtttctcccctctaggggatggaggctgagagaccccaggaagaagaggatggtgagc

SEQ ID NO: 644902 - DNA, 99 bp, Homo sapiens
tttgtcacctccaacaacatccgcgagatcgagtatttcctgatttctcccccaaagagcttcagaatgtctgctaatggcaccctcttctccacaaca

SEQ ID NO: 644903 - DNA, 100 bp, Homo sapiens
tggggggcttcatcttcatcgccggcggcagcttctcacgggacaacggaggggatgcggcctccaatcttctttatagatggagtcctgctctgtcacc

SEQ ID NO: 644904 - DNA, 100 bp, Homo sapiens
ttggaggccctgatggaggggacggaggcaacggtggacacgtcattctgagagatgattcacagcgtaagcagtatgaagagtggctccaggagaccca

SEQ ID NO: 644905 - DNA, 97 bp, Homo sapiens
caaaactgatgcagtagaagcccttacggcactgaatcactatcagataagagtgccgagtatatgaatggcacctgcccagaaggaaacagctgta

SEQ ID NO: 644906 - DNA, 97 bp, Homo sapiens
ccaaaaggaaatgcatctttatgtcagaaacacaaagcagcccaaccaaaggtgataagacagaggcaaccacaaagcttcatgacatggtagacca

SEQ ID NO: 644907 - DNA, 100 bp, Homo sapiens
tgcccttttcagaggttgtgaagttagctccaaatcccagactagctgctaccccaagcccgggagcttctcaggagccctctggcacaaatggaagaag

SEQ ID NO: 644908 - DNA, 83 bp, Homo sapiens
tgtcatcatgtcgcgttacgggcggtacggaggagataacgaaggaggcccaacttcattcaataaggagcctgacggattta

SEQ ID NO: 644909 - DNA, 83 bp, Homo sapiens
ctcgcgagatccgcatgaaggagctggagcggcagcagaaggaggactgcaagatggaggaaggcgggaacctaggaggcctg

SEQ ID NO: 644910 - DNA, 90 bp, Homo sapiens
ctttggcatttggtgctgtggcaggccaaagcgtttgagttaagctacctcgagaaggttccagaagtcaaagacacagtgcacaagcag

SEQ ID NO: 644911 - DNA, 74 bp, Homo sapiens
caaccgcacccctgaatttctccgcaaatttcctgccggcaaggtcctgatgacattcgagaacctggctgcct

SEQ ID NO: 644912 - DNA, 105 bp, Homo sapiens
gggggcacgattctccctctcctagaggcgttgtcgccgtgatcctgaaggcgctgacctacgacgagaagcggggtgcctgcagcgtgggcaccaacgtcaggg

SEQ ID NO: 644913 - DNA, 100 bp, Homo sapiens
ccgcgaggaggcgcgggaggtgttcgagaacgaccccgagacggttaatttggagtggcccctggagtcagtttcctacaccatccgaggccccacccag

SEQ ID NO: 644914 - DNA, 101 bp, Homo sapiens
ctaacatcgacagagagaaggcaatgagccgacccatcttgtacagcaactggctgtcaaaggattctagtataattgacttctatcctgaagattttgct

SEQ ID NO: 644915 - DNA, 90 bp, Homo sapiens
gccaagctcatctctgagacccggaggaggttcgaagctgagtatgtgacagaaccacgaagctgccctgagacgctcactcacgctgtg

SEQ ID NO: 644916 - DNA, 50 bp, Homo sapiens
ctgcggcggagactgcatcaggctctcgtgttctaagaacggaagcatct

SEQ ID NO: 644917 - DNA, 98 bp, Homo sapiens
tggacatgctaaacagagaatacaagaggattatcttagaattttaagatacttcagttcacaatgttaaaccggaatgcctagaagcatacaacaaa

SEQ ID NO: 644918 - DNA, 100 bp, Homo sapiens
catctcgctcggctgcgggaaatcgggctgaagcgactgagtccgcgatggagtttgatttgacagtttgagaggcacctcagagtttccttctttaccc

SEQ ID NO: 644919 - DNA, 101 bp, Homo sapiens
cattgatacctttcctgagtgtagtacggaagatcggcgccaatggtgtgccatagccatcctctttgcagtcctgttggttgtgctcatcctcttcttag

SEQ ID NO: 644920 - DNA, 100 bp, Homo sapiens
cgtcagatctggaacccacactctgcctgtggagtcaggagacagtctataacttgctaccagtaaagagtccatttacctttagagctggaggtcctgc

SEQ ID NO: 644921 - DNA, 89 bp, Homo sapiens
gggtgctgcaggcgccgccgccggacgtcggcaacggagaagggtgaggttggtcagcaaggttctcctggacccaccctgttggtaga

SEQ ID NO: 644922 - DNA, 112 bp, Homo sapiens
tgagatcaaatggcacttcattggccacctacagaaacaaaatgtcaacaaattgatggaatgtgacagtgatgataacatgggtgccaaaaatacttcaataggagaagaa

SEQ ID NO: 644923 - DNA, 101 bp, Homo sapiens
ctgctttcttttcctcagaactactatattcagtggctaaatggctccctgattcatggtttatcgacaagaaggaaaggttaagccgacttaagagcaag

SEQ ID NO: 644924 - DNA, 50 bp, Homo sapiens
cgcctacttctataaagtcatccaggaatctgtcttgaactatcgtttcg

SEQ ID NO: 644925 - DNA, 98 bp, Homo sapiens
ttgttttattagggcaatttgtctcaataaaagcccaggaagaagacgaggatgctgcagaaccttggcctgaaaatgctacattatatcagcaattg

SEQ ID NO: 644926 - DNA, 75 bp, Homo sapiens
gtccatgcggaagatcgtcgccacctggatgctggagatgaggaaaccagcgtggtgatagttgggaaaatttcc

SEQ ID NO: 644927 - DNA, 75 bp, Homo sapiens
gcttcctggaatggcaagcgcagcaacaacagagagcacgtgatgtgaagttcatttccaatccgccctccatgg

SEQ ID NO: 644928 - DNA, 100 bp, Homo sapiens
gaaacgttgagaggagcaatagaagacatgggatttgatgctaccttgtcagatggtgttatctgaaaaggttagtcagctgatggaatggactaacaaa

SEQ ID NO: 644929 - DNA, 106 bp, Homo sapiens
caggagcaggagcaggagcgggagcgggatccccagcaggagcaggagcgggagcgggtgagaagccctaccactgcaactgggacggctgcggctggaagtttgc

SEQ ID NO: 644930 - DNA, 100 bp, Homo sapiens
taccagaaggggaggagacgttggaatcaggtagcacaagtaaccgctccagcacccggagcctcctcagtgtgagcagcgggatggaaggggacaacga

SEQ ID NO: 644931 - DNA, 95 bp, Homo sapiens
tgaaaatatggtaataaagctagccaaggaattaccgtgacaaatggcctacagctgtgagagcaaatggacatctcctcctgaactctgagaag

SEQ ID NO: 644932 - DNA, 97 bp, Homo sapiens
aggttcgaagctgagtatgtgacagctgctgtgacttactcgaagcctcgattggccacattttggtactacgccaaggttgagctggttcctccca

SEQ ID NO: 644933 - DNA, 82 bp, Homo sapiens
ggacgataccgagaatacagtaatggacaggcgggtgcgatagaacatgtaatatctcccagctgtaatgatgacatcacag

SEQ ID NO: 644934 - DNA, 51 bp, Homo sapiens
gcggatttcaaccaagaatgaagaggtccaggtgcaggtacagcagtctcc

SEQ ID NO: 644935 - DNA, 100 bp, Homo sapiens
ggagaatatatggctggacagctagctgcttatggctataaaattacaggttccagcagcactgatgtgaaggaaaaccgcaatctggacaacgtgtccc

SEQ ID NO: 644936 - DNA, 101 bp, Homo sapiens
aaatatgagaaagaatatcagacaatgcgagagagtcagctgcaacaggaagacccaatggatagatacaagatggttatgtccttcggagttacctagcg

SEQ ID NO: 644937 - DNA, 101 bp, Homo sapiens
cggacccccacccgccgaggggcccagggaggacgcggagcagtatgtgtttatccacgatgcgatcctggaagcctgtctttgtggggacacctctgtgc

SEQ ID NO: 644938 - DNA, 100 bp, Homo sapiens
cgtcagcagcctgttcggcgaggacaacgtgcgcgccgctcagaagggctgctggtggggtgaggccatcccacgcaactctggggtctgtgaagccacc

SEQ ID NO: 644939 - DNA, 100 bp, Homo sapiens
aggacgctgatgaaataattcagtgtgacaattgtggcattacagtccatgaaggtgctggagaatctggtaaaagcaccattgtgaagcagatgaggat

SEQ ID NO: 644940 - DNA, 100 bp, Homo sapiens
ctgcccaccatcaaggatgcctacaggaagttcgagatcaagatcaccttccggcccgactcagccgatggataccatcagaacggagtcatcagaaacc

SEQ ID NO: 644941 - DNA, 96 bp, Homo sapiens
gtccagcttcaccacgcggctgcacaactgcaggaacaccgtcacgctgctggaggagtcacagaagatcttattagacggaatgctgaacacaac

SEQ ID NO: 644942 - DNA, 90 bp, Homo sapiens
ggctcttttatattgctggcaaaatagtggcaatggtggcttgctatccgggaaatggaacaggttatgttcgccacgtggacaacccca

SEQ ID NO: 644943 - DNA, 90 bp, Homo sapiens
cgccgagagagtcctccttaccacacaggagtgctgtgcccccctcccaggaggaaaggccgggccccgctcccaccaacctggctcgcc

SEQ ID NO: 644944 - DNA, 88 bp, Homo sapiens
aaatcctggtgtcaaggaaggatataagttttacccacctaaagtggagttgtttttcaaggatgaccaactcttggatgatggcaag

SEQ ID NO: 644945 - DNA, 88 bp, Homo sapiens
gaggcatgggggtccacactgcaatgtttttgtggaacatggttgctcgtgggggccccgcgggcagaagcgcttccactgcagagag

SEQ ID NO: 644946 - DNA, 75 bp, Homo sapiens
ccaccatggagacccgctacaacctgaagagtccggaatcagcatgattcttcagaggctcttcaggttctcctc

SEQ ID NO: 644947 - DNA, 75 bp, Homo sapiens
ccgccgcatccacacagtccgtgtgcggggaggtgctggagaatctggtaaaagcaccattgtgaagcagatgag

SEQ ID NO: 644948 - DNA, 97 bp, Homo sapiens
ttgaaagcaaaatccaaccaggttctcaacaggctgactgctattcaagatctctggcagtggaggaagtctctttaagaaaatagtttaaacaatt

SEQ ID NO: 644949 - DNA, 100 bp, Homo sapiens
gcatgatggtggagcacctgctgcgttgcggctactacaacacggctgtcaagctggcgcgccagagcggcatcgagtttaaggagtcggccttgaggaa

SEQ ID NO: 644950 - DNA, 50 bp, Homo sapiens
cacttgttgcagaaacagccaaggagatggccacatgaacacagacacgc

SEQ ID NO: 644951 - DNA, 90 bp, Homo sapiens
gcagaagcaacctatttctgtgaaggtgatttcaggactccatccccgtgtctacctccctccttggagacacttccgacacgacctcta

SEQ ID NO: 644952 - DNA, 100 bp, Homo sapiens
ccgcgccctctgcgcaaggaggagactcgacaacatgtcacccgcgctccaagacctgtcgcaacccggcatatcacacctgaaaaattttatgtggaag

SEQ ID NO: 644953 - DNA, 100 bp, Homo sapiens
tcggcatcatcgggctggggcgcataggcagcctcagtcagagcaccctgaagtttttgctcctgaatccagctgtgcactttgcccaagtggtgaagga

SEQ ID NO: 644954 - DNA, 95 bp, Homo sapiens
aaatctgtgatgtaggagtctctctaccactggatgaaaatatgactggtttaaaacctcaaaaaggcttttggatccactggaaactgaaagaa

SEQ ID NO: 644955 - DNA, 82 bp, Homo sapiens
gccgtgatcaaacactgcaaggaccccctccggctcaagtgtgtcaagcaagtatgactatgaatatgatgaaaatggtgac

SEQ ID NO: 644956 - DNA, 77 bp, Homo sapiens
catttggagcctggacacgcagtacagcaagaaataagaatgtctaagcccctggaggccgagaagcaaggtctgga

SEQ ID NO: 644957 - DNA, 75 bp, Homo sapiens
gctccctcacacaccggcctcagcccgcaccgcctccagaggcagaggacccagaccggggccagccctgcaact

SEQ ID NO: 644958 - DNA, 101 bp, Homo sapiens
aaaaaccagtggctccacagtggaagtcattcccgcgttgccaagactgcagatcagcacctctctgcccaggcatagaatgtcaagctaaccaggcgtcc

SEQ ID NO: 644959 - DNA, 74 bp, Homo sapiens
cggccccgccatgggctgctgcagctccgcctcctccgccgcgcagtgtgtgttttaatagaaaagttgtcact

SEQ ID NO: 644960 - DNA, 96 bp, Homo sapiens
gaagcgggaggcagttgcagctttcagacccgtgaccaaggtgtagactaagaagtggagtcatgcttcacacggccatatcatgctggcagccat

SEQ ID NO: 644961 - DNA, 100 bp, Homo sapiens
agtgatgtcttccagactcggtgctgtacccgccggccatgaagcccccaggaggagaatcgagcaatctttttggaagtccagaagaagctactccttc

SEQ ID NO: 644962 - DNA, 98 bp, Homo sapiens
cgcggatcgccgcgctcagcgacaaacaagcctccggtgtggctgtctctgatggtgtcatcaaggtgttcaacgacatgaaggtgcgtaagtcttca

SEQ ID NO: 644963 - DNA, 101 bp, Homo sapiens
gaaaaaagcgatgactgtgaaggagttcaggcagctggccaacagtggcaagccttgctgtctctaaccctgatctgatctcctgccttgagcaaataaaa

SEQ ID NO: 644964 - DNA, 90 bp, Homo sapiens
gaacggaaggaacagagggggcaaagccaacaaccccccgtatttgccccccgagccccttccaaatgacaaaaccttactctacaatcc

SEQ ID NO: 644965 - DNA, 100 bp, Homo sapiens
ctccaaccaacaaaacctgttgtttccccaaatctttcccagggaactccgatgaagtgttccaacaaaatgagcgagtgaaccaagaagaggatgacat

SEQ ID NO: 644966 - DNA, 100 bp, Homo sapiens
tagatgggcatctctatgaattagtgaaacctgatcctccacatattaaaaacctctccttccacaatgatgacctatatgtgcaatgggagaatccaca

SEQ ID NO: 644967 - DNA, 83 bp, Homo sapiens
aagaggcagaaggagcaggctctgcgggaggtggagcacctgaagagatgccagcaggtaactaggatttctacctcaaccgc

SEQ ID NO: 644968 - DNA, 100 bp, Homo sapiens
ctgcccttacacctgtgctcctatacaagattaacattcaatgcctgaaaacttcatgcctcctgttcccatcacatcaccaatcatgaacccgttgggt

SEQ ID NO: 644969 - DNA, 100 bp, Homo sapiens
gtcagtgcacaaaatggcgccctacagcctactggtgactcggctgcaggagcttgaagaaatccgcaaatgtgggatgaaaaacttccgtaacatccag

SEQ ID NO: 644970 - DNA, 74 bp, Homo sapiens
ctcacttcttacagattgcaaccctgatattaataaggcagcggaaagaagaaatatgaatacggctccatcaa

SEQ ID NO: 644971 - DNA, 75 bp, Homo sapiens
aagggcccaactggaattccacttacggacgatcattcccgagtgaggctgcagacaatagaaggagacacaaac

SEQ ID NO: 644972 - DNA, 83 bp, Homo sapiens
catcgactccgagacctccgaaaagcgtttccgcagacagaagtggggagaagcggaggctgaaggtgatgtggccgccctca

SEQ ID NO: 644973 - DNA, 80 bp, Homo sapiens
tttatacttgcttttgcttcagcgttctgtggttgtcaacaggttccatcttagcccacatccagaagcaaaagcacttc

SEQ ID NO: 644974 - DNA, 75 bp, Homo sapiens
ccgcaattcgagaatcaaagggccgggagcgatggtcaaaatgcagatcttcgtgaaaacccttaccggcaagac

SEQ ID NO: 644975 - DNA, 100 bp, Homo sapiens
cagagattaaaagagttcggcgaggaactccagaatacaagggttaaagcacgaattgggagctctcagcgacatcaccagtcagcagccaaagacctaa

SEQ ID NO: 644976 - DNA, 100 bp, Homo sapiens
caacgccatggaggccaggagccggagtgccgaggctttcacggagacgcagaagaaacggctgctatcctggaaacagcaagtgctgaagctcctccgg

SEQ ID NO: 644977 - DNA, 96 bp, Homo sapiens
cgagccgtcaagcaagaatctgtgggagcagatctgcaagggctggtgagattggagagatgaaggatggagtcccagagggagcacaacttcagg

SEQ ID NO: 644978 - DNA, 74 bp, Homo sapiens
atgaggacactgaaattcagagaggggaagtgatttgcctcagcttgtactgttatcaatactctggctgacca

SEQ ID NO: 644979 - DNA, 130 bp, Homo sapiens
acagacggagtcctgttccaccttcagagcgtcacggcgtacgccctcatggggaaaatctccccggtgactttcaggaattgaatgatctggcacgggaccctccagcacagtgttcagcaggtcctgt

SEQ ID NO: 644980 - DNA, 82 bp, Homo sapiens
catcctgccgtccttctccactttcgccagcccgtgccgcgagcgcggcctgcaggaggttttgggatttgagattgacgcg

SEQ ID NO: 644981 - DNA, 75 bp, Homo sapiens
cagccgctgtacagattcatcaccacggcgtccaggtgatcccccaaacagcatgtgctcagccccagacctgcc

SEQ ID NO: 644982 - DNA, 75 bp, Homo sapiens
agcgatttcttcgaggtggagtcggagctgggacgcttggattagaagaacaagaaagactccacctactatgga

SEQ ID NO: 644983 - DNA, 51 bp, Homo sapiens
tccaccagcggttccatcctacacttggatttgtcttcagcgaagcggaag

SEQ ID NO: 644984 - DNA, 100 bp, Homo sapiens
ctccatacccgtgacctggggatcgctacggaccttaaaatacccgcaacagccccttcgtcccaagtaagaatgattgatgttggctgatattggagtg

SEQ ID NO: 644985 - DNA, 82 bp, Homo sapiens
aacgaggcaaggagctaaagcagcgtgcgttcagccctgggctggagatggagctgaagatgctgaagtctcagtccagctc

SEQ ID NO: 644986 - DNA, 75 bp, Homo sapiens
cagagacatgagatggtagccaacccctcagttgcaggaagaggcagaggaagaggaagaggaagaggacgtggc

SEQ ID NO: 644987 - DNA, 96 bp, Homo sapiens
tggagtttacacaggcaaactgtcagaaaagagtagcctgggctgtctggaaatctgagtgacagatgagaacagtgagtctgacagtgacacaga

SEQ ID NO: 644988 - DNA, 75 bp, Homo sapiens
ggaccgtgggcagccagggtcggtgaagatctgtgactttggcctggcccgtgttgcagatccagaccatgatca

SEQ ID NO: 644989 - DNA, 87 bp, Homo sapiens
cattgaaggaggccctggcttaggcatgtcctctgacctagaggatcaagacataatgggagcatttttagacaagccaaagatgga

SEQ ID NO: 644990 - DNA, 75 bp, Homo sapiens
agagcttgctccctacgatgagaactggttctacacgcgagctggggctttttccctgtcgccttcggcttcctg

SEQ ID NO: 644991 - DNA, 82 bp, Homo sapiens
tccatattgagctgttgccgctgttgctgatgtggctttatgaaaggacagaactgtaccgctctctttttggccagctcca

SEQ ID NO: 644992 - DNA, 124 bp, Homo sapiens
gctgcagcactccagccactgctgtctccttagctgctcacatatggatactttcacagttcaggaaaaagaagatgtccctgtggaaatgtccaatggtgaaccaggttgccactactttgag

SEQ ID NO: 644993 - DNA, 100 bp, Homo sapiens
ctcctgccgcgtataccaggcatccagccccgatgagaattttgatttggctgctgggctgctaccttgaaatccaagccctaaaaatgccagcttcttt

SEQ ID NO: 644994 - DNA, 78 bp, Homo sapiens
ggcaggaagattgctggctcagaggctctatgcaggttccactgtcaagatgttaaggagaactgcaaaccactgttc

SEQ ID NO: 644995 - DNA, 100 bp, Homo sapiens
gaagaagtatttgatgtcttagagaaacttggagaaggggaatgacagaggaagaggaagacaaacttctggcactgaaagacttcatgatgaaatctaa

SEQ ID NO: 644996 - DNA, 100 bp, Homo sapiens
aaaacatccggaaatcctgccaacagtgcaaggaagcctggttcagcaggtggccctaaggttggagggaactctaatgatccaggacaaagaagttacc

SEQ ID NO: 644997 - DNA, 75 bp, Homo sapiens
ccttctatcccatctacttccggcccctaatgagattggaggagtacactttctacaagttctgattaaagtcag

SEQ ID NO: 644998 - DNA, 75 bp, Homo sapiens
ggagatgggagatggatggtggtagtgccagtttcaatctcagggaacatggctttcatgagaaggacaagaagc

SEQ ID NO: 644999 - DNA, 104 bp, Homo sapiens
aatgatggaaagcaagcttcttggtacattcacaaatacgtacagattgagatgctaccagatgggctgtttcagtgcaaaaagctgcagtgtttacttttggg

SEQ ID NO: 645000 - DNA, 53 bp, Homo sapiens
cacagacatctgccaaggagccctgggggactgctggctgctggctgccatcg

SEQ ID NO: 645001 - DNA, 75 bp, Homo sapiens
aaagcacaaggattctcgctgtgacagagacaacaccgagtatgagaagtcaccgaggaggagcccagctccaac

SEQ ID NO: 645002 - DNA, 75 bp, Homo sapiens
tcttcgctctttgcatcttaactgcaggcaatagccctctggaacaagacaattcatgtgagataagaaagaaga

SEQ ID NO: 645003 - DNA, 82 bp, Homo sapiens
gaggagatgcttcagagagaggaagccgaaaacaccctgcaatctttcagacaggtgctcttacagcctgttccaagtgtgg

SEQ ID NO: 645004 - DNA, 87 bp, Homo sapiens
tgcgtggggacggccgcctagagtggttcagccacaaggaggatgagacctgcacgcagtggctcacagcagcacgatttgtgacag

SEQ ID NO: 645005 - DNA, 90 bp, Homo sapiens
tcagagtgttagagacggtctggaaaagcggtacattgcttcttatttagcactcacaggtttgcatcgccagcttctatatattacggc

SEQ ID NO: 645006 - DNA, 75 bp, Homo sapiens
ctcgccatgtcctgctgcccggcatggctctgtgagcgctgatgaggctgcccgcacggctcccttccacctcga

SEQ ID NO: 645007 - DNA, 89 bp, Homo sapiens
gtggagttgccatctatgttaatggatacacaggtctttcccgcggtgacttcccttgggctgaatgaacaggagctgttatttctcac

SEQ ID NO: 645008 - DNA, 80 bp, Homo sapiens
aagagtgacataggagaagtgattcttgtgggtggcatgactaggatgcccaagtctgaggacccagaagaagatgccag

SEQ ID NO: 645009 - DNA, 87 bp, Homo sapiens
tgtcttcccgcttgcgtcagggacctgcccgactcagtggaaccaccaaactgttttccacagaggctgcatcaattgacattccca

SEQ ID NO: 645010 - DNA, 134 bp, Homo sapiens
gatcatgaaagagatcctggacctatgaatatccagtttgagccatcggatctaagatccaaaagagctccttaataagcatttatagtcagtttttggcagcaatagaatcactaaaggcattctgggatgtt

SEQ ID NO: 645011 - DNA, 75 bp, Homo sapiens
ccagtcacccaggcctccgcttctccggcctccctgctcttaccgggaggtcttgggcgtctttggtactggctt

SEQ ID NO: 645012 - DNA, 75 bp, Homo sapiens
agctgctttgaagacttagcagagatccccgtcgaggtcaagatcaagatccaggtctatttcacgaccaagaag

SEQ ID NO: 645013 - DNA, 100 bp, Homo sapiens
caagaaactggagaaactcggagtgtactccgcctgcaaggatgtggagagcatcttgtgcgcaccatactggctagagaatgttcacatgctttacaag

SEQ ID NO: 645014 - DNA, 88 bp, Homo sapiens
gtttatgagcaggtgcttcggagtgcttatgccaagaggaacagcagtgtaaatgactcaggtgccatgcctctgcaactcctcctgt

SEQ ID NO: 645015 - DNA, 99 bp, Homo sapiens
caataatggactatgctatgaatttatacaaggagaagcactggatccaaagcatgtctgcaacccagccattttcagaataataataacctggatgcc

SEQ ID NO: 645016 - DNA, 98 bp, Homo sapiens
agtctgcaattcataatggagctactgtactggctattggaaggaggagattctgaagataaggaggaattctatgagcatgccaaggctctgtggga

SEQ ID NO: 645017 - DNA, 83 bp, Homo sapiens
cggtggcggcgggctcctgcgagaagcaagcggaacttcctgagatgtctggcgataaagggatttctgccttccctgaatca

SEQ ID NO: 645018 - DNA, 75 bp, Homo sapiens
gtcttgtaaagagccctgagcagagggccacagccactcagctcctgcaggcatttgatgaagcaattgctgaat

SEQ ID NO: 645019 - DNA, 83 bp, Homo sapiens
taaccatgaagacttgaacttaatacagcaagaaagaccatcaagtttaccaaggctgggaggcggcagaatgcagccagagg

SEQ ID NO: 645020 - DNA, 100 bp, Homo sapiens
tcttttttgagaaaggaaggaatatatcctgactgattaccaagatcactccatggatgaaatgacagctgtggtgaaaattgaaaaaggagttggtggc

SEQ ID NO: 645021 - DNA, 82 bp, Homo sapiens
gactcccttcacgtccaggccacctacatctcggatgtgaagttcatttccaatccgccctccatggtggcagcggggagcg

SEQ ID NO: 645022 - DNA, 75 bp, Homo sapiens
gtaatgaacaaatctccagctgctaagtccctaaaagataagttagtacaagagaaaaagctgtccaatatgtac

SEQ ID NO: 645023 - DNA, 75 bp, Homo sapiens
ttcctgagattccaggaggaagtactggcgaagtgctccatggcaatggcgaactgagcaataaggaatttgttt

SEQ ID NO: 645024 - DNA, 74 bp, Homo sapiens
atgaccaaatcattggaaaacattttgactttggctggggagaggccccctttcatccctgaaggagtggtggc

SEQ ID NO: 645025 - DNA, 75 bp, Homo sapiens
agaaatactgtatcttctcatgaaggaaggaaccgaagatgtgacaagccgaggcggtgagccgggcaggaggaa

SEQ ID NO: 645026 - DNA, 82 bp, Homo sapiens
gagattcgcaaggagatgatgaaggagacgttcaagtacttcctccgggatccagcacacggaagacatggagaacgagatc

SEQ ID NO: 645027 - DNA, 80 bp, Homo sapiens
gtcgtggtggaccacgtggtggcaaatcctccatcagttctggaattaaggataacctagacgacataaagaggataatt

SEQ ID NO: 645028 - DNA, 101 bp, Homo sapiens
ggagatatggcgcaactgcggcgcgttcgtgctggccgtgggcagcgccgtctttgatgccatgttcaacgggggaatggccacaacatccacggagattg

SEQ ID NO: 645029 - DNA, 74 bp, Homo sapiens
cagtgacattttatttacccttcctaacctctccaaaaaagttcattcggctcctaaagaagtagcagtgtcca

SEQ ID NO: 645030 - DNA, 75 bp, Homo sapiens
gaaagcagttgctgttcgaaagcatcttgagaggaacagaaaggatatgggccctcacattttccaaacctgtcc

SEQ ID NO: 645031 - DNA, 97 bp, Homo sapiens
taacaatgatcgcccgagtggcggacgggctcccgctggccgcctcgatgcaggaggacgaacagatgctgaaacatgcagttgtaaacttgattaa

SEQ ID NO: 645032 - DNA, 75 bp, Homo sapiens
ctttactgaagtttatcttattaaatttatgaacttacaaagtgcaagaatgtgaaagatgttgcagaagtgttc

SEQ ID NO: 645033 - DNA, 100 bp, Homo sapiens
agccaaaacctcacctcaagccacgcatatgataatgttgcttcatgtgcgaaatggaaactgcaaatatcatttgggtgaagaaacatttaaattagct

SEQ ID NO: 645034 - DNA, 75 bp, Homo sapiens
accaggagtttactagatttgttcctaaatttaaggccctgaagcagagaccacgatttgtagctttaaagaaac

SEQ ID NO: 645035 - DNA, 140 bp, Homo sapiens
aggaagtagccgctccgagtggaggcgactgggggctgaagagcgcgccgccctctcgtcccactttccaggtacaccagaggatcgcttcctggcagaatttgggagctgtttattgcagcactgttgtgccctctgat

SEQ ID NO: 645036 - DNA, 100 bp, Homo sapiens
cgccatcatgggtcgcatgcatgctcccgggtagtaaacctattgatggcaattttgctgactgtggaagtgactcatccaaactccatgccagctgtca

SEQ ID NO: 645037 - DNA, 75 bp, Homo sapiens
cagagaggaaattcaggaaactttgacttcggagtatttccagatttgcaagaattctgcttggtcagaatcgtg

SEQ ID NO: 645038 - DNA, 83 bp, Homo sapiens
ccgaaccaaaatcatcttccaagggaagaaggagaaagggccaacccctgaagaagcaatacagaaactgaaggagacagaga

SEQ ID NO: 645039 - DNA, 87 bp, Homo sapiens
gcgagcccgaggacatggagatggaaggttatcaatactctggctgaccatcatcatcgtgggactgactttggtggaagtccttgg

SEQ ID NO: 645040 - DNA, 74 bp, Homo sapiens
gctggaacaatggataacttcttcaccgagtgtcaacctaagaaaaagtctacgccactgaagtatgaagttgg

SEQ ID NO: 645041 - DNA, 82 bp, Homo sapiens
caaaatcactcagcagatgccaaagcttcctggagatgatggaggctcgcagccgtggccatgcgtccccactggcggccaa

SEQ ID NO: 645042 - DNA, 75 bp, Homo sapiens
tacaagatcacaagatgttgatcagcttcgtgatatcaaagataaactgtttcacgttagacctgtaacccaagg

SEQ ID NO: 645043 - DNA, 82 bp, Homo sapiens
aggtctctggagacatcttcagcaggtgccctacgagacgctgaacaaacgctttcgcgccgctcagaagaacattgaccgg

SEQ ID NO: 645044 - DNA, 75 bp, Homo sapiens
cagcgctaccggctggaagccctcaagcttgtgaaaaaacagttgaagaagcacctttcaggagaggagcatgag

SEQ ID NO: 645045 - DNA, 100 bp, Homo sapiens
ggaaatcgtcaggagcccagaaagctccaggaatcgaaagtgaagtcactgcttttgctgtcttggatcaagaccagaaagaaattattgataccaatgg

SEQ ID NO: 645046 - DNA, 100 bp, Homo sapiens
tctggtgatgaacttagcagcagctccactgaacagataaggatgctggcatcaccatctacatcaggtcagctgtctcagtttggggcaagtttatacg

SEQ ID NO: 645047 - DNA, 75 bp, Homo sapiens
cttgagccttctagtctgacctggatatgaaccagtggcttcaagaccccatgccacagctggatgtgactgagg

SEQ ID NO: 645048 - DNA, 83 bp, Homo sapiens
cggcggcggtggcggccgctgggaaatctggcattttttaaagtttgcgccccacaaagaggaaatattccaaaggtactcag

SEQ ID NO: 645049 - DNA, 51 bp, Homo sapiens
ttaatggagccaaatttaataaagtatgactatgaatatgatgaaaatggt

SEQ ID NO: 645050 - DNA, 76 bp, Homo sapiens
tgggggcgctggcggcctgcgcagccacctcaagaacccacttaacctgtgtgtgaagatcgtgcaaggaattcgg

SEQ ID NO: 645051 - DNA, 82 bp, Homo sapiens
ccctaaaagcacctggccccgctacagcaaaccaggagccttcacgtaaatgggtccagtcatgcctcccagtaagaagcca

SEQ ID NO: 645052 - DNA, 75 bp, Homo sapiens
cttccacatcagatgcttcacctgtcaaggtgctggagaatctggtaaaagcaccattgtgaagcagatgaggat

SEQ ID NO: 645053 - DNA, 50 bp, Homo sapiens
tgagctgagtggcagcgtggcccagacagaggtggtttgtgctcccccta

SEQ ID NO: 645054 - DNA, 75 bp, Homo sapiens
gggcagcagtagaatcacttgggttcattctattcagtgggacacagcaggccaggaaagatttcgaacaatcac

SEQ ID NO: 645055 - DNA, 101 bp, Homo sapiens
gggacgagactgccgagcggacggaggctccgggcacccccgagggccccgagcccgagcgccccagcccggaacgtgctggccaaagcgctctatgacaa

SEQ ID NO: 645056 - DNA, 100 bp, Homo sapiens
taaagagaagttggagcttaacctggaggattttgatattcatgaactacatagagctcatgcaaatgaacaagtggatgagaatggcaaaattagtcgc

SEQ ID NO: 645057 - DNA, 100 bp, Homo sapiens
gttcaacctcagcgctctgaagttaaagctgaagctcaacaaagatatagtgatctctgtgggcatttataatctggtccagaaggctctcaagcctcct

SEQ ID NO: 645058 - DNA, 96 bp, Homo sapiens
caacatcgtcaactctgtgaagcagcggcctctccaggcctacaagccggacggtgtgaagggagacctgctgattgacatcggctctggccccac

SEQ ID NO: 645059 - DNA, 98 bp, Homo sapiens
ctacttcacccatctggacattgagctgtcagagaactgtgcgtatgactcagtgcaggagctgaaaatcctggtggactacgacgagaaaggctacc

SEQ ID NO: 645060 - DNA, 75 bp, Homo sapiens
ttttataataaagacacttatcttgcccaagagctgggtcccacccacctctgcctccgccatggctgcaagaac

SEQ ID NO: 645061 - DNA, 80 bp, Homo sapiens
ctcagagctgggtgccaggctgaaggatcactgaggaaggggaagtgggcaaagcaggccttgaaccggggcattgctgc

SEQ ID NO: 645062 - DNA, 80 bp, Homo sapiens
ctgaggaggagccgaagcccaaaaagctgaaggtggaggcgccgcaagcgctgaggagtctgatgacttttcacagtacc

SEQ ID NO: 645063 - DNA, 98 bp, Homo sapiens
gcggcgagacagcggcggcgacggcgcggaggccccgggcgcggcgcagaaccgtgggtaccgatggatgtggccgagagccctgaacgggatcctca

SEQ ID NO: 645064 - DNA, 100 bp, Homo sapiens
gctgcgcgacccccgcgcatgaacaatgctaaagtagctgtgctaggggcctctggaggcatcgggcagccactttcacttctcctgaagaacagcccct

SEQ ID NO: 645065 - DNA, 115 bp, Homo sapiens
ccagcccccggcatgggcagtacggggccgccggggcgggcgccgagcgctgagcgctgagcctcccggcatggtgctcaaggccttcttccccacgtgctgcgtctcgacggac

SEQ ID NO: 645066 - DNA, 100 bp, Homo sapiens
ctgcctggacattggagggggcttccccggaatggagggctccgggcccaagtttgaggaggggtggcctatgtatgcacagctactgattgatttattc

SEQ ID NO: 645067 - DNA, 100 bp, Homo sapiens
gcggcgggctgcgcggagcggcgtcccctgcagccgcggaccgaggcagcggcggcacctgccggccgaggaccctctttgcaagttcagtgcttaacct

SEQ ID NO: 645068 - DNA, 74 bp, Homo sapiens
caagaaatgaaaatgaagggcgccctggaataggttcgccgaagagagaggcatctggccatctgaagaggttt

SEQ ID NO: 645069 - DNA, 75 bp, Homo sapiens
atagagcagagtggaccaccccatgaacctcgagaccacgtctccacctcctgggctccaacgattctcccatct

SEQ ID NO: 645070 - DNA, 75 bp, Homo sapiens
gcgagtgcagcggcggccgccgaggaggtgccgtgagcgatgtggagatgcaggaacactatgatgagttttttg

SEQ ID NO: 645071 - DNA, 75 bp, Homo sapiens
caggactccaaaatggcgtcagttggctcttctcaaccatctgtgagtccaggggaaccgtctccaccatccatc

SEQ ID NO: 645072 - DNA, 100 bp, Homo sapiens
ttcaacgcccacctggtttgtcgcatgtgctgtatggacgaagttatacggaagcgtctcctcattgatggagatggtgctggagatgatcggagaatta

SEQ ID NO: 645073 - DNA, 75 bp, Homo sapiens
gaagatcctggaggtggatctgaagaacggggctctggaggccacgggcatgatgcttcgggtcctggtgggggc

SEQ ID NO: 645074 - DNA, 100 bp, Homo sapiens
ctggagccaccatcaagctgtctaagtccaaagatttttacccagaaacgcttcgttaagggactcaggcagtacgggaagaacttcttcagaattagaa

SEQ ID NO: 645075 - DNA, 75 bp, Homo sapiens
cgacgtcttgcctgtgtcccacttgttcgcggcctataggctaactatatgtcagaaagcatcagcttttctcga

SEQ ID NO: 645076 - DNA, 89 bp, Homo sapiens
tcaggagaactctatgcagaagggtcccgggattcttgagctgtgcccagctgacgagcttttgaagatggcacaataaccgtccagtg

SEQ ID NO: 645077 - DNA, 95 bp, Homo sapiens
actcaagacacacaactcataacagttgatgaaaaattggtttgagaagatgatcagtgggatgtacatgggggagctggtgaggcttatcctgg

SEQ ID NO: 645078 - DNA, 88 bp, Homo sapiens
ctgtatgatagtgttagttccacagatggggaggacagtctagagagaaagggatggggaaagacaccatagtcataaaagaagaaag

SEQ ID NO: 645079 - DNA, 114 bp, Homo sapiens
ccttctactccatcgtgggactcagcagccttggtgctcaggtgccagatgcaaaggccctgtctcagcgggaccctcctcacaacaacttcttcttcttcgatggcatgaagg

SEQ ID NO: 645080 - DNA, 98 bp, Homo sapiens
ctgggtgggaaggtcaccatcgagtgtgcgaagaacaacttccaggcccagctggaattcaaactcaaggttttgcacactagggaccaagaagccct

SEQ ID NO: 645081 - DNA, 50 bp, Homo sapiens
tgcaaatcgactgtctggctgcctggggagaaattgtcgtaaatgaagtc

SEQ ID NO: 645082 - DNA, 75 bp, Homo sapiens
atcctttatcctggtcatcttctatttccaaaatacctgcactttaatcagatagaaactttggacccagattcg

SEQ ID NO: 645083 - DNA, 96 bp, Homo sapiens
cttgaacttaatacagcaagaaagaccatcaagtttaccagtgggccatgcacagacacagctcatgtctcattaatcacaccaacaaaaagatcc

SEQ ID NO: 645084 - DNA, 51 bp, Homo sapiens
aatcttctcctctggggatgacctggggccaggagctgactatccgccaga

SEQ ID NO: 645085 - DNA, 75 bp, Homo sapiens
acatgctgagtgaattagtccaggtatctgtgcctaggtttgctgtggggattgtaataggaagaaacggggaaa

SEQ ID NO: 645086 - DNA, 50 bp, Homo sapiens
ctttccatagctgtaggactgctggaggaaaacggacgatgtattactaa

SEQ ID NO: 645087 - DNA, 98 bp, Homo sapiens
atggcagccatttatttgtcccgtggccttggacaagattcgctatgagagcctgacagacccttcgaagttggacagtggtaaagagctgaaaattg

SEQ ID NO: 645088 - DNA, 82 bp, Homo sapiens
tgtcgctgcccgtgtgattactgagactcagaattcaattcgtcataatctgtccctacacagcaagttcattcgtgtgcag

SEQ ID NO: 645089 - DNA, 100 bp, Homo sapiens
attgtcatagctgatgtcaagttggttgctgatttccaaaggatttattggatcattcgtgtacatcaggaagtggctctggtcttccttttctggtaca

SEQ ID NO: 645090 - DNA, 100 bp, Homo sapiens
cctcacagtgccaaatggagctggaagcagtccagtggaatatcaacacctttgagaacagaatgttaatgcttgatgggatgccggcagtcagagtcaa

SEQ ID NO: 645091 - DNA, 100 bp, Homo sapiens
gtcaaatacatgaaaaatggggcagaagaagagcagaaaatagcagccaggaaccaagaaaacttgctcaaagttatgaagtttcaggatgaattggaat

SEQ ID NO: 645092 - DNA, 98 bp, Homo sapiens
aaaagatgaaaaggaatatgcattgaagcaaattgaaggcacaggaatatccatgtcggcttgtagagagattgcatactatactggcaattgctgga

SEQ ID NO: 645093 - DNA, 82 bp, Homo sapiens
ctgggatcctttctcatcagggtcagtcacagccatgtgggctacacactctcctacaaaggctgacccgcggctgattgag

SEQ ID NO: 645094 - DNA, 96 bp, Homo sapiens
acttggcaatgaacagtgagggatacttgtacacctcgcaccagatactgctacaccatctcatcggcatggacctatatgtggcagcaagtccat

SEQ ID NO: 645095 - DNA, 80 bp, Homo sapiens
agagcgtgaatttgcctcggggacgcctctccagtacctggagtagaacagaaaaattattatgtctgtgttcccttggg

SEQ ID NO: 645096 - DNA, 50 bp, Homo sapiens
cgagctttcttctccaagtccaaagaggccctccaaccctatccccatca

SEQ ID NO: 645097 - DNA, 75 bp, Homo sapiens
gctactcggagggcgagcggacctccctggagaaggttcctgtgagaacaacatctcgctcccctgttctgtccc

SEQ ID NO: 645098 - DNA, 74 bp, Homo sapiens
gatctcttctgttctccactgctaggttattcagcttctcaaggctggaaaagcgaaggaagtttcctacaatg

SEQ ID NO: 645099 - DNA, 74 bp, Homo sapiens
ccgagaagtccccgaccgactgatggaggtctcaacatgttgcccagactggtctcgaactcctgagctcaagc

SEQ ID NO: 645100 - DNA, 100 bp, Homo sapiens
tgtatgagatttacgtggagacctgtgggcaaaacactgagaaccaagtcaacccggccacctttgggaagggtcgacatgttaaaacgggtcagttggc

SEQ ID NO: 645101 - DNA, 85 bp, Homo sapiens
gaggcgaacactgaggatgctttccacatgaaccctgaaggaaagaccacagcaagattctttcattcgtctcctcctagcctgg

SEQ ID NO: 645102 - DNA, 100 bp, Homo sapiens
ctggaaagcggtctgcccctggaggtggtagcaaggttccacagggcttgtcaatgaggcagatcagattcaggttcgacgggcagccaatcaatgaaac

SEQ ID NO: 645103 - DNA, 100 bp, Homo sapiens
cttcaagatccgcatggagcctgacgagacggtgaggaagaggatggagatgaagatgaggaagctgagtcagctacgggcaagcgggcagctgaagatg

SEQ ID NO: 645104 - DNA, 100 bp, Homo sapiens
gtccggtgtccggtgtccggtgtctggagccgctggctagtttgtgaatagcacaatggaagaagctggactttgtgggttaagagagaaagcagatatg

SEQ ID NO: 645105 - DNA, 88 bp, Homo sapiens
gattccaagtaactcttatttgagagagtctacagggagattgaacaggtgattggcccacatcgccctccagagcttcatgaccgag

SEQ ID NO: 645106 - DNA, 132 bp, Homo sapiens
tcaccccgttgccgaaagactaagcgtcccgttggccagtgcaacgaagaacggaggaagcgacgatgaaacaggcgcctatttaatcgacagagaccccacctactttgggcctgtgctgaactacctgag

SEQ ID NO: 645107 - DNA, 99 bp, Homo sapiens
ctagaccttgccaagatggcacagcttggtgtaaaaattgccaaagcagttgcctgccacaactttgtaaaagccaaaaaggaggttgaaaattcacag

SEQ ID NO: 645108 - DNA, 100 bp, Homo sapiens
cgttcatgcagacttttttaacggaatagccaggccagaagaaggaaggcctgtggtgagtgggacaggaaatgacatcaccaccccaccgaacaaggag

SEQ ID NO: 645109 - DNA, 90 bp, Homo sapiens
tcttggcttctcccagcatagccccaggctttaaactccagagaacctcatatgtgtttagtaagagatatttcaaactgctgggccccc

SEQ ID NO: 645110 - DNA, 100 bp, Homo sapiens
cgctgcctgcaccatgtccgccagaggtgcagaagtctacttcagacatcgtgtgacacagatcaacctaagagatgacaaatgggaagtatccaaacaa

SEQ ID NO: 645111 - DNA, 100 bp, Homo sapiens
ctggatcaccttcaatgtgggctaccacgtggagcaccacgacttccccagcatcccgggctacaacctgccgctgctggtcacctgacttttgaatgcc

SEQ ID NO: 645112 - DNA, 50 bp, Homo sapiens
ttggcaagtggacattttactggctcaagagagtgcgtagaagggctgcg

SEQ ID NO: 645113 - DNA, 100 bp, Homo sapiens
tggacattgaccccactggactgcagtcacagtggactcccaaggggcagcgagaaccctctgcccacagtggagattgccatccggaacacgggcgatg

SEQ ID NO: 645114 - DNA, 100 bp, Homo sapiens
gccctctgcgcaaggaggagactcgacaacatgtcacccgcgctccaagacctgtcgcaacccgggaggctgccggcgtggaccgcgggaaggcggggct

SEQ ID NO: 645115 - DNA, 100 bp, Homo sapiens
aaatgacctgctttctttctgttcccgggctgcgttcggacccctgtcggagagtaaatccgaaactcagattgatggacaacttttcttaattaagcac

SEQ ID NO: 645116 - DNA, 82 bp, Homo sapiens
cacggccgtctctggagagcagcaggtttggtgcacctcgatttggaggaagtagggcagggcccttatctggaaagaagtt

SEQ ID NO: 645117 - DNA, 76 bp, Homo sapiens
gccagcagcactgtggaggccgtcctcgaggtggggctggtgtccgagcacttctcgcaggccccgcagaggctgt

SEQ ID NO: 645118 - DNA, 109 bp, Homo sapiens
ggaggtcatcgacggcttcgccatcgccagcttcagcaccctggaggccctggaggtgaaatgacaatggatgctctgttggctcgattgaaacttctgaatccagatg

SEQ ID NO: 645119 - DNA, 83 bp, Homo sapiens
aaacctgaagttagaaaggctcaacgagaacaagctatcagttactatgcgagtcagaagaaaacatttgaaattaatcccag

SEQ ID NO: 645120 - DNA, 82 bp, Homo sapiens
actgggagataaccctggacagtggcaggaccatggccaacctggagcgcaccttcatcgccatcaagccggacggcgtgca

SEQ ID NO: 645121 - DNA, 100 bp, Homo sapiens
cccagagggaatggaccccgatggtgtcatcgaggttggacgtgataagtatgagcctgcagctgtttcagaacaaggtgataaaaagggcaaaaagggc

SEQ ID NO: 645122 - DNA, 82 bp, Homo sapiens
cggggacattattgcgcgtggaacggctgcttttggaaggcggctatgagaggttttcctccgagtacccagaattctgttc

SEQ ID NO: 645123 - DNA, 101 bp, Homo sapiens
tggagatatggcgcaactgcggcgcggacacttggcattcagggacgtggccatagaattccctcaggaggagtggaaatgtctggaccctgctcagagga

SEQ ID NO: 645124 - DNA, 75 bp, Homo sapiens
gaccgctgcagccgctggctgagtgtgggccatgtttgaggattgccccagcattcagttctatgagtaataaat

SEQ ID NO: 645125 - DNA, 100 bp, Homo sapiens
cttttagagcaggtgtatgatcttttggaggaggaggatgaatttgatagagaggaatgtatcctgtcaggtataatgtcagtgaatggcaagaaagttc

SEQ ID NO: 645126 - DNA, 100 bp, Homo sapiens
ggagccgatcccggcctgagcaagcggccgcgcactgaggaggcggcggccgacggtggcggcgggatgcagcactgtaatggcgttgactggcgtcaga

SEQ ID NO: 645127 - DNA, 99 bp, Homo sapiens
tcagcgctgggaggggggtgacagcaacagcgacgactatgacctcgagtctgacatggttctgtacagagtaatgagatgtgtgacggctgcaaacca

SEQ ID NO: 645128 - DNA, 100 bp, Homo sapiens
ctcagtgactcccttggcaaccctcatctgcacactgattgccatattggcgcagttgtgtagcagttgagtaatgctggttagctgttaaggtggcgtg

SEQ ID NO: 645129 - DNA, 89 bp, Homo sapiens
ctgaaattcaggccaaggctccaagtagtctgagtgatgtttcagctcctggcatcagctctattcaaatctggttcagattttacagc

SEQ ID NO: 645130 - DNA, 82 bp, Homo sapiens
ggacctgctggaagggaaggaaaaacctgtatgtggaaccaccttgttccttgcctgtatctccccttggttcaatagctac

SEQ ID NO: 645131 - DNA, 74 bp, Homo sapiens
gaccgagagcgcgaatatcgtcatcgttagaagactggatacacgtctgtttaactacgcaaaaggtaatgctg

SEQ ID NO: 645132 - DNA, 75 bp, Homo sapiens
gcagccaacctatgttgccctgagttacataaatagcttctttgtgatattggccacagtgaagaaaaactgggc

SEQ ID NO: 645133 - DNA, 82 bp, Homo sapiens
gaccagtccatttggggaaatccttcggatggtgaactcattagaaatatgtgtcacaaagatgtctacacggaactgccag

SEQ ID NO: 645134 - DNA, 100 bp, Homo sapiens
attgatctcctatttttggcttcaagattttgtgccaaccaggcacaggttcaatatcaacagcagcatgaacaacagaaaaaagatttagaaatcctcc

SEQ ID NO: 645135 - DNA, 98 bp, Homo sapiens
atcctgttctgcatgtatgtttgaagccgcaagaggccggagctgcccagggcaccgtcgactccgaggatcaccacatttcctccggtgcctgtcac

SEQ ID NO: 645136 - DNA, 100 bp, Homo sapiens
ttctgttcagactcaacatacacccagaacaatgcaggtgcatctaactgtgcaaggtgtgttccagagaacaagccttcagacatttgctatattgacg

SEQ ID NO: 645137 - DNA, 88 bp, Homo sapiens
agatccaaagccattcccaaattatagagctaattacaactttcggggcatgtacaatcagaggaaactactaaagttcctggggaag

SEQ ID NO: 645138 - DNA, 97 bp, Homo sapiens
gggtgctgatagggatggtcttcatgcactctcccctcccgcagttggctgattgcaattctggcccaactcaaccctctctttggaccgcaattga

SEQ ID NO: 645139 - DNA, 98 bp, Homo sapiens
cgacgagtccggaggggctgccgcgggagggagaagatacccattatcagaaaaaaaaattatgcactatatgtaccagttatgtaagtccctggatc

SEQ ID NO: 645140 - DNA, 100 bp, Homo sapiens
atcacattgctgttcatgagtggaatccatgtttctggacgcggatttttggcctcatactctgttatagataaacaagtataaggatgcatttatgaaa

SEQ ID NO: 645141 - DNA, 100 bp, Homo sapiens
ggatatggagcctttggtgttgtctggcattcaagtcagcagaaaagaaaacaaagcaaacattaaaagaagttcagactgttacctctattcaaaaagc

SEQ ID NO: 645142 - DNA, 75 bp, Homo sapiens
ctttgggcattcctgaacttgtcaatcaggcctgggcagtttttaaagggaagtttaaagaaggggacaaagctg

SEQ ID NO: 645143 - DNA, 100 bp, Homo sapiens
catgtaccggctccacaaacgcttcagcgctctggagttggagcgggcttacagtgaaatagaacaactgcagtccatttgggaacaggagcgagtgccc

SEQ ID NO: 645144 - DNA, 95 bp, Homo sapiens
tggaagatgggaaagttattgaacggctgggccagagcgtggttgctgaccagttgaaagaggaaacgacatttgaagcaggagtgaaagttcag

SEQ ID NO: 645145 - DNA, 87 bp, Homo sapiens
cttgaatgactggaaactgattggaaactctttgggaaagccactcgaaaaggctatgtggttgatgttgcagaatgatgagccgga

SEQ ID NO: 645146 - DNA, 82 bp, Homo sapiens
caaagagcttgctccctacgatgagaactggttctacacgcgagctgatcctgcagctcctgaaaggcaagctggtggtggg

SEQ ID NO: 645147 - DNA, 88 bp, Homo sapiens
atggagatctattaggattttatatcttactatgtttctcagcagtgtagctcagtgtgattacagtgcagagaagaaaagcagcctc

SEQ ID NO: 645148 - DNA, 90 bp, Homo sapiens
tggcttgaaggtggtggaaattgatggagaccccaagtgggaggtcagcttatttcggatcaagtggcagaaatcgtatctaaatacgac

SEQ ID NO: 645149 - DNA, 75 bp, Homo sapiens
tgatgccccacttggtgaatggagatgcagctcagcagtgtaaacaggaacatcgataagtagtgtaaaaacttg

SEQ ID NO: 645150 - DNA, 51 bp, Homo sapiens
caccccggggtcccaggaagggcggcccagcatcaacaacagcaacttgtg

SEQ ID NO: 645151 - DNA, 97 bp, Homo sapiens
aatttgtcttgatgggctacagttagagtctgaagttgttaccaatggtgaaactacatgttcagaaaggattaatgaaaatcaagttccatcctca

SEQ ID NO: 645152 - DNA, 100 bp, Homo sapiens
gtccataggctgctgcaggcgccgcacaaggtccagcatgccagcaaacagatcagtgctgagaagcagtacaaagggatcattgattgtgtggtgagaa

SEQ ID NO: 645153 - DNA, 100 bp, Homo sapiens
cgagccccgagcccggctggacgccgctgcctcagtgagggagactctgatgtggactcggagctggaggaccgtgttgacggggtcaagtcctggttgt

SEQ ID NO: 645154 - DNA, 100 bp, Homo sapiens
tggaggcaagcgctgcccgcgagctgagccgccggaggaggagccgcgggcaacgaggtcttgatgcagaactttattatgtgagaaatgaccttattag

SEQ ID NO: 645155 - DNA, 98 bp, Homo sapiens
aggcttcgcgggaagacgcggcggcggcggcggaggatgagcctgcagagcgcgcagtacctccggtgaatccgccatactacatcccgctggttgag

SEQ ID NO: 645156 - DNA, 75 bp, Homo sapiens
agtcactctgctggttgctgagcaagtgtaaagacctcagccaggacagacgttgaaagataccacgtccagttc

SEQ ID NO: 645157 - DNA, 74 bp, Homo sapiens
atatgattggctctttagctgaaatacttctgaagcttcgagcaaatgctctcatcaaaagaggcagcatgtac

SEQ ID NO: 645158 - DNA, 98 bp, Homo sapiens
gggaacaggccagcaaaacactcagctgcaagtccaaagccacaaggttttgaaagagggaaggaagatatttctcaaaataaagatgaatcttcact

SEQ ID NO: 645159 - DNA, 75 bp, Homo sapiens
tgccagatattccacccatacaggaagaaaggcgaaggttgaaaaatgcaataattatccagtcatttattcgag

SEQ ID NO: 645160 - DNA, 100 bp, Homo sapiens
gaacttgttaacctccggggagagctagctaaaccaggtggacaggtgaaatgtcagtatatctctgctgtggataaagttatatttgtggatgattatg

SEQ ID NO: 645161 - DNA, 75 bp, Homo sapiens
cgttaagagaaattgccctagaaacagccatgactcaaagaaaactgaggtcctcaaccactgaagaagaagctt

SEQ ID NO: 645162 - DNA, 144 bp, Homo sapiens
ttgtgtcctgagatcaaatggcacttcattggccacctacagaaacaaaatgtcaacaaattgatggcacttttccagccattaactccaggctctcgagaatttgaagatgttgtaaatattctccattcttcttaccttgaa

SEQ ID NO: 645163 - DNA, 82 bp, Homo sapiens
agactacggacctgtctgggtctcagccgccaaagaccccgtccggtagcttcgagagctgtgcccaggagtgaacaaccag

SEQ ID NO: 645164 - DNA, 98 bp, Homo sapiens
ggcaagctcggcggcgtgcagcgcgtcctcagcacgcttgaccctaagcaggaggcagtgcgagacctccagtcggaacctggtgaccctgcgtgtgg

SEQ ID NO: 645165 - DNA, 74 bp, Homo sapiens
tgaagaccatggatcacaaccggaaccgcaggtgcctggtccctgtgaccatgaagacctcctggacggtgtca

SEQ ID NO: 645166 - DNA, 75 bp, Homo sapiens
gggcttcaacaagctagctgaggtcccagcgactccagtttgatgtctcttcccccaatggcatcttactcttcc

SEQ ID NO: 645167 - DNA, 100 bp, Homo sapiens
ctgcggttgaaggcagccctgcacgaccagctgaaccgcctcaaggccgccatggcatcagatgaaggcaaactttttgttggagggctgagttttgaca

SEQ ID NO: 645168 - DNA, 51 bp, Homo sapiens
aagcaatatttcgagcagtttggcaagcttggtgatccagctatttttcct

SEQ ID NO: 645169 - DNA, 99 bp, Homo sapiens
cagaaaccagtggaaaaaggaaaaagagaaaagaaatgaaccagtattcttaaattgatttcaagtttgaacaagcacaatcctggaggaagagaaggc

SEQ ID NO: 645170 - DNA, 82 bp, Homo sapiens
cggagatcctgatgaagttcgagcactaatatttaagaaagaagatgttaactttcaggaaatctggcattttttaaagttt

SEQ ID NO: 645171 - DNA, 99 bp, Homo sapiens
ggagtatctgccaaacgtagaccaaaggctcagcccacaactcttgtcctaccacctcaactgggccagtgccattcgcgtcgcagctctggactgcat

SEQ ID NO: 645172 - DNA, 87 bp, Homo sapiens
ggctgataaccatatcctgctgtgggatttacaggaaagctcgagccaggctgtggctccatggtccccttctcgatgcgcatcttg

SEQ ID NO: 645173 - DNA, 75 bp, Homo sapiens
atttcctttctctgctttaacgtacttttaaaagggatccttccatgaagactgaggcaggcggagctgctaaga

SEQ ID NO: 645174 - DNA, 95 bp, Homo sapiens
accaaaagtatgttgtaccttgtgacagaatatgccaaaaatggagaaatttttgaggacagttatgggatggatgggaaggttaatcagccccg

SEQ ID NO: 645175 - DNA, 82 bp, Homo sapiens
ttggatttaaaagacagtcctcgtcagcactgactttcagctatggaatcgactccgtgggaaggaggcttgtttaaactac

SEQ ID NO: 645176 - DNA, 98 bp, Homo sapiens
ggcagcgacagagccaaaatcagagctggaacctgaggagagaggaagtgagctcacaatgactcaagctgccacatagtgttgattgtgaaatgcca

SEQ ID NO: 645177 - DNA, 83 bp, Homo sapiens
cgccgctgcgggcccgctccgacgcggaaggacacagaatttccaggtgttgtggtgcgaccaattggtgaatttcgtagttc

SEQ ID NO: 645178 - DNA, 100 bp, Homo sapiens
ggtgaccgcgcgactcggcgcccgcccgcggactgagcagggggaggaacatttaagctgatggaagtggaagtggaagttgctgtacattggcagcaag

SEQ ID NO: 645179 - DNA, 82 bp, Homo sapiens
cttcaacgaagaccgagactttcagtgagaaagatcagtctaaagaaaaggagaagaaagtgaaaaaaacaattccttcctg

SEQ ID NO: 645180 - DNA, 101 bp, Homo sapiens
cccggtgtggctgtgccgttggtcctgtgcggtcacttagccaagaacgggctcatgtcggggctgatgcagatgctgctgctgaaggtgtctgcacacat

SEQ ID NO: 645181 - DNA, 100 bp, Homo sapiens
cgcgggtcctggagaagcggccgcggccagggaacggggcatcgcggttccaacggtcacctgtggagaaagaaacatcatctctcaacagaggattgtt

SEQ ID NO: 645182 - DNA, 88 bp, Homo sapiens
attcacagcttgagctcaaataaggagaatcttatttatactgctgatccagaatcctttgaagtaaatacaaaagatatggacagta

SEQ ID NO: 645183 - DNA, 82 bp, Homo sapiens
acagtttgaagagagacatttgaaatttctacagcaacttggcaagttggaaaatggatataccttatttgattatgatgtt

SEQ ID NO: 645184 - DNA, 82 bp, Homo sapiens
cagggaccaggcggaggcgtcgcgggagcctttggggcaccacagagatgcggattcttctaacagagaaaatgccattgag

SEQ ID NO: 645185 - DNA, 75 bp, Homo sapiens
taaagctggtctgttctaactgaggaagtcctggctgagcaaggttggaagccctagttctcgcattgaccgcac

SEQ ID NO: 645186 - DNA, 116 bp, Homo sapiens
gccactgctgctccgtggagatcgtcccgcgcctgccggtttacccaaggtccagcctagcccctaggcaccatgtcggacagtgatctaggtgaggacgaaggcctcctctccct

SEQ ID NO: 645187 - DNA, 99 bp, Homo sapiens
aacaagacctgcgggctgtgtggcaactttaacatctttgctgaagatgactttatgacccaagaagtccctcctcctatgtctccatcctccaaatct

SEQ ID NO: 645188 - DNA, 75 bp, Homo sapiens
gaagggacctggagcttttccggaaaaaggtgctgtgactatctaagcaatggtcgaattggatggagatgatgt

SEQ ID NO: 645189 - DNA, 80 bp, Homo sapiens
cggagagctgacaatgatgaatctcagaggcattgaaacttcagcaggatgtaaggaaaaggaaacaagaaattttagaa

SEQ ID NO: 645190 - DNA, 96 bp, Homo sapiens
gaccaggcaccttctgtggaagaatcccagtgttccaatgcagaagttgcaggatatccagagagcaatggagctgctatccgcatgccagggccc

SEQ ID NO: 645191 - DNA, 74 bp, Homo sapiens
gtcatggaacagcagactctgtccattgcaaaggattcactggcaaaatttgctggcagaaaactgaaagactg

SEQ ID NO: 645192 - DNA, 100 bp, Homo sapiens
ccttcacttgaaaactccaagtactgccgtttcaaccaggacccagaagcagtactatactggcaattgctggagaagattttgcaattgttgcttctga

SEQ ID NO: 645193 - DNA, 50 bp, Homo sapiens
ggggaagacagttggaagctcagacatgggtgtacaactatgagcctttg

SEQ ID NO: 645194 - DNA, 82 bp, Homo sapiens
aggggctgcggccggagcgggcggctgagacaaaggcgacggtgattttctatgatagcgactggaaccccactgtggacca

SEQ ID NO: 645195 - DNA, 88 bp, Homo sapiens
aaaatgctctcccatctgctccaggctttagattatggggcaccccctcatggaggaattgccttagctctcacccctccagtgccga

SEQ ID NO: 645196 - DNA, 100 bp, Homo sapiens
ggtttcagtggcgtcactcgctgggctgctcttcctgaggttttcctaagccatcccctggcggaaccgcccccagtaccttctccaggcaaattccgtt

SEQ ID NO: 645197 - DNA, 82 bp, Homo sapiens
ctcaagactacctgttgctcatcaactgtcaaagcaagaagcccgaacccaccaggttgatctcctatcaagagtttttggc

SEQ ID NO: 645198 - DNA, 75 bp, Homo sapiens
tgaaggtccaggagtacccgaccctcaagccgccaccggcacggccaggccagcatggtggaccacttacttcca

SEQ ID NO: 645199 - DNA, 83 bp, Homo sapiens
tgaagaagaagattaacctggagttaaggaacagatccccggaggaggtgtcagctgtgatgcatgtttaaaaggaaattttc

SEQ ID NO: 645200 - DNA, 100 bp, Homo sapiens
agaaatttcatgttgcaccctttaattgctggccctcggagagtggaaatggctgtgatgtcaacatagaatatgagctacaagaagataatttagaact

SEQ ID NO: 645201 - DNA, 80 bp, Homo sapiens
ttcctgcgtgctacggccctgtgggcctgggagctgcctctgaggaacacgccgcagcttcatggcggctgaagagatgc

SEQ ID NO: 645202 - DNA, 106 bp, Homo sapiens
ccgagaccgtgaccgagagcgtgaccgagagcgcgaatatcgtcatcgttagaaggacccactgatctcagcatgaagagacaattggcgactagctcaggatcct

SEQ ID NO: 645203 - DNA, 101 bp, Homo sapiens
tgcaagaaacatggatttgatccacaaagtcccctttgtgttcacataatgctgtcaggaactgtgaccaaggatcttcaacaactgcaacagcttcaaca

SEQ ID NO: 645204 - DNA, 155 bp, Homo sapiens
tttgttggggagaagaggattggaggtgtcagtgttaaaggaacctctacaacgaaggtgaagccacggaagataagcctcgaagcggaggatccctgtgtcccagccgggcatggccgacccccaccagcttttcgatgacacaagttcagccc

SEQ ID NO: 645205 - DNA, 50 bp, Homo sapiens
ccagcgagaacgagctgaagaaggtgtgatgaatgcagactctgctacca

SEQ ID NO: 645206 - DNA, 75 bp, Homo sapiens
aaagtcagaccgctcatcacgaacatcatcgtctgatgaagaagaggagtgtgcatcaccttcgaccaggccaac

SEQ ID NO: 645207 - DNA, 82 bp, Homo sapiens
gagcccgtccgtccgccgccaccacccactccggacacagaaaattgtacaagctggagataaggaccttgatgggcagcta

SEQ ID NO: 645208 - DNA, 82 bp, Homo sapiens
cagcacagttcctgggaaggtggagccaccagcctctccttggagtggagtcaacatatcaatggagcaagtcacagtcgtc

SEQ ID NO: 645209 - DNA, 74 bp, Homo sapiens
ggaggaacactctctgaggaagcccaactcctatgagctcctctctggcagattaccagttaccagatgccaaa

SEQ ID NO: 645210 - DNA, 100 bp, Homo sapiens
ttcacggacaacctcagaggacaacgaagtgttcggttgattcacaaaaggctgcaacaaagcaagtcaacaaggcacacaataggttaatcgaaaaaaa

SEQ ID NO: 645211 - DNA, 100 bp, Homo sapiens
tctgggcttctctgaggcggcgagagatggtcaggtctggagctcgaccgggccaggatggagaagagttcctgggaaatacatgagaggagaatgaagg

SEQ ID NO: 645212 - DNA, 100 bp, Homo sapiens
tcccagagtgctgggattacagtccaaggaacaccaccccttacttgccgacttccgaaggtcaccgggagcgggttctcagcctctcccaagccctggc

SEQ ID NO: 645213 - DNA, 87 bp, Homo sapiens
ggaatcgctgaagagcccagtaccagttcagcaagtgtctctactgtcagaccacacacagaggttcagcaccacccccttctccaa

SEQ ID NO: 645214 - DNA, 71 bp, Homo sapiens
cagccatgaacggatggatgtgatgcctgctagccaaaaggaaaaatggctacaaacttcctagcacatga

SEQ ID NO: 645215 - DNA, 121 bp, Homo sapiens
gctccgtggccttagctgtgctcgcgctactctctctttctggcctggaggctatccagcgaaactttaccctcccagaggtagctgagtgctttgatgaaataacctatgttgaacttca

SEQ ID NO: 645216 - DNA, 74 bp, Homo sapiens
aaccgccagatcaacctggagctctacgcctcctacgtttacctgtccatgggatagctgggagtatggccacc

SEQ ID NO: 645217 - DNA, 87 bp, Homo sapiens
taaccctgctaattcagatacaacaatgactgatgtggtgggtaacccagaggaggagcgccgagctgagttctacttccagccctg

SEQ ID NO: 645218 - DNA, 100 bp, Homo sapiens
ctgacgctctgggtgaagaatggaaggtatgtgcactgcgcgtgaccagccgggcccgcagccgcatcctcagggcagggggcaagatcctcactttcga

SEQ ID NO: 645219 - DNA, 87 bp, Homo sapiens
tgcgcccgccctcgcctcacctggcgcaggtgccctacgagacgctgaacaaacgctttcgcgccgctcagaagaacattgaccggg

SEQ ID NO: 645220 - DNA, 80 bp, Homo sapiens
tcctgcgcgcgcgcctgaagtcggcgtgggcgtttgaggaagctggatgatatcatcaagttgaatcgaaaggaagggaa

SEQ ID NO: 645221 - DNA, 100 bp, Homo sapiens
gaaagaagatatgacctatgcagttcgaaaactggataacactaagtttagatctcatgaggatgaacgtgaagccagagaaaatgtgaagagagagcaa

SEQ ID NO: 645222 - DNA, 50 bp, Homo sapiens
caggctcacaccacctcacctggtggctagaagtgaccccaggatttttt

SEQ ID NO: 645223 - DNA, 82 bp, Homo sapiens
taaatgaggaatgtctttcctaccatctaaaatacgaaggtttctggctgggttctacaacaactgaagcagacattttcca

SEQ ID NO: 645224 - DNA, 100 bp, Homo sapiens
ctacaaactgtttgaggataactgacttaaaatctgggtgatgatgaacagtctacacagatggctgcaagttgggaagatgataaagttacagaagcat

SEQ ID NO: 645225 - DNA, 144 bp, Homo sapiens
cggacccgcaagcatgcccaccactgccacaaacgccgcaccaggtcttgtagcagcgcctcctcgacccagccgatgcccaatcctgtggcgtactacctgcaccactcaccctggtggttccatcgcttcgagacgctcagc

SEQ ID NO: 645226 - DNA, 100 bp, Homo sapiens
acgtctccaaaatgagtcgcatcttcaacccccatctttccagcgcacttttccaacacatcactgcattatttgaatgcagcatggcagctattatcac

SEQ ID NO: 645227 - DNA, 50 bp, Homo sapiens
gtatcccaaatgtagacccaagggtgatttctaacctagaagcaagaaat

SEQ ID NO: 645228 - DNA, 82 bp, Homo sapiens
cctgccgtccatgcggaagatcgtcgccacctggatgctggaggagtgtggccatctggggccgtgtggtatttgccactca

SEQ ID NO: 645229 - DNA, 53 bp, Homo sapiens
gtggcgcggctgcgcgaggagcaggaaaagacaaatgtactgaggctggagcc

SEQ ID NO: 645230 - DNA, 76 bp, Homo sapiens
ggaagaagaggagcaggaccagaaggaagtggaaggggaagccaaatataggccaagagcagcctgtggatgatgc

SEQ ID NO: 645231 - DNA, 90 bp, Homo sapiens
aaggaaaaaaaccttcgactatgcagagacatgagatggtagccaacccctcaggatattattgctggattcctatataccattttaatc

SEQ ID NO: 645232 - DNA, 88 bp, Homo sapiens
tggctgggagttctggtctcaggcaaggtggggactgggcacatcatcaatacgacgcgagtgctggtgacgcacggcattagcttcc

SEQ ID NO: 645233 - DNA, 100 bp, Homo sapiens
ggatcatatttttaagtacacaaactttggaattgtttctctagttcatggagacttctttataagacagaatttatccagttggcgaaggactttgagg

SEQ ID NO: 645234 - DNA, 100 bp, Homo sapiens
acatggccagacttgatttcaatcttataagtacctggagtagaacagaaaaattattatgtctgtgttcccttgggactcattggaaattgtacagtga

SEQ ID NO: 645235 - DNA, 90 bp, Homo sapiens
accataacaacaaatctgtgaatgaatcattgaacaatctttttattacagaagaagattatcagcctgagagacactctcgtaagttac

SEQ ID NO: 645236 - DNA, 100 bp, Homo sapiens
gcaaaatggagctggaggagctttatttgtggactctctgggtggctcagcccacagtatccttattgccaacattgcccctgagagacgcttctaccta

SEQ ID NO: 645237 - DNA, 95 bp, Homo sapiens
aaaacactatcccagggagtgcaagcttagagcgtctggccaagaatcagaggaagtggcatggcttctcgctgtttctgggatgctgacactga

SEQ ID NO: 645238 - DNA, 100 bp, Homo sapiens
tcccacagtgaagggcctgatggaagcggtttgctggttggctcccgagcagacagcaggaaagaagaagcccttcgtgtacacccagggccaggctgtc

SEQ ID NO: 645239 - DNA, 75 bp, Homo sapiens
gctggaccacgtgctcacccacggctgcttcgacatcttcaccacggaggaggatcatgctgcaaagcttggagc

SEQ ID NO: 645240 - DNA, 98 bp, Homo sapiens
ccgtgaccgagagcgtgaccgagagcgcgaatatcgtcatcgttagaaggctattcaagatctctggcagtggaggaagtctctttaagaaaatagtt

SEQ ID NO: 645241 - DNA, 100 bp, Homo sapiens
gtcggcggctcagttgtccatgaccctgaaggtccaggagtacccgaccctcaagagagtaaaacttgtctcggcacagagtcaagtaaagaaagccaac

SEQ ID NO: 645242 - DNA, 100 bp, Homo sapiens
ctccgccagcttcggcagcctcggagtgcccaggccgtggcccctcagccgtgtggctgctgagctctgtggagccagttcttcaaggcctttaccaaga

SEQ ID NO: 645243 - DNA, 100 bp, Homo sapiens
cagagaagttgctggcggcgctcagggaaggaagcacccgaggaggcggagcggcatctcagccacagagggaaaggtggcccagacagcgtgtatgtca

SEQ ID NO: 645244 - DNA, 83 bp, Homo sapiens
ccagaacggagccgccttggcctcggggtctccctacaccaacgacaaatttacatgtattggagaccagaccagaagccctt

SEQ ID NO: 645245 - DNA, 100 bp, Homo sapiens
gatatctcaaaaggtgatctggacaaaggaacaggtatctcagattatcttagaagacctaggactccaaaaatgtttcccctgaaggacgctgaaatgg

SEQ ID NO: 645246 - DNA, 100 bp, Homo sapiens
gcgggatcccagcctcaggcgtgcgcggacggtgtgcgggaatatatgcagaacatgtcctgcggcccaagaatcttggacttgcacatcagaggcaaca

SEQ ID NO: 645247 - DNA, 96 bp, Homo sapiens
catcatcgctgttgtgcaaaagatgattgaaaattatgaagccctgttcatggagcgtgaggatcatccccggagaggacgggaggatcggcagca

SEQ ID NO: 645248 - DNA, 51 bp, Homo sapiens
cgaagaccccttttttgtagtccgaggacctagggcttcgggtccagcaga

SEQ ID NO: 645249 - DNA, 99 bp, Homo sapiens
cgagctgctggaggacgagggccagctgacggagatggtgcagaagatggaggagggatgatggcgccacttcctcagtttcggcactcaagcgcctgg

SEQ ID NO: 645250 - DNA, 82 bp, Homo sapiens
cagatgttggatatttgcttggaaaaacgtgtgggtacgaccttggaacatcatttacagcgagcaatttcagcacagcaag

SEQ ID NO: 645251 - DNA, 75 bp, Homo sapiens
aaagagagagatgctgctaaaaaggagccagcaccgctctttgaccttgccatgcttgccttagatagtccagag

SEQ ID NO: 645252 - DNA, 100 bp, Homo sapiens
gctgacacaaagctggatctacatttaaaggaagttattccaacttttgacatggctgtcaatgaaatcttctttgaccgttaccctgactcaatcttag

SEQ ID NO: 645253 - DNA, 90 bp, Homo sapiens
cctggacctaaaggtgctgctggcaacgggcatgaggaggtagttgcatgcgcctgggatggacagacatatatcattgatcacaaccgc

SEQ ID NO: 645254 - DNA, 83 bp, Homo sapiens
agctcttcggcccttcccggacagcgacgcagtcgcagcgcgcgccctaacacagagagaagaagaaggaggttcctgctgtg

SEQ ID NO: 645255 - DNA, 100 bp, Homo sapiens
gaaattgagtggtgggactcttacataatccccaatggctttgatctgtccaggtgcaggtacagcagtctccgcaacaggtctcggctcagctctcccc

SEQ ID NO: 645256 - DNA, 83 bp, Homo sapiens
ctcaaccaggtgtccaccatctgggacgataaccctgccccctccacccacgataagaaaaatggctacaaacttcctagcac

SEQ ID NO: 645257 - DNA, 82 bp, Homo sapiens
agaagaggaggaggcactgcctgagcagtcagaaggcaaagaacagaagatcctccttggaggctactcacagtcgaactac

SEQ ID NO: 645258 - DNA, 100 bp, Homo sapiens
ccatttctccgtcgattaaagagccatctgtggtgccaattgaaggttcatatttgaggctgtgggcttcattgtgagcagcgtgggacttctcctgggc

SEQ ID NO: 645259 - DNA, 87 bp, Homo sapiens
gcagtggtcgcttcttctccttgatttgaccgtaccctggggggcctggagatggagctccggcttcgagaacgcctggctgggctt

SEQ ID NO: 645260 - DNA, 100 bp, Homo sapiens
aattgctcaggactttaaaacagatctgcgcttccagagcgcagctatcggtgctttgcaggttgggggccgtcccgctcctaaggcaggaagatggtgg

SEQ ID NO: 645261 - DNA, 75 bp, Homo sapiens
catctttatgcaaagccagcgttacagtaatgttccaggtacaccagaggatcgcttcctggcagaatttgggag

SEQ ID NO: 645262 - DNA, 98 bp, Homo sapiens
gctgcgcggcgcggcggccgggccctcgagacggggacggtgacgcagctggaccagaggctggcactcatcaccgacatgcttcaccagctgctctc

SEQ ID NO: 645263 - DNA, 101 bp, Homo sapiens
gttggagatggctttacaagaaaaccacctaaatatgaaagattcatcaggccaatgactggatacacgtctgtttaactacgcaaaaggtaatgctggca

SEQ ID NO: 645264 - DNA, 98 bp, Homo sapiens
caggttgttggccacagccaattcaaaggaaggagtgggactctgggacattcgaaaacctcagagggtcgataaagacaggagtggagtgatatcag

SEQ ID NO: 645265 - DNA, 74 bp, Homo sapiens
tatgagactgcatcagaaatgatcttagttctggaataattatttgcatgggtgcaaaagaaaatggtttgccg

SEQ ID NO: 645266 - DNA, 100 bp, Homo sapiens
tacacatcccctgataaactaaaggggcaagattcttgccaagagaattaatgtgcgtattgagcacattaagcactctaagagccgagatagcttcctg

SEQ ID NO: 645267 - DNA, 125 bp, Homo sapiens
cagcgcggtcgtctgtaccctcccccgggagagcaagccgggcggcctgccccgccggagcagcatcatcaagatccaggaggctgcaagccagggcctgaaattcgttggtgttatacctcagt

SEQ ID NO: 645268 - DNA, 100 bp, Homo sapiens
tgagtctagctgcgtctggaggatatgttaatatcattaagattctgcttaatgctggggcagaaattaattcaagctgctagtacgagctggcttcaag

SEQ ID NO: 645269 - DNA, 102 bp, Homo sapiens
ccaagggctcctgaagcaggtcctcttccctcccagtgttgtccttctggaggccgctgcccgaaatgacctggaagaagcacgtatctcccatgcgccaag

SEQ ID NO: 645270 - DNA, 97 bp, Homo sapiens
gtgggtctacggaccttggctgacatatgttggtatgtgcgctgccaaccgtgtcagggaaacaccaagatctgaagtatgtcaacccagaaacagt

SEQ ID NO: 645271 - DNA, 100 bp, Homo sapiens
aacgagcgcaagtgcgtggaggaggcctacagcctcctcaacgaatacggcgacgacatgtatgggccagaaaagacaggtgctctagttcacagctata

SEQ ID NO: 645272 - DNA, 75 bp, Homo sapiens
agagctggaatctatgggattttcagctcgatacaatttcacacctggtccaatgatgcatcagcagcctccttc

SEQ ID NO: 645273 - DNA, 50 bp, Homo sapiens
aagcgagccgcgacccgagctgaggaatgtcgggtcctcacaattcaaaa

SEQ ID NO: 645274 - DNA, 98 bp, Homo sapiens
ggctctggataaggaccagtacctgcccaggaaactgagctcaggccccggggcctccagcggcaccagcggagaccacggtgagctcgtcgtccgga

SEQ ID NO: 645275 - DNA, 138 bp, Homo sapiens
cggtgggctcttctctcaactggcctcatgttcttttatcacttcagcgtcttgcagatcctcggcctgaacacacctaccctctcttccatatgacagcccttcagagacttgaagacagtgtgtgactctcctgtg

SEQ ID NO: 645276 - DNA, 89 bp, Homo sapiens
agaggatccagtgttcaccatcctggccccggaagcactctcgagtggaccctgaggagctcttcaccaagctcgaccgcattggcaag

SEQ ID NO: 645277 - DNA, 83 bp, Homo sapiens
tcaacggcaaagttttgcagatcttcaacaagaggacccaggagaaattcgccctcaaactgtttgcagacaaggtcccaaag

SEQ ID NO: 645278 - DNA, 90 bp, Homo sapiens
gtttgaggcgcgcgctctgggcaggaaatgctgctcatggattctcccttattcaggtggacaacacaaaggttaccatgaaggaaatct

SEQ ID NO: 645279 - DNA, 75 bp, Homo sapiens
gaacttctgcccagctctccttggaaacctggacaagcatgaagaactagaggagcttgtagcaaggttcttagg

SEQ ID NO: 645280 - DNA, 100 bp, Homo sapiens
ttccagcagcaacgctagtgtggcctggatgccaggtgctgatggccgagctctgctacagtcctgtacagttcagtttctcccgtacatcccagtccag

SEQ ID NO: 645281 - DNA, 90 bp, Homo sapiens
attttcagtggaaccactaccaccacgaccatcatctgatcagtctagcaggtgaatcttggaagcaaccagtaccttttctctgtcata

SEQ ID NO: 645282 - DNA, 100 bp, Homo sapiens
gccaccagcgcagcgctgccatggagcccagcagcaagaccatggtgaatccgggcagcagctcgcagccgcccccggtgacggccggctccctctcctg

SEQ ID NO: 645283 - DNA, 75 bp, Homo sapiens
gacgggacggacggtgatggtggtcgccgcggcggcgtgtgcgcccctcaggcatggaagaggagatggttcgtg

SEQ ID NO: 645284 - DNA, 90 bp, Homo sapiens
aacttggtggccagcgccgcgcccggggccgtgcgctctcgggccactcggccgcaggctgttgaagctcaaatccgaagttttggacag

SEQ ID NO: 645285 - DNA, 100 bp, Homo sapiens
cagctgcagagcaggctggagcccaagccccagccccctgtggctgaggctacaccccggagccaggaggctgcggttggatttctcacgatgtccagtg

SEQ ID NO: 645286 - DNA, 99 bp, Homo sapiens
gcttagtcatcacatcatttcactgtgattgaaaaggaagatcaggccaaccccaaagaagaagtgaccaaggaggagtttaaactgaatgaacaacct

SEQ ID NO: 645287 - DNA, 100 bp, Homo sapiens
gtggcatgagaggcatgaagggattggtctatgaaacatcagttcttgatcctgatgagttggtgacaaagttcctgctgatataaggttaacttccatc

SEQ ID NO: 645288 - DNA, 51 bp, Homo sapiens
ctggagggggacacctatgaccggtgagcaagaagaacccatcaggtgatt

SEQ ID NO: 645289 - DNA, 139 bp, Homo sapiens
agcagtcggcttctctacgcagaacccgggagtaggagactcagaatcgaatctcttctccctccccttcttggatgctgatatgctaactggtgatgagcaagtatggaaggaagttcaagaatccctgaaaaaaatt

SEQ ID NO: 645290 - DNA, 95 bp, Homo sapiens
gccaagcgcggccgccgcccccgcctcaggtgccagaaccctgtggagcatcatgaactgggaagagtagctgagccccagagcctctctggaag

SEQ ID NO: 645291 - DNA, 75 bp, Homo sapiens
tcaaagacaatatcaatgacaaactgacggaaaaggagagagagacccggtcagcccaaggagcaggggtccagc

SEQ ID NO: 645292 - DNA, 105 bp, Homo sapiens
gggaagtacatgtgtcgtatcatagttcattttatgtgggaggatgttcagcagcgcggcagagtcatgggggttgtagcagataccaatataagcgccatagca

SEQ ID NO: 645293 - DNA, 82 bp, Homo sapiens
gacgctaagttgctgatcgtggcgataacgaaggaggcccaacttcattcaataaggagcctgacggatttatcccagacgg

SEQ ID NO: 645294 - DNA, 50 bp, Homo sapiens
tgatgatgtcctcagtattgattcagggtacagccaaagaccggagcttt

SEQ ID NO: 645295 - DNA, 99 bp, Homo sapiens
gagttggaatttgtgcaatgtttagccaacccaaattaccttaatttaccttccactggaagaatctcaaacagcgctacttactcaggatcagtggca

SEQ ID NO: 645296 - DNA, 117 bp, Homo sapiens
aacaatgggcacttactgaaggccgtcttaaagttacgttgttagaatgtagcaggtccctccttgtggtccatttctgggcaccatgggctccacagtgtgcacagatgaacgaag

SEQ ID NO: 645297 - DNA, 82 bp, Homo sapiens
cttgggaaggattggacccatcagggcatcgctaagctgtaccataaagtgagccactctactgagatgaagaaagaaaaag

SEQ ID NO: 645298 - DNA, 83 bp, Homo sapiens
gtttaccggatctcagctccgacgcccgaggagaaggaggagtggattaagtgcattaaggatgtttcagcagcccctgagaa

SEQ ID NO: 645299 - DNA, 83 bp, Homo sapiens
cgggtggcttacagacgctgccagcatcgccgccgccagcatacagaaactgctgtaaaagaagaagttgtgggtattttttt

SEQ ID NO: 645300 - DNA, 100 bp, Homo sapiens
tcttccccagctctgcagccacatactatccgtttgttcaggaaccaccagtgacagagtttatgcagaaattatggcagttctaaagcatgacgatcag

SEQ ID NO: 645301 - DNA, 88 bp, Homo sapiens
gaagttggaagtgtctcttagcagcgcgcggagaagaacggggagccaggcatgttttccacaaatcctgcgtggatccctggcttag

SEQ ID NO: 645302 - DNA, 82 bp, Homo sapiens
cgtctgtctctgcggcttctggttctcacttgtcgcactatgttggccatggaaatgctatcaatgagctgaaattccatcc

SEQ ID NO: 645303 - DNA, 50 bp, Homo sapiens
gtcggacctgcacgagctgtctggacaagggcacacaactggttccgtta

SEQ ID NO: 645304 - DNA, 82 bp, Homo sapiens
ggccgcgctgcccgggccgcgaggacgaggcggcgccgccgggctgtggagtctctgctttctatccgtcaagatgataaag

SEQ ID NO: 645305 - DNA, 50 bp, Homo sapiens
gcgagtccccgccgccctcatcgtgtctgttcaaaccggcacggtctgat

SEQ ID NO: 645306 - DNA, 75 bp, Homo sapiens
gaccactttagaaactcaattaagtgccatgctatgtgtttgatgaagagttgaggaagcatgatctcaatcctc

SEQ ID NO: 645307 - DNA, 100 bp, Homo sapiens
tgaaggagaagaagatttgtttgtttctgccagtgaaaaccaccaaaacaatccagctgttccctcaggtgtgaaatctaagaatcccctgccaactctt

SEQ ID NO: 645308 - DNA, 96 bp, Homo sapiens
gtttgatactgacctgtaaatcatcctttaggtttccaatacttatctacaggaatcgccatgaccccagctctgagggaggcaacagcaaagggt

SEQ ID NO: 645309 - DNA, 100 bp, Homo sapiens
gctggttctgtatgagactagagctgcttgtaatgagccagtgctgcgccgtgttgctgtggacaagtgtgcaaggagagtgcggcaggctctggcaagt

SEQ ID NO: 645310 - DNA, 75 bp, Homo sapiens
ccgcaaacatgctccgccagatcatcggtcaggccaagaagcatccgagcggccccgtggttatgaatgtgcttc

SEQ ID NO: 645311 - DNA, 100 bp, Homo sapiens
ccagttgggtatcctcctcagtatccaccgacagcattccaagtgggtccatgagaattggaaaagactttattctttttacgaagaaggaagaaacgat

SEQ ID NO: 645312 - DNA, 87 bp, Homo sapiens
tggacccggccgaggcggtgctgcaagagaaggcactcaagtttatggataaggaagcctgtgtgggtaccaacaatcaaagctaca

SEQ ID NO: 645313 - DNA, 83 bp, Homo sapiens
tgaagctcaagttgctactcgggacgctgcacctcccgcgccgcacggtggacgagatgtgaagttcatttccaatccgccct

SEQ ID NO: 645314 - DNA, 75 bp, Homo sapiens
gtgcggtggttggagggattttggcacaggaaattgtgaagattgaaaaggctgtggtgtctcagcgcctgacag

SEQ ID NO: 645315 - DNA, 99 bp, Homo sapiens
aagaactgtacaagctgccctagtgggtatctcttagacttaggaatgtgtcaaatgggagccatttgcaaggatgccaattgcatgatttctggcgtt

SEQ ID NO: 645316 - DNA, 102 bp, Homo sapiens
gaagaataaggagaaggataagtcgaaggggaaggcgcctgaagaggacgaagctgacagtgaagatagtactgtgtccatccagataaaattagaaaatga

SEQ ID NO: 645317 - DNA, 92 bp, Homo sapiens
catgctggtggctctacccagaattcaattaaagtggctcaggttcaaaccttgtactactcagctgatcacaagctgcttgatgggaacct

SEQ ID NO: 645318 - DNA, 89 bp, Homo sapiens
tacattgaccacaacaccaggaggaccagctggatcgacccccgggacaggtgctggagaatctggtaaaagcaccattgtgaagcaga

SEQ ID NO: 645319 - DNA, 87 bp, Homo sapiens
ggatgctgtttggaaccaggattggggtggtcgcagtcacagctactcggactgcttgtattcaaatctgaacatcaatgatgtact

SEQ ID NO: 645320 - DNA, 73 bp, Homo sapiens
aagtcttcctcaaaataacaatccagagacgaggtcttgctacattgtccaggatggagaagtaggaattctt

SEQ ID NO: 645321 - DNA, 96 bp, Homo sapiens
ctctctcgaccccttctgcccggcgcttcggcccgggccgctcaggtgcaggcagtcgatgatgtgaagaaaggttacatcaaagcagaagaaaag

SEQ ID NO: 645322 - DNA, 100 bp, Homo sapiens
ggattccaagtaactcttatttgggactttgaacatgtcggggatcgccctcagcagactcgcccaggagaggaaagcatggaggaaagaccacccattt

SEQ ID NO: 645323 - DNA, 51 bp, Homo sapiens
agatcatcattaaggacggaggcacggttaaacccatccagagtaatggct

SEQ ID NO: 645324 - DNA, 97 bp, Homo sapiens
tggcaaaattactgtatatgcacatgctgggctaccctgctcactttggacaggaaagaccacagcaagattctttcattcgtctcctcctagcctg

SEQ ID NO: 645325 - DNA, 74 bp, Homo sapiens
ggcatttacagaaagagtcaacagcagtggcaacagcatcctgaggttagcattacacttctcccagtggagcc

SEQ ID NO: 645326 - DNA, 100 bp, Homo sapiens
ggcagcaccgacgaacccccaatgctgaccaaggaggagcctgttccagaactgctggaagctgagatgaagcgccctcagttcagcaagccgccaggag

SEQ ID NO: 645327 - DNA, 100 bp, Homo sapiens
caggcctgcagaggctgttctacaggggcaaacaggcaattgaagatgaaggtggtaatcctgacgaaattgaaattacctccgagggaaacaagaaaac

SEQ ID NO: 645328 - DNA, 75 bp, Homo sapiens
gacatgagatggtagccaacccctcaggggctatctgatgggttagagtgcctttgagaagaaatcagtggatac

SEQ ID NO: 645329 - DNA, 88 bp, Homo sapiens
caagcggaggcgcgcggaacagtcgccgaggcgattcccgcccagggcaagaagactatgaccggctgcggcccctgtcctaccagaa

SEQ ID NO: 645330 - DNA, 75 bp, Homo sapiens
agcaaatgaagcaactgaaaaaccccttggaaatagtcagcatacctgccgaaggagtaaaggtgctgcaatgat

SEQ ID NO: 645331 - DNA, 87 bp, Homo sapiens
ggccgcgagttcgaccagaaggcgctgctggagttccgcgacaccatcttcgacaacatcctcaagaacaccctgcagccagaagaa

SEQ ID NO: 645332 - DNA, 100 bp, Homo sapiens
cagacctggacctgcatcagggtcctgacttccagggagcccgtggcctcatcctgcatgactcgcctgtcccggtctcgtacagcctctctgaccagtg

SEQ ID NO: 645333 - DNA, 100 bp, Homo sapiens
cctccagaggcctgcacgcggggcgcgggccccgaaggctctccatcgaaggcaacattggcaaaccagaaccattggtgttccacattcctcagtcatt

SEQ ID NO: 645334 - DNA, 98 bp, Homo sapiens
gcggagatgaagaccacgccgccgcgcgccgggagctgctgagcctaccgccgccagagtccagttctaggaaaaatccgaaccgcagtgggcagtgc

SEQ ID NO: 645335 - DNA, 75 bp, Homo sapiens
ctggataagatgaccttcagtgtgctgctcaaaaacagggtttgaaagtattcttgaagggctgtttggacctgc

SEQ ID NO: 645336 - DNA, 100 bp, Homo sapiens
ctcctgggttatgctcaaggaagactagaggaggactacaaccagctgaggccactctcctaccccaacacggatgtgtttttgatctgcttctctgtcg

SEQ ID NO: 645337 - DNA, 75 bp, Homo sapiens
cagcctatggcctgttatttgtctcaacaaaagaataaaatcagtggttctggaagtaactctgatatgatggaa

SEQ ID NO: 645338 - DNA, 110 bp, Homo sapiens
aatgcatacttggaatgaatccttctagagacgtccacggtgctggagaatctggtaaaagcaccattgtgaagcagatgaggatcctgcatgttaatgggtttaatgga

SEQ ID NO: 645339 - DNA, 51 bp, Homo sapiens
caagaaggggagtgcccgcggcagccacaatggtgcgcatgaatgtcctgg

SEQ ID NO: 645340 - DNA, 80 bp, Homo sapiens
gtgacaatagaccgcagacacagggcccatcaccctaaggccaaaagtgtgatccaagctgtcccaatgggagctgctgg

SEQ ID NO: 645341 - DNA, 99 bp, Homo sapiens
tgtcaggcccctgttctgctgatggattgagatttgaacatggaattcaatccttcagatcatcctcgggccagcacaatattcctcagtaaatctcag

SEQ ID NO: 645342 - DNA, 75 bp, Homo sapiens
cacagagggagatgtcaggtgggagaaagctgtccgcaggcttgtccaaaaggaaacatcggaatgaccacttaa

SEQ ID NO: 645343 - DNA, 100 bp, Homo sapiens
tgagcagaacatcctggccctccgtagcatccaaggcagacaaagagtgagagccacgagccaaggtgggcacttgatgtcggatctcttcaacaagctg

SEQ ID NO: 645344 - DNA, 50 bp, Homo sapiens
gctgaggcagcgcggccgcagcagccctcctgtggccgtgggttctacaa

SEQ ID NO: 645345 - DNA, 74 bp, Homo sapiens
atccccatgaactaaataatctcctgtctaaattttcggctttgtgagaaaccttaccatcaaacacgatggcc

SEQ ID NO: 645346 - DNA, 75 bp, Homo sapiens
agtggaagcagaggcacccacgctcctacaataggctgaggggatctggcggtggagcgctaggatcagacgccc

SEQ ID NO: 645347 - DNA, 75 bp, Homo sapiens
gttcaatgggtagcctcaccatgaaatcacagcttcagatcactgctgagtcagtgctgattctctcaaatagag

SEQ ID NO: 645348 - DNA, 82 bp, Homo sapiens
gcctcacgagtcgaggtcctgcaggtggagctccggcagccgccctgattacaccaccaccttcactgtcagatccacttaa

SEQ ID NO: 645349 - DNA, 100 bp, Homo sapiens
ggcgcgccctgtgcccctgaagaagcgcggatacgatgtcaccaggaaccctcatctcaacaaggtaggtgatgctctgatgctgctgcctcttatgaat

SEQ ID NO: 645350 - DNA, 50 bp, Homo sapiens
cacggtgttcatcttttctacagtacagggaagaccatttgaagtaaaag

SEQ ID NO: 645351 - DNA, 100 bp, Homo sapiens
ctaagcaagtaaacagtgcacttaaacagaaaatggaaggtggaattgaagaattcaaacctcctgagcttatgttcctgaggaagaattgaaggcagca

SEQ ID NO: 645352 - DNA, 130 bp, Homo sapiens
gtccaaggcaagaactgaaaactctgagtgatgttcagaagtttgcagagataaatgtgccggtggtggtgtgcacattgagccccggtatagacagttcccccagctgaccagatcccaggtgttccag

SEQ ID NO: 645353 - DNA, 100 bp, Homo sapiens
acgtggggatttcagtaggaaacattatggatctgtggagctggctgggtgctggagtggcgctggctggctgtgctgggctgcgtgcccccctccctca

SEQ ID NO: 645354 - DNA, 75 bp, Homo sapiens
gcccactcgcctcacctgagcctggacccatcctcatgccaacaaactacccttgaaggattctttcacttacga

SEQ ID NO: 645355 - DNA, 82 bp, Homo sapiens
cgcccagccaagacatggaaatgcccctcattaaccagcacaaacaggttgatgataattagaagcatgctttccactgaac

SEQ ID NO: 645356 - DNA, 100 bp, Homo sapiens
cccagcagcacagtcaacaaatggcacgcatgcgtcctatggacccttctacctggaatactctcttcttgcagaattgcgccttggtgctgaattgggg

SEQ ID NO: 645357 - DNA, 100 bp, Homo sapiens
gtgccgcctccctccggaggtgcgcggaggcttggtgtgccaggtcaaaatgcagatcttcgtgaaaacccttaccggcaagaccatcacccttgaggtg

SEQ ID NO: 645358 - DNA, 100 bp, Homo sapiens
agcattcaaaatcaatgaactgaaagctgaagttgcaaatcacttggctgtcctagagaaacgcgtggaatatcaggatcctcatgaccagccaaagaga

SEQ ID NO: 645359 - DNA, 83 bp, Homo sapiens
caagcacgccgtgtccgagggcaccaaggcggtcaccaagtacaccagctcgaatttggatgctcttccaagagtcacatgtc

SEQ ID NO: 645360 - DNA, 83 bp, Homo sapiens
ccccgtaccaagccgagggcaactttggaggccccctggaaggctttaggatccagaaatgactgctgtccatgcaggcaaca

SEQ ID NO: 645361 - DNA, 74 bp, Homo sapiens
gtctgtctggtgataccaggggcagagggaccactctgacaggttgggagccacgtgtaccagtgtgtgttgat

SEQ ID NO: 645362 - DNA, 100 bp, Homo sapiens
aagatgggggatttctacgacccggagcacccgacccctgaaaggaagaggcccagcagaagggactcgctgagccaccccccgccccactccatgttgg

SEQ ID NO: 645363 - DNA, 75 bp, Homo sapiens
cagattcgcagtggtcgcttcttctccttggcatccgtgtacaagatttgcagagaaatgtatgacgatggagtg

SEQ ID NO: 645364 - DNA, 76 bp, Homo sapiens
caggattaacaccttaaagttccagaaagattttgaggccgttgctccagggagaactgcaaatatcttcatccac

SEQ ID NO: 645365 - DNA, 82 bp, Homo sapiens
ggagataaattcccggaaccgcgattcggcgtgtcagaatagcctaacatggcagaccagagacagcgctcactgtctacct

SEQ ID NO: 645366 - DNA, 101 bp, Homo sapiens
tgaaggagcaaggctgaagaaccagacctggactttcttaggcagtagtctcctgactggcccagagggacttttggccaaagaacgagagaacttaaagc

SEQ ID NO: 645367 - DNA, 90 bp, Homo sapiens
accccttgaccagcacacactgcaaggagatcaggttggtgttcgaggaagagacattgttgttcttggtgtggagaagaagtcagtggc

SEQ ID NO: 645368 - DNA, 100 bp, Homo sapiens
ttagtcacaagcctggtggagagccaaagatcaaaacaaactcaaccagaactcccagctgagccacagttatcaggagaggagtccagctcagaagatg

SEQ ID NO: 645369 - DNA, 82 bp, Homo sapiens
cctgcgtcgccgggaccctcgcgcgcgaccgccgaatcgctcctgcagcagagaagtttgcctgcaatggtactgtaattga

SEQ ID NO: 645370 - DNA, 113 bp, Homo sapiens
gggccatctaccagtgcttcgtgtggagcggcacggctgaggcccgcaagcgcaagggtgagcttgtcggccacagactgctacattgtgcatgagatctacaatggggagaa

SEQ ID NO: 645371 - DNA, 88 bp, Homo sapiens
agaatggcagattcaggagagagtttgtgccagaatgaagagcttcgaaacttgtctttgtctggccatgtgggatttgacagcctcc

SEQ ID NO: 645372 - DNA, 83 bp, Homo sapiens
cggcggcgctccaggtgctgacagcgcgagagagcgcggccctcaggagcaaggcggcgccatgtcagaaccggctggggatg

SEQ ID NO: 645373 - DNA, 98 bp, Homo sapiens
tccctctcgggcgactggtaccgcaggaaccagatatggtccggaaaaagaacccccctctgagaaacgttgcaagtgaaggcgagggccagatcctg

SEQ ID NO: 645374 - DNA, 80 bp, Homo sapiens
gaaaaagtgctcctgggactccaggataccaggtgattctcatctaaatgttcaagttagcaactttaaatctggaaaag

SEQ ID NO: 645375 - DNA, 98 bp, Homo sapiens
tgcatcccagccatcacctggatttacctgttttctgggagcttcgaaggttcctcatgccatgcacctgctgtcacccagcatgcaccctattttaa

SEQ ID NO: 645376 - DNA, 100 bp, Homo sapiens
ttggactgtgacaagatggacaaggcctgcatgggcggcttgccctccaatgcctactcggccataaagaatttgggtacaggtttgcagattccgccag

SEQ ID NO: 645377 - DNA, 90 bp, Homo sapiens
ggagtccctgttcgtacttacacccatgagatatgagggaaggcaccattggagatatggctatcctgggtataacagaaagttttcaag

SEQ ID NO: 645378 - DNA, 98 bp, Homo sapiens
ggtgatgcctgggtgaagaagtatgatcgctcctccctgcggaccctggggtcagggaggcttgtggatcagaatctgaacaaaattgggaaagatga

SEQ ID NO: 645379 - DNA, 93 bp, Homo sapiens
cagatcgccggggaggcagcgcgggatcccagcctcaggcgtgcgcggacggtgtgcgggcgcctgtgtctggcagagctggtgtgagacgag

SEQ ID NO: 645380 - DNA, 100 bp, Homo sapiens
actttaaagcatgatttaaagtcgggcctcatcacttcctttgctgtggacatccaccaatgctggctctgcattggattgatctgaagttaaacaaaaa

SEQ ID NO: 645381 - DNA, 100 bp, Homo sapiens
gttgtggatgcactaagcattgtctgccagcttcgtatggatagctggcctgggagcagaagtttcggtgaggagcactagaaacacggctccaccccag

SEQ ID NO: 645382 - DNA, 74 bp, Homo sapiens
gcttttgtaacggcattgctttttgctgtacatcctattcatactgaggcggtgtttggagaagagggattgac

SEQ ID NO: 645383 - DNA, 100 bp, Homo sapiens
aggacatccgggcccggaactacaagctgcgcaaggtgttgaaagacagagaagcgaagacagagacgtggaaagacagggagagagacacggagagaga

SEQ ID NO: 645384 - DNA, 100 bp, Homo sapiens
tctgagggtcaagaattgccgcttccttttagttactggatacccacccaccatcccagggtctacaacatccacagccggaccgtcacccgctatcctg

SEQ ID NO: 645385 - DNA, 75 bp, Homo sapiens
tctcttttctttcagtctgcaactgtgtctgatggcgtaagactttgaccccgacgcaggcttcagtgattgccg

SEQ ID NO: 645386 - DNA, 100 bp, Homo sapiens
tccacgctggactggtgcgaggagaactactccgtgacctggtacatcgccgagttctgtgattcgcaaggggtggctcaccatcagcaacattggcatc

SEQ ID NO: 645387 - DNA, 100 bp, Homo sapiens
ctgttgcctgggggcacacaggtgctggatggtacctcggggttctctcctgcccccaagctggatgcaagtgctgctggaccaggcgggctgctgtatc

SEQ ID NO: 645388 - DNA, 139 bp, Homo sapiens
ttcgggccgagatgtctcgctccgtggccttagctgtgctcgcgctactctctctttctggcctggaggctatccagcgaggtgcttcccaaggaccgtagatgcctctctagagcatgagctcaggcaagagtgcccg

SEQ ID NO: 645389 - DNA, 115 bp, Homo sapiens
tggaattctaatttgaaccatgtttggattgaagccgcctctgtattacttaccaggtgagaagccctaccactgcaactgggacggctgcggctggaagtttgcgcgctcagac

SEQ ID NO: 645390 - DNA, 95 bp, Homo sapiens
agcggacgccggtctctgttccgcaggatggagccactggaagtggggaaatggtctgtacaatatgtcaagaagagtattcagaagctcccaat

SEQ ID NO: 645391 - DNA, 75 bp, Homo sapiens
ccgggggtgacagctccgggaccggccgaaaggcgaggaaccggcagttcaattaacctccagaagatggctgaa

SEQ ID NO: 645392 - DNA, 82 bp, Homo sapiens
aaagtcatcaagctagtggacatcacggacatccagaagtctctgctttctatccgtcaagatgataaagtcgtgtgcccga

SEQ ID NO: 645393 - DNA, 100 bp, Homo sapiens
gccaagccagatgcagattccaaaagaaacggacagaccagagatttgttttatgaaaggtgcttacgaacaagtaattaagtactgtactacataccag

SEQ ID NO: 645394 - DNA, 75 bp, Homo sapiens
gcgaaatccattgtcttccaccgaaagaagaatcttcagactgaaactgttgaggagcccatggaggaagaagaa

SEQ ID NO: 645395 - DNA, 83 bp, Homo sapiens
gccgcgggacctctccgggccatggaggctgggaggcggcagaatgcagccagaggagggcacaggctggctgctggagctgc

SEQ ID NO: 645396 - DNA, 75 bp, Homo sapiens
ggagatggttcgggcctagcggagccgggactggaggttatccggtgttggctcctgctgcttactatgaccaaa

SEQ ID NO: 645397 - DNA, 75 bp, Homo sapiens
cttcaggattgagacccggaaggcttcaaaggctgtcgcaaggaggaagatccgtgggcgtgagcgcttcgagat

SEQ ID NO: 645398 - DNA, 100 bp, Homo sapiens
gagaagaactcataaacttggcttcctcgcttctgctcctcaggagaccaagacacattccaccccagtggggggtcccataccactcatggatctgaat

SEQ ID NO: 645399 - DNA, 100 bp, Homo sapiens
cttggaggaggtatgcctggactgggccagctccagtcagcccggtcaagcatgacagcaactcaaactcggcaaacttccaagacgtggaggacatgcc

SEQ ID NO: 645400 - DNA, 106 bp, Homo sapiens
agggcctgcagcgggagctggacggcgagcgcgagcggcgcgagaaacacttgcacctcctgcgccgccgccccccatccaaggatatgccttcaagcctccacct

SEQ ID NO: 645401 - DNA, 100 bp, Homo sapiens
gaacacgactgcgagccgtcggaccctgagcaggagacgcgaaccaacatgctgctggagctcgcaaggtcatccctgagctgaacgggaagctcactgg

SEQ ID NO: 645402 - DNA, 83 bp, Homo sapiens
agaagatctgggtgcccgtggaccacaggccctcgttgcccagatgattgtcagtggcttcgccccgaggagagctgactgcc

SEQ ID NO: 645403 - DNA, 98 bp, Homo sapiens
tagactccatctcctgcactggaaatgtgaatttcactgtgagcgcagaggcactagagtctcaagagctgtgtgggactgaggtgccttcagttcct

SEQ ID NO: 645404 - DNA, 101 bp, Homo sapiens
ctcagacgcctcacttaggacaaacgttccatcctcagagcagcctgaactgttcctaaagaaacttcagcagtgctgtgtcatttttgacttcatggaca

SEQ ID NO: 645405 - DNA, 82 bp, Homo sapiens
ctgggattcaaatgaaagtgaaaatgttagaagaactcgtgagccggattgatggatgccggctccaggagcagcagtggag

SEQ ID NO: 645406 - DNA, 75 bp, Homo sapiens
gaaaggccaatttcatgaatttcaagagagtaccattggggattctgcttctcagaagatgcactattatagata

SEQ ID NO: 645407 - DNA, 101 bp, Homo sapiens
tgacagccctgtgtgacaccaagataagtaacatggagttttgctgtgttgcccaggctggagtgcagtggcacaatctcagctcagtgcaacctccacct

SEQ ID NO: 645408 - DNA, 75 bp, Homo sapiens
ctgtgctgcgcgacccccgcgcatgatgtgaagttcatttccaatccgccctccatggtggcagcggggagcgtg

SEQ ID NO: 645409 - DNA, 100 bp, Homo sapiens
gtcttccccagctctgcagccacatactatccgtttgttcaggaaccaccagtgacagaataaaggctggtggtgggagaatgctatcgctgccctgttt

SEQ ID NO: 645410 - DNA, 140 bp, Homo sapiens
aagacctgcgtcctttttcgtttttcggatgatgccttcaatactacctttatttccaccataggttgaagaagaggatgaacttgaatctggagaccaagaggatgaggatgatgaaagtgaagatcctggcaaggatc

SEQ ID NO: 645411 - DNA, 51 bp, Homo sapiens
cattgcaagaatacttttctgagaattgtggccttgtttcctaaagatgtg

SEQ ID NO: 645412 - DNA, 75 bp, Homo sapiens
cgcgccgccaccgtctgaactaggatgtcccgacatgaagggaggaaataatgctggccatacagttgttgtgga

SEQ ID NO: 645413 - DNA, 100 bp, Homo sapiens
tccgctctcttcggctgccccaatccccggcagctctctcagagacaaagcatggaggacacaagaatgggaggaaaggcggactctcaggaacttcatt

SEQ ID NO: 645414 - DNA, 98 bp, Homo sapiens
gtgagaaaacggctgcatattggtgtcaaagtgtcactgaactaaaggctgactttccagacaacgaaaatgactcaggcactttggacacggtaggc

SEQ ID NO: 645415 - DNA, 98 bp, Homo sapiens
gcatctaatgttcttagtgacattagtacatcgggctggggagtgactccgtgtgtgcccggccctcgtctcaccgcataaagtcttttgactccctt

SEQ ID NO: 645416 - DNA, 100 bp, Homo sapiens
aaaaaacttcagcatgtgccaggaacacaacctcaccttgatcagagttctatatgaagggaaagaacggcttattccaggatgtgaagtgatcctagcc

SEQ ID NO: 645417 - DNA, 101 bp, Homo sapiens
gcgttacaaaacatggagattaaagaccagggagcccaaatggagccgctgctgcctacgaattctgcttggtcagaatcgtgatggcattgtgttcagca

SEQ ID NO: 645418 - DNA, 78 bp, Homo sapiens
acatctgcattatcgtgctgaatttgggtgaggaggaaggagaagcagatgaagaaactgaggttcagagaggttaag

SEQ ID NO: 645419 - DNA, 100 bp, Homo sapiens
cttcgtggccgcaacctgcggcccatgcgggagcggactgctgtccagatcccagtgatggccttggtagggaatgatgctggctggacacagatttctc

SEQ ID NO: 645420 - DNA, 100 bp, Homo sapiens
tcatcaaggagagcgaagtcaaggccctgtgcgctaaggccagataatgctaagtttgcaacagagagcacagaaacgtgcaagttacatcttgcgtctt

SEQ ID NO: 645421 - DNA, 100 bp, Homo sapiens
tctgggtgacacgctgggggtcggcaccttcggcaaagtgaaggagtaaaagccaccaccagtctgtgcgaatcggaactgcatggaaaacccaattact

SEQ ID NO: 645422 - DNA, 82 bp, Homo sapiens
gaagcctttaaatgcagcatctgcgatgtgaggaaaggcacctccaccaggttacccatgcagttgttactgtaccagccta

SEQ ID NO: 645423 - DNA, 98 bp, Homo sapiens
ctacggcgtcatggaggagatccggcggcagggcaagctgtgcgacgtgaccctcaagatctacgaactgcgtgtgatggagaccaaacccgacaagg

SEQ ID NO: 645424 - DNA, 100 bp, Homo sapiens
gctcagagaagcctgtataaagatgtcatgatggagaattatggaaacctggtctcactggaccagcagaagtagacactgtggatgcattccagggtcg

SEQ ID NO: 645425 - DNA, 90 bp, Homo sapiens
gctctgtctgccggttcttgaggggtgacagtccaaagattgacttggccggcagttcgctatctggcatcctggacaaagatctctcgg

SEQ ID NO: 645426 - DNA, 75 bp, Homo sapiens
gcaggactgggcacagcatgagatccaaaggcagggcaaggaaactggccacaaagcactgacacggctcccggg

SEQ ID NO: 645427 - DNA, 96 bp, Homo sapiens
gaaaacttccagaacctggcctcactaggaacccaagccagaccgtctccttgtattgaaagtactatggaatgatttcctgatgtgctactcctc

SEQ ID NO: 645428 - DNA, 103 bp, Homo sapiens
ggaagaccgcgcgcagggcctgcagcgggagctggacggcgagcgcgagcggcgcgagaaacggggatctgacgagcttttctctacttgtgtcactaacgga

SEQ ID NO: 645429 - DNA, 89 bp, Homo sapiens
tggcacttcagagggtacgggaagctgctgaaaaggctaaatgtgaactctcctcatctgtgcagattccaaacagaggcattgattta

SEQ ID NO: 645430 - DNA, 98 bp, Homo sapiens
cggtgatgaagaatccccccgaaaggaccccccagaggggcttctgaacaatgccagggatacaagtgtcatggatactctaccactgaatggtaacc

SEQ ID NO: 645431 - DNA, 100 bp, Homo sapiens
cattccaaatctgggaccagtctcggcaaatattacacttctctccttgtttccctaggacttctgcatgcccatgccacacatatcctgtggcccccag

SEQ ID NO: 645432 - DNA, 98 bp, Homo sapiens
caagatagaccccagcgccttggtgcagaagctggagctggacgtgaggagtgtcacttccgtcaggagaggatgctccaggatgaaacgccataggc

SEQ ID NO: 645433 - DNA, 100 bp, Homo sapiens
gggaggcaagaagaagaaggatcctaatgctcccaaaaggccaccttgttgccacctcctccctttcatggttccatcagccgccttcatcaaatcaaac

SEQ ID NO: 645434 - DNA, 83 bp, Homo sapiens
cagccgccgccgcagcgcgaacatggacgccgtcaacgccttcaaccaggagtgcagagcagagcgggcggaggaccccgggc

SEQ ID NO: 645435 - DNA, 100 bp, Homo sapiens
aaacagtgcattggaggaacgggaacaagagaagtttaatctgaaagaagaactggaacgttgtaaagtgcagctggagaatgtcagaatattaataaac

SEQ ID NO: 645436 - DNA, 50 bp, Homo sapiens
gtcaaactacctctcagcagggttattcaaggacacggaaaagccaacac

SEQ ID NO: 645437 - DNA, 59 bp, Homo sapiens
ctccgcccggcagctgccccgtctgagaaacacgttggtcgtcattgcctccgagccca

SEQ ID NO: 645438 - DNA, 75 bp, Homo sapiens
cgaaagtggattttgtgcaatttgacagctgcagaaccttggcctgaaaatgctacattatatcagcaattgaaa

SEQ ID NO: 645439 - DNA, 82 bp, Homo sapiens
cagtcgcgaggttcgagtgttgcagagcctgcggggcaagatctctcccgaaaagcccgtgaaacaagaggaaatggctgcc

SEQ ID NO: 645440 - DNA, 100 bp, Homo sapiens
gcttcccctgaccccttaggccctccccctgcaggtgccctcgcgcccctcccggggtccccagggtgcggggggcaatggcactgcagctctgggccct

SEQ ID NO: 645441 - DNA, 101 bp, Homo sapiens
agcagccaaggtgtttccaggaagttcagagagaacagggccctcatctttgtgtcccatggagccggagagcacagtggccgctatgaagagctggctcg

SEQ ID NO: 645442 - DNA, 100 bp, Homo sapiens
ggccccagcagcccccgaaggccctatcaggacatggagtatgaaagacggtttgtgaaatggctgctgacatttctgaatccagcggggctgactgcaa

SEQ ID NO: 645443 - DNA, 100 bp, Homo sapiens
ttgacagcatgttggttcaggccctgaagtctggagactggcttctgatggacaatgttaacttctgcaagagcaagaagatttgtgaccttggattttg

SEQ ID NO: 645444 - DNA, 78 bp, Homo sapiens
agccaccccgcgggatacgcctcagcgcggctatgactttgcagccgtcctggagtggttcgcggagcgtgtggaccg

SEQ ID NO: 645445 - DNA, 100 bp, Homo sapiens
gacatgtatgaagtcggggcagagagtggccgctactactgtctgaacgtgcccctgcgggatggcattgatgaccagaactctgaagcggctcatggca

SEQ ID NO: 645446 - DNA, 100 bp, Homo sapiens
ggaccaacaaaaactaaaactgcaggtccaggaggtgaagctgtcatagctctaagtaaggacagcaggatgcatcaaaatcaaatatgtgaagggaatg

SEQ ID NO: 645447 - DNA, 132 bp, Homo sapiens
gcgggggcgaggttcgggctggttgttccgttgcgagctgcagctgcgatctctgtggtaggcccaggctgaagccgacgtagcttctctgaacagacgcatccagctggttgaggaagagttggatcgtgc

SEQ ID NO: 645448 - DNA, 75 bp, Homo sapiens
ccgcacccgcctccggcggggctctcagacctgcctagagctggaacgttacctccagagcgagccctgctatgt

SEQ ID NO: 645449 - DNA, 98 bp, Homo sapiens
ttctaatgggtgttctgaaggaagttgtaagacagagatcagatttaaaggtgagtttggctactgtgatttttgttgcaagtcagaaggcattgtct

SEQ ID NO: 645450 - DNA, 74 bp, Homo sapiens
ctccaccaaaaaaatacgaaaaccagtcaggcgtggcgccaaagctggactgtactgctgccatctcggctcac

SEQ ID NO: 645451 - DNA, 100 bp, Homo sapiens
ctgaggggcggccgggcagcgccgccaccatgttcctgggcaccggggagccggccttggacacgtgcaccaattccagctggacatcactgtgaaaatg

SEQ ID NO: 645452 - DNA, 90 bp, Homo sapiens
cttcagcatcgagctgctgttatcccaccaatgatgccaattctcggaagcaagaagcagagtggaaagaaaaggcaataaaggagctag

SEQ ID NO: 645453 - DNA, 83 bp, Homo sapiens
gcctaggcattttgctgtctcctcctaatacgattccatactcagccacttccaaagcctctcctatagcctggctgagcgat

SEQ ID NO: 645454 - DNA, 135 bp, Homo sapiens
atgacgtcatgatgccccagcgggtgaggctgcaacacgaggctgccgttcagcacccgtcgagcttgtcgccgtgatcctgaaggcgctgacctacgacgagaagcggggtgcctgcagcgtgggcaccaacgt

SEQ ID NO: 645455 - DNA, 76 bp, Homo sapiens
ctgagctggagctggagctgtcggaaggatgctccaggatgaaacgccataggcctgtcagcagcagtgacagttc

SEQ ID NO: 645456 - DNA, 96 bp, Homo sapiens
ccgcggctagccccttcccacaggctctctccgctcgattttgtcaccgttatgtgggaagcgaatccaatccaacttagaaataatgtttcattc

SEQ ID NO: 645457 - DNA, 74 bp, Homo sapiens
cagtggtcgcttcttctccttggttgaatgtcaaagctttcattagcaatgtgaagacagctcttgctgcaaca

SEQ ID NO: 645458 - DNA, 100 bp, Homo sapiens
ctctaggccttttagaaaacatggagcctcctcaacaagcccaagagtgagatgaccccagaggagctgcagaagcgagaggaggaggaatttaacaccg

SEQ ID NO: 645459 - DNA, 98 bp, Homo sapiens
atccgcatcaacaagatgttgtcctgtgctggggctgacaggtggacccaagagccatatcagtgctagcaaaatggcagaattcatatagcatcaaa

SEQ ID NO: 645460 - DNA, 100 bp, Homo sapiens
tttgatctctcctgcatgggtttccagggaaatgggtttccagatagacttgcgtctacagaacaaacagaggacatggatttgattgacatactttgga

SEQ ID NO: 645461 - DNA, 83 bp, Homo sapiens
gagagcgcgggcctctaggaaggtattagaaaactactcggatgctccaatgacaccaaaacagattctgcaggtcatagagg

SEQ ID NO: 645462 - DNA, 50 bp, Homo sapiens
ccccgccccgtcgggcctcacgaggtgtgggttgctgaccgaggaaataa

SEQ ID NO: 645463 - DNA, 82 bp, Homo sapiens
ccagaccctggagcctcagttggaagcagccgatccagcctgcggagcctgtggggcaggtcaaggaagctgatccgctgag

SEQ ID NO: 645464 - DNA, 100 bp, Homo sapiens
ggcccctctacatctacagaaaccccctcacggggctgtgcaggattggtggtgactggtgtgatccctcacatccacaaatctctgattggaaagaagg

SEQ ID NO: 645465 - DNA, 100 bp, Homo sapiens
ctgccctcgccgcccgccgggcgctctcgcttcagtcagtcgggccgcgccgcgcctcagctctgattcgctcagcttattttgagttagtctctgcatt

SEQ ID NO: 645466 - DNA, 89 bp, Homo sapiens
tactactgaaagtgcaatatttgagtatcactgcgagaatgaagaatccctccattgttggagtcctgtgcacagattcacaaggactt

SEQ ID NO: 645467 - DNA, 50 bp, Homo sapiens
ggtggcagctgctgagttctcggtgaagttaccggtattgtaagaacaag

SEQ ID NO: 645468 - DNA, 100 bp, Homo sapiens
tgctgcagccggccctggcccacgggctggctttggggctcgtgattgccacgctggggaatatcaggtctacgaccccttccgctttgacccagagaac

SEQ ID NO: 645469 - DNA, 82 bp, Homo sapiens
caaccattgacgccatgtcgggttattcgagtgaccgagaccgcggccgggaccgagggcatcagtgtttttctgaccgaag

SEQ ID NO: 645470 - DNA, 100 bp, Homo sapiens
gctgtggagacggtgacagattctagccgctactttgtaatccggatccaggatggtactggtttttgccaatccagaagactgtgtagcatttggcaaa

SEQ ID NO: 645471 - DNA, 75 bp, Homo sapiens
tacctgcagaaggtctctggagacatcttcagcaggactggaatgtcacgtggaataccagcaaccccgacttca

SEQ ID NO: 645472 - DNA, 75 bp, Homo sapiens
aaggcaaagagcaatgagtatagccagtattttgaccaacaccatggaaggttatcaatactctggctgaccatc

SEQ ID NO: 645473 - DNA, 100 bp, Homo sapiens
gcgcgacctgggctggctccgggggtggcgggcgcagctgctgtgacagactgcaggcacacagtttggaagggctctgcctttgctgctcttcatagag

SEQ ID NO: 645474 - DNA, 50 bp, Homo sapiens
cggccacgcgcggcgccgctcgaggactactgagcccagccaggctgtat

SEQ ID NO: 645475 - DNA, 98 bp, Homo sapiens
tccagtgaccctgagcgcaccctggaccccaactcagccttcctgcataccctggaccagcagaaacctagagtgcggggatctgatgagcttctttc

SEQ ID NO: 645476 - DNA, 75 bp, Homo sapiens
cctgggatgtggccaggcttcagtcactggacacaagctttctgggacgcgcgggcggccatgcgccccttcgac

SEQ ID NO: 645477 - DNA, 48 bp, Homo sapiens
cttcctcctcctcccgcgacgttggaaaatggatataccttatttgat

SEQ ID NO: 645478 - DNA, 100 bp, Homo sapiens
gtaaaagatgttctgaagactttagtcctctctcacctgatgtgcctatggattctgaacacaagcagtttgctctgtgactgccatttgaagtggctac

SEQ ID NO: 645479 - DNA, 87 bp, Homo sapiens
gtggcatattctaagaaatgggactttacagctttgatcgatttctgggataaggttatcaatactctggctgaccatcatcatcgt

SEQ ID NO: 645480 - DNA, 101 bp, Homo sapiens
tgaccttacaagtatccccgttcgccaccaattatgggagggctggccaacttctgctacagacgactcaatcatatactcctatgaaaggaggaatctcc

SEQ ID NO: 645481 - DNA, 82 bp, Homo sapiens
cttcaacccgcaccttgtgttccggaagttccaggttcgtgctggccgtgggcagcgccgtctttgatgccatgttcaacgg

SEQ ID NO: 645482 - DNA, 100 bp, Homo sapiens
tgatgctgaagctgtgcaccgaggtccgtgtggccaacgagctcaacgccaggcgccgctcctttacaggcagttcaattaacctccagaagatggctga

SEQ ID NO: 645483 - DNA, 96 bp, Homo sapiens
accaacaacaccacaataatccacagccaaggttaatgttgaagaaggaaaatgcggaagtcgtcatttgacaagttttataaatgagtatttgaa

SEQ ID NO: 645484 - DNA, 73 bp, Homo sapiens
ccgcggcgatgactcggacccagagacttttcttggtctcctggtggtaacataatcgccttctgggtgcctg

SEQ ID NO: 645485 - DNA, 82 bp, Homo sapiens
ccccagttctactcaagccttattgaagagataggaactcttggttgggataagttcttgcacgcattgcaaatgccacgag

SEQ ID NO: 645486 - DNA, 75 bp, Homo sapiens
caccatcttcaggtcctactccaggggcgctcagccctgggcgctgcctatggcacagccaagagcggtaccggc

SEQ ID NO: 645487 - DNA, 105 bp, Homo sapiens
gcctactcgcccgccaccctgcgctgccgccgctctgaggagttaaaggaccaaaagatctcagattgctataactgaaggtatatttgaacttccaaatctcac

SEQ ID NO: 645488 - DNA, 100 bp, Homo sapiens
ccggggggagcgcggggcgacgctggctgcagggacccggtgacagcgtgagaggtctcctttacagaaaggggcttggataaggaggaaagaccatcag

SEQ ID NO: 645489 - DNA, 98 bp, Homo sapiens
tagtcagtctgggatatggcatcgtcaagggcaagctctgtgtgattgattggaagacatcagagaaaccaaagccttttattcaaagtacatttgac

SEQ ID NO: 645490 - DNA, 90 bp, Homo sapiens
aaagtcattgcagtcgtcaacaagatggtgagcatgatggagggtgtcatccagctctttccaacaactgatcctgtgggtactttgctc

SEQ ID NO: 645491 - DNA, 83 bp, Homo sapiens
agaacaaccgctataagtccatagatggctcagacgagaccaaagccaactggatgagatgcctgaggaaacccagacccaag

SEQ ID NO: 645492 - DNA, 80 bp, Homo sapiens
gagtggcggacgggctcccgctggccgcctcgatgcaggaggacgaacagaacttttgcgactttcaggaccagtcatgc

SEQ ID NO: 645493 - DNA, 82 bp, Homo sapiens
caagatgctggaccgaggcctggatcccaatttccacgacccggagaccggagactccatcaagaatgctggaggaagggtg

SEQ ID NO: 645494 - DNA, 51 bp, Homo sapiens
ttgtaaattctccttttaccaaggtttcctatcctgggagcaggagagtgt

SEQ ID NO: 645495 - DNA, 100 bp, Homo sapiens
attggctgtgaagctgcagacttataagacagcagtggaggttactatgggcaaggcggcatgagtggaggtggatggcgtgggatgtactgaaagcaaa

SEQ ID NO: 645496 - DNA, 74 bp, Homo sapiens
tgggattataggcgtgagccaccgtgcctggctgaagaccctacagcttggggcctgggctcctctgaccatcc

SEQ ID NO: 645497 - DNA, 88 bp, Homo sapiens
ccccgggcagcccgggaaatctccaagtcagaaagtctattatcctcccagtccacaacgctgaaccgtggctggacgaatgtttgag

SEQ ID NO: 645498 - DNA, 100 bp, Homo sapiens
ccaagatgtcgcagacggccatgtccgaaacctacggaggcaagtgaggcctatctggttggcctttttgaagacaccaacctgtgtgctatccatgcca

SEQ ID NO: 645499 - DNA, 143 bp, Homo sapiens
gagcattgtgtgtgccatttgccttggtttagctggaaaacctgctttcatgggacgagcagataagctgtcaccactgactaaagaagagaaaactgcggcagagcaattcaaatttcacatgccagatttatgaagaaatg

SEQ ID NO: 645500 - DNA, 83 bp, Homo sapiens
gtctttggttataaattatgatctacctaccaatcgtgaaaactatattcacagaaagttcaggagccctggaaaggagaagg

SEQ ID NO: 645501 - DNA, 100 bp, Homo sapiens
attgtagaattgcaaataatcctggaaaagtacttggcaggagtgtatctcgcagtcagcagtgaaaacaaagttcgaacagcacactatcagagctaaa

SEQ ID NO: 645502 - DNA, 83 bp, Homo sapiens
gttggaagcagccgatccagcctgcggagcctgtggggcaggttttccggacagacttgatcacagccatgaagatcccggac

SEQ ID NO: 645503 - DNA, 75 bp, Homo sapiens
cgtgcagcacatgcaccggcagaagccgcccatcatccacagggacctcaaggtttggtgcacctcgatttggag

SEQ ID NO: 645504 - DNA, 90 bp, Homo sapiens
tggaactaacacagcaacttccagggtctcatgttgaagactttatggctccattgatatcttgatgatggggtatacctgagaggacag

SEQ ID NO: 645505 - DNA, 73 bp, Homo sapiens
ccgcctcccgcgtgggcgtcccggagcctggccagctgcacttcaaccaggtggagtctttcattttggatca

SEQ ID NO: 645506 - DNA, 80 bp, Homo sapiens
aatggaacaggcttgagaaacaggtaaacattataccagtgattgccaaagcagatacggtttctaaaactgaattacag

SEQ ID NO: 645507 - DNA, 97 bp, Homo sapiens
acagggaacagccagacgagagcttcagccatcacgaggatgatttcggaacctggagaaaatgcttgttagcagtggcacaagatcttacagagga

SEQ ID NO: 645508 - DNA, 109 bp, Homo sapiens
cccggccgcgggagcctcgtggctgcgtcaccgccgcccccccagacaagatggacaccgcggaggaaggcactttccacacatgaggagaagaagagcttctgtttag

SEQ ID NO: 645509 - DNA, 100 bp, Homo sapiens
gagtgatggcttttatggtactggagagacctttgtttttacattctgtccggagtttgaggtgcaactgacatgggtgaaccccagggatccatgcgga

SEQ ID NO: 645510 - DNA, 53 bp, Homo sapiens
cagcctcccaagtagctggaattacaggtgcatgccaccacacccagctaatt

SEQ ID NO: 645511 - DNA, 98 bp, Homo sapiens
ccctaccacttcagccggctctgcgggcccggtatcattgcccagtgcctaagatcttttatgttcagctcactgtaggaaataatgaattttttggg

SEQ ID NO: 645512 - DNA, 75 bp, Homo sapiens
tccaaataccagctcgacaaagatggggttgtcctctttaagaagtttgcagaaaaaacttcagcatgtgccagg

SEQ ID NO: 645513 - DNA, 75 bp, Homo sapiens
gggctgcttgctaactccaggaacagacatttcagcagtcctcactgcagcacaaatcaaagaagaaaaacaaag

SEQ ID NO: 645514 - DNA, 98 bp, Homo sapiens
gggtcgatacatatgctcaacagtgcctgcgaaggcggaagaggaagcacagagcttgtttgttacagaggccagactttgccgctgcgtggatgaat

SEQ ID NO: 645515 - DNA, 100 bp, Homo sapiens
aagaggaagagagaaagaagcaagaagagcaggccaaacgtcagcaagaagaagaagcagctgctcagatgaatgcccttgctaccagttccgagccagc

SEQ ID NO: 645516 - DNA, 75 bp, Homo sapiens
acatggatgaagaaggggaagaaagtcagctcccagcgcttcgaggtcgatgagcagatgcttaacgtgcagaac

SEQ ID NO: 645517 - DNA, 74 bp, Homo sapiens
atatggtcttggtttggtctacttccattataatgcatttcagtggccatggctgttatcttctcaaattttag

SEQ ID NO: 645518 - DNA, 101 bp, Homo sapiens
agatttaaagtgttacaattgaactagattatgaccatgaccagcgttttggaaggaactagattttaaaaatgtctgacactggaggagcctttaaaggt

SEQ ID NO: 645519 - DNA, 50 bp, Homo sapiens
ggactgcaccagagccatggtcgatattttagggcaagtgtggtggctca

SEQ ID NO: 645520 - DNA, 100 bp, Homo sapiens
ctaccgctgcggctactgcaagaacgagtcgggcagccgctccaatgtgagctggaagaatctctacttgtgctgcctttctcttatgtcccagacattc

SEQ ID NO: 645521 - DNA, 80 bp, Homo sapiens
ttcagtcacaacagatgaagacagcaccaggttccaaatcatcaatgaagcaagtaagatgggctatctgaagaggaacg

SEQ ID NO: 645522 - DNA, 96 bp, Homo sapiens
cgggaggaaggaacgaggcaaggagctaaagcagcgtgcgttcagccctggggtcttgccccagaagctgcgggcacatccacgcctgaaatgcgg

SEQ ID NO: 645523 - DNA, 100 bp, Homo sapiens
gctacctgtggagccgaggaaaagatctgactgcagccatgagcagcaatgagtgcttcaagtgtggacgatctggccactgggcccgggaatgtcctac

SEQ ID NO: 645524 - DNA, 99 bp, Homo sapiens
ttggctcactgcagcctcaacttcttgtcctcaagtgatcctcccaccttagcctcctaagtagctgggaccacagtagagacggggttttaccatgtt

SEQ ID NO: 645525 - DNA, 74 bp, Homo sapiens
tttcttattgcagcaaaaattcccgtaccaatgtcagtgctagggttatatttcacactatgtgctgactgtat

SEQ ID NO: 645526 - DNA, 100 bp, Homo sapiens
attacatctacaagaggggacaagtacctttatgaaccagtgtatcccaacctgcctgcctatccttcagattttggacttgccagcctcaacaatcatg

SEQ ID NO: 645527 - DNA, 75 bp, Homo sapiens
agcggagtagcgagtcggcaacccggaggtacctgcacatgttgttctttgtcagtgctgtcaagtgtgtgccag

SEQ ID NO: 645528 - DNA, 75 bp, Homo sapiens
tgcaggcaggccctgagcacgctgctgtgtgagcagcagctgtctgagtggtggctcaagaccgcctacctccag

SEQ ID NO: 645529 - DNA, 100 bp, Homo sapiens
ctgatctctacataaaggattatttacatccatatgtagaagcaggcaatccccaggcaagacctctcagattttcgacaatgaagccaaagacgtggag

SEQ ID NO: 645530 - DNA, 98 bp, Homo sapiens
ctgcccctgatcgcttggttttccttgcagtcgcctgctgctgtcgtcgggagtgccggtggtggtgtgcacattgagccccggtatagacagttccc

SEQ ID NO: 645531 - DNA, 83 bp, Homo sapiens
cttttattttcctgtaatatatctgtatcatcggagggtgcggaggcagcaaatgttacaggtcctggtggtgttccagttca

SEQ ID NO: 645532 - DNA, 75 bp, Homo sapiens
ttgtttgtggatcgctgtgatcgtcacttggtacaatgcccaggagtactacgatcgcattcctgagcttcggca

SEQ ID NO: 645533 - DNA, 120 bp, Homo sapiens
aatgaaagaatactcaggctttgcaggagttagccgaccacgaggaacctttgtggctgtacttttgatgatggtccaggggcctgtgattaccaccaggatctgtatgatgactttgaa

SEQ ID NO: 645534 - DNA, 100 bp, Homo sapiens
tctatttagatgctaatcagattgaagagcttccaaagttttctggatatgccgcagaaggatccgtgccagaagcaagcctgtgagatacagaaatgtt

SEQ ID NO: 645535 - DNA, 93 bp, Homo sapiens
ataaggacaaaagccaagaggaggacagttcgctacacagcaatgcatcgagaattcagaaggagctggcggacatcactttagaccctccac

SEQ ID NO: 645536 - DNA, 100 bp, Homo sapiens
tctgggttttacagcacttggccaagctagatgtcaaggtattccagcgtcttcaggaaacagtttagactctcttcaagatgacaatcctccacactgg

SEQ ID NO: 645537 - DNA, 82 bp, Homo sapiens
ctgggagctggaggaaccgcggccacggaaaggtatgatatatttgatccaagacagtccattccagtccgggaatctacag

SEQ ID NO: 645538 - DNA, 87 bp, Homo sapiens
taagtcagctgcagacttgattagcctgcctaccactgtagagggacttcagaagtctcttcaagaaaatgaggaggaggagattgg

SEQ ID NO: 645539 - DNA, 126 bp, Homo sapiens
gctccctctggatgtggaattctccgtccctttccagggagggaacaaagcccacagcaccgttgcagatgttggcattggtgtttgactgaaagcccacttagtaccttcatagccttaccttca

SEQ ID NO: 645540 - DNA, 75 bp, Homo sapiens
tttgcacttgctggaggcatgttcctctatatttctctggcagatatgatcaagagactgaaatctcatccttct

SEQ ID NO: 645541 - DNA, 85 bp, Homo sapiens
cagatctacctgacgggcctgcgagggttgaagattgtgaagcaatagcctaagcatgaacgtgcagggtgattatgagccaact

SEQ ID NO: 645542 - DNA, 100 bp, Homo sapiens
cagctgacatatgaaggactcattgatgaaatttatggcattcagaacattcaggacctcaaggggctcggctatgagaaggggaagcctgtgggtctag

SEQ ID NO: 645543 - DNA, 100 bp, Homo sapiens
tatttagttctggggagcgcctcgtcgacatgagtgatgtggaggaaaacaacttcgagggcagagccaactgtgatttgagacggcagattgatgaaca

SEQ ID NO: 645544 - DNA, 100 bp, Homo sapiens
ttcaattcggtgctccgccagccccagcttggcgtcctgagaaatggacatggatttgattgacatactttggaggcaagatatagatcttggagtaagt

SEQ ID NO: 645545 - DNA, 100 bp, Homo sapiens
agagctgcctggttctgtctgtttcagaacaaagttctggacgtggatggtgtgaaggtgaagctgcaggtatcttattgacagccggtggttcaagcag

SEQ ID NO: 645546 - DNA, 74 bp, Homo sapiens
ggtaggagatggagaaattccaagttcagattctccagctctggtagctgaagaacatctcacagtggacgcca

SEQ ID NO: 645547 - DNA, 75 bp, Homo sapiens
ggaacccttgccgctgctgtcctgcgaccccaagcaggttctgatctacaatggccaactggacatcatcgtggc

SEQ ID NO: 645548 - DNA, 75 bp, Homo sapiens
agcaggttcatgccagcccagaacagagaatcagaatgacagcccatatcaaggcggtgtattctttttgacaat

SEQ ID NO: 645549 - DNA, 98 bp, Homo sapiens
ctcagttgctgctccgacgcggaccccagtaccaaggatgaaaactttcggaagagaaagttgcctgtggtaagttcagttgttaaagtaaaaaaatt

SEQ ID NO: 645550 - DNA, 100 bp, Homo sapiens
caagcctgatcaagctactccagcagccttggtattacagggtcttcatgcactctgtcaagctgagtgaaagagtttctagccaaagccaaagaagact

SEQ ID NO: 645551 - DNA, 75 bp, Homo sapiens
gtttatgtcaaatctttaagagatttttctacagaatcaatgtctttgggcttcataaacttcacttaccaaata

SEQ ID NO: 645552 - DNA, 96 bp, Homo sapiens
agagtggaggaagtacagccagcagaattgagttcttctcagactttatcacatgatggaggattcttcaatagactggaagatgatgttcataaa

SEQ ID NO: 645553 - DNA, 48 bp, Homo sapiens
catcgacatcagtgaagaagatcagcgactgcatttgcctccagactt

SEQ ID NO: 645554 - DNA, 100 bp, Homo sapiens
ctgagtccttatggcatattcagatcagtagaagcagatttcttttggatagtgatgggaaaagctctggccaggctgccgcacctctacaggaactttg

SEQ ID NO: 645555 - DNA, 96 bp, Homo sapiens
agagttatggatattctggtggggagatgaacccaacctagtgggtgtaatacatcatgaactgcaggctcctggtccatgtgcagaagtaagagc

SEQ ID NO: 645556 - DNA, 83 bp, Homo sapiens
gaaaaagaagctgcataccctgagccagattgaaacttctattgcaacagttcagatgagagtccctacactaaatccgccag

SEQ ID NO: 645557 - DNA, 100 bp, Homo sapiens
cggggacggattggttgttttttcctgtatgaagcggttggcaccactgaagtgaccgaatgaggaactttatattgctgttggaatatctggagccatc

SEQ ID NO: 645558 - DNA, 50 bp, Homo sapiens
gaccagctctcaggatgactttgttggatggcaagcatgtggtgtttggc

SEQ ID NO: 645559 - DNA, 90 bp, Homo sapiens
cgacgatgaggtgacagtcacgggagttctgggaaatcgttcattcatttacagatgaacagaaaagactcttcttgcagtttacaacgg

SEQ ID NO: 645560 - DNA, 98 bp, Homo sapiens
tctgctctccgtctgaaaaccttggccgaaagggttgtagacatggcggccatcaggacttggattgggaatcgaagaaggaaatatcgtttaatggg

SEQ ID NO: 645561 - DNA, 82 bp, Homo sapiens
gaaagccccgtggctatgccttcatcgagtacgaacacgagcgagacatgcactgttaacacagaaatctgcctcctgggcc

SEQ ID NO: 645562 - DNA, 90 bp, Homo sapiens
gtcacccaggtggagaatgaggagaaactgaaggagctagagcaaaatcatttctaccagttcggagagatccggacgatcactgttgtg

SEQ ID NO: 645563 - DNA, 83 bp, Homo sapiens
cgacactctgaagcagcgacggcacagcgggaagaatggaagaaatctttcctgttttctgctctgtatgctgcctttatatt

SEQ ID NO: 645564 - DNA, 80 bp, Homo sapiens
ctccctctgcccccccttccccacgcaaccccagatccatttacactttacatacgagctcaactggaggcagtcctgtg

SEQ ID NO: 645565 - DNA, 82 bp, Homo sapiens
ctcctcctccggagaagtagagaaataaatttctcccaccctaaaccaggaaccctaaggactctgcaatatgaataattcc

SEQ ID NO: 645566 - DNA, 75 bp, Homo sapiens
gtggatattgggcttgacagctgcaaggagttactgaagcttggatcctagcatgactatacattgtgacatggt

SEQ ID NO: 645567 - DNA, 75 bp, Homo sapiens
cagtttgctctgctcttccaacaccagtggaagatgatcacatcccagactgtggatattcataaggagaaagtg

SEQ ID NO: 645568 - DNA, 96 bp, Homo sapiens
acgccgctccgactccaggggagccgtggcctcctctccgccctagcgctgagagtgtgaacatggctacgcctcttcattcccgtccatgccgag

SEQ ID NO: 645569 - DNA, 75 bp, Homo sapiens
caacactgtggttggagaaaagggtgttctcctctcagatgatttacccaggaaaaggttacctcagctgtataa

SEQ ID NO: 645570 - DNA, 100 bp, Homo sapiens
ccacaggagccccggacttcacctgagctacctcaggtgcttttgaagatgatgatatcacgcacgttgaaggaagtgtagatcctattcgagatataga

SEQ ID NO: 645571 - DNA, 88 bp, Homo sapiens
ctgaggcagttggaagttatgacaccatggatctcttcaggcacactacagaactaaatatgcattggttcaatgcacagagaaagac

SEQ ID NO: 645572 - DNA, 75 bp, Homo sapiens
ttcgcagtggtcgcttcttctccttggtcctcatggaaattacaattaaaggacttcctcagaaagtattaggtt

SEQ ID NO: 645573 - DNA, 75 bp, Homo sapiens
gccccagtgatggagcaatggcaaactatgaaagtacagacaacaaaggaggctttgaaaatgttttagaagaaa

SEQ ID NO: 645574 - DNA, 100 bp, Homo sapiens
cgggcccgctccgacgcggaaggtacatgtcccagagcaagcacacggaggcccgggagctcatgtactcgggagccctgctcttcttcagccatggcca

SEQ ID NO: 645575 - DNA, 103 bp, Homo sapiens
caccaacatcgatgggcggcggaaaatagcctttgccatcactgccattaagctttgtgtccctggtgatgttggaacattaatgatggaacatggccaaact

SEQ ID NO: 645576 - DNA, 100 bp, Homo sapiens
gagacccgcgccgccctggaggagtggctgcctagggagcggcaccgggggggcgtggccccgggcttccaggtggtgcacctcaacgctgtgaccgtgg

SEQ ID NO: 645577 - DNA, 50 bp, Homo sapiens
gcggcaaggtctccaagtcccagctcaagtacttcctcgcgtattgctaa

SEQ ID NO: 645578 - DNA, 100 bp, Homo sapiens
acttgttttccagtgtgatcttacccttaaagctgggagacagcaggaaggcagcaagtccccacctccccgccagcctcggaaaacagcagtgctgccc

SEQ ID NO: 645579 - DNA, 100 bp, Homo sapiens
agggagacgacgctgctgggtccgctgagcggggcgacccgaggtggaggctgcatggctggaaggccggatccggcaggagtttgataagcttcgcgag

SEQ ID NO: 645580 - DNA, 76 bp, Homo sapiens
ccagaaggtctcagcacactgatgatagtgccttgtgcatgatccaggatgagaagactgataaaagaagaagcta

SEQ ID NO: 645581 - DNA, 100 bp, Homo sapiens
atttggatactacgttctgtgatccaagattttaccaaattccaagtcggaaaaggttaagaagttcttacaagagttctaccaggatgatgaactcggg

SEQ ID NO: 645582 - DNA, 100 bp, Homo sapiens
gacctagtatttgaatttgctagtaacgtcatggaggatgaacgacagcatgctatggaaagcaaccattgtactcagtagaggagtatcagttcagtat

SEQ ID NO: 645583 - DNA, 97 bp, Homo sapiens
gcatccatattctggtgtaactgtggacatcaccattcaggaagccgattacacctcaacaagaaggcaactgacaaacagccttatagcaagctcc

SEQ ID NO: 645584 - DNA, 87 bp, Homo sapiens
agaatgaacaatccgtcagaaaccagtaaaccatctatggagagtggagatggcaacacaggccctcgggaccaaggatcacgtcat

SEQ ID NO: 645585 - DNA, 109 bp, Homo sapiens
gccgaagaagcatcgttaaagtctctcttcaccctgccgtcatgtctaagtcagagtctggcttcagccttgtcatgaaccacccagcctgtgtcaatgagattgctct

SEQ ID NO: 645586 - DNA, 87 bp, Homo sapiens
cgactccggagacagcccaaatatcctcggaagagcgctcccaggagaaacaagcatgcatgtagggaataccggattcataaagag

SEQ ID NO: 645587 - DNA, 75 bp, Homo sapiens
ccatgattatgcaagattttgtcacctgcagatcggtgcaagaaaatccatgctggcgatgaagtgattcaagtt

SEQ ID NO: 645588 - DNA, 80 bp, Homo sapiens
tatggctggacagctagctgcttatggctataaaattacagactttatattcagagcaccaatcaaattaagcaagcctg

SEQ ID NO: 645589 - DNA, 49 bp, Homo sapiens
atcgcccaatccacatgcttttccaggtggacccccaaaagtacaaggg

SEQ ID NO: 645590 - DNA, 50 bp, Homo sapiens
tgctcagcatcctggacatcatcaccggagaagaaatgggtgaccgttgg

SEQ ID NO: 645591 - DNA, 106 bp, Homo sapiens
ttacagaaattccatgctgccttcagcttcctttgccgctctgcatcatgttgtgttgcctcagcttctcaaagtttctggtgtttatgaagatccataacagctg

SEQ ID NO: 645592 - DNA, 100 bp, Homo sapiens
ttccagcctgatgctaccaaaggtggaaagtcctgaagaaatccagtgggtaaactgtcttgagccccaccctcacctgcctgtgctggcaaccagtggc

SEQ ID NO: 645593 - DNA, 108 bp, Homo sapiens
ctcaatatctgtcttcggtggactccttcggcagtccacccaccgccgccgcctcccaggctttatcctgtggataaacgcagagtgaacgagtttggggagtcctac

SEQ ID NO: 645594 - DNA, 101 bp, Homo sapiens
cgggcaggatggatcaccaccagccggggactgggcgctaccaggtgggagctgtatgcccagttcctgagggaaatgatcatccagcctggcattgccaa

SEQ ID NO: 645595 - DNA, 103 bp, Homo sapiens
cctggagcctcagttggaagcagccgatccagcctgcggagcctgtggggcagaaaatgacagatggcgagacctggacaggaaatgccctcttcagattgac

SEQ ID NO: 645596 - DNA, 100 bp, Homo sapiens
cctgactacccggccttcagcgagattccggacaaggagttccagaatgtcatgacctacctcaccagcatccccagtagaacttcatggaggaacacgg

SEQ ID NO: 645597 - DNA, 100 bp, Homo sapiens
cgctactggtgctgtcctggccacccccaggaaccgtggatgtttccaaggattgtcttcagtcatggccttgggattaaagtgcttccgcatggtccac

SEQ ID NO: 645598 - DNA, 75 bp, Homo sapiens
catgagcgctcacttccgcggctgtgtgggcgagagagaaaaggaacagttccgtaagctctttattggtggctt

SEQ ID NO: 645599 - DNA, 75 bp, Homo sapiens
ccgcgacgctatggcgcactggagtaccctgttcctggcagtatttcagttactaactgatctgaaagagcagcg

SEQ ID NO: 645600 - DNA, 51 bp, Homo sapiens
ctggtggaagaggcgtacctattgtccgtgtggagcccttggtgaccatgg

SEQ ID NO: 645601 - DNA, 100 bp, Homo sapiens
tgcgtgtcagccaagtccccccaacactgcatggagcggatccagctattgtacagggggatacgctggaagacatttacaaccaagtgaaacagatcat

SEQ ID NO: 645602 - DNA, 80 bp, Homo sapiens
aagttaggggagagtttcgagaagcagccgcgctgcgccttccacactgtgcgctgcttcattccagcgctccaatagtc

SEQ ID NO: 645603 - DNA, 82 bp, Homo sapiens
atggagtcttccatcaatcatatctcacaggattttttatcaagcagaaatgcatcgaacaacgagaatcaagatcactgag

SEQ ID NO: 645604 - DNA, 112 bp, Homo sapiens
tctcgtgccgccttcccaggaccctcagggagagcgggcagccttccaggtggacagaactcacgtgctgtgtgtcagactgagctttccctgattcattctacaatccaag

SEQ ID NO: 645605 - DNA, 96 bp, Homo sapiens
aaagacagtggtgttgcttcaacagaagatagttcctcatcacatataactgcagcagccattgctgccaagattctgtttctggcgtctgcatac

SEQ ID NO: 645606 - DNA, 135 bp, Homo sapiens
atgagcagtcagagagtctacagaacacgcacgacgacagcaggaacaacgcggcctcagccagacacagggtctcactgtgttggccaggctggagtgcggcagtctggaactcctgggcccaagtgatcctcc

SEQ ID NO: 645607 - DNA, 100 bp, Homo sapiens
ccggcccgtgtcaccgccctgcgcttcaacagctccagcctgcagtgccagaattcctcgggcacgaagggctaccccggcctcaagggggacgagggag

SEQ ID NO: 645608 - DNA, 82 bp, Homo sapiens
agaaaggttgtgatggcggctatagctgcatccgaggagttcatgatcaagtgttgcccacaccaaatgcttcatccagagt

SEQ ID NO: 645609 - DNA, 75 bp, Homo sapiens
gtatttggctccagaaataattctcagcaaggaagaagaccgaaaactgttagttggattcttagaagatgtaat

SEQ ID NO: 645610 - DNA, 100 bp, Homo sapiens
tcctctggcccccggaaaacctaaccatgaagacttgaacttaatacagcaagaaagaccatcaagtttaccagtaaagggagaagatgaggaagagaac

SEQ ID NO: 645611 - DNA, 90 bp, Homo sapiens
taccgagagttagtcccgagaagcatcctagccatgcatgaaggagggagccccaggaacaggagtcccaccgaagaactgctctctgac

SEQ ID NO: 645612 - DNA, 82 bp, Homo sapiens
ggcaagtgctgcctgcaggtccatgccagtgagaagccctaccactgcaactgggacggctgcggctggaagtttgcgcgct

SEQ ID NO: 645613 - DNA, 75 bp, Homo sapiens
cggggccgctgctcaagttccagatttggtcccatgactcaatgaacatgcttgtccagctcatctggaaacctg

SEQ ID NO: 645614 - DNA, 98 bp, Homo sapiens
tgtttacgattgttttcacccagaagaaacacgataatgagaccaacctttccactgagaagggaccagttactctccacaagaaaattcacacaacc

SEQ ID NO: 645615 - DNA, 116 bp, Homo sapiens
ggagaccgtcacgccctcagaggccccggtgctggcagctgagcccgaggctgacaaggtgcctccatatgcgtcggagaaccagacctgcagggaccaggaaaaggaatactatg

SEQ ID NO: 645616 - DNA, 50 bp, Homo sapiens
agagaacgcagtggcacagagtagcagcgatgtgcattttgtaagcactt

SEQ ID NO: 645617 - DNA, 100 bp, Homo sapiens
gtggcaatcatcctgaatgaatttagagccaaactgtccaaggctttggcattccaaagaactactggttcagattttagctcttcccaagttgtgaaaa

SEQ ID NO: 645618 - DNA, 100 bp, Homo sapiens
ccctgacctcggtcccctccgccggctgtgaccacaaggtgacatccaccagtggtaccatcaccagccccaactggcctgacaagtatcccagcaagaa

SEQ ID NO: 645619 - DNA, 83 bp, Homo sapiens
cacatctggaatctggaatgaaatcttccaagtccaaggatgtgaatgcctgaactagatgaatacaccatggagagggtcct

SEQ ID NO: 645620 - DNA, 100 bp, Homo sapiens
tttggagttgccacctctgctgtgcttgccttattggtgatgtgcattgtcttacgcccttcaagagttaaaactgcacctcggtctccagatgcccggg

SEQ ID NO: 645621 - DNA, 98 bp, Homo sapiens
ttcaagctgataggctgcgctaccggaatgtcatccagcgagtgattagaatgacccattgccaggacgcatcaaagttgactttgtgatccctaaag

SEQ ID NO: 645622 - DNA, 90 bp, Homo sapiens
gtcgggacaccccggaagctgggaaatggctactgcagcactggggtgtcagttgttggtccgacccagaacgcttcagttctgctctgc

SEQ ID NO: 645623 - DNA, 95 bp, Homo sapiens
agaggcccaaattgaggcgcaatgatgagaggatgtggtggtctactctgatgtcaatcttgagggctagggactggtttggctgaaagacaaag

SEQ ID NO: 645624 - DNA, 50 bp, Homo sapiens
tgattcaggtgacacctattattttggagaataactgaagtgaagtgatg

SEQ ID NO: 645625 - DNA, 51 bp, Homo sapiens
gccaagccttctgcctgtgatgacaccaactctacaacattacctgtcata

SEQ ID NO: 645626 - DNA, 73 bp, Homo sapiens
tgaaccctgaagtcggtgtctgctgcgttcacggcaggattcggttagttttgatgaagcaagaacacagaga

SEQ ID NO: 645627 - DNA, 100 bp, Homo sapiens
cccgcgtccgccgattcctcctccttggtcgccgcgtccttggctggcgtctccaattaaggaacagctatatcctgcttccttctgtaagcagcatcga

SEQ ID NO: 645628 - DNA, 97 bp, Homo sapiens
atctaaggagtggtttgtgcagctctattaccacgggaagaatgtaattctgctgaccacataaagtcccaggattcccagcacacaccacactcga

SEQ ID NO: 645629 - DNA, 95 bp, Homo sapiens
aattctggtgacacaaagacatctgtatgtgctgtcagattcaggaggtacatgtgcttgtttgtcatatggatatattgcatactggtggagat

SEQ ID NO: 645630 - DNA, 88 bp, Homo sapiens
cgaagaggtggcagcgcgagctgggaccagcgtctcggaggcgccgcagttgtatcacggactgattcaccgagcccaaccgtactca

SEQ ID NO: 645631 - DNA, 100 bp, Homo sapiens
gcaagttggataaaaggaggacctctcgccaagggccccaatgagtggcacacagtctactatcaccgacagtgtaaacaggaacatcgataagtagtgt

SEQ ID NO: 645632 - DNA, 100 bp, Homo sapiens
ccgggacacccccgcaagcgagcagtgctacaactgtgaggaggaggccatgtaccactgctgctggaacacatcctactgctccatcaagtgccagcag

SEQ ID NO: 645633 - DNA, 75 bp, Homo sapiens
ggccggcggagcgccatggcctgcatcctgaaggtttattcagaaaacatgtccactgcaattagggaggtagga

SEQ ID NO: 645634 - DNA, 83 bp, Homo sapiens
ctgcttttcccaagaggagagaatggctgctgggtacctgccccgctggtcccagaacacaccacagccatcagcactggaat

SEQ ID NO: 645635 - DNA, 87 bp, Homo sapiens
ttgaagcccactagaagtgggaccaagtgggtgcatgtcagctgtgccctatggattcctgagttaccaccaccctgtgaatctgcc

SEQ ID NO: 645636 - DNA, 100 bp, Homo sapiens
cctgggtgggggagggaagaagccggagccgccgcaagccacacgaaagtgactgagaccgaagatgatagtgatagtgacagcgatgatgatgaagatg

SEQ ID NO: 645637 - DNA, 50 bp, Homo sapiens
ccgcctcctcctcctcagtaacgcggaagagaagctgaatttggacgaca

SEQ ID NO: 645638 - DNA, 98 bp, Homo sapiens
gtgaatttaaactcagcaaagtctggcgtgatcaacattttgttaagattcaggtcaaagacagtgtgaccgcaacaagggaaaacatggcttatact

SEQ ID NO: 645639 - DNA, 75 bp, Homo sapiens
agattatttcaagtggaatatgccattgaggctatcaaggaaaggaaacagattcattgtctgtctgaggatgag

SEQ ID NO: 645640 - DNA, 98 bp, Homo sapiens
tcaccaccaaatggatttggtattggaagaatgaatctggcacatggattcagtatggagaagagtgcctccggagccagcgtggtggccatagacaa

SEQ ID NO: 645641 - DNA, 75 bp, Homo sapiens
cagcaggctgggaatgtgaagcagcagataagaccatcatcatgtggaaactgaccagggatgagaccaactatg

SEQ ID NO: 645642 - DNA, 100 bp, Homo sapiens
tgagccgatagcgtccgctaggctgtctgcctcggtacctgttactgctgctacttcctcgtttgacaccttcctggaacaaaatccagtctcatagcag

SEQ ID NO: 645643 - DNA, 51 bp, Homo sapiens
cccagttccaaagtgtcttaaaggtttaccgacaagactgtgaaactttcg

SEQ ID NO: 645644 - DNA, 96 bp, Homo sapiens
cgacaagttcaagcagctgcttgccggccccaacacggaccttgtaattacaagtagtggctacagccccagatcagcacatcagtattccccaca

SEQ ID NO: 645645 - DNA, 75 bp, Homo sapiens
cacttactactatcctcattatctccaaaccaagtgtcccttttgatgagaagaataagcctcattctgattcaa

SEQ ID NO: 645646 - DNA, 98 bp, Homo sapiens
tgggattcgcgctgctgggcacccacggagcctccggggctgattttggctatggaaaggggaaatgttctaagcagagcccgtcaggagcccacggg

SEQ ID NO: 645647 - DNA, 90 bp, Homo sapiens
gactgtcgggcggtggtgatctctggtgcaggaaaaatgttcactgcagggaaggaagccatgctgaagcaccgggactacgagacggcc

SEQ ID NO: 645648 - DNA, 75 bp, Homo sapiens
acaattcaagatagtttgcagcatccctggatcaagcttccagtggtgtctgtagtgagagaaacagagtcccag

SEQ ID NO: 645649 - DNA, 75 bp, Homo sapiens
gaaagttccagccggttcgagagctagatttgagttctgtgaacctgcatttgttgttggtaattgcctccagat

SEQ ID NO: 645650 - DNA, 75 bp, Homo sapiens
gcctgccccctcagccctgtggctgggggcagagctcagaacattctagtatgccagtagaaaaaaatatcactt

SEQ ID NO: 645651 - DNA, 97 bp, Homo sapiens
atcctcacctaccatgacatcggcatgaaccgcagtgctggcactcctgtcacttttaatgaaaacggagatgctcctggacgttatgatatcttcc

SEQ ID NO: 645652 - DNA, 82 bp, Homo sapiens
aacgccccggtggagaagctgagaaaccaaggtgtatgttggtaacctgggaactggcgctggcaaaggagagttagaaagg

SEQ ID NO: 645653 - DNA, 90 bp, Homo sapiens
cggcctcgcctcgcacccccagccagtccgtcgatccagctgccagcgcagccgccagcgccggtgttggaaaaccttggacagacaatt

SEQ ID NO: 645654 - DNA, 90 bp, Homo sapiens
gaagagggaagacacgcggaaacaggattaagcatgaaaatattgttgccctggaagacatttatgaaagcccaaatcacctgtacttgg

SEQ ID NO: 645655 - DNA, 73 bp, Homo sapiens
aacgccaaggtggccaacctctacaaggccagcgtgctgaagaaggtggtcttctgccctgttaaagaagccc

SEQ ID NO: 645656 - DNA, 100 bp, Homo sapiens
gggaaagataaccttctcaacgcctggaggacgccttatggagccagcatattccagcaaagtctctcgcgacaccctgtacgaggcggtgcgggaagtc

SEQ ID NO: 645657 - DNA, 88 bp, Homo sapiens
aagacatggagattctcttaaaaagcttcttccagaccagctggtcttgcttctggagcatctcttggagcagaagactctgagcccc

SEQ ID NO: 645658 - DNA, 98 bp, Homo sapiens
aatcctagacgtggtccggtatctctgtctgatgggagccagcgttgaggcgctgaccacggttgcacagagcattgaggatcaccatcaggaagtga

SEQ ID NO: 645659 - DNA, 98 bp, Homo sapiens
ggatttccaagtgatttcttccaaagcacaggaatctcactctgttaaagctggtctgttctaactgaggttgacaggactgaggtgattcgcacctg

SEQ ID NO: 645660 - DNA, 59 bp, Homo sapiens
gggggccttggctgtaaggacccctaaggataaactcatcctgaaagtcgctgttgttc

SEQ ID NO: 645661 - DNA, 83 bp, Homo sapiens
ccgggggctgccccctccccccaggtcttctcagtacagcatggtggctggggcaggccgagagaatggcatggagacgccga

SEQ ID NO: 645662 - DNA, 51 bp, Homo sapiens
ggaaggagcacccaggagctgaaggctcccagccaacctctgataaaccct

SEQ ID NO: 645663 - DNA, 82 bp, Homo sapiens
ggcaggacgtgaaggggaagaggcccaccctggagtaaccctcactggagaatccagagatttctgcgccaggagatgaggg

SEQ ID NO: 645664 - DNA, 97 bp, Homo sapiens
cgctatgttgggagtgttcgctttcgagttgcatttgctggtctggcctttgcgtccttctacctggcagggaagttacactgcttcacaccacaag

SEQ ID NO: 645665 - DNA, 97 bp, Homo sapiens
ctgcgcagaatgcttctcagcagcaacatccccaaacagcggcgtttcacggtggcacatacatgactgccactggagacaccattgtctcatccaa

SEQ ID NO: 645666 - DNA, 83 bp, Homo sapiens
caggccgtgttccgtgtctctggattcaagtcccaggagtcctgaccagagagcaggtgacgttcaccaagcggaagttcggg

SEQ ID NO: 645667 - DNA, 110 bp, Homo sapiens
cccaccctggagtaaccctcactggagaatccagagtaccatgcggagaccatcaagaatgtgcgcacagccacggaaagctttgcttctgaccccatcctctaccggcc

SEQ ID NO: 645668 - DNA, 90 bp, Homo sapiens
cgccgagggacgccgaggcctcgggcgggggctggcccggggttccagagtacaggggctcaggtccaggtggcaggggatatgctaccc

SEQ ID NO: 645669 - DNA, 51 bp, Homo sapiens
caactgggcgaagagggtgccaggatgtaaatgaagaccctggagaagatg

SEQ ID NO: 645670 - DNA, 98 bp, Homo sapiens
gtcatcggtttccagacagctgccatacacactgctgctatggatatgctgggaggacctggtatcgaaagccagtgtagaaaagttgatatcattgc

SEQ ID NO: 645671 - DNA, 76 bp, Homo sapiens
gcaagaccaccttcgtcaatgtcatcgcgtgataatatgcagcatgcatactgggaactgaagagagaaatgtcta

SEQ ID NO: 645672 - DNA, 51 bp, Homo sapiens
aggaacaacgcggcctcagccagatctgtagaaacttccagtgtgtagatg

SEQ ID NO: 645673 - DNA, 100 bp, Homo sapiens
gggagcagaggggacagaggcaccaaggacctccaagacaggttatacattggctcttcaaagacgttcacctcatcagagaaatccctgactcctttgc

SEQ ID NO: 645674 - DNA, 50 bp, Homo sapiens
gcgtcaggcatctcaatcatgaaaacccatatagacagctgccttgtaac

SEQ ID NO: 645675 - DNA, 51 bp, Homo sapiens
ccctggtgtcacctatcagtaaaagatgaggaaactgaggccttggactag

SEQ ID NO: 645676 - DNA, 50 bp, Homo sapiens
agaacaaccaggctttgtcaagactcaggctgcccctggtgccttccaag

SEQ ID NO: 645677 - DNA, 100 bp, Homo sapiens
cgactagcggcggcgggagcggcgccgagaggccgtgcgggacgcgggcgccaggaccggccgaacgcagaggtcaaaatgcagatcttcgtgaaaaccc

SEQ ID NO: 645678 - DNA, 82 bp, Homo sapiens
gctgttagtcattacaagttgctgcttcagcaaaacaagaaatttcaaaacttgatcaagtcttctcattcacaggttaagg

SEQ ID NO: 645679 - DNA, 78 bp, Homo sapiens
aaaatcatattatagatggagtaaagattgaagcactagagtgtgcatatgataatctttgtcaaacagaaggagtca

SEQ ID NO: 645680 - DNA, 90 bp, Homo sapiens
ggaaactctatggagacgcagactacttggaagagaggcaccgccaccgatttgagaaaactcttctacagaaattactctcaaagaaac

SEQ ID NO: 645681 - DNA, 100 bp, Homo sapiens
ttcagctggccaacagcaccatcattgcatttacctcggatcatgcgccatggggcaagcgtggctggaagatgttccacaccttactgcgagggatggt

SEQ ID NO: 645682 - DNA, 100 bp, Homo sapiens
gtaagatcgtcgagatgtctacttcgaagactggcaagcacggccacgccaaggtccagcagctccagatctcggttgaccaacatggtgacaacctgaa

SEQ ID NO: 645683 - DNA, 75 bp, Homo sapiens
caggtgctgcagaagctcttgggtactaggttttgacaagcttgcatcatgcgtgagtataagctagtcgttctt

SEQ ID NO: 645684 - DNA, 100 bp, Homo sapiens
attgctgcatcaagaaacccaagctgctgaggaatctgtctgctattcaggatagagaaatttgctgctattcaatttcttgcaaagaaaaggataatat

SEQ ID NO: 645685 - DNA, 100 bp, Homo sapiens
aagacctgtgttgatacctataccaaccgtttaaggaaacctcgacctgtctcccagttggttgcacagcaggttactcagcagtttgtgcctcctacac

SEQ ID NO: 645686 - DNA, 100 bp, Homo sapiens
tagagaatgagatagccgtcctgagaaagctatccgacatgttcagaccatgtatgaagaggcttacaatgattaccttaaagacaggggaaaaggcaat

SEQ ID NO: 645687 - DNA, 98 bp, Homo sapiens
ttctactgtgggtctggactgatctccatgtcctgttgtggggcttttacagcctttggcacacggcactttcttgggtcacattcggttggaacctc

SEQ ID NO: 645688 - DNA, 75 bp, Homo sapiens
agcagttgtctgatgaagagaagggcaagggcgccgaggacactttctggctagtgggcagacgcggcttcaaca

SEQ ID NO: 645689 - DNA, 87 bp, Homo sapiens
tagccaaaattgcacaatacaagaggaaactcatggatctttcccatagaactttacaggataaaagaatcagagtgtctcaaccct

SEQ ID NO: 645690 - DNA, 100 bp, Homo sapiens
gcatatcagagtattcagaactacttaagaagaggccttttgactcggatgaagagacacggaaggggagaaatcattggaattcagaagctgaattcag

SEQ ID NO: 645691 - DNA, 83 bp, Homo sapiens
ccgggcacagccttcctgtgtggttttaccgcccagagagcgtcatggacctgggtttggttttcctaaacaaatcctttcac

SEQ ID NO: 645692 - DNA, 100 bp, Homo sapiens
gctctgcctggagcactcactggcggactgcaatgacatccacctgctggagtcggaggccaacagtgctggtccttatgtcgtcagaagatcgagaagc

SEQ ID NO: 645693 - DNA, 82 bp, Homo sapiens
tggaggcgctcttcctggtgtcccgcccagtagattttgcaagaacgaggctcaaggatgtgagggacacagtattgacagc

SEQ ID NO: 645694 - DNA, 100 bp, Homo sapiens
ccaaaggaagctccaaagtccttcagcttcgactattcctactggtctcatacctcaattcttagatatggcagaggtattgcccccatctggatttctg

SEQ ID NO: 645695 - DNA, 108 bp, Homo sapiens
ggaaactggacctgtctgatactaagtctattcgagcttttgctaagggcttcttagctgtattcagagcggaagactctaatacccatagacatctaactgagtttg

SEQ ID NO: 645696 - DNA, 82 bp, Homo sapiens
ctgggccgccttctcatcctgcgggcgcccagggtatttcctgtgctctggacgctgaaagcttgttactgtggagaagcag

SEQ ID NO: 645697 - DNA, 100 bp, Homo sapiens
gtggcctgcgtgtcggcggagtcggcctcattgctacgatttcagagtaccctggtaatagctgagcatgcaaatgattccctagcacccattactttaa

SEQ ID NO: 645698 - DNA, 101 bp, Homo sapiens
cctggagggtctgagcaacctcgcagcccagtacaacatcagcgctctagtcacgattgccaccaagaccttcctccgttatgatcggctacgggctctca

SEQ ID NO: 645699 - DNA, 100 bp, Homo sapiens
ctcatccctgtctctggaaagctggagaaggcctttccatgggtaaggagaaggcacttagcctccagatgatgaaatactgggccaactttgcccgcac

SEQ ID NO: 645700 - DNA, 100 bp, Homo sapiens
tggctgtgccctggagcccagctatgtggaggccctacacagttgcctgcagatcctgatcgcgcagaaagatgaaggtcttagaatcattgattggaat

SEQ ID NO: 645701 - DNA, 51 bp, Homo sapiens
taacaatgtgcttgtgcctcatcaaaggatccggaaagtatggcagaggag

SEQ ID NO: 645702 - DNA, 100 bp, Homo sapiens
gctggcggggggagctgcaggaggaaggtgctgtggggggaggcagcaagagcaactcaccaccagccttgggcccagaagcatgccctgtctccctgcc

SEQ ID NO: 645703 - DNA, 100 bp, Homo sapiens
ccagcctcgtgagcttcggcaccaccttgttagaggtcctcatgcctctcctcctcttgctgctcctgctgccaagccccttacacccccaccccatctg

SEQ ID NO: 645704 - DNA, 100 bp, Homo sapiens
ttggacgtggggaatttctcctggggctcagagtgctcactcagtaacttgatggattttgtgaagaaaacaggcatttgcgcttcaaagtgggaatggg

SEQ ID NO: 645705 - DNA, 88 bp, Homo sapiens
aacattacattatccaaatgtggtcttgtaatgttaaacaatttagtcaagttgtcactcagcccagtccatcagtttctcagcccag

SEQ ID NO: 645706 - DNA, 75 bp, Homo sapiens
attgctcgtgggaacgcttattcaacggcaaaagcaatggccaatgtacatggtggactatgccggcctgaacgt

SEQ ID NO: 645707 - DNA, 100 bp, Homo sapiens
gtctcaggatgttctgagattgcatcaggatattaatgattataaccggagattctcagggcaacccagatctgacatagagacactgcatattttacca

SEQ ID NO: 645708 - DNA, 74 bp, Homo sapiens
caagggcagtcttttcttgctgctgtattactgctgcatattcccagttctcaatcttccttcctccttacaag

SEQ ID NO: 645709 - DNA, 90 bp, Homo sapiens
atcctgtccatcgtgtgcctgatgatcacgcagctggctggcttcagtggaccatttgctaatccagactttacacaacctatctcagaa

SEQ ID NO: 645710 - DNA, 83 bp, Homo sapiens
acagtcgtagatacaaatttttggatgatgatggatccatttctcctattgaggagtcaacggtgatcagttatgaagaaggg

SEQ ID NO: 645711 - DNA, 98 bp, Homo sapiens
gccgccgccgccgccggcttcccgtcctacatggtgctggagaatctggtaaaagcaccattgtgaagcagatgaggatcctgcatgttaatgggttt

SEQ ID NO: 645712 - DNA, 95 bp, Homo sapiens
caggactttctctctgggtccccttccaaaacgcagccaccgccgtcaccaatctctacaaagatcacagattctgctggccatattctctactc

SEQ ID NO: 645713 - DNA, 100 bp, Homo sapiens
gctctgaaagcccgtatgacctccttccacagcgagcccacagcctcggtgccccccgagtcggacgtgtaccggatgctccacgacaatcggaatgagc

SEQ ID NO: 645714 - DNA, 76 bp, Homo sapiens
gctgggagccacatctcctccaatcgagcgtatgattttctgtacggtggtggagtctatggcccttctccttgaa

SEQ ID NO: 645715 - DNA, 100 bp, Homo sapiens
ccaacagctcattttatgttggctttcttctagtcaagatgagtgataaaccagacttgtcggaagtggagaagtttgacaggtcaaaactgaagaaaac

SEQ ID NO: 645716 - DNA, 50 bp, Homo sapiens
caaaatcggagacagagtattgattccagaatgactatcttgacttaccc

SEQ ID NO: 645717 - DNA, 119 bp, Homo sapiens
gagtctacagttataccaagtggatagtagaacttatctactggatttccgtagtattgatggtgaccaagaatatggcccaggtgaccaaagccctggacaaggccctgagcaccatg

SEQ ID NO: 645718 - DNA, 100 bp, Homo sapiens
gtctggaaggcgtgcacgtcatcgatagcagagagaaggttcccatgatcagtggtgaaatatagtgattttcacctgtgcttccattctgaagttctgg

SEQ ID NO: 645719 - DNA, 50 bp, Homo sapiens
gtgataggggttcttgcccaatcaaaaacctgatgttgttgttaaacgac

SEQ ID NO: 645720 - DNA, 100 bp, Homo sapiens
aaggaaggaatatatcctgactgattctgtcaccactgactaaagaagagaaaactgcggcagagcaattcaaatttcacatgccagatttatgaagaaa

SEQ ID NO: 645721 - DNA, 50 bp, Homo sapiens
tgctggcaagtctgaaggtcaaactcggtgaaatacctggagtgctcagc

SEQ ID NO: 645722 - DNA, 96 bp, Homo sapiens
ctcatctggaattttgccgatttcatgactaaccagtagcataagggtccacaacgccacctgcctctccgacgccgactgcgtggctggggagct

SEQ ID NO: 645723 - DNA, 83 bp, Homo sapiens
acggcgagcgcgagcggcgcgagaaagatgggcgggatccccgctgtgaacggccgcggggagcggctgctgctgcacattgg

SEQ ID NO: 645724 - DNA, 75 bp, Homo sapiens
tgtcacaggccatgctctggcaaaaacgtccgccgggatcttcacgtatcaaccggtgaatttacagacttaaag

SEQ ID NO: 645725 - DNA, 99 bp, Homo sapiens
gtgatgttagagaactacagaaacttggtcttccttgacgcagtaaaacgcaggactcttcccgcttggattcgcgaaggtcttgaaaaaatggaacgt

SEQ ID NO: 645726 - DNA, 75 bp, Homo sapiens
ctgattcttcagttcctcgaagaggcggaaggtgctctaccagcgtgcacccaggaatatccaccgccatgtgat

SEQ ID NO: 645727 - DNA, 51 bp, Homo sapiens
attgggacctagctcggcctgggtctcactctgccacccaggctggagtgc

SEQ ID NO: 645728 - DNA, 98 bp, Homo sapiens
cgggcctcaggctccttcctactgtccgagggccaccaggccgccgggggcctgctgcgcccggttttcggctttgtgagaaaccttaccatcaaaca

SEQ ID NO: 645729 - DNA, 107 bp, Homo sapiens
tgcccattctctacctgaacggcgtcgtcgggccgccgcagcccgccgaaggcgcggacaatgcagatcttcgtgaagactctgactggtaagaccatcaccctcga

SEQ ID NO: 645730 - DNA, 75 bp, Homo sapiens
gtgcccttgtggcgaatggggctcacgtcgagaacgatggcactgaatttggaggttctatctaccagaaggtga

SEQ ID NO: 645731 - DNA, 100 bp, Homo sapiens
ctcctgcagtctctctgtgtggctgtaacttacgtgtactttaccaacgagctgaagcaggactttgtgttttatgccccacgtctgagaatcaacaagc

SEQ ID NO: 645732 - DNA, 96 bp, Homo sapiens
tgaagagagggctctgctgtgtgctgctgctgtgtggagcagtcttcgtttcgcccagccaggacatgtctcaggaaggctatggaactagatctc

SEQ ID NO: 645733 - DNA, 75 bp, Homo sapiens
tcgacaagaaggatgaggagtcagcagtgattccagcagtagttcaagtgatgattctccagctcgatcagttca

SEQ ID NO: 645734 - DNA, 100 bp, Homo sapiens
gaagtatgctggccaccagctcccaagaactcaaccattgctgtgaattacgtgagggaaagatattgaagaggagttggacactccgagagtgcagctg

SEQ ID NO: 645735 - DNA, 100 bp, Homo sapiens
gaaaactaactgacccacttgaagctttaaaagagaaatacttgaggccttctccaggattcttgtttcacccacaaatgatcatgacgcagtcctgagg

SEQ ID NO: 645736 - DNA, 82 bp, Homo sapiens
atggaggccggctgaggagcgccgctgcctcgcctcggtcctctccacccggatcctggccatgaaggcctcgctctgcaag

SEQ ID NO: 645737 - DNA, 75 bp, Homo sapiens
gtcgaagctgctgaagtggtttttcctaatggaaaatcacatacctttccagactgcctatgtgcttgctgatgt

SEQ ID NO: 645738 - DNA, 83 bp, Homo sapiens
cgggaggcccgacgcgactgggcccctcagatctctgttgaggagctggcgcggaatctggtcatcaaggtcaacagggatgc

SEQ ID NO: 645739 - DNA, 75 bp, Homo sapiens
agattcgcagtggtcgcttcttctccttgatattctgcctccatggtggcctctctccatccatagacacactgg

SEQ ID NO: 645740 - DNA, 83 bp, Homo sapiens
tatgaacccagaggtcgtggaggtggccgtggaggcagaggtggcatggggtctgtgcagacttttgcagacaaatcaaaaca

SEQ ID NO: 645741 - DNA, 90 bp, Homo sapiens
atggctaaccacctcccctaagacaaggaatttgaccctctagggcatgaatactgtgctgttcagttctgagctgtgctagcaataccc

SEQ ID NO: 645742 - DNA, 73 bp, Homo sapiens
tcagcagcagcagcagaaggtggcagcttccatgccgatcttgcttctgaaatatctacctgggatggagtga

SEQ ID NO: 645743 - DNA, 75 bp, Homo sapiens
agacaatggccccgatgggatggagcccgaaggcgtcatcgagttcttccagatgtcctccaggtgtctgctgcc

SEQ ID NO: 645744 - DNA, 100 bp, Homo sapiens
gtccaggtgatcatggagacgcggcaggtggcctggagcaagaccgctgacaagatcgagggcttctggtcctcactgagcagcgagtcgtcccccgtgt

SEQ ID NO: 645745 - DNA, 100 bp, Homo sapiens
ctgtgttaatggctgtgaccctgacagtaccagtagttattttcccaattctctataaagctggtgagaacagatggggcacggatgaagacaaattcac

SEQ ID NO: 645746 - DNA, 111 bp, Homo sapiens
aagatcttcacagagaacttcttatgaatcaaaaaaggtgcttttggatgctctgtagccacccggggcccaggaggactgactcggcagcaggattcgtgcatgggaatc

SEQ ID NO: 645747 - DNA, 99 bp, Homo sapiens
ggacttaaactgcttacaaagaatggccatgtctacaagtatgatggcttccgagaatcggtctggttccagaacgcccgagccaagttcaggcgcaac

SEQ ID NO: 645748 - DNA, 100 bp, Homo sapiens
gcggcagaagaagacgaagaagcagaagcgtctgctcaggttgcagcaggagagaggtacatgtcccagagcaagcacacggaggcccgggagctcatgt

SEQ ID NO: 645749 - DNA, 82 bp, Homo sapiens
cgccagcaagaacgaggaggacgcgggaagctccaccatgaggcgaggtggatggaggaagcgagctgaaaatgatggctgg

SEQ ID NO: 645750 - DNA, 83 bp, Homo sapiens
cccgcgtccgcgccggccccacagctctgcgtccgggcctccggtgtggctgtctctgatggtgtcatcaaggtgttcaacga

SEQ ID NO: 645751 - DNA, 100 bp, Homo sapiens
ctgtggatccagagacacaggcacgactagaagcattgctagaagcagcagaaaattacttggggcacacagcaaaaaatgctgtgatcacagtcccagc

SEQ ID NO: 645752 - DNA, 145 bp, Homo sapiens
gttgactaagctgaaggaaactgctgaaaacagcctcaagaaaccagtaacagattgtgttatttcaaatatcgataacttgatgaccccagaaggagttggccttaccactgccttacgtgttctctgtaatgttgcatgccca

SEQ ID NO: 645753 - DNA, 107 bp, Homo sapiens
ggagctgtgcagccgcgaggaggcgcgggaggtgttcgagaacgaccccgagacggaagcgccgcggagccatcaacagcaagcagctcacctacctggagaaatac

SEQ ID NO: 645754 - DNA, 87 bp, Homo sapiens
aataccctcaagaggagcaacctcgtcagcagcgaggaaggaaacagcgtgcttatgaggtgatcaaactcaaaggctacacatcct

SEQ ID NO: 645755 - DNA, 103 bp, Homo sapiens
gtgaccgagaccgtgaccgagagcgtgaccgagagcgcgaatatcgtcatcgttagaagattgctgctctctgaacactatagtcgtcgaatctcacaagcgt

SEQ ID NO: 645756 - DNA, 50 bp, Homo sapiens
tttccatgcttcaagtccatcatgttcagattgttgccaatgccaaaggc

SEQ ID NO: 645757 - DNA, 100 bp, Homo sapiens
gtggaggcggcctctctggcagcagacatcagccacgcatctgaccttgttgggcctgcggcctcaccatggacccagaatgcgcccagctgctcccggc

SEQ ID NO: 645758 - DNA, 82 bp, Homo sapiens
gatggctttgttacggtgagcctaaagccagacaaaggtgaatgaaaactttgccattgatttgatagcagagcagcccgtg

SEQ ID NO: 645759 - DNA, 82 bp, Homo sapiens
aaaagaaaatagaagccatgtttcgaagacctgtattacagctcctttggtgaagattaaacagagcttaacaaaactgaag

SEQ ID NO: 645760 - DNA, 82 bp, Homo sapiens
ggggcagccaggcgctccggcgcttctccactggccgggtaaatattgggaagatggattcacccattgaaaagtggaacct

SEQ ID NO: 645761 - DNA, 100 bp, Homo sapiens
caacagatccacctgtattcacttgccgacctgcagcaggttcttcattagaagctgtaaccacctgtgaactatgtaaagagaagttggagcttaacct

SEQ ID NO: 645762 - DNA, 100 bp, Homo sapiens
cagagctggctgtcttccatgatgaaacagcctgctccacccagagaagcacactttgtgagaaccaatgggaaggagcctgagctgctggaacctattc

SEQ ID NO: 645763 - DNA, 124 bp, Homo sapiens
cccgccgtcgcagcccccgcgctggtgcagccaccctcgctccctctgctcttcctcccttcgctcgcaccatggtctcggcgcggaagatggccggcggcgtggacggccccatcgggatccc

SEQ ID NO: 645764 - DNA, 122 bp, Homo sapiens
cggtgagataacatcctacatcactgaagatgatgtggtctacagaccaggaggtcctactgctctgttggctcatgaaataggttttggaagtaaagttacaacacaccctcttgctaaag

SEQ ID NO: 645765 - DNA, 100 bp, Homo sapiens
ctactcactggcgagctcagttggaaattcactcccaataggagttccacggcagacacatctgaacttgaagatgatttacttggagaagatttgctat

SEQ ID NO: 645766 - DNA, 100 bp, Homo sapiens
gcaaggcctgctctgtgcggagcagaaacgccttgtgcgaacagaaataaattcccgcggaaaggatgtcatgcttcaccccttcctccatctgctgcac

SEQ ID NO: 645767 - DNA, 75 bp, Homo sapiens
acttgtgcagaccgggcgagcagagtaagaagcaggacagagcgggatgccaccagcttgtccaaagggaagttc

SEQ ID NO: 645768 - DNA, 100 bp, Homo sapiens
ccacaaatgtttttctgttttgcctgaatacatgatttaaacaagagatttccacagaagtctaataaagttcctgtcgttcagcacccgcatcacatgc

SEQ ID NO: 645769 - DNA, 102 bp, Homo sapiens
gggcagcccccaccacccgcccaggccagccccagcagcaacagcagcacagtttccaaggcaggaaaggtaaagagacaaagaaagtgccttgtacagatg

SEQ ID NO: 645770 - DNA, 82 bp, Homo sapiens
agcgactgagtccgcgatggagaacggaaagatgctgaaggatgggagaccgttcagagaggaaggcctattcgttctcgat

SEQ ID NO: 645771 - DNA, 100 bp, Homo sapiens
gcgggtgagcgcggcgagcggcgaccctgtgggtaattccagaattgattggccataccattgtcactgtattactgctcatgtcattgcactggttcat

SEQ ID NO: 645772 - DNA, 102 bp, Homo sapiens
gattgagttaatgaacttcacgcctcagcgtccagggcgtctctggccgagcctctttttgtggaaaacgacagcagcagcagtggcctggaagacgccacc

SEQ ID NO: 645773 - DNA, 89 bp, Homo sapiens
gaaatgtcattgagcgactccagggctatggcgtgtgctcggtggggctggagcggctggcttacctcctcgtggcttacagcctgggc

SEQ ID NO: 645774 - DNA, 100 bp, Homo sapiens
cggggattggcgggatgcggcgcgccgcgcggtacatcaggaacgtctctatcaagaatacaatttcagcaaggctgagggccatctgaaacagatggag

SEQ ID NO: 645775 - DNA, 100 bp, Homo sapiens
agagatgaggccggagcccaccaagttctgggaaatgccttcaattaagttgcagagttctgatggagagatatttgaagttgatgtggaaattgccaaa

SEQ ID NO: 645776 - DNA, 96 bp, Homo sapiens
aacttctcttcgcatcggcggcggcttccgtcacctccgctcccccgatcctattcccagtcgttaccttggccatgtagaagttgatgaatcaag

SEQ ID NO: 645777 - DNA, 95 bp, Homo sapiens
ggggcagctggacgagctggagaaggccatcaccacgcagaacgtcaacaccaagtgcatcaccatccccagggaactgactcttttttggagta

SEQ ID NO: 645778 - DNA, 83 bp, Homo sapiens
ctgctgctgagctacccgagcggcggcggcggcagcagcggcagcggcaagcaccgtgcaggtcttctgaacaaatgcctcct

SEQ ID NO: 645779 - DNA, 83 bp, Homo sapiens
ctccggcataagctcaatcttcggatctatagcatgatgctgcgattatctgccttatttgaaagtcatatcaaaaatatcat

SEQ ID NO: 645780 - DNA, 87 bp, Homo sapiens
tcaaggaggccttccagctgtttgaccgaacaggtctgggcccctgctgctgacatcccccacatgtcagtctgcctgctagtggga

SEQ ID NO: 645781 - DNA, 102 bp, Homo sapiens
gtgaactatagagtttgtggacagatttatattggaatgtatcctgtcaggtataatgtcagtgaatggcaagaaagttcttcatatggatcgaaaccctta

SEQ ID NO: 645782 - DNA, 74 bp, Homo sapiens
ccatgactgggatttagaggagggtcagtatagaccttctgatttgctgtgccctgagacatatgtttgggtac

SEQ ID NO: 645783 - DNA, 100 bp, Homo sapiens
ccgtatactatggatccagatcatagactcttaattagaaatacaaagcctttgcttcagagcaggaatgctgcggttttgtttatcagaaaccagttgt

SEQ ID NO: 645784 - DNA, 89 bp, Homo sapiens
cggatattctaggatcttccggagctgccgtgcatacctgtgtgaaagcaaccttccactcctcctcgccctctgactaatatgaatga

SEQ ID NO: 645785 - DNA, 75 bp, Homo sapiens
cgggcaggtcgatgcccgattctttggacaacatgacagcagagaggggcagcaggatgaatgtgggcacagcgc

SEQ ID NO: 645786 - DNA, 74 bp, Homo sapiens
tggaaagtcaggaccgcgacggcagcagagcagtacagcaatcatttgaaactccaagggccaaagctcaaatg

SEQ ID NO: 645787 - DNA, 50 bp, Homo sapiens
cgtgaccaccggcctggtattgggatggcaggtgacagcagggacatgtc

SEQ ID NO: 645788 - DNA, 82 bp, Homo sapiens
ggcaagatgatccaccagcggttccatcctacacttggcctcttagcaaatatccggctgtgatcaatgatatttcattctg

SEQ ID NO: 645789 - DNA, 74 bp, Homo sapiens
ccctcagaatatgactctctgcctgaaaatagcgagacagggtccccggcagcacacggccacagcgctccttc

SEQ ID NO: 645790 - DNA, 82 bp, Homo sapiens
tggtggtccaccccctggtgctgctcagtgtggtggatcatttcaaccgagtaatcaagtcagaggattatatgacttttat

SEQ ID NO: 645791 - DNA, 98 bp, Homo sapiens
tcaaagatgccagatgtgggagacacgccaaagctcccaaggttgtttgatgtgtgcacagtgtcacgaacagacagagaaaccaaactaactttagt

SEQ ID NO: 645792 - DNA, 88 bp, Homo sapiens
gagcgagctgagtggttgtgtggtcgcgtctcggaaaccggtagcgcttgcagcatgaatatatacagccctgctctgggacacacct

SEQ ID NO: 645793 - DNA, 75 bp, Homo sapiens
catgctagtcatggagatcgagaggaaataatgagttcactgattaccaaagctatgtcatccatggctgcctgg

SEQ ID NO: 645794 - DNA, 97 bp, Homo sapiens
ctctacttagctcagcaattcttaccttgaatgtatcctgtcaggtataatgtcagtgaatggcaagaaagttcttcatatggatcgaaacccttac

SEQ ID NO: 645795 - DNA, 50 bp, Homo sapiens
ggcaacttctgaagacttcaacaagtttgaacgccatgaccctgtggatg

SEQ ID NO: 645796 - DNA, 73 bp, Homo sapiens
agaaaatgcaaactgaaacctgggaaacagtgcaggtttgatgaacttgtgaaaaaattcaaagtcgaatatc

SEQ ID NO: 645797 - DNA, 85 bp, Homo sapiens
caacttcatcagctgcttggtcaggctggacgccatgttccttaatatgatcctctgttgaagcaagaagacaaactgtatggtg

SEQ ID NO: 645798 - DNA, 76 bp, Homo sapiens
ggtgttacctggagcttaaaaagctgcacgcaagtgttaaacttctgggaaaagactactttgtgtgtatccattc

SEQ ID NO: 645799 - DNA, 98 bp, Homo sapiens
cgcgggtcggagtctgggggttcgcgcccgccgacccgcgccctgctccctctcagcacctgggcggacgggaaagtgtggagagcctgattcaaaag

SEQ ID NO: 645800 - DNA, 75 bp, Homo sapiens
accgattcctctcgggctcttgggcgctgctctgaggtttctctggaaacccccctggtaagtgtggaggaggcg

SEQ ID NO: 645801 - DNA, 100 bp, Homo sapiens
gcacggtgcgggccatgagcggggcggtgccccaggacctagcgcaatggcaccagcatgatatcattgatcattcctcccaaagaccagatttcacgag

SEQ ID NO: 645802 - DNA, 75 bp, Homo sapiens
gtgccggcctagcgtcctggaattacttcaatcaagaggaattttgttgtcagagaataaaaggaggttgtccat

SEQ ID NO: 645803 - DNA, 100 bp, Homo sapiens
ctcgagcttctcagtcagtcctgcctcatcccagccatgtcatcttatctacgaaatgattcagtaacaaatgtggcaattattttggatctatcacctg

SEQ ID NO: 645804 - DNA, 100 bp, Homo sapiens
gacattattgcgcgtggaacggctgcttttggaaggaaacattggcaaatttggagcgacagatctatgcttttgagggaagctacctggaagacactca

SEQ ID NO: 645805 - DNA, 100 bp, Homo sapiens
agaaacatatactgcttacctcattgaaacaaggcaaggggagagccagttgcgcagagccctgcaaccagcagtccagggagaagtggtgaatgtcatg

SEQ ID NO: 645806 - DNA, 90 bp, Homo sapiens
tctacagcacctatcacttgttccctccaagacaactgaatgaaacctcctccagctcgcttaggatgggggcctatgtcttcatcggcg

SEQ ID NO: 645807 - DNA, 98 bp, Homo sapiens
acaggtgtttgtctcagaaatcgtatacatagacggatctcaatggagcatttgctggacaaattatgcaaagaaatagagaaagatctgcgactttc

SEQ ID NO: 645808 - DNA, 95 bp, Homo sapiens
aaattggagcaaggagaagagccgtgggtaggagatggagaaattccaagttcagattctccaggacagccttcctcctgaagagaatgtctttg

SEQ ID NO: 645809 - DNA, 100 bp, Homo sapiens
ctgaggagtccaacatcaccatgcaggtggaatgcaagctttaggacttcacctgacagatccaagtcaacgtcttgttcagaactgtctttggactctc

SEQ ID NO: 645810 - DNA, 101 bp, Homo sapiens
cctcgagccagcccgccagcatgccccagtccaaaggaccaagaatcgccttcagccctgtctggtgcatccttggcagaaagtgaggaggaaaacacccc

SEQ ID NO: 645811 - DNA, 100 bp, Homo sapiens
agattcaccaaataagctatatactttggttacctatgtacctgttaccactttcaaaacaaaagctgatgaagcattgaaagccaaagaaagaaatgag

SEQ ID NO: 645812 - DNA, 100 bp, Homo sapiens
cccggcgcagccagagccaccagcgcagcgctgccatggagcccagcagcaagtgctggctgaagatgcaatcaaggccgccctggctgattacaaattg

SEQ ID NO: 645813 - DNA, 75 bp, Homo sapiens
tcgaggagctgaagtcagagagagacacgacaatgcagatcttcgtgaagactctgactggtaagaccatcaccc

SEQ ID NO: 645814 - DNA, 100 bp, Homo sapiens
agctgttcctcccagctacgagctgccccagcaacacgctagaagggtttatgaaattcttcgactactggtaactgacatgagtgatgccgaacaatac

SEQ ID NO: 645815 - DNA, 100 bp, Homo sapiens
tccgcttctcagaggacgccttcaacaccaccttcatctccaccatcggctttccttaaagtttcccatgtctcaatggactcctgaatataacgagctc

SEQ ID NO: 645816 - DNA, 75 bp, Homo sapiens
ctggaacttgccctgtctcctcgcagatgagtgatgtcttggcattgcccattttcaagcaggaagattccagcc

SEQ ID NO: 645817 - DNA, 100 bp, Homo sapiens
tggagagggactgacgtgtttggagggaaatgggaatgtacacgataattaaagagtaaagttgtgctcaacgctctcaaaggtctatggccctgtgttc

SEQ ID NO: 645818 - DNA, 98 bp, Homo sapiens
gtctgtgtgagcagaggggagagcggccgccgccgctgccgcttccaccacaggtgtcatggagaaactccagctgggcccagagattctgcagcggg

SEQ ID NO: 645819 - DNA, 75 bp, Homo sapiens
gtcagctgcgtttccgcggtcgcgggtatcagcagatgttgcacacaaacttggtataccttgctacaatagcag

SEQ ID NO: 645820 - DNA, 80 bp, Homo sapiens
accaagctcaaacacctgtgggtgacaagtctggtttctctggaaaatgtaaacaagatggagagaccagagaagagaac

SEQ ID NO: 645821 - DNA, 100 bp, Homo sapiens
tgttggcaatctgatccagcctggggacattatccggctcaccaaaggtgttcctaaacccaaaggaaagaaaaccaaagatatgaaaaaacctgtcaga

SEQ ID NO: 645822 - DNA, 100 bp, Homo sapiens
accagccaatgatcttttcaatgctgcgaaagctgccaaaagtgacatgcaggcagctcactttgctggtggccagtgaggactcaagctacatgccagc

SEQ ID NO: 645823 - DNA, 75 bp, Homo sapiens
gttcaaccctccaaaagagcccatgaaagatgacgtacatcaggaacgtctctatcaagaatacaatttcagcaa

SEQ ID NO: 645824 - DNA, 98 bp, Homo sapiens
cgggtacttatctccgacctccggctagtgggaaaggccgcgcgaccgcccgtcctccaactacagggaccgcacgacagagtcttgctttgtcaccc

SEQ ID NO: 645825 - DNA, 75 bp, Homo sapiens
gttgctgcaaaataaagtccctttgctcgcaaaagatacagatattgtggatgaagccatctattacttcaaggc

SEQ ID NO: 645826 - DNA, 100 bp, Homo sapiens
gatgaatcccagggggagatttatagatccattgaacatctagataaaatgctcggggtgtggttttctctcggttgtgcctatttggccttggaagact

SEQ ID NO: 645827 - DNA, 100 bp, Homo sapiens
aggtgatctggacaaaggaacaggtatctcaggtgaatctggattgggaaagtcgacattaatcaactcattattcctcacagatttgtattctccagag

SEQ ID NO: 645828 - DNA, 73 bp, Homo sapiens
aggaagccagagccacacacaccatcatggtcctggtgtaaaaggaagagaatgtctcctggacctaattgcc

SEQ ID NO: 645829 - DNA, 100 bp, Homo sapiens
ccgacttgaaggtagaagttccttgaaagaaatagaaccaaatctgtttgctgatgaagattcacctgtgcatgaggcaaccagaaggatgaatgatatt

SEQ ID NO: 645830 - DNA, 142 bp, Homo sapiens
ctgaggcccagcccccttcgcccgtttccatcacgagtgccgccagcatgtctgacaaactgccctacaaagtcgaaggaggcttcgatgaagaaagtggtgcggccccggacccccctatctgcgccctgcgtggccaccc

SEQ ID NO: 645831 - DNA, 100 bp, Homo sapiens
cagtagtttgggtgtgatggagggaaggcagcatggcacgctgcatggagccaaaatcgggtctgaggtgtaatcctgagagattcacatggtgttgcac

SEQ ID NO: 645832 - DNA, 83 bp, Homo sapiens
gcctgagacagctgtgcgaggctatcggcgcttcctcaagggcactgagattgacatcttcagctacaagcccacactgctca

SEQ ID NO: 645833 - DNA, 100 bp, Homo sapiens
actccagcagccaagatggtgaagcagatcgagagcaaggtaatggaactgctggtccatctgaataaacgtataaaaagccgccccaaaatacaacttc

SEQ ID NO: 645834 - DNA, 110 bp, Homo sapiens
gtttgaaagcgtgctccacaaatatttacagtcggaggagtactcggtgaaatcctgtcctgaagactgtaagcttgttgcagatccttgtgccagcaacccttgtcacc

SEQ ID NO: 645835 - DNA, 100 bp, Homo sapiens
catccatccagatgaacgtggccgagtgaaactggaacgccaagctgaagaagaacgaatacggaagcacaaagcagctgctgagaaagctttccaggaa

SEQ ID NO: 645836 - DNA, 82 bp, Homo sapiens
gatcgcctcccttgatgtcaaggcatccccaatggattggacaattgccctaaagtccccaacccactacagacagacaggg

SEQ ID NO: 645837 - DNA, 90 bp, Homo sapiens
ggagtgtgacagggatgatgaagaagacctgctggatggcattgatcaatatgacagagatagcatcataaatgactttaagaatgggac

SEQ ID NO: 645838 - DNA, 100 bp, Homo sapiens
cacgggcttgaaaccaagataccattttgctgctttggaaaagacctattatgagaggcttccatatcgagtaacacagcatctggtggaatgacacgac

SEQ ID NO: 645839 - DNA, 95 bp, Homo sapiens
cggacggctgcgtcgcccgaggcgaggaggagcgctggcggagctgtggctaaaggaagtggaggggccgtgggatgcggagagccgagggctaa

SEQ ID NO: 645840 - DNA, 100 bp, Homo sapiens
ggctccatggtgggattgtcgggcggtcagcggacttcgtggtagaatccattggctctgaagtggggtctctggcattggattcaaaggctaacaattt

SEQ ID NO: 645841 - DNA, 83 bp, Homo sapiens
atttgcttggaaaaacgtgtgggtacgaccttgcttcttggacacttaatgattgttggcaagaaatgtgctgctgatctggg

SEQ ID NO: 645842 - DNA, 82 bp, Homo sapiens
gcgggaggtgttcgagaacgaccccgagacgaggacgggaggggcaagctgcggccaaccaaggccaagagcgagcggaaga

SEQ ID NO: 645843 - DNA, 100 bp, Homo sapiens
gtaacggaaatccttgggtttgaagatgatgttgtgattgagtttatattcaaccagctggaagtgaaggcagtccttgatggagatgcagagtcgtcat

SEQ ID NO: 645844 - DNA, 101 bp, Homo sapiens
ctggccgaagtcttttttacctcctgggggcagggcagacgccgtgtgtctgtttcacgagcactacaaacaccactggtttcccgaaaagccgtccaagg

SEQ ID NO: 645845 - DNA, 100 bp, Homo sapiens
catggtttcaatcaagtccccagagaacacatttgtcttctgagctgctggcagttttgagttttaattgataaagaccagagtccaaaatggaaaccag

SEQ ID NO: 645846 - DNA, 96 bp, Homo sapiens
gtccagctcaaacaggaagatgggagcctctgccttgtacagttcccatcacactgctctggcccatttagagtctcttgcagtggatgttgaggt

SEQ ID NO: 645847 - DNA, 100 bp, Homo sapiens
ctgtatgcaagttttcacttatctcgaaagcctatcagcatagttaaggtcagttcaccgggacctggaggcccagattgcgatcgtgacggagaaccag

SEQ ID NO: 645848 - DNA, 100 bp, Homo sapiens
aggtacctgcatcaacccctctaactggtgtgatggcgtgtcacactgccccggcggggaggacgagaatcggtgtggagctaatttcgttactcgaaaa

SEQ ID NO: 645849 - DNA, 82 bp, Homo sapiens
tttaagaaagaagatgttaactttcagtgtaaacaggaacatcgataagtagtgtaaaaacttgcacaatgaaatccgaagc

SEQ ID NO: 645850 - DNA, 100 bp, Homo sapiens
tgctgcctctgtgtacgctgaggggggaggttattcagcttctcaaggctggaaaagcgaaggaagtttcctacaatgcactagcctcacacataatctc

SEQ ID NO: 645851 - DNA, 100 bp, Homo sapiens
tctactctgtcgctcttgtgccctagcaccccgagaaccgtcagtttgagccagatgggtgcggggggcaatggcactgcagctctgggccctgaccctg

SEQ ID NO: 645852 - DNA, 90 bp, Homo sapiens
gccggacaaggcgccgcggcgactcaacaagcggcgcttcccggggctgcggctcttcgggcacaggaaggaagcagccaccctcgccat

SEQ ID NO: 645853 - DNA, 93 bp, Homo sapiens
gggccggccgcccagacgctgcccgcgggcccggccacggcggagccaagctctacgaactcgacggggaccccaagaggaaggaattcctgg

SEQ ID NO: 645854 - DNA, 101 bp, Homo sapiens
acttcgaaacgtgataagaagcacctggatgagacatttgctacagcatcccacattaagtcaacgcacaccaatgactttgccctgtacacagaagccat

SEQ ID NO: 645855 - DNA, 112 bp, Homo sapiens
acagtttgcatgtgacaatggattgaatgtgagagttggtgttggtattaggagatctgcacatcccacaccggtgcaacagtttgccagctaaattcaaaaaactcctggt

SEQ ID NO: 645856 - DNA, 76 bp, Homo sapiens
gaagatggcacatggcccaggcagaccttgcagtcaaacgtggggtagagcagcggctgccatgctcttctgtggc

SEQ ID NO: 645857 - DNA, 83 bp, Homo sapiens
cgagaagccctacgagtgcaacatctgcaaggtccgcttcaccagacgcatcttctctccagactgccgatcccagaaagcca

SEQ ID NO: 645858 - DNA, 73 bp, Homo sapiens
ggttctgcaccatcttcaggtcctactccaggggcgctcaggcacgtgtggttctcaaatataggcattctga

SEQ ID NO: 645859 - DNA, 50 bp, Homo sapiens
tgaggagctggtctatgaaaagattatatgcgtcaggcaggagaagtgac

SEQ ID NO: 645860 - DNA, 75 bp, Homo sapiens
gacttgtctgacctagaagctgagaaactggtgatgttccagaggaggcattttgttcccaacatcacctttggt

SEQ ID NO: 645861 - DNA, 76 bp, Homo sapiens
tccaccatccggctccctcacgtcaagtacatctgtccccatgcctagatacactgtcagatcctttggcatccgg

SEQ ID NO: 645862 - DNA, 100 bp, Homo sapiens
tttgcctgactgcttcaaaatttgtggcgcatcttattaaccaaaatgtggaagtaccattggcacaaactgcacagcccacatcagctattgttcgtcc

SEQ ID NO: 645863 - DNA, 83 bp, Homo sapiens
gttggaagcagccgatccagcctgcggagcctgtggggcagacttcccaagtaagaagcggaagaggagccgctggaaccaag

SEQ ID NO: 645864 - DNA, 98 bp, Homo sapiens
aatcttagaatcacccaagaaggcaaagtcgcgtttaataacctgccaatttgtggtgtctgaagaccaagactacacagctcattttgctgatcctg

SEQ ID NO: 645865 - DNA, 75 bp, Homo sapiens
atgggacaagctgatgtctccagaccggtaaatccagatgcagttgctggaatagtcaaatgatttcagttcgtg

SEQ ID NO: 645866 - DNA, 82 bp, Homo sapiens
cgggaccggctgtatgattaggccacaatcttcaatgagtaaacatattcctatgaaggatttgggggcagagcacttggca

SEQ ID NO: 645867 - DNA, 87 bp, Homo sapiens
agacccagaggacactaaccaaggaacgtcaaggtcgtgggaaataaaaggcagttctacacagactgcagcaacggttgcatctgc

SEQ ID NO: 645868 - DNA, 75 bp, Homo sapiens
tgtgggcactgaagggggactacaggttcgagagagttattcctgatgaagctaaagctttgtctctgttggcac

SEQ ID NO: 645869 - DNA, 85 bp, Homo sapiens
acgcggccacctcgaagccacgtcagggcagccccaggtcgggcgcgtgccagcagccagagatgatgaggagtctgatgaggaa

SEQ ID NO: 645870 - DNA, 98 bp, Homo sapiens
ttgcttcacttagctctacaatcaacccatgtggtgctcagcagggagaccccctttcccgctatatcttcaggaaggctggggagatgctgggcaga

SEQ ID NO: 645871 - DNA, 97 bp, Homo sapiens
agtgcactgctttttgcatggagaaagtcttgctgctactttaaaaagggtcgacaagaagatgctgaggaatacttaggcttcattctaaatggac

SEQ ID NO: 645872 - DNA, 88 bp, Homo sapiens
aagctgagcctttctggacagaccaacctgtcagtgctgcaaacagcacccaagaaaacctcatttggctcgctgaaggatgaagacc

SEQ ID NO: 645873 - DNA, 90 bp, Homo sapiens
gggccagcacagtggttttggcccccagcccaaccctgagaaagttcagaaccacagggacacggccaacacggtgaaggaaaagttcgg

SEQ ID NO: 645874 - DNA, 98 bp, Homo sapiens
tccagggtcttctaagtcagagacatcaaaacctggaccttctggattacaggccaaattagcaagaggaatgtttcttgaacctagaggctcctata

SEQ ID NO: 645875 - DNA, 83 bp, Homo sapiens
gttctccctctttgctggaggcatgctggtatgatctcgtgaaaccttgagagaaactgaatgacgaatgaaactattgttcc

SEQ ID NO: 645876 - DNA, 83 bp, Homo sapiens
atcacagactgtgagatgaacagcccccagttccgggctgtcttgggcgaagtgaaactgtgtgagaagatggcccagtttga

SEQ ID NO: 645877 - DNA, 50 bp, Homo sapiens
tgcacattcattctcaaaaacccacctgaaacacaccgaggagatcacca

SEQ ID NO: 645878 - DNA, 82 bp, Homo sapiens
gacgccatgcagaaagcctgcctgaatggctgtgccaagtctgtttctgtcgactgtggaccacttatgtgcgatccgtgga

SEQ ID NO: 645879 - DNA, 75 bp, Homo sapiens
gcaccccgggcgggcggcggctgctgccgccatggcatcagatgaaggcaaactttttgttggagggctgagttt

SEQ ID NO: 645880 - DNA, 97 bp, Homo sapiens
gccgtgatcgtggcgttcgcctttaccaccctcctcatcgcctgcctgctgctgcgcgtcttcaggctgaagccgacgtagcttctctgaacagacg

SEQ ID NO: 645881 - DNA, 74 bp, Homo sapiens
tttacgcggatgtcggcgaagagttcaaccagatatgtcaagggttcaagatgatgaagttggtgatggcacta

SEQ ID NO: 645882 - DNA, 90 bp, Homo sapiens
agcagggtcgaccaagaactgtgaagagaggagttgagaacatctctgttgacattcattgtggtgttatttgagcttgcccgctaccac

SEQ ID NO: 645883 - DNA, 75 bp, Homo sapiens
ccagcactggtcatgtctaaaggtggaaccgtcccaaaatgtcccttgctcagaagaaggatcgggtagctcaaa

SEQ ID NO: 645884 - DNA, 100 bp, Homo sapiens
catcagtcaccatgtcaccttcgcacctctgctctcagataatgtcccccaaaccccagacattactggttatagaattaccacaacccctacaaacggc

SEQ ID NO: 645885 - DNA, 74 bp, Homo sapiens
agctggaaatagggcacagatccaggttctgctccagacgagcccttaccacgttgactcactcctgcagctca

SEQ ID NO: 645886 - DNA, 108 bp, Homo sapiens
gaagatgttcagcgtagagtcgctggagcgggcggagctgtgcgagagcctcctcacttggacaatgcagatcttcgtgaagactctgactggtaagaccatcaccct

SEQ ID NO: 645887 - DNA, 75 bp, Homo sapiens
cgcagatgcccaccggaatggagaaggaagaggagtcgttttctttttaaaagcggaaggagagttttacatgga

SEQ ID NO: 645888 - DNA, 90 bp, Homo sapiens
aacctggtattgctggcttcaaaggtgaacaaggccccaagggagaaccttcttcgagtgcttcgactgaccatgatcccctgggccccc

SEQ ID NO: 645889 - DNA, 121 bp, Homo sapiens
gagaagcggcagcagtcccttgggggcttctttaaaggcctgatctgaacagaattaagacgaacgagctttcacaattgcagcagatgaagatccattggtaaattgatcaggatttttg

SEQ ID NO: 645890 - DNA, 100 bp, Homo sapiens
tccacgtctaggacagctgcgcttcttctttcagctgttcgttcaaggctatgccctgcaactgcaccagttacagaaactgccagaggcatgcagcatt

SEQ ID NO: 645891 - DNA, 83 bp, Homo sapiens
gtttttcggatcatgtctggtggctccgcggattataacaggcatacctagatgaactggtagagcttcacagaaggttaatg

SEQ ID NO: 645892 - DNA, 75 bp, Homo sapiens
cagcagcagctccagcaggcgctggctcctgctcaggttgcacgttttcaaaaaatacctaatggtgaaaatgag

SEQ ID NO: 645893 - DNA, 82 bp, Homo sapiens
atcttcttccttaggaaaccaggtctttttggagttcctgagctgagtgccccagaaggatttcatattgcacaagaaaaag

SEQ ID NO: 645894 - DNA, 129 bp, Homo sapiens
gctgttgatgctggctttgttcccaatgacatgcaagttggacagacgggaaaaatagtagcaccagagcatctttccttgaagaagtacattattgacattgtggttgaaagtacagctccagcagaa

SEQ ID NO: 645895 - DNA, 74 bp, Homo sapiens
tcagaccttcaactggaatacaaggtgactgtcgttcctacagttacgtgtgtggaatctccagtaaagatgaa

SEQ ID NO: 645896 - DNA, 51 bp, Homo sapiens
ataatgtctgttcttctgccatggttttaaatgcacagagagcaggataca

SEQ ID NO: 645897 - DNA, 87 bp, Homo sapiens
agagtcagtattccggccagcttcacgaagtcagagaggtcttaattacagagcacggtgacctgggtaatagcagatttttagatc

SEQ ID NO: 645898 - DNA, 71 bp, Homo sapiens
caccaaagacctgcgactttgctcagcttgccttgcgccatggactggcagccagacgagcagggcctgca

SEQ ID NO: 645899 - DNA, 75 bp, Homo sapiens
acggagacttggatgaggtgaaagactatgtggccaagcggggatctgatgagcttctttcttctggcatcatta

SEQ ID NO: 645900 - DNA, 100 bp, Homo sapiens
ctggtttaaagacataaagtttgatgacagtgacacagaacagatagctgaagaaggtgacgataatttggctatgaatggtagtgtctagaaagggtat

SEQ ID NO: 645901 - DNA, 95 bp, Homo sapiens
cgagcccgaggacatggagatggaagctacgagttccagggagctctgtcctggtgaccgtgcccgggttatgacgactaatcccaaaccgaata

SEQ ID NO: 645902 - DNA, 75 bp, Homo sapiens
ctttgaccatgaagagaaatgagatgatagccaaaccctcagcaaaccagtccagctacgggggcccagccagcc

SEQ ID NO: 645903 - DNA, 100 bp, Homo sapiens
tcatcaactggggatgattacagttcttcctaaaaaagagctgtcgtcgagaaatatctgcttgaaaagtctcgcctggtgtctcaggagaaggatgaga

SEQ ID NO: 645904 - DNA, 98 bp, Homo sapiens
tgcagctccagagagacgtgaaacatgtgaacactcaagtgaagcaaaagccttccatgattacaaaggaagctgttgaagttattgaagtacctgtt

SEQ ID NO: 645905 - DNA, 83 bp, Homo sapiens
ggcaatgaacacccttttatcttgttttgcaggcgaaaccacaatttctccaaaagaggtctgtgcggccctcaatgtcactg

SEQ ID NO: 645906 - DNA, 75 bp, Homo sapiens
agatacaaatttttggatgatgatggatccatttctcctattgaggagtcaacattggtggaacgagaatgccta

SEQ ID NO: 645907 - DNA, 82 bp, Homo sapiens
caccaagtccggatgctcactccaaagtctcagcagaggctgggaggcggcagaatgcagccagaggagggcacaggctggc

SEQ ID NO: 645908 - DNA, 75 bp, Homo sapiens
attaaagcaattatgaaagaagtcattccttttttgaagccagctgaggtgggtgtcctggttggcaaagaccgg

SEQ ID NO: 645909 - DNA, 83 bp, Homo sapiens
cggctgtatgattaggccacaatcttcaatgagtaaacatattcctgtaaattcgaaccaccattatttcacccgaatgtgta

SEQ ID NO: 645910 - DNA, 82 bp, Homo sapiens
gggtcgctggctctgctgctgccgccggcgaaggaggaggcgttgccggcttgcaaaccatactgggtacatcaaagttgac

SEQ ID NO: 645911 - DNA, 118 bp, Homo sapiens
cactggattgaggatgtgaggaagtatgcgggctccaacattgtgcagctgctgatcgatctgactgcagccatgagcagcaatgagtgcttcaagtgtggacgatctggccactggg

SEQ ID NO: 645912 - DNA, 83 bp, Homo sapiens
cgcgatgggcgcctgtacgcctcggagaaccaccaggaaattttgaaactgcggttggatttctcacgatgtccagtgttatc

SEQ ID NO: 645913 - DNA, 82 bp, Homo sapiens
ggctggtgaagaatgattccagcgtggggacagaggctgacatttcttgcgttgtgaactaaaggccgacaaagattatcac

SEQ ID NO: 645914 - DNA, 98 bp, Homo sapiens
cgggcggcgggcggagacgtgggcgccctccccgccaaggcccgtgcgaggtagctacagcaagctgggtagcaggcagatccaaaggatatcatgaa

SEQ ID NO: 645915 - DNA, 90 bp, Homo sapiens
gttttgtgaaaggccaatttcatgaatttcaagagagtaccattggggggtcctgatgaagaagctgttgtggatcttggcaaaactagc

SEQ ID NO: 645916 - DNA, 75 bp, Homo sapiens
aagaagcccatggtggacgcccagcacttcctgccggccgtttgtcagaggaatggctgtgaatggatgcctgga

SEQ ID NO: 645917 - DNA, 82 bp, Homo sapiens
tggaacagtttgaggacctcctggtgcgcatcctgctgctggctgcccttgtctcctttcccccttacccaggaatggaaca

SEQ ID NO: 645918 - DNA, 98 bp, Homo sapiens
tcaaggccctgcccccagccctgcagggcaattgaaggaacagactaaaaatcgtgtcctggaaggaaactacaggtactaccagggattttcagtct

SEQ ID NO: 645919 - DNA, 75 bp, Homo sapiens
aatgatgaagatgcgacaggctaagctggattatcaggtgctggagaatctggtaaaagcaccattgtgaagcag

SEQ ID NO: 645920 - DNA, 96 bp, Homo sapiens
aacaactcccctcggacctcagtatgggctggaacctgacacttggcatgacagtggaaattgaagttggtggtggtcggaaagctatcataatct

SEQ ID NO: 645921 - DNA, 74 bp, Homo sapiens
ctctgtcatcatcagcgccctcaagacctacctggtgtcgggattcggaggaacctgagtgcctcagtcatcgc

SEQ ID NO: 645922 - DNA, 75 bp, Homo sapiens
tgggcacagctgaatggaaagccagtaggacacgaaggtgaaaaaagccttcatgctgagtcaccaggattctca

SEQ ID NO: 645923 - DNA, 96 bp, Homo sapiens
aacctgacaattctgtcgtgtcccgatcgggcccgggacacccagacagatgagattgtcgcactgaagaaggtgcggatggacaaggagaaggat

SEQ ID NO: 645924 - DNA, 87 bp, Homo sapiens
aggattggggtggtcgcagtcacagctactcggactgcttgtactgaggagtacctgtcatttgcctttgagcattgtcaccgttct

SEQ ID NO: 645925 - DNA, 82 bp, Homo sapiens
gacgacgctcgcggaagcagaggtttggggttatggaaacaaaggacatgctttacatcgtcactgaatttgctaaaaatgg

SEQ ID NO: 645926 - DNA, 82 bp, Homo sapiens
gctgagcggcgagtttccgatttaaagctgagctgcgaggaaaatggcggcgggaggtctcggcgcggaagatggccggcgg

SEQ ID NO: 645927 - DNA, 97 bp, Homo sapiens
ctcgtgggagccccgcgggtcctgcccagtgccggtggtggtgtgcacattgagccccggtatagacagttcccccagctgaccagatcccaggtgt

SEQ ID NO: 645928 - DNA, 112 bp, Homo sapiens
cggtcccctcccacctcgtctgggctcgcggcgtctccggggaaagccgtggccccgagggcggatccgagattctgcttctcagaagatgcactattatagatactctaac

SEQ ID NO: 645929 - DNA, 75 bp, Homo sapiens
agcagaagcagcgcctgatcgagtccctccggaactcacactccagaaaacccgctatgaaatgtatgtcagcat

SEQ ID NO: 645930 - DNA, 100 bp, Homo sapiens
aaaggggtttctctggatctcagcaactgtgagatcttcccagacccgtcagattttgaccgctgctgcaaactgaaggaccgtctgccctccatagtgg

SEQ ID NO: 645931 - DNA, 100 bp, Homo sapiens
ggtctgatccggaaatatggcctcaatatgtgccgccagtgtttccgtcagtacgcgaaggatatcggtttcattaagagctgtaggtaaaacttgccta

SEQ ID NO: 645932 - DNA, 100 bp, Homo sapiens
tgcgaggagagtaccgaggagggggtcggcgggagaggagataggctgaactccagtgcacccagttagacttggagcggaaactcaagttgaatgaaaa

SEQ ID NO: 645933 - DNA, 98 bp, Homo sapiens
catgttcattcctgatgggcgggtgtctgtctctgctcgaattgacagaaaaggattctgtgaaggtgaccttaatgctgctcgaccagaataaccgg

SEQ ID NO: 645934 - DNA, 74 bp, Homo sapiens
cttggctctcccacccaatggagatggctctaatgttgccagtagtcatcagagtaccaaaactgatctatttc

SEQ ID NO: 645935 - DNA, 75 bp, Homo sapiens
ccgggattccttgccccagttgattgctgctaaaattgattcaattcctcacttgaataattccacacctctagt

SEQ ID NO: 645936 - DNA, 51 bp, Homo sapiens
tagacgccttcccaagattgtggactccgtggagccgccaccaaaatgcag

SEQ ID NO: 645937 - DNA, 100 bp, Homo sapiens
ccctggactacctgcctactcccctcacccttccctagcaaaaggttcaaagggtgaggtgggtttcccaggattagccgggagcccaggaattcctgga

SEQ ID NO: 645938 - DNA, 75 bp, Homo sapiens
cgacctccgactactttctccttcaagggacgtccagatcggtgacatcgtcacagtgggcgagtgccggcctct

SEQ ID NO: 645939 - DNA, 75 bp, Homo sapiens
aaaaccagtcatgaccactagacccacagctgttaaagcaacagggctgagaaagggcaatgagatcatgacctt

SEQ ID NO: 645940 - DNA, 61 bp, Homo sapiens
gcccgggagggccggggccgcgctcagggagggcaatgagccaggggagaccactcagatc

SEQ ID NO: 645941 - DNA, 90 bp, Homo sapiens
tttttacttggttctctgacagcagacgaaggtgtaaagcaggccctctggctcaccaagaccaagttaatagaaggccttcccgagaaa

SEQ ID NO: 645942 - DNA, 100 bp, Homo sapiens
cacaaattcctgagaattgggaacatgctaaatacaaatggtatcttaaggaatgcgatgttaattctggggcattgatgttttacaatgcctgatcaag

SEQ ID NO: 645943 - DNA, 100 bp, Homo sapiens
attcccaggcaggctgctaccgcccctccgcttccagacattctcagctgtcagaatctgatgttccagcagaaatccaggtgttaaaagaacccctaca

SEQ ID NO: 645944 - DNA, 75 bp, Homo sapiens
cactcccacgcccttcaccaatgccgtccagctgctgctgacgctgaaggtactgcttctccgagatggccccag

SEQ ID NO: 645945 - DNA, 100 bp, Homo sapiens
gaaagctttcttcatatggtggcaaagctgctggaatcgggggaaccaaagcttcaagttcttggaacaaattctgtaagaagacaagaggtttcttctc

SEQ ID NO: 645946 - DNA, 116 bp, Homo sapiens
tctgacaccagcacagcaaacccgccgggatcaaagtgtaccagtcggcagcatggataacagctggttggccggtgtggccctgcaagggcgtggtggcttcggcctgcttcccg

SEQ ID NO: 645947 - DNA, 100 bp, Homo sapiens
ggggaccctgtacgtgtacatcatttacggcatgtacttctgcatgaacatctccagccaggacagccctcagcgcctttttccaggagaccaacatccc

SEQ ID NO: 645948 - DNA, 50 bp, Homo sapiens
cgacgaccgacagggtggtgaaaggtgacttaagagattaaaattaattt

SEQ ID NO: 645949 - DNA, 75 bp, Homo sapiens
ggggagtcgtaaacaaccctgaagagaacagccaggcctggccctgggaggagcggggacactgaggacctctct

SEQ ID NO: 645950 - DNA, 83 bp, Homo sapiens
cagattcgcagtggtcgcttcttctccttggtggctgggagcccgagccccacacctgccgggcagcaggtgctggacgtcga

SEQ ID NO: 645951 - DNA, 87 bp, Homo sapiens
accagctctgtaaaagccccgcctctgccttcggatagggagtgcatccgccccaacccttttccccctcgtctcctgtgagaattc

SEQ ID NO: 645952 - DNA, 82 bp, Homo sapiens
gcaaggaagcgcagcccgttgtggtgatacgagccggagatgccttctgcagggaactactggagaccacgtgccgcctggc

SEQ ID NO: 645953 - DNA, 98 bp, Homo sapiens
gctggacgcagcaagcggggcgctgtgtccccaagctccccgtcctcggccttagccccgtgggccccacggagtgagcggcatgcagcacccccggg

SEQ ID NO: 645954 - DNA, 75 bp, Homo sapiens
cagcttcatgatattactgtaccgttagaagtttttgagagatatctgaagagattataggatcacccatcccag

SEQ ID NO: 645955 - DNA, 100 bp, Homo sapiens
cccgctacgagctggctttaatcctgaaagccatgcagcgggccctccctatcctgaagacattagctgagagtctggcaccttttaaaggtctgatcat

SEQ ID NO: 645956 - DNA, 100 bp, Homo sapiens
gaactcggacctcaaggctcagctcagggagctgaatattacggcagctaagcagttgcaccaccagcaccaccttccagtagtcagctctgccgttact

SEQ ID NO: 645957 - DNA, 75 bp, Homo sapiens
gcgagttacaccaaccaggacagaaatcattatcttagccaccaggcacagaaaactgaatctgtagataacgag

SEQ ID NO: 645958 - DNA, 51 bp, Homo sapiens
cccaactggaattccacttacgggtacacactggcagctcaggacctggtg

SEQ ID NO: 645959 - DNA, 80 bp, Homo sapiens
ctttcaatgacaaaaagtttgtcattaaacccatcgacaagaaggcacctggtaaagcatcaagtcgaatatttgggtct

SEQ ID NO: 645960 - DNA, 100 bp, Homo sapiens
ggagcggcgttggaggccaccgtttccaggaatcccagtcagaagttccagcctgccactgttctctgatgccatgccagcaccaactcaactgtttttt

SEQ ID NO: 645961 - DNA, 83 bp, Homo sapiens
ttggaggtggcattgttgggagcgctgttttcgtgatcttcagaccccaggttctttggctgctgacttgagtaaaccaatag

SEQ ID NO: 645962 - DNA, 74 bp, Homo sapiens
cagagttacttcactctaggaatgaaggtgtgggtacgtttgcgggagcacatgggtgaaaagtatacaactta

SEQ ID NO: 645963 - DNA, 118 bp, Homo sapiens
tttgacgtcagatggagctgacttggaatcctggctctgccagctgactggcagaggggtctgcgggccaggcatcgacatccgcaacgactatcagcagctgaagcgcctggagaac

SEQ ID NO: 645964 - DNA, 100 bp, Homo sapiens
cctgggctgatctgaccaatgaggtggatatgcctggagctgacgccatggagttggtgctggtcttcctctgcagcctgctggcccccatggtcctggc

SEQ ID NO: 645965 - DNA, 97 bp, Homo sapiens
gcagccaggagcgcggggaggcggctgccttcgacctccgccaggccgagcaggagctccgcgtggcccagacagagtttgaccggcaagcagaagt

SEQ ID NO: 645966 - DNA, 75 bp, Homo sapiens
aaactacaggcggggacggcttctcggtcagaatggcggcagcggagcatcgtcattcttcaggattgccctgct

SEQ ID NO: 645967 - DNA, 83 bp, Homo sapiens
atgacatccagcgacaaggactttagatgatgctggagggtcttgaaatctttacagtaaaacctgcaacttgaaaactagcc

SEQ ID NO: 645968 - DNA, 100 bp, Homo sapiens
agttgacctaccccttgcacacctaccctaagtgtctcctttcctcttgggccgggcactttgggctgccagtcggttcactgttgctatgtcccctgaa

SEQ ID NO: 645969 - DNA, 97 bp, Homo sapiens
caaggatttggccaactcacccagtgtttctacacctgtgggttatgacaaagacaactgccaaagaatcttcaagaaggaggactgcaagtatatc

SEQ ID NO: 645970 - DNA, 75 bp, Homo sapiens
ctcaagccccacctgaggaagaaaatgaaagtgagcctgaagaaccatcggggagcatgattgatgccaacctga

SEQ ID NO: 645971 - DNA, 90 bp, Homo sapiens
agaacaatcttgaatcatgaagctactaaccagagccggctctttctcgataactggagtgccaaggctaaaagacgaaataccaccgga

SEQ ID NO: 645972 - DNA, 82 bp, Homo sapiens
ccggcaccgccatccccatttctatggtcctcctcacctatggccgctggcagactggtgaattttcagctcgtttcctttt

SEQ ID NO: 645973 - DNA, 75 bp, Homo sapiens
cacttcaatgcagatgggtctgaggtcagtttgctgagaacgaaaccaatgaggtcaattttagagagatacctt

SEQ ID NO: 645974 - DNA, 82 bp, Homo sapiens
ccttcatcttgatgccactaagctgctacttcaagctttggccatcaatagctctgagagagtgagtaaaggaatacttaaa

SEQ ID NO: 645975 - DNA, 100 bp, Homo sapiens
aggaagccgactgctgcctggtctgcaaagaagtcctttcaagtctctaggactggactcttcctaagcaagtccgatgctgaagttccgaacagtccat

SEQ ID NO: 645976 - DNA, 83 bp, Homo sapiens
ctcaggagcggaacaacgtcggcgagcgggccctgggcgctgcctatggcacagccaagagcggtaccggcattgcggccatg

SEQ ID NO: 645977 - DNA, 100 bp, Homo sapiens
ggactcactggcggtgcgcgacctgggctggctccgggggtggcgggcgcagctgctgtgacagtgttgctaaagattatgtgcgactgatgaagtatgg

SEQ ID NO: 645978 - DNA, 98 bp, Homo sapiens
agacctgaagaatgtcaagtccaagatcggctccactgagaacctgaagcaccagccgggaggcgggaagaccgagacatgggtgcccggcaccgcgc

SEQ ID NO: 645979 - DNA, 50 bp, Homo sapiens
ggacattccaggcagaggcaagacactcaaatggtttcaagcaatataat

SEQ ID NO: 645980 - DNA, 74 bp, Homo sapiens
ttccatgctctgaaagacatccttgggcccccgatgtatgaaatggagttccatgccattgcagtgtcaactag

SEQ ID NO: 645981 - DNA, 75 bp, Homo sapiens
tgagacggtgtcccgccgaaagatatctcccggggccaattcagcatctctacctggccatcctaacaaggtgat

SEQ ID NO: 645982 - DNA, 82 bp, Homo sapiens
cggctttgaccgagaggctgctggagctcgtgtttggacgccccttcagatatttcaacactcctctcagcatcctccactt

SEQ ID NO: 645983 - DNA, 95 bp, Homo sapiens
gcgacagtacaaagaagactcttgtcacactaattgccaacaacaatgagacatatgagcggctcgaggctgataaaaagaagcaggttcataag

SEQ ID NO: 645984 - DNA, 80 bp, Homo sapiens
tgttttccatgtgtgagcatcacttggttccatttgttggaaagaaaactttagaaactgttcctttggagaggaaaaag

SEQ ID NO: 645985 - DNA, 90 bp, Homo sapiens
tcttacaacatggcagacattgacaataccaaaagaattggtggagctccatttgaagctgatgaggaaaattggcaaatctgttactgc

SEQ ID NO: 645986 - DNA, 49 bp, Homo sapiens
atggagaacaagcccatcgtcaccttacgtcccggaggacctccttccc

SEQ ID NO: 645987 - DNA, 83 bp, Homo sapiens
gggcttctctgaggcggcgagagatggtcaggtctggagctcgaccgggccagaggacagtccagcttatctgccgaggattc

SEQ ID NO: 645988 - DNA, 100 bp, Homo sapiens
tttcaaattgtgaattcactccagcacccactcctcaggaacatttaaccaagggcatacatcacagaaggaagccatggaagtaagccttgatataaca

SEQ ID NO: 645989 - DNA, 100 bp, Homo sapiens
tcaggtgttaaaaaatgataatgtgcataaaattcaacccagctttcaaagtccagtcaaaatatcagatgttaagggaagctaaggagaaggagaagca

SEQ ID NO: 645990 - DNA, 100 bp, Homo sapiens
gaaagatgttgtcttgagaaattacgcttaaggaatgactgggaaattgtggttttcagataactattatcgtgcagaaatgattgatgccctggccaac

SEQ ID NO: 645991 - DNA, 100 bp, Homo sapiens
caaggctgcaaacaaggaggcaacccaggaggcttttatgaagcgggccatggccgtgcataaggctgtgctgaccatcgacgagaaagggactgaagct

SEQ ID NO: 645992 - DNA, 90 bp, Homo sapiens
ccactatcaaggataagccagcagagatcctacaagaatccaggatgatgatcccagattgccagcgcaggttggaagccgcatatttgg

SEQ ID NO: 645993 - DNA, 75 bp, Homo sapiens
agactacaagtctagtttaaagattagtgatgatgaaccaggttatgaccttgatttattttgcatacctaatca

SEQ ID NO: 645994 - DNA, 100 bp, Homo sapiens
acatcctggaagctgggaaatgttccatgccattgcagtgtcaactaggcctcagttacttttcagtttgcccaaattgagcccatctcaacatttggca

SEQ ID NO: 645995 - DNA, 100 bp, Homo sapiens
gcagccatggccacaggcttagctgttaacgggaaaggtaacccaggcctgcacagtcccatgttggatcttgataatgatacacgtccctcagtgttgg

SEQ ID NO: 645996 - DNA, 100 bp, Homo sapiens
taaggaagaaactgaataaaaaatatccaaagctttctcgaattcatccagagcagcttcctccgaggccatggattacattaaaagaacgagaccaaat

SEQ ID NO: 645997 - DNA, 95 bp, Homo sapiens
gaaaaattgaagtcacagcccctcagcaccaagcagaaggtcagtaacagatccaagagatggaaagagagtagcgctcaaaaagatgcccaacg

SEQ ID NO: 645998 - DNA, 76 bp, Homo sapiens
accctcacggagctgggcgacgagctgaccctgggagacatcgacggagaacgcccatataaatgtgaactttgtc

SEQ ID NO: 645999 - DNA, 75 bp, Homo sapiens
ccccgaggatctggaggcacagctgcagtctgacgagagggggtgtgagatggcagacaggtttgcaggaaaccc

SEQ ID NO: 646000 - DNA, 100 bp, Homo sapiens
catggcgccagcagaaatcctgaacgggaaggagatctccgcggcgatgccagtccctccactccagaggagaacgaaaccacgacaaccagcgccttca

SEQ ID NO: 646001 - DNA, 83 bp, Homo sapiens
gaaagatggtgcccaccacatggaggccagcctaggtcttgtatgaaacctgtgagagatttatggagaatagcagcataatt

SEQ ID NO: 646002 - DNA, 73 bp, Homo sapiens
tttgaagtgggagcccagttggaagcccgggaccgtttaaaaaactgatccatatgtcaaacttctgcttgat

SEQ ID NO: 646003 - DNA, 75 bp, Homo sapiens
tggcatctacctacctagcaagacttggtctccatcatcaccagttccagtagtgaaaaacagaacccaacaaac

SEQ ID NO: 646004 - DNA, 98 bp, Homo sapiens
gctgcggtcgggccaaggttccgcgccgggcgtggacggtgtggggcggtcccggccccgcagatgatgatgtgcctgcagatatggttgcagaagaa

SEQ ID NO: 646005 - DNA, 98 bp, Homo sapiens
tcgatgctgcgaaaagaaaagctgtggaaaccgaaatgagactccatcggacccagtcataattgacagcataagcagtactataatggatgtagaca

SEQ ID NO: 646006 - DNA, 80 bp, Homo sapiens
caatatctgtcttcggtggactccttcggcagtccacccaccgccgccgcctcccagcacttttcaggattagaagaggc

SEQ ID NO: 646007 - DNA, 75 bp, Homo sapiens
aggaaaacacacagttaataagatctggggtgaaaagaagactgtggatattcataaggagaaagtggcacgaag

SEQ ID NO: 646008 - DNA, 82 bp, Homo sapiens
tgaaaggaatgggtctgggaccttaacagggagccatggtgaggacaccagtgatgaattctgaagcaaaagttctggtgcc

SEQ ID NO: 646009 - DNA, 75 bp, Homo sapiens
cccgttcagagtcctacagtggcaggcgacattgactacagcaccgtgctcctcggcatgctggtgacgcaggac

SEQ ID NO: 646010 - DNA, 98 bp, Homo sapiens
ttcgacaccctcgacttcttactgtccagcatcctttagaagaatccagaaaaatcgatgggacaactgaggaagaagataacattgagctgaatgaa

SEQ ID NO: 646011 - DNA, 96 bp, Homo sapiens
aaggaccgcttacaacttctagcttcttctcagcctgttgataaccatgttagcccatcttccttcttgggccagacaccagcatctccagccaga

SEQ ID NO: 646012 - DNA, 100 bp, Homo sapiens
ttttcacgtcacctggagagatgcacagggtttggaaatcccttgtctccaggttgctgggattgacttcttgctcaattgaaacactcattcaatggag

SEQ ID NO: 646013 - DNA, 100 bp, Homo sapiens
taaaaaaggaagcaaaggagactgtactgtactgaagcccacacttatggctgctgttccggacagcagaactgcattgcactgggcatgctcagctgga

SEQ ID NO: 646014 - DNA, 75 bp, Homo sapiens
ggatgaatcccagtccctgttacggcagagagagatcatcattgcctgaatttagctttgtgactgcaagagcaa

SEQ ID NO: 646015 - DNA, 75 bp, Homo sapiens
ctagaattcgacctccgacatttctgctcaccagagggcatgaactgctgacggagtttcgctcttgttacccag

SEQ ID NO: 646016 - DNA, 48 bp, Homo sapiens
agagggatccttcacccgtgtctgatatcaatgagtgtttgagtatca

SEQ ID NO: 646017 - DNA, 82 bp, Homo sapiens
cccatgggcgactggacatcccgagtggtgcacctgctcaatgaccagcacttggaagtccaaagccaagcctaatggcaag

SEQ ID NO: 646018 - DNA, 100 bp, Homo sapiens
caatcaaccttattgtggcattgcgccgtacattcgagagtttgagggtgcagttctgaagccagagttgaaaagggaccctgtcagtacaagagtcaag

SEQ ID NO: 646019 - DNA, 112 bp, Homo sapiens
cggagcccccgagaagccctcatcagtggctggctcttcttccgatacctggctatcggaggctcacggttttgaggagatccgtgctactttccttcagaccgatttgctg

SEQ ID NO: 646020 - DNA, 75 bp, Homo sapiens
cagtccctagggctcagggagcaggagcttcaggttgtccgagcatctgggaaggactatgcagccatcgtcttc

SEQ ID NO: 646021 - DNA, 75 bp, Homo sapiens
gaagcacgagcagatcctggtcctcgatccgcccacagacctcaaattcaaagggaatgcagagagcaaccaatg

SEQ ID NO: 646022 - DNA, 51 bp, Homo sapiens
aaaggcaacaagatatcatcggtctccaatggtgcagggaccatgtccgtc

SEQ ID NO: 646023 - DNA, 75 bp, Homo sapiens
cctttatatagaagggagagtaggttggccgttgtccaatgtgttgctgttatctggaactcctacctgtcctgg

SEQ ID NO: 646024 - DNA, 74 bp, Homo sapiens
tctcccaacagctcaatggtcttgtttgtgagaaaccagactgtgatgactgggagagcgggctgaatgcaatg

SEQ ID NO: 646025 - DNA, 100 bp, Homo sapiens
gcaggaggcctcctcgggccgcggggggcgccaccgccggctcccggcagcccagcgtggagaccctggacagtgatctcagtgaaaaccaaattcaggc

SEQ ID NO: 646026 - DNA, 142 bp, Homo sapiens
gccacttgcctgagcgccccggcggcccgagcgcgccccaagcccgggcgccaccgctgccacctccgcgagtaagactttgaccccgacgcaggcttcagtgattgccgcggatcagaagcctgagcactttggctcgaga

SEQ ID NO: 646027 - DNA, 90 bp, Homo sapiens
agtctccacctctcaggctcaagtgattctcctacctcagcctcccgagtagctgggaccagagagatgaggactcagtgtgtcgtcgtg

SEQ ID NO: 646028 - DNA, 76 bp, Homo sapiens
ccaccgtgctggaccgcttttacaatgcagttgatcccgctcttgaactctgtagactctgataattgtggatcta

SEQ ID NO: 646029 - DNA, 75 bp, Homo sapiens
gcgaggagtctctgtccgggggcctggctaaggaaaccctattacctccagccgttatggaacacctgaagagct

SEQ ID NO: 646030 - DNA, 80 bp, Homo sapiens
gtttaaggagctgaaagcgcggtcaaaatgcagatcttcgtgaaaacccttaccggcaagaccatcacccttgaggtgga

SEQ ID NO: 646031 - DNA, 87 bp, Homo sapiens
ctgggtctagagtgcggagctgctccgtggccacgaggacgtcaccatggtagctacagcaagctgggtagcaggcagatccaaagg

SEQ ID NO: 646032 - DNA, 75 bp, Homo sapiens
cattgcttgggatgatgaagagaccaggtatgagaaagtgccagtcatcttggttgggaacaaagtggacctgga

SEQ ID NO: 646033 - DNA, 51 bp, Homo sapiens
ataatgttccattgccaaagaaatcggttgatgacaacaagaaactaggag

SEQ ID NO: 646034 - DNA, 97 bp, Homo sapiens
aggaagatggcggatctggaggagcagttgtctgatgaagagaagccttgcacagtgtgcatgcacacacccaagactgagtcagataatggaatga

SEQ ID NO: 646035 - DNA, 83 bp, Homo sapiens
ggctgagatgggcaccgcggatctggggccgtcctcagaacaactctgctcatggtgattacatgcaaaataacgagagcagc

SEQ ID NO: 646036 - DNA, 51 bp, Homo sapiens
gaagctttgagtaacattgccagagagttgtcatggatgcactggtagaag

SEQ ID NO: 646037 - DNA, 100 bp, Homo sapiens
ggattgcccagagtgaagccgagctcatcagtgatgaggcccaggccgacctggcgctgcggagggaatctggaaacatcaaagctggattagaacatct

SEQ ID NO: 646038 - DNA, 50 bp, Homo sapiens
tgtttgatgttcgtgactttggaaagatgtgggaagaggccataagtctg

SEQ ID NO: 646039 - DNA, 73 bp, Homo sapiens
caattaaaactgatctgataagacctcagatcagacagagacagtgatgtgtgttctgaaattgtgaaccatg

SEQ ID NO: 646040 - DNA, 83 bp, Homo sapiens
acacaactgggagatgaattaccaagaggcagcaatctacctccaggattttttatcaagcagaaatgcatcgaacaacgaga

SEQ ID NO: 646041 - DNA, 50 bp, Homo sapiens
ctggattacaggccaaattagcaacatgctgatcccattttcaatgaaga

SEQ ID NO: 646042 - DNA, 114 bp, Homo sapiens
cattgcttgggagcagcgagactttcaacagtttcctgcgtcgggcacaacagacacctgaaagaccccgccgtggcatcccagggcttcctgatggccgcttccatctgccgc

SEQ ID NO: 646043 - DNA, 75 bp, Homo sapiens
cacattggtctgttagagttcgaaaagctgagaatcctcagtgtttgctaggttgtttacattcagagctctatc

SEQ ID NO: 646044 - DNA, 83 bp, Homo sapiens
gcgcatctccaacagcgacctgagcgtcaactgcttggaccagcatgttcggaagtcccccgagagcgttgctttgatctggg

SEQ ID NO: 646045 - DNA, 95 bp, Homo sapiens
attcgcaagaccttcaatatcaaaaatgactttactgaagaggaggaagcccagagccccccaaaattaaacgaggtcagttcagatgccaacag

SEQ ID NO: 646046 - DNA, 90 bp, Homo sapiens
gcgctcccggcccgcgcccgccccagccccgacctggcggggccaggacgctggttcatacactccaagttcctattatccttgccgtaa

SEQ ID NO: 646047 - DNA, 85 bp, Homo sapiens
caagatgatccaccagcggttccatcctacacttggccatcactggtgcaagctatatttaacggagatcctgatgaagttcgag

SEQ ID NO: 646048 - DNA, 100 bp, Homo sapiens
gtgaccgagaccgtgaccgagagcgtgaccgagagcgcgaatatcgtcatcgttagaaggtgacattgcattccggttccttaattatgttcagtcccag

SEQ ID NO: 646049 - DNA, 50 bp, Homo sapiens
gtcacctatgaagccatcgtggacggagctcgggttcatgacgctctcga

SEQ ID NO: 646050 - DNA, 90 bp, Homo sapiens
cttttttaaacaacaacattgtctacacgttcatgacacatttccttctaaagcacttttctgtagaaggtcagttggaattcagggcat

SEQ ID NO: 646051 - DNA, 100 bp, Homo sapiens
gacacagttcacatcctggagatgtacgaggccaaacatcatgtcaatggcaacagaacagtcgaacctttcccagagggaacacagatggctgtatttg

SEQ ID NO: 646052 - DNA, 75 bp, Homo sapiens
cagccgaacttcagggtttccaccgttcgttcaaggtgtcttataagactttgacacttcctgttttgtctgaaa

SEQ ID NO: 646053 - DNA, 82 bp, Homo sapiens
gccccaatggcacagagctactagtcaacatggggggggaacagctggctgcaccttcgaggaggcaagtgacccagcagtg

SEQ ID NO: 646054 - DNA, 78 bp, Homo sapiens
agaatctgggactttcttcgttgccatgaggaaagaattctccgaggatcactactcttggaatcaaagataaatcca

SEQ ID NO: 646055 - DNA, 75 bp, Homo sapiens
catggatttcagagaacccacagaagaggatggagatgaagatgaggaagctgagtcagctacgggcaagcgggc

SEQ ID NO: 646056 - DNA, 80 bp, Homo sapiens
ggaagaggaggaaggagggcgagcgaggaggatggcggagtcggggctcctgacggtttttagaacttcagccataaaaa

SEQ ID NO: 646057 - DNA, 82 bp, Homo sapiens
ggcggaggcagcggagccctgggccatcgttccagggtctccctccactgctgtagtaacccgggtccggggcctcggtggt

SEQ ID NO: 646058 - DNA, 90 bp, Homo sapiens
gagggttgccttttcgtgcaactgaaaatgacattgctaatgtggatagatacttctcaagacatcacacagcgtgagtcaatcaaggag

SEQ ID NO: 646059 - DNA, 80 bp, Homo sapiens
gattttgatcagaaaagggcaacgattcagtttcaccaacctcagagatttaaggcaattaagttggaatatgcaaggtt

SEQ ID NO: 646060 - DNA, 95 bp, Homo sapiens
tataactcagcctgatgtcatttaccaaatccataagtaacaaaggcatggagcatctgtacagcatgaagtgcaagaacgtggtgcccctctat

SEQ ID NO: 646061 - DNA, 90 bp, Homo sapiens
ccaaaggaattccagagttctggtttaccatcttcagaaatgtggacatgctgagtgaattagtccagcaaattgtggctactaatttgc

SEQ ID NO: 646062 - DNA, 100 bp, Homo sapiens
gatgaaacagagtatggctgcagaggatccatctgtcttagcaaggctgtcatcacagaagatgatccctatgatcttgaagatgtttctgcacagaaat

SEQ ID NO: 646063 - DNA, 98 bp, Homo sapiens
agagacaggaggcagtagccaaacacccagaatctgatgacctccgaggggaccctgcactcagccatcaaagtgttcctgcccctctggacactcat

SEQ ID NO: 646064 - DNA, 87 bp, Homo sapiens
gtgacgcagaagcgggcctcccgcctccagcaggacaatattcgcacccggctgaagatgagcagcaccagcagtaagagggctccg

SEQ ID NO: 646065 - DNA, 75 bp, Homo sapiens
agtgatctgaatcttttagagtggacccatcacagcatgaaaccacacgtctgagaaagaaccccagtttaagtt

SEQ ID NO: 646066 - DNA, 75 bp, Homo sapiens
ttcccggggcagatccaggttcaggattttttatcaagcagaaatgcatcgaacaacgagaatcaagatcactga

SEQ ID NO: 646067 - DNA, 100 bp, Homo sapiens
gaacagttaatcctcaatttaagcctgatctaacccctagaaacagatccgccaatgaaggagaacccttatgaggacatcgagttacatggtcgctgcc

SEQ ID NO: 646068 - DNA, 98 bp, Homo sapiens
ctgactcgtgatctgcccatcttgttactccctagcagtgtggtaaggacactgcccatctctaagataagaacctggaaaggggactctgttggcca

SEQ ID NO: 646069 - DNA, 96 bp, Homo sapiens
gaggagactccggcgctcgccatggccgacgaaaagcccaagggggatatgagactttctactcggaatatcctgagtgttgcgtggatgtaaaac

SEQ ID NO: 646070 - DNA, 100 bp, Homo sapiens
ctgttccttcattttcctgtatattctctgtactatgtcgattcgacaggacttcctgagctaaaggagaaaaaaaatatggtggatcgttcaaaactcc

SEQ ID NO: 646071 - DNA, 75 bp, Homo sapiens
tgccagtccagttaacatcaaggagagaaatcaggaagattatgggaggtattttgaccaacgtgatttagctga

SEQ ID NO: 646072 - DNA, 99 bp, Homo sapiens
gaagatccagagggccaatgagctgatgggcttcaatgattcctctccagaacgctgtaaatgtaagcctattagagctacacagaagacctatttccg

SEQ ID NO: 646073 - DNA, 82 bp, Homo sapiens
ctgcacacctggatccaggataacggaggctggatggacacccgctccgggagccagtgttccgtcaccccagaagccatac

SEQ ID NO: 646074 - DNA, 82 bp, Homo sapiens
aactgcatctgccgcgtgcccaaaagcaagctggaagtggagccaagccgccatggcctaccacagcttcctggtggagccc

SEQ ID NO: 646075 - DNA, 50 bp, Homo sapiens
caaaagcaacgacttcgtatggcttcccagctggcgtgtatgttgtaaag

SEQ ID NO: 646076 - DNA, 74 bp, Homo sapiens
tacatggaccgaagtctggacatcaatgcctttagggaatccatcaacagcatcaagtccagactaagcaaaag

SEQ ID NO: 646077 - DNA, 76 bp, Homo sapiens
ccacacagtgtgcctgcaacctgtccggggatcccagggagagtctcactctgttgtcacccaggctggagtccag

SEQ ID NO: 646078 - DNA, 100 bp, Homo sapiens
ctatttactctaaaggaggtattccttgcagcattatctcagctacttaaacaacctccgtgtccaagatgttttcagttcaacacacagtctcctccat

SEQ ID NO: 646079 - DNA, 103 bp, Homo sapiens
cccgcgtccgccgattcctcctccttggtcgccgcgtccttggctggcgtcagggagagcaacaagccccggccctcagagctcagccggatgagcgcagccc

SEQ ID NO: 646080 - DNA, 80 bp, Homo sapiens
ggacagcacctcatcccctggatgggggaccacaagatcctcatcgacaggtgctgaaggtcgccatcctggctgagaag

SEQ ID NO: 646081 - DNA, 100 bp, Homo sapiens
gaacttctcaacaccattgatgcctgccagtgccattttgatatcggtggccatcagctcgaggagacttgagcccctcctcgcttaccagcatgcccac

SEQ ID NO: 646082 - DNA, 102 bp, Homo sapiens
ggaagagacattagaggtcatccaaagcagccgtcccctctgcagcctctctgacaagtgagcaccaagctatggatcatcatggagtacctgggcggcggc

SEQ ID NO: 646083 - DNA, 100 bp, Homo sapiens
ggtagcagtagctgatgtgcagtttggccccatgagatttcatcaagatcaacttcagcttcgcctcaacagcatcaagaagctgtccaccatcgccttg

SEQ ID NO: 646084 - DNA, 98 bp, Homo sapiens
ctgttctcaaggcggattaattagcccaagaaacattatattcatgtggttccaggaaagaaatcactgaacactgggaatggcttgagcaaaatctc

SEQ ID NO: 646085 - DNA, 74 bp, Homo sapiens
ttgaccagacagcccttgcaattgagcatgtcaggtatggagagtcggcttgactacactgtgtggagcaagtt

SEQ ID NO: 646086 - DNA, 100 bp, Homo sapiens
aatatgcatgagtcttctcaacttgaaggtcatttaaccaacctcagctttacaaaccctgaatttataactgacattgtcttcagtgttaagaaatgtg

SEQ ID NO: 646087 - DNA, 75 bp, Homo sapiens
cgcctcctcgcagcagcgccatgtgctgaagctgctgaaagatggcagaagaagtggtggtagtagccaaatttg

SEQ ID NO: 646088 - DNA, 90 bp, Homo sapiens
acggggtgtacttgggaacgaggggtgaagcggcccaggtgaggtgctctatgcccaggtctctgtggctgggctgctccagcctggcgg

SEQ ID NO: 646089 - DNA, 100 bp, Homo sapiens
ggggaagggcctcaaagccagaagaatcttatggcaagggccttatatgacaatgtcccagagtgtgccgaggaactggcctttcgcaagggagacatcc

SEQ ID NO: 646090 - DNA, 108 bp, Homo sapiens
cggaaagcagcgtcaggagccatagtacctacagcagcactccaggtgtcatgtgattctctgagggagcagctgcgtgagtggagatgctttcagtggtggagaatg

SEQ ID NO: 646091 - DNA, 75 bp, Homo sapiens
gagcccgggacccccgggggcgcagggtatttgaagtataccatacaactgttttgaaaatccagcgtggacaat

SEQ ID NO: 646092 - DNA, 74 bp, Homo sapiens
ggacggcgagcgcgagcggcgcgagaaagacaggtcccagaagaggaggccagtcacaatggacagcgccgggg

SEQ ID NO: 646093 - DNA, 142 bp, Homo sapiens
cccgcagcccctcggagccagaggagaggcgcccccgccggccgccgcgccgcccggcagcctcggcagctgagcgtgtacaccacgacgaggtcccacctgggtgctgagaacaacatcgacctggtcttgaatgtggaag

SEQ ID NO: 646094 - DNA, 95 bp, Homo sapiens
ttgtgaggcctccccagccatgtggaactactttggctgagcaaaacactaagaatcctaaaagcactactggtagaagttccaaatctaaagag

SEQ ID NO: 646095 - DNA, 100 bp, Homo sapiens
ctcaggcagtacgggaagaacttcttcagaattagaaaggagctgcttcccaataaggaaacagtatctctcctctttgtcacaacctctttgccctgta

SEQ ID NO: 646096 - DNA, 100 bp, Homo sapiens
tggaatcctcctatacgaaattgtcacctatgggaaaattccctacccagaggctgcctaccacaaggactttagcttactttttaaagattgaagaaaa

SEQ ID NO: 646097 - DNA, 92 bp, Homo sapiens
ggctcacctggcggtgcccgaggagtagtcgctggagtccgcgcctccctgggtaattaaccagaacaggatcgacacgtgttctctacagc

SEQ ID NO: 646098 - DNA, 100 bp, Homo sapiens
agaagaatgaacattgtattgagaacaatatagatttgcaggtccaacctaaacatgtgaaggaagctttccggttactgaataaatcaatcatccgtgt

SEQ ID NO: 646099 - DNA, 86 bp, Homo sapiens
acatctgctcctccaaggcagagcggctcccccctttcggtcaccagtgaaaagttgtgcagagcccaacatgagcttcatttcca

SEQ ID NO: 646100 - DNA, 100 bp, Homo sapiens
atgcagaagaagataaatgacacaattgctaaaaacaaagagttatatgaaatcaatcctccagtgaccaagaatatggcccaggtgaccaaagccctgg

SEQ ID NO: 646101 - DNA, 100 bp, Homo sapiens
gcctgcgtaactttctcccttgatccgggagtctttccactgggtaattgctctagcagatgcagtggaggaaaaccaaggcaatctgttccagtcattc

SEQ ID NO: 646102 - DNA, 90 bp, Homo sapiens
ggcagttcgtggagaaactgcaggacttggatactgattatggctcaggctaccccaatggttgatccccatcttggtgaatgggatgaa

SEQ ID NO: 646103 - DNA, 88 bp, Homo sapiens
tcttggacacaaaccggtatctttacttccatttgcaggtgacacttaactccgccatctgcgttttgagcactgttctcataatgga

SEQ ID NO: 646104 - DNA, 100 bp, Homo sapiens
cgagaccccgtcggacccatggtttccagtgcagcgcggagtgggcgatgccagcgtgccaggtcagccatgtcatctgagcctcccccaccaccacagc

SEQ ID NO: 646105 - DNA, 100 bp, Homo sapiens
aagctctttgggaagtggagcaccgatgatgtgcagatcaatgacatttccctgcaggacgtgttcctcatgatccggcgccacaagaccaccatcttca

SEQ ID NO: 646106 - DNA, 82 bp, Homo sapiens
gaaccacagttgctttgagcacatgcaccacatacctgcggattattgcatcgagcttttagtgtcttcttattcaacaccg

SEQ ID NO: 646107 - DNA, 100 bp, Homo sapiens
gtcagaagaaggctgctattgaaagagagtatgcacagatgtgactggagtgatttgcacccggatgcctagactcgccatctgctcaaagactgctcag

SEQ ID NO: 646108 - DNA, 60 bp, Homo sapiens
cgacggcggctgcggcggcggcgggacccaaaatgtgccagaggaacttcaagaaccatt

SEQ ID NO: 646109 - DNA, 90 bp, Homo sapiens
ctcacctgaggtgaaccttcgaccttggacttctcagcctccagaatggatcccattgaagataccacgctgcatgtgtccttagtagtc

SEQ ID NO: 646110 - DNA, 100 bp, Homo sapiens
cacgctgcctcagggagcccgcgaccgcgccttctcctccgccggtcccatacggtcatggaggcggagcagaccaagaccaggagcgagctggtgcata

SEQ ID NO: 646111 - DNA, 100 bp, Homo sapiens
gaccagtctcagaaggtcttgtacaaggaagtaatgttggagaactacatcaacctagtatcaataggtcatgcttcaccccttcctccatctgctgcac

SEQ ID NO: 646112 - DNA, 100 bp, Homo sapiens
cggggtcaaatggccccagtccaatcccaaattcctttgtgctgactatgccgagcaagatgaggatgcctggtgtgcaggagtatatacaacagcctat

SEQ ID NO: 646113 - DNA, 75 bp, Homo sapiens
catggtgcggctcatcttcgagagaacagagagtacctgattgagaagctgcttacaagaacaccagacatagcc

SEQ ID NO: 646114 - DNA, 76 bp, Homo sapiens
cgctcgtcagactccagcagccaagatggtgaagcagatcgagagcaaggcagagacatttgtttgggtgaacaat

SEQ ID NO: 646115 - DNA, 50 bp, Homo sapiens
cccccgccccgtcgggcctcacgagtcaagctgtattagtcgacaggacc

SEQ ID NO: 646116 - DNA, 98 bp, Homo sapiens
taggaaagatccagaaagcattgggagaatatctggaaagagagcggtcatctttccccaggcccagaagaatctgtatctgcatcaacaccagcaga

SEQ ID NO: 646117 - DNA, 75 bp, Homo sapiens
gtccgggaggcgcttccacctctccaccaccgaccgcgtcatcaaagaagatggctgtgccacccacgtatgccg

SEQ ID NO: 646118 - DNA, 98 bp, Homo sapiens
agagatgtgtaccaacaagagaaggcacgcatgggctcagcgggactcagaggtgtcatggagaaactccagctgggcccagagattctgcagcggga

SEQ ID NO: 646119 - DNA, 89 bp, Homo sapiens
aagctgacagagatacctacagacggagtgctgtgccacgtgttaataatgcagtttatggaatagatgctatgaacccatcttcaaga

SEQ ID NO: 646120 - DNA, 88 bp, Homo sapiens
gtacatgaaagtggctccttgggagacagaagcaaatccgtcccaggcctcaatgtggatatggctggagtacaatggcacgatctcg

SEQ ID NO: 646121 - DNA, 83 bp, Homo sapiens
ggaagcggagggcggccggccggcgcagcaggaatgggccttgacgaaggagaagtcggtgaagcacatggatttgtgcctta

SEQ ID NO: 646122 - DNA, 90 bp, Homo sapiens
attagtgcttatctttttaaacaaggactcttcagtgaatattacttcagtgtagaaaatttggaacgagacttctttcttcggggaaag

SEQ ID NO: 646123 - DNA, 83 bp, Homo sapiens
gctcgaggctggcggcgaggaagatcaatgtccgagttaccaccatggatgcagagctggagtttgcaatccagccaaataca

SEQ ID NO: 646124 - DNA, 99 bp, Homo sapiens
tacatttggcagaataaatgaaccagtctgcgggccaggcatcgacatccgcaacgactatcagcagctgaagcgcctggagaactgcacggtgatcga

SEQ ID NO: 646125 - DNA, 100 bp, Homo sapiens
ggaagaggacaggtagtggagatcctgcaatctgaaaagcagactgaaagccgccgccatgtctgcgcatctgcaatggatggtcgtgcggaactgctcc

SEQ ID NO: 646126 - DNA, 97 bp, Homo sapiens
aagatcgagaagcagctgcagaaggacaagcaggtctaccgggccacgcaccgcctgctgctgctggtgcttagcgaatgccacagacggcgtgcgg

SEQ ID NO: 646127 - DNA, 82 bp, Homo sapiens
ttgcggccgctgccccagggctgcggggacggtttttagaacttcagccataaaaatgggcagaattttccttgatcatatc

SEQ ID NO: 646128 - DNA, 74 bp, Homo sapiens
cgggagaaccgcagtgcggccctgaagaaggcggatgtcattgtcctagcagaggagaaggcagagccccccca

SEQ ID NO: 646129 - DNA, 75 bp, Homo sapiens
ccggggcctagcgctatgcctgcggcggagactgcatcaggctctcgatgactgccaggggcatgaaggggatgt

SEQ ID NO: 646130 - DNA, 100 bp, Homo sapiens
ggaccacatagacatttacgcggatgtcggcgaagagttcaaccaggctttgctctctgtacatgatactgtggctcagaagaattacgacccagtgttg

SEQ ID NO: 646131 - DNA, 100 bp, Homo sapiens
gcgacccgcgcaagcgcgagatcttcgaccgctacggggaggaaggccagaggacgtgcgcatttctaggtatggagtgtgacaataacaatgactttga

SEQ ID NO: 646132 - DNA, 124 bp, Homo sapiens
ctggacttgctgtggaggcacgtgctctccctgggactcctcgctgtggccttcctagtctcctacagcaggtaccagcggaagtgggatgagctggctgtgcaggagaagatgttccgccagg

SEQ ID NO: 646133 - DNA, 100 bp, Homo sapiens
gccctatcaggacatggagtatgaaagacgggaaatcctcattgacgattcaatttgttgaaggccaatttgtggactcctacgatccaaccatagaaaa

SEQ ID NO: 646134 - DNA, 96 bp, Homo sapiens
gagggagcccgcgtcggctgagagcccacaggcccccacaggtgtcatggagaaactccagctgggcccagagattctgcagcgggaaaatccaag

SEQ ID NO: 646135 - DNA, 50 bp, Homo sapiens
gtcgctggcagccgctgtacttggaccttaaaggctttgatccaggagag

SEQ ID NO: 646136 - DNA, 83 bp, Homo sapiens
ggcgccagcctgcgaaggtggcggcgctgctgctcgggctgctcttggagctggagatggagctgaagatgctgaagtctcag

SEQ ID NO: 646137 - DNA, 96 bp, Homo sapiens
ctgtgtcctactacaggaaaataattgaaggcactgaagttgtccagagctcagagttctacagagtcaccactgaacaatatcagaaagctgctg

SEQ ID NO: 646138 - DNA, 101 bp, Homo sapiens
ccgccgccgccgggcccggccacagcctgcagcggagcccacgagaggcagcgccatggcggagcagacctactcgtgaaggctgaggagaatgcagaggg

SEQ ID NO: 646139 - DNA, 75 bp, Homo sapiens
cttcattgttttcagctaacagtaaccccaggagaataaaggcagccccgttgatgactgaaaatgacaaagcat

SEQ ID NO: 646140 - DNA, 74 bp, Homo sapiens
gtcttcgtgagttttctcaaatccgatatgatgctgtgaagagtaaaattgacttgatgcaaaacatcacaaag

SEQ ID NO: 646141 - DNA, 75 bp, Homo sapiens
catctcagcgcatgatcagttctcaggcccaagggaaaggcagctgcagtccacaggacccgagcagaatccggg

SEQ ID NO: 646142 - DNA, 87 bp, Homo sapiens
gggagttgcttttggaatgaatttggaatcttcccttgaagagtgcgtcccttctttaaaaaaagtccagttgccttctcttagcaa

SEQ ID NO: 646143 - DNA, 109 bp, Homo sapiens
caagtcctcactcctcaggaagcaactgagcatcagcctcagcgatacgttgtgtaaattagaattggttccttccattatgagcaacttgttgaatccagatgccatt

SEQ ID NO: 646144 - DNA, 100 bp, Homo sapiens
attgacatttaattttagggtcctttatatagaagggagagtaggcaccttcagtgccccgtgggctgccctggcccacagccgtgagcagtactgcctg

SEQ ID NO: 646145 - DNA, 74 bp, Homo sapiens
cccgctgcaggtgtgcggcccagtccgagacagcaggtgggcaccatgtccttgaagcttcaggcaagcaatgt

SEQ ID NO: 646146 - DNA, 98 bp, Homo sapiens
ctccgattccacacttgattctcttatacgctacttttactcagagtttgaaggttgtgaccaaaagaggctccgattttgatgcatacgaaagagat

SEQ ID NO: 646147 - DNA, 83 bp, Homo sapiens
agatcatcgagcatttcaaacggttatggaaacaaaggacatgctttacatcgtcactgaatttgctaaaaatggagaaatgt

SEQ ID NO: 646148 - DNA, 100 bp, Homo sapiens
ttaaaggatagccaattgcagtttgaggctagacagggcagggcattgttcatgcactgaccgacctcagcagccccggcatgacctcagggaacggaaa

SEQ ID NO: 646149 - DNA, 83 bp, Homo sapiens
cattgacgccatgtcgggttattcgagtgaccgagaccgcggccgggaccgaggactacagtggtagtggaggccgaagcggc

SEQ ID NO: 646150 - DNA, 100 bp, Homo sapiens
cgacccaagggccgacccccgcaaggagccgaaggcggcgggagccagagtcgccgccggcgtcggcgccgatccagaagcagcaaggtctagcaattcc

SEQ ID NO: 646151 - DNA, 97 bp, Homo sapiens
ggagccagttcacgctgtggcagcaaggcagctgctcccaaccccagaacctttgctgtcttgggacggatcaccgctgcaagaggggaagttgcta

SEQ ID NO: 646152 - DNA, 90 bp, Homo sapiens
catacttccaacaatatttacgaggcagtcaaattgtagaagattaaataggtaccaggagacatgaaagaatcatcttcaacatttctc

SEQ ID NO: 646153 - DNA, 97 bp, Homo sapiens
aagtttgaaggacaaaccgaaggtgatcatcatccaggcctgccgtggtgatgcacagtctctgacatcagctctcctgggaccctccaagagcact

SEQ ID NO: 646154 - DNA, 95 bp, Homo sapiens
gccttccgagtagctgggactacaggagatctataaggacaggcagaaattctcagaacaggttttcaaagtggcctcctcagacctggtcaaca

SEQ ID NO: 646155 - DNA, 100 bp, Homo sapiens
ccagagtccgcgaatcctccgctccgagcccgtccggactcccccgatcccaggtggttgtgtcaaaccgattggtgacatctccatgctgtattgtcac

SEQ ID NO: 646156 - DNA, 96 bp, Homo sapiens
agaaaacctctgcgaggaaagggaaggagcaagccgtggtattgaaatagaagagttacagaatgaggaagaagaactaagtccacctctcatgga

SEQ ID NO: 646157 - DNA, 75 bp, Homo sapiens
agcagaaaatcattgccctgcagagtggtttacaagctgacttgtccttgtgtggacgggagccggaaagccttg

SEQ ID NO: 646158 - DNA, 98 bp, Homo sapiens
ggtggacagatctgagagatactgagcatgtcggtgcctcaggccatggagtggctaattgaacacgcagaagacccgaccatagacacgcctcttcc

SEQ ID NO: 646159 - DNA, 75 bp, Homo sapiens
tgggcaccttgcgcttcttgcagtcggctgttaaaaatgaagtgaatgttccctgtttgaaaaattttgtggaga

SEQ ID NO: 646160 - DNA, 50 bp, Homo sapiens
ctcccaaggtgctgggattacagtccacattcttgagtctgatgacctcc

SEQ ID NO: 646161 - DNA, 98 bp, Homo sapiens
cccggccacaacatccctggtgaacgtcgtgcccaaactcaatgccacagggagggatctgctgcagagctgcaacaagtgtgcgacgtcctttaaag

SEQ ID NO: 646162 - DNA, 75 bp, Homo sapiens
tcagcctcccgagtagctgagattacagaaatttcggagtgcttcagttggggctgaggagtacatgtatgatca

SEQ ID NO: 646163 - DNA, 74 bp, Homo sapiens
aggtttaaaattttacataagaagttacctttttcagaattctgcttggtcagaatcgtgatggcattgtgttc

SEQ ID NO: 646164 - DNA, 82 bp, Homo sapiens
cttgcagctgcttagacgctggatttttttcgggtagtggaaaaccaggagaagaaggaagttgtggaagaggcagaaaatg

SEQ ID NO: 646165 - DNA, 100 bp, Homo sapiens
tggcaatgtccacgtatcacagaggagaatctgtgttacacagagcaatgctcctctggtgcaagtgtggtagctattgacaacaaaatcgagcaagcta

SEQ ID NO: 646166 - DNA, 75 bp, Homo sapiens
tggtttgatactgacctgtaaatcatcctttaggtggtggaggtggatacagcagtcggagaacatctggcagag

SEQ ID NO: 646167 - DNA, 78 bp, Homo sapiens
agcgcctcgtcgacatgagtgatgtggaggaaaacaacttcgagggcagagatattaccttccaaatgatgatggaga

SEQ ID NO: 646168 - DNA, 50 bp, Homo sapiens
tgaaaatggagtttcctgaaagccaaacatttgatggtatccatgtggtg

SEQ ID NO: 646169 - DNA, 75 bp, Homo sapiens
cagaaccctggctgaccactttgaaggaggatgctccagcagtggtggtgaccgcggtggcttcaaaaattttgg

SEQ ID NO: 646170 - DNA, 90 bp, Homo sapiens
agacacccagaaggagcctgaccgggcctcttgcactgactgagacgactcctcaggccacccaagtgatgagaaggacttctccttccc

SEQ ID NO: 646171 - DNA, 76 bp, Homo sapiens
catgcacttgttgcagaaacagccaaggtgtgatgaatgcagactctgctaccattttggctgtttggatcctcct

SEQ ID NO: 646172 - DNA, 83 bp, Homo sapiens
ttcgtcgcggcggcggtggagatcgcaggtcgctcaggacctgggaggaaggcaaggtgctcatctttgatgactcctttgag

SEQ ID NO: 646173 - DNA, 100 bp, Homo sapiens
gcgcgggatcccagcctcaggcgtgcgcggacggtgtgcggtctctggctgatgaacttgctcttgtggatgttttggaagataagcttaaaggagaaat

SEQ ID NO: 646174 - DNA, 100 bp, Homo sapiens
aagtggtttgcaacatccttcttctggataacactgtacaagctttcaaagtcaatgttcaaaccttgtactactcagctgatcacaagctgcttgatgg

SEQ ID NO: 646175 - DNA, 88 bp, Homo sapiens
aagaagaactctgaagatgattcagccttctgcatctggatctcttgttggaagagaaaatgagaatctcactctgttgcccaggctg

SEQ ID NO: 646176 - DNA, 146 bp, Homo sapiens
cagaactggtgcaagcggggccgcaagcagtgcaagacccatccccactttgtgattccctaccgctgcttagggctccggctggcacctgaggagcggcgtgaccccgagggcccagggagctgcccggctggcctaggcaggca

SEQ ID NO: 646177 - DNA, 100 bp, Homo sapiens
tctcttagtaagatgaaatacgatgaaatcacagctacatatttgttattggggagaaaatcttcagagttttttgctccactcaagcctgttagaatca

SEQ ID NO: 646178 - DNA, 90 bp, Homo sapiens
ctttgttcttgattcagagtatctcgtcacattactggtagtagttcccaagctattagctccagattgtgaaatcatacaggaagtggg

SEQ ID NO: 646179 - DNA, 120 bp, Homo sapiens
tgccctcctgccaccggacctacagctgcattcactgcagagctcacttggccaatcatgatgaactaatttccaagcttctatagtgtttatggggtggacaactaagacatttagaat

SEQ ID NO: 646180 - DNA, 99 bp, Homo sapiens
cgcgaaggcagtaccgtttcctcagcggcgggtcatccatgcctggcttattatatcatctctattgttgctgttctttttttcattcatttacttggg

SEQ ID NO: 646181 - DNA, 100 bp, Homo sapiens
acaaaacagcatggttagtcattgtggatgatgatacattaataagactgcttttggcttctggatgccctcctccagtacacatcgtatggggtgacac

SEQ ID NO: 646182 - DNA, 117 bp, Homo sapiens
tataagattcttcaaggtggggttggcatcccccacatacgaattctgcttggtcagaatcgtgatggcattgtgttcagcactgatgactattttcaccatcaagatgggtacagg

SEQ ID NO: 646183 - DNA, 100 bp, Homo sapiens
taatggagccaaatttaataaaggctgacaaaccaagaggatttgccagaggtcttgatcctgaaagaataattggtgccacagacagcagtggagaatt

SEQ ID NO: 646184 - DNA, 83 bp, Homo sapiens
cagactgcacctcgcagtctccccaggtccgcccagcagccgcgcttcagccagcatttgcaagtgaggaagcagcacaaccc

SEQ ID NO: 646185 - DNA, 74 bp, Homo sapiens
gtgccgtccactgagactgaggccttggcttccaaacctcaagaaggcatgaagccagcccctgcagtgccgtc

SEQ ID NO: 646186 - DNA, 101 bp, Homo sapiens
aactcctgaggagattcgcaagaccttcaatatcaaaaatgactttactgaagaggaggaagcccagattccgaagaggctcaatctgtaaatccttctag

SEQ ID NO: 646187 - DNA, 100 bp, Homo sapiens
catgtttctacacaacaaaacattcatggagggggaagtaaactaacattatggatttttccaagctacccaaaatactcgatgaagataaagaaagcac

SEQ ID NO: 646188 - DNA, 75 bp, Homo sapiens
cctctgcgccgccggcaccatgagctgaactgtcccaagcaataaacagtggtacattgttatcaaaaccgtccc

SEQ ID NO: 646189 - DNA, 75 bp, Homo sapiens
aggacccagagcaggacagcggcccggaggacctgcctctcgtcagatcaatgaactgagccatgttcaaatccc

SEQ ID NO: 646190 - DNA, 90 bp, Homo sapiens
cttttggatagtgatgggaaaagagcctggctagccgtctcaaggaaaacatggagaagctgactgaggagcgggatcagcgcattgcag

SEQ ID NO: 646191 - DNA, 90 bp, Homo sapiens
ctgaaagctgccgctgaagctgccgccgttgcctccgccgccaagagtgagcgagcggacccgcgatggaaaatggacccaagtggggtc

SEQ ID NO: 646192 - DNA, 74 bp, Homo sapiens
aataaagtagccaaagaagctgctaacagatggactgggcagccgatgaagtgcaaccttcacatgaatgggaa

SEQ ID NO: 646193 - DNA, 98 bp, Homo sapiens
atcatccatctaaagcaccagtaaaatatggtgaactcattgtcttaggccacagcaattgtctgctattttaaaagcactgtgatgcttaaatattc

SEQ ID NO: 646194 - DNA, 97 bp, Homo sapiens
tctattacgaccccaacaagagtcagagggatgaagatgcccctgctaagattccagatgaagaggccacaaaacccgaaggctggttagatgatga

SEQ ID NO: 646195 - DNA, 75 bp, Homo sapiens
cagaagtactaccgccagatgcgcaagttcctgttcctctcagaggtcttgcagtggagagcacagaccaccccg

SEQ ID NO: 646196 - DNA, 75 bp, Homo sapiens
tgaaaaataccacgacaaaaccaccctaacctagaggatcaagacataatgggagcatttttagacaagccaaag

SEQ ID NO: 646197 - DNA, 102 bp, Homo sapiens
gcggagcccggctcccgcaccatggaggaggacgacagctacgatcgtcagtatttaaacagatcacatcatgcgtgagtacaagctagtggtccttggttc

SEQ ID NO: 646198 - DNA, 83 bp, Homo sapiens
ccgtcgccttgctcctcgccgcggcggggactgcaggtagtgggcagcagtcagtgacaggtgtaacctctgtggatgacagc

SEQ ID NO: 646199 - DNA, 89 bp, Homo sapiens
gaccaacttctttggcaagtggacattttactggctcaagaataagacgagttggaagaagacctgatcaacaacttcagggtgaaggg

SEQ ID NO: 646200 - DNA, 83 bp, Homo sapiens
aggcagtgcccattagcccttgatgccattctagttggggaactataccgaggatatatgagcaatttaatccagaccataaa

SEQ ID NO: 646201 - DNA, 83 bp, Homo sapiens
cgcatttgtgggcgcgcggcacgcagccgggaggccgaggactcggagttcacctgcagacctgcctagagctggaacgttac

SEQ ID NO: 646202 - DNA, 96 bp, Homo sapiens
taggaagacgggcttgcgggtgatgggaatcgtggagaatatgagcggcttcacctgcccacactgcacggctcaggtggccttccttcagggaga

SEQ ID NO: 646203 - DNA, 118 bp, Homo sapiens
gacgactccgtcgcagactacggacctgtctgggtctcagccgccaaagaccccgtccggtaggtgctggagaatctggtaaaagcaccattgtgaagcagatgaggatcctgcatgt

SEQ ID NO: 646204 - DNA, 75 bp, Homo sapiens
agcaaaaagctccgcaacaagatagcagggctgtagtacatgagcgagctagagaaatcaccaccgtttagacca

SEQ ID NO: 646205 - DNA, 101 bp, Homo sapiens
acaaaaaatagttatggcgactttcagaaacaatcacatgaagactaaagcatctgtcagaaaagagagacagcgtctggagaccatcctcagtctctgtg

SEQ ID NO: 646206 - DNA, 100 bp, Homo sapiens
gtgcagaaataccagtccccagtgagggtgtacaaatacccctttgaattaattatggctgccagtccctgagacgaataggaccttgtccctggatgag

SEQ ID NO: 646207 - DNA, 83 bp, Homo sapiens
cgcgagcacagagcctcgcctttgccgatccgccgcccgtccacacccgccgccaggttcgtgctggccgtgggcagcgccgt

SEQ ID NO: 646208 - DNA, 100 bp, Homo sapiens
tcctggtactactgcttgctgtggcatttggacatgctttagagagagcatatcgcacggatgactgccatccctgggttttgccagtagtgaagaaagt

SEQ ID NO: 646209 - DNA, 82 bp, Homo sapiens
tctggactcacttcctgcccacctgagtgaagacatttccacctggacacctgaccatgtgcctgccctgagcagcgaggcc

SEQ ID NO: 646210 - DNA, 100 bp, Homo sapiens
cccaggtccagccaatgcattcagaagccaaaatgcaacagaagaaccttgaaggctatgtgggatttgccaatctcccaaatcaagtatacagaaaatc

SEQ ID NO: 646211 - DNA, 100 bp, Homo sapiens
tgagaaaacaccgaagggacattctgtcttcatggacatttttgaacttgtgagctgtgacttgtggtccctaggggtgattatctatgtgatgctgtgc

SEQ ID NO: 646212 - DNA, 100 bp, Homo sapiens
cagcatattgtactggcctgctgctggcccgcaggatttataagattggccagggctaccttatcaaggacggcaagctgatcaagaacaatgcctccac

SEQ ID NO: 646213 - DNA, 83 bp, Homo sapiens
gggaattgggaggtcggcggccccaaaaatcaatgtccgagttaccaccatggatgcagagctggagtttgcaatccagccaa

SEQ ID NO: 646214 - DNA, 100 bp, Homo sapiens
tgagtttacgtctcttccatctgctgctcacctcagctgcctgggtccccgacgagagccaggacactatcttgatcagaagaggctgaagcaggggctg

SEQ ID NO: 646215 - DNA, 89 bp, Homo sapiens
cgtcaggtcacccagcagagatcagcaatccttggctcactgaggaggtttgatacttgccagaactaatacagctgatgaaatacctg

SEQ ID NO: 646216 - DNA, 100 bp, Homo sapiens
cgtggacagcctcatcacccggctgctggagggtgcatggctgcctcctaatcccatagtccagaggaggcatccctaggactgcgggcaagggagccgg

SEQ ID NO: 646217 - DNA, 97 bp, Homo sapiens
tggacatggaggagaaggtccgcttcaagctcctggcgacctccctgctgcagggggccctcccagcggggccatgcccttctacaaccctgctcag

SEQ ID NO: 646218 - DNA, 75 bp, Homo sapiens
acccgatcttggccgcctctcccgcggccccattttccttcgaaggagggaagggaactctaatgatccaggaca

SEQ ID NO: 646219 - DNA, 100 bp, Homo sapiens
gacagagtctcactctgttgcccaggatttaaaaactggaacggtgaaggtgacagcagtcggttggagcgagcatcccccaaagttcacaatgtggccg

SEQ ID NO: 646220 - DNA, 50 bp, Homo sapiens
cgaatatggtgataaggagagaaagctctgagcagcgggtcccctgttcc

SEQ ID NO: 646221 - DNA, 50 bp, Homo sapiens
gggggaagtggaagtgaaattggagggcctgtccatcctcgctgtccttt

SEQ ID NO: 646222 - DNA, 100 bp, Homo sapiens
ggtgcatcccgggcgcctggcagtgtgacgggctgcctgactgcttcgacaagagtgatgagaaggagtgccttgtcacaggtagtactgatggaattgg

SEQ ID NO: 646223 - DNA, 98 bp, Homo sapiens
tgctcatccagccccaccagttgcaccagtgcagggacagcagcaatttcagaggctgaaggtagttcctgaaatgactgagatattgaagaaaaaat

SEQ ID NO: 646224 - DNA, 83 bp, Homo sapiens
actcggtcctgtttcgacagcgaacatgtcgcggcctgtcaggaagctcttcgtgggcggtcttgactggagcacgacccaag

SEQ ID NO: 646225 - DNA, 73 bp, Homo sapiens
cgccgctgcgggcccgctccgacgcggaaggtcgccactgggacactgtgaaccaggagtgagtcggagctgc

SEQ ID NO: 646226 - DNA, 98 bp, Homo sapiens
tcctaactatatcaacaacactgggaggcttttgctcttctggatttagcatcaaccatctggatattgctccttcccatcggagaccagagccgccc

SEQ ID NO: 646227 - DNA, 75 bp, Homo sapiens
atttcctgcaaggactccaaagtggtgaggctgagcaacagaaaaaggcggccatcatctctgctgagggcgact

SEQ ID NO: 646228 - DNA, 75 bp, Homo sapiens
atttacaaactggccaagaagggccttactccttcacagatcggtcaaggtgaagatgttcttaaagggtcccag

SEQ ID NO: 646229 - DNA, 50 bp, Homo sapiens
gaaggcccgcggcgccccgtgctgcaggaatggcatcaccagctgccgga

SEQ ID NO: 646230 - DNA, 100 bp, Homo sapiens
cagggactgaaggtcacaccacagcgcacaatgcagatcttcgtgaagactctgactggtaagaccatcaccctcgaggttgagcccagtgacaccatcg

SEQ ID NO: 646231 - DNA, 98 bp, Homo sapiens
tggtggtgctgcgctgtgtggaattatatccagatcgagagacagaagattctgaaagggttcaatgaaatgagagtcatcttggacaatgaggagca

SEQ ID NO: 646232 - DNA, 75 bp, Homo sapiens
ggcccctagctttctccttctggtgtggggcccgaggtatgatctcgtgaaaccttgagagaaactgaatgacga

SEQ ID NO: 646233 - DNA, 83 bp, Homo sapiens
acttgccgcgtcgaggactgtcggtgtcttctacaaatgcttctgggaactggaggacccagttaaccatagggctgtcggat

SEQ ID NO: 646234 - DNA, 100 bp, Homo sapiens
gtgtcatggcaatgctgagaaggaggatcagggatgagaagaccaacgttaggaagtctgcactgcaggttggcaaaagcagcttttgatgatgcaattg

SEQ ID NO: 646235 - DNA, 85 bp, Homo sapiens
gtggcggcgctgctgctcgggctgctcttggaggttattcagcttctcaaggctggaaaagcgaaggaagtttcctacaatgcac

SEQ ID NO: 646236 - DNA, 75 bp, Homo sapiens
tttggggtgggcgccgccgaggtgaggtcgtctcgcctcccgcgcgccgaactgccattggatgtccagaatccc

SEQ ID NO: 646237 - DNA, 112 bp, Homo sapiens
aggatatcgacgtcgtgatccagaagtccagagctgaggactgcctgtttgcagtacgagctcaactggaggcagtcctgtgcggaaatctgaagaaaaaacagatacaaag

SEQ ID NO: 646238 - DNA, 100 bp, Homo sapiens
ctgcagcccgtggtgatgtgcgtcatgaagcacctgcccaaggctcccttcctccgcagcgctcggaccaacaccagccagcctcagccccgccgatgat

SEQ ID NO: 646239 - DNA, 83 bp, Homo sapiens
cagaggtggaagtccaagtcaaacgcagaaggactgcctcactgagcaaccaagagtataattgaaatcctcaaaggaatgca

SEQ ID NO: 646240 - DNA, 85 bp, Homo sapiens
ggttgccttggtaggcaataaaagaggctgggatgcagatggaaaaggcccttgtgtctgggacacatttactcatcagggagga

SEQ ID NO: 646241 - DNA, 82 bp, Homo sapiens
tcctcctcctgtcgctgcccgtgtgattactgagactcagtccagttacaacacagggatcacaacaaacacaaccgccaca

SEQ ID NO: 646242 - DNA, 99 bp, Homo sapiens
ctcatgcaaaattgactactttttatggagcatttggaccagaaaaattcagcttcttctgcacggtacctgagatcctggtgcacaacatagtgatct

SEQ ID NO: 646243 - DNA, 80 bp, Homo sapiens
acaagcatactggcccagtgagagccttggatgtgaacattttccaggaggagatgttaaagtaacccatcttgcaggac

SEQ ID NO: 646244 - DNA, 75 bp, Homo sapiens
aggaaaggccccatcttcccttcacacctggaaattggccttgcctctctgggtgcacctgatgaatacattgaa

SEQ ID NO: 646245 - DNA, 74 bp, Homo sapiens
tacattcagtatcatggatgaatttcaggtatgaccccaaaacaaaccagtggagcagtgatgtggcccctaca

SEQ ID NO: 646246 - DNA, 97 bp, Homo sapiens
gaggagggggaactggtgctggagagacagggagaggggcgaaccggccccccacagccactgcagattatgtttgagaccttcaacaccccggcca

SEQ ID NO: 646247 - DNA, 75 bp, Homo sapiens
agagagcaagcgtttcagcgcctacaattacagccttcatctcctcgtcctccaggcagcacaagccattgtgga

SEQ ID NO: 646248 - DNA, 75 bp, Homo sapiens
caatgactgtggaataatatggaagaagatggaaaaaacttgtttaatggaaaccaggaatggatctggcagaca

SEQ ID NO: 646249 - DNA, 100 bp, Homo sapiens
gctgccactgctgccgccgcccccggagctgctggtttcattcgaggtttcgggccgatcgctccttcgatatcctaaaaaaatccaagccgccctcgac

SEQ ID NO: 646250 - DNA, 75 bp, Homo sapiens
gggggatggttccatcatggcgtcaatgcaggtgctggagaatctggtaaaagcaccattgtgaagcagatgagg

SEQ ID NO: 646251 - DNA, 75 bp, Homo sapiens
catagtacctacagcagcactccagccttcggacgctgactgggacgacctgtgggaccagtttgatgagcggcg

SEQ ID NO: 646252 - DNA, 115 bp, Homo sapiens
acgaggcaaggagctaaagcagcgtgcgttcagccctgggaccagaatccgtagaagctagccctgtggtagttgagaaatccaacagttatccccaccagttatataccagcag

SEQ ID NO: 646253 - DNA, 100 bp, Homo sapiens
ccgttcctggtcttctcccccagctgtgtaaatgagtatggaagattatgatttcctgttcaaaattgttttaattggcaacgctggtgtggggaagacg

SEQ ID NO: 646254 - DNA, 109 bp, Homo sapiens
ggacatccaaatatgggtgggccaatgcagagaatgactcctccaagaggaatggtgcccttaggaccacaggtttgaagatgccgcatttggattggatgaattccaa

SEQ ID NO: 646255 - DNA, 97 bp, Homo sapiens
gacaaaacagaccagtttctagtgacagacagcggcaggacagtcatcctctataagaccttctttggtaacgtgaacgagtcggcggtggtgcgcc

SEQ ID NO: 646256 - DNA, 90 bp, Homo sapiens
taaagacaggagtggagtgatatcagacaccgagcttcagcaagctctctccaacggcttcagggatgacttcttagggggcaggggagg

SEQ ID NO: 646257 - DNA, 96 bp, Homo sapiens
ctggagacagattgtaggaccgagcgcgggcaggcgggaggcaacggagctaccagccggagagaagatgactgaggaggaggtggagaccgttct

SEQ ID NO: 646258 - DNA, 90 bp, Homo sapiens
tgatatttcttctaatattattggattttgttacgattatcttcatattttgaaacagaattatatccagatcgagagacagaagattct

SEQ ID NO: 646259 - DNA, 97 bp, Homo sapiens
agcccggaaggtccggcgcccagagctaacgggagtcccaggtggcacgcactacccttcttcctggcctcctgaagaccatagcagcaaatcgtaa

SEQ ID NO: 646260 - DNA, 98 bp, Homo sapiens
cttacagataccacctctcttaatcagttccatggaaaatgggagaccacctgatcctgcagactgggccgtgatggatgtcgtcaattatttccgaa

SEQ ID NO: 646261 - DNA, 100 bp, Homo sapiens
agtgcgcaacaccctcagcctcatgcattcctgcggcatgtatgacttctctggccagtttgccttccacggcttccgagtggacctgccaatcaagtcg

SEQ ID NO: 646262 - DNA, 100 bp, Homo sapiens
gatcagagccgtgttcggggagtctttcaggcgttcgtggcattcagggatgtggctgtgtacttcacccaggaggagtggaggttgttgagccctgctc

SEQ ID NO: 646263 - DNA, 83 bp, Homo sapiens
aggacctgctggtggtgcacacgaggcgctatcttaatgagctcaagacctgcctagagctggaacgttacctccagagcgag

SEQ ID NO: 646264 - DNA, 102 bp, Homo sapiens
ctccgaaccccttcatgcccaaatcccggaaactccagcgtgtctccagccgtggtggtataagttgaaatccaaaccaggaaagaaggacaaggagcgagg

SEQ ID NO: 646265 - DNA, 71 bp, Homo sapiens
gttggacacgctgactttgtaggctccgccaagaggcgccgcaggagatcttggccctgattgcattcatc

SEQ ID NO: 646266 - DNA, 74 bp, Homo sapiens
cagcaaccgaattccagtttcatacggaatggacagccgacctcccatggcaatttttgagttgttggattaca

SEQ ID NO: 646267 - DNA, 90 bp, Homo sapiens
cgcgggccttcgagcagctcatgaccgacctcaccctgtcgcggaacattgacatcaccaatttcagcagcagctggagcgatggcctgg

SEQ ID NO: 646268 - DNA, 89 bp, Homo sapiens
tgcgaatctataagaaaggtgatattgtagacatcaaggtcggtgagctggtaaaggttacgaagattaatgtgagtggtcagtgggaa

SEQ ID NO: 646269 - DNA, 82 bp, Homo sapiens
cgtttcctccaggacagcacctagtcgtggccggaggagtctcagagctgtcagaaaggccagaagcggactcctagaagag

SEQ ID NO: 646270 - DNA, 75 bp, Homo sapiens
gaaagaaccctggctggggaaaagggaagtgaaaagagatctgttttcagttacatggacacagaacagtatgaa

SEQ ID NO: 646271 - DNA, 50 bp, Homo sapiens
cgtgcgctgaccctgactcactccaggtcgcgtctatgatggcaagatgt

SEQ ID NO: 646272 - DNA, 100 bp, Homo sapiens
ggcggacgcgcgcagcccgcccgcccggcgaccagcaagggcctgccttaagtgtgaaagtaatgactgatgaaagtggaaaatccaaaggatttggatt

SEQ ID NO: 646273 - DNA, 80 bp, Homo sapiens
gcttgcctacccgccggcccgcgggtctacttcctcaaagaagatgctcatgaagcagcaggaccggctggaggagcgag

SEQ ID NO: 646274 - DNA, 74 bp, Homo sapiens
tggatatccacaccatccttctcgctgcaggggctattcacgaaaagcagcagctctagagttcttaaaccgct

SEQ ID NO: 646275 - DNA, 75 bp, Homo sapiens
gctgcaaggagcatcccggctggagcagagccagccaaaactggacaagccaaggcatctgtagccaaagtaaac

SEQ ID NO: 646276 - DNA, 90 bp, Homo sapiens
tgtgtacagtattttgcagagcatcccccaaagacagattgaagaaatgcagagacagttcatcagagaagatatgaaatataaagatgc

SEQ ID NO: 646277 - DNA, 154 bp, Homo sapiens
ggatttgtctttctcagcaccttggcgaagccttgggtttctttcttaaaggactgatttttagaactccacatttgagattcccaacctgctgagcatccgcacacccactcaggagttggggcccagctcccagtttacttggtttcccttg

SEQ ID NO: 646278 - DNA, 74 bp, Homo sapiens
atcattatatggacagtttaggattattcttggagaaaccctgtctgtttactgtaaccttttgcactcaaatt

SEQ ID NO: 646279 - DNA, 90 bp, Homo sapiens
caaaaacgtccaggttctctacagtgaacaggtgaagatggttctggtaaaacaaccctcatgactaaactacaaggagctgagcatggc

SEQ ID NO: 646280 - DNA, 101 bp, Homo sapiens
aagtcttccaggacgagacatcactggctacacatttccagcaggctgcagatacgagtggacaagtaagaatgattgatgttggctgatattggagtgct

SEQ ID NO: 646281 - DNA, 50 bp, Homo sapiens
gggagaggcaggtgtcattggagagagagactttgagaatcactacaaga

SEQ ID NO: 646282 - DNA, 75 bp, Homo sapiens
ccctagaggcagcccatgggcctgggcaggccaaccaggtaagaaagcaaacttaggtaaaaatgcaagcatgaa

SEQ ID NO: 646283 - DNA, 75 bp, Homo sapiens
ctttactctggggtcccggctgccctgtggcctcgctcctcggaggttttcagataactattatcgtgcagaaat

SEQ ID NO: 646284 - DNA, 100 bp, Homo sapiens
ctgcaaggaaggtggagatctcctgtgctgcgaccactgcccggctgccttccacctccagtgctgattactacagcccggccatgctgggcctgaagac

SEQ ID NO: 646285 - DNA, 90 bp, Homo sapiens
atgcttctaagctgggagatgataggcacagtcagtggtgtgctgctagttacaccaaataatataatgtttgatccacataaaaatgac

SEQ ID NO: 646286 - DNA, 133 bp, Homo sapiens
cgcagctgtaccgccagttcaccaccaccgtgcaggtcgtcatcttcataggctcgctgctcgaccatggcaaaagttataaccaccgtactgaagttccctgatgatcagactcagaaaattttggaaagag

SEQ ID NO: 646287 - DNA, 87 bp, Homo sapiens
aagagacccgttcagagtcctacagtggcaggtggtggtatcatggatacagaaatgtctgaagatatagaccacaacttaactcct

SEQ ID NO: 646288 - DNA, 75 bp, Homo sapiens
ggggaagcgggacaatcgggtggaatcagagaagatcattgctgagttgaatgaaacttgggaagagaagcttcg

SEQ ID NO: 646289 - DNA, 75 bp, Homo sapiens
gcaggagccaacattaacaaaccggttgtttgatgtgtgcacagtgtcacgaacagacagagaaaccaaactaac

SEQ ID NO: 646290 - DNA, 100 bp, Homo sapiens
tggaagaggtagaggacgatactctgaccgttttagtagtcgcagacctcgaaatgatagacgaattggcagagggggtcgatttgggaggaaaggtgtg

SEQ ID NO: 646291 - DNA, 99 bp, Homo sapiens
tggcgagccatggcgctggggctgcagcgcgcaagaagaagatccttcagagcaacgattgcatagaagcagccttctgatctgaggacccctgcagat

SEQ ID NO: 646292 - DNA, 100 bp, Homo sapiens
ccaagttccaggaaccgtagagatggcttctgccggaaaaggaggacaggagcctgtcactctgctgggccagattggctgtgatagcaacgggaagctg

SEQ ID NO: 646293 - DNA, 100 bp, Homo sapiens
ataaacgatccagtggtgggctgcctgctccaacttgccaatgcaacggccacagtaaatgcatcaatcagagcatctgtgagaagtgtgagaacctgac

SEQ ID NO: 646294 - DNA, 83 bp, Homo sapiens
cgccggaagcggtccgagaatgaagaggttggtacattgtgacctatgccttggggatctaccatctaaatcttttcatagct

SEQ ID NO: 646295 - DNA, 100 bp, Homo sapiens
agagggcgtcgcatcctggacaggaaaattcagagcctgggagacagcaagaccattcccgccagaagatcagctgccatgttacttgactcacaccaac

SEQ ID NO: 646296 - DNA, 100 bp, Homo sapiens
cgaagagtttgaaagcgtgctccacaaatatttacagtcggaggagtactcggtgaaatcctgtcctgaagactgtaagcaaacttggaaatcatgtctt

SEQ ID NO: 646297 - DNA, 100 bp, Homo sapiens
gactacgcaggaaagccccagccacccatcaaatcagagagaaggaatccaccttcttacgctatggcagtccttcagtgaatctacagacctattttct

SEQ ID NO: 646298 - DNA, 96 bp, Homo sapiens
ttcacagaggccacaggctggacccacagtgccaaatatggccctggaacaggattggcatctctacactgaccctcgggagatctttgaggtgct

SEQ ID NO: 646299 - DNA, 75 bp, Homo sapiens
gacttcttgcatgcgagggaccattgcgccagaagcctgtcttagatgttcatgcagaactagacagaattacac

SEQ ID NO: 646300 - DNA, 100 bp, Homo sapiens
atatgctgaccttggcaaagctgccagagatattttcaacaaaggatttgttccatgccattgcagtgtcaactaggcctcagttacttttcagtttgcc

SEQ ID NO: 646301 - DNA, 100 bp, Homo sapiens
ctcacccagaggctcccggtgtccaggcaggtttctcaactcattggatgctaaagaaatatatttggaagtaatacataatcttccagattttgaacta

SEQ ID NO: 646302 - DNA, 73 bp, Homo sapiens
tggagcattctgtgaagaaggcagtacattttgggttaccgggtgatctggaccctctggcatctctcaaatc

SEQ ID NO: 646303 - DNA, 82 bp, Homo sapiens
gcgagatatctggccgcctctgccgcagctggaggtgtctgacttccagcaactgctggcctgtgccagggtgcaagctgag

SEQ ID NO: 646304 - DNA, 76 bp, Homo sapiens
aggggtgcctgtgattagtgtaaaaacgtccgggtccaaagagagactgtttcagatagagagccttgcccgggag

SEQ ID NO: 646305 - DNA, 90 bp, Homo sapiens
cttcatgcctgtcatgttctccctgacttgggacatggcctgtcggattatcctgcccccagagaagagtctcgctctgtcacccaggct

SEQ ID NO: 646306 - DNA, 100 bp, Homo sapiens
gtatgagcttctaactcattgtattcctcctgagataataatgaaggccatcatctctcagcaaggtgacatatttgtttttgacctggagacctcagct

SEQ ID NO: 646307 - DNA, 100 bp, Homo sapiens
tatggtgctgggtgcagatgcagtgtggctctggatagcaccttatggacaggtattttcaaccaccaggaacttggatacagtgtgctttagaatccag

SEQ ID NO: 646308 - DNA, 100 bp, Homo sapiens
cgaaggcgaccttccttgctttcagaatttcacccaggttctgacagggcggtgtccgtgtcctccatgtctgagttccagcgtctaatggacatctccc

SEQ ID NO: 646309 - DNA, 100 bp, Homo sapiens
gtagatttaccagaagtagatggagcagatgatctctctgatgtaaaggatggagtaaatcaagcagcacctgcatttggatttggcagcagtcaagcag

SEQ ID NO: 646310 - DNA, 75 bp, Homo sapiens
gcgaagctggccgagcaggctgagcgatacgacggtccagccctgctgggagttttctgccacacagatttgcgg

SEQ ID NO: 646311 - DNA, 74 bp, Homo sapiens
cttcaaatgctgtttgtattccagagactagtggcatggcagagagaaatgctaattttgaagcccttcctgag

SEQ ID NO: 646312 - DNA, 91 bp, Homo sapiens
aaggcacagaagcatttcaacaagagcttcatcgacacatcccggatcacacctgagcatcagcggggaagggggagcctttgagcagcag

SEQ ID NO: 646313 - DNA, 82 bp, Homo sapiens
gcagtggcgtcctggagccctcctcaggtactaccgtggtgcagtgggcgccctgctggtgtacgacatcgccaagcacctg

SEQ ID NO: 646314 - DNA, 100 bp, Homo sapiens
gtggacatctgctgccggaaggggtcccgaagccccctgcaggaactctacaacccaatccagggcttcctcagccgccgcctcaagggctccatcaagc

SEQ ID NO: 646315 - DNA, 100 bp, Homo sapiens
cggagctgcgcgggatcctggctactctggccccgcaggccgggagcagagggcggaccgccacctaccgcggatgcttccgactgccagagaacatcac

SEQ ID NO: 646316 - DNA, 74 bp, Homo sapiens
tactgtctttttcttcaatgggcagcatatgaaagtggattatgggaaaatgtttcaacgtgcgcaagagttgc

SEQ ID NO: 646317 - DNA, 83 bp, Homo sapiens
agagtcaggagaagccgcgggagatcatggacgcggcggaaaattaaacaaccaccatgtcgagcaaaaaggcaaagaccaag

SEQ ID NO: 646318 - DNA, 100 bp, Homo sapiens
ttgctctctggcgagctttcaactatattgcagaagaatttgatatatcagaagcatttatttctatagtacacgtagaagatgtgttacaacgttgtcg

SEQ ID NO: 646319 - DNA, 100 bp, Homo sapiens
accggccccccacagccactgcaggctaccctgtcatgatcaaggcctcagcaggtggtggtgggaaaggcatgcgcattgcttgggatgatgaagagac

SEQ ID NO: 646320 - DNA, 51 bp, Homo sapiens
gtcgcagcgagctggagccgccggagggaaatcctcattgacgattcaatt

SEQ ID NO: 646321 - DNA, 92 bp, Homo sapiens
ttcctaccttatgagctcggttttcttatgcttataagagtggaacagacaatgcagatcttcgtgaagactctgactggtaagaccatcac

SEQ ID NO: 646322 - DNA, 80 bp, Homo sapiens
ctcagaaagatggatttttgcatgagacgcttctggacaggaggaaaattcttccagcgatggtctcccactcagagctg

SEQ ID NO: 646323 - DNA, 100 bp, Homo sapiens
catttatgatctttcctggtcaaaagatgatcactacatccttacttcatcatctgatggcactgccagagaatcagatatcaccaaggagagaattcag

SEQ ID NO: 646324 - DNA, 101 bp, Homo sapiens
atacaggaatggaagtttggggaggagaaaacctcgaattttcctttaggggtttccaaggcaagaccggccctccaggcccccccggcgtggtcggccct

SEQ ID NO: 646325 - DNA, 106 bp, Homo sapiens
gctggcggcggcgggtcaggagcagccgcagcgacggcggcgacagcagacaatgcagatcttcgtgaagactctgactggtaagaccatcaccctcgaggttgag

SEQ ID NO: 646326 - DNA, 100 bp, Homo sapiens
ctgaacaacaatgaattggagaccattccaaatctgggaccagtctcggcaaatattacacttctctccttgtacctagtcgatagtcgctggttcaaac

SEQ ID NO: 646327 - DNA, 100 bp, Homo sapiens
ggtatttgagagcaatcgccaccgctttcctggaacttgagctgaccctctggtgggcagcatcgccacacagtacatgaccaacagagcagagcatgac

SEQ ID NO: 646328 - DNA, 100 bp, Homo sapiens
aggggccccggccacagtgaccatggtggaatccaagagttttgtaatctccatcagtcaaaagaagagaacctcatcagttcctgaaacgagagaatgt

SEQ ID NO: 646329 - DNA, 101 bp, Homo sapiens
cctgtctcaaaaccctcctcatcatctactccttcgtcttctggatatggaacctcctagaatcaagtgcccaagtgtgaaggaacgcattgcagaaccca

SEQ ID NO: 646330 - DNA, 90 bp, Homo sapiens
atttatttctttggagacaaaactatgccagtctcctgcaagcgcaaaatcttctaacgcaactacctcagcaaagccaagccaacctcc

SEQ ID NO: 646331 - DNA, 83 bp, Homo sapiens
gctgggtcagtccgccgctcaccccgcggccgcaccttcccgccttctcaggtattaatctctggagaagacacatccacagt

SEQ ID NO: 646332 - DNA, 75 bp, Homo sapiens
ggcagagtgctgatgtgaaaaataccacgacaaaaccaccctagtgcaaatgtcaattgtcaagccttggacaaa

SEQ ID NO: 646333 - DNA, 100 bp, Homo sapiens
gaggacctggccctgcgggctcagaacgatgtggctgcccggcagacgacagagatgctgaagcacttaaatatagatccggtggtatggatgagaaaac

SEQ ID NO: 646334 - DNA, 75 bp, Homo sapiens
caagtatggacatttaagagtgaatcagaccttcaactggaatacaaccatgaagctcatgactgctctggtgaa

SEQ ID NO: 646335 - DNA, 90 bp, Homo sapiens
cttctgcaccggcctcaagttggctacattcggcccagagccatggctatctcctcttcctcctgcgaactgcccctggtggctgtgtgc

SEQ ID NO: 646336 - DNA, 100 bp, Homo sapiens
cgatgtttcaatattggaagcgctttgatttacagcagctgcaggcatttgagctggcaacgggagattatttgtttgaaccacattctggggaagacta

SEQ ID NO: 646337 - DNA, 95 bp, Homo sapiens
gaaaacctaaccatgaagacttgaacttaatacagcaagaaagaccatcaagtttaccagaggcaggtggaagtcatcataaagtttctgtttca

SEQ ID NO: 646338 - DNA, 82 bp, Homo sapiens
tttccttcgtacccacagtgcttcatgagaggcttgtggaatatacccgtgctgatggcacagttggccgaagagtgaagcc

SEQ ID NO: 646339 - DNA, 100 bp, Homo sapiens
cgacgcagtcagctgcgtgattcccgtgattgcgttacaagctttgtctccttcgacttggagtctttgtccaggacgagcatgctgtcaaggtccttta

SEQ ID NO: 646340 - DNA, 100 bp, Homo sapiens
gcagtgaccttcaaagtgagcgccaatgtccaaaacgtgaccactgaggatgtggagaaggccacagaaatgtctttcctccaggacccaagtttcttca

SEQ ID NO: 646341 - DNA, 88 bp, Homo sapiens
aagaatctgtgggagcagatctgcaaggaaaatgatgcatcctgttgccagcagtaatccagctttctgtgggcctggcaagccttcc

SEQ ID NO: 646342 - DNA, 97 bp, Homo sapiens
aggctttatgggagcatgggttaccagcgacgcaccctgttggagtaatagatttttccctctaccttaaggatgtgcaggatcttgatggtggcaa

SEQ ID NO: 646343 - DNA, 113 bp, Homo sapiens
tgggggaccacagcatgcacttccttccagcagctacacaggctaaagaattacctccaaagccattgtcaagaccacagcagtcatctgcaccagtccagctgaactctggc

SEQ ID NO: 646344 - DNA, 75 bp, Homo sapiens
gcgcgctgcgcggactgcggcgccccggggcgaagctgtgctcaggcccgggctggacgcagagccagagctgtc

SEQ ID NO: 646345 - DNA, 98 bp, Homo sapiens
tacccagagacagacaactggtacctctccctgcagctcatgtgccctgagaatgctgagccgagcaggagctccgcgtggcccagacagagtttgac

SEQ ID NO: 646346 - DNA, 80 bp, Homo sapiens
caatcttcaagatggtcttcagagagcaactatcctccccagaattaaacaaccaccatgtcgagcaaaaaggcaaagac

SEQ ID NO: 646347 - DNA, 100 bp, Homo sapiens
ctgggagagaggtacctctccttttccctctccctttccctaaggtgatgtgtccaatctagatcccaacttctcatttgaaggcaccaaactggatgtg

SEQ ID NO: 646348 - DNA, 75 bp, Homo sapiens
ttcaatgcagacaagacggatgtgatgctgcgcttctctgaagtagctttggaaagtagagaagaaaatccagtt

SEQ ID NO: 646349 - DNA, 83 bp, Homo sapiens
ctgtgggacacctggaaggttgctcacctgaagggctggctgctggcgggatggacaccctggaggaggtgacttgggccaat

SEQ ID NO: 646350 - DNA, 98 bp, Homo sapiens
ttaaggattccaagtaactcttatttggttggaaaagagactgttcaaaccactgaggatcagattttgaagagagatatgccaccagcatttattaa

SEQ ID NO: 646351 - DNA, 75 bp, Homo sapiens
ttatgcatctttatccaatcaagtgcccttggacaaagcctgaaaccagggttcaggataagtttgaggtgctga

SEQ ID NO: 646352 - DNA, 100 bp, Homo sapiens
cagcatgtatctgcttgatattggcggtggctttcctggatctgaggatgtgaaacttaaatttgaagagccgttggacataccagatggtcgaagagct

SEQ ID NO: 646353 - DNA, 83 bp, Homo sapiens
caggatccggctgccgaaggtcctcgccagattcgagtggtgaatgcatttcgtagttctttatatgaagggttagaaaaacc

SEQ ID NO: 646354 - DNA, 90 bp, Homo sapiens
cttgacctttaggtgcttttatattcatctcaaaaacaaaattctgaactcaggacttggcaattgttgacctcctgtactggagagaca

SEQ ID NO: 646355 - DNA, 90 bp, Homo sapiens
cacagttcccatccctgcagtcaactgccaagcatgtagaaagccggaagtattgccaaatgcccatgcccatgggctataatccttatg

SEQ ID NO: 646356 - DNA, 100 bp, Homo sapiens
ggacgccgctgaccgccgcgcgcccgaaccgggtgtccacatgagtgcctctcccagcagatccagaacctaaaggcagacccagaagagctttttacaa

SEQ ID NO: 646357 - DNA, 100 bp, Homo sapiens
ctcgcgtcgcgcccgggaggaaggaacgaggcaaggagctaaagcagcgtgcgttcagccctggggctggcctgccactcctcctgctatgatgcctggg

SEQ ID NO: 646358 - DNA, 74 bp, Homo sapiens
ctgattcaagtgttggcggatggaagggaggagactcctgaccctcagaatgtggaggccatagtggagtttga

SEQ ID NO: 646359 - DNA, 90 bp, Homo sapiens
gcctgcacaggttaaccgtcagacttccggggcattcagcctgattacatcaaccccagagccgtgcagctgggctcccttctcgtccgc

SEQ ID NO: 646360 - DNA, 75 bp, Homo sapiens
aatggcaacttgcgcggtggaggtgttcgggctcctggaggacgagaagaggactgtcagaaggacgtagaaggc

SEQ ID NO: 646361 - DNA, 100 bp, Homo sapiens
cctcttccactccgaggaaatcaagtttgtgaagtgtggatatgcaggctctaactttccagaacacatcttcccagctttggttggaagacctattatc

SEQ ID NO: 646362 - DNA, 100 bp, Homo sapiens
gcagtcggactctgtggcccaaggttcactggttgaggacccagttcccatctttggatatagaggtcgatggtggagtaggtcctgacactgtccataa

SEQ ID NO: 646363 - DNA, 73 bp, Homo sapiens
gattacttcagaattaccagtgttacagacctgctgcagctacagtatgaaggagttgcagtcatgaaattat

SEQ ID NO: 646364 - DNA, 100 bp, Homo sapiens
gccaggatcttataaaacaaatgctgctgctatgaatatgggtcgaccattccaaaaaaatcgtgtaaagtcctgttttcatattatggatatttgtaag

SEQ ID NO: 646365 - DNA, 96 bp, Homo sapiens
tcagcgacggcggcagcggccggagccgggccgggcagctagcagggcgcttcggtctgaagatgatgagaaactgaaaaagaggaaggagcgatt

SEQ ID NO: 646366 - DNA, 100 bp, Homo sapiens
tcttcaggaattcctgatgaatttatatgtccaataactagagaacttatgaaagatccggtcatcgcatcagggaaattggattccaagatccatcaag

SEQ ID NO: 646367 - DNA, 100 bp, Homo sapiens
ctggatcaacaaccgccttgtggcaacatggctcaccctacctgtggtttttagaacttcagccataaaaatgggcagaattttccttgatcatatcggt

SEQ ID NO: 646368 - DNA, 100 bp, Homo sapiens
tcttattcagtgtaatcctaatctcatgggtatccactgttgggggagaagacatccctttaaaagtagttggaatgttcccaagtagaggtgagaaaag

SEQ ID NO: 646369 - DNA, 82 bp, Homo sapiens
accgccagcgacctccgccgcagagtcccaccgccacagtgtactaatggtcacttgatgtgcgctggctgttttatccacc

SEQ ID NO: 646370 - DNA, 76 bp, Homo sapiens
ggagcctcagttggaagcagccgatccagcctgcggagcctgtggggcaggaaatttggtgagcggcctccaccta

SEQ ID NO: 646371 - DNA, 88 bp, Homo sapiens
cttacctatcaaaaagaaacatttgtttgagaattccaggcttctgcagcctccaaaaggtacgacaccacagaggaaaagttattta

SEQ ID NO: 646372 - DNA, 116 bp, Homo sapiens
tcggtggagtcatggcagtgccctttgtggaagactgggacttggtgcaaaccctgggagaaggtgcctatggagacacttttccagccattaactccaggctctcgagaatttga

SEQ ID NO: 646373 - DNA, 82 bp, Homo sapiens
aggtgaagagttgtcccagctcggcccgcgggggagccccgggagccgcacggttacaggaggttccagtggcatcgggaag

SEQ ID NO: 646374 - DNA, 90 bp, Homo sapiens
agctctgcggctcgggccctgagggttgaagctttgagagaagcagcaactgctgttgagcaagagaaagaaatccttctggaaatgatc

SEQ ID NO: 646375 - DNA, 83 bp, Homo sapiens
cccttcacctgtgtaagcagagtgctgagccatcactgtttcagtttgcctgagaatacagatcaacccacagaacaaagcgg

SEQ ID NO: 646376 - DNA, 96 bp, Homo sapiens
cagccctcagtgcctgccatggactgttgttgcgaagctctttggtgaataatagaactcaggccaaggtagcggaggagctgggcatgcaggagt

SEQ ID NO: 646377 - DNA, 76 bp, Homo sapiens
agcaaatctacttttgggttacaaaaatccagaccagggaagagacttccaccttaggatagtgttgcctgaagat

SEQ ID NO: 646378 - DNA, 80 bp, Homo sapiens
tgcagggagtatcaaatatgagaaagctaggccatctgaataactttactaagtttttcagaagaagtgaagtcaagatg

SEQ ID NO: 646379 - DNA, 99 bp, Homo sapiens
ggcattcgcttcatcatctcattctccagggatcagtgattccagaattctctgatggtttctggactgggtcccagctggcgtgctggacgaattcgg

SEQ ID NO: 646380 - DNA, 97 bp, Homo sapiens
agctgcaggaaggtatggggccatttcaggatttggtctctctctaattaaatggatcctgattgtcaggcttcgagacaccaagtccacagatcag

SEQ ID NO: 646381 - DNA, 100 bp, Homo sapiens
tgctgcccagatggaggtggccagcttcctcctgagcaaggagaaccagcctgaaaacagccagacgcccaccaagaagtattcaagtcaaacaacgttg

SEQ ID NO: 646382 - DNA, 100 bp, Homo sapiens
gccgcccccgccgccggggacatgtctaaccccggaggccggaggaacgggcccgtcaagctgcgcctgacagattttcgacaatgaagccaaagacgtg

SEQ ID NO: 646383 - DNA, 100 bp, Homo sapiens
cagagacaccagcttcagtggcctgtcgttggaagagtacaagctgatcctgtccacaggaaagatgaatgggagggctgattttcgagagccgaatgca

SEQ ID NO: 646384 - DNA, 74 bp, Homo sapiens
ataaagtgttctgacgcttcagactagatatctcttccaaacgcatgatgaaggaggtcttgtcaacagggcaa

SEQ ID NO: 646385 - DNA, 100 bp, Homo sapiens
ggagattctaagtccatcatcacgtgtcgggtgtcccttctggatggtactgatgttagtgtggacttgccagttgtaaagaagaaagttctaccctttc

SEQ ID NO: 646386 - DNA, 75 bp, Homo sapiens
cagttcatgacaatgactttgagccctaccttactggacagtcaaatcagtttcaccagtgatcattaaagaatg

SEQ ID NO: 646387 - DNA, 100 bp, Homo sapiens
tgtttggggacccctgggggagtgcatcatcgctggccatgagagtggagagctcaaccagtatagtgccaaggttaaaattgcagagttttctcgtact

SEQ ID NO: 646388 - DNA, 98 bp, Homo sapiens
gatgctcctgacggtggtggacagactctccatgccccgatgaagtttgtccgagctgcaggaggagggaatgaacgccatcaacctgcccctcagcc

SEQ ID NO: 646389 - DNA, 99 bp, Homo sapiens
tttactacaaagatggacttctctgtacagtgacttctgacagctctctccatggaaggaggcggcggccgcgatgagccttcagcctgccgggcaggg

SEQ ID NO: 646390 - DNA, 100 bp, Homo sapiens
gcctcttccagagccaactgctgtgccagggcccaagcctagcatctaagcctgttccctgttcagacttcatcacctgattcttccaatgagaattccg

SEQ ID NO: 646391 - DNA, 51 bp, Homo sapiens
agggtcgggcccagttgcggcgagcggcagaagatggctgtgccacccacg

SEQ ID NO: 646392 - DNA, 75 bp, Homo sapiens
gtctctaaagatgattttcaaaagctcctttcaactgtgcctgatggccaggccatgttatgggatctcaacgaa

SEQ ID NO: 646393 - DNA, 75 bp, Homo sapiens
caagcgggccacgcacctcgtcaccaaggccaaggttccagcaacagatagaaatgctttaagttcactctgggg

SEQ ID NO: 646394 - DNA, 100 bp, Homo sapiens
atttggaattttcgtatacgtggattccagaggggtgacagcgaaatgacattgtcaatacctctggccgcttcttcatcatcaacaaggaaaattacac

SEQ ID NO: 646395 - DNA, 100 bp, Homo sapiens
gtgtgtcccgggcccagacgaattgcaggcattttggagatcaaagatgggtagaaaagatgctgctactataaaacttcctgttgatcagtacagaaaa

SEQ ID NO: 646396 - DNA, 100 bp, Homo sapiens
tcggaacactgatgggaaatcagccctggacctggcagatccttcagcaaaagctgtccttacagtcataccctaatgatcccagcaagataatgtcctg

SEQ ID NO: 646397 - DNA, 75 bp, Homo sapiens
ttttgatgcggagtgtgcactggagaaacttactaccgatcatgagaaaggtttgcctgaatccatcattgcagc

SEQ ID NO: 646398 - DNA, 100 bp, Homo sapiens
agaacagatgtggaaaaatgtttacttcagagaaaggggttgtggaggaatggttgtcagagtttaagtggcttttcatggcctgccactgaaaatcaag

SEQ ID NO: 646399 - DNA, 97 bp, Homo sapiens
gggaaggaactttgggtcctgaatcttctgggagctgaggaaccagatatcttgaaaagctgccagaaaggtgttgacttcaaaatcaaaactgtag

SEQ ID NO: 646400 - DNA, 75 bp, Homo sapiens
aacatgatcctcatgacaaatcatttctatgcagcgatcttgggatatgatgagagacggggtttcaccacgttg

SEQ ID NO: 646401 - DNA, 90 bp, Homo sapiens
ctggacgatgccttggagcctcggcaggacggcggacccagccgagaagacgccgctgggggtcccgcgccagtcgggccgtccgggttg

SEQ ID NO: 646402 - DNA, 100 bp, Homo sapiens
tgcagctcctgaaaggagagacacttgtgaacattcaagtgaagcaaaagcctttcatgattatacgctgaccggaaaggagattgagattgacattgaa

SEQ ID NO: 646403 - DNA, 90 bp, Homo sapiens
gtggacatcagccccaaacaggacgaaggcgtgctgaaggaacttgctactaccagcaccatgccctaccaatatccagcactgaccccg

SEQ ID NO: 646404 - DNA, 98 bp, Homo sapiens
gaagctgacctcagaggagtttaacgcgatcttcacattttacgacaagaaaaagcggatggtggttcctgctgccctcaaggtcgtgcgtctgaagc

SEQ ID NO: 646405 - DNA, 100 bp, Homo sapiens
attccatcaagtcctgaaaaatcaaaatggatttagagaaaaattatccgactcctcggaccagcaggacagcggggatctgatgagcttctttcttctg

SEQ ID NO: 646406 - DNA, 98 bp, Homo sapiens
ctgtacttctcgagcttctcagtcagtcctgcctcatcccagccatgtcatcttatctacgaaatgattcaggtacaagaaaattccccaggacacag

SEQ ID NO: 646407 - DNA, 75 bp, Homo sapiens
ccactcagctgacatatgaaggactcattgatgaaatttatggcattcagaacaatttggtgcttccagatgtga

SEQ ID NO: 646408 - DNA, 50 bp, Homo sapiens
caaagacctgcgactttgctcagcttcgagagctgtgcccaggagtgaac

SEQ ID NO: 646409 - DNA, 75 bp, Homo sapiens
gaagaaaagaaaaaggcggcagtggtagtttccaaatcagtgcaccggctgctgacccatgccctgggccacacg

SEQ ID NO: 646410 - DNA, 100 bp, Homo sapiens
gtccagcagatggcggatgccctgcagtacctgcagaaggtctctggagacatcttcagcagctgcgcatggagtacctctccctgatgcatgctatagt

SEQ ID NO: 646411 - DNA, 74 bp, Homo sapiens
ttaaaaacaggatgaaaaagactgattggctcttcctcaatgcttgtgtgggtgtggaaacaggaagagaacta

SEQ ID NO: 646412 - DNA, 75 bp, Homo sapiens
atgttgctcctgtgatgccattagatcgtttcattacagaaatgttgctgaagtgctgctgaaagggccagagat

SEQ ID NO: 646413 - DNA, 98 bp, Homo sapiens
aaggcgatcttcctgtttgtggataagacagtcccacagtccaggattcactccttctccagttgcacagccacacccttcagctggccttaatgttg

SEQ ID NO: 646414 - DNA, 98 bp, Homo sapiens
tgccggcggctgggactgaagagggacgggtcccgcggcgagcgagctcctgaggcttgcattgatgacaatgttgatatggtgaagtttctggtaga

SEQ ID NO: 646415 - DNA, 74 bp, Homo sapiens
caagtgacttgctgagtccagataacactgactgtcagagcatttattgaaatggcaaccacagaggatgctca

SEQ ID NO: 646416 - DNA, 82 bp, Homo sapiens
ggcggtgcgtgttgctgcgagtgggacgcgcactggtcggtgccggctcaggagccggggtgagaagccctaccactgcaac

SEQ ID NO: 646417 - DNA, 50 bp, Homo sapiens
ggggtactacggctacagcaagatgcctgtgaggagccaccaacatttga

SEQ ID NO: 646418 - DNA, 75 bp, Homo sapiens
ggaaaccttttccgggtggggatctctgaaattactcaggaccctgatgctcccataagacagaaaatgcccctt

SEQ ID NO: 646419 - DNA, 97 bp, Homo sapiens
acagttatgggtcgcaagaagaagaagcagctgaagccgtggtgctgtggtttgaagaaaagcagcagcaatttgagaatctggatcagcaacttag

SEQ ID NO: 646420 - DNA, 100 bp, Homo sapiens
ctaagaaagagaatgtaagacaggaaaataattaaatattcttaccgagcctacaacacagcagtcccctcaggatgagcaggaaaagctcttggatgaa

SEQ ID NO: 646421 - DNA, 80 bp, Homo sapiens
cttctccactttcgccagcccgtgccgcgagcgcggcctgcaggagagctagagccggtgcaggccacgcagaacaagac

SEQ ID NO: 646422 - DNA, 90 bp, Homo sapiens
ccgacctctcgaagtcccgtgagaacctgtctgcagtcatgttgtataaccccggacttcacagagaatgcagttgtcttgacttcaggt

SEQ ID NO: 646423 - DNA, 100 bp, Homo sapiens
aaccagccacagatactattaggagggaagaaggtagataatgactataatgcccttcgagaaagactcagcaccttgcctgataaattgtcttataata

SEQ ID NO: 646424 - DNA, 74 bp, Homo sapiens
ggggagcggcgttggaggccaccgtttccaggctccttctcctgaaaaagccgaggaggagagtgagaggcttc

SEQ ID NO: 646425 - DNA, 75 bp, Homo sapiens
catcgagcagaggctgctcatgttctccttcgtcaacgaccggaagcggggagaggtggtgagagatgacccctg

SEQ ID NO: 646426 - DNA, 109 bp, Homo sapiens
ccggtgccagcacctttcggcttctgagacggcggcagcagcggcattcagaactggcatcaaatactcacaacatagctcaggatctgtcaaacaaaagttcttatgg

SEQ ID NO: 646427 - DNA, 90 bp, Homo sapiens
cgagaatacagagagaaaattgagacggagctaagagatatctgcaatgatgtactggtattgttgcagcatctggcagtgagactgagg

SEQ ID NO: 646428 - DNA, 75 bp, Homo sapiens
tgccataatgaataagtacattcccagtactgccaaatctgtcgaaagggagataatgaagaactgcttcttctt

SEQ ID NO: 646429 - DNA, 98 bp, Homo sapiens
cccagagtccgcggccggggcgcgggaggtatcgagaaccttccctgcgaacttcagaggaacttccagctgatgcgagagctggaccagaggacgga

SEQ ID NO: 646430 - DNA, 83 bp, Homo sapiens
gccaggaagcttcggccccgcagctcggcttgctgcggtctcaggctgtctgtccccagaccccagagcacgtccggcaccac

SEQ ID NO: 646431 - DNA, 100 bp, Homo sapiens
cccatacagcgctttgacaagtgcctggaagagttctatgcactctgtgaccagctggagctgtgcctggagtttttcttaaatgtgaaagatatccttc

SEQ ID NO: 646432 - DNA, 76 bp, Homo sapiens
ggccaactccaatgggcctttccagcccgtggtccttctccatattcgagaatttccccatggactccagatcctt

SEQ ID NO: 646433 - DNA, 74 bp, Homo sapiens
tggaccctcctcccaactgtagctttgaaaagtccagccgcatttcatgagcagagaaggagcttggagcgggc

SEQ ID NO: 646434 - DNA, 71 bp, Homo sapiens
ccacaaatccagtgaacaacgatggcattttgaaaacagcaaagggacttcgtgaatgtccggcgcattga

SEQ ID NO: 646435 - DNA, 96 bp, Homo sapiens
atttcacaaaaaaatcaaagaggcatttgaagtctttgaccatgagtcgaataatacagtggatgtgagtatcggttttatggagaacctgtaata

SEQ ID NO: 646436 - DNA, 100 bp, Homo sapiens
atctgaaggatcgctactattcaggactaatctatgtctctcaggcagctgcagagcttcaacagtactgtatgcagaatgcctgcaaggatgccctgct

SEQ ID NO: 646437 - DNA, 82 bp, Homo sapiens
tctccaaccccaacctggcctgctgatgggaaccaagttgataaacctaggctgatctcccagctggagcaagaagataaag

SEQ ID NO: 646438 - DNA, 75 bp, Homo sapiens
aaggactggaagagagccatccgcatgaacggcatcatgctcaggtttaaagtaaaggtgggtgctgatctccag

SEQ ID NO: 646439 - DNA, 100 bp, Homo sapiens
gaagtgttggaaaagtccagtactttaaatgtgcccccaagtatggaccctgatgctcccataagacagaaaatgccccttgatgatctggatagagaag

SEQ ID NO: 646440 - DNA, 100 bp, Homo sapiens
gggctgaagagaagatggaggagctggtggtggaagtgcggggctccaatggcgctttctacaaggctctaagggatggaaataagctggcacagatgga

SEQ ID NO: 646441 - DNA, 50 bp, Homo sapiens
gaaaacatcggatttacattttaaggtccagacatcatctggtctccctg

SEQ ID NO: 646442 - DNA, 82 bp, Homo sapiens
ggtgaaggagatgtgggctgggaagaagctggccgatgaccacaaggtttggtgcacctcgatttggaggaagtagggcagg

SEQ ID NO: 646443 - DNA, 101 bp, Homo sapiens
cgctgctggcctttgtgagcctcagcctgcagttctcacgttcacgtccatgttcttcccaggaaggctggagactttcacaggaatgacagcatctatga

SEQ ID NO: 646444 - DNA, 97 bp, Homo sapiens
tgaatgaggtgctgaatagactgcacctggctatcccaaccaggagggacgataagattgctcgctgtaagcagctcatctgtgaccccagctacgt

SEQ ID NO: 646445 - DNA, 50 bp, Homo sapiens
tctatagtcggagtggagaactgcaagcccacgacccttcctcagggcac

SEQ ID NO: 646446 - DNA, 75 bp, Homo sapiens
tggcaaaagtcactatcaagaaggaagatctggagctaatagtctctaattaacagaagatggcaaagcccagcc

SEQ ID NO: 646447 - DNA, 50 bp, Homo sapiens
caactgccgagcagcgcttctccatggagacttttggaacagcgatcgta

SEQ ID NO: 646448 - DNA, 97 bp, Homo sapiens
ggagtggtgaagctggaacagccagaattggacccgaaaccatgcctcactgtcctaggcaaggacccatggatgaaggaccagatcttgatctagg

SEQ ID NO: 646449 - DNA, 98 bp, Homo sapiens
tagcagaagtagctaatgaaattgaaaacctgggatccacagaggaaagtgccggtggtggtgtgcacattgagccccggtatagacagttcccccag

SEQ ID NO: 646450 - DNA, 100 bp, Homo sapiens
ccaccggcttccctttgtaaattgagctctgcacgctggggagtttgttgggtggaccgcatcatcggcctggaccaggtggccggcatgtcggagaccg

SEQ ID NO: 646451 - DNA, 76 bp, Homo sapiens
gccgcggcggcgtgtgcgcccctcaggcccggtggttctgggaagcgtacttccagtcaattaaagccattgccct

SEQ ID NO: 646452 - DNA, 100 bp, Homo sapiens
gatgtatacacgtttaatttttctaaagagtcttgttatttcttctttgagaaaaacctgaaagatgtctcattggatgaaaaatctgacaaacagtatg

SEQ ID NO: 646453 - DNA, 75 bp, Homo sapiens
ggagctacagaaattagaagaacagattgcaaatcagactggaagatggtctcctaaaaacccagaacagaagat

SEQ ID NO: 646454 - DNA, 101 bp, Homo sapiens
cagctcatggggcattcagaatgggaccacaaacgagggccaagaggatcacagctctgcttatgataatgtcaacaaagttcgagtagctatcaagaaaa

SEQ ID NO: 646455 - DNA, 90 bp, Homo sapiens
aaaaatgagcgaactggaacagttgaggcaagaagcagaacaactgcggaatcagattcaggtcttcagaactactagcagataatttgg

SEQ ID NO: 646456 - DNA, 75 bp, Homo sapiens
gccacacatccccgaccacttgcggcctgagtatggatttttagactctgaggagcagttggagctaatccacat

SEQ ID NO: 646457 - DNA, 90 bp, Homo sapiens
cccgactacctgcgcggcgcgctcggccgcctcaaggtcgcccaagtggcctgtgttgcctactgcttcatcaccatcccctccctggcg

SEQ ID NO: 646458 - DNA, 90 bp, Homo sapiens
tgacaaacgtacctgtggtccctggatccagtgctactgctacaaataaggtcgagtttgagtggctgaggcagttttggtttcaaggca

SEQ ID NO: 646459 - DNA, 83 bp, Homo sapiens
actgtggagaagcaggataatgaaacatttggatttgaaattcaggtttactcctggcttgggggcattaggaagcactggag

SEQ ID NO: 646460 - DNA, 75 bp, Homo sapiens
cacacctgccaagagagcccaggccgagttccccacctgcgattgcgtcggcgatatgagtctcatccagtctgt

SEQ ID NO: 646461 - DNA, 83 bp, Homo sapiens
gaactctttccacttcaagtagtcatgaaaaaactggatcttattagtgaacttagagaacgctttatggttccataatgtaa

SEQ ID NO: 646462 - DNA, 73 bp, Homo sapiens
agaaccgtcagtttgagccagatgagtgatcagcagctggactgtgccttggacctaatgaggcgcctgcctc

SEQ ID NO: 646463 - DNA, 75 bp, Homo sapiens
ggatatcgacgtcgtgatccagaagtccagagctgaggactgcctgtttgcagaaagtttcctacactactgagg

SEQ ID NO: 646464 - DNA, 100 bp, Homo sapiens
cgtgcccggccgctggcagtgcgactacgacaacgattgcggtgacaactccgatgaagagagctgcagccgctacctgtctgaggaacccgagccctac

SEQ ID NO: 646465 - DNA, 95 bp, Homo sapiens
gggatcgtgaccgagaccgtgaccgagagcgtgaccgagagcgcgaatatcgtcatcgttagaaggttcccagtagctgcagcagtgaaagacag

SEQ ID NO: 646466 - DNA, 76 bp, Homo sapiens
gctcctgtcagtggacagtttgtcacagtcctagtgagtgtcaggagccttcctcgtccaggccttccaggataga

SEQ ID NO: 646467 - DNA, 100 bp, Homo sapiens
tgtgtggattcagaaagtcaatgtgatggagagtctctgccgtgccatctgggatgcaaaccgtccctgtgttccccacgtccaggccgtagatgctccc

SEQ ID NO: 646468 - DNA, 100 bp, Homo sapiens
cccgggcggccgcctgagtaaggacttctgcgcgcgggagttcgaggccctgcggagctgcttcgccgctgcgcaccccccggggaaagacattttctgc

SEQ ID NO: 646469 - DNA, 50 bp, Homo sapiens
cgagccagagtggagcgtaacgcagtgctgatgtagcccagcagttccag

SEQ ID NO: 646470 - DNA, 76 bp, Homo sapiens
gcagctcattgctaagaacagaaaggacatcgagaatcaatatgagactcagtttgctgagaatgatggtttccag

SEQ ID NO: 646471 - DNA, 100 bp, Homo sapiens
acttgtcagtgaagttcaaatagctcagttgcggtttcctgtaccaaagagacttagacacatgataccacgtcaaactgatttcaatctgatgcggatt

SEQ ID NO: 646472 - DNA, 101 bp, Homo sapiens
cggctaaggtttgcgctgccatccgcaaaggctttctcgcttgtcaccttgccatgtggaagaaactggctttaccaacagggacgcttatgtcaactggg

SEQ ID NO: 646473 - DNA, 82 bp, Homo sapiens
ctaggccatggcagcctcactgacatcagccagcaattaccagctctggctgggtcgccacaacttgtttgacgacgaaaac

SEQ ID NO: 646474 - DNA, 82 bp, Homo sapiens
tgaaaacctaacagggtggccccctgtgccagctcaggttaatttggagtggcccctggagtcagtttcctacaccatccga

SEQ ID NO: 646475 - DNA, 98 bp, Homo sapiens
catgatcgaaattagccggacccaggatgaagaggttggagatgggaccacatcagtaattattcttgggcgaagctgtgctcaggcccgggctggac

SEQ ID NO: 646476 - DNA, 100 bp, Homo sapiens
ccggggtgtcagtgtggaggagactgaggctatgactttgcagccgtcctggagtggttcgcggagcgtgtggaccgcatcatcctgctcttcgacgccc

SEQ ID NO: 646477 - DNA, 100 bp, Homo sapiens
gtgccaaatttcctgaacacaccattatggtaaaagtcttgcagtgaaaaacccgaggacccttaccgcaagtgtcttttgctcccagctactgatactg

SEQ ID NO: 646478 - DNA, 120 bp, Homo sapiens
cttctgagatgttcttggtcacctgatggaagcaaaatagcagctggctcagccgacaggtctccaggaaacctagagaaaaaccgttatggggatgtaccctgcctggaccaaactaga

SEQ ID NO: 646479 - DNA, 100 bp, Homo sapiens
tgaggcgcaatgatgagaggatgtggtggtctactctgatgtcaatcttgagggctaggggcataatcaacccatttcctgcttcaaaaggaatcagagc

SEQ ID NO: 646480 - DNA, 100 bp, Homo sapiens
ttaccaggagatttggataggaatggggctgatgggcttcatcgtttataaaatccgggctgctggtatcccctgaaatactgacttcaggtcgaattat

SEQ ID NO: 646481 - DNA, 88 bp, Homo sapiens
ccagattcctggcagccacccaacgtttacttggagaccagctttccagaacatgaattccaaaaggaaagcagaaacctggaaaaga

SEQ ID NO: 646482 - DNA, 75 bp, Homo sapiens
gaatttttgaagcaacataattcaacatatctgaagagatggattaagaatgctttggattaaggattgtggagc

SEQ ID NO: 646483 - DNA, 75 bp, Homo sapiens
cccgaatgccagcgcctcttctaccggggcaagcaggatcgaggccatcaagctacagatggtcttacaaatgga

SEQ ID NO: 646484 - DNA, 98 bp, Homo sapiens
ctcaactctctacgctttgcctccaagtggttctatagatggtaataaccaacttgtaatcaaaggaagattccaacagaaacagatagaaaatgtct

SEQ ID NO: 646485 - DNA, 75 bp, Homo sapiens
ggaggaggaggaggaggaagaggttgttggaagaggagcctttggagttgtttgcaaagctaagtggagagcaaa

SEQ ID NO: 646486 - DNA, 101 bp, Homo sapiens
ctcagaggccgccatcaaccgccagatcaacctggagctctacgcctcctacgtttacctgtccatgccacaatggtgcgcatgaatgtcctggcagatgc

SEQ ID NO: 646487 - DNA, 100 bp, Homo sapiens
caagcataattgaaaacctacagtctcagctaaagctaagggaaggggaaatcactcatttacaggcaaaaattccttcagccaggagtttagatgagat

SEQ ID NO: 646488 - DNA, 83 bp, Homo sapiens
caaaaagacaagaactccctgggagcaattctgcaacagagttgatctctctaatgtattagatcttcatgcctttgatagtc

SEQ ID NO: 646489 - DNA, 83 bp, Homo sapiens
gtgagccaccacacccagccactaaggtcctactgctctgttggctcatgaaataggttttggaagtaaagttacaacacacc

SEQ ID NO: 646490 - DNA, 101 bp, Homo sapiens
gttcgtcatggggctgtttggaaagacccaggagaagccgcccaaagaactggtgatggcttggacaacagtgtagcttcccccagcacaggtgacgatga

SEQ ID NO: 646491 - DNA, 98 bp, Homo sapiens
cgcccggcccggagcccccagcgcagcggccgcgaaacgttaatggacaccagaacggctactgcagagctgggctggacggccaatcctgcgtccgg

SEQ ID NO: 646492 - DNA, 83 bp, Homo sapiens
gagagcacaaccatcgcagttggaagcccatggggcagcacatcaaagctgcccaatgatctgcttgatttgcagcagccaac

SEQ ID NO: 646493 - DNA, 75 bp, Homo sapiens
gttactcgggctcaggcccgggccggagccggtggcgctggagcgggaaaagcttttgacatcacctatgtgcgt

SEQ ID NO: 646494 - DNA, 50 bp, Homo sapiens
gtgtgctgtgagagatctaccactagatctcccttgagtttagaaatctg

SEQ ID NO: 646495 - DNA, 90 bp, Homo sapiens
ctcagagtaaagctgctggacaacaccatggaaatatttgacattgaggtgaatgaaaactttgccattgatttgatagcagagcagccc

SEQ ID NO: 646496 - DNA, 90 bp, Homo sapiens
acagaatttatatagagatgtgatgttggagaactacagaaacctcgtctccctggatctctcaaaggccttggttctgacagaaattgg

SEQ ID NO: 646497 - DNA, 82 bp, Homo sapiens
cgggagatgatcctggcggattttcaggcagaagctcctcctggggtagagacagatcttattgatgttggattcacagatg

SEQ ID NO: 646498 - DNA, 100 bp, Homo sapiens
cgcccgcctctccaagaccatccctggctgctggtcaccgaggaggagcccagctccaaccacacggtcatgatccaggagacggtccagcaagcgtccg

SEQ ID NO: 646499 - DNA, 100 bp, Homo sapiens
tggagagcccgtccgacagcgctgagtgaccaaagacttgaccactcaaagtccagctccccagaacactgctcgacatggacaccggtgtgattgaagg

SEQ ID NO: 646500 - DNA, 50 bp, Homo sapiens
gccgggagtctgagctcaggttcatgctgaagtgcaatgttgtgatctcg

SEQ ID NO: 646501 - DNA, 90 bp, Homo sapiens
gacgccaatcgcccgtactgagcgccggcgggagcgtcccccgggggagaccaggactcgcacaggaggatcagctgatttattcggagg

SEQ ID NO: 646502 - DNA, 85 bp, Homo sapiens
gaattcagttatcaagctttagagcctggctactcacagttgaagcctgattgcagacttaattcagtgcacaaatgagatgaat

SEQ ID NO: 646503 - DNA, 80 bp, Homo sapiens
atgagggaaatcgtgcacttgcaggccgggcagtgcggcaaccaaatcggcgccaaggagtctcacaactcaagaaagaa

SEQ ID NO: 646504 - DNA, 118 bp, Homo sapiens
gaactgaacttagctcgacggggctgaccgctctggcccagggtggtgtggccgacgacgatgccctcgctgaggagcgcatgcggagaggccagaacgccctgccagcccagcctgc

SEQ ID NO: 646505 - DNA, 80 bp, Homo sapiens
atgactgtaaccagacagggcagatgacagctggatttcttgactggccacaggtcatacagcagatggaacaaaaaaaa

SEQ ID NO: 646506 - DNA, 98 bp, Homo sapiens
ttccagatccagttttactactcagctgtccagatcattgatgaccttattgaaaggagccatgaaagtcatgatagatttttctggcaaattgtaat

SEQ ID NO: 646507 - DNA, 100 bp, Homo sapiens
tcctggctgcccaacccagagaggagcttagaagagtcgggaagacatcactcatgaaccagtatgtgaataagaaattcagcaatcagtacaaagccac

SEQ ID NO: 646508 - DNA, 75 bp, Homo sapiens
ctcctgggactccaggataccaggtcgcagcagttgtggtagaaatttctgggttagtggactctcttctacaac

SEQ ID NO: 646509 - DNA, 118 bp, Homo sapiens
ggatgccgcgtggaagccgaagccgcacctcccgcatggcccctccggccaggatgctttcattggatttggaggaaatgtgatcaggcaacaagtcaaggataacgccaaatggtat

SEQ ID NO: 646510 - DNA, 100 bp, Homo sapiens
cctgcctcagcctcccgagtacctgagattagcccagaacagtccactttggaaagtgaagaatggaatccttgggaaggagatgaaaaaaatgagcaac

SEQ ID NO: 646511 - DNA, 100 bp, Homo sapiens
ccgcgacggacgcaagatggcgacggcgaccatagctctcgacgagattgaggagctgcgggccgagatgctggagatgcgggacgtctatatggaggag

SEQ ID NO: 646512 - DNA, 75 bp, Homo sapiens
aagaatcgcatctcttgggtcggagaagccgtcaaggtgccaagtcctgccctgccaacttcttggcagctgccg

SEQ ID NO: 646513 - DNA, 96 bp, Homo sapiens
aaagggtatctgatcaagccaacaacagtgacggaatgcctccatacattgccaacaatatgcccaagcaggtggaagtgcgaatgcacgacagtc

SEQ ID NO: 646514 - DNA, 82 bp, Homo sapiens
gcctgtgggcacagacaaggagctcagtgacctcctggacttcagcatgcaggttacgggcaggacttgagtggcttcggac

SEQ ID NO: 646515 - DNA, 74 bp, Homo sapiens
gcagcggcgcccgcagccgcagccccctgctccggaggctggtgcagaaatcaatgtggactgaacataaatca

SEQ ID NO: 646516 - DNA, 75 bp, Homo sapiens
gcacaagggcccaactggaattccacttacgggcaaatcatgattgttttgtttataagaaaatgaggattgtaa

SEQ ID NO: 646517 - DNA, 101 bp, Homo sapiens
ccgccgccgccttgctgctgctcaaagctgctgccgccccttgggctaaaaggtatcatgatattagctggtttgacatcaagtcatttgtgagtcatcag

SEQ ID NO: 646518 - DNA, 75 bp, Homo sapiens
agagaagaagaagcaggatgaactgaaacggattgccagagaattggcagaagaacatatgcagtaatgtcacct

SEQ ID NO: 646519 - DNA, 100 bp, Homo sapiens
caagaaaggcagtgaggccagtgcaggccagatcagaaaagggagctcaggtaccttccagagagtgagacccagcgcccttgtctcgcacccagtaggc

SEQ ID NO: 646520 - DNA, 74 bp, Homo sapiens
gaagttgctgcgctctgctcggtgtcgtggcctcgcagatgtactatactggcaattgctggagaagattttgc

SEQ ID NO: 646521 - DNA, 75 bp, Homo sapiens
gaaccaacgaggtggccgaatcttccttcaggatatcaagatgtatcggcaagcagtgtaaacggaggacttggg

SEQ ID NO: 646522 - DNA, 75 bp, Homo sapiens
atgatcctgtggataaaatcgtatattgttcaggaatatacaaaaagagaagaagaaatagaacagttaactgag

SEQ ID NO: 646523 - DNA, 101 bp, Homo sapiens
gaaagagtcaacagcagtggcaacagctgtgtcagcgtgttatgatgccgtcccgtaccaacctggctactggaatccccagtagtaaagtgaaatattca

SEQ ID NO: 646524 - DNA, 98 bp, Homo sapiens
cgacacctgggagtggaatgatgtgacgctctacggcatgctcaacacactcaagaacaggtaccccaatctgaagtcagtaaatgaactaatctaca

SEQ ID NO: 646525 - DNA, 82 bp, Homo sapiens
gagactccctgtcccggaccgcagccgcttacaaacacgcagatggcaagaagattgatggcaggagggtccttgtggacgt

SEQ ID NO: 646526 - DNA, 75 bp, Homo sapiens
agaacagcaagtgcaccaaacttagatggtcatccagactcagagctctctctacagagaggaaattctccactg

SEQ ID NO: 646527 - DNA, 82 bp, Homo sapiens
ggcgaggatgcaccttcccctgccttggaaagagctggaagtcgagtgtgctactcaactcaggagatttggagacaaactg

SEQ ID NO: 646528 - DNA, 99 bp, Homo sapiens
aaagaggagatggtgagacgattaaaggacccagatgatgtggtaccagttggccaaagaagagcctggtgttggtgcatgtgctttggactagcattt

SEQ ID NO: 646529 - DNA, 76 bp, Homo sapiens
catgacgcaggtgcaggtgtctcttctcgccctggcggggaagaggtggggctggtgtccgagcacttctcgcagg

SEQ ID NO: 646530 - DNA, 150 bp, Homo sapiens
cgcaggaaatgggaccaaccttgatgaatatgtggctttggtggatggggtattcttgaaccaggtcatgctccaaataccactggagcgatccagcgaagatgtggatataatcttcactcgactgaaagaagttaaagcttttgagaa

SEQ ID NO: 646531 - DNA, 100 bp, Homo sapiens
cagcgtctagggcagcagccgcttcctagaagaccagtttctgatgaagaattgaaaagaagagtagctgaggagctggcattggagcaagccaagaaag

SEQ ID NO: 646532 - DNA, 100 bp, Homo sapiens
acttacggttttcgtggagaagccttggggtcaatttgttgtatagctgaggcatatactagtgtctcaaaggcttcacttggccttgcagatcacagag

SEQ ID NO: 646533 - DNA, 74 bp, Homo sapiens
aaatgcacacgcttcagcatcagtctgaatgaagaagaggtctttgcatggaataatgaagtaaaacagggact

SEQ ID NO: 646534 - DNA, 96 bp, Homo sapiens
cctccgagcgcaaggacagcgcgaggtccgcgcagcccagcgcagccattgtttcacctgtctcggaaagtaacatctctggtccctgagagctgc

SEQ ID NO: 646535 - DNA, 82 bp, Homo sapiens
acaagtccatcgagttcatcggcttctggatggacattgggcagcccaaggacttcctcactggcatgtgcctcttcctgca

SEQ ID NO: 646536 - DNA, 100 bp, Homo sapiens
ttactgcgagaacaactacatacaggtggtaagttttcttcatacagttcttttgtgtgacaaactggatttcagcacggcgttagtggtttgtcctctt

SEQ ID NO: 646537 - DNA, 75 bp, Homo sapiens
gcagcgagctggagccgccggagatcccgtaccagctttggatctcggacagcaactccagctcaaagtgcagcg

SEQ ID NO: 646538 - DNA, 76 bp, Homo sapiens
cacgggtattgtaccgctgagggaaaggagcgggactccggacctccaggagggaaacctcaaatgaattctgaag

SEQ ID NO: 646539 - DNA, 100 bp, Homo sapiens
ccccatgctacagcagtttataagaccctggtgtgctaccacccccaactttgatcaggaccagcgatggggatactgtttggagcccaagaaagtgaaa

SEQ ID NO: 646540 - DNA, 73 bp, Homo sapiens
cctatcgaaggacatgaagactaccacatgatggaaaatcatcagcgtgttagcattttctttgactatgcaa

SEQ ID NO: 646541 - DNA, 100 bp, Homo sapiens
ttgcaaagttgttaacggaaaaagaactccgagatgctctgctcctgatttttgctaacaaacaggaaactatggtccaggaggcagtggaggaagtggg

SEQ ID NO: 646542 - DNA, 82 bp, Homo sapiens
accaggccgtgcaggcgctgaagcgcgcgggcaaggaggtgctgctggagggtgccagaaccctgtggagcatcatgaactg

SEQ ID NO: 646543 - DNA, 82 bp, Homo sapiens
ccgagtgcagaagatctgggtgcccgtggaccacaggccctcgttgcccagatgggagaagcctttcaactgcagctgggat

SEQ ID NO: 646544 - DNA, 100 bp, Homo sapiens
cttgaggcccagaatgcactgcacaatattaaaactttacctgggttaccgcgcttgaatgcctacagaggttactgtagtaaccagctggcagccaaag

SEQ ID NO: 646545 - DNA, 89 bp, Homo sapiens
ctcagttggaagcagccgatccagcctgcggagcctgtggggcaggaaataatgcaaaaggtgtcccaaggctcctgaccagtgaacaa

SEQ ID NO: 646546 - DNA, 98 bp, Homo sapiens
gcgtgggtcggttgcggtcggccccggcagagacctgtcggccatggagcctaatgatagtaccagtaccgctgtggaggagcctgacagcttggagg

SEQ ID NO: 646547 - DNA, 133 bp, Homo sapiens
cgatgctcttcttggaaaaccagatccagaaactggaggagtcccgctcgaagctaggtcagcccaaggccaaccccactgtcactctgttcccgccctcctctgaggagctccaagccaacaaggccacact

SEQ ID NO: 646548 - DNA, 100 bp, Homo sapiens
gaccaccaccctcgtgtctgccaccatcttcgacttgagcgaagttttatgcaagtggttagcaggaagaagatgagccttaagtctgaacgccgaggaa

SEQ ID NO: 646549 - DNA, 75 bp, Homo sapiens
agcatggctcacaccacaaaggttaacggcagtgcctcaggaaaaggggaagatagtgatgtactcagtataaat

SEQ ID NO: 646550 - DNA, 100 bp, Homo sapiens
gggaagacaattgtcattaccaagacaacccctcaatctgagatgggagggatggatgacatggctgtggatagtgatgaggaggtggattatagcaaaa

SEQ ID NO: 646551 - DNA, 82 bp, Homo sapiens
caggctctcagggggcatagacttcaaccagcctttggtcatcaccagggtgctgactgggttacttttttaaacactagga

SEQ ID NO: 646552 - DNA, 97 bp, Homo sapiens
gaggcaccgggatcgtgaccgagaccgtgaccgagagcgtgaccgagagcgcgaatatcgtcatcgttagaagataatgctctaccacaagaaaatg

SEQ ID NO: 646553 - DNA, 80 bp, Homo sapiens
cgggtcctcctagaaattccccccgaagaagactcccccacatctggtgtgctggaattgatgttcgtctgtgtgatgtt

SEQ ID NO: 646554 - DNA, 100 bp, Homo sapiens
caaaaggaagaaaaaacaaaacaagaagcttatgcccaaaacagagcaagggcaaaagaattccataagggtgtcaaattgagaaccaggtagatcccca

SEQ ID NO: 646555 - DNA, 50 bp, Homo sapiens
ctgagttttgactagcggaagaaaagacatctcgagatctggcgtgtttt

SEQ ID NO: 646556 - DNA, 83 bp, Homo sapiens
ctcagttggaagcagccgatccagcctgcggagcctgtggggcaggtggatattccatctattataaccaagaaactattaaa

SEQ ID NO: 646557 - DNA, 98 bp, Homo sapiens
aattggagaaacaccaaaaggaatccgcagttggaggacgagtaagtcgtgaattaaattatactcgccagaagattggagaagaggctatgtttaat

SEQ ID NO: 646558 - DNA, 98 bp, Homo sapiens
gggccgccatggagcccgactcggtgattgaggacaagaccatcgagctcatggtcctgctcaatctggaattttgtcagatcgtgaagtggtaaacc

SEQ ID NO: 646559 - DNA, 83 bp, Homo sapiens
ggacgtggccactgtggccttctgcgacgcgcagtccacgcaggagatccatgagaaggtgccctacgagacgctgaacaaac

SEQ ID NO: 646560 - DNA, 100 bp, Homo sapiens
ggcggctggaaggagagctggatacagctcggagagagagagatgccctgcagctggaaatgagcttggtgcaggagattgcatcctacctgatcacctt

SEQ ID NO: 646561 - DNA, 100 bp, Homo sapiens
ggcagcagcattgggactcctccagaagatcctgggaagactctgcctgaagcccttgattattgcactgtttggctacagacagtgcctggagaaatag

SEQ ID NO: 646562 - DNA, 74 bp, Homo sapiens
cacaagcaccccaataacctcaaggttttttattggcacctcagtctcaacattttcttttcggattcatgagg

SEQ ID NO: 646563 - DNA, 100 bp, Homo sapiens
aacatgaaggcgactttttatgatacgtactccctttcctatgatctgcactgctgtggggccaaacgcatcatgaacaatggcaacaagtgaacgagga

SEQ ID NO: 646564 - DNA, 93 bp, Homo sapiens
cgaggaggcgcgggaggtgttcgagaacgaccccgagacggtcgcgtggggcaggcagtggcgctgcgggccaaggccttcggcttcaacgtg

SEQ ID NO: 646565 - DNA, 100 bp, Homo sapiens
attctgcccactctgcggagttagcagtcacgacctccagcacaggcctaaatgtgactgtgaacgctactttcatgtattcggatggtctgattcataa

SEQ ID NO: 646566 - DNA, 75 bp, Homo sapiens
aagggaacaggcatcatggactgtgcgcccaagttattagaagcccaagcagattaccatagaaaagcattagca

SEQ ID NO: 646567 - DNA, 90 bp, Homo sapiens
aagaaaacaaggcgattccgcagtccccccgttccctggaggtcctgtggaatggtggcagagtttgtggatgagcggccagaagaggta

SEQ ID NO: 646568 - DNA, 51 bp, Homo sapiens
caaactcaaaatgatgatgctttcaaggactggggttttaaggggtgtggc

SEQ ID NO: 646569 - DNA, 75 bp, Homo sapiens
ccggctcctcagagagcctcggctaggcaccgggagcctggccgctgcagtggagacagcctcgggacgccaggc

SEQ ID NO: 646570 - DNA, 75 bp, Homo sapiens
cttgtggccagtaggcaatcacctgaaggatctgacttccagaaggtcttcatcctccaggtccacctttagcaa

SEQ ID NO: 646571 - DNA, 100 bp, Homo sapiens
gaaccggggccgccttcagccaagcggcctaaactctcatctccggccctctcggcgtccgccagcgatggcacagattggtttatcttggaagctaaag

SEQ ID NO: 646572 - DNA, 97 bp, Homo sapiens
ggtggagcgggcggagctgcaggtgtggaaaaagccaaagcaatgccctctccacggatactaaagactcacctttccactcagctgctgccaccgt

SEQ ID NO: 646573 - DNA, 83 bp, Homo sapiens
cggcgcctgggccgcgccgacctggtcatgagcttcgttaacatgggtactccaaagattcaggtttactcacgtcatccagc

SEQ ID NO: 646574 - DNA, 100 bp, Homo sapiens
ggcggcgccctgaagaagtgcaagagcagaggccttctctagaccttgccaagatggcacaggcactgtcgcaagttactctccttctgagggtttgctt

SEQ ID NO: 646575 - DNA, 136 bp, Homo sapiens
gatctgacagatgccagcgtagctgaatccagtaccaaaaacgtcaacaacagttttacgacctagaggatcaagacataatgggagcatttttagacaagccaaagatggaaaagcataatgcccaggggcaggg

SEQ ID NO: 646576 - DNA, 100 bp, Homo sapiens
tactccaaagggtggtggtggtggaggtccaggagaagctgggagtgtccactcgccttccaccagcatggcaacgtcttcacagtaccgccagctgctc

SEQ ID NO: 646577 - DNA, 90 bp, Homo sapiens
tgcccatcttgttactccctagcagtgtggtaagcatcagaggctccttgaaatgctagatacagagaaggaactgttaaaagaaaaaat

SEQ ID NO: 646578 - DNA, 100 bp, Homo sapiens
gcggcggtggcagcggcggaaaccgaaggggagccatggcggctgacagtcgggaggagaaagattcttctgcacagtcagtatcctcgggagttcgtgc

SEQ ID NO: 646579 - DNA, 74 bp, Homo sapiens
ctgagaacccctatcacaatgagcccggctttgaacagatgtcaaagcagttggacatgttcaagaccaacctg

SEQ ID NO: 646580 - DNA, 98 bp, Homo sapiens
tttcctggggctatcgtcgtgacatggcattgtctgatgttacagaagaatctgaaatcatttcggtcagcacctcatctatgggcactttaccaaag

SEQ ID NO: 646581 - DNA, 100 bp, Homo sapiens
ttcattgctactaactacctcatcttcagtcaaaagcctgaatttcaggatctttcagatattaataaggcagcggaaagaagaaatatgaatacggctc

SEQ ID NO: 646582 - DNA, 96 bp, Homo sapiens
caggcaccaagatgtccaaccgagtggtctgccgagaagccagtcacgccgggagctggtacacagcctcagtcatcaagagttcatataactaga

SEQ ID NO: 646583 - DNA, 50 bp, Homo sapiens
cactgaggttgcagttggcgtgaaggtatgcagtgccattcagaatcagg

SEQ ID NO: 646584 - DNA, 100 bp, Homo sapiens
cccgaggccggaggaacccggactccggcgtagcggtgctggagaatctggtaaaagcaccattgtgaagcagatgaggatcctgcatgttaatgggttt

SEQ ID NO: 646585 - DNA, 100 bp, Homo sapiens
actcatggaggctgagcatttattcaggtccattacatcgtcgcgtctgctcaggtctggatgataacacgctatgatctgtaccacaccttccggccag

SEQ ID NO: 646586 - DNA, 75 bp, Homo sapiens
gctgctggacccggcctgggagaagcagcagcgcaaggtgccatacacagaggctgcctctttgtctactggttc

SEQ ID NO: 646587 - DNA, 82 bp, Homo sapiens
tctctgactccttctggtgaattcaggaagactaatcaaagaatagataacaagtgcagtattcccagaaaatctaagctgg

SEQ ID NO: 646588 - DNA, 98 bp, Homo sapiens
acaaagaaacccaggaaggaatcattactatacagaaggtcgatggccaggtggtcttcataaactatactgccttgtgatgcctccctagaaatgag

SEQ ID NO: 646589 - DNA, 100 bp, Homo sapiens
tgtcccaagatttaatggccttgcagggaacccagctgaccccattgcgcaggtccaccaggccttctgcaagaacctgctggagcgagctatagagtcc

SEQ ID NO: 646590 - DNA, 90 bp, Homo sapiens
gtctgatccagaccaggactttgacaaagaggtcccaggtgtgacaccttcagcaggtctcagggaagatggcagccctaggggacattc

SEQ ID NO: 646591 - DNA, 100 bp, Homo sapiens
cgaagctggccaaagcctgcccagacggctcacctgtgcgggatggaacaaaagggtctccgtctctccaccgggggcttcatccttccagggaggagaa

SEQ ID NO: 646592 - DNA, 75 bp, Homo sapiens
gtgaagatggattactgaaagttttgaaattagagacgcagacaggatacattaattgtttggtcagaagcagag

SEQ ID NO: 646593 - DNA, 98 bp, Homo sapiens
tctgtgtgctgagcgttctaaaggaaggcgtccgttggccttcgtacccgtcttgattgagatttattgccaaaccctgtgcactctgtattggcatc

SEQ ID NO: 646594 - DNA, 82 bp, Homo sapiens
ctgctggctgcttccagtgttcgccgagaggtgtggacactgccagcggctgcagccgacttggaatgacctgggagacaaa

SEQ ID NO: 646595 - DNA, 51 bp, Homo sapiens
tgatgcggaaattaaccccaagataaagagttctatctgtcttctacgcgg

SEQ ID NO: 646596 - DNA, 80 bp, Homo sapiens
gtggccgtgggggacatcgtctgggtaagactttgaccccgacgcaggcttcagtgattgccgcggatcagaagcctgag

SEQ ID NO: 646597 - DNA, 100 bp, Homo sapiens
gaggaactaaggcggaggaactgagacgtttcgaattccagctgagatctgtatctgtggacctgaatgttgatccctcgcttcagattgacatacctga

SEQ ID NO: 646598 - DNA, 100 bp, Homo sapiens
ccacttgccgagcctgatgatggggacgtgccgcccctttgcgggacagtcattttgtttactcattcagccctgttgcaggtcccaataaactcttcat

SEQ ID NO: 646599 - DNA, 97 bp, Homo sapiens
cggagacacggtggaaacgcttatgctttcctcattggaaaaggctggatttggaggtgttcttctgtatatcgatccttgtgatttgccaaagact

SEQ ID NO: 646600 - DNA, 75 bp, Homo sapiens
cagaacgtgctgacatggagccaggggatggcctttacccttgaagaaaggctgcagcttggaatccacggccta

SEQ ID NO: 646601 - DNA, 75 bp, Homo sapiens
ggaagcgggactccaaatgggtcgcagtcgcagccgctctccacggaggggtggacatcatcagccgtagtgggg

SEQ ID NO: 646602 - DNA, 97 bp, Homo sapiens
tcggagggcgagcgcatcctggaggtgcccgaatcgcacacagcctcggaactcaagcttggagctgacggcagtgagaatgagcagcagtggcccg

SEQ ID NO: 646603 - DNA, 83 bp, Homo sapiens
tggaattgcgaagtgcagctttacagctagttgctacattgcctgatgatgttcagcctgggcctgatttttatggactgcca

SEQ ID NO: 646604 - DNA, 98 bp, Homo sapiens
cttcttgagaagaagaattatgttcattttgcagctactcaggtgcagaatagggcaatgagctgggatgaagacaactgaattgcagagtatgaaag

SEQ ID NO: 646605 - DNA, 85 bp, Homo sapiens
ttgctcctgcacatgctttggaggccagcgggtatctgatggtataattgccccaggatatgaagaagaagccttgacaatactt

SEQ ID NO: 646606 - DNA, 100 bp, Homo sapiens
ccagcattggtgacatggaaaaggagccaggaattcccagtttgacaccacaggctgagctccctgaaccagattgagctaagagaacgagagatagaac

SEQ ID NO: 646607 - DNA, 51 bp, Homo sapiens
gtggatgtggaagaaagtgatgagatggtttgtgaagaaggtgacaagcta

SEQ ID NO: 646608 - DNA, 51 bp, Homo sapiens
cagctgcagttcaaagatgccttttggggtgtggtgctgcagcaggacagc

SEQ ID NO: 646609 - DNA, 101 bp, Homo sapiens
cccatcatggccgccgcctgtgcgcctctgctgagtcgaaagactttgtttgcctcatcatattttggaagaacgaggacttgtgaaagttggtgtcacag

SEQ ID NO: 646610 - DNA, 100 bp, Homo sapiens
gctgctttatggcgaatgtggctgataagtctagattcaccaatgtcaaacagtttattgcaccaggcgatgttattgtagacatcaatggcaactgtgt

SEQ ID NO: 646611 - DNA, 82 bp, Homo sapiens
ggaattcatggggtgaaccatggcattagtgaccagaaggatcccaaggatcgaatggttcaggttgtgaaatggtacctct

SEQ ID NO: 646612 - DNA, 83 bp, Homo sapiens
ctttgcatccggagagtggacaagaaaataacgaaggaggcccaacttcattcaataaggagcctgacggatttatcccagac

SEQ ID NO: 646613 - DNA, 75 bp, Homo sapiens
tacagaggagccccatgggccggaagcaggggggaacgctggacgaccttacatcaaggccttttacaatgagtc

SEQ ID NO: 646614 - DNA, 103 bp, Homo sapiens
cctgcacgtggctgctgccaagggctacattgaggtgatgagtggacatcctcatcatggatgatgacgacgtccccagctggcctcccaccaagctgtcccc

SEQ ID NO: 646615 - DNA, 98 bp, Homo sapiens
aagagagacatttctggctctgaaggcgaacgcttcgctggccatttaggagctctgctcaaagccagacgggaggtgttgtagcaggaaatgtggct

SEQ ID NO: 646616 - DNA, 143 bp, Homo sapiens
aagccagctctccaggccacggaagtcctctgagcagcctgttaccttctgcctcagtgccagagtccatgacaattaggactttgaacatgtcggggatcgccctcagcagactcgcccaggagaggaaagcatggaggaaa

SEQ ID NO: 646617 - DNA, 49 bp, Homo sapiens
gagctgcttcccaataaggaaacaagtgatcagcagctggactgtgcct

SEQ ID NO: 646618 - DNA, 97 bp, Homo sapiens
ctggctattgtgaataatgctgcagtgaacatgggagtacatacatctgtttgaggtggaggagttactgatggccatggagaaggtaaagcaggaa

SEQ ID NO: 646619 - DNA, 73 bp, Homo sapiens
aactcctctctgttaatggagtggtactactaaccaataacctgcttggctcaaaggtgagtaatttcacggt

SEQ ID NO: 646620 - DNA, 50 bp, Homo sapiens
cctacccgggatacggaggaggggtaaagtcagtgataaatcttttgttt

SEQ ID NO: 646621 - DNA, 90 bp, Homo sapiens
tgcgtcatcctaaggaacatcgacgtctgtctcgttggaaaatccagaacatacccttcctccagagaagcttccgtggatgaaaagagg

SEQ ID NO: 646622 - DNA, 97 bp, Homo sapiens
cgtaactttctcccttgatccgggagtctttccactgggtgagaagccctaccactgcaactgggacggctgcggctggaagtttgcgcgctcagac

SEQ ID NO: 646623 - DNA, 90 bp, Homo sapiens
cgacaaggagggcatgatcaacctcgtcatgtcctacgcgcatcaagatggtgctcatgtggaccagtggtgacgccttcaagacggcct

SEQ ID NO: 646624 - DNA, 100 bp, Homo sapiens
tttcaagatcctggaccgtgtcaccatccaggaactcacaggaaagaagagatccctcccaaatcccaaccagtttccttacctgaagaattgaatcggg

SEQ ID NO: 646625 - DNA, 82 bp, Homo sapiens
gtgctgctgggattcgcgctgctgggcacccacggagcctccggggctgattttgcaagaacgaggctcaaggatgtgaggg

SEQ ID NO: 646626 - DNA, 100 bp, Homo sapiens
tgccaacactagtggaatatgatcacatcccagccaatcctgaggcaaaagaaacattttaattcactgcacattccaaaagccttgcagaaggccctgc

SEQ ID NO: 646627 - DNA, 101 bp, Homo sapiens
tgaaaagtgccataaactgaaaaaccaaacatgagggtagcaggaaatgcttccagactgcacacttttacttagaggacagtacatcccctagagttata

SEQ ID NO: 646628 - DNA, 82 bp, Homo sapiens
cagtcagtctggtactaacaatgcagggaagtgttcgccagttactacatgaaaagataagagatgcttatactcacccaca

SEQ ID NO: 646629 - DNA, 75 bp, Homo sapiens
catgctgggagccatctgtgccatcatcgtggtagttattgtaaccattgacctcatcaacaacctgctgcaggt

SEQ ID NO: 646630 - DNA, 75 bp, Homo sapiens
tgctgatgaggttgatgaatttgaaatccaaggcgctgagatgcgtctggagagccagagggcctgcctgaagga

SEQ ID NO: 646631 - DNA, 50 bp, Homo sapiens
atttaagatcaacttcctttgtaagtgagcagtgaagattcagaagattc

SEQ ID NO: 646632 - DNA, 97 bp, Homo sapiens
gaacatccgagggtgcctgggaatcggtcgcctggaggaccagtatttcccatggagggtactgtctgatgagcgtgaaaggttgtttcaccgactt

SEQ ID NO: 646633 - DNA, 100 bp, Homo sapiens
atttgcttcatcacaagatcttggaaacattatataccttggggaaagctgatcaattcacagaagctgtgagtccttcagtgctacccccttcagcttt

SEQ ID NO: 646634 - DNA, 100 bp, Homo sapiens
ggatttaaaagacagtcctcgtcagcactgactttcagctatggaatcggaacaagactgccaatggagactgccgcagagacccccgggagcggagccg

SEQ ID NO: 646635 - DNA, 111 bp, Homo sapiens
ctcggcctcgcggcgacggcggcggtggcggcttggacgactcggagagccgcagaagatggctgtgccacccacgtatgccgatcttggcaaatctgccagggatgtctt

SEQ ID NO: 646636 - DNA, 90 bp, Homo sapiens
agctgatagagaccctagtaacatgaaaaatggagtgctggcatacattgggaattttcgcctgcttgcagagctttccagcccgtttgt

SEQ ID NO: 646637 - DNA, 96 bp, Homo sapiens
aacatgtgaacactcaagtgaagcaaaagccttccatgattacggttacacatcattttggaatgactgtatatcatctggattacgtggctgtat

SEQ ID NO: 646638 - DNA, 98 bp, Homo sapiens
cgaggcttgaagagtggagagaactttaagttgttatatgacttggcagatcaactacatgctgcagctcaaattgaaattattccatgcaagatctg

SEQ ID NO: 646639 - DNA, 80 bp, Homo sapiens
cgacgacagcgtcctcgaagccaccagctcccgggacccgctcagcgattaagactttgaccccgacgcaggcttcagtg

SEQ ID NO: 646640 - DNA, 100 bp, Homo sapiens
aagcacacctggagcaacaacctggcggtgctcgagtgcctgcaggatgtgagggagcaccctggaggagaagaggttctgctggaacaagctggtgtag

SEQ ID NO: 646641 - DNA, 50 bp, Homo sapiens
aattgataacaccctgtaacagctgagttcttctacattgacccacacta

SEQ ID NO: 646642 - DNA, 100 bp, Homo sapiens
tcacggagcctgaagatgaggggccaggcctttgtcatcttcaaggagtcctgacgtgaactacgaggagctggcccgctgcacagatgacttcaatggg

SEQ ID NO: 646643 - DNA, 82 bp, Homo sapiens
cattttgcaacgcagttcggagttattatgagattggagcatatgatcaacaaatatgggaaaaatctgttgaacagagaga

SEQ ID NO: 646644 - DNA, 100 bp, Homo sapiens
cacggaccttgagaccatcgccaacctgggtctgggccaacattggccagaaggaagacttcgaggaagccaggaagaaggcactgaagcttggggccaa

SEQ ID NO: 646645 - DNA, 100 bp, Homo sapiens
acaaaaccgagtcaacagggaagcagaggagaaccgggagccattcagaaaagattgcagtgcttttgtccacaaaggctgccgagaaagtctagcctcc

SEQ ID NO: 646646 - DNA, 82 bp, Homo sapiens
ggggaagcagcacgggatcccagcctcaggcctgcacggacggtgttggttgggggaaagcaggcaggatgggagagtcgcc

SEQ ID NO: 646647 - DNA, 101 bp, Homo sapiens
catgacctatgtgtcccagtattacaaccacttctgcagtcctggccaagcttaatcgaaccctgaagaagatgggacagagaccttgatgatattcacac

SEQ ID NO: 646648 - DNA, 75 bp, Homo sapiens
agatgatgacgatgatgatgaagaggatgatgatgaagatactctgggaccgagtgcactgaagacgataggaag

SEQ ID NO: 646649 - DNA, 75 bp, Homo sapiens
tgccagccgggcctccaggctgaatctgttcttccagatgaccgttttcctgactatgggaaggttgaattagtc

SEQ ID NO: 646650 - DNA, 75 bp, Homo sapiens
cggattcgattcaacggggttccggaccgcgctgcgctatggagcagcctttctgaagggcctgagtgacaagca

SEQ ID NO: 646651 - DNA, 82 bp, Homo sapiens
ttcttttaaagttcttcgaggttgcagtacttctggaatagaaattctaaacattagcctgccgaacaactggattgcattt

SEQ ID NO: 646652 - DNA, 101 bp, Homo sapiens
cccaactcccaccccatccagtggaatgcaccacagccatctcacatttccaagtacattctcaggtggagacctaactcacgtgctgtgtgtcagactga

SEQ ID NO: 646653 - DNA, 50 bp, Homo sapiens
ttggcaaaccagatatatgacttgaatgtcgtactctcaggaggctccac

SEQ ID NO: 646654 - DNA, 113 bp, Homo sapiens
gtaatttcaacagaagagtgagagatggaacccgaagaagaaaggattcgttacagccagagattgatcactggcgttatccttcttgcagttggcatttggggcaaggtgag

SEQ ID NO: 646655 - DNA, 100 bp, Homo sapiens
tgtggatgactgagtacctgaaccggcacctgcacacctggatccaggataacggaggctggaaatacactttcgggaaatggcctctaaatcctggctg

SEQ ID NO: 646656 - DNA, 100 bp, Homo sapiens
cagccttcagaaattgccggtctgggagttgggggcaaggagaagatcctggagtctactcttcatcttgtgttgagacttcgtggtggtgctaagaaaa

SEQ ID NO: 646657 - DNA, 100 bp, Homo sapiens
gccgagattacgtcttgaactgttccatccttaatcctttgttaacggaaatgtttcaacgtgcgcaagcgttgcggcggcgggcagaggactactacag

SEQ ID NO: 646658 - DNA, 100 bp, Homo sapiens
tttagagagcagcgtggagagtatcatctcaccaaaggctcatcttcaggtggaactaatctggttaagattcctacagaaaaaagaactcggagaaaac

SEQ ID NO: 646659 - DNA, 96 bp, Homo sapiens
ggacaacaaaagcctcctacaagagtcctaccaaaactcactggacagccagtgctcattggtggcaccatgggaacctgtagttatgttcttact

SEQ ID NO: 646660 - DNA, 100 bp, Homo sapiens
ccaggagcgccccccactcccaggccagcccaccccggcggaccgggccccgcgcgcccaggcgaggccccgtctgaggtctggcagtcagagacagccg

SEQ ID NO: 646661 - DNA, 75 bp, Homo sapiens
ttatgcttataagagtggaacaggtaatgagaatcttcgccttgcggagatggtaacctgcacctcaatgtgacg

SEQ ID NO: 646662 - DNA, 100 bp, Homo sapiens
tggcggaacgggcagccatcagctctggcattgaggaccctgtgccaacgctgcacctgaccgagcgaggttgcgacatgtgcgcggacaaccgcaacgg

SEQ ID NO: 646663 - DNA, 73 bp, Homo sapiens
tcctgctgcgagccggcggcccggagtggggcggcgggaaacttttgagaagaactttgaaagagaaacccat

SEQ ID NO: 646664 - DNA, 82 bp, Homo sapiens
cccaacacctccctgttcatcaggaacgtcgcggacgccaccaggctactgcagcactggggtgtcagttgttggtccgacc

SEQ ID NO: 646665 - DNA, 100 bp, Homo sapiens
gggaatcaaaatgtgtgggaaagagttcaataaggcttttgagctgtatgatcagaaatgcactcggtgatggaaagagagccactattctgaagaacac

SEQ ID NO: 646666 - DNA, 51 bp, Homo sapiens
gagcaatgttgaggtgtttatgggctttgaagactgcttggtatttgatga

SEQ ID NO: 646667 - DNA, 122 bp, Homo sapiens
taaccgggacccggtgtctgctcctgtcgccttcgcctcctaatccctagccactatggaatgggtaccacagaccatgtcatcgtcctggcgtccacgaaccgagctgacattttggacgg

SEQ ID NO: 646668 - DNA, 101 bp, Homo sapiens
gagcaaccactgactgatgaacctttgccagtctcccttccaagagggatgccagagccttctgggaacttatgacattttagtaacaaaagataatcaaa

SEQ ID NO: 646669 - DNA, 74 bp, Homo sapiens
caaatgattgtggcagtaaagaagtgtatgtggtgctggagaatctggtaaaagcaccattgtgaagcagatga

SEQ ID NO: 646670 - DNA, 88 bp, Homo sapiens
gcaccggctgcattgttttcgggatcgaggggtgagggcgctatggcacccggctgcaaaactatctcacgtgagagggcagtggaac

SEQ ID NO: 646671 - DNA, 75 bp, Homo sapiens
gcagcccttgccttgagtcagtgcgccgctctccagcccgcttgaacgtctcctgggctacctgaccaagtacga

SEQ ID NO: 646672 - DNA, 74 bp, Homo sapiens
ccacctacagaaacaaaatgtcaacaaattgatgggtcgagtggtgggcatacttcagaagaactggcgggatt

SEQ ID NO: 646673 - DNA, 100 bp, Homo sapiens
atcgatgaccccggtcgcggacttgcttcaggctggccaccccccgatggcactggatctttaaaacgcagtggttcctttagcaaactccgggcttcca

SEQ ID NO: 646674 - DNA, 97 bp, Homo sapiens
aagccagtagattctgacagcgatgatgatcccttggaggcattcatggctgaagtggaggcacttcaagtaagtgcagcagtttttatctggccaa

SEQ ID NO: 646675 - DNA, 100 bp, Homo sapiens
cgccggagctgaaacacgacgtgaaggaacaagagttgaatgctcgagcccgggccctccaagctgcatctgcttcatgttcatttcggcccaatggatt

SEQ ID NO: 646676 - DNA, 75 bp, Homo sapiens
gcctggcgcccgtcaacttctgcgacgaagaaaaaaagagcgacgagtgcaagctctgaacagcaacatggggtg

SEQ ID NO: 646677 - DNA, 69 bp, Homo sapiens
atcctacccagaggtaacaactaatattttgttcacaacaaagatatgagttggcctgaggagatgtct

SEQ ID NO: 646678 - DNA, 100 bp, Homo sapiens
gaccaactctgccacaagcaccatctttctggaggagagcaggagtgttcagaagcaaatgaagatcctgcagaagaagcaagcccagattgtgaaagag

SEQ ID NO: 646679 - DNA, 100 bp, Homo sapiens
ctgacagtgatgaatcagtaccagagcttgaagaacaggattccacccaggcaaccacacaacaagcccaggtcatcagactagtgctgagtcttggggt

SEQ ID NO: 646680 - DNA, 75 bp, Homo sapiens
atatctacaagggggtccgcaaggttttcaaatggaacattttgatgcatcacttagtacctatttcaaggcatt

SEQ ID NO: 646681 - DNA, 75 bp, Homo sapiens
gcactcgttccgggggtgaagcctcctgcgccggccttgcctcgggattttttatcaagcagaaatgcatcgaac

SEQ ID NO: 646682 - DNA, 82 bp, Homo sapiens
acactcttggggctctacctctttttcaaagtgatcgccatgatcaaaggcctgcaggtgctgatgggcaggatggagagcg

SEQ ID NO: 646683 - DNA, 75 bp, Homo sapiens
cgggaggaggacctgatcaagactgatgatgtcctggatctgagtgttttggggaacgagtttagtatattaaaa

SEQ ID NO: 646684 - DNA, 98 bp, Homo sapiens
ccaaattgaggcgcaatgatgagaggatgtggtggtctactctgatgtcaatcttgagggctagtttacaggagagccgaccattttcagttgacttt

SEQ ID NO: 646685 - DNA, 100 bp, Homo sapiens
gataacttctcagtgggggaacggcagctcttgtgcatagctagagccctgctccgccactgtaaggaagaggagcaggacttggatggtgagaaggggc

SEQ ID NO: 646686 - DNA, 100 bp, Homo sapiens
caggggagggcgatcccccgcggcaccccggggccaccaccggcccacggagcagggtccccagccccaccccagccccaaaggaggctgttcgagaggg

SEQ ID NO: 646687 - DNA, 104 bp, Homo sapiens
tctctcccaccaaagtgatggaaacaccattccagaaaatgggattgcccaccacgataatgcagttcttattactagcaacgcacctcttgctttttcctcca

SEQ ID NO: 646688 - DNA, 96 bp, Homo sapiens
gttagcgtgagtgatcactctcaatcccggaattagaggagacagcactgattgcagtgacagaagcggtgccagctaactccccaccatcaaaag

SEQ ID NO: 646689 - DNA, 100 bp, Homo sapiens
caaaggagccagcctggacgatctcattgacagctgcattcaatcttttgacagatgtgctggtgctgagctgtgatctgataacagacgttgccttaca

SEQ ID NO: 646690 - DNA, 75 bp, Homo sapiens
tgtggggtccatgcctcttaagaactcttttcgaggaactatccggtcctggatgcctcatcccttagtttcaac

SEQ ID NO: 646691 - DNA, 90 bp, Homo sapiens
ccaaacttcttaacccctagaccggtttttagtccattgactatgcagcctaatgttagagatgtttatgattacttccgagctgtcctg

SEQ ID NO: 646692 - DNA, 101 bp, Homo sapiens
atccctgtgtgcacggccacctggttcctctcctcacttgctggacccagatgatgtggtaccagttggccaaagaagagcctggtgttggtgcatgtgct

SEQ ID NO: 646693 - DNA, 75 bp, Homo sapiens
acgctgcggggatggagaaccggtgtccagcggggctgcgggctacggctgttgttccaagagcctctgagttcc

SEQ ID NO: 646694 - DNA, 50 bp, Homo sapiens
gtgcggggagcggagccatggcctccggtaaagatgagcccagcagctac

SEQ ID NO: 646695 - DNA, 98 bp, Homo sapiens
ctagcaatcagcgagactccgtgggcgtaggaccctccgagccaggcagttttcttagctgtgattcccactgctgccattgtctgtgcaatcacatc

SEQ ID NO: 646696 - DNA, 100 bp, Homo sapiens
cagccggcggtgcagcagccggccgacccagagtgtgtcttctctttagggatggtgaggttggaaaaaggctcctgtaaccctcctccaggatgaacca

SEQ ID NO: 646697 - DNA, 80 bp, Homo sapiens
cgcgtcaggtgaagactgggggctgcaggcgcgctagattcccaacctgctgagcatccgcacacccactcaggagttgg

SEQ ID NO: 646698 - DNA, 75 bp, Homo sapiens
tgtgatgcctgcatctccattgctgttattcatcattttgcaacagcaaaaacctttccaacctatgagagaaag

SEQ ID NO: 646699 - DNA, 99 bp, Homo sapiens
cacgacaccggctacttctcagctttaccatccctggaggagacctggcagcagataccagatgacaattttagcatcccagaaggtgaagaagatctg

SEQ ID NO: 646700 - DNA, 75 bp, Homo sapiens
tgaaaacacagtttctgcaggaaaagatctctctacttctcctaagctttgatgttcacaagaagtgtcccctct

SEQ ID NO: 646701 - DNA, 76 bp, Homo sapiens
gtgtacgcatgttttacccatcttagaagggagataggtgatcttcagctttgcaaactggatgaactagattgct

SEQ ID NO: 646702 - DNA, 101 bp, Homo sapiens
ccattcagatgggatctttccggatcaatccagatggcagccagtcagtggtggagcctttagaagaagccacactctctgaattaaaaactgtcctcaag

SEQ ID NO: 646703 - DNA, 101 bp, Homo sapiens
gttcgggtgtctcgtgtgtgaacatcacaggtttgttggcatccaaagctgttggggttgatggtgctgaaaaaaaggaagactacaatgaaacagctcca

SEQ ID NO: 646704 - DNA, 50 bp, Homo sapiens
cctaactcaagccattggcacacagtacggcaagaagaagctgaaatacc

SEQ ID NO: 646705 - DNA, 96 bp, Homo sapiens
aaaaccattgtgtaaaacagtaggcggatctttcagagactccaaatcattgacaattcagctgcagaaccttggcctgaaaatgctacattatat

SEQ ID NO: 646706 - DNA, 75 bp, Homo sapiens
catcctgaccaagcccgatccaagaaccttctggactaatgatgatccaggtgactgcttagaaaactgcacagc

SEQ ID NO: 646707 - DNA, 100 bp, Homo sapiens
ttcatctggtcctcataatcttacttatcctctaggtcccaggaatgaagatcattgctgaaggtgccaatgggccaacaactccagaagctgacaagat

SEQ ID NO: 646708 - DNA, 85 bp, Homo sapiens
tttttcggatcatgtctggtggctccgcggattataacagaaataggaaggttgttgattactcacagtttcaggaatctgatga

SEQ ID NO: 646709 - DNA, 74 bp, Homo sapiens
cagagcgcagccatcggtgcgctgcaggaggagcagccatacccatggggaccacgcgactcaatggacggaga

SEQ ID NO: 646710 - DNA, 82 bp, Homo sapiens
cttactctgcaagttctccccggacggcaagtacctgcattactctactgactggcagagacaggagaggtagatgtccacg

SEQ ID NO: 646711 - DNA, 75 bp, Homo sapiens
tggattccatgttcatgagtttggagataatacagcagggctgttttgctgcagcttctgaagtgttaaagcact

SEQ ID NO: 646712 - DNA, 88 bp, Homo sapiens
gatatttggagttcttacaacatggcagacattgacaagcaatgaatcgctccctggctaatgtgattcttggaggctatggcaccac

SEQ ID NO: 646713 - DNA, 75 bp, Homo sapiens
tcaactcctgaaagaacactctgaacttcaggttacagtgtacagcatgtatgtttctataatggctttcaatgc

SEQ ID NO: 646714 - DNA, 82 bp, Homo sapiens
cggcccggcagcgacatggaagaaggaagaggcccagcagaagggactcgctgagccaccccccgccccactccatgttggc

SEQ ID NO: 646715 - DNA, 82 bp, Homo sapiens
aaggaattttgaagtcaccactgaggaggaattcaccctgttcgtctatgggaagaggaagaacgtctgagaaataaaattc

SEQ ID NO: 646716 - DNA, 76 bp, Homo sapiens
cgagctgcgggtgcggcacctggaggaggagaaccgagctttgttgtggcataatgtgtctggagttggttcctgc

SEQ ID NO: 646717 - DNA, 74 bp, Homo sapiens
atacatatgtcagtttttgacaagaattgcagcaggaaaaacccttgattaacagacccctgactatgaagaag

SEQ ID NO: 646718 - DNA, 100 bp, Homo sapiens
tcttcaacataataagatatttgtgaaccaaggcgttcgtggcattcagggatgtggctgtgtacttcacccaggaggagtggaggttgttgagccctgc

SEQ ID NO: 646719 - DNA, 100 bp, Homo sapiens
aacggccgccaccaccgaatggacgagttctcccggggaaatgtaccgtccagcgagttgcagatctacacttggcaacatgagtgagaatgaggaagag

SEQ ID NO: 646720 - DNA, 98 bp, Homo sapiens
cggcgaatgcggattcgatcattcacatcgagtgtgaacatggctacgcctcttcattcccgtccatgccgagcccccgactgcagcattcaaagccc

SEQ ID NO: 646721 - DNA, 74 bp, Homo sapiens
gagaaggtgtacatcgtgcatggcgtccaggatctggggactttgatgattttaacctggaggatgcagtgaaa

SEQ ID NO: 646722 - DNA, 100 bp, Homo sapiens
agtacgcgcaggaggccgtcaagaagggctcgaccgcgcggggatctgacgagcttttctctacttgtgtcactaacggaccgtttatcatgagcagcaa

SEQ ID NO: 646723 - DNA, 50 bp, Homo sapiens
cccgtgtgttgggggagtccccgggtgagacatcccctccttggagatct

SEQ ID NO: 646724 - DNA, 97 bp, Homo sapiens
tatatgtcctaaagtaaggtttcaggactcctcctattttgaggacttctccaacatctccatcttctcctcgtccgtggactccctgtcggacatc

SEQ ID NO: 646725 - DNA, 75 bp, Homo sapiens
tccatggctctcatgctcagtttggttctgagtctcctcaagctgggatcagcatgcagccagtaaagatcccag

SEQ ID NO: 646726 - DNA, 83 bp, Homo sapiens
cgcaccgcggcttaaatgatgtattttgtgatcgcagcgatgaaaggttgggttaacggcatggagaacagtcacccccccca

SEQ ID NO: 646727 - DNA, 90 bp, Homo sapiens
gagcaagaaaagcctctgggagcagaagggaggctccaagacctcatcaacaattaaggcctctcaccacctacctacaccaccttccaa

SEQ ID NO: 646728 - DNA, 100 bp, Homo sapiens
cttccacctctccaccaccgaccgcgtcatcaaagagcgaaaagctgttgctatatgatacagtccagagtgaactagaggagaagataagaaggcttga

SEQ ID NO: 646729 - DNA, 90 bp, Homo sapiens
cacagagatctacaaccttggagcccagagccacgtcaaagagtggaagctggacacactatgtgacttgtatgaaaccctgaccatcac

SEQ ID NO: 646730 - DNA, 75 bp, Homo sapiens
ctaagggagaagtggacagaagaagatattgctccatatattcaaggccttcgaggaagaggcccacctccttca

SEQ ID NO: 646731 - DNA, 75 bp, Homo sapiens
tcaaagatgaagatgaaaccaagcccttgatgaaaggttgtatcaaagttcttaaggaccaacctcctaatagtg

SEQ ID NO: 646732 - DNA, 99 bp, Homo sapiens
ctgaattctggacgtcctgtcactccacctcgaacagctaatccgccgaagaaaagagggagcactatgtctgcggaagtccccgaggcagcctccgcg

SEQ ID NO: 646733 - DNA, 90 bp, Homo sapiens
tccagttactctaacaagtctggagctgtcccctttcctccaacccaacggcttactttcaaggaagtatttgagaatgggaaacctaaa

SEQ ID NO: 646734 - DNA, 80 bp, Homo sapiens
cctggagcctcagttggaagcagccgatccagcctgcggagcctgtggggcagatgatgtctttctacctaaagatattg

SEQ ID NO: 646735 - DNA, 75 bp, Homo sapiens
gagctctatctcagtgtacacgattggtttttcagcagcagatgctgtaacaggactgaaattggtagaagaggg

SEQ ID NO: 646736 - DNA, 100 bp, Homo sapiens
ggcgtcctggacgccctgcacgtgctcgagggcctcttccgcaccgaccccgaggccaaggccttatatgaccccatcaaccctgacagggagaccctcg

SEQ ID NO: 646737 - DNA, 100 bp, Homo sapiens
acttgggcccagtttatggcttccagtggaggcattttggggcagaatacagagatatggaatcagacgcaaacatgcagatctttgtgaagaccctcac

SEQ ID NO: 646738 - DNA, 80 bp, Homo sapiens
ccgaggcccgcagcctccgcggatccgggcccgctcggcccctcccatggtgtcctgtggccaggcggaaagcagtgaga

SEQ ID NO: 646739 - DNA, 83 bp, Homo sapiens
cgagcatcggggtataggaagagaggtccgaaacccaagcggcttctgctgcaggtgtcgtgaaaactacccctaaaagccaa

SEQ ID NO: 646740 - DNA, 75 bp, Homo sapiens
gggagctgaggaaccagatatcttgaaaagctgccagaaagggggtcctgatgacaacttaattgaaggtggagg

SEQ ID NO: 646741 - DNA, 75 bp, Homo sapiens
gaggaaccccagcgactcttttatggagaccaagacacattccaccccagtggggggtcccataccactcatgga

SEQ ID NO: 646742 - DNA, 106 bp, Homo sapiens
agccggcggacggttttcgtacgggcggccgtgcgcgaggcgaggctcttgtcaggatggtgaagctgttcatcggaaacctgccccgggaggctacagagcagga

SEQ ID NO: 646743 - DNA, 100 bp, Homo sapiens
gcagaacaaatctcagcagaactcaagcaggcataccaaggctgggaagacagatgctaatagcaattcctgtcctctcaggcctagctcagatgatgcg

SEQ ID NO: 646744 - DNA, 103 bp, Homo sapiens
ccaaggccacttcttgcaaaccacatacacagcacaaagaatgtcagacaggattcagtggtcctgagccttctgaagttaggcttctgcctggtggtgggga

SEQ ID NO: 646745 - DNA, 100 bp, Homo sapiens
ggttaccgctgctgcccctgctgtcgctcctggtcggcgcgtggctcaagctaggtggatccataaagaacccagccaacccgcagagggaggggagggg

SEQ ID NO: 646746 - DNA, 100 bp, Homo sapiens
ctccttcctgcagatcaccgggggcgccctggaggagtccctgaagatctatgctcctctgtacttgcctgcctagggtagttaaaagacgagtgaatgc

SEQ ID NO: 646747 - DNA, 90 bp, Homo sapiens
tgctctctctccagtccttgctgaagagactttccgttacatgaatttgggccaggcttagtcatctattggtatggatttatccaggag

SEQ ID NO: 646748 - DNA, 88 bp, Homo sapiens
tgcggccatcattctgtgtggaggtgatactgtgcttgtccaccgagttcacagttatttagagcgtcatggtcttatcaacttcggc

SEQ ID NO: 646749 - DNA, 112 bp, Homo sapiens
atgaattaatccttgaaggaaatgacattgagcttgtttcaaattcagtgggaatgtaagacggacttagatattgcatacaaatttggaaaaactgtggtgagctgtgaag

SEQ ID NO: 646750 - DNA, 100 bp, Homo sapiens
ggatgtcaagcatgtggtttggcacccaagtcaggaggctgtcacccttgacccaaactttctggatgcttatatcaatttaggaaatgtcttgaaagag

SEQ ID NO: 646751 - DNA, 83 bp, Homo sapiens
caaaatgcaaaaaaggaggccaaagactttgtctgtgaactagatatcatctttaattttgagaaggcttattttattttgga

SEQ ID NO: 646752 - DNA, 74 bp, Homo sapiens
tccaacaatgagcaactgcccatgctgggccggcgccctggggccccggagagaatcgctgttctggcatccat

SEQ ID NO: 646753 - DNA, 100 bp, Homo sapiens
gcgacggcgggctgtcgtcacgacgacgtgcggacgcagcggcgggggcaatcaaaggcatgggaggttgatacctgccggggccattacaacaatgtat

SEQ ID NO: 646754 - DNA, 100 bp, Homo sapiens
gggtcagtgacactatatcctaccgagactttgtgaacatgatgctggggaaacggtcggctgtcctcaagttgttcagcagactgtacaggatcttttt

SEQ ID NO: 646755 - DNA, 108 bp, Homo sapiens
gacatcactttagaccctccacctaattgcaggtatcatgatattagctggtttgacatcaagtcatttgtgagtcatcagatcttctcctgaaaatgggagacacag

SEQ ID NO: 646756 - DNA, 75 bp, Homo sapiens
ccgccgccgccgccgccaccatgtggagcgagaccgtgccctgggccaccaggagccccattggaaggagttccg

SEQ ID NO: 646757 - DNA, 82 bp, Homo sapiens
ccgccggcgcccgcagaatcccagcgccatggatatgtggtgcctgtcataagctccagagagctgccttccacaagaccag

SEQ ID NO: 646758 - DNA, 87 bp, Homo sapiens
gtgtacaaatacccctttgaattaattatggctgaattgaaagatgttggccatcgtgatcagatggctgcagctagaggaatcctg

SEQ ID NO: 646759 - DNA, 100 bp, Homo sapiens
gcagttacttagggacaatctcactgggcccagaagacacctgctttgagtttggtgtttttcctgccatcctgagtttcccacttgattacccgttaag

SEQ ID NO: 646760 - DNA, 95 bp, Homo sapiens
cacatgcctctaccaatggacagctctcagtccacactcccaaaagggaaaggttcgagaacttgtcttggacaattgcaaatcaaatgatggaa

SEQ ID NO: 646761 - DNA, 50 bp, Homo sapiens
ggaggggctccggctggtctgtggtgagtgtgacagcgagagcggcccgg

SEQ ID NO: 646762 - DNA, 50 bp, Homo sapiens
aggataagtctcatgacaccgttttcctcctccaccaggcgctccacctc

SEQ ID NO: 646763 - DNA, 82 bp, Homo sapiens
tgcaggccatcaaagaccacgcctttgttacctcgaggtggaagtgctgcatcagtaaatgctaattttgctcattttgata

SEQ ID NO: 646764 - DNA, 83 bp, Homo sapiens
ccgccgcccgcggcgtccccggtttggtgttgcggcgcccaccttcgggaggatcaggtttgtccagaggggttgcgtttatc

SEQ ID NO: 646765 - DNA, 100 bp, Homo sapiens
ccgggacctgctgctggacccggcctgggagaagcagcagcgcaaggatgaaattgattctgcagtaaagatgttggtgtcattaaaaatgagctacaaa

SEQ ID NO: 646766 - DNA, 82 bp, Homo sapiens
aaagaagagaaagacaaggatgaccaggaatgggaaagccccaggtcagcccaaggccaaccccactgtcactctgttcccg

SEQ ID NO: 646767 - DNA, 100 bp, Homo sapiens
acatctatcaacagaagatcaaggtgttcgaaatccgcaccactgatgacctcactgaggcctggctccaagaaaagttgtctttctttcgttgatctct

SEQ ID NO: 646768 - DNA, 101 bp, Homo sapiens
agcaacagtattattcacctcaagcccaaactccagatcagcaaccaaataggaccaatggagagaatggtggcatgaagctcaaaaaaatccaaagataa

SEQ ID NO: 646769 - DNA, 74 bp, Homo sapiens
ctgcaaggaggccgtcaccttcaaggccgtcagacaaggatcccattgaagataccacgctgcatgtgtcctta

SEQ ID NO: 646770 - DNA, 75 bp, Homo sapiens
ggagagcatgccccggccccctgagcaggtgttggagcgggccggagagaagtagagtgggctgcgaggagaagg

SEQ ID NO: 646771 - DNA, 100 bp, Homo sapiens
cgcctcggccgaccagggacctgcccgcctgcggctgctccggctgggcagatgctcaaactcaaatccaaaacattgctgcatcttttgaccaggaggc

SEQ ID NO: 646772 - DNA, 50 bp, Homo sapiens
atgcaaaggcagacccaaagggtatatgactctcaacccttctactaaga

SEQ ID NO: 646773 - DNA, 75 bp, Homo sapiens
cagggacctagttcagctacgtcctaaacagtaccaggagccaccagaaatggaactattgaaatttttcaggcc

SEQ ID NO: 646774 - DNA, 139 bp, Homo sapiens
gatcctttctccttgatctaccaaactttccagatctttccaaagctgatatcaatgggcagaatccaaatatccagctttggcagcatgtaagcagctgtttgccaagaacccaggtcactgctaagaaagggtgcct

SEQ ID NO: 646775 - DNA, 101 bp, Homo sapiens
tcccaacagtgatgtcacaagattgaccacattgatcacattccggaactttaagatcatttaccgccgctatgctggcctctacttctgcatctgtgtgg

SEQ ID NO: 646776 - DNA, 82 bp, Homo sapiens
agggcgttggctatgtgcccatcacaggaaaacgaagccccctcctgtattgacagctgggaattgtggagtccaccgtcct

SEQ ID NO: 646777 - DNA, 82 bp, Homo sapiens
cagaacctttgacttggtgttgaaagtgaaatgtcatgcctctgaaaatgaagcatttcttatactgaagcagtggagatct

SEQ ID NO: 646778 - DNA, 90 bp, Homo sapiens
tgaacttggcagcaagatacctgtgcatcccaacgatcatgttaataaaagccagctcactaccctgggaaatcttacaccttcaagcac

SEQ ID NO: 646779 - DNA, 49 bp, Homo sapiens
aacttctgaagacttcaacaaggtcataaagaaggaaactggattttgg

SEQ ID NO: 646780 - DNA, 100 bp, Homo sapiens
agggagggcagcggggccgaagggagacctgaggtccggcgccagctgccagtcgaggaaccgaacccagccaaaaggcttctctttctgctgctcacca

SEQ ID NO: 646781 - DNA, 100 bp, Homo sapiens
caaacactgggttgaccctctgcctgatggagctctccttgtgtacatcatcatggttccccaggagtggatttaccagttaccataccagaagtttctt

SEQ ID NO: 646782 - DNA, 100 bp, Homo sapiens
gagaggatttgcttttgtaacttttgatgatcatgatacagttgataaaattgttggatggtgccatgacaatggtgtgaactacaagattggagagaag

SEQ ID NO: 646783 - DNA, 75 bp, Homo sapiens
cggatccggggcctccttcccctccaaggcatgctgggtctaaaattcccaggactccacagctttgcaccagat

SEQ ID NO: 646784 - DNA, 82 bp, Homo sapiens
cttcacaggaattgccatttgctgaccggttccctgatgtgttacctgcttctgctactgatccaaactgcagaacttctca

SEQ ID NO: 646785 - DNA, 75 bp, Homo sapiens
ccaagaaatccgggagttggaacgtcaacaggagcaacttgtaaagggaatggccaaatccagtgctattgaaac

SEQ ID NO: 646786 - DNA, 83 bp, Homo sapiens
ggcagtccacccaccgccgccgcctcccaggttaaataggattgcgaatcaggtggccattcagcggaagaagcagtttgtgg

SEQ ID NO: 646787 - DNA, 85 bp, Homo sapiens
ccgcagcctggcatggcttctggggacctttacgagagaccgtccaggctggacttgaactccttcctcggctgaagtgatcctc

SEQ ID NO: 646788 - DNA, 90 bp, Homo sapiens
gcgggtgtgagagtccgtaaggagcagcttccaggatcctgagatccggagcagccggggtcggagcggatgccctccaaatccttggtt

SEQ ID NO: 646789 - DNA, 101 bp, Homo sapiens
gcagatgcaggaaaatttcgatattgaagtgtcaaaatccatagatggaaaagatggtctctaattaacagaagatggcaaagcccagccacagcagctat

SEQ ID NO: 646790 - DNA, 97 bp, Homo sapiens
atcccttccgaggcccgacttcggaatgaagccaagagtgatgaaagaagctgtatctactccatcacgaatggcccacagggatcaggaatggtat

SEQ ID NO: 646791 - DNA, 74 bp, Homo sapiens
acgacccggagcacccgacccctgagcaaagtgtttcatggatttcaaagctggaggcgccttatgtcacattc

SEQ ID NO: 646792 - DNA, 51 bp, Homo sapiens
agaaaatgccgaaggcactcagacaggtagatcgacacttgagaaagctgg

SEQ ID NO: 646793 - DNA, 99 bp, Homo sapiens
gccgagatgccgggggagcggggccttccacaccccctccgtgggtgtgtggtgagtgtggactttatattcagagcaccaatcaaattaagcaagcct

SEQ ID NO: 646794 - DNA, 100 bp, Homo sapiens
cagccagggcgggggggatggcgtctccccgactccacctgagggactggctcctggggacccttgaacatctgtgaagaaatgactattctgcatggag

SEQ ID NO: 646795 - DNA, 100 bp, Homo sapiens
ccgggaagcgacgccccggggcgggggcgatggcggcggcggcggccggagcttctctcagccgacctgtcatttactccatcctttatagtgatgctac

SEQ ID NO: 646796 - DNA, 96 bp, Homo sapiens
gcgcgatgctggaccagttgatgggcacctcccgggacgaaattagtgaatttccatcagaatgttgtagtgtgatggcaggaggtactctgactg

SEQ ID NO: 646797 - DNA, 100 bp, Homo sapiens
gcaggcccacggtagcgcagccgctctgaggaaggcgcaatggcgaggaagttatctgtaatcttgatcctgacctttgccctctctgtcacaaatcccc

SEQ ID NO: 646798 - DNA, 100 bp, Homo sapiens
ggcggcgaatcacttataaatggcgccgaagcaggacccgaagcctaaattccaggagggttagctttatacgtctacgaatatttactgcacgtaggag

SEQ ID NO: 646799 - DNA, 75 bp, Homo sapiens
gcctgatctgggttccgctgattcctttcgtaaccgcaccacacccgaggtagttgatgtcacttggcgatattc

SEQ ID NO: 646800 - DNA, 82 bp, Homo sapiens
aagagaaacttcagcaggcgatagcaatgcacagccaatttcatgctccactataggagggctctaactccgtgaggacccc

SEQ ID NO: 646801 - DNA, 98 bp, Homo sapiens
cgccctcgatcccctcgccgcggtcccatggaggaggaggcgagccgcagcgccgcggcgacgaacccagggagctgtcgcctggttgggcccggaaa

SEQ ID NO: 646802 - DNA, 100 bp, Homo sapiens
actcattattttaacatttgggagaaacacagccagaagtgcatgcaagatatgggaaatactaaagcaagactactctatgaagccaatcttccagaga

SEQ ID NO: 646803 - DNA, 83 bp, Homo sapiens
gtcctcgcttgcagttcagcgaccacggtcatgatgatgggcagcgcccgagtggcggagctgctgctgctccacggcgcgga

SEQ ID NO: 646804 - DNA, 82 bp, Homo sapiens
acccagcttaaagagctccacattcaggggaaccgcctcaccgttctgcccccagaactagcaggtgcagttaataaccaaa

SEQ ID NO: 646805 - DNA, 75 bp, Homo sapiens
gagggagcgatgcggtgcagcgcggttaatttggagtggcccctggagtcagtttcctacaccatccgaggcccc

SEQ ID NO: 646806 - DNA, 51 bp, Homo sapiens
tgatcaatggaattgtcaagtacagttcaacgtcctcagatgactttcggc

SEQ ID NO: 646807 - DNA, 82 bp, Homo sapiens
aggagagcgcagtcacgcctgggacccccgaccccacttgtgctggaagaggctgggaggcggcagaatgcagccagaggag

SEQ ID NO: 646808 - DNA, 90 bp, Homo sapiens
gtttgaaagggcaaaagcagcagtggaggttctcagaggcactgtgactgacttccctggatttgatgagcgggctgatgcagaaactct

SEQ ID NO: 646809 - DNA, 75 bp, Homo sapiens
tccccaactgaagaggcacaaaggtgatgcaactgtgacaatagctcacagatacacccccaaagagcaactgaa

SEQ ID NO: 646810 - DNA, 101 bp, Homo sapiens
ggatcgtctttgccttcttcaccacggccgagacgctcacggatatagtgctctcctggagttcatgatcaagtgttgcccacaccaaatgcttcatccag

SEQ ID NO: 646811 - DNA, 90 bp, Homo sapiens
cttcgatgtggtcattgtccaggcagacaagcccagcttcttcactgaccggcgcaagtgtttccccccgggccggcctgccgtgacgat

SEQ ID NO: 646812 - DNA, 75 bp, Homo sapiens
aacctaatcttgctggtgaagcactggtaccaccaggaaacttccattttagaagaatacagtatcaattggact

SEQ ID NO: 646813 - DNA, 98 bp, Homo sapiens
cgactttggccggacttttgctaactgcggcgggcgagacgttctcaggtattgttgcagcatctggcagtgagactgaggatgaggacagcatggac

SEQ ID NO: 646814 - DNA, 50 bp, Homo sapiens
atccagatgaggatatatccctgctggtgaaactgcgtgctgtaagctgg

SEQ ID NO: 646815 - DNA, 100 bp, Homo sapiens
aagatgcagtgaaagctttgaagaaaaggatttccaaaaactacaatcataaagaaatccaacttaccttgtcagaatcctgcaatatggcgaacataag

SEQ ID NO: 646816 - DNA, 96 bp, Homo sapiens
gtggaaagcagtttttaagagagcgtcagttgcgactgcacaatgatatgcacaaaggcatggccaggtatacaaaactaggatatgctggaaata

SEQ ID NO: 646817 - DNA, 100 bp, Homo sapiens
aaaagccacattcgctcccattcggataccagcattgcctccaggggagctccaggggtggaagttgggaaggatcaggagttcaccgttgataccaggg

SEQ ID NO: 646818 - DNA, 100 bp, Homo sapiens
cagggcgatggacggccgaaccccgcgcccgcaggacgccccagccaggaagggaaaaggccgaggcatcagcgtgtgaagaccgcaaagacgatcccga

SEQ ID NO: 646819 - DNA, 100 bp, Homo sapiens
cgaagaagagccagaatgagaagtaccggctgaagtacctgcggctgcgcaaagcggccaaggccacggtgtttatcccaccacctgctgaggagaaaaa

SEQ ID NO: 646820 - DNA, 98 bp, Homo sapiens
gcgttcattcaaaaacttgctgggtaatccccaggcctctatagctcagttccatgccattgcagtgtcaactaggcctcagttacttttcagtttgc

SEQ ID NO: 646821 - DNA, 75 bp, Homo sapiens
taagaataatgaaggttttgaatcatcccaacatagtggtagagctttgtgttcagtatggacagaatgaggagg

SEQ ID NO: 646822 - DNA, 50 bp, Homo sapiens
gaccgcttggagagcaccagacgtgcacatattcagtttctgaatttttc

SEQ ID NO: 646823 - DNA, 100 bp, Homo sapiens
aaaaagtgaagtccctatttgaagaacttggaagtagtcctatcatggtgaacttacttcagattgtgcgggaccactgggttcatgttcttgtccctat

SEQ ID NO: 646824 - DNA, 83 bp, Homo sapiens
ctggcacctggcgcccagcgcgcccgtggccgctgccgcctccgccccaggtgaaatgacaatggatgctctgttggctcgat

SEQ ID NO: 646825 - DNA, 100 bp, Homo sapiens
ctggatcttcgaacttttgacacggctttggaaacgacgtcatgtgttaggtgaaaggtgtagcagtcactcggcctacacccacagcatcgaccttgtg

SEQ ID NO: 646826 - DNA, 97 bp, Homo sapiens
agaccctctaggacaagactgtatgatagtgttagttccacagatggggaggacagtctagagagaaaggtaaaataccatgaagattttgaaaaaa

SEQ ID NO: 646827 - DNA, 100 bp, Homo sapiens
ggtacggcggccccgcgcagcccccggccgcagcgcaggcagcccagcaggattttttatcaagcagaaatgcatcgaacaacgagaatcaagatcactg

SEQ ID NO: 646828 - DNA, 50 bp, Homo sapiens
ccggctgccagacctgacggcggagttggtgtcctgcctgcgctcaggat

SEQ ID NO: 646829 - DNA, 75 bp, Homo sapiens
gagttcgggggatggcacagaatgggggtcaacatatttcactggcacctattcacaagcttgaagaagctctgt

SEQ ID NO: 646830 - DNA, 98 bp, Homo sapiens
tgcctcctctcctgccaggtgtgtggctgcacaggagtcttgctgatggtaagaatgattgatgttggctgatattggagtgctcattcacatgaagt

SEQ ID NO: 646831 - DNA, 100 bp, Homo sapiens
cgggagtacaatgaagtggagcccatcatcctctccgcgtgtgaaggcaaagaagaatgctgctccattcagaagtgaagtctgctttgggaaagagggc

SEQ ID NO: 646832 - DNA, 98 bp, Homo sapiens
tccaggagatattgggattcctggacaaaacggccctgaaggaccaaagatgtactttatgaaaaatcgtgcccggaggcaaggtattaacttaaaac

SEQ ID NO: 646833 - DNA, 98 bp, Homo sapiens
ccgcagtggcgtcctggagccctcctcaggacataccgagggattgcatatgttaaatggaaattttataaagaagcaactcaagatttttctgctgc

SEQ ID NO: 646834 - DNA, 74 bp, Homo sapiens
gccgctatcgaaaatgtcttcaggctggaatgaacctggaagagacaaagcatggaggacacaagaatgggagg

SEQ ID NO: 646835 - DNA, 100 bp, Homo sapiens
ggggtctgagtctcacagcttgtaaaggatctggaactcctaagccatctactcctacaccaaccccttcatcgaccccacaccctcctgatgctcagag

SEQ ID NO: 646836 - DNA, 48 bp, Homo sapiens
actccgaggcggtgttttattacaagggatcgcttacacctgagacga

SEQ ID NO: 646837 - DNA, 100 bp, Homo sapiens
tggattcagcgcgatgcccaaatccaagcgcgacaagaaagatggagaaggatgaaactgtgagtgactgctccccacacatagccaacatcgggcgcct

SEQ ID NO: 646838 - DNA, 100 bp, Homo sapiens
ccaagtccggctagtacgcgaattggagaaaaagttcagtgggaagcatgtcgtctttatcgctcaggcaaagaacagagcagttcaccatttgcattat

SEQ ID NO: 646839 - DNA, 100 bp, Homo sapiens
cagatgggatctttccggatcaatccagatggcagccagtcagtggtggagaaactaatctggattcactccctctggttgatacccactcaaaaaggac

SEQ ID NO: 646840 - DNA, 75 bp, Homo sapiens
aggatggggcacgcctgctcacagggactcggagatcatgcagcagaagcagaaaaaggcaaacgagaagaagga

SEQ ID NO: 646841 - DNA, 100 bp, Homo sapiens
ggccgcttctcgcgggccggggccacgctcagcgccgagggcgagatcgtgcagatatggagattaatcaccaacttcttattttttgggccagttggat

SEQ ID NO: 646842 - DNA, 74 bp, Homo sapiens
accaagcaaggtcctatgaaggactctgatcctcctcctaagaaacgtgctcgagtacagtggtttgtccgatt

SEQ ID NO: 646843 - DNA, 83 bp, Homo sapiens
caaaaaaaggagatgcctggcagccccgctctctgcaggcatcattgcagaatacaacaaaatcaatgatgtaaaggaagatg

SEQ ID NO: 646844 - DNA, 96 bp, Homo sapiens
aagtacaccattacaccagtgaagatgaggaagtctgggggccgagaccacacagattgctgatggtatggcatatattgaaagaatgaactatat

SEQ ID NO: 646845 - DNA, 76 bp, Homo sapiens
cgccgagaagcagaggccccgagctgcgccaacggaggaggctactaccactattcctactcggtggtgaggggct

SEQ ID NO: 646846 - DNA, 82 bp, Homo sapiens
gttgaaggactaaaacgcttaatgacagaggttgagataagtcgaagagtgactctggaaaaactccctcctgtcctcgtgc

SEQ ID NO: 646847 - DNA, 100 bp, Homo sapiens
gtgagaggacgtctgcaaaatgctgcttcttggacacttaatgattgttggcaagaaatgtgctgctgatctgggcctgaataagggttatcgaatggtg

SEQ ID NO: 646848 - DNA, 51 bp, Homo sapiens
cccaaacaactggcagaatttgctagacccgaccgcatgtctgtcatggac

SEQ ID NO: 646849 - DNA, 98 bp, Homo sapiens
caagggcggcggggagcacacggagcactgcaggcgccgggtgtcgtgaaaactacccctaaaagccaaaatgggaaaggaaaagactcatatcaaca

SEQ ID NO: 646850 - DNA, 100 bp, Homo sapiens
tcgtcaccgtgtgggagcgggagctgcggaaaggactgcatcaaaacatgtaaacaaggacctcggtaatatggaagaaaacaaaaagttagaagaaaac

SEQ ID NO: 646851 - DNA, 75 bp, Homo sapiens
ccgccttccgccgtctcttcgagttcttcgtgctgctcaagctccaccgggggacggctacgtgcaggcggacgc

SEQ ID NO: 646852 - DNA, 74 bp, Homo sapiens
ggaatgtgaagagacatgagaccatagccaaacccccaggttctggcctataggaacaagacattttcagtaat

SEQ ID NO: 646853 - DNA, 101 bp, Homo sapiens
aacagggcctggtccgtgtccggtcccccaaatctgtcgtccctgcccccagggccagtacacaacaggccggggctcctcaggagtggggcttacggcag

SEQ ID NO: 646854 - DNA, 76 bp, Homo sapiens
cattgcgaaaattaaactcccgaagaagaggttgggtatctacagccattggttgctgttcaggtcagctttgctc

SEQ ID NO: 646855 - DNA, 75 bp, Homo sapiens
cccctttcttgaaccgaacagagtcaagtggaatcaaaggatggtgatgggaatctttgcaaattgtatcttctg

SEQ ID NO: 646856 - DNA, 100 bp, Homo sapiens
tattacactgtcaaaactttacaagttaattgaagagtcttgtccacagctggcaaattcagtgcagatcagtacccgctcttttcactttaaatattga

SEQ ID NO: 646857 - DNA, 83 bp, Homo sapiens
atggcgtgcagcgcaaccacgagacggccttccaaggaacggagctttgactgtaagatctgtgggaagagcttcaagaggtc

SEQ ID NO: 646858 - DNA, 90 bp, Homo sapiens
gaaccgcagtatcatgctggccaagaagatcatcattaaggacggaggcacgacaggccgacggtcgcaaggtcctacggtcaagcatcc

SEQ ID NO: 646859 - DNA, 89 bp, Homo sapiens
aggccccgccgctggagcgcgaggacagtgggaccttcagactctaaaatagagctcaagcttgagaagagagaaccactaaagggcag

SEQ ID NO: 646860 - DNA, 97 bp, Homo sapiens
aagaacaaggtgacacatattctgtctgtccacgatagtgccaggcctatgttggagccgggggccatcaagtataagaccacaggaccacgtgatt

SEQ ID NO: 646861 - DNA, 75 bp, Homo sapiens
atggaataaagagctgtatttgatcaggctgtatcgcatccattgaatactgtgaccgaggacatgtacaccaac

SEQ ID NO: 646862 - DNA, 75 bp, Homo sapiens
agaagccaaagaactggctaggcaaataagctttaaggtacaacagaatagctcgggaatggactcagaagtatg

SEQ ID NO: 646863 - DNA, 100 bp, Homo sapiens
tcatcgagccggcccagcttctgaagggagatgtcatgaaatgagccgtcagactgctacagcattacctaccggtacctcgaagtgtccaccatcccag

SEQ ID NO: 646864 - DNA, 100 bp, Homo sapiens
tgcagttggacatgagaaccgtgcaaatttctgatctagaggtcctgcatctccagtatggaatgtatgtttggccctgtgctgtggtcctggcccagta

SEQ ID NO: 646865 - DNA, 100 bp, Homo sapiens
tggctctgttggctgtgacatctattccatctgtgagtgactctttgacatggagagaatttcactatattcagtctcaaatatctatcagtgtagaaga

SEQ ID NO: 646866 - DNA, 51 bp, Homo sapiens
ttctgctgttcaaaaaagtccctaaagatggagtcttgctctgttgccagg

SEQ ID NO: 646867 - DNA, 90 bp, Homo sapiens
gggggcaccgagggctaccacgttctgcgggaatccttcaactgctttctaccaagcgttccatttgaacacgttaaaggaatcaaagag

SEQ ID NO: 646868 - DNA, 100 bp, Homo sapiens
gatgctttgaaatctgataagaaagtacggaccataataatcaggagtgaagtcccagggatattctgtgctggtttacatgaggatccacaaagtccac

SEQ ID NO: 646869 - DNA, 100 bp, Homo sapiens
ggaccctgcaggaggccctgagcctgaaacttcaggagctccgcaaagtgtgtctccaggaggcgaaaccagcctggacaccaagtctgtgtcagaaggc

SEQ ID NO: 646870 - DNA, 83 bp, Homo sapiens
gcgcagggcctgcagcgggagctggacggcgagcgcgagcggcgcgagaaagttttgtagtgcatccctgagcatgagcacag

SEQ ID NO: 646871 - DNA, 103 bp, Homo sapiens
actcctactagtggagggggtccaatgtcaccccaggatgatgaagcagaagagggtgtatgcaacagcgttattgcaacaggctaacgaaaacagacaaaat

SEQ ID NO: 646872 - DNA, 78 bp, Homo sapiens
gcggtggaggacgaggggctccgggtcttccagagcgtgaagatcaagatcggtgcccgtggttgacacgagctgtgt

SEQ ID NO: 646873 - DNA, 82 bp, Homo sapiens
cctgatttacgaacagaactgagtaaaagaatagctccgtgttatcaaggaactgtggctgcaccatctgtcttcatcttcc

SEQ ID NO: 646874 - DNA, 100 bp, Homo sapiens
attcgaaggaatctttaacaatgccatcttctgcacaattgttttaggcacttttgtggtacaggcacctcttccattggggcacataaagcgaatgcaa

SEQ ID NO: 646875 - DNA, 99 bp, Homo sapiens
cggcggcgcgtctggaggaggctgcagcagcggaagaccccagtccagatgggccgtctcccacaggcagcgcctgctggaactcaacagctccctgga

SEQ ID NO: 646876 - DNA, 101 bp, Homo sapiens
aactgggttcagtttgaagatgacacaccctgggccagcacatctccacctcatcaggaaacagctgagacagggccacgcctggctgaaagatgacgaag

SEQ ID NO: 646877 - DNA, 75 bp, Homo sapiens
cgagctcatagggtagttaagcggaaaagaaatttgcgagaatccccgatttatcattgatggagccaacagaac

SEQ ID NO: 646878 - DNA, 100 bp, Homo sapiens
cagaacagagcaagatctgtatgttcgcctcatagattcaatgaccaaacaggccagaagcggactcctagaagaggggagcagcaaggatggaatgaca

SEQ ID NO: 646879 - DNA, 88 bp, Homo sapiens
caacacctacatcacctattaaaaagaatgatatggaacctagcaaagctgttccactgaatgcatctaagcaagatggacctatgcc

SEQ ID NO: 646880 - DNA, 83 bp, Homo sapiens
gaaagacgagactgagtcgcttggggccacggcagagacaacgtgtgtaccccaagtgcacatggctgaccacccctaaaagc

SEQ ID NO: 646881 - DNA, 75 bp, Homo sapiens
acttcatcgacagccatgtccccggggaggatgaagagcgaggcactgtggagttccagggtcacccccgagagg

SEQ ID NO: 646882 - DNA, 100 bp, Homo sapiens
caaatgctccttctcctggagacgcaactcaagtgaatggcattactgaggaagctgatcccaccatttactctggcaaagtaattcgccccctgaggag

SEQ ID NO: 646883 - DNA, 97 bp, Homo sapiens
aaaaacagtggataattttgtggccttagctacaggagaggttctgtacagagtaatgagatgtgtgacggctgcaaaccaggtgtttttttctgag

SEQ ID NO: 646884 - DNA, 100 bp, Homo sapiens
gtcgggttattcgagtgaccgagaccgcggccgggaccgaggggctcttccgtgggcggcggcttcgcgggcttggagttcgcgcggccgcaggagtcgg

SEQ ID NO: 646885 - DNA, 101 bp, Homo sapiens
agaaattccagatatccaaatataaagtgaaatctttccgtgcagctctacaagaggaggaacaagccagcaagcaaatcaacccgaagagaccccgtgcc

SEQ ID NO: 646886 - DNA, 83 bp, Homo sapiens
cgaggtcagccccaaactaccggtcagcccaaggccaaccccactgtcactctgttcccgccctcctctgaggagctccaagc

SEQ ID NO: 646887 - DNA, 75 bp, Homo sapiens
agcacaggggccactcagagtcgcccgagaagaatggccttgatgaagatgacaggcatggccggggtcagctct

SEQ ID NO: 646888 - DNA, 100 bp, Homo sapiens
ggaaatggcaccgtcatgggtgctgaaatccggcatgttcttgtcacactgggtcacgcatgaagggagcaccgtggagaagacagtggcccctacagaa

SEQ ID NO: 646889 - DNA, 75 bp, Homo sapiens
ctcaaccttgtgggatgtgaaaactctgttactgaaggttacacggtgtgggcacacaacctcattgccattgct

SEQ ID NO: 646890 - DNA, 100 bp, Homo sapiens
ccgggctgagtactaccagtgttaacgtccctaaaacccgccggactttctgtaagaagtgtggcaagcaccaaccccataaagtgacacagtacaagaa

SEQ ID NO: 646891 - DNA, 100 bp, Homo sapiens
gagtctttggaggatgcggctttgatgggctttcttctagtcaagatgagtgataaaccagacttgtcggaagtggagaagtttgacaggtcaaaactga

SEQ ID NO: 646892 - DNA, 95 bp, Homo sapiens
tatacagggccgtgatgttggagaactacaggaacctggagtctgtggctggaagctctttgacatcctttggaacagaaacatcaaacagtggt

SEQ ID NO: 646893 - DNA, 96 bp, Homo sapiens
aaaattttggaccattaacttaaagacgagaatacatggactactgttcgaagatttttggaagaatactgagaacggcataaagtgaagatcgac

SEQ ID NO: 646894 - DNA, 100 bp, Homo sapiens
ggatagcctcagcgtcaacgagttcaaagagctggttacccagcagttgccccatctgctcaagagagaagcgaagggcaatcattccttctcacttggc

SEQ ID NO: 646895 - DNA, 91 bp, Homo sapiens
tattgattcacttaagaaaactcagcctgagaatgatcattgagcgcttgaagctggtgcccctgaatcaggaaagtgtggaagagagagt

SEQ ID NO: 646896 - DNA, 74 bp, Homo sapiens
gcagttatcagttgtaccaataattgcaatccatctgtcatgcttgctgcagaaattgcatctgatggtctcaa

SEQ ID NO: 646897 - DNA, 90 bp, Homo sapiens
atcatccacttccgtgtgcagtactatgtggaaaatggcagattgatcaggtatatgagtagaccagtgatgagtggcccaggactctat

SEQ ID NO: 646898 - DNA, 75 bp, Homo sapiens
aggccttgactatggaggcgttgccaggtatggtttaggaatgatttattacaagcaagaaaaattcagccttgc

SEQ ID NO: 646899 - DNA, 108 bp, Homo sapiens
ccctccgcgtcctgaccgggccctgggcggaagggatgtctgcgaaagaccacagcaagattctttcattcgtctcctcctagcctgggggaccaggctcgaactgac

SEQ ID NO: 646900 - DNA, 101 bp, Homo sapiens
cggcgtcacctccttctgccccaccctggtcacttccccaccggaggtttatcacaagcctggtccgacccccagtggcactaacgtgggatcctcagggc

SEQ ID NO: 646901 - DNA, 101 bp, Homo sapiens
gggcgagcggctgtgtggatgtcggcgaagccgcgggcgaggtactctctgaagatggcagaagctcaccaagctgtggcctttcagttcacggtcactcc

SEQ ID NO: 646902 - DNA, 101 bp, Homo sapiens
aaaattaactataaaggagagcgccaaaccattactgatgatgtggaggttaacagctatctttctacagtgggagtagctcaccgttacccaagtatgct

SEQ ID NO: 646903 - DNA, 100 bp, Homo sapiens
agccggaatgcttattcctcacacttatccagagttgtggaaagtaaaaatgtagccctaccaaaaggaactattgtactggcttctccaggctggacaa

SEQ ID NO: 646904 - DNA, 49 bp, Homo sapiens
gccgacctccgggagcagcgcagttggtcgcattatgtttcagctcttc

SEQ ID NO: 646905 - DNA, 50 bp, Homo sapiens
ctctggtaccattaaggcaaaattggttgtggttcaccttgaaactattc

SEQ ID NO: 646906 - DNA, 98 bp, Homo sapiens
caaagcccccacgcccagccaggagcaccgccgaggactccagcacaccgaggcctcattatctggtttggagacatgaactttcggatcgaggactt

SEQ ID NO: 646907 - DNA, 83 bp, Homo sapiens
acagcatgctgatcaaggctgtctccacctcggacacaggtaccacatggaatgcttggacccccctctccaggaggtgccgg

SEQ ID NO: 646908 - DNA, 100 bp, Homo sapiens
aatatcggaacccctccttgaagctgatggtgaatgtgtgcggacacactctacaagttggatggcttgaggactggtactaaaaggaaacgtgactggg

SEQ ID NO: 646909 - DNA, 50 bp, Homo sapiens
gaccccctgctctgcgacttcctggataccccagaatcttccatgctccg

SEQ ID NO: 646910 - DNA, 100 bp, Homo sapiens
gtgatggatgcagctcttctgttgataggacactttgccaccatcaccttgaccttcatcgacaagaacggagagactgagctgtgcatggaaggtcgag

SEQ ID NO: 646911 - DNA, 82 bp, Homo sapiens
ggaggcgcagggaccggacggctcccgagtcgcccacctgacgggtttccaggcctgaggtgcccgccctggccccaggaga

SEQ ID NO: 646912 - DNA, 80 bp, Homo sapiens
acaaggagctcagtgacctcctggacttcagcatgtgcctccggagccagcgtggtggccatagacaacaagatcgaaca

SEQ ID NO: 646913 - DNA, 100 bp, Homo sapiens
ctggacaagttcatctactgggtggatgggcgccagaacatcaagcgagccaaggacgacgggacccagggctgagggaggaagacggcatggttacatg

SEQ ID NO: 646914 - DNA, 87 bp, Homo sapiens
gctgctcctcctcgtgctggcggcggcggcggcggcggcggcggcgctgctcccgggggcgacggcccgtggaacacagagcattcc

SEQ ID NO: 646915 - DNA, 75 bp, Homo sapiens
gcctcggcccgctcttctccctgcttaacgagaaccatagctggattgtagtcacatattccacttacagtgctg

SEQ ID NO: 646916 - DNA, 100 bp, Homo sapiens
ctggccggatggaaatcctaatgacagtctccaaattcgcctccatctgtaccatgggaacccgagcgtcatgttagggtgaagcagaggacctcagtgc

SEQ ID NO: 646917 - DNA, 90 bp, Homo sapiens
cttcatctctgttgcaggatttagcagaatcacgacaactgttgcatgtaacatggatctgtctaaataccccatggacacacagacatg

SEQ ID NO: 646918 - DNA, 85 bp, Homo sapiens
ggaagggaaacacacttggagacaaacttcactttaaaatctgaatggatgacgactcatttaatttacataacagcaatagtac

SEQ ID NO: 646919 - DNA, 100 bp, Homo sapiens
gccagagagaagaccaggctccaggaacaaggaagatactgtccagaaatggtttattcatagcaacttcaagatgaacaagagaactgggcaacccatg

SEQ ID NO: 646920 - DNA, 87 bp, Homo sapiens
gggcagagcgcggcggcgcggagctttcagcagaggccaaggcagcattgcttgaatttgaagaaagggagcgacagcataaacaag

SEQ ID NO: 646921 - DNA, 90 bp, Homo sapiens
cttaaatctgcactcctattccaatttgcccatctgggtcaacaagcttgacatggagttatctgaaaaactgcaagacacagagaatga

SEQ ID NO: 646922 - DNA, 75 bp, Homo sapiens
ggttgccttggaaaatgccaacgccgtgtctgaagctgctggagccagttctgcttctcggcaaggagcgatttg

SEQ ID NO: 646923 - DNA, 96 bp, Homo sapiens
ccgctgctgcccgcccgctgcctgcctgcctggcatctctctctcccgaaaccccgagactcttcagttgaagttcgtagtgattgggaagtgaaa

SEQ ID NO: 646924 - DNA, 75 bp, Homo sapiens
gatcaaccttctgcgttgcgaagacagaatcaagctggcctttgtggaggcccagaataagattactgtgccatt

SEQ ID NO: 646925 - DNA, 126 bp, Homo sapiens
atgaagtcgctagagtcccagctggagaaacagcagaaggacctgagtgaagggccacctcctgcccagcccctggcacagcgtctctgctccatggtctgcttcagtctgcttgccctgagcttc

SEQ ID NO: 646926 - DNA, 76 bp, Homo sapiens
tgatgctggcacagggccttctgctgcatttcctgcccagaggtgtgtgtaactggtgtgtgcaccgtttcgacca

SEQ ID NO: 646927 - DNA, 75 bp, Homo sapiens
aggagctgagcatggtcattctgcttcccgatgacaacacggacctcgccgtggacttcattgacttaactagag

SEQ ID NO: 646928 - DNA, 56 bp, Homo sapiens
tcctactccagcggcggcggcggccagcagtgcacttggaggctcctcagctcttc

SEQ ID NO: 646929 - DNA, 83 bp, Homo sapiens
cctagacggcggtgttgctccggcagcgttcctgggagccgagggccagagactaagtgtcatcaagagagagggcacaggta

SEQ ID NO: 646930 - DNA, 82 bp, Homo sapiens
tttgttgtaagaaccgccggggacgaaacaataaagaccggaagctgagtttttatccgatattagaaatggctactcccca

SEQ ID NO: 646931 - DNA, 112 bp, Homo sapiens
cttcactcgagagatgaggacactgaaattcagagaggggaagtgatttgcctcagcttgtactgaatgtatcctgtcaggtataatgtcagtgaatggcaagaaagttctt

SEQ ID NO: 646932 - DNA, 51 bp, Homo sapiens
atcatctgggggaaacaagaccagatagaagaagtcagagatgccatggaa

SEQ ID NO: 646933 - DNA, 100 bp, Homo sapiens
tgggatgagattcaatgaagtggccgcacagtatagtgaagataaagccaggcaagggacttcccaagaaggacaacccgaggcgaggcttgtggctggc

SEQ ID NO: 646934 - DNA, 90 bp, Homo sapiens
cgggcgcacccagccgccacttccgagagcgcctgccgcccctgcgccgccgagccagctgccaggtatataatgtttacatggcaggga

SEQ ID NO: 646935 - DNA, 50 bp, Homo sapiens
gtcttgatcccatggatgttggcccagggctcctcagagcaggaactcca

SEQ ID NO: 646936 - DNA, 75 bp, Homo sapiens
aagatggaaaaccagttattgaatatcaagaggaggagttgttggggctaagtgatggatcttgtactccgtgtt

SEQ ID NO: 646937 - DNA, 100 bp, Homo sapiens
ccgaagccttcctcagtacaaccacccacacagaatatgcctatgggtcctggagggatgaatcagagcggccctcccccacctccacgctctcacaaca

SEQ ID NO: 646938 - DNA, 50 bp, Homo sapiens
aggagtacgctcaacaagatggttgtgtccgtattgagaatgtggagacc

SEQ ID NO: 646939 - DNA, 82 bp, Homo sapiens
ccgccgccgccgttggctggaggattttttatcaagcagaaatgcatcgaacaacgagaatcaagatcactgagctaaatcc

SEQ ID NO: 646940 - DNA, 100 bp, Homo sapiens
cacggtgtgttctatgccgggggctttgccattgtgtattacctcattcaaacactattcctgatcagagaactccagttgcttcaacacacagtatcag

SEQ ID NO: 646941 - DNA, 101 bp, Homo sapiens
gacagaggtgtgctgacgacctgctacaacagaatgaaagtagagcctattcccgccattggccacgccacgctcggcactgccagccggatcattcagac

SEQ ID NO: 646942 - DNA, 75 bp, Homo sapiens
cctcaggagcggaacaacgtcggcgagcgggagattatggagaagtctggcgaggaaggaatgcctgatcttgcc

SEQ ID NO: 646943 - DNA, 51 bp, Homo sapiens
cactaaggaaatgctgaagcttttggaatcagagatcattgatttcttcct

SEQ ID NO: 646944 - DNA, 75 bp, Homo sapiens
acagctgaaggatgaaggagccagtttggctgaaaataaaaggagtccaatgtgctgattgctgctaacagtcag

SEQ ID NO: 646945 - DNA, 85 bp, Homo sapiens
aaccaacgcctggctcggagcagcagcctctgagccctgggcgctgcctatggcacagccaagagcggtaccggcattgcggcca

SEQ ID NO: 646946 - DNA, 97 bp, Homo sapiens
attgatttagggactggcaagataatcaactttatcaaatttgatacagtggtgcttcatgccccacctccaaccaagatcaaacgggagctgcaca

SEQ ID NO: 646947 - DNA, 141 bp, Homo sapiens
cagcgactgcaccagcaagatcggcaggcgagattgcctgacccaggcctgctcggccctcacaggggcatgaccattcggcccctggtagacctgttggctgtgaagaaaaagcaagagacgaagcgctccatcaacgaa

SEQ ID NO: 646948 - DNA, 99 bp, Homo sapiens
atggagcccgaggaggagccaagtgtggcagcagttcgtgaagtctgtgaggaggttactactttgggattgtgatgatcgaagctatagctactacgt

SEQ ID NO: 646949 - DNA, 100 bp, Homo sapiens
ccgccggcagcttcgctggaaggctcatcggaacctgtcccagctccctaattttgccttctctgttccactggcgtatttcctgctgagccagcagaca

SEQ ID NO: 646950 - DNA, 82 bp, Homo sapiens
cgctcttcctggtgtcccgcccagtagcggagctggagtttgttcagatcatcatcatcgtggtggtgatgatggtgatggt

SEQ ID NO: 646951 - DNA, 90 bp, Homo sapiens
acttgctcaacttcctgatagatgtacactgaaaactggacattataacattaagagtcagtggatcggtggggaaaatgctgcttaccc

SEQ ID NO: 646952 - DNA, 100 bp, Homo sapiens
ctgcccttcaccgcgggcgccaatggggagcagaaggactcggacacagcatttcttctgaggccctgaagaagtatcaagtgggctttgacattgcggt

SEQ ID NO: 646953 - DNA, 100 bp, Homo sapiens
aaaagaacttcgtgtgaaaattttcctgggagttgtggaaagtaaaaatgtagccctaccaaaaggaactattgtactggcttctccaggctggacaacg

SEQ ID NO: 646954 - DNA, 120 bp, Homo sapiens
ccaaaaagccaaagccacagataaaccagtggaagcaggagaagcagcaattatcgtccgagcaggaatatatgcagaacatgtcctgcggcccaagaatcttggacttgcacatcagag

SEQ ID NO: 646955 - DNA, 48 bp, Homo sapiens
ctatgtcaacacgaccaccaatggcccggtacaagcagagccttgacc

SEQ ID NO: 646956 - DNA, 82 bp, Homo sapiens
cacacgtcctcgtctcgttcctgatcgaacgtggtgcatatcccagtagaatacgggcttttccagggcaggaacctttagc

SEQ ID NO: 646957 - DNA, 100 bp, Homo sapiens
cgaagacagtccctggatcaccgacagcacagacagaatccctgctaccagtggagccttttgccagcttgaccgaggccgtgcggagctcagttccccg

SEQ ID NO: 646958 - DNA, 75 bp, Homo sapiens
cattttagaaatgctgttgcgactcctggacacttaccgggacaagctttatcctgtggataaacgcagagtgaa

SEQ ID NO: 646959 - DNA, 80 bp, Homo sapiens
cgcggtaatgctggtggtctgcatcaccaccggatcaacttcgacaaataatgccgacaaaaggatcaaggtggcgaagc

SEQ ID NO: 646960 - DNA, 88 bp, Homo sapiens
tctgctcgtgttccaaatcatcgcctttctggtgggaggcttgattggtctcctctgagcctccggcctccataagacccaaaacaga

SEQ ID NO: 646961 - DNA, 90 bp, Homo sapiens
agaaagtggtgaatcccctgtttgagaaaaggcctaagaattttggcattgggcccggcaggaagatgggctcccgtggacagggactct

SEQ ID NO: 646962 - DNA, 88 bp, Homo sapiens
ggaggttatgaggcttaataaagaagaactatttgtcaatgaagattgtaaagccaaatgtgtaacaaaggcaaaggcttcatttcaa

SEQ ID NO: 646963 - DNA, 48 bp, Homo sapiens
tgggacaccgcggaagtcgggaaatggcagcatgatcccagtggccga

SEQ ID NO: 646964 - DNA, 75 bp, Homo sapiens
caatttcctgcccgggatcccagagctacccttcttggagcccacaggggtaatgcatgtccatggtacacaaat

SEQ ID NO: 646965 - DNA, 100 bp, Homo sapiens
tggatttcgttatatcccctttagaatatatcagctagaacaacagaggcagcagttgcttactgaacgccaaaacttccacatggaacagctgaagtat

SEQ ID NO: 646966 - DNA, 75 bp, Homo sapiens
gcacaaagagccctctgcactagcgccgcaggaccgcggacccgaggtttggttttcctaaacaaatcctttcac

SEQ ID NO: 646967 - DNA, 111 bp, Homo sapiens
gcatccttgctttgttcctaaacaggaggtgaaaacattcagtcttctgccattagactttgagagttttgacctgcctgaagagcaccagattgcgcacctccccttgag

SEQ ID NO: 646968 - DNA, 96 bp, Homo sapiens
gcagttcctgccgccttccaggcagagttcccgctctcttgtttttgccaatccagaagactgtgtagcatttggcaaaggagaaaatgccaagaa

SEQ ID NO: 646969 - DNA, 75 bp, Homo sapiens
tccaggtctatcaagcagcccttctgggtcacccttgcatggaggcccgccgtgggggcagagaagtccaacccc

SEQ ID NO: 646970 - DNA, 100 bp, Homo sapiens
tctgtgtaacgtagaatgtagtcatttgaaggttccatcataatgaatggatccaatatggcaaatacatcaccgagtgtaaaatccaaagaggaccagg

SEQ ID NO: 646971 - DNA, 74 bp, Homo sapiens
tccatctgtggaaggacctaccaaccagtatttttcagtgctgtacaagcgtcttgaattactctggtagcttt

SEQ ID NO: 646972 - DNA, 95 bp, Homo sapiens
gttaagtggaaaagcagcggtatttctctgcctcctgtggacaaaaaaaggtattttgattccgttcaagctaaagaacagcgaaggcaacagag

SEQ ID NO: 646973 - DNA, 101 bp, Homo sapiens
cccaatttcccagctgctaaaggaagaggaaggtgatggcttggacaacagtgtagcttcccccagcacaggtgacgatgatgaccctgataaggacaaaa

SEQ ID NO: 646974 - DNA, 83 bp, Homo sapiens
gcaaacactacaagtccacggtgggagtccattggaaatgctaaaacaaccaggaatgataatagcagccgttttgggaagta

SEQ ID NO: 646975 - DNA, 100 bp, Homo sapiens
gataactgaggacaatggacctgcctgggcatagacttccttaaggaaatgccacaatcattttctgcaatcacattaagtaacacagagatgaataata

SEQ ID NO: 646976 - DNA, 82 bp, Homo sapiens
agctaacctcggggaccgagatgcagggttgtgagtcccggcccagcccctccacccccctgcccccccgatgcgaccatgg

SEQ ID NO: 646977 - DNA, 75 bp, Homo sapiens
caaaaagagagagttttaccgtgacaagaagtacgaggaagtgaggagccgccctgcctggagctagcctggggg

SEQ ID NO: 646978 - DNA, 95 bp, Homo sapiens
cgtgccaaattccgaagcaatcttcctgctaaggccattggacacagaatccgagtggaatacgagaaggccttaaagtacgtccgcgggttgct

SEQ ID NO: 646979 - DNA, 82 bp, Homo sapiens
gatgggggcctcgggcgccccgcagccccccaacatcctgctcctgctcatggacgactgggtaattccagaattgattggc

SEQ ID NO: 646980 - DNA, 73 bp, Homo sapiens
aatgaatgtcgaatgtgactgactagcagcttcattttgaagttgatgatgcaatgatggcaaatgcagccca

SEQ ID NO: 646981 - DNA, 83 bp, Homo sapiens
ccacccttctcacgtctgacggactctgctgacagacaatgcagatcttcgtgaagactctgactggtaagaccatcaccctc

SEQ ID NO: 646982 - DNA, 103 bp, Homo sapiens
agcagctgtcactcatcagtggttgtcccaatatccaagaagcagtagagggtgccatgcacattcaggtgccatcatggaagaacaggcagcagaactcctt

SEQ ID NO: 646983 - DNA, 51 bp, Homo sapiens
cagccctgaggcaagagaagaaaggctagatgaacagtgtagtgctattcc

SEQ ID NO: 646984 - DNA, 95 bp, Homo sapiens
tcttggcattacgcaggccagcaactcccagctcaatgcaatgaaatgagccgtcagactgctacagcattacctaccggtacctcgaagtgtcc

SEQ ID NO: 646985 - DNA, 96 bp, Homo sapiens
gttctccatacccgtgacctggggatcgctacggaccttaaaatacccgcaacagccccttcgtcccaagttctgactcctcaggagcaaaaaaca

SEQ ID NO: 646986 - DNA, 83 bp, Homo sapiens
ctgcgctcgcgcccggatccctcaggtgacttaagagattaaaattaatttggttgctgttggttctgaacaaataatgagtt

SEQ ID NO: 646987 - DNA, 100 bp, Homo sapiens
aaaaacagaacgttgcaaactctggaaaaaaacttgggtactccaaagattcaggtttactcacgtcatccagcagagaatggaaagtcaaatttcctga

SEQ ID NO: 646988 - DNA, 97 bp, Homo sapiens
cttgcttgcagccgggcactacaggacccgcttgctcacggaggaagagcaagcaggccctgagggactataagaaggttcagatccagctggagaa

SEQ ID NO: 646989 - DNA, 75 bp, Homo sapiens
ataacatcaaattttaaggggccagagcatatgcagtcggttacttttcacatagaaccatatagcaatcgagat

SEQ ID NO: 646990 - DNA, 100 bp, Homo sapiens
ccagccaacgatgaccagtccaggcccagcctctcgaatgggcacacctgtgtagctagtgagacctgcaacgacttccacccgatgttcttcacccacg

SEQ ID NO: 646991 - DNA, 90 bp, Homo sapiens
cctaaactagcagtttagggtgtcaggaattgaatgatctggcacgggaccctccagcacagtgttcagcaggtcctgttggagatgata

SEQ ID NO: 646992 - DNA, 90 bp, Homo sapiens
ggacgggaaggcgggagacgagaagcctgaaaagtcgcagcgagctggagccgccggagaaactggcagacctttcacttcgtatccaac

SEQ ID NO: 646993 - DNA, 75 bp, Homo sapiens
gcctcccagcaccacagtccttctgcagtccctcgtccagccacccccaggtgagcagccggatgcctccctccc

SEQ ID NO: 646994 - DNA, 90 bp, Homo sapiens
gccacgtccaagcaaaccgggaaaggagaggatcccggagccgaccgagacatgggtgcccggcaccgcgcccgagcccactccattcag

SEQ ID NO: 646995 - DNA, 98 bp, Homo sapiens
tgccctcccccttgtcccgggatcgctccgtcgcacccaccatgatggaagacgacgggcagccccggactctgttatgaagttcatggaatggaaaa

SEQ ID NO: 646996 - DNA, 100 bp, Homo sapiens
ctggaatctaaggagtggtttgtgcagctctattaccacgggaagaactgccattggatgtccagaatcccctgtagttgataatgttgggaataagctc

SEQ ID NO: 646997 - DNA, 90 bp, Homo sapiens
gtgacatggaaggggcagtacaagcttacgtctctgctcttcagtacaatcctgttgtggaaaatgcccttaaagtgaacccaatactag

SEQ ID NO: 646998 - DNA, 97 bp, Homo sapiens
aggacgactgggaccgggacctgctgctggacccggcctgggagaagcagcagcgcaagcccgacggccatggaggctgaagagacgatggaatgcc

SEQ ID NO: 646999 - DNA, 75 bp, Homo sapiens
cggtggaggacgaggggctccgggtcttccagagcgtgaagatcaagatcgggcaaaataacatggcagccagac

SEQ ID NO: 647000 - DNA, 76 bp, Homo sapiens
cccagtgactccgtgctgcacggaagaatatcagctccagaatgagatgctggaggaaggacatgagtatgcggtc

SEQ ID NO: 647001 - DNA, 100 bp, Homo sapiens
cgggacgccaagcacttcctgccgcgggcggcgcgccgcagctgcccaggccggaccgggccgggcgcccgcaggaagctcttcgtgggcggtcttgact

SEQ ID NO: 647002 - DNA, 75 bp, Homo sapiens
gctaactattggaaagatctggcgatgacctacaaacagagacatatctgaagagatggattaagaatgctttgg

SEQ ID NO: 647003 - DNA, 103 bp, Homo sapiens
gagatgtctcgctccgtggccttagctgtgctcgcgctactctctctttctggcctggaggctatccagcgatgcagcagtctcggccctggctgctctatgc

SEQ ID NO: 647004 - DNA, 96 bp, Homo sapiens
tccttggccgactacctgacctctgcaaaattccttctctaccttggtcattctctctctacttgggattcatcagatgacagagtttcttcaaag

SEQ ID NO: 647005 - DNA, 100 bp, Homo sapiens
gcggacagtatgaggcaagcgcagggggacggggaccagcagctgtcgccgccgctctcaggtccctgtccttcgaatggtggaaggtgataccatctat

SEQ ID NO: 647006 - DNA, 50 bp, Homo sapiens
acttggagtccagacatctaaaatttggaagacccactacgttatctgag

SEQ ID NO: 647007 - DNA, 100 bp, Homo sapiens
ccggctcccagcccactgagtggcttcagcctcgctggatgaagcctgctgggagcgtgaatgacatggccctggatgccttcgacttggaccggatgaa

SEQ ID NO: 647008 - DNA, 100 bp, Homo sapiens
gccccatcaggtgcagagctgtgggtctggttccaagacactgtcactgactgcaagctttcttcctggtggcagatgacatcatggattcatcccttac

SEQ ID NO: 647009 - DNA, 100 bp, Homo sapiens
gcagcactcggaacagatgtatagtgatctgattaaaaagataactaatcacttagagagagtctcaaaggagctgcagtgccgtggaggtcccagcccc

SEQ ID NO: 647010 - DNA, 87 bp, Homo sapiens
aggcggcagacatgctgagtgggccgcgcagggctgagatcctcgccaagaccatggtgggacagcgggaacttcattgcaggccgt

SEQ ID NO: 647011 - DNA, 73 bp, Homo sapiens
attcttcttgatcgtccaaaagctagaaatgagctgtcgcctggttgggcccggaaatgggacgtcgcgcttt

SEQ ID NO: 647012 - DNA, 82 bp, Homo sapiens
cttgtgtgctccatagtttatcaaaaggttttgattcccaccatggccatcacccagtttcggttatttaaattttgtacct

SEQ ID NO: 647013 - DNA, 75 bp, Homo sapiens
tgctgtaaaaagattgaaagctcattacaacacctccttgcttgccgctgcagcagcagcagtttcagatgatca

SEQ ID NO: 647014 - DNA, 83 bp, Homo sapiens
tctgaggatggacgcaggagcgcactcccccggctccctctctggaacttgctactaccagcaccatgccctaccaatatcca

SEQ ID NO: 647015 - DNA, 102 bp, Homo sapiens
gtcggtgcgcctagcggatcggagctgcgcgcggaaccgtgctgccccgccccgctccacccgtgagggatggctgctccatgaggtcaagactgggtctcc

SEQ ID NO: 647016 - DNA, 83 bp, Homo sapiens
tgggacttcccgtccgcggcgtggaggagtcatcctttttgaacttccatgactcagactgcgaacccaagggatcatcaccc

SEQ ID NO: 647017 - DNA, 98 bp, Homo sapiens
acatttttatttgggaccttgaccgggggaccaaaattcggaattactttaacatggatttaaatgtggatgaatttgaggaaatattcaagacaaaa

SEQ ID NO: 647018 - DNA, 75 bp, Homo sapiens
ttcttcttcgagtatttgtagaaggcagcccctgtcaaagggaacaggaagcagtccacggagggtgacgcccta

SEQ ID NO: 647019 - DNA, 100 bp, Homo sapiens
agctttatctcaggagtgtcattgctcatatagaagacccagaggacactaaccaaggaagtgaaagtacttagcattgatcaaagaaatttcaaattac

SEQ ID NO: 647020 - DNA, 90 bp, Homo sapiens
ggatgatacaccttttccacagggaattgagttgggaagtcttaagagaagccgacagatctcacctcaggaattcattcatgagctgaa

SEQ ID NO: 647021 - DNA, 100 bp, Homo sapiens
agacatcctgagaggacttggcaggttggtcaaagaaaaagtgatgtatgaaaaagaggcaaaacaacaagaagaaaagattgaaaaaatgagagctgaa

SEQ ID NO: 647022 - DNA, 100 bp, Homo sapiens
ggaaaccgaagcctgaacggcctccgtccagctccagcagtgacagtgatccgtatgtgaaactttcattgtacgtagcggatgagaatagagaacttgc

SEQ ID NO: 647023 - DNA, 82 bp, Homo sapiens
ccggccgcccagacgctgcccgcgggcccggccacggcggagccaagctgcatcttcctcccgtgaggctggccgagctcca

SEQ ID NO: 647024 - DNA, 75 bp, Homo sapiens
tgcaacatgctcagcaggagcttcatcaacgatatatgtcagatctaaagtttcgagaggcccgtgccatgagac

SEQ ID NO: 647025 - DNA, 97 bp, Homo sapiens
tgaccgagaccgtgaccgagagcgtgaccgagagcgcgaatatcgtcatcgttagaaggccatcaagccctgtcgtcctatgaccaacaatgctggc

SEQ ID NO: 647026 - DNA, 96 bp, Homo sapiens
ggaggtggagaagccacgagaggagctcttccagctgtttggctacggagacgtggttttacacatccataagtagacctttttggagcctcacca

SEQ ID NO: 647027 - DNA, 100 bp, Homo sapiens
cccagtgacgggtctggagtgcgtgggggaccggctgttggcgggaaaaagaagatgtccctgtggaaatgtccaatggtgaaccaggttgccactactt

SEQ ID NO: 647028 - DNA, 100 bp, Homo sapiens
cgcgttcctcccgccggccccaaagacgctaaacgtgccctactctgccccgggggagaggtgagaagccctaccactgcaactgggacggctgcggctg

SEQ ID NO: 647029 - DNA, 151 bp, Homo sapiens
tgaagaagtttgatgtgccgtgtggaggaagagattgcagtgggggctgccagtgctaccctgagaaaggtggacgtgctgtggaaaatctctgttctcacaaagtctccccaatgctctacaagcaactgcgtcaggcctgtgaagacca

SEQ ID NO: 647030 - DNA, 100 bp, Homo sapiens
ccagagttgtgggccgccgtcggcagcaagaacagagagagaggtggacagatctgagagatactgaggaagaaatgttggctatttggcgatgagaggt

SEQ ID NO: 647031 - DNA, 98 bp, Homo sapiens
gatgcaaggcttgctggagcgcgtgaacacggagatacactttgtcaccaaatgtgcctttcagagcccccctccatgcgcctgaaggcccgacccag

SEQ ID NO: 647032 - DNA, 82 bp, Homo sapiens
cggcttactacaacctccgcctcccaggtggtgttcccactgatgaagagcaggcgactgggttggagagggagatcatgct

SEQ ID NO: 647033 - DNA, 75 bp, Homo sapiens
gagttccaccaggccgggaagcccatcggacttaattcagtgcacaaatgagatgaatgtgaacatcccacagtt

SEQ ID NO: 647034 - DNA, 50 bp, Homo sapiens
gtttcataagacaggactttccagacagttaaatctcacacagaaacaga

SEQ ID NO: 647035 - DNA, 100 bp, Homo sapiens
accaaaaaaatcattgatcctcttccccccattgatcattcagagtgggctcgggatgagtttgaaggcctcttcaagcagccagcagaaaatgtcaacc

SEQ ID NO: 647036 - DNA, 90 bp, Homo sapiens
tgattttcaagcacttgctctggagggaagagcgatgggagagctcgttctccgaaaatggtgtgaattgattcctggggctgagtttcg

SEQ ID NO: 647037 - DNA, 75 bp, Homo sapiens
cttcagagccgcaatcaagcaggactggagactgatgcatgagggggctacggaggcgcaggagcggtggtgatg

SEQ ID NO: 647038 - DNA, 74 bp, Homo sapiens
ccacacggctgacattagctcccactttcaagaagcaatagacttcattggtctctaattaacagaagatggca

SEQ ID NO: 647039 - DNA, 95 bp, Homo sapiens
ctgaatcgaaaggataatggctacttcctgattaaacccactctccacataaaataaaacagggtctgttacctagcttggaagatttgctgttc

SEQ ID NO: 647040 - DNA, 100 bp, Homo sapiens
gggaagatggcggcagcggcggcggcggctgcagaacaggagagagaatgctgcagtttggaaagtggtgcttggcatcaacaatctagaccatccatca

SEQ ID NO: 647041 - DNA, 100 bp, Homo sapiens
tttaataatgatagaatgaagaccacaataaaagagacctctacttagctcagcaattcttaccttactgccagttagagaaattgcccatgaggccccg

SEQ ID NO: 647042 - DNA, 75 bp, Homo sapiens
gcggcagcatgtcggtggcggggctgaagaagcagttctacaaggcgagccaggcagtgaaaaagcagtctggct

SEQ ID NO: 647043 - DNA, 74 bp, Homo sapiens
tcgcagggtctggagagggggagccaggggaggacgcaggggacccgaagctgccagtactgtaccaagtggag

SEQ ID NO: 647044 - DNA, 100 bp, Homo sapiens
tctggaggcagttcaagcactctgagaagtgtccacatagaccatggccagacagacaatggggattatgcatctttgatgatgtcatagaacactgtag

SEQ ID NO: 647045 - DNA, 100 bp, Homo sapiens
ttccggaaccatttgaaggaacagcatcctgacatcgaaaacccggacctcgcttacctgcatgctggtttttggattcaaagcataaaaaccattacaa

SEQ ID NO: 647046 - DNA, 100 bp, Homo sapiens
cgagaccgtgaccgagagcgtgaccgagagcgcgaatatcgtcatcgttagaaggccttcctggatgctctgcagaaccaggctgaggccagcagcaaga

SEQ ID NO: 647047 - DNA, 83 bp, Homo sapiens
tagctaattaaaacatttttcagggacgtagccatccagaggtttccacttgagcggcacagtgacagaacctgcaatacaat

SEQ ID NO: 647048 - DNA, 80 bp, Homo sapiens
ccactggcagcctatgctcacattgtccctgtgtctagcagtttcagaggtttttcgttggaatatacgttgcacattta

SEQ ID NO: 647049 - DNA, 90 bp, Homo sapiens
gtcgagactggaggctgagtgctaaactgtgtggggcgcggatgggatccagctgttagtcgggccccttcacagatgtagtcactacaa

SEQ ID NO: 647050 - DNA, 92 bp, Homo sapiens
ttgagcgtgagcacttctggaagatcattaatgccttccgctactacggtttgacaagtatgcgcccaagctggacagcccctacttccgac

SEQ ID NO: 647051 - DNA, 90 bp, Homo sapiens
gtatcactcgctcccttgatgatcttgagcccaggccattcagcccacctgtaacttccaacaccagcccacctcctgctgcaccattag

SEQ ID NO: 647052 - DNA, 74 bp, Homo sapiens
ctggataaccttttgctaacaaaaacagctggatagaacttatactggcttgcagactcttggagcagagacgg

SEQ ID NO: 647053 - DNA, 100 bp, Homo sapiens
tggtttggaagttgcaatcaaaatgcatggcctgtatgagaagaaaaagacctcaagaaagcaacgaaaggaacgcaagaacagaatgaagaaagtcagg

SEQ ID NO: 647054 - DNA, 80 bp, Homo sapiens
atccgctttgacgtgatggtgaacggcaagtaagactttgaccccgacgcaggcttcagtgattgccgcggatcagaagc

SEQ ID NO: 647055 - DNA, 101 bp, Homo sapiens
ctgctacacgcttgatgtggaaatcccagtatgttccatatgatggaatcccatttgttaatgcaggaagtgagctcacaatgactcaagctgccacatag

SEQ ID NO: 647056 - DNA, 96 bp, Homo sapiens
gctgccgccgccgcgggagccgctgcccgaactcccggcccgaactccagatgccatggacaatattaccaggcagaaccaattctacgataccca

SEQ ID NO: 647057 - DNA, 74 bp, Homo sapiens
ttacggcaggaggccgagcaacttaagaaccagattcgaatgttcgacaaggactgataggcgttggcctgata

SEQ ID NO: 647058 - DNA, 73 bp, Homo sapiens
cctcatcttttatacactcttagtgctgtccaggattttaaaatacccagtaatacaacattaaaaactcctc

SEQ ID NO: 647059 - DNA, 74 bp, Homo sapiens
gcagttggtgaagaggaagtacctaaatgcagctttcgtgaagccaggggtcctgccagagcaagaaccatggc

SEQ ID NO: 647060 - DNA, 50 bp, Homo sapiens
tgcagccgagaacgagctcaaccagctgtcaataccagcaaatatgcaga

SEQ ID NO: 647061 - DNA, 80 bp, Homo sapiens
gaccaaggtggagatcaaacagctctccaaatcccagaatgatatgacttctgagaagcatcttctcgccacgggcccca

SEQ ID NO: 647062 - DNA, 100 bp, Homo sapiens
tacttgtacacctccaaggctgtcagtttaggggctggtgcaaaggatgagttgcacattgttgaagcagaggcaatgaattacgaaggcagtccaatta

SEQ ID NO: 647063 - DNA, 82 bp, Homo sapiens
cagctattaaaaccagggctccacagttaggagatatgtgtcacaaagatgtctacacggaactgccagggaatggactcag

SEQ ID NO: 647064 - DNA, 100 bp, Homo sapiens
cggaaaactcccaacttcctggtggcattgcagacagtgtagccaagtggatatttaaacaggacttcagccctgaagtattaaaactggctaatgaaga

SEQ ID NO: 647065 - DNA, 100 bp, Homo sapiens
gccgtctcctgtgaaggccatatttgataaacaggaacttgagcacgtcagctaactgttcagatgatgcaaaatcctcagattcttgcagcccttcaag

SEQ ID NO: 647066 - DNA, 100 bp, Homo sapiens
ggagaagccgcccaaagaactgagcgggaacagcttccacgtgttcgaccagggccagtttgccaaggaggtgctgcccaagtacttcaagcacaacaac

SEQ ID NO: 647067 - DNA, 100 bp, Homo sapiens
tgggtggcatgactaggatgcccaaggtgctagagtgtggagtttgtgaagatgtcttttctttgcaaggagacaaagttccccgtcttttgctttgtgg

SEQ ID NO: 647068 - DNA, 100 bp, Homo sapiens
taacggctgcacctggagattgacgcagagtgggcggcggtggtgaatatgcttttaaggctattaaccagggtggccttacatcagtagctgtcagagg

SEQ ID NO: 647069 - DNA, 100 bp, Homo sapiens
tggacgtggatttggggatggctataatgggtatggaggaggacctggagggtgtccgcaatgttgccagtgtctgtctgcagattggctacccaactgt

SEQ ID NO: 647070 - DNA, 100 bp, Homo sapiens
acttgagagtgtccttctctcctgcaagtggctgtcgctgggcgcggactccaacgggagcggcgtctctgtgctgctggagctggcacgcctcttctcc

SEQ ID NO: 647071 - DNA, 77 bp, Homo sapiens
gacggattcatttagagctgcggaacaggacgccctctgatcaaatggttatgagccttagagtttctgaactccaa

SEQ ID NO: 647072 - DNA, 125 bp, Homo sapiens
ctcttttctaaagaggactccaaaggaaggactggtcatctctttcatatctcaaaaccatggctcaggaacggaaaacagttcttccttcaaagcatgcagtacctgaagtaatagaagacttt

SEQ ID NO: 647073 - DNA, 100 bp, Homo sapiens
cagcgccgtcccgtccgacagccaggcccgggagaaagccaaatctcctcagccacctgttgaagaagaagatgaacacttcgatgacacagtggtttgt

SEQ ID NO: 647074 - DNA, 89 bp, Homo sapiens
gccgccttgccatccctgcagcccagggtgcctctgccaactggtggaatcatcgccacttccagcaccacgccaagcctaacatcttc

SEQ ID NO: 647075 - DNA, 97 bp, Homo sapiens
ccccgggccaagaaggcggaggacaaggccaagagggccaagggcaaaggccgaggtacttacaatttcatcagaaattcctaaaagaattcgaagt

SEQ ID NO: 647076 - DNA, 83 bp, Homo sapiens
ggaattgctactgctgcctctgtcactcctggtgaccagcattcaagtgtcacaccatgtctgaccggaaggcagtgatcaag

SEQ ID NO: 647077 - DNA, 80 bp, Homo sapiens
gacaatttcaaaggatcagtttgaaaagaagaaaaatgataccttagaccccgaaccatactttcattcagaaaaccaag

SEQ ID NO: 647078 - DNA, 100 bp, Homo sapiens
ggcaccctcacagactataccaaccagctgctccaggcaatgcagcgcgtctatggagcccagaaaacttggaatataacgtggagcctcaagaaatctc

SEQ ID NO: 647079 - DNA, 75 bp, Homo sapiens
aatgggaacagaaataccatggcaacaagcttaaagaatcatggagaacgggcaggagcgggtggaagtggagga

SEQ ID NO: 647080 - DNA, 82 bp, Homo sapiens
tggaagaagaagaagagcatgatcggcatgtccaccaaggcaggccccttcccagctgcctgcctgccctagccagctccca

SEQ ID NO: 647081 - DNA, 83 bp, Homo sapiens
agccaggaggcgctgcggtattaccggaggaaggtggcccgctggaacagacaatgcagatcttcgtgaagactctgactggt

SEQ ID NO: 647082 - DNA, 51 bp, Homo sapiens
gcgggacctggaggcggagcatgtgattgttatcgtgggaatggcaaaaat

SEQ ID NO: 647083 - DNA, 85 bp, Homo sapiens
tatgccagggaccaggttaccctaacagcaggaaggttgtgaacatggcgctgctctgggggctcctggtgctcagctggtcctg

SEQ ID NO: 647084 - DNA, 97 bp, Homo sapiens
tgctgcaggtagaggcctcccaggagccctcgcacgtgttcagcctgaagcagctgctgcagagttacaggcccaaaaactgcgactggcatacaca

SEQ ID NO: 647085 - DNA, 100 bp, Homo sapiens
cacaaaaggaccatccccatgtttgtcccagaatctacgtctaaactgcagaagtttacaaggtgcagaggccaagaccgttttgcccaagaaggagaaa

SEQ ID NO: 647086 - DNA, 100 bp, Homo sapiens
catctacctggacatcgatggacgcattcagaaggaaatgcttccagactgcacacttttacttagaggacagtacatcccctagagttatatccacacc

SEQ ID NO: 647087 - DNA, 76 bp, Homo sapiens
tcctagcgcctggcctgcgcgccgctgcccgcgccacagcagatataatttctacagtagaatttaatcattctgg

SEQ ID NO: 647088 - DNA, 73 bp, Homo sapiens
tgcgctgtcagcgatagcccagtggatggccattccaggcctcaaaaaagaaggtgtatatgctctataacct

SEQ ID NO: 647089 - DNA, 83 bp, Homo sapiens
gagcgtgctgagcaaccgcagcctccgcggccgagagtgcagcgagatttttagactctgaggagcagttggagctaatccac

SEQ ID NO: 647090 - DNA, 100 bp, Homo sapiens
ctcaaactctatttgccaaaggaaacttgccttatcaccttcttgcttgcagatgagattgtggggaacctgggtgaaggcacctttggcaaggtggtgg

SEQ ID NO: 647091 - DNA, 98 bp, Homo sapiens
aatcaaggacttcctgctcacagcccgacgaaaggatgccaaatggttcgaaaccgccaagtcttttgccctccatggtgcacatgtgatcttggcct

SEQ ID NO: 647092 - DNA, 50 bp, Homo sapiens
tggaaagaagttgcaaaacactgggcctgagacctgggaggaagctggag

SEQ ID NO: 647093 - DNA, 83 bp, Homo sapiens
tgagatggaaggatgactatgagtatgagctattatagaaaccatggcctggtctccaagtcctctcctaagaagcctcgtgg

SEQ ID NO: 647094 - DNA, 110 bp, Homo sapiens
gtcagctgctggtacaagtacctccttttcagctacaacatcatcttctggaggatattcctcaaagcagaaagtgaagaagaaatttttgcgcatctgggattggatta

SEQ ID NO: 647095 - DNA, 102 bp, Homo sapiens
cgtctgccgtggacagcgaagctgctgcggttcctgagccggagataacgaaggaggcccaacttcattcaataaggagcctgacggatttatcccagacgg

SEQ ID NO: 647096 - DNA, 75 bp, Homo sapiens
ctggtggaatgcgtccccaacttttcggaggggaagaaccaggagggacccccaggccctccgggaagagagggg

SEQ ID NO: 647097 - DNA, 99 bp, Homo sapiens
atcatcttcaacttgtagacacagccgggcaaggaggtatggaaacattggaacttcaaaaggacatcaaagaagaatcagatgaagaagaagaagatg

SEQ ID NO: 647098 - DNA, 100 bp, Homo sapiens
agattgtcatgattgtttatcctaatcccaatgctgaagtaagattgtcttggaaatactaagttgggcctcatcatttctgtctcctgtttctccactt

SEQ ID NO: 647099 - DNA, 75 bp, Homo sapiens
gtagcttggttggtggtaccctaaaattagggcatgattaagagatctcagggaacacagaggatatccctttgg

SEQ ID NO: 647100 - DNA, 75 bp, Homo sapiens
tacatttggcagaataaatgaaccagccagaataaaagctacttggccgtaaggctaaaagaccaagatctgaga

SEQ ID NO: 647101 - DNA, 100 bp, Homo sapiens
acctcggcaaattccgacgtcttgaagacttccgagtagatagagcgaagtgtactcttggggcaaaggggcgcgaggtcgattgggaaggagggatgag

SEQ ID NO: 647102 - DNA, 97 bp, Homo sapiens
ttttatgagtgggaaccatttgcagaagcccgagggcaacatccttcgagaccggttcaagagcttccagaggaggaatatgatcgagcctcgagag

SEQ ID NO: 647103 - DNA, 88 bp, Homo sapiens
atagagctgacagccccagatagcaatgatgatgtgaaaacagaagctgtggctggaggttcccctgaaggatgctaaggaatacgct

SEQ ID NO: 647104 - DNA, 100 bp, Homo sapiens
ccacaccatccttctcgctgcaggctccgggaagcagtttgttcgctatataaacatgttgataaacgacacgacgtttttgctcgatgaaagtctggag

SEQ ID NO: 647105 - DNA, 83 bp, Homo sapiens
cggcggccgaacgcccgcggcgcgggactccatcgtcagcagtctctggtcccagcccaccccatggcccctcccagtcccag

SEQ ID NO: 647106 - DNA, 100 bp, Homo sapiens
tcataattcatccattgctcttagcgactgttttggactcaggaccagcattagcagtacagggcccagccatgtttacagagccagcaaatgataccag

SEQ ID NO: 647107 - DNA, 100 bp, Homo sapiens
cgtgccccaccatgtcagacgcagccgtagacaccagctccgaaatcaccaccaagcagcagccgctcttctaaaacattcaaaccaaagaagaatatcc

SEQ ID NO: 647108 - DNA, 74 bp, Homo sapiens
ggctgccagcaaatcactctctttactgaggttaagcaaccttttccacgggatggataagaatactcctgtaa

SEQ ID NO: 647109 - DNA, 89 bp, Homo sapiens
gcgggcgttttcttggatgaattgcttgctttggaggtggatccataaagaacccagccaacccgcagagggaggggaggggctgagct

SEQ ID NO: 647110 - DNA, 101 bp, Homo sapiens
taacctccccagcccttttgcgtacctcctcaccatacacctgaaggaaggccggaacctggttgtccgagatcgctgtgccctactgccaataaagggaa

SEQ ID NO: 647111 - DNA, 100 bp, Homo sapiens
gatcctggagcagaagacaagttcattcaaatcagtaaggcttacgagtttcagaaagtgctttctctctgtggacatgaggattggattagaggagtgg

SEQ ID NO: 647112 - DNA, 103 bp, Homo sapiens
gaggctgtgggacctgcagcagctgagaaaggagctcggggactcccccaaagacaagcccacttataagaagcgaaggttggatgagtgtgaagaagccttc

SEQ ID NO: 647113 - DNA, 75 bp, Homo sapiens
ctcttgccatgtgtgaagcactttatacacctgtaaggcaccatgagccaggacaccgaggtggatatgaaggag

SEQ ID NO: 647114 - DNA, 102 bp, Homo sapiens
gggcagagtactactgcgccaaatttggtgcctggagtaggagaagattctagtgttccagaaactccagataatgaaagaaaagcaagtatatcatatttc

SEQ ID NO: 647115 - DNA, 100 bp, Homo sapiens
gcatcccgcgtccagcacctacgtcccgctgccgtcgccgccgccaccatgcccaagagaaagtattctaccttgtaaatactgttatttgtatatactg

SEQ ID NO: 647116 - DNA, 98 bp, Homo sapiens
atgacagatgtgtggtgcacccagaggccggggaccttgccaaccctcccaagaagttcagaggtgagcctgaatttaaatacattgggaatatgcat

SEQ ID NO: 647117 - DNA, 74 bp, Homo sapiens
caccagacagatcgctgtcaaaaccctaggggcagaggcctggcctccaggggtttgtcttaaatatgtcgggg

SEQ ID NO: 647118 - DNA, 100 bp, Homo sapiens
caatccagccaaatacaactggaaaacagctttttgatcaggtactgggcctaatcgctacgtgcctctttggctatgatgcctatgtcaccttccccgt

SEQ ID NO: 647119 - DNA, 80 bp, Homo sapiens
tgctgctcttctccaggctctgtggtgctggagaatctggtaaaagcaccattgtgaagcagatgaggatcctgcatgtt

SEQ ID NO: 647120 - DNA, 96 bp, Homo sapiens
taagtccagtttcttttcaatataggggtggtggttggagccccccaaaagataacagctgccaaccaaacgggtggcctctaccagtgtggctac

SEQ ID NO: 647121 - DNA, 100 bp, Homo sapiens
ggacagcggagagtatgcgtgctctgcgaccaacaacattgacagcgtccatgccaccgctttcatcatcgtccaggaaatgctttgtggtctacagcca

SEQ ID NO: 647122 - DNA, 100 bp, Homo sapiens
gccgtgggcatgttctttgtcatgtgctcggcctttgctgcaggcaatggatttagaagtaccggtattggccaggaacatccccgggaatgctgccgtg

SEQ ID NO: 647123 - DNA, 101 bp, Homo sapiens
ttccattggccagtatgaagtggtgaaggagtgtgtgcagcggtgagacacagtaacctggttgaactctgcatctggaaagctgaagactgaagaaagat

SEQ ID NO: 647124 - DNA, 80 bp, Homo sapiens
aaaaaacttcagcatgtgccaggaacacaacctcaccttgatcagagaccgagaggttgatgtcactcccaatatcggag

SEQ ID NO: 647125 - DNA, 51 bp, Homo sapiens
aagatggcttcggagggaatgaggttgctgttgaagaaatctggttgcaga

SEQ ID NO: 647126 - DNA, 73 bp, Homo sapiens
ctgtccacctgcgatcccacacgggccctgagcctgtgcaattatttcgagagtcaaaatgtggatttccgag

SEQ ID NO: 647127 - DNA, 75 bp, Homo sapiens
ggcatggataccaccttctggagattaaaggatccagacacattagtcaagctgcagccaaagtcgacgttgaat

SEQ ID NO: 647128 - DNA, 100 bp, Homo sapiens
gcagcggttttcatggagactgtcttacgctgacaaagattattgaagcaagactaaagccctactgccaataaagggaaaataagagatgctcatcgac

SEQ ID NO: 647129 - DNA, 82 bp, Homo sapiens
tttatactccaaccccaagacaccaaggtgtgggaaccgctgagcagaacaccctcccccagcgggaaatccgggacacgca

SEQ ID NO: 647130 - DNA, 92 bp, Homo sapiens
atgtaagatcgtcgagatgtctacttcgaagactggcaagcacggccacgccaagaggaagaatacaagcgattgagtgaagcactagcaga

SEQ ID NO: 647131 - DNA, 99 bp, Homo sapiens
cagaccaatttttattccacgaggaggagtacctggaaattaggtaatacatacaatattccaatatgcctatggctactggacacatacccatataat

SEQ ID NO: 647132 - DNA, 97 bp, Homo sapiens
ccgttgctttactttttgcttcaccgacatagtcattatgccgaagagaaagcggaagaagtccctatagaaccatacaacatcccactgtcccagg

SEQ ID NO: 647133 - DNA, 90 bp, Homo sapiens
tggcatgggaaatgccaaggcagattctagaggaagaagtcgaacaaaaatggtgtctcaatcacagcttggaatgttaaagaaattcat

SEQ ID NO: 647134 - DNA, 82 bp, Homo sapiens
acagcatcccacattaagtcaacgattgaaagtggagctgtttggaaacaagtctaccaagatcttggaatccctgtcttaa

SEQ ID NO: 647135 - DNA, 73 bp, Homo sapiens
gacggcgtcgggagagcgcgcctagccggctcgcgagtacaaagaggatggtgaagctttgctaattttgcta

SEQ ID NO: 647136 - DNA, 76 bp, Homo sapiens
aatgccttcacccgggatacgctgcaagagattttccagagtcaaaccggcacgatgtccaggcaccagaaccaga

SEQ ID NO: 647137 - DNA, 98 bp, Homo sapiens
gacttccggcgagcgggcaagcgggaaccaggtggccacccggtgtcggtggacaagagcaaggaccaagtgtggaaggtcttaatgtaccaacaaag

SEQ ID NO: 647138 - DNA, 87 bp, Homo sapiens
gacaccaaagtttctattaaaggtctccgtctctccaccgggggcttcatccttccagggaggagaagagggactccagaatggctg

SEQ ID NO: 647139 - DNA, 90 bp, Homo sapiens
ggggtcatataatacccttgtgtcttcagtttgaggtacctcccataattttaagggagatagattccattcatcctttctaatgtctac

SEQ ID NO: 647140 - DNA, 100 bp, Homo sapiens
tgtgaacagacaaggttcaaaaactaagcatccagaggccctgagcagctttcagcactggagtgccggtggtggtgtgcacattgagccccggtataga

SEQ ID NO: 647141 - DNA, 75 bp, Homo sapiens
cagccaagctcgtagcctgccactccgtgctgcctccggagccagcgtggtggccatagacaacaagatcgaaca

SEQ ID NO: 647142 - DNA, 75 bp, Homo sapiens
ggcacatggattcagtatggagaagagaaattgttgccaaggtcagagaagtctcccagcccgactggacgcctc

SEQ ID NO: 647143 - DNA, 100 bp, Homo sapiens
ctcagctcggccggggccgcagtctggccacccgcttccatgcggttcgggtccaagatgatgccggtgctggagaatctggtaaaagcaccattgtgaa

SEQ ID NO: 647144 - DNA, 109 bp, Homo sapiens
agttggaacacagcagagggtgtgtaataaaatacagtatcttaaatagcgaagatggagaaatactcaataatgaagagcatgaatatgcatccaaaaaaagaaaaag

SEQ ID NO: 647145 - DNA, 99 bp, Homo sapiens
ctttcaagaagttggtgaagggccatgcctactctgtgaccggggccaagcaggtgctagactggatcgagaaccacggagaagcatttctgagcaaac

SEQ ID NO: 647146 - DNA, 97 bp, Homo sapiens
tcagcgaggaagctacacttttcaccaaggaactggtgctgcagcgagagggtgttcctgaaaagccccatagtgattgagtcttcaaaaccaccga

SEQ ID NO: 647147 - DNA, 100 bp, Homo sapiens
ggagccaagacggtcggggctgcttgctaactccaggaacagtggaatgcagtagccctctgggcctgggatattgtggttgataactgtgccatctgca

SEQ ID NO: 647148 - DNA, 100 bp, Homo sapiens
acggggcctcctccaccgaggaggtgaatacacctctgattttaatcagttctgcgtttgaaaggaaacccgtttcaccagtgatcattaaagaatgggc

SEQ ID NO: 647149 - DNA, 100 bp, Homo sapiens
agatctggaagatcaagaagctcattaagagcttggaggcggcccgcggacctgcctagagctggaacgttacctccagagcgagccctgctatgtttca

SEQ ID NO: 647150 - DNA, 80 bp, Homo sapiens
gaaacatctcaccaatttcaaatctgatcttcttcagcagtatcgttctgctgtgtgcaaactagacagtgtgaataagg

SEQ ID NO: 647151 - DNA, 75 bp, Homo sapiens
cttattcccttcaattcaagtaacaggcaaatgaagaggattcttccagttctctagtgaaggatcacctttttc

SEQ ID NO: 647152 - DNA, 90 bp, Homo sapiens
gagtggaaactcatggggaggcatcagtcttggcccccctgaccctggtccctgtggagaactgataaatttcaaacggaagagagtggc

SEQ ID NO: 647153 - DNA, 100 bp, Homo sapiens
caggccagttctctgaatgtcgagacatagaagatccttatgactgcaagaagtgcaggatgagtttccccactcttcaggatcaccggaagcacatcca

SEQ ID NO: 647154 - DNA, 109 bp, Homo sapiens
gagtggagggcaaacctgtgaacccacccgagagcaacaaagcaggcgactacagccacgtgaaggtcaccgaggaggagcccagctccaaccacacggtcatgatcca

SEQ ID NO: 647155 - DNA, 80 bp, Homo sapiens
actgcggctcctgctgggcccacgccagcaccagcgctatggcgggtgctggagaatctggtaaaagcaccattgtgaag

SEQ ID NO: 647156 - DNA, 82 bp, Homo sapiens
cgcggatcccagcttcctgcagccagcgacagggtctcactgtattgcccaggttggtctcgaactcctggcttcaagcgat

SEQ ID NO: 647157 - DNA, 100 bp, Homo sapiens
agtccttcaaaaatgccagaaatcaacgccaaggaagctgtgctgaatggtttggtggccactgaggtgttgatgtggttttatgtcggagagattatag

SEQ ID NO: 647158 - DNA, 80 bp, Homo sapiens
agtttgaagagttccctgccgaaggtcaaaatgcagatcttcgtgaaaacccttaccggcaagaccatcacccttgaggt

SEQ ID NO: 647159 - DNA, 51 bp, Homo sapiens
ccttcaacgtccctccctgcaagtgcgccaatctgcagaacgccattgcgg

SEQ ID NO: 647160 - DNA, 82 bp, Homo sapiens
cgtggacagcgaagctgctgcggttcctgagccggagaagtccattggaatattaagcccaggagttgctttggggatggct

SEQ ID NO: 647161 - DNA, 100 bp, Homo sapiens
acagtgatgcggctcatcgagaagcgggctttccaggacaagtactttatgataggagggccgcaagaacgagatgctgctgtccaaggtgaaagcgaag

SEQ ID NO: 647162 - DNA, 90 bp, Homo sapiens
cggccgtgttgcaatctacaaagcctcagggataatccacaggtggacccaagtggagagattgtggaactggcgaaaggtgcatgtccc

SEQ ID NO: 647163 - DNA, 50 bp, Homo sapiens
cctcaggcgtgcgcggacggtgtgcgggcatcctcaagtgcccagagcac

SEQ ID NO: 647164 - DNA, 100 bp, Homo sapiens
ggaccccaactcagccttcctgcataccctggaccagcagaaacctagagtggtacccattcctggcccagtgggtaacaagagaatggttcatttttcc

SEQ ID NO: 647165 - DNA, 75 bp, Homo sapiens
gtgggacaagatggtttacatctcgaacggtatcatgaactgatcactaaatatgggaagttggagcctttggca

SEQ ID NO: 647166 - DNA, 100 bp, Homo sapiens
cgccgactgtcaatggagctggaaaacatcgtggccaacacggtcttgctgaaagccagggaaggtccccatcctcatcccgtgccacagagtggtctgc

SEQ ID NO: 647167 - DNA, 75 bp, Homo sapiens
gcgaccggcggcgtccgaggagagtgaagatgaagctggatgtagctcagttgatgaagaaagttacaagactct

SEQ ID NO: 647168 - DNA, 82 bp, Homo sapiens
gagggaaccggcagactaatgtgttaagcaagatgtggcaccatttattgagtttctgaaggccatacaagatggaacaata

SEQ ID NO: 647169 - DNA, 89 bp, Homo sapiens
tgccgcctgaagtgcgggcgcagctggcggagctggagctggagctctcggagggataatgaagagttgacaattagttgcccagtgcc

SEQ ID NO: 647170 - DNA, 100 bp, Homo sapiens
ctgggatcggcccaaggccagttctccgcagaatgcgataagttgcggcatgatggctaccgcagttctcagtactactctcagggacccacctttgcgg

SEQ ID NO: 647171 - DNA, 96 bp, Homo sapiens
gcgctgtcttcccgcttgcgtcagggacctgcccgactcagtggccaatccggagccggcaacaactgggcaaaggggcactacacggagggcgca

SEQ ID NO: 647172 - DNA, 122 bp, Homo sapiens
tcttatagaaaatatggatctttacatgttgaatccttgcagcactaaaatttgtcgttgcttagcaaatctaaggcctcttttagattctggaacaatgggcactaagggacacactgaag

SEQ ID NO: 647173 - DNA, 74 bp, Homo sapiens
ttccatcctggttcttccaaagtgcccggacccaaaacaggaacaacccaaggagatctgtgcgctggttgggt

SEQ ID NO: 647174 - DNA, 96 bp, Homo sapiens
cccggagctctgtgcacctccactgaaacgcaaggagcagacagaacctacaccatccgtgaggtagtgctcatagctctctttgtccagtgcttc

SEQ ID NO: 647175 - DNA, 83 bp, Homo sapiens
attacatgagaccttgtgtattaaaaacaaaggatggagtatggcccaagaccagctgatactccccctgctccatcacctcc

SEQ ID NO: 647176 - DNA, 96 bp, Homo sapiens
tgtcgaactcttggtcttaagcagccctcccacgtcagcatcccaaagtgttgggatttcagagggtcttgctccgtcgcccagtctggagtgcag

SEQ ID NO: 647177 - DNA, 50 bp, Homo sapiens
atccagcctgcggagcctgtggggcagtcctcatcaccgggggcatcgtg

SEQ ID NO: 647178 - DNA, 100 bp, Homo sapiens
ctctgcagccacatactatccgtttgttcaggaaccaccagtgacagaacccaagtcttggattgaggaacaggcaatgggatcattcctcagtgtggcc

SEQ ID NO: 647179 - DNA, 99 bp, Homo sapiens
atcgttacagacatggacaccattgagaagtcaaatctgaatcgacagtttcttttccggccctgggatgtcacgagatggacagagacgtatgtgcgt

SEQ ID NO: 647180 - DNA, 100 bp, Homo sapiens
gtggaaataaaacagctgttttgcagattggactacaaggtaaactttggagtcggagtttaaaactagcttatactctacttaataaactgacaagtaa

SEQ ID NO: 647181 - DNA, 100 bp, Homo sapiens
atgggatctttccggatcaatccagatggcagccagtcagtggtggaggagaactgtgtttatgaaactgtagttttgcctttggatgaaagggcatttg

SEQ ID NO: 647182 - DNA, 100 bp, Homo sapiens
gccacctgcctttgacctttttgaagcctttgcaaaagcaaagccaaagctaattgagccactcgactatgaaaatgtcatcgtccagaagaagactcag

SEQ ID NO: 647183 - DNA, 75 bp, Homo sapiens
ggaagatcctggaggtggatctgaagaacgggcacgtgtggttctcaaatataggcattctgatgggaacttgtg

SEQ ID NO: 647184 - DNA, 100 bp, Homo sapiens
cgcatcgcgcactttttggatcggcatctagtctttccgcttcttgaatttctctctgtaaaggaggtatggcatttcaaatatagatacaaccattgaa

SEQ ID NO: 647185 - DNA, 75 bp, Homo sapiens
aaaaaaaagtctcaagtgcgcccgaggcgcagggggcaggtacccactgatggtaatgctggcctgctggctgaa

SEQ ID NO: 647186 - DNA, 100 bp, Homo sapiens
gtataaccaagtaccaagtgaagactttgaacgcactcctcagagtccgactctcccacctgctaagataagaaggctgactgcacaatcacaatggctg

SEQ ID NO: 647187 - DNA, 100 bp, Homo sapiens
gtacaaccttcaaaacaactggaatatttagcaaggattcaaggctttcaggctatttttatgattcccacaaatccaccaccaacattcagaaagccag

SEQ ID NO: 647188 - DNA, 82 bp, Homo sapiens
aaggtattcattaaagaaaataatgggaaggaagaagtatccaaggtacttaagagattatggcatcagaaacccacaatgt

SEQ ID NO: 647189 - DNA, 90 bp, Homo sapiens
gcagaagggaggctccaagacctcatcaacaattaaggttcagtgtatctttgcctgcctacatcaatctgcaagggagttgcagaaagc

SEQ ID NO: 647190 - DNA, 101 bp, Homo sapiens
tgaaggtggcaaagtgctgcttccaaagctcattgacttttctgctcaggctcggggaccagttctacaaggaagccattgagcactgccggagttacaac

SEQ ID NO: 647191 - DNA, 101 bp, Homo sapiens
ccagtatctgtgtcgccgccgcccgcggcgtccccggtttggtgttgcggcgcccaccttcgggaggatcagccctggcaggtgcccggcccgccccccac

SEQ ID NO: 647192 - DNA, 75 bp, Homo sapiens
gtagggctcaaatccccgacgtttccagggccaccccccatacggttcattttccagacactgaaagagcagaat

SEQ ID NO: 647193 - DNA, 82 bp, Homo sapiens
atgatccacaagcccaggagaaattccaggatctgggtgctgcttatgaggtggtgatctttgtgaagtctgtgcagcggtg

SEQ ID NO: 647194 - DNA, 100 bp, Homo sapiens
catgctgggaacatcattgcaacacagcgccatttccgctggcacccaggtgcccatccctccagaatacccatcatatagcccctgaggtggcatggtg

SEQ ID NO: 647195 - DNA, 100 bp, Homo sapiens
ccttttcgaccttcaatccagttccaaggactccacgggaaatgcatcttctgcagacaccgggttaagagggtctctggagcctgcatccagtgttcct

SEQ ID NO: 647196 - DNA, 100 bp, Homo sapiens
aaataatggcaaataacttttccttggagagtcataacatatcactgactggtacaccagaggatcgcttcctggcagaatttgggagctgtttattgca

SEQ ID NO: 647197 - DNA, 83 bp, Homo sapiens
ggcaaggatgtgatgccagaggtcaacaaggttctggacaagatgaagtctttctgccaggtgaaatgacaatggatgctctg

SEQ ID NO: 647198 - DNA, 82 bp, Homo sapiens
agatgaaagacaagatgtccatcttctcatgaccaactgtatcaagaagaaggcactgatcctgaaactgaagaccccaacc

SEQ ID NO: 647199 - DNA, 82 bp, Homo sapiens
tggaagcagccgatccagcctgcggagcctgtggggcagagtactgcagtggactgtaaaataacatcgtctacgactggag

SEQ ID NO: 647200 - DNA, 75 bp, Homo sapiens
ctgtgatatttgatgttgcaagtatcatcctgggctccaaggagagggtagtaaaggcttttgtcgttctaaatc

SEQ ID NO: 647201 - DNA, 100 bp, Homo sapiens
ggagcttctcagaagacagagggttttcttttgaggacatttgtgtactcactgctcaatcgagggaggccttatccagctatactcattctcagaggca

SEQ ID NO: 647202 - DNA, 82 bp, Homo sapiens
gctgccggagctgtcgacccggcctggcgccggactagattggcggcagtaagcacacaatgaatgatcacctgcatgtcgg

SEQ ID NO: 647203 - DNA, 83 bp, Homo sapiens
ccacgatccagatgcagagccgaaacaagaagtgggctcaggtttggtgcacctcgatttggaggaagtagggcagggccctt

SEQ ID NO: 647204 - DNA, 76 bp, Homo sapiens
tacatctttggtgatggacgaggccttattgaaggaaatgacatttatggaagatggatctgaagttggtgttgga

SEQ ID NO: 647205 - DNA, 100 bp, Homo sapiens
gaacggcagccccaagaacggaaagctggctggaggcgtgatcctgggtgtggccctgtggctccgccatgacccgcagaccaccaacctcctgtatctg

SEQ ID NO: 647206 - DNA, 96 bp, Homo sapiens
cctggaagaaagcccctctcacacagagacgagttgtactgctgtcacaggaaatggacgctggattacaagcatggcagctcaggcagcagaagt

SEQ ID NO: 647207 - DNA, 90 bp, Homo sapiens
ggctgctccattgccaatgaactccatgaaccccatgaaacctgccctgccccctgcgccacacgggctccttctcctgaaaaagccgag

SEQ ID NO: 647208 - DNA, 82 bp, Homo sapiens
caactccatccggcccgaggagctgctgggggggccctcagcctcttggccttgaacgggctgttcatcttgattcacaaac

SEQ ID NO: 647209 - DNA, 100 bp, Homo sapiens
ctcaacttggtttaggagagataatcctgggagaagaagagtttgatatgcctcagcctccacatggccatgtcttacatcgtcacatgagaacaatccg

SEQ ID NO: 647210 - DNA, 83 bp, Homo sapiens
aaactctttgagtttcggagaggagtaaagaggggccagtgtcattcaaagatgtggctgtggatttcacccaggaggagtgg

SEQ ID NO: 647211 - DNA, 100 bp, Homo sapiens
cacagcgaaacgccgcgcactcggagccggcacggctcggcggtgcatgtccgttccgaggaatgggatttaatgacctttgatgccaacccatatgaca

SEQ ID NO: 647212 - DNA, 100 bp, Homo sapiens
aaggatgacatatttttggacctgaaacagaaattctggaacacctatatgaacgacaccgtaactatccgcactagaaagttcatgaccaaccgactac

SEQ ID NO: 647213 - DNA, 75 bp, Homo sapiens
ttatctcagatatggcccagactaaggagtccatagttaataataactgaagtgaagtgatggactccgatttgg

SEQ ID NO: 647214 - DNA, 108 bp, Homo sapiens
ccttgtgttgtgtctcctggaggctgccgacatgaagtgctttttcccggtgctgagctgtctggctgtgctggatcgtcagtatttaaacagatcacatcatgcgtg

SEQ ID NO: 647215 - DNA, 50 bp, Homo sapiens
ctcctgagtagctgggattgcaggacacagcagggcaagagcggtaccgg

SEQ ID NO: 647216 - DNA, 100 bp, Homo sapiens
tccgggaccgagcggtgaagaagctgcgccagtacatcagcgtgaagacgcagagggagacagttgcaggcagaggcaccaaggctggcagaatatcaag

SEQ ID NO: 647217 - DNA, 100 bp, Homo sapiens
ccctcgagcttcgaagtgacatgtacattctcaatgagagcctcacagacccagccatcgttaagtttctccacagacactacccaaagcagtccttcac

SEQ ID NO: 647218 - DNA, 101 bp, Homo sapiens
ctggaggaacaggatttgcaccacgagatgtcactccagaggttatcttgacgaatcagattacaacccatctgagtggagccctggcttctcaggcagac

SEQ ID NO: 647219 - DNA, 90 bp, Homo sapiens
ttgtagcagacactgcaaatgaagctctcgaggctgctaagagactaattgtcatggatgcactggtagaagatgatatctgtattctga

SEQ ID NO: 647220 - DNA, 101 bp, Homo sapiens
gggcaccagcaggatgtactattctcggcgcggcgtgatcaccgaccagaactcggacggctactgcaattctgtggtgttcttggtcacacatttatgga

SEQ ID NO: 647221 - DNA, 99 bp, Homo sapiens
cctcatcccctggatgggggaccacaagatcctcatcgacagatcaggaaattttacgtaaattagagaaggagaaaatcctggtgttcacgccatccc

SEQ ID NO: 647222 - DNA, 85 bp, Homo sapiens
cggccaacttcggcaagatccagatcgggatttacgtggagatcaagcgcagcgatggcccctccagccagcgtcaggtgcagaa

SEQ ID NO: 647223 - DNA, 107 bp, Homo sapiens
cgggcaccagcccccgtgccaacgggctgtccgtggagcggagtaacacacagctgggtgggggcacagtgccctgtgggacattgagacaggccagcagacagtgg

SEQ ID NO: 647224 - DNA, 100 bp, Homo sapiens
ttcagattacattgggagatatttacacacaacttaaaaatcttgttcgaactttcagttaaagctgatacattcctgtgggtcaactatgcaactaact

SEQ ID NO: 647225 - DNA, 100 bp, Homo sapiens
aagcgaagccgttagtcccttaatacaaagggtgggaagagtgcagtactcacagctctcatagtcggtcttggtggaagagcagttgctactaatagag

SEQ ID NO: 647226 - DNA, 74 bp, Homo sapiens
agagagctccacaaggtgaaggaggagatcatcgacggcagtcgatgatgtgaagaaaggttacatcaaagcag

SEQ ID NO: 647227 - DNA, 75 bp, Homo sapiens
gcaggaacaccgtcacgctgctggaggagggccgttgctccagggagaactgcaaatatcttcatccacccccac

SEQ ID NO: 647228 - DNA, 74 bp, Homo sapiens
cattttagtccattgtcttgaaagagatgacaactgcaaaccacccaaggtgaagtcatcttagcctcttggag

SEQ ID NO: 647229 - DNA, 75 bp, Homo sapiens
ccttcctccagcagctctgtccagacccctttgctgatgcaagtaagggtgatgacctgcttcctgctggcactg

SEQ ID NO: 647230 - DNA, 100 bp, Homo sapiens
agaatgtccatggatttgtttctcattctcatatttcaccaataaaggggctaagccagctctaccataaccagagtcagggactcttatcccagctgca

SEQ ID NO: 647231 - DNA, 75 bp, Homo sapiens
caaccagcctggaggcaagaggctcctgcagacccctggcttcctgaaaattgcctaagaattatgacccaaaag

SEQ ID NO: 647232 - DNA, 75 bp, Homo sapiens
ctgagtggttgtgtggtcgcgtctcggaaaccggtagcgcttgcagcatggctggggaataactacatcactgcc

SEQ ID NO: 647233 - DNA, 80 bp, Homo sapiens
cgtagatcttgaggactggatggatgttagcctggtgcctgccttcaatgtcctggaataatcatgggccagactgggaa

SEQ ID NO: 647234 - DNA, 101 bp, Homo sapiens
aagaagttcttcgatgtatctaaacttggcaccaagtatggttcagacagtaactttaattccaggagatggtattggcccagaaatttcagctgcagtta

SEQ ID NO: 647235 - DNA, 90 bp, Homo sapiens
aggagactacctacactgaacagagccatgaagaacttggagaggctattttggcattctgctggatatatgttcgtaaataccaaagtc

SEQ ID NO: 647236 - DNA, 74 bp, Homo sapiens
ccccctgtactttgtggacttgcaggatgacttagacgactggctgcagactcctgttccagaggtcattgttg

SEQ ID NO: 647237 - DNA, 75 bp, Homo sapiens
ctcgaagtggagcaaaaggtgacagtcacagcttagtagctttccccagacatggccaacaagggtccttcctat

SEQ ID NO: 647238 - DNA, 74 bp, Homo sapiens
tgtccacgatgtcttggatctttacttgtggctaaggaactctaatgaatcattgattgaccagcactatttta

SEQ ID NO: 647239 - DNA, 100 bp, Homo sapiens
gctgcttatggcggcgctggagagggggcgctgagctgttgggccccatctgctttgatatgattgaagaagcatacatgacaaaatgtggccacagctt

SEQ ID NO: 647240 - DNA, 100 bp, Homo sapiens
gaaagtggacaaagagaggagtcaggtggaaatgagttctcaacagtttcctcggttaggagccccttctaccgggctgagccaggccccttctcagatt

SEQ ID NO: 647241 - DNA, 75 bp, Homo sapiens
gcactttactacaaagatggacttctctgtacagcactgccctgggaagaactaggatgaggtattgacttgctg

SEQ ID NO: 647242 - DNA, 100 bp, Homo sapiens
tgggtggcgaacggggcgagcctggaggattgtcactccaacctcttttcgctgaactgggaccctggaacttggggataaattgctcgcaatagataat

SEQ ID NO: 647243 - DNA, 82 bp, Homo sapiens
agccgcgcgctgagggtctcggggcgggcgccgcgggacctctccgggccatggcaaattgtggctactaatttgccccctg

SEQ ID NO: 647244 - DNA, 100 bp, Homo sapiens
gtcttcatgcacaaacgagctcagaggctcaagttcctgtgtgagcggaatgacaagggtgatgctggtcccaaaggtgctgatggctctcctggcaaag

SEQ ID NO: 647245 - DNA, 100 bp, Homo sapiens
tgcccaccaccatcgagcgggagttcgaagagttggatactcagcgtcgctggcagccgctgtacttgctctcgtggcattatccttcagtggggctatt

SEQ ID NO: 647246 - DNA, 88 bp, Homo sapiens
gggaccaggacagtcgcgaggttcgagtgttgcagagcctgcggggcaagatctgacttccaatagtagtcagacattatcatcctgt

SEQ ID NO: 647247 - DNA, 100 bp, Homo sapiens
gtagacggcaaggatgtgatgccagaggtcaacaaggttctggacaagatgaagtctttctgccaggtccgaggagctgcaggtgtgactgatgggaatg

SEQ ID NO: 647248 - DNA, 98 bp, Homo sapiens
atcaacagtgcattagacataaaagttttgactcagccttcccagtcagctgtgagagcactgggtattgtacccctccaatatgtgtttgttatgac

SEQ ID NO: 647249 - DNA, 98 bp, Homo sapiens
tgaagtgcttgatatcacagaggaaactctgcattctcgcttcctggagagattctgtcagggggtgtttatattgagaagaacgataagctttgtca

SEQ ID NO: 647250 - DNA, 86 bp, Homo sapiens
cgccgcctggtgcatgggaggggagccgggccaggaacaatgcagatcttcgtgaagactctgactggtaagaccatcaccctcga

SEQ ID NO: 647251 - DNA, 83 bp, Homo sapiens
gtgctcggaaagcatctattgtgaaaaacctaaaggataccttagcaccttccaaaggacctactgttcggacaaaaaaagta

SEQ ID NO: 647252 - DNA, 82 bp, Homo sapiens
tcctacacctacctctctctggggacaggcaaatggtatgaattacaagacctccaggtgactgacatccttccccagatga

SEQ ID NO: 647253 - DNA, 98 bp, Homo sapiens
cgccgggcgcccgaagccgggagccgccgccatgggggcctgcctgggagcctgctccctgctcagctgcccacccctttgctgtgaagttgcttgcg

SEQ ID NO: 647254 - DNA, 51 bp, Homo sapiens
gaatttatcctcaagagtcagctggcaggtgatgaaatttattgagaaggc

SEQ ID NO: 647255 - DNA, 100 bp, Homo sapiens
cagcgcgccacagcccgcgaagccaacgagtgcgtgggtgagaaaccctacaagtgtccgcactgtgactatgccggcacgcagtcagcatccttaaaat

SEQ ID NO: 647256 - DNA, 90 bp, Homo sapiens
gccctatggggcatacctatggctttattgacctcgactcccatgcggatatgctgcaggctgctagtcattatcgccaaaatagaaact

SEQ ID NO: 647257 - DNA, 76 bp, Homo sapiens
taacgatcgttggcaacatctttttgatgtcatcggatcaaggcaacctgtgaaaagctgaacaggtccaattctg

SEQ ID NO: 647258 - DNA, 75 bp, Homo sapiens
gagtttgtttacagctgttgtcctggtatctgcaggatctaaaatgtccactgaggcacaaagagttgatgacag

SEQ ID NO: 647259 - DNA, 96 bp, Homo sapiens
gcgacgcggggccatgtgcaggaccctaacgacaggcgcctccggcccatttacggtgaatgaactggtgcaggtagaaacgtacctccgcagtga

SEQ ID NO: 647260 - DNA, 75 bp, Homo sapiens
ttggcctcccaaagttctgggattacagatgctgcagttggagaagaaacttgaacgtgaacttgaggatgatgc

SEQ ID NO: 647261 - DNA, 100 bp, Homo sapiens
tgaacttataatcgtcactggatttcctcactaggctcatcgacttcttcattccagtccatgggttcttatggacctttcggcaggatgcccacataca

SEQ ID NO: 647262 - DNA, 99 bp, Homo sapiens
agccagaagaggcgttcgctgcgcgtgcacattccggctcttgtcaggatggtgaagctgttcatcggaaacctgccccgggaggctacagagcaggag

SEQ ID NO: 647263 - DNA, 75 bp, Homo sapiens
cggcggcggcggcggaggatgagcctgcagagcgcgcagtacctccgagtgttcgacctacaccacaaaatgatg

SEQ ID NO: 647264 - DNA, 88 bp, Homo sapiens
ctgtttgagaaaaggcctaagaattttggcattgtatggtttgaagtggtgaacatggatttttctcggcttcacatgtacagtcctc

SEQ ID NO: 647265 - DNA, 75 bp, Homo sapiens
ctcggatcgcctggagaggcactcggacctgagaactcagattgcacagagctagactcgggcagccagagcggc

SEQ ID NO: 647266 - DNA, 74 bp, Homo sapiens
ttgaagatccaccaattccagaaaaaccatggaagcttccagtggtgtctgtagtgagagaaacagagtcccag

SEQ ID NO: 647267 - DNA, 73 bp, Homo sapiens
tgaaggagtgcagaggcatcacctgaaagacagctacagacagttcttctaattcctctcagaagagagagca

SEQ ID NO: 647268 - DNA, 100 bp, Homo sapiens
tcccttgaagaccctgaaacagcatcgttggcttcacagtatgactgatgatcctccaacaacaaaaccacttactgctcgtaaattcatttggacgaac

SEQ ID NO: 647269 - DNA, 82 bp, Homo sapiens
aaggtgctgctgatcatctgaggttgcctgcatggcagtgaagaacatggacctttgggtatcatgaactgatcactaaata

SEQ ID NO: 647270 - DNA, 74 bp, Homo sapiens
agcaatgatggaaagtggggtgagagactatagcaagcaggaggagatgttaaagtaacccatcttgcaggacg

SEQ ID NO: 647271 - DNA, 85 bp, Homo sapiens
tttcaactggatagtgtcaattattccctgaatatcctatacacgtctgttcggcacttgaagtactccttgtttaagaaatcac

SEQ ID NO: 647272 - DNA, 101 bp, Homo sapiens
ttaccatgagagtttggcttggattatctcaacattctgttggtgcagaatggtggcgaacaactgatgctcatactcgtacaggagcaaccttctttcca

SEQ ID NO: 647273 - DNA, 83 bp, Homo sapiens
gaagaagaaccggaagaaactgtccgagaagcccaaaaacctggacatcaccaagaagaaattggtccacgagggcccactga

SEQ ID NO: 647274 - DNA, 100 bp, Homo sapiens
ctggatgctggaggccttagagggcctgtcgggccaagagctgacggaccacatggggatgaccgtgtccagctctgaagggcaaagtgcagaagatcct

SEQ ID NO: 647275 - DNA, 98 bp, Homo sapiens
ttcggtctcctggggtcggcgccgagtgggaggatggcggaagtcgcctgcgaggccgctggccaggcctgagcctctgccaccatggccattgtgca

SEQ ID NO: 647276 - DNA, 90 bp, Homo sapiens
gcgcgccgactgggctacaaggccaagcaaggtgctgggtaggccaggtttcagcatcgcagacaagaagcgcaggacaggctgcattgg

SEQ ID NO: 647277 - DNA, 100 bp, Homo sapiens
gaaagagtcaacagcagtggcaacaggattcactccttctccagttgcacagccacacccttcagctggccttaatgttgactttgaatctgtgtttgga

SEQ ID NO: 647278 - DNA, 74 bp, Homo sapiens
gaatggggatgaaaagcatgagcacagacttcaaatctcaacctgagccatccccagttcttagccagttgagc

SEQ ID NO: 647279 - DNA, 88 bp, Homo sapiens
ccagagcatgattcccatcaatgagccctatggagatgcactgtgtcctaacctacctccgccagtcaaaaagatcacccaggaagac

SEQ ID NO: 647280 - DNA, 75 bp, Homo sapiens
ttcccaggtgggagcctggagggcaaagcgtggtgcgagcagactactccagtggttttggcggcaagtatggcg

SEQ ID NO: 647281 - DNA, 80 bp, Homo sapiens
gtgggcttcgacctggagctgggccaggccgtggagggccgttgctccagggagaactgcaaatatcttcatccaccccc

SEQ ID NO: 647282 - DNA, 100 bp, Homo sapiens
ttacttttaatcatctttattatctcattgaagcttggaattacatagctggaaaggatcttacagatgtcaagccctccaacatcctagtcaactcccg

SEQ ID NO: 647283 - DNA, 100 bp, Homo sapiens
gtggagatatggcgcaactgcggcgccctgggagcctcgatctgaaagccaagcatcacgcaaggaagagggcctgcctgaagaggagccatcccatgtc

SEQ ID NO: 647284 - DNA, 88 bp, Homo sapiens
gccgatactgagcttcttcctatttgccatgggctctgtggagatggctgtcgcagtgttcctggtcatctgcattgtggtggtggta

SEQ ID NO: 647285 - DNA, 101 bp, Homo sapiens
gacttgtgcagcaaagtggcccaaatccatggcattgtactaggttttgacaagcttgcatcatgcgtgagtataagctagtcgttcttggctcaggaggc

SEQ ID NO: 647286 - DNA, 100 bp, Homo sapiens
tggccctctgtctgcctgtgtccctgaccatggctccctgcagtaccctttaacggtgcttttgaagatgatgatatcacgcacgttgaaggaagtgtag

SEQ ID NO: 647287 - DNA, 82 bp, Homo sapiens
accggaggagacatcggcctctgcaggcttgccgaagaagggagcgtgaagcctctgcgggccttcttttcgtcttatttga

SEQ ID NO: 647288 - DNA, 95 bp, Homo sapiens
tggctaagctcatccagtgtattgtgtttggccctcttcgagtgagtgagagacagaatgctgacaaggtactggagctgatgaacaaactgctg

SEQ ID NO: 647289 - DNA, 83 bp, Homo sapiens
aaacagcccgcccgaccccgtcccgaccctggccgccccgagcggagcctggagcaagagtgagccatggagctacgtgtggg

SEQ ID NO: 647290 - DNA, 50 bp, Homo sapiens
cagttcgctacacagcaatgcatcgaggtgagcgagtgctgtgctttcat

SEQ ID NO: 647291 - DNA, 75 bp, Homo sapiens
caacgggctcatcaactcctacgaggacaaaagcaacgacttcgtatgaaataagcgggttttgaaaacaaaaaa

SEQ ID NO: 647292 - DNA, 83 bp, Homo sapiens
gtccctttgaaagtatctcctacaggcgcatcccggggaaatggtgggggctctggctgcgcagtcccttggagaacctgcca

SEQ ID NO: 647293 - DNA, 95 bp, Homo sapiens
aaatgattccagtgtgaccgttcatcgggatagtagccttgctctgggtgctggctggagatatggctcgtggacagcagaaaattcagtctcag

SEQ ID NO: 647294 - DNA, 100 bp, Homo sapiens
tcctcttcctcaaaccattctgataactttttcaggatgggtagcagtcccctggaggtccccaaacccaggtgtgaccatgaagctcatggatgaggtc

SEQ ID NO: 647295 - DNA, 95 bp, Homo sapiens
ccccgccaggcgctctgaccactctccagcaccagcttccagttagtggatatagcacaccatccccagccactcgagatgctgctgtgcagaag

SEQ ID NO: 647296 - DNA, 75 bp, Homo sapiens
gtaagcgcagaaagcaggcgaacccgcggcgcaataacgacccgggaaaaggagaagatgaaggaagccaaggat

SEQ ID NO: 647297 - DNA, 100 bp, Homo sapiens
tggacatggacatgagccccctgaggccccagaactatcttttcggtgctggagaatctggtaaaagcaccattgtgaagcagatgaggatcctgcatgt

SEQ ID NO: 647298 - DNA, 90 bp, Homo sapiens
taaacacagaaggaaatacccagactgttactacaacctcgggcgtctgcttttaggacaactggaaaacacaggccctcccccagctga

SEQ ID NO: 647299 - DNA, 75 bp, Homo sapiens
gtctcttcgagttcttcgtgctgctcaagatggtcagtaggacagaaggtaacattgatgactcgctcattggtg

SEQ ID NO: 647300 - DNA, 90 bp, Homo sapiens
ggttcctggggcatcgacgatctccatatttcattgcaaggtgattgtagagaaggctccaaaagccagggtgcctgatctggacaagag

SEQ ID NO: 647301 - DNA, 100 bp, Homo sapiens
gctctgaaggggatctgcagaggttatggaggttttgatgactatggtggctataataattacggctatgggaatgatggctttgatgacagaatgagag

SEQ ID NO: 647302 - DNA, 83 bp, Homo sapiens
cggagccccggctcgcccgtgtgcagaggaaaggagtgttcccaggatgaaagcacagctgctgccatcttcactgttcagat

SEQ ID NO: 647303 - DNA, 50 bp, Homo sapiens
taccacccagcagcagggcatcaagatgagaattctccagccaacttctg

SEQ ID NO: 647304 - DNA, 82 bp, Homo sapiens
gctgaatgggctgaaggaggaggacaaagagcccctcatcgagctcttcgtcaagatatggccgcgtggaaagtgtcaaaat

SEQ ID NO: 647305 - DNA, 95 bp, Homo sapiens
ggcgagccggccggggcttcctccccggccggcagggtggacggtgggctcaacaccttccaccatgaccacctcagcaagttcccacttaaata

SEQ ID NO: 647306 - DNA, 100 bp, Homo sapiens
gcaccaccgccctctggccgttgcctcaccgggccctgatccttcaccagctaggccgctacagtctggcggagaagatcctccgggacgcggtgcaggt

SEQ ID NO: 647307 - DNA, 90 bp, Homo sapiens
ccacattataccggtgctgaagacctgcaagttattttggaaaaggactccctggaggaaaagcggaagcggcagcggtctgaacgcctg

SEQ ID NO: 647308 - DNA, 75 bp, Homo sapiens
tgtgagtgaccatgcagcaaaagaaggagggtcctctcagtgattaagttgagtcagcagatactggagttattt

SEQ ID NO: 647309 - DNA, 98 bp, Homo sapiens
ccaggaactcttctggggagaccccgacgtggagtgccgagagaatggcaaatcggttcattggaaacttggagctgataaggaagtctgggtatggg

SEQ ID NO: 647310 - DNA, 75 bp, Homo sapiens
tctatgatgtcatgctaaatcaggactctcgttggggagatagagattcagaaggcacctggagaaaaggacctg

SEQ ID NO: 647311 - DNA, 82 bp, Homo sapiens
ggcgcagtacaccaacgcggtgcgcgaccgggagctggacctccgggctggcaaaactcaaggctcagaaactgcagggccc

SEQ ID NO: 647312 - DNA, 100 bp, Homo sapiens
ggctgaagggcatgtccctgcttgtcagggctgagagcgacgacctcttcctgtgccaaaactgccacctggggagcaatgtgagggtgaagaggacaca

SEQ ID NO: 647313 - DNA, 75 bp, Homo sapiens
ctacactggcaacattagatccacctcatacaggacggaaagacggcagaagatcttgctagatcggaacagcac

SEQ ID NO: 647314 - DNA, 100 bp, Homo sapiens
agctgcggcgaggtccgccagatctacggagccaagggcttcagcctgagcgacgtgccccaggcggagatctcggagttgcatgctgagaatttgaaaa

SEQ ID NO: 647315 - DNA, 82 bp, Homo sapiens
aaaagaaatgagaagacaacaagctgttcttctgaaacatcaggttttgactacaagacttgtaacgtgctggtagccttgg

SEQ ID NO: 647316 - DNA, 100 bp, Homo sapiens
acactgtcaaaactttacaagttaattgaagagtcttgtccacagctggcaaattcagtgcagatcagattgaaactgcttctgccttggctagaggcca

SEQ ID NO: 647317 - DNA, 74 bp, Homo sapiens
gcctttctaagtctcctaaaggatgtggttcttgccagaaaccttatgttgcacttattcatggaattacaatg

SEQ ID NO: 647318 - DNA, 145 bp, Homo sapiens
tcagcatccacagccatacatcttccctgactctcctgggggcacctcctatgagagatacgattgctacaagaaaagcaaactcaagttcctgcctcctcaggcggagcaagaagactccaccaagttcatcgcgctcaccctg

SEQ ID NO: 647319 - DNA, 75 bp, Homo sapiens
cggaatgccagggccgaggtgttgcgccaggtatctcgtgatttcagaaaagcttgaggagattaagtctttccg

SEQ ID NO: 647320 - DNA, 100 bp, Homo sapiens
acaggatgctgatagtctccagcgggcctggactgtgggctggtgtgtggaactggaagtggagagactgattttggacctcagctcaagaacctcaata

SEQ ID NO: 647321 - DNA, 75 bp, Homo sapiens
cagctacaccaccaacgcctttcccggagagtacatccccaccgtttgataagcaatacaaatcggtaacaaaac

SEQ ID NO: 647322 - DNA, 75 bp, Homo sapiens
atcagtgatggctcttctctggaagatcttgtgggaactctaatgatccaggacaaagaagttaccctggagtat

SEQ ID NO: 647323 - DNA, 75 bp, Homo sapiens
taacagacaagacacttttcagaaagacaggaagactatgaccgtctgaggcctttatcttacccaatgaccgat

SEQ ID NO: 647324 - DNA, 74 bp, Homo sapiens
caaaacagcagatttcccaagagcagcggaaaatgatccagtcacagatacctcggatctgcattttcaagtga

SEQ ID NO: 647325 - DNA, 95 bp, Homo sapiens
aaacctgactgcaaagtgggaagaattaccacaactgaagactttaaacatctggctcgcaaggacctcccagtctctcattctcgtccttggat

SEQ ID NO: 647326 - DNA, 100 bp, Homo sapiens
ccagccgactggagcaggcagcagcccagatgaactgatcgcttatgaactaacgagaagggaagcagaagcaaacagaagaccccttcctgagttggta

SEQ ID NO: 647327 - DNA, 90 bp, Homo sapiens
ggagccagagaacgtgtggtgggggtggcgaaggactactgttcgaagatttttggaagaatactgagaacggcataaagtgaagatcga

SEQ ID NO: 647328 - DNA, 100 bp, Homo sapiens
tgtttgacacaactgtagagcagctgtatagcatcttcactgtaaaggagctccgggttgacaaatggtggggtaacagaaaggaactggctaccgttcg

SEQ ID NO: 647329 - DNA, 100 bp, Homo sapiens
gggaccgttgctgggcctcatttccgcaacttttcggctccgaactgctattcttgaagacctggatgaacaaatttatatcattaccttagaggaagaa

SEQ ID NO: 647330 - DNA, 75 bp, Homo sapiens
tcggcggcgccctgcaccgcgcctcgcaaagtgtggacactgccagcggctgcagccgacttggaatgacctggg

SEQ ID NO: 647331 - DNA, 75 bp, Homo sapiens
ctggcagtgaaaatgagaatgtatcactctctgaaattgcatctgatggtctcaagggtcgtgtgtttgaagtga

SEQ ID NO: 647332 - DNA, 82 bp, Homo sapiens
atcaaatccgtgtcggagtccttacaggcaaaacccatttatggcggttggctgctcctggctccagatgggaccgactttg

SEQ ID NO: 647333 - DNA, 48 bp, Homo sapiens
cgccaccggcccgacctcataacatacggtccctaatgagcacagaga

SEQ ID NO: 647334 - DNA, 101 bp, Homo sapiens
gccaaccccttcgagcaagacgtgggggaaggtgtggctcattgactttaatccatttggtgaagtcacagattcactgctgttcacctgggaagaactga

SEQ ID NO: 647335 - DNA, 75 bp, Homo sapiens
aaatgatcaactattgaccatataggtcggaagtctatgcgtcagtctacagctgagcatacacgacaaacgttc

SEQ ID NO: 647336 - DNA, 80 bp, Homo sapiens
ctgcagtcacagtggactcccaaggggcaggtatctgaaaaggtttaaagtgatgaagatcaaagttctaagaagctggt

SEQ ID NO: 647337 - DNA, 82 bp, Homo sapiens
ggagaggctgagctgctccaggacttgggattgggaaaatgaggtacgttagtgttcgcgattttaaaggcaaagtgctaat

SEQ ID NO: 647338 - DNA, 100 bp, Homo sapiens
cgcggatctacgtgggcaacgcgttttttgccctgacatctcttcgtcttgtgtttttacttgcatttggcttgatgatcattgtgtgtattgatcaatg

SEQ ID NO: 647339 - DNA, 100 bp, Homo sapiens
cagaaaaccaaacaccacatgttgtctcttagaagtgggagctgaacggaacctctttcaggagctataaaagaaagggaggaatcatgtccacaattgc

SEQ ID NO: 647340 - DNA, 96 bp, Homo sapiens
cggggacccttccgtatctgcctaggcattttgctgtctcctcctaatacgtattctttgaaactggagaaaggagattatacaattcgactacag

SEQ ID NO: 647341 - DNA, 100 bp, Homo sapiens
aattcctgtggtgacgtcagaccacatccgtacccttccgaagagcagaagaaacagttagcgcaagacacaggacttacaattctccaagtaaacaact

SEQ ID NO: 647342 - DNA, 100 bp, Homo sapiens
ctcggccaggcgccggcgacctgaggggagagggaacgcagctgaaagcgtgaactgtatgttgctaaatttgcataagaagagttggatggaaggtttg

SEQ ID NO: 647343 - DNA, 100 bp, Homo sapiens
ttcgggaagcagggattccagtgccaaggcccattgctagaagactgggacataatcagccccaaagatgtcattggctccgacgtgttgctggctgaga

SEQ ID NO: 647344 - DNA, 100 bp, Homo sapiens
gcctgaggtgcggagtttcgtgagtttttactgactcgagggaaacagtgcttcttagtcctacgtcagcagcagtttaatgtccaggctcttgtggcgg

SEQ ID NO: 647345 - DNA, 80 bp, Homo sapiens
aaagctttaggagttcacagtcctggagtactcgggtactttgagttcagtggctcaccccagcctcctggttatttgac

SEQ ID NO: 647346 - DNA, 75 bp, Homo sapiens
gaagatggcgcctgttgtgacagggactcgctcagcagcagcctgaaaacttgctacaagtatctcaatcagacc

SEQ ID NO: 647347 - DNA, 75 bp, Homo sapiens
gtccaagcacagtctcagccccatggggtatatccaccctcaagtgtgattgttgccagcaaaggaggttttgaa

SEQ ID NO: 647348 - DNA, 74 bp, Homo sapiens
ttccggtcagggtcaagtcgtgttctgatcactactgacttgttgggctcaatcaagacatcacagatgtgtgt

SEQ ID NO: 647349 - DNA, 101 bp, Homo sapiens
aggatggcagaggcggaattgcacaaggaaaggctgcaagccatagcagaactgcctcctgagcgtggagcctgccattagcaccaagcacctcccttacc

SEQ ID NO: 647350 - DNA, 50 bp, Homo sapiens
gaccgacctcaccctgtcgcggggatgaaaaaatcccgttctctggagaa

SEQ ID NO: 647351 - DNA, 75 bp, Homo sapiens
ccgccggccgctagcgtcagcgccagccaggaatgctgtctctgcaatttgagaggaggtgctcttaagcaaacg

SEQ ID NO: 647352 - DNA, 100 bp, Homo sapiens
aaactgtgccttgtggaaatgaacttcacaagttcctcatctgggacactgctggtcaggaacggtattttaataagcggaaaacctactttgctcacga

SEQ ID NO: 647353 - DNA, 83 bp, Homo sapiens
ctttctgcctatgctgatgatgttgaaaagggaaatcctcattgacgattcaatttgttgaaggccaatttgtggactcctac

SEQ ID NO: 647354 - DNA, 51 bp, Homo sapiens
atcctttggaaatgtgctcacactcttcacgttacagcatggaagctgttg

SEQ ID NO: 647355 - DNA, 100 bp, Homo sapiens
agtcatcattcttcagtgcaaaggaaggggaattgatcaggttagtggatgacagatgtgtggtgcacccagaggccggggaccttgccaaccctcccaa

SEQ ID NO: 647356 - DNA, 90 bp, Homo sapiens
cacggcggactctttcagctccctcaaccctgaggaggccacccagaggagaaggccaccccgcctggaggcacaggccatgaggggctc

SEQ ID NO: 647357 - DNA, 98 bp, Homo sapiens
agcgaggcgccggcccagactccactccccagctgtgaaaggaggcgtagaggctccggtgttttttgtgccaattgcctgaccacaaagacctctct

SEQ ID NO: 647358 - DNA, 74 bp, Homo sapiens
gaagagagttcagctctgattgaattttttgacagaaaaggtgaaagtgggagatacattggatcttctcattg

SEQ ID NO: 647359 - DNA, 100 bp, Homo sapiens
gggcgttttcttggatgaattgcttgctttggagtgaaaccagcagtgtgtgtagcagcagtgacactgggctctttaccaatgatgaagggcgacaagg

SEQ ID NO: 647360 - DNA, 88 bp, Homo sapiens
cagatcggccagtccgagcgtgccggacacagccagggcgagtatgtgtcctgccttctctcactgctccgccagatgtgtgacaccc

SEQ ID NO: 647361 - DNA, 90 bp, Homo sapiens
ctcgtggcctggtctccattatttgagatgagttacatcttggagagaccatggcgagcccagggaaagacaattatcgaatgaagagct

SEQ ID NO: 647362 - DNA, 98 bp, Homo sapiens
atcctgtccatcgtgtgcctgatgatcacgcagctggctggcttcagtggaccagcaattaagttggaatatgcaaggttggttaagttggcccaaga

SEQ ID NO: 647363 - DNA, 101 bp, Homo sapiens
ttgcaacatccttcttctggataacactgtacaagctttcaaagtcaatccagtgaaactgaaattgcattcttctgtgaagaagattataagaactacaa

SEQ ID NO: 647364 - DNA, 51 bp, Homo sapiens
ccgggatcggttgccttgagcctgttgaaatggatgcagtcagaactgaat

SEQ ID NO: 647365 - DNA, 100 bp, Homo sapiens
gcttccgagccgcactcgccgatcctccaggcatgccccgctacgagctggctttaatcctgaaagccatgcagcggtgaagccatgtccctggagggag

SEQ ID NO: 647366 - DNA, 96 bp, Homo sapiens
gaattcacagtctaccatgaattggaagatctgtttacccgaggtattgatatacaagctgtgaatgtggtaataaactttgatttcccaaagctg

SEQ ID NO: 647367 - DNA, 100 bp, Homo sapiens
cggcatcacctcctccaagaccgtgctggtctttctcaacctcatcttctgggtgctggagaatctggtaaaagcaccattgtgaagcagatgaggatcc

SEQ ID NO: 647368 - DNA, 76 bp, Homo sapiens
gttttggtggggacacaaaccatgtcagatggccttttgaagtatagaattcaagccaggaagaagcagcaatctg

SEQ ID NO: 647369 - DNA, 100 bp, Homo sapiens
ctgcgcggctgcggggcttccctgcggctggagattgcagagggaatggcatacatcgagcggaagaactacattcaccgggacctgcgagcagctaatg

SEQ ID NO: 647370 - DNA, 98 bp, Homo sapiens
ttgctccccctcgtgcagcaacccccacacccagcaccagggaactctaatgatccaggacaaagaagttaccctggagtatgtatcaagcctggatt

SEQ ID NO: 647371 - DNA, 100 bp, Homo sapiens
gaggaactcctgaaggctcgagagaatccaagtgaagaggcacaaagctgagggtaaaaagctgggattggtaggctgggtccagaacactgaccggggc

SEQ ID NO: 647372 - DNA, 83 bp, Homo sapiens
tttggaccctgttttcagaaagcagaataactgaagtgaagtgatggactccgatttggagagtagtaagacgtgaaaggaat

SEQ ID NO: 647373 - DNA, 74 bp, Homo sapiens
tcaatgtcattctgaccttgtgggtttcctgtgctaatggacaagaactgttgacatcagactctgaaggaagc

SEQ ID NO: 647374 - DNA, 83 bp, Homo sapiens
gccagcccagccccagccccagccctacagagatcaatgtccgagttaccaccatggatgcagagctggagtttgcaatccag

SEQ ID NO: 647375 - DNA, 96 bp, Homo sapiens
cggagctcggcaggaagtgggaccggtgtctggcggatgcggtcgtgaagataggacggagtaaccaagagcccagaaaagcgctcttctctccca

SEQ ID NO: 647376 - DNA, 100 bp, Homo sapiens
gatcgtgaccgagaccgtgaccgagagcgtgaccgagagcgcgaatatcgtcatcgttagaaggtaaggacgacatggagatgtgtgagctgaatcttga

SEQ ID NO: 647377 - DNA, 100 bp, Homo sapiens
aggagactggatgatagaattggttatgtaccgaaggactctaccgtgtcagcgggaataaaactgaccaagacaatattcaaaagcagtttgatcaagg

SEQ ID NO: 647378 - DNA, 76 bp, Homo sapiens
gattgttgcaaagagcaaagaagaggcctgcaaagctgtacaagagatcatgcagttaagctcaaatcttcgtcat

SEQ ID NO: 647379 - DNA, 98 bp, Homo sapiens
acccgaggagttccgcccctttctggcaaagatgagggggattcttaagattaagatgttctacgaggagcatttgcacttggacgatgagatccgct

SEQ ID NO: 647380 - DNA, 96 bp, Homo sapiens
cactgggttcttcaaaggataaactacctacatagaggacatacctttggttaaaggagctgccgtcagagctccctctttgcccactagcagggc

SEQ ID NO: 647381 - DNA, 98 bp, Homo sapiens
acctccctggaaagaggcctgcccgtggctccctcccagagcaaccctgcacaaaggatcttgacattggtgccaagaacgtgaagctttacgtcaac

SEQ ID NO: 647382 - DNA, 100 bp, Homo sapiens
agacgcacagctaagatgcccggacatcctggaagctgggaaatgaacgctgtccaactgggcgtacgagtttgacaagtgggccccctccgtggtgaag

SEQ ID NO: 647383 - DNA, 100 bp, Homo sapiens
actaacactgtgggacttggtttgcctatgtcaagatcacaggaaagatcctacaggaatggatcctgatgatatttggcagctgtcctccagtcttaaa

SEQ ID NO: 647384 - DNA, 97 bp, Homo sapiens
ggacgcgtccggctgtggaagagagcggcggccgctcacaacatgcacagcctggcgacggctgcggtatggcatttcaaatatagatacaaccatt

SEQ ID NO: 647385 - DNA, 128 bp, Homo sapiens
tggggctccctgtatgcatggtgtggggttggtgtgattagcttcgcagtctggaaagctttaggagttcacagtgcaccagttagaagacaaatgaaagctaagcaactcagtgcacaatcttacgg

SEQ ID NO: 647386 - DNA, 75 bp, Homo sapiens
cacggagcagcaaacgcagagacaaaagaaacgggccccgactggctagcttgtcactttctgcaaaggtttccc

SEQ ID NO: 647387 - DNA, 90 bp, Homo sapiens
gttcaaggacaaaggtggcccagaattttccagtgccctgaaaaatagttgtttacattcagagctctatcaataagaggaatacatatt

SEQ ID NO: 647388 - DNA, 72 bp, Homo sapiens
ggtcctgctgtgcgcgctgctcagctgtctgcttctcacaggtgctggagaatctggtaaaagcaccattgt

SEQ ID NO: 647389 - DNA, 78 bp, Homo sapiens
ccagtttcctgatcaagaggaataagcagacctacagcactagtatactgtcctcgtaactgtatgcaagcaaatcca

SEQ ID NO: 647390 - DNA, 100 bp, Homo sapiens
caagcagcagccgccggagcccgagtggatcggggacggagagagcacgagcccatcaggtggcagaggagatcagtggtcccttgacttcagccaataa

SEQ ID NO: 647391 - DNA, 90 bp, Homo sapiens
caaacactcagagtggaaaaagtaccatcatttgaaacagagacctgaattataacaagctgcaggagttccctgtggccatccggaccc

SEQ ID NO: 647392 - DNA, 130 bp, Homo sapiens
ccgtccacagctcacgaccagatgcaccagcaggagtccacatcgaggacgtcctccgggcactcccacgaccagggctattcacgaaaagcagcagctctagagttcttaaaccgctttgaagaagcca

SEQ ID NO: 647393 - DNA, 100 bp, Homo sapiens
atccacagactgcgattcacaaccgacgtacagctagattcacagtctgagaatgaggcttcaccagtaaaacggccacgactacttgagaatacggaac

SEQ ID NO: 647394 - DNA, 101 bp, Homo sapiens
acctgaatgaccacctagagccttggatccaggagaacggcggctggtttgcagtgttgatgtgggtatttacctatgttggtgccttgtttaatggtctg

SEQ ID NO: 647395 - DNA, 101 bp, Homo sapiens
cccccgcgcctctcttcgcctcgcctcgggacccgcggtccccgctcttgctgatggactagaggcttttaccagatttcttaaaactgaattcagtgaag

SEQ ID NO: 647396 - DNA, 100 bp, Homo sapiens
gtatcctccaagacctgacatggacaatgtgtgaaaaagcgctcaagtgtatgcaacagcgttattgcaacaggctaacgaaaacagacaaaattcaact

SEQ ID NO: 647397 - DNA, 73 bp, Homo sapiens
gatgacggagctgcagtcggcactgctactgcgaagacagctggcagttgcaggaagaggcagaggaagagga

SEQ ID NO: 647398 - DNA, 75 bp, Homo sapiens
agtcatttagcgctatggaagatgaccagaggactagacctgaagtttcaaagagacaaagaatgtgttgctaat

SEQ ID NO: 647399 - DNA, 73 bp, Homo sapiens
gactttgggcgtcccattgccatgcatcctgaggttagcattacacttctcccagtggagcccatgacttctg

SEQ ID NO: 647400 - DNA, 139 bp, Homo sapiens
cgcagcgcagcccgcaccctccccgcccgacctgcgagcgccgcccgggcatgcgaagccgtccctccccggagcagccatcagcagggaccctttctacgaaatgctcgcagcacggaaaaagaaggtctcctccacg

SEQ ID NO: 647401 - DNA, 100 bp, Homo sapiens
agttgcgtgaggggtttgtactatcctcggtgctgtggtgcagagctagttcctctccagctcagccgcgtaggtgagaattatgaagatgatgacctag

SEQ ID NO: 647402 - DNA, 74 bp, Homo sapiens
ccatgggaagccctgctactgctggattagcgccagggtttgaaagtattcttgaagggctgtttggacctgca

SEQ ID NO: 647403 - DNA, 82 bp, Homo sapiens
tcccatctgttacagttctgtgcataagaaggatctcaagagcctggtccgacccccagtggcactaacgtgggatcctcag

SEQ ID NO: 647404 - DNA, 83 bp, Homo sapiens
ccccaactcccgtatcatgatccaccagccctcaggaggcgcccgggtggaggagaagatcaagcagacccaccgtaagtacc

SEQ ID NO: 647405 - DNA, 100 bp, Homo sapiens
cgcggaccttccgccctgcacccgcactgtcgggccactttgtaaacgatccggaacatggtggcggtgctggaagtcatctccagcctggagaaatacc

SEQ ID NO: 647406 - DNA, 90 bp, Homo sapiens
tctcacttcctcccagaggcctttgctgactgacccctcagatgccactgccgccaggagccctgtaacatcagccatcgtcaaccccac

SEQ ID NO: 647407 - DNA, 50 bp, Homo sapiens
tcctggaggtggatctgaagaacggaataatgcatatactgccatgtcag

SEQ ID NO: 647408 - DNA, 75 bp, Homo sapiens
tcctgcaacacctgcggcctcactgggacccccaggaggtgaccctgcagtgatcgaactgtgagaatttggaag

SEQ ID NO: 647409 - DNA, 75 bp, Homo sapiens
attgatgcactggacaccttgctgaaaccccaatgatgggaatctgccctgctggccacgctacaacaaggatga

SEQ ID NO: 647410 - DNA, 97 bp, Homo sapiens
atgttcctgagcttgagatgctaggaagacttggaaatggatgaaaagaggctgctggatccagggttgaaggttcataaaggcctctgggattata

SEQ ID NO: 647411 - DNA, 100 bp, Homo sapiens
ctttctaccagaagcttgaagggtttggttaaggtgatgcagcatcctaatgaaggcgcactggtgcttggcctacacagcaacgtgaaggatgtctctg

SEQ ID NO: 647412 - DNA, 83 bp, Homo sapiens
cgcagatgttgtcaaggtggcctaccaggaggccaggggtgtcgccatggctttatcctgtggataaacgcagagtgaacgag

SEQ ID NO: 647413 - DNA, 100 bp, Homo sapiens
gggattctgaccatctcacatgccacaacttggaaatggatagtgggtcccatgtttctgtatctctgtgagaggttggtgcggttttggcgatctcaac

SEQ ID NO: 647414 - DNA, 76 bp, Homo sapiens
gtcgtccgcttatagtggaggctgctaggagccggtcagaggggaaatcctcattgacgattcaatttgttgaagg

SEQ ID NO: 647415 - DNA, 82 bp, Homo sapiens
ggtcatatgcttctgtggacagctgtgctattcctggagatagaatctcactatgttgaccaggctggtcttgaactcttgg

SEQ ID NO: 647416 - DNA, 101 bp, Homo sapiens
gagtggctcacttgcatgtatttggaacaaaaaaaggagatgcctggcagccccgctctctgcaaatgagtccctggaacgccagatgcgtgaaatggaag

SEQ ID NO: 647417 - DNA, 130 bp, Homo sapiens
acgaagccaacgactaccggcgccagttgcagtccttgacctgcgacctggagtctctgcgcggcacgaaactaatctggattcactccctctggttgatacccactcaaaaaggacacttctgattaag

SEQ ID NO: 647418 - DNA, 98 bp, Homo sapiens
atcagattttgcattggatattcgcatgcctggggttacacctaaacaggtgggcaatgggcactccaatgaggcagccttgatcctccacagaaaag

SEQ ID NO: 647419 - DNA, 51 bp, Homo sapiens
gcttcctgttcgcagctgcggcatgatcaccagcagcttgcaaaacttatc

SEQ ID NO: 647420 - DNA, 73 bp, Homo sapiens
tttaatgaccacaacaagcaagcatgcagcttactgcttgaaaggagctgcagatgaagcgtactgcaattga

SEQ ID NO: 647421 - DNA, 50 bp, Homo sapiens
ccggctcgtcggtgtcctccgaacccttaggagaaatcttgagagtggac

SEQ ID NO: 647422 - DNA, 90 bp, Homo sapiens
ataccttggggaaagctgataaaccacaacaaaggtgcttgcccatggctcctcgcttccctctgcctcatgactgatgccaattattcc

SEQ ID NO: 647423 - DNA, 100 bp, Homo sapiens
gttagatgccgattacccacttcgagtcctttattgtggaggtgttgacagctcttctaccacaagcagtgcttctccaatgcccaacagttatgatgcc

SEQ ID NO: 647424 - DNA, 75 bp, Homo sapiens
gaggcgcaaacaagccaatcccaggaggaaaaacggcccatggacagaccttcacgttcccagatctgtttcccg

SEQ ID NO: 647425 - DNA, 100 bp, Homo sapiens
ctgcaaccacctgttccacgacggctgcatcgtgccctggctggagcagagcaacagcgagctcgccatcctgtccaatgagcatggctcctacaggtac

SEQ ID NO: 647426 - DNA, 100 bp, Homo sapiens
cgcccgcctaccacgaggtggtggacgcggaggctgaaggtgatgtggccgccctcaaccgacgcatccagctcgttgaggaggagttggacagggctca

SEQ ID NO: 647427 - DNA, 97 bp, Homo sapiens
aggaagttgtgattgcccagaatgacaagcatactggcccagtgagagccttggatgtgaacattttccaggtggtgtgtgatgagaacggctctaa

SEQ ID NO: 647428 - DNA, 51 bp, Homo sapiens
catccaaagagtcactctttgttcgaattcaacaggttcttgggagaaaaa

SEQ ID NO: 647429 - DNA, 100 bp, Homo sapiens
aggagatctaccgctacagccgcagcctggaggagctgctgctcgacgccaaccagctgcgcgagctgcccaagagttcaaggaggccttccagctgttt
